(19) United States
(12) Patent Application Publication
(10) Pub. No.: US 2023/0032369 A1
(43) Pub. Date: Feb. 2, 2023

(54) COMPOSITIONS AND METHODS FOR THE TARGETING OF HTT

(71) Applicant: Scribe Therapeutics, Inc., Alameda, CA (US)

(72) Inventors: Benjamin OAKES, El Cerrito, CA (US); Sean HIGGINS, Alameda, CA (US); Hannah SPINNER, Boston, MA (US); Sarah DENNY, San Francisco, CA (US); Brett T. STAAHL, Tiburon, CA (US); Kian TAYLOR, Atlanta, GA (US); Katherine BANEY, Berkeley, CA (US); Isabel COLIN, Oakland, CA (US); Maroof ADIL, Davis, CA (US); Cole URNES, Los Angeles, CA (US)

(21) Appl. No.: 17/829,206

(22) Filed: May 31, 2022

Related U.S. Application Data
(63) Continuation of application No. PCT/US2020/063484, filed on Dec. 4, 2020.
(60) Provisional application No. 62/945,131, filed on Dec. 7, 2019.

(51) Int. Cl. C12N 9/22; C12N 15/86

(52) U.S. Cl. CPC C12N 9/22; C12N 15/86; C12N 2310/20

(57) ABSTRACT

Provided herein are CRISPR:guide systems comprising Class 2 Type V polypeptides (e.g. CasX:gNA systems comprising CasX polypeptides), guide nucleic acids (gNA), and optionally donor template nucleic acids useful in the modification of a HTT gene. The systems are also useful for introduction into cells, for example eukaryotic cells having mutations in the huntingtin protein. Also provided are methods of using such systems to modify cells having such mutations and utility in methods of treatment of a subject with a HTT-related disease, such as Huntington's disease.

### CROSS REFERENCE TO RELATED APPLICATIONS

[0001] This application claims priority to U.S. provisional patent application No. 62/945,131, filed on Dec. 7, 2019, the contents of which is incorporated herein by reference in their entirety.

### INCORPORATION BY REFERENCE OF SEQUENCE LISTING

[0002] This application contains a Sequence Listing which has been submitted in ASCII format via EFS-WEB and is hereby incorporated by reference in its entirety. Said ASCII copy, created on Dec. 4, 2020 is named SCRB_021_01WO_SeqList_ST25.txt and is 9.12 MB in size.

### STATEMENT OF GOVERNMENT INTEREST

[0003] This invention was made with government support under SBIR grant 1 R43 NS110161-01 awarded by the National Institutes of Health. The government has certain rights in the invention.

### BACKGROUND

[0004] The wild-type HTT gene produces a protein called huntingtin. The huntingtin protein is a soluble 3144 amino acid (348 kDa) protein that localizes to the nucleus, with the highest levels of expression being found in the central nervous system and testes. The N-terminal 17 amino acids, or N17 region, has been identified as a critical region that plays a role in localization, aggregation, and toxicity due to the protein. Immediately following the N17 region is the polyQ tract, which contains as many as 35 CAG repeats in those individuals not afflicted by Huntington's disease. Although the function of this protein is unknown, it appears to play an important role in nerve cells (neurons) in the brain.

[0005] Huntington's disease is a fatal neurodegenerative genetic disease characterized by a loss of neurons in the striatum. Huntington's disease is caused by a single genetic mutation on exon 1 of the huntingtin (HTT) gene, conferring a selective vulnerability of striatal spiny projecting neurons (Bates, G P. et al., Huntington disease. Nat. Rev. Dis. Primers 1:15005. (2015)). Huntington's disease is an autosomal dominant neurodegenerative disorder caused by the expansion of a (CAG)n repeat in the HTT gene. The CAG repeats are within the Huntington's disease coding region and are successfully transcribed and translated, producing a protein, called huntingtin, containing a polyglutamine tract (Lee, J. An upstream open reading frame impedes translation of the huntingtin gene. Nucleic Acids Res. 2002 Dec. 1; 30(23): 5110 (2002)). In normal, healthy subjects, the CAG segment is repeated 10 to 35 times within the gene. In people with Huntington's disease, the CAG segment is repeated 36 to more than 120 times. This leads to the inability of the huningtin protein to undergo appropriate post-translational changes, thereby rendering it useless in the cell body, as well as conferring a toxic gain of the function property (Koli, N. et al. CRISPR-Cas9 Mediated Gene-Silencing of the Mutant Huntingtin Gene in an In Vitro Model of Huntington's Disease. Int. J. Mol. Sci. 18:754 (2017)). People with 36 to 39 CAG repeats may or may not develop the signs and symptoms of Huntington disease, while people with 40 or more repeats almost always develop the disorder. The increase in the size of the CAG segment leads to the production of an abnormally long, non-functional version of the huntingtin protein, which is cut into smaller, toxic fragments that bind together and accumulate in neurons, disrupting the normal functions of these cells and leading to the eventual death of neurons in certain areas of the brain, underlying the signs and symptoms of Huntington's disease.

[0006] The advent of CRISPR/Cas systems and the programmable nature of these minimal systems has facilitated their use as a versatile technology for genomic manipulation and engineering. Particular CRISPR proteins are particularly well suited for such manipulation. For example CasX, has compact size and ease of delivery, and the nucleotide sequence encoding the protein is relatively short; an advantage for its incorporation into viral vectors for delivery into a cell.

[0007] As, at present, only palliative treatments are available to alleviate the symptomology of Huntington's disease, there remains a critical need for developing curative treatments for this disease. Provided herein are compositions and methods for targeting HTT to the address this need.

### SUMMARY

[0008] The present disclosure provides compositions of modified Class 2, Type V CRISPR proteins and guide nucleic acids used in the editing of huntingtin (HTT) gene target nucleic acid sequences. The Class 2, Type V CRISPR proteins and guide nucleic acids are modified for passive entry into target cells. The Class 2, Type V CRISPR proteins and guide nucleic acids are useful in a variety of methods for target nucleic acid modification, which methods are also provided.

[0009] In one aspect, the present disclosure relates to CasX:guide nucleic acid systems (CasX:gNA system) and methods used to alter a target nucleic acid comprising the HTT gene in cells. In some embodiments of the disclosure, the CasX:gNA system has utility in modifying HTT target nucleic acid sequence in a population of cells to correct or compensate for the one or more mutations of the HTT gene in the cells of the population. In another embodiment, the CasX:gNA system has utility in modifying HTT target nucleic acid sequence in a subject.

[0010] In some embodiments, the CasX:gNA system gNA is a gRNA, or a gDNA, or a chimera of RNA and DNA, and may be a single-molecule gNA or a dual-molecule gNA. In other embodiments, the CasX:gNA system gNA has a targeting sequence complementary to a target nucleic acid sequence comprising a region within the HTT gene or that comprises a sequence having at least about 50%, at least about 60%, at least about 70%, at least about 80%, at least about 85%, at least about 90%, or at least about 95%, or 100% sequence identity to a sequence selected from the group consisting of SEQ ID NOS: 409-2100 and 2286-39966. In other embodiments, the CasX:gNA system gNA targeting sequence comprises a sequence having at least about 50%, at least about 60%, at least about 70%, at least about 80%, at least about 85%, at least about 90%, or at least about 95%, or 100% sequence identity to a sequence selected from the group consisting of SEQ ID NOS: 409-508. In some embodiments the gNA has a targeting sequence consisting of a sequence selected from the group consisting of SEQ ID NOS: 409-2100 and 2286-39966. In some embodiments the gNA has a targeting sequence consisting of a sequence selected from the group consisting of SEQ ID NOS: 409-509. In some embodiments, the targeting sequence of the gNA is complementary to a sequence within or proximal to an exon of exons 1-67 of the HTT gene. In a particular embodiment, the targeting sequence of the gNA is complementary to a sequence within or proximal to exon 1, wherein the exon has an expansion of a (CAG)n repeat such that a non-functional huntingtin protein is expressed. In another embodiment, the targeting sequence of the gNA is complementary to a sequence within or proximal to an intron of the HTT gene. In another embodiment, the targeting sequence of the gNA is complementary to a sequence within or proximal to an intron-exon junction of the HTT gene. In another embodiment, the targeting sequence of the gNA is complementary to a sequence within or proximal to a regulatory element of the HTT gene. In another embodiment, the targeting sequence of the gNA is complementary to a sequence within or proximal to an intergenic region of the HTT gene. The gNA can comprise a targeting sequence comprising 14 to 30 consecutive nucleotides. In other embodiments, the targeting sequence of the gNA consists of 20 nucleotides. In other embodiments, the targeting sequence consists of 19 nucleotides. In other embodiments, the targeting sequence consists of 18 nucleotides. In other embodiments, the targeting sequence consists of 17 nucleotides. In other embodiments, the targeting sequence consists of 16 nucleotides. In other embodiments, the targeting sequence consists of 15 nucleotides.

[0011] In some embodiments, the gNA has a scaffold comprising a sequence selected from the group consisting of SEQ ID NOS: 4-16 as set forth in Table 1, or a sequence having at least about 50%, at least about 60%, at least about 70%, at least about 80%, at least about 90%, at least about 95%, at least about 96%, at least about 97%, at least about 98%, or at least about 99% sequence identity thereto. In other embodiments, the CasX:gNA system gNA variant has a scaffold comprising a sequence selected from the group consisting of SEQ ID NOS: 2101-2285 as disclosed in Table 2, or a sequence having at least about 50%, at least about 60%, at least about 70%, at least about 80%, at least about 90%, at least about 95%, at least about 96%, at least about 97%, at least about 98%, at least about 99% sequence identity thereto. In some embodiments, the CasX:gNA system gNA variant has a scaffold consisting of a sequence selected from the group consisting of SEQ ID NOS: 2101-2285.

[0012] In some embodiments, the CasX:gNA systems comprise a reference CasX sequence comprising any one of SEQ ID NOS: 1-3 or a CasX variant comprising a sequence selected from the group consisting of SEQ ID NOS: 49-160, 221-223, 227-230, 235-247, and 258-267 as set forth in Tables 4, 6, 7, 8, or 10, or a sequence having at least about 50%, at least about 60%, at least about 70%, at least about 80%, or at least about 90%, or at least about 95%, or at least about 96%, or at least about 97%, or at least about 98%, or at least about 99% sequence identity thereto. In some embodiments, the CasX variant comprises a sequence selected from the group consisting of SEQ ID NOS: 49-160, 221-223, 227-230, 235-247, and 258-267. In these embodiments, a CasX variant exhibits one or more improved characteristics relative to the reference CasX protein. In some embodiments, the CasX protein has binding affinity for a protospacer adjacent motif (PAM) sequence selected from the group consisting of TTC, ATC, GTC, and CTC. In some embodiments, the CasX protein has binding affinity for the PAM sequence that is at least 1.5-fold greater compared to the binding affinity of any one of the CasX proteins of SEQ ID NOS: 1-3 for the PAM sequences selected from the group consisting of TTC, ATC, GTC, and CTC.

[0013] In some embodiments of the CasX:gNA system, the CasX molecule and the gNA molecule are associated together in a ribonuclear protein complex (RNP). In a particular embodiment, the RNP comprising the CasX variant and the gNA variant exhibits greater editing efficiency and/or binding of a target sequence in the target DNA when any one of the PAM sequences TTC, ATC, GTC, or CTC is located 1 nucleotide 5′ to the non-target strand sequence having identity with the targeting sequence of the gNA in a cellular assay system compared to the editing efficiency and/or binding of an RNP comprising a reference CasX protein and a reference gNA in a comparable assay system.

[0014] In some embodiments, the CasX:gNA system further comprises a donor template comprising a nucleic acid comprising at least a portion of an HTT gene, wherein the HTT gene portion is selected from the group consisting of an HTT exon, an HTT intron, an HTT intron-exon junction, an HTT regulatory element, or combinations thereof, wherein the donor template is inserted by homology-directed repair (HDR) or homology-independent targeted integration (HITI) to correct or compensate for the mutation in the HTT gene, or to replace a portion of the exon 1 bearing the CAG repeats wherein insertion of the donor template results in the exon 1 having between 10 and 35 CAG repeats such that a functional dystophin protein can be expressed. In some cases the donor sequence is a single-stranded DNA template or a single stranded RNA template. In other cases, the donor template is a double-stranded DNA template.

[0015] In another aspect, the disclosure relates to nucleic acids encoding the CasX:gNA systems of any of the embodiments described herein, as well as vectors comprising the nucleic acids. In some embodiments, the vector is selected from the group consisting of a retroviral vector, a lentiviral vector, an adenoviral vector, an adeno-associated viral (AAV) vector, a herpes simplex virus (HSV) vector, a plasmid, a minicircle, a nanoplasmid, and an RNA vector. In other embodiments, the vector is a virus-like particle (VLP) comprising one or more components of a gag polyprotein and an RNP of a CasX and gNA of any of the embodiments described herein and, optionally, a donor template nucleic acid.

[0016] In another aspect, the disclosure provides a method of modifying an HTT target nucleic acid sequence in a population of cells, wherein said method comprises introducing into the cells of the population: a) a composition comprising the CasX:gNA system of any of the embodiments disclosed herein; b) the nucleic acid of any of the embodiments disclosed herein; c) the vector of any of the embodiments disclosed herein; d) the VLP of any of the embodiments disclosed herein; or e) a combination of two or more of the foregoing. In some embodiments, the vector is an AAV vector. In some embodiments of the method, the modifying comprises introducing an insertion, deletion, substitution, duplication, or inversion of one or more nucleotides in the target nucleic acid sequence as compared to the genomic sequence, wherein the modifying results in a correction of or compensation for the mutation of the HTT gene in the cells of the population. As used herein, “compensation” means that the sequence of the target nucleic acid is modified such that, while not being identical to a wild-type genomic sequence, a functional huntingtin protein is nevertheless able to be expressed from the modified gene. In some cases, the method further comprises contacting the target nucleic acid with a donor template nucleic acid of any of the embodiments disclosed herein, wherein insertion of the donor template results in a correction of the HTT gene in the cells of the population or wherein insertion of the donor template results in the HTT gene exon 1 having between 10 to 35 CAG repeats such that a functional huntingtin protein is expressed in the cells of the population. In some cases, the modification results in expression of a functional huntingtin protein that is increased by at least about 10%, at least about 20%, at least about 30%, at least about 40%, at least about 50%, at least about 60%, at least about 70%, at least about 80%, or at least about 90% in comparison to a cell where the HTT gene has not been modified. The cells of the population to be modified by the methods of the embodiments are eukaryotic. In some embodiments of the method, the eukaryotic cells are selected from the group consisting of rodent cells, mouse cells, rat cells, and non-human primate cells. In other embodiments of the method, the eukaryotic cells are human cells. In some embodiments of the method, the eukaryotic cells are cells of the central nervous system selected from the group consisting of a neuron, a spinal motor neuron, a medium spiny neuron, a cortical neuron, and a striatal neuron. In some embodiments of the method, the modifying of the HTT gene target nucleic acid sequence of the population of cells occurs in vitro or ex vivo. The present disclosure provided populations of such cells modified by the foregoing methods. In other embodiments of the method, the modifying of the HTT gene target nucleic acid sequence of the population of cells occurs in vivo in a subject, wherein the subject is selected from the group consisting of a rodent, a mouse, a rat, a non-human primate, and a human.

[0017] In another aspect, the present disclosure provides methods of treating an HTT-related disease (e.g., Huntington's disease) in a subject in need thereof, comprising modifying an HTT gene having one or more mutations in cells of the subject, the modifying comprising contacting said cells with a therapeutically effective dose of: i) a composition comprising a CasX and gNA of any of the embodiments disclosed herein and, optionally, a donor template; ii) a nucleic acid encoding the composition of (i); a vector selected from the group consisting of a retroviral vector, a lentiviral vector, an adenoviral vector, an adeno-associated viral (AAV) vector, a herpes simplex virus (HSV) vector, a plasmid, a minicircle, a nanoplasmid, a DNA vector, and an RNA vector, and comprising a nucleic acid of (ii); iii) a VLP comprising the composition of (i); or iv) combinations of two or more of (i)-(iii), wherein the HTT gene of the cells targeted by the gNA is modified by the CasX protein (and, optionally, the donor template) such that the mutation of the HTT gene is corrected or compensated for and a functional huntingtin protein is expressed. In other embodiments of the method of treating an HTT-related disease, the HTT gene is knocked-down or knocked-out such that the expression of non-functional huntingtin protein is reduced or eliminated. In some embodiments, the subject is selected from the group consisting of a rodent, a mouse, a rat, a non-human primate, and a human. In some embodiments, the therapeutically effective dose is administered to the subject by a route of administration selected from intraparenchymal, intravenous, intra-arterial, intramuscular, subcuticular, intraarticular, sub-capsular, or by subcutaneous injection, or combinations thereof. In some embodiments, the method results in improvement in at least one clinically-relevant endpoint selected from the group consisting of six-minute walk test (6MWT), the North Star Ambulatory Assessment (NSAA), the four-stair climb, stride velocity 95th centile measured at the ankle (SV95C), and prolongation of the ability to stand from the floor.

[0018] In another aspect, the present disclosure provides kits comprising the nucleic acids, vectors, CasX proteins, gNAs and gene editing pairs described herein.

[0019] In another aspect, provided herein are compositions comprising gene editing pairs, or compositions of vectors comprising or encoding gene editing pairs for use as a medicament for the treatment of a subject having a HTT-related disease.

[0020] In another aspect, provided herein are Class 2 Type V CRISPR:gNA systems, compositions comprising Class 2 Type V CRISPR:gNA systems, vectors comprising or encoding Class 2 Type V CRISPR:gNA systems, VLP comprising Class 2 Type V CRISPR:gNA systems, or populations of cells edited using the Class 2 Type V CRISPR:gNA systems for use as a medicament for the treatment of a HTT-related disease.

[0021] In another aspect, provided herein are Class 2 Type V CRISPR:gNA systems, composition comprising Class 2 Type V CRISPR:gNA systems, or vectors comprising or encoding Class 2 Type V CRISPR:gNA systems, VLP comprising Class 2 Type V CRISPR:gNA systems, populations of cells edited using the Class 2 Type V CRISPR:gNA systems, for use in a method of treatment of a HTT-related disease in a subject in need thereof.

### INCORPORATION BY REFERENCE

[0022] All publications, patents, and patent applications mentioned in this specification are herein incorporated by reference to the same extent as if each individual publication, patent, or patent application was specifically and individually indicated to be incorporated by reference. The contents of PCT/US2020/036505, filed on Jun. 5, 2020, and the contents of U.S. Provisional Patent Application No. 63/121,196, filed on Dec. 3, 2020, both which disclose CasX variants and gNA variants, are hereby incorporated by reference in their entireties.

### BRIEF DESCRIPTION OF THE DRAWINGS

[0023] The novel features of the invention are set forth with particularity in the appended claims. A better understanding of the features and advantages of the present invention will be obtained by reference to the following detailed description that sets forth illustrative embodiments, in which the principles of the invention are utilized, and the accompanying drawings of which:

[0024] FIG. 1 shows an SDS-PAGE gel of StX2 purification fractions visualized by colloidal Coomassie staining, as described in Example 1.

[0025] FIG. 2 shows the chromatogram from a size exclusion chromatography assay of the StX2, using of Superdex 200 16/600 pg Gel Filtration, as described in Example 1.

[0026] FIG. 3 shows an SDS-PAGE gel of StX2 purification fractions visualized by colloidal Coomassie staining, as described in Example 1.

[0027] FIG. 4 is a schematic showing the organization of the components in the pSTX34 plasmid used to assemble the CasX constructs, as described in Example 2.

[0028] FIG. 5 is a schematic showing the steps of generating the CasX 119 variant, as described in Example 2.

[0029] FIG. 6 shows an SDS-PAGE gel of purification samples, visualized on a Bio-Rad Stain-Free™ gel, as described in Example 1.

[0030] FIG. 7 shows the chromatogram of Superdex 200 16/600 pg Gel Filtration, as described in Example 1.

[0031] FIG. 8 shows an SDS-PAGE gel of gel filtration samples, stained with colloidal Coomassie, as described in Example 1.

[0032] FIG. 9 shows an SDS-PAGE gel of purification samples of CasX 438, visualized on a Bio-Rad Stain-Free™ gel, as described in Example 1.

[0033] FIG. 10 shows the chromatogram from a size exclusion chromatography assay of the CasX 438, using of Superdex 200 16/600 pg gel filtration, as described in Example 1.

[0034] FIG. 11 shows an SDS-PAGE gel of CasX 438 purification fractions visualized by colloidal Coomassie staining, as described in Example, as described in Example 1.

[0035] FIG. 12 shows an SDS-PAGE gel of purification samples of CasX 457, visualized on a Bio-Rad Stain-Free™ gel, as described in Example 1.

[0036] FIG. 13 shows the chromatogram from a size exclusion chromatography assay of the CasX 457, using of Superdex 200 16/600 pg gel filtration, as described in Example 1.

[0037] FIG. 14 shows an SDS-PAGE gel of CasX 457 purification fractions visualized by colloidal Coomassie staining, as described in Example 1.

[0038] FIG. 15 shows a Snapgene map showing the targeting regions of spacers for Cas119 and gNA 174, SpyCas9, and SauCas9 targeting exon 1 of the HTT gene, as described in Example 9. The region of DNA that codes for the pathogenic polyQ expansion in Huntington's disease is shown for reference.

[0039] FIG. 16 shows the results of an editing assay of 6 target genes in HEK293T cells, as described in Example 9. Each dot represents results using an individual spacer.

[0040] FIG. 17 shows the results of an editing assay of 6 target genes in HEK293T cells, with individual bars representing the results obtained with individual spacers, as described in Example 9.

[0041] FIG. 18 shows the results of an editing assay of 4 target genes in HEK293T cells, as described in Example 9. Each dot represents results using an individual spacer utilizing a CTC PAM.

[0042] FIG. 19 is a graph of the results of an assay for the quantification of active fractions of RNP formed by sgRNA174 and the CasX variants, as described in Example 11. Equimolar amounts of RNP and target were co-incubated and the amount of cleaved target was determined at the indicated timepoints. Mean and standard deviation of three independent replicates are shown for each timepoint. The biphasic fit of the combined replicates is shown. “2” refers to the reference CasX protein of SEQ ID NO:2.

[0043] FIG. 20 shows the quantification of active fractions of RNP formed by CasX2 (reference CasX protein of SEQ ID NO:2) and the modified sgRNAs, as described in Example 11. Equimolar amounts of RNP and target were co-incubated and the amount of cleaved target was determined at the indicated timepoints. Mean and standard deviation of three independent replicates are shown for each timepoint. The biphasic fit of the combined replicates is shown.

[0044] FIG. 21 shows the quantification of active fractions of RNP formed by CasX 491 and the modified sgRNAs under guide-limiting conditions, as described in Example 11. Equimolar amounts of RNP and target were co-incubated and the amount of cleaved target was determined at the indicated timepoints. The biphasic fit of the data is shown.

[0045] FIG. 22 shows the quantification of cleavage rates of RNP formed by sgRNA174 and the CasX variants, as described in Example 11. Target DNA was incubated with a 20-fold excess of the indicated RNP and the amount of cleaved target was determined at the indicated time points. Mean and standard deviation of three independent replicates are shown for each timepoint, except for 488 and 491 where a single replicate is shown. The monophasic fit of the combined replicates is shown.

[0046] FIG. 23 shows the quantification of cleavage rates of RNP formed by CasX2 and the sgRNA variants, as described in Example 11. Target DNA was incubated with a 20-fold excess of the indicated RNP and the amount of cleaved target was determined at the indicated time points. Mean and standard deviation of three independent replicates are shown for each timepoint. The monophasic fit of the combined replicates is shown.

[0047] FIG. 24 shows the quantification of initial velocities of RNP formed by CasX2 and the sgRNA variants, as described in Example 11. The first two time-points of the previous cleavage experiment were fit with a linear model to determine the initial cleavage velocity.

[0048] FIG. 25 shows the quantification of cleavage rates of RNP formed by CasX491 and the sgRNA variants, as described in Example 11. Target DNA was incubated with a 20-fold excess of the indicated RNP at 10° C. and the amount of cleaved target was determined at the indicated time points. The monophasic fit of the timepoints is shown.

[0049] FIG. 26 is a diagram and an example fluorescence activated cell sorting (FACS) plot illustrating an exemplary method for assaying the effectiveness of a reference CasX protein or single guide RNA (sgRNA), or variants thereof, as described in Example 14. A reporter (e.g., GFP reporter) coupled to a gRNA target sequence, complementary to the gRNA spacer, is integrated into a reporter cell line. Cells are transformed or transfected with a CasX protein and/or sgRNA variant, with the spacer motif of the sgRNA complementary to and targeting the gRNA target sequence of the reporter. Ability of the CasX:sgRNA ribonucleoprotein complex to cleave the target sequence is assayed by FACS. Cells that lose reporter expression indicate occurrence of CasX:sgRNA ribonucleoprotein complex-mediated cleavage and indel formation.

[0050] FIG. 27 shows results of gene editing in an EGFP disruption assay, as described in Example 16. Editing was measured by indel formation and GFP disruption in HEK293 cells carrying a GFP reporter. FIG. 2 shows the improvement in editing efficiency of a CasX sgRNA variant of SEQ ID NO:5 versus the reference of SEQ ID NO:4 across 10 targets. When averaged across 10 targets, the editing efficiency of sgRNA SEQ ID NO:5 improved 176% compared to SEQ ID NO:4.

[0051] FIG. 28 shows results of gene editing in an EGFP disruption assay where further editing improvements were obtained in the sgRNA scaffold of SEQ ID NO:5 by swapping the extended stem loop sequence (indicated in the X-axis) for additional sequences to generate the scaffolds whose sequences are shown in Table 2, as described in Example 17.

[0052] FIG. 29 is a graph showing the fold improvement of sgRNA variants generated by DME mutations normalized to SEQ ID NO:5 as the CasX reference sgRNA, as described in Example 17.

[0053] FIG. 30 is a graph showing the fold improvement normalized to the SEQ ID NO:5 reference CasX sgRNA of variants created by both combining (stacking) scaffold stem mutations showing improved cleavage, DME mutations showing improved cleavage, and using ribozyme appendages showing improved cleavage (the appendages and their sequences are listed in Table 14 in Example 18). The resulting sgRNA variants yield 2-fold or greater improvement in cleavage compared to SEQ ID NO:5 in this assay. EGFP editing assays were performed with spacer target sequences of E6 (TGTGGTCGGGGTAGCGGCTG (SEQ ID NO: 17)) and E7 (TCAAGTCCGCCATGCCCGAA (SEQ ID NO: 18)) described in Example 17.

[0054] FIG. 31 shows results of NGS edit analysis of Cas-mediated editing at the HTT locus in HEK293T cells showing total editing percentage, as described in Example 18. Cells were transfected with plasmid DNA encoding Cas and guide constructs targeting the HTT gene and prepared for NGS 6 days post-transfection. Four to five different spacers (indicated by the individual data points) targeting the HTT locus were used for each of the different Cas molecules (SauCas9, CasX, and SpyCas9) in this experiment. Each data point is an average measurement of NGS reads of editing outcomes generated by an individual spacer.

[0055] FIG. 32 shows results of NGS edit analysis of Cas-mediated editing at the HTT locus in HEK293T cells showing total editing percentage (gray bars) and percentage of total edits that were deletions greater than 40 bp of the PolyQ-PolyP repeat region at the target site (black bars), as described in Example 18. Data points for each spacer are average measurements of NGS reads of editing outcomes.

[0056] FIG. 33 shows results of editing HTT in HD patient-derived cells analyzed by flow cytometry, as described in Example 19. Each data point is an average measurement of at least 5000 cells.

### DETAILED DESCRIPTION

[0057] While exemplary embodiments have been shown and described herein, it will be obvious to those skilled in the art that such embodiments are provided by way of example only. Numerous variations, changes, and substitutions will now occur to those skilled in the art without departing from the invention. It should be understood that various alternatives to the embodiments of the invention described herein may be employed in practicing the invention. It is intended that the following claims define the scope of the invention and that methods and structures within the scope of these claims and their equivalents be covered thereby.

[0058] Unless otherwise defined, all technical and scientific terms used herein have the same meaning as commonly understood by one of ordinary skill in the art to which this invention belongs. Although methods and materials similar or equivalent to those described herein can be used in the practice or testing of the present invention, suitable methods and materials are described below. In case of conflict, the patent specification, including definitions, will control. In addition, the materials, methods, and examples are illustrative only and not intended to be limiting. Numerous variations, changes, and substitutions will now occur to those skilled in the art without departing from the invention.

### Definitions

[0059] The terms “polynucleotide” and “nucleic acid,” used interchangeably herein, refer to a polymeric form of nucleotides of any length, either ribonucleotides or deoxyribonucleotides. Thus, terms “polynucleotide” and “nucleic acid” encompass single-stranded DNA; double-stranded DNA; multi-stranded DNA; single-stranded RNA; double-stranded RNA; multi-stranded RNA; genomic DNA; cDNA; DNA-RNA hybrids; and a polymer comprising purine and pyrimidine bases or other natural, chemically or biochemically modified, non-natural, or derivatized nucleotide bases.

[0060] “Hybridizable” or “complementary” are used interchangeably to mean that a nucleic acid (e.g., RNA, DNA) comprises a sequence of nucleotides that enables it to non-covalently bind, i.e., form Watson-Crick base pairs and/or G/U base pairs, “anneal”, or “hybridize,” to another nucleic acid in a sequence-specific, antiparallel, manner (i.e., a nucleic acid specifically binds to a complementary nucleic acid) under the appropriate in vitro and/or in vivo conditions of temperature and solution ionic strength. It is understood that the sequence of a polynucleotide need not be 100% complementary to that of its target nucleic acid sequence to be specifically hybridizable; it can have at least about 70%, at least about 80%, or at least about 90%, or at least about 95% sequence identity and still hybridize to the target nucleic acid sequence. Moreover, a polynucleotide may hybridize over one or more segments such that intervening or adjacent segments are not involved in the hybridization event (e.g., a loop structure or hairpin structure, a ‘bulge’, and the like).

[0061] A “gene,” for the purposes of the present disclosure, includes a DNA region encoding a gene product (e.g., a protein, RNA), as well as all DNA regions which regulate the production of the gene product, whether or not such regulatory sequences are adjacent to coding and/or transcribed sequences. Accordingly, a gene may include regulatory element sequences including, but not necessarily limited to, promoter sequences, terminators, translational regulatory sequences such as ribosome binding sites and internal ribosome entry sites, enhancers, silencers, insulators, boundary elements, replication origins, matrix attachment sites and locus control regions. Coding sequences encode a gene product upon transcription or transcription and translation; the coding sequences of the disclosure may comprise fragments and need not contain a full-length open reading frame. A gene can include both the strand that is transcribed as well as the complementary strand containing the anticodons.

[0062] The term “downstream” refers to a nucleotide sequence that is located 3′ to a reference nucleotide sequence. In certain embodiments, downstream nucleotide sequences relate to sequences that follow the starting point of transcription. For example, the translation initiation codon of a gene is located downstream of the start site of transcription.

[0063] The term “upstream” refers to a nucleotide sequence that is located 5′ to a reference nucleotide sequence. In certain embodiments, upstream nucleotide sequences relate to sequences that are located on the 5′ side of a coding region or starting point of transcription. For example, most promoters are located upstream of the start site of transcription.

[0064] The term “regulatory element” is used interchangeably herein with the term “regulatory sequence,” and is intended to include promoters, enhancers, and other expression regulatory elements (e.g. transcription termination signals, such as polyadenylation signals and poly-U sequences). Exemplary regulatory elements include a transcription promoter such as, but not limited to, CMV, CMV+intron A, SV40, RSV, HIV-Ltr, elongation factor 1 alpha (EF1α), MMLV-ltr, internal ribosome entry site (IRES) or P2A peptide to permit translation of multiple genes from a single transcript, metallothionein, a transcription enhancer element, a transcription termination signal, polyadenylation sequences, sequences for optimization of initiation of translation, and translation termination sequences. In the case of systems utilized for exon skipping, regulatory elements include exonic splicing enhancers. It will be understood that the choice of the appropriate regulatory element will depend on the encoded component to be expressed (e.g., protein or RNA) or whether the nucleic acid comprises multiple components that require different polymerases or are not intended to be expressed as a fusion protein.

[0065] The term “promoter” refers to a DNA sequence that contains an RNA polymerase binding site, transcription start site, TATA box, and/or B recognition element and assists or promotes the transcription and expression of an associated transcribable polynucleotide sequence and/or gene (or transgene). A promoter can be synthetically produced or can be derived from a known or naturally occurring promoter sequence or another promoter sequence. A promoter can be proximal or distal to the gene to be transcribed. A promoter can also include a chimeric promoter comprising a combination of two or more heterologous sequences to confer certain properties. A promoter of the present disclosure can include variants of promoter sequences that are similar in composition, but not identical to, other promoter sequence(s) known or provided herein. A promoter can be classified according to criteria relating to the pattern of expression of an associated coding or transcribable sequence or gene operably linked to the promoter, such as constitutive, developmental, tissue-specific, inducible, etc.

[0066] The term “enhancer” refers to regulatory DNA sequences that, when bound by specific proteins called transcription factors, regulate the expression of an associated gene. Enhancers may be located in the intron of the gene, or 5′ or 3′ of the coding sequence of the gene. Enhancers may be proximal to the gene (i.e., within a few tens or hundreds of base pairs (bp) of the promoter), or may be located distal to the gene (i.e., thousands of bp, hundreds of thousands of bp, or even millions of bp away from the promoter). A single gene may be regulated by more than one enhancer, all of which are envisaged as within the scope of the instant disclosure.

[0067] “Recombinant,” as used herein, means that a particular nucleic acid (DNA or RNA) is the product of various combinations of cloning, restriction, and/or ligation steps resulting in a construct having a structural coding or non-coding sequence distinguishable from endogenous nucleic acids found in natural systems. Generally, DNA sequences encoding the structural coding sequence can be assembled from cDNA fragments and short oligonucleotide linkers, or from a series of synthetic oligonucleotides, to provide a synthetic nucleic acid which is capable of being expressed from a recombinant transcriptional unit contained in a cell or in a cell-free transcription and translation system. Such sequences can be provided in the form of an open reading frame uninterrupted by internal non-translated sequences, or introns, which are typically present in eukaryotic genes. Genomic DNA comprising the relevant sequences can also be used in the formation of a recombinant gene or transcriptional unit. Sequences of non-translated DNA may be present 5′ or 3′ from the open reading frame, where such sequences do not interfere with manipulation or expression of the coding regions, and may indeed act to modulate production of a desired product by various mechanisms (see “enhancers” and “promoters”, above).

[0068] The term “recombinant polynucleotide” or “recombinant nucleic acid” refers to one which is not naturally occurring, e.g., is made by the artificial combination of two otherwise separated segments of sequence through human intervention. This artificial combination is often accomplished by either chemical synthesis means, or by the artificial manipulation of isolated segments of nucleic acids, e.g., by genetic engineering techniques. Such is usually done to replace a codon with a redundant codon encoding the same or a conservative amino acid, while typically introducing or removing a sequence recognition site. Alternatively, it is performed to join together nucleic acid segments of desired functions to generate a desired combination of functions. This artificial combination is often accomplished by either chemical synthesis means, or by the artificial manipulation of isolated segments of nucleic acids, e.g., by genetic engineering techniques.

[0069] Similarly, the term “recombinant” polypeptide refers to a polypeptide which is not naturally occurring, e.g., is made by the artificial combination of two otherwise separated segments of amino sequence through human intervention. Thus, e.g., a polypeptide that comprises a heterologous amino acid sequence is recombinant.

[0070] As used herein, the term “contacting” means establishing a physical connection between two or more entities. For example, contacting a target nucleic acid sequence with a guide nucleic acid means that the target nucleic acid sequence and the guide nucleic acid are made to share a physical connection; e.g., can hybridize if the sequences share sequence similarity.

[0071] “Dissociation constant”, or “K_{d}”, are used interchangeably and mean the affinity between a ligand “L” and a protein “P”; i.e., how tightly a ligand binds to a particular protein. It can be calculated using the formula K_{d}=[L] [P]/[LP], where [P], [L] and [LP] represent molar concentrations of the protein, ligand and complex, respectively.

[0072] The disclosure provides compositions and methods useful for editing a target nucleic acid sequence. As used herein “editing” is used interchangeably with “modifying” and includes but is not limited to cleaving, nicking, deleting, knocking in, knocking out, and the like.

[0073] The term “knock-out” refers to the elimination of a gene or the expression of a gene. For example, a gene can be knocked out by either a deletion or an addition of a nucleotide sequence that leads to a disruption of the reading frame. As another example, a gene may be knocked out by replacing a part of the gene with an irrelevant sequence. The term “knock-down” as used herein refers to reduction in the expression of a gene or its gene product(s). As a result of a gene knock-down, the protein activity or function may be attenuated or the protein levels may be reduced or eliminated.

[0074] As used herein, “homology-directed repair” (HDR) refers to the form of DNA repair that takes place during repair of double-strand breaks in cells. This process requires nucleotide sequence homology, and uses a donor template to repair or knock-out a target DNA, and leads to the transfer of genetic information from the donor to the target. Homology-directed repair can result in an alteration of the sequence of the target sequence by insertion, deletion, or mutation if the donor template differs from the target DNA sequence and part or all of the sequence of the donor template is incorporated into the target DNA.

[0075] As used herein, “non-homologous end joining” (NHEJ) refers to the repair of double-strand breaks in DNA by direct ligation of the break ends to one another without the need for a homologous template (in contrast to homology-directed repair, which requires a homologous sequence to guide repair). NHEJ often results in the loss (deletion) of nucleotide sequence near the site of the double-strand break.

[0076] As used herein “micro-homology mediated end joining” (MMEJ) refers to a mutagenic DSB repair mechanism, which always associates with deletions flanking the break sites without the need for a homologous template (in contrast to homology-directed repair, which requires a homologous sequence to guide repair). MMEJ often results in the loss (deletion) of nucleotide sequence near the site of the double-strand break.

[0077] A polynucleotide or polypeptide has a certain percent “sequence similarity” or “sequence identity” to another polynucleotide or polypeptide, meaning that, when aligned, that percentage of bases or amino acids are the same, and in the same relative position, when comparing the two sequences. Sequence similarity (sometimes referred to as percent similarity, percent identity, or homology) can be determined in a number of different manners. To determine sequence similarity, sequences can be aligned using the methods and computer programs that are known in the art, including BLAST, available over the world wide web at ncbi.nlm.nih.gov/BLAST. Percent complementarity between particular stretches of nucleic acid sequences within nucleic acids can be determined using any convenient method. Example methods include BLAST programs (basic local alignment search tools) and PowerBLAST programs (Altschul et al., J. Mol. Biol., 1990, 215, 403-410; Zhang and Madden, Genome Res., 1997, 7, 649-656) or by using the Gap program (Wisconsin Sequence Analysis Package, Version 8 for Unix, Genetics Computer Group, University Research Park, Madison Wis.), e.g., using default settings, which uses the algorithm of Smith and Waterman (Adv. Appl. Math., 1981, 2, 482-489).

[0078] The terms “polypeptide,” and “protein” are used interchangeably herein, and refer to a polymeric form of amino acids of any length, which can include coded and non-coded amino acids, chemically or biochemically modified or derivatized amino acids, and polypeptides having modified peptide backbones. The term includes fusion proteins, including, but not limited to, fusion proteins with a heterologous amino acid sequence.

[0079] A “vector” or “expression vector” is a replicon, such as plasmid, phage, virus, or cosmid, to which another DNA segment, i.e., an “insert”, may be attached so as to bring about the replication or expression of the attached segment in a cell.

[0080] The term “naturally-occurring” or “unmodified” or “wild type” as used herein as applied to a nucleic acid, a polypeptide, a cell, or an organism, refers to a nucleic acid, polypeptide, cell, or organism that is found in nature.

[0081] As used herein, a “mutation” refers to an insertion, deletion, substitution, duplication, or inversion of one or more amino acids or nucleotides as compared to a reference amino acid sequence or to a reference nucleotide sequence.

[0082] As used herein the term “isolated” is meant to describe a polynucleotide, a polypeptide, or a cell that is in an environment different from that in which the polynucleotide, the polypeptide, or the cell naturally occurs. An isolated genetically modified host cell may be present in a mixed population of genetically modified host cells.

[0083] A “host cell,” as used herein, denotes a eukaryotic cell, a prokaryotic cell, or a cell from a multicellular organism (e.g., in a cell line), which eukaryotic or prokaryotic cells are used as recipients for a nucleic acid (e.g., an expression vector), and include the progeny of the original cell which has been genetically modified by the nucleic acid. It is understood that the progeny of a single cell may not necessarily be completely identical in morphology or in genomic or total DNA complement as the original parent, due to natural, accidental, or deliberate mutation. A “recombinant host cell” (also referred to as a “genetically modified host cell”) is a host cell into which has been introduced a heterologous nucleic acid, e.g., an expression vector.

[0084] The term “conservative amino acid substitution” refers to the interchangeability in proteins of amino acid residues having similar side chains. For example, a group of amino acids having aliphatic side chains consists of glycine, alanine, valine, leucine, and isoleucine; a group of amino acids having aliphatic-hydroxyl side chains consists of serine and threonine; a group of amino acids having amide-containing side chains consists of asparagine and glutamine; a group of amino acids having aromatic side chains consists of phenylalanine, tyrosine, and tryptophan; a group of amino acids having basic side chains consists of lysine, arginine, and histidine; and a group of amino acids having sulfur-containing side chains consists of cysteine and methionine. Exemplary conservative amino acid substitution groups are: valine-leucine-isoleucine, phenylalanine-tyrosine, lysine-arginine, alanine-valine, and asparagine-glutamine.

[0085] The term “antibody,” as used herein, encompasses various antibody structures, including but not limited to monoclonal antibodies, polyclonal antibodies, multispecific antibodies (e.g., bispecific antibodies), nanobodies, single domain antibodies such as VHH antibodies, and antibody fragments so long as they exhibit the desired antigen-binding activity or immunological activity. Antibodies represent a large family of molecules that include several types of molecules, such as IgD, IgG, IgA, IgM and IgE.

[0086] As used herein, “treatment” or “treating,” are used interchangeably herein and refer to an approach for obtaining beneficial or desired results, including but not limited to a therapeutic benefit and/or a prophylactic benefit. By therapeutic benefit is meant eradication or amelioration of the underlying disorder or disease being treated. A therapeutic benefit can also be achieved with the eradication or amelioration of one or more of the symptoms or an improvement in one or more clinical parameters associated with the underlying disease such that an improvement is observed in the subject, notwithstanding that the subject may still be afflicted with the underlying disorder.

[0087] The terms “therapeutically effective amount” and “therapeutically effective dose”, as used herein, refer to an amount of a drug or a biologic, alone or as a part of a composition, that is capable of having any detectable, beneficial effect on any symptom, aspect, measured parameter or characteristics of a disease state or condition when administered in one or repeated doses to a subject such as a human or an experimental animal. Such effect need not be absolute to be beneficial.

[0088] As used herein, “administering” is meant a method of giving a dosage of a compound (e.g., a composition of the disclosure) or a composition (e.g., a pharmaceutical composition) to a subject.

[0089] A “subject” is a mammal. Mammals include, but are not limited to, domesticated animals, non-human primates, humans, rabbits, mice, rats and other rodents.

### I. General Methods

[0090] The practice of the present disclosure employs, unless otherwise indicated, conventional techniques of immunology, biochemistry, chemistry, molecular biology, microbiology, cell biology, genomics and recombinant DNA, which can be found in such standard textbooks as Molecular Cloning: A Laboratory Manual, 3rd Ed. (Sambrook et al., Harbor Laboratory Press 2001); Short Protocols in Molecular Biology, 4th Ed. (Ausubel et al. eds., John Wiley & Sons 1999); Protein Methods (Bollag et al., John Wiley & Sons 1996); Nonviral Vectors for Gene Therapy (Wagner et al. eds., Academic Press 1999); Viral Vectors (Kaplift & Loewy eds., Academic Press 1995); Immunology Methods Manual (I. Lefkovits ed., Academic Press 1997); and Cell and Tissue Culture: Laboratory Procedures in Biotechnology (Doyle & Griffiths, John Wiley & Sons 1998), the disclosures of which are incorporated herein by reference.

[0091] Where a range of values is provided, it is understood that endpoints are included, and that each intervening value, to the tenth of the unit of the lower limit unless the context clearly dictates otherwise, between the upper and lower limit of that range and any other stated or intervening value in that stated range, is encompassed. The upper and lower limits of these smaller ranges may independently be included in the smaller ranges, and are also encompassed, subject to any specifically excluded limit in the stated range. Where the stated range includes one or both of the limits, ranges excluding either or both of those included limits are also included.

[0092] Unless defined otherwise, all technical and scientific terms used herein have the same meaning as commonly understood by one of ordinary skill in the art to which this invention belongs. All publications mentioned herein are incorporated herein by reference to disclose and describe the methods and/or materials in connection with which the publications are cited.

[0093] It must be noted that as used herein and in the appended claims, the singular forms “a,” “an,” and “the” include plural referents unless the context clearly dictates otherwise.

[0094] It will be appreciated that certain features of the invention, which are, for clarity, described in the context of separate embodiments, may also be provided in combination in a single embodiment. In other cases, various features of the invention, which are, for brevity, described in the context of a single embodiment, may also be provided separately or in any suitable sub-combination. It is intended that all combinations of the embodiments pertaining to the invention are specifically embraced by the present invention and are disclosed herein just as if each and every combination was individually and explicitly disclosed. In addition, all sub-combinations of the various embodiments and elements thereof are also specifically embraced by the present invention and are disclosed herein just as if each and every such sub-combination was individually and explicitly disclosed herein.

### II. Systems for Genetic Editing of HTT Genes

[0095] In a first aspect, the present disclosure provides systems comprising a CRISPR nuclease protein and one or more guide nucleic acids (gNA) for use in modifying an HTT gene (referred to herein as the “target nucleic acid”). The HTT gene to be modified may comprise one or more mutations, including deletions or duplications, in the gene region selected from the group consisting of an HTT intron, an HTT exon, an HTT intron-exon junction, an HTT regulatory element, and an intergenic region, or the modification is deletion or mutation of one or more exons.

[0096] The huntingtin locus is large, spanning 180 kb and consisting of 67 exons. The HTT promoter has high GC content and lacks TATA and CCAAT regulatory elements (Thompson, S B and Leavitt, B R. Transcriptional Regulation of the Huntingtin Gene. J Huntingtons Dis. 7(4):289 (2018)). Some features of the HTT promoter include two 20 bp direct repeats, two 17 bp direct repeats (surrounded by identical 7 bp sequences that are identical to the first 7 bp of the full-length 17 bp repeats), one full Alu element and one Alu element 3′ fragment, both of which are in reverse orientation to the direction of HTT transcription (Lin B, et al. Structural analysis of the 5′ region of mouse and human Huntington disease genes reveals conservation of putative promoter region and di- and trinucleotide polymorphisms. Genomics. 25(3):707 (1995)).

[0097] The human HTT gene (HGNC:4851; see also NG_009378) encodes the huntingtin protein (P42858) having the sequence of SEQ ID NO: 33. In people with Huntington's disease, the huntingtin protein is encoded with CAG segment repeats that are repeated 36 to more than 120 times in the HTT gene.

(SEQ ID NO: 33)
MATLEKLMKAFESLKSFQQQQQQQQQQQQQQQQQQQQQPPPPPPPPPPPQ
LPQPPPQAQPLLPQPQPPPPPPPPPPGPAVAEEPLHRPKKELSATKKDRV
NHCLTICENIVAQSVRNSPEFQKLLGIAMELFLLCSDDAESDVRMVADEC
LNKVIKALMDSNLPRLQLELYKEIKKNGAPRSLRAALWRFAELAHLVRPQ
KCRPYLVNLLPCLTRTSKRPEESVQETLAAAVPKIMASFGNFANDNEIKV
LLKAFIANLKSSSPTIRRTAAGSAVSICQHSRRTQYFYSWLLNVLLGLLV
PVEDEHSTLLILGVLLTLRYLVPLLQQQVKDTSLKGSFGVTRKEMEVSPS
AEQLVQVYELTLHHTQHQDHNVVTGALELLQQLFRTPPPELLQTLTAVGG
IGQLTAAKEESGGRSRSGSIVELIAGGGSSCSPVLSRKQKGKVLLGEEEA
LEDDSESRSDVSSSALTASVKDEISGELAASSGVSTPGSAGHDIITEQPR
SQHTLQADSVDLASCDLTSSATDGDEEDILSHSSSQVSAVPSDPAMDLND
GTQASSPISDSSQTTTEGPDSAVTPSDSSEIVLDGTDNQYLGLQIGQPQD
EDEEATGILPDEASEAFRNSSMALQQAHLLKNMSHCRQPSDSSVDKFVLR
DEATEPGDQENKPCRIKGDIGQSTDDDSAPLVHCVRLLSASFLLTGGKNV
LVPDRDVRVSVKALALSCVGAAVALHPESFFSKLYKVPLDTTEYPEEQYV
SDILNYIDHGDPQVRGATAILCGTLICSILSRSRFHVGDWMGTIRTLTGN
TFSLADCIPLLRKTLKDESSVTCKLACTAVRNCVMSLCSSSYSELGLQLI
IDVLTLRNSSYWLVRTELLETLAEIDFRLVSFLEAKAENLHRGAHHYTGL
LKLQERVLNNVVIHLLGDEDPRVRHVAAASLIRLVPKLFYKCDQGQADPV
VAVARDQSSVYLKLLMHETQPPSHFSVSTITRIYRGYNLLPSITDVTMEN
NLSRVIAAVSHELITSTTRALTFGCCEALCLLSTAFPVCIWSLGWHCGVP
PLSASDESRKSCTVGMATMILTLLSSAWFPLDLSAHQDAHVLDDVAPGPA
IKAALPSLTNPPSLSPIRRKGKEKEPGEQASVPLSPKKGSEASAASRQSD
TSGPVTTSKSSSLGSFYHLPSYLKLHDVLKATHANYKVTLDLQNSTEKFG
GFLRSALDVLSQILELATLQDIGKCVEEILGYLKSCFSREPMMATVCVQQ
LLKTLFGTNLASQFDGLSSNPSKSQGRAQRLGSSSVRPGLYHYCFMAPYT
HFTQALADASLRNMVQAEQENDTSGWFDVLQKVSTQLKTNLTSVTKNRAD
KNAIHNHIRLFEPLVIKALKQYTTTTCVQLQKQVLDLLAQLVQLRVNYCL
LDSDQVFIGFVLKQFEYIEVGQFRESEAIIPNIFFFLVLLSYERYHSKQI
IGIPKIIQLCDGIMASGRKAVTHAIPALQPIVHDLFVLRGTNKADAGKEL
ETQKEVVVSMLLRLIQYHQVLEMFILVLQQCHKENEDKWKRLSRQIADII
LPMLAKQQMHIDSHEALGVLNTLFEILAPSSLRPVDMLLRSMFVTPNTMA
SVSTVQLWISGILAILRVLISQSTEDIVLSRIQELSFSPYLISCTVINRL
RDGDSTSTLEEHSEGKQIKNLPEETFSRFLLQLVGILLEDIVTKQLKVEM
SEQQHTFYCQELGTLLMCLIHIFKSGMERRITAAATRLFRSDGCGGSFYT
LDSLNLRARSMITTHPALVLLWCQILLLVNHTDYRWWAEVQQTPKRHSLS
STKLLSPQMSGEEEDSDLAAKLGMCNREIVRRGALILFCDYVCQNLHDSE
HLTWLIVNHIQDLISLSHEPPVQDFISAVHRNSAASGLFIQAIQSRCENL
STPTMLKKTLQCLEGIHLSQSGAVLTLYVDRLLCTPFRVLARMVDILACR
RVEMLLAANLQSSMAQLPMEELNRIQEYLQSSGLAQRHQRLYSLLDRFRL
STMQDSLSPSPPVSSHPLDGDGHVSLETVSPDKDWYVHLVKSQCWTRSDS
ALLEGAELVNRIPAEDMNAFMMNSEFNLSLLAPCLSLGMSEISGGQKSAL
FEAAREVTLARVSGTVQQLPAVHHVFQPELPAEPAAYWSKLNDLFGDAAL
YQSLPTLARALAQYLVVVSKLPSHLHLPPEKEKDIVKFVVATLEALSWHL
IHEQIPLSLDLQAGLDCCCLALQLPGLWSVVSSTEFVTHACSLIYCVHFI
LEAVAVQPGEQLLSPERRTNTPKAISEEEEEVDPNTQNPKYITAACEMVA
EMVESLQSVLALGHKRNSGVPAFLTPLLRNIIISLARLPLVNSYTRVPPL
VWKLGWSPKPGGDFGTAFPEIPVEFLQEKEVFKEFIYRINTLGWTSRTQF
EETWATLLGVLVTQPLVMEQEESPPEEDTERTQINVLAVQAITSLVLSAM
TVPVAGNPAVSCLEQQPRNKPLKALDTRFGRKLSIIRGIVEQEIQAMVSK
RENIATHHLYQAWDPVPSLSPATTGALISHEKLLLQINPERELGSMSYKL
GQVSIHSVWLGNSITPLREEEWDEEEEEEADAPAPSSPPTSPVNSRKHRA
GVDIHSCSQFLLELYSRWILPSSSARRTPAILISEVVRSLLVVSDLFTER
NQFELMYVTLTELRRVHPSEDEILAQYLVPATCKAAAVLGMDKAVAEPVS
RLLESTLRSSHLPSRVGALHGVLYVLECDLLDDTAKQLIPVISDYLLSNL
KGIAHCVNIHSQQHVLVMCATAFYLIENYPLDVGPEFSASIIQMCGVMLS
GSEESTPSIIYHCALRGLERLLLSEQLSRLDAESLVKLSVDRVNVHSPHR
AMAALGLMLTCMYTGKEKVSPGRTSDPNPAAPDSESVIVAMERVSVLFDR
IRKGFPCEARVVARILPQFLDDFFPPQDIMNKVIGEFLSNQQPYPQFMAT
VVYKVFQTLHSTGQSSMVRDWVMLSLSNFTQRAPVAMATWSLSCFFVSAS
TSPWVAAILPHVISRMGKLEQVDVNLFCLVATDFYRHQIEEELDRRAFQS
VLEWAAPGSPYHRLLTCLRNVHKVTTC

[0098] In some embodiments, the disclosure provides systems specifically designed to modify the HTT gene in eukaryotic cells. Generally, any portion of the HTT target nucleic acid can be targeted using the programmable compositions and methods provided herein. In some embodiments, the CRISPR nuclease is a Class 2, Type V nuclease. In some embodiments, the Class 2, Type V nuclease is selected from the group consisting of Cas12a, Cas12b, Cas12c, Cas12d (CasY), Cas12J, and CasX. In some embodiments, the disclosure provides systems comprising one or more CasX proteins and one or more guide nucleic acids (gNA) as a CasX:gNA system. In other embodiments, the CasX:gNA systems of the disclosure comprise one or more CasX proteins, one or more guide nucleic acids (gNA) and one or more donor template nucleic acids comprising a nucleic acid encoding a portion of an HTT gene wherein the nucleic acid comprises a wild-type sequence, a cDNA sequence encoding a portion of a functional huntingtin protein, a deletion, an insertion, or a mutation of one or more nucleotides in comparison to a genomic nucleic acid sequence encoding the mutant huntingtin. In those cases where the HTT mutation spans multiple exons, the disclosure contemplates a donor template of sufficient length that may also be optimized to contain synthetic intron sequences of shortened length (relative to the genomic intron) between the exons in the donor template to ensure proper expression and processing of the HTT locus. In some embodiments, the donor polynucleotide comprises at least about 10, at least about 50, at least about 100, or at least about 200, or at least about 300, or at least about 400, or at least about 500, or at least about 600, or at least about 700, or at least about 800, or at least about 900, or at least about 1000, or at least about 10,000, or at least about 15,000, or at least about 30,000 nucleotides. In other embodiments, the donor polynucleotide comprises at least about 10 to about 30,000 nucleotides, or at least about 100 to about 15,000 nucleotides, or at least about 400 to about 10,000 nucleotides, or at least about 600 to about 5000 nucleotides, or at least about 1000 to about 2000 nucleotides. In some embodiments, the donor template is a single stranded DNA template or a single stranded RNA template. In other embodiments, the donor template is a double stranded DNA template.

[0099] In some embodiments, the disclosure provides gene editing pairs of a CasX and a gNA of any of the embodiments described herein that are capable of being bound together prior to their use for gene editing and, thus, are “pre-complexed” as a ribonuclear protein complex (RNP). The use of a pre-complexed RNP confers advantages in the delivery of the system components to a cell or target nucleic acid sequence for editing of the target nucleic acid sequence. In some embodiments, the functional RNP can be delivered ex vivo to a cell by electrophoresis or by chemical means. In other embodiments, the functional RNP can be delivered either ex vivo or in vivo by a vector in their functional form. The gNA can provide target specificity to the complex by including a targeting sequence (or “spacer”) having a nucleotide sequence that is complementary to a sequence of the target nucleic acid sequence while the CasX protein of the pre-complexed CasX:gNA provides the site-specific activity such as cleavage or nicking of the target sequence that is guided to a target site (e.g., stabilized at a target site) within a target nucleic acid sequence by virtue of its association with the gNA. The CasX proteins and gNA components of the CasX:gNA systems and their sequences, features and functions are described more fully, below.

[0100] The CasX:gNA systems have utility in the treatment of a subject having Huntington's disease. Each of the components of the CasX:gNA systems and their use in the editing of the target nucleic acids in cells is described more fully, below.

### III. Guide Nucleic Acids of the Systems for Genetic Editing

[0101] In another aspect, the disclosure relates to guide nucleic acids (gNA) comprising a targeting sequence complementary to a target nucleic acid sequence of an HTT gene, wherein the gNA is capable of forming a complex with a CRISPR protein that has specificity to a protospacer adjacent motif (PAM) sequence comprising a TC motif in the complementary non-target strand, and wherein the PAM sequence is located 1 nucleotide 5′ of the sequence in the non-target strand that is complementary to the target nucleic acid sequence in the target strand of the target nucleic acid. In some embodiments, the gNA is capable of forming a complex with a Class 2, Type V CRISPR nuclease. In a particular embodiment, the gNA is capable of forming a complex with a CasX nuclease.

[0102] In some embodiments, the disclosure provides gNAs utilized in the CasX:gNA systems that have utility in genome editing an HTT gene in a eukaryotic cell. The present disclosure provides specifically-designed gNAs wherein the targeting sequence (or spacer, described more fully, below) of the gNA is complementary to (and are therefore able to hybridize with) target nucleic acid sequences when used as a component of the gene editing CasX:gNA systems. Representative, but non-limiting examples of targeting sequences to the HTT target nucleic acid that can be utilized in the gNA of the embodiments are presented as SEQ ID NOS: 409-2100 and 2286-39966. In some embodiments, the targeting sequence of the gNA is specific to a mutation in the HTT locus, for example the targeting sequences presented as SEQ ID NOS: 409-508. In some embodiments, the gNA is a deoxyribonucleic acid molecule (“gDNA”); in some embodiments, the gNA is a ribonucleic acid molecule (“gRNA”); and in other embodiments, the gNA is a chimera, and comprises both DNA and RNA. As used herein, the terms gNA, gRNA, and gDNA cover naturally-occurring molecules, as well as sequence variants.

[0103] It is envisioned that in some embodiments, multiple gNAs are delivered in the methods for the modification of a target nucleic acid sequence by use of the CasX:gNA systems which is then edited by host cell repair mechanisms such as non-homologous end joining (NHEJ), homology-directed repair (HDR, which can include, for example, insertion of a donor template to replace all or a portion of the HTT exon), homology-independent targeted integration (HITI), micro-homology mediated end joining (MMEJ), single strand annealing (SSA) or base excision repair (BER). For example, when an editing event designed to delete one or more mutant exons of the HTT gene is desired, a pair of gNAs can be used in order to bind and cleave at two different sites 5′ and 3′ of the exon(s) bearing the mutation(s) within the HTT gene. In the context of nucleic acids, cleavage refers to the breakage of the covalent backbone of a nucleic acid molecule; either DNA or RNA, by the nuclease. Both single-stranded cleavage and double-stranded cleavage are possible, and double-stranded cleavage can occur as a result of two distinct single-stranded cleavage events. In some embodiments, small indels introduced by the CasX:gNA systems of the embodiments described herein and cellular repair systems can restore the protein reading frame of the mutant HTT gene (“reframing” strategy). When the reframing strategy is used, the cells may be contacted with a single gNA. In the case of deleting CAG repeats in the HTT gene, the disclosure contemplates use of targeting sequences that flank the CAG repeat region such that it can be deleted or replaced with a donor template having the physiologically correct number of CAG repeats. Where consecutive exons are to be removed, the disclosure contemplates use of multiple gNAs targeted to sequences that flank the exons 5′ and 3′ to the target sequence to be excised. In other cases, when a deletion or a knock-down/knock-out of the HTT gene is desired, a pair of gNAs with targeting sequences to different or overlapping regions of the target nucleic acid sequence can be used in order to bind and the CasX to cleave at two different or overlapping sites within or proximal to the exon or regulatory element of the gene, which is then edited by non-homologous end joining (NHEJ), homology-directed repair (HDR, which can include, for example, insertion of a donor template to replace all or a portion of an HTT exon), homology-independent targeted integration (HITI), micro-homology mediated end joining (MMEJ), single strand annealing (SSA) or base excision repair (BER).

[0104] a. Reference gNA and gNA Variants

[0105] In some embodiments, a gNA of the present disclosure comprises a wild-type sequence of a naturally-occurring gNA (a “reference gNA”). In other cases, a reference gNA of the disclosure may be subjected to one or more mutagenesis methods, such as the mutagenesis methods described herein, which may include Deep Mutational Evolution (DME), deep mutational scanning (DMS), error prone PCR, cassette mutagenesis, random mutagenesis, staggered extension PCR, gene shuffling, or domain swapping, in order to generate one or more gNA variants with enhanced or varied properties relative to the reference gNA. gNA variants also include variants comprising one or more exogenous sequences, for example fused to either the 5′ or 3′ end, or inserted internally. The activity of reference gNAs may be used as a benchmark against which the activity of gNA variants are compared, thereby measuring improvements in function or other characteristics of the gNA variants. In other embodiments, a reference gNA may be subjected to one or more deliberate, specifically-targeted mutations in order to produce a gNA variant, for example a rationally designed variant.

[0106] The gNAs of the disclosure comprise two segments: a targeting sequence and a protein-binding segment. The targeting segment of a gNA includes a nucleotide sequence (referred to interchangeably as a guide sequence, a spacer, a targeter, or a targeting sequence) that is complementary to (and therefore hybridizes with) a specific sequence (a target site) within the target nucleic acid sequence (e.g., a target ssRNA, a target ssDNA, a strand of a double stranded target DNA, etc.), described more fully below. The targeting sequence of a gNA is capable of binding to a target nucleic acid sequence, including a coding sequence, a complement of a coding sequence, a non-coding sequence, and to regulatory elements. The protein-binding segment (or “activator” or “protein-binding sequence”) interacts with (e.g., binds to) a CasX protein as a complex, forming an RNP (described more fully, below). The protein-binding segment is alternatively referred to herein as a “scaffold”, which is comprised of several regions, described more fully, below.

[0107] In the case of a dual guide RNA (dgRNA), the targeter and the activator portions each have a duplex-forming segment, where the duplex forming segment of the targeter and the duplex-forming segment of the activator have complementarity with one another and hybridize to one another to form a double stranded duplex (dsRNA duplex for a gRNA). When the gNA is a gRNA, the term “targeter” or “targeter RNA” is used herein to refer to a crRNA-like molecule (crRNA: “CRISPR RNA”) of a CasX dual guide RNA (and therefore of a CasX single guide RNA when the “activator” and the “targeter” are linked together; e.g., by intervening nucleotides). The crRNA has a 5′ region that anneals with the tracrRNA followed by the nucleotides of the targeting sequence. Thus, for example, a guide RNA (dgRNA or sgRNA) comprises a guide sequence and a duplex-forming segment of a crRNA, which can also be referred to as a crRNA repeat. A corresponding tracrRNA-like molecule (activator) also comprises a duplex-forming stretch of nucleotides that forms the other half of the dsRNA duplex of the protein-binding segment of the guide RNA. Thus, a targeter and an activator, as a corresponding pair, hybridize to form a dual guide NA, referred to herein as a “dual guide NA”, a “dual-molecule gNA”, a “dgNA”, a “double-molecule guide NA”, or a “two-molecule guide NA”. Site-specific binding and/or cleavage of a target nucleic acid sequence (e.g., genomic DNA) by the CasX protein can occur at one or more locations (e.g., a sequence of a target nucleic acid) determined by base-pairing complementarity between the targeting sequence of the gNA and the target nucleic acid sequence. Thus, for example, the gNA of the disclosure have sequences complementarity to and therefore can hybridize with the target nucleic acid that is adjacent to a sequence complementary to a TC PAM motif or a PAM sequence, such as ATC, CTC, GTC, or TTC. Because the targeting sequence of a guide sequence hybridizes with a sequence of a target nucleic acid sequence, a targeter can be modified by a user to hybridize with a specific target nucleic acid sequence, so long as the location of the PAM sequence is considered. Thus, in some cases, the sequence of a targeter may be a non-naturally occurring sequence. In other cases, the sequence of a targeter may be a naturally-occurring sequence, derived from the gene to be edited. In other embodiments, the activator and targeter of the gNA are covalently linked to one another (rather than hybridizing to one another) and comprise a single molecule, referred to herein as a “single-molecule gNA,” “one-molecule guide NA,” “single guide NA”, “single guide RNA”, a “single-molecule guide RNA,” a “one-molecule guide RNA”, a “single guide DNA”, a “single-molecule DNA”, or a “one-molecule guide DNA”, (“sgNA”, “sgRNA”, or a “sgDNA”). In some embodiments, the sgNA includes an “activator” or a “targeter” and thus can be an “activator-RNA” and a “targeter-RNA,” respectively.

[0108] Collectively, the assembled gNAs of the disclosure comprise four distinct regions, or domains: the RNA triplex, the scaffold stem, the extended stem, and the targeting sequence that, in the embodiments of the disclosure is specific for a target nucleic acid and is located on the 3′ end of the gNA. The RNA triplex, the scaffold stem, and the extended stem, together, are referred to as the “scaffold” of the gNA.

[0109] b. RNA Triplex

[0110] In some embodiments of the guide NAs provided herein (including reference sgNAs), there is a RNA-triplex, and the RNA triplex comprises the sequence of a UUU-nX(˜4-15)-UUU stem loop (SEQ ID NO: 19) that ends with an AAAG after 2 intervening stem loops (the scaffold stem loop and the extended stem loop), forming a pseudoknot that may also extend past the triplex into a duplex pseudoknot. The UU-UUU-AAA sequence of the triplex forms as a nexus between the spacer, scaffold stem, and extended stem. In exemplary reference CasX sgNAs, the UUU-loop-UUU region is coded for first, then the scaffold stem loop, and then the extended stem loop, which is linked by the tetraloop, and then an AAAG closes off the triplex before becoming the spacer.

[0111] c. Scaffold Stem Loop

[0112] In some embodiments of sgNAs of the disclosure, the triplex region is followed by the scaffold stem loop. The scaffold stem loop is a region of the gNA that is bound by CasX protein (such as a reference or CasX variant protein). In some embodiments, the scaffold stem loop is a fairly short and stable stem loop. In some cases, the scaffold stem loop does not tolerate many changes, and requires some form of an RNA bubble. In some embodiments, the scaffold stem is necessary for CasX sgNA function. While it is perhaps analogous to the nexus stem of Cas9 as being a critical stem loop, the scaffold stem of a CasX sgNA, in some embodiments, has a necessary bulge (RNA bubble) that is different from many other stem loops found in CRISPR/Cas systems. In some embodiments, the presence of this bulge is conserved across sgNA that interact with different CasX proteins. An exemplary sequence of a scaffold stem loop sequence of a gNA comprises the sequence CCAGCGACUAUGUCGUAUGG (SEQ ID NO: 20). In other embodiments, the disclosure provides gNA variants wherein the scaffold stem loop is replaced with an RNA stem loop sequence from a heterologous RNA source with proximal 5′ and 3′ ends, such as, but not limited to stem loop sequences selected from MS2, Q β, U1 hairpin II, Uvsx, or PP7 stem loops. In some cases, the heterologous RNA stem loop of the gNA is capable of binding a protein, an RNA structure, a DNA sequence, or a small molecule.

[0113] d. Extended Stem Loop

[0114] In some embodiments of the CasX sgNAs of the disclosure, the scaffold stem loop is followed by the extended stem loop. In some embodiments, the extended stem comprises a synthetic tracr and crRNA fusion that is largely unbound by the CasX protein. In some embodiments, the extended stem loop can be highly malleable. In some embodiments, a single guide gRNA is made with a GAAA tetraloop linker or a GAGAAA linker between the tracr and crRNA in the extended stem loop. In some cases, the targeter and activator of a CasX sgNA are linked to one another by intervening nucleotides and the linker can have a length of from 3 to 20 nucleotides. In some embodiments of the CasX sgNAs of the disclosure, the extended stem is a large 32-bp loop that sits outside of the CasX protein in the ribonucleoprotein complex. An exemplary sequence of an extended stem loop sequence of a sgNA comprises the sequence GCGCUUAUUUAUCGGAGAGAAAUCCGAUAAAUAAGAAGC (SEQ ID NO: 21). In some embodiments, the extended stem loop comprises a GAGAAA spacer sequence. In some embodiments, the disclosure provides gNA variants wherein the extended stem loop is replaced with an RNA stem loop sequence from a heterologous RNA source with proximal 5′ and 3′ ends, such as, but not limited to stem loop sequences selected from MS2, Qβ, U1 hairpin II, Uvsx, or PP7 stem loops. In such cases, the heterologous RNA stem loop increases the stability of the gNA. In other embodiments, the disclosure provides gNA variants having an extended stem loop region comprising at least 10, at least 100, at least 500, at least 1000, or at least 10,000 nucleotides, or at least 10-10,000, at least 10-1000, or at least 10-100 nucleotides.

[0115] e. Targeting Sequence

[0116] In some embodiments of the gNAs of the disclosure, the extended stem loop is followed by a region that forms part of the triplex, and then the targeting sequence (or “spacer”) at the 3′ end of the gNA. The targeting sequence targets the CasX ribonucleoprotein holo complex to a specific region of the target nucleic acid sequence of the gene to be modified. Thus, for example, gNA targeting sequences of the disclosure have sequences complementarity to, and therefore can hybridize to, a portion of the HTT gene in a nucleic acid in a eukaryotic cell (e.g., a eukaryotic chromosome, chromosomal sequence, a eukaryotic RNA, etc.) as a component of the RNP when the TC PAM motif or any one of the PAM sequences TTC, ATC, GTC, or CTC is located 1 nucleotide 5′ to the non-target strand sequence complementary to the target sequence. The targeting sequence of a gNA can be modified so that the gNA can target a desired sequence of any desired target nucleic acid sequence, so long as the PAM sequence location is taken into consideration. In some embodiments, the gNA scaffold is 5′ of the targeting sequence, with the targeting sequence on the 3′ end of the gNA. In some embodiments, the PAM motif sequence recognized by the nuclease of the RNP is TC. In other embodiments, the PAM sequence recognized by the nuclease of the RNP is NTC.

[0117] In some embodiments, the targeting sequence of the gNA is complementary to a portion of a gene encoding a huntingtin protein. In some embodiments, the targeting sequence of a gNA is complementary to an HTT exon selected from the group consisting of exons 1-67. In other embodiments, the targeting sequence of the gNA is complementary to a region within or proximal to an exon comprising a duplication; e.g. the CAG repeats. In a particular embodiment, the targeting sequence is complementary to a sequence of exon 1 that is 5′ to the region of CAG repeats. In other embodiments, the targeting sequence of a gNA is specific for an HTT intronic region, an intron-exon junction of the HTT gene, or an intergenic region. In some embodiments, the targeting sequence of the gNA is complementary to a sequence comprising one or more single nucleotide polymorphisms (SNPs) of the HTT gene or its complement. SNPs that are within an HTT coding sequence or within an HTT non-coding sequence are both within the scope of the instant disclosure. Representative targeting sequences to SNPs known or believed to be associated with Huntington's disease are presented in Table 3A as SEQ ID NOS: 409-508. In some embodiments, the targeting sequence of the gNA is complementary to a region within or proximal to (e.g., within 40 nucleotides of) an exon comprising a deletion. In other embodiments, the disclosure contemplates use of combinations gNAs with targeting sequences that target a sequence within or proximal to (e.g., within 40 nucleotides of) the region of CAG repeats in exon 1. For example, in some embodiments, the disclosure contemplates use of a pair of targeting sequence in the CasX:gNA system wherein the targeting sequences are complementary to sequences that are 5′ and 3′ to the CAG sequence to be excised or replaced with a donor template.

[0118] In other embodiments, the targeting sequence of a gNA is specific for a junction of the exon, an intron, and/or a regulatory element of the gene. In those cases where the targeting sequence is specific for a regulatory element, such regulatory elements include, but are not limited to promoter regions, enhancer regions, intergenic regions, 5′ untranslated regions (5′ UTR), 3′ untranslated regions (3′ UTR), conserved elements, and regions comprising cis-regulatory elements. The promoter region is intended to encompass nucleotides within 5 kb of the initiation point of the encoding sequence or, in the case of gene enhancer elements or conserved elements, can be thousands of bp, hundreds of thousands of bp, or even millions of bp away from the encoding sequence of the gene of the target nucleic acid. In the foregoing, the targets are those in which the encoding gene of the target is intended to be knocked out or knocked down such that the targeted protein is not expressed or is expressed at a lower level in a cell.

[0119] In some embodiments, the targeting sequence of the gNA has between 14 and 35 consecutive nucleotides. In some embodiments, the targeting sequence has 14, 15, 16, 18, 18, 19, 20, 21, 22, 23 24, 25, 26, 27, 28, 29, 30, 31, 32, 33, 34 or 35 consecutive nucleotides. In some embodiments, the targeting sequence consists of 20 consecutive nucleotides. In some embodiments, the targeting sequence consists of 19 consecutive nucleotides. In some embodiments, the targeting sequence consists of 18 consecutive nucleotides. In some embodiments, the targeting sequence consists of 17 consecutive nucleotides. In some embodiments, the targeting sequence consists of 16 consecutive nucleotides. In some embodiments, the targeting sequence consists of 15 consecutive nucleotides. In some embodiments, the targeting sequence has 14, 15, 16, 17, 18, 19, 20, 21, 22, 23, 24, 25, 26, 27, 28, 29, 30, 31, 32, 33, 34 or 35 consecutive nucleotides and the targeting sequence can comprise 0 to 5, 0 to 4, 0 to 3, or 0 to 2 mismatches relative to the target nucleic acid sequence and retain sufficient binding specificity such that the RNP comprising the gNA comprising the targeting sequence can form a complementary bond with respect to the target nucleic acid.

[0120] Representative, but non-limiting examples of targeting sequences for inclusion in the gNA of the disclosure utilized with the CasX:gNA system for editing of the HTT gene are presented as SEQ ID NOs: 409-2100 and 2286-39966, representing targeting sequences for HTT target nucleic acid. In one embodiment, the targeting sequence of the gNA comprises a sequence having at least about 65%, at least about 75%, at least about 85%, or at least about 95% identity to a sequence selected from the group consisting of SEQ ID NOs: 409-2100 and 2286-39966. In another embodiment, the targeting sequence of the gNA consists of a sequence selected from the group consisting of SEQ ID NOs: 409-2100 and 2286-39966. In the foregoing embodiments, thymine (T) nucleotides can be substituted for one or more or all of the uracil (U) nucleotides in any of the targeting sequences such that the gNA can be a gDNA or a gRNA, or a chimera of RNA and DNA. In some embodiments, a targeting sequence of SEQ ID NOs: 409-2100 and 2286-39966 has at least 1, 2, 3, 4, 5, or 6 or more thymine nucleotides substituted for uracil nucleotides. In other embodiments, a gNA, gRNA, or gDNA of the disclosure comprises 1, 2, 3 or more targeting sequences of SEQ ID NOs: 409-2100 and 2286-39966], or targeting sequences that are at least 50% identical, at least 55% identical, at least 60% identical, at least 65% identical, at least 70% identical, at least 75% identical, at least 80% identical, at least 85% identical, at least 90% identical, at least 95% identical to one or more sequences of SEQ ID NOs: 409-2100 and 2286-39966.

[0121] In some embodiments, the CasX:gNA system comprises a first gNA and further comprises a second (and optionally a third, fourth, fifth, or more) gNA, wherein the second gNA or additional gNA has a targeting sequence complementary to a different or overlapping portion of the target nucleic acid sequence compared to the targeting sequence of the first gNA such that multiple points in the target nucleic acid are targeted, and, for example, multiple breaks are introduced in the target nucleic acid by the CasX. It will be understood that in such cases, the second or additional gNA is complexed with an additional copy of the CasX protein. By selection of the targeting sequences of the gNA, defined regions of the target nucleic acid sequence bracketing a particular location within the target nucleic acid can be modified or edited using the CasX:gNA systems described herein, including facilitating the insertion of a donor template or excision of a region or exon comprising a mutation of the HTT gene.

[0122] f. gNA Scaffolds

[0123] In some embodiments, a CasX reference gRNA comprises a sequence isolated or derived from Deltaproteobacter. In some embodiments, the sequence is a CasX tracrRNA sequence. Exemplary CasX reference tracrRNA sequences isolated or derived from Deltaproteobacter may include: ACAUCUGGCGCGUUUAUUCCAUUACUUUGGAGCCAGUCCCAGCGACUAUGUCGU AUGGACGAAGCGCUUAUUUAUCGGAGA (SEQ ID NO: 22) and ACAUCUGGCGCGUUUAUUCCAUUACUUUGGAGCCAGUCCCAGCGACUAUGUCGU AUGGACGAAGCGCUUAUUUAUCGG (SEQ ID NO: 23). Exemplary crRNA sequences isolated or derived from Deltaproteobacter may comprise a sequence of CCGAUAAGUAAAACGCAUCAAAG (SEQ ID NO: 24). In some embodiments, a CasX reference gNA comprises a sequence at least 60% identical, at least 65% identical, at least 70% identical, at least 75% identical, at least 80% identical, at least 81% identical, at least 82% identical, at least 83% identical, at least 84% identical, at least 85% identical, at least 86% identical, at least 86% identical, at least 87% identical, at least 88% identical, at least 89% identical, at least 89% identical, at least 90% identical, at least 91% identical, at least 92% identical, at least 93% identical, at least 94% identical, at least 95% identical, at least 96% identical, at least 97% identical, at least 98% identical, at least 99% identical, at least 99.5% identical or 100% identical to a sequence isolated or derived from Deltaproteobacter.

[0124] In some embodiments, a CasX reference guide RNA comprises a sequence isolated or derived from Planctomycetes. In some embodiments, the sequence is a CasX tracrRNA sequence. Exemplary CasX reference tracrRNA sequences isolated or derived from Planctomycetes may include: UACUGGCGCUUUUAUCUCAUUACUUUGAGAGCCAUCACCAGCGACUAUGUCGUA UGGGUAAAGCGCUUAUUUAUCGGAGA (SEQ ID NO: 25) and UACUGGCGCUUUUAUCUCAUUACUUUGAGAGCCAUCACCAGCGACUAUGUCGUA UGGGUAAAGCGCUUAUUUAUCGG (SEQ ID NO: 26). Exemplary crRNA sequences isolated or derived from Planctomycetes may comprise a sequence of UCUCCGAUAAAUAAGAAGCAUCAAAG (SEQ ID NO: 27). In some embodiments, a CasX reference gNA comprises a sequence at least 60% identical, at least 65% identical, at least 70% identical, at least 75% identical, at least 80% identical, at least 81% identical, at least 82% identical, at least 83% identical, at least 84% identical, at least 85% identical, at least 86% identical, at least 86% identical, at least 87% identical, at least 88% identical, at least 89% identical, at least 89% identical, at least 90% identical, at least 91% identical, at least 92% identical, at least 93% identical, at least 94% identical, at least 95% identical, at least 96% identical, at least 97% identical, at least 98% identical, at least 99% identical, at least 99.5% identical or 100% identical to a sequence isolated or derived from Planctomycetes.

[0125] In some embodiments, a CasX reference gNA comprises a sequence isolated or derived from Candidatus sungbacteria. In some embodiments, the sequence is a CasX tracrRNA sequence. Exemplary CasX reference tracrRNA sequences isolated or derived from Candidatus sungbacteria may comprise sequences of: GUUUACACACUCCCUCUCAUAGGGU (SEQ ID NO: 28), GUUUACACACUCCCUCUCAUGAGGU (SEQ ID NO: 29), UUUUACAUACCCCCUCUCAUGGGAU (SEQ ID NO: 30) and GUUUACACACUCCCUCUCAUGGGGG (SEQ ID NO: 31). In some embodiments, a CasX reference guide RNA comprises a sequence at least 60% identical, at least 65% identical, at least 70% identical, at least 75% identical, at least 80% identical, at least 81% identical, at least 82% identical, at least 83% identical, at least 84% identical, at least 85% identical, at least 86% identical, at least 86% identical, at least 87% identical, at least 88% identical, at least 89% identical, at least 89% identical, at least 90% identical, at least 91% identical, at least 92% identical, at least 93% identical, at least 94% identical, at least 95% identical, at least 96% identical, at least 97% identical, at least 98% identical, at least 99% identical, at least 99.5% identical or 100% identical to a sequence isolated or derived from Candidatus sungbacteria.

[0126] Table 1 provides the sequences of reference gRNAs tracr and scaffold sequences. In some embodiments, the disclosure provides gNA sequences wherein the gNA has a scaffold comprising a sequence having at least one nucleotide modification relative to a reference gNA sequence having a sequence of any one of SEQ ID NOS: 4-16 of Table 1. It will be understood that in those embodiments wherein a vector comprises a DNA encoding sequence for a gNA, or where a gNA is a gDNA or a chimera of RNA and DNA, that thymine (T) bases can be substituted for the uracil (U) bases of any of the gNA sequence embodiments described herein, including the sequences of Table 1 and Table 2.

TABLE 1
Reference gRNA sequences

| SEQ ID NO. | Nucleotide Sequence |
|---|---|
| 4 | ACAUCUGGCGCGUUUAUUCCAUUACUUUGGAGCCAGUCCCAGCGACUAUGUCG |
| | UAUGGACGAAGCGCUUAUUUAUCGGAGAGAAACCGAUAAGUAAAACGCAUCAA |
| | AG |
| 5 | UACUGGCGCUUUUAUCUCAUUACUUUGAGAGCCAUCACCAGCGACUAUGUCGU |
| | AUGGGUAAAGCGCUUAUUUAUCGGAGAGAAAUCCGAUAAAUAAGAAGCAUCAA |
| | AG |
| 6 | ACAUCUGGCGCGUUUAUUCCAUUACUUUGGAGCCAGUCCCAGCGACUAUGUCG |
| | UAUGGACGAAGCGCUUAUUUAUCGGAGA |
| 7 | ACAUCUGGCGCGUUUAUUCCAUUACUUUGGAGCCAGUCCCAGCGACUAUGUCG |
| | UAUGGACGAAGCGCUUAUUUAUCGG |
| 8 | UACUGGCGCUUUUAUCUCAUUACUUUGAGAGCCAUCACCAGCGACUAUGUCGU |
| | AUGGGUAAAGCGCUUAUUUAUCGGAGA |
| 9 | UACUGGCGCUUUUAUCUCAUUACUUUGAGAGCCAUCACCAGCGACUAUGUCGU |
| | AUGGGUAAAGCGCUUAUUUAUCGG |
| 10 | GUUUACACACUCCCUCUCAUAGGGU |
| 11 | GUUUACACACUCCCUCUCAUGAGGU |
| 12 | UUUUACAUACCCCCUCUCAUGGGAU |
| 13 | GUUUACACACUCCCUCUCAUGGGGG |
| 14 | CCAGCGACUAUGUCGUAUGG |
| 15 | GCGCUUAUUUAUCGGAGAGAAAUCCGAUAAAUAAGAAGC |
| 16 | GGCGCUUUUAUCUCAUUACUUUGAGAGCCAUCACCAGCGACUAUGUCGUAUGG |
| | GUAAAGCGCUUAUUUAUCGGA |

[0127] g. gNA Variants

[0128] In another aspect, the disclosure relates to guide nucleic acid variants (referred to herein alternatively as “gNA variant” or “gRNA variant”), which comprise one or more modifications relative to a reference gRNA scaffold. As used herein, “scaffold” refers to all parts to the gNA necessary for gNA function with the exception of the spacer sequence.

[0129] In some embodiments, a gNA variant comprises one or more nucleotide substitutions, insertions, deletions, or swapped or replaced regions relative to a reference gRNA sequence of the disclosure. In some embodiments, a mutation can occur in any region of a reference gRNA to produce a gNA variant. In some embodiments, the scaffold of the gNA variant sequence has at least 20%, at least 30%, at least 40%, at least 50%, at least 60%, or at least 70%, at least 80%, at least 85%, at least about 90%, at least about 95%, at least about 96%, at least about 97%, at least about 98%, or at least about 99% identity to the sequence of SEQ ID NO:4 or SEQ ID NO:5.

[0130] In some embodiments, a gNA variant comprises one or more nucleotide changes within one or more regions of the reference gRNA that improve a characteristic of the reference gRNA. Exemplary regions include the RNA triplex, the pseudoknot, the scaffold stem loop, and the extended stem loop. In some cases, the variant scaffold stem further comprises a bubble. In other cases, the variant scaffold further comprises a triplex loop region. In still other cases, the variant scaffold further comprises a 5′ unstructured region. In one embodiment, the gNA variant scaffold comprises a scaffold stem loop having at least 60% sequence identity to SEQ ID NO:14. In another embodiment, the gNA variant comprises a scaffold stem loop having the sequence of CCAGCGACUAUGUCGUAGUGG (SEQ ID NO: 32). In another embodiment, the disclosure provides a gNA scaffold comprising, relative to SEQ ID NO:5, a C18G substitution, a G55 insertion, a U1 deletion, and a modified extended stem loop in which the original 6 nt loop and 13 most-loop-proximal base pairs (32 nucleotides total) are replaced by a Uvsx hairpin (4 nt loop and 5 loop-proximal base pairs; 14 nucleotides total) and the loop-distal base of the extended stem was converted to a fully base-paired stem contiguous with the new Uvsx hairpin by deletion of the A99 and substitution of G64U. In the foregoing embodiment, the gNA scaffold comprises the sequence

(SEQ ID NO: 2238)
ACUGGCGCUUUUAUCUGAUUACUUUGAGAGCCAUCACCAGCGACUAUGUC
GUAGUGGGUAAAGCUCCCUCUUCGGAGGGAGCAUCAAAG.

[0131] All gNA variants that have one or more improved functions or characteristics, or add one or more new functions when the variant gNA is compared to a reference gRNA described herein, are envisaged as within the scope of the disclosure. A representative example of such a gNA variant is guide 174 (SEQ ID NO: 2238), the design of which is described in the Examples. In some embodiments, the gNA variant adds a new function to the RNP comprising the gNA variant. In some embodiments, the gNA variant has an improved characteristic selected from: improved stability; improved solubility; improved transcription of the gNA; improved resistance to nuclease activity; increased folding rate of the gNA; decreased side product formation during folding; increased productive folding; improved binding affinity to a CasX protein; improved binding affinity to a target DNA when complexed with a CasX protein; improved gene editing when complexed with a CasX protein; improved specificity of editing when complexed with a CasX protein; and improved ability to utilize a greater spectrum of one or more PAM sequences, including ATC, CTC, GTC, or TTC, in the editing of target DNA when complexed with a CasX protein, or any combination thereof. In some cases, the one or more of the improved characteristics of the gNA variant is at least about 1.1 to about 100,000-fold improved relative to the reference gNA of SEQ ID NO:4 or SEQ ID NO:5. In other cases, the one or more improved characteristics of the gNA variant is at least about 1.1, at least about 10, at least about 100, at least about 1000, at least about 10,000, at least about 100,000-fold or more improved relative to the reference gNA of SEQ ID NO:4 or SEQ ID NO:5. In other cases, the one or more of the improved characteristics of the gNA variant is about 1.1 to 100,00-fold, about 1.1 to 10,00-fold, about 1.1 to 1,000-fold, about 1.1 to 500-fold, about 1.1 to 100-fold, about 1.1 to 50-fold, about 1.1 to 20-fold, about 10 to 100,00-fold, about 10 to 10,00-fold, about 10 to 1,000-fold, about 10 to 500-fold, about 10 to 100-fold, about 10 to 50-fold, about 10 to 20-fold, about 2 to 70-fold, about 2 to 50-fold, about 2 to 30-fold, about 2 to 20-fold, about 2 to 10-fold, about 5 to 50-fold, about 5 to 30-fold, about 5 to 10-fold, about 100 to 100,00-fold, about 100 to 10,00-fold, about 100 to 1,000-fold, about 100 to 500-fold, about 500 to 100,00-fold, about 500 to 10,00-fold, about 500 to 1,000-fold, about 500 to 750-fold, about 1,000 to 100,00-fold, about 10,000 to 100,00-fold, about 20 to 500-fold, about 20 to 250-fold, about 20 to 200-fold, about 20 to 100-fold, about 20 to 50-fold, about 50 to 10,000-fold, about 50 to 1,000-fold, about 50 to 500-fold, about 50 to 200-fold, or about 50 to 100-fold, improved relative to the reference gNA of SEQ ID NO:4 or SEQ ID NO:5. In other cases, the one or more improved characteristics of the gNA variant is about 1.1-fold, 1.2-fold, 1.3-fold, 1.4-fold, 1.5-fold, 1.6-fold, 1.7-fold, 1.8-fold, 1.9-fold, 2-fold, 3-fold, 4-fold, 5-fold, 6-fold, 7-fold, 8-fold, 9-fold, 10-fold, 11-fold, 12-fold, 13-fold, 14-fold, 15-fold, 16-fold, 17-fold, 18-fold, 19-fold, 20-fold, 25-fold, 30-fold, 40-fold, 45-fold, 50-fold, 55-fold, 60-fold, 70-fold, 80-fold, 90-fold, 100-fold, 110-fold, 120-fold, 130-fold, 140-fold, 150-fold, 160-fold, 170-fold, 180-fold, 190-fold, 200-fold, 210-fold, 220-fold, 230-fold, 240-fold, 250-fold, 260-fold, 270-fold, 280-fold, 290-fold, 300-fold, 310-fold, 320-fold, 330-fold, 340-fold, 350-fold, 360-fold, 370-fold, 380-fold, 390-fold, 400-fold, 425-fold, 450-fold, 475-fold, or 500-fold improved relative to the reference gNA of SEQ ID NO:4 or SEQ ID NO:5.

[0132] In some embodiments, a gNA variant can be created by subjecting a reference gRNA to a one or more mutagenesis methods, such as the mutagenesis methods described herein, below, which may include Deep Mutational Evolution (DME), deep mutational scanning (DMS), error prone PCR, cassette mutagenesis, random mutagenesis, staggered extension PCR, gene shuffling, or domain swapping, in order to generate the gNA variants of the disclosure. The activity of reference gRNAs may be used as a benchmark against which the activity of gNA variants are compared, thereby measuring improvements in function of gNA variants. In other embodiments, a reference gRNA may be subjected to one or more deliberate, targeted mutations, substitutions, or domain swaps in order to produce a gNA variant, for example a rationally designed variant. Exemplary gRNA variants produced by such methods are described in the Examples and representative sequences of gNA scaffolds are presented in Table 2 as SEQ ID NOS: 2101-2285.

[0133] In some embodiments, the gNA variant comprises one or more modifications compared to a reference guide nucleic acid scaffold sequence, wherein the one or more modification is selected from: at least one nucleotide substitution in a region of the gNA variant; at least one nucleotide deletion in a region of the gNA variant; at least one nucleotide insertion in a region of the gNA variant; a substitution of all or a portion of a region of the gNA variant; a deletion of all or a portion of a region of the gNA variant; or any combination of the foregoing. In some cases, the modification is a substitution of 1 to 15 consecutive or non-consecutive nucleotides in the gNA variant in one or more regions. In other cases, the modification is a deletion of 1 to 10 consecutive or non-consecutive nucleotides in the gNA variant in one or more regions. In other cases, the modification is an insertion of 1 to 10 consecutive or non-consecutive nucleotides in the gNA variant in one or more regions. In other cases, the modification is a substitution of the scaffold stem loop or the extended stem loop with an RNA stem loop sequence from a heterologous RNA source with proximal 5′ and 3′ ends. In some cases, a gNA variant of the disclosure comprises two or more modifications in one region. In other cases, a gNA variant of the disclosure comprises modifications in two or more regions. In other cases, a gNA variant comprises any combination of the foregoing modifications described in this paragraph.

[0134] In some embodiments, a 5′ G is added to a gNA variant sequence for expression in vivo, as transcription from a U6 promoter is more efficient and more consistent with regard to the start site when the +1 nucleotide is a G. In other embodiments, two 5′ Gs are added to a gNA variant sequence for in vitro transcription to increase production efficiency, as T7 polymerase strongly prefers a G in the +1 position and a purine in the +2 position. In some cases, the 5′ G bases are added to the reference scaffolds of SEQ ID NOS: 4-16 as set forth in Table 1. In other cases, the 5′ G bases are added to the variant scaffolds of SEQ ID NOS: 2101-2285 as set forth in Table 2.

[0135] Table 2 provides exemplary gNA variant scaffold sequences. In Table 2, (−) indicates a deletion at the specified position(s) relative to the reference sequence of SEQ ID NO:5, (+) indicates an insertion of the specified base(s) at the position indicated relative to SEQ ID NO:5, (:) indicates the range of bases at the specified start:stop coordinates of a deletion or substitution relative to SEQ ID NO:5, and multiple insertions, deletions or substitutions are separated by commas; e.g., A14C, U17G. In some embodiments, the gNA variant scaffold comprises any one of the sequences listed in Table 2, i.e., SEQ ID NOS:2101-2285, or a sequence having at least about 50%, at least about 60%, at least about 70%, at least about 80%, at least about 90%, at least about 95%, at least about 95%, at least about 96%, at least about 97%, at least about 98%, at least about 99% sequence identity thereto. It will be understood that in those embodiments wherein a vector comprises a DNA encoding sequence for a gNA, or where a gNA is a gDNA or a chimera of RNA and DNA, that thymine (T) bases can be substituted for the uracil (U) bases of any of the gNA sequence embodiments described herein.

TABLE 2
Exemplary gNA Scaffold Sequences

| SEQ | | |
|---|---|---|
| ID | NAME or | |
| NO: | Modification | NUCLEOTIDE SEQUENCE |
| 2101 | phage | UACUGGCGCUUUUAUCUCAUUACUUUGAGAGCCAUCACCAGCGACUA |
| | replication | UGUCGUAUGGGUAAAGCGCAGGUGGGACGACCUCUCGGUCGUCCUAU |
| | stable | CUGAAGCAUCAAAG |
| 2102 | Kissing | UACUGGCGCUUUUAUCUCAUUACUUUGAGAGCCAUCACCAGCGACUA |
| | loop_b1 | UGUCGUAUGGGUAAAGCGCUGCUCGACGCGUCCUCGAGCAGAAGCAU |
| | | CAAAG |
| 2103 | Kissing | UACUGGCGCUUUUAUCUCAUUACUUUGAGAGCCAUCACCAGCGACUA |
| | loop_a | UGUCGUAUGGGUAAAGCGCUGCUCGCUCCGUUCGAGCAGAAGCAUCA |
| | | AAG |
| 2104 | 32: uvsX | GUACUGGCGCUUUUAUCUCAUUACUUUGAGAGCCAUCACCAGCGACU |
| | hairpin | AUGUCGUAUGGGUAAAGCGCCCUCUUCGGAGGGAAGCAUCAAAG |
| 2105 | PP7 | UACUGGCGCUUUUAUCUCAUUACUUUGAGAGCCAUCACCAGCGACUA |
| | | UGUCGUAUGGGUAAAGCGCAGGAGUUUCUAUGGAAACCCUGAAGCAU |
| | | CAAAG |
| 2106 | 64: trip mut, | GUACUGGCGCCUUUAUCUCAUUACUUUGAGAGCCAUCACCAGCGACU |
| | extended stem | AUGUCGUAUGGGUAAAGCGCUUACGGACUUCGGUCCGUAAGAAGCAU |
| | truncation | CAAAG |
| 2107 | hyperstable | UACUGGCGCUUUUAUCUCAUUACUUUGAGAGCCAUCACCAGCGACUA |
| | tetraloop | UGUCGUAUGGGUAAAGCGCUGCGCUUGCGCAGAAGCAUCAAAG |
| 2108 | C18G | UACUGGCGCUUUUAUCUGAUUACUUUGAGAGCCAUCACCAGCGACUA |
| | | UGUCGUAUGGGUAAAGCGCUUAUUUAUCGGAGAGAAAUCCGAUAAAU |
| | | AAGAAGCAUCAAAG |
| 2109 | U17G | UACUGGCGCUUUUAUCGCAUUACUUUGAGAGCCAUCACCAGCGACUA |
| | | UGUCGUAUGGGUAAAGCGCUUAUUUAUCGGAGAGAAAUCCGAUAAAU |
| | | AAGAAGCAUCAAAG |
| 2110 | CUUCGG | UACUGGCGCUUUUAUCUCAUUACUUUGAGAGCCAUCACCAGCGACUA |
| | loop | UGUCGUAUGGGUAAAGCGCUUAUUUAUCGGAGACUUCGGUCCGAUAA |
| | | AUAAGAAGCAUCAAAG |
| 2111 | MS2 | UACUGGCGCUUUUAUCUCAUUACUUUGAGAGCCAUCACCAGCGACUA |
| | | UGUCGUAUGGGUAAAGCGCACAUGAGGAUUACCCAUGUGAAGCAUCA |
| | | AAG |
| 2112 | −1, A2G, −78, | GCUGGCGCUUUUAUCUCAUUACUUUGAGAGCCAUCACCAGCGACUAU |
| | G77U | GUCGUAUGGGUAAAGCGCUUAUUUAUCGUGAGAAAUCCGAUAAAUAA |
| | | GAAGCAUCAAAG |
| 2113 | QB | UACUGGCGCUUUUAUCUCAUUACUUUGAGAGCCAUCACCAGCGACUA |
| | | UGUCGUAUGGGUAAAGCGCUGCAUGUCUAAGACAGCAGAAGCAUCAA |
| | | AG |
| 2114 | 45, 44 hairpin | UACUGGCGCUUUUAUCUCAUUACUUUGAGAGCCAUCACCAGCGACUA |
| | | UGUCGUAUGGGUAAAGCGCAGGGCUUCGGCCGAAGCAUCAAAG |
| 2115 | U1A | UACUGGCGCUUUUAUCUCAUUACUUUGAGAGCCAUCACCAGCGACUA |
| | | UGUCGUAUGGGUAAAGCGCAAUCCAUUGCACUCCGGAUUGAAGCAUC |
| | | AAAG |
| 2116 | A14C, U17G | UACUGGCGCUUUUCUCGCAUUACUUUGAGAGCCAUCACCAGCGACUA |
| | | UGUCGUAUGGGUAAAGCGCUUAUUUAUCGGAGAGAAAUCCGAUAAAU |
| | | AAGAAGCAUCAAAG |
| 2117 | CUUCGG | UACUGGCGCUUUUAUCUCAUUACUUUGAGAGCCAUCACCAGCGACUA |
| | loop modified | UGUCGUAUGGGUAAAGCGCUUAUUUAUCGGACUUCGGUCCGAUAAAU |
| | | AAGAAGCAUCAAAG |
| 2118 | Kissing | UACUGGCGCUUUUAUCUCAUUACUUUGAGAGCCAUCACCAGCGACUA |
| | loop_b2 | UGUCGUAUGGGUAAAGCGCUGCUCGUUUGCGGCUACGAGCAGAAGCA |
| | | UCAAAG |
| 2119 | −76:78, −83:87 | UACUGGCGCUUUUAUCUCAUUACUUUGAGAGCCAUCACCAGCGACUA |
| | | UGUCGUAUGGGUAAAGCGCUUAUUUAUCGAGAGAUAAAUAAGAAGCA |
| | | UCAAAG |
| 2120 | −4 | UACGGCGCUUUUAUCUCAUUACUUUGAGAGCCAUCACCAGCGACUAU |
| | | GUCGUAUGGGUAAAGCGCUUAUUUAUCGGAGAGAAAUCCGAUAAAUA |
| | | AGAAGCAUCAAAG |
| 2121 | extended stem | UACUGGCGCCUUUUAUCUCAUUACUUUGAGAGCCAUCACCAGCGACU |
| | truncation | AUGUCGUAUGGGUAAAGCGCUUACGGACUUCGGUCCGUAAGAAGCAU |
| | | CAAAG |
| 2122 | C55 | UACUGGCGCUUUUAUCUCAUUACUUUGAGAGCCAUCACCAGCGACUA |
| | | UGUCGUAUCGGUAAAGCGCUUAUUUAUCGGAGAGAAAUCCGAUAAAU |
| | | AAGAAGCAUCAAAG |
| 2123 | trip mut | UACUGGCGCCUUUAUCUCAUUACUUUGAGAGCCAUCACCAGCGACUA |
| | | UGUCGUAUGGGUAAAGCGCUUAUUUAUCGGACUUCGGUCCGAUAAAU |
| | | AAGAAGCAUCAAAG |
| 2124 | −76:78 | UACUGGCGCUUUUAUCUCAUUACUUUGAGAGCCAUCACCAGCGACUA |
| | | UGUCGUAUGGGUAAAGCGCUUAUUUAUCGAGAAAUCCGAUAAAUAAG |
| | | AAGCAUCAAAG |
| 2125 | −1:5 | GCGCUUUUAUCUCAUUACUUUGAGAGCCAUCACCAGCGACUAUGUCG |
| | | UAUGGGUAAAGCGCUUAUUUAUCGGAGAGAAAUCCGAUAAAUAAGAA |
| | | GCAUCAAAG |
| 2126 | −83:87 | UACUGGCGCUUUUAUCUCAUUACUUUGAGAGCCAUCACCAGCGACUA |
| | | UGUCGUAUGGGUAAAGCGCUUAUUUAUCGGAGAGAGAUAAAUAAGAA |
| | | GCAUCAAAG |
| 2127 | =+G28, | UACUGGCGCUUUUAUCUCAUUACUUUGGAGAGCCAUCACCAGCGACU |
| | A82U, −84, | AUGUCGUAUGGGUAAAGCGCUUAUUUAUCGGAGAGUAUCCGAUAAAU |
| | | AAGAAGCAUCAAAG |
| 2128 | =+51U | UACUGGCGCUUUUAUCUCAUUACUUUGAGAGCCAUCACCAGCGACUA |
| | | UGUUCGUAUGGGUAAAGCGCUUAUUUAUCGGAGAGAAAUCCGAUAAA |
| | | UAAGAAGCAUCAAAG |
| 2129 | −1:4, +G5A, | AGCGCUUUUAUCUCAUUACUUUGAGAGCCAUCACCAGCGACUAUGUC |
| | +G86, | GUAUGGGUAAAGCGCUUAUUUAUCGGAGAGAAAUGCCGAUAAAUAAG |
| | | AAGCAUCAAAG |
| 2130 | =+A94 | UACUGGCGCUUUUAUCUCAUUACUUUGAGAGCCAUCACCAGCGACUA |
| | | UGUCGUAUGGGUAAAGCGCUUAUUUAUCGGAGAGAAAUCCGAUAAAA |
| | | UAAGAAGCAUCAAAG |
| 2131 | =+G72 | UACUGGCGCUUUUAUCUCAUUACUUUGAGAGCCAUCACCAGCGACUA |
| | | UGUCGUAUGGGUAAAGCGCUUAUUGUAUCGGAGAGAAAUCCGAUAAA |
| | | UAAGAAGCAUCAAAG |
| 2132 | shorten front, | GCGCUUUUAUCUCAUUACUUUGAGAGCCAUCACCAGCGACUAUGUCG |
| | CUUCGG | UAUGGGUAAAGCGCUUAUUUAUCGGACUUCGGUCCGAUAAAUAAGCG |
| | loop modified, | CAUCAAAG |
| | extend | |
| | extended | |
| 2133 | A14C | UACUGGCGCUUUUCUCUCAUUACUUUGAGAGCCAUCACCAGCGACUA |
| | | UGUCGUAUGGGUAAAGCGCUUAUUUAUCGGAGAGAAAUCCGAUAAAU |
| | | AAGAAGCAUCAAAG |
| 2134 | −1:3, +G3 | GUGGCGCUUUUAUCUCAUUACUUUGAGAGCCAUCACCAGCGACUAUG |
| | | UCGUAUGGGUAAAGCGCUUAUUUAUCGGAGAGAAAUCCGAUAAAUAA |
| | | GAAGCAUCAAAG |
| 2135 | =+C45, +U46 | UACUGGCGCUUUUAUCUCAUUACUUUGAGAGCCAUCACCAGCGACCU |
| | | UAUGUCGUAUGGGUAAAGCGCUUAUUUAUCGGAGAGAAAUCCGAUAA |
| | | AUAAGAAGCAUCAAAG |
| 2136 | CUUCGG | GAUGGCGCUUUUAUCUCAUUACUUUGAGAGCCAUCACCAGCGACUAU |
| | loop modified, | GUCGUAUGGGUAAAGCGCUUAUUUAUCGGACUUCGGUCCGAUAAAUA |
| | fun start | AGAAGCAUCAAAG |
| 2137 | −93:94 | UACUGGCGCUUUUAUCUCAUUACUUUGAGAGCCAUCACCAGCGACUA |
| | | UGUCGUAUGGGUAAAGCGCUUAUUUAUCGGAGAGAAAUCCGAUAAAA |
| | | GAAGCAUCAAAG |
| 2138 | =+U45 | UACUGGCGCUUUUAUCUCAUUACUUUGAGAGCCAUCACCAGCGAUCU |
| | | AUGUCGUAUGGGUAAAGCGCUUAUUUAUCGGAGAGAAAUCCGAUAAA |
| | | UAAGAAGCAUCAAAG |
| 2139 | −69, −94 | UACUGGCGCUUUUAUCUCAUUACUUUGAGAGCCAUCACCAGCGACUA |
| | | UGUCGUAUGGGUAAAGGCUUAUUUAUCGGAGAGAAAUCCGAUAAAAA |
| | | GAAGCAUCAAAG |
| 2140 | −94 | UACUGGCGCUUUUAUCUCAUUACUUUGAGAGCCAUCACCAGCGACUA |
| | | UGUCGUAUGGGUAAAGCGCUUAUUUAUCGGAGAGAAAUCCGAUAAAA |
| | | AGAAGCAUCAAAG |
| 2141 | modified | UACUGGCGCUUUAUCUCAUUACUUUGAGAGCCAUCACCAGCGACUAU |
| | CUUCGG, | GUCGUAUGGGUAAAGCGCUUAUUUAUCGGACUUCGGUCCGAUAAAUA |
| | minus U in 1 st | AGAAGCAUCAAAG |
| | triplex | |
| 2142 | −1:4, +C4, | CGGCGCUUUUCUCGCAUUACUUUGAGAGCCAUCACCAGCGACUAUGU |
| | A14C, U17G, | CGUAUGGGUAAAGCGCUUAUUGUAUCGAGAGAUAAAUAAGAAGCAUC |
| | +G72, −76:78, | AAAG |
| | −83:87 | |
| 2143 | U1C, −73 | CACUGGCGCUUUUAUCUCAUUACUUUGAGAGCCAUCACCAGCGACUA |
| | | UGUCGUAUGGGUAAAGCGCUUAUUUUCGGAGAGAAAUCCGAUAAAUA |
| | | AGAAGCAUCAAAG |
| 2144 | Scaffold | UACUGGCGCUUUAUCUCAUUACUUUGAGAGCCAUCACCAGCGACUUC |
| | uuCG, stem | GGUCGUAUGGGUAAAGCGCUUAUGUAUCGGCUUCGGCCGAUACAUAA |
| | uuCG. Stem | GAAGCAUCAAAG |
| | swap, t | |
| | shorten | |
| 2145 | Scaffold | UACUGGCGCUUUUAUCUCAUUACUUUGAGAGCCAUCACCAGCGACUU |
| | uuCG, stem | CGGUCGUAUGGGUAAAGCGCUUAUGUAUCGGCUUCGGCCGAUACAUA |
| | uuCG. Stem | AGAAGCAUCAAAG |
| | swap | |
| 2146 | =+G60 | UACUGGCGCUUUUAUCUCAUUACUUUGAGAGCCAUCACCAGCGACUA |
| | | UGUCGUAUGGGUGAAAGCGCUUAUUUAUCGGAGAGAAAUCCGAUAAA |
| | | UAAGAAGCAUCAAAG |
| 2147 | no stem | UACUGGCGCUUUUAUCUCAUUACUUUGAGAGCCAUCACCAGCGACUU |
| | Scaffold | CGGUCGUAUGGGUAAAG |
| | uuCG | |
| 2148 | no stem | GAUGGGCUUUUAUCUCAUUACUUUGAGAGCCAUCACCAGCGACUUCG |
| | Scaffold | GUCGUAUGGGUAAAG |
| | uuCG, fun | |
| | start | |
| 2149 | Scaffold | GAUGGGCUUUUAUCUCAUUACUUUGAGAGCCAUCACCAGCGACUUCG |
| | uuCG, stem | GUCGUAUGGGUAAAGCGCUUAUUUAUCGGCUUCGGCCGAUAAAUAAG |
| | uuCG, fun | AAGCAUCAAAG |
| | start | |
| 2150 | Pseudoknots | UACUGGCGCUUUUAUCUCAUUACUUUGAGAGCCAUCACCAGCGACUA |
| | | UGUCGUAUGGGUAAAGCGCUACACUGGGAUCGCUGAAUUAGAGAUCG |
| | | GCGUCCUUUCAUUCUAUAUACUUUGGAGUUUUAAAAUGUCUCUAAGU |
| | | ACAGAAGCAUCAAAG |
| 2151 | Scaffold | GGCGCUUUUAUCUCAUUACUUUGAGAGCCAUCACCAGCGACUUCGGU |
| | uuCG, stem | CGUAUGGGUAAAGCGCUUAUUUAUCGGCUUCGGCCGAUAAAUAAGAA |
| | uuCG | GCAUCAAAG |
| 2152 | Scaffold | GCUGGCGCUUUUAUCUCAUUACUUUGAGAGCCAUCACCAGCGACUUC |
| | uuCG, stem | GGUCGUAUGGGUAAAGCGCUUAUUUAUCGGCUUCGGCCGAUAAAUAA |
| | uuCG, no start | GAAGCAUCAAAG |
| 2153 | Scaffold | UACUGGCGCUUUUAUCUCAUUACUUUGAGAGCCAUCACCAGCGACUU |
| | uuCG | CGGUCGUAUGGGUAAAGCGCUUAUUUAUCGGAGAGAAAUCCGAUAAA |
| | | UAAGAAGCAUCAAAG |
| 2154 | =+GCUC36 | UACUGGCGCUUUUAUCUCAUUACUUUGAGAGCCAUGCUCCACCAGCG |
| | | ACUAUGUCGUAUGGGUAAAGCGCUUAUUUAUCGGAGAGAAAUCCGAU |
| | | AAAUAAGAAGCAUCAAAG |
| 2155 | G quadriplex | UACUGGCGCUUUUAUCUCAUUACUUUGAGAGCCAUCACCAGCGACUA |
| | telomere | UGUCGUAUGGGUAAAGCGGGGUUAGGGUUAGGGUUAGGGAAGCAUCA |
| | basket + ends | AAG |
| 2156 | G quadriplex | UACUGGCGCUUUUAUCUCAUUACUUUGAGAGCCAUCACCAGCGACUA |
| | M3q | UGUCGUAUGGGUAAAGCGGAGGGAGGGAGGGAGAGGGAAAGCAUCAA |
| | | AG |
| 2157 | G quadriplex | UACUGGCGCUUUUAUCUCAUUACUUUGAGAGCCAUCACCAGCGACUA |
| | telomere | UGUCGUAUGGGUAAAGCGUUGGGUUAGGGUUAGGGUUAGGGAAAAGC |
| | basket no ends | AUCAAAG |
| 2158 | 45, 44 hairpin | UACUGGCGCUUUUAUCUCAUUACUUUGAGAGCCAUCACCAGCGACUA |
| | (old version) | UGUCGUAUGGGUAAAGCGCAGGGCUUCGGCCG |
| | | GAAGCAUCAAAG |
| 2159 | Sarcin-ricin | UACUGGCGCUUUUAUCUCAUUACUUUGAGAGCCAUCACCAGCGACUA |
| | loop | UGUCGUAUGGGUAAAGCGCCUGCUCAGUACGAGAGGAACCGCAGGAA |
| | | GCAUCAAAG |
| 2160 | uvsX, C18G | UACUGGCGCUUUUAUCUGAUUACUUUGAGAGCCAUCACCAGCGACUA |
| | | UGUCGUAUGGGUAAAGCGCCCUCUUCGGAGGGAAGCAUCAAAG |
| 2161 | truncated stem | UACUGGCGCCUUUAUCUGAUUACUUUGAGAGCCAUCACCAGCGACUA |
| | loop, C18G, | UGUCGUAUGGGUAAAGCGCUUACGGACUUCGGUCCGUAAGAAGCAUC |
| | trip mut | AAAG |
| | (U10C) | |
| 2162 | short phage | UACUGGCGCUUUUAUCUGAUUACUUUGAGAGCCAUCACCAGCGACUA |
| | rep, C18G | UGUCGUAUGGGUAAAGCGCGGACGACCUCUCGGUCGUCCGAAGCAUC |
| | | AAAG |
| 2163 | phage rep | UACUGGCGCUUUUAUCUGAUUACUUUGAGAGCCAUCACCAGCGACUA |
| | loop, C18G | UGUCGUAUGGGUAAAGCGCAGGUGGGACGACCUCUCGGUCGUCCUAU |
| | | CUGAAGCAUCAAAG |
| 2164 | =+G18, | UACUGGCGCCUUUAUCUGCAUUACUUUGAGAGCCAUCACCAGCGACU |
| | stacked onto | AUGUCGUAUGGGUAAAGCGCUUACGGACUUCGGUCCGUAAGAAGCAU |
| | 64 | CAAAG |
| 2165 | truncated stem | GCUGGCGCUUUUAUCUGAUUACUUUGAGAGCCAUCACCAGCGACUAU |
| | loop, C18G, −1 | GUCGUAUGGGUAAAGCGCUUACGGACUUCGGUCCGUAAGAAGCAUCA |
| | A2G | AAG |
| 2166 | phage rep | UACUGGCGCCUUUAUCUGAUUACUUUGAGAGCCAUCACCAGCGACUA |
| | loop, C18G, | UGUCGUAUGGGUAAAGCGCAGGUGGGACGACCUCUCGGUCGUCCUAU |
| | trip mut | CUGAAGCAUCAAAG |
| | (U10C) | |
| 2167 | short phage | UACUGGCGCCUUUAUCUGAUUACUUUGAGAGCCAUCACCAGCGACUA |
| | rep, C18G, | UGUCGUAUGGGUAAAGCGCGGACGACCUCUCGGUCGUCCGAAGCAUC |
| | trip mut | AAAG |
| | (U10C) | |
| 2168 | uvsX, trip mut | UACUGGCGCCUUUAUCUCAUUACUUUGAGAGCCAUCACCAGCGACUA |
| | (U10C) | UGUCGUAUGGGUAAAGCGCCCUCUUCGGAGGGAAGCAUCAAAG |
| 2169 | truncated stem | UACUGGCGCUUUUAUCUCAUUACUUUGAGAGCCAUCACCAGCGACUA |
| | loop | UGUCGUAUGGGUAAAGCGCUUACGGACUUCGGUCCGUAAGAAGCAUC |
| | | AAAG |
| 2170 | =+A17, | UACUGGCGCCUUUAUCAUCAUUACUUUGAGAGCCAUCACCAGCGACU |
| | stacked onto | AUGUCGUAUGGGUAAAGCGCUUACGGACUUCGGUCCGUAAGAAGCAU |
| | 64 | CAAAG |
| 2171 | 3′ HDV | UACUGGCGCUUUUAUCUCAUUACUUUGAGAGCCAUCACCAGCGACUA |
| | genomic | UGUCGUAUGGGUAAAGCGCUUAUUUAUCGGAGAGAAAUCCGAUAAAU |
| | ribozyme | AAGAAGCAUCAAAGGGCCGGCAUGGUCCCAGCCUCCUCGCUGGCGCC |
| | | GGCUGGGCAACAUUCCGAGGGGACCGUCCCCUCGGUAAUGGCGAAUG |
| | | GGACCC |
| 2172 | phage rep | UACUGGCGCCUUUAUCUCAUUACUUUGAGAGCCAUCACCAGCGACUA |
| | loop, trip mut | UGUCGUAUGGGUAAAGCGCAGGUGGGACGACCUCUCGGUCGUCCUAU |
| | (U10C) | CUGAAGCAUCAAAG |
| 2173 | −79:80 | UACUGGCGCUUUUAUCUCAUUACUUUGAGAGCCAUCACCAGCGACUA |
| | | UGUCGUAUGGGUAAAGCGCUUAUUUAUCGGAGAAAUCCGAUAAAUAA |
| | | GAAGCAUCAAAG |
| 2174 | short phage | UACUGGCGCCUUUAUCUCAUUACUUUGAGAGCCAUCACCAGCGACUA |
| | rep, trip mut | UGUCGUAUGGGUAAAGCGCGGACGACCUCUCGGUCGUCCGAAGCAUC |
| | (U10C) | AAAG |
| 2175 | extra | UACUGGCGCUUUUAUCUCAUUACUUUGAGAGCCAUCACCAGCGACUA |
| | truncated stem | UGUCGUAUGGGUAAAGCGCCGGACUUCGGUCCGGAAGCAUCAAAG |
| | loop | |
| 2176 | U17G, C18G | UACUGGCGCUUUUAUCGGAUUACUUUGAGAGCCAUCACCAGCGACUA |
| | | UGUCGUAUGGGUAAAGCGCUUAUUUAUCGGAGAGAAAUCCGAUAAAU |
| | | AAGAAGCAUCAAAG |
| 2177 | short phage | UACUGGCGCUUUUAUCUCAUUACUUUGAGAGCCAUCACCAGCGACUA |
| | rep | UGUCGUAUGGGUAAAGCGCGGACGACCUCUCGGUCGUCCGAAGCAUC |
| | | AAAG |
| 2178 | uvsX, C18G, | GCUGGCGCUUUUAUCUGAUUACUUUGAGAGCCAUCACCAGCGACUAU |
| | −1 A2G | GUCGUAUGGGUAAAGCGCCCUCUUCGGAGGGAAGCAUCAAAG |
| 2179 | uvsX, C18G, | GCUGGCGCCUUUAUCUGAUUACUUUGAGAGCCAUCACCAGCGACUAU |
| | trip mut | GUCGUAUGGGUAAAGCUCCCUCUUCGGAGGGAGCAUCAAAG |
| | (U10C), -1 | |
| | A2G, HDV | |
| | −99 G65U | |
| 2180 | 3′ HDV | UACUGGCGCUUUUAUCUCAUUACUUUGAGAGCCAUCACCAGCGACUA |
| | antigenomic | UGUCGUAUGGGUAAAGCGCUUAUUUAUCGGAGAGAAAUCCGAUAAAU |
| | ribozyme | AAGAAGCAUCAAAGGGGUCGGCAUGGCAUCUCCACCUCCUCGCGGUC |
| | | CGACCUGGGCAUCCGAAGGAGGACGCACGUCCACUCGGAUGGCUAAG |
| | | GGAGAGCCA |
| 2181 | uvsX, C18G, | GCUGGCGCCUUUAUCUGAUUACUUUGAGAGCCAUCACCAGCGACUAU |
| | trip mut | GUCGUAUGGGUAAAGCGCCCUCUUCGGAGGGCGCAUCAAAG |
| | (U10C), -1 | |
| | A2G, HDV | |
| | AA(98:99)C | |
| 2182 | 3′ HDV | UACUGGCGCUUUUAUCUCAUUACUUUGAGAGCCAUCACCAGCGACUA |
| | ribozyme | UGUCGUAUGGGUAAAGCGCUUAUUUAUCGGAGAGAAAUCCGAUAAAU |
| | (Lior Nissim, | AAGAAGCAUCAAAGUUUUGGCCGGCAUGGUCCCAGCCUCCUCGCUGG |
| | Timothy Lu) | CGCCGGCUGGGCAACAUGCUUCGGCAUGGCGAAUGGGACCCCGGG |
| 2183 | TAC(1:3)GA, | GAUGGCGCCUUUAUCUCAUUACUUUGAGAGCCAUCACCAGCGACUAU |
| | stacked onto | GUCGUAUGGGUAAAGCGCUUACGGACUUCGGUCCGUAAGAAGCAUCA |
| | 64 | AAG |
| 2184 | uvsX, −1 A2G | GCUGGCGCUUUUAUCUCAUUACUUUGAGAGCCAUCACCAGCGACUAU |
| | | GUCGUAUGGGUAAAGCGCCCUCUUCGGAGGGAAGCAUCAAAG |
| 2185 | truncated stem | GCUGGCGCCUUUAUCUGAUUACUUUGAGAGCCAUCACCAGCGACUAU |
| | loop, C18G, | GUCGUAUGGGUAAAGCUCUUACGGACUUCGGUCCGUAAGAGCAUCAA |
| | trip mut | AG |
| | (U10C), −1 | |
| | A2G, HDV | |
| | −99 G65U | |
| 2186 | short phage | GCUGGCGCCUUUAUCUGAUUACUUUGAGAGCCAUCACCAGCGACUAU |
| | rep, C18G, | GUCGUAUGGGUAAAGCUCGGACGACCUCUCGGUCGUCCGAGCAUCAA |
| | trip mut | AG |
| | (U10C), −1 | |
| | A2G, HDV −99 | |
| | G65U | |
| 2187 | 3′ sTRSV WT | UACUGGCGCUUUUAUCUCAUUACUUUGAGAGCCAUCACCAGCGACUA |
| | viral | UGUCGUAUGGGUAAAGCGCUUAUUUAUCGGAGAGAAAUCCGAUAAAU |
| | Hammerhead | AAGAAGCAUCAAAGCCUGUCACCGGAUGUGCUUUCCGGUCUGAUGAG |
| | ribozyme | UCCGUGAGGACGAAACAGG |
| 2188 | short phage | GCUGGCGCUUUUAUCUGAUUACUUUGAGAGCCAUCACCAGCGACUAU |
| | rep, C18G, -1 | GUCGUAUGGGUAAAGCGCGGACGACCUCUCGGUCGUCCGAAGCAUCA |
| | A2G | AAG |
| 2189 | short phage | GCUGGCGCCUUUAUCUGAUUACUUUGAGAGCCAUCACCAGCGACUAU |
| | rep, C18G, | GUCGUAUGGGUAAAGCGCGGACGACCUCUCGGUCGUCCGAAGCAUCA |
| | trip mut | AAG |
| | (U10C), -1 | |
| | A2G, 3′ | |
| | genomic HDV | |
| 2190 | phage rep | GCUGGCGCCUUUAUCUGAUUACUUUGAGAGCCAUCACCAGCGACUAU |
| | loop, C18G, | GUCGUAUGGGUAAAGCUCAGGUGGGACGACCUCUCGGUCGUCCUAUC |
| | trip mut | UGAGCAUCAAAG |
| | (U10C), -1 | |
| | A2G, HDV | |
| | −99 G65U | |
| 2191 | 3′ HDV | UACUGGCGCUUUUAUCUCAUUACUUUGAGAGCCAUCACCAGCGACUA |
| | ribozyme | UGUCGUAUGGGUAAAGCGCUUAUUUAUCGGAGAGAAAUCCGAUAAAU |
| | (Owen Ryan, | AAGAAGCAUCAAAGGAUGGCCGGCAUGGUCCCAGCCUCCUCGCUGGC |
| | Jamie Cate) | GCCGGCUGGGCAACACCUUCGGGUGGCGAAUGGGAC |
| 2192 | phage rep | GCUGGCGCUUUUAUCUGAUUACUUUGAGAGCCAUCACCAGCGACUAU |
| | loop, C18G, | GUCGUAUGGGUAAAGCGCAGGUGGGACGACCUCUCGGUCGUCCUAUC |
| | −1 A2G | UGAAGCAUCAAAG |
| 2193 | 0.14 | UACUGGCGCUUUUAUCUCAUUACUUUGAGAGCCAUCACCAGCGACUA |
| | | UGUCGUACUGGGUAAAGCGCUUAUUUAUCGGAGAGAAAUCCGAUAAA |
| | | UAAGAAGCAUCAAAG |
| 2194 | -78, G77U | UACUGGCGCUUUUAUCUCAUUACUUUGAGAGCCAUCACCAGCGACUA |
| | | UGUCGUAUGGGUAAAGCGCUUAUUUAUCGUGAGAAAUCCGAUAAAUA |
| | | AGAAGCAUCAAAG |
| 2195 | | GUACUGGCGCUUUUAUCUCAUUACUUUGAGAGCCAUCACCAGCGACU |
| | | AUGUCGUAUGGGUAAAGCGCUUAUUUAUCGGAGAGAAAUCCGAUAAA |
| | | UAAGAAGCAUCAAAG |
| 2196 | short phage | GCUGGCGCUUUUAUCUCAUUACUUUGAGAGCCAUCACCAGCGACUAU |
| | rep, -1 A2G | GUCGUAUGGGUAAAGCGCGGACGACCUCUCGGUCGUCCGAAGCAUCA |
| | | AAG |
| 2197 | truncated stem | GCUGGCGCCUUUAUCUGAUUACUUUGAGAGCCAUCACCAGCGACUAU |
| | loop, C18G, | GUCGUAUGGGUAAAGCGCUUACGGACUUCGGUCCGUAAGAAGCAUCA |
| | trip mut | AAG |
| | (U10C), -1 | |
| | A2G | |
| 2198 | −1, A2G | GCUGGCGCUUUUAUCUCAUUACUUUGAGAGCCAUCACCAGCGACUAU |
| | | GUCGUAUGGGUAAAGCGCUUAUUUAUCGGAGAGAAAUCCGAUAAAUA |
| | | AGAAGCAUCAAAG |
| 2199 | truncated stem | GCUGGCGCCUUUAUCUCAUUACUUUGAGAGCCAUCACCAGCGACUAU |
| | loop, trip mut | GUCGUAUGGGUAAAGCGCUUACGGACUUCGGUCCGUAAGAAGCAUCA |
| | (U10C), -1 | AAG |
| | A2G | |
| 2200 | uvsX, C18G, | GCUGGCGCCUUUAUCUGAUUACUUUGAGAGCCAUCACCAGCGACUAU |
| | trip mut | GUCGUAUGGGUAAAGCGCCCUCUUCGGAGGGAAGCAUCAAAG |
| | (U10C), -1 | |
| | A2G | |
| 2201 | phage rep | GCUGGCGCUUUUAUCUCAUUACUUUGAGAGCCAUCACCAGCGACUAU |
| | loop, -1 A2G | GUCGUAUGGGUAAAGCGCAGGUGGGACGACCUCUCGGUCGUCCUAUC |
| | | UGAAGCAUCAAAG |
| 2202 | phage rep | GCUGGCGCCUUUAUCUCAUUACUUUGAGAGCCAUCACCAGCGACUAU |
| | loop, trip mut | GUCGUAUGGGUAAAGCGCAGGUGGGACGACCUCUCGGUCGUCCUAUC |
| | (U10C), -1 | UGAAGCAUCAAAG |
| | A2G | |
| 2203 | phage rep | GCUGGCGCCUUUAUCUGAUUACUUUGAGAGCCAUCACCAGCGACUAU |
| | loop, C18G, | GUCGUAUGGGUAAAGCGCAGGUGGGACGACCUCUCGGUCGUCCUAUC |
| | trip mut | UGAAGCAUCAAAG |
| | (U10C), -1 | |
| | A2G | |
| 2204 | truncated stem | UACUGGCGCUUUUAUCUGAUUACUUUGAGAGCCAUCACCAGCGACUA |
| | loop, C18G | UGUCGUAUGGGUAAAGCGCUUACGGACUUCGGUCCGUAAGAAGCAUC |
| | | AAAG |
| 2205 | uvsX, trip mut | GCUGGCGCCUUUAUCUCAUUACUUUGAGAGCCAUCACCAGCGACUAU |
| | (U10C), -1 | GUCGUAUGGGUAAAGCGCCCUCUUCGGAGGGAAGCAUCAAAG |
| | A2G | |
| 2206 | truncated stem | GCUGGCGCUUUUAUCUCAUUACUUUGAGAGCCAUCACCAGCGACUAU |
| | loop, -1 A2G | GUCGUAUGGGUAAAGCGCUUACGGACUUCGGUCCGUAAGAAGCAUCA |
| | | AAG |
| 2207 | short phage | GCUGGCGCCUUUAUCUCAUUACUUUGAGAGCCAUCACCAGCGACUAU |
| | rep, trip mut | GUCGUAUGGGUAAAGCGCGGACGACCUCUCGGUCGUCCGAAGCAUCA |
| | (U10C), -1 | AAG |
| | A2G | |
| 2208 | 5′ HDV | GAUGGCCGGCAUGGUCCCAGCCUCCUCGCUGGCGCCGGCUGGGCAAC |
| | ribozyme | ACCUUCGGGUGGCGAAUGGGACUACUGGCGCUUUUAUCUCAUUACUU |
| | (Owen Ryan, | UGAGAGCCAUCACCAGCGACUAUGUCGUAUGGGUAAAGCGCUUAUUU |
| | Jamie Cate) | AUCGGAGAGAAAUCCGAUAAAUAAGAAGCAUCAAAG |
| 2209 | 5′ HDV | GGCCGGCAUGGUCCCAGCCUCCUCGCUGGCGCCGGCUGGGCAACAUU |
| | genomic | CCGAGGGGACCGUCCCCUCGGUAAUGGCGAAUGGGACCCUACUGGCG |
| | ribozyme | CUUUUAUCUCAUUACUUUGAGAGCCAUCACCAGCGACUAUGUCGUAU |
| | | GGGUAAAGCGCUUAUUUAUCGGAGAGAAAUCCGAUAAAUAAGAAGCA |
| | | UCAAAG |
| 2210 | truncated stem | GCUGGCGCCUUUAUCUGAUUACUUUGAGAGCCAUCACCAGCGACUAU |
| | loop, C18G, | GUCGUAUGGGUAAAGCGCUUACGGACUUCGGUCCGUAAGCGCAUCAA |
| | trip mut | AG |
| | (U10C), -1 | |
| | A2G, HDV | |
| | AA(98:99)C | |
| 2211 | 5′ env25 pistol | CGUGGUUAGGGCCACGUUAAAUAGUUGCUUAAGCCCUAAGCGUUGAU |
| | ribozyme | CUUCGGAUCAGGUGCAAUACUGGCGCUUUUAUCUCAUUACUUUGAGA |
| | (with an added | GCCAUCACCAGCGACUAUGUCGUAUGGGUAAAGCGCUUAUUUAUCGG |
| | CUUCGG | AGAGAAAUCCGAUAAAUAAGAAGCAUCAAAG |
| | loop) | |
| 2212 | 5′ HDV | GGGUCGGCAUGGCAUCUCCACCUCCUCGCGGUCCGACCUGGGCAUCC |
| | antigenomic | GAAGGAGGACGCACGUCCACUCGGAUGGCUAAGGGAGAGCCAUACUG |
| | ribozyme | GCGCUUUUAUCUCAUUACUUUGAGAGCCAUCACCAGCGACUAUGUCG |
| | | UAUGGGUAAAGCGCUUAUUUAUCGGAGAGAAAUCCGAUAAAUAAGAA |
| | | GCAUCAAAG |
| 2213 | 3′ | UACUGGCGCUUUUAUCUCAUUACUUUGAGAGCCAUCACCAGCGACUA |
| | Hammerhead | UGUCGUAUGGGUAAAGCGCUUAUUUAUCGGAGAGAAAUCCGAUAAAU |
| | ribozyme | AAGAAGCAUCAAAGCCAGUACUGAUGAGUCCGUGAGGACGAAACGAG |
| | (Lior Nissim, | UAAGCUCGUCUACUGGCGCUUUUAUCUCAU |
| | Timothy Lu) | |
| | guide scaffold | |
| | scar | |
| 2214 | =+A27, | UACUGGCGCCUUUAUCUCAUUACUUUAGAGAGCCAUCACCAGCGACU |
| | stacked onto | AUGUCGUAUGGGUAAAGCGCUUACGGACUUCGGUCCGUAAGAAGCAU |
| | 64 | CAAAG |
| 2215 | 5′Hammerhead | CGACUACUGAUGAGUCCGUGAGGACGAAACGAGUAAGCUCGUCUAGU |
| | ribozyme | CGUACUGGCGCUUUUAUCUCAUUACUUUGAGAGCCAUCACCAGCGAC |
| | (Lior Nissim, | UAUGUCGUAUGGGUAAAGCGCUUAUUUAUCGGAGAGAAAUCCGAUAA |
| | Timothy Lu) | AUAAGAAGCAUCAAAG |
| | smaller scar | |
| 2216 | phage rep | GCUGGCGCCUUUAUCUGAUUACUUUGAGAGCCAUCACCAGCGACUAU |
| | loop, C18G, | GUCGUAUGGGUAAAGCGCAGGUGGGACGACCUCUCGGUCGUCCUAUC |
| | trip mut | UGGGCAUCAAAG |
| | (U10C), -1 | |
| | A2G, HDV | |
| | AA(98:99)C | |
| 2217 | −27, stacked | UACUGGCGCCUUUAUCUCAUUACUUUAGAGCCAUCACCAGCGACUAU |
| | onto 64 | GUCGUAUGGGUAAAGCGCUUACGGACUUCGGUCCGUAAGAAGCAUCA |
| | | AAG |
| 2218 | 3′ Hatchet | UACUGGCGCUUUUAUCUCAUUACUUUGAGAGCCAUCACCAGCGACUA |
| | | UGUCGUAUGGGUAAAGCGCUUAUUUAUCGGAGAGAAAUCCGAUAAAU |
| | | AAGAAGCAUCAAAGCAUUCCUCAGAAAAUGACAAACCUGUGGGGCGU |
| | | AAGUAGAUCUUCGGAUCUAUGAUCGUGCAGACGUUAAAAUCAGGU |
| 2219 | 3′ | UACUGGCGCUUUUAUCUCAUUACUUUGAGAGCCAUCACCAGCGACUA |
| | Hammerhead | UGUCGUAUGGGUAAAGCGCUUAUUUAUCGGAGAGAAAUCCGAUAAAU |
| | ribozyme | AAGAAGCAUCAAAGCGACUACUGAUGAGUCCGUGAGGACGAAACGAG |
| | (Lior Nissim, | UAAGCUCGUCUAGUCGCGUGUAGCGAAGCA |
| | Timothy Lu) | |
| 2220 | 5′ Hatchet | CAUUCCUCAGAAAAUGACAAACCUGUGGGGCGUAAGUAGAUCUUCGG |
| | | AUCUAUGAUCGUGCAGACGUUAAAAUCAGGUUACUGGCGCUUUUAUC |
| | | UCAUUACUUUGAGAGCCAUCACCAGCGACUAUGUCGUAUGGGUAAAG |
| | | CGCUUAUUUAUCGGAGAGAAAUCCGAUAAAUAAGAAGCAUCAAAG |
| 2221 | 5′HDV | UUUUGGCCGGCAUGGUCCCAGCCUCCUCGCUGGCGCCGGCUGGGCAA |
| | ribozyme | CAUGCUUCGGCAUGGCGAAUGGGACCCCGGGUACUGGCGCUUUUAUC |
| | (Lior Nissim, | UCAUUACUUUGAGAGCCAUCACCAGCGACUAUGUCGUAUGGGUAAAG |
| | Timothy Lu) | CGCUUAUUUAUCGGAGAGAAAUCCGAUAAAUAAGAAGCAUCAAAG |
| 2222 | 5′ | CGACUACUGAUGAGUCCGUGAGGACGAAACGAGUAAGCUCGUCUAGU |
| | Hammerhead | CGCGUGUAGCGAAGCAUACUGGCGCUUUUAUCUCAUUACUUUGAGAG |
| | ribozyme | CCAUCACCAGCGACUAUGUCGUAUGGGUAAAGCGCUUAUUUAUCGGA |
| | (Lior Nissim, | GAGAAAUCCGAUAAAUAAGAAGCAUCAAAG |
| | Timothy Lu) | |
| 2223 | 3′ HH15 | UACUGGCGCUUUUAUCUCAUUACUUUGAGAGCCAUCACCAGCGACUA |
| | Minimal | UGUCGUAUGGGUAAAGCGCUUAUUUAUCGGAGAGAAAUCCGAUAAAU |
| | Hammerhead | AAGAAGCAUCAAAGGGGAGCCCCGCUGAUGAGGUCGGGGAGACCGAA |
| | ribozyme | AGGGACUUCGGUCCCUACGGGGCUCCC |
| 2224 | 5′ RBMX | CCACCCCCACCACCACCCCCACCCCCACCACCACCCUACUGGCGCUU |
| | recruiting | UUAUCUCAUUACUUUGAGAGCCAUCACCAGCGACUAUGUCGUAUGGG |
| | motif | UAAAGCGCUUAUUUAUCGGAGAGAAAUCCGAUAAAUAAGAAGCAUCA |
| | | AAG |
| 2225 | 3′ | UACUGGCGCUUUUAUCUCAUUACUUUGAGAGCCAUCACCAGCGACUA |
| | Hammerhead | UGUCGUAUGGGUAAAGCGCUUAUUUAUCGGAGAGAAAUCCGAUAAAU |
| | ribozyme | AAGAAGCAUCAAAGCGACUACUGAUGAGUCCGUGAGGACGAAACGAG |
| | (Lior Nissim, | UAAGCUCGUCUAGUCG |
| | Timothy Lu) | |
| | smaller scar | |
| 2226 | 3′ env25 pistol | UACUGGCGCUUUUAUCUCAUUACUUUGAGAGCCAUCACCAGCGACUA |
| | ribozyme | UGUCGUAUGGGUAAAGCGCUUAUUUAUCGGAGAGAAAUCCGAUAAAU |
| | (with an added | AAGAAGCAUCAAAGCGUGGUUAGGGCCACGUUAAAUAGUUGCUUAAG |
| | CUUCGG | CCCUAAGCGUUGAUCUUCGGAUCAGGUGCAA |
| | loop) | |
| 2227 | 3′ Env-9 | UACUGGCGCUUUUAUCUCAUUACUUUGAGAGCCAUCACCAGCGACUA |
| | Twister | UGUCGUAUGGGUAAAGCGCUUAUUUAUCGGAGAGAAAUCCGAUAAAU |
| | | AAGAAGCAUCAAAGGGCAAUAAAGCGGUUACAAGCCCGCAAAAAUAG |
| | | CAGAGUAAUGUCGCGAUAGCGCGGCAUUAAUGCAGCUUUAUUG |
| 2228 | =+AUUAUC | UACUGGCGCUUUUAUCUCAUUACUAUUAUCUCAUUACUUUGAGAGCC |
| | UCAUUACU | AUCACCAGCGACUAUGUCGUAUGGGUAAAGCGCUUAUUUAUCGGAGA |
| | 25 | GAAAUCCGAUAAAUAAGAAGCAUCAAAG |
| 2229 | 5′ Env-9 | GGCAAUAAAGCGGUUACAAGCCCGCAAAAAUAGCAGAGUAAUGUCGC |
| | Twister | GAUAGCGCGGCAUUAAUGCAGCUUUAUUGUACUGGCGCUUUUAUCUC |
| | | AUUACUUUGAGAGCCAUCACCAGCGACUAUGUCGUAUGGGUAAAGCG |
| | | CUUAUUUAUCGGAGAGAAAUCCGAUAAAUAAGAAGCAUCAAAG |
| 2230 | 3′ Twisted | UACUGGCGCUUUUAUCUCAUUACUUUGAGAGCCAUCACCAGCGACUA |
| | Sister 1 | UGUCGUAUGGGUAAAGCGCUUAUUUAUCGGAGAGAAAUCCGAUAAAU |
| | | AAGAAGCAUCAAAGACCCGCAAGGCCGACGGCAUCCGCCGCCGCUGG |
| | | UGCAAGUCCAGCCGCCCCUUCGGGGGCGGGCGCUCAUGGGUAAC |
| 2231 | no stem | UACUGGCGCUUUUAUCUCAUUACUUUGAGAGCCAUCACCAGCGACUA |
| | | UGUCGUAUGGGUAAAG |
| 2232 | 5′ HH15 | GGGAGCCCCGCUGAUGAGGUCGGGGAGACCGAAAGGGACUUCGGUCC |
| | Minimal | CUACGGGGCUCCCUACUGGCGCUUUUAUCUCAUUACUUUGAGAGCCA |
| | Hammerhead | UCACCAGCGACUAUGUCGUAUGGGUAAAGCGCUUAUUUAUCGGAGAG |
| | ribozyme | AAAUCCGAUAAAUAAGAAGCAUCAAAG |
| 2233 | 5′ | CCAGUACUGAUGAGUCCGUGAGGACGAAACGAGUAAGCUCGUCUACU |
| | Hammerhead | GGCGCUUUUAUCUCAUUACUGGCGCUUUUAUCUCAUUACUUUGAGAG |
| | ribozyme | CCAUCACCAGCGACUAUGUCGUAUGGGUAAAGCGCUUAUUUAUCGGA |
| | (Lior Nissim, | GAGAAAUCCGAUAAAUAAGAAGCAUCAAAG |
| | Timothy Lu) | |
| | guide scaffold | |
| | scar | |
| 2234 | 5′ Twisted | ACCCGCAAGGCCGACGGCAUCCGCCGCCGCUGGUGCAAGUCCAGCCG |
| | Sister 1 | CCCCUUCGGGGGCGGGCGCUCAUGGGUAACUACUGGCGCUUUUAUCU |
| | | CAUUACUUUGAGAGCCAUCACCAGCGACUAUGUCGUAUGGGUAAAGC |
| | | GCUUAUUUAUCGGAGAGAAAUCCGAUAAAUAAGAAGCAUCAAAG |
| 2235 | 5′ sTRSV WT | CCUGUCACCGGAUGUGCUUUCCGGUCUGAUGAGUCCGUGAGGACGAA |
| | viral | ACAGGUACUGGCGCUUUUAUCUCAUUACUUUGAGAGCCAUCACCAGC |
| | Hammerhead | GACUAUGUCGUAUGGGUAAAGCGCUUAUUUAUCGGAGAGAAAUCCGA |
| | ribozyme | UAAAUAAGAAGCAUCAAAG |
| 2236 | 148: =+G55, | GUACUGGCGCCUUUAUCUCAUUACUUUGAGAGCCAUCACCAGCGACU |
| | stacked onto | AUGUCGUAGUGGGUAAAGCGCUUACGGACUUCGGUCCGUAAGAAGCA |
| | 64 | UCAAAG |
| 2237 | 158: | GUACUGGCGCUUUUAUCUGAUUACUUUGAGAGCCAUCACCAGCGACU |
| | 103+148(+G55) | AUGUCGUAGUGGGUAAAGCUCCCUCUUCGGAGGGAGCAUCAAAG |
| | -99, G65U | |
| 2238 | 174: Uvsx | ACUGGCGCUUUUAUCUGAUUACUUUGAGAGCCAUCACCAGCGACUAU |
| | Extended stem | GUCGUAGUGGGUAAAGCUCCCUCUUCGGAGGGAGCAUCAAAG |
| | with [A99] | |
| | G65U), | |
| | C18G, ^{∧}G55, | |
| | GU-1] | |
| 2239 | 175: extended | ACUGGCGCCUUUAUCUCAUUACUUUGAGAGCCAUCACCAGCGACUAU |
| | stem | GUCGUAUGGGUAAAGCGCUUACGGACUUCGGUCCGUAAGAAGCAUCA |
| | truncation, | AAG |
| | U10C, [GU-1] | |
| 2240 | 176: 174 with | GCUGGCGCUUUUAUCUGAUUACUUUGAGAGCCAUCACCAGCGACUAU |
| | AIG | GUCGUAGUGGGUAAAGCUCCCUCUUCGGAGGGAGCAUCAAAG |
| | substitution | |
| | for T7 | |
| | transcription | |
| 2241 | 177: 174 with | ACUGGCGCUUUUAUCUGAUUACUUUGAGAGCCAUCACCAGCGACUAU |
| | bubble (+G55) | GUCGUAUGGGUAAAGCUCCCUCUUCGGAGGGAGCAUCAAAG |
| | removed | |
| 2242 | 181: stem 42 | ACUGGCGCCUUUAUCUGAUUACUUUGAGAGCCAUCACCAGCGACUAU |
| | (truncated | GUCGUAUGGGUAAAGCGCUUACGGACUUCGGUCCGUAAGAAGCAUCA |
| | stem loop); | AAG |
| | U10C,C18G, | |
| | [GU-1] | |
| | (95+[GU-l]) | |
| 2243 | 182: stem 42 | ACUGGCGCUUUUAUCUGAUUACUUUGAGAGCCAUCACCAGCGACUAU |
| | (truncated | GUCGUAUGGGUAAAGCGCUUACGGACUUCGGUCCGUAAGAAGCAUCA |
| | stem loop); | AAG |
| | C18G,[GU-1] | |
| 2244 | 183: stem 42 | ACUGGCGCUUUUAUCUGAUUACUUUGAGAGCCAUCACCAGCGACUAU |
| | (truncated | GUCGUAGUGGGUAAAGCGCUUACGGACUUCGGUCCGUAAGAAGCAUC |
| | stem loop); | AAAG |
| | C18G, ^{∧}G55, | |
| | [GU-1] | |
| 2245 | 184: stem 48 | ACUGGCGCUUUUAUCUGAUUACUUUGAGAGCCAUCACCAGCGACUAU |
| | (uvsx, -99 | GUCGUAUUGGGUAAAGCUCCCUCUUCGGAGGGAGCAUCAAAG |
| | g65t); | |
| | C18G, ^{∧}T55, | |
| | [GU-1] | |
| 2246 | 185: stem 42 | ACUGGCGCUUUUAUCUGAUUACUUUGAGAGCCAUCACCAGCGACUAU |
| | (truncated | GUCGUAUUGGGUAAAGCGCUUACGGACUUCGGUCCGUAAGAAGCAUC |
| | stem loop); | AAAG |
| | C18G, ^{∧}U55, | |
| | [GU-1] | |
| 2247 | 186: stem 42 | ACUGGCGCCUUUAUCAUCAUUACUUUGAGAGCCAUCACCAGCGACUA |
| | (truncated | UGUCGUAUGGGUAAAGCGCUUACGGACUUCGGUCCGUAAGAAGCAUC |
| | stem loop); | AAAG |
| | U10C, ^{∧}A17, | |
| | [GU-1] | |
| 2248 | 187: stem 46 | ACUGGCGCUUUUAUCUGAUUACUUUGAGAGCCAUCACCAGCGACUAU |
| | (uvsx); | GUCGUAGUGGGUAAAGCGCCCUCUUCGGAGGGAAGCAUCAAAG |
| | C18G, ^{∧}G55, | |
| | [GU-1] | |
| 2249 | 188: stem 50 | ACUGGCGCUUUUAUCUGAUUACUUUGAGAGCCAUCACCAGCGACUAU |
| | (ms2U15C, | GUCGUAGUGGGUAAAGCUCACAUGAGGAUCACCCAUGUGAGCAUCAA |
| | -99, g65t); | AG |
| | C18G, ^{∧}G55, | |
| | [GU-1] | |
| 2250 | 189: 174 + | ACUGGCACUUUUACCUGAUUACUUUGAGAGCCAACACCAGCGACUAU |
| | G8A; U15C; | GUCGUAGUGGGUAAAGCUCCCUCUUCGGAGGGAGCAUCAAAG |
| | U35A | |
| 2251 | 190: 174 + | ACUGGCACUUUUAUCUGAUUACUUUGAGAGCCAUCACCAGCGACUAU |
| | G8A | GUCGUAGUGGGUAAAGCUCCCUCUUCGGAGGGAGCAUCAAAG |
| 2252 | 191: 174 + | ACUGGCCCUUUUAUCUGAUUACUUUGAGAGCCAUCACCAGCGACUAU |
| | G8C | GUCGUAGUGGGUAAAGCUCCCUCUUCGGAGGGAGCAUCAAAG |
| 2253 | 192: 174 + | ACUGGCGCUUUUACCUGAUUACUUUGAGAGCCAUCACCAGCGACUAU |
| | U15C | GUCGUAGUGGGUAAAGCUCCCUCUUCGGAGGGAGCAUCAAAG |
| 2254 | 193, 174 + | ACUGGCGCUUUUAUCUGAUUACUUUGAGAGCCAACACCAGCGACUAU |
| | U35A | GUCGUAGUGGGUAAAGCUCCCUCUUCGGAGGGAGCAUCAAAG |
| 2255 | 195: 175 + | ACUGGCACCUUUACCUGAUUACUUUGAGAGCCAACACCAGCGACUAU |
| | C18G + | GUCGUAUGGGUAAAGCGCUUACGGACUUCGGUCCGUAAGAAGCAUCA |
| | G8A; U15C; | AAG |
| | U35A | |
| 2256 | 196: 175 + | ACUGGCACCUUUAUCUGAUUACUUUGAGAGCCAUCACCAGCGACUAU |
| | C18G + G8A | GUCGUAUGGGUAAAGCGCUUACGGACUUCGGUCCGUAAGAAGCAUCA |
| | | AAG |
| 2257 | 197: 175 + | ACUGGCCCCUUUAUCUGAUUACUUUGAGAGCCAUCACCAGCGACUAU |
| | C18G + G8C | GUCGUAUGGGUAAAGCGCUUACGGACUUCGGUCCGUAAGAAGCAUCA |
| | | AAG |
| 2258 | 198: 175 + | ACUGGCGCCUUUAUCUGAUUACUUUGAGAGCCAACACCAGCGACUAU |
| | C18G + U35A | GUCGUAUGGGUAAAGCGCUUACGGACUUCGGUCCGUAAGAAGCAUCA |
| | | AAG |
| 2259 | 199: 174 + | GCUGGCGCUUUUAUCUGAUUACUUUGAGAGCCAUCACCAGCGACUAU |
| | A2G (test G | GUCGUAGUGGGUAAAGCUCCCUCUUCGGAGGGAGCAUCAAAG |
| | transcription | |
| | at start; | |
| | ccGCT . . . ) | |
| 2260 | 200: 174 + | GACUGGCGCUUUUAUCUGAUUACUUUGAGAGCCAUCACCAGCGACUA |
| | ^{∧}G1 | UGUCGUAGUGGGUAAAGCUCCCUCUUCGGAGGGAGCAUCAAAG |
| | (ccGACU . . . ) | |
| 2261 | 201: 174 + | ACUGGCGCCUUUAUCUGAUUACUUUGGAGAGCCAUCACCAGCGACUA |
| | U10C; ^{∧}G28 | UGUCGUAGUGGGUAAAGCUCCCUCUUCGGAGGGAGCAUCAAAG |
| 2262 | 202: 174 + | ACUGGCGCAUUUAUCUGAUUACUUUGUGAGCCAUCACCAGCGACUAU |
| | U10A; A28U | GUCGUAGUGGGUAAAGCUCCCUCUUCGGAGGGAGCAUCAAAG |
| 2263 | 203: 174 + | ACUGGCGCCUUUAUCUGAUUACUUUGAGAGCCAUCACCAGCGACUAU |
| | U10C | GUCGUAGUGGGUAAAGCUCCCUCUUCGGAGGGAGCAUCAAAG |
| 2264 | 204: 174 + | ACUGGCGCUUUUAUCUGAUUACUUUGGAGAGCCAUCACCAGCGACUA |
| | ^{∧}G28 | UGUCGUAGUGGGUAAAGCUCCCUCUUCGGAGGGAGCAUCAAAG |
| 2265 | 205: 174 + | ACUGGCGCAUUUAUCUGAUUACUUUGAGAGCCAUCACCAGCGACUAU |
| | U10A | GUCGUAGUGGGUAAAGCUCCCUCUUCGGAGGGAGCAUCAAAG |
| 2266 | 206, 174 + | ACUGGCGCUUUUAUCUGAUUACUUUGUGAGCCAUCACCAGCGACUAU |
| | A28U | GUCGUAGUGGGUAAAGCUCCCUCUUCGGAGGGAGCAUCAAAG |
| 2267 | 207: 174 + | ACUGGCGCUUUUAUUCUGAUUACUUUGAGAGCCAUCACCAGCGACUA |
| | ^{∧}U15 | UGUCGUAGUGGGUAAAGCUCCCUCUUCGGAGGGAGCAUCAAAG |
| 2268 | 208: 174 + | ACGGCGCUUUUAUCUGAUUACUUUGAGAGCCAUCACCAGCGACUAUG |
| | [U4] | UCGUAGUGGGUAAAGCUCCCUCUUCGGAGGGAGCAUCAAAG |
| 2269 | 209: 174 + | ACUGGCGCUUUUAUAUGAUUACUUUGAGAGCCAUCACCAGCGACUAU |
| | C16A | GUCGUAGUGGGUAAAGCUCCCUCUUCGGAGGGAGCAUCAAAG |
| 2270 | 210: 174 + | ACUGGCGCUUUUAUCUUGAUUACUUUGAGAGCCAUCACCAGCGACUA |
| | ^{∧}U17 | UGUCGUAGUGGGUAAAGCUCCCUCUUCGGAGGGAGCAUCAAAG |
| 2271 | 211: 174 + | ACUGGCGCUUUUAUCUGAUUACUUUGAGAGCCAGCACCAGCGACUAU |
| | U35G | GUCGUAGUGGGUAAAGCUCCCUCUUCGGAGGGAGCAUCAAAG |
| | (compare with | |
| | 174 + U35A | |
| | above) | |
| 2272 | 212: 174 + | ACUGGCGCUGUUAUCUGAUUACUUCGAGAGCCAUCACCAGCGACUAU |
| | U11G, | GUCGUAGUGGGUAAAGCUCCCUCUUCGGAGGGAGCAUCGAAG |
| | A105G | |
| | (A86G), | |
| | U26C | |
| 2273 | 213: 174 + | ACUGGCGCUCUUAUCUGAUUACUUCGAGAGCCAUCACCAGCGACUAU |
| | U11C, | GUCGUAGUGGGUAAAGCUCCCUCUUCGGAGGGAGCAUCGAAG |
| | A105G | |
| | (A86G), | |
| | U26C | |
| 2274 | 214: | ACUGGCGCUUGUAUCUGAUUACUCUGAGAGCCAUCACCAGCGACUAU |
| | 174 + U12G; | GUCGUAGUGGGUAAAGCUCCCUCUUCGGAGGGAGCAUCAGAG |
| | A106G | |
| | (A87G), | |
| | U25C | |
| 2275 | 215: | ACUGGCGCUUCUAUCUGAUUACUCUGAGAGCCAUCACCAGCGACUAU |
| | 174 + U12C; | GUCGUAGUGGGUAAAGCUCCCUCUUCGGAGGGAGCAUCAGAG |
| | A106G | |
| | (A87G), | |
| | U25C | |
| 2276 | 216: | ACUGGCGCUUUGAUCUGAUUACCUUGAGAGCCAUCACCAGCGACUAU |
| | 174_tx_11.G, | GUCGUAGUGGGUAAAGCUCCCUCUUCGGAGGGAGCAUCAAGG |
| | 87.G,22.C | |
| 2277 | 217: | ACUGGCGCUUUCAUCUGAUUACCUUGAGAGCCAUCACCAGCGACUAU |
| | 174_tx_11.C, | GUCGUAGUGGGUAAAGCUCCCUCUUCGGAGGGAGCAUCAAGG |
| | 87.G,22.C | |
| 2278 | 218: 174 + | ACUGGCGCUGUUAUCUGAUUACUUUGAGAGCCAUCACCAGCGACUAU |
| | U11G | GUCGUAGUGGGUAAAGCUCCCUCUUCGGAGGGAGCAUCAAAG |
| 2279 | 219: 174 + | ACUGGCGCUUUUAUCUGAUUACUUUGAGAGCCAUCACCAGCGACUAU |
| | A105G | GUCGUAGUGGGUAAAGCUCCCUCUUCGGAGGGAGCAUCGAAG |
| | (A86G) | |
| 2280 | 220: 174 + | ACUGGCGCUUUUAUCUGAUUACUUCGAGAGCCAUCACCAGCGACUAU |
| | U26C | GUCGUAGUGGGUAAAGCUCCCUCUUCGGAGGGAGCAUCAAAG |
| 2281 | 221: 182 + | ACUGGCACUUCUAUCUGAUUACUCUGAGAGCCAUCACCAGCGACUAU |
| | G8A(196) + | GUCGUAUGGGUAAAGCCGCUUACGGACUUCGGUCCGUAAGAGGCAUC |
| | 215 | AGAG |
| | mutations + | |
| | ^{∧}C63, A88G | |
| 2282 | 222: 174 + | ACUGGCACUUCUAUCUGAUUACUCUGAGAGCCAUCACCAGCGACUAU |
| | G8A(196) + | GUCGUAGUGGGUAAAGCUCCCUCUUCGGAGGGAGCAUCAGAG |
| | 215 | |
| | mutations | |
| 2283 | 223: 181 + | ACUGGCACCUUUAUCUGAUUACUUUGAGAGCCAUCACCAGCGACUAU |
| | G8A(196) + | GUCGUAUGGGUAAAGCCGCUUACGGACUUCGGUCCGUAAGAGGCAUC |
| | ^{∧}C63, A88G | AAAG |
| 2284 | 224: 182 + | ACUGGCACUUGUAUCUGAUUACUCUGAGAGCCAUCACCAGCGACUAU |
| | G8A(196) + | GUCGUAUGGGUAAAGCCGCUUACGGACUUCGGUCCGUAAGAGGCAUC |
| | 214 | AGAG |
| | mutations + | |
| | ^{∧}C63, A88G | |
| 2285 | 225: 174 + | ACUGGCACUUGUAUCUGAUUACUCUGAGAGCCAUCACCAGCGACUAU |
| | G8A(196) + | GUCGUAGUGGGUAAAGCUCCCUCUUCGGAGGGAGCAUCAGAG |
| | 214 | |
| | mutations | |

[0136] In some embodiments, the gNA variant comprises a tracrRNA stem loop comprising the sequence -UUU-N4-25-UUU- (SEQ ID NO: 34). For example, the gNA variant comprises a scaffold stem loop or a replacement thereof, flanked by two triplet U motifs that contribute to the triplex region. In some embodiments, the scaffold stem loop or replacement thereof comprises at least 4 nucleotides, at least 5 nucleotides, at least 6 nucleotides, at least 7 nucleotides, at least 7 nucleotides, at least 8 nucleotides, at least 9 nucleotides, at least 10 nucleotides, at least 11 nucleotides, at least 12 nucleotides, at least 13 nucleotides, at least 14 nucleotides, at least 15 nucleotides, at least 16 nucleotides, at least 17 nucleotides, at least 18 nucleotides, at least 19 nucleotides, at least 20 nucleotides, at least 21 nucleotides, at least 22 nucleotides, at least 23 nucleotides, at least 24 nucleotides, or at least 25 nucleotides.

[0137] In some embodiments, the gNA variant comprises a crRNA sequence with -AAAG- in a location 5′ to the spacer region. In some embodiments, the -AAAG- sequence is immediately 5′ to the spacer region.

[0138] In some embodiments, the at least one nucleotide modification to a reference gNA to produce a gNA variant comprises at least one nucleotide deletion in the CasX variant gNA relative to the reference gRNA. In some embodiments, a gNA variant comprises a deletion of 1, 2, 3, 4, 5, 6, 7, 8, 9, 10, 11, 12, 13, 14, 15, 16, 17, 18, 19 or 20 consecutive or non-consecutive nucleotides relative to a reference gNA. In some embodiments, the at least one deletion comprises a deletion of 1, 2, 3, 4, 5, 6, 7, 8, 9, 10, 11, 12, 13, 14, 15, 16, 17, 18, 19 or 20 or more consecutive nucleotides relative to a reference gNA. In some embodiments, the gNA variant comprises 2, 3, 4, 5, 6, 7, 8, 9, 10, 11, 12, 13, 14, 15, 16, 17, 18, 19 or 20 or more nucleotide deletions relative to the reference gNA, and the deletions are not in consecutive nucleotides. In those embodiments where there are two or more non-consecutive deletions in the gNA variant relative to the reference gRNA, any length of deletions, and any combination of lengths of deletions, as described herein, are contemplated as within the scope of the disclosure. In some embodiments, a gNA variant comprises at least two deletions in different regions of the reference gRNA. In some embodiments, a gNA variant comprises at least two deletions in the same region of the reference gRNA. For example, the regions may be the extended stem loop, scaffold stem loop, scaffold stem bubble, triplex loop, pseudoknot, triplex, or a 5′ end of the gNA variant. The deletion of any nucleotide in a reference gRNA is contemplated as within the scope of the disclosure.

[0139] In some embodiments, the at least one nucleotide modification of a reference gRNA to generate a gNA variant comprises at least one nucleotide insertion. In some embodiments, a gNA variant comprises an insertion of 1, 2, 3, 4, 5, 6, 7, 8, 9 or 10 consecutive or non-consecutive nucleotides relative to a reference gRNA. In some embodiments, the at least one nucleotide insertion comprises an insertion of 1, 2, 3, 4, 5, 6, 7, 8, 9, 10, 11, 12, 13, 14, 15, 16, 17, 18, 19 or 20 or more consecutive nucleotides relative to a reference gRNA. In some embodiments, the gNA variant comprises 2 or more insertions relative to the reference gRNA, and the insertions are not consecutive. In those embodiments where there are two or more non-consecutive insertions in the gNA variant relative to the reference gRNA, any length of insertions, and any combination of lengths of insertions, as described herein, are contemplated as within the scope of the disclosure. For example, in some embodiments, a gNA variant may comprise a first insertion of one nucleotide, and a second insertion of two nucleotides and the two insertions are not consecutive. In some embodiments, a gNA variant comprises at least two insertions in different regions of the reference gRNA. In some embodiments, a gNA variant comprises at least two insertions in the same region of the reference gRNA. For example, the regions may be the extended stem loop, scaffold stem loop, scaffold stem bubble, triplex loop, pseudoknot, triplex, or a 5′ end of the gNA variant. Any insertion of A, G, C, U (or T, in the corresponding DNA) or combinations thereof at any location in the reference gRNA is contemplated as within the scope of the disclosure.

[0140] In some embodiments, the at least one nucleotide modification of a reference gRNA to generate a gNA variant comprises at least one nucleic acid substitution. In some embodiments, a gNA variant comprises 1, 2, 3, 4, 5, 6, 7, 8, 9, 10, 11, 12, 13, 14, 15, 16, 17, 18, 19 or 20 or more consecutive or non-consecutive substituted nucleotides relative to a reference gRNA. In some embodiments, a gNA variant comprises 1-4 nucleotide substitutions relative to a reference gRNA. In some embodiments, the at least one substitution comprises a substitution of 1, 2, 3, 4, 5, 6, 7, 8, 9, 10, 11, 12, 13, 14, 15, 16, 17, 18, 19 or 20 or more consecutive nucleotides relative to a reference gRNA. In some embodiments, the gNA variant comprises 2 or more substitutions relative to the reference gRNA, and the substitutions are not consecutive. In those embodiments where there are two or more non-consecutive substitutions in the gNA variant relative to the reference gRNA, any length of substituted nucleotides, and any combination of lengths of substituted nucleotides, as described herein, are contemplated as within the scope of the disclosure. For example, in some embodiments, a gNA variant may comprise a first substitution of one nucleotide, and a second substitution of two nucleotides and the two substitutions are not consecutive. In some embodiments, a gNA variant comprises at least two substitutions in different regions of the reference gRNA. In some embodiments, a gNA variant comprises at least two substitutions in the same region of the reference gRNA. For example, the regions may be the triplex, the extended stem loop, scaffold stem loop, scaffold stem bubble, triplex loop, pseudoknot, triplex, or a 5′ end of the gNA variant. Any substitution of A, G, C, U (or T, in the corresponding DNA) or combinations thereof at any location in the reference gRNA is contemplated as within the scope of the disclosure.

[0141] Any of the substitutions, insertions and deletions described herein can be combined to generate a gNA variant of the disclosure. For example, a gNA variant can comprise at least one substitution and at least one deletion relative to a reference gRNA, at least one substitution and at least one insertion relative to a reference gRNA, at least one insertion and at least one deletion relative to a reference gRNA, or at least one substitution, one insertion and one deletion relative to a reference gRNA.

[0142] In some embodiments, the gNA variant comprises a scaffold region at least 20% identical, at least 30% identical, at least 40% identical, at least 50% identical, at least 60% identical, at least 65% identical, at least 70% identical, at least 75% identical, at least 80% identical, at least 85% identical, at least 90% identical, at least 91% identical, at least 92% identical, at least 93% identical, at least 94% identical, at least 95% identical, at least 96% identical, at least 97% identical, at least 98% identical, or at least 99% identical to any one of SEQ ID NOS:4-16. In some embodiments, the gNA variant comprises a scaffold region at least 60% homologous (or identical) to any one of SEQ ID NOS:4-16.

[0143] In some embodiments, the gNA variant comprises a tracr stem loop at least 60% identical, at least 65% identical, at least 70% identical, at least 75% identical, at least 80% identical, at least 85% identical, at least 90% identical, or at least 95% identical to SEQ ID NO:14. In some embodiments, the gNA variant comprises a tracr stem loop at least 60% homologous (or identical) to SEQ ID NO:14.

[0144] In some embodiments, the gNA variant comprises an extended stem loop at least 60% identical, at least 65% identical, at least 70% identical, at least 75% identical, at least 80% identical, at least 85% identical, at least 90% identical, or at least 95% identical to SEQ ID NO:15. In some embodiments, the gNA variant comprises an extended stem loop at least 60% homologous (or identical) to SEQ ID NO:15.

[0145] In some embodiments, the gNA variant comprises an exogenous extended stem loop, with such differences from a reference gNA described as follows. In some embodiments, an exogenous extended stem loop has little or no identity to the reference stem loop regions disclosed herein (e.g., SEQ ID NO:15). In some embodiments, an exogenous stem loop is at least 10 bp, at least 20 bp, at least 30 bp, at least 40 bp, at least 50 bp, at least 60 bp, at least 70 bp, at least 80 bp, at least 90 bp, at least 100 bp, at least 200 bp, at least 300 bp, at least 400 bp, at least 500 bp, at least 600 bp, at least 700 bp, at least 800 bp, at least 900 bp, at least 1,000 bp, at least 2,000 bp, at least 3,000 bp, at least 4,000 bp, at least 5,000 bp, at least 6,000 bp, at least 7,000 bp, at least 8,000 bp, at least 9,000 bp, at least 10,000 bp, at least 12,000 bp, at least 15,000 bp or at least 20,000 bp. In some embodiments, the gNA variant comprises an extended stem loop region comprising at least 10, at least 100, at least 500, at least 1000, or at least 10,000 nucleotides. In some embodiments, the heterologous stem loop increases the stability of the gNA. In some embodiments, the heterologous RNA stem loop is capable of binding a protein, an RNA structure, a DNA sequence, or a small molecule. In some embodiments, an exogenous stem loop region replacing the stem loop comprises an RNA stem loop or hairpin in which the resulting gNA has increased stability and, depending on the choice of loop, can interact with certain cellular proteins or RNA. Such exogenous extended stem loops can comprise, for example a thermostable RNA such as MS2 (ACAUGAGGAUUACCCAUGU (SEQ ID NO: 35)), Qβ (UGCAUGUCUAAGACAGCA (SEQ ID NO: 36)), U1 hairpin II (AAUCCAUUGCACUCCGGAUU (SEQ ID NO: 37)), Uvsx (CCUCUUCGGAGG (SEQ ID NO: 38)), PP7 (AGGAGUUUCUAUGGAAACCCU (SEQ ID NO: 39)), Phage replication loop (AGGUGGGACGACCUCUCGGUCGUCCUAUCU (SEQ ID NO: 40)), Kissing loop_a (UGCUCGCUCCGUUCGAGCA (SEQ ID NO: 41)), Kissing loop_b1 (UGCUCGACGCGUCCUCGAGCA (SEQ ID NO: 42)), Kissing loop_b2 (UGCUCGUUUGCGGCUACGAGCA (SEQ ID NO: 43)), G quadriplex M3q (AGGGAGGGAGGGAGAGG (SEQ ID NO: 44)), G quadriplex telomere basket (GGUUAGGGUUAGGGUUAGG (SEQ ID NO: 45)), Sarcin-ricin loop (CUGCUCAGUACGAGAGGAACCGCAG (SEQ ID NO: 46)) or Pseudoknots (UACACUGGGAUCGCUGAAUUAGAGAUCGGCGUCCUUUCAUUCUAUAUACUUUGG AGUUUUAAAAUGUCUCUAAGUACA (SEQ ID NO: 47)). In some embodiments, an exogenous stem loop comprises a long non-coding RNA (lncRNA). As used herein, a lncRNA refers to a non-coding RNA that is longer than approximately 200 bp in length. In some embodiments, the 5′ and 3′ ends of the exogenous stem loop are base paired; i.e., interact to form a region of duplex RNA. In some embodiments, the 5′ and 3′ ends of the exogenous stem loop are base paired, and one or more regions between the 5′ and 3′ ends of the exogenous stem loop are not base paired. In some embodiments, the at least one nucleotide modification comprises: (a) substitution of 1 to 15 consecutive or non-consecutive nucleotides in the gNA variant in one or more regions; (b) a deletion of 1 to 10 consecutive or non-consecutive nucleotides in the gNA variant in one or more regions; (c) an insertion of 1 to 10 consecutive or non-consecutive nucleotides in the gNA variant in one or more regions; (d) a substitution of the scaffold stem loop or the extended stem loop with an RNA stem loop sequence from a heterologous RNA source with proximal 5′ and 3′ ends; or any combination of (a)-(d).

[0146] In some embodiments, the gNA variant comprises a scaffold stem loop sequence of CCAGCGACUAUGUCGUAGUGG (SEQ ID NO: 32). In some embodiments, the gNA variant comprises a scaffold stem loop sequence of CCAGCGACUAUGUCGUAGUGG (SEQ ID NO: 32) with at least 1, 2, 3, 4, or 5 mismatches thereto.

[0147] In some embodiments, the gNA variant comprises an extended stem loop region comprising less than 32 nucleotides, less than 31 nucleotides, less than 30 nucleotides, less than 29 nucleotides, less than 28 nucleotides, less than 27 nucleotides, less than 26 nucleotides, less than 25 nucleotides, less than 24 nucleotides, less than 23 nucleotides, less than 22 nucleotides, less than 21 nucleotides, or less than 20 nucleotides. In some embodiments, the gNA variant comprises an extended stem loop region comprising less than 32 nucleotides. In some embodiments, the gNA variant further comprises a thermostable stem loop.

[0148] In some embodiments, a sgRNA variant comprises a sequence of SEQ ID NOS: 2102-2285. In some embodiments, a sgRNA variant comprises a sequence of SEQ ID NO:2104, SEQ ID NO:2106, SEQ ID NO:2163, SEQ ID NO:2107, SEQ ID NO:2164, SEQ ID NO:2165, SEQ ID NO:2166, SEQ ID NO:2103, SEQ ID NO:2167, SEQ ID NO:2105, SEQ ID NO:2108, SEQ ID NO:2112, SEQ ID NO:2160, SEQ ID NO:2170, SEQ ID NO:2114, SEQ ID NO:2171, SEQ ID NO:2112, SEQ ID NO:2173, SEQ ID NO:2102, SEQ ID NO:2174, SEQ ID NO:2175, SEQ ID NO:2109, SEQ ID NO:2176, SEQ ID NO:2238, SEQ ID NO:2239, SEQ ID NO:2240, SEQ ID NO:2241, SEQ ID NO:2274, SEQ ID NO:2275, or 2279.

[0149] In some embodiments, the gNA variant comprises the sequence of any one of SEQ ID NOS:2236, 2237, 2238, 2241, 2244, 2248, 2249, or 2259-2285, or having at least about 80%, at least about 90%, at least about 95%, at least about 96%, at least about 97%, at least about 98%, at least about 99% identity thereto. In some embodiments, the gNA variant comprises one or more additional changes to a sequence of any one of SEQ ID NOs: 2201-2285. In some embodiments, the gNA variant comprises the sequence of any one of SEQ ID NOS:2236, 2237, 2238, 2241, 2244, 2248, 2249, or 2259-2285. In some embodiments, the gNA variant scaffold consists of the sequence of any one of SEQ ID NOS:2236, 2237, 2238, 2241, 2244, 2248, 2249, or 2259-2285, and further comprises a targeting sequence of any of the embodiments described herein.

[0150] In some embodiments, a sgRNA variant comprises one or more additional changes to a sequence of SEQ ID NO:2104, SEQ ID NO:2163, SEQ ID NO:2107, SEQ ID NO:2164, SEQ ID NO:2165, SEQ ID NO:2166, SEQ ID NO:2103, SEQ ID NO:2167, SEQ ID NO:2105, SEQ ID NO:2108, SEQ ID NO:2112, SEQ ID NO:2160, SEQ ID NO:2170, SEQ ID NO:2114, SEQ ID NO:2171, SEQ ID NO:2112, SEQ ID NO:2173, SEQ ID NO:2102, SEQ ID NO:2174, SEQ ID NO:2175, SEQ ID NO:2109, SEQ ID NO:2176, SEQ ID NO:2238, SEQ ID NO:2239, SEQ ID NO:2240, SEQ ID NO:2241, SEQ ID NO:2274, SEQ ID NO:2275, or 2279.

[0151] In some embodiments of the gNA variants of the disclosure, the gNA variant comprises at least one modification, wherein the at least one modification compared to the reference guide scaffold of SEQ ID NO:5 is selected from one or more of: (a) a C18G substitution in the triplex loop; (b) a G55 insertion in the stem bubble; (c) a U1 deletion; (d) a modification of the extended stem loop wherein (i) a 6 nt loop and 13 loop-proximal base pairs are replaced by a Uvsx hairpin; and (ii) a deletion of A99 and a substitution of G65U that results in a loop-distal base that is fully base-paired. In such embodiments, the gNA variant comprises the sequence of any one of SEQ ID NOS:2236, 2237, 2238, 2241, 2244, 2248, 2249, or 2259-2285.

[0152] In the embodiments of the gNA variants, the gNA variant further comprises a targeting sequence (or spacer) region located at the 3′ end of the gNA, described more fully, supra, which comprises at least 14 to about 35 nucleotides wherein the targeting sequence is designed with a sequence that is complementary to a target nucleic acid of the HTT gene. In some embodiments, the targeting sequence of a gNA is complementary to an HTT exon selected from the group consisting of exons 1-67. In other embodiments, the targeting sequence of the gNA is complementary to a region within or proximal to an exon comprising a duplication; e.g. the CAG repeats. In a particular embodiment, the targeting sequence is complementary to a sequence of exon 1 that is 5′ to the region of CAG repeats. In other embodiments, the targeting sequence of a gNA is specific for an HTT intronic region, an intron-exon junction of the HTT gene, or an intergenic region. In some embodiments, the targeting sequence of the gNA is complementary to a sequence comprising one or more single nucleotide polymorphisms (SNPs) of the HTT gene or its complement. SNPs that are within an HTT coding sequence or within an HTT non-coding sequence are both within the scope of the instant disclosure. Representative targeting sequences to SNPs known or believed to be associated with Huntington's disease are presented in Table 3A as SEQ ID NOS: 409-508. Additional representative targeting sequences are presented as SEQ ID NOS: 509-2100 and 2286-39966 in Table 3B. In some embodiments, the gNA variant comprises a targeting sequence of at least 10 to 30 nucleotides complementary to a target nucleic acid. In some embodiments, the targeting sequence has 14, 15, 16, 17, 18, 19, 20, 21, 22, 23, 24, 25, 26, 27, 28, 29, 30, 31, 32, 33, 34 or 35 nucleotides. In some embodiments, the gNA variant comprises a targeting sequence having 20 nucleotides. In some embodiments, the targeting sequence has 25 nucleotides. In some embodiments, the targeting sequence has 24 nucleotides. In some embodiments, the targeting sequence has 23 nucleotides. In some embodiments, the targeting sequence has 22 nucleotides. In some embodiments, the targeting sequence has 21 nucleotides. In some embodiments, the targeting sequence has 19 nucleotides. In some embodiments, the targeting sequence has 18 nucleotides. In some embodiments, the targeting sequence has 17 nucleotides. In some embodiments, the targeting sequence has 16 nucleotides. In some embodiments, the targeting sequence has 15 nucleotides. In some embodiments, the targeting sequence has 14 nucleotides. In some embodiments, the disclosure provides targeting sequences for inclusion in the gNA variants of the disclosure comprising a sequence that is at least 50% identical, at least 55% identical, at least 60% identical, at least 65% identical, at least 70% identical, at least 75% identical, at least 80% identical, at least 85% identical, at least 90% identical, at least 95% identical, or 100% identical to a sequence of SEQ ID NOs: SEQ ID NOS: 409-2100 or 2286-39966. In some embodiments, the disclosure provides targeting sequences for inclusion in the gNA variants of the disclosure comprising a sequence that is at least 50% identical, at least 55% identical, at least 60% identical, at least 65% identical, at least 70% identical, at least 75% identical, at least 80% identical, at least 85% identical, at least 90% identical, at least 95% identical, or 100% identical to a sequence of SEQ ID NOs: SEQ ID NOS: 409-508. In some embodiments, the targeting sequence of the gNA variant comprises a sequence a sequence of SEQ ID NOs: 409-2100 or 2286-39966 with a single nucleotide removed from the 3′ end of the sequence. In some embodiments, the targeting sequence of the gNA variant comprises a sequence a sequence of SEQ ID NOs: 409-508 with a single nucleotide removed from the 3′ end of the sequence. In other embodiments, the targeting sequence of the gNA variant comprises a sequence a sequence of SEQ ID NOs: 409-2100 or 2286-39966 with two nucleotides removed from the 3′ end of the sequence. In other embodiments, the targeting sequence of the gNA variant comprises a sequence a sequence of SEQ ID NOs: 409-508 with two nucleotides removed from the 3′ end of the sequence. In other embodiments, the targeting sequence of the gNA variant comprises a sequence a sequence of SEQ ID NOs: 409-2100 or 2286-39966 with three nucleotides removed from the 3′ end of the sequence. In other embodiments, the targeting sequence of the gNA variant comprises a sequence a sequence of SEQ ID NOs: 409-508 with three nucleotides removed from the 3′ end of the sequence. In other embodiments, the targeting sequence of the gNA variant comprises a sequence a sequence of SEQ ID NOs: 409-2100 or 2286-39966 with four nucleotides removed from the 3′ end of the sequence. In other embodiments, the targeting sequence of the gNA variant comprises a sequence a sequence of SEQ TD NOs: 409-508 with four nucleotides removed from the 3′ end of the sequence. In other embodiments, the targeting sequence of the gNA variant comprises a sequence a sequence of SEQ ID NOs: 409-2100 or 2286-39966 with five nucleotides removed from the 3′ end of the sequence. In other embodiments, the targeting sequence of the gNA variant comprises a sequence a sequence of SEQ TD NOs: 409-508 with five nucleotides removed from the 3′ end of the sequence.

TABLE 3A
Targeting Sequences for Mutant HTT Gene

| | SEQ | | SEQ |
|---|---|---|---|
| | ID | | ID |
| Sequence | NO: | Sequence | NO: |
| UUCGUUGAAAAGAAAACCUUACCG | 409 | UUCUAGUCCCAAAUCUGGGUGC | 459 |
| | | UA | |
| UUCUUUUCAACGAAAAGCAGCCCC | 410 | UUCUGUACACACGUGUCCUUGA | 460 |
| | | CA | |
| UUCAACGAAAAGCAGCCCCCAAGC | 411 | UUCAGAAUGCCUCAUCUGGUCA | 461 |
| | | AA | |
| UUCCUAGCUUGAACUUCCCCUUUA | 412 | UUCCCGCUGCGCCGUUUCUGCA | 462 |
| | | UA | |
| UUCAAAUACAAUGUCCAGCACACA | 413 | UUCUGCCAGCGCAUGUGUCCUU | 463 |
| | | UC | |
| UUCCUGGUAAUUUGUGUUUGUGUG | 414 | UUCCCCUUGAAAGGACACAUGC | 464 |
| | | GC | |
| UUCAUCCCAGUGAGAAAGAUCAAG | 415 | UUCCUCAUCGGAGAGCACACCC | 465 |
| | | UG | |
| UUCUCACUGGGAUGAACUAGCAGC | 416 | UUCAGUUGCGUUGAUUUGAUUU | 466 |
| | | UU | |
| UUCAAGCUAGUAACGAUGCUAACG | 417 | UUCAGAGGUUCGGUGGACACAG | 467 |
| | | GC | |
| UUCCCGCAGCUAGGCUAAAGAGUC | 418 | UUCGGUGGACACAGGCAGCUGC | 468 |
| | | CC | |
| UUCUUUGAUUGUGUUUCUUAUUUG | 419 | UUCUGGGUGCUGGAGAUAUCAU | 469 |
| | | GG | |
| UUCUCAUCAAAUAAGAAACACAAU | 420 | UUCUACCAAUUUUCUAUUUUUG | 470 |
| | | GA | |
| UUCUAAAAUACAGUAUACCUCCUC | 421 | UUCCACCUCUGAAACCCCGAAA | 471 |
| | | UU | |
| UUCAAACACAGAGGAGGUAUACUG | 422 | UUCUCAAAUUUCGGGGUUUCAG | 472 |
| | | AG | |
| UUCUGAUUGUUAAUCAUAAAGUCU | 423 | UUCGCUAUGAAGGCCUUUAACA | 473 |
| | | AA | |
| UUCUAGACUUUAUGAUUAACAAUC | 424 | UUCAGGUUCGCUAUGAAGGCCU | 474 |
| | | UU | |
| UUCCUCAUUGCACUUCCAUGUUGG | 425 | UUCAUAGCGAACCUGAAGUCAA | 475 |
| | | GC | |
| UUCAUUUGGGAUAUUUGACCUGCG | 426 | UUCCCCCUGUUAGCAAAAACGA | 476 |
| | | AG | |
| UUCUGAAGAGCUACAACGCAGGUC | 427 | UUCGUUUUUGCUAACAGGGGGA | 477 |
| | | AA | |
| UUCUUGUUCUCUCUUUUUCUUUGG | 428 | UUCCCAUUGGAUCUCUCAGCCC | 478 |
| | | AU | |
| UUCAAAUGGAGAAUACGGGUAACA | 429 | UUCCGGCCAAAAUCAAAGCAUC | 479 |
| | | UU | |
| UUCCAAGUAGUAGUUAGUAAUCAA | 430 | UUCUCUAACAAACCCCCCUUCU | 480 |
| | | CU | |
| UUCACAGCAAAUAAUUUUGGAAAG | 431 | UUCCGUGCUGUUCUGAAGAUCC | 481 |
| | | AG | |
| UUCCAAAAUUAUUUGCUGUGAAUU | 432 | UUCAGAACAGCACGGAAAAGUU | 482 |
| | | UG | |
| UUCUAAUUCACAGCAAAUAAUUUU | 433 | UUCUCCGCUCAGCCUUGGAUGU | 483 |
| | | UC | |
| UUCCUAAACUUCUAAUUCACAGCA | 434 | UCCGCUCAGCCUUGGAUGUUCU | 484 |
| | | UU | |
| UUCAUUCUCAAGUUAGUUUUAGAU | 435 | UUCCUGCAUCAGCUUUAUUUGU | 485 |
| | | UC | |
| UUCUCAAGUUAGUUUUAGAUUAGA | 436 | UUCUGGCCAUUUUGAGGGUUCU | 486 |
| | | GA | |
| UUCAGUCCUUUCUGCCCACCAGCA | 437 | CUCAAAAUGGCCAGAAUUCCCG | 487 |
| | | AU | |
| UUUCUGCCCACCAGCACAUGCUUU | 438 | UUCAACUCUUAUCUUGAAACCA | 488 |
| | | AU | |
| UUCUGCCCACCAGCACAUGCUUUC | 439 | UUCAAGAUAAGAGUUGAAAUAA | 489 |
| | | UU | |
| UUCUACUUGUAGAUUGAUUUAGGG | 440 | UUCCUCUGUGGCAGAGGGGAUG | 490 |
| | | GC | |
| UUCUCCCUAAAUCAAUCUACAAGU | 441 | CUCUGUGGCAGAGGGGAUGGCU | 491 |
| | | GC | |
| UUCCUAGUCAGUCUCGCCUUACCU | 442 | UUCUCUCGUGGUGACAGGUCAC | 492 |
| | | AG | |
| UUCUCCUGCUCCGCCUGCACCAUG | 443 | UUCGCAGUUUUUGCUUGAGUUG | 493 |
| | | UA | |
| UUCCCUAAAAACAAAAACAUCCAU | 444 | UUCAGACCCUAAUCCUGCAGCC | 494 |
| | | CC | |
| UUUUAGGGAAUCAGAGGCAAUCAU | 445 | UUCUCAUGAAGCAAAGCAAGCC | 495 |
| | | UC | |
| UUCUAUUGUCUGUCCCCUUACCCG | 446 | UUCAUGAGAACCUAGACCUUGC | 496 |
| | | UG | |
| UUCACUCACUUGCUUUUCUAUUGU | 447 | UUCUUGGUUUUGACAUGGACGC | 497 |
| | | GA | |
| UUCAUGCUGCCAAGGGAUGCUGAC | 448 | UUCUCUUUGUUCUGUUGUAAUU | 498 |
| | | UU | |
| UUCUAGCGUUGAAGUACUGUCCCC | 449 | UUCAUAUCCGCCUAUACCAUAC | 499 |
| | | AA | |
| UUCUUCUAGCGUUGAAGUACUGUC | 450 | UUCUACCUUCAUAUCCGCCUAU | 500 |
| | | AC | |
| UUCCUCACUGAGGAUGAAAUGGCA | 451 | UUCCUGAGCAAUGGCGUGAGAA | 501 |
| | | AC | |
| UUCAUCCUCAGUGAGGAAGGUGAU | 452 | UUCUCACGCCAUUGCUCAGGAA | 502 |
| | | CA | |
| UUCAUCCCACAGUGGUUUGCCUAU | 453 | UUCAUCUACCGCAUCAACACAC | 503 |
| | | UA | |
| UUCCAUUGCUCCCAGCAUUAUAAU | 454 | UUCAAGAAGCCUGAUAAAAUCU | 504 |
| | | CU | |
| UUCUCUUCCCCCGAGUCCCUUUGG | 455 | UUCUGUCAGCGUCACAUACAUC | 505 |
| | | AG | |
| UUCCCCCGAGUCCCUUUGGCUCCC | 456 | UUCACAGCUAUCUUCUCAUCAA | 506 |
| | | UA | |
| UUCUAUCCUGUCCCCAAGUUCAUC | 457 | UUCUUCACAGCUAUCUUCUCAU | 507 |
| | | CA | |
| UUCUGGUGAUGACAAUUUAUUAAU | 458 | UUCUUCUCUUUGUUCUGUUGUA | 508 |
| | | AU | |

TABLE 3B
Additional HTT Targeting Sequences

| PAM Type | SEQ IDs of spacers |
|---|---|
| ATCN | 509-2100, 2286-8051 |
| TTCN | 28985-39966 |
| GTCN | 21551-28984 |
| CTCN | 8052-21550 |

[0153] In some embodiments, the gNA variant further comprises a targeting sequence region located at the 3′ end of the gNA, wherein the targeting sequence is designed with a sequence that is complementary to a target nucleic acid. In some embodiments, the target nucleic acid comprises a PAMV sequence located 5′ of the targeting sequence with at least a single nucleotide separating the PAM from the first nucleotide of the targeting sequence. In some embodiments, the PAM is located on the non-targeted strand of the target region, i.e. the strand that is complementary to the target nucleic acid. In some embodiments, the PAM sequence is ATC. In some embodiments, the targeting sequence for an ATC PAM comprises SEQ ID NOs: 509-2100 or 2286-8051, or a sequence that is at least 50% identical, at least 55% identical, at least 60% identical, at least 65% identical, at least 70% identical, at least 75% identical, at least 80% identical, at least 85% identical, at least 90% identical, at least 95% identical, or at least 99% identical to SEQ ID NOs: 509-2100 or 2286-8051. In some embodiments, the targeting sequence for an ATC PAM is selected from the group consisting of SEQ ID NOs: 509-2100 or 2286-8051. In some embodiments, the PAM sequence is CTC. In some embodiments, the targeting sequence for a CTC PAM comprises SEQ ID NOs: 8052-21550, or a sequence that is at least 50% identical, at least 55% identical, at least 60% identical, at least 65% identical, at least 70% identical, at least 75% identical, at least 80% identical, at least 85% identical, at least 90% identical, at least 95% identical, or at least 99% identical to SEQ ID NOs: 8052-21550. In some embodiments, the targeting sequence for a CTC PAM is selected from the group consisting of SEQ ID NOs: 8052-21550. In some embodiments, the PAM sequence is GTC. In some embodiments, the targeting sequences for a GTC PAM comprises SEQ ID NOs: 21551-28984 or a sequence that is at least 50% identical, at least 55% identical, at least 60% identical, at least 65% identical, at least 70% identical, at least 75% identical, at least 80% identical, at least 85% identical, at least 90% identical, at least 95% identical, or at least 99% identical to SEQ ID NOs: 21551-28984. In some embodiments, the targeting sequence for a GTC PAM is selected from the group consisting of SEQ ID NOs: 21551-28984. In some embodiments, the PAM sequence is TTC. In some embodiments, a targeting sequences for a TTC PAM comprises SEQ ID NOs: 28985-39966, or a sequence that is at least 50% identical, at least 55% identical, at least 60% identical, at least 65% identical, at least 70% identical, at least 75% identical, at least 80% identical, at least 85% identical, at least 90% identical, at least 95% identical, or at least 99% identical to SEQ ID NOs: 28985-39966. In some embodiments, a targeting sequence for a TTC PAM is selected from the group consisting of SEQ ID NOs: 28985-39966.

[0154] In some embodiments, the scaffold of the gNA variant is part of an RNP with a CasX variant protein comprising any one of the sequences of SEQ ID NOS: 49-160, 221-223, 227-230, 235-247, or 258-267 as set forth in Tables 4, 6, 7, 8, or 10 or a sequence having at least about 50%, at least about 60%, at least about 70%, at least about 80%, at least about 85%, at least about 90%, at least about 91%, at least about 92%, at least about 93%, at least about 94%, at least about 95%, at least about 96%, at least about 97%, at least about 98%, or at least about 99% identity thereto. In the foregoing embodiments, the gNA further comprises a targeting sequence.

[0155] In some embodiments, the scaffold of the gNA variant is a variant comprising one or more additional changes to a sequence of a reference gRNA that comprises SEQ ID NO:4 or SEQ ID NO:5. In those embodiments where the scaffold of the reference gRNA is derived from SEQ ID NO:4 or SEQ ID NO:5, the one or more improved or added characteristics of the gNA variant are improved compared to the same characteristic in SEQ ID NO:4 or SEQ ID NO:5.

[0156] h. Complex Formation with CasX Protein

[0157] In some embodiments, a gNA variant has an improved ability to form a complex with a CasX protein (such as a reference CasX or a CasX variant protein) when compared to a reference gRNA. In some embodiments, a gNA variant has an improved affinity for a CasX protein (such as a reference or variant protein) when compared to a reference gRNA, thereby improving its ability to form a ribonucleoprotein (RNP) complex with the CasX protein, as described in the Examples. Improving ribonucleoprotein complex formation may, in some embodiments, improve the efficiency with which functional RNPs are assembled. In some embodiments, greater than 90%, greater than 93%, greater than 95%, greater than 96%, greater than 97%, greater than 98% or greater than 99% of RNPs comprising a gNA variant and its targeting sequence are competent for gene editing of a target nucleic acid.

[0158] Exemplary nucleotide changes that can improve the ability of gNA variants to form a complex with CasX protein may, in some embodiments, include replacing the scaffold stem with a thermostable stem loop. Without wishing to be bound by any theory, replacing the scaffold stem with a thermostable stem loop could increase the overall binding stability of the gNA variant with the CasX protein. Alternatively, or in addition, removing a large section of the stem loop could change the gNA variant folding kinetics and make a functional folded gNA easier and quicker to structurally-assemble, for example by lessening the degree to which the gNA variant can get “tangled” in itself. In some embodiments, choice of scaffold stem loop sequence could change with different targeting sequences that are utilized for the gNA. In some embodiments, scaffold sequence can be tailored to the targeting sequence and therefore the target sequence. Biochemical assays can be used to evaluate the binding affinity of CasX protein for the gNA variant to form the RNP, including the assays of the Examples. For example, a person of ordinary skill can measure changes in the amount of a fluorescently tagged gNA that is bound to an immobilized CasX protein, as a response to increasing concentrations of an additional unlabeled “cold competitor” gNA. Alternatively, or in addition, fluorescence signal can be monitored to or seeing how it changes as different amounts of fluorescently labeled gNA are flowed over immobilized CasX protein. Alternatively, the ability to form an RNP can be assessed using in vitro cleavage assays against a defined target nucleic acid sequence.

[0159] i. gNA Stability

[0160] In some embodiments, a gNA variant has improved stability when compared to a reference gRNA. Increased stability and efficient folding may, in some embodiments, increase the extent to which a gNA variant persists inside a target cell, which may thereby increase the chance of forming a functional RNP capable of carrying out CasX functions such as gene editing. Increased stability of gNA variants may also, in some embodiments, allow for a similar outcome with a lower amount of gNA delivered to a cell, which may in turn reduce the chance of off-target effects during gene editing. Guide RNA stability can be assessed in a variety of ways, including for example in vitro by assembling the guide, incubating for varying periods of time in a solution that mimics the intracellular environment, and then measuring functional activity via the in vitro cleavage assays described herein. Alternatively, or in addition, gNAs can be harvested from cells at varying time points after initial transfection/transduction of the gNA to determine how long gNA variants persist relative to reference gRNAs.

[0161] j. Solubility

[0162] In some embodiments, a gNA variant has improved solubility when compared to a reference gRNA. In some embodiments, a gNA variant has improved solubility of the CasX protein:gNA RNP when compared to a reference gRNA. In some embodiments, solubility of the CasX protein:gNA RNP is improved by the addition of a ribozyme sequence to a 5′ or 3′ end of the gNA variant, for example the 5′ or 3′ of a reference sgRNA. Some ribozymes, such as the M1 ribozyme, can increase solubility of proteins through RNA mediated protein folding. Increased solubility of CasX RNPs comprising a gNA variant as described herein can be evaluated through a variety of means known to one of skill in the art, such as by taking densitometry readings on a gel of the soluble fraction of lysed E. coli in which the CasX and gNA variants are expressed.

[0163] k. Resistance to Nuclease Activity

[0164] In some embodiments, a gNA variant has improved resistance to nuclease activity compared to a reference gRNA that may, for example, increase the persistence of a variant gNA in an intracellular environment, thereby improving gene editing. Resistance to nuclease activity may be evaluated through a variety of methods known to one of skill in the art. For example, in vitro methods of measuring resistance to nuclease activity may include for example contacting reference gNA and variants with one or more exemplary RNA nucleases and measuring degradation. Alternatively, or in addition, measuring persistence of a gNA variant in a cellular environment using the methods described herein can indicate the degree to which the gNA variant is nuclease resistant.

[0165] l. Binding Affinity to a Target DNA

[0166] In some embodiments, a gNA variant has improved affinity for the target DNA relative to a reference gRNA. In certain embodiments, a ribonucleoprotein complex comprising a gNA variant has improved affinity for the target DNA, relative to the affinity of an RNP comprising a reference gRNA. In some embodiments, the improved affinity of the RNP for the target DNA comprises improved affinity for the target sequence, improved affinity for the PAM sequence, improved ability of the RNP to search DNA for the target sequence, or any combinations thereof. In some embodiments, the improved affinity for the target DNA is the result of increased overall DNA binding affinity.

[0167] Without wishing to be bound by theory, it is possible that nucleotide changes in the gNA variant that affect the function of the OBD in the CasX protein may increase the affinity of CasX variant protein binding to the protospacer adjacent motif (PAM), as well as the ability to bind or utilize an increased spectrum of PAM sequences other than the canonical TTC PAM recognized by the reference CasX protein of SEQ ID NO:2, including PAM sequences selected from the group consisting of TTC, ATC, GTC, and CTC, thereby increasing the affinity and diversity of the CasX variant protein for target DNA sequences, resulting in a substantial increase in the target nucleic acid sequences that can be edited and/or bound, compared to a reference CasX. As described more fully, below, increasing the sequences of the target nucleic acid that can be edited, compared to a reference CasX, refers to both the PAM and the protospacer sequence and their directionality according to the orientation of the non-target strand. This does not imply that the PAM sequence of the non-target strand, rather than the target strand, is determinative of cleavage or mechanistically involved in target recognition. For example, when reference is to a TTC PAM, it may in fact be the complementary GAA sequence that is required for target cleavage, or it may be some combination of nucleotides from both strands. In the case of the CasX proteins disclosed herein, the PAM is located 5′ of the protospacer with at least a single nucleotide separating the PAM from the first nucleotide of the protospacer. Alternatively, or in addition, changes in the gNA that affect function of the helical I and/or helical II domains that increase the affinity of the CasX variant protein for the target DNA strand can increase the affinity of the CasX RNP comprising the variant gNA for target DNA.

[0168] m. Adding or Changing gNA Function

[0169] In some embodiments, gNA variants can comprise larger structural changes that change the topology of the gNA variant with respect to the reference gRNA, thereby allowing for different gNA functionality. For example, in some embodiments a gNA variant has swapped an endogenous stem loop of the reference gRNA scaffold with a previously identified stable RNA structure or a stem loop that can interact with a protein or RNA binding partner to recruit additional moieties to the CasX or to recruit CasX to a specific location, such as the inside of a viral capsid, that has the binding partner to the said RNA structure. In other scenarios the RNAs may be recruited to each other, as in Kissing loops, such that two CasX proteins can be co-localized for more effective gene editing at the target DNA sequence. Such RNA structures may include MS2, Qβ, U1 hairpin II, Uvsx, PP7, Phage replication loop, Kissing loop_a, Kissing loop_b1, Kissing loop_b2, G quadriplex M3q, G quadriplex telomere basket, Sarcin-ricin loop, or a Pseudoknot.

[0170] In some embodiments, a gNA variant comprises a terminal fusion partner. Exemplary terminal fusions may include fusion of the gRNA to a self-cleaving ribozyme or protein binding motif As used herein, a “ribozyme” refers to an RNA or segment thereof with one or more catalytic activities similar to a protein enzyme. Exemplary ribozyme catalytic activities may include, for example, cleavage and/or ligation of RNA, cleavage and/or ligation of DNA, or peptide bond formation. In some embodiments, such fusions could either improve scaffold folding or recruit DNA repair machinery. For example, a gRNA may in some embodiments be fused to a hepatitis delta virus (HDV) antigenomic ribozyme, HDV genomic ribozyme, hatchet ribozyme (from metagenomic data), env25 pistol ribozyme (representative from Aliistipes putredinis), HH15 Minimal Hammerhead ribozyme, tobacco ringspot virus (TRSV) ribozyme, WT viral Hammerhead ribozyme (and rational variants), or Twisted Sister 1 or RBMX recruiting motif Hammerhead ribozymes are RNA motifs that catalyze reversible cleavage and ligation reactions at a specific site within an RNA molecule. Hammerhead ribozymes include type I, type II and type III hammerhead ribozymes. The HDV, pistol, and hatchet ribozymes have self-cleaving activities. gNA variants comprising one or more ribozymes may allow for expanded gNA function as compared to a gRNA reference. For example, gNAs comprising self-cleaving ribozymes can, in some embodiments, be transcribed and processed into mature gNAs as part of polycistronic transcripts. Such fusions may occur at either the 5′ or the 3′ end of the gNA. In some embodiments, a gNA variant comprises a fusion at both the 5′ and the 3′ end, wherein each fusion is independently as described herein. In some embodiments, a gNA variant comprises a phage replication loop or a tetraloop. In some embodiments, a gNA comprises a hairpin loop that is capable of binding a protein. For example, in some embodiments the hairpin loop is an MS2, Qβ, U1 hairpin II, Uvsx, or PP7 hairpin loop.

[0171] In some embodiments, a gNA variant comprises one or more RNA aptamers. As used herein, an “RNA aptamer” refers to an RNA molecule that binds a target with high affinity and high specificity. In some embodiments, a gNA variant comprises one or more riboswitches. As used herein, a “riboswitch” refers to an RNA molecule that changes state upon binding a small molecule. In some embodiments, the gNA variant further comprises one or more protein binding motifs. Adding protein binding motifs to a reference gRNA or gNA variant of the disclosure may, in some embodiments, allow a CasX RNP to associate with additional proteins, which can, for example, add the functionality of those proteins to the CasX RNP.

[0172] n. Chemically Modified gNA

[0173] In some embodiments, the disclosure relates to chemically-modified gNA. In some embodiments, the present disclosure provides a chemically-modified gNA that has guide RNA functionality and has reduced susceptibility to cleavage by a nuclease. A gNA that comprises any nucleotide other than the four canonical ribonucleotides A, C, G, and U, or a deoxynucleotide, is a chemically modified gNA. In some cases, a chemically-modified gNA comprises any backbone or internucleotide linkage other than a natural phosphodiester internucleotide linkage. In certain embodiments, the retained functionality includes the ability of the modified gNA to bind to a CasX of any of the embodiments described herein. In certain embodiments, the retained functionality includes the ability of the modified gNA to bind to a target nucleic acid sequence. In certain embodiments, the retained functionality includes targeting a CasX protein or the ability of a pre-complexed CasX protein-gNA to bind to a target nucleic acid sequence. In certain embodiments, the retained functionality includes the ability to nick a target polynucleotide by a CasX-gNA. In certain embodiments, the retained functionality includes the ability to cleave a target nucleic acid sequence by a CasX-gNA. In certain embodiments, the retained functionality is any other known function of a gNA in a CasX system with a CasX protein of the embodiments of the disclosure.

[0174] In some embodiments, the disclosure provides a chemically-modified gNA in which a nucleotide sugar modification is incorporated into the gNA selected from the group consisting of 2′-OC₁₋₄alkyl such as 2′-O-methyl (2′-OMe), 2′-deoxy (2′-H), 2′-OC₁₋₃alkyl-O—C₁₋₃alkyl such as 2′-methoxyethyl (“2′-MOE”), 2′-fluoro (“2′-F”), 2′-amino (“2′-NH₂”), 2′-arabinosyl (“2′-arabino”) nucleotide, 2′-F-arabinosyl (“2′-F-arabino”) nucleotide, 2′-locked nucleic acid (“LNA”) nucleotide, 2′-unlocked nucleic acid (“ULNA”) nucleotide, a sugar in L form (“L-sugar”), and 4′-thioribosyl nucleotide. In other embodiments, an internucleotide linkage modification incorporated into the guide RNA is selected from the group consisting of: phosphorothioate “P(S)” (P(S)), phosphonocarboxylate (P(CH₂)ₙCOOR) such as phosphonoacetate “PACE” (P(CH₂COO⁻)), thiophosphonocarboxylate ((S)P(CH₂)ₙCOOR) such as thiophosphonoacetate “thioPACE” ((S)P(CH₂)ₙCOO⁻)), alkylphosphonate (P(C₁₋₃alkyl) such as methylphosphonate P(CH₃), boranophosphonate (P(BH₃)), and phosphorodithioate (P(S)₂).

[0175] In certain embodiments, the disclosure provides a chemically-modified gNA in which a nucleobase (“base”) modification is incorporated into the gNA selected from the group consisting of: 2-thiouracil (“2-thioU”), 2-thiocytosine (“2-thioC”), 4-thiouracil (“4-thioU”), 6-thioguanine (“6-thioG”), 2-aminoadenine (“2-aminoA”), 2-aminopurine, pseudouracil, hypoxanthine, 7-deazaguanine, 7-deaza-8-azaguanine, 7-deazaadenine, 7-deaza-8-azaadenine, 5-methylcytosine (“5-methylC”), 5-methyluracil (“5-methylU”), 5-hydroxymethylcytosine, 5-hydroxymethyluracil, 5,6-dehydrouracil, 5-propynylcytosine, 5-propynyluracil, 5-ethynylcytosine, 5-ethynyluracil, 5-allyluracil (“5-allylU”), 5-allylcytosine (“5-allylC”), 5-aminoallyluracil (“5-aminoallylU”), 5-aminoallyl-cytosine (“5-aminoallylC”), an abasic nucleotide, Z base, P base, Unstructured Nucleic Acid (“UNA”), isoguanine (“isoG”), isocytosine (“isoC”), 5-methyl-2-pyrimidine, x(A,G,C,T) and y(A,G,C,T).

[0176] In other embodiments, the disclosure provides a chemically-modified gNA in which one or more isotopic modifications are introduced on the nucleotide sugar, the nucleobase, the phosphodiester linkage and/or the nucleotide phosphates, including nucleotides comprising one or more ¹⁵N, ¹³C, ¹⁴C, deuterium, ³H, ³²P, ¹²⁵I, ³¹I atoms or other atoms or elements used as tracers.

[0177] In some embodiments, an “end” modification incorporated into the gNA is selected from the group consisting of: PEG (polyethyleneglycol), hydrocarbon linkers (including: heteroatom (O,S,N)-substituted hydrocarbon spacers; halo-substituted hydrocarbon spacers; keto-, carboxyl-, amido-, thionyl-, carbamoyl-, thionocarbamaoyl-containing hydrocarbon spacers), spermine linkers, dyes including fluorescent dyes (for example fluoresceins, rhodamines, cyanines) attached to linkers such as for example 6-fluorescein-hexyl, quenchers (for example dabcyl, BHQ) and other labels (for example biotin, digoxigenin, acridine, streptavidin, avidin, peptides and/or proteins). In some embodiments, an “end” modification comprises a conjugation (or ligation) of the gNA to another molecule comprising an oligonucleotide of deoxynucleotides and/or ribonucleotides, a peptide, a protein, a sugar, an oligosaccharide, a steroid, a lipid, a folic acid, a vitamin and/or other molecule. In certain embodiments, the disclosure provides a chemically-modified gNA in which an “end” modification (described above) is located internally in the gNA sequence via a linker such as, for example, a 2-(4-butylamidofluorescein)propane-1,3-diol bis(phosphodiester) linker, which is incorporated as a phosphodiester linkage and can be incorporated anywhere between two nucleotides in the gNA.

[0178] In some embodiments, the disclosure provides a chemically-modified gNA having an end modification comprising a terminal functional group such as an amine, a thiol (or sulfhydryl), a hydroxyl, a carboxyl, carbonyl, thionyl, thiocarbonyl, a carbamoyl, a thiocarbamoyl, a phoshoryl, an alkene, an alkyne, an halogen or a functional group-terminated linker that can be subsequently conjugated to a desired moiety selected from the group consisting of a fluorescent dye, a non-fluorescent label, a tag (for ¹⁴C, example biotin, avidin, streptavidin, or moiety containing an isotopic label such as ¹⁵N, ¹³C, deuterium, ³H, ³²P ¹²⁵I and the like), an oligonucleotide (comprising deoxynucleotides and/or ribonucleotides, including an aptamer), an amino acid, a peptide, a protein, a sugar, an oligosaccharide, a steroid, a lipid, a folic acid, and a vitamin. The conjugation employs standard chemistry well-known in the art, including but not limited to coupling via N-hydroxysuccinimide, isothiocyanate, DCC (or DCI), and/or any other standard method as described in “Bioconjugate Techniques” by Greg T. Hermanson, Publisher Elsevier Science, 3^{rd} ed. (2013), the contents of which are incorporated herein by reference in its entirety.

### IV. Proteins for Modifying a Target Nucleic Acid

[0179] The present disclosure provides systems comprising a CRISPR nuclease that have utility in genome editing of eukaryotic cells. In some embodiments, the CRISPR nuclease employed in the genome editing systems is a Class 2, Type V nuclease. Although members of Class 2, Type V CRISPR-Cas systems have differences, they share some common characteristics that distinguish them from the Cas9 systems. Firstly, the Type V nucleases possess a single RNA-guided RuvC domain-containing effector but no HNH domain, and they recognize T-rich PAM 5′ upstream to the target region on the non-targeted strand, which is different from Cas9 systems which rely on G-rich PAM at 3′ side of target sequences. Type V nucleases generate staggered double-stranded breaks distal to the PAM sequence, unlike Cas9, which generates a blunt end in the proximal site close to the PAM. In addition, Type V nucleases degrade ssDNA in trans when activated by target dsDNA or ssDNA binding in cis. In some embodiments, the Type V nucleases of the embodiments recognize a 5′-TC PAM motif and produce staggered ends cleaved solely by the RuvC domain. In some embodiments, the Type V nuclease is selected from the group consisting of Cas12a, Cas12b, Cas12c, Cas12d (CasY), and CasX. In some embodiments, the present disclosure provides systems comprising a CasX protein and one or more gNA acids (CasX:gNA system) that are specifically designed to modify a target nucleic acid sequence in eukaryotic cells.

[0180] The term “CasX protein”, as used herein, refers to a family of proteins, and encompasses all naturally occurring CasX proteins, proteins that share at least 50% identity to naturally occurring CasX proteins, as well as CasX variants exhibiting one or more improved characteristics relative to a naturally-occurring reference CasX protein.

[0181] Exemplary improved characteristics of the CasX variant embodiments include, but are not limited to improved folding of the variant, improved binding affinity to the gNA, improved binding affinity to the target nucleic acid, improved ability to utilize a greater spectrum of PAM sequences in the editing and/or binding of target DNA, improved unwinding of the target DNA, increased editing activity, improved editing efficiency, improved editing specificity, increased percentage of a eukaryotic genome that can be efficiently edited, increased activity of the nuclease, increased target strand loading for double strand cleavage, decreased target strand loading for single strand nicking, decreased off-target cleavage, improved binding of the non-target strand of DNA, improved protein stability, improved protein:gNA (RNP) complex stability, improved protein solubility, improved protein:gNA (RNP) complex solubility, improved protein yield, improved protein expression, and improved fusion characteristics, as described more fully, below. In some embodiments, the RNP of the CasX variant and the gNA variant exhibit one or more of the improved characteristics that are at least about 1.1 to about 100,000-fold improved relative to an RNP of the reference CasX protein of SEQ ID NO:1, SEQ ID NO:2, or SEQ ID NO:3 and the gNA of Table 1, when assayed in a comparable fashion. In other cases, the one or more improved characteristics of an RNP of the CasX variant and the gNA variant are at least about 1.1, at least about 10, at least about 100, at least about 1000, at least about 10,000, at least about 100,000-fold or more improved relative to an RNP of the reference CasX protein of SEQ ID NO:1, SEQ ID NO:2, or SEQ ID NO:3 and the gNA of Table 1. In other cases, the one or more of the improved characteristics of an RNP of the CasX variant and the gNA variant are about 1.1 to 100,00-fold, about 1.1 to 10,00-fold, about 1.1 to 1,000-fold, about 1.1 to 500-fold, about 1.1 to 100-fold, about 1.1 to 50-fold, about 1.1 to 20-fold, about 10 to 100,00-fold, about 10 to 10,00-fold, about 10 to 1,000-fold, about 10 to 500-fold, about 10 to 100-fold, about 10 to 50-fold, about 10 to 20-fold, about 2 to 70-fold, about 2 to 50-fold, about 2 to 30-fold, about 2 to 20-fold, about 2 to 10-fold, about 5 to 50-fold, about 5 to 30-fold, about 5 to 10-fold, about 100 to 100,00-fold, about 100 to 10,00-fold, about 100 to 1,000-fold, about 100 to 500-fold, about 500 to 100,00-fold, about 500 to 10,00-fold, about 500 to 1,000-fold, about 500 to 750-fold, about 1,000 to 100,00-fold, about 10,000 to 100,00-fold, about 20 to 500-fold, about 20 to 250-fold, about 20 to 200-fold, about 20 to 100-fold, about 20 to 50-fold, about 50 to 10,000-fold, about 50 to 1,000-fold, about 50 to 500-fold, about 50 to 200-fold, or about 50 to 100-fold, improved relative to an RNP of the reference CasX protein of SEQ ID NO:1, SEQ ID NO:2, or SEQ ID NO:3 and the gNA of Table 1, when assayed in a comparable fashion. In other cases, the one or more improved characteristics of an RNP of the CasX variant and the gNA variant are about 1.1-fold, 1.2-fold, 1.3-fold, 1.4-fold, 1.5-fold, 1.6-fold, 1.7-fold, 1.8-fold, 1.9-fold, 2-fold, 3-fold, 4-fold, 5-fold, 6-fold, 7-fold, 8-fold, 9-fold, 10-fold, 11-fold, 12-fold, 13-fold, 14-fold, 15-fold, 16-fold, 17-fold, 18-fold, 19-fold, 20-fold, 25-fold, 30-fold, 40-fold, 45-fold, 50-fold, 55-fold, 60-fold, 70-fold, 80-fold, 90-fold, 100-fold, 110-fold, 120-fold, 130-fold, 140-fold, 150-fold, 160-fold, 170-fold, 180-fold, 190-fold, 200-fold, 210-fold, 220-fold, 230-fold, 240-fold, 250-fold, 260-fold, 270-fold, 280-fold, 290-fold, 300-fold, 310-fold, 320-fold, 330-fold, 340-fold, 350-fold, 360-fold, 370-fold, 380-fold, 390-fold, 400-fold, 425-fold, 450-fold, 475-fold, or 500-fold improved relative to an RNP of the reference CasX protein of SEQ ID NO:1, SEQ ID NO:2, or SEQ ID NO:3 and the gNA of Table 1, when assayed in a comparable fashion.

[0182] The term “CasX variant” is inclusive of variants that are fusion proteins; i.e., the CasX is “fused to” a heterologous sequence. This includes CasX variants comprising CasX variant sequences and N-terminal, C-terminal, or internal fusions of the CasX to a heterologous protein or domain thereof.

[0183] CasX proteins of the disclosure comprise at least one of the following domains: a non-target strand binding (NTSB) domain, a target strand loading (TSL) domain, a helical I domain, a helical II domain, an oligonucleotide binding domain (OBD), and a RuvC DNA cleavage domain (the last of which may be modified or deleted in a catalytically dead CasX variant), described more fully, below. Additionally, the CasX variant proteins of the disclosure have an enhanced ability to efficiently edit and/or bind target DNA, when complexed with a gNA as an RNP, utilizing PAM TC motif, including PAM sequences selected from TTC, ATC, GTC, or CTC, compared to an RNP of a reference CasX protein and reference gNA. In the foregoing, the PAM sequence is located at least 1 nucleotide 5′ to the non-target strand of the protospacer having identity with the targeting sequence of the gNA in a assay system compared to the editing efficiency and/or binding of an RNP comprising a reference CasX protein and reference gNA in a comparable assay system. In one embodiment, an RNP of a CasX variant and gNA variant exhibits greater editing efficiency and/or binding of a target sequence in the target DNA compared to an RNP comprising a reference CasX protein and a reference gNA in a comparable assay system, wherein the PAM sequence of the target DNA is TTC. In another embodiment, an RNP of a CasX variant and gNA variant exhibits greater editing efficiency and/or binding of a target sequence in the target DNA compared to an RNP comprising a reference CasX protein and a reference gNA in a comparable assay system, wherein the PAM sequence of the target DNA is ATC. In another embodiment, an RNP of a CasX variant and gNA variant exhibits greater editing efficiency and/or binding of a target sequence in the target DNA compared to an RNP comprising a reference CasX protein and a reference gNA in a comparable assay system, wherein the PAM sequence of the target DNA is CTC. In another embodiment, an RNP of a CasX variant and gNA variant exhibits greater editing efficiency and/or binding of a target sequence in the target DNA compared to an RNP comprising a reference CasX protein and a reference gNA in a comparable assay system, wherein the PAM sequence of the target DNA is GTC. In the foregoing embodiments, the increased editing efficiency and/or binding affinity for the one or more PAM sequences is at least 1.5-fold greater or more compared to the editing efficiency and/or binding affinity of an RNP of any one of the CasX proteins of SEQ ID NOS:1-3 and the gNA of Table 1 for the PAM sequences.

[0184] In some embodiments, a CasX protein can bind and/or modify (e.g., cleave, nick, methylate, demethylate, etc.) a target nucleic acid and/or a polypeptide associated with target nucleic acid (e.g., methylation or acetylation of a histone tail). In some embodiments, the CasX protein is catalytically dead (dCasX) but retains the ability to bind a target nucleic acid. An exemplary catalytically dead CasX protein comprises one or more mutations in the active site of the RuvC domain of the CasX protein. In some embodiments, a catalytically dead CasX protein comprises substitutions at residues 672, 769 and/or 935 of SEQ ID NO:1. In one embodiment, a catalytically dead CasX protein comprises substitutions of D672A, E769A and/or D935A in a reference CasX protein of SEQ ID NO:1. In other embodiments, a catalytically dead CasX protein comprises substitutions at amino acids 659, 756 and/or 922 in a reference CasX protein of SEQ ID NO:2. In some embodiments, a catalytically dead CasX protein comprises D659A, E756A and/or D922A substitutions in a reference CasX protein of SEQ ID NO:2. In further embodiments, a catalytically dead CasX protein comprises deletions of all or part of the RuvC domain of the CasX protein. It will be understood that the same foregoing substitutions can similarly be introduced into the CasX variants of the disclosure, resulting in a dCasX variant. In one embodiment, all or a portion of the RuvC domain is deleted from the CasX variant, resulting in a dCasX variant. Catalytically inactive dCasX variant proteins can, in some embodiments, be used for base editing or epigenetic modifications. With a higher affinity for DNA, in some embodiments, catalytically inactive dCasX variant proteins can, relative to catalytically active CasX, find their target nucleic acid faster, remain bound to target nucleic acid for longer periods of time, bind target nucleic acid in a more stable fashion, or a combination thereof, thereby improving these functions of the catalytically dead CasX variant protein compared to a CasX variant that retains its cleavage capability.

[0185] a. Non-Target Strand Binding Domain

[0186] The reference CasX proteins of the disclosure comprise a non-target strand binding domain (NTSBD). The NTSBD is a domain not previously found in any Cas proteins; for example this domain is not present in Cas proteins such as Cas9, Cas12a/Cpf1, Cas13, Cas14, CASCADE, CSM, or CSY. Without being bound to theory or mechanism, a NTSBD in a CasX allows for binding to the non-target DNA strand and may aid in unwinding of the non-target and target strands. The NTSBD is presumed to be responsible for the unwinding, or the capture, of a non-target DNA strand in the unwound state. The NTSBD is in direct contact with the non-target strand in CryoEM model structures derived to date and may contain a non-canonical zinc finger domain. The NTSBD may also play a role in stabilizing DNA during unwinding, guide RNA invasion and R-loop formation. In some embodiments, an exemplary NTSBD comprises amino acids 101-191 of SEQ ID NO:1 or amino acids 103-192 of SEQ ID NO:2. In some embodiments, the NTSBD of a reference CasX protein comprises a four-stranded beta sheet.

[0187] b. Target Strand Loading Domain

[0188] The reference CasX proteins of the disclosure comprise a Target Strand Loading (TSL) domain. The TSL domain is a domain not found in certain Cas proteins such as Cas9, CASCADE, CSM, or CSY. Without wishing to be bound by theory or mechanism, it is thought that the TSL domain is responsible for aiding the loading of the target DNA strand into the RuvC active site of a CasX protein. In some embodiments, the TSL acts to place or capture the target-strand in a folded state that places the scissile phosphate of the target strand DNA backbone in the RuvC active site. The TSL comprises a cys4 (CXXC, CXXC zinc finger/ribbon domain (SEQ ID NO: 48) that is separated by the bulk of the TSL. In some embodiments, an exemplary TSL comprises amino acids 825-934 of SEQ ID NO:1 or amino acids 813-921 of SEQ ID NO:2.

[0189] c. Helical I Domain

[0190] The reference CasX proteins of the disclosure comprise a helical I domain. Certain Cas proteins other than CasX have domains that may be named in a similar way. However, in some embodiments, the helical I domain of a CasX protein comprises one or more unique structural features, or comprises a unique sequence, or a combination thereof, compared to non-CasX proteins. For example, in some embodiments, the helical I domain of a CasX protein comprises one or more unique secondary structures compared to domains in other Cas proteins that may have a similar name. For example, in some embodiments the helical I domain in a CasX protein comprises one or more alpha helices of unique structure and sequence in arrangement, number and length compared to other CRISPR proteins. In certain embodiments, the helical I domain is responsible for interacting with the bound DNA and targeting sequence of the guide RNA. Without wishing to be bound by theory, it is thought that in some cases the helical I domain may contribute to binding of the protospacer adjacent motif (PAM). In some embodiments, an exemplary helical I domain comprises amino acids 57-100 and 192-332 of SEQ ID NO:1, or amino acids 59-102 and 193-333 of SEQ ID NO:2. In some embodiments, the helical I domain of a reference CasX protein comprises one or more alpha helices.

[0191] d. Helical II Domain

[0192] The reference CasX proteins of the disclosure comprise a helical II domain. Certain Cas proteins other than CasX have domains that may be named in a similar way. However, in some embodiments, the helical II domain of a CasX protein comprises one or more unique structural features, or a unique sequence, or a combination thereof, compared to domains in other Cas proteins that may have a similar name. For example, in some embodiments, the helical II domain comprises one or more unique structural alpha helical bundles that align along the target DNA:guide RNA channel. In some embodiments, in a CasX comprising a helical II domain, the target strand and guide RNA interact with helical II (and the helical I domain, in some embodiments) to allow RuvC domain access to the target DNA. The helical II domain is responsible for binding to the guide RNA scaffold stem loop as well as the bound DNA. In some embodiments, an exemplary helical II domain comprises amino acids 333-509 of SEQ ID NO:1, or amino acids 334-501 of SEQ ID NO:2.

[0193] e. Oligonucleotide Binding Domain

[0194] The reference CasX proteins of the disclosure comprise an Oligonucleotide Binding Domain (OBD). Certain Cas proteins other than CasX have domains that may be named in a similar way. However, in some embodiments, the OBD comprises one or more unique functional features, or comprises a sequence unique to a CasX protein, or a combination thereof. For example, in some embodiments the bridged helix (BH), helical I domain, helical II domain, and Oligonucleotide Binding Domain (OBD) together are responsible for binding of a CasX protein to the guide RNA. Thus, for example, in some embodiments the OBD is unique to a CasX protein in that it interacts functionally with a helical I domain, or a helical II domain, or both, each of which may be unique to a CasX protein as described herein. Specifically, in CasX the OBD largely binds the RNA triplex of the guide RNA scaffold. The OBD may also be responsible for binding to the protospacer adjacent motif (PAM). An exemplary OBD domain comprises amino acids 1-56 and 510-660 of SEQ ID NO:1, or amino acids 1-58 and 502-647 of SEQ ID NO:2.

[0195] f. RuvC DNA Cleavage Domain

[0196] The reference CasX proteins of the disclosure comprise a RuvC domain, that includes 2 partial RuvC domains (RuvC-I and RuvC-II). The RuvC domain is the ancestral domain of all cas12 CRISPR proteins. The RuvC domain originates from a TNPB (transposase B) like transposase. Similar to other RuvC domains, the CasX RuvC domain has a DED catalytic triad that is responsible for coordinating a magnesium (Mg) ion and cleaving DNA. In some embodiments, the RuvC has a DED motif active site that is responsible for cleaving both strands of DNA (one by one, most likely the non-target strand first at 11-14 nucleotides (nt) into the targeted sequence and then the target strand next at 2-4 nucleotides after the target sequence). Specifically in CasX, the RuvC domain is unique in that it is also responsible for binding the guide RNA scaffold stem loop that is critical for CasX function. An exemplary RuvC domain comprises amino acids 661-824 and 935-986 of SEQ ID NO:1, or amino acids 648-812 and 922-978 of SEQ ID NO:2.

[0197] g. Reference CasX Proteins

[0198] The disclosure provides naturally-occurring CasX proteins (referred to herein as a “reference CasX protein”) that function as an endonuclease that catalyzes a double strand break at a specific sequence in a targeted double-stranded DNA (dsDNA). The sequence specificity is provided by the targeting sequence of the associated gNA to which it is complexed, which hybridizes to a target sequence within the target nucleic acid. For example, reference CasX proteins can be isolated from naturally occurring prokaryotes, such as Deltaproteobacteria, Planctomycetes, or Candidatus sungbacteria species. A reference CasX protein (sometimes referred to herein as a reference CasX protein) is a Type V CRISPR/Cas endonuclease belonging to the CasX (sometimes referred to as Cas12e) family of proteins that is capable of interacting with a guide NA to form a ribonucleoprotein (RNP) complex. In some embodiments, the RNP complex comprising the reference CasX protein can be targeted to a particular site in a target nucleic acid via base pairing between the targeting sequence (or spacer) of the gNA and a target sequence in the target nucleic acid. In some embodiments, the RNP comprising the reference CasX protein is capable of cleaving target DNA. In some embodiments, the RNP comprising the reference CasX protein is capable of nicking target DNA. In some embodiments, the RNP comprising the reference CasX protein is capable of editing target DNA, for example in those embodiments where the reference CasX protein is capable of cleaving or nicking DNA, followed by non-homologous end joining (NHEJ), homology-directed repair (HDR), homology-independent targeted integration (HITI), micro-homology mediated end joining (MMEJ), single strand annealing (SSA) or base excision repair (BER). In some embodiments, the RNP comprising the CasX protein is a catalytically dead (is catalytically inactive or has substantially no cleavage activity) CasX protein (dCasX), but retains the ability to bind the target DNA, described more fully, supra.

[0199] In some cases, a Type V reference CasX protein is isolated or derived from Deltaproteobacteria. In some embodiments, a CasX protein comprises a sequence at least 50% identical, at least 60% identical, at least 65% identical, at least 70% identical, at least 75% identical, at least 80% identical, at least 81% identical, at least 82% identical, at least 83% identical, at least 84% identical, at least 85% identical, at least 86% identical, at least 86% identical, at least 87% identical, at least 88% identical, at least 89% identical, at least 89% identical, at least 90% identical, at least 91% identical, at least 92% identical, at least 93% identical, at least 94% identical, at least 95% identical, at least 96% identical, at least 97% identical, at least 98% identical, at least 99% identical, at least 99.5% identical or 100% identical to a sequence of:

| (SEQ ID NO: 1) | |
|---|---|
| 1 | MEKRINKIRK KLSADNATKP VSRSGPMKTL LVRVMTDDLK KRLEKRRKKP EVMPQVISNN |
| 61 | AANNLRMLLD DYTKMKEAIL QVYWQEFKDD HVGLMCKFAQ PASKKIDQNK LKPEMDEKGN |
| 121 | LTTAGFACSQ CGQPLFVYKL EQVSEKGKAY TNYFGRCNVA EHEKLILLAQ LKPEKDSDEA |
| 181 | VTYSLGKFGQ RALDFYSIHV TKESTHPVKP LAQIAGNRYA SGPVGKALSD ACMGTIASFL |
| 241 | SKYQDIIIEH QKVVKGNQKR LESLRELAGK ENLEYPSVTL PPQPHTKEGV DAYNEVIARV |
| 301 | RMWVNLNLWQ KLKLSRDDAK PLLRLKGFPS FPVVERRENE VDWWNTINEV KKLIDAKRDM |
| 361 | GRVFWSGVTA EKRNTILEGY NYLPNENDHK KREGSLENPK KPAKRQFGDL LLYLEKKYAG |
| 421 | DWGKVFDEAW ERIDKKIAGL TSHIEREEAR NAEDAQSKAV LTDWLRAKAS FVLERLKEMD |
| 481 | EKEFYACEIQ LQKWYGDLRG NPFAVEAENR VVDISGFSIG SDGHSIQYRN LLAWKYLENG |
| 541 | KREFYLLMNY GKKGRIRFTD GTDIKKSGKW QGLLYGGGKA KVIDLTFDPD DEQLIILPLA |
| 601 | FGTRQGREFI WNDLLSLETG LIKLANGRVI EKTIYNKKIG RDEPALFVAL TFERREVVDP |
| 661 | SNIKPVNLIG VDRGENIPAV IALTDPEGCP LPEFKDSSGG PTDILRIGEG YKEKQRAIQA |
| 721 | AKEVEQRRAG GYSRKFASKS RNLADDMVRN SARDLFYHAV THDAVLVFEN LSRGFGRQGK |
| 781 | RTFMTERQYT KMEDWLTAKL AYEGLTSKTY LSKTLAQYTS KTCSNCGFTI TTADYDGMLV |
| 841 | RLKKTSDGWA TTLNNKELKA EGQITYYNRY KRQTVEKELS AELDRLSEES GNNDISKWTK |
| 901 | GRRDEALFLL KKRFSHRPVQ EQFVCLDCGH EVHADEQAAL NIARSWLFLN SNSTEFKSYK |
| 961 | SGKQPFVGAW QAFYKRRLKE VWKPNA. |

[0200] In some cases, a Type V reference CasX protein is isolated or derived from Planctomycetes. In some embodiments, a CasX protein comprises a sequence at least 50% identical, at least 60% identical, at least 65% identical, at least 70% identical, at least 75% identical, at least 80% identical, at least 81% identical, at least 82% identical, at least 83% identical, at least 84% identical, at least 85% identical, at least 86% identical, at least 86% identical, at least 87% identical, at least 88% identical, at least 89% identical, at least 89% identical, at least 90% identical, at least 91% identical, at least 92% identical, at least 93% identical, at least 94% identical, at least 95% identical, at least 96% identical, at least 97% identical, at least 98% identical, at least 99% identical, at least 99.5% identical or 100% identical to a sequence of:

| (SEQ ID NO: 2) | |
|---|---|
| 1 | MQEIKRINKI RRRLVKDSNT KKAGKTGPMK TLLVRVMTPD LRERLENLRK KPENIPQPIS |
| 61 | NTSRANLNKL LTDYTEMKKA ILHVYWEEFQ KDPVGLMSRV AQPAPKNIDQ RKLIPVKDGN |
| 121 | ERLTSSGEAC SQCCQPLYVY KLEQVNDKGK PHTNYFGRCN VSEHERLILL SPHKPEANDE |
| 181 | LVTYSLGKFG QRALDFYSIH VTRESNHPVK PLEQIGGNSC ASGPVGKALS DACMGAVASF |
| 241 | LTKYQDIILE HQKVIKKNEK RLANLKDIAS ANGLAFPKIT LPPQPHTKEG IEAYNNVVAQ |
| 301 | IVIWVNLNLW QKLKIGRDEA KPLQRLKGFP SFPLVERQAN EVDWWDMVCN VKKLINEKKE |
| 361 | DGKVFWQNLA GYKRQEALLP YLSSEEDRKK GKKFARYQFG DLLLHLEKKH GEDWGKVYDE |
| 421 | AWERIDKKVE GLSKHIKLEE ERRSEDAQSK AALTDWLRAK ASFVIEGLKE ADKDEFCRCE |
| 481 | LKLQKWYGDL RGKPFAIEAE NSILDISGFS KQYNCAFIWQ KDGVKKLNLY LIINYFKGGK |
| 541 | LRFKKIKPEA FEANRFYTVI NKKSGEIVPM EVNFNFDDPN LIILPLAFGK RQGREFIWND |
| 601 | LLSLETGSLK LANGRVIEKT LYNRRTRQDE PALEVALTEE RREVLDSSNI KPMNLIGIDR |
| 661 | GENIPAVIAL TDPEGCPLSR FKDSLGNPTH ILRIGESYKE KQRTIQAAKE VEQRRAGGYS |
| 721 | RKYASKAKNL ADDMVRNTAR DLLYYAVTQD AMLIFENLSR GFGRQGKRTF MAERQYTRME |
| 781 | DWLTAKLAYE GLPSKTYLSK TLAQYTSKTC SNCGETITSA DYDRVLEKLK KTATGWMTTI |
| 841 | NGKELKVEGQ ITYYNRYKRQ NVVKDLSVEL DRLSEESVNN DISSWTKGRS GEALSLLKKR |
| 901 | FSHRPVQEKF VCLNCGFETH ADEQAALNIA RSWLFLRSQE YKKYQTNKTT GNTDKRAFVE |
| 961 | TWQSFYRKKL KEVWKPAV. |

[0201] In some embodiments, the CasX protein comprises the sequence of SEQ ID NO:2, or at least 60% similarity thereto. In some embodiments, the CasX protein comprises the sequence of SEQ ID NO:2, or at least 80% similarity thereto. In some embodiments, the CasX protein comprises the sequence of SEQ ID NO:2, or at least 90% similarity thereto. In some embodiments, the CasX protein comprises the sequence of SEQ ID NO:2, or at least 95% similarity thereto. In some embodiments, the CasX protein consists of the sequence of SEQ ID NO:2. In some embodiments, the CasX protein comprises or consists of a sequence that has at least 1, at least 2, at least 3, at least 4, at least 5, at least 6, at least 7, at least 8, at least 9, at least 10, at least 20, at least 30, at least 40 or at least 50 mutations relative to the sequence of SEQ ID NO:2. These mutations can be insertions, deletions, amino acid substitutions, or any combinations thereof.

[0202] In some cases, a Type V reference CasX protein is isolated or derived from Candidatus sungbacteria. In some embodiments, a CasX protein comprises a sequence at least 50% identical, at least 60% identical, at least 65% identical, at least 70% identical, at least 75% identical, at least 80% identical, at least 81% identical, at least 82% identical, at least 83% identical, at least 84% identical, at least 85% identical, at least 86% identical, at least 86% identical, at least 87% identical, at least 88% identical, at least 89% identical, at least 89% identical, at least 90% identical, at least 91% identical, at least 92% identical, at least 93% identical, at least 94% identical, at least 95% identical, at least 96% identical, at least 97% identical, at least 98% identical, at least 99% identical, at least 99.5% identical or 100% identical to a sequence of

| (SEQ ID NO: 3) | |
|---|---|
| 1 | MDNANKPSTK SLVNTTRISD HFGVTPGQVT RVFSFGIIPT KRQYAIIERW FAAVEAARER |
| 61 | LYGMLYAHFQ ENPPAYLKEK FSYETFFKGR PVLNGLRDID PTIMTSAVFT ALRHKAEGAM |
| 121 | AAFHTNHRRL FEEARKKMRE YAECLKANEA LLRGAADIDW DKIVNALRTR LNTCLAPEYD |
| 181 | AVIADFGALC AFRALIAETN ALKGAYNHAL NQMLPALVKV DEPEEAEESP RLRFFNGRIN |
| 241 | DLPKFPVAER ETPPDTETII RQLEDMARVI PDTAEILGYI HRIRHKAARR KPGSAVPLPQ |
| 301 | RVALYCAIRM ERNPEEDPST VAGHFLGEID RVCEKRRQGL VRTPFDSQIR ARYMDIISER |
| 361 | ATLAHPDRWT EIQFLRSNAA SRRVRAETIS APFEGFSWTS NRTNPAPQYG MALAKDANAP |
| 421 | ADAPELCICL SPSSAAFSVR EKGGDLIYMR PTGGRRGKDN PGKEITWVPG SFDEYPASGV |
| 481 | ALKLRLYFGR SQARRMLTNK TWGLLSDNPR VFAANAELVG KKRNPQDRWK LFFHMVISGP |
| 541 | PPVEYLDFSS DVRSRARTVI GINRGEVNPL AYAVVSVEDG QVLEEGLLGK KEYIDQLIET |
| 601 | RRRISEYQSR EQTPPRDLRQ RVRHLQDTVL GSARAKIHSL IAFWKGILAI ERLDDQFHGR |
| 661 | EQKIIPKKTY LANKTGFMNA LSFSGAVRVD KKGNPWGGMI EIYPGGISRT CTQCGTVWLA |
| 721 | RRPKNPGHRD AMVVIPDIVD DAAATGFDNV DCDAGTVDYG ELFTLSREWV RLTPRYSRVM |
| 781 | RGTLGDLERA IRQGDDRKSR QMLELALEPQ PQWGQFFCHR CGFNGQSDVL AATNLARRAI |
| 841 | SLIRRLPDTD TPPTP. |

[0203] In some embodiments, the CasX protein comprises the sequence of SEQ ID NO:3, or at least 60% similarity thereto. In some embodiments, the CasX protein comprises the sequence of SEQ ID NO:3, or at least 80% similarity thereto. In some embodiments, the CasX protein comprises the sequence of SEQ ID NO:3, or at least 90% similarity thereto. In some embodiments, the CasX protein comprises the sequence of SEQ ID NO:3, or at least 95% similarity thereto. In some embodiments, the CasX protein consists of the sequence of SEQ ID NO:3. In some embodiments, the CasX protein comprises or consists of a sequence that has at least 1, at least 2, at least 3, at least 4, at least 5, at least 6, at least 7, at least 8, at least 9, at least 10, at least 20, at least 30, at least 40 or at least 50 mutations relative to the sequence of SEQ ID NO:3. These mutations can be insertions, deletions, amino acid substitutions, or any combinations thereof.

[0204] h. CasX Variant Proteins

[0205] The present disclosure provides variants of a reference CasX protein (interchangeably referred to herein as “CasX variant” or “CasX variant protein”), wherein the CasX variants comprise at least one modification in at least one domain of the reference CasX protein, including the sequences of SEQ ID NOS:1-3. In some embodiments, the CasX variant exhibits at least one improved characteristic compared to the reference CasX protein. All variants that improve one or more functions or characteristics of the CasX variant protein when compared to a reference CasX protein described herein are envisaged as being within the scope of the disclosure. In some embodiments, the modification is a mutation in one or more amino acids of the reference CasX. In other embodiments, the modification is a substitution of one or more domains of the reference CasX with one or more domains from a different CasX. In some embodiments, insertion includes the insertion of a part or all of a domain from a different CasX protein. Mutations can occur in any one or more domains of the reference CasX protein, and may include, for example, deletion of part or all of one or more domains, or one or more amino acid substitutions, deletions, or insertions in any domain of the reference CasX protein. The domains of CasX proteins include the non-target strand binding (NTSB) domain, the target strand loading (TSL) domain, the helical I domain, the helical II domain, the oligonucleotide binding domain (OBD), and the RuvC DNA cleavage domain. Any change in amino acid sequence of a reference CasX protein that leads to an improved characteristic of the CasX protein is considered a CasX variant protein of the disclosure. For example, CasX variants can comprise one or more amino acid substitutions, insertions, deletions, or swapped domains, or any combinations thereof, relative to a reference CasX protein sequence.

[0206] In some embodiments, the CasX variant protein comprises at least one modification in at least each of two domains of the reference CasX protein, including the sequences of SEQ ID NOS:1-3. In some embodiments, the CasX variant protein comprises at least one modification in at least 2 domains, in at least 3 domains, at least 4 domains or at least 5 domains of the reference CasX protein. In some embodiments, the CasX variant protein comprises two or more modifications in at least one domain of the reference CasX protein. In some embodiments, the CasX variant protein comprises at least two modifications in at least one domain of the reference CasX protein, at least three modifications in at least one domain of the reference CasX protein or at least four modifications in at least one domain of the reference CasX protein. In some embodiments, wherein the CasX variant comprises two or more modifications compared to a reference CasX protein, each modification is made in a domain independently selected from the group consisting of a NTSBD, TSLD, Helical I domain, Helical II domain, OBD, and RuvC DNA cleavage domain.

[0207] In some embodiments, the at least one modification of the CasX variant protein comprises a deletion of at least a portion of one domain of the reference CasX protein, including the sequences of SEQ ID NOS:1-3. In some embodiments, the deletion is in the NTSBD, TSLD, Helical I domain, Helical II domain, OBD, or RuvC DNA cleavage domain.

[0208] Suitable mutagenesis methods for generating CasX variant proteins of the disclosure may include, for example, Deep Mutational Evolution (DME), deep mutational scanning (DMS), error prone PCR, cassette mutagenesis, random mutagenesis, staggered extension PCR, gene shuffling, or domain swapping. In some embodiments, the CasX variants are designed, for example by selecting one or more desired mutations in a reference CasX. In certain embodiments, the activity of a reference CasX protein is used as a benchmark against which the activity of one or more CasX variants are compared, thereby measuring improvements in function of the CasX variants. Exemplary improvements of CasX variants include, but are not limited to, improved folding of the variant, improved binding affinity to the gNA, improved binding affinity to the target DNA, altered binding affinity to one or more PAM sequences, improved unwinding of the target DNA, increased activity, improved editing efficiency, improved editing specificity, increased activity of the nuclease, increased target strand loading for double strand cleavage, decreased target strand loading for single strand nicking, decreased off-target cleavage, improved binding of the non-target strand of DNA, improved protein stability, improved protein:gNA complex stability, improved protein solubility, improved protein:gNA complex solubility, improved protein yield, improved protein expression, and improved fusion characteristics, as described more fully, below.

[0209] In some embodiments of the CasX variants described herein, the at least one modification comprises: (a) a substitution of 1 to 100 consecutive or non-consecutive amino acids in the CasX variant compared to a reference CasX of SEQ ID NO:1, SEQ ID NO:2, or SEQ ID NO:3; (b) a deletion of 1 to 100 consecutive or non-consecutive amino acids in the CasX variant compared to a reference CasX; (c) an insertion of 1 to 100 consecutive or non-consecutive amino acids in the CasX compared to a reference CasX; or (d) any combination of (a)-(c). In some embodiments, the at least one modification comprises: (a) a substitution of 5-10 consecutive or non-consecutive amino acids in the CasX variant compared to a reference CasX of SEQ ID NO:1, SEQ ID NO:2, or SEQ ID NO:3; (b) a deletion of 1-5 consecutive or non-consecutive amino acids in the CasX variant compared to a reference CasX; (c) an insertion of 1-5 consecutive or non-consecutive amino acids in the CasX compared to a reference CasX; or (d) any combination of (a)-(c).

[0210] In some embodiments, the CasX variant protein comprises or consists of a sequence that has at least 1, at least 2, at least 3, at least 4, at least 5, at least 6, at least 7, at least 8, at least 9, at least 10, at least 20, at least 30, at least 40 or at least 50 mutations relative to the sequence of SEQ ID NO:1, SEQ ID NO:2, or SEQ ID NO:3. These mutations can be insertions, deletions, amino acid substitutions, or any combinations thereof.

[0211] In some embodiments, the CasX variant protein comprises at least one amino acid substitution in at least one domain of a reference CasX protein. In some embodiments, the CasX variant protein comprises at least about 1-4 amino acid substitutions, 1-10 amino acid substitutions, 1-20 amino acid substitutions, 1-30 amino acid substitutions, 1-40 amino acid substitutions, 1-50 amino acid substitutions, 1-60 amino acid substitutions, 1-70 amino acid substitutions, 1-80 amino acid substitutions, 1-90 amino acid substitutions, 1-100 amino acid substitutions, 2-10 amino acid substitutions, 2-20 amino acid substitutions, 2-30 amino acid substitutions, 3-10 amino acid substitutions, 3-20 amino acid substitutions, 3-30 amino acid substitutions, 4-10 amino acid substitutions, 4-20 amino acid substitutions, 3-300 amino acid substitutions, 5-10 amino acid substitutions, 5-20 amino acid substitutions, 5-30 amino acid substitutions, 10-50 amino acid substitutions, or 20-50 amino acid substitutions, relative to a reference CasX protein, which can be consecutive or non-consecutive, or in different domains. As used herein “consecutive amino acids” refer to amino acids that are contiguous in the primary sequence of a polypeptide. In some embodiments, the CasX variant protein comprises at least about 100 or more amino acid substitutions relative to a reference CasX protein. In some embodiments, the amino acid substitutions are conservative substitutions. In other embodiments, the substitutions are non-conservative; e.g., a polar amino acid is substituted for a non-polar amino acid, or vice versa.

[0212] Any amino acid can be substituted for any other amino acid in the substitutions described herein. The substitution can be a conservative substitution (e.g., a basic amino acid is substituted for another basic amino acid). The substitution can be a non-conservative substitution (e.g., a basic amino acid is substituted for an acidic amino acid or vice versa). For example, a proline in a reference CasX protein can be substituted for any of arginine, histidine, lysine, aspartic acid, glutamic acid, serine, threonine, asparagine, glutamine, cysteine, glycine, alanine, isoleucine, leucine, methionine, phenylalanine, tryptophan, tyrosine or valine to generate a CasX variant protein of the disclosure.

[0213] In some embodiments, a CasX variant protein comprises at least one amino acid deletion relative to a reference CasX protein. In some embodiments, a CasX variant protein comprises a deletion of 1-4 amino acids, 1-10 amino acids, 1-20 amino acids, 1-30 amino acids, 1-40 amino acids, 1-50 amino acids, 1-60 amino acids, 1-70 amino acids, 1-80 amino acids, 1-90 amino acids, 1-100 amino acids, 2-10 amino acids, 2-20 amino acids, 2-30 amino acids, 3-10 amino acids, 3-20 amino acids, 3-30 amino acids, 4-10 amino acids, 4-20 amino acids, 3-300 amino acids, 5-10 amino acids, 5-20 amino acids, 5-30 amino acids, 10-50 amino acids or 20-50 amino acids relative to a reference CasX protein. In some embodiments, a CasX protein comprises a deletion of at least about 100 consecutive amino acids relative to a reference CasX protein. In some embodiments, a CasX variant protein comprises a deletion of at least 1, 2, 3, 4, 5, 6, 7, 8, 9, 10, 20, 30, 40, 50 or 100 consecutive amino acids relative to a reference CasX protein. In some embodiments, a CasX variant protein comprises a deletion of 1, 2, 3, 4, 5, 6, 7, 8, 9 or 10 consecutive amino acids.

[0214] In some embodiments, a CasX variant protein comprises two or more deletions relative to a reference CasX protein, and the two or more deletions are not consecutive amino acids. For example, a first deletion may be in a first domain of the reference CasX protein, and a second deletion may be in a second domain of the reference CasX protein. In some embodiments, a CasX variant protein comprises 2, 3, 4, 5, 6, 7, 8, 9, 10, 11, 12, 13, 14, 15, 16, 17, 18, 19 or 20 non-consecutive deletions relative to a reference CasX protein. In some embodiments, a CasX variant protein comprises at least 20 non-consecutive deletions relative to a reference CasX protein. Each non-consecutive deletion may be of any length of amino acids described herein, e.g., 1-4 amino acids, 1-10 amino acids, and the like.

[0215] In some embodiments, the CasX variant protein comprises one or more amino acid insertions relative to the sequence of SEQ ID NOS:1, 2, or 3. In some embodiments, a CasX variant protein comprises an insertion of 1 amino acid, an insertion of 2-3 consecutive or non-consecutive amino acids, 2-4 consecutive or non-consecutive amino acids, 2-5 consecutive or non-consecutive amino acids, 2-6 consecutive or non-consecutive amino acids, 2-7 consecutive or non-consecutive amino acids, 2-8 consecutive or non-consecutive amino acids, 2-9 consecutive or non-consecutive amino acids, 2-10 consecutive or non-consecutive amino acids, 2-20 consecutive or non-consecutive amino acids, 2-30 consecutive or non-consecutive amino acids, 2-40 consecutive or non-consecutive amino acids, 2-50 consecutive or non-consecutive amino acids, 2-60 consecutive or non-consecutive amino acids, 2-70 consecutive or non-consecutive amino acids, 2-80 consecutive or non-consecutive amino acids, 2-90 consecutive or non-consecutive amino acids, 2-100 consecutive or non-consecutive amino acids, 3-10 consecutive or non-consecutive amino acids, 3-20 consecutive or non-consecutive amino acids, 3-30 consecutive or non-consecutive amino acids, 4-10 consecutive or non-consecutive amino acids, 4-20 consecutive or non-consecutive amino acids, 3-300 consecutive or non-consecutive amino acids, 5-10 consecutive or non-consecutive amino acids, 5-20 consecutive or non-consecutive amino acids, 5-30 consecutive or non-consecutive amino acids, 10-50 consecutive or non-consecutive amino acids or 20-50 consecutive or non-consecutive amino acids relative to a reference CasX protein. In some embodiments, the CasX variant protein comprises an insertion of 2, 3, 4, 5, 6, 7, 8, 9, 10, 11, 12, 13, 14, 15, 16, 17, 18, 19 or 20 consecutive or non-consecutive amino acids. In some embodiments, a CasX variant protein comprises an insertion of at least about 100 consecutive or non-consecutive amino acids. Any amino acid, or combination of amino acids, can be inserted in the insertions described herein to generate a CasX variant protein.

[0216] Any permutation of the substitution, insertion and deletion embodiments described herein can be combined to generate a CasX variant protein of the disclosure. For example, a CasX variant protein can comprise at least one substitution and at least one deletion relative to a reference CasX protein sequence, at least one substitution and at least one insertion relative to a reference CasX protein sequence, at least one insertion and at least one deletion relative to a reference CasX protein sequence, or at least one substitution, one insertion and one deletion relative to a reference CasX protein sequence.

[0217] In some embodiments, the CasX variant protein has at least about 60% sequence similarity to SEQ ID NO:2 or a portion thereof. In some embodiments, the CasX variant protein comprises a substitution of Y789T of SEQ ID NO:2, a deletion of P793 of SEQ ID NO:2, a substitution of Y789D of SEQ ID NO:2, a substitution of T72S of SEQ ID NO:2, a substitution of I546V of SEQ ID NO:2, a substitution of E552A of SEQ ID NO:2, a substitution of A636D of SEQ ID NO:2, a substitution of F536S of SEQ ID NO:2, a substitution of A708K of SEQ ID NO:2, a substitution of Y797L of SEQ ID NO:2, a substitution of L792G SEQ ID NO:2, a substitution of A739V of SEQ ID NO:2, a substitution of G791M of SEQ ID NO:2, an insertion of A at position 661 of SEQ ID NO:2, a substitution of A788W of SEQ ID NO:2, a substitution of K390R of SEQ ID NO:2, a substitution of A751S of SEQ ID NO:2, a substitution of E385A of SEQ ID NO:2, an insertion of P at position 696 of SEQ ID NO:2, an insertion of M at position 773 of SEQ ID NO:2, a substitution of G695H of SEQ ID NO:2, an insertion of AS at position 793 of SEQ ID NO:2, an insertion of AS at position 795 of SEQ ID NO:2, a substitution of C477R of SEQ ID NO:2, a substitution of C477K of SEQ ID NO:2, a substitution of C479A of SEQ ID NO:2, a substitution of C479L of SEQ ID NO:2, a substitution of I55F of SEQ ID NO:2, a substitution of K210R of SEQ ID NO:2, a substitution of C233S of SEQ ID NO:2, a substitution of D231N of SEQ ID NO:2, a substitution of Q338E of SEQ ID NO:2, a substitution of Q338R of SEQ ID NO:2, a substitution of L379R of SEQ ID NO:2, a substitution of K390R of SEQ ID NO:2, a substitution of L481Q of SEQ ID NO:2, a substitution of F495S of SEQ ID NO:2, a substitution of D600N of SEQ ID NO:2, a substitution of T886K of SEQ ID NO:2, a substitution of A739V of SEQ ID NO:2, a substitution of K460N of SEQ ID NO:2, a substitution of I199F of SEQ ID NO:2, a substitution of G492P of SEQ ID NO:2, a substitution of T153I of SEQ ID NO:2, a substitution of R591I of SEQ ID NO:2, an insertion of AS at position 795 of SEQ ID NO:2, an insertion of AS at position 796 of SEQ ID NO:2, an insertion of L at position 889 of SEQ ID NO:2, a substitution of E121D of SEQ ID NO:2, a substitution of S270W of SEQ ID NO:2, a substitution of E712Q of SEQ ID NO:2, a substitution of K942Q of SEQ ID NO:2, a substitution of E552K of SEQ ID NO:2, a substitution of K25Q of SEQ ID NO:2, a substitution of N47D of SEQ ID NO:2, an insertion of T at position 696 of SEQ ID NO:2, a substitution of L685I of SEQ ID NO:2, a substitution of N880D of SEQ ID NO:2, a substitution of Q102R of SEQ ID NO:2, a substitution of M734K of SEQ ID NO:2, a substitution of A724S of SEQ ID NO:2, a substitution of T704K of SEQ ID NO:2, a substitution of P224K of SEQ ID NO:2, a substitution of K25R of SEQ ID NO:2, a substitution of M29E of SEQ ID NO:2, a substitution of H152D of SEQ ID NO:2, a substitution of S219R of SEQ ID NO:2, a substitution of E475K of SEQ ID NO:2, a substitution of G226R of SEQ ID NO:2, a substitution of A377K of SEQ ID NO:2, a substitution of E480K of SEQ ID NO:2, a substitution of K416E of SEQ ID NO:2, a substitution of H164R of SEQ ID NO:2, a substitution of K767R of SEQ ID NO:2, a substitution of I7F of SEQ ID NO:2, a substitution of M29R of SEQ ID NO:2, a substitution of H435R of SEQ ID NO:2, a substitution of E385Q of SEQ ID NO:2, a substitution of E385K of SEQ ID NO:2, a substitution of I279F of SEQ ID NO:2, a substitution of D489S of SEQ ID NO:2, a substitution of D732N of SEQ ID NO:2, a substitution of A739T of SEQ ID NO:2, a substitution of W885R of SEQ ID NO:2, a substitution of E53K of SEQ ID NO:2, a substitution of A238T of SEQ ID NO:2, a substitution of P283Q of SEQ ID NO:2, a substitution of E292K of SEQ ID NO:2, a substitution of Q628E of SEQ ID NO:2, a substitution of R388Q of SEQ ID NO:2, a substitution of G791M of SEQ ID NO:2, a substitution of L792K of SEQ ID NO:2, a substitution of L792E of SEQ ID NO:2, a substitution of M779N of SEQ ID NO:2, a substitution of G27D of SEQ ID NO:2, a substitution of K955R of SEQ ID NO:2, a substitution of S867R of SEQ ID NO:2, a substitution of R693I of SEQ ID NO:2, a substitution of F189Y of SEQ ID NO:2, a substitution of V635M of SEQ ID NO:2, a substitution of F399L of SEQ ID NO:2, a substitution of E498K of SEQ ID NO:2, a substitution of E386R of SEQ ID NO:2, a substitution of V254G of SEQ ID NO:2, a substitution of P793S of SEQ ID NO:2, a substitution of K188E of SEQ ID NO:2, a substitution of QT945KI of SEQ ID NO:2, a substitution of T620P of SEQ ID NO:2, a substitution of T946P of SEQ ID NO:2, a substitution of TT949PP of SEQ ID NO:2, a substitution of N952T of SEQ ID NO:2, a substitution of K682E of SEQ ID NO:2, a substitution of K975R of SEQ ID NO:2, a substitution of L212P of SEQ ID NO:2, a substitution of E292R of SEQ ID NO:2, a substitution of 1303K of SEQ ID NO:2, a substitution of C349E of SEQ ID NO:2, a substitution of E385P of SEQ ID NO:2, a substitution of E386N of SEQ ID NO:2, a substitution of D387K of SEQ ID NO:2, a substitution of L404K of SEQ ID NO:2, a substitution of E466H of SEQ ID NO:2, a substitution of C477Q of SEQ ID NO:2, a substitution of C477H of SEQ ID NO:2, a substitution of C479A of SEQ ID NO:2, a substitution of D659H of SEQ ID NO:2, a substitution of T806V of SEQ ID NO:2, a substitution of K808S of SEQ ID NO:2, an insertion of AS at position 797 of SEQ ID NO:2, a substitution of V959M of SEQ ID NO:2, a substitution of K975Q of SEQ ID NO:2, a substitution of W974G of SEQ ID NO:2, a substitution of A708Q of SEQ ID NO:2, a substitution of V711K of SEQ ID NO:2, a substitution of D733T of SEQ ID NO:2, a substitution of L742W of SEQ ID NO:2, a substitution of V747K of SEQ ID NO:2, a substitution of F755M of SEQ ID NO:2, a substitution of M771A of SEQ ID NO:2, a substitution of M771Q of SEQ ID NO:2, a substitution of W782Q of SEQ ID NO:2, a substitution of G791F, of SEQ ID NO:2 a substitution of L792D of SEQ ID NO:2, a substitution of L792K of SEQ ID NO:2, a substitution of P793Q of SEQ ID NO:2, a substitution of P793G of SEQ ID NO:2, a substitution of Q804A of SEQ ID NO:2, a substitution of Y966N of SEQ ID NO:2, a substitution of Y723N of SEQ ID NO:2, a substitution of Y857R of SEQ ID NO:2, a substitution of S890R of SEQ ID NO:2, a substitution of S932M of SEQ ID NO:2, a substitution of L897M of SEQ ID NO:2, a substitution of R624G of SEQ ID NO:2, a substitution of S603G of SEQ ID NO:2, a substitution of N737S of SEQ ID NO:2, a substitution of L307K of SEQ ID NO:2, a substitution of I658V of SEQ ID NO:2, an insertion of PT at position 688 of SEQ ID NO:2, an insertion of SA at position 794 of SEQ ID NO:2, a substitution of S877R of SEQ ID NO:2, a substitution of N580T of SEQ ID NO:2, a substitution of V335G of SEQ ID NO:2, a substitution of T620S of SEQ ID NO:2, a substitution of W345G of SEQ ID NO:2, a substitution of T280S of SEQ ID NO:2, a substitution of L406P of SEQ ID NO:2, a substitution of A612D of SEQ ID NO:2, a substitution of A751S of SEQ ID NO:2, a substitution of E386R of SEQ ID NO:2, a substitution of V351M of SEQ ID NO:2, a substitution of K210N of SEQ ID NO:2, a substitution of D40A of SEQ ID NO:2, a substitution of E773G of SEQ ID NO:2, a substitution of H207L of SEQ ID NO:2, a substitution of T62A SEQ ID NO:2, a substitution of T287P of SEQ ID NO:2, a substitution of T832A of SEQ ID NO:2, a substitution of A893S of SEQ ID NO:2, an insertion of V at position 14 of SEQ ID NO:2, an insertion of AG at position 13 of SEQ ID NO:2, a substitution of R11V of SEQ ID NO:2, a substitution of R12N of SEQ ID NO:2, a substitution of R13H of SEQ ID NO:2, an insertion of Y at position 13 of SEQ ID NO:2, a substitution of R12L of SEQ ID NO:2, an insertion of Q at position 13 of SEQ ID NO:2, an substitution of V15S of SEQ ID NO:2, an insertion of D at position 17 of SEQ ID NO:2 or a combination thereof.

[0218] In some embodiments, the CasX variant comprises at least one modification in the NTSB domain.

[0219] In some embodiments, the CasX variant comprises at least one modification in the TSL domain. In some embodiments, the at least one modification in the TSL domain comprises an amino acid substitution of one or more of amino acids Y857, S890, or S932 of SEQ ID NO:2.

[0220] In some embodiments, the CasX variant comprises at least one modification in the helical I domain. In some embodiments, the at least one modification in the helical I domain comprises an amino acid substitution of one or more of amino acids S219, L249, E259, Q252, E292, L307, or D318 of SEQ ID NO:2.

[0221] In some embodiments, the CasX variant comprises at least one modification in the helical II domain. In some embodiments, the at least one modification in the helical II domain comprises an amino acid substitution of one or more of amino acids D361, L379, E385, E386, D387, F399, L404, R458, C477, or D489 of SEQ ID NO:2.

[0222] In some embodiments, the CasX variant comprises at least one modification in the OBD domain. In some embodiments, the at least one modification in the OBD comprises an amino acid substitution of one or more of amino acids F536, E552, T620, or 1658 of SEQ ID NO:2.

[0223] In some embodiments, the CasX variant comprises at least one modification in the RuvC DNA cleavage domain. In some embodiments, the at least one modification in the RuvC DNA cleavage domain comprises an amino acid substitution of one or more of amino acids K682, G695, A708, V711, D732, A739, D733, L742, V747, F755, M771, M779, W782, A788, G791, L792, P793, Y797, M799, Q804, S819, or Y857 or a deletion of amino acid P793 of SEQ ID NO:2.

[0224] In some embodiments, the CasX variant comprises at least one modification compared to the reference CasX sequence of SEQ ID NO:2 is selected from one or more of: (a) an amino acid substitution of L379R; (b) an amino acid substitution of A708K; (c) an amino acid substitution of T620P; (d) an amino acid substitution of E385P; (e) an amino acid substitution of Y857R; (f) an amino acid substitution of I658V; (g) an amino acid substitution of F399L; (h) an amino acid substitution of Q252K; (i) an amino acid substitution of L404K; and (j) an amino acid deletion of P793.

[0225] In some embodiments, a CasX variant comprises at least two amino acid changes to the sequence of a reference CasX variant protein selected from the group consisting of: a substitution of Y789T of SEQ ID NO:2, a deletion of P793 of SEQ ID NO:2, a substitution of Y789D of SEQ ID NO:2, a substitution of T72S of SEQ ID NO:2, a substitution of I546V of SEQ ID NO:2, a substitution of E552A of SEQ ID NO:2, a substitution of A636D of SEQ ID NO:2, a substitution of F536S of SEQ ID NO:2, a substitution of A708K of SEQ ID NO:2, a substitution of Y797L of SEQ ID NO:2, a substitution of L792G SEQ ID NO:2, a substitution of A739V of SEQ ID NO:2, a substitution of G791M of SEQ ID NO:2, an insertion of A at position 661 of SEQ ID NO:2, a substitution of A788W of SEQ ID NO:2, a substitution of K390R of SEQ ID NO:2, a substitution of A751S of SEQ ID NO:2, a substitution of E385A of SEQ ID NO:2, an insertion of P at position 696 of SEQ ID NO:2, an insertion of M at position 773 of SEQ ID NO:2, a substitution of G695H of SEQ ID NO:2, an insertion of AS at position 793 of SEQ ID NO:2, an insertion of AS at position 795 of SEQ ID NO:2, a substitution of C477R of SEQ ID NO:2, a substitution of C477K of SEQ ID NO:2, a substitution of C479A of SEQ ID NO:2, a substitution of C479L of SEQ ID NO:2, a substitution of I55F of SEQ ID NO:2, a substitution of K210R of SEQ ID NO:2, a substitution of C233S of SEQ ID NO:2, a substitution of D231N of SEQ ID NO:2, a substitution of Q338E of SEQ ID NO:2, a substitution of Q338R of SEQ ID NO:2, a substitution of L379R of SEQ ID NO:2, a substitution of K390R of SEQ ID NO:2, a substitution of L481Q of SEQ ID NO:2, a substitution of F495S of SEQ ID NO:2, a substitution of D600N of SEQ ID NO:2, a substitution of T886K of SEQ ID NO:2, a substitution of A739V of SEQ ID NO:2, a substitution of K460N of SEQ ID NO:2, a substitution of I199F of SEQ ID NO:2, a substitution of G492P of SEQ ID NO:2, a substitution of T153I of SEQ ID NO:2, a substitution of R591I of SEQ ID NO:2, an insertion of AS at position 795 of SEQ ID NO:2, an insertion of AS at position 796 of SEQ ID NO:2, an insertion of L at position 889 of SEQ ID NO:2, a substitution of E121D of SEQ ID NO:2, a substitution of S270W of SEQ ID NO:2, a substitution of E712Q of SEQ ID NO:2, a substitution of K942Q of SEQ ID NO:2, a substitution of E552K of SEQ ID NO:2, a substitution of K25Q of SEQ ID NO:2, a substitution of N47D of SEQ ID NO:2, an insertion of T at position 696 of SEQ ID NO:2, a substitution of L685I of SEQ ID NO:2, a substitution of N880D of SEQ ID NO:2, a substitution of Q102R of SEQ ID NO:2, a substitution of M734K of SEQ ID NO:2, a substitution of A724S of SEQ ID NO:2, a substitution of T704K of SEQ ID NO:2, a substitution of P224K of SEQ ID NO:2, a substitution of K25R of SEQ ID NO:2, a substitution of M29E of SEQ ID NO:2, a substitution of H152D of SEQ ID NO:2, a substitution of S219R of SEQ ID NO:2, a substitution of E475K of SEQ ID NO:2, a substitution of G226R of SEQ ID NO:2, a substitution of A377K of SEQ ID NO:2, a substitution of E480K of SEQ ID NO:2, a substitution of K416E of SEQ ID NO:2, a substitution of H164R of SEQ ID NO:2, a substitution of K767R of SEQ ID NO:2, a substitution of I7F of SEQ ID NO:2, a substitution of M29R of SEQ ID NO:2, a substitution of H435R of SEQ ID NO:2, a substitution of E385Q of SEQ ID NO:2, a substitution of E385K of SEQ ID NO:2, a substitution of I279F of SEQ ID NO:2, a substitution of D489S of SEQ ID NO:2, a substitution of D732N of SEQ ID NO:2, a substitution of A739T of SEQ ID NO:2, a substitution of W885R of SEQ ID NO:2, a substitution of E53K of SEQ ID NO:2, a substitution of A238T of SEQ ID NO:2, a substitution of P283Q of SEQ ID NO:2, a substitution of E292K of SEQ ID NO:2, a substitution of Q628E of SEQ ID NO:2, a substitution of R388Q of SEQ ID NO:2, a substitution of G791M of SEQ ID NO:2, a substitution of L792K of SEQ ID NO:2, a substitution of L792E of SEQ ID NO:2, a substitution of M779N of SEQ ID NO:2, a substitution of G27D of SEQ ID NO:2, a substitution of K955R of SEQ ID NO:2, a substitution of S867R of SEQ ID NO:2, a substitution of R693I of SEQ ID NO:2, a substitution of F189Y of SEQ ID NO:2, a substitution of V635M of SEQ ID NO:2, a substitution of F399L of SEQ ID NO:2, a substitution of E498K of SEQ ID NO:2, a substitution of E386R of SEQ ID NO:2, a substitution of V254G of SEQ ID NO:2, a substitution of P793S of SEQ ID NO:2, a substitution of K188E of SEQ ID NO:2, a substitution of QT945KI of SEQ ID NO:2, a substitution of T620P of SEQ ID NO:2, a substitution of T946P of SEQ ID NO:2, a substitution of TT949PP of SEQ ID NO:2, a substitution of N952T of SEQ ID NO:2, a substitution of K682E of SEQ ID NO:2, a substitution of K975R of SEQ ID NO:2, a substitution of L212P of SEQ ID NO:2, a substitution of E292R of SEQ ID NO:2, a substitution of 1303K of SEQ ID NO:2, a substitution of C349E of SEQ ID NO:2, a substitution of E385P of SEQ ID NO:2, a substitution of E386N of SEQ ID NO:2, a substitution of D387K of SEQ ID NO:2, a substitution of L404K of SEQ ID NO:2, a substitution of E466H of SEQ ID NO:2, a substitution of C477Q of SEQ ID NO:2, a substitution of C477H of SEQ ID NO:2, a substitution of C479A of SEQ ID NO:2, a substitution of D659H of SEQ ID NO:2, a substitution of T806V of SEQ ID NO:2, a substitution of K808S of SEQ ID NO:2, an insertion of AS at position 797 of SEQ ID NO:2, a substitution of V959M of SEQ ID NO:2, a substitution of K975Q of SEQ ID NO:2, a substitution of W974G of SEQ ID NO:2, a substitution of A708Q of SEQ ID NO:2, a substitution of V711K of SEQ ID NO:2, a substitution of D733T of SEQ ID NO:2, a substitution of L742W of SEQ ID NO:2, a substitution of V747K of SEQ ID NO:2, a substitution of F755M of SEQ ID NO:2, a substitution of M771A of SEQ ID NO:2, a substitution of M771Q of SEQ ID NO:2, a substitution of W782Q of SEQ ID NO:2, a substitution of G791F, of SEQ ID NO:2 a substitution of L792D of SEQ ID NO:2, a substitution of L792K of SEQ ID NO:2, a substitution of P793Q of SEQ ID NO:2, a substitution of P793G of SEQ ID NO:2, a substitution of Q804A of SEQ ID NO:2, a substitution of Y966N of SEQ ID NO:2, a substitution of Y723N of SEQ ID NO:2, a substitution of Y857R of SEQ ID NO:2, a substitution of S890R of SEQ ID NO:2, a substitution of S932M of SEQ ID NO:2, a substitution of L897M of SEQ ID NO:2, a substitution of R624G of SEQ ID NO:2, a substitution of S603G of SEQ ID NO:2, a substitution of N737S of SEQ ID NO:2, a substitution of L307K of SEQ ID NO:2, a substitution of I658V of SEQ ID NO:2, an insertion of PT at position 688 of SEQ ID NO:2, an insertion of SA at position 794 of SEQ ID NO:2, a substitution of S877R of SEQ ID NO:2, a substitution of N580T of SEQ ID NO:2, a substitution of V335G of SEQ ID NO:2, a substitution of T620S of SEQ ID NO:2, a substitution of W345G of SEQ ID NO:2, a substitution of T280S of SEQ ID NO:2, a substitution of L406P of SEQ ID NO:2, a substitution of A612D of SEQ ID NO:2, a substitution of A751S of SEQ ID NO:2, a substitution of E386R of SEQ ID NO:2, a substitution of V351M of SEQ ID NO:2, a substitution of K210N of SEQ ID NO:2, a substitution of D40A of SEQ ID NO:2, a substitution of E773G of SEQ ID NO:2, a substitution of H207L of SEQ ID NO:2, a substitution of T62A SEQ ID NO:2, a substitution of T287P of SEQ ID NO:2, a substitution of T832A of SEQ ID NO:2, a substitution of A893S of SEQ ID NO:2, an insertion of V at position 14 of SEQ ID NO:2, an insertion of AG at position 13 of SEQ ID NO:2, a substitution of R11V of SEQ ID NO:2, a substitution of R12N of SEQ ID NO:2, a substitution of R13H of SEQ ID NO:2, an insertion of Y at position 13 of SEQ ID NO:2, a substitution of R12L of SEQ ID NO:2, an insertion of Q at position 13 of SEQ ID NO:2, an substitution of V15S of SEQ ID NO:2 and an insertion of D at position 17 of SEQ ID NO:2. In some embodiments, the at least two amino acid changes to a reference CasX protein are selected from the amino acid changes disclosed in the sequences of Table 4. In some embodiments, a CasX variant comprises any combination of the foregoing embodiments of this paragraph.

[0226] In some embodiments, a CasX variant protein comprises more than one substitution, insertion and/or deletion of a reference CasX protein amino acid sequence. In some embodiments, a CasX variant protein comprises a substitution of S794R and a substitution of Y797L of SEQ ID NO:2. In some embodiments, a CasX variant protein comprises a substitution of K416E and a substitution of A708K of SEQ ID NO:2. In some embodiments, a CasX variant protein comprises a substitution of A708K and a deletion of P793 of SEQ ID NO:2. In some embodiments, a CasX variant protein comprises a deletion of P793 and an insertion of AS at position 795 SEQ ID NO:2. In some embodiments, a CasX variant protein comprises a substitution of Q367K and a substitution of I425S of SEQ ID NO:2. In some embodiments, a CasX variant protein comprises a substitution of A708K, a deletion of P position 793 and a substitution A793V of SEQ ID NO:2. In some embodiments, a CasX variant protein comprises a substitution of Q338R and a substitution of A339E of SEQ ID NO:2. In some embodiments, a CasX variant protein comprises a substitution of Q338R and a substitution of A339K of SEQ ID NO:2. In some embodiments, a CasX variant protein comprises a substitution of S507G and a substitution of G508R of SEQ ID NO:2. In some embodiments, a CasX variant protein comprises a substitution of L379R, a substitution of A708K and a deletion of P at position 793 of SEQ ID NO:2. In some embodiments, a CasX variant protein comprises a substitution of C477K, a substitution of A708K and a deletion of P at position 793 of SEQ ID NO:2. In some embodiments, a CasX variant protein comprises a substitution of L379R, a substitution of C477K, a substitution of A708K and a deletion of P at position of 793 of SEQ ID NO:2. In some embodiments, a CasX variant protein comprises a substitution of L379R, a substitution of A708K, a deletion of P at position 793 and a substitution A739V of SEQ ID NO:2. In some embodiments, a CasX variant protein comprises a substitution of C477K, a substitution of A708K, a deletion of P at position 793 and a substitution of A739V of SEQ ID NO:2. In some embodiments, a CasX variant protein comprises a substitution of L379R, a substitution of C477K, a substitution of A708K, a deletion of P at position 793 and a substitution of A739V of SEQ ID NO:2. In some embodiments, a CasX variant protein comprises a substitution of L379R, a substitution of A708K, a deletion of P at position 793 and a substitution of M779N of SEQ ID NO:2. In some embodiments, a CasX variant protein comprises a substitution of L379R, a substitution of A708K, a deletion of P at position 793 and a substitution of M771N of SEQ ID NO:2. In some embodiments, a CasX variant protein comprises a substitution of L379R, a substitution of 708K, a deletion of P at position 793 and a substitution of D489S of SEQ ID NO:2. In some embodiments, a CasX variant protein comprises a substitution of L379R, a substitution of A708K, a deletion of P at position 793 and a substitution of A739T of SEQ ID NO:2. In some embodiments, a CasX variant protein comprises a substitution of L379R, a substitution of A708K, a deletion of P at position 793 and a substitution of D732N of SEQ ID NO:2. In some embodiments, a CasX variant protein comprises a substitution of L379R, a substitution of A708K, a deletion of P at position 793 and a substitution of G791M of SEQ ID NO:2. In some embodiments, a CasX variant protein comprises a substitution of L379R, a substitution of 708K, a deletion of P at position 793 and a substitution of Y797L of SEQ ID NO:2. In some embodiments, a CasX variant protein comprises a substitution of L379R, a substitution of C477K, a substitution of A708K, a deletion of P at position 793 and a substitution of M779N of SEQ ID NO:2. In some embodiments, a CasX variant protein comprises a substitution of L379R, a substitution of C477K, a substitution of A708K, a deletion of P at position 793 and a substitution of M771N of SEQ ID NO:2. In some embodiments, a CasX variant protein comprises a substitution of L379R, a substitution of C477K, a substitution of A708K, a deletion of P at position 793 and a substitution of D489S of SEQ ID NO:2. In some embodiments, a CasX variant protein comprises a substitution of L379R, a substitution of C477K, a substitution of A708K, a deletion of P at position 793 and a substitution of A739T of SEQ ID NO:2. In some embodiments, a CasX variant protein comprises a substitution of L379R, a substitution of C477K, a substitution of A708K, a deletion of P at position 793 and a substitution of D732N of SEQ ID NO:2. In some embodiments, a CasX variant protein comprises a substitution of L379R, a substitution of C477K, a substitution of A708K, a deletion of P at position 793 and a substitution of G791M of SEQ ID NO:2. In some embodiments, a CasX variant protein comprises a substitution of L379R, a substitution of C477K, a substitution of A708K, a deletion of P at position 793 and a substitution of Y797L of SEQ ID NO:2. In some embodiments, a CasX variant protein comprises a substitution of L379R, a substitution of C477K, a substitution of A708K, a deletion of P at position 793 and a substitution of T620P of SEQ ID NO:2. In some embodiments, a CasX variant protein comprises a substitution of A708K, a deletion of P at position 793 and a substitution of E386S of SEQ ID NO:2. In some embodiments, a CasX variant protein comprises a substitution of E386R, a substitution of F399L and a deletion of P at position 793 of SEQ ID NO:2. In some embodiments, a CasX variant protein comprises a substitution of R581I and A739V of SEQ ID NO:2. In some embodiments, a CasX variant comprises any combination of the foregoing embodiments of this paragraph.

[0227] In some embodiments, a CasX variant protein comprises more than one substitution, insertion and/or deletion of a reference CasX protein amino acid sequence. In some embodiments, a CasX variant protein comprises a substitution of A708K, a deletion of P at position 793 and a substitution of A739V of SEQ ID NO:2. In some embodiments, a CasX variant protein comprises a substitution of L379R, a substitution of A708K and a deletion of P at position 793 of SEQ ID NO:2. In some embodiments, a CasX variant protein comprises a substitution of C477K, a substitution of A708K and a deletion of P at position 793 of SEQ ID NO:2. In some embodiments, a CasX variant protein comprises a substitution of L379R, a substitution of C477K, a substitution of A708K and a deletion of P at position 793 of SEQ ID NO:2. In some embodiments, a CasX variant protein comprises a substitution of L379R, a substitution of A708K, a deletion of P at position 793 and a substitution of A739V of SEQ ID NO:2. In some embodiments, a CasX variant protein comprises a substitution of C477K, a substitution of A708K, a deletion of P at position 793 and a substitution of A739 of SEQ ID NO:2. In some embodiments, a CasX variant protein comprises a substitution of L379R, a substitution of C477K, a substitution of A708K, a deletion of P at position 793 and a substitution of A739V of SEQ ID NO:2. In some embodiments, a CasX variant protein comprises a substitution of L379R, a substitution of C477K, a substitution of A708K, a deletion of P at position 793 and a substitution of T620P of SEQ ID NO:2. In some embodiments, a CasX variant protein comprises a substitution of M771A of SEQ ID NO:2. In some embodiments, a CasX variant protein comprises a substitution of L379R, a substitution of A708K, a deletion of P at position 793 and a substitution of D732N of SEQ ID NO:2. In some embodiments, a CasX variant comprises any combination of the foregoing embodiments of this paragraph.

[0228] In some embodiments, a CasX variant protein comprises a substitution of W782Q of SEQ ID NO:2. In some embodiments, a CasX variant protein comprises a substitution of M771Q of SEQ ID NO:2. In some embodiments, a CasX variant protein comprises a substitution of R458I and a substitution of A739V of SEQ ID NO:2. In some embodiments, a CasX variant protein comprises a substitution of L379R, a substitution of A708K, a deletion of P at position 793 and a substitution of M771N of SEQ ID NO:2. In some embodiments, a CasX variant protein comprises a substitution of L379R, a substitution of A708K, a deletion of P at position 793 and a substitution of A739T of SEQ ID NO:2. In some embodiments, a CasX variant protein comprises a substitution of L379R, a substitution of C477K, a substitution of A708K, a deletion of P at position 793 and a substitution of D489S of SEQ ID NO:2. In some embodiments, a CasX variant protein comprises a substitution of L379R, a substitution of C477K, a substitution of A708K, a deletion of P at position 793 and a substitution of D732N of SEQ ID NO:2. In some embodiments, a CasX variant protein comprises a substitution of V711K of SEQ ID NO:2. In some embodiments, a CasX variant protein comprises a substitution of L379R, a substitution of C477K, a substitution of A708K, a deletion of P at position 793 and a substitution of Y797L of SEQ ID NO:2. In some embodiments, a CasX variant protein comprises a substitution of L379R, a substitution of A708K and a deletion of P at position 793 of SEQ ID NO:2. In some embodiments, a CasX variant protein comprises a substitution of L379R, a substitution of C477K, a substitution of A708K, a deletion of P at position 793 and a substitution of M771N of SEQ ID NO:2. In some embodiments, a CasX variant protein comprises a substitution of A708K, a substitution of P at position 793 and a substitution of E386S of SEQ ID NO:2. In some embodiments, a CasX variant protein comprises a substitution of L379R, a substitution of C477K, a substitution of A708K and a deletion of P at position 793 of SEQ ID NO:2. In some embodiments, a CasX variant protein comprises a substitution of L792D of SEQ ID NO:2. In some embodiments, a CasX variant protein comprises a substitution of G791F of SEQ ID NO:2. In some embodiments, a CasX variant protein comprises a substitution of A708K, a deletion of P at position 793 and a substitution of A739V of SEQ ID NO:2. In some embodiments, a CasX variant protein comprises a substitution of L379R, a substitution of A708K, a deletion of P at position 793 and a substitution of A739V of SEQ ID NO:2. In some embodiments, a CasX variant protein comprises a substitution of C477K, a substitution of A708K and a substitution of P at position 793 of SEQ ID NO:2. In some embodiments, a CasX variant protein comprises a substitution of L249I and a substitution of M771N of SEQ ID NO:2. In some embodiments, a CasX variant protein comprises a substitution of V747K of SEQ ID NO:2. In some embodiments, a CasX variant protein comprises a substitution of L379R, a substitution of C477, a substitution of A708K, a deletion of P at position 793 and a substitution of M779N of SEQ ID NO:2. In some embodiments, a CasX variant protein comprises a substitution of F755M. In some embodiments, a CasX variant comprises any combination of the foregoing embodiments of this paragraph.

[0229] In some embodiments, a CasX variant protein comprises at least one modification compared to the reference CasX sequence of SEQ ID NO:2, wherein the at least one modification is selected from one or more of: an amino acid substitution of L379R; an amino acid substitution of A708K; an amino acid substitution of T620P; an amino acid substitution of E385P; an amino acid substitution of Y857R; an amino acid substitution of I658V; an amino acid substitution of F399L; an amino acid substitution of Q252K; and an amino acid deletion of [P793]. In some embodiments, a CasX variant protein comprises at least one modification compared to the reference CasX sequence of SEQ ID NO:2, wherein the at least one modification is selected from one or more of: an amino acid substitution of L379R; an amino acid substitution of A708K; an amino acid substitution of T620P; an amino acid substitution of E385P; an amino acid substitution of Y857R; an amino acid substitution of I658V; an amino acid substitution of F399L; an amino acid substitution of Q252K; an amino acid substitution of L404K; and an amino acid deletion of [P793]. In other embodiments, a CasX variant protein comprises any combination of the foregoing substitutions or deletions compared to the reference CasX sequence of SEQ ID NO:2. In other embodiments, the CasX variant protein can, in addition to the foregoing substitutions or deletions, further comprise a substitution of an NTSB and/or a helical 1b domain from the reference CasX of SEQ ID NO:1.

[0230] In some embodiments, the CasX variant protein comprises between 400 and 2000 amino acids, between 500 and 1500 amino acids, between 700 and 1200 amino acids, between 800 and 1100 amino acids, or between 900 and 1000 amino acids.

[0231] In some embodiments, the CasX variant protein comprises one or more modifications in a region of non-contiguous residues that form a channel in which gNA:target DNA complexing occurs. In some embodiments, the CasX variant protein comprises one or more modifications comprising a region of non-contiguous residues that form an interface which binds with the gNA. For example, in some embodiments of a reference CasX protein, the helical I, helical II and OBD domains all contact or are in proximity to the gNA:target DNA complex, and one or more modifications to non-contiguous residues within any of these domains may improve function of the CasX variant protein.

[0232] In some embodiments, the CasX variant protein comprises one or more modifications in a region of non-contiguous residues that form a channel which binds with the non-target strand DNA. For example, a CasX variant protein can comprise one or more modifications to non-contiguous residues of the NTSBD. In some embodiments, the CasX variant protein comprises one or more modifications in a region of non-contiguous residues that form an interface which binds with the PAM. For example, a CasX variant protein can comprise one or more modifications to non-contiguous residues of the helical I domain or OBD. In some embodiments, the CasX variant protein comprises one or more modifications comprising a region of non-contiguous surface-exposed residues. As used herein, “surface-exposed residues” refers to amino acids on the surface of the CasX protein, or amino acids in which at least a portion of the amino acid, such as the backbone or a part of the side chain is on the surface of the protein. Surface exposed residues of cellular proteins such as CasX, which are exposed to an aqueous intracellular environment, are frequently selected from positively charged hydrophilic amino acids, for example arginine, asparagine, aspartate, glutamine, glutamate, histidine, lysine, serine, and threonine. Thus, for example, in some embodiments of the variants provided herein, a region of surface exposed residues comprises one or more insertions, deletions, or substitutions compared to a reference CasX protein. In some embodiments, one or more positively charged residues are substituted for one or more other positively charged residues, or negatively charged residues, or uncharged residues, or any combinations thereof. In some embodiments, one or more amino acids residues for substitution are near bound nucleic acid, for example residues in the RuvC domain or helical I domain that contact target DNA, or residues in the OBD or helical II domain that bind the gNA, can be substituted for one or more positively charged or polar amino acids.

[0233] In some embodiments, the CasX variant protein comprises one or more modifications in a region of non-contiguous residues that form a core through hydrophobic packing in a domain of the reference CasX protein. Without wishing to be bound by any theory, regions that form cores through hydrophobic packing are rich in hydrophobic amino acids such as valine, isoleucine, leucine, methionine, phenylalanine, tryptophan, and cysteine. For example, in some reference CasX proteins, RuvC domains comprise a hydrophobic pocket adjacent to the active site. In some embodiments, between 2 to 15 residues of the region are charged, polar, or base-stacking. Charged amino acids (sometimes referred to herein as residues) may include, for example, arginine, lysine, aspartic acid, and glutamic acid, and the side chains of these amino acids may form salt bridges provided a bridge partner is also present. Polar amino acids may include, for example, glutamine, asparagine, histidine, serine, threonine, tyrosine, and cysteine. Polar amino acids can, in some embodiments, form hydrogen bonds as proton donors or acceptors, depending on the identity of their side chains. As used herein, “base-stacking” includes the interaction of aromatic side chains of an amino acid residue (such as tryptophan, tyrosine, phenylalanine, or histidine) with stacked nucleotide bases in a nucleic acid. Any modification to a region of non-contiguous amino acids that are in close spatial proximity to form a functional part of the CasX variant protein is envisaged as within the scope of the disclosure.

[0234] i. CasX Variant Proteins with Domains from Multiple Source Proteins

[0235] In certain embodiments, the disclosure provides a chimeric CasX protein comprising protein domains from two or more different CasX proteins, such as two or more reference CasX proteins, or two or more CasX variant protein sequences as described herein. As used herein, a “chimeric CasX protein” refers to a CasX containing at least two domains isolated or derived from different sources, such as two naturally occurring proteins, which may, in some embodiments, be isolated from different species. For example, in some embodiments, a chimeric CasX protein comprises a first domain from a first CasX protein and a second domain from a second, different CasX protein. In some embodiments, the first domain can be selected from the group consisting of the NTSB, TSL, Helical I, Helical II, OBD and RuvC domains. In some embodiments, the second domain is selected from the group consisting of the NTSB, TSL, Helical I, Helical II, OBD and RuvC domains with the second domain being different from the foregoing first domain. For example, a chimeric CasX protein may comprise an NTSB, TSL, Helical I, Helical II, OBD domains from a CasX protein of SEQ ID NO:2, and a RuvC domain from a CasX protein of SEQ ID NO:1, or vice versa. As a further example, a chimeric CasX protein may comprise an NTSB, TSL, Helical II, OBD and RuvC domain from CasX protein of SEQ ID NO:2, and a Helical I domain from a CasX protein of SEQ ID NO:1, or vice versa. Thus, in certain embodiments, a chimeric CasX protein may comprise an NTSB, TSL, Helical II, OBD and RuvC domain from a first CasX protein, and a Helical I domain from a second CasX protein. In some embodiments of the chimeric CasX proteins, the domains of the first CasX protein are derived from the sequences of SEQ ID NO:1, SEQ ID NO:2 or SEQ ID NO:3, and the domains of the second CasX protein are derived from the sequences of SEQ ID NO: 1, SEQ ID NO:2 or SEQ ID NO:3, and the first and second CasX proteins are not the same. In some embodiments, domains of the first CasX protein comprise sequences derived from SEQ ID NO:1 and domains of the second CasX protein comprise sequences derived from SEQ ID NO:2. In some embodiments, domains of the first CasX protein comprise sequences derived from SEQ ID NO:1 and domains of the second CasX protein comprise sequences derived from SEQ ID NO:3. In some embodiments, domains of the first CasX protein comprise sequences derived from SEQ ID NO:2 and domains of the second CasX protein comprise sequences derived from SEQ ID NO:3. In some embodiments, the CasX variant is selected of group consisting of CasX variants 387, 388, 389, 390, 395, 485, 486, 487, 488, 489, 490, and 491, the sequences of which are set forth in Table 4.

[0236] In some embodiments, a CasX variant protein comprises at least one chimeric domain comprising a first part from a first CasX protein and a second part from a second, different CasX protein. As used herein, a “chimeric domain” refers to a domain containing at least two parts isolated or derived from different sources, such as two naturally occurring proteins or portions of domains from two reference CasX proteins. The at least one chimeric domain can be any of the NTSB, TSL, helical I, helical II, OBD or RuvC domains as described herein. In some embodiments, the first portion of a CasX domain comprises a sequence of SEQ ID NO:1 and the second portion of a CasX domain comprises a sequence of SEQ ID NO:2. In some embodiments, the first portion of the CasX domain comprises a sequence of SEQ ID NO:1 and the second portion of the CasX domain comprises a sequence of SEQ ID NO:3. In some embodiments, the first portion of the CasX domain comprises a sequence of SEQ ID NO:2 and the second portion of the CasX domain comprises a sequence of SEQ ID NO:3. In some embodiments, the at least one chimeric domain comprises a chimeric RuvC domain. As an example of the foregoing, the chimeric RuvC domain comprises amino acids 661 to 824 of SEQ ID NO:1 and amino acids 922 to 978 of SEQ ID NO:2. As an alternative example of the foregoing, a chimeric RuvC domain comprises amino acids 648 to 812 of SEQ ID NO:2 and amino acids 935 to 986 of SEQ ID NO:1. In some embodiments, a CasX protein comprises a first domain from a first CasX protein and a second domain from a second CasX protein, and at least one chimeric domain comprising at least two parts isolated from different CasX proteins using the approach of the embodiments described in this paragraph. In the foregoing embodiments, the chimeric CasX proteins having domains or portions of domains derived from SEQ ID NOS:1, 2 and 3, can further comprise amino acid insertions, deletions, or substitutions of any of the embodiments disclosed herein.

[0237] In some embodiments, a CasX variant protein comprises a sequence of SEQ ID NOS: 49-160, 221-223, 227-230, 235-247, or 258-267 as set forth in set forth in Tables 4, 6, 7, 8, or 10. In some embodiments, a CasX variant protein consists of a sequence set forth in Table 4. In other embodiments, a CasX variant protein comprises a sequence at least 60% identical, at least 65% identical, at least 70% identical, at least 75% identical, at least 80% identical, at least 81% identical, at least 82% identical, at least 83% identical, at least 84% identical, at least 85% identical, at least 86% identical, at least 86% identical, at least 87% identical, at least 88% identical, at least 89% identical, at least 89% identical, at least 90% identical, at least 91% identical, at least 92% identical, at least 93% identical, at least 94% identical, at least 95% identical, at least 96% identical, at least 97% identical, at least 98% identical, at least 99% identical, at least 99.5% identical to a sequence of SEQ ID NOS: 49-160, 221-223, 227-230, 235-247, or 258-267 as set forth in set forth in Tables 4, 6, 7, 8, or 10. In other embodiments, a CasX variant protein comprises a sequence set forth in Table 4, and further comprises one or more NLS disclosed herein at or near either the N-terminus, the C-terminus, or both. It will be understood that in some cases, the N-terminal methionine of the CasX variants of the Tables is removed from the expressed CasX variant during post-translational modification.

TABLE 4
CasX Variant Sequences

| Description* | Amino Acid Sequence |
|---|---|
| TSL, Helical I, | MQEIKRINKIRRRLVKDSNTKKAGKTGPMKTLLVRVMTPDLRERLENLRKK |
| Helical II, | PENIPQPISNTSRANLNKLLTDYTEMKKAILHVYWEEFQKDPVGLMSRVAQ |
| OBD and | PASKKIDQNKLKPEMDEKGNLTTAGFACSQCGQPLFVYKLEQVSEKGKAYT |
| RuvC | NYFGRCNVAEHEKLILLAQLKPEKDSDEAVTYSLGKFGQRALDFYSIHVTR |
| domains | ESNHPVKPLEQIGGNSCASGPVGKALSDACMGAVASFLTKYQDIILEHQKV |
| from SEQ ID | IKKNEKRLANLKDIASANGLAFPKITLPPQPHTKEGIEAYNNVVAQIVIWV |
| NO: 2 and an | NLNLWQKLKIGRDEAKPLQRLKGFPSFPLVERQANEVDWWDMVCNVKKLIN |
| NTSB | EKKEDGKVFWQNLAGYKRQEALRPYLSSEEDRKKGKKFARYQFGDLLLHLE |
| domain from | KKHGEDWGKVYDEAWERIDKKVEGLSKHIKLEEERRSEDAQSKAALTDWLR |
| SEQ ID | AKASFVIEGLKEADKDEFCRCELKLQKWYGDLRGKPFAIEAENSILDISGF |
| NO: 1 | SKQYNCAFIWQKDGVKKLNLYLIINYFKGGKLRFKKIKPEAFEANRFYTVI |
| | NKKSGEIVPMEVNFNFDDPNLIILPLAFGKRQGREFIWNDLLSLETGSLKL |
| | ANGRVIEKTLYNRRTRQDEPALFVALTFERREVLDSSNIKPMNLIGIDRGE |
| | NIPAVIALTDPEGCPLSRFKDSLGNPTHILRIGESYKEKQRTIQAKKEVEQ |
| | RRAGGYSRKYASKAKNLADDMVRNTARDLLYYAVTQDAMLIFENLSRGFGR |
| | QGKRTFMAERQYTRMEDWLTAKLAYEGLSKTYLSKTLAQYTSKTCSNCGFT |
| | ITSADYDRVLEKLKKTATGWMTTINGKELKVEGQITYYNRYKRQNVVKDLS |
| | VELDRLSEESVNNDISSWTKGRSGEALSLLKKRFSHRPVQEKFVCLNCGFE |
| | THADEQAALNIARSWLFLRSQEYKKYQTNKTTGNTDKRAFVETWQSFYRKK |
| | LKEVWKPAV (SEQ ID NO: 49) |
| NTSB, | MQEIKRINKIRRRLVKDSNTKKAGKTGPMKTLLVRVMTPDLRERLENLRKK |
| Helical I, | PENIPQPISNTSRANLNKLLTDYTEMKKAILHVYWEEFQKDPVGLMSRVAQ |
| Helical II, | PAPKNIDQRKLIPVKDGNERLTSSGFACSQCCQPLYVYKLEQVNDKGKPHT |
| OBD and | NYFGRCNVSEHERLILLSPHKPEANDELVTYSLGKFGQRALDFYSIHVTRE |
| RuvC | SNHPVKPLEQIGGNSCASGPVGKALSDACMGAVASFLTKYQDIILEHQKVI |
| domains | KKNEKRLANLKDIASANGLAFPKITLPPQPHTKEGIEAYNNVVAQIVIWVN |
| from SEQ ID | LNLWQKLKIGRDEAKPLQRLKGFPSFPLVERQANEVDWWDMVCNVKKLINE |
| NO: 2 and a | KKEDGKVFWQNLAGYKRQEALRPYLSSEEDRKKGKKFARYQFGDLLLHLEK |
| TSL domain | KHGEDWGKVYDEAWERIDKKVEGLSKHIKLEEERRSEDAQSKAALTDWLRA |
| from SEQ ID | KASFVIEGLKEADKDEFCRCELKLQKWYGDLRGKPFAIEAENSILDISGFS |
| NO: 1. | KQYNCAFIWQKDGVKKLNLYLIINYFKGGKLRFKKIKPEAFEANRFYTVIN |
| | KKSGEIVPMEVNFNFDDPNLIILPLAFGKRQGREFIWNDLLSLETGSLKLA |
| | NGRVIEKTLYNRRTRQDEPALFVALTFERREVLDSSNIKPMNLIGIDRGEN |
| | IPAVIALTDPEGCPLSRFKDSLGNPTHILRIGESYKEKQRTIQAKKEVEQR |
| | RAGGYSRKYASKAKNLADDMVRNTARDLLYYAVTQDAMLIFENLSRGFGRQ |
| | GKRTFMAERQYTRMEDWLTAKLAYEGLSKTYLSKTLAQYTSKTCSNCGFTI |
| | TTADYDGMLVRLKKTSDGWATTLNNKELKAEGQITYYNRYKRQTVEKELSA |
| | ELDRLSEESGNNDISKWTKGRRDEALFLLKKRFSHRPVQEQFVCLDCGHEV |
| | HADEQAALNIARSWLFLRSQEYKKYQTNKTTGNTDKRAFVETWQSFYRKKL |
| | KEVWKPAV (SEQ ID NO: 50) |
| TSL, Helical I, | MEKRINKIRKKLSADNATKPVSRSGPMKTLLVRVMTDDLKKRLEKRRKKPE |
| Helical II, | VMPQVISNNAANNLRMLLDDYTKMKEAILQVYWQEFKDDHVGLMCKFAQPA |
| OBD and | PKNIDQRKLIPVKDGNERLTSSGFACSQCCQPLYVYKLEQVNDKGKPHTNY |
| RuvC | FGRCNVSEHERLILLSPHKPEANDELVTYSLGKFGQRALDFYSIHVTKEST |
| domains | HPVKPLAQIAGNRYASGPVGKALSDACMGTIASFLSKYQDIIIEHQKVVKG |
| from SEQ ID | NQKRLESLRELAGKENLEYPSVTLPPQPHTKEGVDAYNEVIARVRMWVNLN |
| NO: 1 and an | LWQKLKLSRDDAKPLLRLKGFPSFPVVERRENEVDWWNTINEVKKLIDAKR |
| NTSB | DMGRVFWSGVTAEKRNTILEGYNYLPNENDHKKREGSLENPKKPAKRQFGD |
| domain from | LLLYLEKKYAGDWGKVFDEAWERIDKKIAGLTSHIEREEARNAEDAQSKAV |
| SEQ ID | LTDWLRAKASFVLERLKEMDEKEFYACEIQLQKWYGDLRGNPFAVEAENRV |
| NO: 2 | VDISGFSIGSDGHSIQYRNLLAWKYLENGKREFYLLMNYGKKGRIRFTDGT |
| | DIKKSGKWQGLLYGGGKAKVIDLTFDPDDEQLIILPLAFGTRQGREFIWND |
| | LLSLETGLIKLANGRVIEKTIYNKKIGRDEPALFVALTFERREVVDPSNIK |
| | PVNLIGVDRGENIPAVIALTDPEGCPLPEFKDSSGGPTDILRIGEGYKEKQ |
| | RAIQAAKEVEQRRAGGYSRKFASKSRNLADDMVRNSARDLFYHAVTHDAVL |
| | VFENLSRGFGRQGKRTFMTERQYTKMEDWLTAKLAYEGLTSKTYLSKTLAQ |
| | YTSKTCSNCGFTITTADYDGMLVRLKKTSDGWATTLNNKELKAEGQITYYN |
| | RYKRQTVEKELSAELDRLSEESGNNDISKWTKGRRDEALFLLKKRFSHRPV |
| | QEQFVCLDCGHEVHADEQAALNIARSWLFLNSNSTEFKSYKSGKQPFVGAW |
| | QAFYKRRLKEVWKPNA (SEQ ID NO: 51) |
| NTSB, | MEKRINKIRKKLSADNATKPVSRSGPMKTLLVRVMTDDLKKRLEKRRKKPE |
| Helical I, | VMPQVISNNAANNLRMLLDDYTKMKEAILQVYWQEFKDDHVGLMCKFAQPA |
| Helical II, | SKKIDQNKLKPEMDEKGNLTTAGFACSQCGQPLFVYKLEQVSEKGKAYTNY |
| OBD and | FGRCNVAEHEKLILLAQLKPEKDSDEAVTYSLGKFGQRALDFYSIHVTKES |
| RuvC | THPVKPLAQIAGNRYASGPVGKALSDACMGTIASFLSKYQDIIIEHQKVVK |
| domains | GNQKRLESLRELAGKENLEYPSVTLPPQPHTKEGVDAYNEVIARVRMWVNL |
| from SEQ ID | NLWQKLKLSRDDAKPLLRLKGFPSFPVVERRENEVDWWNTINEVKKLIDAK |
| NO: 1 and an | RDMGRVFWSGVTAEKRNTILEGYNYLPNENDHKKREGSLENPKKPAKRQFG |
| TSL domain | DLLLYLEKKYAGDWGKVFDEAWERIDKKIAGLTSHIEREEARNAEDAQSKA |
| from SEQ ID | VLTDWLRAKASFVLERLKEMDEKEFYACEIQLQKWYGDLRGNPFAVEAENR |
| NO: 2. | VVDISGFSIGSDGHSIQYRNLLAWKYLENGKREFYLLMNYGKKGRIRFTDG |
| | TDIKKSGKWQGLLYGGGKAKVIDLTFDPDDEQLIILPLAFGTRQGREFIWN |
| | DLLSLETGLIKLANGRVIEKTIYNKKIGRDEPALFVALTFERREVVDPSNI |
| | KPVNLIGVDRGENIPAVIALTDPEGCPLPEFKDSSGGPTDILRIGEGYKEK |
| | QRAIQAAKEVEQRRAGGYSRKFASKSRNLADDMVRNSARDLFYHAVTHDAV |
| | LVFENLSRGFGRQGKRTFMTERQYTKMEDWLTAKLAYEGLTSKTYLSKTLA |
| | QYTSKTCSNCGFTITSADYDRVLEKLKKTATGWMTTINGKELKVEGQITYY |
| | NRYKRQNVVKDLSVELDRLSEESVNNDISSWTKGRSGEALSLLKKRFSHRP |
| | VQEKFVCLNCGFETHADEQAALNIARSWLFLNSNSTEFKSYKSGKQPFVGA |
| | WQAFYKRRLKEVWKPNA (SEQ ID NO: 52) |
| NTSB, TSL, | MQEIKRINKIRRRLVKDSNTKKAGKTGPMKTLLVRVMTPDLRERLENLRKK |
| Helical I, | PENIPQPISNTSRANLNKLLTDYTEMKKAILHVYWEEFQKDPVGLMSRVAQ |
| Helical II | PAPKNIDQRKLIPVKDGNERLTSSGFACSQCCQPLYVYKLEQVNDKGKPHT |
| and OBD | NYFGRCNVSEHERLILLSPHKPEANDELVTYSLGKFGQRALDFYSIHVTRE |
| domains | SNHPVKPLEQIGGNSCASGPVGKALSDACMGAVASFLTKYQDIILEHQKVI |
| SEQ ID | KKNEKRLANLKDIASANGLAFPKITLPPQPHTKEGIEAYNNVVAQIVIWVN |
| NO: 2 and an | LNLWQKLKIGRDEAKPLQRLKGFPSFPLVERQANEVDWWDMVCNVKKLINE |
| exogenous | KKEDGKVFWQNLAGYKRQEALRPYLSSEEDRKKGKKFARYQFGDLLLHLEK |
| RuvC | KHGEDWGKVYDEAWERIDKKVEGLSKHIKLEEERRSEDAQSKAALTDWLRA |
| domain or a | KASFVIEGLKEADKDEFCRCELKLQKWYGDLRGKPFAIEAENSILDISGFS |
| portion | KQYNCAFIWQKDGVKKLNLYLIINYFKGGKLRFKKIKPEAFEANRFYTVIN |
| thereof from | KKSGEIVPMEVNFNFDDPNLIILPLAFGKRQGREFIWNDLLSLETGSLKLA |
| a second | NGRVIEKTLYNRRTRQDEPALFVALTFERREVLDSSNIKPVNLIGVDRGEN |
| CasX | IPAVIALTDPEGCPLPEFKDSSGGPTDILRIGEGYKEKQRAIQAAKEVEQR |
| protein. | RAGGYSRKFASKSRNLADDMVRNSARDLFYHAVTHDAVLVFENLSRGFGRQ |
| | GKRTFMTERQYTKMEDWLTAKLAYEGLTSKTYLSKTLAQYTSKTCSNCGFT |
| | ITSADYDRVLEKLKKTATGWMTTINGKELKVEGQITYYNRYKRQNVVKDLS |
| | VELDRLSEESVNNDISSWTKGRSGEALSLLKKRFSHRPVQEKFVCLNCGFE |
| | THA (SEQ ID NO: 53) |
| | MQEIKRINKIRRRLVKDSNTKKAGKTGPMKTLLVRVMTPDLRERLENLRKK |
| | PENIPQPISNTSRANLNKLLTDYTEMKKAILHVYWEEFQKDPVGLMSRVAQ |
| | PAPKNIDQRKLIPVKDGNERLTSSGFACSQCCQPLYVYKLEQVNDKGKPHT |
| | NYFGRCNVSEHERLILLSPHKPEANDELVTYSLGKFGQRALDFYSIHVTRE |
| | SNHPVKPLEQIGGNSCASGPVGKALSDACMGAVASFLTKYQDIILEHQKVI |
| | KKNEKRLANLKDIASANGLAFPKITLPPQPHTKEGIEAYNNVVAQIVIWVN |
| | LNLWQKLKIGRDEAKPLQRLKGFPSFPLVERQANEVDWWDMVCNVKKLINE |
| | KKEDGKVFWQNLAGYKRQEALRPYLSSEEDRKKGKKFARYQFGDLLLHLEK |
| | KHGEDWGKVYDEAWERIDKKVEGLSKHIKLEEERRSEDAQSKAALTDWLRA |
| | KASFVIEGLKEADKDEFCRCELKLQKWYGDLRGKPFAIEAENSILDISGFS |
| | KQYNCAFIWQKDGVKKLNLYLIINYFKGGKLRFKKIKPEAFEANRFYTVIN |
| | KKSGEIVPMEVNFNFDDPNLIILPLAFGKRQGREFIWNDLLSLETGSLKLA |
| | NGRVIEKTLYNRRTRQDEPALFVALTFERREVLDSSNIKPMNLIGIDRGEN |
| | IPAVIALTDPEGCPLSRFKDSLGNPTHILRIGESYKEKQRTIQAKKEVEQR |
| | RAGGYSRKYASKAKNLADDMVRNTARDLLYYAVTQDAMLIFENLSRGFGRQ |
| | GKRTFMAERQYTRMEDWLTAKLAYEGLSKTYLSKTLAQYTSKTCSNCGFTI |
| | TSADYDRVLEKLKKTATGWMTTINGKELKVEGQITYYNRYKRONVVKDLSV |
| | ELDRLSEESVNNDISSWTKGRSGEALSLLKKRFSHRPVQEKFVCLNCGFET |
| | HA (SEQ ID NO: 54) |
| NTSB, TSL, | MQEIKRINKIRRRLVKDSNTKKAGKTGPMKTLLVRVMTPDLRERLENLRKK |
| Helical II, | PENIPQPISNNAANNLRMLLDDYTKMKEAILQVYWQEFKDDHVGLMCKFAQ |
| OBD and | PAPKNIDQRKLIPVKDGNERLTSSGFACSQCCQPLYVYKLEQVNDKGKPHT |
| RuvC | NYFGRCNVSEHERLILLSPHKPEANDELVTYSLGKFGQRALDFYSIHVTKE |
| domains | STHPVKPLAQIAGNRYASGPVGKALSDACMGTIASFLSKYQDIIIEHQKVV |
| from SEQ ID | KGNQKRLESLRELAGKENLEYPSVTLPPQPHTKEGVDAYNEVIARVRMWVN |
| NO: 2 and a | LNLWQKLKLSRDDAKPLLRLKGFPSFPLVERQANEVDWWDMVCNVKKLINE |
| Helical I | KKEDGKVFWQNLAGYKRQEALRPYLSSEEDRKKGKKFARYQFGDLLLHLEK |
| domain from | KHGEDWGKVYDEAWERIDKKVEGLSKHIKLEEERRSEDAQSKAALTDWLRA |
| SEQ ID | KASFVIEGLKEADKDEFCRCELKLQKWYGDLRGKPFAIEAENSILDISGFS |
| NO: 1 | KQYNCAFIWQKDGVKKLNLYLIINYFKGGKLRFKKIKPEAFEANRFYTVIN |
| | KKSGEIVPMEVNFNFDDPNLIILPLAFGKRQGREFIWNDLLSLETGSLKLA |
| | NGRVIEKTLYNRRTRQDEPALFVALTFERREVLDSSNIKPMNLIGIDRGEN |
| | IPAVIALTDPEGCPLSRFKDSLGNPTHILRIGESYKEKQRTIQAKKEVEQR |
| | RAGGYSRKYASKAKNLADDMVRNTARDLLYYAVTQDAMLIFENLSRGFGRQ |
| | GKRTFMAERQYTRMEDWLTAKLAYEGLSKTYLSKTLAQYTSKTCSNCGFTI |
| | TSADYDRVLEKLKKTATGWMTTINGKELKVEGQITYYNRYKRQNVVKDLSV |
| | ELDRLSEESVNNDISSWTKGRSGEALSLLKKRFSHRPVQEKFVCLNCGFET |
| | HADEQAALNIARSWLFLRSQEYKKYQTNKTTGNTDKRAFVETWQSFYRKKL |
| | KEVWKPAV (SEQ ID NO: 55) |
| NTSB, TSL, | MQEIKRINKIRRRLVKDSNTKKAGKTGPMKTLLVRVMTPDLRERLENLRKK |
| Helical I, | PENIPQPISNTSRANLNKLLTDYTEMKKAILHVYWEEFQKDPVGLMSRVAQ |
| OBD and | PAPKNIDQRKLIPVKDGNERLTSSGFACSQCCQPLYVYKLEQVNDKGKPHT |
| RuvC | NYFGRCNVSEHERLILLSPHKPEANDELVTYSLGKFGQRALDFYSIHVTRE |
| domains | SNHPVKPLEQIGGNSCASGPVGKALSDACMGAVASFLTKYQDIILEHQKVI |
| from SEQ ID | KKNEKRLANLKDIASANGLAFPKITLPPQPHTKEGIEAYNNVVAQIVIWVN |
| NO: 2 and a | LNLWQKLKIGRDEAKPLQRLKGFPSFPVVERRENEVDWWNTINEVKKLIDA |
| Helical II | KRDMGRVFWSGVTAEKRNTILEGYNYLPNENDHKKREGSLENPKKPAKRQF |
| domain from | GDLLLYLEKKYAGDWGKVFDEAWERIDKKIAGLTSHIEREEARNAEDAQSK |
| SEQ ID | AVLTDWLRAKASFVLERLKEMDEKEFYACEIQLQKWYGDLRGNPFAVEAEN |
| NO: 1 | SILDISGFSKQYNCAFIWQKDGVKKLNLYLIINYFKGGKLRFKKIKPEAFE |
| | ANRFYTVINKKSGEIVPMEVNFNFDDPNLIILPLAFGKRQGREFIWNDLLS |
| | LETGSLKLANGRVIEKTLYNRRTRQDEPALFVALTFERREVLDSSNIKPMN |
| | LIGIDRGENIPAVIALTDPEGCPLSRFKDSLGNPTHILRIGESYKEKQRTI |
| | QAKKEVEQRRAGGYSRKYASKAKNLADDMVRNTARDLLYYAVTQDAMLIFE |
| | NLSRGFGRQGKRTFMAERQYTRMEDWLTAKLAYEGLSKTYLSKTLAQYTSK |
| | TCSNCGFTITSADYDRVLEKLKKTATGWMTTINGKELKVEGQITYYNRYKR |
| | QNVVKDLSVELDRLSEESVNNDISSWTKGRSGEALSLLKKRFSHRPVQEKF |
| | VCLNCGFETHADEQAALNIARSWLFLRSQEYKKYQTNKTTGNTDKRAFVET |
| | WQSFYRKKLKEVWKPAV (SEQ ID NO: 56) |
| NTSB, TSL, | MISNTSRANLNKLLTDYTEMKKAILHVYWEEFQKDPVGLMSRVAQPAPKNI |
| Helical I, | DQRKLIPVKDGNERLTSSGFACSQCCQPLYVYKLEQVNDKGKPHTNYFGRC |
| Helical II | NVSEHERLILLSPHKPEANDELVTYSLGKFGQRALDFYSIHVTRESNHPVK |
| and RuvC | PLEQIGGNSCASGPVGKALSDACMGAVASFLTKYQDIILEHQKVIKKNEKR |
| domains | LANLKDIASANGLAFPKITLPPQPHTKEGIEAYNNVVAQIVIWVNLNLWQK |
| from a first | LKIGRDEAKPLQRLKGFPSFPLVERQANEVDWWDMVCNVKKLINEKKEDGK |
| CasX protein | VFWQNLAGYKRQEALRPYLSSEEDRKKGKKFARYQFGDLLLHLEKKHGEDW |
| and an | GKVYDEAWERIDKKVEGLSKHIKLEEERRSEDAQSKAALTDWLRAKASFVI |
| exogenous | EGLKEADKDEFCRCELKLQKWYGDLRGKPFAIEAENRVVDISGFSIGSDGH |
| OBD or a | SIQYRNLLAWKYLENGKREFYLLMNYGKKGRIRFTDGTDIKKSGKWQGLLY |
| part thereof | GGGKAKVIDLTFDPDDEQLIILPLAFGTRQGREFIWNDLLSLETGLIKLAN |
| from a | GRVIEKTIYNKKIGRDEPALFVALTFERREVVDPSNIKPMNLIGIDRGENI |
| second CasX | PAVIALTDPEGCPLSRFKDSLGNPTHILRIGESYKEKQRTIQAKKEVEQRR |
| protein | AGGYSRKYASKAKNLADDMVRNTARDLLYYAVTQDAMLIFENLSRGFGRQG |
| | KRTFMAERQYTRMEDWLTAKLAYEGLSKTYLSKTLAQYTSKTCSNCGFTIT |
| | SADYDRVLEKLKKTATGWMTTINGKELKVEGQITYYNRYKRQNVVKDLSVE |
| | LDRLSEESVNNDISSWTKGRSGEALSLLKKRFSHRPVQEKFVCLNCGFETH |
| | ADEQAALNIARSWLFLRSQEYKKYQTNKTTGNTDKRAFVETWQSFYRKKLK |
| | EVWKPAV (SEQ ID NO: 57) |
| | MEKRINKIRKKLSADNATKPVSRSGPMKTLLVRVMTDDLKKRLEKRRKKPE |
| | VMPQVISNTSRANLNKLLTDYTEMKKAILHVYWEEFQKDPVGLMSRVAQPA |
| | PKNIDQRKLIPVKDGNERLTSSGFACSQCCQPLYVYKLEQVNDKGKPHTNY |
| | FGRCNVSEHERLILLSPHKPEANDELVTYSLGKFGQRALDFYSIHVTRESN |
| | HPVKPLEQIGGNSCASGPVGKALSDACMGAVASFLTKYQDIILEHQKVIKK |
| | NEKRLANLKDIASANGLAFPKITLPPQPHTKEGIEAYNNVVAQIVIWVNLN |
| | LWQKLKIGRDEAKPLQRLKGFPSFPLVERQANEVDWWDMVCNVKKLINEKK |
| | EDGKVFWQNLAGYKRQEALRPYLSSEEDRKKGKKFARYQFGDLLLHLEKKH |
| | GEDWGKVYDEAWERIDKKVEGLSKHIKLEEERRSEDAQSKAALTDWLRAKA |
| | SFVIEGLKEADKDEFCRCELKLQKWYGDLRGKPFAIEAENSILDISGFSKQ |
| | YNCAFIWQKDGVKKLNLYLIINYFKGGKLRFKKIKPEAFEANRFYTVINKK |
| | SGEIVPMEVNFNFDDPNLIILPLAFGKRQGREFIWNDLLSLETGSLKLANG |
| | RVIEKTLYNRRTRQDEPALFVALTFERREVLDSSNIKPMNLIGIDRGENIP |
| | AVIALTDPEGCPLSRFKDSLGNPTHILRIGESYKEKQRTIQAKKEVEQRRA |
| | GGYSRKYASKAKNLADDMVRNTARDLLYYAVTQDAMLIFENLSRGFGRQGK |
| | RTFMAERQYTRMEDWLTAKLAYEGLSKTYLSKTLAQYTSKTCSNCGFTITS |
| | ADYDRVLEKLKKTATGWMTTINGKELKVEGQITYYNRYKRQNVVKDLSVEL |
| | DRLSEESVNNDISSWTKGRSGEALSLLKKRFSHRPVQEKFVCLNCGFETHA |
| | DEQAALNIARSWLFLRSQEYKKYQTNKTTGNTDKRAFVETWQSFYRKKLKE |
| | VWKPAV (SEQ ID NO: 58) |
| | MQEIKRINKIRRRLVKDSNTKKAGKTGPMKTLLVRVMTPDLRERLENLRKK |
| | PENIPQPISNTSRANLNKLLTDYTEMKKAILHVYWEEFQKDPVGLMSRVAQ |
| | PAPKNIDQRKLIPVKDGNERLTSSGFACSQCCQPLYVYKLEQVNDKGKPHT |
| | NYFGRCNVSEHERLILLSPHKPEANDELVTYSLGKFGQRALDFYSIHVTRE |
| | SNHPVKPLEQIGGNSCASGPVGKALSDACMGAVASFLTKYQDIILEHQKVI |
| | KKNEKRLANLKDIASANGLAFPKITLPPQPHTKEGIEAYNNVVAQIVIWVN |
| | LNLWQKLKIGRDEAKPLQRLKGFPSFPLVERQANEVDWWDMVCNVKKLINE |
| | KKEDGKVFWQNLAGYKRQEALRPYLSSEEDRKKGKKFARYQFGDLLLHLEK |
| | KHGEDWGKVYDEAWERIDKKVEGLSKHIKLEEERRSEDAQSKAALTDWLRA |
| | KASFVIEGLKEADKDEFCRCELKLQKWYGDLRGKPFAIEAENRVVDISGFS |
| | IGSDGHSIQYRNLLAWKYLENGKREFYLLMNYGKKGRIRFTDGTDIKKSGK |
| | WQGLLYGGGKAKVIDLTFDPDDEQLIILPLAFGTRQGREFIWNDLLSLETG |
| | LIKLANGRVIEKTIYNKKIGRDEPALFVALTFERREVVDPSNIKPMNLIGI |
| | DRGENIPAVIALTDPEGCPLSRFKDSLGNPTHILRIGESYKEKQRTIQAKK |
| | EVEQRRAGGYSRKYASKAKNLADDMVRNTARDLLYYAVTQDAMLIFENLSR |
| | GFGRQGKRTFMAERQYTRMEDWLTAKLAYEGLSKTYLSKTLAQYTSKTCSN |
| | CGFTITSADYDRVLEKLKKTATGWMTTINGKELKVEGQITYYNRYKRQNVV |
| | KDLSVELDRLSEESVNNDISSWTKGRSGEALSLLKKRFSHRPVQEKFVCLN |
| | CGFETHADEQAALNIARSWLFLRSQEYKKYQTNKTTGNTDKRAFVETWQSF |
| | YRKKLKEVWKPAV (SEQ ID NO: 59) |
| substitution | MQEIKRINKIRRRLVKDSNTKKAGKTGPMKTLLVRVMTPDLRERLENLRKK |
| of L379R, a | PENIPQPISNTSRANLNKLLTDYTEMKKAILHVYWEEFQKDPVGLMSRVAQ |
| substitution | PAPKNIDQRKLIPVKDGNERLTSSGFACSQCCQPLYVYKLEQVNDKGKPHT |
| of C477K, a | NYFGRCNVSEHERLILLSPHKPEANDELVTYSLGKFGQRALDFYSIHVTRE |
| substitution | SNHPVKPLEQIGGNSCASGPVGKALSDACMGAVASFLTKYQDIILEHQKVI |
| of A708K, a | KKNEKRLANLKDIASANGLAFPKITLPPQPHTKEGIEAYNNVVAQIVIWVN |
| deletion of P | LNLWQKLKIGRDEAKPLQRLKGFPSFPLVERQANEVDWWDMVCNVKKLINE |
| at position | KKEDGKVFWQNLAGYKRQEALRPYLSSEEDRKKGKKFARYQFGDLLLHLEK |
| 793 and a | KHGEDWGKVYDEAWERIDKKVEGLSKHIKLEEERRSEDAQSKAALTDWLRA |
| substitution | KASFVIEGLKEADKDEFKRCELKLQKWYGDLRGKPFAIEAENSILDISGFS |
| ofT620P of | KQYNCAFIWQKDGVKKLNLYLIINYFKGGKLRFKKIKPEAFEANRFYTVIN |
| SEQID | KKSGEIVPMEVNFNFDDPNLIILPLAFGKRQGREFIWNDLLSLETGSLKLA |
| NO:2 | NGRVIEKPLYNRRTRQDEPALFVALTFERREVLDSSNIKPMNLIGIDRGEN |
| | IPAVIALTDPEGCPLSRFKDSLGNPTHILRIGESYKEKQRTIQAKKEVEQR |
| | RAGGYSRKYASKAKNLADDMVRNTARDLLYYAVTQDAMLIFENLSRGFGRQ |
| | GKRTFMAERQYTRMEDWLTAKLAYEGLSKTYLSKTLAQYTSKTCSNCGFTI |
| | TSADYDRVLEKLKKTATGWMTTINGKELKVEGQITYYNRYKRQNVVKDLSV |
| | ELDRLSEESVNNDISSWTKGRSGEALSLLKKRFSHRPVQEKFVCLNCGFET |
| | HADEQAALNIARSWLFLRSQEYKKYQTNKTTGNTDKRAFVETWQSFYRKKL |
| | KEVWKPAV (SEQ ID NO: 60) |
| substitution | MQEIKRINKIRRRLVKDSNTKKAGKTGPMKTLLVRVMTPDLRERLENLRKK |
| of M771A of | PENIPQPISNTSRANLNKLLTDYTEMKKAILHVYWEEFQKDPVGLMSRVAQ |
| SEQ ID | PAPKNIDQRKLIPVKDGNERLTSSGFACSQCCQPLYVYKLEQVNDKGKPHT |
| NO: 2. | NYFGRCNVSEHERLILLSPHKPEANDELVTYSLGKFGQRALDFYSIHVTRE |
| | SNHPVKPLEQIGGNSCASGPVGKALSDACMGAVASFLTKYQDIILEHQKVI |
| | KKNEKRLANLKDIASANGLAFPKITLPPQPHTKEGIEAYNNVVAQIVIWVN |
| | LNLWQKLKIGRDEAKPLQRLKGFPSFPLVERQANEVDWWDMVCNVKKLINE |
| | KKEDGKVFWQNLAGYKRQEALLPYLSSEEDRKKGKKFARYQFGDLLLHLEK |
| | KHGEDWGKVYDEAWERIDKKVEGLSKHIKLEEERRSEDAQSKAALTDWLRA |
| | KASFVIEGLKEADKDEFCRCELKLQKWYGDLRGKPFAIEAENSILDISGFS |
| | KQYNCAFIWQKDGVKKLNLYLIINYFKGGKLREKKIKPEAFEANRFYTVIN |
| | KKSGEIVPMEVNFNFDDPNLIILPLAFGKRQGREFIWNDLLSLETGSLKLA |
| | NGRVIEKTLYNRRTRQDEPALFVALTFERREVLDSSNIKPMNLIGIDRGEN |
| | IPAVIALTDPEGCPLSRFKDSLGNPTHILRIGESYKEKQRTIQAAKEVEQR |
| | RAGGYSRKYASKAKNLADDMVRNTARDLLYYAVTQDAMLIFENLSRGFGRQ |
| | GKRTFAAERQYTRMEDWLTAKLAYEGLPSKTYLSKTLAQYTSKTCSNCGFT |
| | ITSADYDRVLEKLKKTATGWMTTINGKELKVEGQITYYNRYKRQNVVKDLS |
| | VELDRLSEESVNNDISSWTKGRSGEALSLLKKRFSHRPVQEKFVCLNCGFE |
| | THADEQAALNIARSWLFLRSQEYKKYQTNKTTGNTDKRAFVETWQSFYRKK |
| | LKEVWKPA (SEQ ID NO: 61) |
| substitution | MQEIKRINKIRRRLVKDSNTKKAGKTGPMKTLLVRVMTPDLRERLENLRKK |
| of L379R, a | PENIPQPISNTSRANLNKLLTDYTEMKKAILHVYWEEFQKDPVGLMSRVAQ |
| substitution | PAPKNIDQRKLIPVKDGNERLTSSGFACSQCCQPLYVYKLEQVNDKGKPHT |
| of A708K, a | NYFGRCNVSEHERLILLSPHKPEANDELVTYSLGKFGQRALDFYSIHVTRE |
| deletion of P | SNHPVKPLEQIGGNSCASGPVGKALSDACMGAVASFLTKYQDIILEHQKVI |
| at position | KKNEKRLANLKDIASANGLAFPKITLPPQPHTKEGIEAYNNVVAQIVIWVN |
| 793 and a | LNLWQKLKIGRDEAKPLQRLKGFPSFPLVERQANEVDWWDMVCNVKKLINE |
| substitution | KKEDGKVFWQNLAGYKRQEALRPYLSSEEDRKKGKKFARYQFGDLLLHLEK |
| of D732N of | KHGEDWGKVYDEAWERIDKKVEGLSKHIKLEEERRSEDAQSKAALTDWLRA |
| SEQ ID | KASFVIEGLKEADKDEFCRCELKLQKWYGDLRGKPFAIEAENSILDISGFS |
| NO: 2. | KQYNCAFIWQKDGVKKLNLYLIINYFKGGKLRFKKIKPEAFEANRFYTVIN |
| | KKSGEIVPMEVNFNFDDPNLIILPLAFGKRQGREFIWNDLLSLETGSLKLA |
| | NGRVIEKTLYNRRTRQDEPALFVALTFERREVLDSSNIKPMNLIGIDRGEN |
| | IPAVIALTDPEGCPLSRFKDSLGNPTHILRIGESYKEKQRTIQAKKEVEQR |
| | RAGGYSRKYASKAKNLANDMVRNTARDLLYYAVTQDAMLIFENLSRGFGRQ |
| | GKRTFMAERQYTRMEDWLTAKLAYEGLSKTYLSKTLAQYTSKTCSNCGFTI |
| | TSADYDRVLEKLKKTATGWMTTINGKELKVEGQITYYNRYKRQNVVKDLSV |
| | ELDRLSEESVNNDISSWTKGRSGEALSLLKKRFSHRPVQEKFVCLNCGFET |
| | HADEQAALNIARSWLFLRSQEYKKYQTNKTTGNTDKRAFVETWQSFYRKKL |
| | KEVWKPAV (SEQ ID NO: 62) |
| substitution | MQEIKRINKIRRRLVKDSNTKKAGKTGPMKTLLVRVMTPDLRERLENLRKK |
| of W782Q of | PENIPQPISNTSRANLNKLLTDYTEMKKAILHVYWEEFQKDPVGLMSRVAQ |
| SEQ ID | PAPKNIDQRKLIPVKDGNERLTSSGFACSQCCQPLYVYKLEQVNDKGKPHT |
| NO: 2. | NYFGRCNVSEHERLILLSPHKPEANDELVTYSLGKFGQRALDFYSIHVTRE |
| | SNHPVKPLEQIGGNSCASGPVGKALSDACMGAVASFLTKYQDIILEHQKVI |
| | KKNEKRLANLKDIASANGLAFPKITLPPQPHTKEGIEAYNNVVAQIVIWVN |
| | LNLWQKLKIGRDEAKPLQRLKGFPSFPLVERQANEVDWWDMVCNVKKLINE |
| | KKEDGKVFWQNLAGYKRQEALLPYLSSEEDRKKGKKFARYQFGDLLLHLEK |
| | KHGEDWGKVYDEAWERIDKKVEGLSKHIKLEEERRSEDAQSKAALTDWLRA |
| | KASFVIEGLKEADKDEFCRCELKLQKWYGDLRGKPFAIEAENSILDISGFS |
| | KQYNCAFIWQKDGVKKLNLYLIINYFKGGKLRFKKIKPEAFEANRFYTVIN |
| | KKSGEIVPMEVNFNFDDPNLIILPLAFGKRQGREFIWNDLLSLETGSLKLA |
| | NGRVIEKTLYNRRTRQDEPALFVALTFERREVLDSSNIKPMNLIGIDRGEN |
| | IPAVIALTDPEGCPLSRFKDSLGNPTHILRIGESYKEKQRTIQAAKEVEQR |
| | RAGGYSRKYASKAKNLADDMVRNTARDLLYYAVTQDAMLIFENLSRGFGRQ |
| | GKRTFMAERQYTRMEDQLTAKLAYEGLPSKTYLSKTLAQYTSKTCSNCGFT |
| | ITSADYDRVLEKLKKTATGWMTTINGKELKVEGQITYYNRYKRQNVVKDLS |
| | VELDRLSEESVNNDISSWTKGRSGEALSLLKKRFSHRPVQEKFVCLNCGFE |
| | THADEQAALNIARSWLFLRSQEYKKYQTNKTTGNTDKRAFVETWQSFYRKK |
| | LKEVWKPAV (SEQ ID NO: 63) |
| substitution | MQEIKRINKIRRRLVKDSNTKKAGKTGPMKTLLVRVMTPDLRERLENLRKK |
| of M771Q of | PENIPQPISNTSRANLNKLLTDYTEMKKAILHVYWEEFQKDPVGLMSRVAQ |
| SEQ ID | PAPKNIDQRKLIPVKDGNERLTSSGFACSQCCQPLYVYKLEQVNDKGKPHT |
| NO: 2 | NYFGRCNVSEHERLILLSPHKPEANDELVTYSLGKFGQRALDFYSIHVTRE |
| | SNHPVKPLEQIGGNSCASGPVGKALSDACMGAVASFLTKYQDIILEHQKVI |
| | KKNEKRLANLKDIASANGLAFPKITLPPQPHTKEGIEAYNNVVAQIVIWVN |
| | LNLWQKLKIGRDEAKPLQRLKGFPSFPLVERQANEVDWWDMVCNVKKLINE |
| | KKEDGKVFWQNLAGYKRQEALLPYLSSEEDRKKGKKFARYQFGDLLLHLEK |
| | KHGEDWGKVYDEAWERIDKKVEGLSKHIKLEEERRSEDAQSKAALTDWLRA |
| | KASFVIEGLKEADKDEFCRCELKLQKWYGDLRGKPFAIEAENSILDISGFS |
| | KQYNCAFIWQKDGVKKLNLYLIINYFKGGKLRFKKIKPEAFEANRFYTVIN |
| | KKSGEIVPMEVNFNFDDPNLIILPLAFGKRQGREFIWNDLLSLETGSLKLA |
| | NGRVIEKTLYNRRTRQDEPALFVALTFERREVLDSSNIKPMNLIGIDRGEN |
| | IPAVIALTDPEGCPLSRFKDSLGNPTHILRIGESYKEKQRTIQAAKEVEQR |
| | RAGGYSRKYASKAKNLADDMVRNTARDLLYYAVTQDAMLIFENLSRGFGRQ |
| | GKRTFQAERQYTRMEDWLTAKLAYEGLPSKTYLSKTLAQYTSKTCSNCGFT |
| | ITSADYDRVLEKLKKTATGWMTTINGKELKVEGQITYYNRYKRQNVVKDLS |
| | VELDRLSEESVNNDISSWTKGRSGEALSLLKKRFSHRPVQEKFVCLNCGFE |
| | THADEQAALNIARSWLFLRSQEYKKYQTNKTTGNTDKRAFVETWQSFYRKK |
| | LKEVWKPAV (SEQ ID NO: 64) |
| substitution | MQEIKRINKIRRRLVKDSNTKKAGKTGPMKTLLVRVMTPDLRERLENLRKK |
| of R458I and | PENIPQPISNTSRANLNKLLTDYTEMKKAILHVYWEEFQKDPVGLMSRVAQ |
| a substitution | PAPKNIDQRKLIPVKDGNERLTSSGFACSQCCQPLYVYKLEQVNDKGKPHT |
| of A739V of | NYFGRCNVSEHERLILLSPHKPEANDELVTYSLGKFGQRALDFYSIHVTRE |
| SEQ ID | SNHPVKPLEQIGGNSCASGPVGKALSDACMGAVASFLTKYQDIILEHQKVI |
| NO: 2. | KKNEKRLANLKDIASANGLAFPKITLPPQPHTKEGIEAYNNVVAQIVIWVN |
| | LNLWQKLKIGRDEAKPLQRLKGFPSFPLVERQANEVDWWDMVCNVKKLINE |
| | KKEDGKVFWQNLAGYKRQEALLPYLSSEEDRKKGKKFARYQFGDLLLHLEK |
| | KHGEDWGKVYDEAWERIDKKVEGLSKHIKLEEERRSEDAQSKAALTDWLIA |
| | KASFVIEGLKEADKDEFCRCELKLQKWYGDLRGKPFAIEAENSILDISGFS |
| | KQYNCAFIWQKDGVKKLNLYLIINYFKGGKLRFKKIKPEAFEANRFYTVIN |
| | KKSGEIVPMEVNFNFDDPNLIILPLAFGKRQGREFIWNDLLSLETGSLKLA |
| | NGRVIEKTLYNRRTRQDEPALFVALTFERREVLDSSNIKPMNLIGIDRGEN |
| | IPAVIALTDPEGCPLSRFKDSLGNPTHILRIGESYKEKQRTIQAAKEVEQR |
| | RAGGYSRKYASKAKNLADDMVRNTVRDLLYYAVTQDAMLIFENLSRGFGRQ |
| | GKRTFMAERQYTRMEDWLTAKLAYEGLPSKTYLSKTLAQYTSKTCSNCGFT |
| | ITSADYDRVLEKLKKTATGWMTTINGKELKVEGQITYYNRYKRQNVVKDLS |
| | VELDRLSEESVNNDISSWTKGRSGEALSLLKKRFSHRPVQEKFVCLNCGFE |
| | THADEQAALNIARSWLFLRSQEYKKYQTNKTTGNTDKRAFVETWQSFYRKK |
| | LKEVWKPAV (SEQ ID NO: 65) |
| L379R, a | MQEIKRINKIRRRLVKDSNTKKAGKTGPMKTLLVRVMTPDLRERLENLRKK |
| substitution | PENIPQPISNTSRANLNKLLTDYTEMKKAILHVYWEEFQKDPVGLMSRVAQ |
| of A708K, a | PAPKNIDQRKLIPVKDGNERLTSSGFACSQCCQPLYVYKLEQVNDKGKPHT |
| deletion of P | NYFGRCNVSEHERLILLSPHKPEANDELVTYSLGKFGQRALDFYSIHVTRE |
| at position | SNHPVKPLEQIGGNSCASGPVGKALSDACMGAVASFLTKYQDIILEHQKVI |
| 793 and a | KKNEKRLANLKDIASANGLAFPKITLPPQPHTKEGIEAYNNVVAQIVIWVN |
| substitution | LNLWQKLKIGRDEAKPLQRLKGFPSFPLVERQANEVDWWDMVCNVKKLINE |
| of M771N of | KKEDGKVFWQNLAGYKRQEALRPYLSSEEDRKKGKKFARYQFGDLLLHLEK |
| SEQ ID | KHGEDWGKVYDEAWERIDKKVEGLSKHIKLEEERRSEDAQSKAALTDWLRA |
| NO: 2 | KASFVIEGLKEADKDEFCRCELKLQKWYGDLRGKPFAIEAENSILDISGFS |
| | KQYNCAFIWQKDGVKKLNLYLIINYFKGGKLRFKKIKPEAFEANRFYTVIN |
| | KKSGEIVPMEVNFNFDDPNLIILPLAFGKRQGREFIWNDLLSLETGSLKLA |
| | NGRVIEKTLYNRRTRQDEPALFVALTFERREVLDSSNIKPMNLIGIDRGEN |
| | IPAVIALTDPEGCPLSRFKDSLGNPTHILRIGESYKEKQRTIQAKKEVEQR |
| | RAGGYSRKYASKAKNLADDMVRNTARDLLYYAVTQDAMLIFENLSRGFGRQ |
| | GKRTFNAERQYTRMEDWLTAKLAYEGLSKTYLSKTLAQYTSKTCSNCGFTI |
| | TSADYDRVLEKLKKTATGWMTTINGKELKVEGQITYYNRYKRQNVVKDLSV |
| | ELDRLSEESVNNDISSWTKGRSGEALSLLKKRFSHRPVQEKFVCLNCGFET |
| | HADEQAALNIARSWLFLRSQEYKKYQTNKTTGNTDKRAFVETWQSFYRKKL |
| | KEVWKPAV (SEQ ID NO: 66) |
| substitution | MQEIKRINKIRRRLVKDSNTKKAGKTGPMKTLLVRVMTPDLRERLENLRKK |
| of L379R, a | PENIPQPISNTSRANLNKLLTDYTEMKKAILHVYWEEFQKDPVGLMSRVAQ |
| substitution | PAPKNIDQRKLIPVKDGNERLTSSGFACSQCCQPLYVYKLEQVNDKGKPHT |
| of A708K, a | NYFGRCNVSEHERLILLSPHKPEANDELVTYSLGKFGQRALDFYSIHVTRE |
| deletion of P | SNHPVKPLEQIGGNSCASGPVGKALSDACMGAVASFLTKYQDIILEHQKVI |
| at position | KKNEKRLANLKDIASANGLAFPKITLPPQPHTKEGIEAYNNVVAQIVIWVN |
| 793 and a | LNLWQKLKIGRDEAKPLQRLKGFPSFPLVERQANEVDWWDMVCNVKKLINE |
| substitution | KKEDGKVFWQNLAGYKRQEALRPYLSSEEDRKKGKKFARYQFGDLLLHLEK |
| of A739T of | KHGEDWGKVYDEAWERIDKKVEGLSKHIKLEEERRSEDAQSKAALTDWLRA |
| SEQ ID | KASFVIEGLKEADKDEFCRCELKLQKWYGDLRGKPFAIEAENSILDISGFS |
| NO: 2 | KQYNCAFIWQKDGVKKLNLYLIINYFKGGKLRFKKIKPEAFEANRFYTVIN |
| | KKSGEIVPMEVNFNFDDPNLIILPLAFGKRQGREFIWNDLLSLETGSLKLA |
| | NGRVIEKTLYNRRTRQDEPALFVALTFERREVLDSSNIKPMNLIGIDRGEN |
| | IPAVIALTDPEGCPLSRFKDSLGNPTHILRIGESYKEKQRTIQAKKEVEQR |
| | RAGGYSRKYASKAKNLADDMVRNTTRDLLYYAVTQDAMLIFENLSRGFGRQ |
| | GKRTFMAERQYTRMEDWLTAKLAYEGLSKTYLSKTLAQYTSKTCSNCGFTI |
| | TSADYDRVLEKLKKTATGWMTTINGKELKVEGQITYYNRYKRQNVVKDLSV |
| | ELDRLSEESVNNDISSWTKGRSGEALSLLKKRFSHRPVQEKFVCLNCGFET |
| | HADEQAALNIARSWLFLRSQEYKKYQTNKTTGNTDKRAFVETWQSFYRKKL |
| | KEVWKPAV (SEQ ID NO: 67) |
| substitution | MQEIKRINKIRRRLVKDSNTKKAGKTGPMKTLLVRVMTPDLRERLENLRKK |
| of L379R, a | PENIPQPISNTSRANLNKLLTDYTEMKKAILHVYWEEFQKDPVGLMSRVAQ |
| substitution | PAPKNIDQRKLIPVKDGNERLTSSGFACSQCCQPLYVYKLEQVNDKGKPHT |
| of C477K, a | NYFGRCNVSEHERLILLSPHKPEANDELVTYSLGKFGQRALDFYSIHVTRE |
| substitution | SNHPVKPLEQIGGNSCASGPVGKALSDACMGAVASFLTKYQDIILEHQKVI |
| of A708K, a | KKNEKRLANLKDIASANGLAFPKITLPPQPHTKEGIEAYNNVVAQIVIWVN |
| deletion of P | LNLWQKLKIGRDEAKPLQRLKGFPSFPLVERQANEVDWWDMVCNVKKLINE |
| at position | KKEDGKVFWQNLAGYKRQEALRPYLSSEEDRKKGKKFARYQFGDLLLHLEK |
| 793 and a | KHGEDWGKVYDEAWERIDKKVEGLSKHIKLEEERRSEDAQSKAALTDWLRA |
| substitution | KASFVIEGLKEADKDEFKRCELKLQKWYGSLRGKPFAIEAENSILDISGFS |
| of D489S of | KQYNCAFIWQKDGVKKLNLYLIINYFKGGKLRFKKIKPEAFEANRFYTVIN |
| SEQ ID | KKSGEIVPMEVNFNFDDPNLIILPLAFGKRQGREFIWNDLLSLETGSLKLA |
| NO: 2. | NGRVIEKTLYNRRTRQDEPALFVALTFERREVLDSSNIKPMNLIGIDRGEN |
| | IPAVIALTDPEGCPLSRFKDSLGNPTHILRIGESYKEKQRTIQAKKEVEQR |
| | RAGGYSRKYASKAKNLADDMVRNTARDLLYYAVTQDAMLIFENLSRGFGRQ |
| | GKRTFMAERQYTRMEDWLTAKLAYEGLSKTYLSKTLAQYTSKTCSNCGFTI |
| | TSADYDRVLEKLKKTATGWMTTINGKELKVEGQITYYNRYKRQNVVKDLSV |
| | ELDRLSEESVNNDISSWTKGRSGEALSLLKKRFSHRPVQEKFVCLNCGFET |
| | HADEQAALNIARSWLFLRSQEYKKYQTNKTTGNTDKRAFVETWQSFYRKKL |
| | KEVWKPAV (SEQ ID NO: 68) |
| substitution | MQEIKRINKIRRRLVKDSNTKKAGKTGPMKTLLVRVMTPDLRERLENLRKK |
| of L379R, a | PENIPQPISNTSRANLNKLLTDYTEMKKAILHVYWEEFQKDPVGLMSRVAQ |
| substitution | PAPKNIDQRKLIPVKDGNERLTSSGFACSQCCQPLYVYKLEQVNDKGKPHT |
| of C477K, a | NYFGRCNVSEHERLILLSPHKPEANDELVTYSLGKFGQRALDFYSIHVTRE |
| substitution | SNHPVKPLEQIGGNSCASGPVGKALSDACMGAVASFLTKYQDIILEHQKVI |
| of A708K, a | KKNEKRLANLKDIASANGLAFPKITLPPQPHTKEGIEAYNNVVAQIVIWVN |
| deletion of P | LNLWQKLKIGRDEAKPLQRLKGFPSFPLVERQANEVDWWDMVCNVKKLINE |
| at position | KKEDGKVFWQNLAGYKRQEALRPYLSSEEDRKKGKKFARYQFGDLLLHLEK |
| 793 and a | KHGEDWGKVYDEAWERIDKKVEGLSKHIKLEEERRSEDAQSKAALTDWLRA |
| substitution | KASFVIEGLKEADKDEFKRCELKLQKWYGDLRGKPFAIEAENSILDISGFS |
| of D732N of | KQYNCAFIWQKDGVKKLNLYLIINYFKGGKLREKKIKPEAFEANRFYTVIN |
| SEQ ID | KKSGEIVPMEVNFNFDDPNLIILPLAFGKRQGREFIWNDLLSLETGSLKLA |
| NO: 2. | NGRVIEKTLYNRRTRQDEPALFVALTFERREVLDSSNIKPMNLIGIDRGEN |
| | IPAVIALTDPEGCPLSRFKDSLGNPTHILRIGESYKEKQRTIQAKKEVEQR |
| | RAGGYSRKYASKAKNLANDMVRNTARDLLYYAVTQDAMLIFENLSRGFGRQ |
| | GKRTFMAERQYTRMEDWLTAKLAYEGLSKTYLSKTLAQYTSKTCSNCGFTI |
| | TSADYDRVLEKLKKTATGWMTTINGKELKVEGQITYYNRYKRQNVVKDLSV |
| | ELDRLSEESVNNDISSWTKGRSGEALSLLKKRFSHRPVQEKFVCLNCGFET |
| | HADEQAALNIARSWLFLRSQEYKKYQTNKTTGNTDKRAFVETWQSFYRKKL |
| | KEVWKPAV (SEQ ID NO: 69) |
| substitution | MQEIKRINKIRRRLVKDSNTKKAGKTGPMKTLLVRVMTPDLRERLENLRKK |
| of V711K of | PENIPQPISNTSRANLNKLLTDYTEMKKAILHVYWEEFQKDPVGLMSRVAQ |
| SEQ ID | PAPKNIDQRKLIPVKDGNERLTSSGFACSQCCQPLYVYKLEQVNDKGKPHT |
| NO: 2. | NYFGRCNVSEHERLILLSPHKPEANDELVTYSLGKFGQRALDFYSIHVTRE |
| | SNHPVKPLEQIGGNSCASGPVGKALSDACMGAVASFLTKYQDIILEHQKVI |
| | KKNEKRLANLKDIASANGLAFPKITLPPQPHTKEGIEAYNNVVAQIVIWVN |
| | LNLWQKLKIGRDEAKPLQRLKGFPSFPLVERQANEVDWWDMVCNVKKLINE |
| | KKEDGKVFWQNLAGYKRQEALLPYLSSEEDRKKGKKFARYQFGDLLLHLEK |
| | KHGEDWGKVYDEAWERIDKKVEGLSKHIKLEEERRSEDAQSKAALTDWLRA |
| | KASFVIEGLKEADKDEFCRCELKLQKWYGDLRGKPFAIEAENSILDISGFS |
| | KQYNCAFIWQKDGVKKLNLYLIINYFKGGKLREKKIKPEAFEANRFYTVIN |
| | KKSGEIVPMEVNFNFDDPNLIILPLAFGKRQGREFIWNDLLSLETGSLKLA |
| | NGRVIEKTLYNRRTRQDEPALFVALTFERREVLDSSNIKPMNLIGIDRGEN |
| | IPAVIALTDPEGCPLSRFKDSLGNPTHILRIGESYKEKQRTIQAAKEKEQR |
| | RAGGYSRKYASKAKNLADDMVRNTARDLLYYAVTQDAMLIFENLSRGFGRQ |
| | GKRTFMAERQYTRMEDWLTAKLAYEGLPSKTYLSKTLAQYTSKTCSNCGFT |
| | ITSADYDRVLEKLKKTATGWMTTINGKELKVEGQITYYNRYKRONVVKDLS |
| | VELDRLSEESVNNDISSWTKGRSGEALSLLKKRFSHRPVQEKFVCLNCGFE |
| | THADEQAALNIARSWLFLRSQEYKKYQTNKTTGNTDKRAFVETWQSFYRKK |
| | LKEVWKPAV (SEQ ID NO: 70) |
| substitution | MQEIKRINKIRRRLVKDSNTKKAGKTGPMKTLLVRVMTPDLRERLENLRKK |
| of L379R, a | PENIPQPISNTSRANLNKLLTDYTEMKKAILHVYWEEFQKDPVGLMSRVAQ |
| substitution | PAPKNIDQRKLIPVKDGNERLTSSGFACSQCCQPLYVYKLEQVNDKGKPHT |
| of C477K, a | NYFGRCNVSEHERLILLSPHKPEANDELVTYSLGKFGQRALDFYSIHVTRE |
| substitution | SNHPVKPLEQIGGNSCASGPVGKALSDACMGAVASFLTKYQDIILEHQKVI |
| of A708K, a | KKNEKRLANLKDIASANGLAFPKITLPPQPHTKEGIEAYNNVVAQIVIWVN |
| deletion of P | LNLWQKLKIGRDEAKPLQRLKGFPSFPLVERQANEVDWWDMVCNVKKLINE |
| at position | KKEDGKVFWQNLAGYKRQEALRPYLSSEEDRKKGKKFARYQFGDLLLHLEK |
| 793 and a | KHGEDWGKVYDEAWERIDKKVEGLSKHIKLEEERRSEDAQSKAALTDWLRA |
| substitution | KASFVIEGLKEADKDEFKRCELKLQKWYGDLRGKPFAIEAENSILDISGFS |
| of Y797L of | KQYNCAFIWQKDGVKKLNLYLIINYFKGGKLRFKKIKPEAFEANRFYTVIN |
| SEQ ID | KKSGEIVPMEVNFNFDDPNLIILPLAFGKRQGREFIWNDLLSLETGSLKLA |
| NO: 2. | NGRVIEKTLYNRRTRQDEPALFVALTFERREVLDSSNIKPMNLIGIDRGEN |
| | IPAVIALTDPEGCPLSRFKDSLGNPTHILRIGESYKEKQRTIQAKKEVEQR |
| | RAGGYSRKYASKAKNLADDMVRNTARDLLYYAVTQDAMLIFENLSRGFGRQ |
| | GKRTFMAERQYTRMEDWLTAKLAYEGLSKTLLSKTLAQYTSKTCSNCGFTI |
| | TSADYDRVLEKLKKTATGWMTTINGKELKVEGQITYYNRYKRQNVVKDLSV |
| | ELDRLSEESVNNDISSWTKGRSGEALSLLKKRFSHRPVQEKFVCLNCGFET |
| | HADEQAALNIARSWLFLRSQEYKKYQTNKTTGNTDKRAFVETWQSFYRKKL |
| | KEVWKPAV (SEQ ID NO: 71) |
| 119: | MQEIKRINKIRRRLVKDSNTKKAGKTGPMKTLLVRVMTPDLRERLENLRKK |
| substitution | PENIPQPISNTSRANLNKLLTDYTEMKKAILHVYWEEFQKDPVGLMSRVAQ |
| of L379R, a | PAPKNIDQRKLIPVKDGNERLTSSGFACSQCCQPLYVYKLEQVNDKGKPHT |
| substitution | NYFGRCNVSEHERLILLSPHKPEANDELVTYSLGKFGQRALDFYSIHVTRE |
| of A708K | SNHPVKPLEQIGGNSCASGPVGKALSDACMGAVASFLTKYQDIILEHQKVI |
| and a | KKNEKRLANLKDIASANGLAFPKITLPPQPHTKEGIEAYNNVVAQIVIWVN |
| deletion of P | LNLWQKLKIGRDEAKPLQRLKGFPSFPLVERQANEVDWWDMVCNVKKLINE |
| at position | KKEDGKVFWQNLAGYKRQEALRPYLSSEEDRKKGKKFARYQFGDLLLHLEK |
| 793 of SEQ | KHGEDWGKVYDEAWERIDKKVEGLSKHIKLEEERRSEDAQSKAALTDWLRA |
| ID NO: 2. | KASFVIEGLKEADKDEFCRCELKLQKWYGDLRGKPFAIEAENSILDISGFS |
| | KQYNCAFIWQKDGVKKLNLYLIINYFKGGKLRFKKIKPEAFEANRFYTVIN |
| | KKSGEIVPMEVNFNFDDPNLIILPLAFGKRQGREFIWNDLLSLETGSLKLA |
| | NGRVIEKTLYNRRTRQDEPALFVALTFERREVLDSSNIKPMNLIGIDRGEN |
| | IPAVIALTDPEGCPLSRFKDSLGNPTHILRIGESYKEKQRTIQAKKEVEQR |
| | RAGGYSRKYASKAKNLADDMVRNTARDLLYYAVTQDAMLIFENLSRGFGRQ |
| | GKRTFMAERQYTRMEDWLTAKLAYEGLSKTYLSKTLAQYTSKTCSNCGFTI |
| | TSADYDRVLEKLKKTATGWMTTINGKELKVEGQITYYNRYKRQNVVKDLSV |
| | ELDRLSEESVNNDISSWTKGRSGEALSLLKKRFSHRPVQEKFVCLNCGFET |
| | HADEQAALNIARSWLFLRSQEYKKYQTNKTTGNTDKRAFVETWQSFYRKKL |
| | KEVWKPAV (SEQ ID NO: 72) |
| substitution | MQEIKRINKIRRRLVKDSNTKKAGKTGPMKTLLVRVMTPDLRERLENLRKK |
| of L379R, a | PENIPQPISNTSRANLNKLLTDYTEMKKAILHVYWEEFQKDPVGLMSRVAQ |
| substitution | PAPKNIDQRKLIPVKDGNERLTSSGFACSQCCQPLYVYKLEQVNDKGKPHT |
| of C477K, a | NYFGRCNVSEHERLILLSPHKPEANDELVTYSLGKFGQRALDFYSIHVTRE |
| substitution | SNHPVKPLEQIGGNSCASGPVGKALSDACMGAVASFLTKYQDIILEHQKVI |
| of A708K, a | KKNEKRLANLKDIASANGLAFPKITLPPQPHTKEGIEAYNNVVAQIVIWVN |
| deletion of P | LNLWQKLKIGRDEAKPLQRLKGFPSFPLVERQANEVDWWDMVCNVKKLINE |
| at position | KKEDGKVFWQNLAGYKRQEALRPYLSSEEDRKKGKKFARYQFGDLLLHLEK |
| 793 and a | KHGEDWGKVYDEAWERIDKKVEGLSKHIKLEEERRSEDAQSKAALTDWLRA |
| substitution | KASFVIEGLKEADKDEFKRCELKLQKWYGDLRGKPFAIEAENSILDISGFS |
| of M771N of | KQYNCAFIWQKDGVKKLNLYLIINYFKGGKLRFKKIKPEAFEANRFYTVIN |
| SEQ ID | KKSGEIVPMEVNFNFDDPNLIILPLAFGKRQGREFIWNDLLSLETGSLKLA |
| NO: 2. | NGRVIEKTLYNRRTRQDEPALFVALTFERREVLDSSNIKPMNLIGIDRGEN |
| | IPAVIALTDPEGCPLSRFKDSLGNPTHILRIGESYKEKQRTIQAKKEVEQR |
| | RAGGYSRKYASKAKNLADDMVRNTARDLLYYAVTQDAMLIFENLSRGFGRQ |
| | GKRTFNAERQYTRMEDWLTAKLAYEGLSKTYLSKTLAQYTSKTCSNCGFTI |
| | TSADYDRVLEKLKKTATGWMTTINGKELKVEGQITYYNRYKRQNVVKDLSV |
| | ELDRLSEESVNNDISSWTKGRSGEALSLLKKRFSHRPVQEKFVCLNCGFET |
| | HADEQAALNIARSWLFLRSQEYKKYQTNKTTGNTDKRAFVETWQSFYRKKL |
| | KEVWKPAV (SEQ ID NO: 73) |
| substitution | MQEIKRINKIRRRLVKDSNTKKAGKTGPMKTLLVRVMTPDLRERLENLRKK |
| of A708K, a | PENIPQPISNTSRANLNKLLTDYTEMKKAILHVYWEEFQKDPVGLMSRVAQ |
| deletion of P | PAPKNIDQRKLIPVKDGNERLTSSGFACSQCCQPLYVYKLEQVNDKGKPHT |
| at position | NYFGRCNVSEHERLILLSPHKPEANDELVTYSLGKFGQRALDFYSIHVTRE |
| 793 and a | SNHPVKPLEQIGGNSCASGPVGKALSDACMGAVASFLTKYQDIILEHQKVI |
| substitution | KKNEKRLANLKDIASANGLAFPKITLPPQPHTKEGIEAYNNVVAQIVIWVN |
| of E386S of | LNLWQKLKIGRDEAKPLQRLKGFPSFPLVERQANEVDWWDMVCNVKKLINE |
| SEQ ID | KKEDGKVFWQNLAGYKRQEALLPYLSSESDRKKGKKFARYQFGDLLLHLEK |
| NO: 2. | KHGEDWGKVYDEAWERIDKKVEGLSKHIKLEEERRSEDAQSKAALTDWLRA |
| | KASFVIEGLKEADKDEFCRCELKLQKWYGDLRGKPFAIEAENSILDISGFS |
| | KQYNCAFIWQKDGVKKLNLYLIINYFKGGKLRFKKIKPEAFEANRFYTVIN |
| | KKSGEIVPMEVNFNFDDPNLIILPLAFGKRQGREFIWNDLLSLETGSLKLA |
| | NGRVIEKTLYNRRTRQDEPALFVALTFERREVLDSSNIKPMNLIGIDRGEN |
| | IPAVIALTDPEGCPLSRFKDSLGNPTHILRIGESYKEKQRTIQAKKEVEQR |
| | RAGGYSRKYASKAKNLADDMVRNTARDLLYYAVTQDAMLIFENLSRGFGRQ |
| | GKRTFMAERQYTRMEDWLTAKLAYEGLSKTYLSKTLAQYTSKTCSNCGFTI |
| | TSADYDRVLEKLKKTATGWMTTINGKELKVEGQITYYNRYKRQNVVKDLSV |
| | ELDRLSEESVNNDISSWTKGRSGEALSLLKKRFSHRPVQEKFVCLNCGFET |
| | HADEQAALNIARSWLFLRSQEYKKYQTNKTTGNTDKRAFVETWQSFYRKKL |
| | KEVWKPAV (SEQ ID NO: 74) |
| substitution | MQEIKRINKIRRRLVKDSNTKKAGKTGPMKTLLVRVMTPDLRERLENLRKK |
| of L379R, a | PENIPQPISNTSRANLNKLLTDYTEMKKAILHVYWEEFQKDPVGLMSRVAQ |
| substitution | PAPKNIDQRKLIPVKDGNERLTSSGFACSQCCQPLYVYKLEQVNDKGKPHT |
| of C477K, a | NYFGRCNVSEHERLILLSPHKPEANDELVTYSLGKFGQRALDFYSIHVTRE |
| substitution | SNHPVKPLEQIGGNSCASGPVGKALSDACMGAVASFLTKYQDIILEHQKVI |
| of A708K | KKNEKRLANLKDIASANGLAFPKITLPPQPHTKEGIEAYNNVVAQIVIWVN |
| and a | LNLWQKLKIGRDEAKPLQRLKGFPSFPLVERQANEVDWWDMVCNVKKLINE |
| deletion of P | KKEDGKVFWQNLAGYKRQEALRPYLSSEEDRKKGKKFARYQFGDLLLHLEK |
| at position | KHGEDWGKVYDEAWERIDKKVEGLSKHIKLEEERRSEDAQSKAALTDWLRA |
| 793 of SEQ | KASFVIEGLKEADKDEFKRCELKLQKWYGDLRGKPFAIEAENSILDISGFS |
| ID NO: 2. | KQYNCAFIWQKDGVKKLNLYLIINYFKGGKLRFKKIKPEAFEANRFYTVIN |
| | KKSGEIVPMEVNFNFDDPNLIILPLAFGKRQGREFIWNDLLSLETGSLKLA |
| | NGRVIEKTLYNRRTRQDEPALFVALTFERREVLDSSNIKPMNLIGIDRGEN |
| | IPAVIALTDPEGCPLSRFKDSLGNPTHILRIGESYKEKQRTIQAKKEVEQR |
| | RAGGYSRKYASKAKNLADDMVRNTARDLLYYAVTQDAMLIFENLSRGFGRQ |
| | GKRTFMAERQYTRMEDWLTAKLAYEGLSKTYLSKTLAQYTSKTCSNCGFTI |
| | TSADYDRVLEKLKKTATGWMTTINGKELKVEGQITYYNRYKRQNVVKDLSV |
| | ELDRLSEESVNNDISSWTKGRSGEALSLLKKRFSHRPVQEKFVCLNCGFET |
| | HADEQAALNIARSWLFLRSQEYKKYQTNKTTGNTDKRAFVETWQSFYRKKL |
| | KEVWKPAV (SEQ ID NO: 75) |
| substitution | MQEIKRINKIRRRLVKDSNTKKAGKTGPMKTLLVRVMTPDLRERLENLRKK |
| of L792D of | PENIPQPISNTSRANLNKLLTDYTEMKKAILHVYWEEFQKDPVGLMSRVAQ |
| SEQ ID | PAPKNIDQRKLIPVKDGNERLTSSGFACSQCCQPLYVYKLEQVNDKGKPHT |
| NO: 2. | NYFGRCNVSEHERLILLSPHKPEANDELVTYSLGKFGQRALDFYSIHVTRE |
| | SNHPVKPLEQIGGNSCASGPVGKALSDACMGAVASFLTKYQDIILEHQKVI |
| | KKNEKRLANLKDIASANGLAFPKITLPPQPHTKEGIEAYNNVVAQIVIWVN |
| | LNLWQKLKIGRDEAKPLQRLKGFPSFPLVERQANEVDWWDMVCNVKKLINE |
| | KKEDGKVFWQNLAGYKRQEALLPYLSSEEDRKKGKKFARYQFGDLLLHLEK |
| | KHGEDWGKVYDEAWERIDKKVEGLSKHIKLEEERRSEDAQSKAALTDWLRA |
| | KASFVIEGLKEADKDEFCRCELKLQKWYGDLRGKPFAIEAENSILDISGFS |
| | KQYNCAFIWQKDGVKKLNLYLIINYFKGGKLRFKKIKPEAFEANRFYTVIN |
| | KKSGEIVPMEVNFNFDDPNLIILPLAFGKRQGREFIWNDLLSLETGSLKLA |
| | NGRVIEKTLYNRRTRQDEPALFVALTFERREVLDSSNIKPMNLIGIDRGEN |
| | IPAVIALTDPEGCPLSRFKDSLGNPTHILRIGESYKEKQRTIQAAKEVEQR |
| | RAGGYSRKYASKAKNLADDMVRNTARDLLYYAVTQDAMLIFENLSRGFGRQ |
| | GKRTFMAERQYTRMEDWLTAKLAYEGDPSKTYLSKTLAQYTSKTCSNCGFT |
| | ITSADYDRVLEKLKKTATGWMTTINGKELKVEGQITYYNRYKRQNVVKDLS |
| | VELDRLSEESVNNDISSWTKGRSGEALSLLKKRFSHRPVQEKFVCLNCGFE |
| | THADEQAALNIARSWLFLRSQEYKKYQTNKTTGNTDKRAFVETWQSFYRKK |
| | LKEVWKPAV (SEQ ID NO: 76) |
| substitution | MQEIKRINKIRRRLVKDSNTKKAGKTGPMKTLLVRVMTPDLRERLENLRKK |
| of G791F of | PENIPQPISNTSRANLNKLLTDYTEMKKAILHVYWEEFQKDPVGLMSRVAQ |
| SEQ ID | PAPKNIDQRKLIPVKDGNERLTSSGFACSQCCQPLYVYKLEQVNDKGKPHT |
| NO: 2. | NYFGRCNVSEHERLILLSPHKPEANDELVTYSLGKFGQRALDFYSIHVTRE |
| | SNHPVKPLEQIGGNSCASGPVGKALSDACMGAVASFLTKYQDIILEHQKVI |
| | KKNEKRLANLKDIASANGLAFPKITLPPQPHTKEGIEAYNNVVAQIVIWVN |
| | LNLWQKLKIGRDEAKPLQRLKGFPSFPLVERQANEVDWWDMVCNVKKLINE |
| | KKEDGKVFWQNLAGYKRQEALLPYLSSEEDRKKGKKFARYQFGDLLLHLEK |
| | KHGEDWGKVYDEAWERIDKKVEGLSKHIKLEEERRSEDAQSKAALTDWLRA |
| | KASFVIEGLKEADKDEFCRCELKLQKWYGDLRGKPFAIEAENSILDISGFS |
| | KQYNCAFIWQKDGVKKLNLYLIINYFKGGKLRFKKIKPEAFEANRFYTVIN |
| | KKSGEIVPMEVNFNFDDPNLIILPLAFGKRQGREFIWNDLLSLETGSLKLA |
| | NGRVIEKTLYNRRTRQDEPALFVALTFERREVLDSSNIKPMNLIGIDRGEN |
| | IPAVIALTDPEGCPLSRFKDSLGNPTHILRIGESYKEKQRTIQAAKEVEQR |
| | RAGGYSRKYASKAKNLADDMVRNTARDLLYYAVTQDAMLIFENLSRGFGRQ |
| | GKRTFMAERQYTRMEDWLTAKLAYEFLPSKTYLSKTLAQYTSKTCSNCGFT |
| | ITSADYDRVLEKLKKTATGWMTTINGKELKVEGQITYYNRYKRQNVVKDLS |
| | VELDRLSEESVNNDISSWTKGRSGEALSLLKKRFSHRPVQEKFVCLNCGFE |
| | THADEQAALNIARSWLFLRSQEYKKYQTNKTTGNTDKRAFVETWQSFYRKK |
| | LKEVWKPAV (SEQ ID NO: 77) |
| substitution | MQEIKRINKIRRRLVKDSNTKKAGKTGPMKTLLVRVMTPDLRERLENLRKK |
| of A708K, a | PENIPQPISNTSRANLNKLLTDYTEMKKAILHVYWEEFQKDPVGLMSRVAQ |
| deletion of P | PAPKNIDQRKLIPVKDGNERLTSSGFACSQCCQPLYVYKLEQVNDKGKPHT |
| at position | NYFGRCNVSEHERLILLSPHKPEANDELVTYSLGKFGQRALDFYSIHVTRE |
| 793 and a | SNHPVKPLEQIGGNSCASGPVGKALSDACMGAVASFLTKYQDIILEHQKVI |
| substitution | KKNEKRLANLKDIASANGLAFPKITLPPQPHTKEGIEAYNNVVAQIVIWVN |
| of A739V of | LNLWQKLKIGRDEAKPLQRLKGFPSFPLVERQANEVDWWDMVCNVKKLINE |
| SEQ ID | KKEDGKVFWQNLAGYKRQEALLPYLSSEEDRKKGKKFARYQFGDLLLHLEK |
| NO: 2. | KHGEDWGKVYDEAWERIDKKVEGLSKHIKLEEERRSEDAQSKAALTDWLRA |
| | KASFVIEGLKEADKDEFCRCELKLQKWYGDLRGKPFAIEAENSILDISGFS |
| | KQYNCAFIWQKDGVKKLNLYLIINYFKGGKLREKKIKPEAFEANRFYTVIN |
| | KKSGEIVPMEVNFNFDDPNLIILPLAFGKRQGREFIWNDLLSLETGSLKLA |
| | NGRVIEKTLYNRRTRQDEPALFVALTFERREVLDSSNIKPMNLIGIDRGEN |
| | IPAVIALTDPEGCPLSRFKDSLGNPTHILRIGESYKEKQRTIQAKKEVEQR |
| | RAGGYSRKYASKAKNLADDMVRNTVRDLLYYAVTQDAMLIFENLSRGFGRQ |
| | GKRTFMAERQYTRMEDWLTAKLAYEGLSKTYLSKTLAQYTSKTCSNCGFTI |
| | TSADYDRVLEKLKKTATGWMTTINGKELKVEGQITYYNRYKRQNVVKDLSV |
| | ELDRLSEESVNNDISSWTKGRSGEALSLLKKRFSHRPVQEKFVCLNCGFET |
| | HADEQAALNIARSWLFLRSQEYKKYQTNKTTGNTDKRAFVETWQSFYRKKL |
| | KEVWKPAV (SEQ ID NO: 78) |
| substitution | MQEIKRINKIRRRLVKDSNTKKAGKTGPMKTLLVRVMTPDLRERLENLRKK |
| of L379R, a | PENIPQPISNTSRANLNKLLTDYTEMKKAILHVYWEEFQKDPVGLMSRVAQ |
| substitution | PAPKNIDQRKLIPVKDGNERLTSSGFACSQCCQPLYVYKLEQVNDKGKPHT |
| of A708K, a | NYFGRCNVSEHERLILLSPHKPEANDELVTYSLGKFGQRALDFYSIHVTRE |
| deletion of P | SNHPVKPLEQIGGNSCASGPVGKALSDACMGAVASFLTKYQDIILEHQKVI |
| at position | KKNEKRLANLKDIASANGLAFPKITLPPQPHTKEGIEAYNNVVAQIVIWVN |
| 793 and a | LNLWQKLKIGRDEAKPLQRLKGFPSFPLVERQANEVDWWDMVCNVKKLINE |
| substitution | KKEDGKVFWQNLAGYKRQEALRPYLSSEEDRKKGKKFARYQFGDLLLHLEK |
| of A739V of | KHGEDWGKVYDEAWERIDKKVEGLSKHIKLEEERRSEDAQSKAALTDWLRA |
| SEQ ID | KASFVIEGLKEADKDEFCRCELKLQKWYGDLRGKPFAIEAENSILDISGFS |
| NO: 2. | KQYNCAFIWQKDGVKKLNLYLIINYFKGGKLREKKIKPEAFEANRFYTVIN |
| | KKSGEIVPMEVNFNFDDPNLIILPLAFGKRQGREFIWNDLLSLETGSLKLA |
| | NGRVIEKTLYNRRTRQDEPALFVALTFERREVLDSSNIKPMNLIGIDRGEN |
| | IPAVIALTDPEGCPLSRFKDSLGNPTHILRIGESYKEKQRTIQAKKEVEQR |
| | RAGGYSRKYASKAKNLADDMVRNTVRDLLYYAVTQDAMLIFENLSRGFGRQ |
| | GKRTFMAERQYTRMEDWLTAKLAYEGLSKTYLSKTLAQYTSKTCSNCGFTI |
| | TSADYDRVLEKLKKTATGWMTTINGKELKVEGQITYYNRYKRQNVVKDLSV |
| | ELDRLSEESVNNDISSWTKGRSGEALSLLKKRFSHRPVQEKFVCLNCGFET |
| | HADEQAALNIARSWLFLRSQEYKKYQTNKTTGNTDKRAFVETWQSFYRKKL |
| | KEVWKPAV (SEQ ID NO: 79) |
| substitution | MQEIKRINKIRRRLVKDSNTKKAGKTGPMKTLLVRVMTPDLRERLENLRKK |
| of C477K, a | PENIPQPISNTSRANLNKLLTDYTEMKKAILHVYWEEFQKDPVGLMSRVAQ |
| substitution | PAPKNIDQRKLIPVKDGNERLTSSGFACSQCCQPLYVYKLEQVNDKGKPHT |
| of A708K | NYFGRCNVSEHERLILLSPHKPEANDELVTYSLGKFGQRALDFYSIHVTRE |
| and a | SNHPVKPLEQIGGNSCASGPVGKALSDACMGAVASFLTKYQDIILEHQKVI |
| deletion of P | KKNEKRLANLKDIASANGLAFPKITLPPQPHTKEGIEAYNNVVAQIVIWVN |
| at position | LNLWQKLKIGRDEAKPLQRLKGFPSFPLVERQANEVDWWDMVCNVKKLINE |
| 793 of SEQ | KKEDGKVFWQNLAGYKRQEALLPYLSSEEDRKKGKKFARYQFGDLLLHLEK |
| ID NO: 2. | KHGEDWGKVYDEAWERIDKKVEGLSKHIKLEEERRSEDAQSKAALTDWLRA |
| | KASFVIEGLKEADKDEFKRCELKLQKWYGDLRGKPFAIEAENSILDISGFS |
| | KQYNCAFIWQKDGVKKLNLYLIINYFKGGKLRFKKIKPEAFEANRFYTVIN |
| | KKSGEIVPMEVNFNFDDPNLIILPLAFGKRQGREFIWNDLLSLETGSLKLA |
| | NGRVIEKTLYNRRTRQDEPALFVALTFERREVLDSSNIKPMNLIGIDRGEN |
| | IPAVIALTDPEGCPLSRFKDSLGNPTHILRIGESYKEKQRTIQAKKEVEQR |
| | RAGGYSRKYASKAKNLADDMVRNTARDLLYYAVTQDAMLIFENLSRGFGRQ |
| | GKRTFMAERQYTRMEDWLTAKLAYEGLSKTYLSKTLAQYTSKTCSNCGFTI |
| | TSADYDRVLEKLKKTATGWMTTINGKELKVEGQITYYNRYKRQNVVKDLSV |
| | ELDRLSEESVNNDISSWTKGRSGEALSLLKKRFSHRPVQEKFVCLNCGFET |
| | HADEQAALNIARSWLFLRSQEYKKYQTNKTTGNTDKRAFVETWQSFYRKKL |
| | KEVWKPAV (SEQ ID NO: 80) |
| substitution | MQEIKRINKIRRRLVKDSNTKKAGKTGPMKTLLVRVMTPDLRERLENLRKK |
| of L249I and | PENIPQPISNTSRANLNKLLTDYTEMKKAILHVYWEEFQKDPVGLMSRVAQ |
| a substitution | PAPKNIDQRKLIPVKDGNERLTSSGFACSQCCQPLYVYKLEQVNDKGKPHT |
| of M771N of | NYFGRCNVSEHERLILLSPHKPEANDELVTYSLGKFGQRALDFYSIHVTRE |
| SEQ ID | SNHPVKPLEQIGGNSCASGPVGKALSDACMGAVASFLTKYQDIIIEHQKVI |
| NO: 2. | KKNEKRLANLKDIASANGLAFPKITLPPQPHTKEGIEAYNNVVAQIVIWVN |
| | LNLWQKLKIGRDEAKPLQRLKGFPSFPLVERQANEVDWWDMVCNVKKLINE |
| | KKEDGKVFWQNLAGYKRQEALLPYLSSEEDRKKGKKFARYQFGDLLLHLEK |
| | KHGEDWGKVYDEAWERIDKKVEGLSKHIKLEEERRSEDAQSKAALTDWLRA |
| | KASFVIEGLKEADKDEFCRCELKLQKWYGDLRGKPFAIEAENSILDISGFS |
| | KQYNCAFIWQKDGVKKLNLYLIINYFKGGKLRFKKIKPEAFEANRFYTVIN |
| | KKSGEIVPMEVNFNFDDPNLIILPLAFGKRQGREFIWNDLLSLETGSLKLA |
| | NGRVIEKTLYNRRTRQDEPALFVALTFERREVLDSSNIKPMNLIGIDRGEN |
| | IPAVIALTDPEGCPLSRFKDSLGNPTHILRIGESYKEKQRTIQAAKEVEQR |
| | RAGGYSRKYASKAKNLADDMVRNTARDLLYYAVTQDAMLIFENLSRGFGRQ |
| | GKRTFNAERQYTRMEDWLTAKLAYEGLPSKTYLSKTLAQYTSKTCSNCGFT |
| | ITSADYDRVLEKLKKTATGWMTTINGKELKVEGQITYYNRYKRQNVVKDLS |
| | VELDRLSEESVNNDISSWTKGRSGEALSLLKKRFSHRPVQEKFVCLNCGFE |
| | THADEQAALNIARSWLFLRSQEYKKYQTNKTTGNTDKRAFVETWQSFYRKK |
| | LKEVWKPAV (SEQ ID NO: 81) |
| substitution | MQEIKRINKIRRRLVKDSNTKKAGKTGPMKTLLVRVMTPDLRERLENLRKK |
| of V747K of | PENIPQPISNTSRANLNKLLTDYTEMKKAILHVYWEEFQKDPVGLMSRVAQ |
| SEQ ID | PAPKNIDQRKLIPVKDGNERLTSSGFACSQCCQPLYVYKLEQVNDKGKPHT |
| NO: 2. | NYFGRCNVSEHERLILLSPHKPEANDELVTYSLGKFGQRALDFYSIHVTRE |
| | SNHPVKPLEQIGGNSCASGPVGKALSDACMGAVASFLTKYQDIILEHQKVI |
| | KKNEKRLANLKDIASANGLAFPKITLPPQPHTKEGIEAYNNVVAQIVIWVN |
| | LNLWQKLKIGRDEAKPLQRLKGFPSFPLVERQANEVDWWDMVCNVKKLINE |
| | KKEDGKVFWQNLAGYKRQEALLPYLSSEEDRKKGKKFARYQFGDLLLHLEK |
| | KHGEDWGKVYDEAWERIDKKVEGLSKHIKLEEERRSEDAQSKAALTDWLRA |
| | KASFVIEGLKEADKDEFCRCELKLQKWYGDLRGKPFAIEAENSILDISGES |
| | KQYNCAFIWQKDGVKKLNLYLIINYFKGGKLRFKKIKPEAFEANRFYTVIN |
| | KKSGEIVPMEVNFNFDDPNLIILPLAFGKRQGREFIWNDLLSLETGSLKLA |
| | NGRVIEKTLYNRRTRQDEPALFVALTFERREVLDSSNIKPMNLIGIDRGEN |
| | IPAVIALTDPEGCPLSRFKDSLGNPTHILRIGESYKEKQRTIQAAKEVEQR |
| | RAGGYSRKYASKAKNLADDMVRNTARDLLYYAKTQDAMLIFENLSRGFGRQ |
| | GKRTFMAERQYTRMEDWLTAKLAYEGLPSKTYLSKTLAQYTSKTCSNCGFT |
| | ITSADYDRVLEKLKKTATGWMTTINGKELKVEGQITYYNRYKRQNVVKDLS |
| | VELDRLSEESVNNDISSWTKGRSGEALSLLKKRFSHRPVQEKFVCLNCGFE |
| | THADEQAALNIARSWLFLRSQEYKKYQTNKTTGNTDKRAFVETWQSFYRKK |
| | LKEVWKPAV (SEQ ID NO: 82) |
| substitution | MQEIKRINKIRRRLVKDSNTKKAGKTGPMKTLLVRVMTPDLRERLENLRKK |
| of L379R, a | PENIPQPISNTSRANLNKLLTDYTEMKKAILHVYWEEFQKDPVGLMSRVAQ |
| substitution | PAPKNIDQRKLIPVKDGNERLTSSGFACSQCCQPLYVYKLEQVNDKGKPHT |
| of C477K, a | NYFGRCNVSEHERLILLSPHKPEANDELVTYSLGKFGQRALDFYSIHVTRE |
| substitution | SNHPVKPLEQIGGNSCASGPVGKALSDACMGAVASFLTKYQDIILEHQKVI |
| of A708K, a | KKNEKRLANLKDIASANGLAFPKITLPPQPHTKEGIEAYNNVVAQIVIWVN |
| deletion of P | LNLWQKLKIGRDEAKPLQRLKGFPSFPLVERQANEVDWWDMVCNVKKLINE |
| at position | KKEDGKVFWQNLAGYKRQEALRPYLSSEEDRKKGKKFARYQFGDLLLHLEK |
| 793 and a | KHGEDWGKVYDEAWERIDKKVEGLSKHIKLEEERRSEDAQSKAALTDWLRA |
| substitution | KASFVIEGLKEADKDEFKRCELKLQKWYGDLRGKPFAIEAENSILDISGES |
| of M779N of | KQYNCAFIWQKDGVKKLNLYLIINYFKGGKLRFKKIKPEAFEANRFYTVIN |
| SEQ ID | KKSGEIVPMEVNFNFDDPNLIILPLAFGKRQGREFIWNDLLSLETGSLKLA |
| NO: 2. | NGRVIEKTLYNRRTRQDEPALFVALTFERREVLDSSNIKPMNLIGIDRGEN |
| | IPAVIALTDPEGCPLSRFKDSLGNPTHILRIGESYKEKQRTIQAKKEVEQR |
| | RAGGYSRKYASKAKNLADDMVRNTARDLLYYAVTQDAMLIFENLSRGFGRQ |
| | GKRTFMAERQYTRNEDWLTAKLAYEGLSKTYLSKTLAQYTSKTCSNCGFTI |
| | TSADYDRVLEKLKKTATGWMTTINGKELKVEGQITYYNRYKRQNVVKDLSV |
| | ELDRLSEESVNNDISSWTKGRSGEALSLLKKRFSHRPVQEKFVCLNCGFET |
| | HADEQAALNIARSWLFLRSQEYKKYQTNKTTGNTDKRAFVETWQSFYRKKL |
| | KEVWKPAV (SEQ ID NO: 83) |
| L379R, | MQEIKRINKIRRRLVKDSNTKKAGKTGPMKTLLVRVMTPDLRERLENLRKK |
| F755M | PENIPQPISNTSRANLNKLLTDYTEMKKAILHVYWEEFQKDPVGLMSRVAQ |
| | PAPKNIDQRKLIPVKDGNERLTSSGFACSQCCQPLYVYKLEQVNDKGKPHT |
| | NYFGRCNVSEHERLILLSPHKPEANDELVTYSLGKFGQRALDFYSIHVTRE |
| | SNHPVKPLEQIGGNSCASGPVGKALSDACMGAVASFLTKYQDIILEHQKVI |
| | KKNEKRLANLKDIASANGLAFPKITLPPQPHTKEGIEAYNNVVAQIVIWVN |
| | LNLWQKLKIGRDEAKPLQRLKGFPSFPLVERQANEVDWWDMVCNVKKLINE |
| | KKEDGKVFWQNLAGYKRQEALLPYLSSEEDRKKGKKFARYQFGDLLLHLEK |
| | KHGEDWGKVYDEAWERIDKKVEGLSKHIKLEEERRSEDAQSKAALTDWLRA |
| | KASFVIEGLKEADKDEFCRCELKLQKWYGDLRGKPFAIEAENSILDISGFS |
| | KQYNCAFIWQKDGVKKLNLYLIINYFKGGKLRFKKIKPEAFEANRFYTVIN |
| | KKSGEIVPMEVNFNFDDPNLIILPLAFGKRQGREFIWNDLLSLETGSLKLA |
| | NGRVIEKTLYNRRTRQDEPALFVALTFERREVLDSSNIKPMNLIGIDRGEN |
| | IPAVIALTDPEGCPLSRFKDSLGNPTHILRIGESYKEKQRTIQAAKEVEQR |
| | RAGGYSRKYASKAKNLADDMVRNTARDLLYYAVTQDAMLIMENLSRGFGRQ |
| | GKRTFMAERQYTRMEDWLTAKLAYEGLPSKTYLSKTLAQYTSKTCSNCGFT |
| | ITSADYDRVLEKLKKTATGWMTTINGKELKVEGQITYYNRYKRQNVVKDLS |
| | VELDRLSEESVNNDISSWTKGRSGEALSLLKKRFSHRPVQEKFVCLNCGFE |
| | THADEQAALNIARSWLFLRSQEYKKYQTNKTTGNTDKRAFVETWQSFYRKK |
| | LKEVWKPAV (SEQ ID NO: 84) |
| 429: | MQEIKRINKIRRRLVKDSNTKKAGKTGPMKTLLVRVMTPDLRERLENLRKK |
| L379R, | PENIPQPISNTSRANLNKLLTDYTEMKKAILHVYWEEFQKDPVGLMSRVAQ |
| A708K, | PAPKNIDQRKLIPVKDGNERLTSSGFACSQCCQPLYVYKLEQVNDKGKPHT |
| P793_, | NYFGRCNVSEHERLILLSPHKPEANDELVTYSLGKFGQRALDFYSIHVTRE |
| Y857R | SNHPVKPLEQIGGNSCASGPVGKALSDACMGAVASFLTKYQDIILEHQKVI |
| | KKNEKRLANLKDIASANGLAFPKITLPPQPHTKEGIEAYNNVVAQIVIWVN |
| | LNLWQKLKIGRDEAKPLQRLKGFPSFPLVERQANEVDWWDMVCNVKKLINE |
| | KKEDGKVFWQNLAGYKRQEALRPYLSSEEDRKKGKKFARYQFGDLLLHLEK |
| | KHGEDWGKVYDEAWERIDKKVEGLSKHIKLEEERRSEDAQSKAALTDWLRA |
| | KASFVIEGLKEADKDEFCRCELKLQKWYGDLRGKPFAIEAENSILDISGFS |
| | KQYNCAFIWQKDGVKKLNLYLIINYFKGGKLRFKKIKPEAFEANRFYTVIN |
| | KKSGEIVPMEVNFNFDDPNLIILPLAFGKRQGREFIWNDLLSLETGSLKLA |
| | NGRVIEKTLYNRRTRQDEPALFVALTFERREVLDSSNIKPMNLIGIDRGEN |
| | IPAVIALTDPEGCPLSRFKDSLGNPTHILRIGESYKEKQRTIQAKKEVEQR |
| | RAGGYSRKYASKAKNLADDMVRNTARDLLYYAVTQDAMLIFENLSRGFGRQ |
| | GKRTFMAERQYTRMEDWLTAKLAYEGLSKTYLSKTLAQYTSKTCSNCGFTI |
| | TSADYDRVLEKLKKTATGWMTTINGKELKVEGQITYYNRRKRQNVVKDLSV |
| | ELDRLSEESVNNDISSWTKGRSGEALSLLKKRFSHRPVQEKFVCLNCGFET |
| | HADEQAALNIARSWLFLRSQEYKKYQTNKTTGNTDKRAFVETWQSFYRKKL |
| | KEVWKPAV (SEQ ID NO: 85) |
| 430: | MQEIKRINKIRRRLVKDSNTKKAGKTGPMKTLLVRVMTPDLRERLENLRKK |
| L379R, | PENIPQPISNTSRANLNKLLTDYTEMKKAILHVYWEEFQKDPVGLMSRVAQ |
| A708K, | PAPKNIDQRKLIPVKDGNERLTSSGFACSQCCQPLYVYKLEQVNDKGKPHT |
| P793_, | NYFGRCNVSEHERLILLSPHKPEANDELVTYSLGKFGQRALDFYSIHVTRE |
| Y857R, | SNHPVKPLEQIGGNSCASGPVGKALSDACMGAVASFLTKYQDIILEHQKVI |
| I658V | KKNEKRLANLKDIASANGLAFPKITLPPQPHTKEGIEAYNNVVAQIVIWVN |
| | LNLWQKLKIGRDEAKPLQRLKGFPSFPLVERQANEVDWWDMVCNVKKLINE |
| | KKEDGKVFWQNLAGYKRQEALRPYLSSEEDRKKGKKFARYQFGDLLLHLEK |
| | KHGEDWGKVYDEAWERIDKKVEGLSKHIKLEEERRSEDAQSKAALTDWLRA |
| | KASFVIEGLKEADKDEFCRCELKLQKWYGDLRGKPFAIEAENSILDISGFS |
| | KQYNCAFIWQKDGVKKLNLYLIINYFKGGKLRFKKIKPEAFEANRFYTVIN |
| | KKSGEIVPMEVNFNFDDPNLIILPLAFGKRQGREFIWNDLLSLETGSLKLA |
| | NGRVIEKTLYNRRTRQDEPALFVALTFERREVLDSSNIKPMNLIGVDRGEN |
| | IPAVIALTDPEGCPLSRFKDSLGNPTHILRIGESYKEKQRTIQAKKEVEQR |
| | RAGGYSRKYASKAKNLADDMVRNTARDLLYYAVTQDAMLIFENLSRGFGRQ |
| | GKRTFMAERQYTRMEDWLTAKLAYEGLSKTYLSKTLAQYTSKTCSNCGFTI |
| | TSADYDRVLEKLKKTATGWMTTINGKELKVEGQITYYNRRKRQNVVKDLSV |
| | ELDRLSEESVNNDISSWTKGRSGEALSLLKKRFSHRPVQEKFVCLNCGFET |
| | HADEQAALNIARSWLFLRSQEYKKYQTNKTTGNTDKRAFVETWQSFYRKKL |
| | KEVWKPAV (SEQ ID NO: 86) |
| 431: | MQEIKRINKIRRRLVKDSNTKKAGKTGPMKTLLVRVMTPDLRERLENLRKK |
| L379R, | PENIPQPISNTSRANLNKLLTDYTEMKKAILHVYWEEFQKDPVGLMSRVAQ |
| A708K, | PAPKNIDQRKLIPVKDGNERLTSSGFACSQCCQPLYVYKLEQVNDKGKPHT |
| P793_, | NYFGRCNVSEHERLILLSPHKPEANDELVTYSLGKFGQRALDFYSIHVTRE |
| Y857R, | SNHPVKPLEQIGGNSCASGPVGKALSDACMGAVASFLTKYQDIILEHQKVI |
| I658V, | KKNEKRLANLKDIASANGLAFPKITLPPQPHTKEGIEAYNNVVAQIVIWVN |
| E386N | LNLWQKLKIGRDEAKPLQRLKGFPSFPLVERQANEVDWWDMVCNVKKLINE |
| | KKEDGKVFWQNLAGYKRQEALRPYLSSENDRKKGKKFARYQFGDLLLHLEK |
| | KHGEDWGKVYDEAWERIDKKVEGLSKHIKLEEERRSEDAQSKAALTDWLRA |
| | KASFVIEGLKEADKDEFCRCELKLQKWYGDLRGKPFAIEAENSILDISGFS |
| | KQYNCAFIWQKDGVKKLNLYLIINYFKGGKLRFKKIKPEAFEANRFYTVIN |
| | KKSGEIVPMEVNFNFDDPNLIILPLAFGKRQGREFIWNDLLSLETGSLKLA |
| | NGRVIEKTLYNRRTRQDEPALFVALTFERREVLDSSNIKPMNLIGVDRGEN |
| | IPAVIALTDPEGCPLSRFKDSLGNPTHILRIGESYKEKQRTIQAKKEVEQR |
| | RAGGYSRKYASKAKNLADDMVRNTARDLLYYAVTQDAMLIFENLSRGFGRQ |
| | GKRTFMAERQYTRMEDWLTAKLAYEGLSKTYLSKTLAQYTSKTCSNCGFTI |
| | TSADYDRVLEKLKKTATGWMTTINGKELKVEGQITYYNRRKRQNVVKDLSV |
| | ELDRLSEESVNNDISSWTKGRSGEALSLLKKRFSHRPVQEKFVCLNCGFET |
| | HADEQAALNIARSWLFLRSQEYKKYQTNKTTGNTDKRAFVETWQSFYRKKL |
| | KEVWKPAV (SEQ ID NO: 87) |
| 432: | MQEIKRINKIRRRLVKDSNTKKAGKTGPMKTLLVRVMTPDLRERLENLRKK |
| L379R, | PENIPQPISNTSRANLNKLLTDYTEMKKAILHVYWEEFQKDPVGLMSRVAQ |
| A708K, | PAPKNIDQRKLIPVKDGNERLTSSGFACSQCCQPLYVYKLEQVNDKGKPHT |
| P793_, | NYFGRCNVSEHERLILLSPHKPEANDELVTYSLGKFGQRALDFYSIHVTRE |
| Y857R, | SNHPVKPLEQIGGNSCASGPVGKALSDACMGAVASFLTKYQDIILEHQKVI |
| I658V, | KKNEKRLANLKDIASANGLAFPKITLPPQPHTKEGIEAYNNVVAQIVIWVN |
| L404K | LNLWQKLKIGRDEAKPLQRLKGFPSFPLVERQANEVDWWDMVCNVKKLINE |
| | KKEDGKVFWQNLAGYKRQEALRPYLSSEEDRKKGKKFARYQFGDLLKHLEK |
| | KHGEDWGKVYDEAWERIDKKVEGLSKHIKLEEERRSEDAQSKAALTDWLRA |
| | KASFVIEGLKEADKDEFCRCELKLQKWYGDLRGKPFAIEAENSILDISGFS |
| | KQYNCAFIWQKDGVKKLNLYLIINYFKGGKLRFKKIKPEAFEANRFYTVIN |
| | KKSGEIVPMEVNFNFDDPNLIILPLAFGKRQGREFIWNDLLSLETGSLKLA |
| | NGRVIEKTLYNRRTRQDEPALFVALTFERREVLDSSNIKPMNLIGVDRGEN |
| | IPAVIALTDPEGCPLSRFKDSLGNPTHILRIGESYKEKQRTIQAKKEVEQR |
| | RAGGYSRKYASKAKNLADDMVRNTARDLLYYAVTQDAMLIFENLSRGFGRQ |
| | GKRTFMAERQYTRMEDWLTAKLAYEGLSKTYLSKTLAQYTSKTCSNCGFTI |
| | TSADYDRVLEKLKKTATGWMTTINGKELKVEGQITYYNRRKRQNVVKDLSV |
| | ELDRLSEESVNNDISSWTKGRSGEALSLLKKRFSHRPVQEKFVCLNCGFET |
| | HADEQAALNIARSWLFLRSQEYKKYQTNKTTGNTDKRAFVETWQSFYRKKL |
| | KEVWKPAV (SEQ ID NO: 88) |
| 433: | MQEIKRINKIRRRLVKDSNTKKAGKTGPMKTLLVRVMTPDLRERLENLRKK |
| L379R, | PENIPQPISNTSRANLNKLLTDYTEMKKAILHVYWEEFQKDPVGLMSRVAQ |
| A708K, | PAPKNIDQRKLIPVKDGNERLTSSGFACSQCCQPLYVYKLEQVNDKGKPHT |
| P793_, | NYFGRCNVSEHERLILLSPHKPEANDELVTYSLGKFGQVRALDFYSIHVTR |
| Y857R, | ESNHPVKPLEQIGGNSCASGPVGKALSDACMGAVASFLTKYQDIILEHQKV |
| I658V, | IKKNEKRLANLKDIASANGLAFPKITLPPQPHTKEGIEAYNNVVAQIVIWV |
| ^V192 | NLNLWQKLKIGRDEAKPLQRLKGFPSFPLVERQANEVDWWDMVCNVKKLIN |
| | EKKEDGKVFWQNLAGYKRQEALRPYLSSEEDRKKGKKFARYQFGDLLLHLE |
| | KKHGEDWGKVYDEAWERIDKKVEGLSKHIKLEEERRSEDAQSKAALTDWLR |
| | AKASFVIEGLKEADKDEFCRCELKLQKWYGDLRGKPFAIEAENSILDISGF |
| | SKQYNCAFIWQKDGVKKLNLYLIINYFKGGKLRFKKIKPEAFEANRFYTVI |
| | NKKSGEIVPMEVNFNFDDPNLIILPLAFGKRQGREFIWNDLLSLETGSLKL |
| | ANGRVIEKTLYNRRTRQDEPALFVALTFERREVLDSSNIKPMNLIGVDRGE |
| | NIPAVIALTDPEGCPLSRFKDSLGNPTHILRIGESYKEKQRTIQAKKEVEQ |
| | RRAGGYSRKYASKAKNLADDMVRNTARDLLYYAVTQDAMLIFENLSRGFGR |
| | QGKRTFMAERQYTRMEDWLTAKLAYEGLSKTYLSKTLAQYTSKTCSNCGFT |
| | ITSADYDRVLEKLKKTATGWMTTINGKELKVEGQITYYNRRKRQNVVKDLS |
| | VELDRLSEESVNNDISSWTKGRSGEALSLLKKRFSHRPVQEKFVCLNCGFE |
| | THADEQAALNIARSWLFLRSQEYKKYQTNKTTGNTDKRAFVETWQSFYRKK |
| | LKEVWKPAV (SEQ ID NO: 89) |
| 434: | MQEIKRINKIRRRLVKDSNTKKAGKTGPMKTLLVRVMTPDLRERLENLRKK |
| L379R, | PENIPQPISNTSRANLNKLLTDYTEMKKAILHVYWEEFQKDPVGLMSRVAQ |
| A708K, | PAPKNIDQRKLIPVKDGNERLTSSGFACSQCCQPLYVYKLEQVNDKGKPHT |
| P793_, | NYFGRCNVSEHERLILLSPHKPEANDELVTYSLGKFGQRALDFYSIHVTRE |
| Y857R, | SNHPVKPLEQIGGNSCASGPVGKALSDACMGAVASFLTKYQDIILEHQKVI |
| I658V, | KKNEKRLANLKDIASANGLAFPKITLPPQPHTKEGIEAYNNVVAQIVIWVN |
| L404K, | LNLWQKLKIGRDEAKPLQRLKGFPSFPLVERQANEVDWWDMVCNVKKLINE |
| E386N | KKEDGKVFWQNLAGYKRQEALRPYLSSENDRKKGKKFARYQFGDLLKHLEK |
| | KHGEDWGKVYDEAWERIDKKVEGLSKHIKLEEERRSEDAQSKAALTDWLRA |
| | KASFVIEGLKEADKDEFCRCELKLQKWYGDLRGKPFAIEAENSILDISGFS |
| | KQYNCAFIWQKDGVKKLNLYLIINYFKGGKLREKKIKPEAFEANRFYTVIN |
| | KKSGEIVPMEVNFNFDDPNLIILPLAFGKRQGREFIWNDLLSLETGSLKLA |
| | NGRVIEKTLYNRRTRQDEPALFVALTFERREVLDSSNIKPMNLIGVDRGEN |
| | IPAVIALTDPEGCPLSRFKDSLGNPTHILRIGESYKEKQRTIQAKKEVEQR |
| | RAGGYSRKYASKAKNLADDMVRNTARDLLYYAVTQDAMLIFENLSRGFGRQ |
| | GKRTFMAERQYTRMEDWLTAKLAYEGLSKTYLSKTLAQYTSKTCSNCGFTI |
| | TSADYDRVLEKLKKTATGWMTTINGKELKVEGQITYYNRRKRQNVVKDLSV |
| | ELDRLSEESVNNDISSWTKGRSGEALSLLKKRFSHRPVQEKFVCLNCGFET |
| | HADEQAALNIARSWLFLRSQEYKKYQTNKTTGNTDKRAFVETWQSFYRKKL |
| | KEVWKPAV (SEQ ID NO: 90) |
| 435: | MQEIKRINKIRRRLVKDSNTKKAGKTGPMKTLLVRVMTPDLRERLENLRKK |
| L379R, | PENIPQPISNTSRANLNKLLTDYTEMKKAILHVYWEEFQKDPVGLMSRVAQ |
| A708K, | PAPKNIDQRKLIPVKDGNERLTSSGFACSQCCQPLYVYKLEQVNDKGKPHT |
| P793_, | NYFGRCNVSEHERLILLSPHKPEANDELVTYSLGKFGQRALDFYSIHVTRE |
| Y857R, | SNHPVKPLEQIGGNSCASGPVGKALSDACMGAVASFLTKYQDIILEHQKVI |
| I658V, | KKNEKRLANLKDIASANGLAFPKITLPPQPHTKEGIEAYNNVVAQIVIWVN |
| F399L | LNLWQKLKIGRDEAKPLQRLKGFPSFPLVERQANEVDWWDMVCNVKKLINE |
| | KKEDGKVFWQNLAGYKRQEALRPYLSSEEDRKKGKKFARYQLGDLLLHLEK |
| | KHGEDWGKVYDEAWERIDKKVEGLSKHIKLEEERRSEDAQSKAALTDWLRA |
| | KASFVIEGLKEADKDEFCRCELKLQKWYGDLRGKPFAIEAENSILDISGFS |
| | KQYNCAFIWQKDGVKKLNLYLIINYFKGGKLRFKKIKPEAFEANRFYTVIN |
| | KKSGEIVPMEVNFNFDDPNLIILPLAFGKRQGREFIWNDLLSLETGSLKLA |
| | NGRVIEKTLYNRRTRQDEPALFVALTFERREVLDSSNIKPMNLIGVDRGEN |
| | IPAVIALTDPEGCPLSRFKDSLGNPTHILRIGESYKEKQRTIQAKKEVEQR |
| | RAGGYSRKYASKAKNLADDMVRNTARDLLYYAVTQDAMLIFENLSRGFGRQ |
| | GKRTFMAERQYTRMEDWLTAKLAYEGLSKTYLSKTLAQYTSKTCSNCGFTI |
| | TSADYDRVLEKLKKTATGWMTTINGKELKVEGQITYYNRRKRQNVVKDLSV |
| | ELDRLSEESVNNDISSWTKGRSGEALSLLKKRFSHRPVQEKFVCLNCGFET |
| | HADEQAALNIARSWLFLRSQEYKKYQTNKTTGNTDKRAFVETWQSFYRKKL |
| | KEVWKPAV (SEQ ID NO: 91) |
| 436: | MQEIKRINKIRRRLVKDSNTKKAGKTGPMKTLLVRVMTPDLRERLENLRKK |
| L379R, | PENIPQPISNTSRANLNKLLTDYTEMKKAILHVYWEEFQKDPVGLMSRVAQ |
| A708K, | PAPKNIDQRKLIPVKDGNERLTSSGFACSQCCQPLYVYKLEQVNDKGKPHT |
| P793_, | NYFGRCNVSEHERLILLSPHKPEANDELVTYSLGKFGQRALDFYSIHVTRE |
| Y857R, | SNHPVKPLEQIGGNSCASGPVGKALSDACMGAVASFLTKYQDIILEHQKVI |
| I658V, | KKNEKRLANLKDIASANGLAFPKITLPPQPHTKEGIEAYNNVVAQIVIWVN |
| F399L, | LNLWQKLKIGRDEAKPLQRLKGFPSFPLVERQANEVDWWDMVCNVKKLINE |
| E386N | KKEDGKVFWQNLAGYKRQEALRPYLSSENDRKKGKKFARYQLGDLLLHLEK |
| | KHGEDWGKVYDEAWERIDKKVEGLSKHIKLEEERRSEDAQSKAALTDWLRA |
| | KASFVIEGLKEADKDEFCRCELKLQKWYGDLRGKPFAIEAENSILDISGFS |
| | KQYNCAFIWQKDGVKKLNLYLIINYFKGGKLRFKKIKPEAFEANRFYTVIN |
| | KKSGEIVPMEVNFNFDDPNLIILPLAFGKRQGREFIWNDLLSLETGSLKLA |
| | NGRVIEKTLYNRRTRQDEPALFVALTFERREVLDSSNIKPMNLIGVDRGEN |
| | IPAVIALTDPEGCPLSRFKDSLGNPTHILRIGESYKEKQRTIQAKKEVEQR |
| | RAGGYSRKYASKAKNLADDMVRNTARDLLYYAVTQDAMLIFENLSRGFGRQ |
| | GKRTFMAERQYTRMEDWLTAKLAYEGLSKTYLSKTLAQYTSKTCSNCGFTI |
| | TSADYDRVLEKLKKTATGWMTTINGKELKVEGQITYYNRRKRQNVVKDLSV |
| | ELDRLSEESVNNDISSWTKGRSGEALSLLKKRFSHRPVQEKFVCLNCGFET |
| | HADEQAALNIARSWLFLRSQEYKKYQTNKTTGNTDKRAFVETWQSFYRKKL |
| | KEVWKPAV (SEQ ID NO: 92) |
| 437: | MQEIKRINKIRRRLVKDSNTKKAGKTGPMKTLLVRVMTPDLRERLENLRKK |
| L379R, | PENIPQPISNTSRANLNKLLTDYTEMKKAILHVYWEEFQKDPVGLMSRVAQ |
| A708K, | PAPKNIDQRKLIPVKDGNERLTSSGFACSQCCQPLYVYKLEQVNDKGKPHT |
| P793_, | NYFGRCNVSEHERLILLSPHKPEANDELVTYSLGKFGQRALDFYSIHVTRE |
| Y857R, | SNHPVKPLEQIGGNSCASGPVGKALSDACMGAVASFLTKYQDIILEHQKVI |
| I658V, | KKNEKRLANLKDIASANGLAFPKITLPPQPHTKEGIEAYNNVVAQIVIWVN |
| F399L, | LNLWQKLKIGRDEAKPLQRLKGFPSFPLVERQANEVDWWDMVCNVKKLINE |
| C477S | KKEDGKVFWQNLAGYKRQEALRPYLSSEEDRKKGKKFARYQLGDLLLHLEK |
| | KHGEDWGKVYDEAWERIDKKVEGLSKHIKLEEERRSEDAQSKAALTDWLRA |
| | KASFVIEGLKEADKDEFSRCELKLQKWYGDLRGKPFAIEAENSILDISGFS |
| | KQYNCAFIWQKDGVKKLNLYLIINYFKGGKLRFKKIKPEAFEANRFYTVIN |
| | KKSGEIVPMEVNFNFDDPNLIILPLAFGKRQGREFIWNDLLSLETGSLKLA |
| | NGRVIEKTLYNRRTRQDEPALFVALTFERREVLDSSNIKPMNLIGVDRGEN |
| | IPAVIALTDPEGCPLSRFKDSLGNPTHILRIGESYKEKQRTIQAKKEVEQR |
| | RAGGYSRKYASKAKNLADDMVRNTARDLLYYAVTQDAMLIFENLSRGFGRQ |
| | GKRTFMAERQYTRMEDWLTAKLAYEGLSKTYLSKTLAQYTSKTCSNCGFTI |
| | TSADYDRVLEKLKKTATGWMTTINGKELKVEGQITYYNRRKRQNVVKDLSV |
| | ELDRLSEESVNNDISSWTKGRSGEALSLLKKRFSHRPVQEKFVCLNCGFET |
| | HADEQAALNIARSWLFLRSQEYKKYQTNKTTGNTDKRAFVETWQSFYRKKL |
| | KEVWKPAV (SEQ ID NO: 93) |
| 438: | MQEIKRINKIRRRLVKDSNTKKAGKTGPMKTLLVRVMTPDLRERLENLRKK |
| L379R, | PENIPQPISNTSRANLNKLLTDYTEMKKAILHVYWEEFQKDPVGLMSRVAQ |
| A708K, | PAPKNIDQRKLIPVKDGNERLTSSGFACSQCCQPLYVYKLEQVNDKGKPHT |
| P793_, | NYFGRCNVSEHERLILLSPHKPEANDELVTYSLGKFGQRALDFYSIHVTRE |
| Y857R, | SNHPVKPLEQIGGNSCASGPVGKALSDACMGAVASFLTKYQDIILEHQKVI |
| I658V, | KKNEKRLANLKDIASANGLAFPKITLPPQPHTKEGIEAYNNVVAQIVIWVN |
| F399L, | LNLWQKLKIGRDEAKPLQRLKGFPSFPLVERQANEVDWWDMVCNVKKLINE |
| L404K | KKEDGKVFWQNLAGYKRQEALRPYLSSEEDRKKGKKFARYQLGDLLKHLEK |
| | KHGEDWGKVYDEAWERIDKKVEGLSKHIKLEEERRSEDAQSKAALTDWLRA |
| | KASFVIEGLKEADKDEFCRCELKLQKWYGDLRGKPFAIEAENSILDISGFS |
| | KQYNCAFIWQKDGVKKLNLYLIINYFKGGKLREKKIKPEAFEANRFYTVIN |
| | KKSGEIVPMEVNFNFDDPNLIILPLAFGKRQGREFIWNDLLSLETGSLKLA |
| | NGRVIEKTLYNRRTRQDEPALFVALTFERREVLDSSNIKPMNLIGVDRGEN |
| | IPAVIALTDPEGCPLSRFKDSLGNPTHILRIGESYKEKQRTIQAKKEVEQR |
| | RAGGYSRKYASKAKNLADDMVRNTARDLLYYAVTQDAMLIFENLSRGFGRQ |
| | GKRTFMAERQYTRMEDWLTAKLAYEGLSKTYLSKTLAQYTSKTCSNCGFTI |
| | TSADYDRVLEKLKKTATGWMTTINGKELKVEGQITYYNRRKRQNVVKDLSV |
| | ELDRLSEESVNNDISSWTKGRSGEALSLLKKRFSHRPVQEKFVCLNCGFET |
| | HADEQAALNIARSWLFLRSQEYKKYQTNKTTGNTDKRAFVETWQSFYRKKL |
| | KEVWKPAV (SEQ ID NO: 94) |
| 439: | MQEIKRINKIRRRLVKDSNTKKAGKTGPMKTLLVRVMTPDLRERLENLRKK |
| L379R, | PENIPQPISNTSRANLNKLLTDYTEMKKAILHVYWEEFQKDPVGLMSRVAQ |
| A708K, | PAPKNIDQRKLIPVKDGNERLTSSGFACSQCCQPLYVYKLEQVNDKGKPHT |
| P793_, | NYFGRCNVSEHERLILLSPHKPEANDELVTYSLGKFGQRALDFYSIHVTRE |
| Y857R, | SNHPVKPLEQIGGNSCASGPVGKALSDACMGAVASFLTKYQDIILEHQKVI |
| I658V, | KKNEKRLANLKDIASANGLAFPKITLPPQPHTKEGIEAYNNVVAQIVIWVN |
| F399L, | LNLWQKLKIGRDEAKPLQRLKGFPSFPLVERQANEVDWWDMVCNVKKLINE |
| E386N, | KKEDGKVFWQNLAGYKRQEALRPYLSSENDRKKGKKFARYQLGDLLKHLEK |
| C477S, | KHGEDWGKVYDEAWERIDKKVEGLSKHIKLEEERRSEDAQSKAALTDWLRA |
| L404K | KASFVIEGLKEADKDEFSRCELKLQKWYGDLRGKPFAIEAENSILDISGFS |
| | KQYNCAFIWQKDGVKKLNLYLIINYFKGGKLREKKIKPEAFEANRFYTVIN |
| | KKSGEIVPMEVNFNFDDPNLIILPLAFGKRQGREFIWNDLLSLETGSLKLA |
| | NGRVIEKTLYNRRTRQDEPALFVALTFERREVLDSSNIKPMNLIGVDRGEN |
| | IPAVIALTDPEGCPLSRFKDSLGNPTHILRIGESYKEKQRTIQAKKEVEQR |
| | RAGGYSRKYASKAKNLADDMVRNTARDLLYYAVTQDAMLIFENLSRGFGRQ |
| | GKRTFMAERQYTRMEDWLTAKLAYEGLSKTYLSKTLAQYTSKTCSNCGFTI |
| | TSADYDRVLEKLKKTATGWMTTINGKELKVEGQITYYNRRKRONVVKDLSV |
| | ELDRLSEESVNNDISSWTKGRSGEALSLLKKRFSHRPVQEKFVCLNCGFET |
| | HADEQAALNIARSWLFLRSQEYKKYQTNKTTGNTDKRAFVETWQSFYRKKL |
| | KEVWKPAV (SEQ ID NO: 95) |
| 440: | MQEIKRINKIRRRLVKDSNTKKAGKTGPMKTLLVRVMTPDLRERLENLRKK |
| L379R, | PENIPQPISNTSRANLNKLLTDYTEMKKAILHVYWEEFQKDPVGLMSRVAQ |
| A708K, | PAPKNIDQRKLIPVKDGNERLTSSGFACSQCCQPLYVYKLEQVNDKGKPHT |
| P793_, | NYFGRCNVSEHERLILLSPHKPEANDELVTYSLGKFGQRALDFYSIHVTRE |
| Y857R, | SNHPVKPLEQIGGNSCASGPVGKALSDACMGAVASFLTKYQDIILEHQKVI |
| I658V, | KKNEKRLANLKDIASANGLAFPKITLPPQPHTKEGIEAYNNVVAQIVIWVN |
| F399L, | LNLWQKLKIGRDEAKPLQRLKGFPSFPLVERQANEVDWWDMVCNVKKLINE |
| Y797L | KKEDGKVFWQNLAGYKRQEALRPYLSSEEDRKKGKKFARYQLGDLLLHLEK |
| | KHGEDWGKVYDEAWERIDKKVEGLSKHIKLEEERRSEDAQSKAALTDWLRA |
| | KASFVIEGLKEADKDEFCRCELKLQKWYGDLRGKPFAIEAENSILDISGFS |
| | KQYNCAFIWQKDGVKKLNLYLIINYFKGGKLREKKIKPEAFEANRFYTVIN |
| | KKSGEIVPMEVNFNFDDPNLIILPLAFGKRQGREFIWNDLLSLETGSLKLA |
| | NGRVIEKTLYNRRTRQDEPALFVALTFERREVLDSSNIKPMNLIGVDRGEN |
| | IPAVIALTDPEGCPLSRFKDSLGNPTHILRIGESYKEKQRTIQAKKEVEQR |
| | RAGGYSRKYASKAKNLADDMVRNTARDLLYYAVTQDAMLIFENLSRGFGRQ |
| | GKRTFMAERQYTRMEDWLTAKLAYEGLSKTLLSKTLAQYTSKTCSNCGFTI |
| | TSADYDRVLEKLKKTATGWMTTINGKELKVEGQITYYNRRKRQNVVKDLSV |
| | ELDRLSEESVNNDISSWTKGRSGEALSLLKKRFSHRPVQEKFVCLNCGFET |
| | HADEQAALNIARSWLFLRSQEYKKYQTNKTTGNTDKRAFVETWQSFYRKKL |
| | KEVWKPAV (SEQ ID NO: 96) |
| 441: | MQEIKRINKIRRRLVKDSNTKKAGKTGPMKTLLVRVMTPDLRERLENLRKK |
| L379R, | PENIPQPISNTSRANLNKLLTDYTEMKKAILHVYWEEFQKDPVGLMSRVAQ |
| A708K, | PAPKNIDQRKLIPVKDGNERLTSSGFACSQCCQPLYVYKLEQVNDKGKPHT |
| P793_, | NYFGRCNVSEHERLILLSPHKPEANDELVTYSLGKFGQRALDFYSIHVTRE |
| Y857R, | SNHPVKPLEQIGGNSCASGPVGKALSDACMGAVASFLTKYQDIILEHQKVI |
| I658V, | KKNEKRLANLKDIASANGLAFPKITLPPQPHTKEGIEAYNNVVAQIVIWVN |
| F399L, | LNLWQKLKIGRDEAKPLQRLKGFPSFPLVERQANEVDWWDMVCNVKKLINE |
| Y797L, | KKEDGKVFWQNLAGYKRQEALRPYLSSENDRKKGKKFARYQLGDLLLHLEK |
| E386N | KHGEDWGKVYDEAWERIDKKVEGLSKHIKLEEERRSEDAQSKAALTDWLRA |
| | KASFVIEGLKEADKDEFCRCELKLQKWYGDLRGKPFAIEAENSILDISGFS |
| | KQYNCAFIWQKDGVKKLNLYLIINYFKGGKLREKKIKPEAFEANRFYTVIN |
| | KKSGEIVPMEVNFNFDDPNLIILPLAFGKRQGREFIWNDLLSLETGSLKLA |
| | NGRVIEKTLYNRRTRQDEPALFVALTFERREVLDSSNIKPMNLIGVDRGEN |
| | IPAVIALTDPEGCPLSRFKDSLGNPTHILRIGESYKEKQRTIQAKKEVEQR |
| | RAGGYSRKYASKAKNLADDMVRNTARDLLYYAVTQDAMLIFENLSRGFGRQ |
| | GKRTFMAERQYTRMEDWLTAKLAYEGLSKTLLSKTLAQYTSKTCSNCGFTI |
| | TSADYDRVLEKLKKTATGWMTTINGKELKVEGQITYYNRRKRQNVVKDLSV |
| | ELDRLSEESVNNDISSWTKGRSGEALSLLKKRFSHRPVQEKFVCLNCGFET |
| | HADEQAALNIARSWLFLRSQEYKKYQTNKTTGNTDKRAFVETWQSFYRKKL |
| | KEVWKPAV (SEQ ID NO: 97) |
| 442: | MQEIKRINKIRRRLVKDSNTKKAGKTGPMKTLLVRVMTPDLRERLENLRKK |
| L379R, | PENIPQPISNTSRANLNKLLTDYTEMKKAILHVYWEEFQKDPVGLMSRVAQ |
| A708K, | PAPKNIDQRKLIPVKDGNERLTSSGFACSQCCQPLYVYKLEQVNDKGKPHT |
| P793_, | NYFGRCNVSEHERLILLSPHKPEANDELVTYSLGKFGQRALDFYSIHVTRE |
| Y857R, | SNHPVKPLEQIGGNSCASGPVGKALSDACMGAVASFLTKYQDIILEHQKVI |
| I658V, | KKNEKRLANLKDIASANGLAFPKITLPPQPHTKEGIEAYNNVVAQIVIWVN |
| F399L, | LNLWQKLKIGRDEAKPLQRLKGFPSFPLVERQANEVDWWDMVCNVKKLINE |
| Y797L, | KKEDGKVFWQNLAGYKRQEALRPYLSSENDRKKGKKFARYQLGDLLKHLEK |
| E386N, | KHGEDWGKVYDEAWERIDKKVEGLSKHIKLEEERRSEDAQSKAALTDWLRA |
| C477S, | KASFVIEGLKEADKDEFSRCELKLQKWYGDLRGKPFAIEAENSILDISGFS |
| L404K | KQYNCAFIWQKDGVKKLNLYLIINYFKGGKLRFKKIKPEAFEANRFYTVIN |
| | KKSGEIVPMEVNFNFDDPNLIILPLAFGKRQGREFIWNDLLSLETGSLKLA |
| | NGRVIEKTLYNRRTRQDEPALFVALTFERREVLDSSNIKPMNLIGVDRGEN |
| | IPAVIALTDPEGCPLSRFKDSLGNPTHILRIGESYKEKQRTIQAKKEVEQR |
| | RAGGYSRKYASKAKNLADDMVRNTARDLLYYAVTQDAMLIFENLSRGFGRQ |
| | GKRTFMAERQYTRMEDWLTAKLAYEGLSKTLLSKTLAQYTSKTCSNCGFTI |
| | TSADYDRVLEKLKKTATGWMTTINGKELKVEGQITYYNRRKRQNVVKDLSV |
| | ELDRLSEESVNNDISSWTKGRSGEALSLLKKRFSHRPVQEKFVCLNCGFET |
| | HADEQAALNIARSWLFLRSQEYKKYQTNKTTGNTDKRAFVETWQSFYRKKL |
| | KEVWKPAV (SEQ ID NO: 98) |
| 443: | MQEIKRINKIRRRLVKDSNTKKAGKTGPMKTLLVRVMTPDLRERLENLRKK |
| L379R, | PENIPQPISNTSRANLNKLLTDYTEMKKAILHVYWEEFQKDPVGLMSRVAQ |
| A708K, | PAPKNIDQRKLIPVKDGNERLTSSGFACSQCCQPLYVYKLEQVNDKGKPHT |
| P793_, | NYFGRCNVSEHERLILLSPHKPEANDELVTYSLGKFGQRALDFYSIHVTRE |
| Y857R, | SNHPVKPLEQIGGNSCASGPVGKALSDACMGAVASFLTKYQDIILEHQKVI |
| I658V, | KKNEKRLANLKDIASANGLAFPKITLPPQPHTKEGIEAYNNVVAQIVIWVN |
| Y797L | LNLWQKLKIGRDEAKPLQRLKGFPSFPLVERQANEVDWWDMVCNVKKLINE |
| | KKEDGKVFWQNLAGYKRQEALRPYLSSEEDRKKGKKFARYQFGDLLLHLEK |
| | KHGEDWGKVYDEAWERIDKKVEGLSKHIKLEEERRSEDAQSKAALTDWLRA |
| | KASFVIEGLKEADKDEFCRCELKLQKWYGDLRGKPFAIEAENSILDISGFS |
| | KQYNCAFIWQKDGVKKLNLYLIINYFKGGKLRFKKIKPEAFEANRFYTVIN |
| | KKSGEIVPMEVNFNFDDPNLIILPLAFGKRQGREFIWNDLLSLETGSLKLA |
| | NGRVIEKTLYNRRTRQDEPALFVALTFERREVLDSSNIKPMNLIGVDRGEN |
| | IPAVIALTDPEGCPLSRFKDSLGNPTHILRIGESYKEKQRTIQAKKEVEQR |
| | RAGGYSRKYASKAKNLADDMVRNTARDLLYYAVTQDAMLIFENLSRGFGRQ |
| | GKRTFMAERQYTRMEDWLTAKLAYEGLSKTLLSKTLAQYTSKTCSNCGFTI |
| | TSADYDRVLEKLKKTATGWMTTINGKELKVEGQITYYNRRKRQNVVKDLSV |
| | ELDRLSEESVNNDISSWTKGRSGEALSLLKKRFSHRPVQEKFVCLNCGFET |
| | HADEQAALNIARSWLFLRSQEYKKYQTNKTTGNTDKRAFVETWQSFYRKKL |
| | KEVWKPAV (SEQ ID NO: 99) |
| 444: | MQEIKRINKIRRRLVKDSNTKKAGKTGPMKTLLVRVMTPDLRERLENLRKK |
| L379R, | PENIPQPISNTSRANLNKLLTDYTEMKKAILHVYWEEFQKDPVGLMSRVAQ |
| A708K, | PAPKNIDQRKLIPVKDGNERLTSSGFACSQCCQPLYVYKLEQVNDKGKPHT |
| P793_, | NYFGRCNVSEHERLILLSPHKPEANDELVTYSLGKFGQRALDFYSIHVTRE |
| Y857R, | SNHPVKPLEQIGGNSCASGPVGKALSDACMGAVASFLTKYQDIILEHQKVI |
| I658V, | KKNEKRLANLKDIASANGLAFPKITLPPQPHTKEGIEAYNNVVAQIVIWVN |
| Y797L, | LNLWQKLKIGRDEAKPLQRLKGFPSFPLVERQANEVDWWDMVCNVKKLINE |
| L404K | KKEDGKVFWQNLAGYKRQEALRPYLSSEEDRKKGKKFARYQFGDLLKHLEK |
| | KHGEDWGKVYDEAWERIDKKVEGLSKHIKLEEERRSEDAQSKAALTDWLRA |
| | KASFVIEGLKEADKDEFCRCELKLQKWYGDLRGKPFAIEAENSILDISGFS |
| | KQYNCAFIWQKDGVKKLNLYLIINYFKGGKLRFKKIKPEAFEANRFYTVIN |
| | KKSGEIVPMEVNFNFDDPNLIILPLAFGKRQGREFIWNDLLSLETGSLKLA |
| | NGRVIEKTLYNRRTRQDEPALFVALTFERREVLDSSNIKPMNLIGVDRGEN |
| | IPAVIALTDPEGCPLSRFKDSLGNPTHILRIGESYKEKQRTIQAKKEVEQR |
| | RAGGYSRKYASKAKNLADDMVRNTARDLLYYAVTQDAMLIFENLSRGFGRQ |
| | GKRTFMAERQYTRMEDWLTAKLAYEGLSKTLLSKTLAQYTSKTCSNCGFTI |
| | TSADYDRVLEKLKKTATGWMTTINGKELKVEGQITYYNRRKRQNVVKDLSV |
| | ELDRLSEESVNNDISSWTKGRSGEALSLLKKRFSHRPVQEKFVCLNCGFET |
| | HADEQAALNIARSWLFLRSQEYKKYQTNKTTGNTDKRAFVETWQSFYRKKL |
| | KEVWKPAV (SEQ ID NO: 100) |
| 445: | MQEIKRINKIRRRLVKDSNTKKAGKTGPMKTLLVRVMTPDLRERLENLRKK |
| L379R, | PENIPQPISNTSRANLNKLLTDYTEMKKAILHVYWEEFQKDPVGLMSRVAQ |
| A708K, | PAPKNIDQRKLIPVKDGNERLTSSGFACSQCCQPLYVYKLEQVNDKGKPHT |
| P793_, | NYFGRCNVSEHERLILLSPHKPEANDELVTYSLGKFGQRALDFYSIHVTRE |
| Y857R, | SNHPVKPLEQIGGNSCASGPVGKALSDACMGAVASFLTKYQDIILEHQKVI |
| I658V, | KKNEKRLANLKDIASANGLAFPKITLPPQPHTKEGIEAYNNVVAQIVIWVN |
| Y797L, | LNLWQKLKIGRDEAKPLQRLKGFPSFPLVERQANEVDWWDMVCNVKKLINE |
| E386N | KKEDGKVFWQNLAGYKRQEALRPYLSSENDRKKGKKFARYQFGDLLLHLEK |
| | KHGEDWGKVYDEAWERIDKKVEGLSKHIKLEEERRSEDAQSKAALTDWLRA |
| | KASFVIEGLKEADKDEFCRCELKLQKWYGDLRGKPFAIEAENSILDISGFS |
| | KQYNCAFIWQKDGVKKLNLYLIINYFKGGKLRFKKIKPEAFEANRFYTVIN |
| | KKSGEIVPMEVNFNFDDPNLIILPLAFGKRQGREFIWNDLLSLETGSLKLA |
| | NGRVIEKTLYNRRTRQDEPALFVALTFERREVLDSSNIKPMNLIGVDRGEN |
| | IPAVIALTDPEGCPLSRFKDSLGNPTHILRIGESYKEKQRTIQAKKEVEQR |
| | RAGGYSRKYASKAKNLADDMVRNTARDLLYYAVTQDAMLIFENLSRGFGRQ |
| | GKRTFMAERQYTRMEDWLTAKLAYEGLSKTLLSKTLAQYTSKTCSNCGFTI |
| | TSADYDRVLEKLKKTATGWMTTINGKELKVEGQITYYNRRKRQNVVKDLSV |
| | ELDRLSEESVNNDISSWTKGRSGEALSLLKKRFSHRPVQEKFVCLNCGFET |
| | HADEQAALNIARSWLFLRSQEYKKYQTNKTTGNTDKRAFVETWQSFYRKKL |
| | KEVWKPAV (SEQ ID NO: 101) |
| 446: | MQEIKRINKIRRRLVKDSNTKKAGKTGPMKTLLVRVMTPDLRERLENLRKK |
| L379R, | PENIPQPISNTSRANLNKLLTDYTEMKKAILHVYWEEFQKDPVGLMSRVAQ |
| A708K, | PAPKNIDQRKLIPVKDGNERLTSSGFACSQCCQPLYVYKLEQVNDKGKPHT |
| P793_, | NYFGRCNVSEHERLILLSPHKPEANDELVTYSLGKFGQRALDFYSIHVTRE |
| Y857R, | SNHPVKPLEQIGGNSCASGPVGKALSDACMGAVASFLTKYQDIILEHQKVI |
| I658V, | KKNEKRLANLKDIASANGLAFPKITLPPQPHTKEGIEAYNNVVAQIVIWVN |
| Y797L, | LNLWQKLKIGRDEAKPLQRLKGFPSFPLVERQANEVDWWDMVCNVKKLINE |
| E386N, | KKEDGKVFWQNLAGYKRQEALRPYLSSENDRKKGKKFARYQFGDLLKHLEK |
| C477S, | KHGEDWGKVYDEAWERIDKKVEGLSKHIKLEEERRSEDAQSKAALTDWLRA |
| L404K | KASFVIEGLKEADKDEFSRCELKLQKWYGDLRGKPFAIEAENSILDISGFS |
| | KQYNCAFIWQKDGVKKLNLYLIINYFKGGKLRFKKIKPEAFEANRFYTVIN |
| | KKSGEIVPMEVNFNFDDPNLIILPLAFGKRQGREFIWNDLLSLETGSLKLA |
| | NGRVIEKTLYNRRTRQDEPALFVALTFERREVLDSSNIKPMNLIGVDRGEN |
| | IPAVIALTDPEGCPLSRFKDSLGNPTHILRIGESYKEKQRTIQAKKEVEQR |
| | RAGGYSRKYASKAKNLADDMVRNTARDLLYYAVTQDAMLIFENLSRGFGRQ |
| | GKRTFMAERQYTRMEDWLTAKLAYEGLSKTLLSKTLAQYTSKTCSNCGFTI |
| | TSADYDRVLEKLKKTATGWMTTINGKELKVEGQITYYNRRKRQNVVKDLSV |
| | ELDRLSEESVNNDISSWTKGRSGEALSLLKKRFSHRPVQEKFVCLNCGFET |
| | HADEQAALNIARSWLFLRSQEYKKYQTNKTTGNTDKRAFVETWQSFYRKKL |
| | KEVWKPAV (SEQ ID NO: 102) |
| 447: | MQEIKRINKIRRRLVKDSNTKKAGKTGPMKTLLVRVMTPDLRERLENLRKK |
| L379R, | PENIPQPISNTSRANLNKLLTDYTEMKKAILHVYWEEFQKDPVGLMSRVAQ |
| A708K, | PAPKNIDQRKLIPVKDGNERLTSSGFACSQCCQPLYVYKLEQVNDKGKPHT |
| P793_, | NYFGRCNVSEHERLILLSPHKPEANDELVTYSLGKFGQRALDFYSIHVTRE |
| Y857R, | SNHPVKPLEQIGGNSCASGPVGKALSDACMGAVASFLTKYQDIILEHQKVI |
| E386N | KKNEKRLANLKDIASANGLAFPKITLPPQPHTKEGIEAYNNVVAQIVIWVN |
| | LNLWQKLKIGRDEAKPLQRLKGFPSFPLVERQANEVDWWDMVCNVKKLINE |
| | KKEDGKVFWQNLAGYKRQEALRPYLSSENDRKKGKKFARYQFGDLLLHLEK |
| | KHGEDWGKVYDEAWERIDKKVEGLSKHIKLEEERRSEDAQSKAALTDWLRA |
| | KASFVIEGLKEADKDEFCRCELKLQKWYGDLRGKPFAIEAENSILDISGFS |
| | KQYNCAFIWQKDGVKKLNLYLIINYFKGGKLRFKKIKPEAFEANRFYTVIN |
| | KKSGEIVPMEVNFNFDDPNLIILPLAFGKRQGREFIWNDLLSLETGSLKLA |
| | NGRVIEKTLYNRRTRQDEPALFVALTFERREVLDSSNIKPMNLIGIDRGEN |
| | IPAVIALTDPEGCPLSRFKDSLGNPTHILRIGESYKEKQRTIQAKKEVEQR |
| | RAGGYSRKYASKAKNLADDMVRNTARDLLYYAVTQDAMLIFENLSRGFGRQ |
| | GKRTFMAERQYTRMEDWLTAKLAYEGLSKTYLSKTLAQYTSKTCSNCGFTI |
| | TSADYDRVLEKLKKTATGWMTTINGKELKVEGQITYYNRRKRQNVVKDLSV |
| | ELDRLSEESVNNDISSWTKGRSGEALSLLKKRFSHRPVQEKFVCLNCGFET |
| | HADEQAALNIARSWLFLRSQEYKKYQTNKTTGNTDKRAFVETWQSFYRKKL |
| | KEVWKPAV (SEQ ID NO: 103) |
| 448: | MQEIKRINKIRRRLVKDSNTKKAGKTGPMKTLLVRVMTPDLRERLENLRKK |
| L379R, | PENIPQPISNTSRANLNKLLTDYTEMKKAILHVYWEEFQKDPVGLMSRVAQ |
| A708K, | PAPKNIDQRKLIPVKDGNERLTSSGFACSQCCQPLYVYKLEQVNDKGKPHT |
| P793_, | NYFGRCNVSEHERLILLSPHKPEANDELVTYSLGKFGQRALDFYSIHVTRE |
| Y857R, | SNHPVKPLEQIGGNSCASGPVGKALSDACMGAVASFLTKYQDIILEHQKVI |
| E386N, | KKNEKRLANLKDIASANGLAFPKITLPPQPHTKEGIEAYNNVVAQIVIWVN |
| L404K | LNLWQKLKIGRDEAKPLQRLKGFPSFPLVERQANEVDWWDMVCNVKKLINE |
| | KKEDGKVFWQNLAGYKRQEALRPYLSSENDRKKGKKFARYQFGDLLKHLEK |
| | KHGEDWGKVYDEAWERIDKKVEGLSKHIKLEEERRSEDAQSKAALTDWLRA |
| | KASFVIEGLKEADKDEFCRCELKLQKWYGDLRGKPFAIEAENSILDISGFS |
| | KQYNCAFIWQKDGVKKLNLYLIINYFKGGKLRFKKIKPEAFEANRFYTVIN |
| | KKSGEIVPMEVNFNFDDPNLIILPLAFGKRQGREFIWNDLLSLETGSLKLA |
| | NGRVIEKTLYNRRTRQDEPALFVALTFERREVLDSSNIKPMNLIGIDRGEN |
| | IPAVIALTDPEGCPLSRFKDSLGNPTHILRIGESYKEKQRTIQAKKEVEQR |
| | RAGGYSRKYASKAKNLADDMVRNTARDLLYYAVTQDAMLIFENLSRGFGRQ |
| | GKRTFMAERQYTRMEDWLTAKLAYEGLSKTYLSKTLAQYTSKTCSNCGFTI |
| | TSADYDRVLEKLKKTATGWMTTINGKELKVEGQITYYNRRKRQNVVKDLSV |
| | ELDRLSEESVNNDISSWTKGRSGEALSLLKKRFSHRPVQEKFVCLNCGFET |
| | HADEQAALNIARSWLFLRSQEYKKYQTNKTTGNTDKRAFVETWQSFYRKKL |
| | KEVWKPAV (SEQ ID NO: 104) |
| 449: | MQEIKRINKIRRRLVKDSNTKKAGKTGPMKTLLVRVMTPDLRERLENLRKK |
| L379R, | PENIPQPISNTSRANLNKLLTDYTEMKKAILHVYWEEFQKDPVGLMSRVAQ |
| A708K, | PAPKNIDQRKLIPVKDGNERLTSSGFACSQCCQPLYVYKLEQVNDKGKPHT |
| P793_, | NYFGRCNVSEHERLILLSPHKPEANDELVTYSLGKFGQRALDFYSIHVTRE |
| D732N, | SNHPVKPLEQIGGNSCASGPVGKALSDACMGAVASFLTKYQDIILEHQKVI |
| E385P, | KKNEKRLANLKDIASANGLAFPKITLPPQPHTKEGIEAYNNVVAQIVIWVN |
| Y857R | LNLWQKLKIGRDEAKPLQRLKGFPSFPLVERQANEVDWWDMVCNVKKLINE |
| | KKEDGKVFWQNLAGYKRQEALRPYLSSPEDRKKGKKFARYQFGDLLLHLEK |
| | KHGEDWGKVYDEAWERIDKKVEGLSKHIKLEEERRSEDAQSKAALTDWLRA |
| | KASFVIEGLKEADKDEFCRCELKLQKWYGDLRGKPFAIEAENSILDISGFS |
| | KQYNCAFIWQKDGVKKLNLYLIINYFKGGKLRFKKIKPEAFEANRFYTVIN |
| | KKSGEIVPMEVNFNFDDPNLIILPLAFGKRQGREFIWNDLLSLETGSLKLA |
| | NGRVIEKTLYNRRTRQDEPALFVALTFERREVLDSSNIKPMNLIGIDRGEN |
| | IPAVIALTDPEGCPLSRFKDSLGNPTHILRIGESYKEKQRTIQAKKEVEQR |
| | RAGGYSRKYASKAKNLANDMVRNTARDLLYYAVTQDAMLIFENLSRGFGRQ |
| | GKRTFMAERQYTRMEDWLTAKLAYEGLSKTYLSKTLAQYTSKTCSNCGFTI |
| | TSADYDRVLEKLKKTATGWMTTINGKELKVEGQITYYNRRKRQNVVKDLSV |
| | ELDRLSEESVNNDISSWTKGRSGEALSLLKKRFSHRPVQEKFVCLNCGFET |
| | HADEQAALNIARSWLFLRSQEYKKYQTNKTTGNTDKRAFVETWQSFYRKKL |
| | KEVWKPAV (SEQ ID NO: 105) |
| 450: | MQEIKRINKIRRRLVKDSNTKKAGKTGPMKTLLVRVMTPDLRERLENLRKK |
| L379R, | PENIPQPISNTSRANLNKLLTDYTEMKKAILHVYWEEFQKDPVGLMSRVAQ |
| A708K, | PAPKNIDQRKLIPVKDGNERLTSSGFACSQCCQPLYVYKLEQVNDKGKPHT |
| P793_, | NYFGRCNVSEHERLILLSPHKPEANDELVTYSLGKFGQRALDFYSIHVTRE |
| D732N, | SNHPVKPLEQIGGNSCASGPVGKALSDACMGAVASFLTKYQDIILEHQKVI |
| E385P, | KKNEKRLANLKDIASANGLAFPKITLPPQPHTKEGIEAYNNVVAQIVIWVN |
| Y857R, | LNLWQKLKIGRDEAKPLQRLKGFPSFPLVERQANEVDWWDMVCNVKKLINE |
| I658V | KKEDGKVFWQNLAGYKRQEALRPYLSSPEDRKKGKKFARYQFGDLLLHLEK |
| | KHGEDWGKVYDEAWERIDKKVEGLSKHIKLEEERRSEDAQSKAALTDWLRA |
| | KASFVIEGLKEADKDEFCRCELKLQKWYGDLRGKPFAIEAENSILDISGFS |
| | KQYNCAFIWQKDGVKKLNLYLIINYFKGGKLRFKKIKPEAFEANRFYTVIN |
| | KKSGEIVPMEVNFNFDDPNLIILPLAFGKRQGREFIWNDLLSLETGSLKLA |
| | NGRVIEKTLYNRRTRQDEPALFVALTFERREVLDSSNIKPMNLIGVDRGEN |
| | IPAVIALTDPEGCPLSRFKDSLGNPTHILRIGESYKEKQRTIQAKKEVEQR |
| | RAGGYSRKYASKAKNLANDMVRNTARDLLYYAVTQDAMLIFENLSRGFGRQ |
| | GKRTFMAERQYTRMEDWLTAKLAYEGLSKTYLSKTLAQYTSKTCSNCGFTI |
| | TSADYDRVLEKLKKTATGWMTTINGKELKVEGQITYYNRRKRQNVVKDLSV |
| | ELDRLSEESVNNDISSWTKGRSGEALSLLKKRFSHRPVQEKFVCLNCGFET |
| | HADEQAALNIARSWLFLRSQEYKKYQTNKTTGNTDKRAFVETWQSFYRKKL |
| | KEVWKPAV (SEQ ID NO: 106) |
| 451: | MQEIKRINKIRRRLVKDSNTKKAGKTGPMKTLLVRVMTPDLRERLENLRKK |
| L379R, | PENIPQPISNTSRANLNKLLTDYTEMKKAILHVYWEEFQKDPVGLMSRVAQ |
| A708K, | PAPKNIDQRKLIPVKDGNERLTSSGFACSQCCQPLYVYKLEQVNDKGKPHT |
| P793_, | NYFGRCNVSEHERLILLSPHKPEANDELVTYSLGKFGQRALDFYSIHVTRE |
| D732N, | SNHPVKPLEQIGGNSCASGPVGKALSDACMGAVASFLTKYQDIILEHQKVI |
| E385P, | KKNEKRLANLKDIASANGLAFPKITLPPQPHTKEGIEAYNNVVAQIVIWVN |
| Y857R, | LNLWQKLKIGRDEAKPLQRLKGFPSFPLVERQANEVDWWDMVCNVKKLINE |
| I658V, | KKEDGKVFWQNLAGYKRQEALRPYLSSPEDRKKGKKFARYQLGDLLLHLEK |
| F399L | KHGEDWGKVYDEAWERIDKKVEGLSKHIKLEEERRSEDAQSKAALTDWLRA |
| | KASFVIEGLKEADKDEFCRCELKLQKWYGDLRGKPFAIEAENSILDISGFS |
| | KQYNCAFIWQKDGVKKLNLYLIINYFKGGKLRFKKIKPEAFEANRFYTVIN |
| | KKSGEIVPMEVNFNFDDPNLIILPLAFGKRQGREFIWNDLLSLETGSLKLA |
| | NGRVIEKTLYNRRTRQDEPALFVALTFERREVLDSSNIKPMNLIGVDRGEN |
| | IPAVIALTDPEGCPLSRFKDSLGNPTHILRIGESYKEKQRTIQAKKEVEQR |
| | RAGGYSRKYASKAKNLANDMVRNTARDLLYYAVTQDAMLIFENLSRGFGRQ |
| | GKRTFMAERQYTRMEDWLTAKLAYEGLSKTYLSKTLAQYTSKTCSNCGFTI |
| | TSADYDRVLEKLKKTATGWMTTINGKELKVEGQITYYNRRKRQNVVKDLSV |
| | ELDRLSEESVNNDISSWTKGRSGEALSLLKKRFSHRPVQEKFVCLNCGFET |
| | HADEQAALNIARSWLFLRSQEYKKYQTNKTTGNTDKRAFVETWQSFYRKKL |
| | KEVWKPAV (SEQ ID NO: 107) |
| 452: | MQEIKRINKIRRRLVKDSNTKKAGKTGPMKTLLVRVMTPDLRERLENLRKK |
| L379R, | PENIPQPISNTSRANLNKLLTDYTEMKKAILHVYWEEFQKDPVGLMSRVAQ |
| A708K, | PAPKNIDQRKLIPVKDGNERLTSSGFACSQCCQPLYVYKLEQVNDKGKPHT |
| P793_, | NYFGRCNVSEHERLILLSPHKPEANDELVTYSLGKFGQRALDFYSIHVTRE |
| D732N, | SNHPVKPLEQIGGNSCASGPVGKALSDACMGAVASFLTKYQDIILEHQKVI |
| E385P, | KKNEKRLANLKDIASANGLAFPKITLPPQPHTKEGIEAYNNVVAQIVIWVN |
| Y857R, | LNLWQKLKIGRDEAKPLQRLKGFPSFPLVERQANEVDWWDMVCNVKKLINE |
| I658V, | KKEDGKVFWQNLAGYKRQEALRPYLSSPNDRKKGKKFARYQFGDLLLHLEK |
| E386N | KHGEDWGKVYDEAWERIDKKVEGLSKHIKLEEERRSEDAQSKAALTDWLRA |
| | KASFVIEGLKEADKDEFCRCELKLQKWYGDLRGKPFAIEAENSILDISGFS |
| | KQYNCAFIWQKDGVKKLNLYLIINYFKGGKLRFKKIKPEAFEANRFYTVIN |
| | KKSGEIVPMEVNFNFDDPNLIILPLAFGKRQGREFIWNDLLSLETGSLKLA |
| | NGRVIEKTLYNRRTRQDEPALFVALTFERREVLDSSNIKPMNLIGVDRGEN |
| | IPAVIALTDPEGCPLSRFKDSLGNPTHILRIGESYKEKQRTIQAKKEVEQR |
| | RAGGYSRKYASKAKNLANDMVRNTARDLLYYAVTQDAMLIFENLSRGFGRQ |
| | GKRTFMAERQYTRMEDWLTAKLAYEGLSKTYLSKTLAQYTSKTCSNCGFTI |
| | TSADYDRVLEKLKKTATGWMTTINGKELKVEGQITYYNRRKRQNVVKDLSV |
| | ELDRLSEESVNNDISSWTKGRSGEALSLLKKRFSHRPVQEKFVCLNCGFET |
| | HADEQAALNIARSWLFLRSQEYKKYQTNKTTGNTDKRAFVETWQSFYRKKL |
| | KEVWKPAV (SEQ ID NO: 108) |
| 453: | MQEIKRINKIRRRLVKDSNTKKAGKTGPMKTLLVRVMTPDLRERLENLRKK |
| L379R, | PENIPQPISNTSRANLNKLLTDYTEMKKAILHVYWEEFQKDPVGLMSRVAQ |
| A708K, | PAPKNIDQRKLIPVKDGNERLTSSGFACSQCCQPLYVYKLEQVNDKGKPHT |
| P793_, | NYFGRCNVSEHERLILLSPHKPEANDELVTYSLGKFGQRALDFYSIHVTRE |
| D732N, | SNHPVKPLEQIGGNSCASGPVGKALSDACMGAVASFLTKYQDIILEHQKVI |
| E385P, | KKNEKRLANLKDIASANGLAFPKITLPPQPHTKEGIEAYNNVVAQIVIWVN |
| Y857R, | LNLWQKLKIGRDEAKPLQRLKGFPSFPLVERQANEVDWWDMVCNVKKLINE |
| I658V, | KKEDGKVFWQNLAGYKRQEALRPYLSSPEDRKKGKKFARYQFGDLLKHLEK |
| L404K | KHGEDWGKVYDEAWERIDKKVEGLSKHIKLEEERRSEDAQSKAALTDWLRA |
| | KASFVIEGLKEADKDEFCRCELKLQKWYGDLRGKPFAIEAENSILDISGFS |
| | KQYNCAFIWQKDGVKKLNLYLIINYFKGGKLRFKKIKPEAFEANRFYTVIN |
| | KKSGEIVPMEVNFNFDDPNLIILPLAFGKRQGREFIWNDLLSLETGSLKLA |
| | NGRVIEKTLYNRRTRQDEPALFVALTFERREVLDSSNIKPMNLIGVDRGEN |
| | IPAVIALTDPEGCPLSRFKDSLGNPTHILRIGESYKEKQRTIQAKKEVEQR |
| | RAGGYSRKYASKAKNLANDMVRNTARDLLYYAVTQDAMLIFENLSRGFGRQ |
| | GKRTFMAERQYTRMEDWLTAKLAYEGLSKTYLSKTLAQYTSKTCSNCGFTI |
| | TSADYDRVLEKLKKTATGWMTTINGKELKVEGQITYYNRRKRQNVVKDLSV |
| | ELDRLSEESVNNDISSWTKGRSGEALSLLKKRFSHRPVQEKFVCLNCGFET |
| | HADEQAALNIARSWLFLRSQEYKKYQTNKTTGNTDKRAFVETWQSFYRKKL |
| | KEVWKPAV (SEQ ID NO: 109) |
| 454: | MQEIKRINKIRRRLVKDSNTKKAGKTGPMKTLLVRVMTPDLRERLENLRKK |
| L379R, | PENIPQPISNTSRANLNKLLTDYTEMKKAILHVYWEEFQKDPVGLMSRVAQ |
| A708K, | PAPKNIDQRKLIPVKDGNERLTSSGFACSQCCQPLYVYKLEQVNDKGKPHT |
| P793_, | NYFGRCNVSEHERLILLSPHKPEANDELVTYSLGKFGQRALDFYSIHVTRE |
| T620P, | SNHPVKPLEQIGGNSCASGPVGKALSDACMGAVASFLTKYQDIILEHKKVI |
| E385P, | KKNEKRLANLKDIASANGLAFPKITLPPQPHTKEGIEAYNNVVAQIVIWVN |
| Y857R, | LNLWQKLKIGRDEAKPLQRLKGFPSFPLVERQANEVDWWDMVCNVKKLINE |
| Q252K | KKEDGKVFWQNLAGYKRQEALRPYLSSPEDRKKGKKFARYQFGDLLLHLEK |
| | KHGEDWGKVYDEAWERIDKKVEGLSKHIKLEEERRSEDAQSKAALTDWLRA |
| | KASFVIEGLKEADKDEFCRCELKLQKWYGDLRGKPFAIEAENSILDISGFS |
| | KQYNCAFIWQKDGVKKLNLYLIINYFKGGKLRFKKIKPEAFEANRFYTVIN |
| | KKSGEIVPMEVNFNFDDPNLIILPLAFGKRQGREFIWNDLLSLETGSLKLA |
| | NGRVIEKPLYNRRTRQDEPALFVALTFERREVLDSSNIKPMNLIGIDRGEN |
| | IPAVIALTDPEGCPLSRFKDSLGNPTHILRIGESYKEKQRTIQAKKEVEQR |
| | RAGGYSRKYASKAKNLADDMVRNTARDLLYYAVTQDAMLIFENLSRGFGRQ |
| | GKRTFMAERQYTRMEDWLTAKLAYEGLSKTYLSKTLAQYTSKTCSNCGFTI |
| | TSADYDRVLEKLKKTATGWMTTINGKELKVEGQITYYNRRKRQNVVKDLSV |
| | ELDRLSEESVNNDISSWTKGRSGEALSLLKKRFSHRPVQEKFVCLNCGFET |
| | HADEQAALNIARSWLFLRSQEYKKYQTNKTTGNTDKRAFVETWQSFYRKKL |
| | KEVWKPAV (SEQ ID NO: 110) |
| 455: | MQEIKRINKIRRRLVKDSNTKKAGKTGPMKTLLVRVMTPDLRERLENLRKK |
| L379R, | PENIPQPISNTSRANLNKLLTDYTEMKKAILHVYWEEFQKDPVGLMSRVAQ |
| A708K, | PAPKNIDQRKLIPVKDGNERLTSSGFACSQCCQPLYVYKLEQVNDKGKPHT |
| P793_, | NYFGRCNVSEHERLILLSPHKPEANDELVTYSLGKFGQRALDFYSIHVTRE |
| T620P, | SNHPVKPLEQIGGNSCASGPVGKALSDACMGAVASFLTKYQDIILEHKKVI |
| E385P, | KKNEKRLANLKDIASANGLAFPKITLPPQPHTKEGIEAYNNVVAQIVIWVN |
| Y857R, | LNLWQKLKIGRDEAKPLQRLKGFPSFPLVERQANEVDWWDMVCNVKKLINE |
| I658V, | KKEDGKVFWQNLAGYKRQEALRPYLSSPEDRKKGKKFARYQFGDLLLHLEK |
| Q252K | KHGEDWGKVYDEAWERIDKKVEGLSKHIKLEEERRSEDAQSKAALTDWLRA |
| | KASFVIEGLKEADKDEFCRCELKLQKWYGDLRGKPFAIEAENSILDISGFS |
| | KQYNCAFIWQKDGVKKLNLYLIINYFKGGKLRFKKIKPEAFEANRFYTVIN |
| | KKSGEIVPMEVNFNFDDPNLIILPLAFGKRQGREFIWNDLLSLETGSLKLA |
| | NGRVIEKPLYNRRTRQDEPALFVALTFERREVLDSSNIKPMNLIGVDRGEN |
| | IPAVIALTDPEGCPLSRFKDSLGNPTHILRIGESYKEKQRTIQAKKEVEQR |
| | RAGGYSRKYASKAKNLADDMVRNTARDLLYYAVTQDAMLIFENLSRGFGRQ |
| | GKRTFMAERQYTRMEDWLTAKLAYEGLSKTYLSKTLAQYTSKTCSNCGFTI |
| | TSADYDRVLEKLKKTATGWMTTINGKELKVEGQITYYNRRKRQNVVKDLSV |
| | ELDRLSEESVNNDISSWTKGRSGEALSLLKKRFSHRPVQEKFVCLNCGFET |
| | HADEQAALNIARSWLFLRSQEYKKYQTNKTTGNTDKRAFVETWQSFYRKKL |
| | KEVWKPAV (SEQ ID NO: 111) |
| 456: | MQEIKRINKIRRRLVKDSNTKKAGKTGPMKTLLVRVMTPDLRERLENLRKK |
| L379R, | PENIPQPISNTSRANLNKLLTDYTEMKKAILHVYWEEFQKDPVGLMSRVAQ |
| A708K, | PAPKNIDQRKLIPVKDGNERLTSSGFACSQCCQPLYVYKLEQVNDKGKPHT |
| P793_, | NYFGRCNVSEHERLILLSPHKPEANDELVTYSLGKFGQRALDFYSIHVTRE |
| T620P, | SNHPVKPLEQIGGNSCASGPVGKALSDACMGAVASFLTKYQDIILEHKKVI |
| E385P, | KKNEKRLANLKDIASANGLAFPKITLPPQPHTKEGIEAYNNVVAQIVIWVN |
| Y857R, | LNLWQKLKIGRDEAKPLQRLKGFPSFPLVERQANEVDWWDMVCNVKKLINE |
| I658V, | KKEDGKVFWQNLAGYKRQEALRPYLSSPNDRKKGKKFARYQFGDLLLHLEK |
| E386N, | KHGEDWGKVYDEAWERIDKKVEGLSKHIKLEEERRSEDAQSKAALTDWLRA |
| Q252K | KASFVIEGLKEADKDEFCRCELKLQKWYGDLRGKPFAIEAENSILDISGFS |
| | KQYNCAFIWQKDGVKKLNLYLIINYFKGGKLRFKKIKPEAFEANRFYTVIN |
| | KKSGEIVPMEVNFNFDDPNLIILPLAFGKRQGREFIWNDLLSLETGSLKLA |
| | NGRVIEKPLYNRRTRQDEPALFVALTFERREVLDSSNIKPMNLIGVDRGEN |
| | IPAVIALTDPEGCPLSRFKDSLGNPTHILRIGESYKEKQRTIQAKKEVEQR |
| | RAGGYSRKYASKAKNLADDMVRNTARDLLYYAVTQDAMLIFENLSRGFGRQ |
| | GKRTFMAERQYTRMEDWLTAKLAYEGLSKTYLSKTLAQYTSKTCSNCGFTI |
| | TSADYDRVLEKLKKTATGWMTTINGKELKVEGQITYYNRRKRQNVVKDLSV |
| | ELDRLSEESVNNDISSWTKGRSGEALSLLKKRFSHRPVQEKFVCLNCGFET |
| | HADEQAALNIARSWLFLRSQEYKKYQTNKTTGNTDKRAFVETWQSFYRKKL |
| | KEVWKPAV (SEQ ID NO: 112) |
| 457: | MQEIKRINKIRRRLVKDSNTKKAGKTGPMKTLLVRVMTPDLRERLENLRKK |
| L379R, | PENIPQPISNTSRANLNKLLTDYTEMKKAILHVYWEEFQKDPVGLMSRVAQ |
| A708K, | PAPKNIDQRKLIPVKDGNERLTSSGFACSQCCQPLYVYKLEQVNDKGKPHT |
| P793_, | NYFGRCNVSEHERLILLSPHKPEANDELVTYSLGKFGQRALDFYSIHVTRE |
| T620P, | SNHPVKPLEQIGGNSCASGPVGKALSDACMGAVASFLTKYQDIILEHKKVI |
| E385P, | KKNEKRLANLKDIASANGLAFPKITLPPQPHTKEGIEAYNNVVAQIVIWVN |
| Y857R, | LNLWQKLKIGRDEAKPLQRLKGFPSFPLVERQANEVDWWDMVCNVKKLINE |
| I658V, | KKEDGKVFWQNLAGYKRQEALRPYLSSPEDRKKGKKFARYQLGDLLLHLEK |
| F399L, | KHGEDWGKVYDEAWERIDKKVEGLSKHIKLEEERRSEDAQSKAALTDWLRA |
| Q252K | KASFVIEGLKEADKDEFCRCELKLQKWYGDLRGKPFAIEAENSILDISGFS |
| | KQYNCAFIWQKDGVKKLNLYLIINYFKGGKLRFKKIKPEAFEANRFYTVIN |
| | KKSGEIVPMEVNFNFDDPNLIILPLAFGKRQGREFIWNDLLSLETGSLKLA |
| | NGRVIEKPLYNRRTRQDEPALFVALTFERREVLDSSNIKPMNLIGVDRGEN |
| | IPAVIALTDPEGCPLSRFKDSLGNPTHILRIGESYKEKQRTIQAKKEVEQR |
| | RAGGYSRKYASKAKNLADDMVRNTARDLLYYAVTQDAMLIFENLSRGFGRQ |
| | GKRTFMAERQYTRMEDWLTAKLAYEGLSKTYLSKTLAQYTSKTCSNCGFTI |
| | TSADYDRVLEKLKKTATGWMTTINGKELKVEGQITYYNRRKRQNVVKDLSV |
| | ELDRLSEESVNNDISSWTKGRSGEALSLLKKRFSHRPVQEKFVCLNCGFET |
| | HADEQAALNIARSWLFLRSQEYKKYQTNKTTGNTDKRAFVETWQSFYRKKL |
| | KEVWKPAV (SEQ ID NO: 113) |
| 458: | MQEIKRINKIRRRLVKDSNTKKAGKTGPMKTLLVRVMTPDLRERLENLRKK |
| L379R, | PENIPQPISNTSRANLNKLLTDYTEMKKAILHVYWEEFQKDPVGLMSRVAQ |
| A708K, | PAPKNIDQRKLIPVKDGNERLTSSGFACSQCCQPLYVYKLEQVNDKGKPHT |
| P793_, | NYFGRCNVSEHERLILLSPHKPEANDELVTYSLGKFGQRALDFYSIHVTRE |
| T620P, | SNHPVKPLEQIGGNSCASGPVGKALSDACMGAVASFLTKYQDIILEHKKVI |
| E385P, | KKNEKRLANLKDIASANGLAFPKITLPPQPHTKEGIEAYNNVVAQIVIWVN |
| Y857R, | LNLWQKLKIGRDEAKPLQRLKGFPSFPLVERQANEVDWWDMVCNVKKLINE |
| I658V, | KKEDGKVFWQNLAGYKRQEALRPYLSSPEDRKKGKKFARYQFGDLLKHLEK |
| L404K, | KHGEDWGKVYDEAWERIDKKVEGLSKHIKLEEERRSEDAQSKAALTDWLRA |
| Q252K | KASFVIEGLKEADKDEFCRCELKLQKWYGDLRGKPFAIEAENSILDISGFS |
| | KQYNCAFIWQKDGVKKLNLYLIINYFKGGKLRFKKIKPEAFEANRFYTVIN |
| | KKSGEIVPMEVNFNFDDPNLIILPLAFGKRQGREFIWNDLLSLETGSLKLA |
| | NGRVIEKPLYNRRTRQDEPALFVALTFERREVLDSSNIKPMNLIGVDRGEN |
| | IPAVIALTDPEGCPLSRFKDSLGNPTHILRIGESYKEKQRTIQAKKEVEQR |
| | RAGGYSRKYASKAKNLADDMVRNTARDLLYYAVTQDAMLIFENLSRGFGRQ |
| | GKRTFMAERQYTRMEDWLTAKLAYEGLSKTYLSKTLAQYTSKTCSNCGFTI |
| | TSADYDRVLEKLKKTATGWMTTINGKELKVEGQITYYNRRKRQNVVKDLSV |
| | ELDRLSEESVNNDISSWTKGRSGEALSLLKKRFSHRPVQEKFVCLNCGFET |
| | HADEQAALNIARSWLFLRSQEYKKYQTNKTTGNTDKRAFVETWQSFYRKKL |
| | KEVWKPAV (SEQ ID NO: 114) |
| 459: | MQEIKRINKIRRRLVKDSNTKKAGKTGPMKTLLVRVMTPDLRERLENLRKK |
| L379R, | PENIPQPISNTSRANLNKLLTDYTEMKKAILHVYWEEFQKDPVGLMSRVAQ |
| A708K, | PAPKNIDQRKLIPVKDGNERLTSSGFACSQCCQPLYVYKLEQVNDKGKPHT |
| P793_, | NYFGRCNVSEHERLILLSPHKPEANDELVTYSLGKFGQRALDFYSIHVTRE |
| T620P, | SNHPVKPLEQIGGNSCASGPVGKALSDACMGAVASFLTKYQDIILEHQKVI |
| Y857R, | KKNEKRLANLKDIASANGLAFPKITLPPQPHTKEGIEAYNNVVAQIVIWVN |
| I658V, | LNLWQKLKIGRDEAKPLQRLKGFPSFPLVERQANEVDWWDMVCNVKKLINE |
| E386N | KKEDGKVFWQNLAGYKRQEALRPYLSSENDRKKGKKFARYQFGDLLLHLEK |
| | KHGEDWGKVYDEAWERIDKKVEGLSKHIKLEEERRSEDAQSKAALTDWLRA |
| | KASFVIEGLKEADKDEFCRCELKLQKWYGDLRGKPFAIEAENSILDISGFS |
| | KQYNCAFIWQKDGVKKLNLYLIINYFKGGKLRFKKIKPEAFEANRFYTVIN |
| | KKSGEIVPMEVNFNFDDPNLIILPLAFGKRQGREFIWNDLLSLETGSLKLA |
| | NGRVIEKPLYNRRTRQDEPALFVALTFERREVLDSSNIKPMNLIGVDRGEN |
| | IPAVIALTDPEGCPLSRFKDSLGNPTHILRIGESYKEKQRTIQAKKEVEQR |
| | RAGGYSRKYASKAKNLADDMVRNTARDLLYYAVTQDAMLIFENLSRGFGRQ |
| | GKRTFMAERQYTRMEDWLTAKLAYEGLSKTYLSKTLAQYTSKTCSNCGFTI |
| | TSADYDRVLEKLKKTATGWMTTINGKELKVEGQITYYNRRKRQNVVKDLSV |
| | ELDRLSEESVNNDISSWTKGRSGEALSLLKKRFSHRPVQEKFVCLNCGFET |
| | HADEQAALNIARSWLFLRSQEYKKYQTNKTTGNTDKRAFVETWQSFYRKKL |
| | KEVWKPAV (SEQ ID NO: 115) |
| 460: | MQEIKRINKIRRRLVKDSNTKKAGKTGPMKTLLVRVMTPDLRERLENLRKK |
| L379R, | PENIPQPISNTSRANLNKLLTDYTEMKKAILHVYWEEFQKDPVGLMSRVAQ |
| A708K, | PAPKNIDQRKLIPVKDGNERLTSSGFACSQCCQPLYVYKLEQVNDKGKPHT |
| P793_, | NYFGRCNVSEHERLILLSPHKPEANDELVTYSLGKFGQRALDFYSIHVTRE |
| T620P, | SNHPVKPLEQIGGNSCASGPVGKALSDACMGAVASFLTKYQDIILEHKKVI |
| E385P, | KKNEKRLANLKDIASANGLAFPKITLPPQPHTKEGIEAYNNVVAQIVIWVN |
| Q252K | LNLWQKLKIGRDEAKPLQRLKGFPSFPLVERQANEVDWWDMVCNVKKLINE |
| | KKEDGKVFWQNLAGYKRQEALRPYLSSPEDRKKGKKFARYQFGDLLLHLEK |
| | KHGEDWGKVYDEAWERIDKKVEGLSKHIKLEEERRSEDAQSKAALTDWLRA |
| | KASFVIEGLKEADKDEFCRCELKLQKWYGDLRGKPFAIEAENSILDISGFS |
| | KQYNCAFIWQKDGVKKLNLYLIINYFKGGKLRFKKIKPEAFEANRFYTVIN |
| | KKSGEIVPMEVNFNFDDPNLIILPLAFGKRQGREFIWNDLLSLETGSLKLA |
| | NGRVIEKPLYNRRTRQDEPALFVALTFERREVLDSSNIKPMNLIGIDRGEN |
| | IPAVIALTDPEGCPLSRFKDSLGNPTHILRIGESYKEKQRTIQAKKEVEQR |
| | RAGGYSRKYASKAKNLADDMVRNTARDLLYYAVTQDAMLIFENLSRGFGRQ |
| | GKRTFMAERQYTRMEDWLTAKLAYEGLSKTYLSKTLAQYTSKTCSNCGFTI |
| | TSADYDRVLEKLKKTATGWMTTINGKELKVEGQITYYNRYKRQNVVKDLSV |
| | ELDRLSEESVNNDISSWTKGRSGEALSLLKKRFSHRPVQEKFVCLNCGFET |
| | HADEQAALNIARSWLFLRSQEYKKYQTNKTTGNTDKRAFVETWQSFYRKKL |
| | KEVWKPAV (SEQ ID NO: 116) |
| 278 | QEIKRINKIRRRLVKDSNTKKAGKTGPMKTLLVRVMTPDLRERLENLRKKP |
| | ENIPQPISNTSRANLNKLLTDYTEMKKAILHVYWEEFQKDPVGLMSRVAQP |
| | APKNIDQRKLIPVKDGNERLTSSGFACSQCCQPLYVYKLEQVNDKGKPHTN |
| | YFGRCNVSEHERLILLSPHKPEANDELVTYSLGKFGQRALDFYSIHVTRES |
| | NHPVKPLEQIGGNSCASGPVGKALSDACMGAVASFLTKYQDIILEHQKVIK |
| | KNEKRLANLKDIASANGLAFPKITLPPQPHTKEGIEAYNNVVAQIVIWVNL |
| | NLWQKLKIGRDEAKPLQRLKGFPSFPLVERQANEVDWWDMVCNVKKLINEK |
| | KEDGKVFWQNLAGYKRQEALRPYLSSEEDRKKGKKFARYQFGDLLLHLEKK |
| | HGEDWGKVYDEAWERIDKKVEGLSKHIKLEEERRSEDAQSKAALTDWLRAK |
| | ASFVIEGLKEADKDEFCRCELKLQKWYGDLRGKPFAIEAENSILDISGFSK |
| | QYNCAFIWQKDGVKKLNLYLIINYFKGGKLRFKKIKPEAFEANRFYTVINK |
| | KSGEIVPMEVNFNFDDPNLIILPLAFGKRQGREFIWNDLLSLETGSLKLAN |
| | GRVIEKTLYNRRTRQDEPALFVALTFERREVLDSSNIKPMNLIGIDRGENI |
| | PAVIALTDPEGCPLSRFKDSLGNPTHILRIGESYKEKQRTIQAKKEVEQRR |
| | AGGYSRKYASKAKNLADDMVRNTARDLLYYAVTQDAMLIFENLSRGFGRQG |
| | KRTFMAERQYTRMEDWLTAKLAYEGLSKTYLSKTLAQYTSKTCSNCGFTIT |
| | SADYDRVLEKLKKTATGWMTTINGKELKVEGQITYYNRYKRQNVVKDLSVE |
| | LDRLSEESVNNDISSWTKGRSGEALSLLKKRFSHRPVQEKFVCLNCGFETH |
| | ADEQAALNIARSWLFLRSQEYKKYQTNKTTGNTDKRAFVETWQSFYRKKLK |
| | EVWKPAV (SEQ ID NO: 117) |
| 279 | MQEIKRINKIRRRLVKDSNTKKAGKTGPMKTLLVRVMTPDLRERLENLRKK |
| | PENIPQPISNTSRANLNKLLTDYTEMKKAILHVYWEEFQKDPVGLMSRVAQ |
| | PAPKNIDQRKLIPVKDGNERLTSSGFACSQCCQPLYVYKLEQVNDKGKPHT |
| | NYFGRCNVSEHERLILLSPHKPEANDELVTYSLGKFGQRALDFYSIHVTRE |
| | SNHPVKPLEQIGGNSCASGPVGKALSDACMGAVASFLTKYQDIILEHQKVI |
| | KKNEKRLANLKDIASANGLAFPKITLPPQPHTKEGIEAYNNVVAQIVIWVN |
| | LNLWQKLKIGRDEAKPLQRLKGFPSFPLVERQANEVDWWDMVCNVKKLINE |
| | KKEDGKVFWQNLAGYKRQEALRPYLSSEEDRKKGKKFARYQFGDLLLHLEK |
| | KHGEDWGKVYDEAWERIDKKVEGLSKHIKLEEERRSEDAQSKAALTDWLRA |
| | KASFVIEGLKEADKDEFCRCELKLQKWYGDLRGKPFAIEAENSILDISGFS |
| | KQYNCAFIWQKDGVKKLNLYLIINYFKGGKLRFKKIKPEAFEANRFYTVIN |
| | KKSGEIVPMEVNFNFDDPNLIILPLAFGKRQGREFIWNDLLSLETGSLKLA |
| | NGRVIEKTLYNRRTRQDEPALFVALTFERREVLDSSNIKPMNLIGIDRGEN |
| | IPAVIALTDPEGCPLSRFKDSLGNPTHILRIGESYKEKQRTIQAKKEVEQR |
| | RAGGYSRKYASKAKNLADDMVRNTARDLLYYAVTQDAMLIFENLSRGFGRQ |
| | GKRTFMAERQYTRMEDWLTAKLAYEGLSKTYLSKTLAQYTSKTCSNCGFTI |
| | TSADYDRVLEKLKKTATGWMTTINGKELKVEGQITYYNRYKRQNVVKDLSV |
| | ELDRLSEESVNNDISSWTKGRSGEALSLLKKRFSHRPVQEKFVCLNCGFET |
| | HADEQAALNIARSWLFLRSQEYKKYQTNKTTGNTDKRAFVETWQSFYRKKL |
| | KEVWKPAV (SEQ ID NO: 118) |
| 280 | MQEIKRINKIRRRLVKDSNTKKAGKTGPMKTLLVRVMTPDLRERLENLRKK |
| | PENIPQPISNTSRANLNKLLTDYTEMKKAILHVYWEEFQKDPVGLMSRVAQ |
| | PAPKNIDQRKLIPVKDGNERLTSSGFACSQCCQPLYVYKLEQVNDKGKPHT |
| | NYFGRCNVSEHERLILLSPHKPEANDELVTYSLGKFGQRALDFYSIHVTRE |
| | SNHPVKPLEQIGGNSCASGPVGKALSDACMGAVASFLTKYQDIILEHQKVI |
| | KKNEKRLANLKDIASANGLAFPKITLPPQPHTKEGIEAYNNVVAQIVIWVN |
| | LNLWQKLKIGRDEAKPLQRLKGFPSFPLVERQANEVDWWDMVCNVKKLINE |
| | KKEDGKVFWQNLAGYKRQEALRPYLSSEEDRKKGKKFARYQFGDLLLHLEK |
| | KHGEDWGKVYDEAWERIDKKVEGLSKHIKLEEERRSEDAQSKAALTDWLRA |
| | KASFVIEGLKEADKDEFCRCELKLQKWYGDLRGKPFAIEAENSILDISGFS |
| | KQYNCAFIWQKDGVKKLNLYLIINYFKGGKLRFKKIKPEAFEANRFYTVIN |
| | KKSGEIVPMEVNFNFDDPNLIILPLAFGKRQGREFIWNDLLSLETGSLKLA |
| | NGRVIEKTLYNRRTRQDEPALFVALTFERREVLDSSNIKPMNLIGIDRGEN |
| | IPAVIALTDPEGCPLSRFKDSLGNPTHILRIGESYKEKQRTIQAKKEVEQR |
| | RAGGYSRKYASKAKNLADDMVRNTARDLLYYAVTQDAMLIFENLSRGFGRQ |
| | GKRTFMAERQYTRMEDWLTAKLAYEGLSKTYLSKTLAQYTSKTCSNCGFTI |
| | TSADYDRVLEKLKKTATGWMTTINGKELKVEGQITYYNRYKRQNVVKDLSV |
| | ELDRLSEESVNNDISSWTKGRSGEALSLLKKRFSHRPVQEKFVCLNCGFET |
| | HADEQAALNIARSWLFLRSQEYKKYQTNKTTGNTDKRAFVETWQSFYRKKL |
| | KEVWKPAV (SEQ ID NO: 119) |
| 285 | MQEIKRINKIRRRLVKDSNTKKAGKTGPMKTLLVRVMTPDLRERLENLRKK |
| | PENIPQPISNTSRANLNKLLTDYTEMKKAILHVYWEEFQKDPVGLMSRVAQ |
| | PAPKNIDQRKLIPVKDGNERLTSSGFACSQCCQPLYVYKLEQVNDKGKPHT |
| | NYFGRCNVSEHERLILLSPHKPEANDELVTYSLGKFGQRALDFYSIHVTRE |
| | SNHPVKPLEQIGGNSCASGPVGKALSDACMGAVASFLTKYQDIILEHQKVI |
| | KKNEKRLANLKDIASANGLAFPKITLPPQPHTKEGIEAYNNVVAQIVIWVN |
| | LNLWQKLKIGRDEAKPLQRLKGFPSFPLVERQANEVDWWDMVCNVKKLINE |
| | KKEDGKVFWQNLAGYKRQEALRPYLSSEEDRKKGKKFARYQFGDLLLHLEK |
| | KHGEDWGKVYDEAWERIDKKVEGLSKHIKLEEERRSEDAQSKAALTDWLRA |
| | KASFVIEGLKEADKDEFCRCELKLQKWYGDLRGKPFAIEAENSILDISGFS |
| | KQYNCAFIWQKDGVKKLNLYLIINYFKGGKLREKKIKPEAFEANRFYTVIN |
| | KKSGEIVPMEVNFNFDDPNLIILPLAFGKRQGREFIWNDLLSLETGSLKLA |
| | NGRVIEKTLYNRRTRQDEPALFVALTFERREVLDSSNIKPMNLIGIDRGEN |
| | IPAVIALTDPEGCPLSRFKDSLGNPTHILRIGESYKEKQRTIQAKKEVEQR |
| | RAGGYSRKYASKAKNLADDMVRNTARDLLYYAVTQDAMLIFENLSRGFGRQ |
| | GKRTFMAERQYTRMEDWLTAKLAYEGLSKTYLSKTLAQYTSKTCSNCGFTI |
| | TSADYDRVLEKLKKTATGWMTTINGKELKVEGQITYYNRYKRONVVKDLSV |
| | ELDRLSEESVNNDISSWTKGRSGEALSLLKKRFSHRPVQEKFVCLNCGFET |
| | HADEQAALNIARSWLFLRSQEYKKYQTNKTTGNTDKRAFVETWQSFYRKKL |
| | KEVWKPAV (SEQ ID NO: 120) |
| 286 | MQEIKRINKIRRRLVKDSNTKKAGKTGPMKTLLVRVMTPDLRERLENLRKK |
| | PENIPQPISNTSRANLNKLLTDYTEMKKAILHVYWEEFQKDPVGLMSRVAQ |
| | PAPKNIDQRKLIPVKDGNERLTSSGFACSQCCQPLYVYKLEQVNDKGKPHT |
| | NYFGRCNVSEHERLILLSPHKPEANDELVTYSLGKFGQRALDFYSIHVTRE |
| | SNHPVKPLEQIGGNSCASGPVGKALSDACMGAVASFLTKYQDIILEHQKVI |
| | KKNEKRLANLKDIASANGLAFPKITLPPQPHTKEGIEAYNNVVAQIVIWVN |
| | LNLWQKLKIGRDEAKPLQRLKGFPSFPLVERQANEVDWWDMVCNVKKLINE |
| | KKEDGKVFWQNLAGYKRQEALRPYLSSEEDRKKGKKFARYQFGDLLLHLEK |
| | KHGEDWGKVYDEAWERIDKKVEGLSKHIKLEEERRSEDAQSKAALTDWLRA |
| | KASFVIEGLKEADKDEFCRCELKLQKWYGDLRGKPFAIEAENSILDISGFS |
| | KQYNCAFIWQKDGVKKLNLYLIINYFKGGKLRFKKIKPEAFEANRFYTVIN |
| | KKSGEIVPMEVNFNFDDPNLIILPLAFGKRQGREFIWNDLLSLETGSLKLA |
| | NGRVIEKTLYNRRTRQDEPALFVALTFERREVLDSSNIKPMNLIGIDRGEN |
| | IPAVIALTDPEGCPLSRFKDSLGNPTHILRIGESYKEKQRTIQAKKEVEQR |
| | RAGGYSRKYASKAKNLADDMVRNTARDLLYYAVTQDAMLIFENLSRGFGRQ |
| | GKRTFMAERQYTRMEDWLTAKLAYEGLSKTYLSKTLAQYTSKTCSNCGFTI |
| | TSADYDRVLEKLKKTATGWMTTINGKELKVEGQITYYNRYKRQNVVKDLSV |
| | ELDRLSEESVNNDISSWTKGRSGEALSLLKKRFSHRPVQEKFVCLNCGFET |
| | HADEQAALNIARSWLFLRSQEYKKYQTNKTTGNTDKRAFVETWQSFYRKKL |
| | KEVWKPAV (SEQ ID NO: 121) |
| 287 | MQEIKRINKIRRRLVKDSNTKKAGKTGPMKTLLVRVMTPDLRERLENLRKK |
| | PENIPQPISNTSRANLNKLLTDYTEMKKAILHVYWEEFQKDPVGLMSRVAQ |
| | PAPKNIDQRKLIPVKDGNERLTSSGFACSQCCQPLYVYKLEQVNDKGKPHT |
| | NYFGRCNVSEHERLILLSPHKPEANDELVTYSLGKFGQRALDFYSIHVTRE |
| | SNHPVKPLEQIGGNSCASGPVGKALSDACMGAVASFLTKYQDIILEHQKVI |
| | KKNEKRLANLKDIASANGLAFPKITLPPQPHTKEGIEAYNNVVAQIVIWVN |
| | LNLWQKLKIGRDEAKPLQRLKGFPSFPLVERQANEVDWWDMVCNVKKLINE |
| | KKEDGKVFWQNLAGYKRQEALRPYLSSEEDRKKGKKFARYQFGDLLLHLEK |
| | KHGEDWGKVYDEAWERIDKKVEGLSKHIKLEEERRSEDAQSKAALTDWLRA |
| | KASFVIEGLKEADKDEFCRCELKLQKWYGDLRGKPFAIEAENSILDISGFS |
| | KQYNCAFIWQKDGVKKLNLYLIINYFKGGKLRFKKIKPEAFEANRFYTVIN |
| | KKSGEIVPMEVNFNFDDPNLIILPLAFGKRQGREFIWNDLLSLETGSLKLA |
| | NGRVIEKTLYNRRTRQDEPALFVALTFERREVLDSSNIKPMNLIGIDRGEN |
| | IPAVIALTDPEGCPLSRFKDSLGNPTHILRIGESYKEKQRTIQAKKEVEQR |
| | RAGGYSRKYASKAKNLADDMVRNTARDLLYYAVTQDAMLIFENLSRGFGRQ |
| | GKRTFMAERQYTRMEDWLTAKLAYEGLSKTYLSKTLAQYTSKTCSNCGFTI |
| | TSADYDRVLEKLKKTATGWMTTINGKELKVEGQITYYNRYKRQNVVKDLSV |
| | ELDRLSEESVNNDISSWTKGRSGEALSLLKKRFSHRPVQEKFVCLNCGFET |
| | HADEQAALNIARSWLFLRSQEYKKYQTNKTTGNTDKRAFVETWQSFYRKKL |
| | KEVWKPAV (SEQ ID NO: 122) |
| 288 | MQEIKRINKIRRRLVKDSNTKKAGKTGPMKTLLVRVMTPDLRERLENLRKK |
| | PENIPQPISNTSRANLNKLLTDYTEMKKAILHVYWEEFQKDPVGLMSRVAQ |
| | PAPKNIDQRKLIPVKDGNERLTMSSGFACSQCCQPLYVYKLEQVNDKGKPH |
| | TNYFGRCNVSEHERLILLSPHKPEANDELVTYSLGKFGQRALDFYSIHVTR |
| | ESNHPVKPLEQIGGNSCASGPVGKALSDACMGAVASFLTKYQDIILEHQKV |
| | IKKNEKRLANLKDIASANGLAFPKITLPPQPHTKEGIEAYNNVVAQIVIWV |
| | NLNLWQKLKIGRDEAKPLQRLKGFPSFPLVERQANEVDWWDMVCNVKKLIN |
| | EKKEDGKVFWQNLAGYKRQEALRPYLSSEEDRKKGKKFARYQFGDLLLHLE |
| | KKHGEDWGKVYDEAWERIDKKVEGLSKHIKLEEERRSEDAQSKAALTDWLR |
| | AKASFVIEGLKEADKDEFCRCELKLQKWYGDLRGKPFAIEAENSILDISGF |
| | SKQYNCAFIWQKDGVKKLNLYLIINYFKGGKLRFKKIKPEAFEANRFYTVI |
| | NKKSGEIVPMEVNFNFDDPNLIILPLAFGKRQGREFIWNDLLSLETGSLKL |
| | ANGRVIEKTLYNRRTRQDEPALFVALTFERREVLDSSNIKPMNLIGIDRGE |
| | NIPAVIALTDPEGCPLSRFKDSLGNPTHILRIGESYKEKQRTIQAKKEVEQ |
| | RRAGGYSRKYASKAKNLADDMVRNTARDLLYYAVTQDAMLIFENLSRGFGR |
| | QGKRTFMAERQYTRMEDWLTAKLAYEGLSKTYLSKTLAQYTSKTCSNCGFT |
| | ITSADYDRVLEKLKKTATGWMTTINGKELKVEGQITYYNRYKRQNVVKDLS |
| | VELDRLSEESVNNDISSWTKGRSGEALSLLKKRFSHRPVQEKFVCLNCGFE |
| | THADEQAALNIARSWLFLRSQEYKKYQTNKTTGNTDKRAFVETWQSFYRKK |
| | LKEVWKPAV (SEQ ID NO: 123) |
| 290 | MQEIKRINKIRRRLVKDSNTKKAGKTGPMKTLLVRVMTPDLRERLENLRKK |
| | PENIPQPISNTSRANLNKLLTDYTEMKKAILHVYWEEFQKDPVGLMSRVAQ |
| | PAPKNIDQRKLIPVKDGNERLTSSGFACSQCCQPLYVYKLEQVNDKGKPHT |
| | NYFGRCNVSEHERLILLSPHKPEANDELVTYSLGKFGQRALDFYSIHVTRE |
| | SNHPVKPLEQIGGNSCASGPVGKALSDACMGAVASFLTKYQDIILEHQKVI |
| | KKNEKRLANLKDIASANGLAFPKITLPPQPHTKEGIEAYNNVVAQIVIWVN |
| | LNLWQKLKIGRDEAKPLQRLKGFPSFPLVERQANEVDWWDMVCNVKKLINE |
| | KKEDGKVFWQNLAGYKRQEALRPYLSSEEDRKKGKKFARYQFGDLLLHLEK |
| | KHGEDWGKVYDEAWERIDKKVEGLSKHIKLEEERRSEDAQSKAALTDWLRA |
| | KASFVIEGLKEADKDEFCRCELKLQKWYGDLRGKPFAIEAENSILDISGFS |
| | KQYNCAFIWQKDGVKKLNLYLIINYFKGGKLRFKKIKPEAFEANRFYTVIN |
| | KKSGEIVPMEVNFNFDDPNLIILPLAFGKRQGREFIWNDLLSLETGSLKLA |
| | NGRVIEKTLYNRRTRQDEPALFVALTFERREVLDSSNIKPMNLIGIDRGEN |
| | IPAVIALTDPEGCPLSRFKDSLGNPTHILRIGESYKEKQRTIQAKKEVEQR |
| | RAGGYSRKYASKAKNLADDMVRNTARDLLYYAVTQDAMLIFENLSRGFGRQ |
| | GKRTFMAERQYTRMEDWLTAKLAYEGLSKTYLSKTLAQYTSKTCSNCGFTI |
| | TSADYDRVLEKLKKTATGWMTTINGKELKVEGQITYYNRYKRQNVVKDLSV |
| | ELDRLSEESVNNDISSWTKGRSGEALSLLKKRFSHRPVQEKFVCLNCGFET |
| | HADEQAALNIARSWLFLRSQEYKKYQTNKTTGNTDKRAFVETWQSFYRKKL |
| | KEVWKPAV (SEQ ID NO: 124) |
| 291 | MQEIKRINKIRRRLVKDSNTKKAGKTGPMKTLLVRVMTPDLRERLENLRKK |
| | PENIPQPISNTSRANLNKLLTDYTEMKKAILHVYWEEFQKDPVGLMSRVAQ |
| | PAPKNIDQRKLIPVKDGNERLTSSGFACSQCCQPLYVYKLEQVNDKGKPHT |
| | NYFGRCNVSEHERLILLSPHKPEANDELVTYSLGKFGQRALDFYSIHVTRE |
| | SNHPVKPLEQIGGNSCASGPVGKALSDACMGAVASFLTKYQDIILEHQKVI |
| | KKNEKRLANLKDIASANGLAFPKITLPPQPHTKEGIEAYNNVVAQIVIWVN |
| | LNLWQKLKIGRDEAKPLQRLKGFPSFPLVERQANEVDWWDMVCNVKKLINE |
| | KKEDGKVFWQNLAGYKRQEALRPYLSSEEDRKKGKKFARYQFGDLLLHLEK |
| | KHGEDWGKVYDEAWERIDKKVEGLSKHIKLEEERRSEDAQSKAALTDWLRA |
| | KASFVIEGLKEADKDEFCRCELKLQKWYGDLRGKPFAIEAENSILDISGFS |
| | KQYNCAFIWQKDGVKKLNLYLIINYFKGGKLRFKKIKPEAFEANRFYTVIN |
| | KKSGEIVPMEVNFNFDDPNLIILPLAFGKRQGREFIWNDLLSLETGSLKLA |
| | NGRVIEKTLYNRRTRQDEPALFVALTFERREVLDSSNIKPMNLIGIDRGEN |
| | IPAVIALTDPEGCPLSRFKDSLGNPTHILRIGESYKEKQRTIQAKKEVEQR |
| | RAGGYSRKYASKAKNLADDMVRNTARDLLYYAVTQDAMLIFENLSRGFGRQ |
| | GKRTFMAERQYTRMEDWLTAKLAYEGLSKTYLSKTLAQYTSKTCSNCGFTI |
| | TSADYDRVLEKLKKTATGWMTTINGKELKVEGQITYYNRYKRQNVVKDLSV |
| | ELDRLSEESVNNDISSWTKGRSGEALSLLKKRFSHRPVQEKFVCLNCGFET |
| | HADEQAALNIARSWLFLRSQEYKKYQTNKTTGNTDKRAFVETWQSFYRKKL |
| | KEVWKPAV (SEQ ID NO: 125) |
| 293 | MQEIKRINKIRRRLVKDSNTKKAGKTGPMKTLLVRVMTPDLRERLENLRKK |
| | PENIPQPISNTSRANLNKLLTDYTEMKKAILHVYWEEFQKDPVGLMSRVAQ |
| | PAPKNIDQRKLIPVKDGNERLTSSGFACSQCCQPLYVYKLEQVNDKGKPHT |
| | NYFGRCNVSEHERLILLSPHKPEANDELVTYSLGKFGQRALDFYSIHVTRE |
| | SNHPVKPLEQIGGNSCASGPVGKALSDACMGAVASFLTKYQDIILEHQKVI |
| | KKNEKRLANLKDIASANGLAFPKITLPPQPHTKEGIEAYNNVVAQIVIWVN |
| | LNLWQKLKIGRDEAKPLQRLKGFPSFPLVERQANEVDWWDMVCNVKKLINE |
| | KKEDGKVFWQNLAGYKRQEALRPYLSSEEDRKKGKKFARYQFGDLLLHLEK |
| | KHGEDWGKVYDEAWERIDKKVEGLSKHIKLEEERRSEDAQSKAALTDWLRA |
| | KASFVIEGLKEADKDEFCRCELKLQKWYGDLRGKPFAIEAENSILDISGFS |
| | KQYNCAFIWQKDGVKKLNLYLIINYFKGGKLRFKKIKPEAFEANRFYTVIN |
| | KKSGEIVPMEVNFNFDDPNLIILPLAFGKRQGREFIWNDLLSLETGSLKLA |
| | NGRVIEKTLYNRRTRQDEPALFVALTFERREVLDSSNIKPMNLIGIDRGEN |
| | IPAVIALTDPEGCPLSRFKDSLGNPTHILRIGESYKEKQRTIQAKKEVEQR |
| | RAGGYSRKYASKAKNLADDMVRNTARDLLYYAVTQDAMLIFENLSRGFGRQ |
| | GKRTFMAERQYTRMEDWLTAKLAYEGLSKTYLSKTLAQYTSKTCSNCGFTI |
| | TSADYDRVLEKLKKTATGWMTTINGKELKVEGQITYYNRYKRQNVVKDLSV |
| | ELDRLSEESVNNDISSWTKGRSGEALSLLKKRFSHRPVQEKFVCLNCGFET |
| | HADEQAALNIARSWLFLRSQEYKKYQTNKTTGNTDKRAFVETWQSFYRKKL |
| | KEVWKPAV (SEQ ID NO: 126) |
| 300 | MQEIKRINKIRRRLVKDSNTKKAGKTGPMKTLLVRVMTPDLRERLENLRKK |
| | PENIPQPISNTSRANLNKLLTDYTEMKKAILHVYWEEFQKDPVGLMSRVAQ |
| | PAPKNIDQRKLIPVKDGNERLTSSGFACSQCCQPLYVYKLEQVNDKGKPHT |
| | NYFGRCNVSEHERLILLSPHKPEANDELVTYSLGKFGQRALDFYSIHVTRE |
| | SNHPVKPLEQIGGNSCASGPVGKALSDACMGAVASFLTKYQDIILEHQKVI |
| | KKNEKRLANLKDIASANGLAFPKITLPPQPHTKEGIEAYNNVVAQIVIWVN |
| | LNLWQKLKIGRDEAKPLQRLKGFPSFPLVERQANEVDWWDMVCNVKKLINE |
| | KKEDGKVFWQNLAGYKRQEALRPYLSSEEDRKKGKKFARYQFGDLLLHLEK |
| | KHGEDWGKVYDEAWERIDKKVEGLSKHIKLEEERRSEDAQSKAALTDWLRA |
| | KASFVIEGLKEADKDEFCRCELKLQKWYGDLRGKPFAIEAENSILDISGFS |
| | KQYNCAFIWQKDGVKKLNLYLIINYFKGGKLREKKIKPEAFEANRFYTVIN |
| | KKSGEIVPMEVNFNFDDPNLIILPLAFGKRQGREFIWNDLLSLETGSLKLA |
| | NGRVIEKTLYNRRTRQDEPALFVALTFERREVLDSSNIKPMNLIGIDRGEN |
| | IPAVIALTDPEGCPLSRFKDSLGNPTHILRIGESYKEKQRTIQAKKEVEQR |
| | RAGGYSRKYASKAKNLADDMVRNTARDLLYYAVTQDAMLIFENLSRGFGRQ |
| | GKRTFMAERQYTRMEDWLTAKLAYEGLSKTYLSKTLAQYTSKTCSNCGFTI |
| | TSADYDRVLEKLKKTATGWMTTINGKELKVEGQITYYNRYKRQNVVKDLSV |
| | ELDRLSEESVNNDISSWTKGRSGEALSLLKKRFSHRPVQEKFVCLNCGFET |
| | HADEQAALNIARSWLFLRSQEYKKYQTNKTTGNTDKRAFVETWQSFYRKKL |
| | KEVWKPAV (SEQ ID NO: 127) |
| 492 | MQEIKRINKIRRRLVKDSNTKKAGKTGPMKTLLVRVMTPDLRERLENLRKK |
| | PENIPQPISNTSRANLNKLLTDYTEMKKAILHVYWEEFQKDPVGLMSRVAQ |
| | PAPKNIDQRKLIPVKDGNERLTSSGFACSQCCQPLYVYKLEQVNDKGKPHT |
| | NYFGRCNVSEHERLILLSPHKPEANDELVTYSLGKFGQRALDFYSIHVTRE |
| | SNHPVKPLEQIGGNSCASGPVGKALSDACMGAVASFLTKYQDIILEHQKVI |
| | KKNEKRLANLKDIASANGLAFPKITLPPQPHTKEGIEAYNNVVAQIVIWVN |
| | LNLWQKLKIGRDEAKPLQRLKGFPSFPLVERQANEVDWWDMVCNVKKLINE |
| | KKEDGKVFWQNLAGYKRQEALRPYLSSEEDRKKGKKFARYQFGDLLLHLEK |
| | KHGEDWGKVYDEAWERIDKKVEGLSKHIKLEEERRSEDAQSKAALTDWLRA |
| | KASFVIEGLKEADKDEFCRCELKLQKWYGDLRGKPFAIEAENSILDISGFS |
| | KQYNCAFIWQKDGVKKLNLYLIINYFKGGKLRFKKIKPEAFEANRFYTVIN |
| | KKSGEIVPMEVNFNFDDPNLIILPLAFGKRQGREFIWNDLLSLETGSLKLA |
| | NGRVIEKTLYNRRTRQDEPALFVALTFERREVLDSSNIKPMNLIGIDRGEN |
| | IPAVIALTDPEGCPLSRFKDSLGNPTHILRIGESYKEKQRTIQAKKEVEQR |
| | RAGGYSRKYASKAKNLADDMVRNTARDLLYYAVTQDAMLIFENLSRGFGRQ |
| | GKRTFMAERQYTRMEDWLTAKLAYEGLSKTYLSKTLAQYTSKTCSNCGFTI |
| | TSADYDRVLEKLKKTATGWMTTINGKELKVEGQITYYNRYKRQNVVKDLSV |
| | ELDRLSEESVNNDISSWTKGRSGEALSLLKKRFSHRPVQEKFVCLNCGFET |
| | HADEQAALNIARSWLFLRSQEYKKYQTNKTTGNTDKRAFVETWQSFYRKKL |
| | KEVWKPAV (SEQ ID NO: 128) |
| 493 | MQEIKRINKIRRRLVKDSNTKKAGKTGPMKTLLVRVMTPDLRERLENLRKK |
| | PENIPQPISNTSRANLNKLLTDYTEMKKAILHVYWEEFQKDPVGLMSRVAQ |
| | PAPKNIDQRKLIPVKDGNERLTSSGFACSQCCQPLYVYKLEQVNDKGKPHT |
| | NYFGRCNVSEHERLILLSPHKPEANDELVTYSLGKFGQRALDFYSIHVTRE |
| | SNHPVKPLEQIGGNSCASGPVGKALSDACMGAVASFLTKYQDIILEHQKVI |
| | KKNEKRLANLKDIASANGLAFPKITLPPQPHTKEGIEAYNNVVAQIVIWVN |
| | LNLWQKLKIGRDEAKPLQRLKGFPSFPLVERQANEVDWWDMVCNVKKLINE |
| | KKEDGKVFWQNLAGYKRQEALRPYLSSEEDRKKGKKFARYQFGDLLLHLEK |
| | KHGEDWGKVYDEAWERIDKKVEGLSKHIKLEEERRSEDAQSKAALTDWLRA |
| | KASFVIEGLKEADKDEFCRCELKLQKWYGDLRGKPFAIEAENSILDISGFS |
| | KQYNCAFIWQKDGVKKLNLYLIINYFKGGKLREKKIKPEAFEANRFYTVIN |
| | KKSGEIVPMEVNFNFDDPNLIILPLAFGKRQGREFIWNDLLSLETGSLKLA |
| | NGRVIEKTLYNRRTRQDEPALFVALTFERREVLDSSNIKPMNLIGIDRGEN |
| | IPAVIALTDPEGCPLSRFKDSLGNPTHILRIGESYKEKQRTIQAKKEVEQR |
| | RAGGYSRKYASKAKNLADDMVRNTARDLLYYAVTQDAMLIFENLSRGFGRQ |
| | GKRTFMAERQYTRMEDWLTAKLAYEGLSKTYLSKTLAQYTSKTCSNCGFTI |
| | TSADYDRVLEKLKKTATGWMTTINGKELKVEGQITYYNRYKRQNVVKDLSV |
| | ELDRLSEESVNNDISSWTKGRSGEALSLLKKRFSHRPVQEKFVCLNCGFET |
| | HADEQAALNIARSWLFLRSQEYKKYQTNKTTGNTDKRAFVETWQSFYRKKL |
| | KEVWKPAV (SEQ ID NO: 129) |
| 387: | QEIKRINKIRRRLVKDSNTKKAGKTGPMKTLLVRVMTPDLRERLENLRKKP |
| NT SB swap | ENIPQPISNTSRANLNKLLTDYTEMKKAILHVYWEEFQKDPVGLMSRVAQP |
| from SEQ ID | ASKKIDQNKLKPEMDEKGNLTTAGFACSQCGQPLFVYKLEQVSEKGKAYTN |
| NO: 1 | YFGRCNVAEHEKLILLAQLKPEKDSDEAVTYSLGKFGQRALDFYSIHVTRE |
| | SNHPVKPLEQIGGNSCASGPVGKALSDACMGAVASFLTKYQDIILEHQKVI |
| | KKNEKRLANLKDIASANGLAFPKITLPPQPHTKEGIEAYNNVVAQIVIWVN |
| | LNLWQKLKIGRDEAKPLQRLKGFPSFPLVERQANEVDWWDMVCNVKKLINE |
| | KKEDGKVFWQNLAGYKRQEALRPYLSSEEDRKKGKKFARYQFGDLLLHLEK |
| | KHGEDWGKVYDEAWERIDKKVEGLSKHIKLEEERRSEDAQSKAALTDWLRA |
| | KASFVIEGLKEADKDEFCRCELKLQKWYGDLRGKPFAIEAENSILDISGFS |
| | KQYNCAFIWQKDGVKKLNLYLIINYFKGGKLRFKKIKPEAFEANRFYTVIN |
| | KKSGEIVPMEVNFNFDDPNLIILPLAFGKRQGREFIWNDLLSLETGSLKLA |
| | NGRVIEKTLYNRRTRQDEPALFVALTFERREVLDSSNIKPMNLIGIDRGEN |
| | IPAVIALTDPEGCPLSRFKDSLGNPTHILRIGESYKEKQRTIQAKKEVEQR |
| | RAGGYSRKYASKAKNLADDMVRNTARDLLYYAVTQDAMLIFENLSRGFGRQ |
| | GKRTFMAERQYTRMEDWLTAKLAYEGLSKTYLSKTLAQYTSKTCSNCGFTI |
| | TSADYDRVLEKLKKTATGWMTTINGKELKVEGQITYYNRYKRQNVVKDLSV |
| | ELDRLSEESVNNDISSWTKGRSGEALSLLKKRFSHRPVQEKFVCLNCGFET |
| | HADEQAALNIARSWLFLRSQEYKKYQTNKTTGNTDKRAFVETWQSFYRKKL |
| | KEVWKPAV (SEQ ID NO: 130) |
| 395: | QEIKRINKIRRRLVKDSNTKKAGKTGPMKTLLVRVMTPDLRERLENLRKKP |
| Helical 1B | ENIPQPISNTSRANLNKLLTDYTEMKKAILHVYWEEFQKDPVGLMSRVAQP |
| swap from | APKNIDQRKLIPVKDGNERLTSSGFACSQCCQPLYVYKLEQVNDKGKPHTN |
| SEQ ID | YFGRCNVSEHERLILLSPHKPEANDELVTYSLGKFGQRALDFYSIHVTKES |
| NO: 1 | THPVKPLAQIAGNRYASGPVGKALSDACMGTIASFLSKYQDIIIEHQKVVK |
| | GNQKRLESLRELAGKENLEYPSVTLPPQPHTKEGVDAYNEVIARVRMWVNL |
| | NLWQKLKLSRDDAKPLLRLKGFPSFPLVERQANEVDWWDMVCNVKKLINEK |
| | KEDGKVFWQNLAGYKRQEALRPYLSSEEDRKKGKKFARYQFGDLLLHLEKK |
| | HGEDWGKVYDEAWERIDKKVEGLSKHIKLEEERRSEDAQSKAALTDWLRAK |
| | ASFVIEGLKEADKDEFCRCELKLQKWYGDLRGKPFAIEAENSILDISGFSK |
| | QYNCAFIWQKDGVKKLNLYLIINYFKGGKLREKKIKPEAFEANRFYTVINK |
| | KSGEIVPMEVNFNFDDPNLIILPLAFGKRQGREFIWNDLLSLETGSLKLAN |
| | GRVIEKTLYNRRTRQDEPALFVALTFERREVLDSSNIKPMNLIGIDRGENI |
| | PAVIALTDPEGCPLSRFKDSLGNPTHILRIGESYKEKQRTIQAKKEVEQRR |
| | AGGYSRKYASKAKNLADDMVRNTARDLLYYAVTQDAMLIFENLSRGFGRQG |
| | KRTFMAERQYTRMEDWLTAKLAYEGLSKTYLSKTLAQYTSKTCSNCGFTIT |
| | SADYDRVLEKLKKTATGWMTTINGKELKVEGQITYYNRYKRQNVVKDLSVE |
| | LDRLSEESVNNDISSWTKGRSGEALSLLKKRFSHRPVQEKFVCLNCGFETH |
| | ADEQAALNIARSWLFLRSQEYKKYQTNKTTGNTDKRAFVETWQSFYRKKLK |
| | EVWKPAV (SEQ ID NO: 131) |
| 485: | QEIKRINKIRRRLVKDSNTKKAGKTGPMKTLLVRVMTPDLRERLENLRKKP |
| Helical 1B | ENIPQPISNTSRANLNKLLTDYTEMKKAILHVYWEEFQKDPVGLMSRVAQP |
| swap from | APKNIDQRKLIPVKDGNERLTSSGFACSQCCQPLYVYKLEQVNDKGKPHTN |
| SEQ ID | YFGRCNVSEHERLILLSPHKPEANDELVTYSLGKFGQRALDFYSIHVTKES |
| NO: 1 | THPVKPLAQIAGNRYASGPVGKALSDACMGTIASFLSKYQDIIIEHQKVVK |
| | GNQKRLESLRELAGKENLEYPSVTLPPQPHTKEGVDAYNEVIARVRMWVNL |
| | NLWQKLKLSRDDAKPLLRLKGFPSFPLVERQANEVDWWDMVCNVKKLINEK |
| | KEDGKVFWQNLAGYKRQEALRPYLSSEEDRKKGKKFARYQLGDLLLHLEKK |
| | HGEDWGKVYDEAWERIDKKVEGLSKHIKLEEERRSEDAQSKAALTDWLRAK |
| | ASFVIEGLKEADKDEFCRCELKLQKWYGDLRGKPFAIEAENSILDISGFSK |
| | QYNCAFIWQKDGVKKLNLYLIINYFKGGKLRFKKIKPEAFEANRFYTVINK |
| | KSGEIVPMEVNFNFDDPNLIILPLAFGKRQGREFIWNDLLSLETGSLKLAN |
| | GRVIEKTLYNRRTRQDEPALFVALTFERREVLDSSNIKPMNLIGVDRGENI |
| | PAVIALTDPEGCPLSRFKDSLGNPTHILRIGESYKEKQRTIQAKKEVEQRR |
| | AGGYSRKYASKAKNLADDMVRNTARDLLYYAVTQDAMLIFENLSRGFGRQG |
| | KRTFMAERQYTRMEDWLTAKLAYEGLSKTYLSKTLAQYTSKTCSNCGFTIT |
| | SADYDRVLEKLKKTATGWMTTINGKELKVEGQITYYNRRKRQNVVKDLSVE |
| | LDRLSEESVNNDISSWTKGRSGEALSLLKKRFSHRPVQEKFVCLNCGFETH |
| | ADEQAALNIARSWLFLRSQEYKKYQTNKTTGNTDKRAFVETWQSFYRKKLK |
| | EVWKPAV (SEQ ID NO: 132) |
| 486: | QEIKRINKIRRRLVKDSNTKKAGKTGPMKTLLVRVMTPDLRERLENLRKKP |
| Helical 1B | ENIPQPISNTSRANLNKLLTDYTEMKKAILHVYWEEFQKDPVGLMSRVAQP |
| swap from | APKNIDQRKLIPVKDGNERLTSSGFACSQCCQPLYVYKLEQVNDKGKPHTN |
| SEQ ID | YFGRCNVSEHERLILLSPHKPEANDELVTYSLGKFGQRALDFYSIHVTKES |
| NO: 1 | THPVKPLAQIAGNRYASGPVGKALSDACMGTIASFLSKYQDIIIEHQKVVK |
| | GNQKRLESLRELAGKENLEYPSVTLPPQPHTKEGVDAYNEVIARVRMWVNL |
| | NLWQKLKLSRDDAKPLLRLKGFPSFPLVERQANEVDWWDMVCNVKKLINEK |
| | KEDGKVFWQNLAGYKRQEALRPYLSSEEDRKKGKKFARYQLGDLLKHLEKK |
| | HGEDWGKVYDEAWERIDKKVEGLSKHIKLEEERRSEDAQSKAALTDWLRAK |
| | ASFVIEGLKEADKDEFCRCELKLQKWYGDLRGKPFAIEAENSILDISGFSK |
| | QYNCAFIWQKDGVKKLNLYLIINYFKGGKLRFKKIKPEAFEANRFYTVINK |
| | KSGEIVPMEVNFNFDDPNLIILPLAFGKRQGREFIWNDLLSLETGSLKLAN |
| | GRVIEKTLYNRRTRQDEPALFVALTFERREVLDSSNIKPMNLIGVDRGENI |
| | PAVIALTDPEGCPLSRFKDSLGNPTHILRIGESYKEKQRTIQAKKEVEQRR |
| | AGGYSRKYASKAKNLADDMVRNTARDLLYYAVTQDAMLIFENLSRGFGRQG |
| | KRTFMAERQYTRMEDWLTAKLAYEGLSKTYLSKTLAQYTSKTCSNCGFTIT |
| | SADYDRVLEKLKKTATGWMTTINGKELKVEGQITYYNRRKRQNVVKDLSVE |
| | LDRLSEESVNNDISSWTKGRSGEALSLLKKRFSHRPVQEKFVCLNCGFETH |
| | ADEQAALNIARSWLFLRSQEYKKYQTNKTTGNTDKRAFVETWQSFYRKKLK |
| | EVWKPAV (SEQ ID NO: 133) |
| 487: | QEIKRINKIRRRLVKDSNTKKAGKTGPMKTLLVRVMTPDLRERLENLRKKP |
| Helical 1B | ENIPQPISNTSRANLNKLLTDYTEMKKAILHVYWEEFQKDPVGLMSRVAQP |
| swap from | APKNIDQRKLIPVKDGNERLTSSGFACSQCCQPLYVYKLEQVNDKGKPHTN |
| SEQ ID | YFGRCNVSEHERLILLSPHKPEANDELVTYSLGKFGQRALDFYSIHVTKES |
| NO: 1 | THPVKPLAQIAGNRYASGPVGKALSDACMGTIASFLSKYQDIIIEHQKVVK |
| | GNQKRLESLRELAGKENLEYPSVTLPPQPHTKEGVDAYNEVIARVRMWVNL |
| | NLWQKLKLSRDDAKPLLRLKGFPSFPLVERQANEVDWWDMVCNVKKLINEK |
| | KEDGKVFWQNLAGYKRQEALRPYLSSEEDRKKGKKFARYQLGDLLLHLEKK |
| | HGEDWGKVYDEAWERIDKKVEGLSKHIKLEEERRSEDAQSKAALTDWLRAK |
| | ASFVIEGLKEADKDEFCRCELKLQKWYGDLRGKPFAIEAENSILDISGFSK |
| | QYNCAFIWQKDGVKKLNLYLIINYFKGGKLRFKKIKPEAFEANRFYTVINK |
| | KSGEIVPMEVNFNFDDPNLIILPLAFGKRQGREFIWNDLLSLETGSLKLAN |
| | GRVIEKTLYNRRTRQDEPALFVALTFERREVLDSSNIKPMNLIGVDRGENI |
| | PAVIALTDPEGCPLSRFKDSLGNPTHILRIGESYKEKQRTIQAKKEVEQRR |
| | AGGYSRKYASKAKNLADDMVRNTARDLLYYAVTQDAMLIFENLSRGFGRQG |
| | KRTFMAERQYTRMEDWLTAKLAYEGLSKTYLSKTLAQYTSKTCSNCGFTIT |
| | SADYDRVLEKLKKTATGWMTTINGKELKVEGQITYYNRYKRQNVVKDLSVE |
| | LDRLSEESVNNDISSWTKGRSGEALSLLKKRFSHRPVQEKFVCLNCGFETH |
| | ADEQAALNIARSWLFLRSQEYKKYQTNKTTGNTDKRAFVETWQSFYRKKLK |
| | EVWKPAV (SEQ ID NO: 134) |
| 488: | QEIKRINKIRRRLVKDSNTKKAGKTGPMKTLLVRVMTPDLRERLENLRKKP |
| NTSB and | ENIPQPISNTSRANLNKLLTDYTEMKKAILHVYWEEFQKDPVGLMSRVAQP |
| Helical 1B | ASKKIDQNKLKPEMDEKGNLTTAGFACSQCGQPLFVYKLEQVSEKGKAYTN |
| swap from | YFGRCNVAEHEKLILLAQLKPEKDSDEAVTYSLGKFGQRALDFYSIHVTKE |
| SEQ ID | STHPVKPLAQIAGNRYASGPVGKALSDACMGTIASFLSKYQDIIIEHQKVV |
| NO: 1 | KGNQKRLESLRELAGKENLEYPSVTLPPQPHTKEGVDAYNEVIARVRMWVN |
| | LNLWQKLKLSRDDAKPLLRLKGFPSFPLVERQANEVDWWDMVCNVKKLINE |
| | KKEDGKVFWQNLAGYKRQEALRPYLSSEEDRKKGKKFARYQFGDLLLHLEK |
| | KHGEDWGKVYDEAWERIDKKVEGLSKHIKLEEERRSEDAQSKAALTDWLRA |
| | KASFVIEGLKEADKDEFCRCELKLQKWYGDLRGKPFAIEAENSILDISGFS |
| | KQYNCAFIWQKDGVKKLNLYLIINYFKGGKLRFKKIKPEAFEANRFYTVIN |
| | KKSGEIVPMEVNFNFDDPNLIILPLAFGKRQGREFIWNDLLSLETGSLKLA |
| | NGRVIEKTLYNRRTRQDEPALFVALTFERREVLDSSNIKPMNLIGIDRGEN |
| | IPAVIALTDPEGCPLSRFKDSLGNPTHILRIGESYKEKQRTIQAKKEVEQR |
| | RAGGYSRKYASKAKNLADDMVRNTARDLLYYAVTQDAMLIFENLSRGFGRQ |
| | GKRTFMAERQYTRMEDWLTAKLAYEGLSKTYLSKTLAQYTSKTCSNCGFTI |
| | TSADYDRVLEKLKKTATGWMTTINGKELKVEGQITYYNRYKRQNVVKDLSV |
| | ELDRLSEESVNNDISSWTKGRSGEALSLLKKRFSHRPVQEKFVCLNCGFET |
| | HADEQAALNIARSWLFLRSQEYKKYQTNKTTGNTDKRAFVETWQSFYRKKL |
| | KEVWKPAV (SEQ ID NO: 135) |
| 489: | QEIKRINKIRRRLVKDSNTKKAGKTGPMKTLLVRVMTPDLRERLENLRKKP |
| NTSB and | ENIPQPISNTSRANLNKLLTDYTEMKKAILHVYWEEFQKDPVGLMSRVAQP |
| Helical 1B | ASKKIDQNKLKPEMDEKGNLTTAGFACSQCGQPLFVYKLEQVSEKGKAYTN |
| swap from | YFGRCNVAEHEKLILLAQLKPEKDSDEAVTYSLGKFGQRALDFYSIHVTKE |
| SEQ ID | STHPVKPLAQIAGNRYASGPVGKALSDACMGTIASFLSKYQDIIIEHQKVV |
| NO: 1 | KGNQKRLESLRELAGKENLEYPSVTLPPQPHTKEGVDAYNEVIARVRMWVN |
| | LNLWQKLKLSRDDAKPLLRLKGFPSFPLVERQANEVDWWDMVCNVKKLINE |
| | KKEDGKVFWQNLAGYKRQEALRPYLSSEEDRKKGKKFARYQLGDLLLHLEK |
| | KHGEDWGKVYDEAWERIDKKVEGLSKHIKLEEERRSEDAQSKAALTDWLRA |
| | KASFVIEGLKEADKDEFCRCELKLQKWYGDLRGKPFAIEAENSILDISGFS |
| | KQYNCAFIWQKDGVKKLNLYLIINYFKGGKLRFKKIKPEAFEANRFYTVIN |
| | KKSGEIVPMEVNFNFDDPNLIILPLAFGKRQGREFIWNDLLSLETGSLKLA |
| | NGRVIEKTLYNRRTRQDEPALFVALTFERREVLDSSNIKPMNLIGVDRGEN |
| | IPAVIALTDPEGCPLSRFKDSLGNPTHILRIGESYKEKQRTIQAKKEVEQR |
| | RAGGYSRKYASKAKNLADDMVRNTARDLLYYAVTQDAMLIFENLSRGFGRQ |
| | GKRTFMAERQYTRMEDWLTAKLAYEGLSKTYLSKTLAQYTSKTCSNCGFTI |
| | TSADYDRVLEKLKKTATGWMTTINGKELKVEGQITYYNRRKRQNVVKDLSV |
| | ELDRLSEESVNNDISSWTKGRSGEALSLLKKRFSHRPVQEKFVCLNCGFET |
| | HADEQAALNIARSWLFLRSQEYKKYQTNKTTGNTDKRAFVETWQSFYRKKL |
| | KEVWKPAV (SEQ ID NO: 136) |
| 490: | QEIKRINKIRRRLVKDSNTKKAGKTGPMKTLLVRVMTPDLRERLENLRKKP |
| NTSB and | ENIPQPISNTSRANLNKLLTDYTEMKKAILHVYWEEFQKDPVGLMSRVAQP |
| Helical 1B | ASKKIDQNKLKPEMDEKGNLTTAGFACSQCGQPLFVYKLEQVSEKGKAYTN |
| swap from | YFGRCNVAEHEKLILLAQLKPEKDSDEAVTYSLGKFGQRALDFYSIHVTKE |
| SEQ ID | STHPVKPLAQIAGNRYASGPVGKALSDACMGTIASFLSKYQDIIIEHQKVV |
| NO: 1 | KGNQKRLESLRELAGKENLEYPSVTLPPQPHTKEGVDAYNEVIARVRMWVN |
| | LNLWQKLKLSRDDAKPLLRLKGFPSFPLVERQANEVDWWDMVCNVKKLINE |
| | KKEDGKVFWQNLAGYKRQEALRPYLSSEEDRKKGKKFARYQLGDLLKHLEK |
| | KHGEDWGKVYDEAWERIDKKVEGLSKHIKLEEERRSEDAQSKAALTDWLRA |
| | KASFVIEGLKEADKDEFCRCELKLQKWYGDLRGKPFAIEAENSILDISGFS |
| | KQYNCAFIWQKDGVKKLNLYLIINYFKGGKLRFKKIKPEAFEANRFYTVIN |
| | KKSGEIVPMEVNFNFDDPNLIILPLAFGKRQGREFIWNDLLSLETGSLKLA |
| | NGRVIEKTLYNRRTRQDEPALFVALTFERREVLDSSNIKPMNLIGVDRGEN |
| | IPAVIALTDPEGCPLSRFKDSLGNPTHILRIGESYKEKQRTIQAKKEVEQR |
| | RAGGYSRKYASKAKNLADDMVRNTARDLLYYAVTQDAMLIFENLSRGFGRQ |
| | GKRTFMAERQYTRMEDWLTAKLAYEGLSKTYLSKTLAQYTSKTCSNCGFTI |
| | TSADYDRVLEKLKKTATGWMTTINGKELKVEGQITYYNRRKRQNVVKDLSV |
| | ELDRLSEESVNNDISSWTKGRSGEALSLLKKRFSHRPVQEKFVCLNCGFET |
| | HADEQAALNIARSWLFLRSQEYKKYQTNKTTGNTDKRAFVETWQSFYRKKL |
| | KEVWKPAV (SEQ ID NO: 137) |
| 491: | QEIKRINKIRRRLVKDSNTKKAGKTGPMKTLLVRVMTPDLRERLENLRKKP |
| NTSB and | ENIPQPISNTSRANLNKLLTDYTEMKKAILHVYWEEFQKDPVGLMSRVAQP |
| Helical 1B | ASKKIDQNKLKPEMDEKGNLTTAGFACSQCGQPLFVYKLEQVSEKGKAYTN |
| swap from | YFGRCNVAEHEKLILLAQLKPEKDSDEAVTYSLGKFGQRALDFYSIHVTKE |
| SEQ ID | STHPVKPLAQIAGNRYASGPVGKALSDACMGTIASFLSKYQDIIIEHQKVV |
| NO: 1 | KGNQKRLESLRELAGKENLEYPSVTLPPQPHTKEGVDAYNEVIARVRMWVN |
| | LNLWQKLKLSRDDAKPLLRLKGFPSFPLVERQANEVDWWDMVCNVKKLINE |
| | KKEDGKVFWQNLAGYKRQEALRPYLSSEEDRKKGKKFARYQLGDLLLHLEK |
| | KHGEDWGKVYDEAWERIDKKVEGLSKHIKLEEERRSEDAQSKAALTDWLRA |
| | KASFVIEGLKEADKDEFCRCELKLQKWYGDLRGKPFAIEAENSILDISGFS |
| | KQYNCAFIWQKDGVKKLNLYLIINYFKGGKLREKKIKPEAFEANRFYTVIN |
| | KKSGEIVPMEVNFNFDDPNLIILPLAFGKRQGREFIWNDLLSLETGSLKLA |
| | NGRVIEKTLYNRRTRQDEPALFVALTFERREVLDSSNIKPMNLIGVDRGEN |
| | IPAVIALTDPEGCPLSRFKDSLGNPTHILRIGESYKEKQRTIQAKKEVEQR |
| | RAGGYSRKYASKAKNLADDMVRNTARDLLYYAVTQDAMLIFENLSRGFGRQ |
| | GKRTFMAERQYTRMEDWLTAKLAYEGLSKTYLSKTLAQYTSKTCSNCGFTI |
| | TSADYDRVLEKLKKTATGWMTTINGKELKVEGQITYYNRYKRQNVVKDLSV |
| | ELDRLSEESVNNDISSWTKGRSGEALSLLKKRFSHRPVQEKFVCLNCGFET |
| | HADEQAALNIARSWLFLRSQEYKKYQTNKTTGNTDKRAFVETWQSFYRKKL |
| | KEVWKPAV (SEQ ID NO: 138) |
| 494: | QEIKRINKIRRRLVKDSNTKKAGKTGPMKTLLVRVMTPDLRERLENLRKKP |
| NT SB swap | ENIPQPISNTSRANLNKLLTDYTEMKKAILHVYWEEFQKDPVGLMSRVAQP |
| from SEQ ID | ASKKIDQNKLKPEMDEKGNLTTAGFACSQCGQPLFVYKLEQVSEKGKAYTN |
| NO: 1 | YFGRCNVAEHEKLILLAQLKPEKDSDEAVTYSLGKFGQRALDFYSIHVTRE |
| | SNHPVKPLEQIGGNSCASGPVGKALSDACMGAVASFLTKYQDIILEHQKVI |
| | KKNEKRLANLKDIASANGLAFPKITLPPQPHTKEGIEAYNNVVAQIVIWVN |
| | LNLWQKLKIGRDEAKPLQRLKGFPSFPLVERQANEVDWWDMVCNVKKLINE |
| | KKEDGKVFWQNLAGYKRQEALRPYLSSEEDRKKGKKFARYQLGDLLLHLEK |
| | KHGEDWGKVYDEAWERIDKKVEGLSKHIKLEEERRSEDAQSKAALTDWLRA |
| | KASFVIEGLKEADKDEFCRCELKLQKWYGDLRGKPFAIEAENSILDISGFS |
| | KQYNCAFIWQKDGVKKLNLYLIINYFKGGKLRFKKIKPEAFEANRFYTVIN |
| | KKSGEIVPMEVNFNFDDPNLIILPLAFGKRQGREFIWNDLLSLETGSLKLA |
| | NGRVIEKTLYNRRTRQDEPALFVALTFERREVLDSSNIKPMNLIGVDRGEN |
| | IPAVIALTDPEGCPLSRFKDSLGNPTHILRIGESYKEKQRTIQAKKEVEQR |
| | RAGGYSRKYASKAKNLADDMVRNTARDLLYYAVTQDAMLIFENLSRGFGRQ |
| | GKRTFMAERQYTRMEDWLTAKLAYEGLSKTYLSKTLAQYTSKTCSNCGFTI |
| | TSADYDRVLEKLKKTATGWMTTINGKELKVEGQITYYNRYKRQNVVKDLSV |
| | ELDRLSEESVNNDISSWTKGRSGEALSLLKKRFSHRPVQEKFVCLNCGFET |
| | HADEQAALNIARSWLFLRSQEYKKYQTNKTTGNTDKRAFVETWQSFYRKKL |
| | KEVWKPAV (SEQ ID NO: 139) |
| 328: S867G | MQEIKRINKIRRRLVKDSNTKKAGKTGPMKTLLVRVMTPDLRERLENLRKK |
| | PENIPQPISNTSRANLNKLLTDYTEMKKAILHVYWEEFQKDPVGLMSRVAQ |
| | PAPKNIDQRKLIPVKDGNERLTSSGFACSQCCQPLYVYKLEQVNDKGKPHT |
| | NYFGRCNVSEHERLILLSPHKPEANDELVTYSLGKFGQRALDFYSIHVTRE |
| | SNHPVKPLEQIGGNSCASGPVGKALSDACMGAVASFLTKYQDIILEHQKVI |
| | KKNEKRLANLKDIASANGLAFPKITLPPQPHTKEGIEAYNNVVAQIVIWVN |
| | LNLWQKLKIGRDEAKPLQRLKGFPSFPLVERQANEVDWWDMVCNVKKLINE |
| | KKEDGKVFWQNLAGYKRQEALLPYLSSEEDRKKGKKFARYQFGDLLLHLEK |
| | KHGEDWGKVYDEAWERIDKKVEGLSKHIKLEEERRSEDAQSKAALTDWLRA |
| | KASFVIEGLKEADKDEFCRCELKLQKWYGDLRGKPFAIEAENSILDISGFS |
| | KQYNCAFIWQKDGVKKLNLYLIINYFKGGKLRFKKIKPEAFEANRFYTVIN |
| | KKSGEIVPMEVNFNFDDPNLIILPLAFGKRQGREFIWNDLLSLETGSLKLA |
| | NGRVIEKTLYNRRTRQDEPALFVALTFERREVLDSSNIKPMNLIGIDRGEN |
| | IPAVIALTDPEGCPLSRFKDSLGNPTHILRIGESYKEKQRTIQAAKEVEQR |
| | RAGGYSRKYASKAKNLADDMVRNTARDLLYYAVTQDAMLIFENLSRGFGRQ |
| | GKRTFMAERQYTRMEDWLTAKLAYEGLPSKTYLSKTLAQYTSKTCSNCGFT |
| | ITSADYDRVLEKLKKTATGWMTTINGKELKVEGQITYYNRYKRQNVVKDLG |
| | VELDRLSEESVNNDISSWTKGRSGEALSLLKKRFSHRPVQEKFVCLNCGFE |
| | THADEQAALNIARSWLFLRSQEYKKYQTNKTTGNTDKRAFVETWQSFYRKK |
| | LKEVWKPAV (SEQ ID NO: 140) |
| 388: | MQEIKRINKIRRRLVKDSNTKKAGKTGPMKTLLVRVMTPDLRERLENLRKK |
| L379R + A708K+ | PENIPQPISNTSRANLNKLLTDYTEMKKAILHVYWEEFQKDPVGLMSRVAQ |
| [P793] + X1 | PAPKNIDQRKLIPVKDGNERLTSSGFACSQCCQPLYVYKLEQVNDKGKPHT |
| Helical2 | NYFGRCNVSEHERLILLSPHKPEANDELVTYSLGKFGQRALDFYSIHVTRE |
| swap | SNHPVKPLEQIGGNSCASGPVGKALSDACMGAVASFLTKYQDIILEHQKVI |
| | KKNEKRLANLKDIASANGLAFPKITLPPQPHTKEGIEAYNNVVAQIVIWVN |
| | LNLWQKLKIGRDEAKPLQRLKGFPSFPVVERRENEVDWWNTINEVKKLIDA |
| | KRDMGRVFWSGVTAEKRNTILEGYNYLPNENDHKKREGSLENPKKPAKRQF |
| | GDLLLYLEKKYAGDWGKVFDEAWERIDKKIAGLTSHIEREEARNAEDAQSK |
| | AVLTDWLRAKASFVLERLKEMDEKEFYACEIQLQKWYGDLRGNPFAVEAEN |
| | SILDISGFSKQYNCAFIWQKDGVKKLNLYLIINYFKGGKLRFKKIKPEAFE |
| | ANRFYTVINKKSGEIVPMEVNFNFDDPNLIILPLAFGKRQGREFIWNDLLS |
| | LETGSLKLANGRVIEKTLYNRRTRQDEPALFVALTFERREVLDSSNIKPMN |
| | LIGIDRGENIPAVIALTDPEGCPLSRFKDSLGNPTHILRIGESYKEKQRTI |
| | QAKKEVEQRRAGGYSRKYASKAKNLADDMVRNTARDLLYYAVTQDAMLIFE |
| | NLSRGFGRQGKRTFMAERQYTRMEDWLTAKLAYEGLSKTYLSKTLAQYTSK |
| | TCSNCGFTITSADYDRVLEKLKKTATGWMTTINGKELKVEGQITYYNRYKR |
| | QNVVKDLSVELDRLSEESVNNDISSWTKGRSGEALSLLKKRFSHRPVQEKF |
| | VCLNCGFETHADEQAALNIARSWLFLRSQEYKKYQTNKTTGNTDKRAFVET |
| | WQSFYRKKLKEVWKPAV (SEQ ID NO: 141) |
| 389: | MQEIKRINKIRRRLVKDSNTKKAGKTGPMKTLLVRVMTPDLRERLENLRKK |
| L379R +A708K + | PENIPQPISNTSRANLNKLLTDYTEMKKAILHVYWEEFQKDPVGLMSRVAQ |
| [P793] + X1 | PAPKNIDQRKLIPVKDGNERLTSSGFACSQCCQPLYVYKLEQVNDKGKPHT |
| RuvC1 | NYFGRCNVSEHERLILLSPHKPEANDELVTYSLGKFGQRALDFYSIHVTRE |
| swap | SNHPVKPLEQIGGNSCASGPVGKALSDACMGAVASFLTKYQDIILEHQKVI |
| | KKNEKRLANLKDIASANGLAFPKITLPPQPHTKEGIEAYNNVVAQIVIWVN |
| | LNLWQKLKIGRDEAKPLQRLKGFPSFPLVERQANEVDWWDMVCNVKKLINE |
| | KKEDGKVFWQNLAGYKRQEALRPYLSSEEDRKKGKKFARYQFGDLLLHLEK |
| | KHGEDWGKVYDEAWERIDKKVEGLSKHIKLEEERRSEDAQSKAALTDWLRA |
| | KASFVIEGLKEADKDEFCRCELKLQKWYGDLRGKPFAIEAENSILDISGFS |
| | KQYNCAFIWQKDGVKKLNLYLIINYFKGGKLRFKKIKPEAFEANRFYTVIN |
| | KKSGEIVPMEVNFNFDDPNLIILPLAFGKRQGREFIWNDLLSLETGSLKLA |
| | NGRVIEKTLYNRRTRQDEPALFVALTFERREVLDSSNIKPVNLIGVDRGEN |
| | IPAVIALTDPEGCPLPEFKDSSGGPTDILRIGEGYKEKQRAIQAAKEVEQR |
| | RAGGYSRKFASKSRNLADDMVRNSARDLFYHAVTHDAVLVFENLSRGFGRQ |
| | GKRTFMTERQYTKMEDWLTAKLAYEGLTSKTYLSKTLAQYTSKTCSNCGFT |
| | ITSADYDRVLEKLKKTATGWMTTINGKELKVEGQITYYNRYKRQNVVKDLS |
| | VELDRLSEESVNNDISSWTKGRSGEALSLLKKRFSHRPVQEKFVCLNCGFE |
| | THADEQAALNIARSWLFLRSQEYKKYQTNKTTGNTDKRAFVETWQSFYRKK |
| | LKEVWKPAV (SEQ ID NO: 142) |
| 390: | MQEIKRINKIRRRLVKDSNTKKAGKTGPMKTLLVRVMTPDLRERLENLRKK |
| L379R + A708K + | PENIPQPISNTSRANLNKLLTDYTEMKKAILHVYWEEFQKDPVGLMSRVAQ |
| [P793] + X1 | PAPKNIDQRKLIPVKDGNERLTSSGFACSQCCQPLYVYKLEQVNDKGKPHT |
| RuvC2 | NYFGRCNVSEHERLILLSPHKPEANDELVTYSLGKFGQRALDFYSIHVTRE |
| swap | SNHPVKPLEQIGGNSCASGPVGKALSDACMGAVASFLTKYQDIILEHQKVI |
| | KKNEKRLANLKDIASANGLAFPKITLPPQPHTKEGIEAYNNVVAQIVIWVN |
| | LNLWQKLKIGRDEAKPLQRLKGFPSFPLVERQANEVDWWDMVCNVKKLINE |
| | KKEDGKVFWQNLAGYKRQEALRPYLSSEEDRKKGKKFARYQFGDLLLHLEK |
| | KHGEDWGKVYDEAWERIDKKVEGLSKHIKLEEERRSEDAQSKAALTDWLRA |
| | KASFVIEGLKEADKDEFCRCELKLQKWYGDLRGKPFAIEAENSILDISGFS |
| | KQYNCAFIWQKDGVKKLNLYLIINYFKGGKLREKKIKPEAFEANRFYTVIN |
| | KKSGEIVPMEVNFNFDDPNLIILPLAFGKRQGREFIWNDLLSLETGSLKLA |
| | NGRVIEKTLYNRRTRQDEPALFVALTFERREVLDSSNIKPMNLIGIDRGEN |
| | IPAVIALTDPEGCPLSRFKDSLGNPTHILRIGESYKEKQRTIQAKKEVEQR |
| | RAGGYSRKYASKAKNLADDMVRNTARDLLYYAVTQDAMLIFENLSRGFGRQ |
| | GKRTFMAERQYTRMEDWLTAKLAYEGLSKTYLSKTLAQYTSKTCSNCGFTI |
| | TSADYDRVLEKLKKTATGWMTTINGKELKVEGQITYYNRYKRQNVVKDLSV |
| | ELDRLSEESVNNDISSWTKGRSGEALSLLKKRFSHRPVQEKFVCLNCGFET |
| | HADEQAALNIARSWLFLNSNSTEFKSYKSGKQPFVGAWQAFYKRRLKEVWK |
| | PNA (SEQ ID NO: 143) |
| 514: | QEIKRINKIRRRLVKDSNTKKAGKTGPMKTLLVRVMTPDLRERLENLRKKP |
| ^H817 in | ENIPQPISNTSRANLNKLLTDYTEMKKAILHVYWEEFQKDPVGLMSRVAQP |
| 491 | ASKKIDQNKLKPEMDEKGNLTTAGFACSQCGQPLFVYKLEQVSEKGKAYTN |
| | YFGRCNVAEHEKLILLAQLKPEKDSDEAVTYSLGKFGQRALDFYSIHVTKE |
| | STHPVKPLAQIAGNRYASGPVGKALSDACMGTIASFLSKYQDIIIEHQKVV |
| | KGNQKRLESLRELAGKENLEYPSVTLPPQPHTKEGVDAYNEVIARVRMWVN |
| | LNLWQKLKLSRDDAKPLLRLKGFPSFPLVERQANEVDWWDMVCNVKKLINE |
| | KKEDGKVFWQNLAGYKRQEALRPYLSSEEDRKKGKKFARYQLGDLLLHLEK |
| | KHGEDWGKVYDEAWERIDKKVEGLSKHIKLEEERRSEDAQSKAALTDWLRA |
| | KASFVIEGLKEADKDEFCRCELKLQKWYGDLRGKPFAIEAENSILDISGFS |
| | KQYNCAFIWQKDGVKKLNLYLIINYFKGGKLRFKKIKPEAFEANRFYTVIN |
| | KKSGEIVPMEVNFNFDDPNLIILPLAFGKRQGREFIWNDLLSLETGSLKLA |
| | NGRVIEKTLYNRRTRQDEPALFVALTFERREVLDSSNIKPMNLIGVDRGEN |
| | IPAVIALTDPEGCPLSRFKDSLGNPTHILRIGESYKEKQRTIQAKKEVEQR |
| | RAGGYSRKYASKAKNLADDMVRNTARDLLYYAVTQDAMLIFENLSRGFGRQ |
| | GKRTFMAERQYTRMEDWLTAKLAYEGLSKTYLSKTLAQYTSKTCSNCGFTI |
| | HTSADYDRVLEKLKKTATGWMTTINGKELKVEGQITYYNRYKRQNVVKDLS |
| | VELDRLSEESVNNDISSWTKGRSGEALSLLKKRFSHRPVQEKFVCLNCGFE |
| | THADEQAALNIARSWLFLRSQEYKKYQTNKTTGNTDKRAFVETWQSFYRKK |
| | LKEVWKPAV (SEQ ID NO: 144) |
| 515: | QEIKRINKIRRRLVKDSNTKKAGKTGPMKTLLVRVMTPDLRERLENLRKKP |
| ^P793 in 491 | ENIPQPISNTSRANLNKLLTDYTEMKKAILHVYWEEFQKDPVGLMSRVAQP |
| | ASKKIDQNKLKPEMDEKGNLTTAGFACSQCGQPLFVYKLEQVSEKGKAYTN |
| | YFGRCNVAEHEKLILLAQLKPEKDSDEAVTYSLGKFGQRALDFYSIHVTKE |
| | STHPVKPLAQIAGNRYASGPVGKALSDACMGTIASFLSKYQDIIIEHQKVV |
| | KGNQKRLESLRELAGKENLEYPSVTLPPQPHTKEGVDAYNEVIARVRMWVN |
| | LNLWQKLKLSRDDAKPLLRLKGFPSFPLVERQANEVDWWDMVCNVKKLINE |
| | KKEDGKVFWQNLAGYKRQEALRPYLSSEEDRKKGKKFARYQLGDLLLHLEK |
| | KHGEDWGKVYDEAWERIDKKVEGLSKHIKLEEERRSEDAQSKAALTDWLRA |
| | KASFVIEGLKEADKDEFCRCELKLQKWYGDLRGKPFAIEAENSILDISGFS |
| | KQYNCAFIWQKDGVKKLNLYLIINYFKGGKLRFKKIKPEAFEANRFYTVIN |
| | KKSGEIVPMEVNFNFDDPNLIILPLAFGKRQGREFIWNDLLSLETGSLKLA |
| | NGRVIEKTLYNRRTRQDEPALFVALTFERREVLDSSNIKPMNLIGVDRGEN |
| | IPAVIALTDPEGCPLSRFKDSLGNPTHILRIGESYKEKQRTIQAKKEVEQR |
| | RAGGYSRKYASKAKNLADDMVRNTARDLLYYAVTQDAMLIFENLSRGFGRQ |
| | GKRTFMAERQYTRMEDWLTAKLAYEGLPSKTYLSKTLAQYTSKTCSNCGFT |
| | ITSADYDRVLEKLKKTATGWMTTINGKELKVEGQITYYNRYKRQNVVKDLS |
| | VELDRLSEESVNNDISSWTKGRSGEALSLLKKRFSHRPVQEKFVCLNCGFE |
| | THADEQAALNIARSWLFLRSQEYKKYQTNKTTGNTDKRAFVETWQSFYRKK |
| | LKEVWKPAV (SEQ ID NO: 145) |
| 516: | QEIKRINKIRRRLVKDSNTKKAGKTGPMKTLLVRVMTPDLRERLENLRKKP |
| L307H in | ENIPQPISNTSRANLNKLLTDYTEMKKAILHVYWEEFQKDPVGLMSRVAQP |
| 491 | ASKKIDQNKLKPEMDEKGNLTTAGFACSQCGQPLFVYKLEQVSEKGKAYTN |
| | YFGRCNVAEHEKLILLAQLKPEKDSDEAVTYSLGKFGQRALDFYSIHVTKE |
| | STHPVKPLAQIAGNRYASGPVGKALSDACMGTIASFLSKYQDIIIEHQKVV |
| | KGNQKRLESLRELAGKENLEYPSVTLPPQPHTKEGVDAYNEVIARVRMWVN |
| | HNLWQKLKLSRDDAKPLLRLKGFPSFPLVERQANEVDWWDMVCNVKKLINE |
| | KKEDGKVFWQNLAGYKRQEALRPYLSSEEDRKKGKKFARYQLGDLLLHLEK |
| | KHGEDWGKVYDEAWERIDKKVEGLSKHIKLEEERRSEDAQSKAALTDWLRA |
| | KASFVIEGLKEADKDEFCRCELKLQKWYGDLRGKPFAIEAENSILDISGFS |
| | KQYNCAFIWQKDGVKKLNLYLIINYFKGGKLRFKKIKPEAFEANRFYTVIN |
| | KKSGEIVPMEVNFNFDDPNLIILPLAFGKRQGREFIWNDLLSLETGSLKLA |
| | NGRVIEKTLYNRRTRQDEPALFVALTFERREVLDSSNIKPMNLIGVDRGEN |
| | IPAVIALTDPEGCPLSRFKDSLGNPTHILRIGESYKEKQRTIQAKKEVEQR |
| | RAGGYSRKYASKAKNLADDMVRNTARDLLYYAVTQDAMLIFENLSRGFGRQ |
| | GKRTFMAERQYTRMEDWLTAKLAYEGLSKTYLSKTLAQYTSKTCSNCGFTI |
| | TSADYDRVLEKLKKTATGWMTTINGKELKVEGQITYYNRYKRQNVVKDLSV |
| | ELDRLSEESVNNDISSWTKGRSGEALSLLKKRFSHRPVQEKFVCLNCGFET |
| | HADEQAALNIARSWLFLRSQEYKKYQTNKTTGNTDKRAFVETWQSFYRKKL |
| | KEVWKPAV (SEQ UD BI: 146) |
| 517: | QEIKRINKIRRRLVKDSNTKKAGKTGPMKTLLVRVMTPDLRERLENLRKKP |
| ^A224 in | ENIPQPISNTSRANLNKLLTDYTEMKKAILHVYWEEFQKDPVGLMSRVAQP |
| 491 | ASKKIDQNKLKPEMDEKGNLTTAGFACSQCGQPLFVYKLEQVSEKGKAYTN |
| | YFGRCNVAEHEKLILLAQLKPEKDSDEAVTYSLGKFGQRALDFYSIHVTKE |
| | STHPVKPLAQIAGNRYASGAPVGKALSDACMGTIASFLSKYQDIIIEHQKV |
| | VKGNQKRLESLRELAGKENLEYPSVTLPPQPHTKEGVDAYNEVIARVRMWV |
| | NLNLWQKLKLSRDDAKPLLRLKGFPSFPLVERQANEVDWWDMVCNVKKLIN |
| | EKKEDGKVFWQNLAGYKRQEALRPYLSSEEDRKKGKKFARYQLGDLLLHLE |
| | KKHGEDWGKVYDEAWERIDKKVEGLSKHIKLEEERRSEDAQSKAALTDWLR |
| | AKASFVIEGLKEADKDEFCRCELKLQKWYGDLRGKPFAIEAENSILDISGF |
| | SKQYNCAFIWQKDGVKKLNLYLIINYFKGGKLRFKKIKPEAFEANRFYTVI |
| | NKKSGEIVPMEVNFNFDDPNLIILPLAFGKRQGREFIWNDLLSLETGSLKL |
| | ANGRVIEKTLYNRRTRQDEPALFVALTFERREVLDSSNIKPMNLIGVDRGE |
| | NIPAVIALTDPEGCPLSRFKDSLGNPTHILRIGESYKEKQRTIQAKKEVEQ |
| | RRAGGYSRKYASKAKNLADDMVRNTARDLLYYAVTQDAMLIFENLSRGFGR |
| | QGKRTFMAERQYTRMEDWLTAKLAYEGLSKTYLSKTLAQYTSKTCSNCGFT |
| | ITSADYDRVLEKLKKTATGWMTTINGKELKVEGQITYYNRYKRQNVVKDLS |
| | VELDRLSEESVNNDISSWTKGRSGEALSLLKKRFSHRPVQEKFVCLNCGFE |
| | THADEQAALNIARSWLFLRSQEYKKYQTNKTTGNTDKRAFVETWQSFYRKK |
| | LKEVWKPAV (SEQ ID NO: 147) |
| 518: | RQEIKRINKIRRRLVKDSNTKKAGKTGPMKTLLVRVMTPDLRERLENLRKK |
| ^R1 in 491 | PENIPQPISNTSRANLNKLLTDYTEMKKAILHVYWEEFQKDPVGLMSRVAQ |
| | PASKKIDQNKLKPEMDEKGNLTTAGFACSQCGQPLFVYKLEQVSEKGKAYT |
| | NYFGRCNVAEHEKLILLAQLKPEKDSDEAVTYSLGKFGQRALDFYSIHVTK |
| | ESTHPVKPLAQIAGNRYASGAPVGKALSDACMGTIASFLSKYQDIIIEHQK |
| | VVKGNQKRLESLRELAGKENLEYPSVTLPPQPHTKEGVDAYNEVIARVRMW |
| | VNLNLWQKLKLSRDDAKPLLRLKGFPSFPLVERQANEVDWWDMVCNVKKLI |
| | NEKKEDGKVFWQNLAGYKRQEALRPYLSSEEDRKKGKKFARYQLGDLLLHL |
| | EKKHGEDWGKVYDEAWERIDKKVEGLSKHIKLEEERRSEDAQSKAALTDWL |
| | RAKASFVIEGLKEADKDEFCRCELKLQKWYGDLRGKPFAIEAENSILDISG |
| | FSKQYNCAFIWQKDGVKKLNLYLIINYFKGGKLRFKKIKPEAFEANRFYTV |
| | INKKSGEIVPMEVNFNFDDPNLIILPLAFGKRQGREFIWNDLLSLETGSLK |
| | LANGRVIEKTLYNRRTRQDEPALFVALTFERREVLDSSNIKPMNLIGVDRG |
| | ENIPAVIALTDPEGCPLSRFKDSLGNPTHILRIGESYKEKQRTIQAKKEVE |
| | QRRAGGYSRKYASKAKNLADDMVRNTARDLLYYAVTQDAMLIFENLSRGFG |
| | RQGKRTFMAERQYTRMEDWLTAKLAYEGLSKTYLSKTLAQYTSKTCSNCGF |
| | TITSADYDRVLEKLKKTATGWMTTINGKELKVEGQITYYNRYKRQNVVKDL |
| | SVELDRLSEESVNNDISSWTKGRSGEALSLLKKRFSHRPVQEKFVCLNCGF |
| | ETHADEQAALNIARSWLFLRSQEYKKYQTNKTTGNTDKRAFVETWQSFYRK |
| | KLKEVWKPAV (SEQ ID NO: 148) |
| 519: | QEIKRINKIRRRLVKDSNTKKAGKTGPMKTLLVRVMTPDLRERLENLRKKP |
| ^Q692 in | ENIPQPISNTSRANLNKLLTDYTEMKKAILHVYWEEFQKDPVGLMSRVAQP |
| 491 | ASKKIDQNKLKPEMDEKGNLTTAGFACSQCGQPLFVYKLEQVSEKGKAYTN |
| | YFGRCNVAEHEKLILLAQLKPEKDSDEAVTYSLGKFGQRALDFYSIHVTKE |
| | STHPVKPLAQIAGNRYASGPVGKALSDACMGTIASFLSKYQDIIIEHQKVV |
| | KGNQKRLESLRELAGKENLEYPSVTLPPQPHTKEGVDAYNEVIARVRMWVN |
| | LNLWQKLKLSRDDAKPLLRLKGFPSFPLVERQANEVDWWDMVCNVKKLINE |
| | KKEDGKVFWQNLAGYKRQEALRPYLSSEEDRKKGKKFARYQLGDLLLHLEK |
| | KHGEDWGKVYDEAWERIDKKVEGLSKHIKLEEERRSEDAQSKAALTDWLRA |
| | KASFVIEGLKEADKDEFCRCELKLQKWYGDLRGKPFAIEAENSILDISGFS |
| | KQYNCAFIWQKDGVKKLNLYLIINYFKGGKLRFKKIKPEAFEANRFYTVIN |
| | KKSGEIVPMEVNFNFDDPNLIILPLAFGKRQGREFIWNDLLSLETGSLKLA |
| | NGRVIEKTLYNRRTRQDEPALFVALTFERREVLDSSNIKPMNLIGVDRGEN |
| | IPAVIALTDPEGCPLSRFKDSLGNPTHIQLRIGESYKEKQRTIQAKKEVEQ |
| | RRAGGYSRKYASKAKNLADDMVRNTARDLLYYAVTQDAMLIFENLSRGFGR |
| | QGKRTFMAERQYTRMEDWLTAKLAYEGLSKTYLSKTLAQYTSKTCSNCGFT |
| | ITSADYDRVLEKLKKTATGWMTTINGKELKVEGQITYYNRYKRQNVVKDLS |
| | VELDRLSEESVNNDISSWTKGRSGEALSLLKKRFSHRPVQEKFVCLNCGFE |
| | THADEQAALNIARSWLFLRSQEYKKYQTNKTTGNTDKRAFVETWQSFYRKK |
| | LKEVWKPAV (SEQ ID NO: 148) |
| 520: | QEIKRINKIRRRLVKDSNTKKAGKTGPMKTLLVRVMTPDLRERLENLRKKP |
| I705T in 491 | ENIPQPISNTSRANLNKLLTDYTEMKKAILHVYWEEFQKDPVGLMSRVAQP |
| | ASKKIDQNKLKPEMDEKGNLTTAGFACSQCGQPLFVYKLEQVSEKGKAYTN |
| | YFGRCNVAEHEKLILLAQLKPEKDSDEAVTYSLGKFGQRALDFYSIHVTKE |
| | STHPVKPLAQIAGNRYASGPVGKALSDACMGTIASFLSKYQDIIIEHQKVV |
| | KGNQKRLESLRELAGKENLEYPSVTLPPQPHTKEGVDAYNEVIARVRMWVN |
| | LNLWQKLKLSRDDAKPLLRLKGFPSFPLVERQANEVDWWDMVCNVKKLINE |
| | KKEDGKVFWQNLAGYKRQEALRPYLSSEEDRKKGKKFARYQLGDLLLHLEK |
| | KHGEDWGKVYDEAWERIDKKVEGLSKHIKLEEERRSEDAQSKAALTDWLRA |
| | KASFVIEGLKEADKDEFCRCELKLQKWYGDLRGKPFAIEAENSILDISGFS |
| | KQYNCAFIWQKDGVKKLNLYLIINYFKGGKLRFKKIKPEAFEANRFYTVIN |
| | KKSGEIVPMEVNFNFDDPNLIILPLAFGKRQGREFIWNDLLSLETGSLKLA |
| | NGRVIEKTLYNRRTRQDEPALFVALTFERREVLDSSNIKPMNLIGVDRGEN |
| | IPAVIALTDPEGCPLSRFKDSLGNPTHILRIGESYKEKQRTTQAKKEVEQR |
| | RAGGYSRKYASKAKNLADDMVRNTARDLLYYAVTQDAMLIFENLSRGFGRQ |
| | GKRTFMAERQYTRMEDWLTAKLAYEGLSKTYLSKTLAQYTSKTCSNCGFTI |
| | TSADYDRVLEKLKKTATGWMTTINGKELKVEGQITYYNRYKRQNVVKDLSV |
| | ELDRLSEESVNNDISSWTKGRSGEALSLLKKRFSHRPVQEKFVCLNCGFET |
| | HADEQAALNIARSWLFLRSQEYKKYQTNKTTGNTDKRAFVETWQSFYRKKL |
| | KEVWKPAV (SEQ ID NO: 150) |
| 522: | QEIKRINKIRRRLVKDSNTKKAGKTGPMKTLLVRVMTPDLRERLENLRKKP |
| D683R in | ENIPQPISNTSRANLNKLLTDYTEMKKAILHVYWEEFQKDPVGLMSRVAQP |
| 491 | ASKKIDQNKLKPEMDEKGNLTTAGFACSQCGQPLFVYKLEQVSEKGKAYTN |
| | YFGRCNVAEHEKLILLAQLKPEKDSDEAVTYSLGKFGQRALDFYSIHVTKE |
| | STHPVKPLAQIAGNRYASGPVGKALSDACMGTIASFLSKYQDIIIEHQKVV |
| | KGNQKRLESLRELAGKENLEYPSVTLPPQPHTKEGVDAYNEVIARVRMWVN |
| | LNLWQKLKLSRDDAKPLLRLKGFPSFPLVERQANEVDWWDMVCNVKKLINE |
| | KKEDGKVFWQNLAGYKRQEALRPYLSSEEDRKKGKKFARYQLGDLLLHLEK |
| | KHGEDWGKVYDEAWERIDKKVEGLSKHIKLEEERRSEDAQSKAALTDWLRA |
| | KASFVIEGLKEADKDEFCRCELKLQKWYGDLRGKPFAIEAENSILDISGFS |
| | KQYNCAFIWQKDGVKKLNLYLIINYFKGGKLRFKKIKPEAFEANRFYTVIN |
| | KKSGEIVPMEVNFNFDDPNLIILPLAFGKRQGREFIWNDLLSLETGSLKLA |
| | NGRVIEKTLYNRRTRQDEPALFVALTFERREVLDSSNIKPMNLIGVDRGEN |
| | IPAVIALTDPEGCPLSRFKRSLGNPTHILRIGESYKEKQRTIQAKKEVEQR |
| | RAGGYSRKYASKAKNLADDMVRNTARDLLYYAVTQDAMLIFENLSRGFGRQ |
| | GKRTFMAERQYTRMEDWLTAKLAYEGLSKTYLSKTLAQYTSKTCSNCGFTI |
| | TSADYDRVLEKLKKTATGWMTTINGKELKVEGQITYYNRYKRQNVVKDLSV |
| | ELDRLSEESVNNDISSWTKGRSGEALSLLKKRFSHRPVQEKFVCLNCGFET |
| | HADEQAALNIARSWLFLRSQEYKKYQTNKTTGNTDKRAFVETWQSFYRKKL |
| | KEVWKPAV (SEQ ID NO: 151) |
| 523: | QEIKRINKIRRRLVKDSNTKKAGKTYPMKTLLVRVMTPDLRERLENLRKKP |
| G26Y in 491 | ENIPQPISNTSRANLNKLLTDYTEMKKAILHVYWEEFQKDPVGLMSRVAQP |
| | ASKKIDQNKLKPEMDEKGNLTTAGFACSQCGQPLFVYKLEQVSEKGKAYTN |
| | YFGRCNVAEHEKLILLAQLKPEKDSDEAVTYSLGKFGQRALDFYSIHVTKE |
| | STHPVKPLAQIAGNRYASGPVGKALSDACMGTIASFLSKYQDIIIEHQKVV |
| | KGNQKRLESLRELAGKENLEYPSVTLPPQPHTKEGVDAYNEVIARVRMWVN |
| | LNLWQKLKLSRDDAKPLLRLKGFPSFPLVERQANEVDWWDMVCNVKKLINE |
| | KKEDGKVFWQNLAGYKRQEALRPYLSSEEDRKKGKKFARYQLGDLLLHLEK |
| | KHGEDWGKVYDEAWERIDKKVEGLSKHIKLEEERRSEDAQSKAALTDWLRA |
| | KASFVIEGLKEADKDEFCRCELKLQKWYGDLRGKPFAIEAENSILDISGFS |
| | KQYNCAFIWQKDGVKKLNLYLIINYFKGGKLRFKKIKPEAFEANRFYTVIN |
| | KKSGEIVPMEVNFNFDDPNLIILPLAFGKRQGREFIWNDLLSLETGSLKLA |
| | NGRVIEKTLYNRRTRQDEPALFVALTFERREVLDSSNIKPMNLIGVDRGEN |
| | IPAVIALTDPEGCPLSRFKDSLGNPTHILRIGESYKEKQRTIQAKKEVEQR |
| | RAGGYSRKYASKAKNLADDMVRNTARDLLYYAVTQDAMLIFENLSRGFGRQ |
| | GKRTFMAERQYTRMEDWLTAKLAYEGLSKTYLSKTLAQYTSKTCSNCGFTI |
| | TSADYDRVLEKLKKTATGWMTTINGKELKVEGQITYYNRYKRQNVVKDLSV |
| | ELDRLSEESVNNDISSWTKGRSGEALSLLKKRFSHRPVQEKFVCLNCGFET |
| | HADEQAALNIARSWLFLRSQEYKKYQTNKTTGNTDKRAFVETWQSFYRKKL |
| | KEVWKPAV (SEQ ID NO: 152) |
| 524: | QEIKRINKIRRRLVKDSNTKKAGKTGPMKTLLVRVMTPDLRERLENLRKKP |
| T817H in | ENIPQPISNTSRANLNKLLTDYTEMKKAILHVYWEEFQKDPVGLMSRVAQP |
| 491 | ASKKIDQNKLKPEMDEKGNLTTAGFACSQCGQPLFVYKLEQVSEKGKAYTN |
| | YFGRCNVAEHEKLILLAQLKPEKDSDEAVTYSLGKFGQRALDFYSIHVTKE |
| | STHPVKPLAQIAGNRYASGPVGKALSDACMGTIASFLSKYQDIIIEHQKVV |
| | KGNQKRLESLRELAGKENLEYPSVTLPPQPHTKEGVDAYNEVIARVRMWVN |
| | LNLWQKLKLSRDDAKPLLRLKGFPSFPLVERQANEVDWWDMVCNVKKLINE |
| | KKEDGKVFWQNLAGYKRQEALRPYLSSEEDRKKGKKFARYQLGDLLLHLEK |
| | KHGEDWGKVYDEAWERIDKKVEGLSKHIKLEEERRSEDAQSKAALTDWLRA |
| | KASFVIEGLKEADKDEFCRCELKLQKWYGDLRGKPFAIEAENSILDISGFS |
| | KQYNCAFIWQKDGVKKLNLYLIINYFKGGKLRFKKIKPEAFEANRFYTVIN |
| | KKSGEIVPMEVNFNFDDPNLIILPLAFGKRQGREFIWNDLLSLETGSLKLA |
| | NGRVIEKTLYNRRTRQDEPALFVALTFERREVLDSSNIKPMNLIGVDRGEN |
| | IPAVIALTDPEGCPLSRFKDSLGNPTHILRIGESYKEKQRTIQAKKEVEQR |
| | RAGGYSRKYASKAKNLADDMVRNTARDLLYYAVTQDAMLIFENLSRGFGRQ |
| | GKRTFMAERQYTRMEDWLTAKLAYEGLSKTYLSKTLAQYTSKTCSNCGFTI |
| | HSADYDRVLEKLKKTATGWMTTINGKELKVEGQITYYNRYKRQNVVKDLSV |
| | ELDRLSEESVNNDISSWTKGRSGEALSLLKKRFSHRPVQEKFVCLNCGFET |
| | HADEQAALNIARSWLFLRSQEYKKYQTNKTTGNTDKRAFVETWQSFYRKKL |
| | KEVWKPAV (SEQ ID NO: 153) |
| 525; | QEIKRINKIRRRLVKDSNTKKAGKTGPMKTLLVRVMTPDLRERLENLRKKP |
| V746A in | ENIPQPISNTSRANLNKLLTDYTEMKKAILHVYWEEFQKDPVGLMSRVAQP |
| 491 | ASKKIDQNKLKPEMDEKGNLTTAGFACSQCGQPLFVYKLEQVSEKGKAYTN |
| | YFGRCNVAEHEKLILLAQLKPEKDSDEAVTYSLGKFGQRALDFYSIHVTKE |
| | STHPVKPLAQIAGNRYASGPVGKALSDACMGTIASFLSKYQDIIIEHQKVV |
| | KGNQKRLESLRELAGKENLEYPSVTLPPQPHTKEGVDAYNEVIARVRMWVN |
| | LNLWQKLKLSRDDAKPLLRLKGFPSFPLVERQANEVDWWDMVCNVKKLINE |
| | KKEDGKVFWQNLAGYKRQEALRPYLSSEEDRKKGKKFARYQLGDLLLHLEK |
| | KHGEDWGKVYDEAWERIDKKVEGLSKHIKLEEERRSEDAQSKAALTDWLRA |
| | KASFVIEGLKEADKDEFCRCELKLQKWYGDLRGKPFAIEAENSILDISGFS |
| | KQYNCAFIWQKDGVKKLNLYLIINYFKGGKLRFKKIKPEAFEANRFYTVIN |
| | KKSGEIVPMEVNFNFDDPNLIILPLAFGKRQGREFIWNDLLSLETGSLKLA |
| | NGRVIEKTLYNRRTRQDEPALFVALTFERREVLDSSNIKPMNLIGVDRGEN |
| | IPAVIALTDPEGCPLSRFKDSLGNPTHILRIGESYKEKQRTIQAKKEVEQR |
| | RAGGYSRKYASKAKNLADDMVRNTARDLLYYAATQDAMLIFENLSRGFGRQ |
| | GKRTFMAERQYTRMEDWLTAKLAYEGLSKTYLSKTLAQYTSKTCSNCGFTI |
| | TSADYDRVLEKLKKTATGWMTTINGKELKVEGQITYYNRYKRQNVVKDLSV |
| | ELDRLSEESVNNDISSWTKGRSGEALSLLKKRFSHRPVQEKFVCLNCGFET |
| | HADEQAALNIARSWLFLRSQEYKKYQTNKTTGNTDKRAFVETWQSFYRKKL |
| | KEVWKPAV (SEQ ID NO: 154) |
| 526: | QEIKRINKIRRRLVKDSNTKKAGKTGPMKTLLVRVMTPDLRERLENLRKKP |
| K708A in | ENIPQPISNTSRANLNKLLTDYTEMKKAILHVYWEEFQKDPVGLMSRVAQP |
| 491 | ASKKIDQNKLKPEMDEKGNLTTAGFACSQCGQPLFVYKLEQVSEKGKAYTN |
| | YFGRCNVAEHEKLILLAQLKPEKDSDEAVTYSLGKFGQRALDFYSIHVTKE |
| | STHPVKPLAQIAGNRYASGPVGKALSDACMGTIASFLSKYQDIIIEHQKVV |
| | KGNQKRLESLRELAGKENLEYPSVTLPPQPHTKEGVDAYNEVIARVRMWVN |
| | LNLWQKLKLSRDDAKPLLRLKGFPSFPLVERQANEVDWWDMVCNVKKLINE |
| | KKEDGKVFWQNLAGYKRQEALRPYLSSEEDRKKGKKFARYQLGDLLLHLEK |
| | KHGEDWGKVYDEAWERIDKKVEGLSKHIKLEEERRSEDAQSKAALTDWLRA |
| | KASFVIEGLKEADKDEFCRCELKLQKWYGDLRGKPFAIEAENSILDISGFS |
| | KQYNCAFIWQKDGVKKLNLYLIINYFKGGKLRFKKIKPEAFEANRFYTVIN |
| | KKSGEIVPMEVNFNFDDPNLIILPLAFGKRQGREFIWNDLLSLETGSLKLA |
| | NGRVIEKTLYNRRTRQDEPALFVALTFERREVLDSSNIKPMNLIGVDRGEN |
| | IPAVIALTDPEGCPLSRFKDSLGNPTHILRIGESYKEKQRTIQAAKEVEQR |
| | RAGGYSRKYASKAKNLADDMVRNTARDLLYYAVTQDAMLIFENLSRGFGRQ |
| | GKRTFMAERQYTRMEDWLTAKLAYEGLSKTYLSKTLAQYTSKTCSNCGFTI |
| | TSADYDRVLEKLKKTATGWMTTINGKELKVEGQITYYNRYKRQNVVKDLSV |
| | ELDRLSEESVNNDISSWTKGRSGEALSLLKKRFSHRPVQEKFVCLNCGFET |
| | HADEQAALNIARSWLFLRSQEYKKYQTNKTTGNTDKRAFVETWQSFYRKKL |
| | KEVWKPAV (SEQ ID NO: 155) |
| 527: | QEIKRINKIRRRLVKDSNTKKAGKTRGPMKTLLVRVMTPDLRERLENLRKK |
| ^R26 in 491 | PENIPQPISNTSRANLNKLLTDYTEMKKAILHVYWEEFQKDPVGLMSRVAQ |
| | PASKKIDQNKLKPEMDEKGNLTTAGFACSQCGQPLFVYKLEQVSEKGKAYT |
| | NYFGRCNVAEHEKLILLAQLKPEKDSDEAVTYSLGKFGQRALDFYSIHVTK |
| | ESTHPVKPLAQIAGNRYASGPVGKALSDACMGTIASFLSKYQDIIIEHQKV |
| | VKGNQKRLESLRELAGKENLEYPSVTLPPQPHTKEGVDAYNEVIARVRMWV |
| | NLNLWQKLKLSRDDAKPLLRLKGFPSFPLVERQANEVDWWDMVCNVKKLIN |
| | EKKEDGKVFWQNLAGYKRQEALRPYLSSEEDRKKGKKFARYQLGDLLLHLE |
| | KKHGEDWGKVYDEAWERIDKKVEGLSKHIKLEEERRSEDAQSKAALTDWLR |
| | AKASFVIEGLKEADKDEFCRCELKLQKWYGDLRGKPFAIEAENSILDISGF |
| | SKQYNCAFIWQKDGVKKLNLYLIINYFKGGKLRFKKIKPEAFEANRFYTVI |
| | NKKSGEIVPMEVNFNFDDPNLIILPLAFGKRQGREFIWNDLLSLETGSLKL |
| | ANGRVIEKTLYNRRTRQDEPALFVALTFERREVLDSSNIKPMNLIGVDRGE |
| | NIPAVIALTDPEGCPLSRFKDSLGNPTHILRIGESYKEKQRTIQAKKEVEQ |
| | RRAGGYSRKYASKAKNLADDMVRNTARDLLYYAVTQDAMLIFENLSRGFGR |
| | QGKRTFMAERQYTRMEDWLTAKLAYEGLSKTYLSKTLAQYTSKTCSNCGFT |
| | ITSADYDRVLEKLKKTATGWMTTINGKELKVEGQITYYNRYKRQNVVKDLS |
| | VELDRLSEESVNNDISSWTKGRSGEALSLLKKRFSHRPVQEKFVCLNCGFE |
| | THADEQAALNIARSWLFLRSQEYKKYQTNKTTGNTDKRAFVETWQSFYRKK |
| | LKEVWKPAV (SEQ ID NO: 156) |
| 528: | QEIKRINKIRRRLVKDSNTKKAGKTGPMKTLLVRVMTPDLRERLENLRKKP |
| G223Y in | ENIPQPISNTSRANLNKLLTDYTEMKKAILHVYWEEFQKDPVGLMSRVAQP |
| 515 | ASKKIDQNKLKPEMDEKGNLTTAGFACSQCGQPLFVYKLEQVSEKGKAYTN |
| | YFGRCNVAEHEKLILLAQLKPEKDSDEAVTYSLGKFGQRALDFYSIHVTKE |
| | STHPVKPLAQIAGNRYASYPVGKALSDACMGTIASFLSKYQDIIIEHQKVV |
| | KGNQKRLESLRELAGKENLEYPSVTLPPQPHTKEGVDAYNEVIARVRMWVN |
| | LNLWQKLKLSRDDAKPLLRLKGFPSFPLVERQANEVDWWDMVCNVKKLINE |
| | KKEDGKVFWQNLAGYKRQEALRPYLSSEEDRKKGKKFARYQLGDLLLHLEK |
| | KHGEDWGKVYDEAWERIDKKVEGLSKHIKLEEERRSEDAQSKAALTDWLRA |
| | KASFVIEGLKEADKDEFCRCELKLQKWYGDLRGKPFAIEAENSILDISGFS |
| | KQYNCAFIWQKDGVKKLNLYLIINYFKGGKLRFKKIKPEAFEANRFYTVIN |
| | KKSGEIVPMEVNFNFDDPNLIILPLAFGKRQGREFIWNDLLSLETGSLKLA |
| | NGRVIEKTLYNRRTRQDEPALFVALTFERREVLDSSNIKPMNLIGVDRGEN |
| | IPAVIALTDPEGCPLSRFKDSLGNPTHILRIGESYKEKQRTIQAKKEVEQR |
| | RAGGYSRKYASKAKNLADDMVRNTARDLLYYAVTQDAMLIFENLSRGFGRQ |
| | GKRTFMAERQYTRMEDWLTAKLAYEGLPSKTYLSKTLAQYTSKTCSNCGFT |
| | ITSADYDRVLEKLKKTATGWMTTINGKELKVEGQITYYNRYKRQNVVKDLS |
| | VELDRLSEESVNNDISSWTKGRSGEALSLLKKRFSHRPVQEKFVCLNCGFE |
| | THADEQAALNIARSWLFLRSQEYKKYQTNKTTGNTDKRAFVETWQSFYRKK |
| | LKEVWKPAV (SEQ ID NO: 157) |
| 529: | QEIKRINKIRRRLVKDSNTKKAGKTGPMKTLLVRVMTPDLRERLENLRKKP |
| G223N in | ENIPQPISNTSRANLNKLLTDYTEMKKAILHVYWEEFQKDPVGLMSRVAQP |
| 515 | ASKKIDQNKLKPEMDEKGNLTTAGFACSQCGQPLFVYKLEQVSEKGKAYTN |
| | YFGRCNVAEHEKLILLAQLKPEKDSDEAVTYSLGKFGQRALDFYSIHVTKE |
| | STHPVKPLAQIAGNRYASNPVGKALSDACMGTIASFLSKYQDIIIEHQKVV |
| | KGNQKRLESLRELAGKENLEYPSVTLPPQPHTKEGVDAYNEVIARVRMWVN |
| | LNLWQKLKLSRDDAKPLLRLKGFPSFPLVERQANEVDWWDMVCNVKKLINE |
| | KKEDGKVFWQNLAGYKRQEALRPYLSSEEDRKKGKKFARYQLGDLLLHLEK |
| | KHGEDWGKVYDEAWERIDKKVEGLSKHIKLEEERRSEDAQSKAALTDWLRA |
| | KASFVIEGLKEADKDEFCRCELKLQKWYGDLRGKPFAIEAENSILDISGFS |
| | KQYNCAFIWQKDGVKKLNLYLIINYFKGGKLRFKKIKPEAFEANRFYTVIN |
| | KKSGEIVPMEVNFNFDDPNLIILPLAFGKRQGREFIWNDLLSLETGSLKLA |
| | NGRVIEKTLYNRRTRQDEPALFVALTFERREVLDSSNIKPMNLIGVDRGEN |
| | IPAVIALTDPEGCPLSRFKDSLGNPTHILRIGESYKEKQRTIQAKKEVEQR |
| | RAGGYSRKYASKAKNLADDMVRNTARDLLYYAVTQDAMLIFENLSRGFGRQ |
| | GKRTFMAERQYTRMEDWLTAKLAYEGLPSKTYLSKTLAQYTSKTCSNCGFT |
| | ITSADYDRVLEKLKKTATGWMTTINGKELKVEGQITYYNRYKRQNVVKDLS |
| | VELDRLSEESVNNDISSWTKGRSGEALSLLKKRFSHRPVQEKFVCLNCGFE |
| | THADEQAALNIARSWLFLRSQEYKKYQTNKTTGNTDKRAFVETWQSFYRKK |
| | LKEVWKPAV (SEQ ID NO: 158) |
| 530: | QEIKRINKIRRRLVKDSNTKKAGKTGPMKTLLVRVMTPDLRERLENLRKKP |
| ^W539 in | ENIPQPISNTSRANLNKLLTDYTEMKKAILHVYWEEFQKDPVGLMSRVAQP |
| 515 | ASKKIDQNKLKPEMDEKGNLTTAGFACSQCGQPLFVYKLEQVSEKGKAYTN |
| | YFGRCNVAEHEKLILLAQLKPEKDSDEAVTYSLGKFGQRALDFYSIHVTKE |
| | STHPVKPLAQIAGNRYASGPVGKALSDACMGTIASFLSKYQDIIIEHQKVV |
| | KGNQKRLESLRELAGKENLEYPSVTLPPQPHTKEGVDAYNEVIARVRMWVN |
| | LNLWQKLKLSRDDAKPLLRLKGFPSFPLVERQANEVDWWDMVCNVKKLINE |
| | KKEDGKVFWQNLAGYKRQEALRPYLSSEEDRKKGKKFARYQLGDLLLHLEK |
| | KHGEDWGKVYDEAWERIDKKVEGLSKHIKLEEERRSEDAQSKAALTDWLRA |
| | KASFVIEGLKEADKDEFCRCELKLQKWYGDLRGKPFAIEAENSILDISGFS |
| | KQYNCAFIWQKDGVKKLNLYLIINYFKGWGKLRFKKIKPEAFEANRFYTVI |
| | NKKSGEIVPMEVNFNFDDPNLIILPLAFGKRQGREFIWNDLLSLETGSLKL |
| | ANGRVIEKTLYNRRTRQDEPALFVALTFERREVLDSSNIKPMNLIGVDRGE |
| | NIPAVIALTDPEGCPLSRFKDSLGNPTHILRIGESYKEKQRTIQAKKEVEQ |
| | RRAGGYSRKYASKAKNLADDMVRNTARDLLYYAVTQDAMLIFENLSRGFGR |
| | QGKRTFMAERQYTRMEDWLTAKLAYEGLPSKTYLSKTLAQYTSKTCSNCGF |
| | TITSADYDRVLEKLKKTATGWMTTINGKELKVEGQITYYNRYKRQNVVKDL |
| | SVELDRLSEESVNNDISSWTKGRSGEALSLLKKRFSHRPVQEKFVCLNCGF |
| | ETHADEQAALNIARSWLFLRSQEYKKYQTNKTTGNTDKRAFVETWQSFYRK |
| | KLKEVWKPAV (SEQ ID NO: 159) |
| 531: | QEIKRINKIRRRLVKDSNTKKAGKTGPMKTLLVRVMTPDLRERLENLRKKP |
| ^Y539 in | ENIPQPISNTSRANLNKLLTDYTEMKKAILHVYWEEFQKDPVGLMSRVAQP |
| 515 | ASKKIDQNKLKPEMDEKGNLTTAGFACSQCGQPLFVYKLEQVSEKGKAYTN |
| | YFGRCNVAEHEKLILLAQLKPEKDSDEAVTYSLGKFGQRALDFYSIHVTKE |
| | STHPVKPLAQIAGNRYASGPVGKALSDACMGTIASFLSKYQDIIIEHQKVV |
| | KGNQKRLESLRELAGKENLEYPSVTLPPQPHTKEGVDAYNEVIARVRMWVN |
| | LNLWQKLKLSRDDAKPLLRLKGFPSFPLVERQANEVDWWDMVCNVKKLINE |
| | KKEDGKVFWQNLAGYKRQEALRPYLSSEEDRKKGKKFARYQLGDLLLHLEK |
| | KHGEDWGKVYDEAWERIDKKVEGLSKHIKLEEERRSEDAQSKAALTDWLRA |
| | KASFVIEGLKEADKDEFCRCELKLQKWYGDLRGKPFAIEAENSILDISGFS |
| | KQYNCAFIWQKDGVKKLNLYLIINYFKGYGKLRFKKIKPEAFEANRFYTVI |
| | NKKSGEIVPMEVNFNFDDPNLIILPLAFGKRQGREFIWNDLLSLETGSLKL |
| | ANGRVIEKTLYNRRTRQDEPALFVALTFERREVLDSSNIKPMNLIGVDRGE |
| | NIPAVIALTDPEGCPLSRFKDSLGNPTHILRIGESYKEKQRTIQAKKEVEQ |
| | RRAGGYSRKYASKAKNLADDMVRNTARDLLYYAVTQDAMLIFENLSRGFGR |
| | QGKRTFMAERQYTRMEDWLTAKLAYEGLPSKTYLSKTLAQYTSKTCSNCGF |
| | TITSADYDRVLEKLKKTATGWMTTINGKELKVEGQITYYNRYKRQNVVKDL |
| | SVELDRLSEESVNNDISSWTKGRSGEALSLLKKRFSHRPVQEKFVCLNCGF |
| | ETHADEQAALNIARSWLFLRSQEYKKYQTNKTTGNTDKRAFVETWQSFYRK |
| | KLKEVWKPAV (SEQ ID NO: 160) |

[0238] In some embodiments, the CasX variant protein comprises a sequence selected from the group consisting of SEQ TD NOs: 49-160, 221-223, 227-230, 235-247, and 258-267, or a sequence having at least about 50%, at least about 60%, at least about 70%, at least about 80%, at least about 90%, or at least about 95%, or at least about 95%, or at least about 96%, or at least about 97% or at least about 98%, or at least about 99% sequence identity thereto. In some embodiments, the CasX variant protein comprises a sequence selected from the group consisting of SEQ TD NOs: 49-160, 221-223, 227-230, 235-247, and 258-267.

[0239] In some embodiments, the CasX variant protein has one or more improved characteristic of the CasX protein when compared to a reference CasX protein, for example a reference protein of SEQ TD NO: 1, SEQ TD NO:2 or SEQ ID NO:3. In some embodiments, the at least one improved characteristic of the CasX variant is at least about 1.1 to about 100,000-fold improved relative to the reference protein. In some embodiments, the at least one improved characteristic of the CasX variant is at least about 1.1 to about 10,000-fold improved, at least about 1.1 to about 1,000-fold improved, at least about 1.1 to about 500-fold improved, at least about 1.1 to about 400-fold improved, at least about 1.1 to about 300-fold improved, at least about 1.1 to about 200-fold improved, at least about 1.1 to about 100-fold improved, at least about 1.1 to about 50-fold improved, at least about 1.1 to about 40-fold improved, at least about 1.1 to about 30-fold improved, at least about 1.1 to about 20-fold improved, at least about 1.1 to about 10-fold improved, at least about 1.1 to about 9-fold improved, at least about 1.1 to about 8-fold improved, at least about 1.1 to about 7-fold improved, at least about 1.1 to about 6-fold improved, at least about 1.1 to about 5-fold improved, at least about 1.1 to about 4-fold improved, at least about 1.1 to about 3-fold improved, at least about 1.1 to about 2-fold improved, at least about 1.1 to about 1.5-fold improved, at least about 1.5 to about 3-fold improved, at least about 1.5 to about 4-fold improved, at least about 1.5 to about 5-fold improved, at least about 1.5 to about 10-fold improved, at least about 5 to about 10-fold improved, at least about 10 to about 20-fold improved, at least 10 to about 30-fold improved, at least 10 to about 50-fold improved or at least 10 to about 100-fold improved than the reference CasX protein. In some embodiments, the at least one improved characteristic of the CasX variant is at least about 10 to about 1000-fold improved relative to the reference CasX protein.

[0240] In some embodiments, the one or more improved characteristics of the CasX variant protein is at least about 1.1, at least about 5, at least about 10, at least about 20, at least about 30, at least about 40, at least about 50, at least about 60, at least about 70, at least about 80, at least about 90, at least about 100, at least about 250, at least about 500, or at least about 1000, at least about 5,000, at least about 10,000, or at least about 100,000-fold improved relative to a reference CasX protein of SEQ ID NO:1, SEQ ID NO:2 or SEQ ID NO:3. In other cases, the one or more improved characteristics of the CasX variant is about 1.1 to 100,00-fold, about 1.1 to 10,00-fold, about 1.1 to 1,000-fold, about 1.1 to 500-fold, about 1.1 to 100-fold, about 1.1 to 50-fold, about 1.1 to 20-fold, about 10 to 100,00-fold, about 10 to 10,00-fold, about 10 to 1,000-fold, about 10 to 500-fold, about 10 to 100-fold, about 10 to 50-fold, about 10 to 20-fold, about 2 to 70-fold, about 2 to 50-fold, about 2 to 30-fold, about 2 to 20-fold, about 2 to 10-fold, about 5 to 50-fold, about 5 to 30-fold, about 5 to 10-fold, about 100 to 100,00-fold, about 100 to 10,00-fold, about 100 to 1,000-fold, about 100 to 500-fold, about 500 to 100,00-fold, about 500 to 10,00-fold, about 500 to 1,000-fold, about 500 to 750-fold, about 1,000 to 100,00-fold, about 10,000 to 100,00-fold, about 20 to 500-fold, about 20 to 250-fold, about 20 to 200-fold, about 20 to 100-fold, about 20 to 50-fold, about 50 to 10,000-fold, about 50 to 1,000-fold, about 50 to 500-fold, about 50 to 200-fold, or about 50 to 100-fold, improved relative to the reference CasX of SEQ ID NO:1, SEQ ID NO:2 or SEQ ID NO:3. In other cases, the one or more improved characteristics of the CasX variant is about 1.1-fold, 1.2-fold, 1.3-fold, 1.4-fold, 1.5-fold, 1.6-fold, 1.7-fold, 1.8-fold, 1.9-fold, 2-fold, 3-fold, 4-fold, 5-fold, 6-fold, 7-fold, 8-fold, 9-fold, 10-fold, 11-fold, 12-fold, 13-fold, 14-fold, 15-fold, 16-fold, 17-fold, 18-fold, 19-fold, 20-fold, 25-fold, 30-fold, 40-fold, 45-fold, 50-fold, 55-fold, 60-fold, 70-fold, 80-fold, 90-fold, 100-fold, 110-fold, 120-fold, 130-fold, 140-fold, 150-fold, 160-fold, 170-fold, 180-fold, 190-fold, 200-fold, 210-fold, 220-fold, 230-fold, 240-fold, 250-fold, 260-fold, 270-fold, 280-fold, 290-fold, 300-fold, 310-fold, 320-fold, 330-fold, 340-fold, 350-fold, 360-fold, 370-fold, 380-fold, 390-fold, 400-fold, 425-fold, 450-fold, 475-fold, or 500-fold or more improved relative to the reference CasX of SEQ ID NO: 1, SEQ ID NO: 2 or SEQ ID NO: 3. Exemplary characteristics that can be improved in CasX variant proteins relative to the same characteristics in reference CasX proteins include, but are not limited to, improved folding of the variant, improved binding affinity to the gNA, improved binding affinity to the target DNA, improved ability to utilize a greater spectrum of PAM sequences in the editing and/or binding of target DNA, improved unwinding of the target DNA, increased editing activity, improved editing efficiency, improved editing specificity, increased activity of the nuclease, increased target strand loading for double strand cleavage, decreased target strand loading for single strand nicking, decreased off-target cleavage, improved binding of the non-target strand of DNA, improved protein stability, improved CasX:gNA RNA complex stability, improved protein solubility, improved CasX:gNA RNP complex solubility, improved ability to form cleavage-competent RNP with a gNA, improved protein yield, improved protein expression, and improved fusion characteristics. In some embodiments, the variant comprises at least one improved characteristic. In other embodiments, the variant comprises at least two improved characteristics. In further embodiments, the variant comprises at least three improved characteristics. In some embodiments, the variant comprises at least four improved characteristics. In still further embodiments, the variant comprises at least five, at least six, at least seven, at least eight, at least nine, at least ten, at least eleven, at least twelve, at least thirteen, or more improved characteristics.

[0241] Exemplary improved characteristic include, as one example, improved editing efficiency. The CasX variants of the embodiments described herein have the ability to form an RNP complex with the gNA disclosed herein. In some embodiments, an RNP comprising the CasX variant protein and a gNA of the disclosure, at a concentration of 20 pM or less, is capable of cleaving a double stranded DNA target with an efficiency of at least 80%. In some embodiments, the RNP at a concentration of 20 pM or less, is capable of cleaving a double stranded DNA target with an efficiency of at least 40%, at least 50%, at least 60%, at least 70%, at least 80%, at least 85%, at least 90% or at least 95%. In some embodiments, the RNP at a concentration of 50 pM or less, 40 pM or less, 30 pM or less, 20 pM or less, 10 pM or less, or 5 pM or less, is capable of cleaving a double stranded DNA target with an efficiency of at least 40%, at least 50%, at least 60%, at least 70%, at least 80%, at least 85%, at least 90% or at least 95%.

[0242] These improved characteristics are described in more detail below.

[0243] j. Protein Stability

[0244] In some embodiments, the disclosure provides a CasX variant protein with improved stability relative to a reference CasX protein. In some embodiments, improved stability of the CasX variant protein results in expression of a higher steady state of protein, which improves editing efficiency. In some embodiments, improved stability of the CasX variant protein results in a larger fraction of CasX protein that remains folded in a functional conformation and improves editing efficiency or improves purifiability for manufacturing purposes. As used herein, a “functional conformation” refers to a CasX protein that is in a conformation where the protein is capable of binding a gNA and target DNA. In embodiments wherein the CasX variant does not carry one or more mutations rendering it catalytically dead, the CasX variant is capable of cleaving, nicking, or otherwise modifying the target DNA. For example, a functional CasX variant can, in some embodiments, be used for gene-editing, and a functional conformation refers to an “editing-competent” conformation. In some exemplary embodiments, including those embodiments where the CasX variant protein results in a larger fraction of CasX protein that remains folded in a functional conformation, a lower concentration of CasX variant is needed for applications such as gene editing compared to a reference CasX protein. Thus, in some embodiments, the CasX variant with improved stability has improved efficiency compared to a reference CasX in one or more gene editing contexts. Improved stability and efficiency of nuclease activity may be evaluated through a variety of methods known to one of skill in the art.

[0245] In some embodiments, the disclosure provides a CasX variant protein having improved thermostability relative to a reference CasX protein. In some embodiments, the CasX variant protein has improved thermostability of the CasX variant protein at a particular temperature range. Without wishing to be bound by any theory, some reference CasX proteins natively function in organisms with niches in groundwater and sediment; thus, some reference CasX proteins may have evolved to exhibit optimal function at lower or higher temperatures that may be desirable for certain applications. For example, one application of CasX variant proteins is gene editing of mammalian cells, which is typically carried out at about 37° C. In some embodiments, a CasX variant protein as described herein has improved thermostability compared to a reference CasX protein at a temperature of at least 16° C., at least 18° C., at least 20° C., at least 22° C., at least 24° C., at least 26° C., at least 28° C., at least 30° C., at least 32° C., at least 34° C., at least 35° C., at least 36° C., at least 37° C., at least 38° C., at least 39° C., at least 40° C., at least 41° C., at least 42° C., at least 44° C., at least 46° C., at least 48° C., at least 50° C., at least 52° C., or greater. In some embodiments, a CasX variant protein has improved thermostability and functionality compared to a reference CasX protein that results in improved gene editing functionality, such as mammalian gene editing applications, which may include human gene editing applications. Improved thermostability of the nuclease may be evaluated through a variety of methods known to one of skill in the art.

[0246] In some embodiments, the disclosure provides a CasX variant protein having improved stability of the CasX variant protein:gNA complex relative to the reference CasX protein:gNA complex such that the RNP remains in a functional form. Stability improvements can include increased thermostability, resistance to proteolytic degradation, enhanced pharmacokinetic properties, stability across a range of pH conditions, salt conditions, and tonicity. Improved stability of the complex may, in some embodiments, lead to improved editing efficiency. In some embodiments, the RNP of the CasX variant and gNA variant has at least a 5%, at least a 10%, at least a 15%, or at least a 20%, or at least a 5-20% higher percentage of cleavage-competent RNP compared to an RNP of the reference CasX of SEQ ID NOS: 1-3 and the gNA of any one of SEQ ID NOS:4-16 of Table 1. Exemplary data of increased cleavage-competent RNP are provided in the Examples.

[0247] In some embodiments, the disclosure provides a CasX variant protein having improved thermostability of the CasX variant protein:gNA complex relative to the reference CasX protein:gNA complex. In some embodiments, a CasX variant protein has improved thermostability relative to a reference CasX protein. In some embodiments, the CasX variant protein:gNA complex has improved thermostability relative to a complex comprising a reference CasX protein at temperatures of at least 16° C., at least 18° C., at least 20° C., at least 22° C., at least 24° C., at least 26° C., at least 28° C., at least 30° C., at least 32° C., at least 34° C., at least 35° C., at least 36° C., at least 37° C., at least 38° C., at least 39° C., at least 40° C., at least 41° C., at least 42° C., at least 44° C., at least 46° C., at least 48° C., at least 50° C., at least 52° C., or greater. In some embodiments, a CasX variant protein has improved thermostability of the CasX variant protein:gNA complex compared to a reference CasX protein:gNA complex, which results in improved function for gene editing applications, such as mammalian gene editing applications, which may include human gene editing applications. Improved thermostability of the RNP may be evaluated through a variety of methods known to one of skill in the art.

[0248] In some embodiments, the improved stability and/or thermostability of the CasX variant protein comprises faster folding kinetics of the CasX variant protein relative to a reference CasX protein, slower unfolding kinetics of the CasX variant protein relative to a reference CasX protein, a larger free energy release upon folding of the CasX variant protein relative to a reference CasX protein, a higher temperature at which 50% of the CasX variant protein is unfolded (Tm) relative to a reference CasX protein, or any combination thereof. These characteristics may be improved by a wide range of values; for example, at least 1.1, at least 1.5, at least 10, at least 50, at least 100, at least 500, at least 1,000, at least 5,000, or at least a 10,000-fold improved, as compared to a reference CasX protein. In some embodiments, improved thermostability of the CasX variant protein comprises a higher Tm of the CasX variant protein relative to a reference CasX protein. In some embodiments, the Tm of the CasX variant protein is between about 20° C. to about 30° C., between about 30° C. to about 40° C., between about 40° C. to about 50° C., between about 50° C. to about 60° C., between about 60° C. to about 70° C., between about 70° C. to about 80° C., between about 80° C. to about 90° C. or between about 90° C. to about 100° C. Thermal stability is determined by measuring the “melting temperature” (Tm), which is defined as the temperature at which half of the molecules are denatured. Methods of measuring characteristics of protein stability such as Tm and the free energy of unfolding are known to persons of ordinary skill in the art, and can be measured using standard biochemical techniques in vitro. For example, Tm may be measured using Differential Scanning Calorimetry, a thermo-analytical technique in which the difference in the amount of heat required to increase the temperature of a sample and a reference is measured as a function of temperature (Chen et al (2003) Pharm Res 20:1952-60; Ghirlando et al (1999) Immunol Lett 68:47-52). Alternatively, or in addition, CasX variant protein Tm may be measured using commercially available methods such as the ThermoFisher Protein Thermal Shift system. Alternatively, or in addition, circular dichroism may be used to measure the kinetics of folding and unfolding, as well as the Tm (Murray et al. (2002) J. Chromatogr Sci 40:343-9). Circular dichroism (CD) relies on the unequal absorption of left-handed and right-handed circularly polarized light by asymmetric molecules such as proteins. Certain structures of proteins, for example alpha-helices and beta-sheets, have characteristic CD spectra. Accordingly, in some embodiments, CD may be used to determine the secondary structure of a CasX variant protein.

[0249] In some embodiments, improved stability and/or thermostability of the CasX variant protein comprises improved folding kinetics of the CasX variant protein relative to a reference CasX protein. In some embodiments, folding kinetics of the CasX variant protein are improved relative to a reference CasX protein by at least about 5, at least about 10, at least about 50, at least about 100, at least about 500, at least about 1,000, at least about 2,000, at least about 3,000, at least about 4,000, at least about 5,000, or at least about a 10,000-fold improvement. In some embodiments, folding kinetics of the CasX variant protein are improved relative to a reference CasX protein by at least about 1 kJ/mol, at least about 5 kJ/mol, at least about 10 kJ/mol, at least about 20 kJ/mol, at least about 30 kJ/mol, at least about 40 kJ/mol, at least about 50 kJ/mol, at least about 60 kJ/mol, at least about 70 kJ/mol, at least about 80 kJ/mol, at least about 90 kJ/mol, at least about 100 kJ/mol, at least about 150 kJ/mol, at least about 200 kJ/mol, at least about 250 kJ/mol, at least about 300 kJ/mol, at least about 350 kJ/mol, at least about 400 kJ/mol, at least about 450 kJ/mol, or at least about 500 kJ/mol.

[0250] Exemplary amino acid changes that can increase the stability of a CasX variant protein relative to a reference CasX protein may include, but are not limited to, amino acid changes that increase the number of hydrogen bonds within the CasX variant protein, increase the number of disulfide bridges within the CasX variant protein, increase the number of salt bridges within the CasX variant protein, strengthen interactions between parts of the CasX variant protein, increase the buried hydrophobic surface area of the CasX variant protein, or any combinations thereof.

[0251] k. Protein Yield

[0252] In some embodiments, the disclosure provides a CasX variant protein having improved yield during expression and purification relative to a reference CasX protein. In some embodiments, the yield of CasX variant proteins purified from bacterial or eukaryotic host cells is improved relative to a reference CasX protein. In some embodiments, the bacterial host cells are Escherichia coli cells. In some embodiments, the eukaryotic cells are yeast, plant (e.g. tobacco), insect (e.g. Spodoptera frugiperda sf9 cells), mouse, rat, hamster, guinea pig, monkey, or human cells. In some embodiments, the eukaryotic host cells are mammalian cells, including, but not limited to human embryonic kidney 293 (HEK293) cells, HEK292T cells, baby hamster kidney (BHK) cells, NS0 cells, SP2/0 cells, YO myeloma cells, P3X63 mouse myeloma cells, PER cells, PER.C6 cells, hybridoma cells, NIH3T3 cells, COS, HeLa, or Chinese hamster ovary (CHO) cells.

[0253] In some embodiments, improved yield of the CasX variant protein is achieved through codon optimization. Cells use 64 different codons, 61 of which encode the 20 standard amino acids, while another 3 function as stop codons. In some cases, a single amino acid is encoded by more than one codon. Different organisms exhibit bias towards use of different codons for the same naturally occurring amino acid. Therefore, the choice of codons in a protein, and matching codon choice to the organism in which the protein will be expressed, can, in some cases, significantly affect protein translation and therefore protein expression levels. In some embodiments, the CasX variant protein is encoded by a nucleic acid that has been codon optimized. In some embodiments, the nucleic acid encoding the CasX variant protein has been codon optimized for expression in a bacterial cell, a yeast cell, an insect cell, a plant cell, or a mammalian cell. In some embodiments, the mammal cell is a mouse, a rat, a hamster, a guinea pig, a monkey, or a human. In some embodiments, the CasX variant protein is encoded by a nucleic acid that has been codon optimized for expression in a human cell. In some embodiments, the CasX variant protein is encoded by a nucleic acid from which nucleotide sequences that reduce translation rates in prokaryotes and eukaryotes have been removed. For example, runs of greater than three thymine residues in a row can reduce translation rates in certain organisms or internal polyadenylation signals can reduce translation.

[0254] Improved protein yield during expression and purification can be evaluated by methods known in the art. For example, the amount of CasX variant protein can be determined by running the protein on an SDS-page gel, and comparing the CasX variant protein to a either a control whose amount or concentration is known in advance to determine an absolute level of protein. Alternatively, or in addition, a purified CasX variant protein can be run on an SDS-page gel next to a reference CasX protein undergoing the same purification process to determine relative improvements in CasX variant protein yield. Alternatively, or in addition, levels of protein can be measured using immunohistochemical methods such as Western blot or ELISA with an antibody to CasX, or by HPLC. For proteins in solution, concentration can be determined by measuring of the protein's intrinsic UV absorbance, or by methods which use protein-dependent color changes such as the Lowry assay, the Smith copper/bicinchoninic assay or the Bradford dye assay. Such methods can be used to calculate the total protein (such as, for example, total soluble protein) yield obtained by expression under certain conditions. This can be compared, for example, to the protein yield of a reference CasX protein under similar expression conditions.

[0255] l. Protein Solubility

[0256] In some embodiments, a CasX variant protein has improved solubility relative to a reference CasX protein. In some embodiments, a CasX variant protein has improved solubility of the CasX:gNA ribonucleoprotein complex variant relative to a ribonucleoprotein complex comprising a reference CasX protein.

[0257] In some embodiments, an improvement in protein solubility leads to higher yield of protein from protein purification techniques such as purification from E. coli. Improved solubility of CasX variant proteins may, in some embodiments, enable more efficient activity in cells, as a more soluble protein may be less likely to aggregate in cells. Protein aggregates can in certain embodiments be toxic or burdensome on cells, and, without wishing to be bound by any theory, increased solubility of a CasX variant protein may ameliorate this result of protein aggregation. Further, improved solubility of CasX variant proteins may allow for enhanced formulations permitting the delivery of a higher effective dose of functional protein, for example in a desired gene editing application. In some embodiments, improved solubility of a CasX variant protein relative to a reference CasX protein results in improved yield of the CasX variant protein during purification of at least about 5, at least about 10, at least about 20, at least about 30, at least about 40, at least about 50, at least about 60, at least about 70, at least about 80, at least about 90, at least about 100, at least about 250, at least about 500, or at least about 1000-fold greater yield. In some embodiments, improved solubility of a CasX variant protein relative to a reference CasX protein improves activity of the CasX variant protein in cells by at least about 1.1, at least about 1.2, at least about 1.3, at least about 1.4, at least about 1.5, at least about 1.6, at least about 1.7, at least about 1.8, at least about 1.9, at least about 2, at least about 2.1, at least about 2.2, at least about 2.3, at least about 2.4, at least about 2.5, at least about 2.6, at least about 2.7, at least about 2.8, at least about 2.9, at least about 3, at least about 3.5, at least about 4, at least about 4.5, at least about 5, at least about 5.5, at least about 6, at least about 6.5, at least about 7.0, at least about 7.5, at least about 8, at least about 8.5, at least about 9, at least about 9.5, at least about 10, at least about 11, at least about 12, at least about 13, at least about 14, or at least about 15-fold greater activity. Improved solubility of the nuclease may be evaluated through a variety of methods known to one of skill in the art, including by taking densitometry readings on a gel of the soluble fraction of lysed E. coli. Alternatively, or addition, improvements in CasX variant protein solubility can be measured by measuring the maintenance of soluble protein product through the course of a full protein purification. For example, soluble protein product can be measured at one or more steps of gel affinity purification, tag cleavage, cation exchange purification, running the protein on a sizing column. In some embodiments, the densitometry of every band of protein on a gel is read after each step in the purification process. CasX variant proteins with improved solubility may, in some embodiments, maintain a higher concentration at one or more steps in the protein purification process when compared to the reference CasX protein, while an insoluble protein variant may be lost at one or more steps due to buffer exchanges, filtration steps, interactions with a purification column, and the like.

[0258] In some embodiments, improving the solubility of CasX variant proteins results in a higher yield in terms of mg/L of protein during protein purification when compared to a reference CasX protein.

[0259] In some embodiments, improving the solubility of CasX variant proteins enables a greater amount of editing events compared to a less soluble protein when assessed in editing assays such as the EGFP disruption assays described herein.

[0260] m. Protein Affinity for the gNA

[0261] In some embodiments, a CasX variant protein has improved affinity for the gNA relative to a reference CasX protein, leading to the formation of the ribonucleoprotein complex. Increased affinity of the CasX variant protein for the gNA may, for example, result in a lower K_{d} for the generation of a RNP complex, which can, in some cases, result in a more stable ribonucleoprotein complex formation. In some embodiments, increased affinity of the CasX variant protein for the gNA results in increased stability of the ribonucleoprotein complex when delivered to human cells. This increased stability can affect the function and utility of the complex in the cells of a subject, as well as result in improved pharmacokinetic properties in blood, when delivered to a subject. In some embodiments, increased affinity of the CasX variant protein, and the resulting increased stability of the ribonucleoprotein complex, allows for a lower dose of the CasX variant protein to be delivered to the subject or cells while still having the desired activity, for example in vivo or in vitro gene editing.

[0262] In some embodiments, a higher affinity (tighter binding) of a CasX variant protein to a gNA allows for a greater amount of editing events when both the CasX variant protein and the gNA remain in an RNP complex. Increased editing events can be assessed using editing assays such as the EGFP disruption assay described herein.

[0263] In some embodiments, the K_{d} of a CasX variant protein for a gNA is increased relative to a reference CasX protein by a factor of at least about 1.1, at least about 1.2, at least about 1.3, at least about 1.4, at least about 1.5, at least about 1.6, at least about 1.7, at least about 1.8, at least about 1.9, at least about 2, at least about 3, at least about 4, at least about 5, at least about 6, at least about 7, at least about 8, at least about 9, at least about 10, at least about 15, at least about 20, at least about 25, at least about 30, at least about 35, at least about 40, at least about 45, at least about 50, at least about 60, at least about 70, at least about 80, at least about 90, or at least about 100. In some embodiments, the CasX variant has about 1.1 to about 10-fold increased binding affinity to the gNA compared to the reference CasX protein of SEQ ID NO:2.

[0264] Without wishing to be bound by theory, in some embodiments amino acid changes in the Helical I domain can increase the binding affinity of the CasX variant protein with the gNA targeting sequence, while changes in the Helical II domain can increase the binding affinity of the CasX variant protein with the gNA scaffold stem loop, and changes in the oligonucleotide binding domain (OBD) increase the binding affinity of the CasX variant protein with the gRNA triplex.

[0265] Methods of measuring CasX protein binding affinity for a gNA include in vitro methods using purified CasX protein and gNA. The binding affinity for reference CasX and variant proteins can be measured by fluorescence polarization if the gNA or CasX protein is tagged with a fluorophore. Alternatively, or in addition, binding affinity can be measured by biolayer interferometry, electrophoretic mobility shift assays (EMSAs), or filter binding. Additional standard techniques to quantify absolute affinities of RNA binding proteins such as the reference CasX and variant proteins of the disclosure for specific gNAs such as reference gNAs and variants thereof include, but are not limited to, isothermal calorimetry (ITC), and surface plasmon resonance (SPR), as well as the methods of the Examples.

[0266] n. Affinity for Target DNA

[0267] In some embodiments, a CasX variant protein has improved binding affinity for a target nucleic acid relative to the affinity of a reference CasX protein for a target nucleic acid. In some embodiments, the improved affinity for the target nucleic acid comprises improved affinity for the target nucleic acid sequence, improved affinity for the PAM sequence, an improved ability to search DNA for the target nucleic acid sequence, or any combinations thereof. Without wishing to be bound by theory, it is thought that CRISPR/Cas system proteins such as CasX may find their target nucleic acid sequences by one-dimension diffusion along a DNA molecule. The process is thought to include (1) binding of the ribonucleoprotein to the DNA molecule followed by (2) stalling at the target nucleic acid sequence, either of which may be, in some embodiments, affected by improved affinity of CasX proteins for a target nucleic acid sequence, thereby improving function of the CasX variant protein compared to a reference CasX protein.

[0268] In some embodiments, a CasX variant protein with improved target nucleic acid affinity has increased overall affinity for DNA. In some embodiments, a CasX variant protein with improved target nucleic acid affinity has increased affinity for specific PAM sequences other than the canonical TTC PAM recognized by the reference CasX protein of SEQ ID NO:2, including binding affinity for PAM sequences selected from the group consisting of TTC, ATC, GTC, and CTC. Without wishing to be bound by theory, it is possible that these protein variants will interact more strongly with DNA overall and will have an increased ability to access and edit sequences within the target DNA due to the ability to bind additional PAM sequences beyond those of wild-type Cas X, thereby allowing for a more efficient search process of the CasX protein for the target sequence. A higher overall affinity for DNA also, in some embodiments, can increase the frequency at which a CasX protein can effectively start and finish a binding and unwinding step, thereby facilitating target strand invasion and R-loop formation, and ultimately the cleavage of a target nucleic acid sequence.

[0269] Without wishing to be bound by theory, it is possible that amino acid changes in the NTSBD that increase the efficiency of unwinding, or capture, of a non-target DNA strand in the unwound state, can increase the affinity of CasX variant proteins for target DNA. Alternatively, or in addition, amino acid changes in the NTSBD that increase the ability of the NTSBD to stabilize DNA during unwinding can increase the affinity of CasX variant proteins for target DNA. Alternatively, or in addition, amino acid changes in the OBD may increase the affinity of CasX variant protein binding to the protospacer adjacent motif (PAM), thereby increasing affinity of the CasX variant protein for target nucleic acid. Alternatively, or in addition, amino acid changes in the Helical I and/or II, RuvC and TSL domains that increase the affinity of the CasX variant protein for the target nucleic acid strand can increase the affinity of the CasX variant protein for target nucleic acid.

[0270] In some embodiments, the CasX variant protein has increased binding affinity to the target nucleic acid sequence compared to the reference protein of SEQ ID NO:1, SEQ ID NO:2, or SEQ ID NO:3. In some embodiments, affinity of a CasX variant protein of the disclosure for a target nucleic acid molecule is increased relative to a reference CasX protein by a factor of at least about 1.1, at least about 1.2, at least about 1.3, at least about 1.4, at least about 1.5, at least about 1.6, at least about 1.7, at least about 1.8, at least about 1.9, at least about 2, at least about 3, at least about 4, at least about 5, at least about 6, at least about 7, at least about 8, at least about 9, at least about 10, at least about 15, at least about 20, at least about 25, at least about 30, at least about 35, at least about 40, at least about 45, at least about 50, at least about 60, at least about 70, at least about 80, at least about 90, or at least about 100.

[0271] In some embodiments, a CasX variant protein has improved binding affinity for the non-target strand of the target nucleic acid. As used herein, the term “non-target strand” refers to the strand of the DNA target nucleic acid sequence that does not form Watson and Crick base pairs with the targeting sequence in the gNA, and is complementary to the target strand.

[0272] Methods of measuring CasX protein (such as reference or variant) affinity for a target nucleic acid molecule may include electrophoretic mobility shift assays (EMSAs), filter binding, isothermal calorimetry (ITC), and surface plasmon resonance (SPR), fluorescence polarization and biolayer interferometry (BLI). Further methods of measuring CasX protein affinity for a target include in vitro biochemical assays that measure DNA cleavage events over time.

[0273] CasX variant proteins with higher affinity for their target nucleic acid may, in some embodiments, cleave the target nucleic acid sequence more rapidly than a reference CasX protein that does not have increased affinity for the target nucleic acid.

[0274] In some embodiments, the CasX variant protein is catalytically dead (dCasX). In some embodiments, the disclosure provides RNP comprising a catalytically-dead CasX protein that retains the ability to bind target DNA. An exemplary catalytically-dead CasX variant protein comprises one or more mutations in the active site of the RuvC domain of the CasX protein. In some embodiments, a catalytically-dead CasX variant protein comprises substitutions at residues 672, 769 and/or 935 of SEQ ID NO:1. In some embodiments, a catalytically-dead CasX variant protein comprises substitutions of D672A, E769A and/or D935A in the reference CasX protein of SEQ ID NO:1. In some embodiments, a catalytically-dead CasX protein comprises substitutions at amino acids 659, 765 and/or 922 of SEQ ID NO:2. In some embodiments, a catalytically-dead CasX protein comprises D659A, E756A and/or D922A substitutions in a reference CasX protein of SEQ ID NO:2. In further embodiments, a catalytically-dead CasX variant protein comprises deletions of all or part of the RuvC domain of the reference CasX protein.

[0275] In some embodiments, improved affinity for DNA of a CasX variant protein also improves the function of catalytically inactive versions of the CasX variant protein. In some embodiments, the catalytically inactive version of the CasX variant protein comprises one or mutations in the DED motif in the RuvC. Catalytically dead CasX variant proteins can, in some embodiments, be used for base editing or epigenetic modifications. With a higher affinity for DNA, in some embodiments, catalytically dead CasX variant proteins can, relative to catalytically active CasX, find their target DNA faster, remain bound to target DNA for longer periods of time, bind target DNA in a more stable fashion, or a combination thereof, thereby improving the function of the catalytically dead CasX variant protein.

[0276] o. Improved Specificity for a Target Site

[0277] In some embodiments, a CasX variant protein has improved specificity for a target DNA sequence relative to a reference CasX protein. As used herein, “specificity,” sometimes referred to as “target specificity,” refers to the degree to which a CRISPR/Cas system ribonucleoprotein complex cleaves off-target sequences that are similar, but not identical to the target DNA sequence; e.g., a CasX variant RNP with a higher degree of specificity would exhibit reduced off-target cleavage of sequences relative to a reference CasX protein. The specificity, and the reduction of potentially deleterious off-target effects, of CRISPR/Cas system proteins can be vitally important in order to achieve an acceptable therapeutic index for use in mammalian subjects.

[0278] In some embodiments, a CasX variant protein has improved specificity for a target site within the target sequence that is complementary to the targeting sequence of the gNA.

[0279] Without wishing to be bound by theory, it is possible that amino acid changes in the Helical I and II domains that increase the specificity of the CasX variant protein for the target DNA strand can increase the specificity of the CasX variant protein for the target DNA overall. In some embodiments, amino acid changes that increase specificity of CasX variant proteins for target DNA may also result in decreased affinity of CasX variant proteins for DNA.

[0280] Methods of testing CasX protein (such as variant or reference) target specificity may include guide and Circularization for In vitro Reporting of Cleavage Effects by Sequencing (CIRCLE-seq), or similar methods. In brief, in CIRCLE-seq techniques, genomic DNA is sheared and circularized by ligation of stem-loop adapters, which are nicked in the stem-loop regions to expose 4 nucleotide palindromic overhangs. This is followed by intramolecular ligation and degradation of remaining linear DNA. Circular DNA molecules containing a CasX cleavage site are subsequently linearized with CasX, and adapter adapters are ligated to the exposed ends followed by high-throughput sequencing to generate paired end reads that contain information about the off-target site. Additional assays that can be used to detect off-target events, and therefore CasX protein specificity include assays used to detect and quantify indels (insertions and deletions) formed at those selected off-target sites such as mismatch-detection nuclease assays and next generation sequencing (NGS). Exemplary mismatch-detection assays include nuclease assays, in which genomic DNA from cells treated with CasX and sgNA is PCR amplified, denatured and rehybridized to form hetero-duplex DNA, containing one wild type strand and one strand with an indel. Mismatches are recognized and cleaved by mismatch detection nucleases, such as Surveyor nuclease or T7 endonuclease I.

[0281] p. Unwinding of DNA

[0282] In some embodiments, a CasX variant protein has improved ability of unwinding DNA relative to a reference CasX protein. In some embodiments, a CasX variant protein has enhanced DNA unwinding characteristics. Poor dsDNA unwinding has been shown previously to impair or prevent the ability of CRISPR/Cas system proteins anaCas9 or Cas14s to cleave DNA. Therefore, without wishing to be bound by any theory, it is likely that increased DNA cleavage activity by some CasX variant proteins is due at least in part to an increased ability to find and unwind the dsDNA at a target site.

[0283] Without wishing to be bound by theory, it is thought that amino acid changes in the NTSB domain may produce CasX variant proteins with increased DNA unwinding characteristics. Alternatively, or in addition, amino acid changes in the OBD or the helical domain regions that interact with the PAM may also produce CasX variant proteins with increased DNA unwinding characteristics.

[0284] Methods of measuring the ability of CasX proteins (such as variant or reference) to unwind DNA include, but are not limited to, in vitro assays that observe increased on rates of dsDNA targets in fluorescence polarization or biolayer interferometry.

[0285] q. Catalytic Activity

[0286] The ribonucleoprotein complex of the CasX:gNA systems disclosed herein comprise a reference CasX protein or variant thereof that bind to a target nucleic acid sequence and cleaves the target nucleic acid sequence. In some embodiments, a CasX variant protein has improved catalytic activity relative to a reference CasX protein. Without wishing to be bound by theory, it is thought that in some cases cleavage of the target strand can be a limiting factor for Cas12-like molecules in creating a dsDNA break. In some embodiments, CasX variant proteins improve bending of the target strand of DNA and cleavage of this strand, resulting in an improvement in the overall efficiency of dsDNA cleavage by the CasX ribonucleoprotein complex.

[0287] In some embodiments, a CasX variant protein has increased nuclease activity compared to a reference CasX protein. Variants with increased nuclease activity can be generated, for example, through amino acid changes in the RuvC nuclease domain. In one embodiment, the CasX variant comprises a nuclease domain having nickase activity. In the foregoing embodiment, the CasX nickase of a CasX:gNA system generates a single-stranded break within 10-18 nucleotides 3′ of a PAM site in the non-target strand. In another embodiment, the CasX variant comprises a nuclease domain having double-stranded cleavage activity. In the foregoing embodiment, the CasX of the CasX:gNA system generates a double-stranded break within 18-26 nucleotides 5′ of a PAM site on the target strand and 10-18 nucleotides 3′ on the non-target strand. Nuclease activity can be assayed by a variety of methods, including those of the Examples. In one embodiment, a CasX variant has a Kcleave constant that is at least 2-fold, or at least 3-fold, or at least 4-fold, or at least 5-fold, or at least 6-fold, or at least 7-fold, or at least 8-fold, or at least 9-fold, or at least 10-fold greater compared to a reference wild-type CasX.

[0288] In some embodiments, a CasX variant protein has the improved characteristic of forming RNP with gNA that result in a higher percentage of cleavage-competent RNP compared to an RNP of a reference CasX protein of SEQ ID NO: 1, SEQ ID NO: 2, or SEQ ID NO: 3 and the gNA, as described in the Examples. By cleavage competent, it is meant that the RNP that is formed has the ability to cleave the target nucleic acid. In some embodiments, the RNP of the CasX variant and the gNA exhibit at least a 2% to at least 30%, or at least a 5% to at least a 20%, or at least a 10% to at least a 15% higher percentage of cleavage-competent RNP compared to an RNP of the reference CasX of SEQ ID NO: 1, SEQ ID NO: 2, or SEQ ID NO: 3 and the gNA of Table 1.

[0289] In some embodiments, a CasX variant protein has increased target strand loading for double strand cleavage. Variants with increased target strand loading activity can be generated, for example, through amino acid changes in the TLS domain.

[0290] Without wishing to be bound by theory, amino acid changes in the TSL domain may result in CasX variant proteins with improved catalytic activity. Alternatively, or in addition, amino acid changes around the binding channel for the RNA:DNA duplex may also improve catalytic activity of the CasX variant protein.

[0291] In some embodiments, a CasX variant protein has increased collateral cleavage activity compared to a reference CasX protein. As used herein, “collateral cleavage activity” refers to additional, non-targeted cleavage of nucleic acids following recognition and cleavage of a target nucleic acid sequence. In some embodiments, a CasX variant protein has decreased collateral cleavage activity compared to a reference CasX protein.

[0292] In some embodiments, for example those embodiments encompassing applications where target DNA cleavage is not a desired outcome, improving the catalytic activity of a CasX variant protein comprises altering, reducing, or abolishing the catalytic activity of the CasX variant protein. In some embodiments, a ribonucleoprotein complex comprising a CasX variant protein binds to a target DNA and does not cleave the target DNA.

[0293] In some embodiments, the CasX ribonucleoprotein complex comprising a CasX variant protein binds a target DNA but generates a single stranded nick in the target DNA. In some embodiments, particularly those embodiments wherein the CasX protein is a nickase, a CasX variant protein has decreased target strand loading for single strand nicking. Variants with decreased target strand loading may be generated, for example, through amino acid changes in the TSL domain.

[0294] Exemplary methods for characterizing the catalytic activity of CasX proteins may include, but are not limited to, in vitro cleavage assays. In some embodiments, electrophoresis of DNA products on agarose gels can interrogate the kinetics of strand cleavage.

[0295] r. Affinity for Target RNA

[0296] In some embodiments, variants of a reference CasX protein increase the specificity of the CasX variant protein for a target HTT RNA, and increase the activity of the CasX variant protein with respect to a target RNA when compared to the reference CasX protein. For example, CasX variant proteins can display increased binding affinity for target RNAs, or increased cleavage of target RNAs, when compared to reference CasX proteins. In some embodiments, a ribonucleoprotein complex comprising a CasX variant protein binds to a target RNA and/or cleaves the target RNA. In one embodiment, a CasX variant has at least about two-fold to about 10-fold increased binding affinity to the target nucleic acid sequence compared to the reference protein of SEQ ID NO:1, SEQ ID NO:2, or SEQ ID NO:3.

[0297] s. Combinations of Mutations

[0298] In some embodiments, the present disclosure provides variants that are a combination of mutations from separate CasX variant proteins. In some embodiments, any variant to any domain described herein can be combined with other variants described herein. In some embodiments, any variant within any domain described herein can be combined with other variants described herein, in the same domain. Combinations of different amino acid changes may in some embodiments produce new optimized variants whose function is further improved by the combination of amino acid changes. In some embodiments, the effect of combining amino acid changes on CasX protein function is linear. As used herein, a combination that is linear refers to a combination whose effect on function is equal to the sum of the effects of each individual amino acid change when assayed in isolation. In some embodiments, the effect of combining amino acid changes on CasX protein function is synergistic. As used herein, a combination of variants that is synergistic refers to a combination whose effect on function is greater than the sum of the effects of each individual amino acid change when assayed in isolation. In some embodiments, combining amino acid changes produces CasX variant proteins in which more than one function of the CasX protein has been improved relative to the reference CasX protein.

[0299] t. CasX Fusion Proteins

[0300] In some embodiments, the disclosure provides CasX proteins comprising a heterologous protein fused to the CasX. In some cases, the CasX is a reference CasX protein. In other cases, the CasX is a CasX variant of any of the embodiments described herein.

[0301] In some embodiments, the CasX variant protein is fused to one or more proteins or domains thereof that has a different activity of interest (i.e., is part of a fusion protein). For example, in some embodiments, the CasX variant protein is fused to a protein (or domain thereof) that inhibits transcription, modifies a target nucleic acid sequence, or modifies a polypeptide associated with a nucleic acid (e.g., histone modification).

[0302] In some embodiments, a heterologous polypeptide (or heterologous amino acid such as a cysteine residue or a non-natural amino acid) can be inserted at one or more positions within a CasX protein to generate a CasX fusion protein. In other embodiments, a cysteine residue can be inserted at one or more positions within a CasX protein followed by conjugation of a heterologous polypeptide described below. In some alternative embodiments, a heterologous polypeptide or heterologous amino acid can be added at the N- or C-terminus of the reference or CasX variant protein. In other embodiments, a heterologous polypeptide or heterologous amino acid can be inserted internally within the sequence of the CasX protein.

[0303] In some embodiments, the reference CasX or variant fusion protein retains RNA-guided sequence specific target nucleic acid binding and cleavage activity. In some cases, the reference CasX or variant fusion protein has (retains) 50% or more of the activity (e.g., cleavage and/or binding activity) of the corresponding reference CasX or variant protein that does not have the insertion of the heterologous protein. In some cases, the reference CasX or variant fusion protein retains at least about 60%, or at least about 70% or more, at least about 80%, or at least about 90%, or at least about 92%, or at least about 95%, or at least about 98%, or at least about 100% of the activity (e.g., cleavage and/or binding activity) of the corresponding CasX protein that does not have the insertion of the heterologous protein.

[0304] In some cases, the reference CasX or variant fusion polypeptide retains (has) target nucleic acid binding activity relative to the activity of the CasX protein without the inserted heterologous amino acid or heterologous polypeptide. For example, in some cases, the reference CasX or variant fusion polypeptide has (retains) 50% or more of the binding activity of the corresponding CasX protein (the CasX protein that does not have the insertion). For example, in some cases, the reference CasX or variant fusion polypeptide has (retains) 60% or more (70% or more, 80% or more, 90% or more, 92% or more, 95% or more, 98% or more, or 100%) of the binding activity of the corresponding parent CasX protein (the CasX protein that does not have the insertion).

[0305] In some cases, the reference CasX or variant fusion polypeptide retains (has) target nucleic acid binding and/or cleavage activity relative to the activity of the parent CasX protein without the inserted heterologous amino acid or heterologous polypeptide. For example, in some cases, the reference CasX or variant fusion polypeptide has (retains) 50% or more of the binding and/or cleavage activity of the corresponding parent CasX protein (the CasX protein that does not have the insertion). For example, in some cases, the reference CasX or variant fusion polypeptide has (retains) 60% or more (70% or more, 80% or more, 90% or more, 92% or more, 95% or more, 98% or more, or 100%) of the binding and/or cleavage activity of the corresponding CasX parent polypeptide (the CasX protein that does not have the insertion). Methods of measuring cleaving and/or binding activity of a CasX protein and/or a CasX fusion polypeptide will be known to one of ordinary skill in the art and any convenient method can be used.

[0306] A variety of heterologous polypeptides are suitable for inclusion in a reference CasX or CasX variant fusion protein of the disclosure. In some cases, the fusion partner can modulate transcription (e.g., inhibit transcription, increase transcription) of a target DNA. For example, in some cases the fusion partner is a protein (or a domain from a protein) that inhibits transcription (e.g., a transcriptional repressor, a protein that functions via recruitment of transcription inhibitor proteins, modification of target DNA such as methylation, recruitment of a DNA modifier, modulation of histones associated with target DNA, recruitment of a histone modifier such as those that modify acetylation and/or methylation of histones, and the like). In some cases the fusion partner is a protein (or a domain from a protein) that increases transcription (e.g., a transcription activator, a protein that acts via recruitment of transcription activator proteins, modification of target DNA such as demethylation, recruitment of a DNA modifier, modulation of histones associated with target DNA, recruitment of a histone modifier such as those that modify acetylation and/or methylation of histones, and the like).

[0307] In some cases, a fusion partner has enzymatic activity that modifies a target nucleic acid sequence (e.g., nuclease activity, methyltransferase activity, demethylase activity, DNA repair activity, DNA damage activity, deamination activity, dismutase activity, alkylation activity, depurination activity, oxidation activity, pyrimidine dimer forming activity, integrase activity, transposase activity, recombinase activity, polymerase activity, ligase activity, helicase activity, photolyase activity or glycosylase activity).

[0308] In some cases, a fusion partner has enzymatic activity that modifies a polypeptide (e.g., a histone) associated with a target nucleic acid (e.g., methyltransferase activity, demethylase activity, acetyltransferase activity, deacetylase activity, kinase activity, phosphatase activity, ubiquitin ligase activity, deubiquitinating activity, adenylation activity, deadenylation activity, SUMOylating activity, deSUMOylating activity, ribosylation activity, deribosylation activity, myristoylation activity or demyristoylation activity).

[0309] Examples of proteins (or fragments thereof) that can be used as a fusion partner to increase transcription include but are not limited to: transcriptional activators such as VP16, VP64, VP48, VP160, p65 subdomain (e.g., from NFkB), and activation domain of EDLL and/or TAL activation domain (e.g., for activity in plants); histone lysine methyltransferases such as SET domain containing 1A, histone lysine methyltransferase (SET1A), SET domain containing 1B, histone lysine methyltransferase (SET1B), lysine methyltransferase 2A (MLL1 to 5, ASCL1 (ASH1) achaete-scute family bHLH transcription factor 1 (ASH1), SET and MYND domain containing 2 (SYMD2), nuclear receptor binding SET domain protein 1 (NSD1), and the like; histone lysine demethylases such as lysine demethylase 3A (JHDM2a)/Lysine-specific demethylase 3B (JHDM2b), lysine demethylase 6A (UTX), lysine demethylase 6B (JMJD3), and the like; histone acetyltransferases such as lysine acetyltransferase 2A (GCN5), lysine acetyltransferase 2B (PCAF), CREB binding protein (CBP), E1A binding protein p300 (p300), TATA-box binding protein associated factor 1 (TAF1), lysine acetyltransferase 5 (TIP60/PLIP), lysine acetyltransferase 6A (MOZ/MYST3), lysine acetyltransferase 6B (MORF/MYST4), SRC proto-oncogene, non-receptor tyrosine kinase (SRC1), nuclear receptor coactivator 3 (ACTR), MYB binding protein 1a (P160), clock circadian regulator (CLOCK), and the like; and DNA demethylases such as Ten-Eleven Translocation (TET) dioxygenase 1 (TET1CD), tet methylcytosine dioxygenase 1 (TET1), demeter (DME), demeter-like 1 (DML1), demeter-like 2 (DML2), protein ROS1 (ROS1), and the like.

[0310] Examples of proteins (or fragments thereof) that can be used as a fusion partner to decrease transcription include but are not limited to: transcriptional repressors such as the Kruppel associated box (KRAB or SKD); KOX1 repression domain; the Mad mSIN3 interaction domain (SID); the ERF repressor domain (ERD), the SRDX repression domain (e.g., for repression in plants), and the like; histone lysine methyltransferases such as PR/SET domain containing protein (Pr-SET7/8), lysine methyltransferase 5B (SUV4- 20H1), PR/SET domain 2 (RIZ1), and the like; histone lysine demethylases such as lysine demethylase 4A (JMJD2A/JHDM3A), lysine demethylase 4B (JMJD2B), lysine demethylase 4C (JMJD2C/GASC1), lysine demethylase 4D (JMJD2D), lysine demethylase 5A (JARID1A/RBP2), lysine demethylase 5B (JARID1B/PLU-1), lysine demethylase 5C (JARID 1C/SMCX), lysine demethylase 5D (JARID1D/SMCY), and the like; histone lysine deacetylases such as histone deacetylase 1 (HDAC1), HDAC2, HDAC3, HDAC8, HDAC4, HDAC5, HDAC7, HDAC9, sirtuin 1 (SIRT1), SIRT2, HDAC11, and the like; DNA methylases such as HhaI DNA m5c-methyltransferase (M.HhaI), DNA methyltransferase 1 (DNMT1), DNA methyltransferase 3a (DNMT3a), DNA methyltransferase 3b (DNMT3b), methyltransferase 1 (MET1), S-adenosyl-L-methionine-dependent methyltransferases superfamily protein (DRM3) (plants), DNA cytosine methyltransferase MET2a (ZMET2), chromomethylase 1 (CMT1), chromomethylase 2 (CMT2) (plants), and the like; and periphery recruitment elements such as Lamin A, Lamin B, and the like.

[0311] In some cases the fusion partner has enzymatic activity that modifies the target nucleic acid sequence (e.g., ssRNA, dsRNA, ssDNA, dsDNA). Examples of enzymatic activity that can be provided by the fusion partner include but are not limited to: nuclease activity such as that provided by a restriction enzyme (e.g., FokI nuclease), methyltransferase activity such as that provided by a methyltransferase (e.g., Hhal DNA m5c-methyltransferase (M.Hhal), DNA methyltransferase 1 (DNMT1), DNA methyltransferase 3a (DNMT3a), DNA methyltransferase 3b (DNMT3b), METI, DRM3 (plants), ZMET2, CMT1, CMT2 (plants), and the like); demethylase activity such as that provided by a demethylase (e.g., Ten-Eleven Translocation (TET) dioxygenase 1 (TET 1 CD), TET1, DME, DML1, DML2, ROS1, and the like), DNA repair activity, DNA damage activity, deamination activity such as that provided by a deaminase (e.g., a cytosine deaminase enzyme, e.g., an APOBEC protein such as rat APOBECl), dismutase activity, alkylation activity, depurination activity, oxidation activity, pyrimidine dimer forming activity, integrase activity such as that provided by an integrase and/or resolvase (e.g., Gin invertase such as the hyperactive mutant of the Gin invertase, GinH106Y; human immunodeficiency virus type 1 integrase (IN); Tn3 resolvase; and the like), transposase activity, recombinase activity such as that provided by a recombinase (e.g., catalytic domain of Gin recombinase), polymerase activity, ligase activity, helicase activity, photolyase activity, and glycosylase activity).

[0312] In some cases, a reference CasX or Cas X variant protein of the present disclosure is fused to a polypeptide selected from: a domain for increasing transcription (e.g., a VP16 domain, a VP64 domain), a domain for decreasing transcription (e.g., a KRAB domain, e.g., from the Kox1 protein), a core catalytic domain of a histone acetyltransferase (e.g., histone acetyltransferase p300), a protein/domain that provides a detectable signal (e.g., a fluorescent protein such as GFP), a nuclease domain (e.g., a Fokl nuclease), and a base editor (e.g., cytidine deaminase such as APOBEC1).

[0313] In some cases, the fusion partner has enzymatic activity that modifies a protein associated with the target nucleic acid sequence (e.g., ssRNA, dsRNA, ssDNA, dsDNA) (e.g., a histone, an RNA binding protein, a DNA binding protein, and the like). Examples of enzymatic activity (that modifies a protein associated with a target nucleic acid) that can be provided by the fusion partner include but are not limited to: methyltransferase activity such as that provided by a histone methyltransferase (HMT) (e.g., suppressor of variegation 3-9 homolog 1 (SUV39H1, also known as KMT1A), euchromatic histone lysine methyltransferase 2 (G9A, also known as KMT1C and EHMT2), SUV39H2, ESET/SETDB 1, and the like, SET1A, SET1B, MLL1 to 5, ASH1, SYMD2, NSD1, DOT1L, Pr-SET7/8, SUV4-20H1, EZH2, RIZ1), demethylase activity such as that provided by a histone demethylase (e.g., Lysine Demethylase 1A (KDM1A also known as LSD1), JHDM2a/b, JMJD2A/JHDM3A, JMJD2B, JMJD2C/GASC1, JMJD2D, JARID1A/RBP2, JARID1B/PLU-1, JARID1C/SMCX, JARID1D/SMCY, UTX, JMJD3, and the like), acetyltransferase activity such as that provided by a histone acetylase transferase (e.g., catalytic core/fragment of the human acetyltransferase p300, GCN5, PCAF, CBP, TAF1, TIP60/PLIP, MOZ/MYST3, MORF/MYST4, HB01/MYST2, HMOF/MYST1, SRC1, ACTR, P160, CLOCK, and the like), deacetylase activity such as that provided by a histone deacetylase (e.g., HDAC1, HDAC2, HDAC3, HDAC8, HDAC4, HDAC5, HDAC7, HDAC9, SIRT1, SIRT2, HDAC11, and the like), kinase activity, phosphatase activity, ubiquitin ligase activity, deubiquitinating activity, adenylation activity, deadenylation activity, SUMOylating activity, deSUMOylating activity, ribosylation activity, deribosylation activity, myristoylation activity, and demyristoylation activity.

[0314] Additional examples of suitable fusion partners are (i) a dihydrofolate reductase (DHFR) destabilization domain to generate a chemically controllable subject RNA-guided polypeptide or a conditionally active RNA-guided polypeptide, and (ii) a chloroplast transit peptide.

[0315] Suitable chloroplast transit peptides include, but are not limited to:

(SEQ ID NO: 39967)
MASMISSSAVTTVSRASRGQSAAMAPFGGLKSMTGFPVRKVNTDITSIT
SNGGRVKCMQVWPPIGKKKFETLSYLPPLTRDSRA;
(SEQ ID NO: 39980)
MASMISSSAVTTVSRASRGQSAAMAPFGGLKSMTGFPVRKVNTDITSIT
SNGGRVKS;
(SEQ ID NO: 39968)
MASSMLSSATMVASPAQATMVAPFNGLKSSAAFPATRKANNDITSITSN
GGRVNCMQVWPPIEKKKFETLSYLPDLTDSGGRVNC;
(SEQ ID NO: 39969)
MAQVSRICNGVQNPSLISNLSKSSQRKSPLSVSLKTQQHPRAYPISSSW
GLKKSGMTLIGSELRPLKVMSSVSTAC;
(SEQ ID NO: 39970)
MAQVSRICNGVWNPSLISNLSKSSQRKSPLSVSLKTQQHPRAYPISSSW
GLKKSGMTLIGSELRPLKVMSSVSTAC;
(SEQ ID NO: 39971)
MAQINNMAQGIQTLNPNSNFHKPQVPKSSSFLVFGSKKLKNSANSMLVL
KKDSIFMQLFCSFRISASVATAC;
(SEQ ID NO: 39972)
MAALVTSQLATSGTVLSVTDRFRRPGFQGLRPRNPADAALGMRTVGASA
APKQSRKPHRFDRRCLSMVV;
(SEQ ID NO: 39973)
MAALTTSQLATSATGFGIADRSAPSSLLRHGFQGLKPRSPAGGDATSLS
VTTSARATPKQQRSVQRGSRRFPSVVVC;
(SEQ ID NO: 39974)
MASSVLSSAAVATRSNVAQANMVAPFTGLKSAASFPVSRKQNLDITSIA
SNGGRVQC;
(SEQ ID NO: 39975)
MESLAATSVFAPSRVAVPAARALVRAGTVVPTRRTSSTSGTSGVKCSAA
VTPQASPVISRSAAAA;
and
(SEQ ID NO: 39976)
MGAAATSMQSLKFSNRLVPPSRRLSPVPNNVTCNNLPKSAAPVRTVKCC
ASSWNSTINGAAATTNGASAASS.

[0316] In some cases, a reference CasX or variant polypeptide of the present disclosure can include an endosomal escape peptide. In some cases, an endosomal escape polypeptide comprises the amino acid sequence GLFXALLXLLXSLWXLLLXA (SEQ ID NO: 39977), wherein each X is independently selected from lysine, histidine, and arginine. In some cases, an endosomal escape polypeptide comprises the amino acid sequence

(SEQ ID NO: 39978)
GLFHALLHLLHSLWHLLLHA,
or
(SEQ ID NO: 39979)
HHHHHHHHH .

[0317] Non-limiting examples of fusion partners for use when targeting ssRNA target nucleic acid sequences include (but are not limited to): splicing factors (e.g., RS domains); protein translation components (e.g., translation initiation, elongation, and/or release factors; e.g., eIF4G); RNA methylases; RNA editing enzymes (e.g., RNA deaminases, e.g., adenosine deaminase acting on RNA (ADAR), including A to I and/or C to U editing enzymes); helicases; RNA-binding proteins; and the like. It is understood that a heterologous polypeptide can include the entire protein or in some cases can include a fragment of the protein (e.g., a functional domain).

[0318] A fusion partner can be any domain capable of interacting with ssRNA (which, for the purposes of this disclosure, includes intramolecular and/or intermolecular secondary structures, e.g., double-stranded RNA duplexes such as hairpins, stem-loops, etc.), whether transiently or irreversibly, directly or indirectly, including but not limited to an effector domain selected from the group comprising; Endonucleases (for example RNase III, the CRR22 DYW domain, Dicer, and PIN (PilT N-terminus) domains from proteins such as SMG5 and SMG6); proteins and protein domains responsible for stimulating RNA cleavage (for example CPSF, CstF, CFIm and CFIIm); Exonucleases (for example XRN-1 or Exonuclease T); Deadenylases (for example HNT3); proteins and protein domains responsible for nonsense mediated RNA decay (for example UPF1, UPF2, UPF3, UPF3b, RNP SI, Y14, DEK, REF2, and SRm160); proteins and protein domains responsible for stabilizing RNA (for example PABP); proteins and protein domains responsible for repressing translation (for example Ago2 and Ago4); proteins and protein domains responsible for stimulating translation (for example Staufen); proteins and protein domains responsible for (e.g., capable of) modulating translation (e.g., translation factors such as initiation factors, elongation factors, release factors, etc., e.g., eIF4G); proteins and protein domains responsible for polyadenylation of RNA (for example PAP1, GLD-2, and Star-PAP); proteins and protein domains responsible for polyuridinylation of RNA (for example CI Dl and terminal uridylate transferase); proteins and protein domains responsible for RNA localization (for example from IMP1, ZBP1, She2p, She3p, and Bicaudal-D); proteins and protein domains responsible for nuclear retention of RNA (for example Rrp6); proteins and protein domains responsible for nuclear export of RNA (for example TAP, NXF1, THO, TREX, REF, and Aly); proteins and protein domains responsible for repression of RNA splicing (for example PTB, Sam68, and hnRNP A1); proteins and protein domains responsible for stimulation of RNA splicing (for example Serine/Arginine-rich (SR) domains); proteins and protein domains responsible for reducing the efficiency of transcription (for example FUS (TLS)); and proteins and protein domains responsible for stimulating transcription (for example CDK7 and HIV Tat). Alternatively, the effector domain may be selected from the group comprising Endonucleases; proteins and protein domains capable of stimulating RNA cleavage; Exonucleases; Deadenylases; proteins and protein domains having nonsense mediated RNA decay activity; proteins and protein domains capable of stabilizing RNA; proteins and protein domains capable of repressing translation; proteins and protein domains capable of stimulating translation; proteins and protein domains capable of modulating translation (e.g., translation factors such as initiation factors, elongation factors, release factors, etc., e.g., eIF4G); proteins and protein domains capable of polyadenylation of RNA; proteins and protein domains capable of polyuridinylation of RNA; proteins and protein domains having RNA localization activity; proteins and protein domains capable of nuclear retention of RNA; proteins and protein domains having RNA nuclear export activity; proteins and protein domains capable of repression of RNA splicing; proteins and protein domains capable of stimulation of RNA splicing; proteins and protein domains capable of reducing the efficiency of transcription; and proteins and protein domains capable of stimulating transcription. Another suitable heterologous polypeptide is a PUF RNA-binding domain, which is described in more detail in WO2012068627, which is hereby incorporated by reference in its entirety.

[0319] Some RNA splicing factors that can be used (in whole or as fragments thereof) as a fusion partner have modular organization, with separate sequence-specific RNA binding modules and splicing effector domains. For example, members of the serine/arginine-rich (SR) protein family contain N-terminal RNA recognition motifs (RRMs) that bind to exonic splicing enhancers (ESEs) in pre-mRNAs and C-terminal RS domains that promote exon inclusion. As another example, the hnRNP protein hnRNP Al binds to exonic splicing silencers (ESSs) through its RRM domains and inhibits exon inclusion through a C-terminal Glycine-rich domain. Some splicing factors can regulate alternative use of splice site (ss) by binding to regulatory sequences between the two alternative sites. For example, ASF/SF2 can recognize ESEs and promote the use of intron proximal sites, whereas hnRNP Al can bind to ESSs and shift splicing towards the use of intron distal sites. One application for such factors is to generate ESFs that modulate alternative splicing of endogenous genes, particularly disease associated genes. For example, Bcl-x pre-mRNA produces two splicing isoforms with two alternative 5′ splice sites to encode proteins of opposite functions. The long splicing isoform Bcl-xL is a potent apoptosis inhibitor expressed in long-lived post mitotic cells and is up-regulated in many cancer cells, protecting cells against apoptotic signals. The short isoform Bcl-xS is a pro-apoptotic isoform and expressed at high levels in cells with a high turnover rate (e.g., developing lymphocytes). The ratio of the two Bcl-x splicing isoforms is regulated by multiple cc-elements that are located in either the core exon region or the exon extension region (i.e., between the two alternative 5′ splice sites). For more examples, see WO2010075303, which is hereby incorporated by reference in its entirety.

[0320] Further suitable fusion partners include, but are not limited to proteins (or fragments thereof) that are boundary elements (e.g., CTCF), proteins and fragments thereof that provide periphery recruitment (e.g., Lamin A, Lamin B, etc.), protein docking elements (e.g., FKBP/FRB, Pill/Abyl, etc.).

[0321] In some cases, a heterologous polypeptide (a fusion partner) provides for subcellular localization, i.e., the heterologous polypeptide contains a subcellular localization sequence (e.g., a nuclear localization signal (NLS) for targeting to the nucleus, a sequence to keep the fusion protein out of the nucleus, e.g., a nuclear export sequence (NES), a sequence to keep the fusion protein retained in the cytoplasm, a mitochondrial localization signal for targeting to the mitochondria, a chloroplast localization signal for targeting to a chloroplast, an ER retention signal, and the like). In some embodiments, a subject RNA-guided polypeptide or a conditionally active RNA-guided polypeptide and/or subject CasX fusion polypeptide does not include a NLS so that the protein is not targeted to the nucleus (which can be advantageous, e.g., when the target nucleic acid sequence is an RNA that is present in the cytosol). In some embodiments, a fusion partner can provide a tag (i.e., the heterologous polypeptide is a detectable label) for ease of tracking and/or purification (e.g., a fluorescent protein, e.g., green fluorescent protein (GFP), yellow fluorescent protein (YFP), red fluorescent protein (RFP), cyan fluorescent protein (CFP), mCherry, tdTomato, and the like; a histidine tag, e.g., a 6×His tag; a hemagglutinin (HA) tag; a FLAG tag; a Myc tag; and the like).

[0322] In some cases a reference or CasX variant polypeptide includes (is fused to) a nuclear localization signal (NLS) (e.g., in some cases 2 or more, 3 or more, 4 or more, or 5 or more 6 or more, 7 or more, 8 or more NLSs). Thus, in some cases, a reference or CasX variant polypeptide includes one or more NLSs (e.g., 2 or more, 3 or more, 4 or more, or 5 or more NLSs). In some cases, one or more NLSs (2 or more, 3 or more, 4 or more, or 5 or more NLSs) are positioned at or near (e.g., within 50 amino acids of) the N-terminus and/or the C-terminus. In some cases, one or more NLSs (2 or more, 3 or more, 4 or more, or 5 or more NLSs) are positioned at or near (e.g., within 50 amino acids of) the N-terminus. In some cases, one or more NLSs (2 or more, 3 or more, 4 or more, or 5 or more NLSs) are positioned at or near (e.g., within 50 amino acids of) the C-terminus. In some cases, one or more NLSs (3 or more, 4 or more, or 5 or more NLSs) are positioned at or near (e.g., within 50 amino acids of) both the N-terminus and the C-terminus. In some cases, an NLS is positioned at the N-terminus and an NLS is positioned at the C-terminus. In some cases a reference or CasX variant polypeptide includes (is fused to) between 1 and 10 NLSs (e.g., 1-9, 1-8, 1-7, 1-6, 1-5, 2-10, 2-9, 2-8, 2-7, 2-6, or 2-5 NLSs). In some cases a reference or CasX variant polypeptide includes (is fused to) between 2 and 5 NLSs (e.g., 2-4, or 2-3 NLSs).

[0323] Non-limiting examples of NLSs include sequences derived from: the NLS of the SV40 virus large T-antigen, having the amino acid sequence PKKKRKV (SEQ ID NO: 196); the NLS from nucleoplasmin (e.g., the nucleoplasmin bipartite NLS with the sequence KRPAATKKAGQAKKKK (SEQ ID NO: 197); the c-myc NLS having the amino acid sequence PAAKRVKLD (SEQ ID NO: 198) or RQRRNELKRSP (SEQ ID NO: 161); the hRNPA1 M9 NLS having the sequence NQSSNFGPMKGGNFGGRSSGPYGGGGQYFAKPRNQGGY (SEQ ID NO: 162); the sequence RMRIZFKNKGKDTAELRRRRVEVSVELRKAKKDEQILKRRNV (SEQ ID NO: 163) of the IBB domain from importin-alpha; the sequences VSRKRPRP (SEQ ID NO: 164) and PPKKARED (SEQ ID NO: 165) of the myoma T protein; the sequence PQPKKKPL (SEQ ID NO: 166) of human p53; the sequence SALIKKKKKMAP (SEQ ID NO: 167) of mouse c-abl IV; the sequences DRLRR (SEQ ID NO: 168) and PKQKKRK (SEQ ID NO: 169) of the influenza virus NS1; the sequence RKLKKKIKKL (SEQ ID NO: 170) of the Hepatitis virus delta antigen; the sequence REKKKFLKRR (SEQ ID NO: 171) of the mouse Mxl protein; the sequence KRKGDEVDGVDEVAKKKSKK (SEQ ID NO: 172) of the human poly(ADP-ribose) polymerase; the sequence RKCLQAGMNLEARKTKK (SEQ ID NO: 173) of the steroid hormone receptors (human) glucocorticoid; the sequence PRPRKIPR (SEQ ID NO: 174) of Borna disease virus P protein (BDV-P1); the sequence PPRKKRTVV (SEQ ID NO: 175) of hepatitis C virus nonstructural protein (HCV-NS5A); the sequence NLSKKKKRKREK (SEQ ID NO: 176) of LEF1; the sequence RRPSRPFRKP (SEQ ID NO: 177) of ORF57 simirae; the sequence KRPRSPSS (SEQ ID NO: 178) of EBV LANA; the sequence KRGINDRNFWRGENERKTR (SEQ ID NO: 179) of Influenza A protein; the sequence PRPPKMARYDN (SEQ ID NO: 180) of human RNA helicase A (RHA); the sequence KRSFSKAF (SEQ ID NO: 181) of nucleolar RNA helicase II; the sequence KLKIKRPVK (SEQ ID NO: 182) of TUS-protein; the sequence PKKKRKVPPPPAAKRVKLD (SEQ ID NO: 183) associated with importin-alpha; the sequence PKTRRRPRRSQRKRPPT (SEQ ID NO: 184) from the Rex protein in HTLV-1; the sequence MSRRRKANPTKLSENAKKLAKEVEN (SEQ ID NO: 185) from the EGL-13 protein of Caenorhabditis elegans; and the sequences KTRRRPRRSQRKRPPT (SEQ ID NO: 186), RRKKRRPRRKKRR (SEQ ID NO: 187), PKKKSRKPKKKSRK (SEQ ID NO: 188), HKKKHPDASVNFSEFSK (SEQ ID NO: 189), QRPGPYDRPQRPGPYDRP (SEQ ID NO: 190), LSPSLSPLLSPSLSPL (SEQ ID NO: 191), RGKGGKGLGKGGAKRHRK (SEQ ID NO: 192), PKRGRGRPKRGRGR (SEQ ID NO: 193), PKKKRKVPPPPAAKRVKLD (SEQ ID NO: 183) and PKKKRKVPPPPKKKRKV (SEQ ID NO: 194). In general, NLS (or multiple NLSs) are of sufficient strength to drive accumulation of a reference or CasX variant fusion protein in the nucleus of a eukaryotic cell. Detection of accumulation in the nucleus may be performed by any suitable technique. For example, a detectable marker may be fused to a reference or CasX variant fusion protein such that location within a cell may be visualized. Cell nuclei may also be isolated from cells, the contents of which may then be analyzed by any suitable process for detecting protein, such as immunohistochemistry, Western blot, or enzyme activity assay. Accumulation in the nucleus may also be determined.

[0324] In some cases, a reference or CasX variant fusion protein includes a “Protein Transduction Domain” or PTD (also known as a CPP—cell penetrating peptide), which refers to a protein, polynucleotide, carbohydrate, or organic or inorganic compound that facilitates traversing a lipid bilayer, micelle, cell membrane, organelle membrane, or vesicle membrane. A PTD attached to another molecule, which can range from a small polar molecule to a large macromolecule and/or a nanoparticle, facilitates the molecule traversing a membrane, for example going from an extracellular space to an intracellular space, or from the cytosol to within an organelle. In some embodiments, a PTD is covalently linked to the amino terminus of a reference or CasX variant fusion protein. In some embodiments, a PTD is covalently linked to the carboxyl terminus of a reference or CasX variant fusion protein. In some cases, the PTD is inserted internally in the sequence of a reference or CasX variant fusion protein at a suitable insertion site. In some cases, a reference or CasX variant fusion protein includes (is conjugated to, is fused to) one or more PTDs (e.g., two or more, three or more, four or more PTDs). In some cases, a PTD includes one or more nuclear localization signals (NLS). Examples of PTDs include but are not limited to peptide transduction domain of HIV TAT comprising YGRKKRRQRRR (SEQ ID NO: 198), RKKRRQRR (SEQ ID NO: 199); YARAAARQARA (SEQ ID NO: 200); THRLPRRRRRR (SEQ ID NO: 201); and GGRRARRRRRR (SEQ ID NO: 202); a polyarginine sequence comprising a number of arginines sufficient to direct entry into a cell (e.g., 3, 4, 5, 6, 7, 8, 9, 10, or 10-50 arginines (SEQ ID NO: 203)); a VP22 domain (Zender et al. (2002) Cancer Gene Ther. 9(6):489-96); an Drosophila Antennapedia protein transduction domain (Noguchi et al. (2003) Diabetes 52(7): 1732-1737); a truncated human calcitonin peptide (Trehin et al. (2004) Pharm. Research 21:1248-1256); polylysine (Wender et al. (2000) Proc. Natl. Acad. Sci. USA 97: 13003-13008); RRQRRTSKLMKR (SEQ ID NO: 204); Transportan GWTLNSAGYLLGKINLKALAALAKKIL (SEQ ID NO: 205); KALAWEAKLAKALAKALAKHLAKALAKALKCEA (SEQ ID NO: 206); and RQIKIWFQNRRMKWKK (SEQ ID NO: 207). In some embodiments, the PTD is an activatable CPP (ACPP) (Aguilera et al. (2009) Integr Biol (Camb) June; 1(5-6): 371-381). ACPPs comprise a polycationic CPP (e.g., Arg9 or “R9”) connected via a cleavable linker to a matching polyanion (e.g., Glu9 or “E9”), which reduces the net charge to nearly zero and thereby inhibits adhesion and uptake into cells. Upon cleavage of the linker, the polyanion is released, locally unmasking the polyarginine and its inherent adhesiveness, thus “activating” the ACPP to traverse the membrane.

[0325] In some embodiments, a reference or CasX variant fusion protein can include a CasX protein that is linked to an internally inserted heterologous amino acid or heterologous polypeptide (a heterologous amino acid sequence) via a linker polypeptide (e.g., one or more linker polypeptides). In some embodiments, a reference or CasX variant fusion protein can be linked at the C-terminal and/or N-terminal end to a heterologous polypeptide (fusion partner) via a linker polypeptide (e.g., one or more linker polypeptides) The linker polypeptide may have any of a variety of amino acid sequences. Proteins can be joined by a spacer peptide, generally of a flexible nature, although other chemical linkages are not excluded. Suitable linkers include polypeptides of between 4 amino acids and 40 amino acids in length, or between 4 amino acids and 25 amino acids in length. These linkers are generally produced by using synthetic, linker-encoding oligonucleotides to couple the proteins. Peptide linkers with a degree of flexibility can be used. The linking peptides may have virtually any amino acid sequence, bearing in mind that the preferred linkers will have a sequence that results in a generally flexible peptide. The use of small amino acids, such as glycine and alanine, are of use in creating a flexible peptide. The creation of such sequences is routine to those of skill in the art. A variety of different linkers are commercially available and are considered suitable for use. Example linker polypeptides include glycine polymers (G)n, glycine-serine polymer (including, for example, (GS)n, GSGGSn (SEQ ID NO: 208), GGSGGSn (SEQ ID NO: 209), and GGGSn (SEQ ID NO: 210), where n is an integer of at least one), glycine-alanine polymers, alanine-serine polymers, glycine-proline polymers, proline polymers and proline-alanine polymers. Example linkers can comprise amino acid sequences including, but not limited to, GGSG (SEQ ID NO: 211), GGSGG (SEQ ID NO: 212), GSGSG (SEQ ID NO: 213), GSGGG (SEQ ID NO: 214), GGGSG (SEQ ID NO: 215), GSSSG (SEQ ID NO: 216), GPGP (SEQ ID NO: 217), GGP, PPP, PPAPPA (SEQ ID NO: 218), PPPGPPP (SEQ ID NO: 219) and the like. The ordinarily skilled artisan will recognize that design of a peptide conjugated to any elements described above can include linkers that are all or partially flexible, such that the linker can include a flexible linker as well as one or more portions that confer less flexible structure.

### V. Systems and Methods for Modification of HTT Nucleic Acids

[0326] The CRISPR proteins, guide nucleic acids, and variants thereof provided herein are useful for various applications, including as therapeutics, diagnostics, and for research. To effect the methods of the disclosure for gene editing, resulting in modification of the gene, provided herein are programmable Class 2, Type V CRISPR systems. The programmable nature of the systems provided herein allows for the precise targeting to achieve the desired effect (nicking, cleaving, repairing, etc.) at one or more regions of predetermined interest in the target nucleic acid sequence of the HTT gene. A variety of strategies and methods can be employed to modify the target nucleic acid sequence in a cell using the systems provided herein. As used herein “modifying” includes, but is not limited to, cleaving, nicking, editing, deleting, knocking out, knocking down, mutating, correcting, exon-skipping and the like. Depending on the system components utilized, the editing event may be a cleavage event followed by introducing random insertions or deletions (indels) or other mutations (e.g., a substitution, duplication, or inversion of one or more nucleotides), for example by utilizing the imprecise non-homologous DNA end joining (NHEJ) repair pathway, which may generate, for example, a frame shift mutation. Alternatively, the editing event may be a cleavage event followed by homology-directed repair (HDR), homology-independent targeted integration (HITI), micro-homology mediated end joining (MMEJ), single strand annealing (SSA) or base excision repair (BER), resulting in modification of the target nucleic acid sequence.

[0327] In some embodiments, the disclosure provides methods of modifying an HTT target nucleic acid in a cell, the method comprising introducing into the cell a Class 2, Type V CRISPR system. In some embodiments, the disclosure provides methods of modifying an HTT target nucleic acid in a cell, the method comprising introducing into the cell: i) a CasX:gNA system comprising a CasX and a gNA of any one of the embodiments described herein; ii) a CasX:gNA system comprising a CasX, a gNA, and a donor template of any one of the embodiments described herein; iii) one or more nucleic acids encoding the CasX and the gNA, and optionally comprising the donor template; iv) a vector comprising the nucleic acid of (iii), above; v) a VLP comprising the CasX:gNA system of any one of the embodiments described herein; or vi) combinations of two or more of (i) to (v), wherein the target nucleic acid sequence of the cell is modified by the CasX protein and, optionally, the donor template. In some embodiments, the disclosure provides CasX:gNA systems for use in the methods of modifying the HTT gene in a cell, wherein the system comprises a CasX variant of SEQ ID NOS: 49-160, 221-223, 227-230, 235-247, or 258-267 as set forth in Tables 4, 6, 7, 8, or 10 or a variant sequence at least 60% identical, at least 70% identical, at least 80% identical, at least 81% identical, at least 82% identical, at least 83% identical, at least 84% identical, at least 85% identical, at least 86% identical, at least 86% identical, at least 87% identical, at least 88% identical, at least 89% identical, at least 89% identical, at least 90% identical, at least 91% identical, at least 92% identical, at least 93% identical, at least 94% identical, at least 95% identical, at least 96% identical, at least 97% identical, at least 98% identical, at least 99% identical, or at least 99.5% identical thereto, the gNA scaffold comprises a sequence of SEQ ID NOS: 2101-2285 as set forth in Table 2 or a sequence at least 65% identical, at least 70% identical, at least 75% identical, at least 80% identical, at least 81% identical, at least 82% identical, at least 83% identical, at least 84% identical, at least 85% identical, at least 86% identical, at least 86% identical, at least 87% identical, at least 88% identical, at least 89% identical, at least 89% identical, at least 90% identical, at least 91% identical, at least 92% identical, at least 93% identical, at least 94% identical, at least 95% identical, at least 96% identical, at least 97% identical, at least 98% identical, at least 99% identical, at least 99.5% identical thereto, and the gNA comprises a targeting sequence selected from the group consisting of SEQ ID NOS: 409-2100 and 2286-39966 or a sequence at least 65% identical, at least 70% identical, at least 75% identical, at least 80% identical, at least 85% identical, at least 90% identical, or at least 95% identical thereto and having between 15 and 30 amino acids.

[0328] In those cases where the CasX is delivered to the cell in the protein form and the gNA is delivered in the RNA form, the CasX and gNA can be pre-complexed and delivered as an RNP. Upon hybridization with the target nucleic acid by the CasX and the gNA, the CasX introduces one or more single-strand breaks or double-strand breaks within or near the HTT gene that result in a modification of the target nucleic acid such as a permanent indel (deletion or insertion) or other mutation (a base change, inversion or rearrangement with respect to the genomic sequence) in the target nucleic acid, as described herein, with a corresponding modulation of expression or alteration in the function of the HTT gene product, thereby creating an edited cell. In some embodiments, the mutation to be corrected by the method is a gain of function mutation. In other embodiments, the mutation to be corrected by the method is a loss of function mutation. In some cases, the huntingtin protein to be modified comprises a mutation that disrupts the function of the huntingtin protein. In some embodiments, the modification comprises correction of the mutation to wild-type sequence. In other embodiments of the method, the modification comprises altering or suppressing expression of the huntingtin protein comprising the mutation(s) by a knock-down or knock-out of the gene.

[0329] In other embodiments, the method comprises contacting the target nucleic acid sequence with a plurality of gNAs targeted to different or overlapping portions of the HTT gene wherein the CasX protein introduces multiple breaks in the target nucleic acid sequence that result in a permanent indel (deletion or insertion) or other mutation in the target nucleic acid, as described herein, with a corresponding modulation of expression or alteration in the function of the HTT gene product, thereby creating an edited cell. In some embodiments of the methods, the RNP are delivered to the in vitro cell directly by electroporation, injection, nucleofection, delivery via liposomes, delivery by nanoparticles, by encapsidation in a VLP (embodiments of which are described herein), or using a protein transduction domain (PTD) conjugated to one or more components of the CasX:gNA. In some cases, the CasX:gNA system is designed to knock-down or knock-out the HTT gene. In other cases, the CasX:gNA system is designed to correct or compensate for the mutations of the HTT gene such that a functional huntingtin protein can be expressed.

[0330] In some cases, the CasX:gNA system for use in the methods of modifying the HTT gene further comprises a donor template nucleic acid of any of the embodiments disclosed herein, wherein the donor template can be inserted by the homology-directed repair (HDR) or homology-independent targeted integration (HITI) repair mechanisms of the host cell. The donor template can be a short single-stranded or double-stranded oligonucleotide, or a long single-stranded or double-stranded oligonucleotide. The donor template may contain one or more single base changes, insertions, deletions, inversions or rearrangements with respect to the genomic sequence, provided that there is sufficient homology with the target nucleic acid sequence to support its integration into the target nucleic acid, which can result in a frame-shift or other mutation such that the non-functional huntingtin protein is not expressed or is expressed at a lower level. In other cases, the donor template may contain a sequence to correct or compensate for the mutation(s) in the HTT gene such that a functional huntintin protein can be expressed. In some embodiments, the donor template sequence comprises a non-homologous sequence flanked by two regions of homology 5′ and 3′ to the break sites of the target nucleic acid (i.e., homologous arms), facilitating insertion of the non-homologous sequence at the target region which can be mediated by HDR or HITI. The exogenous donor template inserted by HITI can be any length, for example, a relatively short sequence of between 1 and 50 nucleotides in length, or a longer sequence of about 50-1000 nucleotides in length. The lack of homology can be, for example, having no more than 20-50% sequence identity and/or lacking in specific hybridization at low stringency. In other cases, the lack of homology can further include a criterion of having no more than 5, 6, 7, 8, or 9 bp identity. In some embodiments, the donor template polynucleotide comprises at least about 10, at least about 50, at least about 100, or at least about 200, or at least about 300, or at least about 400, or at least about 500, or at least about 600, or at least about 700, or at least about 800, or at least about 900, or at least about 1000, or at least about 10,000, or at least about 15,000 nucleotides. In other embodiments, the donor template comprises at least about 10 to about 15,000 nucleotides, or at least about 100 to about 10,000 nucleotides, or at least about 400 to about 8,000 nucleotides, or at least about 600 to about 5000 nucleotides, or at least about 1000 to about 2000 nucleotides. The donor template sequence may comprise certain sequence differences as compared to the genomic sequence; e.g., restriction sites, nucleotide polymorphisms, selectable markers (e.g., drug resistance genes, fluorescent proteins, enzymes etc.), etc., which may be used to assess for successful insertion of the donor nucleic acid at the cleavage site or in some cases may be used for other purposes (e.g., to signify expression at the targeted genomic locus). Alternatively, these sequence differences may include flanking recombination sequences such as FLPs, loxP sequences, or the like, that can be activated at a later time for removal of the marker sequence.

[0331] In some embodiments, the method of the disclosure provides CasX protein and gNA pairs that generate site-specific double strand breaks (DSBs) or single strand breaks (SSBs) (e.g., when the CasX protein is a nickase that can cleave only one strand of a target nucleic acid) within double-stranded DNA (dsDNA) target nucleic acids, which can then be repaired either by non-homologous end joining (NHEJ), homology-directed repair (HDR), homology-independent targeted integration (HITI), micro-homology mediated end joining (MMEJ), single strand annealing (SSA) or base excision repair (BER). In some cases, contacting an HTT gene with a gene editing pair occurs under conditions that are permissive for non-homologous end joining or homology-directed repair. Thus, in some cases, the methods provided herein include contacting the HTT gene with a donor template by introducing the donor template (either in vitro outside of a cell, in vitro inside a cell, in vivo inside a cell, or ex vivo), wherein the donor template, a portion of the donor template, a copy of the donor template, or a portion of a copy of the donor template integrates into the HTT gene to replace a portion of the HTT gene such that either the gene is knocked-down/knocked-out, or corrective or compensating sequence is knocked-in such that a functional huntingtin protein can be expressed.

[0332] In some embodiments of the method of modifying an HTT target nucleic acid of a cell in vitro or ex vivo, to induce cleavage or any desired modification to a target nucleic acid, the gNA and/or the CasX protein of the present disclosure and, optionally, the donor template sequence, whether they be introduced as nucleic acids or polypeptides, vectors or VLP, are provided to the cells for about 30 minutes to about 24 hours, or at least about 1 hour, 1.5 hours, 2 hours, 2.5 hours, 3 hours, 3.5 hours 4 hours, 5 hours, 6 hours, 7 hours, 8 hours, 12 hours, 16 hours, 18 hours, 20 hours, or any other period from about 30 minutes to about 24 hours, which may be repeated with a frequency of about every day to about every 4 days; e.g., every 1.5 days, every 2 days, every 3 days, or any other frequency from about every day to about every four days. The agent(s) may be provided to the subject cells one or more times; e.g., one time, twice, three times, or more than three times, and the cells allowed to incubate with the agent(s) for some amount of time following each contacting event; e.g., 30 minutes to about 24 hours. In the case of in vitro-based methods, after the incubation period with the CasX and gNA (and optionally the donor template), the media is replaced with fresh media and the cells are cultured further.

[0333] In some embodiments of the method of modifying an HTT target nucleic acid in a cell, the method further comprises contacting the target nucleic acid sequence of the cell with: a) an additional CRISPR nuclease and a gNA targeting a different or overlapping portion of the HTT target nucleic acid compared to the first gNA; b) a polynucleotide encoding the additional CRISPR nuclease and the gNA of (a); c) a vector comprising the polynucleotide of (b); or d) a VLP comprising the additional CRISPR nuclease and the gNA of (a), wherein the contacting results in modification of the HTT target nucleic acid at a different location in the sequence compared to the first gNA. In some cases, the additional CRISPR nuclease is a CasX protein having a sequence different from the CasX protein of any of those noted here. In other cases, the additional CRISPR nuclease is not a CasX protein. In other cases, the additional CRISPR nuclease is selected from the group consisting of Cas9, Cas12a, Cas12b, Cas12c, Cas12d (CasY), Cas12J, Cas13a, Cas13b, Cas13c, Cas13d, CasX, CasY, Cas14, Cpf1, C₂cl, Csn2, Cas Phi, and sequence variants thereof.

[0334] In those cases where the modification results in a knock-down of the HTT gene, expression of the non-functional huntingtin protein is reduced by at least about 10%, at least about 20%, at least about 30%, at least about 40%, at least about 50%, at least about 60%, at least about 70%, at least about 80%, or at least about 90% in comparison to cells that have not been modified. In other cases, wherein the modification results in a knock-out of the HTT gene, the target nucleic acid of the cells of the population is modified such that at least about 10%, at least about 20%, at least about 30%, at least about 40%, at least about 50%, at least about 60%, at least about 70%, at least about 80%, or at least about 90% of the cells do not express a detectable level of non-functional huntingtin protein. Expression of huntingtin protein can be measured by flow cytometry, ELISA, cell-based assays, Western blot or other methods know in the art or as described in the Examples.

[0335] In other embodiments of the method of modifying a target nucleic acid sequence, modifying the HTT gene comprises binding of a CasX to the target nucleic acid sequence without cleavage. In some embodiments, the CasX is a catalytically inactive CasX (dCasX) protein that retains the ability to bind to the gNA and to the HTT target nucleic acid sequence but lacks the ability to cleave the nucleic acid sequence, thereby interfering with transcription of the HTT allele. In some embodiments, the dCasX comprises a mutation at residues D672, E769, and/or D935 corresponding to the CasX protein of SEQ ID NO:1 or D659, E756 and/or D922 corresponding to the CasX protein of SEQ ID NO: 2. In some embodiments, the mutation is a substitution of alanine or glycine for the residue.

[0336] In some embodiments, the disclosure provides methods of modifying an HTT target nucleic acid in a population of cells in vivo in a subject. In some embodiments of the method, the modified cells of the population are eukaryotic, which can include rodent cells, mouse cells, rat cells, primate cells, non-human primate cells, and human cells. In some embodiments, the eukaryotic cells are cells of the central nervous system. In some embodiments, the cells of the central nervous system are selected from the group consisting of a neuron, a spinal motor neuron, a medium spiny neuron, a cortical neuron, and a striatal neuron.

[0337] Introducing recombinant expression vectors comprising the components or the nucleic acids encoding the components of the system embodiments into a target cell can be carried out in vivo, in vitro or ex vivo. In some embodiments of the method, vectors may be provided directly to a target host cell. Methods of introducing a nucleic acid (e.g., a nucleic acid comprising a donor polynucleotide sequence, one or more nucleic acids (DNA or RNA) encoding a CasX protein and/or gNA, or a vector comprising same) into a cell are known in the art, and any convenient method can be used to introduce a nucleic acid (e.g., an expression construct) into a cell. Suitable methods include e.g., viral infection, transfection, lipofection, electroporation, calcium phosphate precipitation, polyethyleneimine (PEI)-mediated transfection, DEAE-dextran mediated transfection, liposome-mediated transfection, particle gun technology, nucleofection, electroporation, direct addition by cell penetrating CasX proteins that are fused to or recruit donor DNA, cell squeezing, calcium phosphate precipitation, direct microinjection, nanoparticle-mediated nucleic acid delivery, and the like. Nucleic acids may be introduced into the cells using well-developed commercially-available transfection techniques such as use of TransMessenger® reagents from Qiagen, Stemfect™ RNA Transfection Kit from Stemgent, and TransIT®-mRNA Transfection Kit from Mirus Bio LLC, Lonza nucleofection, Maxagen electroporation and the like. Introducing recombinant expression vectors comprising sequences encoding the CasX:gNA systems (and, optionally, the donor sequences) of the disclosure into cells under in vitro conditions can occur in any suitable culture media and under any suitable culture conditions that promote the survival of the cells. For example, cells may be contacted with vectors comprising the subject nucleic acids (e.g., recombinant expression vectors having the donor template sequence and nucleic acids encoding the CasX and gNA) such that the vectors are taken up by the cells. Vectors used for providing the nucleic acids encoding gNAs and/or CasX proteins to a target host cell can include suitable promoters for driving the expression, that is, transcriptional activation of the nucleic acid of interest. In some cases, the encoding nucleic acid of interest will be operably linked to a promoter. This may include ubiquitously acting promoters, for example, the CMV-beta-actin promoter, or inducible promoters, such as promoters that are active in particular cell populations or that respond to the presence of drugs such as tetracycline or kanamycin. By transcriptional activation, it is intended that transcription will be increased above basal levels in the target host cell comprising the vector by at least about 10-fold, by at least about 100-fold, more usually by at least about 1000-fold. In addition, vectors used for providing a nucleic acid encoding a gNA and/or a CasX protein to a cell may include nucleic acid sequences that encode for selectable markers in the target cells, so as to identify cells that have taken up the CasX protein and/or the gNA.

[0338] For viral vector delivery, cells can be contacted with viral particles comprising the subject viral expression vectors and the nucleic acids encoding the CasX and gNA and, optionally, the donor template. In some embodiments, the vector is an Adeno-Associated Viral (AAV) vector, wherein the AAV is selected from AAV1, AAV2, AAV3, AAV4, AAV5, AAV6, AAV7, AAV8, AAV9, AAV10, AAV 11, AAV12, AAV-Rh74, AAVRh10, or a hybrid, a derivative or variant thereof. In other embodiments, the vector is a retroviral vector, described more fully, below. In other embodiments, the vector is a lentiviral vector. Retroviruses, for example, lentiviruses, may be suitable for use in methods of the present disclosure. Commonly used retroviral vectors are “defective”; e.g., are unable to produce viral proteins required for productive infection. Rather, replication of the vector requires growth in a packaging cell line. To generate viral particles comprising nucleic acids of interest, the retroviral nucleic acids comprising the nucleic acid are packaged into viral capsids by a packaging cell line. Different packaging cell lines provide a different envelope protein (ecotropic, amphotropic or xenotropic) to be incorporated into the capsid, and this envelope protein determines the specificity or tropisms of the viral particle for the cells (ecotropic for murine and rat; amphotropic for most mammalian cell types including human, dog and mouse; and xenotropic for most mammalian cell types except murine cells). The appropriate packaging cell line may be used to ensure that the cells are targeted by the packaged viral particles. Methods of introducing subject vector expression vectors into packaging cell lines and of collecting the viral particles that are generated by the packaging lines are well known in the art, including U.S. Pat. No. 5,173,414; Tratschin et al., Mol. Cell. Biol. 5:3251-3260 (1985); Tratschin, et al., Mol. Cell. Biol. 4:2072-2081 (1984); Hermonat & Muzyczka, PNAS 81:6466-6470 (1984); and Samulski et al., J. Virol. 63:03822-3828 (1989). Nucleic acids can also be introduced by direct micro-injection (e.g., injection of RNA).

### VI. Polynucleotides and Vectors

[0339] In another aspect, the present disclosure relates to polynucleotides encoding the Class 2, Type V nucleases and gNA that have utility in the editing of the HTT gene comprising one or more mutations. In some embodiments, the disclosure provides polynucleotides encoding the CasX proteins and the polynucleotides of the gNAs (e.g., the gDNAs and gRNAs) of any of the CasX:gNA system embodiments described herein. In some embodiments, the disclosure provides donor template polynucleotides for use with the CasX:gNA systems in modifying the target nucleic acid in the cells having an HTT gene comprising one or more mutations. In yet further embodiments, the disclosure provides vectors comprising polynucleotides encoding the CasX proteins and the gNAs described herein, as well as the donor templates of the embodiments.

[0340] In some embodiments, the disclosure provides polynucleotide sequences encoding the reference CasX of SEQ ID NOS: 1-3. In other embodiments, the disclosure provides polynucleotide sequences encoding the CasX variants of any of the embodiments described herein, including the CasX protein variants of Table 4 or sequences having at least about 50%, at least about 60%, at least about 70%, at least about 80%, or at least about 90%, or at least about 95%, or at least about 96%, or at least about 97%, or at least about 98%, or at least about 99% sequence identity to a sequence of Table 4.

[0341] In some embodiments, the polynucleotide encodes a gNA scaffold sequence set forth in Table 1 or Table 2, any one of SEQ ID NOS:2101-2285, or a sequence having at least about 50%, at least about 60%, at least about 70%, at least about 80%, at least about 90%, at least about 95%, at least about 96%, at least about 97%, at least about 98%, at least about 99% sequence identity thereto. In other embodiments, the disclosure provides a targeting sequence polynucleotide selected from the group consisting of SEQ ID NOS:409-2100 and 2286-39966, or a sequence having at least about 65%, at least about 75%, at least about 85%, or at least about 95% identity to a sequence selected from the group consisting of SEQ ID NOS: 409-2100 and 2286-39966. In some embodiments, the targeting sequence polynucleotide is, in turn, linked to the gNA scaffold sequence; either as a sgNA or a dgNA, at the 3′ end of the scaffold sequence. In other embodiments, the disclosure provides gNAs comprising targeting sequence polynucleotides having one or more single nucleotide polymorphisms (SNP) relative to a sequence selected from the group consisting of SEQ ID NOS: 409-2100 and 2286-39966.

[0342] The present disclosure provides isolated polynucleotide sequences encoding gNA comprising a targeting sequence that is complementary to, and therefore hybridizes with the HTT gene. In some embodiments, the polynucleotide sequence encodes a gNA comprising a targeting sequence that hybridizes with an HTT exon; e.g., any one of exons 1-67. In a particular embodiment, the polynucleotide sequence encodes a gNA comprising a targeting sequence that hybridizes with exon 1 of the HTT gene. In other embodiments, the polynucleotide sequence encodes a gNA comprising a targeting sequence that hybridizes with an HTT intron. In other embodiments, the polynucleotide sequence encodes a gNA comprising a targeting sequence that hybridizes with an HTT intron-exon junction. In other embodiments, the polynucleotide sequence encodes a gNA comprising a targeting sequence that hybridizes with an intergenic region of the HTT gene. In other embodiments, the polynucleotide sequence encodes a gNA comprising a targeting sequence that hybridizes with an HTT regulatory element. In some cases, the HTT regulatory element is 5′ of the HTT gene. In other cases, the HTT regulatory element is 3′ of the HTT gene. In some cases, the HTT regulatory element is in an intron of the HTT gene. In other cases, the HTT regulatory element comprises the 5′ UTR of the HTT gene. In still other cases, the HTT regulatory element comprises the 3′UTR of the HTT gene.

[0343] In other embodiments, the disclosure provides donor template nucleic acids, wherein the donor template comprises a nucleotide sequence having homology to an HTT target nucleic acid sequence. In some embodiments, the HTT donor template is intended for gene editing and comprises at least a portion of an HTT gene. In some embodiments, the HTT donor template comprises a sequence that hybridizes with the HTT gene. In other embodiments, the donor template sequence is not identical to the genomic sequence that it replaces and may contain one or more single base changes, insertions, deletions, inversions or rearrangements with respect to the genomic sequence. In other embodiments, the HTT donor sequence comprises a sequence that encodes at least a portion of an HTT exon selected from the group consisting of HTT exons 1-67. In a particular embodiment, the donor sequence comprises a sequence that encodes a portion of wild-type exon 1 of the HTT gene encompassing a physiologically-normal number of CAG repeats (e.g., between 10 and 35) that, when used with a CasX and one or more guides targeted to exon 1, can integrate and replace all or a portion of the mutant exon 1 bearing the CAG repeats such that a functional huntingtin protein can be expressed. In the foregoing embodiment, as the donor template sequence comprises a sequence that is non-homologous relative to the target nucleic acid sequence, the donor template is flanked by two homologous arms such that homology-directed repair between the target DNA region and the two flanking arm sequences results in insertion of the donor template at the target region, resulting in the knock-in of the sequence, such that expression of functional huntingtin can occur. In other embodiments, the HTT donor sequence has a sequence that encodes at least a portion of an HTT intron. In other embodiments, the HTT donor sequence has a sequence that encodes at least a portion of with an HTT intron-exon junction. In other embodiments, the HTT donor sequence has a sequence that encodes at least a portion of an intergenic region of the HTT gene. In other embodiments, the HTT donor sequence has a sequence that encodes at least a portion of an HTT regulatory element. In some cases of the foregoing donor template embodiments, the sequence comprises one or more mutations relative to the wild-type HTT gene such that the gene is knocked-down or knocked out. In some embodiments, the donor polynucleotide comprises at least about 10, at least about 50, at least about 100, or at least about 200, or at least about 300, or at least about 400, or at least about 500, or at least about 600, or at least about 700, or at least about 800, or at least about 900, or at least about 1000, or at least about 10,000, or at least about 15,000, or at least about 30,000 nucleotides. In other embodiments, the donor polynucleotide comprises at least about 10 to about 30,000 nucleotides, or at least about 100 to about 15,000 nucleotides, or at least about 400 to about 10,000 nucleotides, or at least about 600 to about 5000 nucleotides, or at least about 1000 to about 2000 nucleotides. In some embodiments, the donor template is a single stranded DNA template or a single stranded RNA template. In other embodiments, the donor template is a double stranded DNA template.

[0344] In some embodiments, the disclosure relates to methods to produce polynucleotide sequences encoding the reference CasX, the CasX variants, or the gNA of any of the embodiments described herein, including variants thereof, as well as methods to express the proteins expressed or RNA transcribed by the polynucleotide sequences. In general, the methods include producing a polynucleotide sequence coding for the reference CasX, the CasX variants, or the gNA of any of the embodiments described herein and incorporating the encoding gene into an expression vector appropriate for a host cell. For production of the encoded reference CasX, the CasX variants, or the gNA of any of the embodiments described herein, the method includes transforming an appropriate host cell with an expression vector comprising the encoding polynucleotide, and culturing the host cell under conditions causing or permitting the resulting reference CasX, the CasX variants, or the gNA of any of the embodiments described herein to be expressed or transcribed in the transformed host cell, thereby producing the reference CasX, the CasX variants, or the gNA, which is recovered by methods described herein or by standard purification methods known in the art, including the methods of the Examples. Standard recombinant techniques in molecular biology are used to make the polynucleotides and expression vectors of the present disclosure.

[0345] In accordance with the disclosure, polynucleotide sequences that encode the reference CasX, the CasX variants, or the gNA of any of the embodiments described herein are used to generate recombinant DNA molecules that direct the expression in appropriate host cells. Several cloning strategies are suitable for performing the present disclosure, many of which are used to generate a construct that comprises a gene coding for a composition of the present disclosure, or its complement. In some embodiments, the cloning strategy is used to create a gene that encodes a construct that comprises nucleotides encoding the reference CasX, the CasX variants, or the gNA that is used to transform a host cell for expression of the composition.

[0346] In one approach, a construct is first prepared containing the DNA sequence encoding a reference CasX, a CasX variant, or a gNA. Exemplary methods for the preparation of such constructs are described in the Examples. The construct is then used to create an expression vector suitable for transforming a host cell, such as a prokaryotic or eukaryotic host cell for the expression and recovery of the polypeptide construct. Where desired, the host cell is an E. coli cell. In other embodiments, the host cell is selected from Baby Hamster Kidney fibroblast (BHK) cells, human embryonic kidney 293 (HEK293), human embryonic kidney 293T (HEK293T), NS0 cells, SP2/0 cells, YO myeloma cells, P3X63 mouse myeloma cells, PER cells, PER.C6 cells, hybridoma cells, NIH3T3 cells, CV-1 (simian) in Origin with SV40 genetic material (COS), HeLa, Chinese hamster ovary (CHO), or yeast cells, or other eukaryotic cells known in the art suitable for the production of recombinant products. Exemplary methods for the creation of expression vectors, the transformation of host cells and the expression and recovery of reference CasX, the CasX variants, or the gNA are described in the Examples.

[0347] The gene or genes encoding for the reference CasX, the CasX variants, or the gNA constructs can be made in one or more steps, either fully synthetically or by synthesis combined with enzymatic processes, such as restriction enzyme-mediated cloning, PCR and overlap extension, including methods more fully described in the Examples. The methods disclosed herein can be used, for example, to ligate sequences of polynucleotides encoding the various components (e.g., CasX and gNA) genes of a desired sequence. Genes encoding polypeptide compositions are assembled from oligonucleotides using standard techniques of gene synthesis.

[0348] In some embodiments, the nucleotide sequence encoding a CasX protein is codon optimized. This type of optimization can entail a mutation of an encoding nucleotide sequence to mimic the codon preferences of the intended host organism or cell while encoding the same CasX protein. Thus, the codons can be changed, but the encoded protein remains unchanged. For example, if the intended target cell of the CasX protein was a human cell, a human codon-optimized CasX-encoding nucleotide sequence could be used. As another non-limiting example, if the intended host cell were a mouse cell, then a mouse codon-optimized CasX-encoding nucleotide sequence could be generated. As another non-limiting example, if the intended host cell were a plant cell, then a plant codon-optimized CasX protein variant-encoding nucleotide sequence could be generated. As another non-limiting example, if the intended host cell were an insect cell, then an insect codon-optimized CasX protein-encoding nucleotide sequence could be generated. The gene design can be performed using algorithms that optimize codon usage and amino acid composition appropriate for the host cell utilized in the production of the reference CasX or the CasX variants. In one method of the disclosure, a library of polynucleotides encoding the components of the constructs is created and then assembled, as described above. The resulting genes are then assembled and the resulting genes used to transform a host cell and produce and recover the reference CasX, the CasX variants, or the gNA compositions for evaluation of its properties, as described herein.

[0349] In some embodiments, a nucleotide sequence encoding a gNA is operably linked to a control element; e.g., a transcriptional control element, such as a promoter. In some embodiments, a nucleotide sequence encoding a CasX protein is operably linked to a control element; e.g., a transcriptional control element, such as a promoter. In other cases, the nucleotide encoding the CasX and gNA are linked and are operably linked to a single control element. In some cases, the promoter is a constitutively active promoter. In some cases, the promoter is a regulatable promoter. In some cases, the promoter is an inducible promoter. In some cases, the promoter is a tissue-specific promoter. In some cases, the promoter is a cell type-specific promoter. In some cases, the transcriptional control element (e.g., the promoter) is functional in a targeted cell type or targeted cell population. For example, in some cases, the transcriptional control element can be functional in eukaryotic cells; e.g., neurons, spinal motor neurons, medium spiny neurons, cortical neurons, striatal neurons, oligodendrocytes, or glial cells.

[0350] Non-limiting examples of eukaryotic promoters (promoters functional in a eukaryotic cell) include EF1alpha, EF1alpha core promoter, those from cytomegalovirus (CMV) immediate early, herpes simplex virus (HSV) thymidine kinase, early and late SV40, long terminal repeats (LTRs) from retrovirus, and mouse metallothionein-I. Further non-limiting examples of eukaryotic promoters include the CMV promoter full-length promoter, the minimal CMV promoter, the chicken β-actin promoter, the hPGK promoter, the HSV TK promoter, the Mini-TK promoter, the human synapsin I promoter which confers neuron-specific expression, the Mecp2 promoter for selective expression in neurons, the minimal IL-2 promoter, the Rous sarcoma virus enhancer/promoter (single), the spleen focus-forming virus long terminal repeat (LTR) promoter, the SV40 promoter, the SV40 enhancer and early promoter, the TBG promoter: promoter from the human thyroxine-binding globulin gene (Liver specific), the PGK promoter, the human ubiquitin C promoter, the UCOE promoter (Promoter of HNRPA2B1-CBX3), the Histone H2 promoter, the Histone H3 promoter, the U1a1 small nuclear RNA promoter (226 nt), the U1b2 small nuclear RNA promoter (246 nt) 26, the TTR minimal enhancer/promoter, the b-kinesin promoter, the human eIF4A1 promoter, the ROSA26 promoter and the glyceraldehyde 3-phosphate dehydrogenase (GAPDH) promoter.

[0351] Selection of the appropriate vector and promoter is well within the level of ordinary skill in the art, as it related to controlling expression, e.g., for modifying a protein involved in antigen processing, antigen presentation, antigen recognition, and/or antigen response and/or its regulatory element. The expression vector may also contain a ribosome binding site for translation initiation and a transcription terminator. The expression vector may also include appropriate sequences for amplifying expression. The expression vector may also include nucleotide sequences encoding protein tags (e.g., 6×His tag, hemagglutinin tag, FLAG tag, fluorescent protein, etc.) that can be fused to the CasX protein, thus resulting in a chimeric CasX protein that are used for purification or detection.

[0352] In some embodiments, a nucleotide sequence encoding each of a gNA variant or a CasX protein is operably linked to an inducible promoter, a constitutively active promoter, a spatially restricted promoter (i.e., transcriptional control element, enhancer, tissue specific promoter, cell type specific promoter, etc.), or a temporally restricted promoter. In other embodiments, individual nucleotide sequences encoding the gNA or the CasX are linked to one of the foregoing categories of promoters, which are then introduced into the cells to be modified by conventional methods, described below.

[0353] In certain embodiments, suitable promoters can be derived from viruses and can therefore be referred to as viral promoters, or they can be derived from any organism, including prokaryotic or eukaryotic organisms. Suitable promoters can be used to drive expression by any RNA polymerase (e.g., pol I, pol II, pol III). Exemplary promoters include, but are not limited to the SV40 early promoter, mouse mammary tumor virus long terminal repeat (LTR) promoter; adenovirus major late promoter (Ad MLP); a herpes simplex virus (HSV) promoter, a cytomegalovirus (CMV) promoter such as the CMV immediate early promoter region (CMVIE), a rous sarcoma virus (RSV) promoter, a human U6 small nuclear promoter (U6), an enhanced U6 promoter, a human HI promoter (HI), a POL1 promoter, a 7SK promoter, tRNA promoters and the like.

[0354] In some embodiments, a nucleotide sequence encoding a CasX and gNA and, optionally, a donor template, is operably linked to (under the control of) an inducible promoter operable in a eukaryotic cell. Examples of inducible promoters may include, but are not limited to, T7 RNA polymerase promoter, T3 RNA polymerase promoter, isopropyl-beta-D-thiogalactopyranoside (IPTG)-regulated promoter, lactose induced promoter, heat shock promoter, tetracycline-regulated promoter, kanamycin-regulated promoter, steroid-regulated promoter, metal-regulated promoter, estrogen receptor-regulated promoter, etc. Inducible promoters can therefore, in some embodiments, be regulated by molecules including, but not limited to, doxycycline; estrogen and/or an estrogen analog; IPTG; etc. Additional examples of inducible promoters include, without limitation, chemically/biochemically-regulated and physically-regulated promoters such as alcohol-regulated promoters, kanamycin-regulated promoters, tetracycline-regulated promoters (e.g., anhydrotetracycline (aTc)-responsive promoters and other tetracycline-responsive promoter systems, which include a tetracycline repressor protein (tetR), a tetracycline operator sequence (tetO) and a tetracycline transactivator fusion protein (tTA), steroid-regulated promoters (e.g., promoters based on the rat glucocorticoid receptor, human estrogen receptor, moth ecdysone receptors, and promoters from the steroid/retinoid/thyroid receptor superfamily), metal-regulated promoters (e.g., promoters derived from metallothionein (proteins that bind and sequester metal ions) genes from yeast, mouse and human), pathogenesis-regulated promoters (e.g., induced by salicylic acid, ethylene or benzothiadiazole (BTH)), temperature/heat-inducible promoters (e.g., heat shock promoters), and light-regulated promoters (e.g., light responsive promoters from plant cells).

[0355] In some cases, the promoter is a spatially restricted promoter (i.e., cell type specific promoter, tissue specific promoter, etc.) such that in a multi-cellular organism, the promoter is active (i.e., “ON”) in a subset of specific cells. Spatially restricted promoters may also be referred to as enhancers, transcriptional control elements, control sequences, etc. Any convenient spatially restricted promoter may be used as long as the promoter is functional in the targeted host cell (e.g., eukaryotic cell; prokaryotic cell).

[0356] In some cases, the promoter is a reversible promoter. Suitable reversible promoters, including reversible inducible promoters are known in the art. Such reversible promoters may be isolated and derived from many organisms, e.g., eukaryotes and prokaryotes. Modification of reversible promoters derived from a first organism for use in a second organism, e.g., a first prokaryote and a second a eukaryote, a first eukaryote and a second a prokaryote, etc., is well known in the art. Such reversible promoters, and systems based on such reversible promoters but also comprising additional control proteins, include, but are not limited to, alcohol regulated promoters (e.g., alcohol dehydrogenase I (alcA) gene promoter, promoters responsive to alcohol transactivator proteins (AlcR, etc.), tetracycline regulated promoters, (e.g., promoter systems including Tet Activators, TetON, TetOFF, etc.), steroid regulated promoters (e.g., rat glucocorticoid receptor promoter systems, human estrogen receptor promoter systems, retinoid promoter systems, thyroid promoter systems, ecdysone promoter systems, mifepristone promoter systems, etc.), metal regulated promoters (e.g., metallothionein promoter systems, etc.), pathogenesis-related regulated promoters (e.g., salicylic acid regulated promoters, ethylene regulated promoters, benzothiadiazole regulated promoters, etc.), temperature regulated promoters (e.g., heat shock inducible promoters (e.g., HSP-70, HSP-90, soybean heat shock promoter, etc.), light regulated promoters, synthetic inducible promoters, and the like.

[0357] Recombinant expression vectors of the disclosure can also comprise elements that facilitate robust expression of CasX proteins and the gNAs of the disclosure. For example, recombinant expression vectors can include one or more of a polyadenylation signal (PolyA), an intronic sequence or a post-transcriptional regulatory element such as a woodchuck hepatitis post-transcriptional regulatory element (WPRE). Exemplary polyA sequences include hGH poly(A) signal (short), HSV TK poly(A) signal, synthetic polyadenylation signals, SV40 poly(A) signal, β-globin poly(A) signal and the like. A person of ordinary skill in the art will be able to select suitable elements to include in the recombinant expression vectors described herein.

[0358] The polynucleotides encoding the reference CasX, the CasX variants, and the gNA sequences can then be individually cloned into one or more expression vectors. In some embodiments, the present disclosure provides vectors comprising the polynucleotides selected from the group consisting of a retroviral vector, a lentiviral vector, an adenoviral vector, an adeno-associated viral (AAV) vector, a virus-like particle (VLP), a herpes simplex virus (HSV) vector, a plasmid, a minicircle, a nanoplasmid, a DNA vector, and an RNA vector. In some embodiments, the vector is a recombinant expression vector that comprises a nucleotide sequence encoding a CasX protein. In other embodiments, the disclosure provides a recombinant expression vector comprising a nucleotide sequence encoding a CasX protein and a nucleotide sequence encoding a gNA. In some cases, the nucleotide sequence encoding the CasX protein variant and/or the nucleotide sequence encoding the gNA are operably linked to a promoter that is operable in a cell type of choice. In other embodiments, the nucleotide sequence encoding the CasX protein variant and the nucleotide sequence encoding the gNA are provided in separate vectors operably linked to a promoter. In other embodiments, the vector can comprise a donor template or a polynucleotide encoding one or more CAR, engineered TCR, one or more engineered TCR subunits, or a separate vector can be utilized to introduce the donor template or the one or more CAR or engineered TCR subunits into the target cell to be modified.

[0359] In some embodiments, provided herein are one or more recombinant expression vectors comprising one or more of: (i) a nucleotide sequence of a donor template nucleic acid where the donor template comprises a nucleotide sequence having homology to a target sequence of a target nucleic acid (e.g., a target genome); (ii) a nucleotide sequence that encodes a gNA that hybridizes to a target sequence of the locus of the targeted genome (e.g., configured as a single or dual guide RNA) operably linked to a promoter that is operable in a target cell such as a eukaryotic cell; and (iii) a nucleotide sequence encoding a CasX protein operably linked to a promoter that is operable in a target cell such as a eukaryotic cell. In some embodiments, the sequences encoding the donor template, the gNA and the CasX protein are in different recombinant expression vectors, and in other embodiments one or more polynucleotide sequences (for the donor template, CasX, and the gNA) are in the same recombinant expression vector.

[0360] The polynucleotide sequence(s) are inserted into the vector by a variety of procedures. In general, DNA is inserted into an appropriate restriction endonuclease site(s) using techniques known in the art. Vector components generally include, but are not limited to, one or more of a signal sequence, an origin of replication, one or more marker genes, an enhancer element, a promoter, and a transcription termination sequence. Construction of suitable vectors containing one or more of these components employs standard ligation techniques which are known to the skilled artisan. Such techniques are well known in the art and well described in the scientific and patent literature. Various vectors are publicly available. The vector may, for example, be in the form of a plasmid, cosmid, viral particle, or phage that may conveniently be subjected to recombinant DNA procedures, and the choice of vector will often depend on the host cell into which it is to be introduced. Thus, the vector may be an autonomously replicating vector, i.e., a vector, which exists as an extrachromosomal entity, the replication of which is independent of chromosomal replication, e.g., a plasmid. Alternatively, the vector may be one which, when introduced into a host cell, is integrated into the host cell genome and replicated together with the chromosome(s) into which it has been integrated. Once introduced into a suitable host cell, expression of the protein involved in antigen processing, antigen presentation, antigen recognition, and/or antigen response can be determined using any nucleic acid or protein assay known in the art. For example, the presence of transcribed mRNA of reference CasX or the CasX variants can be detected and/or quantified by conventional hybridization assays (e.g., Northern blot analysis), amplification procedures (e.g. RT-PCR), SAGE (U.S. Pat. No. 5,695,937), and array-based technologies (see e.g., U.S. Pat. Nos. 5,405,783, 5,412,087 and 5,445,934), using probes complementary to any region of the polynucleotide.

[0361] The disclosure provides for the use of plasmid expression vectors containing replication and control sequences that are compatible with and recognized by the host cell and are operably linked to the gene encoding the polypeptide for controlled expression of the polypeptide or transcription of the RNA. Such vector sequences are well known for a variety of bacteria, yeast, and viruses. Useful expression vectors that can be used include, for example, segments of chromosomal, non-chromosomal and synthetic DNA sequences. “Expression vector” refers to a DNA construct containing a DNA sequence that is operably linked to a suitable control sequence capable of effecting the expression of the DNA encoding the polypeptide in a suitable host. The requirements are that the vectors are replicable and viable in the host cell of choice. Low- or high-copy number vectors may be used as desired. The control sequences of the vector include a promoter to effect transcription, an optional operator sequence to control such transcription, a sequence encoding suitable mRNA ribosome binding sites, and sequences that control termination of transcription and translation. The promoter may be any DNA sequence, which shows transcriptional activity in the host cell of choice and may be derived from genes encoding proteins either homologous or heterologous to the host cell.

[0362] The polynucleotides and recombinant expression vectors can be delivered to the target host cells by a variety of methods. Such methods include, but are not limited to, viral infection, transfection, lipofection, electroporation, calcium phosphate precipitation, polyethyleneimine (PEI)-mediated transfection, DEAE-dextran mediated transfection, microinjection, liposome-mediated transfection, particle gun technology, nucleofection, direct addition by cell penetrating CasX proteins that are fused to or recruit donor DNA, cell squeezing, calcium phosphate precipitation, direct microinjection, nanoparticle-mediated nucleic acid delivery, and using the commercially available TransMessenger® reagents from Qiagen, Stemfect™ RNA Transfection Kit from Stemgent, and TransIT®-mRNA Transfection Kit from Mirus Bio LLC, Lonza nucleofection, Maxagen electroporation and the like.

[0363] A recombinant expression vector sequence can be packaged into a virus or virus-like particle (also referred to herein as a “VLP” or “virion”) for subsequent infection and transformation of a cell, ex vivo, in vitro or in vivo. Such VLP or virions will typically include proteins that encapsidate or package the vector genome. Suitable expression vectors may include viral expression vectors based on vaccinia virus; poliovirus; adenovirus; a retroviral vector (e.g., Murine Leukemia Virus), spleen necrosis virus, and vectors derived from retroviruses such as Rous Sarcoma Virus, Harvey Sarcoma Virus, avian leukosis virus, retrovirus, a lentivirus, human immunodeficiency virus, myeloproliferative sarcoma virus, and mammary tumor virus; and the like.

[0364] In some embodiments, a recombinant expression vector of the present disclosure is a recombinant adeno-associated virus (AAV) vector. In a particular embodiment, a recombinant expression vector of the present disclosure is a recombinant retrovirus vector. In another particular embodiment, a recombinant expression vector of the present disclosure is a recombinant lentivirus vector.

[0365] AAV is a small (20 nm), nonpathogenic virus that is useful in treating human diseases in situations that employ a viral vector for delivery to a cell such as a eukaryotic cell, either in vivo or ex vivo for cells to be prepared for administration to a subject. A construct is generated, for example, encoding any of the CasX proteins and gNA embodiments as described herein, and optionally a donor template, and can be flanked with AAV inverted terminal repeat (ITR) sequences, thereby enabling packaging of the AAV vector into an AAV viral particle.

[0366] An “AAV” vector may refer to the naturally occurring wild-type virus itself or derivatives thereof. The term covers all subtypes, serotypes and pseudotypes, and both naturally occurring and recombinant forms, except where required otherwise. As used herein, the term “serotype” refers to an AAV which is identified by and distinguished from other AAVs based on capsid protein reactivity with defined antisera, e.g., there are many known serotypes of primate AAVs. In some embodiments, the AAV vector is selected from AAV1, AAV2, AAV3, AAV4, AAV5, AAV6, AAV7, AAV8, AAV9, AAV 10, AAV-Rh74 (Rhesus macaque-derived AAV), and AAVRh10, and modified capsids of these serotypes. For example, serotype AAV-2 is used to refer to an AAV which contains capsid proteins encoded from the cap gene of AAV-2 and a genome containing 5′ and 3′ ITR sequences from the same AAV-2 serotype. Pseudotyped AAV refers to an AAV that contains capsid proteins from one serotype and a viral genome including 5′-3′ ITRs of a second serotype. Pseudotyped rAAV would be expected to have cell surface binding properties of the capsid serotype and genetic properties consistent with the ITR serotype. Pseudotyped recombinant AAV (rAAV) are produced using standard techniques described in the art. As used herein, for example, rAAV1 may be used to refer an AAV having both capsid proteins and 5′-3′ ITRs from the same serotype or it may refer to an AAV having capsid proteins from serotype 1 and 5′-3′ ITRs from a different AAV serotype, e.g., AAV serotype 2. For each example illustrated herein the description of the vector design and production describes the serotype of the capsid and 5′-3′ ITR sequences.

[0367] An “AAV virus” or “AAV viral particle” refers to a viral particle composed of at least one AAV capsid protein (preferably by all of the capsid proteins of a wild-type AAV) and an encapsidated polynucleotide. If the particle additionally comprises a heterologous polynucleotide (i.e., a polynucleotide other than a wild-type AAV genome to be delivered to a mammalian cell), it is typically referred to as “rAAV”. An exemplary heterologous polynucleotide is a polynucleotide comprising a CasX protein and/or sgNA and, optionally, a donor template of any of the embodiments described herein.

[0368] By “adeno-associated virus inverted terminal repeats” or “AAV ITRs” is meant the art recognized regions found at each end of the AAV genome which function together in cis as origins of DNA replication and as packaging signals for the virus. AAV ITRs, together with the AAV rep coding region, provide for the efficient excision and rescue from, and integration of a nucleotide sequence interposed between two flanking ITRs into a mammalian cell genome.

[0369] The nucleotide sequences of AAV ITR regions are known. See, for example Kotin, R. M. (1994) Human Gene Therapy 5:793-801; Berns, K. I. “Parvoviridae and their Replication” in Fundamental Virology, 2^{nd} Edition, (B. N. Fields and D. M. Knipe, eds.). As used herein, an AAV ITR need not have the wild-type nucleotide sequence depicted, but may be altered, e.g., by the insertion, deletion or substitution of nucleotides. Additionally, the AAV ITR may be derived from any of several AAV serotypes, including without limitation, AAV1, AAV2, AAV3, AAV4, AAV5, AAV6, AAV7, AAV8, AAV9, AAV10, AAV-Rh74, and AAVRh10, and modified capsids of these serotypes. Furthermore, 5′ and 3′ ITRs which flank a selected nucleotide sequence in an AAV vector need not necessarily be identical or derived from the same AAV serotype or isolate, so long as they function as intended, i.e., to allow for excision and rescue of the sequence of interest from a host cell genome or vector, and to allow integration of the heterologous sequence into the recipient cell genome when AAV Rep gene products are present in the cell. Use of AAV serotypes for integration of heterologous sequences into a host cell is known in the art (see, e.g., WO2018195555A1 and US20180258424A1, incorporated by reference herein.)

[0370] By “AAV rep coding region” is meant the region of the AAV genome which encodes the replication proteins Rep 78, Rep 68, Rep 52 and Rep 40. These Rep expression products have been shown to possess many functions, including recognition, binding and nicking of the AAV origin of DNA replication, DNA helicase activity and modulation of transcription from AAV (or other heterologous) promoters. The Rep expression products are collectively required for replicating the AAV genome.

[0371] By “AAV cap coding region” is meant the region of the AAV genome which encodes the capsid proteins VP1, VP2, and VP3, or functional homologues thereof. These Cap expression products supply the packaging functions which are collectively required for packaging the viral genome.

[0372] In some embodiments, AAV capsids utilized for delivery of the CasX, gNA, and, optionally, donor template nucleotides, to a host cell can be derived from any of several AAV serotypes, including without limitation, AAV1, AAV2, AAV3, AAV4, AAV5, AAV6, AAV7, AAV8, AAV9, AAV10, AAV 11, AAV12, AAV-Rh74 (Rhesus macaque-derived AAV), and AAVRh10, and the AAV ITRs are derived from AAV serotype 1 or serotype 2. In some embodiments, the AAV vector and the regulatory sequences are selected so that the total size of the vector is below 5 kb, permitting packaging within the AAV capsid. While the AAV vector may be of any AAV serotype, nervous cell tropism varies among AAV capsid serotypes. Thus, use of AAV serotypes compatible with widespread transgene delivery to astrocytes and motoneurons is preferred. In some embodiments, the AAV vector is of serotype 9 or of serotype 6, which have been demonstrated to effectively deliver polynucleotides to motor neurons and glia throughout the spinal cord in preclinical models of ALS (Foust, K D. et al. Therapeutic AAV9-mediated suppression of mutant HTT slows disease progression and extends survival in models of inherited ALS. Mol Ther. 21(12):2148 (2013)). In some embodiments, the methods provide use of AAV9 or AAV6 for targeting of neurons via intraparenchymal brain injection. In some embodiments, the methods provide use of AAV9 for intravenous administering of the vector wherein the AAV9 has the ability to penetrate the blood-brain barrier and drive gene expression in the nervous system via both neuronal and glial tropism of the vector. In order to produce rAAV viral particles, an AAV expression vector is introduced into a suitable host cell using known techniques, such as by transfection. Packaging cells are typically used to form virus particles; such cells include HEK293 or HEK293T cells (and other cells described herein or known in the art), which package adenovirus. A number of transfection techniques are generally known in the art; see, e.g., Sambrook et al. (1989) Molecular Cloning, a laboratory manual, Cold Spring Harbor Laboratories, New York. Particularly suitable transfection methods include calcium phosphate co-precipitation, direct microinjection into cultured cells, electroporation, liposome mediated gene transfer, lipid-mediated transduction, and nucleic acid delivery using high-velocity microprojectiles.

[0373] In some embodiments, host cells transfected with the above-described AAV expression vectors are rendered capable of providing AAV helper functions in order to replicate and encapsidate the nucleotide sequences flanked by the AAV ITRs to produce rAAV viral particles. AAV helper functions are generally AAV-derived coding sequences which can be expressed to provide AAV gene products that, in turn, function in trans for productive AAV replication. AAV helper functions are used herein to complement necessary AAV functions that are missing from the AAV expression vectors. Thus, AAV helper functions include one, or both of the major AAV ORFs (open reading frames), encoding the rep and cap coding regions, or functional homologues thereof. Accessory functions can be introduced into and then expressed in host cells using methods known to those of skill in the art. Commonly, accessory functions are provided by infection of the host cells with an unrelated helper virus. In some embodiments, accessory functions are provided using an accessory function vector. Depending on the host/vector system utilized, any of a number of suitable transcription and translation control elements, including constitutive and inducible promoters, transcription enhancer elements, transcription terminators, etc., may be used in the expression vector.

[0374] In other embodiments, suitable vectors may include virus-like particles (VLP). Virus-like particles (VLPs) are particles that closely resemble viruses, but do not contain viral genetic material and are therefore non-infectious. In some embodiments, VLPs comprise a polynucleotide encoding a transgene of interest, for example any of the CasX protein and/or a gNA embodiments, and, optionally, donor template polynucleotides described herein, packaged with one or more viral structural proteins.

[0375] In other embodiments, the disclosure provides VLPs produced in vitro that comprise a CasX:gNA RNP complex and, optionally, a donor template. Combinations of structural proteins from different viruses can be used to create VLPs, including components from virus families including Parvoviridae (e.g., adeno-associated virus), Retroviridae (e.g., HIV and Alpharetrovirus), Flaviviridae (e.g., Hepatitis C virus), Paramyxoviridae (e.g., Nipah) and bacteriophages (e.g., Qβ, AP205). In some embodiments, the disclosure provides VLP systems designed using components of retrovirus, including lentiviruses such as HIV and Alpharetrovirus, in which individual plasmids comprising polynucleotides encoding the various components are introduced into a packaging cell that, in turn, produce the VLP. In some embodiments, the disclosure provides VLP comprising one or more components of i) protease, ii) a protease cleavage site, iii) one or more components of a gag polyprotein selected from matrix protein (MA), nucleocapsid protein (NC), capsid protein (CA), or p1-p6 protein, v) CasX; vi) gNA, and vi) targeting glycoproteins or antibody fragments wherein the resulting VLP particle encapsidates a CasX:gNA RNP. The targeting glycoproteins or antibody fragments on the surface that provides tropism of the VLP to the target cell, wherein upon administration and entry into the target cell, the RNP molecule is free to be transported into the nucleus of the cell. In other embodiments, the disclosure provides VLP of the foregoing and further comprises one or more components of a pol polyprotein (e.g. a protease), and, optionally, a second CasX or a donor template. The foregoing offers advantages over other vectors in the art in that viral transduction to dividing and non-dividing cells is efficient and that the VLP delivers potent and short-lived RNP that escape a subject's immune surveillance mechanisms that would otherwise detect a foreign protein. In some embodiments, a system to make VLP in a host cell comprises polynucleotides encoding one or more components selected from i) one or more components of a gag polyprotein; ii) a CasX protein of any of the embodiments described herein; iii) a protease cleavage site; iv) a protease; v) a guide RNA of any of the embodiments described herein; vi) a pol polyprotein or portions thereof (e.g., a protease); vii) a pseudotyping glycoprotein or antibody fragment that provides for binding and fusion of the VLP to a target cell; and viii) a donor template. The disclosure contemplates multiple configurations of the arrangement of the encoded components, including duplicates of some of the encoded components. The envelope glycoprotein can be derived from any enveloped viruses known in the art to confer tropism to VLP, including but not limited to the group consisting of Argentine hemorrhagic fever virus, Australian bat virus, Autographa californica multiple nucleopolyhedrovirus, Avian leukosis virus, baboon endogenous virus, Bolivian hemorrhagic fever virus, Borna disease virus, Breda virus, Bunyamwera virus, Chandipura virus, Chikungunya virus, Crimean-Congo hemorrhagic fever virus, Dengue fever virus, Duvenhage virus, Eastern equine encephalitis virus, Ebola hemorrhagic fever virus, Ebola Zaire virus, enteric adenovirus, Ephemerovirus, Epstein-Bar virus (EBV), European bat virus 1, European bat virus 2, Fug Synthetic gP Fusion, Gibbon ape leukemia virus, Hantavirus, Hendra virus, hepatitis A virus, hepatitis B virus, hepatitis C virus, hepatitis D virus, hepatitis E virus, hepatitis G Virus (GB virus C), herpes simplex virus type 1, herpes simplex virus type 2, human cytomegalovirus (HHV5), human foamy virus, human herpesvirus (HHV), human Herpesvirus 7, human herpesvirus type 6, human herpesvirus type 8, human immunodeficiency virus 1 (HIV-1), human metapneumovirus, human T-lymphotro pic virus 1, influenza A, influenza B, influenza C virus, Japanese encephalitis virus, Kaposi's sarcoma-associated herpesvirus (HHV8), Kaysanur Forest disease virus, La Crosse virus, Lagos bat virus, Lassa fever virus, lymphocytic choriomeningitis virus (LCMV), Machupo virus, Marburg hemorrhagic fever virus, measles virus, Middle eastern respiratory syndrome-related coronavirus, Mokola virus, Moloney murine leukemia virus, monkey pox, mouse mammary tumor virus, mumps virus, murine gammaherpesvirus, Newcastle disease virus, Nipah virus, Nipah virus, Norwalk virus, Omsk hemorrhagic fever virus, papilloma virus, parvovirus, pseudorabies virus, Quaranfil virus, rabies virus, RD 114 Endogenous Feline Retrovirus, respiratory syncytial virus (RSV), Rift Valley fever virus, Ross River virus, rRotavirus, Rous sarcoma virus, rubella virus, Sabia-associated hemorrhagic fever virus, SARS-associated coronavirus (SARS-CoV), Sendai virus, Tacaribe virus, Thogotovirus, tick-borne encephalitis causing virus, varicella zoster virus (HHV3), varicella zoster virus (HHV3), variola major virus, variola minor virus, Venezuelan equine encephalitis virus, Venezuelan hemorrhagic fever virus, vesicular stomatitis virus (VSV), VSV-G, Vesiculovirus, West Nile virus, western equine encephalitis virus, and Zika Virus. In some embodiments, the packaging cell used for the production of VLP is selected from the group consisting of HEK293 cells, Lenti-X HEK293T cells, BHK cells, HepG2 cells, Saos-2 cells, HuH7 cells, NS0 cells, SP2/0 cells, YO myeloma cells, A549 cells, P3X63 mouse myeloma cells, PER cells, PER.C6 cells, hybridoma cells, VERO cells, NIH3T3 cells, COS cells, WI38 cells, MRC5 cells, A549 cells, HeLa cells, CHO cells, or HT1080 cells.

### VI. Cells

[0376] In another aspect, the present disclosure relates to a population of cells that has been modified to express functional huntingtin protein. Cells that have been genetically modified in this way may be administered to a subject for purposes such as gene therapy; e.g., to treat a disease associated with a defect in the HTT gene.

[0377] In some embodiments, the population of cells has been modified ex vivo. In some embodiments, the present disclosure provides a population of cells that has been modified to correct or compensate for the mutation(s) of the HTT gene such that wild-type huntingtin (SEQ ID NO:100) or a functional huntingtin protein is expressed. In other embodiments, the present disclosure provides a population of cells that has been modified to excise one exon, a portion of one exon, or two or more exons of the HTT gene comprising mutations such that a functional huntingtin protein is expressed.

[0378] In some embodiments, the population of cells are modified by a Class 2, Type V Cas nuclease and one or more guides targeted to the mutant exon(s) of the HTT gene, or other regions of the gene having mutations. In some embodiments, the disclosure provides methods and populations of cells modified by introducing into the cells of the population: i) a CasX:gNA system comprising a CasX and a gNA of any one of the embodiments described herein; ii) a CasX:gNA system comprising a CasX, a gNA, and a donor template of any one of the embodiments described herein; iii) one or more nucleic acids encoding the CasX and the gNA, and optionally comprising the donor template; iv) a vector selected from the group consisting of a retroviral vector, a lentiviral vector, an adenoviral vector, an adeno-associated viral (AAV) vector, and a herpes simplex virus (HSV) vector and comprising the nucleic acid of (iii), above; v) a VLP comprising the CasX:gNA system of any one of the embodiments described herein; or vi) combinations of two or more of (i) to (v), wherein the HTT target nucleic acid sequence of the cells targeted by the gNA is modified by the CasX protein and, optionally, the donor template.

[0379] In some embodiments, the gNA of the CasX:gNA system is targeted to an HTT exon in the cells of the population having a mutation. In a particular embodiment, the gNA is targeted to an HTT exon of the cells having an expansion of a (CAG)n repeat, wherein the NHEJ repair mechanisms of the cell can correct or compensate for the mutation in the population such that a functional huntingtin protein can be expressed. In another embodiment, two or more gNA are used in the CasX:gNA system to modify the cells of the population wherein the gNA are targeted to different or overlapping portion of the HTT gene target nucleic acid. In one embodiment of the foregoing, the two or more gNA are targeted to sequences that flank (5′ and 3′ to) a portion or the entirety of the (CAG)n repeat expansion. In some cases of the foregoing, the NHEJ repair mechanisms of the cell can correct or compensate for the mutation. In other cases of the foregoing, the systems use a donor template comprising between 10 and 35 CAG repeats wherein the donor template is inserted by HDR or HITI into the break sites made by the CasX (and targeted by the gNA) such that a functional huntingtin protein can be expressed by the modified cells of the population. In some embodiments, the disclosure provides a population of cells wherein the cells have been modified such that at least 60%, at least 70%, at least 75%, at least 80%, at least 85%, at least 90%, or at least 95% of the modified cells express a detectable level of functional huntingtin protein. In other embodiments, the disclosure provides a population of cells wherein the cells have been modified such that the expression of huntingtin protein is increased by at least about 10%, at least about 20%, at least about 30%, at least about 40%, at least about 50%, at least about 60%, at least about 70%, at least about 80%, or at least about 90% in comparison to a cell where the HTT gene has not been modified. Expression of the huntingtin protein can be determined by ELISA or electrochemiluminescence assays (Mcdonald, D., et al. Quantification Assays for Total and Polyglutamine-Expanded Huntingtin Proteins. PLoS ONE 9(5): e96854 (2014)) or other methods know in the art, or as described in the Examples.

[0380] In some embodiments, the disclosure provides a method of preparing cells for treatment of a subject having Huntington's disease comprising modifying cells having one or more mutations in the HTT gene by editing the target nucleic acid with a CasX:gNA system or by introducing into the cells a polynucleotide or vector encoding the CasX:gNA system of any of the embodiments described herein, wherein the modification results in the cells ability to produce a wild-type or a functional huntingtin protein. In some embodiments, the cell has been modified such that expression of functional huntingtin is increased by at least about 10%, at least about 20%, at least about 30%, at least about 40%, at least about 50%, at least about 60%, at least about 70%, at least about 80%, or at least about 90% in comparison to a cell where the HTT gene has not been modified. In other embodiments of the method, the cells have been modified such that at least about 50%, at least about 60%, at least about 70%, at least about 75%, at least about 80%, at least about 85%, at least about 90%, or at least about 95% of the modified cells express a detectable level of functional huntingtin. Such modified cells altered in this manner are useful for therapy applications, for example for ex vivo preparation of cells for use in a subject having Huntington's disease. In other embodiments, the disclosure provides compositions of cells modified to express functional huntingtin for use as a medicament in the treatment of Huntington's disease.

[0381] In some cases of the method, the cells of the population are contacted with a CasX and a gNA wherein the gNA is a guide RNA (gRNA). In other cases, the cells of the population are contacted with a CasX and a gNA wherein the gNA is a guide DNA (gDNA). In other cases, the cells of the populations are contacted with a CasX and a gNA wherein the gNA is a chimera comprising DNA and RNA. As described herein, in embodiments of any of the combinations, each of said gNA molecules (a combination of the scaffold and targeting sequence, which can be configured as a sgRNA or a dgRNA) can be provided as an RNP complexed with a CasX molecule described herein, such that the RNP can then modify the target gene. In some embodiments, the cells of the population are contacted with an RNP of a CasX comprising a sequence of SEQ ID NOS: 49-160, 221-223, 227-230, 235-247 or 258-267 or a sequence at least 65% identical, at least 70% identical, at least 75% identical, at least 80% identical, at least 81% identical, at least 82% identical, at least 83% identical, at least 84% identical, at least 85% identical, at least 86% identical, at least 86% identical, at least 87% identical, at least 88% identical, at least 89% identical, at least 89% identical, at least 90% identical, at least 91% identical, at least 92% identical, at least 93% identical, at least 94% identical, at least 95% identical, at least 96% identical, at least 97% identical, at least 98% identical, at least 99% identical, or at least 99.5% identical thereto, the gNA scaffold comprises a sequence of SEQ ID NOS: 2100-2285 or a sequence at least 65% identical, at least 70% identical, at least 75% identical, at least 80% identical, at least 81% identical, at least 82% identical, at least 83% identical, at least 84% identical, at least 85% identical, at least 86% identical, at least 86% identical, at least 87% identical, at least 88% identical, at least 89% identical, at least 89% identical, at least 90% identical, at least 91% identical, at least 92% identical, at least 93% identical, at least 94% identical, at least 95% identical, at least 96% identical, at least 97% identical, at least 98% identical, at least 99% identical, at least 99.5% identical thereto, and the gNA comprises a targeting sequence of SEQ ID NOs: 409-2100 or 2286-39966 or a sequence at least 65% identical, at least 70% identical, at least 75% identical, at least 80% identical, at least 85% identical, at least 90% identical, or at least 95% identical thereto and having between 15 and 30 amino acids. Upon hybridization with the target nucleic acid by the CasX and the gNA, the CasX introduces one or more single-strand breaks or double-strand breaks within the HTT gene that results in a modification of the target nucleic acid such as a permanent indel (deletion or insertion) or a mutation (e.g., substitution, duplication, or inversion) in the target nucleic acid that, in connection with the repair mechanisms of the host cell, results in a correction or a compensation of the mutation with a corresponding expression of functional huntingtin protein, thereby creating the modified population of cells.

[0382] In some embodiments of the method, the target nucleic acid of the cells of the population is modified using a plurality of gNAs (e.g., two, three, four or more) targeted to different or overlapping portions of the HTT gene wherein the CasX protein introduces multiple breaks in the target nucleic acid sequence that result in a permanent indel (deletion or insertion) or corrective mutation (e.g., a substitution, duplication, or inversion of one or more nucleotides), or is used in conjunction with a donor template, as described, supra.

[0383] An RNP can be introduced into the cells to be modified via any suitable method, including via electroporation, injection, nucleofection, delivery via liposomes, delivery by nanoparticles, or using a protein transduction domain (PTD) conjugated to one or more components of the CasX:gNA. In other cases, the CasX and the one or more gNA are introduced into the population of cells as encoding polynucleotides using a vector; embodiments of which are described herein. Additional methods of modification of the cells using the CasX:gNA system components include viral infection, transfection, conjugation, protoplast fusion, particle gun technology, calcium phosphate precipitation, direct microinjection, and the like. The choice of method is generally dependent on the type of cell being transformed and the circumstances under which the transformation is taking place; e.g., in vitro, ex vivo, or in vivo. A general discussion of these methods can be found in Ausubel, et al, Short Protocols in Molecular Biology, 3rd ed., Wiley & Sons, 1995.

[0384] In some embodiments of the method of modify the population of cells, the method further comprises contacting the HTT gene target nucleic acid sequence of the population of cells with: i) an additional CRISPR nuclease and a gNA targeting a different or overlapping portion of the HTT target nucleic acid compared to the first gNA; ii) a polynucleotide encoding the additional CRISPR nuclease and the gNA of (i); iii) a vector selected from the group consisting of a retroviral vector, a lentiviral vector, an adenoviral vector, an adeno-associated viral (AAV) vector, a herpes simplex virus (HSV) vector and comprising the polynucleotide of (ii); or iv) a VLP comprising the additional CRISPR nuclease and the gNA of (i), wherein the contacting results in modification of the HTT gene at a different location in the sequence compared to the sequence targeted by the first gNA. In one embodiment of the foregoing, the additional CRISPR nuclease is a CasX protein having a sequence different from the CasX protein of the previous embodiments. In another embodiment of the foregoing, the additional CRISPR nuclease is not a CasX protein and is selected from the group consisting of Cas9, Cas12a, Cas12b, Cas12c, Cas12d (CasY), Cas12J, Cas13a, Cas13b, Cas13c, Cas13d, CasX, CasY, Cas14, Cpf1, C₂cl, Csn2, and sequence variants thereof.

[0385] In some embodiments, the population of modified cells are animal cells; for example, derived from a rodent, rat, mouse, rabbit or dog cell. In some embodiments, the cell is a human cell. In some embodiments, the cell is a non-human primate cell; e.g., a cynomolgus monkey cell. In some embodiments, the cell is a progenitor cell, a hematopoietic stem cell, or a pluripotent stem cell. In one embodiment, the cell is an induced pluripotent stem cell. In other embodiments, the cells are cells of the central nervous system, including a neuron, a spinal motor neuron, a medium spiny neuron, a cortical neuron, a striatal neuron, an oligodendrocyte, or a glial cell.

[0386] In some embodiments of the method, the modifying of the HTT gene target nucleic acid sequence of the population of cells occurs in vitro or ex vivo. The method provides that the cells can be obtained from a unit of blood or a biopsy collected from a subject using any number of techniques known to the skilled artisan. The cells collected may be washed and filtered or centrifuged to remove the desired cells from other cells or tissue and, optionally, to place the cells in an appropriate buffer or media for subsequent processing steps. The method may include one or more steps of i) introducing into the cells the CasX:gNA system components for the editing of the target nucleic acids; ii) introducing into the cells one or more nucleic acids encoding the CasX:gNA system components to the cells; iii) expansion of the cells, and iv) cryopreservation of the cells for subsequent administration to the subject.

### VII. Therapeutic Methods

[0387] In another aspect, the present disclosure relates to methods of treating a subject having a disease associated with mutations in the HTT gene, such as Huntington's disease. In some cases, the allele related to the disease associated with mutations in the HTT gene (HTT-related disease) of the subject to be modified comprises one or more mutations. A number of therapeutic strategies have been used to design the compositions for use in the methods of treatment of a subject with an HTT-related disease. Additionally, the methods can be used to treat a subject in advance of any symptom of Huntington's disease, e.g., prior to the development of loss of motor function, impaired gait, posture and balance, memory loss, or difficulty with speech or swallowing. Accordingly, the prophylactic administration of a modified cell population or a therapeutically effective amount of the CasX:gNA system composition(s) or the polynucleic acids encoding the CasX:gNA systems of the embodiments can serve to prevent an HTT-related disease.

[0388] As described herein, the methods of treatment can prevent, treat and/or ameliorate an HTT-related disease of a subject. In some embodiments, the disclosure provides a method of treating an HTT-related disease in a subject in need thereof, comprising modifying an HTT gene having one or more mutations in cells of the subject, the modifying comprising contacting said cells with a therapeutically effective dose of i) a composition comprising a CasX and a gNA of any of the embodiments described herein; ii) a composition comprising a CasX, a gNA, and a donor template of any of the embodiments described herein; iii) one or more nucleic acids encoding or comprising the compositions of (i) or (ii); iv) a vector selected from the group consisting of a retroviral vector, a lentiviral vector, an adenoviral vector, an adeno-associated viral (AAV) vector, a herpes simplex virus (HSV) vector and comprising the nucleic acids of (iii); v) a VLP comprising the composition of (i) or (ii); or vi) combinations of two or more of (i)-(v), wherein the HTT gene of the cells is modified by the CasX protein and, optionally, the donor template such that a wild-type or a functional huntingtin protein is expressed. In some embodiments of the method, a second gNA is utilized, wherein the second gNA has a targeting sequence complementary to a different or overlapping portion of the target nucleic acid compared to the first gNA, resulting in an additional break in the HTT target nucleic acid of the cells of the subject. In the foregoing, the gene can be modified by the NHEJ host repair mechanisms, or utilized in conjunction with a donor template that is inserted by HDR or HITI mechanisms to either excise, correct, or compensate for the mutation, resulting in the expression of a functional huntingtin. The embodiments of the paragraph are more fully detailed, below, while the methods employed in the modification of the HTT gene have been described, supra. In some embodiments of the method of treatment, the subject is selected from the group consisting of a rodent, a mouse, a rat, and a non-human primate. In other embodiments of the method of treatment, the subject is a human.

[0389] In some embodiments of the method of treatment, the method comprises administering to the subject a therapeutically effective dose of a vector comprising or encoding the CasX protein and the gNA and, optionally, the donor template (described, supra), wherein the contacting of the cells of the subject with the vector results in modification of the target nucleic acid of the cells by the components of the CasX:gNA system. In some embodiments, the method comprises administration of the vector comprising or encoding a CasX and a plurality of gNAs targeted to different locations in the HTT gene, wherein the contacting of the cells of the subject with the CasX:gNA RNP complexes results in modification of the target nucleic acid of the cells. In one particular embodiment, the vector is an AAV. The AAV utilized can be selected from the group consisting of AAV1, AAV2, AAV3, AAV4, AAV5, AAV6, AAV7, AAV8, AAV9, AAV10, AAV 11, AAV12, AAV-Rh74, and AAVRh10. The vector of the embodiments are administered to the subject at a therapeutically effective dose. In some embodiments, the vector (e.g., an AAV) is administered to the subject at a dose of at least about 1×10⁵ vector genomes/kg (vg), at least about 1×10⁶ vg/kg, at least about 1×10⁷ vg/kg, at least about 1×10⁸ vg/kg, at least about 1×10⁹ vg/kg, at least about 1×10¹⁰ vg/kg, at least about 1×10¹¹ vg/kg, at least about 1×10¹² vg/kg, at least about 1×10¹³ vg/kg, at least about 1×10¹⁴ vg/kg, at least about 1×10¹⁵ vg/kg, at least about 1×10¹⁶ vg/kg. In other cases, the vector is a VLP of any of the embodiments described herein wherein the VLP is administered to the subject at a dose of at least about 1×10⁵ particles/kg, at least about 1×10⁶ particles/kg, at least about 1×10⁷ particles/kg, at least about 1×10⁸ particles/kg, at least about 1×10⁹ particles/kg, at least about 1×10¹⁰ particles/kg, at least about 1×10¹¹ particles/kg, at least about 1×10¹² particles/kg, at least about 1×10¹³ particles/kg, at least about 1×10¹⁴ particles/kg, at least about 1×10¹⁵ particles/kg, at least about 1×10¹⁶ particles/kg. In other embodiments, the VLP is administered to the subject at a dose of at least about 1×10⁵ particles/kg to at least about 1×10¹⁶ particles/kg. In another embodiment, the VLP is administered to the subject at a dose of at least about 1×10⁵ particles/kg to about 1×10¹⁶ particles/kg, or at least about 1×10⁶ particles/kg to about 1×10¹⁵ particles/kg, or at least about 1×10⁷ particles/kg to about 1×10¹⁴ particles/kg. In other embodiments, the VLP is administered to the subject at a dose of at least about 1×10⁵ particles/kg to at least about 1×10¹⁶ particles/kg. The vector or VLP can be administered according to any of the treatment regimens disclosed herein, below.

[0390] In some embodiments, the treatment results in the improvement of one or more clinical parameters or endpoints associated with the disease in the subject, wherein the clinical parameter or endpoint is selected from one or any combination of the group consisting of Unified Huntington's Disease Rating Scale (UHDRS), improvements in motor function, mutant huntingtin protein levels, neurofilament light polypeptide (NF-L) levels, Patient Global Impression of Change (PGIC), the Clinician Global Impression Change (CGIC), the Short Form 36 Health Survey (SF-36), the Berg Balance Test (BBT), duration of response, progression-free survival, time to progression, and time-to-treatment failure.

[0391] In other embodiments, the disclosure provides methods of treating a subject having an HTT-related disease, the method comprising administering to the subject of a therapeutically effective amount of the modified population of cells of any one of the embodiments described herein, wherein the administration can produce a beneficial effect in helping to prevent, to treat (e.g., reduce the severity) or prevent the progression of the disease or result in an improvement in a clinical parameter or endpoint associated with the disease in the subject. In the embodiments, the population of cells are modified in vitro or ex vivo by CasX:gNA system composition(s) or the nucleic acids encoding the CasX:gNA system of the embodiments described herein. In some cases, the CasX and gNA is delivered to the cells of the population as an RNP (embodiments of which are described herein, supra), wherein the target nucleic acid is modified such that a wild-type or a functional huntingtin protein is expressed. In other cases, the CasX and gNA is delivered to the cell in a vector (embodiments of which are described herein, supra), wherein the target nucleic acid is modified such that a wild-type or a functional huntingtin protein is expressed. In some embodiments, the method of treatment comprises the administration to the subject of a population of the modified cells such that, upon administration, a wild-type or a functional huntingtin protein is expressed. Embodiments of such populations of modified cells are described herein, supra. In some cases, the cells have been modified such that expression of a wild-type or functional huntingtin protein is increased by at least about 10%, at least about 20%, at least about 30%, at least about 40%, at least about 50%, at least about 60%, at least about 70%, at least about 80%, or at least about 90% in comparison to a cell where the HTT gene has not been modified. In other cases, the cells have been modified such that at least about 50%, at least about 60%, at least about 70%, at least about 75%, at least about 80%, at least about 85%, at least about 90%, or at least about 95% of the modified cells express a detectable level of functional huntingtin protein. In some embodiments, the modified cells administered to the subject, or their progeny, persist in the subject for at least one month, two month, three months, four months, five months, six months, seven months, eight months, nine months, ten months, eleven months, twelve months, thirteen months, fourteen month, fifteen months, sixteen months, seventeen months, eighteen months, nineteen months, twenty months, twenty-one months, twenty-two months, twenty-three months, two years, three years, four years, or five years after administration of the modified cells to the subject. In some embodiments of the method of treatment, the dose of total cells is within a range of between at or about 10⁴ and at or about 10⁹ cells/kilogram (kg) body weight, such as between 10⁵ and 10⁶ cells/kg body weight, for example, at or about 1×1⁰⁵ cells/kg, 1.5×10⁵ cells/kg, 2×10⁵ cells/kg, or 1×10⁶ cells/kg body weight. For example, in some embodiments, the cells are administered at, or within a certain range of error of, between at or about 10⁴ and at or about 10⁹ cells/kilograms (kg) body weight, such as between 10⁵ and 10⁶ cells/kg body weight, for example, at or about 1×10⁵ cells/kg, 1.5×10⁵ cells/kg, 2×10⁵ cells/kg, or 1×10⁶ cells/kg body weight. In some embodiments, the cells are selected from the group consisting of rodent cells, mouse cells, rat cells, and non-human primate cells. In other embodiments, the cells are human cells. In some embodiments, the cells are cells of the central nervous system and are selected from the group consisting of a neuron, a spinal motor neuron, a medium spiny neuron, a cortical neuron, a striatal neuron, an oligodendrocyte, and a glial cell. In one embodiment, the cells are autologous with respect to the subject to be administered the cells. In another embodiment, the cells are allogeneic with respect to the subject to be administered the cells. In some embodiments, the method of treatment further comprises administering a chemotherapeutic agent, such as an immunosuppressive or anti-inflammatory agent.

[0392] In another embodiment, the invention provides a method of treatment of a subject having an HTT-related disease according to a treatment regimen comprising one or more consecutive doses using a therapeutically effective dose of a population of the modified cells. In one embodiment of the treatment regimen, the therapeutically effective dose of the cells is administered as a single dose. In another embodiment of the treatment regimen, the therapeutically effective dose of the cells is administered to the subject as two or more doses over a period of at least two weeks, or at least one month, or at least two months, or at least three months, or at least four months, or at least five months, or at least six months, or once a year, or every 2 or 3 years. In some embodiments, the dose of total cells and/or dose of individual sub-populations of cells is within a range of between at or about 10⁴ and at or about 10⁹ cells/kilograms (kg) body weight per dose, such as between 10⁵ and 10⁶ cells/kg body weight, for example, at or about 1×10⁵ cells/kg, 1.5×10⁵ cells/kg, 2×10⁵ cells/kg, or 1×10⁶ cells/kg body weight per dose. For example, in some embodiments, the cells are administered at, or within a certain range of error of, between at or about 10⁴ and at or about 10⁹ cells/kilograms (kg) body weight per dose, such as between 10⁵ and 10⁶ cells/kg body weight, for example, at or about 1×10⁵ cells/kg, 1.5×10⁵ cells/kg, 2×10⁵ cells/kg, or 1×10⁶ cells/kg body weight per dose. The cells can be administered by any suitable means, for example, by bolus infusion, by injection, e.g., intraparenchymal, intravenous, intra-arterial, intramuscular, subcuticular, intraarticular, sub-capsular, or by subcutaneous injection.

[0393] In another embodiment, the invention provides a method of treatment of a subject having an HTT-related disease according to a treatment regimen comprising one or more consecutive doses using a therapeutically effective dose of a CasX:gNA system, or a polynucleotide encoding the CasX:gNA system, or a vector of any of the embodiments described herein. In one embodiment of the treatment regimen, the therapeutically effective dose is administered as a single dose. In another embodiment of the treatment regimen, the therapeutically effective dose is administered to the subject as two or more doses over a period of at least two weeks, or at least one month, or at least two months, or at least three months, or at least four months, or at least five months, or at least six months, or once a year, or every 2 or 3 years. The doses can be administered by any suitable means, for example, by bolus infusion or by injection by a route selected from subcutaneous, intradermal, intraneural, intranodal, intramedullary, intramuscular, intralumbar, intrathecal, subarachnoid, intraventricular, intracapsular, intravenous, intralymphatical, or intraperitoneal routes, wherein the administering method is injection, transfusion, or implantation, or combinations thereof.

[0394] In some embodiments, the treatment regimen results in the improvement of one, two, or more clinical parameters or endpoints associated with the disease in the subject, wherein the clinical parameter or endpoint is selected from one or any combination of the group consisting of Unified Huntington's Disease Rating Scale (UHDRS), improvements in motor function, mutant huntingtin protein levels, neurofilament light polypeptide (NF-L) levels, Patient Global Impression of Change (PGIC), the Clinician Global Impression Change (CGIC), the Short Form 36 Health Survey (SF-36), the Berg Balance Test (BBT), duration of response, progression-free survival, time to progression, and time-to-treatment failure.

[0395] In some embodiments, the disclosure provides compositions comprising CasX and gNA gene editing pairs, for use as a medicament for the treatment of a subject having a neurologic disease, such as Huntington's disease. In the foregoing, the CasX can be a CasX variant of SEQ ID NOS: 49-160, 221-223, 227-230, 235-247 or 258-267 and the gNA can be a gNA variant of SEQ ID NOS: 2101-2285 having a targeting sequence of SEQ ID NOs:409-2100 or 2286-39966. In other embodiments, the disclosure provides compositions of vectors comprising or encoding the gene editing pairs of CasX and gNA for use as a medicament for the treatment of a subject having a disease, such as Huntington's disease.

### IX. Kits and Articles of Manufacture

[0396] In another aspect, provided herein are kits comprising the compositions of the embodiments described herein. In some embodiments, the kit comprises a CasX protein and one or a plurality of gNA of any of the embodiments of the disclosure comprising a targeting sequence complementary to a target nucleic acid of the HTT gene, an excipient and a suitable container (for example a tube, vial or plate). In other embodiments, the kit comprises a nucleic acid encoding a CasX protein and one or a plurality of gNA of any of the embodiments of the disclosure comprising a targeting sequence complementary to a target nucleic acid of the HTT gene, an excipient and a suitable container. In other embodiments, the kit comprises a vector comprising a nucleic acid encoding a CasX protein and one or a plurality of gNA of any of the embodiments of the disclosure comprising a targeting sequence complementary to a target nucleic acid of the HTT gene, an excipient and a suitable container. In still other embodiments, the kit comprises a VLP comprising a CasX protein and one or a plurality of gNA of any of the embodiments of the disclosure comprising a targeting sequence complementary to a target nucleic acid of the HTT gene, an excipient and a suitable container. In still other embodiments, the kit comprises an AAV vector comprising a sequence encoding a CasX protein and one or a plurality of gNA of any of the embodiments of the disclosure comprising a targeting sequence complementary to a target nucleic acid of the HTT gene, an excipient and a suitable container.

[0397] In some embodiments, the kit further comprises a buffer, a nuclease inhibitor, a protease inhibitor, a liposome, a therapeutic agent, a label, a label visualization reagent, or any combination of the foregoing. In some embodiments, the kit further comprises a pharmaceutically acceptable carrier, diluent or excipient.

[0398] In some embodiments, the kit comprises appropriate control compositions for gene modifying applications, and instructions for use.

[0399] In another aspect, the disclosure relates to kits comprising compositions comprising a Class 2 Type V CRISPR protein and a first guide nucleic acid (gNA), wherein the gNA comprises a targeting sequence complementary to a non-target strand sequence located 1 nucleotide 3′ of a protospacer adjacent motif (PAM) sequence of an HTT gene target nucleic acid sequence, wherein the HTT gene comprises one or more mutations. In one embodiment, the PAM sequence comprises a TC motif. In another embodiment, the PAM sequence comprises ATC, GTC, CTC or TTC. In another embodiment, the Class 2 Type V CRISPR protein comprises a RuvC domain. In the foregoing embodiments, the RuvC domain generates a staggered double-stranded break in the target nucleic acid sequence and the Class 2 Type V CRISPR protein does not comprise an HNH nuclease domain.

### Enumerated Embodiments

[0400] The invention may be defined by reference to the following sets of enumerated, illustrative embodiments:

### Set I

[0401] 1. A CasX:gNA system comprising a CasX protein and a guide nucleic acid (gNA), wherein the gNA comprises a targeting sequence complementary to a target nucleic acid sequence comprising a huntingtin (HTT) gene.

[0402] 2. The CasX:gNA system of Set I embodiment 1, wherein the HTT gene comprises a protein coding sequence comprising a mutation.

[0403] 3. The CasX:gNA system of Set I embodiment 1 or Set I embodiment 2, wherein the HTT gene comprises a regulatory region comprising a mutation.

[0404] 4. The CasX:gNA system of or Set I embodiment 2, wherein the HTT gene comprising a mutation encodes a HTT protein comprising a mutation compared to a wild-type HTT protein sequence of SEQ ID NO:100.

[0405] 5. The CasX:gNA system of any one of Set I embodiments 1-4, wherein the target nucleic acid sequence comprises one or more mutations compared to a wild-type sequence of the HTT gene.

[0406] 6. The CasX:gNA system of Set I embodiment 5, wherein the mutation is an insertion, deletion, substitution, duplication, or inversion of one or more nucleotides as compared to the wild-type sequence of the HTT gene.

[0407] 7. The CasX:gNA system of Set I embodiment 5 or Set I embodiment 6, wherein the mutation is a gain of function mutation.

[0408] 8. The CasX:gNA system of Set I embodiment 5 or Set I embodiment 6, wherein the HTT gene encodes a protein comprising one or more mutations that disrupt the function of the HTT protein.

[0409] 9. The CasX:gNA system of Set I embodiment 5 or Set I embodiment 6, wherein the HTT gene comprises a mutation comprising at least 36 to at least about 120 CAG repeats in the nucleic acid sequence.

[0410] 10. The CasX:gNA system of any one of Set I embodiments 1-9, wherein the gNA is a guide RNA (gRNA).

[0411] 11. The CasX:gNA system of any one of Set I embodiments 1-9, wherein the gNA is a guide DNA (gDNA).

[0412] 12. The CasX:gNA system of any one of Set I embodiments 1-9, wherein the gNA is a chimera comprising DNA and RNA.

[0413] 13. The CasX:gNA system of any one of Set I embodiments 1-12, wherein the gNA is a single-molecule gNA (sgNA).

[0414] 14. The CasX:gNA system of any one of Set I embodiments 1-12, wherein the gNA is a dual-molecule gNA (dgNA).

[0415] 15. The CasX:gNA system of any one of Set I embodiments 1-14, wherein the targeting sequence of the gNA comprises a sequence selected from the group consisting of sequences set forth in Table 3 or Table 4.

[0416] 16. The CasX:gNA system of any one of Set I embodiments 1-14, wherein the targeting sequence of the gNA comprises a sequence a sequence of Table 3 or Table 4 with a single nucleotide removed from the 3′ end of the sequence.

[0417] 17. The CasX:gNA system of any one of Set I embodiments 1-14, wherein the targeting sequence of the gNA comprises a sequence a sequence of Table 3 or Table 4 with two nucleotides removed from the 3′ end of the sequence.

[0418] 18. The CasX:gNA system of any one of Set I embodiments 1-14, wherein the targeting sequence of the gNA comprises a sequence a sequence of Table 3 or Table 4 with three nucleotides removed from the 3′ end of the sequence.

[0419] 19. The CasX:gNA system of any one of Set I embodiments 1-14, wherein the targeting sequence of the gNA comprises a sequence a sequence of Table 3 or Table 4 with four nucleotides removed from the 3′ end of the sequence.

[0420] 20. The CasX:gNA system of any one of Set I embodiments 1-14, wherein the targeting sequence of the gNA comprises a sequence a sequence of Table 3 or Table 4 with five nucleotides removed from the 3′ end of the sequence.

[0421] 21. The CasX:gNA system of any one of Set I embodiments 1-14, wherein the targeting sequence of the gNA comprises a sequence having at least about 65%, at least about 75%, at least about 85%, or at least about 95% identity to a sequence selected from the group consisting of sequences set forth in Table 3 or Table 4.

[0422] 22. The CasX:gNA system of any one of Set I embodiments 1-14, wherein the targeting sequence of the gNA comprises a sequence having one or more single nucleotide polymorphisms (SNP) relative to a sequence provided in Table 3 or Table 4.

[0423] 23. The CasX:gNA system of any one of Set I embodiments 1-21, wherein the targeting sequence of the gNA is complementary to a sequence of a HTT exon or a sequence complementary to a HTT exon.

[0424] 24. The CasX:gNA system of any one of Set I embodiments 1-21, wherein the targeting sequence of the gNA is complementary to a sequence of a HTT intron or a sequence complementary to a HTT intron.

[0425] 25. The CasX:gNA system of any one of Set I embodiments 1-21, wherein the targeting sequence of the gNA is complementary to a sequence of a HTT intron-exon junction or a sequence complementary to a HTT intron-exon junction.

[0426] 26. The CasX:gNA system of any one of Set I embodiments 1-21, wherein the targeting sequence of the gNA is complementary to a sequence of a HTT regulatory region.

[0427] 27. The CasX:gNA system of any one of Set I embodiments 1-21, wherein the targeting sequence of the gNA is complementary to a sequence comprising one or more single nucleotide polymorphisms (SNPs) of the HTT gene.

[0428] 28. The CasX:gNA system of any one of Set I embodiments 1-21, wherein the targeting sequence of the gNA is complementary to a sequence of an intergenic region of the HTT gene or a sequence complementary to an intergenic region of the HTT gene.

[0429] 29. The CasX:gNA system of any one of Set I embodiments 1-28, further comprising a second gNA, wherein the second gNA has a targeting sequence complementary a different or overlapping portion of the target nucleic acid sequence or its complement compared to the targeting sequence of the gNA of any one of the preceding embodiments of Set I.

[0430] 30. The CasX:gNA system of any one of Set I embodiments 1-29, wherein the gNA has a scaffold comprising a sequence having at least about 50%, at least about 60%, at least about 70%, at least about 80%, at least about 90%, at least about 95%, at least about 95%, at least about 96%, at least about 97%, at least about 98%, at least about 99%, or 100% sequence identity to a sequence selected from the group consisting of sequences set forth in Table 1 or Table 2.

[0431] 31. The CasX:gNA system of any one of Set I embodiments 1-30, wherein the gNA has a scaffold comprising a sequence having at least one modification relative to a reference gNA sequence having a sequence selected from the group consisting of the sequences of SEQ ID NOS: 4-16 of Table 1.

[0432] 32. The CasX:gNA system of Set I embodiment 31, wherein the at least one modification of the reference gNA comprises at least one substitution, deletion, or substitution of a nucleotide of the gNA sequence.

[0433] 33. The CasX:gNA system of any one of Set I embodiments 1-32, wherein the gNA is chemically modified.

[0434] 34. The CasX:gNA system of any one of Set I embodiments 1-33, wherein the CasX protein comprises a reference CasX protein having a sequence of any one of SEQ ID NOS: 1-3 or a CasX variant protein having a sequence of Table 5, or a sequence having at least about 50%, at least about 60%, at least about 70%, at least about 80%, at least about 90%, or at least about 95% sequence identity thereto.

[0435] 35. The CasX:gNA system of Set I embodiment 34, wherein the CasX protein has binding affinity for a protospacer adjacent motif (PAM) sequence selected from the group consisting of TTC, ATC, GTC, and CTC.

[0436] 36. The CasX:gNA system of Set I embodiment 34 or Set I embodiment 35, wherein the CasX variant protein comprises at least one modification relative to a reference CasX protein having a sequence selected from SEQ ID NOS:1-3.

[0437] 37. The CasX:gNA system of Set I embodiment 36, wherein the at least one modification comprises at least one amino acid substitution, deletion, or substitution in a domain of the CasX variant protein relative to the reference CasX protein.

[0438] 38. The CasX:gNA system of Set I embodiment 37, wherein the domain is selected from the group consisting of a non-target strand binding (NTSB) domain, a target strand loading (TSL) domain, a helical I domain, a helical II domain, an oligonucleotide binding domain (OBD), and a RuvC DNA cleavage domain.

[0439] 39. The CasX:gNA system of any one of Set I embodiments 34-38, wherein the CasX protein is fused to one or more nuclear localization signals (NLS).

[0440] 40. The CasX:gNA system of Set I embodiment 39, wherein the one or more NLS are selected from the group of sequences consisting of PKKKRKV, KRPAATKKAGQAKKKK, PAAKRVKLD, RQRRNELKRSP, NQSSNFGPMKGGNFGGRSSGPYGGGGQYFAKPRNQGGY, RMRIZFKNKGKDTAELRRRRVEVSVELRKAKKDEQILKRRNV, VSRKRPRP, PPKKARED, PQPKKKPL, SALIKKKKKMAP, DRLRR, PKQKKRK, RKLKKKIKKL, REKKKFLKRR, KRKGDEVDGVDEVAKKKSKK, RKCLQAGMNLEARKTKK, PRPRKIPR, PPRKKRTVV, NLSKKKKRKREK, RRPSRPFRKP, KRPRSPSS, KRGINDRNFWRGENERKTR, PRPPKMARYDN, KRSFSKAF, KLKIKRPVK, PKTRRRPRRSQRKRPPT, RRKKRRPRRKKRR, PKKKSRKPKKKSRK, HKKKHPDASVNFSEFSK, QRPGPYDRPQRPGPYDRP, LSPSLSPLLSPSLSPL, RGKGGKGLGKGGAKRHRK, PKRGRGRPKRGRGR, and MSRRRKANPTKLSENAKKLAKEVEN.

[0441] 41. The CasX:gNA system of Set I embodiment 39 or Set I embodiment 40, wherein the one or more NLS are expressed at the C-terminus of the CasX protein.

[0442] 42. The CasX:gNA system of Set I embodiment 39 or Set I embodiment 40, wherein the one or more NLS are expressed at the N-terminus of the CasX protein.

[0443] 43. The CasX:gNA system of Set I embodiment 39 or Set I embodiment 40, wherein the one or more NLS are expressed at the N-terminus and C-terminus of the CasX protein.

[0444] 44. The CasX:gNA system of any one of Set I embodiments 34-43, wherein the CasX variant protein and the gNA exhibit at least one or more improved characteristics as compared to a reference CasX protein and the gNA.

[0445] 45. The CasX:gNA system of Set I embodiment 44, wherein the improved characteristic is selected from the group consisting of improved folding of the CasX protein, improved binding affinity of the CasX protein to the guide RNA, improved ribonuclear protein complex (RNP) formation, higher percentage of cleavage-competent RNP, improved binding affinity to the target nucleic acid sequence, altered binding affinity to one or more PAM sequences, improved unwinding of the target nucleic acid sequence, increased activity, increased target nucleic acid sequence cleavage rate, improved editing efficiency, improved editing specificity, increased activity of the nuclease, increased target strand loading for double strand cleavage, decreased target strand loading for single strand nicking, decreased off-target cleavage, improved binding of the non-target strand of DNA, improved CasX protein stability, improved protein:guide RNA complex stability, improved protein solubility, improved protein:guide RNA complex solubility, improved protein yield, improved protein expression, and improved fusion characteristics.

[0446] 46. The CasX:gNA system of Set I embodiment 44 or Set I embodiment 45, wherein the improved characteristic of the CasX variant protein is at least about 1.1 to about 100,000-fold improved relative to the reference protein of SEQ ID NO: 1, SEQ ID NO: 2, or SEQ ID NO: 3.

[0447] 47. The CasX:gNA system of Set I embodiment 44 or Set I embodiment 45, wherein the improved characteristic of the CasX variant protein is at least about 10-fold, at least about 100-fold, at least about 1,000-fold, or at least about 10,000-fold improved relative to the reference protein of SEQ ID NO: 1, SEQ ID NO: 2, or SEQ ID NO: 3.

[0448] 48. The CasX:gNA system of any one of Set I embodiments 45-47, wherein the improved characteristic is improved binding affinity to the target nucleic acid sequence.

[0449] 49. The CasX:gNA system of any one of Set I embodiments 45-47, wherein the improved characteristic is increased target nucleic acid sequence cleavage rate.

[0450] 50. The CasX:gNA system of any one of Set I embodiments 45-47, wherein the improved characteristic is increased binding affinity to one or more PAM sequences wherein the one or more PAM sequences are selected from the group consisting of TTC, ATC, GTC, and CTC.

[0451] 51. The CasX:gNA system of any one of the preceding embodiments of Set I, wherein the CasX variant protein and the gNA are associated together in an RNP.

[0452] 52. The CasX:gNA system of Set I embodiment 51, wherein the RNP has a higher percentage of cleavage-competent RNP compared to an RNP of a reference CasX and the gNA.

[0453] 53. The CasX:gNA system of any one of Set I embodiments 38-52, wherein the CasX variant protein comprises a nuclease domain having nickase activity.

[0454] 54. The CasX:gNA system of any one of Set I embodiments 38-52, wherein the CasX variant protein comprises a nuclease domain having double-stranded cleavage activity.

[0455] 55. The CasX:gNA system of any one of Set I embodiments 1-43, wherein the CasX protein is a catalytically inactive CasX (dCasX) protein, and wherein the dCasX and the gNA retain the ability to bind to the target nucleic acid sequence.

[0456] 56. The CasX:gNA system of Set I embodiment 55, wherein the dCasX comprises a mutation at residues:

[0457] a. D672, E769, and/or D935 corresponding to the CasX protein of SEQ ID NO:1; or

[0458] b. D659, E756 and/or D922 corresponding to the CasX protein of SEQ ID NO: 2.

[0459] 57. The CasX:gNA system of Set I embodiment 56, wherein the mutation is a substitution of alanine for the residue.

[0460] 58. The CasX:gNA system of any one of Set I embodiments 1-57, further comprising a donor template nucleic acid.

[0461] 59. The CasX:gNA system of Set I embodiment 58, wherein the donor template comprises a nucleic acid comprising at least a portion of the HTT gene, wherein the HTT gene portion is selected from the group consisting of a HTT exon, a HTT intron, a HTT intron-exon junction, or the HTT regulatory region.

[0462] 60. The CasX:gNA system of Set I embodiment 58 or Set I embodiment 59, wherein the donor template ranges in size from 10-15,000 nucleotides.

[0463] 61. The CasX:gNA system of any one of Set I embodiments 58-60, wherein the donor template is a single-stranded DNA template or a single stranded RNA template.

[0464] 62. The CasX:gNA system of any one of Set I embodiments 58-60, wherein the donor template is a double-stranded DNA template.

[0465] 63. A nucleic acid comprising a sequence that encodes the CasX:gNA system of any one of Set I embodiments 1-62.

[0466] 64. The nucleic acid of Set I embodiment 63, wherein the nucleic acids encoding the CasX protein and gNA are codon optimized for expression in a eukaryotic cell.

[0467] 65. A vector comprising the nucleic acid of Set I embodiment 63 or Set I embodiment 64.

[0468] 66. The vector of Set I embodiment 65, wherein the vector further comprises a promoter.

[0469] 67. A vector comprising a donor template, wherein the donor template comprises a nucleic acid comprising at least a portion of a HTT gene, wherein the HTT gene portion is selected from the group consisting of a HTT exon, a HTT intron, a HTT intron-exon junction, or the HTT regulatory region.

[0470] 68. The vector of Set I embodiment 67, further comprising the nucleic acid of Set I embodiment 63 or Set I embodiment 64.

[0471] 69. The vector of any one of Set I embodiments 65-68, wherein the vector is selected from the group consisting of a retroviral vector, a lentiviral vector, an adenoviral vector, an adeno-associated viral (AAV) vector, a herpes simplex virus (HSV) vector, a virus-like particle (VLP), a plasmid, a minicircle, a nanoplasmid, and an RNA vector.

[0472] 70. The vector of Set I embodiment 69, wherein the vector is an AAV vector.

[0473] 71. The vector of Set I embodiment 70, wherein the AAV vector is selected from AAV1, AAV2, AAV3, AAV4, AAV5, AAV6, AAV7, AAV8, AAV9, AAV10, AAV-Rh74, or AAVRh10.

[0474] 72. The vector of Set I embodiment 69, wherein the vector is a retroviral vector.

[0475] 73. The vector of Set I embodiment 69, wherein the vector encoding the VLP comprises one or more nucleic acids encoding a gag polyprotein, the CasX protein of any one of Set I embodiments 34-54, and the gNA of any one of Set I embodiments 1-33.

[0476] 74. A virus-like particle (VLP) comprising the CasX protein of any one of Set I embodiments 34-54, and the gNA of any one of Set I embodiments 1-33.

[0477] 75. The VLP of Set I embodiment 74, wherein the CasX protein and the gNA are associated together in an RNP.

[0478] 76. A method of modifying a HTT target nucleic acid sequence, the method comprising contacting the target nucleic acid sequence with a CasX protein and a guide nucleic acid (gNA) comprising a targeting sequence wherein said contacting comprises introducing into a cell:

[0479] a. (i) the CasX protein of any one of Set I embodiments 34-54 or a nucleic acid encoding the CasX protein; and (ii) the gNA of any one of Set I embodiments 1-33, or a nucleic acid encoding the gNA; or

[0480] b. the CasX:gNA system of any one of Set I embodiments 1-54, or a nucleic acid encoding the system,

[0481] wherein said contacting results in modification of the target nucleic acid sequence by the CasX protein.

[0482] 77. The method of Set I embodiment 76, wherein the CasX protein and the gNA are associated together in a ribonuclear protein complex (RNP).

[0483] 78. The method of Set I embodiment 76 or Set I embodiment 77, further comprising a second gNA or a nucleic acid encoding the second gNA, wherein the second gNA has a targeting sequence complementary to a different portion of the target nucleic acid sequence or its complement.

[0484] 79. The method any one of Set I embodiments 76-78, wherein the HTT regulatory region comprises a mutation.

[0485] 80. The method of any one of Set I embodiments 76-78, wherein the HTT gene comprises a wild-type sequence.

[0486] 81. The method of any one of Set I embodiments 76-78, wherein the HTT gene comprises a mutation.

[0487] 82. The method of Set I embodiment 81, wherein the mutation is a gain of function mutation.

[0488] 83. The method of Set I embodiment 81, wherein the mutation is a loss of function mutation.

[0489] The method of Set I embodiment 81, wherein the mutation of the HTT gene comprises at least 36 to about 120 CAG repeats in the nucleic acid sequence.

[0490] 84. The method of any one of Set I embodiments 76-83, wherein the modifying comprises introducing a single-stranded break in the target nucleic acid sequence.

[0491] 85. The method of any one of Set I embodiments 76-83, wherein the modifying comprises introducing a double-stranded break in the target nucleic acid sequence.

[0492] 86. The method of any one of Set I embodiments 76-85, wherein the modifying comprises introducing an insertion, deletion, substitution, duplication, or inversion of one or more nucleotides in the target nucleic acid sequence as compared to the wild-type sequence.

[0493] 87. The method of any one of Set I embodiments 76-86, wherein the modifying of the target nucleic acid sequence occurs inside of a cell.

[0494] 88. The method of any one of Set I embodiments 76-87, wherein the modifying of the target nucleic acid sequence occurs in vivo.

[0495] 89. The method of any one of Set I embodiments 76-87, wherein the modifying of the target nucleic acid sequence occurs in vitro.

[0496] 90. The method of any one of Set I embodiments 76-89, wherein the cell is a eukaryotic cell.

[0497] 91. The method of Set I embodiment 90, wherein the eukaryotic cell is selected from the group consisting of a rodent cell, a mouse cell, a rat cell, a pig cell, a primate cell, a non-human primate cell, and a human cell.

[0498] 92. The method of Set I embodiment 91, wherein the eukaryotic cell is a human cell.

[0499] 93. The method of any one of Set I embodiments 76-92, wherein the cell is a cell of a central nervous system (CNS).

[0500] 94. The method of any one of Set I embodiments 76-93, wherein the method further comprises contacting the target nucleic acid sequence with a donor template complementary to at least a portion of a HTT gene, a HTT regulatory region, or both the HTT gene and the HTT regulatory region comprising one or more mutations or the complement of the HTT gene or the HTT regulatory region comprising one or more mutations, wherein the donor template is inserted into the target nucleic acid sequence to correct the one or more mutations or is inserted to replace all or a portion of the target nucleic acid sequence.

[0501] 95. The method of Set I embodiment 94, wherein the donor template is inserted to replace the CAG repeats.

[0502] 96. The method of Set I embodiment 94 or Set I embodiment 95, wherein the donor template ranges in size from 10-15,000 nucleotides.

[0503] 97. The method of any one of Set I embodiments 94-96, wherein the donor template ranges in size from 100-1,000 nucleotides.

[0504] 98. The method of any one of Set I embodiments 94-97, wherein the donor template is a single-stranded DNA template or a single stranded RNA template.

[0505] 99. The method of any one of Set I embodiments 94-97, wherein the donor template is a double-stranded DNA template.

[0506] 100. The method of any one of Set I embodiments 94-99, wherein the donor template is inserted by homology directed repair (HDR)

[0507] 101. The method of any one of Set I embodiments 90-100, wherein the method comprises contacting the eukaryotic cell with a vector encoding or comprising the CasX protein and the gNA, and optionally further comprising the donor template.

[0508] 102. The method of Set I embodiment 101, wherein the vector is an Adeno-Associated Viral (AAV) vector.

[0509] 103. The method of Set I embodiment 102, wherein the AAV is AAV1, AAV2, AAV3, AAV4, AAV5, AAV6, AAV7, AAV8, AAV9, AAV10, AAV-Rh74, or AAVRh10.

[0510] 104. The method of Set I embodiment 101, wherein the vector is a lentiviral vector.

[0511] 105. The method of any one of Set I embodiments 90-101, wherein the method comprises contacting the eukaryotic cell with a VLP vector, wherein the VLP vector comprises the RNP of Set I embodiment 51.

[0512] 106. The method of any one of Set I embodiments 101, wherein the vector is administered to a subject at a therapeutically effective dose.

[0513] 107. The method of Set I embodiment 105, wherein the subject is selected from the group consisting of mouse, rat, pig, non-human primate, and human.

[0514] 108. The method of Set I embodiment 107, wherein the subject is a human.

[0515] 109. The method of any one of Set I embodiments 105-108, wherein the vector is administered at a dose of at least about 1×1010 vector genomes (vg), or at least about 1×1011 vg, or at least about 1×1012 vg, or at least about 1×1013 vg, or at least about 1×1014 vg, or at least about 1×1015 vg, or at least about 1×1016 vg.

[0516] 110. The method of any one of Set I embodiments 105-109, wherein the vector is administered by a route of administration selected from the group consisting of intravenous, intracerebroventricular, intracisternal, intrathecal, intracranial, lumbar, and intracontralateral striatum routes.

[0517] 111. The method of any one of Set I embodiments 74-110, comprising further contacting the target nucleic acid sequence with an additional CRISPR protein, or a polynucleotide encoding the additional CRISPR protein.

[0518] 112. The method of Set I embodiment 111, wherein the additional CRISPR protein is a CasX protein having a sequence different from the CasX of any of the preceding embodiments of Set I.

[0519] 113. The method of Set I embodiment 111, wherein the additional CRISPR protein is not a CasX protein.

[0520] 114. A method of altering a HTT target nucleic acid sequence of a cell, comprising contacting said cell with: a) CasX:gNA system of any one of Set I embodiments 1-62; b) the nucleic acid of Set I embodiment 63 or Set I embodiment 64; c) the vector of any one of Set I embodiments 65-72; or d) combinations thereof.

[0521] 115. The method of Set I embodiment 114, wherein the cell has been modified such that expression of the HTT protein is reduced by at least about 50%, at least about 60%, at least about 70%, at least about 80%, at least about 90%, or at least about 95% in comparison to a cell that has not been modified.

[0522] 116. The method of Set I embodiment 114 or Set I embodiment 115, wherein the cell has been modified such that the cell does not express a detectable level of the HTT protein.

[0523] 117. The method of Set I embodiment 114, wherein the cell has been modified such that it expresses HTT protein having the sequence of SEQ ID NO:100.

[0524] 118. A population of cells modified by the method of Set I embodiment 114 or Set I embodiment 115, wherein the cells have been modified such that at least 70%, at least 75%, at least 80%, at least 85%, at least 90%, or at least 95% of the modified cells do not express a detectable level of HTT protein.

[0525] 119. A population of cells modified by the method of Set I embodiment 117, wherein the cells have been modified such that at least 70%, at least 75%, at least 80%, at least 85%, at least 90%, or at least 95% of the modified cells express a detectable level of HTT protein having the sequence of SEQ ID NO:100.

[0526] 120. The population of cells of Set I embodiment 118 or Set I embodiment 119, wherein the cell is a non-primate mammalian cell, a non-human primate cell, or a human cell.

[0527] 121. The population of cells of any one of Set I embodiments 118-120, wherein the cell is selected from the group consisting of a neuron, a spinal motor neuron, a medium spiny neuron, a cortical neuron, and a striatal neuron.

[0528] 122. The population of cells of any one of Set I embodiments 118-121, wherein the cells are autologous with respect to a subject to be administered the cell.

[0529] 123. The population of cells of any one of Set I embodiments 118-121, wherein the cells are allogeneic with respect to a subject to be administered the cell.

[0530] 124. A population of cells, comprising the CasX:gNA system of any one of Set I embodiments 1-62.

[0531] 125. A method of treating a HTT or related disorder in a subject in need thereof, the method comprising administering to the subject an effective amount of the cells of any one of Set I embodiments 118-124.

[0532] 126. The method of Set I embodiment 125, wherein the method further comprises administering a chemotherapeutic agent.

[0533] 127. A method of treating a HTT-related disease in a subject in need thereof, comprising modifying a HTT gene, a HTT regulatory region, or both the HTT gene and the HTT regulatory region having one or more mutations in a cell of the subject, the modifying comprising either contacting said cell with;

[0534] a. CasX:gNA system of any one of Set I embodiments 1-62;

[0535] b. the nucleic acid of Set I embodiment 63 or Set I embodiment 64;

[0536] c. the vector of one of Set I embodiments 65-72;

[0537] d. the VLP of Set I embodiment 74 or Set I embodiment 75; or

[0538] e. combinations thereof.

[0539] 128. The method of Set I embodiment 127, further comprising a second gNA or a nucleic acid encoding the second gNA, wherein the second gNA has a targeting sequence complementary to a different portion of the target nucleic acid sequence or its complement.

[0540] 129. The method of Set I embodiment 127 or Set I embodiment 128, wherein the modifying corrects the one or more mutations, or wherein expression of the HTT having the one or more mutations is inhibited or suppressed.

[0541] 130. The method of any one of Set I embodiments 127-129, wherein the method comprises contacting the cell with a vector encoding the CasX protein and the gNA, and optionally further comprising the donor template.

[0542] 131. The method of any one of Set I embodiments 127-130, wherein the cell is selected from the group consisting of a neuron, a spinal motor neuron, a medium spiny neuron, a cortical neuron, and a striatal neuron.

[0543] 132. The method of Set I embodiment 130 or Set I embodiment 131, wherein the vector is an Adeno-Associated Viral (AAV) vector.

[0544] 133. The method of Set I embodiment 132, wherein the AAV is AAV1, AAV2, AAV3, AAV4, AAV5, AAV6, AAV7, AAV8, AAV9, AAV10, AAV-Rh74, or AAVRh10.

[0545] 134. The method of Set I embodiment 130 or Set I embodiment 131, wherein the vector is a lentiviral vector.

[0546] 135. The method of Set I embodiment 130 or Set I embodiment 131, wherein the vector is a virus-like particle (VLP).

[0547] 136. The method of any one of Set I embodiments 127-135, wherein the vector is administered to a subject at a therapeutically effective dose.

[0548] 137. The method of Set I embodiment 135, wherein the subject is selected from the group consisting of mouse, rat, pig, non-human primate, and human.

[0549] 138. The method of Set I embodiment 137, wherein the subject is a human.

[0550] 139. The method of any one of Set I embodiments 130-138, wherein the vector is administered to the subject at a dose of at least about 1×1010 vector genomes (vg), or at least about 1×1011 vg, or at least about 1×1012 vg, or at least about 1×1013 vg, or at least about 1×1014 vg, or at least about 1×1015 vg, or at least about 1×1016 vg.

[0551] 140. The method of any one of Set I embodiments 130-139, wherein the vector is administered by a route of administration selected from the group consisting of intravenous, intracerebroventricular, intracisternal, intrathecal, intracranial, lumbar, and intracontralateral striatum routes.

[0552] 141. The method of any one of Set I embodiments 130-140, wherein the vector is administered to neurons in the corpus striatum, in the motor, frontal, and occipital cortices, and/or the hypothalamus.

[0553] 142. The method of any one of Set I embodiments 127-141, comprising further contacting the target nucleic acid sequence with an additional CRISPR protein, or a polynucleotide encoding the additional CRISPR protein.

[0554] 143. The method of Set I embodiment 142, wherein the additional CRISPR protein is a CasX protein having a sequence different from the CasX of any of the preceding embodiments of Set I.

[0555] 144. The method of Set I embodiment 143, wherein the additional CRISPR protein is not a CasX protein.

[0556] 145. The method of any one of Set I embodiments 127-144, wherein the method results in improvement in at least one clinically-relevant endpoint selected from the group consisting of Unified Huntington's Disease Rating Scale (UHDRS), motor function, mutant huntingtin protein levels, neurofilament light polypeptide (NF-L) levels, Patient Global Impression of Change (PGIC), Clinician Global Impression Change (CGIC), Short Form 36 Health Survey (SF-36), Berg Balance Test (BBT), duration of response, progression-free survival, time to progression, and time-to-treatment failure.

[0557] 146. The method of any one of Set I embodiments 127-145, wherein the method results in improvement in at least two clinically-relevant endpoints selected from the group consisting of Unified Huntington's Disease Rating Scale (UHDRS), motor function, mutant huntingtin protein levels, neurofilament light polypeptide (NF-L) levels, Patient Global Impression of Change (PGIC), Clinician Global Impression Change (CGIC), Short Form 36 Health Survey (SF-36), Berg Balance Test (BBT), duration of response, progression-free survival, time to progression, and time-to-treatment failure.

### Set II

[0558] 1. A composition comprising a Class 2 Type V CRISPR protein and a first guide nucleic acid (gNA), wherein the gNA comprises a targeting sequence complementary to a huntingtin (HTT) gene target nucleic acid sequence, wherein the HTT gene comprises one or more mutations.

[0559] 2. The composition of Set II embodiment 1, wherein the HTT gene comprises one or more mutations in a region selected from the group consisting of:

a. a HTT intron;
b. a HTT exon;
c. a HTT intron-exon junction;
d. a HTT regulatory element; and
e. an intergenic region.

[0560] 3. The composition of any one of Set II embodiment 1 or Set II embodiment 2, wherein the mutation is an insertion, deletion, substitution, duplication, or inversion of one or more nucleotides as compared to the wild-type HTT gene sequence.

[0561] 4. The composition of any one of Set II embodiments 1-3, wherein the mutation is a gain of function mutation.

[0562] 5. The composition of any one of Set II embodiments 1-3, wherein the HTT gene comprises a mutation comprising at least about 35, at least about 50, at least about 75, at least about 100, or at least about 120 CAG repeats in the target nucleic acid sequence.

[0563] 6. The composition of Set II embodiment 5, wherein the CAG repeats are located in exon 1 of the HTT gene.

[0564] 7. The composition of any one of Set II embodiments 1-6, wherein the HTT gene encodes a non-functional huntingtin protein.

[0565] 8. The composition of any one of Set II embodiments 1-7, wherein the gNA is a guide RNA (gRNA).

[0566] 9. The composition of any one of Set II embodiments 1-7, wherein the gNA is a guide DNA (gDNA).

[0567] 10. The composition of any one of Set II embodiments 1-7, wherein the gNA is a chimera comprising DNA and RNA.

[0568] 11. The composition of any one of Set II embodiments 1-10, wherein the gNA is a single-molecule gNA (sgNA).

[0569] 12. The composition of any one of Set II embodiments 1-10, wherein the gNA is a dual-molecule gNA (dgNA).

[0570] 13. The composition of any one of Set II embodiments 1-12, wherein the targeting sequence of the gNA comprises a sequence selected from the group consisting of the sequences of SEQ ID NOS: 409-2100 and 2286-39966, or a sequence having at least about 65%, at least about 75%, at least about 85%, or at least about 95% identity thereto.

[0571] 14. The composition of any one of Set II embodiments 1-12, wherein the targeting sequence of the gNA comprises a sequence selected from the group consisting of the sequences of SEQ ID NOs: 409-2100 and 2286-39966.

[0572] 15. The composition of any one of Set II embodiments 1-12, wherein the targeting sequence of the gNA comprises a sequence of SEQ ID NOs: 4409-2100 and 2286-399663 with a single nucleotide removed from the 3′ end of the sequence.

[0573] 16. The composition of any one of Set II embodiments 1-12, wherein the targeting sequence of the gNA comprises a sequence of SEQ ID NOs: 409-2100 and 2286-39966 with two nucleotides removed from the 3′ end of the sequence.

[0574] 17. The composition of any one of Set II embodiments 1-12, wherein the targeting sequence of the gNA comprises a sequence of SEQ ID NOs: 409-2100 and 2286-39966 with three nucleotides removed from the 3′ end of the sequence.

[0575] 18. The composition of any one of Set II embodiments 1-12, wherein the targeting sequence of the gNA comprises a sequence of SEQ ID NOs: 409-2100 and 2286-39966 with four nucleotides removed from the 3′ end of the sequence.

[0576] 19. The composition of any one of Set II embodiments 1-12, wherein the targeting sequence of the gNA comprises a sequence of SEQ ID NOs: 409-2100 and 2286-39966 with five nucleotides removed from the 3′ end of the sequence.

[0577] 20. The composition of any one of Set II embodiments 1-19, wherein the targeting sequence of the gNA comprises a sequence having one or more single nucleotide polymorphisms (SNP) relative to a sequence of SEQ ID NOS: 409-2100 and 2286-39966.

[0578] 21. The composition of any one of Set II embodiments 1-19, wherein the targeting sequence of the gNA is complementary to a sequence of a HTT exon.

[0579] 22. The composition of any one of Set II embodiments 1-19, wherein the targeting sequence of the gNA is complementary to a sequence of HTT exon 1.

[0580] 23. The composition of any one of Set II embodiments 1-19, wherein the targeting sequence of the gNA is complementary to a sequence of a HTT intron.

[0581] 24. The composition of any one of Set II embodiments 1-19, wherein the targeting sequence of the gNA is complementary to a sequence of a HTT intron-exon junction.

[0582] 25. The composition of any one of Set II embodiments 1-19, wherein the targeting sequence of the gNA is complementary to a sequence of a HTT regulatory element.

[0583] 26. The composition of any one of Set II embodiments 1-19, wherein the targeting sequence of the gNA is complementary to a sequence comprising one or more single nucleotide polymorphisms (SNPs) of the HTT gene.

[0584] 27. The composition of any one of Set II embodiments 1-19, wherein the targeting sequence of the gNA is complementary to a sequence of an intergenic region of the HTT gene.

[0585] 28. The composition of any one of Set II embodiments 1-27, further comprising a second gNA, wherein the second gNA has a targeting sequence complementary to a different or overlapping portion of the HTT target nucleic acid compared to the targeting sequence of the first gNA.

[0586] 29. The composition of Set II embodiment 28, wherein the second gNA has a targeting sequence complementary to the same exon targeted by the first gNA.

[0587] 30. The composition of Set II embodiment 28, wherein the second gNA has a targeting sequence complementary to a different exon targeted by the first gNA.

[0588] 31. The composition of Set II embodiment 28, wherein the second gNA has a targeting sequence complementary to an intron 3′ to the exon targeted by the first gNA.

[0589] 32. The composition of any one of Set II embodiments 1-33, wherein the first or second gNA has a scaffold comprising a sequence having at least about 50%, at least about 60%, at least about 70%, at least about 80%, at least about 90%, at least about 95%, at least about 96%, at least about 97%, at least about 98%, at least about 99%, or 100% sequence identity to a sequence selected from the group consisting of SEQ ID NOS: 2201-2285.

[0590] 33. The composition of any one of Set II embodiments 1-31, wherein the first or second gNA has a scaffold comprising a sequence selected from the group consisting of SEQ ID NOS: 2201-2285.

[0591] 34. The composition of any one of Set II embodiments 1-31, wherein the first or second gNA scaffold comprises a sequence having at least one modification relative to a reference gNA sequence selected from the group consisting of SEQ ID NOS: 4-16.

[0592] 35. The composition of Set II embodiment 34, wherein the at least one modification of the reference gNA comprises at least one substitution, deletion, or substitution of a nucleotide of the reference gNA sequence.

[0593] 36. The composition of any one of Set II embodiments 1-35, wherein the first or second gNA is chemically modified.

[0594] 37. The composition of any one of Set II embodiments 1-36, wherein the Class 2 Type V CRISPR protein is a reference CasX protein having a sequence of any one of SEQ ID NOS: 1-3, a CasX variant protein having a sequence of SEQ ID NOs: SEQ ID NOS: 49-160, 221-223, 227-230, 235-247, and 258-267, or a sequence having at least about 50%, at least about 60%, at least about 70%, at least about 80%, at least about 90%, or at least about 95%, or at least about 95%, or at least about 96%, or at least about 97%, or at least about 98%, or at least about 99% sequence identity thereto.

[0595] 38. The composition of any one of Set II embodiments 1-37, wherein the Type V CRISPR protein is a CasX variant protein having a sequence of SEQ ID NOs: 49-160, 221-223, 227-230, 235-247, and 258-267.

[0596] 39. The composition of Set II embodiment 38, wherein the CasX variant protein comprises at least one modification relative to a reference CasX protein having a sequence selected from SEQ ID NOS:1-3.

[0597] 40. The composition of Set II embodiment 39, wherein the at least one modification comprises at least one amino acid substitution, deletion, or substitution in a domain of the CasX variant protein relative to the reference CasX protein.

[0598] 41. The composition of Set II embodiment 40, wherein the domain is selected from the group consisting of a non-target strand binding (NTSB) domain, a target strand loading (TSL) domain, a helical I domain, a helical II domain, an oligonucleotide binding domain (OBD), and a RuvC DNA cleavage domain.

[0599] 42. The composition of any one of Set II embodiments 37-41, wherein the CasX protein further comprises one or more nuclear localization signals (NLS).

[0600] 43. The composition of Set II embodiment 42, wherein the one or more NLS are selected from the group of sequences consisting of PKKKRKV (SEQ ID NO: 196), KRPAATKKAGQAKKKK (SEQ ID NO: 197), PAAKRVKLD (SEQ ID NO: 198), RQRRNELKRSP (SEQ ID NO: 161), NQSSNFGPMKGGNFGGRSSGPYGGGGQYFAKPRNQGGY (SEQ ID NO: 162), RMRIZFKNKGKDTAELRRRRVEVSVELRKAKKDEQILKRRNV (SEQ ID NO: 163), VSRKRPRP (SEQ ID NO: 164), PPKKARED (SEQ ID NO: 165), PQPKKKPL (SEQ ID NO: 166), SALIKKKKKMAP (SEQ ID NO: 167), DRLRR (SEQ ID NO: 168), PKQKKRK (SEQ ID NO: 169), RKLKKKIKKL (SEQ ID NO: 170), REKKKFLKRR (SEQ ID NO: 171), KRKGDEVDGVDEVAKKKSKK (SEQ ID NO: 172), RKCLQAGMNLEARKTKK (SEQ ID NO: 173), PRPRKIPR (SEQ ID NO: 174), PPRKKRTVV (SEQ ID NO: 175), NLSKKKKRKREK (SEQ ID NO: 176), RRPSRPFRKP (SEQ ID NO: 177), KRPRSPSS (SEQ ID NO: 178), KRGINDRNFWRGENERKTR (SEQ ID NO: 179), PRPPKMARYDN (SEQ ID NO: 180), KRSFSKAF (SEQ ID NO: 181), KLKIKRPVK (SEQ ID NO: 182), PKTRRRPRRSQRKRPPT (SEQ ID NO: 184), RRKKRRPRRKKRR (SEQ ID NO: 187), PKKKSRKPKKKSRK (SEQ ID NO: 188), HKKKHPDASVNFSEFSK (SEQ ID NO: 189), QRPGPYDRPQRPGPYDRP (SEQ ID NO: 190), LSPSLSPLLSPSLSPL (SEQ ID NO: 191), RGKGGKGLGKGGAKRHRK (SEQ ID NO: 192), PKRGRGRPKRGRGR (SEQ ID NO: 193), MSRRRKANPTKLSENAKKLAKEVEN (SEQ ID NO: 185), PKKKRKVPPPPAAKRVKLD (SEQ ID NO: 183), and PKKKRKVPPPPKKKRKV (SEQ ID NO: 194).

[0601] 44. The composition of Set II embodiment 42 or Set II embodiment 43, wherein the one or more NLS are expressed at or near the C-terminus of the CasX protein.

[0602] 45. The composition of Set II embodiment 42 or Set II embodiment 43, wherein the one or more NLS are expressed at or near the N-terminus of the CasX protein.

[0603] 46. The composition of Set II embodiment 42 or Set II embodiment 43, comprising one or more NLS located at or near the N-terminus and at or near the C-terminus of the CasX protein.

[0604] 47. The composition of any one of Set II embodiments 37-46, wherein the Class 2 Type V CRISPR protein is capable of forming a ribonuclear protein complex (RNP) with the gNA.

[0605] 48. The composition of Set II embodiment 47, wherein an RNP comprising the CasX variant protein and the gNA exhibit at least one or more improved characteristics as compared to an RNP comprising the reference CasX protein of SEQ ID NO: 1, SEQ ID NO: 2, or SEQ ID NO: 3 and a gNA comprising a sequence of any one of SEQ ID NOS: 4-16.

[0606] 49. The composition of Set II embodiment 48, wherein the improved characteristic is selected from one or more of the group consisting of improved folding of the CasX variant; improved binding affinity to a guide nucleic acid (gNA); improved binding affinity to a target DNA; improved ability to utilize a greater spectrum of one or more PAM sequences, including ATC, CTC, GTC, or TTC, in the editing of target DNA; improved unwinding of the target DNA; increased editing activity; improved editing efficiency; improved editing specificity; increased nuclease activity; increased target strand loading for double strand cleavage; decreased target strand loading for single strand nicking; decreased off-target cleavage; improved binding of non-target DNA strand; improved protein stability; improved protein solubility; improved protein:gNA complex (RNP) stability; improved protein:gNA complex solubility; improved protein yield; improved protein expression; and improved fusion characteristics.

[0607] 50. The composition of Set II embodiment 48 or Set II embodiment 49, wherein the improved characteristic of the RNP of the CasX variant protein and the gNA variant is at least about 1.1 to about 100-fold or more improved relative to the RNP of the reference CasX protein of SEQ ID NO: 1, SEQ ID NO: 2, or SEQ ID NO: 3 and the gNA comprising a sequence of any one of SEQ ID NOS: 4-16.

[0608] 51. The composition of Set II embodiment 48 or Set II embodiment 49, wherein the improved characteristic of the CasX variant protein is at least about 1.1, at least about 2, at least about 10, at least about 100-fold or more improved relative to the reference CasX protein of SEQ ID NO: 1, SEQ ID NO: 2, or SEQ ID NO: 3 and the gNA comprising a sequence of any one of SEQ ID NOS: 4-16.

[0609] 52. The composition of any one of Set II embodiments 48-51, wherein the improved characteristic comprises editing efficiency, and the RNP of the CasX variant protein and the gNA variant comprises a 1.1 to 100-fold improvement in editing efficiency compared to the RNP of the reference CasX protein of SEQ ID NO: 2 and the gNA of any one of SEQ ID NOS: 4-16.

[0610] 53. The composition of any one of Set II embodiments 48-52, wherein the RNP comprising the CasX variant and the gNA variant exhibits greater editing efficiency and/or binding of a target sequence in the target DNA when any one of the PAM sequences TTC, ATC, GTC, or CTC is located 1 nucleotide 5′ to the non-target strand sequence having identity with the targeting sequence of the gNA in a cellular assay system compared to the editing efficiency and/or binding of an RNP comprising a reference CasX protein and a reference gNA in a comparable assay system.

[0611] 54. The composition of Set II embodiment 53, wherein the PAM sequence is TTC.

[0612] 55. The composition of Set II embodiment 54, wherein the targeting sequence of the gNA comprises a sequence selected from the group consisting of SEQ ID NOs: 28985-39966.

[0613] 56. The composition of Set II embodiment 53, wherein the PAM sequence is ATC.

[0614] 57. The composition of Set II embodiment 56, wherein the targeting sequence of the gNA comprises a sequence selected from the group consisting of SEQ ID NOs: 509-2100 and 2286-8051.

[0615] 58. The composition of Set II embodiment 53, wherein the PAM sequence is CTC.

[0616] 59. The composition of Set II embodiment 58, wherein the targeting sequence of the gNA comprises a sequence selected from the group consisting of SEQ ID NOs:8052-21550.

[0617] 60. The composition of Set II embodiment 53, wherein the PAM sequence is GTC.

[0618] 61. The composition of Set II embodiment 60, wherein the targeting sequence of the gNA comprises a sequence selected from the group consisting of SEQ ID NOs: 21551-28984.

[0619] 62. The composition of any one of Set II embodiments 53-61, wherein the increased binding affinity for the one or more PAM sequences is at least 1.5-fold greater compared to the binding affinity of any one of the reference CasX proteins of SEQ ID NOS: 1-3 for the PAM sequences.

[0620] 63. The composition of any one of Set II embodiments 48-62, wherein the RNP has at least a 5%, at least a 10%, at least a 15%, or at least a 20% higher percentage of cleavage-competent RNP compared to an RNP of the reference CasX proteins of SEQ ID NOS: 1-3 and the gNA of SEQ ID NOS: 4-16.

[0621] 64. The composition of any one of Set II embodiments 37-63, wherein the CasX variant protein comprises a RuvC DNA cleavage domain having nickase activity.

[0622] 65. The composition of any one of Set II embodiments 37-63, wherein the CasX variant protein comprises a RuvC DNA cleavage domain having double-stranded cleavage activity.

[0623] 66. The composition of any one of Set II embodiments 1-51, wherein the CasX protein is a catalytically inactive CasX (dCasX) protein, and wherein the dCasX and the gNA retain the ability to bind to the HTT target nucleic acid.

[0624] 67. The composition of Set II embodiment 66, wherein the dCasX comprises a mutation at residues:

a. D672, E769, and/or D935 corresponding to the CasX protein of SEQ ID NO: 1; or
b. D659, E756 and/or D922 corresponding to the CasX protein of SEQ ID NO: 2.

[0625] 68. The composition of Set II embodiment 67, wherein the mutation is a substitution of alanine for the residue.

[0626] 69. The composition of any one of Set II embodiments 1-65, further comprising a donor template nucleic acid.

[0627] 70. The composition of Set II embodiment 69, wherein the donor template comprises a nucleic acid comprising at least a portion of a HTT gene selected from the group consisting of a HTT exon, a HTT intron, a HTT intron-exon junction, and a HTT regulatory element.

[0628] 71. The composition of Set II embodiment 70, wherein the donor template comprises a nucleic acid comprising at least a portion of wild-type exon 1.

[0629] 72. The composition of any one of Set II embodiments 69-71, wherein the donor template ranges in size from 10-10,000 nucleotides.

[0630] 73. The composition of any one of Set II embodiments 69-72, wherein the donor template is a single-stranded DNA template or a single stranded RNA template.

[0631] 74. The composition of any one of Set II embodiments 69-72, wherein the donor template is a double-stranded DNA template.

[0632] 75. The composition of any one of Set II embodiments 69-74, wherein the donor template comprises homologous arms at or near the 5′ and 3′ ends of the donor template that are complementary to sequences flanking cleavage sites in the HTT target nucleic acid introduced by the Class 2 Type V CRISPR protein.

[0633] 76. A nucleic acid comprising the donor template of any one of Set II embodiments 69-75.

[0634] 77. A nucleic acid comprising a sequence that encodes the CasX of any one of Set II embodiments 37-68.

[0635] 78. A nucleic acid comprising a sequence that encodes the gNA of any one of Set II embodiments 11-36.

[0636] 79. The nucleic acid of Set II embodiment 77, wherein the sequence that encodes the CasX protein is codon optimized for expression in a eukaryotic cell.

[0637] 80. A vector comprising the gNA of any one of Set II embodiments 1-36, the CasX protein of any one of Set II embodiments 37-65, or the nucleic acid of any one of Set II embodiments 76-79.

[0638] 81. The vector of Set II embodiment 80, wherein the vector further comprises a promoter.

[0639] 82. The vector of Set II embodiment 80 or Set II embodiment 81, wherein the vector is selected from the group consisting of a retroviral vector, a lentiviral vector, an adenoviral vector, an adeno-associated viral (AAV) vector, a herpes simplex virus (HSV) vector, a virus-like particle (VLP), a plasmid, a minicircle, a nanoplasmid, a DNA vector, and an RNA vector.

[0640] 83. The vector of Set II embodiment 82, wherein the vector is an AAV vector.

[0641] 84. The vector of Set II embodiment 83, wherein the AAV vector is selected from AAV1, AAV2, AAV3, AAV4, AAV5, AAV6, AAV7, AAV8, AAV9, AAV10, AAV11, AAV12, AAV-Rh74, or AAVRh10.

[0642] 85. The vector of Set II embodiment 84, wherein the AAV vector is selected from AAV1, AAV2, AAV5, AAV8, or AAV9.

[0643] 86. The vector of Set II embodiment 82, wherein the vector is a retroviral vector.

[0644] 87. The vector of Set II embodiment 82, wherein the vector is a VLP vector comprising one or more components of a gag polyprotein.

[0645] 88. The vector of Set II embodiment 87, wherein the one or more components of the gag polyprotein are selected from the group consisting of matrix protein (MA), nucleocapsid protein (NC), capsid protein (CA), p1-p6 protein, and protease cleavage site.

[0646] 89. The vector of Set II embodiment 87 or Set II embodiment 88, comprising the CasX protein and the gNA.

[0647] 90. The vector of Set II embodiment 89, wherein the CasX protein and the gNA are associated together in an RNP.

[0648] 91. The vector of any one of Set II embodiments 87-90, further comprising the donor template.

[0649] 92. The vector of any one of Set II embodiments 87-91, further comprising a pseudotyping viral envelope glycoprotein or antibody fragment that provides for binding and fusion of the VLP to a target cell.

[0650] 93. A host cell comprising the vector of any one of Set II embodiments 80-92.

[0651] 94. The host cell of Set II embodiment 92, wherein the host cell is selected from the group consisting of BHK, HEK293, HEK293T, NS0, SP2/0, YO myeloma cells, P3X63 mouse myeloma cells, PER, PER.C6, NIH3T3, COS, HeLa, CHO, and yeast cells.

[0652] 95. A method of modifying a HTT target nucleic acid sequence in a population of cells, the method comprising introducing into cells of the population:

a. the composition of any one of Set II embodiments 1-75;
b. the nucleic acid of any one of Set II embodiments 76-79;
c. the vector of any one of Set II embodiments 80-91; or
d. combinations of two or more of (a)-(c),

[0653] wherein the HTT target nucleic acid sequence of the cells targeted by the first gNA is modified by the CasX protein.

[0654] 96. The method of Set II embodiment 95, wherein the modifying comprises introducing a single-stranded break in the HTT target nucleic acid sequence of the cells of the population.

[0655] 97. The method of Set II embodiment 95, wherein the modifying comprises introducing a double-stranded break in the HTT target nucleic acid sequence of the cells of the population.

[0656] 98. The method of any one of Set II embodiments 95-97, further comprising introducing into the cells of the population a second gNA or a nucleic acid encoding the second gNA, wherein the second gNA has a targeting sequence complementary to a different or overlapping portion of the HTT target nucleic acid compared to the first gNA, resulting in an additional break in the HTT target nucleic acid of the cells of the population.

[0657] 99. The method of any one of Set II embodiments 95-98, wherein the modifying comprises introducing an insertion, deletion, substitution, duplication, or inversion of one or more nucleotides in the HTT target nucleic acid of the cells of the population.

[0658] 100. The method of Set II embodiment 99, wherein the modifying results in a knocking down or knocking out the HTT gene in the cells of the population such that expression of a non-functional huntingtin protein is decreased by at least about 10%, at least about 20%, at least about 30%, at least about 40%, at least about 50%, at least about 60%, at least about 70%, at least about 80%, or at least about 90% in comparison to a cell where the HTT gene has not been modified.

[0659] 101. The method of Set II embodiment 99, wherein the modifying results in a correction or compensation of the mutation of the HTT gene in the cells of the population.

[0660] 102. The method of Set II embodiment 99, wherein the modifying results in the HTT gene exon 1 having 10 to 35 CAG repeats.

[0661] 103. The method of any one of Set II embodiments 95-98, wherein the method comprises insertion of the donor template into the break site(s) of the HTT gene target nucleic acid sequence of the cells of the population.

[0662] 104. The method of Set II embodiment 103, wherein the insertion of the donor template is mediated by homology-directed repair (HDR) or homology-independent targeted integration (HITI).

[0663] 105. The method of Set II embodiment 103 or Set II embodiment 104, wherein insertion of the donor template results in a correction or compensation of the HTT gene in the cells of the population.

[0664] 106. The method of Set II embodiment 103 or Set II embodiment 103, wherein insertion of the donor template results in the HTT gene exon 1 having 10 to 35 CAG repeats.

[0665] 107. The method of Set II embodiment 101-106, wherein the modifying of the HTT gene results in expression of a functional huntingtin protein by the modified cells.

[0666] 108. The method of any one of Set II embodiments 95-107, wherein the HTT gene of the cells of the population is modified such that expression of a functional huntingtin protein is increased by at least about 10%, at least about 20%, at least about 30%, at least about 40%, at least about 50%, at least about 60%, at least about 70%, at least about 80%, or at least about 90% in comparison to a cell where the HTT gene has not been modified.

[0667] 109. The method of any one of Set II embodiments 101-107, wherein the HTT gene of the cells of the population is modified such that at least about 50%, at least about 60%, at least about 70%, at least about 75%, at least about 80%, at least about 85%, at least about 90%, or at least about 95% of the modified cells express a detectable level of functional huntingtin.

[0668] 110. The method of Set II embodiment 103 or Set II embodiment 104, wherein insertion of the donor template results in a knocking down or knocking out the HTT gene in the cells of the population such that expression of a non-functional huntingtin protein is decreased by at least about 10%, at least about 20%, at least about 30%, at least about 40%, at least about 50%, at least about 60%, at least about 70%, at least about 80%, or at least about 90% in comparison to a cell where the HTT gene has not been modified of the HTT gene in the cells of the population.

[0669] 111. The method of Set II embodiment 103 or Set II embodiment 104, wherein the HTT gene of the cells of the population is modified such that at least about 10%, at least about 20%, at least about 30%, at least about 40%, at least about 50%, at least about 60%, at least about 70%, at least about 80%, or at least about 90% of the cells do not express a detectable level of non-functional huntingtin protein.

[0670] 112. The method of any one of Set II embodiments 95-111, wherein the cells are eukaryotic.

[0671] 113. The method of Set II embodiment 112, wherein the eukaryotic cells are selected from the group consisting of rodent cells, mouse cells, rat cells, and non-human primate cells.

[0672] 114. The method of Set II embodiment 112, wherein the eukaryotic cells are human cells.

[0673] 115. The method of any one of Set II embodiments 112-114, wherein the eukaryotic cells are cells of the central nervous system.

[0674] 116. The method of Set II embodiment 115, wherein cells are selected from the group consisting of a neuron, a spinal motor neuron, a medium spiny neuron, a cortical neuron, and a striatal neuron.

[0675] 117. The method of any one of Set II embodiment 95-115, wherein the modifying of the HTT gene target nucleic acid sequence of the population of cells occurs in vitro or ex vivo.

[0676] 118. The method of Set II embodiments 95-115, wherein the modifying of the HTT gene target nucleic acid sequence of the population of cells occurs in vivo in a subject.

[0677] 119. The method of Set II embodiment 118, wherein the subject is selected from the group consisting of a rodent, a mouse, a rat, and a non-human primate.

[0678] 120. The method of Set II embodiment 118, wherein the subject is a human.

[0679] 121. The method of any one of Set II embodiments 118-120, wherein the method comprises administering a therapeutically effective dose of an AAV vector to the subject.

[0680] 122. The method of Set II embodiment 121, wherein the AAV vector is administered to the subject at a dose of at least about 1×10⁵ vector genomes/kg (vg), at least about 1×10⁶ vg/kg, at least about 1×10⁷ vg/kg, at least about 1×10⁸ vg/kg, at least about 1×10⁹ vg/kg, at least about 1×10¹⁰ vg/kg, at least about 1×10¹¹ vg/kg, at least about 1×10¹² vg/kg, at least about 1×10¹³ vg/kg, at least about 1×10¹⁴ vg/kg, at least about 1×10¹⁵ vg/kg, at least about 1×10¹⁶ vg/kg.

[0681] 123. The method of any one of Set II embodiments 118-120, wherein the method comprises administering a therapeutically effective dose of a VLP to the subject.

[0682] 124. The method of Set II embodiment 123, wherein the VLP is administered to the subject at a dose of at least about 1×10⁵ particles/kg, at least about 1×10⁶ particles/kg, at least about 1×10⁷ particles/kg, at least about 1×10⁸ particles/kg, at least about 1×10⁹ particles/kg, at least about 1×10¹⁰ particles/kg, at least about 1×10¹¹ particles/kg, at least about 1×10¹² particles/kg, at least about 1×10¹³ particles/kg, at least about 1×10¹⁴ particles/kg, at least about 1×10¹⁵ particles/kg, at least about 1×10¹⁶ particles/kg. particles/kg, at least about 1×1013 particles/kg, at least about 1×1014 particles/kg, at least about 1×1015 particles/kg, at least about 1×106 particles/kg.

[0683] 125. The method of any one of Set II embodiments 119-124, wherein the vector or VLP is administered to the subject by a route of administration selected from subcutaneous, intradermal, intraneural, intranodal, intramedullary, intramuscular, intralumbar, intrathecal, subarachnoid, intraventricular, intracapsular, intravenous, intralymphatical, or intraperitoneal routes, wherein the administering method is injection, transfusion, or implantation, or combinations thereof.

[0684] 126. The method of any one of Set II embodiments 95-125, further comprising contacting the HTT target nucleic acid sequence of the population of cells with:

[0685] a. an additional CRISPR nuclease and a gNA targeting a different or overlapping portion of the HTT target nucleic acid compared to the first gNA;

[0686] b. a polynucleotide encoding the additional CRISPR nuclease and the gNA of (a);

[0687] c. a vector comprising the polynucleotide of (b); or

[0688] d. a VLP comprising the additional CRISPR nuclease and the gNA of (a);

[0689] wherein the contacting results in modification of the HTT gene at a different location in the sequence compared to the sequence targeted by the first gNA.

[0690] 127. The method of Set II embodiment 126, wherein the additional CRISPR nuclease is a CasX protein having a sequence different from the CasX protein of any of the Set II embodiments 1-126.

[0691] 128. The method of Set II embodiment 126, wherein the additional CRISPR nuclease is not a CasX protein.

[0692] 129. The method of Set II embodiment 128, wherein the additional CRISPR nuclease is selected from the group consisting of Cas9, Cas12a, Cas12b, Cas12c, Cas12d (CasY), Cas12J, Cas13a, Cas13b, Cas13c, Cas13d, CasX, CasY, Cas14, Cpf1, C₂cl, Csn2, Cas Phi, and sequence variants thereof.

[0693] 130. A population of cells modified by the method of any one of Set II embodiments 95-129, wherein the cells have been modified such that at least 70%, at least 75%, at least 80%, at least 85%, at least 90%, or at least 95% of the modified cells do not express a detectable level of non-functional huntingtin protein.

[0694] 131. A population of cells modified by the method of any one of Set II embodiments 95-129, wherein the cells have been modified such that expression of a functional huntingtin protein is increased by at least about 10%, at least about 20%, at least about 30%, at least about 40%, at least about 50%, at least about 60%, at least about 70%, at least about 80%, or at least about 90% in comparison to a cell where the HTT gene has not been modified.

[0695] 132. A population of cells modified by the method of any one of Set II embodiments 95-129, wherein the mutation of the HTT gene is corrected or compensated for in the modified cells of the population, resulting in expression of a functional huntingtin protein by the modified cells.

[0696] 133. A method of treating a HTT-related disease in a subject in need thereof, the method comprising administering to the subject a therapeutically effective amount of the cells of any one of Set II embodiments 130-132.

[0697] 134. The method of Set II embodiment 133, wherein the HTT-related disease is Huntington's disease.

[0698] 135. The method of Set II embodiment 133 or Set II embodiment 134, wherein the subject is selected from the group consisting of a rodent, a mouse, a rat, and a non-human primate.

[0699] 136. The method of any one of Set II embodiments 133-135, wherein the subject is a human.

[0700] 137. The method of any one of Set II embodiments 133-136, wherein the cells are autologous with respect to the subject to be administered the cells.

[0701] 138. The method of any one of Set II embodiments 133-136 wherein the cells are allogeneic with respect to the subject to be administered the cells.

[0702] 139. The method of any one of Set II embodiments 133-138, wherein the method further comprises administering a chemotherapeutic agent.

[0703] 140. A method of treating a HTT-related disease in a subject in need thereof, comprising modifying a HTT gene having one or more mutations in cells of the subject, the modifying comprising contacting said cells with a therapeutically effective dose of:

a. the composition of any one of Set II embodiments 1-75;
b. the nucleic acid of any one of Set II embodiments 76-79;
c. the vector of any one of Set II embodiments 80-86;
d. the VLP of any one of Set II embodiments 87-91; or
e. combinations of two or more of (a)-(d),

[0704] wherein the HTT gene of the cells targeted by the first gNA is modified by the CasX protein.

[0705] 141. The method of Set II embodiment 140, wherein the modifying comprises introducing a single-stranded break in the HTT gene of the cells.

[0706] 142. The method of Set II embodiment 140, wherein the modifying comprises introducing a double-stranded break in the HTT gene of the cells.

[0707] 143. The method of any one of Set II embodiments 140-142, further comprising introducing into the cells of the subject a second gNA or a nucleic acid encoding the second gNA, wherein the second gNA has a targeting sequence complementary to a different or overlapping portion of the target nucleic acid compared to the first gNA, resulting in an additional break in the HTT target nucleic acid of the cells of the subject.

[0708] 144. The method of any one of Set II embodiments 140-142, wherein the modifying comprises introducing an insertion, deletion, substitution, duplication, or inversion of one or more nucleotides in the HTT gene of the cells.

[0709] 145. The method of Set II embodiment 144, wherein the modifying results in the HTT gene exon 1 having 10 to 35 CAG repeats.

[0710] 146. The method of any one of Set II embodiments 140-143, wherein the modifying comprises insertion of the donor template into the break site(s) of the HTT gene target nucleic acid sequence of the cells.

[0711] 147. The method of Set II embodiment 146, wherein the insertion of the donor template is mediated by homology-directed repair (HDR) or homology-independent targeted integration (HITI).

[0712] 148. The method of Set II embodiment 145 or Set II embodiment 147, wherein insertion of the donor template results in the HTT gene exon 1 having 10 to 35 CAG repeats.

[0713] 149. The method of any one of Set II embodiments 144-148, wherein the modifying results in a correction of or compensation for the mutation(s) in the HTT gene in the modified cells of the subject.

[0714] 150. The method of Set II embodiment 148, wherein correction of the mutation results in expression of functional huntingtin protein by the modified cells of the subject.

[0715] 151. The method of Set II embodiment 148 or Set II embodiment 150, wherein the HTT gene of the modified cells express increased levels of a functional huntingtin protein, wherein the increase is at least about 10%, at least about 20%, at least about 30%, at least about 40%, at least about 50%, at least about 60%, at least about 70%, at least about 80%, or at least about 90% in comparison to a cell with a HTT gene that has not been modified.

[0716] 152. The method of any one of Set II embodiments 144-147, wherein the modifying results in a knocking down or knocking out the HTT gene in the modified cells of the subject such that at least about 10%, at least about 20%, at least about 30%, at least about 40%, at least about 50%, at least about 60%, at least about 70%, at least about 80%, or at least about 90% of the modified cells do not express a detectable level of non-functional huntingtin protein.

[0717] 153. The method of any one of Set II embodiments 144-147, wherein the modifying results in a knocking down or knocking out the HTT gene in the modified cells of the subject such that expression of non-functional huntingtin protein in the subject is decreased by at least about 10%, at least about 20%, at least about 30%, at least about 40%, at least about 50%, at least about 60%, at least about 70%, at least about 80%, or at least about 90% in comparison to a subject where the HTT gene has not been modified.

[0718] 154. The method of any one of Set II embodiments 140-153, wherein the subject is selected from the group consisting of rodent, mouse, rat, and non-human primate.

[0719] 155. The method of any one of Set II embodiments 140-153, wherein the subject is a human.

[0720] 156. The method of any one of Set II embodiments 140-155, wherein the HTT-related disease is Huntington's disease.

[0721] 157. The method of any one of Set II embodiments 140-156, wherein the vector is an AAV and is administered to the subject at a therapeutically-effective dose.

[0722] 158. The method of any one of Set II embodiments 140-157, wherein the vector is an AAV and is administered to the subject at a dose of at least about 1×10⁵ vector genomes/kg (vg), at least about 1×10⁶ vg/kg, at least about 1×10⁷ vg/kg, at least about 1×10⁸ vg/kg, at least about 1×10⁹ vg/kg, at least about 1×10¹⁰ vg/kg, at least about 1×10¹¹ vg/kg, at least about 1×10¹² vg/kg, at least about 1×10¹³ vg/kg, at least about 1×10¹⁴ vg/kg, at least about 1×10¹⁵ vg/kg, at least about 1×10¹⁶ vg/kg.

[0723] 159. The method of any one of Set II embodiments 140-156, wherein the method comprises administering a therapeutically effective dose of a VLP to the subject.

[0724] 160. The method of Set II embodiment 159, wherein the VLP is administered to the subject at a dose of at least about 1×10⁵ particles/kg, at least about 1×10⁶ particles/kg, at least about 1×10⁷ particles/kg, at least about 1×10⁸ particles/kg, at least about 1×10⁹ particles/kg, at least about 1×10¹⁰ particles/kg, at least about 1×10¹¹ particles/kg, at least about 1×10¹² particles/kg, at least about 1×10¹³ particles/kg, at least about 1×10¹⁴ particles/kg, at least about 1×10¹⁵ particles/kg, at least about 1×10¹⁶ particles/kg.

[0725] 161. The method of any one of Set II embodiments 157-160, wherein the vector or VLP is administered to the subject by a route of administration selected from subcutaneous, intradermal, intraneural, intranodal, intramedullary, intramuscular, intralumbar, intrathecal, subarachnoid, intraventricular, intracapsular, intravenous, intralymphatical, or intraperitoneal routes, wherein the administering method is injection, transfusion, or implantation, or combinations thereof.

[0726] 162. The method of any one of Set II embodiments 140-161, wherein the method results in improvement in at least one clinically-relevant endpoint selected from the group consisting of Unified Huntington's Disease Rating Scale (UHDRS), improvements in motor function, mutant huntingtin protein levels, neurofilament light polypeptide (NF-L) levels, Patient Global Impression of Change (PGIC), the Clinician Global Impression Change (CGIC), the Short Form 36 Health Survey (SF-36), the Berg Balance Test (BBT), duration of response, progression-free survival, time to progression, and time-to-treatment failure.

[0727] 163. The method of any one of Set II embodiments 140-161, wherein the method results in improvement in at least two clinically-relevant endpoints selected from the group consisting of Unified Huntington's Disease Rating Scale (UHDRS), improvements in motor function, mutant huntingtin protein levels, neurofilament light polypeptide (NF-L) levels, Patient Global Impression of Change (PGIC), the Clinician Global Impression Change (CGIC), the Short Form 36 Health Survey (SF-36), the Berg Balance Test (BBT), duration of response, progression-free survival, time to progression, and time-to-treatment failure.

[0728] 164. The composition of Set II embodiment 1, wherein the target nucleic acid sequence is complementary to a non-target strand sequence located 1 nucleotide 3′ of a protospacer adjacent motif (PAM) sequence.

[0729] 165. The composition of Set II embodiment 164, wherein the PAM sequence comprises a TC motif.

[0730] 166. The composition of Set II embodiment 165, wherein the PAM sequence comprises ATC, GTC, CTC or TTC.

[0731] 167. The composition of any one of Set II embodiments 164-166, wherein the Class 2 Type V CRISPR protein comprises a RuvC domain.

[0732] 168. The composition of Set II embodiment 167, wherein the RuvC domain generates a staggered double-stranded break in the target nucleic acid sequence.

[0733] 169. The composition of any one of Set II embodiments 164-168, wherein the Class 2 Type V CRISPR protein does not comprise an HNH nuclease domain.

[0734] 170. A composition of any one of Set II embodiments 1-75; a nucleic acid of any one of Set II embodiments 76-79; a vector of one of Set II embodiments 80-86 or Set II embodiments 164-169; a VLP of any one of Set II embodiments 87-91; or combinations thereof, for use as a medicament for the treatment of a HTT-related disease.

[0735] The present description sets forth numerous exemplary configurations, methods, parameters, and the like. It should be recognized, however, that such description is not intended as a limitation on the scope of the present disclosure, but is instead provided as a description of exemplary embodiments.

### EXAMPLES

### Example 1: Creation, Expression and Purification of CasX Stx2

### 1. Growth and Expression

[0736] An expression construct for CasX Stx2 (also referred to herein as CasX2), derived from Planctomycetes (having the amino acid sequence of SEQ ID NO: 2 and encoded by the sequence of the Table 5, below), was constructed from gene fragments (Twist Biosciences) that were codon optimized for E. coli. The assembled construct contains a TEV-cleavable, C-terminal, TwinStrep tag and was cloned into a pBR322-derivative plasmid backbone containing an ampicillin resistance gene. The expression construct was transformed into chemically competent BL21* (DE3) E. coli and a starter culture was grown overnight in LB broth supplemented with carbenicillin at 37° C., 200 RPM, in UltraYield Flasks (Thomson Instrument Company). The following day, this culture was used to seed expression cultures at a 1:100 ratio (starter culture:expression culture). Expression cultures were Terrific Broth (Novagen) supplemented with carbenicillin and grown in UltraYield flasks at 37° C., 200 RPM. Once the cultures reached an OD of 2, they were chilled to 16° C. and IPTG (isopropyl β-D-1-thiogalactopyranoside) was added to a final concentration of 1 mM, from a 1 M stock. The cultures were induced at 16° C., 200 RPM for 20 hours before being harvested by centrifugation at 4,000×g for 15 minutes, 4° C. The cell paste was weighed and resuspended in lysis buffer (50 mM HEPES-NaOH, 250 mM NaCl, 5 mM MgCl₂, 1 mM TCEP, 1 mM benzamidine-HCL, 1 mM PMSF, 0.500 CHAPS, 10% glycerol, pH 8) at a ratio of 5 mL of lysis buffer per gram of cell paste. Once resuspended, the sample was frozen at −80° C. until purification.

TABLE 5
DNA sequence of CasX Stx2 construct

| Construct | DNA Sequence |
|---|---|
| SV40 NLS-Casx- | ATGGCTCCGAAGAAGAAGCGAAAGGTCAGCCAGGAAATTAAACGCATCA |
| SV40 NLS-TEV | ACAAGATCCGCCGTCGTCTGGTAAAAGACAGCAATACGAAAAAAGCCGG |
| cleavage site- | AAAAACCGGTCCGATGAAAACGCTGCTGGTGCGCGTGATGACGCCGGAT |
| TwinStrep tag | CTCCGCGAACGTCTTGAGAATTTGCGTAAGAAACCTGAAAATATTCCGC |
| | AACCGATTTCTAACACCTCGCGCGCCAATCTGAATAAACTGCTGACCGA |
| | TTAGACCGAAATGAAGAAAGCGATTCTGCACGTTTACTGGGAAGAGTTC |
| | CAGAAAGACCCGGTCGGTCTGATGAGCCGCGTTGCGCAACCTGCGCCGA |
| | AAAATATCGATGAGCGCAAGTTAATCCCGGTTAAAGATGGTAATGAACG |
| | TTTAACCTCCAGCGGCTTTGCCTGCAGTCAGTGCTGCCAGCCACTTTAT |
| | GTTTATAAACTTGAAGAGGTTAACGATAAAGGGAAACCCCATACCAATT |
| | ATTTCGGCCGCTGCAATGTCAGCGAACATGAACGCCTGATTTTGTTAAG |
| | CCCGCATAAACCGGAAGCGAATGACGAACTGGTGACCTATTCCCTGGGT |
| | AAATTTGGTCAGCGGGCGCTGGATTTTTACAGCATTCATGTGACGCGGG |
| | AAAGTAACCATCCGGTAAAGCCACTGGAACAAATCGGCGGTAACAGCTG |
| | CGCCTCTGGCCCGGTTGGCAAAGCGCTTAGCGATGCCTGTATGGGCGCG |
| | GTGGCGAGCTTTCTGACAAAATACCAGGATATTATCCTGGAGCATCAGA |
| | AGGTGATCAAAAAGAACGAGAAACGTCTGGCAAATTTAAAGGATATTGC |
| | CTCCGCTAACGGCCTGGCGTTCCCGAAGATTACCTTACCGCCGCAGCCG |
| | CACACCAAAGAAGGTATCGAAGCGTATAACAACGTTGTTGCCCAGATCG |
| | TCATCTGGGTGAATCTCAACCTGTGGCAAAAACTGAAAATTGGTCGTGA |
| | TGAAGCAAAACCGTTGCAGCGACTGAAAGGATTCCCGTCGTTTCCGCTG |
| | GTTGAACGACAGGCGAACGAAGTGGATTGGTGGGATATGGTTTGTAACG |
| | TCAAAAAATTGATCAACGAAAAAAAGGAAGATGGCAAAGTTTTCTGGCA |
| | AAATCTGGCGGGTTACAAACGTCAGGAGGCGTTGCTTCCGTATCTCTCT |
| | TCAGAAGAAGATCGCAAAAAAGGCAAGAAGTTTGCTCGCTATCAGTTTG |
| | GCGATTTATTACTGCATCTGGAAAAAAAACACGGCGAAGACTGGGGCAA |
| | AGTGTACGATGAAGCCTGGGAGCGTATCGACAAAAAAGTGGAAGGTTTG |
| | TCGAAACATATTAAACTCGAAGAAGAGCGCCGCAGTGAAGATGCGCAGT |
| | CAAAAGCAGCGCTGACGGACTGGTTACGTGCGAAAGCCAGTTTTGTGAT |
| | TGAAGGATTAAAAGAAGCTGATAAAGATGAATTTTGCCGTTGCGAACTG |
| | AAACTGCAAAAATGGTATGGCGACCTGCGCGGCAAACCGTTCGCCATTG |
| | AGGCAGAAAATAGCATCCTTGATATCTCCGGTTTCAGCAAACAATATAA |
| | CTGCGCGTTTATTTGGCAGAAAGACGGCGTGAAAAAGCTTAACCTGTAT |
| | CTGATCATTAACTATTTTAAAGGCGGGAAACTGCGTTTCAAGAAAATCA |
| | AGCCGGAAGCATTTGAAGCCAATCGTTTTTATACCGTTATTAATAAAAA |
| | AAGCGGTGAAATCGTGCCGATGGAAGTTAATTTTAACTTTGATGATCCG |
| | AACTTGATTATTCTGCCGCTGGCATTCGGTAAACGGCAGGGCCGTGAGT |
| | TTATCTGGAACGACCTGTTATCGCTGGAAACGGGCAGCCTGAAATTAGC |
| | CAACGGTCGCGTCATTGAAAAAACGCTCTACAACCGCCGCACCCGCCAG |
| | GATGAGCCGGCACTGTTTGTCGCGCTGACCTTTGAACGGCGTGAAGTCC |
| | TCGATAGGAGCAACATCAAACCAATGAACCTTATCGGTATTGATCGTGG |
| | TGAAAACATTCCTGCCGTTATCGCCCTGACTGATCCAGAAGGCTGCCCG |
| | CTTTCTCGCTTCAAAGATTCACTGGGCAACCCGACCCATATCCTCCGTA |
| | TTGGCGAGAGCTACAAAGAGAAACAGCGTACCATTCAGGCAGCCAAAGA |
| | AGTGGAGCAGCGTCGCGCGGGCGGCTATAGCCGTAAATATGCCAGCAAA |
| | GCTAAAAACCTGGCGGATGACATGGTGCGTAACACGGCGCGCGATTTGC |
| | TGTACTACGCCGTCACCCAGGACGCGATGCTGATTTTTGAGAACCTCTC |
| | CCGCGGTTTTGGGCGTCAGGGTAAACGCACGTTTATGGCGGAACGCCAG |
| | TATACGCGTATGGAGGACTGGCTGACCGCGAAGCTGGCCTATGAAGGCT |
| | TGCCGTCTAAAACTTACCTGAGCAAGACCCTGGCTCAGTACACCAGTAA |
| | AACCTGTAGTAATTGCGGCTTTACCATCACCAGCGCCGATTATGACCGC |
| | GTGCTGGAAAAGCTGAAGAAAACCGCCACCGGCTGGATGACCACCATCA |
| | ATGGTAAAGAGCTTAAAGTCGAAGGGCAGATTACTTATTACAACCGTTA |
| | TAAGCGGCAAAACGTGGTGAAAGATCTGTCGGTTGAGCTGGACCGTTTG |
| | TCTGAAGAAAGCGTGAACAATGATATCAGCTCCTGGACCAAAGGTCGTT |
| | CCGGCGAAGCGTTAAGTCTGTTGAAAAAGCGCTTTAGCCATCGCCCGGT |
| | GCAGGAAAAATTCGTTTGCCTGAACTGTGGCTTCGAAACCCACGCCGAC |
| | GAGCAAGCGGCGCTCAATATTGCGCGTAGCTGGCTGTTCCTGCGCAGCC |
| | AGGAATATAAAAAATATCAAACCAACAAAACAACTGGCAATACCGACAA |
| | GCGTGCCTTTGTTGAAACCTGGCAGAGCTTCTATCGCAAAAAACTGAAA |
| | GAGGTCTGGAAACCGGCGGTAGCGCCAAAGAAAAAACGCAAAGTGAGCG |
| | AAAATCTTTATTTTCAAGGTAGCGCATGGAGTCATCCTCAATTCGAGAA |
| | AGGTGGAGGTTCTGGCGGTGGATCGGGAGGTTCAGCGTGGAGCCACCCG |
| | CAGTTCGAAAAAGGAAGGGGATCCGGCTGCTAA (SEQ ID NO: |
| | 220) |

### 2. Purification

[0737] Frozen samples were thawed overnight at 4° C. with magnetic stirring. The viscosity of the resulting lysate was reduced by sonication and lysis was completed by homogenization in three passes at 17k PSI using an Emulsiflex C3 (Avestin). Lysate was clarified by centrifugation at 50,000×g, 4° C., for 30 minutes and the supernatant was collected. The clarified supernatant was applied to a Heparin 6 Fast Flow column (GE Life Sciences) by gravity flow. The column was washed with 5 CV of Heparin Buffer A (50 mM HEPES-NaOH, 250 mM NaCl, 5 mM MgCl₂, 1 mM TCEP, 10% glycerol, pH 8), then with 5 CV of Heparin Buffer B (Buffer A with the NaCl concentration adjusted to 500 mM). Protein was eluted with 5 CV of Heparin Buffer C (Buffer A with the NaCl concentration adjusted to 1 M), collected in fractions. Fractions were assayed for protein by Bradford Assay and protein-containing fractions were pooled. The pooled heparin eluate was applied to a Strep-Tactin XT Superflow column (IBA Life Sciences) by gravity flow. The column was washed with 5 CV of Strep Buffer (50 mM HEPES-NaOH, 500 mM NaCl, 5 mM MgCl₂, 1 mM TCEP, 10% glycerol, pH 8). Protein was eluted from the column using 5 CV of Strep Buffer with 50 mM D-Biotin added and collected in fractions. CasX-containing fractions were pooled, concentrated at 4° C. using a 30 kDa cut-off spin concentrator, and purified by size exclusion chromatography on a Superdex 200 pg column (GE Life Sciences). The column was equilibrated with SEC Buffer (25 mM sodium phosphate, 300 mM NaCl, 1 mM TCEP, 10% glycerol, pH 7.25) operated by an AKTA Pure FPLC system (GE Life Sciences). CasX-containing fractions that eluted at the appropriate molecular weight were pooled, concentrated at 4° C. using a 30 kDa cut-off spin concentrator, aliquoted, and snap-frozen in liquid nitrogen before being stored at −80° C.

### 3. Results

[0738] Samples from throughout the purification were resolved by SDS-PAGE and visualized by colloidal Coomassie staining, as shown in FIG. 1 and FIG. 3. In FIG. 1, the lanes, from left to right, are: molecular weight standards, Pellet: insoluble portion following cell lysis, Lysate: soluble portion following cell lysis, Flow Thru: protein that did not bind the Heparin column, Wash: protein that eluted from the column in wash buffer, Elution: protein eluted from the heparin column with elution buffer, Flow Thru: Protein that did not bind the StrepTactinXT column, Elution: protein eluted from the StrepTactin XT column with elution buffer, Injection: concentrated protein injected onto the s200 gel filtration column, Frozen: pooled fractions from the s200 elution that have been concentrated and frozen. In FIG. 3, the lanes from right to left, are the injection (sample of protein injected onto the gel filtration column) molecular weight markers, lanes 3-9 are samples from the indicated elution volumes. Results from the gel filtration are shown in FIG. 2. The 68.36 mL peak corresponds to the apparent molecular weight of CasX and contained the majority of CasX protein. The average yield was 0.75 mg of purified CasX protein per liter of culture, with 75% purity, as evaluated by colloidal Coomassie staining.

[0739] In order to generate the CasX 119, 438, and 457 constructs (sequences in Table 6), the codon-optimized CasX 37 construct (based on the CasX Stx2 construct of Example 1, encoding Planctomycetes CasX SEQ ID NO: 2, with a A708K substitution and a [P793] deletion with fused NLS, and linked guide and non-targeting sequences) was cloned into a mammalian expression plasmid (pStX; see FIG. 4) using standard cloning methods. To build CasX 119, the CasX 37 construct DNA was PCR amplified in two reactions using Q5 DNA polymerase (New England BioLabs Cat #M0491L) according to the manufacturer's protocol, using primers oIC539 and oIC88 as well as oIC87 and oIC540 respectively (see FIG. 5). To build CasX 457, the CasX 365 construct DNA was PCR amplified in four reactions using Q5 DNA polymerase (New England BioLabs Cat #M0491L) according to the manufacturer's protocol, using primers oIC539 and oIC212, oIC211 and oIC376, oIC375 and oIC551, and oIC550 and oIC540 respectively. To build CasX 438, the CasX 119 construct DNA was PCR amplified in four reactions using Q5 DNA polymerase according to the manufacturer's protocol, using primers oIC539 and oIC689, oIC688 and oIC376, oIC375 and oIC551, and oIC550 and oIC540 respectively. The resulting PCR amplification products were then purified using Zymoclean DNA clean and concentrator (Zymo Research Cat #4014) according to the manufacturer's protocol. The pStX backbone was digested using XbaI and SpeI in order to remove the 2931 base pair fragment of DNA between the two sites in plasmid pStx34. The digested backbone fragment was purified by gel extraction from a 1% agarose gel (Gold Bio Cat #A-201-500) using Zymoclean Gel DNA Recovery Kit (Zymo Research Cat #D4002) according to the manufacturer's protocol. The three fragments were then pieced together using Gibson assembly (New England BioLabs Cat #E2621S) following the manufacturer's protocol. Assembled products in the pStx34 were transformed into chemically-competent or electro-competent Turbo Competent E. coli bacterial cells, plated on LB-Agar plates (LB: Teknova Cat #L9315, Agar: Quartzy Cat #214510) containing carbenicillin. Individual colonies were picked and miniprepped using Qiagen spin Miniprep Kit (Qiagen Cat #27104) following the manufacturer's protocol. The resultant plasmids were sequenced using Sanger sequencing to ensure correct assembly. pStX34 includes an EF-1α promoter for the protein as well as a selection marker for both puromycin and carbenicillin. Sequences encoding the targeting sequences that target the gene of interest were designed based on CasX PAM locations. Targeting sequence DNA was ordered as single-stranded DNA (ssDNA) oligos (Integrated DNA Technologies) consisting of the targeting sequence and the reverse complement of this sequence. These two oligos were annealed together and cloned into pStX individually or in bulk by Golden Gate assembly using T4 DNA Ligase (New England BioLabs Cat #M0202L) and an appropriate restriction enzyme for the plasmid. Golden Gate products were transformed into chemically or electro-competent cells such as NEB Turbo competent E. coli (NEB Cat #C2984I), plated on LB-Agar plates containing carbenicillin. Individual colonies were picked and miniprepped using Qiagen spin Miniprep Kit and following the manufacturer's protocol. The resultant plasmids were sequenced using Sanger sequencing to ensure correct ligation. SaCas9 and SpyCas9 control plasmids were prepared similarly to pStX plasmids described above, with the protein and guide regions of pStX exchanged for the respective protein and guide. Targeting sequences for SaCas9 and SpyCas9 were either obtained from the literature or were rationally designed according to established methods. The expression and recovery of the CasX 119, 438 and 457 proteins was performed using the general methodologies of Example 1 (however the DNA sequences were codon optimized for expression in E. coli).

[0740] CasX Variant 119: following the same expression and purification scheme for WT CasX, the following results were obtained for CasX variant 119. Samples from throughout the purification procedure were resolved by SDS-PAGE and visualized by colloidal Coomassie staining, as shown in FIG. 6 and FIG. 8. Results from the gel filtration are shown in FIG. 7. The average yield was 11.7 mg of purified CasX protein per liter of culture at 95% purity, as evaluated by colloidal Coomassie staining.

[0741] CasX Variant 438: Following the same expression and purification scheme for WT CasX, the following results were obtained for CasX variant 438. Samples from throughout the purification procedure were resolved by SDS-PAGE and visualized by colloidal Coomassie staining, as shown in FIGS. 9 and 11. Results from the gel filtration are shown in FIG. 10. The average yield was 13.1 mg of purified CasX protein per liter of culture at 97.5% purity, as evaluated by colloidal Coomassie staining.

[0742] CasX Variant 457: Following the same expression and purification scheme for WT CasX, the following results were obtained for CasX variant 457. Samples from throughout the purification procedure were resolved by SDS-PAGE and visualized by colloidal Coomassie staining, as shown in FIGS. 12 and 14 and gel filtration, as shown in FIG. 13. The average yield was 9.76 mg of purified CasX protein per liter of culture at 91.6% purity, as evaluated by colloidal Coomassie staining.

[0743] Overall, the results support that CasX variants can be produced and recovered at high levels of purity sufficient for experimental assays and evaluation.

TABLE 6
Sequences of CasX 119, 438 and 457

| | DNA | |
|---|---|---|
| Construct | Sequence | Amino Acid Sequence |
| CasX | (SEQ | QEIKRINKIRRRLVKDSNTKKAGKTGPMKTLLVRVMTPDLRERLE |
| 119 | ID NO: | NLRKKPENIPQPISNTSRANLNKLLTDYTEMKKAILHVYWEEFQK |
| | 224) | DPVGLMSRVAQPAPKNIDQRKLIPVKDGNERLTSSGFACSQCCQP |
| | | LYVYKLEQVNDKGKPHTNYFGRCNVSEHERLILLSPHKPEANDEL |
| | | VTYSLGKFGQRALDFYSIHVTRESNHPVKPLEQIGGNSCASGPVG |
| | | KALSDACMGAVASFLTKYQDIILEHQKVIKKNEKRLANLKDIASA |
| | | NGLAFPKITLPPQPHTKEGIEAYNNVVAQIVIWVNLNLWQKLKIG |
| | | RDEAKPLQRLKGFPSFPLVERQANEVDWWDMVCNVKKLINEKKED |
| | | GKVFWQNLAGYKRQEALRPYLSSEEDRKKGKKFARYQFGDLLLHL |
| | | EKKHGEDWGKVYDEAWERIDKKVEGLSKHIKLEEERRSEDAQSKA |
| | | ALTDWLRAKASFVIEGLKEADKDEFCRCELKLQKWYGDLRGKPFA |
| | | IEAENSILDISGFSKQYNCAFIWQKDGVKKLNLYLIINYFKGGKL |
| | | RFKKIKPEAFEANRFYTVINKKSGEIVPMEVNFNFDDPNLIILPL |
| | | AFGKRQGREFIWNDLLSLETGSLKLANGRVIEKTLYNRRTRQDEP |
| | | ALFVALTFERREVLDSSNIKPMNLIGIDRGENIPAVIALTDPEGC |
| | | PLSRFKDSLGNPTHILRIGESYKEKQRTIQAKKEVEQRRAGGYSR |
| | | KYASKAKNLADDMVRNTARDLLYYAVTQDAMLIFENLSRGFGRQG |
| | | KRTFMAERQYTRMEDWLTAKLAYEGLSKTYLSKTLAQYTSKTCSN |
| | | CGFTITSADYDRVLEKLKKTATGWMTTINGKELKVEGQITYYNRY |
| | | KRQNVVKDLSVELDRLSEESVNNDISSWTKGRSGEALSLLKKRFS |
| | | HRPVQEKFVCLNCGFETHADEQAALNIARSWLFLRSQEYKKYQTN |
| | | KTTGNTDKRAFVETWQSFYRKKLKEVWKPAV (SEQ ID NO: |
| | | 221) |
| CasX 457 | (SEQ | QEIKRINKIRRRLVKDSNTKKAGKTGPMKTLLVRVMTPDLRERLE |
| | ID NO: | NLRKKPENIPQPISNTSRANLNKLLTDYTEMKKAILHVYWEEFQK |
| | 225) | DPVGLMSRVAQPAPKNIDQRKLIPVKDGNERLTSSGFACSQCCQP |
| | | LYVYKLEQVNDKGKPHTNYFGRCNVSEHERLILLSPHKPEANDEL |
| | | VTYSLGKFGQRALDFYSIHVTRESNHPVKPLEQIGGNSCASGPVG |
| | | KALSDACMGAVASFLTKYQDIILEHKKVIKKNEKRLANLKDIASA |
| | | NGLAFPKITLPPQPHTKEGIEAYNNVVAQIVIWVNLNLWQKLKIG |
| | | RDEAKPLQRLKGFPSFPLVERQANEVDWWDMVCNVKKLINEKKED |
| | | GKVFWQNLAGYKRQEALRPYLSSPEDRKKGKKFARYQLGDLLLHL |
| | | EKKHGEDWGKVYDEAWERIDKKVEGLSKHIKLEEERRSEDAQSKA |
| | | ALTDWLRAKASFVIEGLKEADKDEFCRCELKLQKWYGDLRGKPFA |
| | | IEAENSILDISGFSKQYNCAFIWQKDGVKKLNLYLIINYFKGGKL |
| | | RFKKIKPEAFEANRFYTVINKKSGEIVPMEVNFNFDDPNLIILPL |
| | | AFGKRQGREFIWNDLLSLETGSLKLANGRVIEKPLYNRRTRQDEP |
| | | ALFVALTFERREVLDSSNIKPMNLIGVDRGENIPAVIALTDPEGC |
| | | PLSRFKDSLGNPTHILRIGESYKEKQRTIQAKKEVEQRRAGGYSR |
| | | KYASKAKNLADDMVRNTARDLLYYAVTQDAMLIFENLSRGFGRQG |
| | | KRTFMAERQYTRMEDWLTAKLAYEGLSKTYLSKTLAQYTSKTCSN |
| | | CGFTITSADYDRVLEKLKKTATGWMTTINGKELKVEGQITYYNRR |
| | | KRQNVVKDLSVELDRLSEESVNNDISSWTKGRSGEALSLLKKRFS |
| | | HRPVQEKFVCLNCGFETHADEQAALNIARSWLFLRSQEYKKYQTN |
| | | KTTGNTDKRAFVETWQSFYRKKLKEVWKPAV (SEQ ID NO: |
| | | 222) |
| CasX | (SEQ | QEIKRINKIRRRLVKDSNTKKAGKTGPMKTLLVRVMTPDLRERLE |
| 438 | ID NO: | NLRKKPENIPQPISNTSRANLNKLLTDYTEMKKAILHVYWEEFQK |
| | 226) | DPVGLMSRVAQPAPKNIDQRKLIPVKDGNERLTSSGFACSQCCQP |
| | | LYVYKLEQVNDKGKPHTNYFGRCNVSEHERLILLSPHKPEANDEL |
| | | VTYSLGKFGQRALDFYSIHVTRESNHPVKPLEQIGGNSCASGPVG |
| | | KALSDACMGAVASFLTKYQDIILEHQKVIKKNEKRLANLKDIASA |
| | | NGLAFPKITLPPQPHTKEGIEAYNNVVAQIVIWVNLNLWQKLKIG |
| | | RDEAKPLQRLKGFPSFPLVERQANEVDWWDMVCNVKKLINEKKED |
| | | GKVFWQNLAGYKRQEALRPYLSSEEDRKKGKKFARYQLGDLLKHL |
| | | EKKHGEDWGKVYDEAWERIDKKVEGLSKHIKLEEERRSEDAQSKA |
| | | ALTDWLRAKASFVIEGLKEADKDEFCRCELKLQKWYGDLRGKPFA |
| | | lEAENSILDISGFSKQYNCAFIWQKDGVKKLNLYLIINYFKGGKL |
| | | RFKKIKPEAFEANRFYTVINKKSGEIVPMEVNFNFDDPNLIILPL |
| | | AFGKRQGREFIWNDLLSLETGSLKLANGRVIEKTLYNRRTRQDEP |
| | | ALFVALTFERREVLDSSNIKPMNLIGVDRGENIPAVIALTDPEGC |
| | | PLSRFKDSLGNPTHILRIGESYKEKQRTIQAKKEVEQRRAGGYSR |
| | | KYASKAKNLADDMVRNTARDLLYYAVTQDAMLIFENLSRGFGRQG |
| | | KRTFMAERQYTRMEDWLTAKLAYEGLSKTYLSKTLAQYTSKTCSN |
| | | CGFTITSADYDRVLEKLKKTATGWMTTINGKELKVEGQITYYNRR |
| | | KRQNVVKDLSVELDRLSEESVNNDISSWTKGRSGEALSLLKKRFS |
| | | HRPVQEKFVCLNCGFETHADEQAALNIARSWLFLRSQEYKKYQTN |
| | | KTTGNTDKRAFVETWQSFYRKKLKEVWKPAV (SEQ ID NO: |
| | | 223) |

### Example 2: CasX Construct 488, 491, 515 and 527

[0744] In order to generate the CasX 488 construct (sequences in Table 7), the codon-optimized CasX 119 construct (based on the CasX Stx2 construct of Example 1, encoding Planctomycetes CasX SEQ ID NO: 2, with a A708K substitution, a L379R substitution, and a [P793] deletion with fused NLS, and linked guide and non-targeting sequences) was cloned into a destination plasmid (pStX; see FIG. 4) using standard cloning methods. In order to generate the CasX 491 construct (sequences in Table 7), the codon-optimized CasX 484 construct (based on the CasX Stx2 construct of Example 1, encoding Planctomycetes CasX SEQ ID NO: 2, with a A708K substitution, a L379R substitution, a [P793] deletion, a I658V substitution, and a F399L substitution with fused NLS, and linked guide and non-targeting sequences) was cloned into a destination plasmid (pStX; see FIG. 4) using standard cloning methods. Construct CasX 1 (CasX SEQ ID NO: 1) was cloned into a destination vector using standard cloning methods. To build CasX 488, the CasX 119 construct DNA was PCR amplified using Q5 DNA polymerase according to the manufacturer's protocol, using primers oIC765 and oIC762 (see FIG. 5). To build CasX 491, the codon optimized CasX 484 construct DNA was PCR amplified using Q5 DNA polymerase according to the manufacturer's protocol, using primers oIC765 and oIC762 (see FIG. 5). The CasX 1 construct was PCR amplified using Q5 DNA polymerase according to the manufacturer's protocol, using primers oIC766 and oIC784. Each of the PCR products were purified by gel extraction from a 1% agarose gel (Gold Bio Cat #A-201-500) using Zymoclean Gel DNA Recovery Kit according to the manufacturer's protocol. The corresponding fragments were then pieced together using Gibson assembly (New England BioLabs Cat #E2621S) following the manufacturer's protocol. Assembled products in pStx1 were transformed into chemically-competent Turbo Competent E. coli bacterial cells, plated on LB-Agar plates containing kanamycin. Individual colonies were picked and miniprepped using Qiagen spin Miniprep Kit following the manufacturer's protocol. The resultant plasmids were sequenced using Sanger sequencing to ensure correct assembly. The correct clones were then subcloned into the mammalian expression vector pStx34 using restriction enzyme cloning. The pStx34 backbone and the CasX 488 and 491 clones in pStx1 were digested with XbaI and BamHI respectively. The digested backbone and respective insert fragments were purified by gel extraction from a 1% agarose gel (Gold Bio Cat #A-201-500) using Zymoclean Gel DNA Recovery Kit according to the manufacturer's protocol. The clean backbone and insert were then ligated together using T4 Ligase (New England Biolabs Cat #M0202L) according to the manufacturer's protocol. The ligated products were transformed into chemically-competent Turbo Competent E. coli bacterial cells, plated on LB-Agar plates containing carbenicillin. Individual colonies were picked and miniprepped using Qiagen spin Miniprep Kit following the manufacturer's protocol. The resultant plasmids were sequenced using Sanger sequencing to ensure correct assembly.

[0745] To build CasX 515 (sequences in Table 7), the CasX 491 construct DNA was PCR amplified in two reactions using Q5 DNA polymerase according to the manufacturer's protocol, using primers oIC539 and oSH556 as well as oSH555 and oIC540 respectively (see FIG. 5). To build CasX 527 (sequences in Table 7), the CasX 491 construct DNA was PCR amplified in two reactions using Q5 DNA polymerase according to the manufacturer's protocol, using primers oIC539 and oSH584 as well as oSH583 and oIC540 respectively. The PCR products were purified by gel extraction from a 1% agarose gel using Zymoclean Gel DNA Recovery Kit according to the manufacturer's protocol. The pStX backbone was digested using XbaI and SpeI in order to remove the 2931 base pair fragment of DNA between the two sites in plasmid pStx56. The digested backbone fragment was purified by gel extraction from a 1% agarose gel using Zymoclean Gel DNA Recovery Kit according to the manufacturer's protocol. The insert and backbone fragments were then pieced together using Gibson assembly (New England BioLabs Cat #E2621S) following the manufacturer's protocol. Assembled products in the pStx56 were transformed into chemically-competent Turbo Competent E. coli bacterial cells, plated on LB-Agar plates containing kanamycin. Individual colonies were picked and miniprepped using Qiagen spin Miniprep Kit following the manufacturer's protocol. The resultant plasmids were sequenced using Sanger sequencing to ensure correct assembly. pStX34 includes an EF-1α promoter for the protein as well as a selection marker for both puromycin and carbenicillin. pStX56 includes an EF-1α promoter for the protein as well as a selection marker for both puromycin and kanamycin Sequences encoding the targeting sequences that target the gene of interest were designed based on CasX PAM locations. Targeting sequence DNA was ordered as single-stranded DNA (ssDNA) oligos (Integrated DNA Technologies) consisting of the targeting sequence and the reverse complement of this sequence. These two oligos were annealed together and cloned into pStX individually or in bulk by Golden Gate assembly using T4 DNA Ligase and an appropriate restriction enzyme for the plasmid. Golden Gate products were transformed into chemically or electro-competent cells such as NEB Turbo competent E. coli (NEB Cat #C2984I), plated on LB-Agar plates containing the appropriate antibiotic. Individual colonies were picked and miniprepped using Qiaprep spin Miniprep Kit and following the manufacturer's protocol. The resultant plasmids were sequenced using Sanger sequencing to ensure correct ligation. SaCas9 and SpyCas9 control plasmids were prepared similarly to pStX plasmids described above, with the protein and guide regions of pStX exchanged for the respective protein and guide. Targeting sequences for SaCas9 and SpyCas9 were either obtained from the literature or were rationally designed according to established methods. The expression and recovery of the CasX constructs was performed using the general methodologies of Example 1 and are summarized as follows:

[0746] CasX variant 488: following the same expression and purification scheme for WT CasX, the following results were obtained for CasX variant 488. Samples from throughout the purification procedure were resolved by SDS-PAGE and visualized by colloidal Coomassie staining, as well as resolved by gel filtration. The average yield was 2.7 mg of purified CasX protein per liter of culture at 98.8% purity, as evaluated by colloidal Coomassie staining.

[0747] CasX Variant 491: following the same expression and purification scheme for WT CasX, the following results were obtained for CasX variant 488. Samples from throughout the purification procedure were resolved by SDS-PAGE and visualized by colloidal Coomassie staining, as well as resolved by gel filtration. The average yield was 12.4 mg of purified CasX protein per liter of culture at 99.4% purity, as evaluated by colloidal Coomassie staining.

[0748] CasX variant 515: following the same expression and purification scheme for WT CasX, the following results were obtained for CasX variant 488. Samples from throughout the purification procedure were resolved by SDS-PAGE and visualized by colloidal Coomassie staining, as well as resolved by gel filtration. The average yield was 7.8 mg of purified CasX protein per liter of culture at 87.200 purity, as evaluated by colloidal Coomassie staining.

TABLE 7
Sequences of CasX 488, 491, 515 and 527

| | DNA | |
|---|---|---|
| Construct | Sequence | Amino Acid Sequence |
| CasX 488 | (SEQ | QEIKRINKIRRRLVKDSNTKKAGKTGPMKTLLVRVMTPDLRERLE |
| | ID NO: | NLRKKPENIPQPISNTSRANLNKLLTDYTEMKKAILHVYWEEFQK |
| | 231) | DPVGLMSRVAQPASKKIDQNKLKPEMDEKGNLTTAGFACSQCGQP |
| | | LFVYKLEQVSEKGKAYTNYFGRCNVAEHEKLILLAQLKPEKDSDE |
| | | AVTYSLGKFGQRALDFYSIHVTKESTHPVKPLAQIAGNRYASGPV |
| | | GKALSDACMGTIASELSKYQDIIIEHQKVVKGNQKRLESLRELAG |
| | | KENLEYPSVTLPPQPHTKEGVDAYNEVIARVRMWVNLNLWQKLKL |
| | | SRDDAKPLLRLKGFPSFPLVERQANEVDWWDMVCNVKKLINEKKE |
| | | DGKVFWQNLAGYKRQEALRPYLSSEEDRKKGKKFARYQFGDLLLH |
| | | LEKKHGEDWGKVYDEAWERIDKKVEGLSKHIKLEEERRSEDAQSK |
| | | AALTDWLRAKASFVIEGLKEADKDEFCRCELKLQKWYGDLRGKPF |
| | | AIEAENSILDISGFSKQYNCAFIWQKDGVKKLNLYLIINYFKGGK |
| | | LRFKKIKPEAFEANRFYTVINKKSGEIVPMEVNFNFDDPNLIILP |
| | | LAFGKRQGREFIWNDLLSLETGSLKLANGRVIEKTLYNRRTRQDE |
| | | PALFVALTFERREVLDSSNIKPMNLIGIDRGENIPAVIALTDPEG |
| | | CPLSRFKDSLGNPTHILRIGESYKEKQRTIQAKKEVEQRRAGGYS |
| | | RKYASKAKNLADDMVRNTARDLLYYAVTQDAMLIFENLSRGFGRQ |
| | | GKRTFMAERQYTRMEDWLTAKLAYEGLSKTYLSKTLAQYTSKTCS |
| | | NCGFTITSADYDRVLEKLKKTATGWMTTINGKELKVEGQITYYNR |
| | | YKRQNVVKDLSVELDRLSEESVNNDISSWTKGRSGEALSLLKKRF |
| | | SHRPVQEKFVCLNCGFETHADEQAALNIARSWLFLRSQEYKKYQT |
| | | NKTTGNTDKRAFVETWQSFYRKKLKEVWKPAV (SEQ ID NO: |
| | | 227) |
| CasX 491 | (SEQ | QEIKRINKIRRRLVKDSNTKKAGKTGPMKTLLVRVMTPDLRERLE |
| | ID NO: | NLRKKPENIPQPISNTSRANLNKLLTDYTEMKKAILHVYWEEFQK |
| | 232) | DPVGLMSRVAQPASKKIDQNKLKPEMDEKGNLTTAGFACSQCGQP |
| | | LFVYKLEQVSEKGKAYTNYFGRCNVAEHEKLILLAQLKPEKDSDE |
| | | AVTYSLGKFGQRALDFYSIHVTKESTHPVKPLAQIAGNRYASGPV |
| | | GKALSDACMGTIASELSKYQDIIIEHQKVVKGNQKRLESLRELAG |
| | | KENLEYPSVTLPPQPHTKEGVDAYNEVIARVRMWVNLNLWQKLKL |
| | | SRDDAKPLLRLKGFPSFPLVERQANEVDWWDMVCNVKKLINEKKE |
| | | DGKVFWQNLAGYKRQEALRPYLSSEEDRKKGKKFARYQLGDLLLH |
| | | LEKKHGEDWGKVYDEAWERIDKKVEGLSKHIKLEEERRSEDAQSK |
| | | AALTDWLRAKASFVIEGLKEADKDEFCRCELKLQKWYGDLRGKPF |
| | | AIEAENSILDISGFSKQYNCAFIWQKDGVKKLNLYLIINYFKGGK |
| | | LRFKKIKPEAFEANRFYTVINKKSGEIVPMEVNFNFDDPNLIILP |
| | | LAFGKRQGREFIWNDLLSLETGSLKLANGRVIEKTLYNRRTRQDE |
| | | PALFVALTFERREVLDSSNIKPMNLIGVDRGENIPAVIALTDPEG |
| | | CPLSRFKDSLGNPTHILRIGESYKEKQRTIQAKKEVEQRRAGGYS |
| | | RKYASKAKNLADDMVRNTARDLLYYAVTQDAMLIFENLSRGFGRQ |
| | | GKRTFMAERQYTRMEDWLTAKLAYEGLSKTYLSKTLAQYTSKTCS |
| | | NCGFTITSADYDRVLEKLKKTATGWMTTINGKELKVEGQITYYNR |
| | | YKRQNVVKDLSVELDRLSEESVNNDISSWTKGRSGEALSLLKKRF |
| | | SHRPVQEKFVCLNCGFETHADEQAALNIARSWLFLRSQEYKKYQT |
| | | NKTTGNTDKRAFVETWQSFYRKKLKEVWKPAV (SEQ ID NO: |
| | | 228) |
| CasX 515 | (SEQ | QEIKRINKIRRRLVKDSNTKKAGKTGPMKTLLVRVMTPDLRERLE |
| | ID NO: | NLRKKPENIPQPISNTSRANLNKLLTDYTEMKKAILHVYWEEFQK |
| | 233) | DPVGLMSRVAQPASKKIDQNKLKPEMDEKGNLTTAGFACSQCGQP |
| | | LFVYKLEQVSEKGKAYTNYFGRCNVAEHEKLILLAQLKPEKDSDE |
| | | AVTYSLGKFGQRALDFYSIHVTKESTHPVKPLAQIAGNRYASGPV |
| | | GKALSDACMGTIASELSKYQDIIIEHQKVVKGNQKRLESLRELAG |
| | | KENLEYPSVTLPPQPHTKEGVDAYNEVIARVRMWVNLNLWQKLKL |
| | | SRDDAKPLLRLKGFPSFPLVERQANEVDWWDMVCNVKKLINEKKE |
| | | DGKVFWQNLAGYKRQEALRPYLSSEEDRKKGKKFARYQLGDLLLH |
| | | LEKKHGEDWGKVYDEAWERIDKKVEGLSKHIKLEEERRSEDAQSK |
| | | AALTDWLRAKASFVIEGLKEADKDEFCRCELKLQKWYGDLRGKPF |
| | | AIEAENSILDISGFSKQYNCAFIWQKDGVKKLNLYLIINYFKGGK |
| | | LRFKKIKPEAFEANRFYTVINKKSGEIVPMEVNFNFDDPNLIILP |
| | | LAFGKRQGREFIWNDLLSLETGSLKLANGRVIEKTLYNRRTRQDE |
| | | PALEVALTFERREVLDSSNIKPMNLIGVDRGENIPAVIALTDPEG |
| | | CPLSRFKDSLGNPTHILRIGESYKEKQRTIQAKKEVEQRRAGGYS |
| | | RKYASKAKNLADDMVRNTARDLLYYAVTQDAMLIFENLSRGFGRQ |
| | | GKRTFMAERQYTRMEDWLTAKLAYEGLPSKTYLSKTLAQYTSKTC |
| | | SNCGFTITSADYDRVLEKLKKTATGWMTTINGKELKVEGQITYYN |
| | | RYKRQNVVKDLSVELDRLSEESVNNDISSWTKGRSGEALSLLKKR |
| | | FSHRPVQEKFVCLNCGFETHADEQAALNIARSWLFLRSQEYKKYQ |
| | | TNKTTGNTDKRAFVETWQSFYRKKLKEVWKPAV (SEQ ID NO: |
| | | 229) |
| CasX 527 | (SEQ | QEIKRINKIRRRLVKDSNTKKAGKTRGPMKTLLVRVMTPDLRERL |
| | ID NO: | ENLRKKPENIPQPISNTSRANLNKLLTDYTEMKKAILHVYWEEFQ |
| | 234) | KDPVGLMSRVAQPASKKIDQNKLKPEMDEKGNLTTAGFACSQCGQ |
| | | PLFVYKLEQVSEKGKAYTNYFGRCNVAEHEKLILLAQLKPEKDSD |
| | | EAVTYSLGKFGQRALDFYSIHVTKESTHPVKPLAQIAGNRYASGP |
| | | VGKALSDACMGTIASELSKYQDIIIEHQKVVKGNQKRLESLRELA |
| | | GKENLEYPSVTLPPQPHTKEGVDAYNEVIARVRMWVNLNLWQKLK |
| | | LSRDDAKPLLRLKGFPSFPLVERQANEVDWWDMVCNVKKLINEKK |
| | | EDGKVFWQNLAGYKRQEALRPYLSSEEDRKKGKKFARYQLGDLLL |
| | | HLEKKHGEDWGKVYDEAWERIDKKVEGLSKHIKLEEERRSEDAQS |
| | | KAALTDWLRAKASFVIEGLKEADKDEFCRCELKLQKWYGDLRGKP |
| | | FAIEAENSILDISGFSKQYNCAFIWQKDGVKKLNLYLIINYFKGG |
| | | KLRFKKIKPEAFEANRFYTVINKKSGEIVPMEVNFNFDDPNLIIL |
| | | PLAFGKRQGREFIWNDLLSLETGSLKLANGRVIEKTLYNRRTRQD |
| | | EPALEVALTFERREVLDSSNIKPMNLIGVDRGENIPAVIALTDPE |
| | | GCPLSRFKDSLGNPTHILRIGESYKEKQRTIQAKKEVEQRRAGGY |
| | | SRKYASKAKNLADDMVRNTARDLLYYAVTQDAMLIFENLSRGFGR |
| | | QGKRTFMAERQYTRMEDWLTAKLAYEGLSKTYLSKTLAQYTSKTC |
| | | SNCGFTITSADYDRVLEKLKKTATGWMTTINGKELKVEGQITYYN |
| | | RYKRQNVVKDLSVELDRLSEESVNNDISSWTKGRSGEALSLLKKR |
| | | FSHRPVQEKFVCLNCGFETHADEQAALNIARSWLFLRSQEYKKYQ |
| | | TNKTTGNTDKRAFVETWQSFYRKKLKEVWKPAV (SEQ ID NO: |
| | | 230) |

### Example 3: Design and Generation of CasX Constructs 278-280, 285-288, 290, 291, 293, 300, 492, and 493

[0749] In order to generate the CasX 278-280, 285-288, 290, 291, 293, 300, 492, and 493 constructs (sequences in Table 8), the N- and C-termini of the codon-optimized CasX 119 construct (based on the CasX Stx37 construct of Example 1, encoding Planctomycetes CasX SEQ ID NO: 2, with a A708K substitution and a [P793] deletion with fused NLS, and linked guide and non-targeting sequences) in a mammalian expression vector were manipulated to delete or add NLS sequences (sequences in Table 9). Constructs 278, 279, and 280 were manipulations of the N- and C-termini using only an SV40 NLS sequence. Construct 280 had no NLS on the N-terminus and added two SV40 NLS' on the C-terminus with a triple proline linker in between the two SV40 NLS sequences. Constructs 278, 279, and 280 were made by amplifying pStx34.119.174.NT with Q5 DNA polymerase according to the manufacturer's protocol, using primers oIC527 and oIC528, oIC730 and oIC522, and oIC730 and oIC530 for the first fragments each and using oIC529 and oIC520, oIC519 and oIC731, and oIC529 and oIC731 to create the second fragments each. These fragments were purified by gel extraction from a 1% agarose gel using Zymoclean Gel DNA Recovery Kit according to the manufacturer's protocol. The respective fragments were cloned together using Gibson assembly (New England BioLabs Cat #E2621S) following the manufacturer's protocol. Assembled products in the pStx34 were transformed into chemically-competent Turbo Competent E. coli bacterial cells, plated on LB-Agar plates containing carbenicillin and incubated at 37° C. Individual colonies were picked and miniprepped using Qiagen spin Miniprep Kit following the manufacturer's protocol. The resultant plasmids were sequenced using Sanger sequencing to ensure correct assembly. Sequences encoding the targeting sequences that target the gene of interest were designed based on CasX PAM locations. Targeting sequence DNA was ordered as single-stranded DNA (ssDNA) oligos (Integrated DNA Technologies) consisting of the targeting sequence and the reverse complement of this sequence. These two oligos were annealed together and cloned into pStX individually or in bulk by Golden Gate assembly using T4 DNA Ligase (New England BioLabs Cat #M0202L) and an appropriate restriction enzyme for the plasmid. Golden Gate products were transformed into chemically- or electro-competent cells such as NEB Turbo competent E. coli (NEB Cat #C2984I), plated on LB-Agar plates containing carbenicillin and incubated at 37° C. Individual colonies were picked and miniprepped using Qiagen spin Miniprep Kit and following the manufacturer's protocol. The resultant plasmids were sequenced using Sanger sequencing to ensure correct ligation.

[0750] In order to generate constructs 285-288, 290, 291, 293, and 300, a nested PCR method was used for cloning. The backbone vector and PCR template used was construct pStx34 279.119.174.NT, having the CasX 119, guide 174, and non-targeting spacer (see Examples 7 and 8 and Tables therein for sequences). Construct 278 has the configuration SV40NLS-CasX119. Construct 279 has the configuration CasX119-SV40NLS. Construct 280 has the configuration CasX119-SV40NLS-PPP linker-SV40NLS. Construct 285 has the configuration CasX119-SV40NLS-PPP linker-SynthNL S3. Construct 286 has the configuration CasX119-SV40NLS-PPP linker-SynthNL S4. Construct 287 has the configuration CasX119-SV40NLS-PPP linker-SynthNLS5. Construct 288 has the configuration CasX119-SV40NLS-PPP linker-SynthNLS6. Constrict 290 has the configuration CasX119-SV40NLS-PPP linker-EGL-13 NLS. Construct 291 has the configuration CasX119-SV40NLS-PPP linker-c-Myc NLS. Construct 293 has the configuration CasX119-SV40NLS-PPP linker-Nucleolar RNA Helicase II NLS. Construct 300 has the configuration CasX119-SV40NLS-PPP linker-Influenza A protein NLS. Construct 492 has the configuration SV40NLS-CasX119- SV40NLS-PPP linker-SV40NLS. Construct 493 has the configuration SV40NLS-CasX119- SV40NLS-PPP linker-c-Myc NLS. Each variant had a set of three PCRs; two of which were nested, were purified by gel extraction, digested, and then ligated into the digested and purified backbone. Assembled products in the pStx34 were transformed into chemically-competent Turbo Competent E. coli bacterial cells, plated on LB-Agar plates containing carbenicillin and incubated at 37° C. Individual colonies were picked and miniprepped using Qiagen spin Miniprep Kit following the manufacturer's protocol. The resultant plasmids were sequenced using Sanger sequencing to ensure correct assembly. Sequences encoding the targeting sequences that target the gene of interest were designed based on CasX PAM locations. Targeting sequence DNA was ordered as single-stranded DNA (ssDNA) oligos (Integrated DNA Technologies) consisting of the targeting sequence and the reverse complement of this sequence. These two oligos were annealed together and cloned into the resulting pStX individually or in bulk by Golden Gate assembly using T4 DNA Ligase (New England BioLabs Cat #M0202L) and an appropriate restriction enzyme for the plasmid. Golden Gate products were transformed into chemically- or electro-competent cells such as NEB Turbo competent E. coli (NEB Cat #C2984I), plated on LB-Agar plates containing carbenicillin and incubated at 37° C. Individual colonies were picked and miniprepped using Qiagen spin Miniprep Kit and following the manufacturer's protocol. The resultant plasmids were sequenced using Sanger sequencing to ensure correct ligation.

[0751] In order to generate constructs 492 and 493, constructs 280 and 291 were digested using XbaI and BamHI (NEB #R0145S and NEB #R3136S) according to the manufacturer's protocol. Next, they were purified by gel extraction from a 1% agarose gel using Zymoclean Gel DNA Recovery Kit according to the manufacturer's protocol. Finally, they were ligated using T4 DNA ligase (NEB #M0202S) according to the manufacturer's protocol into the digested and purified pStx34.119.174.NT using XbaI and BamHI and Zymoclean Gel DNA Recovery Kit. Assembled products in the pStx34 were transformed into chemically-competent Turbo Competent E. coli bacterial cells, plated on LB-Agar plates containing carbenicillin and incubated at 37° C. Individual colonies were picked and miniprepped using Qiagen spin Miniprep Kit following the manufacturer's protocol. The resultant plasmids were sequenced using Sanger sequencing to ensure correct assembly. Sequences encoding the targeting spacer sequences that target the gene of interest were designed based on CasX PAM locations. Targeting sequence DNA was ordered as single-stranded DNA (ssDNA) oligos (Integrated DNA Technologies) consisting of the targeting spacer sequence and the reverse complement of this sequence. These two oligos were annealed together and cloned into each pStX individually or in bulk by Golden Gate assembly using T4 DNA Ligase (New England BioLabs Cat #M0202L) and an appropriate restriction enzyme for the respective plasmids. Golden Gate products were transformed into chemically- or electro-competent cells such as NEB Turbo competent E. coli (NEB Cat #C2984I), plated on LB-Agar plates containing carbenicillin and incubated at 37° C. Individual colonies were picked and miniprepped using Qiagen spin Miniprep Kit and following the manufacturer's protocol. The resultant plasmids were sequenced using Sanger sequencing to ensure correct ligation. The plasmids would be used to produce and recover CasX protein utilizing the general methodologies of Example 1.

TABLE 8
CasX 278-280, 285-288, 290, 291, 293, 300, 492, and 493 sequences

| Construct | Amino Acid Sequence |
|---|---|
| 278 | MAPKKKRKVSRQEIKRINKIRRRLVKDSNTKKAGKTGPMKTLLVRVMTPDLRERL |
| | ENLRKKPENIPQPISNTSRANLNKLLTDYTEMKKAILHVYWEEFQKDPVGLMSRV |
| | AQPAPKNIDQRKLIPVKDGNERLTSSGFACSQCCQPLYVYKLEQVNDKGKPHTNY |
| | FGRCNVSEHERLILLSPHKPEANDELVTYSLGKFGQRALDFYSIHVTRESNHPVK |
| | PLEQIGGNSCASGPVGKALSDACMGAVASFLTKYQDIILEHQKVIKKNEKRLANL |
| | KDIASANGLAFPKITLPPQPHTKEGIEAYNNVVAQIVIWVNLNLWQKLKIGRDEA |
| | KPLQRLKGFPSFPLVERQANEVDWWDMVCNVKKLINEKKEDGKVFWQNLAGYKRQ |
| | EALRPYLSSEEDRKKGKKFARYQFGDLLLHLEKKHGEDWGKVYDEAWERIDKKVE |
| | GLSKHIKLEEERRSEDAQSKAALTDWLRAKASFVIEGLKEADKDEFCRCELKLQK |
| | WYGDLRGKPFAIEAENSILDISGFSKQYNCAFIWQKDGVKKLNLYLIINYFKGGK |
| | LRFKKIKPEAFEANRFYTVINKKSGEIVPMEVNFNFDDPNLIILPLAFGKRQGRE |
| | FIWNDLLSLETGSLKLANGRVIEKTLYNRRTRQDEPALFVALTFERREVLDSSNI |
| | KPMNLIGIDRGENIPAVIALTDPEGCPLSRFKDSLGNPTHILRIGESYKEKQRTI |
| | QAKKEVEQRRAGGYSRKYASKAKNLADDMVRNTARDLLYYAVTQDAMLIFENLSR |
| | GFGRQGKRTFMAERQYTRMEDWLTAKLAYEGLSKTYLSKTLAQYTSKTCSNCGFT |
| | ITSADYDRVLEKLKKTATGWMTTINGKELKVEGQITYYNRYKRQNVVKDLSVELD |
| | RLSEESVNNDISSWTKGRSGEALSLLKKRFSHRPVQEKFVCLNCGFETHADEQAA |
| | LNIARSWLFLRSQEYKKYQTNKTTGNTDKRAFVETWQSFYRKKLKEVWKPAV |
| | (SEQ ID NO: 235) |
| 279 | MQEIKRINKIRRRLVKDSNTKKAGKTGPMKTLLVRVMTPDLRERLENLRKKPEN |
| | IPQPISNTSRANLNKLLTDYTEMKKAILHVYWEEFQKDPVGLMSRVAQPAPKNI |
| | DQRKLIPVKDGNERLTSSGFACSQCCQPLYVYKLEQVNDKGKPHTNYFGRCNVS |
| | EHERLILLSPHKPEANDELVTYSLGKFGQRALDFYSIHVTRESNHPVKPLEQIG |
| | GNSCASGPVGKALSDACMGAVASFLTKYQDIILEHQKVIKKNEKRLANLKDIAS |
| | ANGLAFPKITLPPQPHTKEGIEAYNNVVAQIVIWVNLNLWQKLKIGRDEAKPLQ |
| | RLKGFPSFPLVERQANEVDWWDMVCNVKKLINEKKEDGKVFWQNLAGYKRQEAL |
| | RPYLSSEEDRKKGKKFARYQFGDLLLHLEKKHGEDWGKVYDEAWERIDKKVEGL |
| | SKHIKLEEERRSEDAQSKAALTDWLRAKASFVIEGLKEADKDEFCRCELKLQKW |
| | YGDLRGKPFAIEAENSILDISGFSKQYNCAFIWQKDGVKKLNLYLIINYFKGGK |
| | LRFKKIKPEAFEANRFYTVINKKSGEIVPMEVNFNFDDPNLIILPLAFGKRQGR |
| | EFIWNDLLSLETGSLKLANGRVIEKTLYNRRTRQDEPALFVALTFERREVLDSS |
| | NIKPMNLIGIDRGENIPAVIALTDPEGCPLSRFKDSLGNPTHILRIGESYKEKQ |
| | RTIQAKKEVEQRRAGGYSRKYASKAKNLADDMVRNTARDLLYYAVTQDAMLIFE |
| | NLSRGFGRQGKRTFMAERQYTRMEDWLTAKLAYEGLSKTYLSKTLAQYTSKTCS |
| | NCGFTITSADYDRVLEKLKKTATGWMTTINGKELKVEGQITYYNRYKRQNVVKD |
| | LSVELDRLSEESVNNDISSWTKGRSGEALSLLKKRFSHRPVQEKFVCLNCGFET |
| | HADEQAALNIARSWLFLRSQEYKKYQTNKTTGNTDKRAFVETWQSFYRKKLKEV |
| | WKPAVTSPKKKRKV (SEQ ID NO: 236) |
| 280 | MQEIKRINKIRRRLVKDSNTKKAGKTGPMKTLLVRVMTPDLRERLENLRKKPEN |
| | IPQPISNTSRANLNKLLTDYTEMKKAILHVYWEEFQKDPVGLMSRVAQPAPKNI |
| | DQRKLIPVKDGNERLTSSGFACSQCCQPLYVYKLEQVNDKGKPHTNYFGRCNVS |
| | EHERLILLSPHKPEANDELVTYSLGKFGQRALDFYSIHVTRESNHPVKPLEQIG |
| | GNSCASGPVGKALSDACMGAVASFLTKYQDIILEHQKVIKKNEKRLANLKDIAS |
| | ANGLAFPKITLPPQPHTKEGIEAYNNVVAQIVIWVNLNLWQKLKIGRDEAKPLQ |
| | RLKGFPSFPLVERQANEVDWWDMVCNVKKLINEKKEDGKVFWQNLAGYKRQEAL |
| | RPYLSSEEDRKKGKKFARYQFGDLLLHLEKKHGEDWGKVYDEAWERIDKKVEGL |
| | SKHIKLEEERRSEDAQSKAALTDWLRAKASFVIEGLKEADKDEFCRCELKLQKW |
| | YGDLRGKPFAIEAENSILDISGFSKQYNCAFIWQKDGVKKLNLYLIINYFKGGK |
| | LRFKKIKPEAFEANRFYTVINKKSGEIVPMEVNFNFDDPNLIILPLAFGKRQGR |
| | EFIWNDLLSLETGSLKLANGRVIEKTLYNRRTRQDEPALFVALTFERREVLDSS |
| | NIKPMNLIGIDRGENIPAVIALTDPEGCPLSRFKDSLGNPTHILRIGESYKEKQ |
| | RTIQAKKEVEQRRAGGYSRKYASKAKNLADDMVRNTARDLLYYAVTQDAMLIFE |
| | NLSRGFGRQGKRTFMAERQYTRMEDWLTAKLAYEGLSKTYLSKTLAQYTSKTCS |
| | NCGFTITSADYDRVLEKLKKTATGWMTTINGKELKVEGQITYYNRYKRQNVVKD |
| | LSVELDRLSEESVNNDISSWTKGRSGEALSLLKKRFSHRPVQEKFVCLNCGFET |
| | HADEQAALNIARSWLFLRSQEYKKYQTNKTTGNTDKRAFVETWQSFYRKKLKEV |
| | WKPAVTSPKKKRKVPPPPKKKRKV (SEQ ID NO: 237) |
| 285 | MQEIKRINKIRRRLVKDSNTKKAGKTGPMKTLLVRVMTPDLRERLENLRKKPEN |
| | IPQPISNTSRANLNKLLTDYTEMKKAILHVYWEEFQKDPVGLMSRVAQPAPKNI |
| | DQRKLIPVKDGNERLTSSGFACSQCCQPLYVYKLEQVNDKGKPHTNYFGRCNVS |
| | EHERLILLSPHKPEANDELVTYSLGKFGQRALDFYSIHVTRESNHPVKPLEQIG |
| | GNSCASGPVGKALSDACMGAVASFLTKYQDIILEHQKVIKKNEKRLANLKDIAS |
| | ANGLAFPKITLPPQPHTKEGIEAYNNVVAQIVIWVNLNLWQKLKIGRDEAKPLQ |
| | RLKGFPSFPLVERQANEVDWWDMVCNVKKLINEKKEDGKVFWQNLAGYKRQEAL |
| | RPYLSSEEDRKKGKKFARYQFGDLLLHLEKKHGEDWGKVYDEAWERIDKKVEGL |
| | SKHIKLEEERRSEDAQSKAALTDWLRAKASFVIEGLKEADKDEFCRCELKLQKW |
| | YGDLRGKPFAIEAENSILDISGFSKQYNCAFIWQKDGVKKLNLYLIINYFKGGK |
| | LRFKKIKPEAFEANRFYTVINKKSGEIVPMEVNFNFDDPNLIILPLAFGKRQGR |
| | EFIWNDLLSLETGSLKLANGRVIEKTLYNRRTRQDEPALFVALTFERREVLDSS |
| | NIKPMNLIGIDRGENIPAVIALTDPEGCPLSRFKDSLGNPTHILRIGESYKEKQ |
| | RTIQAKKEVEQRRAGGYSRKYASKAKNLADDMVRNTARDLLYYAVTQDAMLIFE |
| | NLSRGFGRQGKRTFMAERQYTRMEDWLTAKLAYEGLSKTYLSKTLAQYTSKTCS |
| | NCGFTITSADYDRVLEKLKKTATGWMTTINGKELKVEGQITYYNRYKRQNVVKD |
| | LSVELDRLSEESVNNDISSWTKGRSGEALSLLKKRFSHRPVQEKFVCLNCGFET |
| | HADEQAALNIARSWLFLRSQEYKKYQTNKTTGNTDKRAFVETWQSFYRKKLKEV |
| | WKPAVTSPKKKRKVPPPHKKKHPDASVNFSEFSK (SEQ ID NO: 238) |
| 286 | MQEIKRINKIRRRLVKDSNTKKAGKTGPMKTLLVRVMTPDLRERLENLRKKPEN |
| | IPQPISNTSRANLNKLLTDYTEMKKAILHVYWEEFQKDPVGLMSRVAQPAPKNI |
| | DQRKLIPVKDGNERLTSSGFACSQCCQPLYVYKLEQVNDKGKPHTNYFGRCNVS |
| | EHERLILLSPHKPEANDELVTYSLGKFGQRALDFYSIHVTRESNHPVKPLEQIG |
| | GNSCASGPVGKALSDACMGAVASFLTKYQDIILEHQKVIKKNEKRLANLKDIAS |
| | ANGLAFPKITLPPQPHTKEGIEAYNNVVAQIVIWVNLNLWQKLKIGRDEAKPLQ |
| | RLKGFPSFPLVERQANEVDWWDMVCNVKKLINEKKEDGKVFWQNLAGYKRQEAL |
| | RPYLSSEEDRKKGKKFARYQFGDLLLHLEKKHGEDWGKVYDEAWERIDKKVEGL |
| | SKHIKLEEERRSEDAQSKAALTDWLRAKASFVIEGLKEADKDEFCRCELKLQKW |
| | YGDLRGKPFAIEAENSILDISGFSKQYNCAFIWQKDGVKKLNLYLIINYFKGGK |
| | LRFKKIKPEAFEANRFYTVINKKSGEIVPMEVNFNFDDPNLIILPLAFGKRQGR |
| | EFIWNDLLSLETGSLKLANGRVIEKTLYNRRTRQDEPALFVALTFERREVLDSS |
| | NIKPMNLIGIDRGENIPAVIALTDPEGCPLSRFKDSLGNPTHILRIGESYKEKQ |
| | RTIQAKKEVEQRRAGGYSRKYASKAKNLADDMVRNTARDLLYYAVTQDAMLIFE |
| | NLSRGFGRQGKRTFMAERQYTRMEDWLTAKLAYEGLSKTYLSKTLAQYTSKTCS |
| | NCGFTITSADYDRVLEKLKKTATGWMTTINGKELKVEGQITYYNRYKRQNVVKD |
| | LSVELDRLSEESVNNDISSWTKGRSGEALSLLKKRFSHRPVQEKFVCLNCGFET |
| | HADEQAALNIARSWLFLRSQEYKKYQTNKTTGNTDKRAFVETWQSFYRKKLKEV |
| | WKPAVTSPKKKRKVPPPQRPGPYDRPQRPGPYDRP (SEQ ID NO: 239) |
| 287 | MQEIKRINKIRRRLVKDSNTKKAGKTGPMKTLLVRVMTPDLRERLENLRKKPEN |
| | IPQPISNTSRANLNKLLTDYTEMKKAILHVYWEEFQKDPVGLMSRVAQPAPKNI |
| | DQRKLIPVKDGNERLTSSGFACSQCCQPLYVYKLEQVNDKGKPHTNYFGRCNVS |
| | EHERLILLSPHKPEANDELVTYSLGKFGQRALDFYSIHVTRESNHPVKPLEQIG |
| | GNSCASGPVGKALSDACMGAVASFLTKYQDIILEHQKVIKKNEKRLANLKDIAS |
| | ANGLAFPKITLPPQPHTKEGIEAYNNVVAQIVIWVNLNLWQKLKIGRDEAKPLQ |
| | RLKGFPSFPLVERQANEVDWWDMVCNVKKLINEKKEDGKVFWQNLAGYKRQEAL |
| | RPYLSSEEDRKKGKKFARYQFGDLLLHLEKKHGEDWGKVYDEAWERIDKKVEGL |
| | SKHIKLEEERRSEDAQSKAALTDWLRAKASFVIEGLKEADKDEFCRCELKLQKW |
| | YGDLRGKPFAIEAENSILDISGFSKQYNCAFIWQKDGVKKLNLYLIINYFKGGK |
| | LRFKKIKPEAFEANRFYTVINKKSGEIVPMEVNFNFDDPNLIILPLAFGKRQGR |
| | EFIWNDLLSLETGSLKLANGRVIEKTLYNRRTRQDEPALFVALTFERREVLDSS |
| | NIKPMNLIGIDRGENIPAVIALTDPEGCPLSRFKDSLGNPTHILRIGESYKEKQ |
| | RTIQAKKEVEQRRAGGYSRKYASKAKNLADDMVRNTARDLLYYAVTQDAMLIFE |
| | NLSRGFGRQGKRTFMAERQYTRMEDWLTAKLAYEGLSKTYLSKTLAQYTSKTCS |
| | NCGFTITSADYDRVLEKLKKTATGWMTTINGKELKVEGQITYYNRYKRQNVVKD |
| | LSVELDRLSEESVNNDISSWTKGRSGEALSLLKKRFSHRPVQEKFVCLNCGFET |
| | HADEQAALNIARSWLFLRSQEYKKYQTNKTTGNTDKRAFVETWQSFYRKKLKEV |
| | WKPAVTSPKKKRKVPPPLSPSLSPLLSPSLSPL (SEQ ID NO: 240) |
| 288 | MQEIKRINKIRRRLVKDSNTKKAGKTGPMKTLLVRVMTPDLRERLENLRKKPEN |
| | IPQPISNTSRANLNKLLTDYTEMKKAILHVYWEEFQKDPVGLMSRVAQPAPKNI |
| | DQRKLIPVKDGNERLTMSSGFACSQCCQPLYVYKLEQVNDKGKPHTNYFGRCNV |
| | SEHERLILLSPHKPEANDELVTYSLGKFGQRALDFYSIHVTRESNHPVKPLEQI |
| | GGNSCASGPVGKALSDACMGAVASFLTKYQDIILEHQKVIKKNEKRLANLKDIA |
| | SANGLAFPKITLPPQPHTKEGIEAYNNVVAQIVIWVNLNLWQKLKIGRDEAKPL |
| | QRLKGFPSFPLVERQANEVDWWDMVCNVKKLINEKKEDGKVFWQNLAGYKRQEA |
| | LRPYLSSEEDRKKGKKFARYQFGDLLLHLEKKHGEDWGKVYDEAWERIDKKVEG |
| | LSKHIKLEEERRSEDAQSKAALTDWLRAKASFVIEGLKEADKDEFCRCELKLQK |
| | WYGDLRGKPFAIEAENSILDISGFSKQYNCAFIWQKDGVKKLNLYLIINYFKGG |
| | KLRFKKIKPEAFEANRFYTVINKKSGEIVPMEVNFNFDDPNLIILPLAFGKRQG |
| | REFIWNDLLSLETGSLKLANGRVIEKTLYNRRTRQDEPALFVALTFERREVLDS |
| | SNIKPMNLIGIDRGENIPAVIALTDPEGCPLSRFKDSLGNPTHILRIGESYKEK |
| | QRTIQAKKEVEQRRAGGYSRKYASKAKNLADDMVRNTARDLLYYAVTQDAMLIF |
| | ENLSRGFGRQGKRTFMAERQYTRMEDWLTAKLAYEGLSKTYLSKTLAQYTSKTC |
| | SNCGFTITSADYDRVLEKLKKTATGWMTTINGKELKVEGQITYYNRYKRQNVVK |
| | DLSVELDRLSEESVNNDISSWTKGRSGEALSLLKKRFSHRPVQEKFVCLNCGFE |
| | THADEQAALNIARSWLFLRSQEYKKYQTNKTTGNTDKRAFVETWQSFYRKKLKE |
| | VWKPAVTSPKKKRKVPPPRGKGGKGLGKGGAKRHRK (SEQ ID NO: 241) |
| 290 | MQEIKRINKIRRRLVKDSNTKKAGKTGPMKTLLVRVMTPDLRERLENLRKKPEN |
| | IPQPISNTSRANLNKLLTDYTEMKKAILHVYWEEFQKDPVGLMSRVAQPAPKNI |
| | DQRKLIPVKDGNERLTSSGFACSQCCQPLYVYKLEQVNDKGKPHTNYFGRCNVS |
| | EHERLILLSPHKPEANDELVTYSLGKFGQRALDFYSIHVTRESNHPVKPLEQIG |
| | GNSCASGPVGKALSDACMGAVASFLTKYQDIILEHQKVIKKNEKRLANLKDIAS |
| | ANGLAFPKITLPPQPHTKEGIEAYNNVVAQIVIWVNLNLWQKLKIGRDEAKPLQ |
| | RLKGFPSFPLVERQANEVDWWDMVCNVKKLINEKKEDGKVFWQNLAGYKRQEAL |
| | RPYLSSEEDRKKGKKFARYQFGDLLLHLEKKHGEDWGKVYDEAWERIDKKVEGL |
| | SKHIKLEEERRSEDAQSKAALTDWLRAKASFVIEGLKEADKDEFCRCELKLQKW |
| | YGDLRGKPFAIEAENSILDISGFSKQYNCAFIWQKDGVKKLNLYLIINYFKGGK |
| | LRFKKIKPEAFEANRFYTVINKKSGEIVPMEVNFNFDDPNLIILPLAFGKRQGR |
| | EFIWNDLLSLETGSLKLANGRVIEKTLYNRRTRQDEPALFVALTFERREVLDSS |
| | NIKPMNLIGIDRGENIPAVIALTDPEGCPLSRFKDSLGNPTHILRIGESYKEKQ |
| | RTIQAKKEVEQRRAGGYSRKYASKAKNLADDMVRNTARDLLYYAVTQDAMLIFE |
| | NLSRGFGRQGKRTFMAERQYTRMEDWLTAKLAYEGLSKTYLSKTLAQYTSKTCS |
| | NCGFTITSADYDRVLEKLKKTATGWMTTINGKELKVEGQITYYNRYKRQNVVKD |
| | LSVELDRLSEESVNNDISSWTKGRSGEALSLLKKRFSHRPVQEKFVCLNCGFET |
| | HADEQAALNIARSWLFLRSQEYKKYQTNKTTGNTDKRAFVETWQSFYRKKLKEV |
| | WKPAVTSPKKKRKVPPPSRRRKANPTKLSENAKKLAKEVEN (SEQ ID NO: |
| | 242) |
| 291 | MQEIKRINKIRRRLVKDSNTKKAGKTGPMKTLLVRVMTPDLRERLENLRKKPEN |
| | IPQPISNTSRANLNKLLTDYTEMKKAILHVYWEEFQKDPVGLMSRVAQPAPKNI |
| | DQRKLIPVKDGNERLTSSGFACSQCCQPLYVYKLEQVNDKGKPHTNYFGRCNVS |
| | EHERLILLSPHKPEANDELVTYSLGKFGQRALDFYSIHVTRESNHPVKPLEQIG |
| | GNSCASGPVGKALSDACMGAVASFLTKYQDIILEHQKVIKKNEKRLANLKDIAS |
| | ANGLAFPKITLPPQPHTKEGIEAYNNVVAQIVIWVNLNLWQKLKIGRDEAKPLQ |
| | RLKGFPSFPLVERQANEVDWWDMVCNVKKLINEKKEDGKVFWQNLAGYKRQEAL |
| | RPYLSSEEDRKKGKKFARYQFGDLLLHLEKKHGEDWGKVYDEAWERIDKKVEGL |
| | SKHIKLEEERRSEDAQSKAALTDWLRAKASFVIEGLKEADKDEFCRCELKLQKW |
| | YGDLRGKPFAIEAENSILDISGFSKQYNCAFIWQKDGVKKLNLYLIINYFKGGK |
| | LRFKKIKPEAFEANRFYTVINKKSGEIVPMEVNFNFDDPNLIILPLAFGKRQGR |
| | EFIWNDLLSLETGSLKLANGRVIEKTLYNRRTRQDEPALFVALTFERREVLDSS |
| | NIKPMNLIGIDRGENIPAVIALTDPEGCPLSRFKDSLGNPTHILRIGESYKEKQ |
| | RTIQAKKEVEQRRAGGYSRKYASKAKNLADDMVRNTARDLLYYAVTQDAMLIFE |
| | NLSRGFGRQGKRTFMAERQYTRMEDWLTAKLAYEGLSKTYLSKTLAQYTSKTCS |
| | NCGFTITSADYDRVLEKLKKTATGWMTTINGKELKVEGQITYYNRYKRQNVVKD |
| | LSVELDRLSEESVNNDISSWTKGRSGEALSLLKKRFSHRPVQEKFVCLNCGFET |
| | HADEQAALNIARSWLFLRSQEYKKYQTNKTTGNTDKRAFVETWQSFYRKKLKEV |
| | WKPAVTSPKKKRKVPPPPAAKRVKLD (SEQ ID NO: 243) |
| 293 | MQEIKRINKIRRRLVKDSNTKKAGKTGPMKTLLVRVMTPDLRERLENLRKKPEN |
| | IPQPISNTSRANLNKLLTDYTEMKKAILHVYWEEFQKDPVGLMSRVAQPAPKNI |
| | DQRKLIPVKDGNERLTSSGFACSQCCQPLYVYKLEQVNDKGKPHTNYFGRCNVS |
| | EHERLILLSPHKPEANDELVTYSLGKFGQRALDFYSIHVTRESNHPVKPLEQIG |
| | GNSCASGPVGKALSDACMGAVASFLTKYQDIILEHQKVIKKNEKRLANLKDIAS |
| | ANGLAFPKITLPPQPHTKEGIEAYNNVVAQIVIWVNLNLWQKLKIGRDEAKPLQ |
| | RLKGFPSFPLVERQANEVDWWDMVCNVKKLINEKKEDGKVFWQNLAGYKRQEAL |
| | RPYLSSEEDRKKGKKFARYQFGDLLLHLEKKHGEDWGKVYDEAWERIDKKVEGL |
| | SKHIKLEEERRSEDAQSKAALTDWLRAKASFVIEGLKEADKDEFCRCELKLQKW |
| | YGDLRGKPFAIEAENSILDISGFSKQYNCAFIWQKDGVKKLNLYLIINYFKGGK |
| | LRFKKIKPEAFEANRFYTVINKKSGEIVPMEVNFNFDDPNLIILPLAFGKRQGR |
| | EFIWNDLLSLETGSLKLANGRVIEKTLYNRRTRQDEPALFVALTFERREVLDSS |
| | NIKPMNLIGIDRGENIPAVIALTDPEGCPLSRFKDSLGNPTHILRIGESYKEKQ |
| | RTIQAKKEVEQRRAGGYSRKYASKAKNLADDMVRNTARDLLYYAVTQDAMLIFE |
| | NLSRGFGRQGKRTFMAERQYTRMEDWLTAKLAYEGLSKTYLSKTLAQYTSKTCS |
| | NCGFTITSADYDRVLEKLKKTATGWMTTINGKELKVEGQITYYNRYKRQNVVKD |
| | LSVELDRLSEESVNNDISSWTKGRSGEALSLLKKRFSHRPVQEKFVCLNCGFET |
| | HADEQAALNIARSWLFLRSQEYKKYQTNKTTGNTDKRAFVETWQSFYRKKLKEV |
| | WKPAVTSPKKKRKVPPPKRSFSKAF (SEQ ID NO: 244) |
| 300 | MQEIKRINKIRRRLVKDSNTKKAGKTGPMKTLLVRVMTPDLRERLENLRKKPEN |
| | IPQPISNTSRANLNKLLTDYTEMKKAILHVYWEEFQKDPVGLMSRVAQPAPKNI |
| | DQRKLIPVKDGNERLTSSGFACSQCCQPLYVYKLEQVNDKGKPHTNYFGRCNVS |
| | EHERLILLSPHKPEANDELVTYSLGKFGQRALDFYSIHVTRESNHPVKPLEQIG |
| | GNSCASGPVGKALSDACMGAVASFLTKYQDIILEHQKVIKKNEKRLANLKDIAS |
| | ANGLAFPKITLPPQPHTKEGIEAYNNVVAQIVIWVNLNLWQKLKIGRDEAKPLQ |
| | RLKGFPSFPLVERQANEVDWWDMVCNVKKLINEKKEDGKVFWQNLAGYKRQEAL |
| | RPYLSSEEDRKKGKKFARYQFGDLLLHLEKKHGEDWGKVYDEAWERIDKKVEGL |
| | SKHIKLEEERRSEDAQSKAALTDWLRAKASFVIEGLKEADKDEFCRCELKLQKW |
| | YGDLRGKPFAIEAENSILDISGFSKQYNCAFIWQKDGVKKLNLYLIINYFKGGK |
| | LRFKKIKPEAFEANRFYTVINKKSGEIVPMEVNFNFDDPNLIILPLAFGKRQGR |
| | EFIWNDLLSLETGSLKLANGRVIEKTLYNRRTRQDEPALFVALTFERREVLDSS |
| | NIKPMNLIGIDRGENIPAVIALTDPEGCPLSRFKDSLGNPTHILRIGESYKEKQ |
| | RTIQAKKEVEQRRAGGYSRKYASKAKNLADDMVRNTARDLLYYAVTQDAMLIFE |
| | NLSRGFGRQGKRTFMAERQYTRMEDWLTAKLAYEGLSKTYLSKTLAQYTSKTCS |
| | NCGFTITSADYDRVLEKLKKTATGWMTTINGKELKVEGQITYYNRYKRQNVVKD |
| | LSVELDRLSEESVNNDISSWTKGRSGEALSLLKKRFSHRPVQEKFVCLNCGFET |
| | HADEQAALNIARSWLFLRSQEYKKYQTNKTTGNTDKRAFVETWQSFYRKKLKEV |
| | WKPAVTSPKKKRKVPPPKRGINDRNFWRGENERKTR (SEQ ID NO: 245) |
| 492 | MAPKKKRKVSRMQEIKRINKIRRRLVKDSNTKKAGKTGPMKTLLVRVMTPDLRE |
| | RLENLRKKPENIPQPISNTSRANLNKLLTDYTEMKKAILHVYWEEFQKDPVGLM |
| | SRVAQPAPKNIDQRKLIPVKDGNERLTSSGFACSQCCQPLYVYKLEQVNDKGKP |
| | HTNYFGRCNVSEHERLILLSPHKPEANDELVTYSLGKFGQRALDFYSIHVTRES |
| | NHPVKPLEQIGGNSCASGPVGKALSDACMGAVASFLTKYQDIILEHQKVIKKNE |
| | KRLANLKDIASANGLAFPKITLPPQPHTKEGIEAYNNVVAQIVIWVNLNLWQKL |
| | KIGRDEAKPLQRLKGFPSFPLVERQANEVDWWDMVCNVKKLINEKKEDGKVFWQ |
| | NLAGYKRQEALRPYLSSEEDRKKGKKFARYQFGDLLLHLEKKHGEDWGKVYDEA |
| | WERIDKKVEGLSKHIKLEEERRSEDAQSKAALTDWLRAKASFVIEGLKEADKDE |
| | FCRCELKLQKWYGDLRGKPFAIEAENSILDISGFSKQYNCAFIWQKDGVKKLNL |
| | YLIINYFKGGKLRFKKIKPEAFEANRFYTVINKKSGEIVPMEVNFNFDDPNLII |
| | LPLAFGKRQGREFIWNDLLSLETGSLKLANGRVIEKTLYNRRTRQDEPALFVAL |
| | TFERREVLDSSNIKPMNLIGIDRGENIPAVIALTDPEGCPLSRFKDSLGNPTHI |
| | LRIGESYKEKQRTIQAKKEVEQRRAGGYSRKYASKAKNLADDMVRNTARDLLYY |
| | AVTQDAMLIFENLSRGFGRQGKRTFMAERQYTRMEDWLTAKLAYEGLSKTYLSK |
| | TLAQYTSKTCSNCGFTITSADYDRVLEKLKKTATGWMTTINGKELKVEGQITYY |
| | NRYKRQNVVKDLSVELDRLSEESVNNDISSWTKGRSGEALSLLKKRFSHRPVQE |
| | KFVCLNCGFETHADEQAALNIARSWLFLRSQEYKKYQTNKTTGNTDKRAFVETW |
| | QSFYRKKLKEVWKPAVTSPKKKRKVPPPPKKKRKV (SEQ ID NO: 246) |
| 493 | MAPKKKRKVSRMQEIKRINKIRRRLVKDSNTKKAGKTGPMKTLLVRVMTPDLRE |
| | RLENLRKKPENIPQPISNTSRANLNKLLTDYTEMKKAILHVYWEEFQKDPVGLM |
| | SRVAQPAPKNIDQRKLIPVKDGNERLTSSGFACSQCCQPLYVYKLEQVNDKGKP |
| | HTNYFGRCNVSEHERLILLSPHKPEANDELVTYSLGKFGQRALDFYSIHVTRES |
| | NHPVKPLEQIGGNSCASGPVGKALSDACMGAVASFLTKYQDIILEHQKVIKKNE |
| | KRLANLKDIASANGLAFPKITLPPQPHTKEGIEAYNNVVAQIVIWVNLNLWQKL |
| | KIGRDEAKPLQRLKGFPSFPLVERQANEVDWWDMVCNVKKLINEKKEDGKVFWQ |
| | NLAGYKRQEALRPYLSSEEDRKKGKKFARYQFGDLLLHLEKKHGEDWGKVYDEA |
| | WERIDKKVEGLSKHIKLEEERRSEDAQSKAALTDWLRAKASFVIEGLKEADKDE |
| | FCRCELKLQKWYGDLRGKPFAIEAENSILDISGFSKQYNCAFIWQKDGVKKLNL |
| | YLIINYFKGGKLREKKIKPEAFEANRFYTVINKKSGEIVPMEVNENEDDPNLI1 |
| | LPLAFGKRQGREFIWNDLLSLETGSLKLANGRVIEKTLYNRRTRQDEPALFVAL |
| | TFERREVLDSSNIKPMNLIGIDRGENIPAVIALTDPEGCPLSRFKDSLGNPTHI |
| | LRIGESYKEKQRTIQAKKEVEQRRAGGYSRKYASKAKNLADDMVRNTARDLLYY |
| | AVTQDAMLIFENLSRGFGRQGKRTFMAERQYTRMEDWLTAKLAYEGLSKTYLSK |
| | TLAQYTSKTCSNCGFTITSADYDRVLEKLKKTATGWMTTINGKELKVEGQITYY |
| | NRYKRQNVVKDLSVELDRLSEESVNNDISSWTKGRSGEALSLLKKRFSHRPVQE |
| | KFVCLNCGFETHADEQAALNIARSWLFLRSQEYKKYQTNKTTGNTDKRAFVETW |
| | QSFYRKKLKEVWKPAVTSPKKKRKVPPPPAAKRVKLD (SEQ ID NO: 247) |

TABLE 9
Nuclear localization sequence list

| CasX | NLS | DNA Sequence | Amino Acid Sequence |
|---|---|---|---|
| 278, 279, | SV40 | CCAAAGAAGAAGCGGAAGGTC | PKKKRKV (SEQ ID |
| 280, 492, | | (SEQ ID NO: 249) | NO: 196) |
| 493 | | | |
| 285 | SynthNLS3 | CACAAGAAGAAACATCCAGACGC | HKKKHPDASVNFSEF |
| | | ATCAGTCAACTTTAGCGAGTTCA | SK (SEQ ID NO: |
| | | GTAAA (SEQ ID NO: 250) | 189) |
| 286 | SynthNLS4 | CAGCGCCCTGGGCCTTACGATAG | QRPGPYDRPQRPGPY |
| | | GCCGCAAAGACCCGGACCGTATG | DRP (SEQ ID NO: |
| | | ATCGCCCT (SEQ ID NO: | 190) |
| | | 251) | |
| 287 | SynthNLS5 | CTCAGCCCGAGTCTTAGTCCACT | LSPSLSPLLSPSLSP |
| | | GCTTTCCCCGTCCCTGTCTCCAC | L (SEQ ID NO: |
| | | TG (SEQ ID NO: 252) | 191) |
| 288 | SynthNLS6 | CGGGGCAAGGGTGGCAAGGGGCT | RGKGGKGLGKGGAKR |
| | | TGGCAAGGGGGGGGCAAAGAGGC | HRK (SEQ ID NO: |
| | | ACAGGAAG (SEQ ID NO: | 192) |
| | | 253) | |
| 290 | EGL-13 | AGCCGCCGCAGAAAAGCCAATCC | SRRRKANPTKLSENA |
| | | TACAAAACTGTCAGAAAATGCGA | KKLAKEVEN (SEQ |
| | | AAAAACTTGCTAAGGAGGTGGAA | ID NO: 185) |
| | | AAC (SEQ ID NO: 254) | |
| 291 | c-Myc | CCTGCCGCAAAGCGAGTGAAATT | PAAKRVKLD (SEQ |
| | | GGAC (SEQ ID NO: 255) | ID NO: 248) |
| 293 | Nucleolar RNA | AAGCGGTCCTTCAGTAAGGCCTT | KRSFSKAE (SEQ |
| | Helicase II | T (SEQ ID NO: 256) | ID NO: 181) |
| 300 | Influenza A | AAACGGGGAATAAACGACCGGAA | KRGINDRNFWRGENE |
| | protein | CTTCTGGCGCGGGGAAAACGAGC | RKTR (SEQ ID |
| | | GCAAAACCCGA (SEQ ID NO: | NO: 179) |
| | | 257) | |

### Example 4: Design and Generation of CasX Constructs 387, 395, 485-491, and 494

[0752] In order to generate CasX 395, CasX 485, CasX 486, CasX 487, the codon optimized CasX 119 (based on the CasX 37 construct of Example 1, encoding Planctomycetes CasX SEQ ID NO: 2, with a A708K substitution and a [P793] deletion with fused NLS, and linked guide and non-targeting sequences), CasX 435, CasX 438, and CasX 484 (each based on CasX 119 construct of Example 1 encoding Planctomycetes CasX SEQ ID NO: 2, with a L379R substitution, a A708K substitution, and a [P793] deletion with fused NLS, and linked guide and non-targeting sequences) were cloned respectively into a 4 kb staging vector comprising a KanR marker, colE1 ori, and CasX with fused NLS (pStx1) using standard cloning methods. Gibson primers were designed to amplify the CasX SEQ ID NO: 1 Helical I domain from amino acid 192-331 in its own vector to replace this corresponding region (aa 193-332) on CasX 119, CasX 435, CasX 438, and CasX 484 in pStx1 respectively. The Helical I domain from CasX SEQ ID NO: 1 was amplified with primers oIC768 and oIC784 using Q5 DNA polymerase according to the manufacturer's protocol. The destination vector containing the desired CasX variant was amplified with primers oIC765 and oIC764 using Q5 DNA polymerase according to the manufacturer's protocol. The two fragments were purified by gel extraction from a 1% agarose gel using Zymoclean Gel DNA Recovery Kit according to the manufacturer's protocol. The insert and backbone fragments were then pieced together using Gibson assembly (New England BioLabs Cat #E2621S) following the manufacturer's protocol. Assembled products in the pStx1 staging vector were transformed into chemically-competent Turbo Competent E. co/i bacterial cells, plated on LB-Agar plates (LB: Teknova Cat #L9315, Agar: Quartzy Cat #214510) containing kanamycin and incubated at 37° C. Individual colonies were picked and miniprepped using Qiagen spin Miniprep Kit following the manufacturer's protocol. The resultant plasmids were sequenced using Sanger sequencing to ensure correct assembly. Correct clones were then cut and pasted into a mammalian expression plasmid (see FIG. 5) using standard cloning methods. The resultant plasmids were sequenced using Sanger sequencing to ensure correct assembly.

[0753] Sequences encoding the targeting spacer sequences that target the gene of interest were designed based on CasX PAM locations. Targeting spacer sequence DNA was ordered as single-stranded DNA (ssDNA) oligos (Integrated DNA Technologies) consisting of the targeting sequence and the reverse complement of this sequence. These two oligos were annealed together and cloned into pStX individually or in bulk by Golden Gate assembly using T4 DNA Ligase (New England BioLabs Cat #M0202L) and an appropriate restriction enzyme for the plasmid. Golden Gate products were transformed into chemically or electro-competent cells such as NEB Turbo competent E. coli (NEB Cat #C2984I), plated on LB-Agar plates (LB: Teknova Cat #L9315, Agar: Quartzy Cat #214510) containing carbenicillin and incubated at 37° C. Individual colonies were picked and miniprepped using Qiagen spin Miniprep Kit following the manufacturer's protocol. The resultant plasmids were sequenced using Sanger sequencing to ensure correct ligation.

[0754] In order to generate CasX 488, CasX 489, CasX 490, and CasX 491 (sequences in Table 10), the codon optimized CasX 119 (based on the CasX 37 construct of Example 1, encoding Planctomycetes CasX SEQ ID NO: 2, with a A708K substitution and a [P793] deletion with fused NLS, and linked guide and non-targeting sequences), CasX 435, CasX 438, and CasX 484 (each based on CasX119 construct of Example 1 encoding Planctomycetes CasX SEQ ID NO: 2, with a L379R substitution, a A708K substitution, and a [P793] deletion with fused NLS, and linked guide and non-targeting sequences) were cloned respectively into a 4 kb staging vector that was made up of a KanR marker, colE1 ori, and STX with fused NLS (pStx1) using standard cloning methods. Gibson primers were designed to amplify the CasX Stx1 NTSB domain from amino acid 101-191 and Helical I domain from amino acid 192-331 in its own vector to replace this similar region (aa 103-332) on CasX 119, CasX 435, CasX 438, and CasX 484 in pStx1 respectively. The NTSB and Helical I domain from CasX SEQ ID NO: 1 were amplified with primers oIC766 and oIC784 using Q5 DNA polymerase according to the manufacturer's protocol. The destination vector containing the desired CasX variant was amplified with primers oIC762 and oIC765 using Q5 DNA polymerase according to the manufacturer's protocol. The two fragments were purified by gel extraction from a 1% agarose gel using Zymoclean Gel DNA Recovery Kit according to the manufacturer's protocol. The insert and backbone fragments were then pieced together using Gibson assembly (New England BioLabs Cat #E2621S) following the manufacturer's protocol. Assembled products in the pStx1 staging vector were transformed into chemically-competent Turbo Competent E. coli bacterial cells, plated on LB-Agar plates (LB: Teknova Cat #L9315, Agar: Quartzy Cat #214510) containing kanamycin and incubated at 37° C. Individual colonies were picked and miniprepped using Qiagen spin Miniprep Kit following the manufacturer's protocol. The resultant plasmids were sequenced using Sanger sequencing to ensure correct assembly. Correct clones were then cut and pasted into a mammalian expression plasmid (see FIG. 5) using standard cloning methods. The resultant plasmids were sequenced using Sanger sequencing to ensure correct assembly. Sequences encoding the targeting spacer sequences that target the gene of interest were designed based on CasX PAM locations. Targeting spacer sequence DNA was ordered as single-stranded DNA (ssDNA) oligos (Integrated DNA Technologies) consisting of the targeting sequence and the reverse complement of this sequence. These two oligos were annealed together and cloned into pStX individually or in bulk by Golden Gate assembly using T4 DNA Ligase (New England BioLabs Cat #M0202L) and an appropriate restriction enzyme for the plasmid. Golden Gate products were transformed into chemically or electro-competent cells such as NEB Turbo competent E. coli (NEB Cat #C2984I), plated on LB-Agar plates (LB: Teknova Cat #L9315, Agar: Quartzy Cat #214510) containing carbenicillin and incubated at 37° C. Individual colonies were picked and miniprepped using Qiagen spin Miniprep Kit and following the manufacturer's protocol. The resultant plasmids were sequenced using Sanger sequencing to ensure correct ligation.

[0755] In order to generate CasX 387 and CasX 494 (sequences in Table 10), the codon optimized CasX 119 (based on the CasX 37 construct of Example 1, encoding Planctomycetes CasX SEQ ID NO: 2, with a A708K substitution and a [P793] deletion with fused NLS, and linked guide and non-targeting sequences) and CasX 484 (based on CasX119 construct of Example 1 encoding Planctomycetes CasX SEQ ID NO: 2, with a L379R substitution, a A708K substitution, and a [P793] deletion with fused NLS, and linked guide and non-targeting sequences) were cloned respectively into a 4 kb staging vector that was made up of a KanR marker, colE1 ori, and STX with fused NLS (pStx1) using standard cloning methods. Gibson primers were designed to amplify the CasX Stx1 NTSB domain from amino acid 101-191 in its own vector to replace this similar region (aa 103-192) on CasX 119 and CasX 484 in pStx1 respectively. The NTSB domain from CasX Stx1 was amplified with primers oIC766 and oIC767 using Q5 DNA polymerase according to the manufacturer's protocol. The destination vector containing the desired CasX variant was amplified with primers oIC763 and oIC762 using Q5 DNA polymerase according to the manufacturer's protocol. The two fragments were purified by gel extraction from a 1% agarose gel using Zymoclean Gel DNA Recovery Kit according to the manufacturer's protocol. The insert and backbone fragments were then pieced together using Gibson assembly (New England BioLabs Cat #E2621S) following the manufacturer's protocol. Assembled products in the pStx1 staging vector were transformed into chemically-competent Turbo Competent E. coli bacterial cells, plated on LB-Agar plates (LB: Teknova Cat #L9315, Agar: Quartzy Cat #214510) containing kanamycin and incubated at 37° C. Individual colonies were picked and miniprepped using Qiagen spin Miniprep Kit following the manufacturer's protocol. The resultant plasmids were sequenced using Sanger sequencing to ensure correct assembly. Correct clones were then cut and pasted into a mammalian expression plasmid (see FIG. 5) using standard cloning methods. The resultant plasmids were sequenced using Sanger sequencing to ensure correct assembly. Sequences encoding the targeting sequences that target the gene of interest were designed based on CasX PAM locations. Targeting sequence DNA was ordered as single-stranded DNA (ssDNA) oligos (Integrated DNA Technologies) consisting of the targeting sequence and the reverse complement of this sequence. These two oligos were annealed together and cloned into pStX individually or in bulk by Golden Gate assembly using T4 DNA Ligase (New England BioLabs Cat #M0202L) and an appropriate restriction enzyme for the plasmid. Golden Gate products were transformed into chemically or electro-competent cells such as NEB Turbo competent E. coli (NEB Cat #C2984I), plated on LB-Agar plates (LB: Teknova Cat #L9315, Agar: Quartzy Cat #214510) containing carbenicillin and incubated at 37° C. Individual colonies were picked and miniprepped using Qiagen spin Miniprep Kit and following the manufacturer's protocol. The resultant plasmids were sequenced using Sanger sequencing to ensure correct ligation. Sequences of the resulting constructs are listed in Table 10.

TABLE 10
Sequences of CasX 395 and 485-491

| | DNA | |
|---|---|---|
| Construct | Sequence | Amino Acid Sequence |
| CasX 387 | (SEQ | MAPKKKRKVSRQEIKRINKIRRRLVKDSNTKKAGKTGPMKTLLVRVM |
| | ID NO: | TPDLRERLENLRKKPENIPQPISNTSRANLNKLLTDYTEMKKAILHV |
| | 268) | YWEEFQKDPVGLMSRVAQPASKKIDQNKLKPEMDEKGNLTTAGFACS |
| | | QCGQPLFVYKLEQVSEKGKAYTNYFGRCNVAEHEKLILLAQLKPEKD |
| | | SDEAVTYSLGKFGQRALDFYSIHVTRESNHPVKPLEQIGGNSCASGP |
| | | VGKALSDACMGAVASFLTKYQDIILEHQKVIKKNEKRLANLKDIASA |
| | | NGLAFPKITLPPQPHTKEGIEAYNNVVAQIVIWVNLNLWQKLKIGRD |
| | | EAKPLQRLKGFPSFPLVERQANEVDWWDMVCNVKKLINEKKEDGKVF |
| | | WQNLAGYKRQEALRPYLSSEEDRKKGKKFARYQFGDLLLHLEKKHGE |
| | | DWGKVYDEAWERIDKKVEGLSKHIKLEEERRSEDAQSKAALTDWLRA |
| | | KASFVIEGLKEADKDEFCRCELKLQKWYGDLRGKPFAIEAENSILDI |
| | | SGFSKQYNCAFIWQKDGVKKLNLYLIINYFKGGKLRFKKIKPEAFEA |
| | | NRFYTVINKKSGEIVPMEVNFNFDDPNLIILPLAFGKRQGREFIWND |
| | | LLSLETGSLKLANGRVIEKTLYNRRTRQDEPALFVALTFERREVLDS |
| | | SNIKPMNLIGIDRGENIPAVIALTDPEGCPLSRFKDSLGNPTHILRI |
| | | GESYKEKQRTIQAKKEVEQRRAGGYSRKYASKAKNLADDMVRNTARD |
| | | LLYYAVTQDAMLIFENLSRGFGRQGKRTFMAERQYTRMEDWLTAKLA |
| | | YEGLSKTYLSKTLAQYTSKTCSNCGFTITSADYDRVLEKLKKTATGW |
| | | MTTINGKELKVEGQITYYNRYKRQNVVKDLSVELDRLSEESVNNDIS |
| | | SWTKGRSGEALSLLKKRFSHRPVQEKFVCLNCGFETHADEQAALNIA |
| | | RSWLFLRSQEYKKYQTNKTTGNTDKRAFVETWQSFYRKKLKEVWKPA |
| | | VTSPKKKRKV (SEQ ID NO: 258) |
| CasX 395 | (SEQ | MAPKKKRKVSRQEIKRINKIRRRLVKDSNTKKAGKTGPMKTLLVRVM |
| | ID NO: | TPDLRERLENLRKKPENIPQPISNTSRANLNKLLTDYTEMKKAILHV |
| | 269) | YWEEFQKDPVGLMSRVAQPAPKNIDQRKLIPVKDGNERLTSSGFACS |
| | | QCCQPLYVYKLEQVNDKGKPHTNYFGRCNVSEHERLILLSPHKPEAN |
| | | DELVTYSLGKFGQRALDFYSIHVTKESTHPVKPLAQIAGNRYASGPV |
| | | GKALSDACMGTIASELSKYQDIIIEHQKVVKGNQKRLESLRELAGKE |
| | | NLEYPSVTLPPQPHTKEGVDAYNEVIARVRMWVNLNLWQKLKLSRDD |
| | | AKPLLRLKGFPSFPLVERQANEVDWWDMVCNVKKLINEKKEDGKVFW |
| | | QNLAGYKRQEALRPYLSSEEDRKKGKKFARYQFGDLLLHLEKKHGED |
| | | WGKVYDEAWERIDKKVEGLSKHIKLEEERRSEDAQSKAALTDWLRAK |
| | | ASFVIEGLKEADKDEFCRCELKLQKWYGDLRGKPFAIEAENSILDIS |
| | | GFSKQYNCAFIWQKDGVKKLNLYLIINYFKGGKLRFKKIKPEAFEAN |
| | | RFYTVINKKSGEIVPMEVNFNFDDPNLIILPLAFGKRQGREFIWNDL |
| | | LSLETGSLKLANGRVIEKTLYNRRTRQDEPALFVALTFERREVLDSS |
| | | NIKPMNLIGIDRGENIPAVIALTDPEGCPLSRFKDSLGNPTHILRIG |
| | | ESYKEKQRTIQAKKEVEQRRAGGYSRKYASKAKNLADDMVRNTARDL |
| | | LYYAVTQDAMLIFENLSRGFGRQGKRTFMAERQYTRMEDWLTAKLAY |
| | | EGLSKTYLSKTLAQYTSKTCSNCGFTITSADYDRVLEKLKKTATGWM |
| | | TTINGKELKVEGQITYYNRYKRQNVVKDLSVELDRLSEESVNNDISS |
| | | WTKGRSGEALSLLKKRFSHRPVQEKFVCLNCGFETHADEQAALNIAR |
| | | SWLFLRSQEYKKYQTNKTTGNTDKRAFVETWQSFYRKKLKEVWKPAV |
| | | TSPKKKRKVTSPKKKRKV (SEQ ID NO: 259) |
| CasX 485 | (SEQ | MAPKKKRKVSRQEIKRINKIRRRLVKDSNTKKAGKTGPMKTLLVRVM |
| | ID NO: | TPDLRERLENLRKKPENIPQPISNTSRANLNKLLTDYTEMKKAILHV |
| | 270) | YWEEFQKDPVGLMSRVAQPAPKNIDQRKLIPVKDGNERLTSSGFACS |
| | | QCCQPLYVYKLEQVNDKGKPHTNYFGRCNVSEHERLILLSPHKPEAN |
| | | DELVTYSLGKFGQRALDFYSIHVTKESTHPVKPLAQIAGNRYASGPV |
| | | GKALSDACMGTIASELSKYQDIIIEHQKVVKGNQKRLESLRELAGKE |
| | | NLEYPSVTLPPQPHTKEGVDAYNEVIARVRMWVNLNLWQKLKLSRDD |
| | | AKPLLRLKGFPSFPLVERQANEVDWWDMVCNVKKLINEKKEDGKVFW |
| | | QNLAGYKRQEALRPYLSSEEDRKKGKKFARYQLGDLLLHLEKKHGED |
| | | WGKVYDEAWERIDKKVEGLSKHIKLEEERRSEDAQSKAALTDWLRAK |
| | | ASFVIEGLKEADKDEFCRCELKLQKWYGDLRGKPFAIEAENSILDIS |
| | | GFSKQYNCAFIWQKDGVKKLNLYLIINYFKGGKLRFKKIKPEAFEAN |
| | | RFYTVINKKSGEIVPMEVNFNFDDPNLIILPLAFGKRQGREFIWNDL |
| | | LSLETGSLKLANGRVIEKTLYNRRTRQDEPALFVALTFERREVLDSS |
| | | NIKPMNLIGVDRGENIPAVIALTDPEGCPLSRFKDSLGNPTHILRIG |
| | | ESYKEKQRTIQAKKEVEQRRAGGYSRKYASKAKNLADDMVRNTARDL |
| | | LYYAVTQDAMLIFENLSRGFGRQGKRTFMAERQYTRMEDWLTAKLAY |
| | | EGLSKTYLSKTLAQYTSKTCSNCGFTITSADYDRVLEKLKKTATGWM |
| | | TTINGKELKVEGQITYYNRRKRQNVVKDLSVELDRLSEESVNNDISS |
| | | WTKGRSGEALSLLKKRFSHRPVQEKFVCLNCGFETHADEQAALNIAR |
| | | SWLFLRSQEYKKYQTNKTTGNTDKRAFVETWQSFYRKKLKEVWKPAV |
| | | TSPKKKRKV (SEQ ID NO: 260) |
| CasX 486 | (SEQ | MAPKKKRKVSRQEIKRINKIRRRLVKDSNTKKAGKTGPMKTLLVRVM |
| | ID NO: | TPDLRERLENLRKKPENIPQPISNTSRANLNKLLTDYTEMKKAILHV |
| | 271) | YWEEFQKDPVGLMSRVAQPAPKNIDQRKLIPVKDGNERLTSSGFACS |
| | | QCCQPLYVYKLEQVNDKGKPHTNYFGRCNVSEHERLILLSPHKPEAN |
| | | DELVTYSLGKFGQRALDFYSIHVTKESTHPVKPLAQIAGNRYASGPV |
| | | GKALSDACMGTIASELSKYQDIIIEHQKVVKGNQKRLESLRELAGKE |
| | | NLEYPSVTLPPQPHTKEGVDAYNEVIARVRMWVNLNLWQKLKLSRDD |
| | | AKPLLRLKGFPSFPLVERQANEVDWWDMVCNVKKLINEKKEDGKVFW |
| | | QNLAGYKRQEALRPYLSSEEDRKKGKKFARYQLGDLLKHLEKKHGED |
| | | WGKVYDEAWERIDKKVEGLSKHIKLEEERRSEDAQSKAALTDWLRAK |
| | | ASFVIEGLKEADKDEFCRCELKLQKWYGDLRGKPFAIEAENSILDIS |
| | | GFSKQYNCAFIWQKDGVKKLNLYLIINYFKGGKLRFKKIKPEAFEAN |
| | | RFYTVINKKSGEIVPMEVNFNFDDPNLIILPLAFGKRQGREFIWNDL |
| | | LSLETGSLKLANGRVIEKTLYNRRTRQDEPALFVALTFERREVLDSS |
| | | NIKPMNLIGVDRGENIPAVIALTDPEGCPLSRFKDSLGNPTHILRIG |
| | | ESYKEKQRTIQAKKEVEQRRAGGYSRKYASKAKNLADDMVRNTARDL |
| | | LYYAVTQDAMLIFENLSRGFGRQGKRTFMAERQYTRMEDWLTAKLAY |
| | | EGLSKTYLSKTLAQYTSKTCSNCGFTITSADYDRVLEKLKKTATGWM |
| | | TTINGKELKVEGQITYYNRRKRQNVVKDLSVELDRLSEESVNNDISS |
| | | WTKGRSGEALSLLKKRFSHRPVQEKFVCLNCGFETHADEQAALNIAR |
| | | SWLFLRSQEYKKYQTNKTTGNTDKRAFVETWQSFYRKKLKEVWKPAV |
| | | TSPKKKRKV (SEQ ID NO: 261) |
| CasX 487 | (SEQ | MAPKKKRKVSRQEIKRINKIRRRLVKDSNTKKAGKTGPMKTLLVRVM |
| | ID NO: | TPDLRERLENLRKKPENIPQPISNTSRANLNKLLTDYTEMKKAILHV |
| | 272) | YWEEFQKDPVGLMSRVAQPAPKNIDQRKLIPVKDGNERLTSSGFACS |
| | | QCCQPLYVYKLEQVNDKGKPHTNYFGRCNVSEHERLILLSPHKPEAN |
| | | DELVTYSLGKFGQRALDFYSIHVTKESTHPVKPLAQIAGNRYASGPV |
| | | GKALSDACMGTIASELSKYQDIIIEHQKVVKGNQKRLESLRELAGKE |
| | | NLEYPSVTLPPQPHTKEGVDAYNEVIARVRMWVNLNLWQKLKLSRDD |
| | | AKPLLRLKGFPSFPLVERQANEVDWWDMVCNVKKLINEKKEDGKVFW |
| | | QNLAGYKRQEALRPYLSSEEDRKKGKKFARYQLGDLLLHLEKKHGED |
| | | WGKVYDEAWERIDKKVEGLSKHIKLEEERRSEDAQSKAALTDWLRAK |
| | | ASFVIEGLKEADKDEFCRCELKLQKWYGDLRGKPFAIEAENSILDIS |
| | | GFSKQYNCAFIWQKDGVKKLNLYLIINYFKGGKLRFKKIKPEAFEAN |
| | | RFYTVINKKSGEIVPMEVNFNFDDPNLIILPLAFGKRQGREFIWNDL |
| | | LSLETGSLKLANGRVIEKTLYNRRTRQDEPALFVALTFERREVLDSS |
| | | NIKPMNLIGVDRGENIPAVIALTDPEGCPLSRFKDSLGNPTHILRIG |
| | | ESYKEKQRTIQAKKEVEQRRAGGYSRKYASKAKNLADDMVRNTARDL |
| | | LYYAVTQDAMLIFENLSRGFGRQGKRTFMAERQYTRMEDWLTAKLAY |
| | | EGLSKTYLSKTLAQYTSKTCSNCGFTITSADYDRVLEKLKKTATGWM |
| | | TTINGKELKVEGQITYYNRYKRQNVVKDLSVELDRLSEESVNNDISS |
| | | WTKGRSGEALSLLKKRFSHRPVQEKFVCLNCGFETHADEQAALNIAR |
| | | SWLFLRSQEYKKYQTNKTTGNTDKRAFVETWQSFYRKKLKEVWKPAV |
| | | TSPKKKRKV (SEQ ID NO: 262) |
| CasX 488 | (SEQ | MAPKKKRKVSRQEIKRINKIRRRLVKDSNTKKAGKTGPMKTLLVRVM |
| | ID NO: | TPDLRERLENLRKKPENIPQPISNTSRANLNKLLTDYTEMKKAILHV |
| | 273) | YWEEFQKDPVGLMSRVAQPASKKIDQNKLKPEMDEKGNLTTAGFACS |
| | | QCGQPLFVYKLEQVSEKGKAYTNYFGRCNVAEHEKLILLAQLKPEKD |
| | | SDEAVTYSLGKFGQRALDFYSIHVTKESTHPVKPLAQIAGNRYASGP |
| | | VGKALSDACMGTIASELSKYQDIIIEHQKVVKGNQKRLESLRELAGK |
| | | ENLEYPSVTLPPQPHTKEGVDAYNEVIARVRMWVNLNLWQKLKLSRD |
| | | DAKPLLRLKGFPSFPLVERQANEVDWWDMVCNVKKLINEKKEDGKVF |
| | | WQNLAGYKRQEALRPYLSSEEDRKKGKKFARYQFGDLLLHLEKKHGE |
| | | DWGKVYDEAWERIDKKVEGLSKHIKLEEERRSEDAQSKAALTDWLRA |
| | | KASFVIEGLKEADKDEFCRCELKLQKWYGDLRGKPFAIEAENSILDI |
| | | SGFSKQYNCAFIWQKDGVKKLNLYLIINYFKGGKLRFKKIKPEAFEA |
| | | NRFYTVINKKSGEIVPMEVNFNFDDPNLIILPLAFGKRQGREFIWND |
| | | LLSLETGSLKLANGRVIEKTLYNRRTRQDEPALFVALTFERREVLDS |
| | | SNIKPMNLIGIDRGENIPAVIALTDPEGCPLSRFKDSLGNPTHILRI |
| | | GESYKEKQRTIQAKKEVEQRRAGGYSRKYASKAKNLADDMVRNTARD |
| | | LLYYAVTQDAMLIFENLSRGFGRQGKRTFMAERQYTRMEDWLTAKLA |
| | | YEGLSKTYLSKTLAQYTSKTCSNCGFTITSADYDRVLEKLKKTATGW |
| | | MTTINGKELKVEGQITYYNRYKRQNVVKDLSVELDRLSEESVNNDIS |
| | | SWTKGRSGEALSLLKKRFSHRPVQEKFVCLNCGFETHADEQAALNIA |
| | | RSWLFLRSQEYKKYQTNKTTGNTDKRAFVETWQSFYRKKLKEVWKPA |
| | | VTSPKKKRKV (SEQ ID NO: 263) |
| CasX 489 | (SEQ | MAPKKKRKVSRQEIKRINKIRRRLVKDSNTKKAGKTGPMKTLLVRVM |
| | ID NO: | TPDLRERLENLRKKPENIPQPISNTSRANLNKLLTDYTEMKKAILHV |
| | 274) | YWEEFQKDPVGLMSRVAQPASKKIDQNKLKPEMDEKGNLTTAGFACS |
| | | QCGQPLFVYKLEQVSEKGKAYTNYFGRCNVAEHEKLILLAQLKPEKD |
| | | SDEAVTYSLGKFGQRALDFYSIHVTKESTHPVKPLAQIAGNRYASGP |
| | | VGKALSDACMGTIASELSKYQDIIIEHQKVVKGNQKRLESLRELAGK |
| | | ENLEYPSVTLPPQPHTKEGVDAYNEVIARVRMWVNLNLWQKLKLSRD |
| | | DAKPLLRLKGFPSFPLVERQANEVDWWDMVCNVKKLINEKKEDGKVF |
| | | WQNLAGYKRQEALRPYLSSEEDRKKGKKFARYQLGDLLLHLEKKHGE |
| | | DWGKVYDEAWERIDKKVEGLSKHIKLEEERRSEDAQSKAALTDWLRA |
| | | KASFVIEGLKEADKDEFCRCELKLQKWYGDLRGKPFAIEAENSILDI |
| | | SGFSKQYNCAFIWQKDGVKKLNLYLIINYFKGGKLRFKKIKPEAFEA |
| | | NRFYTVINKKSGEIVPMEVNFNFDDPNLIILPLAFGKRQGREFIWND |
| | | LLSLETGSLKLANGRVIEKTLYNRRTRQDEPALFVALTFERREVLDS |
| | | SNIKPMNLIGVDRGENIPAVIALTDPEGCPLSRFKDSLGNPTHILRI |
| | | GESYKEKQRTIQAKKEVEQRRAGGYSRKYASKAKNLADDMVRNTARD |
| | | LLYYAVTQDAMLIFENLSRGFGRQGKRTFMAERQYTRMEDWLTAKLA |
| | | YEGLSKTYLSKTLAQYTSKTCSNCGFTITSADYDRVLEKLKKTATGW |
| | | MTTINGKELKVEGQITYYNRRKRQNVVKDLSVELDRLSEESVNNDIS |
| | | SWTKGRSGEALSLLKKRFSHRPVQEKFVCLNCGFETHADEQAALNIA |
| | | RSWLFLRSQEYKKYQTNKTTGNTDKRAFVETWQSFYRKKLKEVWKPA |
| | | VTSPKKKRKV (SEQ ID NO: 264) |
| CasX 490 | (SEQ | MAPKKKRKVSRQEIKRINKIRRRLVKDSNTKKAGKTGPMKTLLVRVM |
| | ID NO: | TPDLRERLENLRKKPENIPQPISNTSRANLNKLLTDYTEMKKAILHV |
| | 275) | YWEEFQKDPVGLMSRVAQPASKKIDQNKLKPEMDEKGNLTTAGFACS |
| | | QCGQPLFVYKLEQVSEKGKAYTNYFGRCNVAEHEKLILLAQLKPEKD |
| | | SDEAVTYSLGKFGQRALDFYSIHVTKESTHPVKPLAQIAGNRYASGP |
| | | VGKALSDACMGTIASELSKYQDIIIEHQKVVKGNQKRLESLRELAGK |
| | | ENLEYPSVTLPPQPHTKEGVDAYNEVIARVRMWVNLNLWQKLKLSRD |
| | | DAKPLLRLKGFPSFPLVERQANEVDWWDMVCNVKKLINEKKEDGKVF |
| | | WQNLAGYKRQEALRPYLSSEEDRKKGKKFARYQLGDLLKHLEKKHGE |
| | | DWGKVYDEAWERIDKKVEGLSKHIKLEEERRSEDAQSKAALTDWLRA |
| | | KASFVIEGLKEADKDEFCRCELKLQKWYGDLRGKPFAIEAENSILDI |
| | | SGFSKQYNCAFIWQKDGVKKLNLYLIINYFKGGKLRFKKIKPEAFEA |
| | | NRFYTVINKKSGEIVPMEVNFNFDDPNLIILPLAFGKRQGREFIWND |
| | | LLSLETGSLKLANGRVIEKTLYNRRTRQDEPALFVALTFERREVLDS |
| | | SNIKPMNLIGVDRGENIPAVIALTDPEGCPLSRFKDSLGNPTHILRI |
| | | GESYKEKQRTIQAKKEVEQRRAGGYSRKYASKAKNLADDMVRNTARD |
| | | LLYYAVTQDAMLIFENLSRGFGRQGKRTFMAERQYTRMEDWLTAKLA |
| | | YEGLSKTYLSKTLAQYTSKTCSNCGFTITSADYDRVLEKLKKTATGW |
| | | MTTINGKELKVEGQITYYNRRKRQNVVKDLSVELDRLSEESVNNDIS |
| | | SWTKGRSGEALSLLKKRFSHRPVQEKFVCLNCGFETHADEQAALNIA |
| | | RSWLFLRSQEYKKYQTNKTTGNTDKRAFVETWQSFYRKKLKEVWKPA |
| | | VTSPKKKRKV (SEQ ID NO: 265) |
| CasX 491 | (SEQ | MAPKKKRKVSRQEIKRINKIRRRLVKDSNTKKAGKTGPMKTLLVRVM |
| | ID NO: | TPDLRERLENLRKKPENIPQPISNTSRANLNKLLTDYTEMKKAILHV |
| | 276) | YWEEFQKDPVGLMSRVAQPASKKIDQNKLKPEMDEKGNLTTAGFACS |
| | | QCGQPLFVYKLEQVSEKGKAYTNYFGRCNVAEHEKLILLAQLKPEKD |
| | | SDEAVTYSLGKFGQRALDFYSIHVTKESTHPVKPLAQIAGNRYASGP |
| | | VGKALSDACMGTIASELSKYQDIIIEHQKVVKGNQKRLESLRELAGK |
| | | ENLEYPSVTLPPQPHTKEGVDAYNEVIARVRMWVNLNLWQKLKLSRD |
| | | DAKPLLRLKGFPSFPLVERQANEVDWWDMVCNVKKLINEKKEDGKVF |
| | | WQNLAGYKRQEALRPYLSSEEDRKKGKKFARYQLGDLLLHLEKKHGE |
| | | DWGKVYDEAWERIDKKVEGLSKHIKLEEERRSEDAQSKAALTDWLRA |
| | | KASFVIEGLKEADKDEFCRCELKLQKWYGDLRGKPFAIEAENSILDI |
| | | SGFSKQYNCAFIWQKDGVKKLNLYLIINYFKGGKLRFKKIKPEAFEA |
| | | NRFYTVINKKSGEIVPMEVNFNFDDPNLIILPLAFGKRQGREFIWND |
| | | LLSLETGSLKLANGRVIEKTLYNRRTRQDEPALFVALTFERREVLDS |
| | | SNIKPMNLIGVDRGENIPAVIALTDPEGCPLSRFKDSLGNPTHILRI |
| | | GESYKEKQRTIQAKKEVEQRRAGGYSRKYASKAKNLADDMVRNTARD |
| | | LLYYAVTQDAMLIFENLSRGFGRQGKRTFMAERQYTRMEDWLTAKLA |
| | | YEGLSKTYLSKTLAQYTSKTCSNCGFTITSADYDRVLEKLKKTATGW |
| | | MTTINGKELKVEGQITYYNRYKRQNVVKDLSVELDRLSEESVNNDIS |
| | | SWTKGRSGEALSLLKKRFSHRPVQEKFVCLNCGFETHADEQAALNIA |
| | | RSWLFLRSQEYKKYQTNKTTGNTDKRAFVETWQSFYRKKLKEVWKPA |
| | | VTSPKKKRKV (SEQ ID NO: 266) |
| CasX 494 | (SEQ | MAPKKKRKVSRQEIKRINKIRRRLVKDSNTKKAGKTGPMKTLLVRVM |
| | ID NO: | TPDLRERLENLRKKPENIPQPISNTSRANLNKLLTDYTEMKKAILHV |
| | 277) | YWEEFQKDPVGLMSRVAQPASKKIDQNKLKPEMDEKGNLTTAGFACS |
| | | QCGQPLFVYKLEQVSEKGKAYTNYFGRCNVAEHEKLILLAQLKPEKD |
| | | SDEAVTYSLGKFGQRALDFYSIHVTRESNHPVKPLEQIGGNSCASGP |
| | | VGKALSDACMGAVASFLTKYQDIILEHQKVIKKNEKRLANLKDIASA |
| | | NGLAFPKITLPPQPHTKEGIEAYNNVVAQIVIWVNLNLWQKLKIGRD |
| | | EAKPLQRLKGFPSFPLVERQANEVDWWDMVCNVKKLINEKKEDGKVF |
| | | WQNLAGYKRQEALRPYLSSEEDRKKGKKFARYQLGDLLLHLEKKHGE |
| | | DWGKVYDEAWERIDKKVEGLSKHIKLEEERRSEDAQSKAALTDWLRA |
| | | KASFVIEGLKEADKDEFCRCELKLQKWYGDLRGKPFAIEAENSILDI |
| | | SGFSKQYNCAFIWQKDGVKKLNLYLIINYFKGGKLRFKKIKPEAFEA |
| | | NRFYTVINKKSGEIVPMEVNFNFDDPNLIILPLAFGKRQGREFIWND |
| | | LLSLETGSLKLANGRVIEKTLYNRRTRQDEPALFVALTFERREVLDS |
| | | SNIKPMNLIGVDRGENIPAVIALTDPEGCPLSRFKDSLGNPTHILRI |
| | | GESYKEKQRTIQAKKEVEQRRAGGYSRKYASKAKNLADDMVRNTARD |
| | | LLYYAVTQDAMLIFENLSRGFGRQGKRTFMAERQYTRMEDWLTAKLA |
| | | YEGLSKTYLSKTLAQYTSKTCSNCGFTITSADYDRVLEKLKKTATGW |
| | | MTTINGKELKVEGQITYYNRYKRQNVVKDLSVELDRLSEESVNNDIS |
| | | SWTKGRSGEALSLLKKRFSHRPVQEKFVCLNCGFETHADEQAALNIA |
| | | RSWLFLRSQEYKKYQTNKTTGNTDKRAFVETWQSFYRKKLKEVWKPA |
| | | VTSPKKKRKV (SEQ ID NO: 267) |

### Example 5: Generation of RNA Guides

[0756] For the generation of RNA single guides and spacers, templates for in vitro transcription were generated by performing PCR with Q5 polymerase (NEB M0491) according to the recommended protocol, with template oligos for each backbone and amplification primers with the T7 promoter and the spacer sequence. The DNA primer sequences for the T7 promoter, guide and spacer for guides and spacers are presented in Table 11, below. The template oligos, labeled “backbone fwd” and “backbone rev” for each scaffold, were included at a final concentration of 20 nM each, and the amplification primers (T7 promoter and the unique spacer primer) were included at a final concentration of 1 uM each. The sg2, sg32, sg64, and sg174 guides correspond to SEQ ID NOS: 5, 2104, 2106, and 2238, respectively, with the exception that sg2, sg32, and sg64 were modified with an additional 5′ G to increase transcription efficiency (compare sequences in Table 11 to Table 2). The 7.37 spacer targets beta2-microglobulin (B2M). Following PCR amplification, templates were cleaned and isolated by phenol-chloroform-isoamyl alcohol extraction followed by ethanol precipitation.

[0757] In vitro transcriptions were carried out in buffer containing 50 mM Tris pH 8.0, 30 mM MgCl₂, 0.01% Triton X-100, 2 mM spermidine, 20 mM DTT, 5 mM NTPs, 0.5 μM template, and 100 μg/mL T7 RNA polymerase. Reactions were incubated at 37° C. overnight. 20 units of DNase I (Promega #M6101)) were added per 1 mL of transcription volume and incubated for one hour. RNA products were purified via denaturing PAGE, ethanol precipitated, and resuspended in 1× phosphate buffered saline. To fold the sgRNAs, samples were heated to 70° C. for 5 min and then cooled to room temperature. The reactions were supplemented to 1 mM final MgCl₂ concentration, heated to 50° C. for 5 min and then cooled to room temperature. Final RNA guide products were stored at −80° C.

TABLE 11
Sequences for generation of guide RNA

| Primer | Primer sequence | RNA product |
|---|---|---|
| T7 promoter | GAAATTAATACGACTCACTATA (SEQ ID NO: | Used for all |
| primer | 278) | |
| sg2 backbone | GAAATTAATAGGACTCACTATAGGTACTGGCGCT | GGUACUGGCGCUUUU |
| fwd | TTTATCTCATTACTTTGAGAGCCATCACGAGCGA | AUCUCAUUACUUUGA |
| | CTATGTCGTATGGGTAAAG (SEQ ID NO: | GAGCCAUCACCAGCG |
| | 279) | ACUAUGUCGUAUGGG |
| sg2 backbone | CTTTGATGCTTCTTATTTATCGGATTTCTCTCCG | UAAAGCGCUUAUUUA |
| rev | ATAAATAAGCGCTTTACCCATACGACATAGTCGC | UCGGAGAGAAAUCCG |
| | TGGTGATGGC (SEQ ID NO: 280) | AUAAAUAAGAAGCAU |
| sg2.7.37 | CGGAGCGAGACATCTCGGCCCTTTGATGCTTCTT | CAAAGGGCCGAGAUG |
| spacer primer | ATTTATCGGATTTCTCTCCG (SEQ ID NO: | UCUCGCUCCG (SEQ |
| | 281) | ID NO: 291) |
| sg32 | GAAATTAATAGGACTCACTATAGGTACTGGCGCT | GGUACUGGCGCUUUU |
| backbone fwd | TTTATCTCATTACTTTGAGAGCCATCACCAGCGA | AUCUCAUUACUUUGA |
| | CTATGTCGTATGGGTAAAGCGC (SEQ ID NO: | GAGCCAUCACCAGCG |
| | 282) | ACUAUGUCGUAUGGG |
| sg32 | CTTTGATGCTTCCCTCCGAAGAGGGCGCTTTACC | UAAAGCGCCCUCUUC |
| backbone rev | CATACGACATAG (SEQ ID NO: 283) | GGAGGGAAGCAUCAA |
| sg32.7.37 | CGGAGCGAGACATCTCGGCCCTTTGATGCTTCCC | AGGGCCGAGAUGUCU |
| spacer primer | TCCGAAGAG (SEQ ID NO: 284) | CG (SEQ ID NO: |
| | | 292) |
| sg64 | GAAATTAATACGACTCACTATAGGTACTGGCGCC | GGUACUGGCGCCUUU |
| backbone fwd | TTTATCTCATTACTTTGAGAGCCATCACGAGCGA | AUCUCAUUACUUUGA |
| | CTATGTCGTATGGGTAAAGCGC (SEQ ID NO: | GAGCCAUCACCAGCG |
| | 285) | ACUAUGUCGUAUGGG |
| sg64 | CTTTGATGCTTCTTACGGACCGAAGTCCGTAAGC | UAAAGCGCUUACGGA |
| backbone rev | GCTTTACCCATACGACATAG (SEQ ID NO: | CUUCGGUCCGUAAGA |
| | 286) | AGCAUCAAAGGGCCG |
| sg64.7.37 | CGGAGCGAGACATCTCGGCCCTTTGATGCTTCTT | AGAUGUCUCGCUCCG |
| spacer primer | ACGGACCGAAG (SEQ ID NO: 287) | (SEQ ID NO: |
| | | 293) |
| sgl74 | GAAATTAATAGGACTCACTATAACTGGCGCTTTT | ACUGGCGCUUUUAUC |
| backbone fwd | ATCTGATTACTTTGAGAGCCATCACCAGCGACTA | UgAUUACUUUGAGAG |
| | TGTCGTAGTGGGTAAAGCT (SEQ ID NO: | CCAUCACCAGCGACU |
| | 288) | AUGUCGUAgUGGGUA |
| sgl74 | CTTTGATGCTCCCTCCGAAGAGGGAGCTTTACCC | AAGCUCCCUCUUCGG |
| backbone rev | ACTACGACATAGTCGC (SEQ ID NO: 289) | AGGGAGCAUCAAAGG |
| sgl74.7.37 | CGGAGCGAGACATCTCGGCCCTTTGATGCTCCCT | GCCGAGAUGUCUCGC |
| spacer primer | CC (SEQ ID NO: 290) | UCCG (SEQ ID |
| | | NO: 294) |

### Example 6: RNP Assembly

[0758] Purified wild-type and RNP of CasX and single guide RNA (sgRNA) were either prepared immediately before experiments or prepared and snap-frozen in liquid nitrogen and stored at −80° C. for later use. To prepare the RNP complexes, the CasX protein was incubated with sgRNA at 1:1.2 molar ratio. Briefly, sgRNA was added to Buffer #1 (25 mM NaPi, 150 mM NaCl, 200 mM trehalose, 1 mM MgCl₂), then the CasX was added to the sgRNA solution, slowly with swirling, and incubated at 37° C. for 10 min to form RNP complexes. RNP complexes were filtered before use through a 0.22 m Costar 8160 filters that were pre-wet with 200 μl Buffer #1. If needed, the RNP sample was concentrated with a 0.5 ml Ultra 100-K_{d} cutoff filter, (Millipore part #UFC510096), until the desired volume was obtained. Formation of competent RNP was assessed as described in Example 11.

### Example 7: Assessing Binding Affinity to the Guide RNA

[0759] Purified wild-type and improved CasX will be incubated with synthetic single-guide RNA containing a 3′ Cy7.5 moiety in low-salt buffer containing magnesium chloride as well as heparin to prevent non-specific binding and aggregation. The sgRNA will be maintained at a concentration of 10 pM, while the protein will be titrated from 1 pM to 100 pM in separate binding reactions. After allowing the reaction to come to equilibrium, the samples will be run through a vacuum manifold filter-binding assay with a nitrocellulose membrane and a positively charged nylon membrane, which bind protein and nucleic acid, respectively. The membranes will be imaged to identify guide RNA, and the fraction of bound vs unbound RNA will be determined by the amount of fluorescence on the nitrocellulose vs nylon membrane for each protein concentration to calculate the dissociation constant of the protein-sgRNA complex. The experiment will also be carried out with improved variants of the sgRNA to determine if these mutations also affect the affinity of the guide for the wild-type and mutant proteins. We will also perform electromobility shift assays to qualitatively compare to the filter-binding assay and confirm that soluble binding, rather than aggregation, is the primary contributor to protein-RNA association.

### Example 8: Assessing Binding Affinity to the Target DNA

[0760] Purified wild-type and improved CasX will be complexed with single-guide RNA bearing a targeting sequence complementary to the target nucleic acid. The RNP complex will be incubated with double-stranded target DNA containing a PAM and the appropriate target nucleic acid sequence with a 5′ Cy7.5 label on the target strand in low-salt buffer containing magnesium chloride as well as heparin to prevent non-specific binding and aggregation. The target DNA will be maintained at a concentration of 1 nM, while the RNP will be titrated from 1 pM to 100 μM in separate binding reactions. After allowing the reaction to come to equilibrium, the samples will be run on a native 5% polyacrylamide gel to separate bound and unbound target DNA. The gel will be imaged to identify mobility shifts of the target DNA, and the fraction of bound vs unbound DNA will be calculated for each protein concentration to determine the dissociation constant of the RNP-target DNA ternary complex.

### Example 9: Editing of Gene Targets PCSK9, PMP22, TRAC, SOD1, B2M and HTT

[0761] The purpose of this study was to evaluate the ability of the CasX variant 119 and gNA variant 174 to edit nucleic acid sequences in six gene targets.

### Materials and Methods

[0762] Spacers for all targets except B2M, HTT and SOD1 were designed in an unbiased manner based on PAM requirements (TTC or CTC) to target a desired locus of interest. Spacers targeting B2M and SOD1 had been previously identified within targeted exons via lentiviral spacer screens carried out for these genes. For HTT, spacers were rationally designed based on PAM requirements to target exon 1 of the HTT gene, the location of the CAG repeats (see FIG. 15). Designed spacers for the other targets were ordered from Integrated DNA Technologies (IDT) as single-stranded DNA (ssDNA) oligo pairs. ssDNA spacer pairs were annealed together and cloned via Golden Gate cloning into a base mammalian-expression plasmid construct that contains the following components: codon optimized Cas X 119 protein+NLS under an EF1A promoter, guide scaffold 174 under a U6 promoter, carbenicillin and puromycin resistance genes. Assembled products were transformed into chemically-competent E. co/i, plated on Lb-Agar plates (LB: Teknova Cat #L9315, Agar: Quartzy Cat #214510) containing carbenicillin and incubated at 37° C. Individual colonies were picked and miniprepped using Qiagen Qiaprep spin Miniprep Kit (Qiagen Cat #27104) following the manufacturer's protocol. The resulting plasmids were sequenced through the guide scaffold region via Sanger sequencing (Quintara Biosciences) to ensure correct ligation.

[0763] HEK 293T cells were grown in Dulbecco's Modified Eagle Medium (DMEM; Corning Cellgro, #10-013-CV) supplemented with 10% fetal bovine serum (FBS; Seradigm, #1500-500), 100 Units/ml penicillin and 100 mg/ml streptomycin (100×-Pen-Strep; GIBCO #15140-122), sodium pyruvate (100×, Thermofisher #11360070), non-essential amino acids (100× Thermofisher #11140050), HEPES buffer (100× Thermofisher #15630080), and 2-mercaptoethanol (1000× Thermofisher #21985023). Cells were passed every 3-5 days using TryplE and maintained in an incubator at 37° C. and 5% CO2.

[0764] On day 0, HEK293T cells were seeded in 96-well, flat-bottom plates at 30k cells/well. On day 1, cells were transfected with 100 ng plasmid DNA using Lipofectamine 3000 according to the manufacturer's protocol. On day 2, cells were switched to FB medium containing puromycin. On day 3, this media was replaced with fresh FB medium containing puromycin. The protocol after this point diverged depending on the gene of interest. Day 4 for PCSK9, PMP22, and TRAC: cells were verified to have completed selection and switched to FB medium without puromycin. Day 4 for B2M, SOD1, and HTT: cells were verified to have completed selection and passed 1:3 using TryplE into new plates containing FB medium without puromycin. Day 7 for PCSK9, PMP22, and TRAC: cells were lifted from the plate, washed in dPBS, counted, and resuspended in Quick Extract (Lucigen, QE09050) at 10,000 cells/μl. Genomic DNA was extracted according to the manufacturer's protocol and stored at −20° C. Day 7 for B2M, SOD1, and HTT: cells were lifted from the plate, washed in dPBS, and genomic DNA was extracted with the Quick-DNA Miniprep Plus Kit (Zymo, D4068) according to the manufacturer's protocol and stored at −20° C.

[0765] NGS Analysis: Editing in cells from each experimental sample was assayed using next generation sequencing (NGS) analysis. All PCRs were carried out using the KAPA HiFi HotStart ReadyMix PCR Kit (KR0370). The template for genomic DNA sample PCR was 5 μl of genomic DNA in QE at 10k cells/μL for PCSK9, PMP22, and TRAC. The template for genomic DNA sample PCR was 400 ng of genomic DNA in water for B2M, SOD1, and HTT. Primers were designed specific to the target genomic location of interest to form a target amplicon. These primers contain additional sequence at the 5′ ends to introduce Illumina read and 2 sequences. Further, they contain a 7 nt randomer sequence that functions as a unique molecular identifier (UMI). Quality and quantification of the amplicon was assessed using a Fragment Analyzer DNA analyzer kit (Agilent, dsDNA 35-1500 bp). Amplicons were sequenced on the Illumina Miseq according to the manufacturer's instructions. Resultant sequencing reads were aligned to a reference sequence and analyzed for indels. Samples with editing that did not align to the estimated cut location or with unexpected alleles in the spacer region were discarded.

### Results

[0766] In order to validate the editing effected by the CasX:gNA 119.174 at a variety of genetic loci, a clonal plasmid transfection experiment was performed in HEK 293T cells. Multiple spacers (Table 12, listing the encoding DNA and the RNA sequences of the actual gNA spacers) were designed and cloned into an expression plasmid encoding the CasX 119 nuclease and guide 174 scaffold. HEK 293T cells were transfected with plasmid DNA, selected with puromycin, and harvested for genomic DNA six days post-transfection. Genomic DNA was analyzed via next generation sequencing (NGS) and aligned to a reference DNA sequence for analysis of insertions or deletions (indels). CasX:gNA 119.174 was able to efficiently generate indels across the 6 target genes, as shown in FIGS. 16 and 17. Indel rates varied between spacers, but median editing rates were consistently at 60% or higher, and in some cases, indel rates as high as 91% were observed. Additionally, spacers with non-canonical CTC PAMs were demonstrated to be able to generate indels with all tested target genes (FIG. 18).

[0767] The results demonstrate that the CasX variant 119 and gNA variant 174 can consistently and efficiently generate indels at a wide variety of genetic loci in human cells. The unbiased selection of many of the spacers used in the assays shows the overall effectiveness of the 119.174 RNP molecules to edit genetic loci, while the ability to target to spacers with both a TTC and a CTC PAM demonstrates its increased versatility compared to reference CasX that edit only with the TTC PAM.

TABLE 12
Spacer sequences targeting each genetic locus.

| Gene | Spacer | PAM | Spacer DNA Sequence | Spacer RNA Sequence |
|---|---|---|---|---|
| PCSK9 | 6.1 | TTC | GAGGAGGACGGCCTGGCCG | GAGGAGGACGGCCUGGCCGA |
| | | | A (SEQ ID NO: 295) | (SEQ ID NO: 339) |
| PCSK9 | 6.2 | TTC | ACCGCTGCGCCAAGGTGCG | ACCGCUGCGCCAAGGUGCGG |
| | | | G (SEQ ID NO: 296) | (SEQ ID NO: 340) |
| PCSK9 | 6.4 | TTC | GCCAGGCCGTCCTCCTCGG | GCCAGGCCGUCCUCCUCGGA |
| | | | A (SEQ ID NO: 297) | (SEQ ID NO: 341) |
| PCSK9 | 6.5 | TTC | GTGCTCGGGTGCTTCGGCC | GUGCUCGGGUGCUUCGGCCA |
| | | | A (SEQ ID NO: 298) | (SEQ ID NO: 342) |
| PCSK9 | 6.3 | TTC | ATGGCCTTCTTCCTGGCTT | AUGGCCUUCUUCCUGGCUUC |
| | | | C (SEQ ID NO: 299) | (SEQ ID NO: 343) |
| PCSK9 | 6.6 | TTC | GCACCACCACGTAGGTGCC | GCACCACCACGUAGGUGCCA |
| | | | A (SEQ ID NO: 300) | (SEQ ID NO: 344) |
| PCSK9 | 6.7 | TTC | TCCTGGCTTCCTGGTGAAG | UCCUGGCUUCCUGGUGAAGA |
| | | | A (SEQ ID NO: 301) | (SEQ ID NO: 345) |
| PCSK9 | 6.8 | TTC | TGGCTTCCTGGTGAAGATG | UGGCUUCCUGGUGAAGAUGA |
| | | | A (SEQ ID NO: 302) | (SEQ ID NO: 346) |
| PCSK9 | 6.9 | TTC | CCAGGAAGCCAGGAAGAAG | CCAGGAAGCCAGGAAGAAGG |
| | | | G (SEQ ID NO: 303) | (SEQ ID NO: 347) |
| PCSK9 | 6.10 | TTC | TCCTTGCATGGGGCCAGGA | UCCUUGCAUGGGGCCAGGAU |
| | | | T (SEQ ID NO: 304) | (SEQ ID NO: 348) |
| PMP22 | 18.16 | TTC | GGCGGCAAGTTCTGCTCAG | GGCGGCAAGUUCUGCUCAGC |
| | | | C (SEQ ID NO: 305) | (SEQ ID NO: 349) |
| PMP22 | 18.17 | TTC | TCTCCACGATCGTCAGCGT | UCUCCACGAUCGUCAGCGUG |
| | | | G (SEQ ID NO: 306) | (SEQ ID NO: 350) |
| PMP22 | 18.18 | CTC | ACGATCGTCAGCGTGAGTG | ACGAUCGUCAGCGUGAGUGC |
| | | | C (SEQ ID NO: 307) | (SEQ ID NO: 351) |
| PMP22 | 18.1 | TTC | CTCTAGCAATGGATCGTGG | CUCUAGCAAUGGAUCGUGGG |
| | | | G (SEQ ID NO: 308) | (SEQ ID NO: 352) |
| TRAC | 15.3 | TTC | CAAACAAATGTGTCACAAA | CAAACAAAUGUGUCACAAAG |
| | | | G (SEQ ID NO: 309) | (SEQ ID NO: 353) |
| TRAC | 15.4 | TTC | GATGTGTATATCACAGACA | GAUGUGUAUAUCACAGACAA |
| | | | A (SEQ ID NO: 310) | (SEQ ID NO: 354) |
| TRAC | 15.5 | TTC | GGAATAATGCTGTTGTTGA | GGAAUAAUGCUGUUGUUGAA |
| | | | A (SEQ ID NO: 311) | (SEQ ID NO: 355) |
| TRAC | 15.9 | TTC | AAATCCAGTGACAAGTCTG | AAAUCCAGUGACAAGUCUGU |
| | | | T (SEQ ID NO: 312) | (SEQ ID NO: 356) |
| TRAC | 15.10 | TTC | AGGCCACAGCACTGTTGCT | AGGCCACAGCACUGUUGCUC |
| | | | C (SEQ ID NO: 313) | (SEQ ID NO: 357) |
| TRAC | 15.21 | TTC | AGAAGACACCTTCTTCCCC | AGAAGACACCUUCUUCCCGA |
| | | | A (SEQ ID NO: 314) | (SEQ ID NO: 358) |
| TRAC | 15.22 | TTC | TCCCCAGCCCAGGTAAGGG | UCCCCAGCCCAGGUAAGGGC |
| | | | C (SEQ ID NO: 315) | (SEQ ID NO: 359) |
| TRAC | 15.23 | TTC | CCAGCCCAGGTAAGGGCAG | CCAGCCCAGGUAAGGGCAGC |
| | | | C (SEQ ID NO: 316) | (SEQ ID NO: 360) |
| HTT | 5.1 | TTC | AGTCCCTCAAGTCCTTCCA | AGUCGCUCAAGUCCUUCGAG |
| | | | G (SEQ ID NO: 317) | (SEQ ID NO: 361) |
| HTT | 5.2 | TTC | AGCAGCAGCAGCAGCAGCA | AGCAGCAGCAGCAGCAGCAG |
| | | | G (SEQ ID NO: 318) | (SEQ ID NO: 362) |
| HTT | 5.3 | TTC | TCAGCCGCCGCCGCAGGCA | UCAGCCGCCGCCGCAGGCAC |
| | | | C (SEQ ID NO: 319) | (SEQ ID NO: 363) |
| HTT | 5.4 | TTC | AGGGTCGCCATGGCGGTCT | AGGGUCGCCAUGGCGGUCUC |
| | | | C (SEQ ID NO: 320) | (SEQ ID NO: 364) |
| HTT | 5.5 | TTC | TCAGCTTTTCCAGGGTCGC | UCAGCUUUUCCAGGGUCGCC |
| | | | C (SEQ ID NO: 321) | (SEQ ID NO: 365) |
| HTT | 5.7 | CTC | GCCGCAGCCGCCCCCGCCG | GCCGCAGCCGCCCCCGCCGC |
| | | | C (SEQ ID NO: 322) | (SEQ ID NO: 366) |
| HTT | 5.8 | CTC | GCCACAGCCGGGCCGGGTG | GCCACAGCCGGGCCGGGUGG |
| | | | G (SEQ ID NO: 323) | (SEQ ID NO: 367) |
| HTT | 5.9 | CTC | TCAGCCACAGCCGGGCCGG | UCAGCCACAGCCGGGCCGGG |
| | | | G (SEQ ID NO: 324) | (SEQ ID NO: 368) |
| HTT | 5.10 | CTC | CGGTCGGTGCAGCGGCTCC | CGGUCGGUGCAGCGGCUCCU |
| | | | T (SEQ ID NO: 325) | (SEQ ID NO: 369) |
| SOD1 | 8.56 | TTC | CCACACCTTCACTGGTCCA | CCAGACCUUCACUGGUCCAU |
| | | | T (SEQ ID NO: 326) | (SEQ ID NO: 370) |
| SOD1 | 8.57 | TTC | TAAAGGAAAGTAATGGACC | UAAAGGAAAGUAAUGGACCA |
| | | | A (SEQ ID NO: 327) | (SEQ ID NO: 371) |
| SOD1 | 8.58 | TTC | CTGGTCCATTACTTTCCTT | CUGGUCCAUUACUUUCCUUU |
| | | | T (SEQ ID NO: 328) | (SEQ ID NO: 372) |
| SOD1 | 8.2 | TTC | ATGTTCATGAGTTTGGAGA | AUGUUCAUGAGUUUGGAGAU |
| | | | T (SEQ ID NO: 329) | (SEQ ID NO: 373) |
| SOD1 | 8.68 | TTC | TGAGTTTGGAGATAATACA | UGAGUUUGGAGAUAAUACAG |
| | | | G (SEQ ID NO: 330) | (SEQ ID NO: 374) |
| SOD1 | 8.59 | TTC | ATAGACACATCGGCCACAC | AUAGACACAUCGGCCACACC |
| | | | C (SEQ ID NO: 331) | (SEQ ID NO: 375) |
| SOD1 | 8.47 | TTC | TTATTAGGCATGTTGGAGA | UUAUUAGGCAUGUUGGAGAC |
| | | | C (SEQ ID NO: 332) | (SEQ ID NO: 376) |
| SOD1 | 8.62 | CTC | CAGGAGACCATTGCATCAT | CAGGAGACCAUUGCAUCAUU |
| | | | T (SEQ ID NO: 333) | (SEQ ID NO: 377) |
| B2M | 7.120 | TTC | GGCCTGGAGGCTATCCAGC | GGCCUGGAGGCUAUCCAGCG |
| | | | G (SEQ ID NO: 334) | (SEQ ID NO: 378) |
| B2M | 7.37 | TTC | GGCCGAGATGTCTCGCTCC | GGCCGAGAUGUCUCGCUCCG |
| | | | G (SEQ ID NO: 335) | (SEQ ID NO: 379) |
| B2M | 7.43 | CTC | AGGCCAGAAAGAGAGAGTA | AGGCCAGAAAGAGAGAGUAG |
| | | | G (SEQ ID NO: 336) | (SEQ ID NO: 380) |
| B2M | 7.119 | CTC | CGCTGGATAGCCTCCAGGC | CGCUGGAUAGCCUCCAGGCC |
| | | | C (SEQ ID NO: 337) | (SEQ ID NO: 381) |
| B2M | 7.14 | TTC | TGAAGCTGACAGCATTCGG | UGAAGCUGACAGCAUUCGGG |
| | | | G (SEQ ID NO: 338) | (SEQ ID NO: 382) |

### Example 10: Assessing Differential PAM Recognition In Vitro

[0768] Purified wild-type and engineered CasX variants will be complexed with single-guide RNA bearing a fixed targeting sequence. The RNP complexes will be added to buffer containing MgCl₂ at a final concentration of 100 nM and incubated with 5′ Cy7.5-labeled double-stranded target DNA at a concentration of 10 nM. Separate reactions will be carried out with different DNA substrates containing different PAMs adjacent to the target nucleic acid sequence. Aliquots of the reactions will be taken at fixed time points and quenched by the addition of an equal volume of 50 mM EDTA and 95% formamide. The samples will be run on a denaturing polyacrylamide gel to separate cleaved and uncleaved DNA substrates. The results will be visualized and the rate of cleavage of the non-canonical PAMs by the CasX variants will be determined.

### Example 11: CasX:gNA In Vitro Cleavage Assays

### 1. Determining Cleavage-Competent Fractions for Protein Variants Compared to Wild-Type Reference CasX

[0769] The ability of CasX variants to form active RNP compared to reference CasX was determined using an in vitro cleavage assay. The beta-2 microglobulin (B2M) 7.37 target for the cleavage assay was created as follows. DNA oligos with the sequence TGAAGCTGACAGCATTCGGGCCGAGATGTCTCGCTCCGTGGCCTTAGCTGTGCTCGC GCT (non-target strand, NTS (SEQ ID NO: 383)) and TGAAGCTGACAGCATTCGGGCCGAGATGTCTCGCTCCGTGGCCTTAGCTGTGCTCGC GCT (target strand, TS (SEQ ID NO: 384)) were purchased with 5′ fluorescent labels (LI-COR IRDye 700 and 800, respectively). dsDNA targets were formed by mixing the oligos in a 1:1 ratio in 1× cleavage buffer (20 mM Tris HCl pH 7.5, 150 mM NaCl, 1 mM TCEP, 5% glycerol, 10 mM MgCl₂), heating to 95° C. for 10 minutes, and allowing the solution to cool to room temperature.

[0770] CasX RNPs were reconstituted with the indicated CasX and guides (see graphs) at a final concentration of 1 μM with 1.5-fold excess of the indicated guide unless otherwise specified in 1× cleavage buffer (20 mM Tris HCl pH 7.5, 150 mM NaCl, 1 mM TCEP, 5% glycerol, 10 mM MgCl₂) at 37° C. for 10 min before being moved to ice until ready to use. The 7.37 target was used, along with sgRNAs having spacers complementary to the 7.37 target.

[0771] Cleavage reactions were prepared with final RNP concentrations of 100 nM and a final target concentration of 100 nM. Reactions were carried out at 37° C. and initiated by the addition of the 7.37 target DNA. Aliquots were taken at 5, 10, 30, 60, and 120 minutes and quenched by adding to 95% formamide, 20 mM EDTA. Samples were denatured by heating at 95° C. for 10 minutes and run on a 10% urea-PAGE gel. The gels were either imaged with a LI-COR Odyssey CLx and quantified using the LI-COR Image Studio software or imaged with a Cytiva Typhoon and quantified using the Cytiva IQTL software. The resulting data were plotted and analyzed using Prism. We assumed that CasX acts essentially as a single-turnover enzyme under the assayed conditions, as indicated by the observation that sub-stoichiometric amounts of enzyme fail to cleave a greater-than-stoichiometric amount of target even under extended time-scales and instead approach a plateau that scales with the amount of enzyme present. Thus, the fraction of target cleaved over long time-scales by an equimolar amount of RNP is indicative of what fraction of the RNP is properly formed and active for cleavage. The cleavage traces were fit with a biphasic rate model, as the cleavage reaction clearly deviates from monophasic under this concentration regime, and the plateau was determined for each of three independent replicates. The mean and standard deviation were calculated to determine the active fraction (Table 13). The graph is shown in FIG. 19.

[0772] Apparent active (competent) fractions were determined for RNPs formed for CasX2+guide 174+7.37 spacer, CasX119+guide 174+7.37 spacer, CasX457+guide 174+7.37 spacer, CasX488+guide 174+7.37 spacer, and CasX491+guide 174+7.37 spacer. The determined active fractions are shown in Table 13. All CasX variants had higher active fractions than the wild-type CasX2, indicating that the engineered CasX variants form significantly more active and stable RNP with the identical guide under tested conditions compared to wild-type CasX. This may be due to an increased affinity for the sgRNA, increased stability or solubility in the presence of sgRNA, or greater stability of a cleavage-competent conformation of the engineered CasX:sgRNA complex. An increase in solubility of the RNP was indicated by a notable decrease in the observed precipitate formed when CasX457, CasX488, or CasX491 was added to the sgRNA compared to CasX2.

2. In Vitro Cleavage Assays—Determining k_{cleave} for CasX Variants Compared to Wild-Type Reference CasX

[0773] Cleavage-competent fractions were also determined using the same protocol for CasX2.2.7.37, CasX2.32.7.37, CasX2.64.7.37, and CasX2.174.7.37 to be 16±3%, 13±3%, 5+2%, and 22±5%, as shown in FIG. 20 and Table 13.

[0774] A second set of guides were tested under different conditions to better isolate the contribution of the guide to RNP formation. 174, 175, 185, 186, 196, 214, and 215 guides with 7.37 spacer were mixed with CasX491 at final concentrations of 1 μM for the guide and 1.5 μM for the protein, rather than with excess guide as before. Results are shown in FIG. 21 and Table 13. Many of these guides exhibited additional improvement over 174, with 185 and 196 achieving 44% and 46% competent fractions, respectively, compared with 17% for 174 under these guide-limiting conditions.

[0775] The data indicate that both CasX variants and sgRNA variants are able to form a higher degree of active RNP with guide RNA compare to wild-type CasX and wild-type sgRNA.

[0776] The apparent cleavage rates of CasX variants 119, 457, 488, and 491 compared to wild-type reference CasX were determined using an in vitro fluorescent assay for cleavage of the target 7.37.

[0777] CasX RNPs were reconstituted with the indicated CasX (see FIG. 22) at a final concentration of 1 μM with 1.5-fold excess of the indicated guide in 1× cleavage buffer (20 mM Tris HCl pH 7.5, 150 mM NaCl, 1 mM TCEP, 5% glycerol, 10 mM MgCl₂) at 37° C. for 10 min before being moved to ice until ready to use. Cleavage reactions were set up with a final RNP concentration of 200 nM and a final target concentration of 10 nM. Reactions were carried out at 37° C. except where otherwise noted and initiated by the addition of the target DNA. Aliquots were taken at 0.25, 0.5, 1, 2, 5, and 10 minutes and quenched by adding to 95% formamide, 20 mM EDTA. Samples were denatured by heating at 95° C. for 10 minutes and run on a 10% urea-PAGE gel. The gels were imaged with a LI-COR Odyssey CLx and quantified using the LI-COR Image Studio software or imaged with a Cytiva Typhoon and quantified using the Cytiva IQTL software. The resulting data were plotted and analyzed using Prism, and the apparent first-order rate constant of non-target strand cleavage (k_{cleave}) was determined for each CasX:sgRNA combination replicate individually. The mean and standard deviation of three replicates with independent fits are presented in Table 13, and the cleavage traces are shown in FIG. 22.

[0778] Apparent cleavage rate constants were determined for wild-type CasX2, and CasX variants 119, 457, 488, and 491 with guide 174 and spacer 7.37 utilized in each assay (see Table 13 and FIG. 22). All CasX variants had improved cleavage rates relative to the wild-type CasX2. CasX457 cleaved more slowly than 119, despite having a higher competent fraction as determined above. CasX488 and CasX491 had the highest cleavage rates by a large margin; as the target was almost entirely cleaved in the first timepoint, the true cleavage rate exceeds the resolution of this assay, and the reported k_{cleave} should be taken as a lower bound.

[0779] The data indicate that the CasX variants have a higher level of activity, with k_{cleave} rates reaching at least 30-fold higher compared to wild-type CasX2.

### 3. In Vitro Cleavage Assays: Comparison of Guide Variants to Wild-Type Guides

[0780] Cleavage assays were also performed with wild-type reference CasX2 and reference guide 2 compared to guide variants 32, 64, and 174 to determine whether the variants improved cleavage. The experiments were performed as described above. As many of the resulting RNPs did not approach full cleavage of the target in the time tested, we determined initial reaction velocities (V₀) rather than first-order rate constants. The first two timepoints (15 and 30 seconds) were fit with a line for each CasX:sgRNA combination and replicate. The mean and standard deviation of the slope for three replicates were determined.

[0781] Under the assayed conditions, the Vo for CasX2 with guides 2, 32, 64, and 174 were 20.4±1.4 nM/min, 18.4±2.4 nM/min, 7.8±1.8 nM/min, and 49.3±1.4 nM/min (see Table 13 and FIG. 23 and FIG. 24). Guide 174 showed substantial improvement in the cleavage rate of the resulting RNP (˜2.5-fold relative to 2, see FIG. 24), while guides 32 and 64 performed similar to or worse than guide 2. Notably, guide 64 supports a cleavage rate lower than that of guide 2 but performs much better in vivo (data not shown). Some of the sequence alterations to generate guide 64 likely improve in vivo transcription at the cost of a nucleotide involved in triplex formation. Improved expression of guide 64 likely explains its improved activity in vivo, while its reduced stability may lead to improper folding in vitro.

[0782] Additional experiments were carried out with guides 174, 175, 185, 186, 196, 214, and 215 with spacer 7.37 and CasX492 to determine relative cleavage rates. To reduce cleavage kinetics to a range measurable with our assay, the cleavage reactions were incubated at 10° C. Results are in FIG. 25 and Table 13. Under these conditions, 215 was the only guide that supported a faster cleavage rate than 174. 196, which exhibited the highest active fraction of RNP under guide-limiting conditions, had kinetics essentially the same as 174, again highlighting that different variants result in improvements of distinct characteristics.

[0783] The data support that, under the conditions of the assay, use of the majority of the guide variants with CasX results in RNP with a higher level of activity than one with the wild-type guide, with improvements in initial cleavage velocity ranging from ˜2-fold to >6-fold. Numbers in Table 13 indicate, from left to right, CasX variant, sgRNA scaffold, and spacer sequence of the RNP construct. In the RNP construct names in the table below, CasX protein variant, guide scaffold and spacer are indicated from left to right.

TABLE 13
Results of cleavage and RNP formation assays

| RNP | | Initial | Competent |
|---|---|---|---|
| Construct | K_{cleave}* | velocity* | fraction |
| 2.2.7.37 | | 20.4 ± 1.4 | 16 ± 3% |
| | | nM/min | |
| 2.32.7.37 | | 18.4 ± 2.4 | 13 ± 3% |
| | | nM/min | |
| 2.64.7.37 | | 7.8 ± 1.8 | 5 ± 2% |
| | | nM/min | |
| 2.174.7.37 | 0.51 ± 0.01 | 49.3 ± 1.4 | 22 ± 5% |
| | min⁻¹ | nM/min | |
| 119.174.7.37 | 6.29 ± 2.11 | | 35 ± 6% |
| | min⁻¹ | | |
| 457.174.7.37 | 3.01 ± 0.90 | | 53 ± 7% |
| | min⁻¹ | | |
| 488.174.7.37 | 15.19 min⁻¹ | | 67% |
| 491.174.7.37 | 16.59 min⁻¹/ | | 83%/17% |
| | 0.293 min⁻¹ | | (guide- |
| | (10° C.) | | limited) |
| 491.175.7.37 | 0.089 min⁻¹ | | 5% (guide- |
| | (10° C.) | | limited) |
| 491.185.7.37 | 0.227 min⁻¹ | | 44% (guide- |
| | (10° C.) | | limited) |
| 491.186.7.37 | 0.099 min⁻¹ | | 11% (guide- |
| | (10° C.) | | limited) |
| 491.196.7.37 | 0.292 min⁻¹ | | 46% (guide- |
| | (10° C.) | | limited) |
| 491.214.7.37 | 0.284 min⁻¹ | | 30% (guide- |
| | (10° C.) | | limited) |
| 491.215.7.37 | 0.398 min⁻¹ | | 38% (guide- |
| | (10° C.) | | limited) |

*Mean and standard deviation

### Example 12: Identification of Nicking Variants

[0784] Purified modified CasX variants will be complexed with single-guide RNA bearing a fixed targeting sequence. The RNP complexes will be added to buffer containing MgCl₂ at a final concentration of 100 nM and incubated with double-stranded target DNA with a 5′ fluorescein label on the target strand and a 5′ Cy5 label on the non-target strand at a concentration of 10 nM. Aliquots of the reactions will be taken at fixed time points and quenched by the addition of an equal volume of 50 mM EDTA and 95% formamide. The samples will be run on a denaturing polyacrylamide gel to separate cleaved and uncleaved DNA substrates. Efficient cleavage of one strand but not the other would be indicative that the variant possessed single-strand nickase activity.

### Example 13: Assessing Improved Expression and Solubility Characteristics of CasX Variants for RNP Production

[0785] Wild-type and modified CasX variants will be expressed in BL21 (DE3) E. coli under identical conditions. All proteins will be under the control of an IPTG-inducible T7 promoter. Cells will be grown to an OD of 0.6 in TB media at 37° C., at which point the growth temperature will be reduced to 16° C. and expression will be induced by the addition of 0.5 mM IPTG. Cells will be harvested following 18 hours of expression. Soluble protein fractions will be extracted and analyzed on an SDS-PAGE gel. The relative levels of soluble CasX expression will be identified by Coomassie staining. The proteins will be purified in parallel according to the protocol above, and final yields of pure protein will be compared. To determine the solubility of the purified protein, the constructs will be concentrated in storage buffer until the protein begins to precipitate. Precipitated protein will be removed by centrifugation and the final concentration of soluble protein will be measured to determine the maximum solubility for each variant. Finally, the CasX variants will be complexed with single guide RNA and concentrated until precipitation begins. Precipitated RNP will be removed by centrifugation and the final concentration of soluble RNP will be measured to determine the maximum solubility of each variant when bound to guide RNA.

### Example 14: Assays Used to Measure sgNA and CasX Protein Activity

[0786] Several assays were used to carry out initial screens of CasX protein and sgNA Deep Mutational Evolution (DME) libraries and modified mutants, and to measure the activity of select protein and sgNA variants relative to CasX reference sgNAs and proteins.

E. coli CRISPRi Screen:

[0787] Briefly, biological triplicates of dead CasX DME Libraries on a chloramphenicol (CM) resistant plasmid with a GFP gNA on a carbenicillin (Carb) resistant plasmid were transformed (at >5× library size) into MG1655 with genetically integrated and constitutively expressed GFP and RFP. Cells were grown overnight in EZ-RDM+Carb, CM and Anhydrotetracycline (aTc) inducer. E. coli were FACS sorted based on gates for the top 1% of GFP but not RFP repression, collected, and resorted immediately to further enrich for highly functional CasX molecules. Double sorted libraries were then grown out and DNA was collected for deep sequencing on a highseq. This DNA was also re-transformed onto plates and individual clones were picked for further analysis.

E. coli Toxin Selection:

[0788] Briefly carbenicillin resistant plasmid containing an arabinose inducible toxin were transformed into E. coli cells and made electrocompetent. Biological triplicates of CasX DME Libraries with a toxin targeted gNA on a chloramphenicol resistant plasmid were transformed (at >5× library size) into said cells and grown in LB+CM and arabinose inducer. E. coli that cleaved the toxin plasmid survived in the induction media and were grown to mid log and plasmids with functional CasX cleavers were recovered. This selection was repeated as needed. Selected libraries were then grown out and DNA was collected for deep sequencing on a highseq. This DNA was also re-transformed onto plates and individual clones were picked for further analysis and testing.

### Lentiviral Based Screen EGFP Screen:

[0789] Lentiviral particles were produced in HEK293 cells at a confluency of 70%-90% at time of transfection. Cells were transfected using polyethylenimine based transfection of plasmids containing a CasX DME library. Lentiviral vectors were co-transfected with the lentiviral packaging plasmid and the VSV-G envelope plasmids for particle production. Media was changed 12 hours post-transfection, and virus harvested at 36-48 hours post-transfection. Viral supernatants were filtered using 0.45 mm membrane filters, diluted in cell culture media if appropriate, and added to target cells HEK cells with an Integrated GFP reporter. Polybrene was supplemented to enhance transduction efficiency, if necessary. Transduced cells were selected for 24-48 hours post-transduction using puromycin and grown for 7-10 days. Cells were then sorted for GFP disruption & collected for highly functional CasX sgNA or protein variants (see FIG. 26). Libraries were then Amplified via PCR directly from the genome and collected for deep sequencing on a highseq. This DNA could also be re-cloned and re-transformed onto plates and individual clones were picked for further analysis.

### Example 15: Assaying Editing Efficiency of an HEK EGFP Reporter

[0790] To assay the editing efficiency of CasX reference sgNAs and proteins and variants thereof, EGFP HEK293T reporter cells were seeded into 96-well plates and transfected according to the manufacturer's protocol with lipofectamine 3000 (Life Technologies) and 100-200 ng plasmid DNA encoding a reference or CasX variant protein, P2A-puromycin fusion and the reference or variant sgNA. The next day cells were selected with 1.5 μg/ml puromycin for 2 days and analyzed by fluorescence-activated cell sorting (FACS) 7 days after selection to allow for clearance of EGFP protein from the cells. EGFP disruption via editing was traced using an Attune NxT Flow Cytometer and high-throughput autosampler.

### Example 16: Cleavage Efficiency of CasX Reference sgRNA

[0791] The reference CasX sgRNA of SEQ ID NO:4 (below) is described in WO 2018064371 and U.S. Ser. No. 10/570,415B2, the contents of which are incorporated herein by reference:

(SEQ ID NO: 4)
ACAUCUGGCGCGUUUAUUCCAUUACUUUGGAGCCAGUCCCAGCGACUAUG
UCGUAUGGACGAAGCGCUUAUUUAUCGGAGAGAAACCGAUAAGUAAAACG
CAUCAAAG.

[0792] It was found that alterations to the sgRNA reference sequence of SEQ ID NO:4, producing SEQ ID NO:5 (below) were able to improve CasX cleavage efficiency. The sequence is:

(SEQ ID NO: 5)
UACUGGCGCUUUUAUCUCAUUACUUUGAGAGCCAUCACCAGCGACUAUGU
CGUAUGGGUAAAGCGCUUAUUUAUCGGAGAGAAAUCCGAUAAAUAAGAAG
CAUCAAAG.

[0793] To assay the editing efficiency of CasX reference sgRNAs and variants thereof, EGFP HEK293T reporter cells were seeded into 96-well plates and transfected according to the manufacturer's protocol with lipofectamine 3000 (Life Technologies) and 100-200 ng plasmid DNA encoding a reference CasX protein, P2A-puromycin fusion and the sgRNA. The next day cells were selected with 1.5 μg/ml puromycin for 2 days and analyzed by fluorescence-activated cell sorting (FACS) 7 days after selection to allow for clearance of EGFP protein from the cells. EGFP disruption via editing was traced using an Attune NxT Flow Cytometer and high-throughput autosampler.

[0794] When testing cleavage of an EGFP reporter by CasX reference and sgNA variants, the following spacer target sequences were used:

E6
(SEQ ID NO: 17)
(TGTGGTCGGGGTAGCGGCTG)
and
E7
(SEQ ID NO: 18)
(TCAAGTCCGCCATGCCCGAA).

[0795] An example of the increased cleavage efficiency of the sgRNA of SEQ ID NO:5 compared to the sgRNA of SEQ ID NO:4 is shown in FIG. 27. Editing efficiency of SEQ ID NO: 5 was improved 176% compared to SEQ ID NO: 4. Accordingly, SEQ ID NO: 5 was chosen as reference sgRNA for DME and additional sgNA variant design, described below.

### Example 17: Design, Creation and Evaluation of gNA Variants with Improved Target Cleavage

[0796] Guide nucleic acid (gNA) variants were designed and tested in order to assess improvements in cleavage activity relative to reference gNAs. These guides were discovered via DME or rational design and replacement or addition of guide parts such as the extended stem or the addition of ribozymes at the termini, as described herein.

[0797] Experimental design: All guides were tested In HEK293T or a HEK293T reporter line as follows. Mammalian cells were maintained in a 37° C. incubator, at 5% CO2. HEK293T Human kidney cells and derivatives thereof were grown in Dulbecco's Modified Eagle Medium (DMEM; Corning Cellgro, #10-013-CV) supplemented with 10% fetal bovine serum (FBS; Seradigm, #1500-500), and 100 Units/ml penicillin and 100 mg/ml streptomycin (100×-Pen-Strep; GIBCO #15140-122), and can additionally include sodium pyruvate (100×, Thermofisher #11360070), Non-essential amino acids (100× Thermofisher #11140050), HEPES buffer (100× Thermofisher #15630080), and 2-mercaptoethanol (1000× Thermofisher #21985023). Cells were seeded at 20-30 thousand cells per well into 96-well plates and transfected using 0.25-1 uL of Lipofectamine 3000 (Thermo Fisher Scientific #L3000008), 50-500 ng of a plasmid containing CasX and the reference or variant CasX guide targeting the reporter or target gene following the manufacturer's protocol. 24-72 hours later the media was changed and 0.3-3.0 ug/ml puromycin (Sigma #P8833) was added to select for transformation. 24-96 hours following selection the cells were analyzed by flow cytometry and gated for the appropriate forward and side scatter, selected for single cells and then gated for green fluorescent protein (GFP) or antibody reporter expression (Attune Nxt Flow Cytometer, Thermo Fisher Scientific) to quantify the expression levels of fluorophores. At least 10,000 events were collected for each sample. For the HEK293T-GFP genome editing reporter cell line, flow cytometry was used to quantify the percentage of GFP-negative (edited) cells and the number of cells with GFP disruption for each variant was compared to the reference guide to generate a fold change measurement.

[0798] Results: Results from the sgNA variants generated via DME were measured and compared to the reference gNA of SEQ ID NO: 4. These results are presented in FIG. 29, with most variants showing improvements from 0.1 to nearly 1.5-fold compared to the reference gNA. Results of the variants generated via rational design and replacement or addition of guide parts (such as the extended stem or the addition of ribozymes at the termini) are shown in FIGS. 28 and 30 respectively; again showing improvements with many of the constructs. The additions to the variants, along with their encoding sequences, portrayed by number in FIG. 30 are listed in Table 14, below. We observed that single mutations such as the C18G improve guide activity when compared to the reference. Additionally, rationally swapping in different stem loops for the extended stem loop, such as MS2, QB, PP7, UvsX, etc. improved activity when compared to the reference guide, as does truncating the original extended stem loop. Finally, we demonstrate that while most ribozymes disrupt activity, the addition of a 3′ HDV to the reference guide RNA can improve activity up to 20-50%.

TABLE 14
Extensions added to 3′ and 5′ ends of gNA

| Extension | | |
|---|---|---|
| Number | Extension Name | Extension Encoding Sequence |
| 1 | HDV | GGGTCGGCATGGCATCTCCACCTCCTCGCGGTCCGACCTGGG |
| | antigenomic | CATCCGAAGGAGGACGCACGTCCACTCGGATGGCTAAGGGAG |
| | ribozyme | AGGCA (SEQ ID NO: 385) |
| 2 | HDV genomic | GGCCGGCATGGTCCCAGCCTCCTCGCTGGCGCCGGCTGGGCA |
| | ribozyme | ACATTCCGAGGGGACCGTCCCCTCGGTAATGGCGAATGGGAC |
| | | CC (SEQ ID NO: 386) |
| 3 | HDV ribozyme | GATGGCCGGCATGGTCCCAGCCTCCTCGCTGGCGCCGGCTGG |
| | (v1) | GCAACACCTTCGGGTGGCGAATGGGAC (SEQ ID NO: |
| | | 387) |
| 4 | HDV ribozyme | TTTTGGCCGGCATGGTCCCAGCCTCCTCGCTGGCGCCGGCTG |
| | (v2) | GGCAACATGCTTCGGCATGGCGAATGGGACCCCGGG (SEQ |
| | | ID NO: 388) |
| 5 | Hatchet | CATTCCTCAGAAAATGACAAACCTGTGGGGCGTAAGTAGATC |
| | | TTCGGATCTATGATCGTGCAGACGTTAAAATCAGGT (SQE |
| | | ID NO: 389) |
| 6 | env25 pistol | CGTGGTTAGGGCCACGTTAAATAGTTGCTTAAGCCCTAAGCG |
| | ribozyme (with | TTGATCTTCGGATCAGGTGCAA (SEQ ID NO: 390) |
| | CUUCGG loop) | |
| 7 | HH15 Minimal | GGGAGCCCCGCTGATGAGGTCGGGGAGACCGAAAGGGACTTC |
| | Hammerhead | GGTCCCTACGGGGCTCCC (SEQ ID NO: 391) |
| | ribozyme | |
| 8 | sTRSV WT viral | CCTGTCACCGGATGTGCTTTCCGGTCTGATGAGTCCGTGAGG |
| | Hammerhead | ACGAAACAGG (SEQ ID NO: 392) |
| | ribozyme | |
| 9 | Hammerhead | CGACTACTGATGAGTCCGTGAGGACGAAACGAGTAAGCTCGT |
| | ribozyme | CTAGTCGCGTGTAGCGAAGCA (SEQ ID NO: 393) |
| 10 | Hammerhead | CGACTACTGATGAGTCCGTGAGGACGAAACGAGTAAGCTCGT |
| | ribozyme, smaller | CTAGTCG (SEQ ID NO: 394) |
| | scar | |
| 11 | Hammerhead | CCAGTACTGATGAGTCCGTGAGGACGAAACGAGTAAGCTCGT |
| | ribozyme, guide | CTACTGGCGCTTTTATCTCAT (SEQ ID NO: 395) |
| | scaffold scar | |
| 12 | Twisted Sister 1 | ACCCGCAAGGCCGACGGCATCCGCCGCCGCTGGTGCAAGTCC |
| | | AGCCGCCCCTTCGGGGGCGGGCGCTCATGGGTAAC (SEQ |
| | | ID NO: 396) |
| 13 | Env-9 Twister | GGCAATAAAGCGGTTACAAGCCCGCAAAAATAGCAGAGTAAT |
| | | GTCGCGATAGCGCGGCATTAATGCAGCTTTATTG (SEQ ID |
| | | NO: 397) |
| 14 | RBMX recruiting | CCACCCCCACCACCACCCCCACCCCCACCACCACCC (SEQ |
| | motif | ID NO: 398) |

[0799] The results support the conclusion that DME and rational design can be used to improve the performance of the gNAs and that many of these variant RNAs can now be used with the targeting sequences as a component of the CasX:gNA systems described herein to edit target nucleic acid sequences.

### Example 18: Method to Edit the HTT Gene Using CasX 119 and Guide 174 in HEK293T Cells

[0800] The purpose of this experiment was to demonstrate the ability of CasX to edit the HTT locus and generate large deletions at the poly-glutamine (PolyQ) repeat region in HTT Exon 1. As expansion of the poly-glutamine (PolyQ) tract in HTT Exon 1 to repeats greater than 36 is a root cause of Huntington's disease, one therapeutic strategy to address Huntington's disease is to disrupt the PolyQ repeat region in order to reduce the number of repeats to non-pathogenic levels (e.g., less than 36).

### Materials and Methods.

[0801] For the experiments, CasX 119, guide 174, and spacers targeting the wild-type HTT sequence were used (see Table 15, below). Spacers were chosen manually based on PAM availability without prior knowledge of activity. HEK293T cells were seeded at 20-40k cells/well in a 96 well plate in 100 μl of FB medium (Thermo 10564029 supplemented with fetal bovine serum (FBS)) and cultured in a 37° C. incubator with 5% CO2. The following day, confluence of seeded cells was checked to ensure that cells were at ˜75% confluence at time of transfection. If cells were at the right confluence, transfection was carried out. Each CasX and guide construct was transfected into the HEK293T cells at 100-500 ng per well using Lipofectamine 3000 following the manufacturer's protocol, using 3 wells per construct as replicates. SaCas9 and SpyCas9 targeting HTT were used as benchmarking controls. For each Cas protein type, a non-targeting plasmid was used as a negative control. Cells were selected for successful transfection with puromycin at 0.3-3 μg/ml for 24-48 hours followed by 24-96 hours of recovery in FB medium. Cells for each sample from the experiment were lysed and the genome was extracted following the manufacturer's protocol and standard practices. Editing in cells from each experimental sample were assayed using NGS analysis. Briefly, genomic DNA was amplified via PCR with primers specific to the target genomic location of interest to form a target amplicon. These primers contain additional sequence at the 5′ ends to introduce Illumina read and 2 sequences. Further, they contain a 16 nt random sequence that functions as a unique molecular identifier (UMI). Quality and quantification of the amplicon was assessed using a Fragment Analyzer DNA analyzer kit (Agilent, dsDNA 35-1500 bp). Amplicons were sequenced on the Illumina Miseq according to the manufacturer's instructions. Raw fastq files from sequencing were processed as follows: (1) the sequences were trimmed for quality and for adapter sequences using the program cutadapt (v. 2.1); (2) the sequences from read 1 and read 2 were merged into a single insert sequence using the program flash2 (v2.2.00); and (3) the consensus insert sequences were run through the program CRISPResso2 (v 2.0.29), along with the expected amplicon sequence and the spacer sequence. This program quantifies the percent of reads that were modified in a window around the 3′ end of the spacer (30 bp window centered at −3 bp from 3′ end of spacer). The activity of the CasX and Cas9 molecules was quantified as the total percent of reads that contain insertions and/or deletions anywhere within this window.

TABLE 15
CasX guide spacer sequences

| Spacer | PAM | Spacer DNA Sequence | Spacer RNA Sequence |
|---|---|---|---|
| 5.1 | TTC | AGTCCCTCAAGTCCTTCCA | AGUCCCUCAAGUCCUUCGAG |
| | | G (SEQ ID NO: 399) | (SEQ ID NO: 404) |
| 5.2 | TTC | AGCAGCAGCAGCAGCAGCA | AGCAGCAGCAGCAGCAGCAG |
| | | G (SEQ ID NO: 400) | (SEQ ID NO: 405) |
| 5.3 | TTC | TCAGCCGCCGCCGCAGGCA | UCAGCCGCCGCCGCAGGCAC |
| | | C (SEQ ID NO: 401) | (SEQ ID NO: 406) |
| 5.4 | TTC | AGGGTCGCCATGGCGGTCT | AGGGUCGCCAUGGCGGUCUC |
| | | C (SEQ ID NO: 402) | (SEQ ID NO: 407) |
| 5.5 | TTC | TCAGCTTTTCCAGGGTCGC | UCAGCUUUUCCAGGGUCGCC |
| | | C (SEQ ID NO: 403) | (SEQ ID NO: 408) |

[0802] Results: The graph in FIG. 31 shows that five different CasX spacers are able to edit the HTT locus, at an average editing of 60%, essentially equivalent to the editing of Spy Cas9 and exhibited greater editing compared to Sau Cas9.

[0803] We additionally analyzed the indel profile of the edits generated by the HTT targeting X constructs. The graph in FIG. 32 shows that spacers 5.1 and 5.2, both of which target near or at the CAG repeat in HTT exon 1 was able to generate large deletions greater than 40 bp of the PolyQ-PolyP repeat region at the target site. On average 65% and 63% of the edits generated by spacers 5.1 and 5.2, respectively, are deletions larger than 40 bp of the PolyQ-PolyP repeat region at the target site. This is a significantly high fraction of the total editing enabled by these spacers.

[0804] This example demonstrates that, under the conditions of the assay, CasX with appropriately targeted guides was able to edit the HTT locus. Spacers targeted to genomic regions at or near the PolyQ-PolyP repeat region, such as spacers 5.1 and 5.2 shown here, have the ability to disrupt these repeat regions in HTT exon 1. This approach may have the potential to reduce the number of PolyQ repeat expansions to non-pathogenic levels (e.g., <36) in Huntington's disease patient cells.

### Example 19. Method to Assess Knockdown on the Mutant Huntingtin Protein in Huntington's Disease Patient Fibroblasts

[0805] The purpose of this experiment was to demonstrate the ability of CasX to knockdown the expression of the mutant huntingtin protein in Huntington's Disease (HD) patient fibroblasts using CasX 119, guide 174 and a spacer targeting HTT Exon 1.

### Materials and Methods.

[0806] HD patient fibroblasts (Coriell Institute) were seeded at 20-40k cells/well in 96 well plates in FB medium and cultured in a 37° C. incubator with 5% CO2. CRISPR/Cas constructs (HTT targeting spacer 5.2, with a non-targeting (NT) spacer as control) were packaged in lentiviral vectors, which were then used to transduce Huntington's Disease (HD) patient fibroblasts at a MOI of 500. Following transduction, cells were selected using 0.3-3 μg/mL puromycin as a selection marker. Following selection and recovery of cells, flow cytometry was used to assess editing. Briefly, cells were harvested, fixed and permeabilized, stained with a huntingtin protein-specific primary antibody (D7F7 CST #5656) at a range of dilutions followed by secondary antibody labeling, and analyzed by flow cytometry.

[0807] Results: Under the conditions of the assay, analysis by flow cytometry demonstrated that HTT targeting spacer 5.2 was able to knock down the expression of the mutant huntingtin protein in 18% of HD patient cells, as shown in FIG. 33, verifying the ability to successfully edit the HTT gene in order to reduce expression of the mutant huntingtin.

1-170. (canceled)

171. A composition comprising:
a. a CasX variant protein comprising the sequence of SEQ ID NO: 138, or a sequence having at least about 70% sequence identity thereto; and
b. a first guide nucleic acid (gNA), wherein the gNA comprises a targeting sequence complementary to a huntingtin (HTT) gene target nucleic acid sequence, wherein the HTT gene comprises one or more mutations.

172. The composition of claim 171, wherein the targeting sequence of the gNA is complementary to a sequence of:
a. a HTT intron;
b. a HTT exon;
c. a HTT intron-exon junction;
d. a HTT regulatory element;
e. an intergenic region; or
f. one or more single nucleotide polymorphisms (SNPs).

173. The composition of claim 171, wherein the HTT gene comprises a mutation in exon 1 comprising at least about 35, at least about 50, at least about 75, at least about 100, or at least about 120 CAG repeats in the target nucleic acid sequence.

174. The composition of claim 171, comprising a second gNA, wherein the second gNA has a targeting sequence complementary to a different or overlapping portion of the HTT gene compared to the targeting sequence of the first gNA.

175. The composition of claim 174, wherein the second gNA has a targeting sequence complementary to the same exon targeted by the first gNA or to an intron 3′ to the exon targeted by the first gNA.

176. The composition of claim 174, wherein the first and/or second gNA has a scaffold sequence comprising the sequence of SEQ ID NO: 2238, or a sequence having at least about 70% sequence identity thereto.

177. The composition of claim 171, wherein the CasX variant protein comprises one or more nuclear localization signals (NLS) located at or near the N-terminus and/or at or near the C-terminus of the Class 2 Type V CRISPR protein.

178. The composition of claim 171, wherein the CasX variant protein is capable of forming a ribonuclear protein complex (RNP) with the gNA, wherein the RNP exhibits at least one improved characteristic as compared to an RNP comprising the reference CasX protein of SEQ ID NO: 1, SEQ ID NO: 2, or SEQ ID NO: 3 and a gNA comprising a sequence of any one of SEQ ID NOS: 4-16.

179. The composition of claim 171, comprising a donor template nucleic acid, wherein the donor template comprises a nucleic acid comprising at least a portion of a wild-type HTT gene selected from the group consisting of a HTT exon, a HTT intron, a HTT intron-exon junction, and a HTT regulatory element.

180. The composition of claim 171, wherein the CasX variant protein exhibits at least one improved characteristic as compared to a reference CasX protein.

181. The composition of claim 171, wherein the CasX variant protein is a chimeric protein, comprising protein domains from two or more different CasX proteins.

182. A gNA comprising a scaffold sequence and a targeting sequence, wherein the scaffold sequence comprises the sequence of SEQ ID NO: 2238, or a sequence having at least about 70% sequence identity thereto, and the targeting sequence is complementary to a huntingtin (HTT) gene target nucleic acid sequence, wherein the HTT gene comprises one or more mutations.

183. The composition of claim 182, wherein the PAM sequence comprises ATC, GTC, CTC or TTC.

184. A nucleic acid comprising a sequence that encodes the CasX variant protein and/or the gNA of claim 171.

185. A vector comprising the nucleic acid of claim 184, wherein the vector is selected from the group consisting of a retroviral vector, a lentiviral vector, an adenoviral vector, an adeno-associated viral (AAV) vector, a herpes simplex virus (HSV) vector, a virus-like particle (VLP), a plasmid, a minicircle, a nanoplasmid, a DNA vector, and an RNA vector.

186. A method of modifying a HTT target nucleic acid sequence in a population of cells, the method comprising introducing into cells of the population the vector of claim 185, wherein the HTT target nucleic acid sequence of the cells targeted by the first gNA is modified by the CasX variant protein, wherein the modifying results in a knocking down of the HTT gene expression in the cells of the population such that expression of a non-functional huntingtin protein is decreased by at least about 10%, in comparison to a cell where the HTT gene has not been modified.

187. The method of claim 186, wherein the cells are selected from the group consisting of rodent cells, mouse cells, rat cells, non-human primate cells, and human cells.

188. The method of claim 186, wherein the cells comprise neurons, wherein the neurons include one or more of a spinal motor neuron, a medium spiny neuron, a cortical neuron, and a striatal neuron.

189. The method of claim 186, wherein the modifying of the HTT gene target nucleic acid sequence of the population of cells occurs in vitro or ex vivo.

190. The method of claim 186, wherein the modifying of the HTT gene target nucleic acid sequence of the population of cells occurs in vivo in a subject, wherein the subject is selected from the group consisting of a rodent, a mouse, a rat, a non-human primate, and a human.

191. The method of claim 190, wherein the method comprises administering a therapeutically effective dose of the vector to the subject, wherein the vector is administered to the subject by a route of administration selected from subcutaneous, intradermal, intraneural, intranodal, intramedullary, intramuscular, intralumbar, intrathecal, subarachnoid, intraventricular, intracapsular, intravenous, intralymphatical, and intraperitoneal, wherein the administering method is injection, transfusion, or implantation, or combinations thereof.

192. A population of cells modified by the method of claim 186, wherein the cells have been modified such that at least 70% of the modified cells do not express a detectable level of a non-functional huntingtin protein.

193. A method of treating a HTT-related disease in a subject in need thereof, the method comprising administering to the subject a therapeutically effective amount of the cells of claim 1922.

194. A method of treating a HTT-related disease in a subject in need thereof, the method comprising administering to the subject a therapeutically effective amount of the vector of claim 185.

195. The method of claim 194, wherein the subject is selected from the group consisting of a rodent, mouse, rat, non-human primate and human.

196. The method of claim 195, wherein the method results in improvement in at least one clinically-relevant endpoint selected from the group consisting of Unified Huntington's Disease Rating Scale (UHDRS), improvements in motor function, mutant huntingtin protein levels, neurofilament light polypeptide (NF-L) levels, Patient Global Impression of Change (PGIC), the Clinician Global Impression Change (CGIC), the Short Form 36 Health Survey (SF-36), the Berg Balance Test (BBT), duration of response, progression-free survival, time to progression, and time-to-treatment failure.

197. A kit, comprising the composition of claim 171, and a suitable container.

The application's sequence listing, which the Patent Office published only in electronic form, follows.

SEQUENCE LISTING (39980 sequences)

SEQ ID NO: 1 - protein, 986 aa, Unknown
  Deltaproteobacteria sp.
MEKRINKIRKKLSADNATKPVSRSGPMKTLLVRVMTDDLKKRLEKRRKKPEVMPQVISNNAANNLRMLLDDYTKMKEAILQVYWQEFKDDHVGLMCKFAQPASKKIDQNKLKPEMDEKGNLTTAGFACSQCGQPLFVYKLEQVSEKGKAYTNYFGRCNVAEHEKLILLAQLKPEKDSDEAVTYSLGKFGQRALDFYSIHVTKESTHPVKPLAQIAGNRYASGPVGKALSDACMGTIASFLSKYQDIIIEHQKVVKGNQKRLESLRELAGKENLEYPSVTLPPQPHTKEGVDAYNEVIARVRMWVNLNLWQKLKLSRDDAKPLLRLKGFPSFPVVERRENEVDWWNTINEVKKLIDAKRDMGRVFWSGVTAEKRNTILEGYNYLPNENDHKKREGSLENPKKPAKRQFGDLLLYLEKKYAGDWGKVFDEAWERIDKKIAGLTSHIEREEARNAEDAQSKAVLTDWLRAKASFVLERLKEMDEKEFYACEIQLQKWYGDLRGNPFAVEAENRVVDISGFSIGSDGHSIQYRNLLAWKYLENGKREFYLLMNYGKKGRIRFTDGTDIKKSGKWQGLLYGGGKAKVIDLTFDPDDEQLIILPLAFGTRQGREFIWNDLLSLETGLIKLANGRVIEKTIYNKKIGRDEPALFVALTFERREVVDPSNIKPVNLIGVDRGENIPAVIALTDPEGCPLPEFKDSSGGPTDILRIGEGYKEKQRAIQAAKEVEQRRAGGYSRKFASKSRNLADDMVRNSARDLFYHAVTHDAVLVFENLSRGFGRQGKRTFMTERQYTKMEDWLTAKLAYEGLTSKTYLSKTLAQYTSKTCSNCGFTITTADYDGMLVRLKKTSDGWATTLNNKELKAEGQITYYNRYKRQTVEKELSAELDRLSEESGNNDISKWTKGRRDEALFLLKKRFSHRPVQEQFVCLDCGHEVHADEQAALNIARSWLFLNSNSTEFKSYKSGKQPFVGAWQAFYKRRLKEVWKPNA

SEQ ID NO: 2 - protein, 978 aa, Unknown
  Planctomycetes sp.
MQEIKRINKIRRRLVKDSNTKKAGKTGPMKTLLVRVMTPDLRERLENLRKKPENIPQPISNTSRANLNKLLTDYTEMKKAILHVYWEEFQKDPVGLMSRVAQPAPKNIDQRKLIPVKDGNERLTSSGFACSQCCQPLYVYKLEQVNDKGKPHTNYFGRCNVSEHERLILLSPHKPEANDELVTYSLGKFGQRALDFYSIHVTRESNHPVKPLEQIGGNSCASGPVGKALSDACMGAVASFLTKYQDIILEHQKVIKKNEKRLANLKDIASANGLAFPKITLPPQPHTKEGIEAYNNVVAQIVIWVNLNLWQKLKIGRDEAKPLQRLKGFPSFPLVERQANEVDWWDMVCNVKKLINEKKEDGKVFWQNLAGYKRQEALLPYLSSEEDRKKGKKFARYQFGDLLLHLEKKHGEDWGKVYDEAWERIDKKVEGLSKHIKLEEERRSEDAQSKAALTDWLRAKASFVIEGLKEADKDEFCRCELKLQKWYGDLRGKPFAIEAENSILDISGFSKQYNCAFIWQKDGVKKLNLYLIINYFKGGKLRFKKIKPEAFEANRFYTVINKKSGEIVPMEVNFNFDDPNLIILPLAFGKRQGREFIWNDLLSLETGSLKLANGRVIEKTLYNRRTRQDEPALFVALTFERREVLDSSNIKPMNLIGIDRGENIPAVIALTDPEGCPLSRFKDSLGNPTHILRIGESYKEKQRTIQAAKEVEQRRAGGYSRKYASKAKNLADDMVRNTARDLLYYAVTQDAMLIFENLSRGFGRQGKRTFMAERQYTRMEDWLTAKLAYEGLPSKTYLSKTLAQYTSKTCSNCGFTITSADYDRVLEKLKKTATGWMTTINGKELKVEGQITYYNRYKRQNVVKDLSVELDRLSEESVNNDISSWTKGRSGEALSLLKKRFSHRPVQEKFVCLNCGFETHADEQAALNIARSWLFLRSQEYKKYQTNKTTGNTDKRAFVETWQSFYRKKLKEVWKPAV

SEQ ID NO: 3 - protein, 855 aa, Unknown
  Candidatus Sungbacteria sp.
MDNANKPSTKSLVNTTRISDHFGVTPGQVTRVFSFGIIPTKRQYAIIERWFAAVEAARERLYGMLYAHFQENPPAYLKEKFSYETFFKGRPVLNGLRDIDPTIMTSAVFTALRHKAEGAMAAFHTNHRRLFEEARKKMREYAECLKANEALLRGAADIDWDKIVNALRTRLNTCLAPEYDAVIADFGALCAFRALIAETNALKGAYNHALNQMLPALVKVDEPEEAEESPRLRFFNGRINDLPKFPVAERETPPDTETIIRQLEDMARVIPDTAEILGYIHRIRHKAARRKPGSAVPLPQRVALYCAIRMERNPEEDPSTVAGHFLGEIDRVCEKRRQGLVRTPFDSQIRARYMDIISFRATLAHPDRWTEIQFLRSNAASRRVRAETISAPFEGFSWTSNRTNPAPQYGMALAKDANAPADAPELCICLSPSSAAFSVREKGGDLIYMRPTGGRRGKDNPGKEITWVPGSFDEYPASGVALKLRLYFGRSQARRMLTNKTWGLLSDNPRVFAANAELVGKKRNPQDRWKLFFHMVISGPPPVEYLDFSSDVRSRARTVIGINRGEVNPLAYAVVSVEDGQVLEEGLLGKKEYIDQLIETRRRISEYQSREQTPPRDLRQRVRHLQDTVLGSARAKIHSLIAFWKGILAIERLDDQFHGREQKIIPKKTYLANKTGFMNALSFSGAVRVDKKGNPWGGMIEIYPGGISRTCTQCGTVWLARRPKNPGHRDAMVVIPDIVDDAAATGFDNVDCDAGTVDYGELFTLSREWVRLTPRYSRVMRGTLGDLERAIRQGDDRKSRQMLELALEPQPQWGQFFCHRCGFNGQSDVLAATNLARRAISLIRRLPDTDTPPTP

SEQ ID NO: 4 - RNA, 108 nt, Artificial Sequence
  gRNA sequence
acaucuggcgcguuuauuccauuacuuuggagccagucccagcgacuaugucguauggacgaagcgcuuauuuaucggagagaaaccgauaaguaaaacgcaucaaag

SEQ ID NO: 5 - RNA, 108 nt, Artificial Sequence
  gRNA sequence
uacuggcgcuuuuaucucauuacuuugagagccaucaccagcgacuaugucguauggguaaagcgcuuauuuaucggagagaaauccgauaaauaagaagcaucaaag

SEQ ID NO: 6 - RNA, 81 nt, Artificial Sequence
  gRNA sequence
acaucuggcgcguuuauuccauuacuuuggagccagucccagcgacuaugucguauggacgaagcgcuuauuuaucggaga

SEQ ID NO: 7 - RNA, 78 nt, Artificial Sequence
  gRNA sequence
acaucuggcgcguuuauuccauuacuuuggagccagucccagcgacuaugucguauggacgaagcgcuuauuuaucgg

SEQ ID NO: 8 - RNA, 80 nt, Artificial Sequence
  gRNA sequence
uacuggcgcuuuuaucucauuacuuugagagccaucaccagcgacuaugucguauggguaaagcgcuuauuuaucggaga

SEQ ID NO: 9 - RNA, 77 nt, Artificial Sequence
  gRNA sequence
uacuggcgcuuuuaucucauuacuuugagagccaucaccagcgacuaugucguauggguaaagcgcuuauuuaucgg

SEQ ID NO: 10 - RNA, 25 nt, Artificial Sequence
  gRNA sequence
guuuacacacucccucucauagggu

SEQ ID NO: 11 - RNA, 25 nt, Artificial Sequence
  gRNA sequence
guuuacacacucccucucaugaggu

SEQ ID NO: 12 - RNA, 25 nt, Artificial Sequence
  gRNA sequence
uuuuacauacccccucucaugggau

SEQ ID NO: 13 - RNA, 25 nt, Artificial Sequence
  gRNA sequence
guuuacacacucccucucauggggg

SEQ ID NO: 14 - RNA, 20 nt, Artificial Sequence
  gRNA sequence
ccagcgacuaugucguaugg

SEQ ID NO: 15 - RNA, 39 nt, Artificial Sequence
  gRNA sequence
gcgcuuauuuaucggagagaaauccgauaaauaagaagc

SEQ ID NO: 16 - RNA, 74 nt, Artificial Sequence
  gRNA sequence
ggcgcuuuuaucucauuacuuugagagccaucaccagcgacuaugucguauggguaaagcgcuuauuuaucgga

SEQ ID NO: 17 - DNA, 20 bp, Artificial Sequence
  E6 primer sequence
tgtggtcggggtagcggctg

SEQ ID NO: 18 - DNA, 20 bp, Artificial Sequence
  E7 primer sequence
tcaagtccgccatgcccgaa

SEQ ID NO: 19 - RNA, 21 nt, Artificial Sequence
  stem loop sequence
  misc_feature (4)..(18): n is any ribonucleotide
  misc_feature (8)..(18): These individual nucleotides may be absent
uuunnnnnnnnnnnnnnnuuu

SEQ ID NO: 20 - RNA, 20 nt, Artificial Sequence
  scaffold stem loop
ccagcgacuaugucguaugg

SEQ ID NO: 21 - RNA, 39 nt, Artificial Sequence; identical to SEQ ID NO: 15
  sgRNA extended stem loop

SEQ ID NO: 22 - RNA, 81 nt, Unknown; identical to SEQ ID NO: 6
  Deltaproteobacteria spp.

SEQ ID NO: 23 - RNA, 78 nt, Unknown; identical to SEQ ID NO: 7
  Deltaproteobacteria spp.

SEQ ID NO: 24 - RNA, 23 nt, Unknown
  Deltaproteobacteria spp.
ccgauaaguaaaacgcaucaaag

SEQ ID NO: 25 - RNA, 80 nt, Unknown; identical to SEQ ID NO: 8
  Planctomycetes spp.

SEQ ID NO: 26 - RNA, 77 nt, Unknown; identical to SEQ ID NO: 9
  Planctomycetes spp.

SEQ ID NO: 27 - RNA, 26 nt, Unknown
  Planctomycetes spp.
ucuccgauaaauaagaagcaucaaag

SEQ ID NO: 28 - RNA, 25 nt, Unknown
  Candidatus Sungbacteria sp.
guuuacacacucccucucauagggu

SEQ ID NO: 29 - RNA, 25 nt, Unknown
  Candidatus Sungbacteria sp.
guuuacacacucccucucaugaggu

SEQ ID NO: 30 - RNA, 25 nt, Unknown
  Candidatus Sungbacteria sp.
uuuuacauacccccucucaugggau

SEQ ID NO: 31 - RNA, 25 nt, Unknown
  Candidatus Sungbacteria sp.
guuuacacacucccucucauggggg

SEQ ID NO: 32 - RNA, 21 nt, Artificial Sequence
  scaffold stem loop
ccagcgacuaugucguagugg

SEQ ID NO: 33 - protein, 3142 aa, Homo sapiens
MATLEKLMKAFESLKSFQQQQQQQQQQQQQQQQQQQQQPPPPPPPPPPPQLPQPPPQAQPLLPQPQPPPPPPPPPPGPAVAEEPLHRPKKELSATKKDRVNHCLTICENIVAQSVRNSPEFQKLLGIAMELFLLCSDDAESDVRMVADECLNKVIKALMDSNLPRLQLELYKEIKKNGAPRSLRAALWRFAELAHLVRPQKCRPYLVNLLPCLTRTSKRPEESVQETLAAAVPKIMASFGNFANDNEIKVLLKAFIANLKSSSPTIRRTAAGSAVSICQHSRRTQYFYSWLLNVLLGLLVPVEDEHSTLLILGVLLTLRYLVPLLQQQVKDTSLKGSFGVTRKEMEVSPSAEQLVQVYELTLHHTQHQDHNVVTGALELLQQLFRTPPPELLQTLTAVGGIGQLTAAKEESGGRSRSGSIVELIAGGGSSCSPVLSRKQKGKVLLGEEEALEDDSESRSDVSSSALTASVKDEISGELAASSGVSTPGSAGHDIITEQPRSQHTLQADSVDLASCDLTSSATDGDEEDILSHSSSQVSAVPSDPAMDLNDGTQASSPISDSSQTTTEGPDSAVTPSDSSEIVLDGTDNQYLGLQIGQPQDEDEEATGILPDEASEAFRNSSMALQQAHLLKNMSHCRQPSDSSVDKFVLRDEATEPGDQENKPCRIKGDIGQSTDDDSAPLVHCVRLLSASFLLTGGKNVLVPDRDVRVSVKALALSCVGAAVALHPESFFSKLYKVPLDTTEYPEEQYVSDILNYIDHGDPQVRGATAILCGTLICSILSRSRFHVGDWMGTIRTLTGNTFSLADCIPLLRKTLKDESSVTCKLACTAVRNCVMSLCSSSYSELGLQLIIDVLTLRNSSYWLVRTELLETLAEIDFRLVSFLEAKAENLHRGAHHYTGLLKLQERVLNNVVIHLLGDEDPRVRHVAAASLIRLVPKLFYKCDQGQADPVVAVARDQSSVYLKLLMHETQPPSHFSVSTITRIYRGYNLLPSITDVTMENNLSRVIAAVSHELITSTTRALTFGCCEALCLLSTAFPVCIWSLGWHCGVPPLSASDESRKSCTVGMATMILTLLSSAWFPLDLSAHQDALILAGNLLAASAPKSLRSSWASEEEANPAATKQEEVWPALGDRALVPMVEQLFSHLLKVINICAHVLDDVAPGPAIKAALPSLTNPPSLSPIRRKGKEKEPGEQASVPLSPKKGSEASAASRQSDTSGPVTTSKSSSLGSFYHLPSYLKLHDVLKATHANYKVTLDLQNSTEKFGGFLRSALDVLSQILELATLQDIGKCVEEILGYLKSCFSREPMMATVCVQQLLKTLFGTNLASQFDGLSSNPSKSQGRAQRLGSSSVRPGLYHYCFMAPYTHFTQALADASLRNMVQAEQENDTSGWFDVLQKVSTQLKTNLTSVTKNRADKNAIHNHIRLFEPLVIKALKQYTTTTCVQLQKQVLDLLAQLVQLRVNYCLLDSDQVFIGFVLKQFEYIEVGQFRESEAIIPNIFFFLVLLSYERYHSKQIIGIPKIIQLCDGIMASGRKAVTHAIPALQPIVHDLFVLRGTNKADAGKELETQKEVVVSMLLRLIQYHQVLEMFILVLQQCHKENEDKWKRLSRQIADIILPMLAKQQMHIDSHEALGVLNTLFEILAPSSLRPVDMLLRSMFVTPNTMASVSTVQLWISGILAILRVLISQSTEDIVLSRIQELSFSPYLISCTVINRLRDGDSTSTLEEHSEGKQIKNLPEETFSRFLLQLVGILLEDIVTKQLKVEMSEQQHTFYCQELGTLLMCLIHIFKSGMFRRITAAATRLFRSDGCGGSFYTLDSLNLRARSMITTHPALVLLWCQILLLVNHTDYRWWAEVQQTPKRHSLSSTKLLSPQMSGEEEDSDLAAKLGMCNREIVRRGALILFCDYVCQNLHDSEHLTWLIVNHIQDLISLSHEPPVQDFISAVHRNSAASGLFIQAIQSRCENLSTPTMLKKTLQCLEGIHLSQSGAVLTLYVDRLLCTPFRVLARMVDILACRRVEMLLAANLQSSMAQLPMEELNRIQEYLQSSGLAQRHQRLYSLLDRFRLSTMQDSLSPSPPVSSHPLDGDGHVSLETVSPDKDWYVHLVKSQCWTRSDSALLEGAELVNRIPAEDMNAFMMNSEFNLSLLAPCLSLGMSEISGGQKSALFEAAREVTLARVSGTVQQLPAVHHVFQPELPAEPAAYWSKLNDLFGDAALYQSLPTLARALAQYLVVVSKLPSHLHLPPEKEKDIVKFVVATLEALSWHLIHEQIPLSLDLQAGLDCCCLALQLPGLWSVVSSTEFVTHACSLIYCVHFILEAVAVQPGEQLLSPERRTNTPKAISEEEEEVDPNTQNPKYITAACEMVAEMVESLQSVLALGHKRNSGVPAFLTPLLRNIIISLARLPLVNSYTRVPPLVWKLGWSPKPGGDFGTAFPEIPVEFLQEKEVFKEFIYRINTLGWTSRTQFEETWATLLGVLVTQPLVMEQEESPPEEDTERTQINVLAVQAITSLVLSAMTVPVAGNPAVSCLEQQPRNKPLKALDTRFGRKLSIIRGIVEQEIQAMVSKRENIATHHLYQAWDPVPSLSPATTGALISHEKLLLQINPERELGSMSYKLGQVSIHSVWLGNSITPLREEEWDEEEEEEADAPAPSSPPTSPVNSRKHRAGVDIHSCSQFLLELYSRWILPSSSARRTPAILISEVVRSLLVVSDLFTERNQFELMYVTLTELRRVHPSEDEILAQYLVPATCKAAAVLGMDKAVAEPVSRLLESTLRSSHLPSRVGALHGVLYVLECDLLDDTAKQLIPVISDYLLSNLKGIAHCVNIHSQQHVLVMCATAFYLIENYPLDVGPEFSASIIQMCGVMLSGSEESTPSIIYHCALRGLERLLLSEQLSRLDAESLVKLSVDRVNVHSPHRAMAALGLMLTCMYTGKEKVSPGRTSDPNPAAPDSESVIVAMERVSVLFDRIRKGFPCEARVVARILPQFLDDFFPPQDIMNKVIGEFLSNQQPYPQFMATVVYKVFQTLHSTGQSSMVRDWVMLSLSNFTQRAPVAMATWSLSCFFVSASTSPWVAAILPHVISRMGKLEQVDVNLFCLVATDFYRHQIEEELDRRAFQSVLEVVAAPGSPYHRLLTCLRNVHKVTTC

SEQ ID NO: 34 - RNA, 31 nt, Artificial Sequence
  tracrRNA stem loop
  misc_feature (4)..(28): n is any ribonucleotide
  misc_feature (8)..(28): These individual nucleotides may be absent
uuunnnnnnnnnnnnnnnnnnnnnnnnnuuu

SEQ ID NO: 35 - RNA, 19 nt, Artificial Sequence
  MS2 stem loop
acaugaggauuacccaugu

SEQ ID NO: 36 - RNA, 18 nt, Artificial Sequence
  Qbeta stem loop
ugcaugucuaagacagca

SEQ ID NO: 37 - RNA, 20 nt, Artificial Sequence
  U1 hairpin II stem loop
aauccauugcacuccggauu

SEQ ID NO: 38 - RNA, 12 nt, Artificial Sequence
  Uvsx stem loop
ccucuucggagg

SEQ ID NO: 39 - RNA, 21 nt, Artificial Sequence
  PP7 stem loop
aggaguuucuauggaaacccu

SEQ ID NO: 40 - RNA, 30 nt, Artificial Sequence
  phage replication loop
aggugggacgaccucucggucguccuaucu

SEQ ID NO: 41 - RNA, 19 nt, Artificial Sequence
  kissing loop a
ugcucgcuccguucgagca

SEQ ID NO: 42 - RNA, 21 nt, Artificial Sequence
  kissing loop b1
ugcucgacgcguccucgagca

SEQ ID NO: 43 - RNA, 22 nt, Artificial Sequence
  kissing loop b2
ugcucguuugcggcuacgagca

SEQ ID NO: 44 - RNA, 17 nt, Artificial Sequence
  G quadriplex M3q
agggagggagggagagg

SEQ ID NO: 45 - RNA, 19 nt, Artificial Sequence
  G quadriplex telomere basket
gguuaggguuaggguuagg

SEQ ID NO: 46 - RNA, 25 nt, Artificial Sequence
  Sarcin-ricin loop
cugcucaguacgagaggaaccgcag

SEQ ID NO: 47 - RNA, 78 nt, Artificial Sequence
  pseudoknots
uacacugggaucgcugaauuagagaucggcguccuuucauucuauauacuuuggaguuuuaaaaugucucuaaguaca

SEQ ID NO: 48 - protein, 4 aa, Artificial Sequence
  CXXC zing finger/ribbon domain
  MISC_FEATURE (2)..(3): Xaa is any amino acid
CXXC

SEQ ID NO: 49 - protein, 978 aa, Artificial Sequence
  CasX variant
MQEIKRINKIRRRLVKDSNTKKAGKTGPMKTLLVRVMTPDLRERLENLRKKPENIPQPISNTSRANLNKLLTDYTEMKKAILHVYWEEFQKDPVGLMSRVAQPASKKIDQNKLKPEMDEKGNLTTAGFACSQCGQPLFVYKLEQVSEKGKAYTNYFGRCNVAEHEKLILLAQLKPEKDSDEAVTYSLGKFGQRALDFYSIHVTRESNHPVKPLEQIGGNSCASGPVGKALSDACMGAVASFLTKYQDIILEHQKVIKKNEKRLANLKDIASANGLAFPKITLPPQPHTKEGIEAYNNVVAQIVIWVNLNLWQKLKIGRDEAKPLQRLKGFPSFPLVERQANEVDWWDMVCNVKKLINEKKEDGKVFWQNLAGYKRQEALRPYLSSEEDRKKGKKFARYQFGDLLLHLEKKHGEDWGKVYDEAWERIDKKVEGLSKHIKLEEERRSEDAQSKAALTDWLRAKASFVIEGLKEADKDEFCRCELKLQKWYGDLRGKPFAIEAENSILDISGFSKQYNCAFIWQKDGVKKLNLYLIINYFKGGKLRFKKIKPEAFEANRFYTVINKKSGEIVPMEVNFNFDDPNLIILPLAFGKRQGREFIWNDLLSLETGSLKLANGRVIEKTLYNRRTRQDEPALFVALTFERREVLDSSNIKPMNLIGIDRGENIPAVIALTDPEGCPLSRFKDSLGNPTHILRIGESYKEKQRTIQAKKEVEQRRAGGYSRKYASKAKNLADDMVRNTARDLLYYAVTQDAMLIFENLSRGFGRQGKRTFMAERQYTRMEDWLTAKLAYEGLSKTYLSKTLAQYTSKTCSNCGFTITSADYDRVLEKLKKTATGWMTTINGKELKVEGQITYYNRYKRQNVVKDLSVELDRLSEESVNNDISSWTKGRSGEALSLLKKRFSHRPVQEKFVCLNCGFETHADEQAALNIARSWLFLRSQEYKKYQTNKTTGNTDKRAFVETWQSFYRKKLKEVWKPAV

SEQ ID NO: 50 - protein, 977 aa, Artificial Sequence
  CasX variant
MQEIKRINKIRRRLVKDSNTKKAGKTGPMKTLLVRVMTPDLRERLENLRKKPENIPQPISNTSRANLNKLLTDYTEMKKAILHVYWEEFQKDPVGLMSRVAQPAPKNIDQRKLIPVKDGNERLTSSGFACSQCCQPLYVYKLEQVNDKGKPHTNYFGRCNVSEHERLILLSPHKPEANDELVTYSLGKFGQRALDFYSIHVTRESNHPVKPLEQIGGNSCASGPVGKALSDACMGAVASFLTKYQDIILEHQKVIKKNEKRLANLKDIASANGLAFPKITLPPQPHTKEGIEAYNNVVAQIVIWVNLNLWQKLKIGRDEAKPLQRLKGFPSFPLVERQANEVDWWDMVCNVKKLINEKKEDGKVFWQNLAGYKRQEALRPYLSSEEDRKKGKKFARYQFGDLLLHLEKKHGEDWGKVYDEAWERIDKKVEGLSKHIKLEEERRSEDAQSKAALTDWLRAKASFVIEGLKEADKDEFCRCELKLQKWYGDLRGKPFAIEAENSILDISGFSKQYNCAFIWQKDGVKKLNLYLIINYFKGGKLRFKKIKPEAFEANRFYTVINKKSGEIVPMEVNFNFDDPNLIILPLAFGKRQGREFIWNDLLSLETGSLKLANGRVIEKTLYNRRTRQDEPALFVALTFERREVLDSSNIKPMNLIGIDRGENIPAVIALTDPEGCPLSRFKDSLGNPTHILRIGESYKEKQRTIQAKKEVEQRRAGGYSRKYASKAKNLADDMVRNTARDLLYYAVTQDAMLIFENLSRGFGRQGKRTFMAERQYTRMEDWLTAKLAYEGLSKTYLSKTLAQYTSKTCSNCGFTITTADYDGMLVRLKKTSDGWATTLNNKELKAEGQITYYNRYKRQTVEKELSAELDRLSEESGNNDISKWTKGRRDEALFLLKKRFSHRPVQEQFVCLDCGHEVHADEQAALNIARSWLFLRSQEYKKYQTNKTTGNTDKRAFVETWQSFYRKKLKEVWKPAV

SEQ ID NO: 51 - protein, 985 aa, Artificial Sequence
  CasX variant
MEKRINKIRKKLSADNATKPVSRSGPMKTLLVRVMTDDLKKRLEKRRKKPEVMPQVISNNAANNLRMLLDDYTKMKEAILQVYWQEFKDDHVGLMCKFAQPAPKNIDQRKLIPVKDGNERLTSSGFACSQCCQPLYVYKLEQVNDKGKPHTNYFGRCNVSEHERLILLSPHKPEANDELVTYSLGKFGQRALDFYSIHVTKESTHPVKPLAQIAGNRYASGPVGKALSDACMGTIASFLSKYQDIIIEHQKVVKGNQKRLESLRELAGKENLEYPSVTLPPQPHTKEGVDAYNEVIARVRMWVNLNLWQKLKLSRDDAKPLLRLKGFPSFPVVERRENEVDWWNTINEVKKLIDAKRDMGRVFWSGVTAEKRNTILEGYNYLPNENDHKKREGSLENPKKPAKRQFGDLLLYLEKKYAGDWGKVFDEAWERIDKKIAGLTSHIEREEARNAEDAQSKAVLTDWLRAKASFVLERLKEMDEKEFYACEIQLQKWYGDLRGNPFAVEAENRVVDISGFSIGSDGHSIQYRNLLAWKYLENGKREFYLLMNYGKKGRIRFTDGTDIKKSGKWQGLLYGGGKAKVIDLTFDPDDEQLIILPLAFGTRQGREFIWNDLLSLETGLIKLANGRVIEKTIYNKKIGRDEPALFVALTFERREVVDPSNIKPVNLIGVDRGENIPAVIALTDPEGCPLPEFKDSSGGPTDILRIGEGYKEKQRAIQAAKEVEQRRAGGYSRKFASKSRNLADDMVRNSARDLFYHAVTHDAVLVFENLSRGFGRQGKRTFMTERQYTKMEDWLTAKLAYEGLTSKTYLSKTLAQYTSKTCSNCGFTITTADYDGMLVRLKKTSDGWATTLNNKELKAEGQITYYNRYKRQTVEKELSAELDRLSEESGNNDISKWTKGRRDEALFLLKKRFSHRPVQEQFVCLDCGHEVHADEQAALNIARSWLFLNSNSTEFKSYKSGKQPFVGAWQAFYKRRLKEVWKPNA

SEQ ID NO: 52 - protein, 986 aa, Artificial Sequence
  CasX variant
MEKRINKIRKKLSADNATKPVSRSGPMKTLLVRVMTDDLKKRLEKRRKKPEVMPQVISNNAANNLRMLLDDYTKMKEAILQVYWQEFKDDHVGLMCKFAQPASKKIDQNKLKPEMDEKGNLTTAGFACSQCGQPLFVYKLEQVSEKGKAYTNYFGRCNVAEHEKLILLAQLKPEKDSDEAVTYSLGKFGQRALDFYSIHVTKESTHPVKPLAQIAGNRYASGPVGKALSDACMGTIASFLSKYQDIIIEHQKVVKGNQKRLESLRELAGKENLEYPSVTLPPQPHTKEGVDAYNEVIARVRMWVNLNLWQKLKLSRDDAKPLLRLKGFPSFPVVERRENEVDWWNTINEVKKLIDAKRDMGRVFWSGVTAEKRNTILEGYNYLPNENDHKKREGSLENPKKPAKRQFGDLLLYLEKKYAGDWGKVFDEAWERIDKKIAGLTSHIEREEARNAEDAQSKAVLTDWLRAKASFVLERLKEMDEKEFYACEIQLQKWYGDLRGNPFAVEAENRVVDISGFSIGSDGHSIQYRNLLAWKYLENGKREFYLLMNYGKKGRIRFTDGTDIKKSGKWQGLLYGGGKAKVIDLTFDPDDEQLIILPLAFGTRQGREFIWNDLLSLETGLIKLANGRVIEKTIYNKKIGRDEPALFVALTFERREVVDPSNIKPVNLIGVDRGENIPAVIALTDPEGCPLPEFKDSSGGPTDILRIGEGYKEKQRAIQAAKEVEQRRAGGYSRKFASKSRNLADDMVRNSARDLFYHAVTHDAVLVFENLSRGFGRQGKRTFMTERQYTKMEDWLTAKLAYEGLTSKTYLSKTLAQYTSKTCSNCGFTITSADYDRVLEKLKKTATGWMTTINGKELKVEGQITYYNRYKRQNVVKDLSVELDRLSEESVNNDISSWTKGRSGEALSLLKKRFSHRPVQEKFVCLNCGFETHADEQAALNIARSWLFLNSNSTEFKSYKSGKQPFVGAWQAFYKRRLKEVWKPNA

SEQ ID NO: 53 - protein, 921 aa, Artificial Sequence
  CasX variant
MQEIKRINKIRRRLVKDSNTKKAGKTGPMKTLLVRVMTPDLRERLENLRKKPENIPQPISNTSRANLNKLLTDYTEMKKAILHVYWEEFQKDPVGLMSRVAQPAPKNIDQRKLIPVKDGNERLTSSGFACSQCCQPLYVYKLEQVNDKGKPHTNYFGRCNVSEHERLILLSPHKPEANDELVTYSLGKFGQRALDFYSIHVTRESNHPVKPLEQIGGNSCASGPVGKALSDACMGAVASFLTKYQDIILEHQKVIKKNEKRLANLKDIASANGLAFPKITLPPQPHTKEGIEAYNNVVAQIVIWVNLNLWQKLKIGRDEAKPLQRLKGFPSFPLVERQANEVDWWDMVCNVKKLINEKKEDGKVFWQNLAGYKRQEALRPYLSSEEDRKKGKKFARYQFGDLLLHLEKKHGEDWGKVYDEAWERIDKKVEGLSKHIKLEEERRSEDAQSKAALTDWLRAKASFVIEGLKEADKDEFCRCELKLQKWYGDLRGKPFAIEAENSILDISGFSKQYNCAFIWQKDGVKKLNLYLIINYFKGGKLRFKKIKPEAFEANRFYTVINKKSGEIVPMEVNFNFDDPNLIILPLAFGKRQGREFIWNDLLSLETGSLKLANGRVIEKTLYNRRTRQDEPALFVALTFERREVLDSSNIKPVNLIGVDRGENIPAVIALTDPEGCPLPEFKDSSGGPTDILRIGEGYKEKQRAIQAAKEVEQRRAGGYSRKFASKSRNLADDMVRNSARDLFYHAVTHDAVLVFENLSRGFGRQGKRTFMTERQYTKMEDWLTAKLAYEGLTSKTYLSKTLAQYTSKTCSNCGFTITSADYDRVLEKLKKTATGWMTTINGKELKVEGQITYYNRYKRQNVVKDLSVELDRLSEESVNNDISSWTKGRSGEALSLLKKRFSHRPVQEKFVCLNCGFETHA

SEQ ID NO: 54 - protein, 920 aa, Artificial Sequence
  CasX variant
MQEIKRINKIRRRLVKDSNTKKAGKTGPMKTLLVRVMTPDLRERLENLRKKPENIPQPISNTSRANLNKLLTDYTEMKKAILHVYWEEFQKDPVGLMSRVAQPAPKNIDQRKLIPVKDGNERLTSSGFACSQCCQPLYVYKLEQVNDKGKPHTNYFGRCNVSEHERLILLSPHKPEANDELVTYSLGKFGQRALDFYSIHVTRESNHPVKPLEQIGGNSCASGPVGKALSDACMGAVASFLTKYQDIILEHQKVIKKNEKRLANLKDIASANGLAFPKITLPPQPHTKEGIEAYNNVVAQIVIWVNLNLWQKLKIGRDEAKPLQRLKGFPSFPLVERQANEVDWWDMVCNVKKLINEKKEDGKVFWQNLAGYKRQEALRPYLSSEEDRKKGKKFARYQFGDLLLHLEKKHGEDWGKVYDEAWERIDKKVEGLSKHIKLEEERRSEDAQSKAALTDWLRAKASFVIEGLKEADKDEFCRCELKLQKWYGDLRGKPFAIEAENSILDISGFSKQYNCAFIWQKDGVKKLNLYLIINYFKGGKLRFKKIKPEAFEANRFYTVINKKSGEIVPMEVNFNFDDPNLIILPLAFGKRQGREFIWNDLLSLETGSLKLANGRVIEKTLYNRRTRQDEPALFVALTFERREVLDSSNIKPMNLIGIDRGENIPAVIALTDPEGCPLSRFKDSLGNPTHILRIGESYKEKQRTIQAKKEVEQRRAGGYSRKYASKAKNLADDMVRNTARDLLYYAVTQDAMLIFENLSRGFGRQGKRTFMAERQYTRMEDWLTAKLAYEGLSKTYLSKTLAQYTSKTCSNCGFTITSADYDRVLEKLKKTATGWMTTINGKELKVEGQITYYNRYKRQNVVKDLSVELDRLSEESVNNDISSWTKGRSGEALSLLKKRFSHRPVQEKFVCLNCGFETHA

SEQ ID NO: 55 - protein, 977 aa, Artificial Sequence
  CasX variant
MQEIKRINKIRRRLVKDSNTKKAGKTGPMKTLLVRVMTPDLRERLENLRKKPENIPQPISNNAANNLRMLLDDYTKMKEAILQVYWQEFKDDHVGLMCKFAQPAPKNIDQRKLIPVKDGNERLTSSGFACSQCCQPLYVYKLEQVNDKGKPHTNYFGRCNVSEHERLILLSPHKPEANDELVTYSLGKFGQRALDFYSIHVTKESTHPVKPLAQIAGNRYASGPVGKALSDACMGTIASFLSKYQDIIIEHQKVVKGNQKRLESLRELAGKENLEYPSVTLPPQPHTKEGVDAYNEVIARVRMWVNLNLWQKLKLSRDDAKPLLRLKGFPSFPLVERQANEVDWWDMVCNVKKLINEKKEDGKVFWQNLAGYKRQEALRPYLSSEEDRKKGKKFARYQFGDLLLHLEKKHGEDWGKVYDEAWERIDKKVEGLSKHIKLEEERRSEDAQSKAALTDWLRAKASFVIEGLKEADKDEFCRCELKLQKWYGDLRGKPFAIEAENSILDISGFSKQYNCAFIWQKDGVKKLNLYLIINYFKGGKLRFKKIKPEAFEANRFYTVINKKSGEIVPMEVNFNFDDPNLIILPLAFGKRQGREFIWNDLLSLETGSLKLANGRVIEKTLYNRRTRQDEPALFVALTFERREVLDSSNIKPMNLIGIDRGENIPAVIALTDPEGCPLSRFKDSLGNPTHILRIGESYKEKQRTIQAKKEVEQRRAGGYSRKYASKAKNLADDMVRNTARDLLYYAVTQDAMLIFENLSRGFGRQGKRTFMAERQYTRMEDWLTAKLAYEGLSKTYLSKTLAQYTSKTCSNCGFTITSADYDRVLEKLKKTATGWMTTINGKELKVEGQITYYNRYKRQNVVKDLSVELDRLSEESVNNDISSWTKGRSGEALSLLKKRFSHRPVQEKFVCLNCGFETHADEQAALNIARSWLFLRSQEYKKYQTNKTTGNTDKRAFVETWQSFYRKKLKEVWKPAV

SEQ ID NO: 56 - protein, 986 aa, Artificial Sequence
  CasX variant
MQEIKRINKIRRRLVKDSNTKKAGKTGPMKTLLVRVMTPDLRERLENLRKKPENIPQPISNTSRANLNKLLTDYTEMKKAILHVYWEEFQKDPVGLMSRVAQPAPKNIDQRKLIPVKDGNERLTSSGFACSQCCQPLYVYKLEQVNDKGKPHTNYFGRCNVSEHERLILLSPHKPEANDELVTYSLGKFGQRALDFYSIHVTRESNHPVKPLEQIGGNSCASGPVGKALSDACMGAVASFLTKYQDIILEHQKVIKKNEKRLANLKDIASANGLAFPKITLPPQPHTKEGIEAYNNVVAQIVIWVNLNLWQKLKIGRDEAKPLQRLKGFPSFPVVERRENEVDWWNTINEVKKLIDAKRDMGRVFWSGVTAEKRNTILEGYNYLPNENDHKKREGSLENPKKPAKRQFGDLLLYLEKKYAGDWGKVFDEAWERIDKKIAGLTSHIEREEARNAEDAQSKAVLTDWLRAKASFVLERLKEMDEKEFYACEIQLQKWYGDLRGNPFAVEAENSILDISGFSKQYNCAFIWQKDGVKKLNLYLIINYFKGGKLRFKKIKPEAFEANRFYTVINKKSGEIVPMEVNFNFDDPNLIILPLAFGKRQGREFIWNDLLSLETGSLKLANGRVIEKTLYNRRTRQDEPALFVALTFERREVLDSSNIKPMNLIGIDRGENIPAVIALTDPEGCPLSRFKDSLGNPTHILRIGESYKEKQRTIQAKKEVEQRRAGGYSRKYASKAKNLADDMVRNTARDLLYYAVTQDAMLIFENLSRGFGRQGKRTFMAERQYTRMEDWLTAKLAYEGLSKTYLSKTLAQYTSKTCSNCGFTITSADYDRVLEKLKKTATGWMTTINGKELKVEGQITYYNRYKRQNVVKDLSVELDRLSEESVNNDISSWTKGRSGEALSLLKKRFSHRPVQEKFVCLNCGFETHADEQAALNIARSWLFLRSQEYKKYQTNKTTGNTDKRAFVETWQSFYRKKLKEVWKPAV

SEQ ID NO: 57 - protein, 925 aa, Artificial Sequence
  CasX variant
MISNTSRANLNKLLTDYTEMKKAILHVYWEEFQKDPVGLMSRVAQPAPKNIDQRKLIPVKDGNERLTSSGFACSQCCQPLYVYKLEQVNDKGKPHTNYFGRCNVSEHERLILLSPHKPEANDELVTYSLGKFGQRALDFYSIHVTRESNHPVKPLEQIGGNSCASGPVGKALSDACMGAVASFLTKYQDIILEHQKVIKKNEKRLANLKDIASANGLAFPKITLPPQPHTKEGIEAYNNVVAQIVIWVNLNLWQKLKIGRDEAKPLQRLKGFPSFPLVERQANEVDWWDMVCNVKKLINEKKEDGKVFWQNLAGYKRQEALRPYLSSEEDRKKGKKFARYQFGDLLLHLEKKHGEDWGKVYDEAWERIDKKVEGLSKHIKLEEERRSEDAQSKAALTDWLRAKASFVIEGLKEADKDEFCRCELKLQKWYGDLRGKPFAIEAENRVVDISGFSIGSDGHSIQYRNLLAWKYLENGKREFYLLMNYGKKGRIRFTDGTDIKKSGKWQGLLYGGGKAKVIDLTFDPDDEQLIILPLAFGTRQGREFIWNDLLSLETGLIKLANGRVIEKTIYNKKIGRDEPALFVALTFERREVVDPSNIKPMNLIGIDRGENIPAVIALTDPEGCPLSRFKDSLGNPTHILRIGESYKEKQRTIQAKKEVEQRRAGGYSRKYASKAKNLADDMVRNTARDLLYYAVTQDAMLIFENLSRGFGRQGKRTFMAERQYTRMEDWLTAKLAYEGLSKTYLSKTLAQYTSKTCSNCGFTITSADYDRVLEKLKKTATGWMTTINGKELKVEGQITYYNRYKRQNVVKDLSVELDRLSEESVNNDISSWTKGRSGEALSLLKKRFSHRPVQEKFVCLNCGFETHADEQAALNIARSWLFLRSQEYKKYQTNKTTGNTDKRAFVETWQSFYRKKLKEVWKPAV

SEQ ID NO: 58 - protein, 975 aa, Artificial Sequence
  CasX variant
MEKRINKIRKKLSADNATKPVSRSGPMKTLLVRVMTDDLKKRLEKRRKKPEVMPQVISNTSRANLNKLLTDYTEMKKAILHVYWEEFQKDPVGLMSRVAQPAPKNIDQRKLIPVKDGNERLTSSGFACSQCCQPLYVYKLEQVNDKGKPHTNYFGRCNVSEHERLILLSPHKPEANDELVTYSLGKFGQRALDFYSIHVTRESNHPVKPLEQIGGNSCASGPVGKALSDACMGAVASFLTKYQDIILEHQKVIKKNEKRLANLKDIASANGLAFPKITLPPQPHTKEGIEAYNNVVAQIVIWVNLNLWQKLKIGRDEAKPLQRLKGFPSFPLVERQANEVDWWDMVCNVKKLINEKKEDGKVFWQNLAGYKRQEALRPYLSSEEDRKKGKKFARYQFGDLLLHLEKKHGEDWGKVYDEAWERIDKKVEGLSKHIKLEEERRSEDAQSKAALTDWLRAKASFVIEGLKEADKDEFCRCELKLQKWYGDLRGKPFAIEAENSILDISGFSKQYNCAFIWQKDGVKKLNLYLIINYFKGGKLRFKKIKPEAFEANRFYTVINKKSGEIVPMEVNFNFDDPNLIILPLAFGKRQGREFIWNDLLSLETGSLKLANGRVIEKTLYNRRTRQDEPALFVALTFERREVLDSSNIKPMNLIGIDRGENIPAVIALTDPEGCPLSRFKDSLGNPTHILRIGESYKEKQRTIQAKKEVEQRRAGGYSRKYASKAKNLADDMVRNTARDLLYYAVTQDAMLIFENLSRGFGRQGKRTFMAERQYTRMEDWLTAKLAYEGLSKTYLSKTLAQYTSKTCSNCGFTITSADYDRVLEKLKKTATGWMTTINGKELKVEGQITYYNRYKRQNVVKDLSVELDRLSEESVNNDISSWTKGRSGEALSLLKKRFSHRPVQEKFVCLNCGFETHADEQAALNIARSWLFLRSQEYKKYQTNKTTGNTDKRAFVETWQSFYRKKLKEVWKPAV

SEQ ID NO: 59 - protein, 982 aa, Artificial Sequence
  CasX variant
MQEIKRINKIRRRLVKDSNTKKAGKTGPMKTLLVRVMTPDLRERLENLRKKPENIPQPISNTSRANLNKLLTDYTEMKKAILHVYWEEFQKDPVGLMSRVAQPAPKNIDQRKLIPVKDGNERLTSSGFACSQCCQPLYVYKLEQVNDKGKPHTNYFGRCNVSEHERLILLSPHKPEANDELVTYSLGKFGQRALDFYSIHVTRESNHPVKPLEQIGGNSCASGPVGKALSDACMGAVASFLTKYQDIILEHQKVIKKNEKRLANLKDIASANGLAFPKITLPPQPHTKEGIEAYNNVVAQIVIWVNLNLWQKLKIGRDEAKPLQRLKGFPSFPLVERQANEVDWWDMVCNVKKLINEKKEDGKVFWQNLAGYKRQEALRPYLSSEEDRKKGKKFARYQFGDLLLHLEKKHGEDWGKVYDEAWERIDKKVEGLSKHIKLEEERRSEDAQSKAALTDWLRAKASFVIEGLKEADKDEFCRCELKLQKWYGDLRGKPFAIEAENRVVDISGFSIGSDGHSIQYRNLLAWKYLENGKREFYLLMNYGKKGRIRFTDGTDIKKSGKWQGLLYGGGKAKVIDLTFDPDDEQLIILPLAFGTRQGREFIWNDLLSLETGLIKLANGRVIEKTIYNKKIGRDEPALFVALTFERREVVDPSNIKPMNLIGIDRGENIPAVIALTDPEGCPLSRFKDSLGNPTHILRIGESYKEKQRTIQAKKEVEQRRAGGYSRKYASKAKNLADDMVRNTARDLLYYAVTQDAMLIFENLSRGFGRQGKRTFMAERQYTRMEDWLTAKLAYEGLSKTYLSKTLAQYTSKTCSNCGFTITSADYDRVLEKLKKTATGWMTTINGKELKVEGQITYYNRYKRQNVVKDLSVELDRLSEESVNNDISSWTKGRSGEALSLLKKRFSHRPVQEKFVCLNCGFETHADEQAALNIARSWLFLRSQEYKKYQTNKTTGNTDKRAFVETWQSFYRKKLKEVWKPAV

SEQ ID NO: 60 - protein, 977 aa, Artificial Sequence
  CasX variant
MQEIKRINKIRRRLVKDSNTKKAGKTGPMKTLLVRVMTPDLRERLENLRKKPENIPQPISNTSRANLNKLLTDYTEMKKAILHVYWEEFQKDPVGLMSRVAQPAPKNIDQRKLIPVKDGNERLTSSGFACSQCCQPLYVYKLEQVNDKGKPHTNYFGRCNVSEHERLILLSPHKPEANDELVTYSLGKFGQRALDFYSIHVTRESNHPVKPLEQIGGNSCASGPVGKALSDACMGAVASFLTKYQDIILEHQKVIKKNEKRLANLKDIASANGLAFPKITLPPQPHTKEGIEAYNNVVAQIVIWVNLNLWQKLKIGRDEAKPLQRLKGFPSFPLVERQANEVDWWDMVCNVKKLINEKKEDGKVFWQNLAGYKRQEALRPYLSSEEDRKKGKKFARYQFGDLLLHLEKKHGEDWGKVYDEAWERIDKKVEGLSKHIKLEEERRSEDAQSKAALTDWLRAKASFVIEGLKEADKDEFKRCELKLQKWYGDLRGKPFAIEAENSILDISGFSKQYNCAFIWQKDGVKKLNLYLIINYFKGGKLRFKKIKPEAFEANRFYTVINKKSGEIVPMEVNFNFDDPNLIILPLAFGKRQGREFIWNDLLSLETGSLKLANGRVIEKPLYNRRTRQDEPALFVALTFERREVLDSSNIKPMNLIGIDRGENIPAVIALTDPEGCPLSRFKDSLGNPTHILRIGESYKEKQRTIQAKKEVEQRRAGGYSRKYASKAKNLADDMVRNTARDLLYYAVTQDAMLIFENLSRGFGRQGKRTFMAERQYTRMEDWLTAKLAYEGLSKTYLSKTLAQYTSKTCSNCGFTITSADYDRVLEKLKKTATGWMTTINGKELKVEGQITYYNRYKRQNVVKDLSVELDRLSEESVNNDISSWTKGRSGEALSLLKKRFSHRPVQEKFVCLNCGFETHADEQAALNIARSWLFLRSQEYKKYQTNKTTGNTDKRAFVETWQSFYRKKLKEVWKPAV

SEQ ID NO: 61 - protein, 977 aa, Artificial Sequence
  CasX variant
MQEIKRINKIRRRLVKDSNTKKAGKTGPMKTLLVRVMTPDLRERLENLRKKPENIPQPISNTSRANLNKLLTDYTEMKKAILHVYWEEFQKDPVGLMSRVAQPAPKNIDQRKLIPVKDGNERLTSSGFACSQCCQPLYVYKLEQVNDKGKPHTNYFGRCNVSEHERLILLSPHKPEANDELVTYSLGKFGQRALDFYSIHVTRESNHPVKPLEQIGGNSCASGPVGKALSDACMGAVASFLTKYQDIILEHQKVIKKNEKRLANLKDIASANGLAFPKITLPPQPHTKEGIEAYNNVVAQIVIWVNLNLWQKLKIGRDEAKPLQRLKGFPSFPLVERQANEVDWWDMVCNVKKLINEKKEDGKVFWQNLAGYKRQEALLPYLSSEEDRKKGKKFARYQFGDLLLHLEKKHGEDWGKVYDEAWERIDKKVEGLSKHIKLEEERRSEDAQSKAALTDWLRAKASFVIEGLKEADKDEFCRCELKLQKWYGDLRGKPFAIEAENSILDISGFSKQYNCAFIWQKDGVKKLNLYLIINYFKGGKLRFKKIKPEAFEANRFYTVINKKSGEIVPMEVNFNFDDPNLIILPLAFGKRQGREFIWNDLLSLETGSLKLANGRVIEKTLYNRRTRQDEPALFVALTFERREVLDSSNIKPMNLIGIDRGENIPAVIALTDPEGCPLSRFKDSLGNPTHILRIGESYKEKQRTIQAAKEVEQRRAGGYSRKYASKAKNLADDMVRNTARDLLYYAVTQDAMLIFENLSRGFGRQGKRTFAAERQYTRMEDWLTAKLAYEGLPSKTYLSKTLAQYTSKTCSNCGFTITSADYDRVLEKLKKTATGWMTTINGKELKVEGQITYYNRYKRQNVVKDLSVELDRLSEESVNNDISSWTKGRSGEALSLLKKRFSHRPVQEKFVCLNCGFETHADEQAALNIARSWLFLRSQEYKKYQTNKTTGNTDKRAFVETWQSFYRKKLKEVWKPA

SEQ ID NO: 62 - protein, 977 aa, Artificial Sequence
  CasX variant
MQEIKRINKIRRRLVKDSNTKKAGKTGPMKTLLVRVMTPDLRERLENLRKKPENIPQPISNTSRANLNKLLTDYTEMKKAILHVYWEEFQKDPVGLMSRVAQPAPKNIDQRKLIPVKDGNERLTSSGFACSQCCQPLYVYKLEQVNDKGKPHTNYFGRCNVSEHERLILLSPHKPEANDELVTYSLGKFGQRALDFYSIHVTRESNHPVKPLEQIGGNSCASGPVGKALSDACMGAVASFLTKYQDIILEHQKVIKKNEKRLANLKDIASANGLAFPKITLPPQPHTKEGIEAYNNVVAQIVIWVNLNLWQKLKIGRDEAKPLQRLKGFPSFPLVERQANEVDWWDMVCNVKKLINEKKEDGKVFWQNLAGYKRQEALRPYLSSEEDRKKGKKFARYQFGDLLLHLEKKHGEDWGKVYDEAWERIDKKVEGLSKHIKLEEERRSEDAQSKAALTDWLRAKASFVIEGLKEADKDEFCRCELKLQKWYGDLRGKPFAIEAENSILDISGFSKQYNCAFIWQKDGVKKLNLYLIINYFKGGKLRFKKIKPEAFEANRFYTVINKKSGEIVPMEVNFNFDDPNLIILPLAFGKRQGREFIWNDLLSLETGSLKLANGRVIEKTLYNRRTRQDEPALFVALTFERREVLDSSNIKPMNLIGIDRGENIPAVIALTDPEGCPLSRFKDSLGNPTHILRIGESYKEKQRTIQAKKEVEQRRAGGYSRKYASKAKNLANDMVRNTARDLLYYAVTQDAMLIFENLSRGFGRQGKRTFMAERQYTRMEDWLTAKLAYEGLSKTYLSKTLAQYTSKTCSNCGFTITSADYDRVLEKLKKTATGWMTTINGKELKVEGQITYYNRYKRQNVVKDLSVELDRLSEESVNNDISSWTKGRSGEALSLLKKRFSHRPVQEKFVCLNCGFETHADEQAALNIARSWLFLRSQEYKKYQTNKTTGNTDKRAFVETWQSFYRKKLKEVWKPAV

SEQ ID NO: 63 - protein, 978 aa, Artificial Sequence
  CasX variant
MQEIKRINKIRRRLVKDSNTKKAGKTGPMKTLLVRVMTPDLRERLENLRKKPENIPQPISNTSRANLNKLLTDYTEMKKAILHVYWEEFQKDPVGLMSRVAQPAPKNIDQRKLIPVKDGNERLTSSGFACSQCCQPLYVYKLEQVNDKGKPHTNYFGRCNVSEHERLILLSPHKPEANDELVTYSLGKFGQRALDFYSIHVTRESNHPVKPLEQIGGNSCASGPVGKALSDACMGAVASFLTKYQDIILEHQKVIKKNEKRLANLKDIASANGLAFPKITLPPQPHTKEGIEAYNNVVAQIVIWVNLNLWQKLKIGRDEAKPLQRLKGFPSFPLVERQANEVDWWDMVCNVKKLINEKKEDGKVFWQNLAGYKRQEALLPYLSSEEDRKKGKKFARYQFGDLLLHLEKKHGEDWGKVYDEAWERIDKKVEGLSKHIKLEEERRSEDAQSKAALTDWLRAKASFVIEGLKEADKDEFCRCELKLQKWYGDLRGKPFAIEAENSILDISGFSKQYNCAFIWQKDGVKKLNLYLIINYFKGGKLRFKKIKPEAFEANRFYTVINKKSGEIVPMEVNFNFDDPNLIILPLAFGKRQGREFIWNDLLSLETGSLKLANGRVIEKTLYNRRTRQDEPALFVALTFERREVLDSSNIKPMNLIGIDRGENIPAVIALTDPEGCPLSRFKDSLGNPTHILRIGESYKEKQRTIQAAKEVEQRRAGGYSRKYASKAKNLADDMVRNTARDLLYYAVTQDAMLIFENLSRGFGRQGKRTFMAERQYTRMEDQLTAKLAYEGLPSKTYLSKTLAQYTSKTCSNCGFTITSADYDRVLEKLKKTATGWMTTINGKELKVEGQITYYNRYKRQNVVKDLSVELDRLSEESVNNDISSWTKGRSGEALSLLKKRFSHRPVQEKFVCLNCGFETHADEQAALNIARSWLFLRSQEYKKYQTNKTTGNTDKRAFVETWQSFYRKKLKEVWKPAV

SEQ ID NO: 64 - protein, 978 aa, Artificial Sequence
  CasX variant
MQEIKRINKIRRRLVKDSNTKKAGKTGPMKTLLVRVMTPDLRERLENLRKKPENIPQPISNTSRANLNKLLTDYTEMKKAILHVYWEEFQKDPVGLMSRVAQPAPKNIDQRKLIPVKDGNERLTSSGFACSQCCQPLYVYKLEQVNDKGKPHTNYFGRCNVSEHERLILLSPHKPEANDELVTYSLGKFGQRALDFYSIHVTRESNHPVKPLEQIGGNSCASGPVGKALSDACMGAVASFLTKYQDIILEHQKVIKKNEKRLANLKDIASANGLAFPKITLPPQPHTKEGIEAYNNVVAQIVIWVNLNLWQKLKIGRDEAKPLQRLKGFPSFPLVERQANEVDWWDMVCNVKKLINEKKEDGKVFWQNLAGYKRQEALLPYLSSEEDRKKGKKFARYQFGDLLLHLEKKHGEDWGKVYDEAWERIDKKVEGLSKHIKLEEERRSEDAQSKAALTDWLRAKASFVIEGLKEADKDEFCRCELKLQKWYGDLRGKPFAIEAENSILDISGFSKQYNCAFIWQKDGVKKLNLYLIINYFKGGKLRFKKIKPEAFEANRFYTVINKKSGEIVPMEVNFNFDDPNLIILPLAFGKRQGREFIWNDLLSLETGSLKLANGRVIEKTLYNRRTRQDEPALFVALTFERREVLDSSNIKPMNLIGIDRGENIPAVIALTDPEGCPLSRFKDSLGNPTHILRIGESYKEKQRTIQAAKEVEQRRAGGYSRKYASKAKNLADDMVRNTARDLLYYAVTQDAMLIFENLSRGFGRQGKRTFQAERQYTRMEDWLTAKLAYEGLPSKTYLSKTLAQYTSKTCSNCGFTITSADYDRVLEKLKKTATGWMTTINGKELKVEGQITYYNRYKRQNVVKDLSVELDRLSEESVNNDISSWTKGRSGEALSLLKKRFSHRPVQEKFVCLNCGFETHADEQAALNIARSWLFLRSQEYKKYQTNKTTGNTDKRAFVETWQSFYRKKLKEVWKPAV

SEQ ID NO: 65 - protein, 978 aa, Artificial Sequence
  CasX variant
MQEIKRINKIRRRLVKDSNTKKAGKTGPMKTLLVRVMTPDLRERLENLRKKPENIPQPISNTSRANLNKLLTDYTEMKKAILHVYWEEFQKDPVGLMSRVAQPAPKNIDQRKLIPVKDGNERLTSSGFACSQCCQPLYVYKLEQVNDKGKPHTNYFGRCNVSEHERLILLSPHKPEANDELVTYSLGKFGQRALDFYSIHVTRESNHPVKPLEQIGGNSCASGPVGKALSDACMGAVASFLTKYQDIILEHQKVIKKNEKRLANLKDIASANGLAFPKITLPPQPHTKEGIEAYNNVVAQIVIWVNLNLWQKLKIGRDEAKPLQRLKGFPSFPLVERQANEVDWWDMVCNVKKLINEKKEDGKVFWQNLAGYKRQEALLPYLSSEEDRKKGKKFARYQFGDLLLHLEKKHGEDWGKVYDEAWERIDKKVEGLSKHIKLEEERRSEDAQSKAALTDWLIAKASFVIEGLKEADKDEFCRCELKLQKWYGDLRGKPFAIEAENSILDISGFSKQYNCAFIWQKDGVKKLNLYLIINYFKGGKLRFKKIKPEAFEANRFYTVINKKSGEIVPMEVNFNFDDPNLIILPLAFGKRQGREFIWNDLLSLETGSLKLANGRVIEKTLYNRRTRQDEPALFVALTFERREVLDSSNIKPMNLIGIDRGENIPAVIALTDPEGCPLSRFKDSLGNPTHILRIGESYKEKQRTIQAAKEVEQRRAGGYSRKYASKAKNLADDMVRNTVRDLLYYAVTQDAMLIFENLSRGFGRQGKRTFMAERQYTRMEDWLTAKLAYEGLPSKTYLSKTLAQYTSKTCSNCGFTITSADYDRVLEKLKKTATGWMTTINGKELKVEGQITYYNRYKRQNVVKDLSVELDRLSEESVNNDISSWTKGRSGEALSLLKKRFSHRPVQEKFVCLNCGFETHADEQAALNIARSWLFLRSQEYKKYQTNKTTGNTDKRAFVETWQSFYRKKLKEVWKPAV

SEQ ID NO: 66 - protein, 977 aa, Artificial Sequence
  CasX variant
MQEIKRINKIRRRLVKDSNTKKAGKTGPMKTLLVRVMTPDLRERLENLRKKPENIPQPISNTSRANLNKLLTDYTEMKKAILHVYWEEFQKDPVGLMSRVAQPAPKNIDQRKLIPVKDGNERLTSSGFACSQCCQPLYVYKLEQVNDKGKPHTNYFGRCNVSEHERLILLSPHKPEANDELVTYSLGKFGQRALDFYSIHVTRESNHPVKPLEQIGGNSCASGPVGKALSDACMGAVASFLTKYQDIILEHQKVIKKNEKRLANLKDIASANGLAFPKITLPPQPHTKEGIEAYNNVVAQIVIWVNLNLWQKLKIGRDEAKPLQRLKGFPSFPLVERQANEVDWWDMVCNVKKLINEKKEDGKVFWQNLAGYKRQEALRPYLSSEEDRKKGKKFARYQFGDLLLHLEKKHGEDWGKVYDEAWERIDKKVEGLSKHIKLEEERRSEDAQSKAALTDWLRAKASFVIEGLKEADKDEFCRCELKLQKWYGDLRGKPFAIEAENSILDISGFSKQYNCAFIWQKDGVKKLNLYLIINYFKGGKLRFKKIKPEAFEANRFYTVINKKSGEIVPMEVNFNFDDPNLIILPLAFGKRQGREFIWNDLLSLETGSLKLANGRVIEKTLYNRRTRQDEPALFVALTFERREVLDSSNIKPMNLIGIDRGENIPAVIALTDPEGCPLSRFKDSLGNPTHILRIGESYKEKQRTIQAKKEVEQRRAGGYSRKYASKAKNLADDMVRNTARDLLYYAVTQDAMLIFENLSRGFGRQGKRTFNAERQYTRMEDWLTAKLAYEGLSKTYLSKTLAQYTSKTCSNCGFTITSADYDRVLEKLKKTATGWMTTINGKELKVEGQITYYNRYKRQNVVKDLSVELDRLSEESVNNDISSWTKGRSGEALSLLKKRFSHRPVQEKFVCLNCGFETHADEQAALNIARSWLFLRSQEYKKYQTNKTTGNTDKRAFVETWQSFYRKKLKEVWKPAV

SEQ ID NO: 67 - protein, 977 aa, Artificial Sequence
  CasX variant
MQEIKRINKIRRRLVKDSNTKKAGKTGPMKTLLVRVMTPDLRERLENLRKKPENIPQPISNTSRANLNKLLTDYTEMKKAILHVYWEEFQKDPVGLMSRVAQPAPKNIDQRKLIPVKDGNERLTSSGFACSQCCQPLYVYKLEQVNDKGKPHTNYFGRCNVSEHERLILLSPHKPEANDELVTYSLGKFGQRALDFYSIHVTRESNHPVKPLEQIGGNSCASGPVGKALSDACMGAVASFLTKYQDIILEHQKVIKKNEKRLANLKDIASANGLAFPKITLPPQPHTKEGIEAYNNVVAQIVIWVNLNLWQKLKIGRDEAKPLQRLKGFPSFPLVERQANEVDWWDMVCNVKKLINEKKEDGKVFWQNLAGYKRQEALRPYLSSEEDRKKGKKFARYQFGDLLLHLEKKHGEDWGKVYDEAWERIDKKVEGLSKHIKLEEERRSEDAQSKAALTDWLRAKASFVIEGLKEADKDEFCRCELKLQKWYGDLRGKPFAIEAENSILDISGFSKQYNCAFIWQKDGVKKLNLYLIINYFKGGKLRFKKIKPEAFEANRFYTVINKKSGEIVPMEVNFNFDDPNLIILPLAFGKRQGREFIWNDLLSLETGSLKLANGRVIEKTLYNRRTRQDEPALFVALTFERREVLDSSNIKPMNLIGIDRGENIPAVIALTDPEGCPLSRFKDSLGNPTHILRIGESYKEKQRTIQAKKEVEQRRAGGYSRKYASKAKNLADDMVRNTTRDLLYYAVTQDAMLIFENLSRGFGRQGKRTFMAERQYTRMEDWLTAKLAYEGLSKTYLSKTLAQYTSKTCSNCGFTITSADYDRVLEKLKKTATGWMTTINGKELKVEGQITYYNRYKRQNVVKDLSVELDRLSEESVNNDISSWTKGRSGEALSLLKKRFSHRPVQEKFVCLNCGFETHADEQAALNIARSWLFLRSQEYKKYQTNKTTGNTDKRAFVETWQSFYRKKLKEVWKPAV

SEQ ID NO: 68 - protein, 977 aa, Artificial Sequence
  CasX variant
MQEIKRINKIRRRLVKDSNTKKAGKTGPMKTLLVRVMTPDLRERLENLRKKPENIPQPISNTSRANLNKLLTDYTEMKKAILHVYWEEFQKDPVGLMSRVAQPAPKNIDQRKLIPVKDGNERLTSSGFACSQCCQPLYVYKLEQVNDKGKPHTNYFGRCNVSEHERLILLSPHKPEANDELVTYSLGKFGQRALDFYSIHVTRESNHPVKPLEQIGGNSCASGPVGKALSDACMGAVASFLTKYQDIILEHQKVIKKNEKRLANLKDIASANGLAFPKITLPPQPHTKEGIEAYNNVVAQIVIWVNLNLWQKLKIGRDEAKPLQRLKGFPSFPLVERQANEVDWWDMVCNVKKLINEKKEDGKVFWQNLAGYKRQEALRPYLSSEEDRKKGKKFARYQFGDLLLHLEKKHGEDWGKVYDEAWERIDKKVEGLSKHIKLEEERRSEDAQSKAALTDWLRAKASFVIEGLKEADKDEFKRCELKLQKWYGSLRGKPFAIEAENSILDISGFSKQYNCAFIWQKDGVKKLNLYLIINYFKGGKLRFKKIKPEAFEANRFYTVINKKSGEIVPMEVNFNFDDPNLIILPLAFGKRQGREFIWNDLLSLETGSLKLANGRVIEKTLYNRRTRQDEPALFVALTFERREVLDSSNIKPMNLIGIDRGENIPAVIALTDPEGCPLSRFKDSLGNPTHILRIGESYKEKQRTIQAKKEVEQRRAGGYSRKYASKAKNLADDMVRNTARDLLYYAVTQDAMLIFENLSRGFGRQGKRTFMAERQYTRMEDWLTAKLAYEGLSKTYLSKTLAQYTSKTCSNCGFTITSADYDRVLEKLKKTATGWMTTINGKELKVEGQITYYNRYKRQNVVKDLSVELDRLSEESVNNDISSWTKGRSGEALSLLKKRFSHRPVQEKFVCLNCGFETHADEQAALNIARSWLFLRSQEYKKYQTNKTTGNTDKRAFVETWQSFYRKKLKEVWKPAV

SEQ ID NO: 69 - protein, 977 aa, Artificial Sequence
  CasX variant
MQEIKRINKIRRRLVKDSNTKKAGKTGPMKTLLVRVMTPDLRERLENLRKKPENIPQPISNTSRANLNKLLTDYTEMKKAILHVYWEEFQKDPVGLMSRVAQPAPKNIDQRKLIPVKDGNERLTSSGFACSQCCQPLYVYKLEQVNDKGKPHTNYFGRCNVSEHERLILLSPHKPEANDELVTYSLGKFGQRALDFYSIHVTRESNHPVKPLEQIGGNSCASGPVGKALSDACMGAVASFLTKYQDIILEHQKVIKKNEKRLANLKDIASANGLAFPKITLPPQPHTKEGIEAYNNVVAQIVIWVNLNLWQKLKIGRDEAKPLQRLKGFPSFPLVERQANEVDWWDMVCNVKKLINEKKEDGKVFWQNLAGYKRQEALRPYLSSEEDRKKGKKFARYQFGDLLLHLEKKHGEDWGKVYDEAWERIDKKVEGLSKHIKLEEERRSEDAQSKAALTDWLRAKASFVIEGLKEADKDEFKRCELKLQKWYGDLRGKPFAIEAENSILDISGFSKQYNCAFIWQKDGVKKLNLYLIINYFKGGKLRFKKIKPEAFEANRFYTVINKKSGEIVPMEVNFNFDDPNLIILPLAFGKRQGREFIWNDLLSLETGSLKLANGRVIEKTLYNRRTRQDEPALFVALTFERREVLDSSNIKPMNLIGIDRGENIPAVIALTDPEGCPLSRFKDSLGNPTHILRIGESYKEKQRTIQAKKEVEQRRAGGYSRKYASKAKNLANDMVRNTARDLLYYAVTQDAMLIFENLSRGFGRQGKRTFMAERQYTRMEDWLTAKLAYEGLSKTYLSKTLAQYTSKTCSNCGFTITSADYDRVLEKLKKTATGWMTTINGKELKVEGQITYYNRYKRQNVVKDLSVELDRLSEESVNNDISSWTKGRSGEALSLLKKRFSHRPVQEKFVCLNCGFETHADEQAALNIARSWLFLRSQEYKKYQTNKTTGNTDKRAFVETWQSFYRKKLKEVWKPAV

SEQ ID NO: 70 - protein, 978 aa, Artificial Sequence
  CasX variant
MQEIKRINKIRRRLVKDSNTKKAGKTGPMKTLLVRVMTPDLRERLENLRKKPENIPQPISNTSRANLNKLLTDYTEMKKAILHVYWEEFQKDPVGLMSRVAQPAPKNIDQRKLIPVKDGNERLTSSGFACSQCCQPLYVYKLEQVNDKGKPHTNYFGRCNVSEHERLILLSPHKPEANDELVTYSLGKFGQRALDFYSIHVTRESNHPVKPLEQIGGNSCASGPVGKALSDACMGAVASFLTKYQDIILEHQKVIKKNEKRLANLKDIASANGLAFPKITLPPQPHTKEGIEAYNNVVAQIVIWVNLNLWQKLKIGRDEAKPLQRLKGFPSFPLVERQANEVDWWDMVCNVKKLINEKKEDGKVFWQNLAGYKRQEALLPYLSSEEDRKKGKKFARYQFGDLLLHLEKKHGEDWGKVYDEAWERIDKKVEGLSKHIKLEEERRSEDAQSKAALTDWLRAKASFVIEGLKEADKDEFCRCELKLQKWYGDLRGKPFAIEAENSILDISGFSKQYNCAFIWQKDGVKKLNLYLIINYFKGGKLRFKKIKPEAFEANRFYTVINKKSGEIVPMEVNFNFDDPNLIILPLAFGKRQGREFIWNDLLSLETGSLKLANGRVIEKTLYNRRTRQDEPALFVALTFERREVLDSSNIKPMNLIGIDRGENIPAVIALTDPEGCPLSRFKDSLGNPTHILRIGESYKEKQRTIQAAKEKEQRRAGGYSRKYASKAKNLADDMVRNTARDLLYYAVTQDAMLIFENLSRGFGRQGKRTFMAERQYTRMEDWLTAKLAYEGLPSKTYLSKTLAQYTSKTCSNCGFTITSADYDRVLEKLKKTATGWMTTINGKELKVEGQITYYNRYKRQNVVKDLSVELDRLSEESVNNDISSWTKGRSGEALSLLKKRFSHRPVQEKFVCLNCGFETHADEQAALNIARSWLFLRSQEYKKYQTNKTTGNTDKRAFVETWQSFYRKKLKEVWKPAV

SEQ ID NO: 71 - protein, 977 aa, Artificial Sequence
  CasX variant
MQEIKRINKIRRRLVKDSNTKKAGKTGPMKTLLVRVMTPDLRERLENLRKKPENIPQPISNTSRANLNKLLTDYTEMKKAILHVYWEEFQKDPVGLMSRVAQPAPKNIDQRKLIPVKDGNERLTSSGFACSQCCQPLYVYKLEQVNDKGKPHTNYFGRCNVSEHERLILLSPHKPEANDELVTYSLGKFGQRALDFYSIHVTRESNHPVKPLEQIGGNSCASGPVGKALSDACMGAVASFLTKYQDIILEHQKVIKKNEKRLANLKDIASANGLAFPKITLPPQPHTKEGIEAYNNVVAQIVIWVNLNLWQKLKIGRDEAKPLQRLKGFPSFPLVERQANEVDWWDMVCNVKKLINEKKEDGKVFWQNLAGYKRQEALRPYLSSEEDRKKGKKFARYQFGDLLLHLEKKHGEDWGKVYDEAWERIDKKVEGLSKHIKLEEERRSEDAQSKAALTDWLRAKASFVIEGLKEADKDEFKRCELKLQKWYGDLRGKPFAIEAENSILDISGFSKQYNCAFIWQKDGVKKLNLYLIINYFKGGKLRFKKIKPEAFEANRFYTVINKKSGEIVPMEVNFNFDDPNLIILPLAFGKRQGREFIWNDLLSLETGSLKLANGRVIEKTLYNRRTRQDEPALFVALTFERREVLDSSNIKPMNLIGIDRGENIPAVIALTDPEGCPLSRFKDSLGNPTHILRIGESYKEKQRTIQAKKEVEQRRAGGYSRKYASKAKNLADDMVRNTARDLLYYAVTQDAMLIFENLSRGFGRQGKRTFMAERQYTRMEDWLTAKLAYEGLSKTLLSKTLAQYTSKTCSNCGFTITSADYDRVLEKLKKTATGWMTTINGKELKVEGQITYYNRYKRQNVVKDLSVELDRLSEESVNNDISSWTKGRSGEALSLLKKRFSHRPVQEKFVCLNCGFETHADEQAALNIARSWLFLRSQEYKKYQTNKTTGNTDKRAFVETWQSFYRKKLKEVWKPAV

SEQ ID NO: 72 - protein, 977 aa, Artificial Sequence
  CasX variant
MQEIKRINKIRRRLVKDSNTKKAGKTGPMKTLLVRVMTPDLRERLENLRKKPENIPQPISNTSRANLNKLLTDYTEMKKAILHVYWEEFQKDPVGLMSRVAQPAPKNIDQRKLIPVKDGNERLTSSGFACSQCCQPLYVYKLEQVNDKGKPHTNYFGRCNVSEHERLILLSPHKPEANDELVTYSLGKFGQRALDFYSIHVTRESNHPVKPLEQIGGNSCASGPVGKALSDACMGAVASFLTKYQDIILEHQKVIKKNEKRLANLKDIASANGLAFPKITLPPQPHTKEGIEAYNNVVAQIVIWVNLNLWQKLKIGRDEAKPLQRLKGFPSFPLVERQANEVDWWDMVCNVKKLINEKKEDGKVFWQNLAGYKRQEALRPYLSSEEDRKKGKKFARYQFGDLLLHLEKKHGEDWGKVYDEAWERIDKKVEGLSKHIKLEEERRSEDAQSKAALTDWLRAKASFVIEGLKEADKDEFCRCELKLQKWYGDLRGKPFAIEAENSILDISGFSKQYNCAFIWQKDGVKKLNLYLIINYFKGGKLRFKKIKPEAFEANRFYTVINKKSGEIVPMEVNFNFDDPNLIILPLAFGKRQGREFIWNDLLSLETGSLKLANGRVIEKTLYNRRTRQDEPALFVALTFERREVLDSSNIKPMNLIGIDRGENIPAVIALTDPEGCPLSRFKDSLGNPTHILRIGESYKEKQRTIQAKKEVEQRRAGGYSRKYASKAKNLADDMVRNTARDLLYYAVTQDAMLIFENLSRGFGRQGKRTFMAERQYTRMEDWLTAKLAYEGLSKTYLSKTLAQYTSKTCSNCGFTITSADYDRVLEKLKKTATGWMTTINGKELKVEGQITYYNRYKRQNVVKDLSVELDRLSEESVNNDISSWTKGRSGEALSLLKKRFSHRPVQEKFVCLNCGFETHADEQAALNIARSWLFLRSQEYKKYQTNKTTGNTDKRAFVETWQSFYRKKLKEVWKPAV

SEQ ID NO: 73 - protein, 977 aa, Artificial Sequence
  CasX variant
MQEIKRINKIRRRLVKDSNTKKAGKTGPMKTLLVRVMTPDLRERLENLRKKPENIPQPISNTSRANLNKLLTDYTEMKKAILHVYWEEFQKDPVGLMSRVAQPAPKNIDQRKLIPVKDGNERLTSSGFACSQCCQPLYVYKLEQVNDKGKPHTNYFGRCNVSEHERLILLSPHKPEANDELVTYSLGKFGQRALDFYSIHVTRESNHPVKPLEQIGGNSCASGPVGKALSDACMGAVASFLTKYQDIILEHQKVIKKNEKRLANLKDIASANGLAFPKITLPPQPHTKEGIEAYNNVVAQIVIWVNLNLWQKLKIGRDEAKPLQRLKGFPSFPLVERQANEVDWWDMVCNVKKLINEKKEDGKVFWQNLAGYKRQEALRPYLSSEEDRKKGKKFARYQFGDLLLHLEKKHGEDWGKVYDEAWERIDKKVEGLSKHIKLEEERRSEDAQSKAALTDWLRAKASFVIEGLKEADKDEFKRCELKLQKWYGDLRGKPFAIEAENSILDISGFSKQYNCAFIWQKDGVKKLNLYLIINYFKGGKLRFKKIKPEAFEANRFYTVINKKSGEIVPMEVNFNFDDPNLIILPLAFGKRQGREFIWNDLLSLETGSLKLANGRVIEKTLYNRRTRQDEPALFVALTFERREVLDSSNIKPMNLIGIDRGENIPAVIALTDPEGCPLSRFKDSLGNPTHILRIGESYKEKQRTIQAKKEVEQRRAGGYSRKYASKAKNLADDMVRNTARDLLYYAVTQDAMLIFENLSRGFGRQGKRTFNAERQYTRMEDWLTAKLAYEGLSKTYLSKTLAQYTSKTCSNCGFTITSADYDRVLEKLKKTATGWMTTINGKELKVEGQITYYNRYKRQNVVKDLSVELDRLSEESVNNDISSWTKGRSGEALSLLKKRFSHRPVQEKFVCLNCGFETHADEQAALNIARSWLFLRSQEYKKYQTNKTTGNTDKRAFVETWQSFYRKKLKEVWKPAV

SEQ ID NO: 74 - protein, 977 aa, Artificial Sequence
  CasX variant
MQEIKRINKIRRRLVKDSNTKKAGKTGPMKTLLVRVMTPDLRERLENLRKKPENIPQPISNTSRANLNKLLTDYTEMKKAILHVYWEEFQKDPVGLMSRVAQPAPKNIDQRKLIPVKDGNERLTSSGFACSQCCQPLYVYKLEQVNDKGKPHTNYFGRCNVSEHERLILLSPHKPEANDELVTYSLGKFGQRALDFYSIHVTRESNHPVKPLEQIGGNSCASGPVGKALSDACMGAVASFLTKYQDIILEHQKVIKKNEKRLANLKDIASANGLAFPKITLPPQPHTKEGIEAYNNVVAQIVIWVNLNLWQKLKIGRDEAKPLQRLKGFPSFPLVERQANEVDWWDMVCNVKKLINEKKEDGKVFWQNLAGYKRQEALLPYLSSESDRKKGKKFARYQFGDLLLHLEKKHGEDWGKVYDEAWERIDKKVEGLSKHIKLEEERRSEDAQSKAALTDWLRAKASFVIEGLKEADKDEFCRCELKLQKWYGDLRGKPFAIEAENSILDISGFSKQYNCAFIWQKDGVKKLNLYLIINYFKGGKLRFKKIKPEAFEANRFYTVINKKSGEIVPMEVNFNFDDPNLIILPLAFGKRQGREFIWNDLLSLETGSLKLANGRVIEKTLYNRRTRQDEPALFVALTFERREVLDSSNIKPMNLIGIDRGENIPAVIALTDPEGCPLSRFKDSLGNPTHILRIGESYKEKQRTIQAKKEVEQRRAGGYSRKYASKAKNLADDMVRNTARDLLYYAVTQDAMLIFENLSRGFGRQGKRTFMAERQYTRMEDWLTAKLAYEGLSKTYLSKTLAQYTSKTCSNCGFTITSADYDRVLEKLKKTATGWMTTINGKELKVEGQITYYNRYKRQNVVKDLSVELDRLSEESVNNDISSWTKGRSGEALSLLKKRFSHRPVQEKFVCLNCGFETHADEQAALNIARSWLFLRSQEYKKYQTNKTTGNTDKRAFVETWQSFYRKKLKEVWKPAV

SEQ ID NO: 75 - protein, 977 aa, Artificial Sequence
  CasX variant
MQEIKRINKIRRRLVKDSNTKKAGKTGPMKTLLVRVMTPDLRERLENLRKKPENIPQPISNTSRANLNKLLTDYTEMKKAILHVYWEEFQKDPVGLMSRVAQPAPKNIDQRKLIPVKDGNERLTSSGFACSQCCQPLYVYKLEQVNDKGKPHTNYFGRCNVSEHERLILLSPHKPEANDELVTYSLGKFGQRALDFYSIHVTRESNHPVKPLEQIGGNSCASGPVGKALSDACMGAVASFLTKYQDIILEHQKVIKKNEKRLANLKDIASANGLAFPKITLPPQPHTKEGIEAYNNVVAQIVIWVNLNLWQKLKIGRDEAKPLQRLKGFPSFPLVERQANEVDWWDMVCNVKKLINEKKEDGKVFWQNLAGYKRQEALRPYLSSEEDRKKGKKFARYQFGDLLLHLEKKHGEDWGKVYDEAWERIDKKVEGLSKHIKLEEERRSEDAQSKAALTDWLRAKASFVIEGLKEADKDEFKRCELKLQKWYGDLRGKPFAIEAENSILDISGFSKQYNCAFIWQKDGVKKLNLYLIINYFKGGKLRFKKIKPEAFEANRFYTVINKKSGEIVPMEVNFNFDDPNLIILPLAFGKRQGREFIWNDLLSLETGSLKLANGRVIEKTLYNRRTRQDEPALFVALTFERREVLDSSNIKPMNLIGIDRGENIPAVIALTDPEGCPLSRFKDSLGNPTHILRIGESYKEKQRTIQAKKEVEQRRAGGYSRKYASKAKNLADDMVRNTARDLLYYAVTQDAMLIFENLSRGFGRQGKRTFMAERQYTRMEDWLTAKLAYEGLSKTYLSKTLAQYTSKTCSNCGFTITSADYDRVLEKLKKTATGWMTTINGKELKVEGQITYYNRYKRQNVVKDLSVELDRLSEESVNNDISSWTKGRSGEALSLLKKRFSHRPVQEKFVCLNCGFETHADEQAALNIARSWLFLRSQEYKKYQTNKTTGNTDKRAFVETWQSFYRKKLKEVWKPAV

SEQ ID NO: 76 - protein, 978 aa, Artificial Sequence
  CasX variant
MQEIKRINKIRRRLVKDSNTKKAGKTGPMKTLLVRVMTPDLRERLENLRKKPENIPQPISNTSRANLNKLLTDYTEMKKAILHVYWEEFQKDPVGLMSRVAQPAPKNIDQRKLIPVKDGNERLTSSGFACSQCCQPLYVYKLEQVNDKGKPHTNYFGRCNVSEHERLILLSPHKPEANDELVTYSLGKFGQRALDFYSIHVTRESNHPVKPLEQIGGNSCASGPVGKALSDACMGAVASFLTKYQDIILEHQKVIKKNEKRLANLKDIASANGLAFPKITLPPQPHTKEGIEAYNNVVAQIVIWVNLNLWQKLKIGRDEAKPLQRLKGFPSFPLVERQANEVDWWDMVCNVKKLINEKKEDGKVFWQNLAGYKRQEALLPYLSSEEDRKKGKKFARYQFGDLLLHLEKKHGEDWGKVYDEAWERIDKKVEGLSKHIKLEEERRSEDAQSKAALTDWLRAKASFVIEGLKEADKDEFCRCELKLQKWYGDLRGKPFAIEAENSILDISGFSKQYNCAFIWQKDGVKKLNLYLIINYFKGGKLRFKKIKPEAFEANRFYTVINKKSGEIVPMEVNFNFDDPNLIILPLAFGKRQGREFIWNDLLSLETGSLKLANGRVIEKTLYNRRTRQDEPALFVALTFERREVLDSSNIKPMNLIGIDRGENIPAVIALTDPEGCPLSRFKDSLGNPTHILRIGESYKEKQRTIQAAKEVEQRRAGGYSRKYASKAKNLADDMVRNTARDLLYYAVTQDAMLIFENLSRGFGRQGKRTFMAERQYTRMEDWLTAKLAYEGDPSKTYLSKTLAQYTSKTCSNCGFTITSADYDRVLEKLKKTATGWMTTINGKELKVEGQITYYNRYKRQNVVKDLSVELDRLSEESVNNDISSWTKGRSGEALSLLKKRFSHRPVQEKFVCLNCGFETHADEQAALNIARSWLFLRSQEYKKYQTNKTTGNTDKRAFVETWQSFYRKKLKEVWKPAV

SEQ ID NO: 77 - protein, 978 aa, Artificial Sequence
  CasX variant
MQEIKRINKIRRRLVKDSNTKKAGKTGPMKTLLVRVMTPDLRERLENLRKKPENIPQPISNTSRANLNKLLTDYTEMKKAILHVYWEEFQKDPVGLMSRVAQPAPKNIDQRKLIPVKDGNERLTSSGFACSQCCQPLYVYKLEQVNDKGKPHTNYFGRCNVSEHERLILLSPHKPEANDELVTYSLGKFGQRALDFYSIHVTRESNHPVKPLEQIGGNSCASGPVGKALSDACMGAVASFLTKYQDIILEHQKVIKKNEKRLANLKDIASANGLAFPKITLPPQPHTKEGIEAYNNVVAQIVIWVNLNLWQKLKIGRDEAKPLQRLKGFPSFPLVERQANEVDWWDMVCNVKKLINEKKEDGKVFWQNLAGYKRQEALLPYLSSEEDRKKGKKFARYQFGDLLLHLEKKHGEDWGKVYDEAWERIDKKVEGLSKHIKLEEERRSEDAQSKAALTDWLRAKASFVIEGLKEADKDEFCRCELKLQKWYGDLRGKPFAIEAENSILDISGFSKQYNCAFIWQKDGVKKLNLYLIINYFKGGKLRFKKIKPEAFEANRFYTVINKKSGEIVPMEVNFNFDDPNLIILPLAFGKRQGREFIWNDLLSLETGSLKLANGRVIEKTLYNRRTRQDEPALFVALTFERREVLDSSNIKPMNLIGIDRGENIPAVIALTDPEGCPLSRFKDSLGNPTHILRIGESYKEKQRTIQAAKEVEQRRAGGYSRKYASKAKNLADDMVRNTARDLLYYAVTQDAMLIFENLSRGFGRQGKRTFMAERQYTRMEDWLTAKLAYEFLPSKTYLSKTLAQYTSKTCSNCGFTITSADYDRVLEKLKKTATGWMTTINGKELKVEGQITYYNRYKRQNVVKDLSVELDRLSEESVNNDISSWTKGRSGEALSLLKKRFSHRPVQEKFVCLNCGFETHADEQAALNIARSWLFLRSQEYKKYQTNKTTGNTDKRAFVETWQSFYRKKLKEVWKPAV

SEQ ID NO: 78 - protein, 977 aa, Artificial Sequence
  CasX variant
MQEIKRINKIRRRLVKDSNTKKAGKTGPMKTLLVRVMTPDLRERLENLRKKPENIPQPISNTSRANLNKLLTDYTEMKKAILHVYWEEFQKDPVGLMSRVAQPAPKNIDQRKLIPVKDGNERLTSSGFACSQCCQPLYVYKLEQVNDKGKPHTNYFGRCNVSEHERLILLSPHKPEANDELVTYSLGKFGQRALDFYSIHVTRESNHPVKPLEQIGGNSCASGPVGKALSDACMGAVASFLTKYQDIILEHQKVIKKNEKRLANLKDIASANGLAFPKITLPPQPHTKEGIEAYNNVVAQIVIWVNLNLWQKLKIGRDEAKPLQRLKGFPSFPLVERQANEVDWWDMVCNVKKLINEKKEDGKVFWQNLAGYKRQEALLPYLSSEEDRKKGKKFARYQFGDLLLHLEKKHGEDWGKVYDEAWERIDKKVEGLSKHIKLEEERRSEDAQSKAALTDWLRAKASFVIEGLKEADKDEFCRCELKLQKWYGDLRGKPFAIEAENSILDISGFSKQYNCAFIWQKDGVKKLNLYLIINYFKGGKLRFKKIKPEAFEANRFYTVINKKSGEIVPMEVNFNFDDPNLIILPLAFGKRQGREFIWNDLLSLETGSLKLANGRVIEKTLYNRRTRQDEPALFVALTFERREVLDSSNIKPMNLIGIDRGENIPAVIALTDPEGCPLSRFKDSLGNPTHILRIGESYKEKQRTIQAKKEVEQRRAGGYSRKYASKAKNLADDMVRNTVRDLLYYAVTQDAMLIFENLSRGFGRQGKRTFMAERQYTRMEDWLTAKLAYEGLSKTYLSKTLAQYTSKTCSNCGFTITSADYDRVLEKLKKTATGWMTTINGKELKVEGQITYYNRYKRQNVVKDLSVELDRLSEESVNNDISSWTKGRSGEALSLLKKRFSHRPVQEKFVCLNCGFETHADEQAALNIARSWLFLRSQEYKKYQTNKTTGNTDKRAFVETWQSFYRKKLKEVWKPAV

SEQ ID NO: 79 - protein, 977 aa, Artificial Sequence
  CasX variant
MQEIKRINKIRRRLVKDSNTKKAGKTGPMKTLLVRVMTPDLRERLENLRKKPENIPQPISNTSRANLNKLLTDYTEMKKAILHVYWEEFQKDPVGLMSRVAQPAPKNIDQRKLIPVKDGNERLTSSGFACSQCCQPLYVYKLEQVNDKGKPHTNYFGRCNVSEHERLILLSPHKPEANDELVTYSLGKFGQRALDFYSIHVTRESNHPVKPLEQIGGNSCASGPVGKALSDACMGAVASFLTKYQDIILEHQKVIKKNEKRLANLKDIASANGLAFPKITLPPQPHTKEGIEAYNNVVAQIVIWVNLNLWQKLKIGRDEAKPLQRLKGFPSFPLVERQANEVDWWDMVCNVKKLINEKKEDGKVFWQNLAGYKRQEALRPYLSSEEDRKKGKKFARYQFGDLLLHLEKKHGEDWGKVYDEAWERIDKKVEGLSKHIKLEEERRSEDAQSKAALTDWLRAKASFVIEGLKEADKDEFCRCELKLQKWYGDLRGKPFAIEAENSILDISGFSKQYNCAFIWQKDGVKKLNLYLIINYFKGGKLRFKKIKPEAFEANRFYTVINKKSGEIVPMEVNFNFDDPNLIILPLAFGKRQGREFIWNDLLSLETGSLKLANGRVIEKTLYNRRTRQDEPALFVALTFERREVLDSSNIKPMNLIGIDRGENIPAVIALTDPEGCPLSRFKDSLGNPTHILRIGESYKEKQRTIQAKKEVEQRRAGGYSRKYASKAKNLADDMVRNTVRDLLYYAVTQDAMLIFENLSRGFGRQGKRTFMAERQYTRMEDWLTAKLAYEGLSKTYLSKTLAQYTSKTCSNCGFTITSADYDRVLEKLKKTATGWMTTINGKELKVEGQITYYNRYKRQNVVKDLSVELDRLSEESVNNDISSWTKGRSGEALSLLKKRFSHRPVQEKFVCLNCGFETHADEQAALNIARSWLFLRSQEYKKYQTNKTTGNTDKRAFVETWQSFYRKKLKEVWKPAV

SEQ ID NO: 80 - protein, 977 aa, Artificial Sequence
  CasX variant
MQEIKRINKIRRRLVKDSNTKKAGKTGPMKTLLVRVMTPDLRERLENLRKKPENIPQPISNTSRANLNKLLTDYTEMKKAILHVYWEEFQKDPVGLMSRVAQPAPKNIDQRKLIPVKDGNERLTSSGFACSQCCQPLYVYKLEQVNDKGKPHTNYFGRCNVSEHERLILLSPHKPEANDELVTYSLGKFGQRALDFYSIHVTRESNHPVKPLEQIGGNSCASGPVGKALSDACMGAVASFLTKYQDIILEHQKVIKKNEKRLANLKDIASANGLAFPKITLPPQPHTKEGIEAYNNVVAQIVIWVNLNLWQKLKIGRDEAKPLQRLKGFPSFPLVERQANEVDWWDMVCNVKKLINEKKEDGKVFWQNLAGYKRQEALLPYLSSEEDRKKGKKFARYQFGDLLLHLEKKHGEDWGKVYDEAWERIDKKVEGLSKHIKLEEERRSEDAQSKAALTDWLRAKASFVIEGLKEADKDEFKRCELKLQKWYGDLRGKPFAIEAENSILDISGFSKQYNCAFIWQKDGVKKLNLYLIINYFKGGKLRFKKIKPEAFEANRFYTVINKKSGEIVPMEVNFNFDDPNLIILPLAFGKRQGREFIWNDLLSLETGSLKLANGRVIEKTLYNRRTRQDEPALFVALTFERREVLDSSNIKPMNLIGIDRGENIPAVIALTDPEGCPLSRFKDSLGNPTHILRIGESYKEKQRTIQAKKEVEQRRAGGYSRKYASKAKNLADDMVRNTARDLLYYAVTQDAMLIFENLSRGFGRQGKRTFMAERQYTRMEDWLTAKLAYEGLSKTYLSKTLAQYTSKTCSNCGFTITSADYDRVLEKLKKTATGWMTTINGKELKVEGQITYYNRYKRQNVVKDLSVELDRLSEESVNNDISSWTKGRSGEALSLLKKRFSHRPVQEKFVCLNCGFETHADEQAALNIARSWLFLRSQEYKKYQTNKTTGNTDKRAFVETWQSFYRKKLKEVWKPAV

SEQ ID NO: 81 - protein, 978 aa, Artificial Sequence
  CasX variant
MQEIKRINKIRRRLVKDSNTKKAGKTGPMKTLLVRVMTPDLRERLENLRKKPENIPQPISNTSRANLNKLLTDYTEMKKAILHVYWEEFQKDPVGLMSRVAQPAPKNIDQRKLIPVKDGNERLTSSGFACSQCCQPLYVYKLEQVNDKGKPHTNYFGRCNVSEHERLILLSPHKPEANDELVTYSLGKFGQRALDFYSIHVTRESNHPVKPLEQIGGNSCASGPVGKALSDACMGAVASFLTKYQDIIIEHQKVIKKNEKRLANLKDIASANGLAFPKITLPPQPHTKEGIEAYNNVVAQIVIWVNLNLWQKLKIGRDEAKPLQRLKGFPSFPLVERQANEVDWWDMVCNVKKLINEKKEDGKVFWQNLAGYKRQEALLPYLSSEEDRKKGKKFARYQFGDLLLHLEKKHGEDWGKVYDEAWERIDKKVEGLSKHIKLEEERRSEDAQSKAALTDWLRAKASFVIEGLKEADKDEFCRCELKLQKWYGDLRGKPFAIEAENSILDISGFSKQYNCAFIWQKDGVKKLNLYLIINYFKGGKLRFKKIKPEAFEANRFYTVINKKSGEIVPMEVNFNFDDPNLIILPLAFGKRQGREFIWNDLLSLETGSLKLANGRVIEKTLYNRRTRQDEPALFVALTFERREVLDSSNIKPMNLIGIDRGENIPAVIALTDPEGCPLSRFKDSLGNPTHILRIGESYKEKQRTIQAAKEVEQRRAGGYSRKYASKAKNLADDMVRNTARDLLYYAVTQDAMLIFENLSRGFGRQGKRTFNAERQYTRMEDWLTAKLAYEGLPSKTYLSKTLAQYTSKTCSNCGFTITSADYDRVLEKLKKTATGWMTTINGKELKVEGQITYYNRYKRQNVVKDLSVELDRLSEESVNNDISSWTKGRSGEALSLLKKRFSHRPVQEKFVCLNCGFETHADEQAALNIARSWLFLRSQEYKKYQTNKTTGNTDKRAFVETWQSFYRKKLKEVWKPAV

SEQ ID NO: 82 - protein, 978 aa, Artificial Sequence
  CasX variant
MQEIKRINKIRRRLVKDSNTKKAGKTGPMKTLLVRVMTPDLRERLENLRKKPENIPQPISNTSRANLNKLLTDYTEMKKAILHVYWEEFQKDPVGLMSRVAQPAPKNIDQRKLIPVKDGNERLTSSGFACSQCCQPLYVYKLEQVNDKGKPHTNYFGRCNVSEHERLILLSPHKPEANDELVTYSLGKFGQRALDFYSIHVTRESNHPVKPLEQIGGNSCASGPVGKALSDACMGAVASFLTKYQDIILEHQKVIKKNEKRLANLKDIASANGLAFPKITLPPQPHTKEGIEAYNNVVAQIVIWVNLNLWQKLKIGRDEAKPLQRLKGFPSFPLVERQANEVDWWDMVCNVKKLINEKKEDGKVFWQNLAGYKRQEALLPYLSSEEDRKKGKKFARYQFGDLLLHLEKKHGEDWGKVYDEAWERIDKKVEGLSKHIKLEEERRSEDAQSKAALTDWLRAKASFVIEGLKEADKDEFCRCELKLQKWYGDLRGKPFAIEAENSILDISGFSKQYNCAFIWQKDGVKKLNLYLIINYFKGGKLRFKKIKPEAFEANRFYTVINKKSGEIVPMEVNFNFDDPNLIILPLAFGKRQGREFIWNDLLSLETGSLKLANGRVIEKTLYNRRTRQDEPALFVALTFERREVLDSSNIKPMNLIGIDRGENIPAVIALTDPEGCPLSRFKDSLGNPTHILRIGESYKEKQRTIQAAKEVEQRRAGGYSRKYASKAKNLADDMVRNTARDLLYYAKTQDAMLIFENLSRGFGRQGKRTFMAERQYTRMEDWLTAKLAYEGLPSKTYLSKTLAQYTSKTCSNCGFTITSADYDRVLEKLKKTATGWMTTINGKELKVEGQITYYNRYKRQNVVKDLSVELDRLSEESVNNDISSWTKGRSGEALSLLKKRFSHRPVQEKFVCLNCGFETHADEQAALNIARSWLFLRSQEYKKYQTNKTTGNTDKRAFVETWQSFYRKKLKEVWKPAV

SEQ ID NO: 83 - protein, 977 aa, Artificial Sequence
  CasX variant
MQEIKRINKIRRRLVKDSNTKKAGKTGPMKTLLVRVMTPDLRERLENLRKKPENIPQPISNTSRANLNKLLTDYTEMKKAILHVYWEEFQKDPVGLMSRVAQPAPKNIDQRKLIPVKDGNERLTSSGFACSQCCQPLYVYKLEQVNDKGKPHTNYFGRCNVSEHERLILLSPHKPEANDELVTYSLGKFGQRALDFYSIHVTRESNHPVKPLEQIGGNSCASGPVGKALSDACMGAVASFLTKYQDIILEHQKVIKKNEKRLANLKDIASANGLAFPKITLPPQPHTKEGIEAYNNVVAQIVIWVNLNLWQKLKIGRDEAKPLQRLKGFPSFPLVERQANEVDWWDMVCNVKKLINEKKEDGKVFWQNLAGYKRQEALRPYLSSEEDRKKGKKFARYQFGDLLLHLEKKHGEDWGKVYDEAWERIDKKVEGLSKHIKLEEERRSEDAQSKAALTDWLRAKASFVIEGLKEADKDEFKRCELKLQKWYGDLRGKPFAIEAENSILDISGFSKQYNCAFIWQKDGVKKLNLYLIINYFKGGKLRFKKIKPEAFEANRFYTVINKKSGEIVPMEVNFNFDDPNLIILPLAFGKRQGREFIWNDLLSLETGSLKLANGRVIEKTLYNRRTRQDEPALFVALTFERREVLDSSNIKPMNLIGIDRGENIPAVIALTDPEGCPLSRFKDSLGNPTHILRIGESYKEKQRTIQAKKEVEQRRAGGYSRKYASKAKNLADDMVRNTARDLLYYAVTQDAMLIFENLSRGFGRQGKRTFMAERQYTRNEDWLTAKLAYEGLSKTYLSKTLAQYTSKTCSNCGFTITSADYDRVLEKLKKTATGWMTTINGKELKVEGQITYYNRYKRQNVVKDLSVELDRLSEESVNNDISSWTKGRSGEALSLLKKRFSHRPVQEKFVCLNCGFETHADEQAALNIARSWLFLRSQEYKKYQTNKTTGNTDKRAFVETWQSFYRKKLKEVWKPAV

SEQ ID NO: 84 - protein, 978 aa, Artificial Sequence
  CasX variant
MQEIKRINKIRRRLVKDSNTKKAGKTGPMKTLLVRVMTPDLRERLENLRKKPENIPQPISNTSRANLNKLLTDYTEMKKAILHVYWEEFQKDPVGLMSRVAQPAPKNIDQRKLIPVKDGNERLTSSGFACSQCCQPLYVYKLEQVNDKGKPHTNYFGRCNVSEHERLILLSPHKPEANDELVTYSLGKFGQRALDFYSIHVTRESNHPVKPLEQIGGNSCASGPVGKALSDACMGAVASFLTKYQDIILEHQKVIKKNEKRLANLKDIASANGLAFPKITLPPQPHTKEGIEAYNNVVAQIVIWVNLNLWQKLKIGRDEAKPLQRLKGFPSFPLVERQANEVDWWDMVCNVKKLINEKKEDGKVFWQNLAGYKRQEALLPYLSSEEDRKKGKKFARYQFGDLLLHLEKKHGEDWGKVYDEAWERIDKKVEGLSKHIKLEEERRSEDAQSKAALTDWLRAKASFVIEGLKEADKDEFCRCELKLQKWYGDLRGKPFAIEAENSILDISGFSKQYNCAFIWQKDGVKKLNLYLIINYFKGGKLRFKKIKPEAFEANRFYTVINKKSGEIVPMEVNFNFDDPNLIILPLAFGKRQGREFIWNDLLSLETGSLKLANGRVIEKTLYNRRTRQDEPALFVALTFERREVLDSSNIKPMNLIGIDRGENIPAVIALTDPEGCPLSRFKDSLGNPTHILRIGESYKEKQRTIQAAKEVEQRRAGGYSRKYASKAKNLADDMVRNTARDLLYYAVTQDAMLIMENLSRGFGRQGKRTFMAERQYTRMEDWLTAKLAYEGLPSKTYLSKTLAQYTSKTCSNCGFTITSADYDRVLEKLKKTATGWMTTINGKELKVEGQITYYNRYKRQNVVKDLSVELDRLSEESVNNDISSWTKGRSGEALSLLKKRFSHRPVQEKFVCLNCGFETHADEQAALNIARSWLFLRSQEYKKYQTNKTTGNTDKRAFVETWQSFYRKKLKEVWKPAV

SEQ ID NO: 85 - protein, 977 aa, Artificial Sequence
  CasX variant
MQEIKRINKIRRRLVKDSNTKKAGKTGPMKTLLVRVMTPDLRERLENLRKKPENIPQPISNTSRANLNKLLTDYTEMKKAILHVYWEEFQKDPVGLMSRVAQPAPKNIDQRKLIPVKDGNERLTSSGFACSQCCQPLYVYKLEQVNDKGKPHTNYFGRCNVSEHERLILLSPHKPEANDELVTYSLGKFGQRALDFYSIHVTRESNHPVKPLEQIGGNSCASGPVGKALSDACMGAVASFLTKYQDIILEHQKVIKKNEKRLANLKDIASANGLAFPKITLPPQPHTKEGIEAYNNVVAQIVIWVNLNLWQKLKIGRDEAKPLQRLKGFPSFPLVERQANEVDWWDMVCNVKKLINEKKEDGKVFWQNLAGYKRQEALRPYLSSEEDRKKGKKFARYQFGDLLLHLEKKHGEDWGKVYDEAWERIDKKVEGLSKHIKLEEERRSEDAQSKAALTDWLRAKASFVIEGLKEADKDEFCRCELKLQKWYGDLRGKPFAIEAENSILDISGFSKQYNCAFIWQKDGVKKLNLYLIINYFKGGKLRFKKIKPEAFEANRFYTVINKKSGEIVPMEVNFNFDDPNLIILPLAFGKRQGREFIWNDLLSLETGSLKLANGRVIEKTLYNRRTRQDEPALFVALTFERREVLDSSNIKPMNLIGIDRGENIPAVIALTDPEGCPLSRFKDSLGNPTHILRIGESYKEKQRTIQAKKEVEQRRAGGYSRKYASKAKNLADDMVRNTARDLLYYAVTQDAMLIFENLSRGFGRQGKRTFMAERQYTRMEDWLTAKLAYEGLSKTYLSKTLAQYTSKTCSNCGFTITSADYDRVLEKLKKTATGWMTTINGKELKVEGQITYYNRRKRQNVVKDLSVELDRLSEESVNNDISSWTKGRSGEALSLLKKRFSHRPVQEKFVCLNCGFETHADEQAALNIARSWLFLRSQEYKKYQTNKTTGNTDKRAFVETWQSFYRKKLKEVWKPAV

SEQ ID NO: 86 - protein, 977 aa, Artificial Sequence
  CasX variant
MQEIKRINKIRRRLVKDSNTKKAGKTGPMKTLLVRVMTPDLRERLENLRKKPENIPQPISNTSRANLNKLLTDYTEMKKAILHVYWEEFQKDPVGLMSRVAQPAPKNIDQRKLIPVKDGNERLTSSGFACSQCCQPLYVYKLEQVNDKGKPHTNYFGRCNVSEHERLILLSPHKPEANDELVTYSLGKFGQRALDFYSIHVTRESNHPVKPLEQIGGNSCASGPVGKALSDACMGAVASFLTKYQDIILEHQKVIKKNEKRLANLKDIASANGLAFPKITLPPQPHTKEGIEAYNNVVAQIVIWVNLNLWQKLKIGRDEAKPLQRLKGFPSFPLVERQANEVDWWDMVCNVKKLINEKKEDGKVFWQNLAGYKRQEALRPYLSSEEDRKKGKKFARYQFGDLLLHLEKKHGEDWGKVYDEAWERIDKKVEGLSKHIKLEEERRSEDAQSKAALTDWLRAKASFVIEGLKEADKDEFCRCELKLQKWYGDLRGKPFAIEAENSILDISGFSKQYNCAFIWQKDGVKKLNLYLIINYFKGGKLRFKKIKPEAFEANRFYTVINKKSGEIVPMEVNFNFDDPNLIILPLAFGKRQGREFIWNDLLSLETGSLKLANGRVIEKTLYNRRTRQDEPALFVALTFERREVLDSSNIKPMNLIGVDRGENIPAVIALTDPEGCPLSRFKDSLGNPTHILRIGESYKEKQRTIQAKKEVEQRRAGGYSRKYASKAKNLADDMVRNTARDLLYYAVTQDAMLIFENLSRGFGRQGKRTFMAERQYTRMEDWLTAKLAYEGLSKTYLSKTLAQYTSKTCSNCGFTITSADYDRVLEKLKKTATGWMTTINGKELKVEGQITYYNRRKRQNVVKDLSVELDRLSEESVNNDISSWTKGRSGEALSLLKKRFSHRPVQEKFVCLNCGFETHADEQAALNIARSWLFLRSQEYKKYQTNKTTGNTDKRAFVETWQSFYRKKLKEVWKPAV

SEQ ID NO: 87 - protein, 977 aa, Artificial Sequence
  CasX variant
MQEIKRINKIRRRLVKDSNTKKAGKTGPMKTLLVRVMTPDLRERLENLRKKPENIPQPISNTSRANLNKLLTDYTEMKKAILHVYWEEFQKDPVGLMSRVAQPAPKNIDQRKLIPVKDGNERLTSSGFACSQCCQPLYVYKLEQVNDKGKPHTNYFGRCNVSEHERLILLSPHKPEANDELVTYSLGKFGQRALDFYSIHVTRESNHPVKPLEQIGGNSCASGPVGKALSDACMGAVASFLTKYQDIILEHQKVIKKNEKRLANLKDIASANGLAFPKITLPPQPHTKEGIEAYNNVVAQIVIWVNLNLWQKLKIGRDEAKPLQRLKGFPSFPLVERQANEVDWWDMVCNVKKLINEKKEDGKVFWQNLAGYKRQEALRPYLSSENDRKKGKKFARYQFGDLLLHLEKKHGEDWGKVYDEAWERIDKKVEGLSKHIKLEEERRSEDAQSKAALTDWLRAKASFVIEGLKEADKDEFCRCELKLQKWYGDLRGKPFAIEAENSILDISGFSKQYNCAFIWQKDGVKKLNLYLIINYFKGGKLRFKKIKPEAFEANRFYTVINKKSGEIVPMEVNFNFDDPNLIILPLAFGKRQGREFIWNDLLSLETGSLKLANGRVIEKTLYNRRTRQDEPALFVALTFERREVLDSSNIKPMNLIGVDRGENIPAVIALTDPEGCPLSRFKDSLGNPTHILRIGESYKEKQRTIQAKKEVEQRRAGGYSRKYASKAKNLADDMVRNTARDLLYYAVTQDAMLIFENLSRGFGRQGKRTFMAERQYTRMEDWLTAKLAYEGLSKTYLSKTLAQYTSKTCSNCGFTITSADYDRVLEKLKKTATGWMTTINGKELKVEGQITYYNRRKRQNVVKDLSVELDRLSEESVNNDISSWTKGRSGEALSLLKKRFSHRPVQEKFVCLNCGFETHADEQAALNIARSWLFLRSQEYKKYQTNKTTGNTDKRAFVETWQSFYRKKLKEVWKPAV

SEQ ID NO: 88 - protein, 977 aa, Artificial Sequence
  CasX variant
MQEIKRINKIRRRLVKDSNTKKAGKTGPMKTLLVRVMTPDLRERLENLRKKPENIPQPISNTSRANLNKLLTDYTEMKKAILHVYWEEFQKDPVGLMSRVAQPAPKNIDQRKLIPVKDGNERLTSSGFACSQCCQPLYVYKLEQVNDKGKPHTNYFGRCNVSEHERLILLSPHKPEANDELVTYSLGKFGQRALDFYSIHVTRESNHPVKPLEQIGGNSCASGPVGKALSDACMGAVASFLTKYQDIILEHQKVIKKNEKRLANLKDIASANGLAFPKITLPPQPHTKEGIEAYNNVVAQIVIWVNLNLWQKLKIGRDEAKPLQRLKGFPSFPLVERQANEVDWWDMVCNVKKLINEKKEDGKVFWQNLAGYKRQEALRPYLSSEEDRKKGKKFARYQFGDLLKHLEKKHGEDWGKVYDEAWERIDKKVEGLSKHIKLEEERRSEDAQSKAALTDWLRAKASFVIEGLKEADKDEFCRCELKLQKWYGDLRGKPFAIEAENSILDISGFSKQYNCAFIWQKDGVKKLNLYLIINYFKGGKLRFKKIKPEAFEANRFYTVINKKSGEIVPMEVNFNFDDPNLIILPLAFGKRQGREFIWNDLLSLETGSLKLANGRVIEKTLYNRRTRQDEPALFVALTFERREVLDSSNIKPMNLIGVDRGENIPAVIALTDPEGCPLSRFKDSLGNPTHILRIGESYKEKQRTIQAKKEVEQRRAGGYSRKYASKAKNLADDMVRNTARDLLYYAVTQDAMLIFENLSRGFGRQGKRTFMAERQYTRMEDWLTAKLAYEGLSKTYLSKTLAQYTSKTCSNCGFTITSADYDRVLEKLKKTATGWMTTINGKELKVEGQITYYNRRKRQNVVKDLSVELDRLSEESVNNDISSWTKGRSGEALSLLKKRFSHRPVQEKFVCLNCGFETHADEQAALNIARSWLFLRSQEYKKYQTNKTTGNTDKRAFVETWQSFYRKKLKEVWKPAV

SEQ ID NO: 89 - protein, 978 aa, Artificial Sequence
  CasX variant
MQEIKRINKIRRRLVKDSNTKKAGKTGPMKTLLVRVMTPDLRERLENLRKKPENIPQPISNTSRANLNKLLTDYTEMKKAILHVYWEEFQKDPVGLMSRVAQPAPKNIDQRKLIPVKDGNERLTSSGFACSQCCQPLYVYKLEQVNDKGKPHTNYFGRCNVSEHERLILLSPHKPEANDELVTYSLGKFGQVRALDFYSIHVTRESNHPVKPLEQIGGNSCASGPVGKALSDACMGAVASFLTKYQDIILEHQKVIKKNEKRLANLKDIASANGLAFPKITLPPQPHTKEGIEAYNNVVAQIVIWVNLNLWQKLKIGRDEAKPLQRLKGFPSFPLVERQANEVDWWDMVCNVKKLINEKKEDGKVFWQNLAGYKRQEALRPYLSSEEDRKKGKKFARYQFGDLLLHLEKKHGEDWGKVYDEAWERIDKKVEGLSKHIKLEEERRSEDAQSKAALTDWLRAKASFVIEGLKEADKDEFCRCELKLQKWYGDLRGKPFAIEAENSILDISGFSKQYNCAFIWQKDGVKKLNLYLIINYFKGGKLRFKKIKPEAFEANRFYTVINKKSGEIVPMEVNFNFDDPNLIILPLAFGKRQGREFIWNDLLSLETGSLKLANGRVIEKTLYNRRTRQDEPALFVALTFERREVLDSSNIKPMNLIGVDRGENIPAVIALTDPEGCPLSRFKDSLGNPTHILRIGESYKEKQRTIQAKKEVEQRRAGGYSRKYASKAKNLADDMVRNTARDLLYYAVTQDAMLIFENLSRGFGRQGKRTFMAERQYTRMEDWLTAKLAYEGLSKTYLSKTLAQYTSKTCSNCGFTITSADYDRVLEKLKKTATGWMTTINGKELKVEGQITYYNRRKRQNVVKDLSVELDRLSEESVNNDISSWTKGRSGEALSLLKKRFSHRPVQEKFVCLNCGFETHADEQAALNIARSWLFLRSQEYKKYQTNKTTGNTDKRAFVETWQSFYRKKLKEVWKPAV

SEQ ID NO: 90 - protein, 977 aa, Artificial Sequence
  CasX variant
MQEIKRINKIRRRLVKDSNTKKAGKTGPMKTLLVRVMTPDLRERLENLRKKPENIPQPISNTSRANLNKLLTDYTEMKKAILHVYWEEFQKDPVGLMSRVAQPAPKNIDQRKLIPVKDGNERLTSSGFACSQCCQPLYVYKLEQVNDKGKPHTNYFGRCNVSEHERLILLSPHKPEANDELVTYSLGKFGQRALDFYSIHVTRESNHPVKPLEQIGGNSCASGPVGKALSDACMGAVASFLTKYQDIILEHQKVIKKNEKRLANLKDIASANGLAFPKITLPPQPHTKEGIEAYNNVVAQIVIWVNLNLWQKLKIGRDEAKPLQRLKGFPSFPLVERQANEVDWWDMVCNVKKLINEKKEDGKVFWQNLAGYKRQEALRPYLSSENDRKKGKKFARYQFGDLLKHLEKKHGEDWGKVYDEAWERIDKKVEGLSKHIKLEEERRSEDAQSKAALTDWLRAKASFVIEGLKEADKDEFCRCELKLQKWYGDLRGKPFAIEAENSILDISGFSKQYNCAFIWQKDGVKKLNLYLIINYFKGGKLRFKKIKPEAFEANRFYTVINKKSGEIVPMEVNFNFDDPNLIILPLAFGKRQGREFIWNDLLSLETGSLKLANGRVIEKTLYNRRTRQDEPALFVALTFERREVLDSSNIKPMNLIGVDRGENIPAVIALTDPEGCPLSRFKDSLGNPTHILRIGESYKEKQRTIQAKKEVEQRRAGGYSRKYASKAKNLADDMVRNTARDLLYYAVTQDAMLIFENLSRGFGRQGKRTFMAERQYTRMEDWLTAKLAYEGLSKTYLSKTLAQYTSKTCSNCGFTITSADYDRVLEKLKKTATGWMTTINGKELKVEGQITYYNRRKRQNVVKDLSVELDRLSEESVNNDISSWTKGRSGEALSLLKKRFSHRPVQEKFVCLNCGFETHADEQAALNIARSWLFLRSQEYKKYQTNKTTGNTDKRAFVETWQSFYRKKLKEVWKPAV

SEQ ID NO: 91 - protein, 977 aa, Artificial Sequence
  CasX variant
MQEIKRINKIRRRLVKDSNTKKAGKTGPMKTLLVRVMTPDLRERLENLRKKPENIPQPISNTSRANLNKLLTDYTEMKKAILHVYWEEFQKDPVGLMSRVAQPAPKNIDQRKLIPVKDGNERLTSSGFACSQCCQPLYVYKLEQVNDKGKPHTNYFGRCNVSEHERLILLSPHKPEANDELVTYSLGKFGQRALDFYSIHVTRESNHPVKPLEQIGGNSCASGPVGKALSDACMGAVASFLTKYQDIILEHQKVIKKNEKRLANLKDIASANGLAFPKITLPPQPHTKEGIEAYNNVVAQIVIWVNLNLWQKLKIGRDEAKPLQRLKGFPSFPLVERQANEVDWWDMVCNVKKLINEKKEDGKVFWQNLAGYKRQEALRPYLSSEEDRKKGKKFARYQLGDLLLHLEKKHGEDWGKVYDEAWERIDKKVEGLSKHIKLEEERRSEDAQSKAALTDWLRAKASFVIEGLKEADKDEFCRCELKLQKWYGDLRGKPFAIEAENSILDISGFSKQYNCAFIWQKDGVKKLNLYLIINYFKGGKLRFKKIKPEAFEANRFYTVINKKSGEIVPMEVNFNFDDPNLIILPLAFGKRQGREFIWNDLLSLETGSLKLANGRVIEKTLYNRRTRQDEPALFVALTFERREVLDSSNIKPMNLIGVDRGENIPAVIALTDPEGCPLSRFKDSLGNPTHILRIGESYKEKQRTIQAKKEVEQRRAGGYSRKYASKAKNLADDMVRNTARDLLYYAVTQDAMLIFENLSRGFGRQGKRTFMAERQYTRMEDWLTAKLAYEGLSKTYLSKTLAQYTSKTCSNCGFTITSADYDRVLEKLKKTATGWMTTINGKELKVEGQITYYNRRKRQNVVKDLSVELDRLSEESVNNDISSWTKGRSGEALSLLKKRFSHRPVQEKFVCLNCGFETHADEQAALNIARSWLFLRSQEYKKYQTNKTTGNTDKRAFVETWQSFYRKKLKEVWKPAV

SEQ ID NO: 92 - protein, 977 aa, Artificial Sequence
  CasX variant
MQEIKRINKIRRRLVKDSNTKKAGKTGPMKTLLVRVMTPDLRERLENLRKKPENIPQPISNTSRANLNKLLTDYTEMKKAILHVYWEEFQKDPVGLMSRVAQPAPKNIDQRKLIPVKDGNERLTSSGFACSQCCQPLYVYKLEQVNDKGKPHTNYFGRCNVSEHERLILLSPHKPEANDELVTYSLGKFGQRALDFYSIHVTRESNHPVKPLEQIGGNSCASGPVGKALSDACMGAVASFLTKYQDIILEHQKVIKKNEKRLANLKDIASANGLAFPKITLPPQPHTKEGIEAYNNVVAQIVIWVNLNLWQKLKIGRDEAKPLQRLKGFPSFPLVERQANEVDWWDMVCNVKKLINEKKEDGKVFWQNLAGYKRQEALRPYLSSENDRKKGKKFARYQLGDLLLHLEKKHGEDWGKVYDEAWERIDKKVEGLSKHIKLEEERRSEDAQSKAALTDWLRAKASFVIEGLKEADKDEFCRCELKLQKWYGDLRGKPFAIEAENSILDISGFSKQYNCAFIWQKDGVKKLNLYLIINYFKGGKLRFKKIKPEAFEANRFYTVINKKSGEIVPMEVNFNFDDPNLIILPLAFGKRQGREFIWNDLLSLETGSLKLANGRVIEKTLYNRRTRQDEPALFVALTFERREVLDSSNIKPMNLIGVDRGENIPAVIALTDPEGCPLSRFKDSLGNPTHILRIGESYKEKQRTIQAKKEVEQRRAGGYSRKYASKAKNLADDMVRNTARDLLYYAVTQDAMLIFENLSRGFGRQGKRTFMAERQYTRMEDWLTAKLAYEGLSKTYLSKTLAQYTSKTCSNCGFTITSADYDRVLEKLKKTATGWMTTINGKELKVEGQITYYNRRKRQNVVKDLSVELDRLSEESVNNDISSWTKGRSGEALSLLKKRFSHRPVQEKFVCLNCGFETHADEQAALNIARSWLFLRSQEYKKYQTNKTTGNTDKRAFVETWQSFYRKKLKEVWKPAV

SEQ ID NO: 93 - protein, 977 aa, Artificial Sequence
  CasX variant
MQEIKRINKIRRRLVKDSNTKKAGKTGPMKTLLVRVMTPDLRERLENLRKKPENIPQPISNTSRANLNKLLTDYTEMKKAILHVYWEEFQKDPVGLMSRVAQPAPKNIDQRKLIPVKDGNERLTSSGFACSQCCQPLYVYKLEQVNDKGKPHTNYFGRCNVSEHERLILLSPHKPEANDELVTYSLGKFGQRALDFYSIHVTRESNHPVKPLEQIGGNSCASGPVGKALSDACMGAVASFLTKYQDIILEHQKVIKKNEKRLANLKDIASANGLAFPKITLPPQPHTKEGIEAYNNVVAQIVIWVNLNLWQKLKIGRDEAKPLQRLKGFPSFPLVERQANEVDWWDMVCNVKKLINEKKEDGKVFWQNLAGYKRQEALRPYLSSEEDRKKGKKFARYQLGDLLLHLEKKHGEDWGKVYDEAWERIDKKVEGLSKHIKLEEERRSEDAQSKAALTDWLRAKASFVIEGLKEADKDEFSRCELKLQKWYGDLRGKPFAIEAENSILDISGFSKQYNCAFIWQKDGVKKLNLYLIINYFKGGKLRFKKIKPEAFEANRFYTVINKKSGEIVPMEVNFNFDDPNLIILPLAFGKRQGREFIWNDLLSLETGSLKLANGRVIEKTLYNRRTRQDEPALFVALTFERREVLDSSNIKPMNLIGVDRGENIPAVIALTDPEGCPLSRFKDSLGNPTHILRIGESYKEKQRTIQAKKEVEQRRAGGYSRKYASKAKNLADDMVRNTARDLLYYAVTQDAMLIFENLSRGFGRQGKRTFMAERQYTRMEDWLTAKLAYEGLSKTYLSKTLAQYTSKTCSNCGFTITSADYDRVLEKLKKTATGWMTTINGKELKVEGQITYYNRRKRQNVVKDLSVELDRLSEESVNNDISSWTKGRSGEALSLLKKRFSHRPVQEKFVCLNCGFETHADEQAALNIARSWLFLRSQEYKKYQTNKTTGNTDKRAFVETWQSFYRKKLKEVWKPAV

SEQ ID NO: 94 - protein, 977 aa, Artificial Sequence
  CasX variant
MQEIKRINKIRRRLVKDSNTKKAGKTGPMKTLLVRVMTPDLRERLENLRKKPENIPQPISNTSRANLNKLLTDYTEMKKAILHVYWEEFQKDPVGLMSRVAQPAPKNIDQRKLIPVKDGNERLTSSGFACSQCCQPLYVYKLEQVNDKGKPHTNYFGRCNVSEHERLILLSPHKPEANDELVTYSLGKFGQRALDFYSIHVTRESNHPVKPLEQIGGNSCASGPVGKALSDACMGAVASFLTKYQDIILEHQKVIKKNEKRLANLKDIASANGLAFPKITLPPQPHTKEGIEAYNNVVAQIVIWVNLNLWQKLKIGRDEAKPLQRLKGFPSFPLVERQANEVDWWDMVCNVKKLINEKKEDGKVFWQNLAGYKRQEALRPYLSSEEDRKKGKKFARYQLGDLLKHLEKKHGEDWGKVYDEAWERIDKKVEGLSKHIKLEEERRSEDAQSKAALTDWLRAKASFVIEGLKEADKDEFCRCELKLQKWYGDLRGKPFAIEAENSILDISGFSKQYNCAFIWQKDGVKKLNLYLIINYFKGGKLRFKKIKPEAFEANRFYTVINKKSGEIVPMEVNFNFDDPNLIILPLAFGKRQGREFIWNDLLSLETGSLKLANGRVIEKTLYNRRTRQDEPALFVALTFERREVLDSSNIKPMNLIGVDRGENIPAVIALTDPEGCPLSRFKDSLGNPTHILRIGESYKEKQRTIQAKKEVEQRRAGGYSRKYASKAKNLADDMVRNTARDLLYYAVTQDAMLIFENLSRGFGRQGKRTFMAERQYTRMEDWLTAKLAYEGLSKTYLSKTLAQYTSKTCSNCGFTITSADYDRVLEKLKKTATGWMTTINGKELKVEGQITYYNRRKRQNVVKDLSVELDRLSEESVNNDISSWTKGRSGEALSLLKKRFSHRPVQEKFVCLNCGFETHADEQAALNIARSWLFLRSQEYKKYQTNKTTGNTDKRAFVETWQSFYRKKLKEVWKPAV

SEQ ID NO: 95 - protein, 977 aa, Artificial Sequence
  CasX variant
MQEIKRINKIRRRLVKDSNTKKAGKTGPMKTLLVRVMTPDLRERLENLRKKPENIPQPISNTSRANLNKLLTDYTEMKKAILHVYWEEFQKDPVGLMSRVAQPAPKNIDQRKLIPVKDGNERLTSSGFACSQCCQPLYVYKLEQVNDKGKPHTNYFGRCNVSEHERLILLSPHKPEANDELVTYSLGKFGQRALDFYSIHVTRESNHPVKPLEQIGGNSCASGPVGKALSDACMGAVASFLTKYQDIILEHQKVIKKNEKRLANLKDIASANGLAFPKITLPPQPHTKEGIEAYNNVVAQIVIWVNLNLWQKLKIGRDEAKPLQRLKGFPSFPLVERQANEVDWWDMVCNVKKLINEKKEDGKVFWQNLAGYKRQEALRPYLSSENDRKKGKKFARYQLGDLLKHLEKKHGEDWGKVYDEAWERIDKKVEGLSKHIKLEEERRSEDAQSKAALTDWLRAKASFVIEGLKEADKDEFSRCELKLQKWYGDLRGKPFAIEAENSILDISGFSKQYNCAFIWQKDGVKKLNLYLIINYFKGGKLRFKKIKPEAFEANRFYTVINKKSGEIVPMEVNFNFDDPNLIILPLAFGKRQGREFIWNDLLSLETGSLKLANGRVIEKTLYNRRTRQDEPALFVALTFERREVLDSSNIKPMNLIGVDRGENIPAVIALTDPEGCPLSRFKDSLGNPTHILRIGESYKEKQRTIQAKKEVEQRRAGGYSRKYASKAKNLADDMVRNTARDLLYYAVTQDAMLIFENLSRGFGRQGKRTFMAERQYTRMEDWLTAKLAYEGLSKTYLSKTLAQYTSKTCSNCGFTITSADYDRVLEKLKKTATGWMTTINGKELKVEGQITYYNRRKRQNVVKDLSVELDRLSEESVNNDISSWTKGRSGEALSLLKKRFSHRPVQEKFVCLNCGFETHADEQAALNIARSWLFLRSQEYKKYQTNKTTGNTDKRAFVETWQSFYRKKLKEVWKPAV

SEQ ID NO: 96 - protein, 977 aa, Artificial Sequence
  CasX variant
MQEIKRINKIRRRLVKDSNTKKAGKTGPMKTLLVRVMTPDLRERLENLRKKPENIPQPISNTSRANLNKLLTDYTEMKKAILHVYWEEFQKDPVGLMSRVAQPAPKNIDQRKLIPVKDGNERLTSSGFACSQCCQPLYVYKLEQVNDKGKPHTNYFGRCNVSEHERLILLSPHKPEANDELVTYSLGKFGQRALDFYSIHVTRESNHPVKPLEQIGGNSCASGPVGKALSDACMGAVASFLTKYQDIILEHQKVIKKNEKRLANLKDIASANGLAFPKITLPPQPHTKEGIEAYNNVVAQIVIWVNLNLWQKLKIGRDEAKPLQRLKGFPSFPLVERQANEVDWWDMVCNVKKLINEKKEDGKVFWQNLAGYKRQEALRPYLSSEEDRKKGKKFARYQLGDLLLHLEKKHGEDWGKVYDEAWERIDKKVEGLSKHIKLEEERRSEDAQSKAALTDWLRAKASFVIEGLKEADKDEFCRCELKLQKWYGDLRGKPFAIEAENSILDISGFSKQYNCAFIWQKDGVKKLNLYLIINYFKGGKLRFKKIKPEAFEANRFYTVINKKSGEIVPMEVNFNFDDPNLIILPLAFGKRQGREFIWNDLLSLETGSLKLANGRVIEKTLYNRRTRQDEPALFVALTFERREVLDSSNIKPMNLIGVDRGENIPAVIALTDPEGCPLSRFKDSLGNPTHILRIGESYKEKQRTIQAKKEVEQRRAGGYSRKYASKAKNLADDMVRNTARDLLYYAVTQDAMLIFENLSRGFGRQGKRTFMAERQYTRMEDWLTAKLAYEGLSKTLLSKTLAQYTSKTCSNCGFTITSADYDRVLEKLKKTATGWMTTINGKELKVEGQITYYNRRKRQNVVKDLSVELDRLSEESVNNDISSWTKGRSGEALSLLKKRFSHRPVQEKFVCLNCGFETHADEQAALNIARSWLFLRSQEYKKYQTNKTTGNTDKRAFVETWQSFYRKKLKEVWKPAV

SEQ ID NO: 97 - protein, 977 aa, Artificial Sequence
  CasX variant
MQEIKRINKIRRRLVKDSNTKKAGKTGPMKTLLVRVMTPDLRERLENLRKKPENIPQPISNTSRANLNKLLTDYTEMKKAILHVYWEEFQKDPVGLMSRVAQPAPKNIDQRKLIPVKDGNERLTSSGFACSQCCQPLYVYKLEQVNDKGKPHTNYFGRCNVSEHERLILLSPHKPEANDELVTYSLGKFGQRALDFYSIHVTRESNHPVKPLEQIGGNSCASGPVGKALSDACMGAVASFLTKYQDIILEHQKVIKKNEKRLANLKDIASANGLAFPKITLPPQPHTKEGIEAYNNVVAQIVIWVNLNLWQKLKIGRDEAKPLQRLKGFPSFPLVERQANEVDWWDMVCNVKKLINEKKEDGKVFWQNLAGYKRQEALRPYLSSENDRKKGKKFARYQLGDLLLHLEKKHGEDWGKVYDEAWERIDKKVEGLSKHIKLEEERRSEDAQSKAALTDWLRAKASFVIEGLKEADKDEFCRCELKLQKWYGDLRGKPFAIEAENSILDISGFSKQYNCAFIWQKDGVKKLNLYLIINYFKGGKLRFKKIKPEAFEANRFYTVINKKSGEIVPMEVNFNFDDPNLIILPLAFGKRQGREFIWNDLLSLETGSLKLANGRVIEKTLYNRRTRQDEPALFVALTFERREVLDSSNIKPMNLIGVDRGENIPAVIALTDPEGCPLSRFKDSLGNPTHILRIGESYKEKQRTIQAKKEVEQRRAGGYSRKYASKAKNLADDMVRNTARDLLYYAVTQDAMLIFENLSRGFGRQGKRTFMAERQYTRMEDWLTAKLAYEGLSKTLLSKTLAQYTSKTCSNCGFTITSADYDRVLEKLKKTATGWMTTINGKELKVEGQITYYNRRKRQNVVKDLSVELDRLSEESVNNDISSWTKGRSGEALSLLKKRFSHRPVQEKFVCLNCGFETHADEQAALNIARSWLFLRSQEYKKYQTNKTTGNTDKRAFVETWQSFYRKKLKEVWKPAV

SEQ ID NO: 98 - protein, 977 aa, Artificial Sequence
  CasX variant
MQEIKRINKIRRRLVKDSNTKKAGKTGPMKTLLVRVMTPDLRERLENLRKKPENIPQPISNTSRANLNKLLTDYTEMKKAILHVYWEEFQKDPVGLMSRVAQPAPKNIDQRKLIPVKDGNERLTSSGFACSQCCQPLYVYKLEQVNDKGKPHTNYFGRCNVSEHERLILLSPHKPEANDELVTYSLGKFGQRALDFYSIHVTRESNHPVKPLEQIGGNSCASGPVGKALSDACMGAVASFLTKYQDIILEHQKVIKKNEKRLANLKDIASANGLAFPKITLPPQPHTKEGIEAYNNVVAQIVIWVNLNLWQKLKIGRDEAKPLQRLKGFPSFPLVERQANEVDWWDMVCNVKKLINEKKEDGKVFWQNLAGYKRQEALRPYLSSENDRKKGKKFARYQLGDLLKHLEKKHGEDWGKVYDEAWERIDKKVEGLSKHIKLEEERRSEDAQSKAALTDWLRAKASFVIEGLKEADKDEFSRCELKLQKWYGDLRGKPFAIEAENSILDISGFSKQYNCAFIWQKDGVKKLNLYLIINYFKGGKLRFKKIKPEAFEANRFYTVINKKSGEIVPMEVNFNFDDPNLIILPLAFGKRQGREFIWNDLLSLETGSLKLANGRVIEKTLYNRRTRQDEPALFVALTFERREVLDSSNIKPMNLIGVDRGENIPAVIALTDPEGCPLSRFKDSLGNPTHILRIGESYKEKQRTIQAKKEVEQRRAGGYSRKYASKAKNLADDMVRNTARDLLYYAVTQDAMLIFENLSRGFGRQGKRTFMAERQYTRMEDWLTAKLAYEGLSKTLLSKTLAQYTSKTCSNCGFTITSADYDRVLEKLKKTATGWMTTINGKELKVEGQITYYNRRKRQNVVKDLSVELDRLSEESVNNDISSWTKGRSGEALSLLKKRFSHRPVQEKFVCLNCGFETHADEQAALNIARSWLFLRSQEYKKYQTNKTTGNTDKRAFVETWQSFYRKKLKEVWKPAV

SEQ ID NO: 99 - protein, 977 aa, Artificial Sequence
  CasX variant
MQEIKRINKIRRRLVKDSNTKKAGKTGPMKTLLVRVMTPDLRERLENLRKKPENIPQPISNTSRANLNKLLTDYTEMKKAILHVYWEEFQKDPVGLMSRVAQPAPKNIDQRKLIPVKDGNERLTSSGFACSQCCQPLYVYKLEQVNDKGKPHTNYFGRCNVSEHERLILLSPHKPEANDELVTYSLGKFGQRALDFYSIHVTRESNHPVKPLEQIGGNSCASGPVGKALSDACMGAVASFLTKYQDIILEHQKVIKKNEKRLANLKDIASANGLAFPKITLPPQPHTKEGIEAYNNVVAQIVIWVNLNLWQKLKIGRDEAKPLQRLKGFPSFPLVERQANEVDWWDMVCNVKKLINEKKEDGKVFWQNLAGYKRQEALRPYLSSEEDRKKGKKFARYQFGDLLLHLEKKHGEDWGKVYDEAWERIDKKVEGLSKHIKLEEERRSEDAQSKAALTDWLRAKASFVIEGLKEADKDEFCRCELKLQKWYGDLRGKPFAIEAENSILDISGFSKQYNCAFIWQKDGVKKLNLYLIINYFKGGKLRFKKIKPEAFEANRFYTVINKKSGEIVPMEVNFNFDDPNLIILPLAFGKRQGREFIWNDLLSLETGSLKLANGRVIEKTLYNRRTRQDEPALFVALTFERREVLDSSNIKPMNLIGVDRGENIPAVIALTDPEGCPLSRFKDSLGNPTHILRIGESYKEKQRTIQAKKEVEQRRAGGYSRKYASKAKNLADDMVRNTARDLLYYAVTQDAMLIFENLSRGFGRQGKRTFMAERQYTRMEDWLTAKLAYEGLSKTLLSKTLAQYTSKTCSNCGFTITSADYDRVLEKLKKTATGWMTTINGKELKVEGQITYYNRRKRQNVVKDLSVELDRLSEESVNNDISSWTKGRSGEALSLLKKRFSHRPVQEKFVCLNCGFETHADEQAALNIARSWLFLRSQEYKKYQTNKTTGNTDKRAFVETWQSFYRKKLKEVWKPAV

SEQ ID NO: 100 - protein, 977 aa, Artificial Sequence
  CasX variant
MQEIKRINKIRRRLVKDSNTKKAGKTGPMKTLLVRVMTPDLRERLENLRKKPENIPQPISNTSRANLNKLLTDYTEMKKAILHVYWEEFQKDPVGLMSRVAQPAPKNIDQRKLIPVKDGNERLTSSGFACSQCCQPLYVYKLEQVNDKGKPHTNYFGRCNVSEHERLILLSPHKPEANDELVTYSLGKFGQRALDFYSIHVTRESNHPVKPLEQIGGNSCASGPVGKALSDACMGAVASFLTKYQDIILEHQKVIKKNEKRLANLKDIASANGLAFPKITLPPQPHTKEGIEAYNNVVAQIVIWVNLNLWQKLKIGRDEAKPLQRLKGFPSFPLVERQANEVDWWDMVCNVKKLINEKKEDGKVFWQNLAGYKRQEALRPYLSSEEDRKKGKKFARYQFGDLLKHLEKKHGEDWGKVYDEAWERIDKKVEGLSKHIKLEEERRSEDAQSKAALTDWLRAKASFVIEGLKEADKDEFCRCELKLQKWYGDLRGKPFAIEAENSILDISGFSKQYNCAFIWQKDGVKKLNLYLIINYFKGGKLRFKKIKPEAFEANRFYTVINKKSGEIVPMEVNFNFDDPNLIILPLAFGKRQGREFIWNDLLSLETGSLKLANGRVIEKTLYNRRTRQDEPALFVALTFERREVLDSSNIKPMNLIGVDRGENIPAVIALTDPEGCPLSRFKDSLGNPTHILRIGESYKEKQRTIQAKKEVEQRRAGGYSRKYASKAKNLADDMVRNTARDLLYYAVTQDAMLIFENLSRGFGRQGKRTFMAERQYTRMEDWLTAKLAYEGLSKTLLSKTLAQYTSKTCSNCGFTITSADYDRVLEKLKKTATGWMTTINGKELKVEGQITYYNRRKRQNVVKDLSVELDRLSEESVNNDISSWTKGRSGEALSLLKKRFSHRPVQEKFVCLNCGFETHADEQAALNIARSWLFLRSQEYKKYQTNKTTGNTDKRAFVETWQSFYRKKLKEVWKPAV

SEQ ID NO: 101 - protein, 977 aa, Artificial Sequence
  CasX variant
MQEIKRINKIRRRLVKDSNTKKAGKTGPMKTLLVRVMTPDLRERLENLRKKPENIPQPISNTSRANLNKLLTDYTEMKKAILHVYWEEFQKDPVGLMSRVAQPAPKNIDQRKLIPVKDGNERLTSSGFACSQCCQPLYVYKLEQVNDKGKPHTNYFGRCNVSEHERLILLSPHKPEANDELVTYSLGKFGQRALDFYSIHVTRESNHPVKPLEQIGGNSCASGPVGKALSDACMGAVASFLTKYQDIILEHQKVIKKNEKRLANLKDIASANGLAFPKITLPPQPHTKEGIEAYNNVVAQIVIWVNLNLWQKLKIGRDEAKPLQRLKGFPSFPLVERQANEVDWWDMVCNVKKLINEKKEDGKVFWQNLAGYKRQEALRPYLSSENDRKKGKKFARYQFGDLLLHLEKKHGEDWGKVYDEAWERIDKKVEGLSKHIKLEEERRSEDAQSKAALTDWLRAKASFVIEGLKEADKDEFCRCELKLQKWYGDLRGKPFAIEAENSILDISGFSKQYNCAFIWQKDGVKKLNLYLIINYFKGGKLRFKKIKPEAFEANRFYTVINKKSGEIVPMEVNFNFDDPNLIILPLAFGKRQGREFIWNDLLSLETGSLKLANGRVIEKTLYNRRTRQDEPALFVALTFERREVLDSSNIKPMNLIGVDRGENIPAVIALTDPEGCPLSRFKDSLGNPTHILRIGESYKEKQRTIQAKKEVEQRRAGGYSRKYASKAKNLADDMVRNTARDLLYYAVTQDAMLIFENLSRGFGRQGKRTFMAERQYTRMEDWLTAKLAYEGLSKTLLSKTLAQYTSKTCSNCGFTITSADYDRVLEKLKKTATGWMTTINGKELKVEGQITYYNRRKRQNVVKDLSVELDRLSEESVNNDISSWTKGRSGEALSLLKKRFSHRPVQEKFVCLNCGFETHADEQAALNIARSWLFLRSQEYKKYQTNKTTGNTDKRAFVETWQSFYRKKLKEVWKPAV

SEQ ID NO: 102 - protein, 977 aa, Artificial Sequence
  CasX variant
MQEIKRINKIRRRLVKDSNTKKAGKTGPMKTLLVRVMTPDLRERLENLRKKPENIPQPISNTSRANLNKLLTDYTEMKKAILHVYWEEFQKDPVGLMSRVAQPAPKNIDQRKLIPVKDGNERLTSSGFACSQCCQPLYVYKLEQVNDKGKPHTNYFGRCNVSEHERLILLSPHKPEANDELVTYSLGKFGQRALDFYSIHVTRESNHPVKPLEQIGGNSCASGPVGKALSDACMGAVASFLTKYQDIILEHQKVIKKNEKRLANLKDIASANGLAFPKITLPPQPHTKEGIEAYNNVVAQIVIWVNLNLWQKLKIGRDEAKPLQRLKGFPSFPLVERQANEVDWWDMVCNVKKLINEKKEDGKVFWQNLAGYKRQEALRPYLSSENDRKKGKKFARYQFGDLLKHLEKKHGEDWGKVYDEAWERIDKKVEGLSKHIKLEEERRSEDAQSKAALTDWLRAKASFVIEGLKEADKDEFSRCELKLQKWYGDLRGKPFAIEAENSILDISGFSKQYNCAFIWQKDGVKKLNLYLIINYFKGGKLRFKKIKPEAFEANRFYTVINKKSGEIVPMEVNFNFDDPNLIILPLAFGKRQGREFIWNDLLSLETGSLKLANGRVIEKTLYNRRTRQDEPALFVALTFERREVLDSSNIKPMNLIGVDRGENIPAVIALTDPEGCPLSRFKDSLGNPTHILRIGESYKEKQRTIQAKKEVEQRRAGGYSRKYASKAKNLADDMVRNTARDLLYYAVTQDAMLIFENLSRGFGRQGKRTFMAERQYTRMEDWLTAKLAYEGLSKTLLSKTLAQYTSKTCSNCGFTITSADYDRVLEKLKKTATGWMTTINGKELKVEGQITYYNRRKRQNVVKDLSVELDRLSEESVNNDISSWTKGRSGEALSLLKKRFSHRPVQEKFVCLNCGFETHADEQAALNIARSWLFLRSQEYKKYQTNKTTGNTDKRAFVETWQSFYRKKLKEVWKPAV

SEQ ID NO: 103 - protein, 977 aa, Artificial Sequence
  CasX variant
MQEIKRINKIRRRLVKDSNTKKAGKTGPMKTLLVRVMTPDLRERLENLRKKPENIPQPISNTSRANLNKLLTDYTEMKKAILHVYWEEFQKDPVGLMSRVAQPAPKNIDQRKLIPVKDGNERLTSSGFACSQCCQPLYVYKLEQVNDKGKPHTNYFGRCNVSEHERLILLSPHKPEANDELVTYSLGKFGQRALDFYSIHVTRESNHPVKPLEQIGGNSCASGPVGKALSDACMGAVASFLTKYQDIILEHQKVIKKNEKRLANLKDIASANGLAFPKITLPPQPHTKEGIEAYNNVVAQIVIWVNLNLWQKLKIGRDEAKPLQRLKGFPSFPLVERQANEVDWWDMVCNVKKLINEKKEDGKVFWQNLAGYKRQEALRPYLSSENDRKKGKKFARYQFGDLLLHLEKKHGEDWGKVYDEAWERIDKKVEGLSKHIKLEEERRSEDAQSKAALTDWLRAKASFVIEGLKEADKDEFCRCELKLQKWYGDLRGKPFAIEAENSILDISGFSKQYNCAFIWQKDGVKKLNLYLIINYFKGGKLRFKKIKPEAFEANRFYTVINKKSGEIVPMEVNFNFDDPNLIILPLAFGKRQGREFIWNDLLSLETGSLKLANGRVIEKTLYNRRTRQDEPALFVALTFERREVLDSSNIKPMNLIGIDRGENIPAVIALTDPEGCPLSRFKDSLGNPTHILRIGESYKEKQRTIQAKKEVEQRRAGGYSRKYASKAKNLADDMVRNTARDLLYYAVTQDAMLIFENLSRGFGRQGKRTFMAERQYTRMEDWLTAKLAYEGLSKTYLSKTLAQYTSKTCSNCGFTITSADYDRVLEKLKKTATGWMTTINGKELKVEGQITYYNRRKRQNVVKDLSVELDRLSEESVNNDISSWTKGRSGEALSLLKKRFSHRPVQEKFVCLNCGFETHADEQAALNIARSWLFLRSQEYKKYQTNKTTGNTDKRAFVETWQSFYRKKLKEVWKPAV

SEQ ID NO: 104 - protein, 977 aa, Artificial Sequence
  CasX variant
MQEIKRINKIRRRLVKDSNTKKAGKTGPMKTLLVRVMTPDLRERLENLRKKPENIPQPISNTSRANLNKLLTDYTEMKKAILHVYWEEFQKDPVGLMSRVAQPAPKNIDQRKLIPVKDGNERLTSSGFACSQCCQPLYVYKLEQVNDKGKPHTNYFGRCNVSEHERLILLSPHKPEANDELVTYSLGKFGQRALDFYSIHVTRESNHPVKPLEQIGGNSCASGPVGKALSDACMGAVASFLTKYQDIILEHQKVIKKNEKRLANLKDIASANGLAFPKITLPPQPHTKEGIEAYNNVVAQIVIWVNLNLWQKLKIGRDEAKPLQRLKGFPSFPLVERQANEVDWWDMVCNVKKLINEKKEDGKVFWQNLAGYKRQEALRPYLSSENDRKKGKKFARYQFGDLLKHLEKKHGEDWGKVYDEAWERIDKKVEGLSKHIKLEEERRSEDAQSKAALTDWLRAKASFVIEGLKEADKDEFCRCELKLQKWYGDLRGKPFAIEAENSILDISGFSKQYNCAFIWQKDGVKKLNLYLIINYFKGGKLRFKKIKPEAFEANRFYTVINKKSGEIVPMEVNFNFDDPNLIILPLAFGKRQGREFIWNDLLSLETGSLKLANGRVIEKTLYNRRTRQDEPALFVALTFERREVLDSSNIKPMNLIGIDRGENIPAVIALTDPEGCPLSRFKDSLGNPTHILRIGESYKEKQRTIQAKKEVEQRRAGGYSRKYASKAKNLADDMVRNTARDLLYYAVTQDAMLIFENLSRGFGRQGKRTFMAERQYTRMEDWLTAKLAYEGLSKTYLSKTLAQYTSKTCSNCGFTITSADYDRVLEKLKKTATGWMTTINGKELKVEGQITYYNRRKRQNVVKDLSVELDRLSEESVNNDISSWTKGRSGEALSLLKKRFSHRPVQEKFVCLNCGFETHADEQAALNIARSWLFLRSQEYKKYQTNKTTGNTDKRAFVETWQSFYRKKLKEVWKPAV

SEQ ID NO: 105 - protein, 977 aa, Artificial Sequence
  CasX variant
MQEIKRINKIRRRLVKDSNTKKAGKTGPMKTLLVRVMTPDLRERLENLRKKPENIPQPISNTSRANLNKLLTDYTEMKKAILHVYWEEFQKDPVGLMSRVAQPAPKNIDQRKLIPVKDGNERLTSSGFACSQCCQPLYVYKLEQVNDKGKPHTNYFGRCNVSEHERLILLSPHKPEANDELVTYSLGKFGQRALDFYSIHVTRESNHPVKPLEQIGGNSCASGPVGKALSDACMGAVASFLTKYQDIILEHQKVIKKNEKRLANLKDIASANGLAFPKITLPPQPHTKEGIEAYNNVVAQIVIWVNLNLWQKLKIGRDEAKPLQRLKGFPSFPLVERQANEVDWWDMVCNVKKLINEKKEDGKVFWQNLAGYKRQEALRPYLSSPEDRKKGKKFARYQFGDLLLHLEKKHGEDWGKVYDEAWERIDKKVEGLSKHIKLEEERRSEDAQSKAALTDWLRAKASFVIEGLKEADKDEFCRCELKLQKWYGDLRGKPFAIEAENSILDISGFSKQYNCAFIWQKDGVKKLNLYLIINYFKGGKLRFKKIKPEAFEANRFYTVINKKSGEIVPMEVNFNFDDPNLIILPLAFGKRQGREFIWNDLLSLETGSLKLANGRVIEKTLYNRRTRQDEPALFVALTFERREVLDSSNIKPMNLIGIDRGENIPAVIALTDPEGCPLSRFKDSLGNPTHILRIGESYKEKQRTIQAKKEVEQRRAGGYSRKYASKAKNLANDMVRNTARDLLYYAVTQDAMLIFENLSRGFGRQGKRTFMAERQYTRMEDWLTAKLAYEGLSKTYLSKTLAQYTSKTCSNCGFTITSADYDRVLEKLKKTATGWMTTINGKELKVEGQITYYNRRKRQNVVKDLSVELDRLSEESVNNDISSWTKGRSGEALSLLKKRFSHRPVQEKFVCLNCGFETHADEQAALNIARSWLFLRSQEYKKYQTNKTTGNTDKRAFVETWQSFYRKKLKEVWKPAV

SEQ ID NO: 106 - protein, 977 aa, Artificial Sequence
  CasX variant
MQEIKRINKIRRRLVKDSNTKKAGKTGPMKTLLVRVMTPDLRERLENLRKKPENIPQPISNTSRANLNKLLTDYTEMKKAILHVYWEEFQKDPVGLMSRVAQPAPKNIDQRKLIPVKDGNERLTSSGFACSQCCQPLYVYKLEQVNDKGKPHTNYFGRCNVSEHERLILLSPHKPEANDELVTYSLGKFGQRALDFYSIHVTRESNHPVKPLEQIGGNSCASGPVGKALSDACMGAVASFLTKYQDIILEHQKVIKKNEKRLANLKDIASANGLAFPKITLPPQPHTKEGIEAYNNVVAQIVIWVNLNLWQKLKIGRDEAKPLQRLKGFPSFPLVERQANEVDWWDMVCNVKKLINEKKEDGKVFWQNLAGYKRQEALRPYLSSPEDRKKGKKFARYQFGDLLLHLEKKHGEDWGKVYDEAWERIDKKVEGLSKHIKLEEERRSEDAQSKAALTDWLRAKASFVIEGLKEADKDEFCRCELKLQKWYGDLRGKPFAIEAENSILDISGFSKQYNCAFIWQKDGVKKLNLYLIINYFKGGKLRFKKIKPEAFEANRFYTVINKKSGEIVPMEVNFNFDDPNLIILPLAFGKRQGREFIWNDLLSLETGSLKLANGRVIEKTLYNRRTRQDEPALFVALTFERREVLDSSNIKPMNLIGVDRGENIPAVIALTDPEGCPLSRFKDSLGNPTHILRIGESYKEKQRTIQAKKEVEQRRAGGYSRKYASKAKNLANDMVRNTARDLLYYAVTQDAMLIFENLSRGFGRQGKRTFMAERQYTRMEDWLTAKLAYEGLSKTYLSKTLAQYTSKTCSNCGFTITSADYDRVLEKLKKTATGWMTTINGKELKVEGQITYYNRRKRQNVVKDLSVELDRLSEESVNNDISSWTKGRSGEALSLLKKRFSHRPVQEKFVCLNCGFETHADEQAALNIARSWLFLRSQEYKKYQTNKTTGNTDKRAFVETWQSFYRKKLKEVWKPAV

SEQ ID NO: 107 - protein, 977 aa, Artificial Sequence
  CasX variant
MQEIKRINKIRRRLVKDSNTKKAGKTGPMKTLLVRVMTPDLRERLENLRKKPENIPQPISNTSRANLNKLLTDYTEMKKAILHVYWEEFQKDPVGLMSRVAQPAPKNIDQRKLIPVKDGNERLTSSGFACSQCCQPLYVYKLEQVNDKGKPHTNYFGRCNVSEHERLILLSPHKPEANDELVTYSLGKFGQRALDFYSIHVTRESNHPVKPLEQIGGNSCASGPVGKALSDACMGAVASFLTKYQDIILEHQKVIKKNEKRLANLKDIASANGLAFPKITLPPQPHTKEGIEAYNNVVAQIVIWVNLNLWQKLKIGRDEAKPLQRLKGFPSFPLVERQANEVDWWDMVCNVKKLINEKKEDGKVFWQNLAGYKRQEALRPYLSSPEDRKKGKKFARYQLGDLLLHLEKKHGEDWGKVYDEAWERIDKKVEGLSKHIKLEEERRSEDAQSKAALTDWLRAKASFVIEGLKEADKDEFCRCELKLQKWYGDLRGKPFAIEAENSILDISGFSKQYNCAFIWQKDGVKKLNLYLIINYFKGGKLRFKKIKPEAFEANRFYTVINKKSGEIVPMEVNFNFDDPNLIILPLAFGKRQGREFIWNDLLSLETGSLKLANGRVIEKTLYNRRTRQDEPALFVALTFERREVLDSSNIKPMNLIGVDRGENIPAVIALTDPEGCPLSRFKDSLGNPTHILRIGESYKEKQRTIQAKKEVEQRRAGGYSRKYASKAKNLANDMVRNTARDLLYYAVTQDAMLIFENLSRGFGRQGKRTFMAERQYTRMEDWLTAKLAYEGLSKTYLSKTLAQYTSKTCSNCGFTITSADYDRVLEKLKKTATGWMTTINGKELKVEGQITYYNRRKRQNVVKDLSVELDRLSEESVNNDISSWTKGRSGEALSLLKKRFSHRPVQEKFVCLNCGFETHADEQAALNIARSWLFLRSQEYKKYQTNKTTGNTDKRAFVETWQSFYRKKLKEVWKPAV

SEQ ID NO: 108 - protein, 977 aa, Artificial Sequence
  CasX variant
MQEIKRINKIRRRLVKDSNTKKAGKTGPMKTLLVRVMTPDLRERLENLRKKPENIPQPISNTSRANLNKLLTDYTEMKKAILHVYWEEFQKDPVGLMSRVAQPAPKNIDQRKLIPVKDGNERLTSSGFACSQCCQPLYVYKLEQVNDKGKPHTNYFGRCNVSEHERLILLSPHKPEANDELVTYSLGKFGQRALDFYSIHVTRESNHPVKPLEQIGGNSCASGPVGKALSDACMGAVASFLTKYQDIILEHQKVIKKNEKRLANLKDIASANGLAFPKITLPPQPHTKEGIEAYNNVVAQIVIWVNLNLWQKLKIGRDEAKPLQRLKGFPSFPLVERQANEVDWWDMVCNVKKLINEKKEDGKVFWQNLAGYKRQEALRPYLSSPNDRKKGKKFARYQFGDLLLHLEKKHGEDWGKVYDEAWERIDKKVEGLSKHIKLEEERRSEDAQSKAALTDWLRAKASFVIEGLKEADKDEFCRCELKLQKWYGDLRGKPFAIEAENSILDISGFSKQYNCAFIWQKDGVKKLNLYLIINYFKGGKLRFKKIKPEAFEANRFYTVINKKSGEIVPMEVNFNFDDPNLIILPLAFGKRQGREFIWNDLLSLETGSLKLANGRVIEKTLYNRRTRQDEPALFVALTFERREVLDSSNIKPMNLIGVDRGENIPAVIALTDPEGCPLSRFKDSLGNPTHILRIGESYKEKQRTIQAKKEVEQRRAGGYSRKYASKAKNLANDMVRNTARDLLYYAVTQDAMLIFENLSRGFGRQGKRTFMAERQYTRMEDWLTAKLAYEGLSKTYLSKTLAQYTSKTCSNCGFTITSADYDRVLEKLKKTATGWMTTINGKELKVEGQITYYNRRKRQNVVKDLSVELDRLSEESVNNDISSWTKGRSGEALSLLKKRFSHRPVQEKFVCLNCGFETHADEQAALNIARSWLFLRSQEYKKYQTNKTTGNTDKRAFVETWQSFYRKKLKEVWKPAV

SEQ ID NO: 109 - protein, 977 aa, Artificial Sequence
  CasX variant
MQEIKRINKIRRRLVKDSNTKKAGKTGPMKTLLVRVMTPDLRERLENLRKKPENIPQPISNTSRANLNKLLTDYTEMKKAILHVYWEEFQKDPVGLMSRVAQPAPKNIDQRKLIPVKDGNERLTSSGFACSQCCQPLYVYKLEQVNDKGKPHTNYFGRCNVSEHERLILLSPHKPEANDELVTYSLGKFGQRALDFYSIHVTRESNHPVKPLEQIGGNSCASGPVGKALSDACMGAVASFLTKYQDIILEHQKVIKKNEKRLANLKDIASANGLAFPKITLPPQPHTKEGIEAYNNVVAQIVIWVNLNLWQKLKIGRDEAKPLQRLKGFPSFPLVERQANEVDWWDMVCNVKKLINEKKEDGKVFWQNLAGYKRQEALRPYLSSPEDRKKGKKFARYQFGDLLKHLEKKHGEDWGKVYDEAWERIDKKVEGLSKHIKLEEERRSEDAQSKAALTDWLRAKASFVIEGLKEADKDEFCRCELKLQKWYGDLRGKPFAIEAENSILDISGFSKQYNCAFIWQKDGVKKLNLYLIINYFKGGKLRFKKIKPEAFEANRFYTVINKKSGEIVPMEVNFNFDDPNLIILPLAFGKRQGREFIWNDLLSLETGSLKLANGRVIEKTLYNRRTRQDEPALFVALTFERREVLDSSNIKPMNLIGVDRGENIPAVIALTDPEGCPLSRFKDSLGNPTHILRIGESYKEKQRTIQAKKEVEQRRAGGYSRKYASKAKNLANDMVRNTARDLLYYAVTQDAMLIFENLSRGFGRQGKRTFMAERQYTRMEDWLTAKLAYEGLSKTYLSKTLAQYTSKTCSNCGFTITSADYDRVLEKLKKTATGWMTTINGKELKVEGQITYYNRRKRQNVVKDLSVELDRLSEESVNNDISSWTKGRSGEALSLLKKRFSHRPVQEKFVCLNCGFETHADEQAALNIARSWLFLRSQEYKKYQTNKTTGNTDKRAFVETWQSFYRKKLKEVWKPAV

SEQ ID NO: 110 - protein, 977 aa, Artificial Sequence
  CasX variant
MQEIKRINKIRRRLVKDSNTKKAGKTGPMKTLLVRVMTPDLRERLENLRKKPENIPQPISNTSRANLNKLLTDYTEMKKAILHVYWEEFQKDPVGLMSRVAQPAPKNIDQRKLIPVKDGNERLTSSGFACSQCCQPLYVYKLEQVNDKGKPHTNYFGRCNVSEHERLILLSPHKPEANDELVTYSLGKFGQRALDFYSIHVTRESNHPVKPLEQIGGNSCASGPVGKALSDACMGAVASFLTKYQDIILEHKKVIKKNEKRLANLKDIASANGLAFPKITLPPQPHTKEGIEAYNNVVAQIVIWVNLNLWQKLKIGRDEAKPLQRLKGFPSFPLVERQANEVDWWDMVCNVKKLINEKKEDGKVFWQNLAGYKRQEALRPYLSSPEDRKKGKKFARYQFGDLLLHLEKKHGEDWGKVYDEAWERIDKKVEGLSKHIKLEEERRSEDAQSKAALTDWLRAKASFVIEGLKEADKDEFCRCELKLQKWYGDLRGKPFAIEAENSILDISGFSKQYNCAFIWQKDGVKKLNLYLIINYFKGGKLRFKKIKPEAFEANRFYTVINKKSGEIVPMEVNFNFDDPNLIILPLAFGKRQGREFIWNDLLSLETGSLKLANGRVIEKPLYNRRTRQDEPALFVALTFERREVLDSSNIKPMNLIGIDRGENIPAVIALTDPEGCPLSRFKDSLGNPTHILRIGESYKEKQRTIQAKKEVEQRRAGGYSRKYASKAKNLADDMVRNTARDLLYYAVTQDAMLIFENLSRGFGRQGKRTFMAERQYTRMEDWLTAKLAYEGLSKTYLSKTLAQYTSKTCSNCGFTITSADYDRVLEKLKKTATGWMTTINGKELKVEGQITYYNRRKRQNVVKDLSVELDRLSEESVNNDISSWTKGRSGEALSLLKKRFSHRPVQEKFVCLNCGFETHADEQAALNIARSWLFLRSQEYKKYQTNKTTGNTDKRAFVETWQSFYRKKLKEVWKPAV

SEQ ID NO: 111 - protein, 977 aa, Artificial Sequence
  CasX variant
MQEIKRINKIRRRLVKDSNTKKAGKTGPMKTLLVRVMTPDLRERLENLRKKPENIPQPISNTSRANLNKLLTDYTEMKKAILHVYWEEFQKDPVGLMSRVAQPAPKNIDQRKLIPVKDGNERLTSSGFACSQCCQPLYVYKLEQVNDKGKPHTNYFGRCNVSEHERLILLSPHKPEANDELVTYSLGKFGQRALDFYSIHVTRESNHPVKPLEQIGGNSCASGPVGKALSDACMGAVASFLTKYQDIILEHKKVIKKNEKRLANLKDIASANGLAFPKITLPPQPHTKEGIEAYNNVVAQIVIWVNLNLWQKLKIGRDEAKPLQRLKGFPSFPLVERQANEVDWWDMVCNVKKLINEKKEDGKVFWQNLAGYKRQEALRPYLSSPEDRKKGKKFARYQFGDLLLHLEKKHGEDWGKVYDEAWERIDKKVEGLSKHIKLEEERRSEDAQSKAALTDWLRAKASFVIEGLKEADKDEFCRCELKLQKWYGDLRGKPFAIEAENSILDISGFSKQYNCAFIWQKDGVKKLNLYLIINYFKGGKLRFKKIKPEAFEANRFYTVINKKSGEIVPMEVNFNFDDPNLIILPLAFGKRQGREFIWNDLLSLETGSLKLANGRVIEKPLYNRRTRQDEPALFVALTFERREVLDSSNIKPMNLIGVDRGENIPAVIALTDPEGCPLSRFKDSLGNPTHILRIGESYKEKQRTIQAKKEVEQRRAGGYSRKYASKAKNLADDMVRNTARDLLYYAVTQDAMLIFENLSRGFGRQGKRTFMAERQYTRMEDWLTAKLAYEGLSKTYLSKTLAQYTSKTCSNCGFTITSADYDRVLEKLKKTATGWMTTINGKELKVEGQITYYNRRKRQNVVKDLSVELDRLSEESVNNDISSWTKGRSGEALSLLKKRFSHRPVQEKFVCLNCGFETHADEQAALNIARSWLFLRSQEYKKYQTNKTTGNTDKRAFVETWQSFYRKKLKEVWKPAV

SEQ ID NO: 112 - protein, 977 aa, Artificial Sequence
  CasX variant
MQEIKRINKIRRRLVKDSNTKKAGKTGPMKTLLVRVMTPDLRERLENLRKKPENIPQPISNTSRANLNKLLTDYTEMKKAILHVYWEEFQKDPVGLMSRVAQPAPKNIDQRKLIPVKDGNERLTSSGFACSQCCQPLYVYKLEQVNDKGKPHTNYFGRCNVSEHERLILLSPHKPEANDELVTYSLGKFGQRALDFYSIHVTRESNHPVKPLEQIGGNSCASGPVGKALSDACMGAVASFLTKYQDIILEHKKVIKKNEKRLANLKDIASANGLAFPKITLPPQPHTKEGIEAYNNVVAQIVIWVNLNLWQKLKIGRDEAKPLQRLKGFPSFPLVERQANEVDWWDMVCNVKKLINEKKEDGKVFWQNLAGYKRQEALRPYLSSPNDRKKGKKFARYQFGDLLLHLEKKHGEDWGKVYDEAWERIDKKVEGLSKHIKLEEERRSEDAQSKAALTDWLRAKASFVIEGLKEADKDEFCRCELKLQKWYGDLRGKPFAIEAENSILDISGFSKQYNCAFIWQKDGVKKLNLYLIINYFKGGKLRFKKIKPEAFEANRFYTVINKKSGEIVPMEVNFNFDDPNLIILPLAFGKRQGREFIWNDLLSLETGSLKLANGRVIEKPLYNRRTRQDEPALFVALTFERREVLDSSNIKPMNLIGVDRGENIPAVIALTDPEGCPLSRFKDSLGNPTHILRIGESYKEKQRTIQAKKEVEQRRAGGYSRKYASKAKNLADDMVRNTARDLLYYAVTQDAMLIFENLSRGFGRQGKRTFMAERQYTRMEDWLTAKLAYEGLSKTYLSKTLAQYTSKTCSNCGFTITSADYDRVLEKLKKTATGWMTTINGKELKVEGQITYYNRRKRQNVVKDLSVELDRLSEESVNNDISSWTKGRSGEALSLLKKRFSHRPVQEKFVCLNCGFETHADEQAALNIARSWLFLRSQEYKKYQTNKTTGNTDKRAFVETWQSFYRKKLKEVWKPAV

SEQ ID NO: 113 - protein, 977 aa, Artificial Sequence
  CasX variant
MQEIKRINKIRRRLVKDSNTKKAGKTGPMKTLLVRVMTPDLRERLENLRKKPENIPQPISNTSRANLNKLLTDYTEMKKAILHVYWEEFQKDPVGLMSRVAQPAPKNIDQRKLIPVKDGNERLTSSGFACSQCCQPLYVYKLEQVNDKGKPHTNYFGRCNVSEHERLILLSPHKPEANDELVTYSLGKFGQRALDFYSIHVTRESNHPVKPLEQIGGNSCASGPVGKALSDACMGAVASFLTKYQDIILEHKKVIKKNEKRLANLKDIASANGLAFPKITLPPQPHTKEGIEAYNNVVAQIVIWVNLNLWQKLKIGRDEAKPLQRLKGFPSFPLVERQANEVDWWDMVCNVKKLINEKKEDGKVFWQNLAGYKRQEALRPYLSSPEDRKKGKKFARYQLGDLLLHLEKKHGEDWGKVYDEAWERIDKKVEGLSKHIKLEEERRSEDAQSKAALTDWLRAKASFVIEGLKEADKDEFCRCELKLQKWYGDLRGKPFAIEAENSILDISGFSKQYNCAFIWQKDGVKKLNLYLIINYFKGGKLRFKKIKPEAFEANRFYTVINKKSGEIVPMEVNFNFDDPNLIILPLAFGKRQGREFIWNDLLSLETGSLKLANGRVIEKPLYNRRTRQDEPALFVALTFERREVLDSSNIKPMNLIGVDRGENIPAVIALTDPEGCPLSRFKDSLGNPTHILRIGESYKEKQRTIQAKKEVEQRRAGGYSRKYASKAKNLADDMVRNTARDLLYYAVTQDAMLIFENLSRGFGRQGKRTFMAERQYTRMEDWLTAKLAYEGLSKTYLSKTLAQYTSKTCSNCGFTITSADYDRVLEKLKKTATGWMTTINGKELKVEGQITYYNRRKRQNVVKDLSVELDRLSEESVNNDISSWTKGRSGEALSLLKKRFSHRPVQEKFVCLNCGFETHADEQAALNIARSWLFLRSQEYKKYQTNKTTGNTDKRAFVETWQSFYRKKLKEVWKPAV

SEQ ID NO: 114 - protein, 977 aa, Artificial Sequence
  CasX variant
MQEIKRINKIRRRLVKDSNTKKAGKTGPMKTLLVRVMTPDLRERLENLRKKPENIPQPISNTSRANLNKLLTDYTEMKKAILHVYWEEFQKDPVGLMSRVAQPAPKNIDQRKLIPVKDGNERLTSSGFACSQCCQPLYVYKLEQVNDKGKPHTNYFGRCNVSEHERLILLSPHKPEANDELVTYSLGKFGQRALDFYSIHVTRESNHPVKPLEQIGGNSCASGPVGKALSDACMGAVASFLTKYQDIILEHKKVIKKNEKRLANLKDIASANGLAFPKITLPPQPHTKEGIEAYNNVVAQIVIWVNLNLWQKLKIGRDEAKPLQRLKGFPSFPLVERQANEVDWWDMVCNVKKLINEKKEDGKVFWQNLAGYKRQEALRPYLSSPEDRKKGKKFARYQFGDLLKHLEKKHGEDWGKVYDEAWERIDKKVEGLSKHIKLEEERRSEDAQSKAALTDWLRAKASFVIEGLKEADKDEFCRCELKLQKWYGDLRGKPFAIEAENSILDISGFSKQYNCAFIWQKDGVKKLNLYLIINYFKGGKLRFKKIKPEAFEANRFYTVINKKSGEIVPMEVNFNFDDPNLIILPLAFGKRQGREFIWNDLLSLETGSLKLANGRVIEKPLYNRRTRQDEPALFVALTFERREVLDSSNIKPMNLIGVDRGENIPAVIALTDPEGCPLSRFKDSLGNPTHILRIGESYKEKQRTIQAKKEVEQRRAGGYSRKYASKAKNLADDMVRNTARDLLYYAVTQDAMLIFENLSRGFGRQGKRTFMAERQYTRMEDWLTAKLAYEGLSKTYLSKTLAQYTSKTCSNCGFTITSADYDRVLEKLKKTATGWMTTINGKELKVEGQITYYNRRKRQNVVKDLSVELDRLSEESVNNDISSWTKGRSGEALSLLKKRFSHRPVQEKFVCLNCGFETHADEQAALNIARSWLFLRSQEYKKYQTNKTTGNTDKRAFVETWQSFYRKKLKEVWKPAV

SEQ ID NO: 115 - protein, 977 aa, Artificial Sequence
  CasX variant
MQEIKRINKIRRRLVKDSNTKKAGKTGPMKTLLVRVMTPDLRERLENLRKKPENIPQPISNTSRANLNKLLTDYTEMKKAILHVYWEEFQKDPVGLMSRVAQPAPKNIDQRKLIPVKDGNERLTSSGFACSQCCQPLYVYKLEQVNDKGKPHTNYFGRCNVSEHERLILLSPHKPEANDELVTYSLGKFGQRALDFYSIHVTRESNHPVKPLEQIGGNSCASGPVGKALSDACMGAVASFLTKYQDIILEHQKVIKKNEKRLANLKDIASANGLAFPKITLPPQPHTKEGIEAYNNVVAQIVIWVNLNLWQKLKIGRDEAKPLQRLKGFPSFPLVERQANEVDWWDMVCNVKKLINEKKEDGKVFWQNLAGYKRQEALRPYLSSENDRKKGKKFARYQFGDLLLHLEKKHGEDWGKVYDEAWERIDKKVEGLSKHIKLEEERRSEDAQSKAALTDWLRAKASFVIEGLKEADKDEFCRCELKLQKWYGDLRGKPFAIEAENSILDISGFSKQYNCAFIWQKDGVKKLNLYLIINYFKGGKLRFKKIKPEAFEANRFYTVINKKSGEIVPMEVNFNFDDPNLIILPLAFGKRQGREFIWNDLLSLETGSLKLANGRVIEKPLYNRRTRQDEPALFVALTFERREVLDSSNIKPMNLIGVDRGENIPAVIALTDPEGCPLSRFKDSLGNPTHILRIGESYKEKQRTIQAKKEVEQRRAGGYSRKYASKAKNLADDMVRNTARDLLYYAVTQDAMLIFENLSRGFGRQGKRTFMAERQYTRMEDWLTAKLAYEGLSKTYLSKTLAQYTSKTCSNCGFTITSADYDRVLEKLKKTATGWMTTINGKELKVEGQITYYNRRKRQNVVKDLSVELDRLSEESVNNDISSWTKGRSGEALSLLKKRFSHRPVQEKFVCLNCGFETHADEQAALNIARSWLFLRSQEYKKYQTNKTTGNTDKRAFVETWQSFYRKKLKEVWKPAV

SEQ ID NO: 116 - protein, 977 aa, Artificial Sequence
  CasX variant
MQEIKRINKIRRRLVKDSNTKKAGKTGPMKTLLVRVMTPDLRERLENLRKKPENIPQPISNTSRANLNKLLTDYTEMKKAILHVYWEEFQKDPVGLMSRVAQPAPKNIDQRKLIPVKDGNERLTSSGFACSQCCQPLYVYKLEQVNDKGKPHTNYFGRCNVSEHERLILLSPHKPEANDELVTYSLGKFGQRALDFYSIHVTRESNHPVKPLEQIGGNSCASGPVGKALSDACMGAVASFLTKYQDIILEHKKVIKKNEKRLANLKDIASANGLAFPKITLPPQPHTKEGIEAYNNVVAQIVIWVNLNLWQKLKIGRDEAKPLQRLKGFPSFPLVERQANEVDWWDMVCNVKKLINEKKEDGKVFWQNLAGYKRQEALRPYLSSPEDRKKGKKFARYQFGDLLLHLEKKHGEDWGKVYDEAWERIDKKVEGLSKHIKLEEERRSEDAQSKAALTDWLRAKASFVIEGLKEADKDEFCRCELKLQKWYGDLRGKPFAIEAENSILDISGFSKQYNCAFIWQKDGVKKLNLYLIINYFKGGKLRFKKIKPEAFEANRFYTVINKKSGEIVPMEVNFNFDDPNLIILPLAFGKRQGREFIWNDLLSLETGSLKLANGRVIEKPLYNRRTRQDEPALFVALTFERREVLDSSNIKPMNLIGIDRGENIPAVIALTDPEGCPLSRFKDSLGNPTHILRIGESYKEKQRTIQAKKEVEQRRAGGYSRKYASKAKNLADDMVRNTARDLLYYAVTQDAMLIFENLSRGFGRQGKRTFMAERQYTRMEDWLTAKLAYEGLSKTYLSKTLAQYTSKTCSNCGFTITSADYDRVLEKLKKTATGWMTTINGKELKVEGQITYYNRYKRQNVVKDLSVELDRLSEESVNNDISSWTKGRSGEALSLLKKRFSHRPVQEKFVCLNCGFETHADEQAALNIARSWLFLRSQEYKKYQTNKTTGNTDKRAFVETWQSFYRKKLKEVWKPAV

SEQ ID NO: 117 - protein, 976 aa, Artificial Sequence
  CasX variant
QEIKRINKIRRRLVKDSNTKKAGKTGPMKTLLVRVMTPDLRERLENLRKKPENIPQPISNTSRANLNKLLTDYTEMKKAILHVYWEEFQKDPVGLMSRVAQPAPKNIDQRKLIPVKDGNERLTSSGFACSQCCQPLYVYKLEQVNDKGKPHTNYFGRCNVSEHERLILLSPHKPEANDELVTYSLGKFGQRALDFYSIHVTRESNHPVKPLEQIGGNSCASGPVGKALSDACMGAVASFLTKYQDIILEHQKVIKKNEKRLANLKDIASANGLAFPKITLPPQPHTKEGIEAYNNVVAQIVIWVNLNLWQKLKIGRDEAKPLQRLKGFPSFPLVERQANEVDWWDMVCNVKKLINEKKEDGKVFWQNLAGYKRQEALRPYLSSEEDRKKGKKFARYQFGDLLLHLEKKHGEDWGKVYDEAWERIDKKVEGLSKHIKLEEERRSEDAQSKAALTDWLRAKASFVIEGLKEADKDEFCRCELKLQKWYGDLRGKPFAIEAENSILDISGFSKQYNCAFIWQKDGVKKLNLYLIINYFKGGKLRFKKIKPEAFEANRFYTVINKKSGEIVPMEVNFNFDDPNLIILPLAFGKRQGREFIWNDLLSLETGSLKLANGRVIEKTLYNRRTRQDEPALFVALTFERREVLDSSNIKPMNLIGIDRGENIPAVIALTDPEGCPLSRFKDSLGNPTHILRIGESYKEKQRTIQAKKEVEQRRAGGYSRKYASKAKNLADDMVRNTARDLLYYAVTQDAMLIFENLSRGFGRQGKRTFMAERQYTRMEDWLTAKLAYEGLSKTYLSKTLAQYTSKTCSNCGFTITSADYDRVLEKLKKTATGWMTTINGKELKVEGQITYYNRYKRQNVVKDLSVELDRLSEESVNNDISSWTKGRSGEALSLLKKRFSHRPVQEKFVCLNCGFETHADEQAALNIARSWLFLRSQEYKKYQTNKTTGNTDKRAFVETWQSFYRKKLKEVWKPAV

SEQ ID NO: 118 - protein, 977 aa, Artificial Sequence; identical to SEQ ID NO: 72
  CasX variant

SEQ ID NO: 119 - protein, 977 aa, Artificial Sequence; identical to SEQ ID NO: 72
  CasX variant

SEQ ID NO: 120 - protein, 977 aa, Artificial Sequence; identical to SEQ ID NO: 72
  CasX variant

SEQ ID NO: 121 - protein, 977 aa, Artificial Sequence; identical to SEQ ID NO: 72
  CasX variant

SEQ ID NO: 122 - protein, 977 aa, Artificial Sequence; identical to SEQ ID NO: 72
  CasX variant

SEQ ID NO: 123 - protein, 978 aa, Artificial Sequence
  CasX variant
MQEIKRINKIRRRLVKDSNTKKAGKTGPMKTLLVRVMTPDLRERLENLRKKPENIPQPISNTSRANLNKLLTDYTEMKKAILHVYWEEFQKDPVGLMSRVAQPAPKNIDQRKLIPVKDGNERLTMSSGFACSQCCQPLYVYKLEQVNDKGKPHTNYFGRCNVSEHERLILLSPHKPEANDELVTYSLGKFGQRALDFYSIHVTRESNHPVKPLEQIGGNSCASGPVGKALSDACMGAVASFLTKYQDIILEHQKVIKKNEKRLANLKDIASANGLAFPKITLPPQPHTKEGIEAYNNVVAQIVIWVNLNLWQKLKIGRDEAKPLQRLKGFPSFPLVERQANEVDWWDMVCNVKKLINEKKEDGKVFWQNLAGYKRQEALRPYLSSEEDRKKGKKFARYQFGDLLLHLEKKHGEDWGKVYDEAWERIDKKVEGLSKHIKLEEERRSEDAQSKAALTDWLRAKASFVIEGLKEADKDEFCRCELKLQKWYGDLRGKPFAIEAENSILDISGFSKQYNCAFIWQKDGVKKLNLYLIINYFKGGKLRFKKIKPEAFEANRFYTVINKKSGEIVPMEVNFNFDDPNLIILPLAFGKRQGREFIWNDLLSLETGSLKLANGRVIEKTLYNRRTRQDEPALFVALTFERREVLDSSNIKPMNLIGIDRGENIPAVIALTDPEGCPLSRFKDSLGNPTHILRIGESYKEKQRTIQAKKEVEQRRAGGYSRKYASKAKNLADDMVRNTARDLLYYAVTQDAMLIFENLSRGFGRQGKRTFMAERQYTRMEDWLTAKLAYEGLSKTYLSKTLAQYTSKTCSNCGFTITSADYDRVLEKLKKTATGWMTTINGKELKVEGQITYYNRYKRQNVVKDLSVELDRLSEESVNNDISSWTKGRSGEALSLLKKRFSHRPVQEKFVCLNCGFETHADEQAALNIARSWLFLRSQEYKKYQTNKTTGNTDKRAFVETWQSFYRKKLKEVWKPAV

SEQ ID NO: 124 - protein, 977 aa, Artificial Sequence; identical to SEQ ID NO: 72
  CasX variant

SEQ ID NO: 125 - protein, 977 aa, Artificial Sequence; identical to SEQ ID NO: 72
  CasX variant

SEQ ID NO: 126 - protein, 977 aa, Artificial Sequence; identical to SEQ ID NO: 72
  CasX variant

SEQ ID NO: 127 - protein, 977 aa, Artificial Sequence; identical to SEQ ID NO: 72
  CasX variant

SEQ ID NO: 128 - protein, 977 aa, Artificial Sequence; identical to SEQ ID NO: 72
  CasX variant

SEQ ID NO: 129 - protein, 977 aa, Artificial Sequence; identical to SEQ ID NO: 72
  CasX variant

SEQ ID NO: 130 - protein, 977 aa, Artificial Sequence
  CasX variant
QEIKRINKIRRRLVKDSNTKKAGKTGPMKTLLVRVMTPDLRERLENLRKKPENIPQPISNTSRANLNKLLTDYTEMKKAILHVYWEEFQKDPVGLMSRVAQPASKKIDQNKLKPEMDEKGNLTTAGFACSQCGQPLFVYKLEQVSEKGKAYTNYFGRCNVAEHEKLILLAQLKPEKDSDEAVTYSLGKFGQRALDFYSIHVTRESNHPVKPLEQIGGNSCASGPVGKALSDACMGAVASFLTKYQDIILEHQKVIKKNEKRLANLKDIASANGLAFPKITLPPQPHTKEGIEAYNNVVAQIVIWVNLNLWQKLKIGRDEAKPLQRLKGFPSFPLVERQANEVDWWDMVCNVKKLINEKKEDGKVFWQNLAGYKRQEALRPYLSSEEDRKKGKKFARYQFGDLLLHLEKKHGEDWGKVYDEAWERIDKKVEGLSKHIKLEEERRSEDAQSKAALTDWLRAKASFVIEGLKEADKDEFCRCELKLQKWYGDLRGKPFAIEAENSILDISGFSKQYNCAFIWQKDGVKKLNLYLIINYFKGGKLRFKKIKPEAFEANRFYTVINKKSGEIVPMEVNFNFDDPNLIILPLAFGKRQGREFIWNDLLSLETGSLKLANGRVIEKTLYNRRTRQDEPALFVALTFERREVLDSSNIKPMNLIGIDRGENIPAVIALTDPEGCPLSRFKDSLGNPTHILRIGESYKEKQRTIQAKKEVEQRRAGGYSRKYASKAKNLADDMVRNTARDLLYYAVTQDAMLIFENLSRGFGRQGKRTFMAERQYTRMEDWLTAKLAYEGLSKTYLSKTLAQYTSKTCSNCGFTITSADYDRVLEKLKKTATGWMTTINGKELKVEGQITYYNRYKRQNVVKDLSVELDRLSEESVNNDISSWTKGRSGEALSLLKKRFSHRPVQEKFVCLNCGFETHADEQAALNIARSWLFLRSQEYKKYQTNKTTGNTDKRAFVETWQSFYRKKLKEVWKPAV

SEQ ID NO: 131 - protein, 976 aa, Artificial Sequence
  CasX variant
QEIKRINKIRRRLVKDSNTKKAGKTGPMKTLLVRVMTPDLRERLENLRKKPENIPQPISNTSRANLNKLLTDYTEMKKAILHVYWEEFQKDPVGLMSRVAQPAPKNIDQRKLIPVKDGNERLTSSGFACSQCCQPLYVYKLEQVNDKGKPHTNYFGRCNVSEHERLILLSPHKPEANDELVTYSLGKFGQRALDFYSIHVTKESTHPVKPLAQIAGNRYASGPVGKALSDACMGTIASFLSKYQDIIIEHQKVVKGNQKRLESLRELAGKENLEYPSVTLPPQPHTKEGVDAYNEVIARVRMWVNLNLWQKLKLSRDDAKPLLRLKGFPSFPLVERQANEVDWWDMVCNVKKLINEKKEDGKVFWQNLAGYKRQEALRPYLSSEEDRKKGKKFARYQFGDLLLHLEKKHGEDWGKVYDEAWERIDKKVEGLSKHIKLEEERRSEDAQSKAALTDWLRAKASFVIEGLKEADKDEFCRCELKLQKWYGDLRGKPFAIEAENSILDISGFSKQYNCAFIWQKDGVKKLNLYLIINYFKGGKLRFKKIKPEAFEANRFYTVINKKSGEIVPMEVNFNFDDPNLIILPLAFGKRQGREFIWNDLLSLETGSLKLANGRVIEKTLYNRRTRQDEPALFVALTFERREVLDSSNIKPMNLIGIDRGENIPAVIALTDPEGCPLSRFKDSLGNPTHILRIGESYKEKQRTIQAKKEVEQRRAGGYSRKYASKAKNLADDMVRNTARDLLYYAVTQDAMLIFENLSRGFGRQGKRTFMAERQYTRMEDWLTAKLAYEGLSKTYLSKTLAQYTSKTCSNCGFTITSADYDRVLEKLKKTATGWMTTINGKELKVEGQITYYNRYKRQNVVKDLSVELDRLSEESVNNDISSWTKGRSGEALSLLKKRFSHRPVQEKFVCLNCGFETHADEQAALNIARSWLFLRSQEYKKYQTNKTTGNTDKRAFVETWQSFYRKKLKEVWKPAV

SEQ ID NO: 132 - protein, 976 aa, Artificial Sequence
  CasX variant
QEIKRINKIRRRLVKDSNTKKAGKTGPMKTLLVRVMTPDLRERLENLRKKPENIPQPISNTSRANLNKLLTDYTEMKKAILHVYWEEFQKDPVGLMSRVAQPAPKNIDQRKLIPVKDGNERLTSSGFACSQCCQPLYVYKLEQVNDKGKPHTNYFGRCNVSEHERLILLSPHKPEANDELVTYSLGKFGQRALDFYSIHVTKESTHPVKPLAQIAGNRYASGPVGKALSDACMGTIASFLSKYQDIIIEHQKVVKGNQKRLESLRELAGKENLEYPSVTLPPQPHTKEGVDAYNEVIARVRMWVNLNLWQKLKLSRDDAKPLLRLKGFPSFPLVERQANEVDWWDMVCNVKKLINEKKEDGKVFWQNLAGYKRQEALRPYLSSEEDRKKGKKFARYQLGDLLLHLEKKHGEDWGKVYDEAWERIDKKVEGLSKHIKLEEERRSEDAQSKAALTDWLRAKASFVIEGLKEADKDEFCRCELKLQKWYGDLRGKPFAIEAENSILDISGFSKQYNCAFIWQKDGVKKLNLYLIINYFKGGKLRFKKIKPEAFEANRFYTVINKKSGEIVPMEVNFNFDDPNLIILPLAFGKRQGREFIWNDLLSLETGSLKLANGRVIEKTLYNRRTRQDEPALFVALTFERREVLDSSNIKPMNLIGVDRGENIPAVIALTDPEGCPLSRFKDSLGNPTHILRIGESYKEKQRTIQAKKEVEQRRAGGYSRKYASKAKNLADDMVRNTARDLLYYAVTQDAMLIFENLSRGFGRQGKRTFMAERQYTRMEDWLTAKLAYEGLSKTYLSKTLAQYTSKTCSNCGFTITSADYDRVLEKLKKTATGWMTTINGKELKVEGQITYYNRRKRQNVVKDLSVELDRLSEESVNNDISSWTKGRSGEALSLLKKRFSHRPVQEKFVCLNCGFETHADEQAALNIARSWLFLRSQEYKKYQTNKTTGNTDKRAFVETWQSFYRKKLKEVWKPAV

SEQ ID NO: 133 - protein, 976 aa, Artificial Sequence
  CasX variant
QEIKRINKIRRRLVKDSNTKKAGKTGPMKTLLVRVMTPDLRERLENLRKKPENIPQPISNTSRANLNKLLTDYTEMKKAILHVYWEEFQKDPVGLMSRVAQPAPKNIDQRKLIPVKDGNERLTSSGFACSQCCQPLYVYKLEQVNDKGKPHTNYFGRCNVSEHERLILLSPHKPEANDELVTYSLGKFGQRALDFYSIHVTKESTHPVKPLAQIAGNRYASGPVGKALSDACMGTIASFLSKYQDIIIEHQKVVKGNQKRLESLRELAGKENLEYPSVTLPPQPHTKEGVDAYNEVIARVRMWVNLNLWQKLKLSRDDAKPLLRLKGFPSFPLVERQANEVDWWDMVCNVKKLINEKKEDGKVFWQNLAGYKRQEALRPYLSSEEDRKKGKKFARYQLGDLLKHLEKKHGEDWGKVYDEAWERIDKKVEGLSKHIKLEEERRSEDAQSKAALTDWLRAKASFVIEGLKEADKDEFCRCELKLQKWYGDLRGKPFAIEAENSILDISGFSKQYNCAFIWQKDGVKKLNLYLIINYFKGGKLRFKKIKPEAFEANRFYTVINKKSGEIVPMEVNFNFDDPNLIILPLAFGKRQGREFIWNDLLSLETGSLKLANGRVIEKTLYNRRTRQDEPALFVALTFERREVLDSSNIKPMNLIGVDRGENIPAVIALTDPEGCPLSRFKDSLGNPTHILRIGESYKEKQRTIQAKKEVEQRRAGGYSRKYASKAKNLADDMVRNTARDLLYYAVTQDAMLIFENLSRGFGRQGKRTFMAERQYTRMEDWLTAKLAYEGLSKTYLSKTLAQYTSKTCSNCGFTITSADYDRVLEKLKKTATGWMTTINGKELKVEGQITYYNRRKRQNVVKDLSVELDRLSEESVNNDISSWTKGRSGEALSLLKKRFSHRPVQEKFVCLNCGFETHADEQAALNIARSWLFLRSQEYKKYQTNKTTGNTDKRAFVETWQSFYRKKLKEVWKPAV

SEQ ID NO: 134 - protein, 976 aa, Artificial Sequence
  CasX variant
QEIKRINKIRRRLVKDSNTKKAGKTGPMKTLLVRVMTPDLRERLENLRKKPENIPQPISNTSRANLNKLLTDYTEMKKAILHVYWEEFQKDPVGLMSRVAQPAPKNIDQRKLIPVKDGNERLTSSGFACSQCCQPLYVYKLEQVNDKGKPHTNYFGRCNVSEHERLILLSPHKPEANDELVTYSLGKFGQRALDFYSIHVTKESTHPVKPLAQIAGNRYASGPVGKALSDACMGTIASFLSKYQDIIIEHQKVVKGNQKRLESLRELAGKENLEYPSVTLPPQPHTKEGVDAYNEVIARVRMWVNLNLWQKLKLSRDDAKPLLRLKGFPSFPLVERQANEVDWWDMVCNVKKLINEKKEDGKVFWQNLAGYKRQEALRPYLSSEEDRKKGKKFARYQLGDLLLHLEKKHGEDWGKVYDEAWERIDKKVEGLSKHIKLEEERRSEDAQSKAALTDWLRAKASFVIEGLKEADKDEFCRCELKLQKWYGDLRGKPFAIEAENSILDISGFSKQYNCAFIWQKDGVKKLNLYLIINYFKGGKLRFKKIKPEAFEANRFYTVINKKSGEIVPMEVNFNFDDPNLIILPLAFGKRQGREFIWNDLLSLETGSLKLANGRVIEKTLYNRRTRQDEPALFVALTFERREVLDSSNIKPMNLIGVDRGENIPAVIALTDPEGCPLSRFKDSLGNPTHILRIGESYKEKQRTIQAKKEVEQRRAGGYSRKYASKAKNLADDMVRNTARDLLYYAVTQDAMLIFENLSRGFGRQGKRTFMAERQYTRMEDWLTAKLAYEGLSKTYLSKTLAQYTSKTCSNCGFTITSADYDRVLEKLKKTATGWMTTINGKELKVEGQITYYNRYKRQNVVKDLSVELDRLSEESVNNDISSWTKGRSGEALSLLKKRFSHRPVQEKFVCLNCGFETHADEQAALNIARSWLFLRSQEYKKYQTNKTTGNTDKRAFVETWQSFYRKKLKEVWKPAV

SEQ ID NO: 135 - protein, 977 aa, Artificial Sequence
  CasX variant
QEIKRINKIRRRLVKDSNTKKAGKTGPMKTLLVRVMTPDLRERLENLRKKPENIPQPISNTSRANLNKLLTDYTEMKKAILHVYWEEFQKDPVGLMSRVAQPASKKIDQNKLKPEMDEKGNLTTAGFACSQCGQPLFVYKLEQVSEKGKAYTNYFGRCNVAEHEKLILLAQLKPEKDSDEAVTYSLGKFGQRALDFYSIHVTKESTHPVKPLAQIAGNRYASGPVGKALSDACMGTIASFLSKYQDIIIEHQKVVKGNQKRLESLRELAGKENLEYPSVTLPPQPHTKEGVDAYNEVIARVRMWVNLNLWQKLKLSRDDAKPLLRLKGFPSFPLVERQANEVDWWDMVCNVKKLINEKKEDGKVFWQNLAGYKRQEALRPYLSSEEDRKKGKKFARYQFGDLLLHLEKKHGEDWGKVYDEAWERIDKKVEGLSKHIKLEEERRSEDAQSKAALTDWLRAKASFVIEGLKEADKDEFCRCELKLQKWYGDLRGKPFAIEAENSILDISGFSKQYNCAFIWQKDGVKKLNLYLIINYFKGGKLRFKKIKPEAFEANRFYTVINKKSGEIVPMEVNFNFDDPNLIILPLAFGKRQGREFIWNDLLSLETGSLKLANGRVIEKTLYNRRTRQDEPALFVALTFERREVLDSSNIKPMNLIGIDRGENIPAVIALTDPEGCPLSRFKDSLGNPTHILRIGESYKEKQRTIQAKKEVEQRRAGGYSRKYASKAKNLADDMVRNTARDLLYYAVTQDAMLIFENLSRGFGRQGKRTFMAERQYTRMEDWLTAKLAYEGLSKTYLSKTLAQYTSKTCSNCGFTITSADYDRVLEKLKKTATGWMTTINGKELKVEGQITYYNRYKRQNVVKDLSVELDRLSEESVNNDISSWTKGRSGEALSLLKKRFSHRPVQEKFVCLNCGFETHADEQAALNIARSWLFLRSQEYKKYQTNKTTGNTDKRAFVETWQSFYRKKLKEVWKPAV

SEQ ID NO: 136 - protein, 977 aa, Artificial Sequence
  CasX variant
QEIKRINKIRRRLVKDSNTKKAGKTGPMKTLLVRVMTPDLRERLENLRKKPENIPQPISNTSRANLNKLLTDYTEMKKAILHVYWEEFQKDPVGLMSRVAQPASKKIDQNKLKPEMDEKGNLTTAGFACSQCGQPLFVYKLEQVSEKGKAYTNYFGRCNVAEHEKLILLAQLKPEKDSDEAVTYSLGKFGQRALDFYSIHVTKESTHPVKPLAQIAGNRYASGPVGKALSDACMGTIASFLSKYQDIIIEHQKVVKGNQKRLESLRELAGKENLEYPSVTLPPQPHTKEGVDAYNEVIARVRMWVNLNLWQKLKLSRDDAKPLLRLKGFPSFPLVERQANEVDWWDMVCNVKKLINEKKEDGKVFWQNLAGYKRQEALRPYLSSEEDRKKGKKFARYQLGDLLLHLEKKHGEDWGKVYDEAWERIDKKVEGLSKHIKLEEERRSEDAQSKAALTDWLRAKASFVIEGLKEADKDEFCRCELKLQKWYGDLRGKPFAIEAENSILDISGFSKQYNCAFIWQKDGVKKLNLYLIINYFKGGKLRFKKIKPEAFEANRFYTVINKKSGEIVPMEVNFNFDDPNLIILPLAFGKRQGREFIWNDLLSLETGSLKLANGRVIEKTLYNRRTRQDEPALFVALTFERREVLDSSNIKPMNLIGVDRGENIPAVIALTDPEGCPLSRFKDSLGNPTHILRIGESYKEKQRTIQAKKEVEQRRAGGYSRKYASKAKNLADDMVRNTARDLLYYAVTQDAMLIFENLSRGFGRQGKRTFMAERQYTRMEDWLTAKLAYEGLSKTYLSKTLAQYTSKTCSNCGFTITSADYDRVLEKLKKTATGWMTTINGKELKVEGQITYYNRRKRQNVVKDLSVELDRLSEESVNNDISSWTKGRSGEALSLLKKRFSHRPVQEKFVCLNCGFETHADEQAALNIARSWLFLRSQEYKKYQTNKTTGNTDKRAFVETWQSFYRKKLKEVWKPAV

SEQ ID NO: 137 - protein, 977 aa, Artificial Sequence
  CasX variant
QEIKRINKIRRRLVKDSNTKKAGKTGPMKTLLVRVMTPDLRERLENLRKKPENIPQPISNTSRANLNKLLTDYTEMKKAILHVYWEEFQKDPVGLMSRVAQPASKKIDQNKLKPEMDEKGNLTTAGFACSQCGQPLFVYKLEQVSEKGKAYTNYFGRCNVAEHEKLILLAQLKPEKDSDEAVTYSLGKFGQRALDFYSIHVTKESTHPVKPLAQIAGNRYASGPVGKALSDACMGTIASFLSKYQDIIIEHQKVVKGNQKRLESLRELAGKENLEYPSVTLPPQPHTKEGVDAYNEVIARVRMWVNLNLWQKLKLSRDDAKPLLRLKGFPSFPLVERQANEVDWWDMVCNVKKLINEKKEDGKVFWQNLAGYKRQEALRPYLSSEEDRKKGKKFARYQLGDLLKHLEKKHGEDWGKVYDEAWERIDKKVEGLSKHIKLEEERRSEDAQSKAALTDWLRAKASFVIEGLKEADKDEFCRCELKLQKWYGDLRGKPFAIEAENSILDISGFSKQYNCAFIWQKDGVKKLNLYLIINYFKGGKLRFKKIKPEAFEANRFYTVINKKSGEIVPMEVNFNFDDPNLIILPLAFGKRQGREFIWNDLLSLETGSLKLANGRVIEKTLYNRRTRQDEPALFVALTFERREVLDSSNIKPMNLIGVDRGENIPAVIALTDPEGCPLSRFKDSLGNPTHILRIGESYKEKQRTIQAKKEVEQRRAGGYSRKYASKAKNLADDMVRNTARDLLYYAVTQDAMLIFENLSRGFGRQGKRTFMAERQYTRMEDWLTAKLAYEGLSKTYLSKTLAQYTSKTCSNCGFTITSADYDRVLEKLKKTATGWMTTINGKELKVEGQITYYNRRKRQNVVKDLSVELDRLSEESVNNDISSWTKGRSGEALSLLKKRFSHRPVQEKFVCLNCGFETHADEQAALNIARSWLFLRSQEYKKYQTNKTTGNTDKRAFVETWQSFYRKKLKEVWKPAV

SEQ ID NO: 138 - protein, 977 aa, Artificial Sequence
  CasX variant
QEIKRINKIRRRLVKDSNTKKAGKTGPMKTLLVRVMTPDLRERLENLRKKPENIPQPISNTSRANLNKLLTDYTEMKKAILHVYWEEFQKDPVGLMSRVAQPASKKIDQNKLKPEMDEKGNLTTAGFACSQCGQPLFVYKLEQVSEKGKAYTNYFGRCNVAEHEKLILLAQLKPEKDSDEAVTYSLGKFGQRALDFYSIHVTKESTHPVKPLAQIAGNRYASGPVGKALSDACMGTIASFLSKYQDIIIEHQKVVKGNQKRLESLRELAGKENLEYPSVTLPPQPHTKEGVDAYNEVIARVRMWVNLNLWQKLKLSRDDAKPLLRLKGFPSFPLVERQANEVDWWDMVCNVKKLINEKKEDGKVFWQNLAGYKRQEALRPYLSSEEDRKKGKKFARYQLGDLLLHLEKKHGEDWGKVYDEAWERIDKKVEGLSKHIKLEEERRSEDAQSKAALTDWLRAKASFVIEGLKEADKDEFCRCELKLQKWYGDLRGKPFAIEAENSILDISGFSKQYNCAFIWQKDGVKKLNLYLIINYFKGGKLRFKKIKPEAFEANRFYTVINKKSGEIVPMEVNFNFDDPNLIILPLAFGKRQGREFIWNDLLSLETGSLKLANGRVIEKTLYNRRTRQDEPALFVALTFERREVLDSSNIKPMNLIGVDRGENIPAVIALTDPEGCPLSRFKDSLGNPTHILRIGESYKEKQRTIQAKKEVEQRRAGGYSRKYASKAKNLADDMVRNTARDLLYYAVTQDAMLIFENLSRGFGRQGKRTFMAERQYTRMEDWLTAKLAYEGLSKTYLSKTLAQYTSKTCSNCGFTITSADYDRVLEKLKKTATGWMTTINGKELKVEGQITYYNRYKRQNVVKDLSVELDRLSEESVNNDISSWTKGRSGEALSLLKKRFSHRPVQEKFVCLNCGFETHADEQAALNIARSWLFLRSQEYKKYQTNKTTGNTDKRAFVETWQSFYRKKLKEVWKPAV

SEQ ID NO: 139 - protein, 977 aa, Artificial Sequence
  CasX variant
QEIKRINKIRRRLVKDSNTKKAGKTGPMKTLLVRVMTPDLRERLENLRKKPENIPQPISNTSRANLNKLLTDYTEMKKAILHVYWEEFQKDPVGLMSRVAQPASKKIDQNKLKPEMDEKGNLTTAGFACSQCGQPLFVYKLEQVSEKGKAYTNYFGRCNVAEHEKLILLAQLKPEKDSDEAVTYSLGKFGQRALDFYSIHVTRESNHPVKPLEQIGGNSCASGPVGKALSDACMGAVASFLTKYQDIILEHQKVIKKNEKRLANLKDIASANGLAFPKITLPPQPHTKEGIEAYNNVVAQIVIWVNLNLWQKLKIGRDEAKPLQRLKGFPSFPLVERQANEVDWWDMVCNVKKLINEKKEDGKVFWQNLAGYKRQEALRPYLSSEEDRKKGKKFARYQLGDLLLHLEKKHGEDWGKVYDEAWERIDKKVEGLSKHIKLEEERRSEDAQSKAALTDWLRAKASFVIEGLKEADKDEFCRCELKLQKWYGDLRGKPFAIEAENSILDISGFSKQYNCAFIWQKDGVKKLNLYLIINYFKGGKLRFKKIKPEAFEANRFYTVINKKSGEIVPMEVNFNFDDPNLIILPLAFGKRQGREFIWNDLLSLETGSLKLANGRVIEKTLYNRRTRQDEPALFVALTFERREVLDSSNIKPMNLIGVDRGENIPAVIALTDPEGCPLSRFKDSLGNPTHILRIGESYKEKQRTIQAKKEVEQRRAGGYSRKYASKAKNLADDMVRNTARDLLYYAVTQDAMLIFENLSRGFGRQGKRTFMAERQYTRMEDWLTAKLAYEGLSKTYLSKTLAQYTSKTCSNCGFTITSADYDRVLEKLKKTATGWMTTINGKELKVEGQITYYNRYKRQNVVKDLSVELDRLSEESVNNDISSWTKGRSGEALSLLKKRFSHRPVQEKFVCLNCGFETHADEQAALNIARSWLFLRSQEYKKYQTNKTTGNTDKRAFVETWQSFYRKKLKEVWKPAV

SEQ ID NO: 140 - protein, 978 aa, Artificial Sequence
  CasX variant
MQEIKRINKIRRRLVKDSNTKKAGKTGPMKTLLVRVMTPDLRERLENLRKKPENIPQPISNTSRANLNKLLTDYTEMKKAILHVYWEEFQKDPVGLMSRVAQPAPKNIDQRKLIPVKDGNERLTSSGFACSQCCQPLYVYKLEQVNDKGKPHTNYFGRCNVSEHERLILLSPHKPEANDELVTYSLGKFGQRALDFYSIHVTRESNHPVKPLEQIGGNSCASGPVGKALSDACMGAVASFLTKYQDIILEHQKVIKKNEKRLANLKDIASANGLAFPKITLPPQPHTKEGIEAYNNVVAQIVIWVNLNLWQKLKIGRDEAKPLQRLKGFPSFPLVERQANEVDWWDMVCNVKKLINEKKEDGKVFWQNLAGYKRQEALLPYLSSEEDRKKGKKFARYQFGDLLLHLEKKHGEDWGKVYDEAWERIDKKVEGLSKHIKLEEERRSEDAQSKAALTDWLRAKASFVIEGLKEADKDEFCRCELKLQKWYGDLRGKPFAIEAENSILDISGFSKQYNCAFIWQKDGVKKLNLYLIINYFKGGKLRFKKIKPEAFEANRFYTVINKKSGEIVPMEVNFNFDDPNLIILPLAFGKRQGREFIWNDLLSLETGSLKLANGRVIEKTLYNRRTRQDEPALFVALTFERREVLDSSNIKPMNLIGIDRGENIPAVIALTDPEGCPLSRFKDSLGNPTHILRIGESYKEKQRTIQAAKEVEQRRAGGYSRKYASKAKNLADDMVRNTARDLLYYAVTQDAMLIFENLSRGFGRQGKRTFMAERQYTRMEDWLTAKLAYEGLPSKTYLSKTLAQYTSKTCSNCGFTITSADYDRVLEKLKKTATGWMTTINGKELKVEGQITYYNRYKRQNVVKDLGVELDRLSEESVNNDISSWTKGRSGEALSLLKKRFSHRPVQEKFVCLNCGFETHADEQAALNIARSWLFLRSQEYKKYQTNKTTGNTDKRAFVETWQSFYRKKLKEVWKPAV

SEQ ID NO: 141 - protein, 986 aa, Artificial Sequence; identical to SEQ ID NO: 56
  CasX variant

SEQ ID NO: 142 - protein, 978 aa, Artificial Sequence
  CasX variant
MQEIKRINKIRRRLVKDSNTKKAGKTGPMKTLLVRVMTPDLRERLENLRKKPENIPQPISNTSRANLNKLLTDYTEMKKAILHVYWEEFQKDPVGLMSRVAQPAPKNIDQRKLIPVKDGNERLTSSGFACSQCCQPLYVYKLEQVNDKGKPHTNYFGRCNVSEHERLILLSPHKPEANDELVTYSLGKFGQRALDFYSIHVTRESNHPVKPLEQIGGNSCASGPVGKALSDACMGAVASFLTKYQDIILEHQKVIKKNEKRLANLKDIASANGLAFPKITLPPQPHTKEGIEAYNNVVAQIVIWVNLNLWQKLKIGRDEAKPLQRLKGFPSFPLVERQANEVDWWDMVCNVKKLINEKKEDGKVFWQNLAGYKRQEALRPYLSSEEDRKKGKKFARYQFGDLLLHLEKKHGEDWGKVYDEAWERIDKKVEGLSKHIKLEEERRSEDAQSKAALTDWLRAKASFVIEGLKEADKDEFCRCELKLQKWYGDLRGKPFAIEAENSILDISGFSKQYNCAFIWQKDGVKKLNLYLIINYFKGGKLRFKKIKPEAFEANRFYTVINKKSGEIVPMEVNFNFDDPNLIILPLAFGKRQGREFIWNDLLSLETGSLKLANGRVIEKTLYNRRTRQDEPALFVALTFERREVLDSSNIKPVNLIGVDRGENIPAVIALTDPEGCPLPEFKDSSGGPTDILRIGEGYKEKQRAIQAAKEVEQRRAGGYSRKFASKSRNLADDMVRNSARDLFYHAVTHDAVLVFENLSRGFGRQGKRTFMTERQYTKMEDWLTAKLAYEGLTSKTYLSKTLAQYTSKTCSNCGFTITSADYDRVLEKLKKTATGWMTTINGKELKVEGQITYYNRYKRQNVVKDLSVELDRLSEESVNNDISSWTKGRSGEALSLLKKRFSHRPVQEKFVCLNCGFETHADEQAALNIARSWLFLRSQEYKKYQTNKTTGNTDKRAFVETWQSFYRKKLKEVWKPAV

SEQ ID NO: 143 - protein, 972 aa, Artificial Sequence
  CasX variant
MQEIKRINKIRRRLVKDSNTKKAGKTGPMKTLLVRVMTPDLRERLENLRKKPENIPQPISNTSRANLNKLLTDYTEMKKAILHVYWEEFQKDPVGLMSRVAQPAPKNIDQRKLIPVKDGNERLTSSGFACSQCCQPLYVYKLEQVNDKGKPHTNYFGRCNVSEHERLILLSPHKPEANDELVTYSLGKFGQRALDFYSIHVTRESNHPVKPLEQIGGNSCASGPVGKALSDACMGAVASFLTKYQDIILEHQKVIKKNEKRLANLKDIASANGLAFPKITLPPQPHTKEGIEAYNNVVAQIVIWVNLNLWQKLKIGRDEAKPLQRLKGFPSFPLVERQANEVDWWDMVCNVKKLINEKKEDGKVFWQNLAGYKRQEALRPYLSSEEDRKKGKKFARYQFGDLLLHLEKKHGEDWGKVYDEAWERIDKKVEGLSKHIKLEEERRSEDAQSKAALTDWLRAKASFVIEGLKEADKDEFCRCELKLQKWYGDLRGKPFAIEAENSILDISGFSKQYNCAFIWQKDGVKKLNLYLIINYFKGGKLRFKKIKPEAFEANRFYTVINKKSGEIVPMEVNFNFDDPNLIILPLAFGKRQGREFIWNDLLSLETGSLKLANGRVIEKTLYNRRTRQDEPALFVALTFERREVLDSSNIKPMNLIGIDRGENIPAVIALTDPEGCPLSRFKDSLGNPTHILRIGESYKEKQRTIQAKKEVEQRRAGGYSRKYASKAKNLADDMVRNTARDLLYYAVTQDAMLIFENLSRGFGRQGKRTFMAERQYTRMEDWLTAKLAYEGLSKTYLSKTLAQYTSKTCSNCGFTITSADYDRVLEKLKKTATGWMTTINGKELKVEGQITYYNRYKRQNVVKDLSVELDRLSEESVNNDISSWTKGRSGEALSLLKKRFSHRPVQEKFVCLNCGFETHADEQAALNIARSWLFLNSNSTEFKSYKSGKQPFVGAWQAFYKRRLKEVWKPNA

SEQ ID NO: 144 - protein, 978 aa, Artificial Sequence
  CasX variant
QEIKRINKIRRRLVKDSNTKKAGKTGPMKTLLVRVMTPDLRERLENLRKKPENIPQPISNTSRANLNKLLTDYTEMKKAILHVYWEEFQKDPVGLMSRVAQPASKKIDQNKLKPEMDEKGNLTTAGFACSQCGQPLFVYKLEQVSEKGKAYTNYFGRCNVAEHEKLILLAQLKPEKDSDEAVTYSLGKFGQRALDFYSIHVTKESTHPVKPLAQIAGNRYASGPVGKALSDACMGTIASFLSKYQDIIIEHQKVVKGNQKRLESLRELAGKENLEYPSVTLPPQPHTKEGVDAYNEVIARVRMWVNLNLWQKLKLSRDDAKPLLRLKGFPSFPLVERQANEVDWWDMVCNVKKLINEKKEDGKVFWQNLAGYKRQEALRPYLSSEEDRKKGKKFARYQLGDLLLHLEKKHGEDWGKVYDEAWERIDKKVEGLSKHIKLEEERRSEDAQSKAALTDWLRAKASFVIEGLKEADKDEFCRCELKLQKWYGDLRGKPFAIEAENSILDISGFSKQYNCAFIWQKDGVKKLNLYLIINYFKGGKLRFKKIKPEAFEANRFYTVINKKSGEIVPMEVNFNFDDPNLIILPLAFGKRQGREFIWNDLLSLETGSLKLANGRVIEKTLYNRRTRQDEPALFVALTFERREVLDSSNIKPMNLIGVDRGENIPAVIALTDPEGCPLSRFKDSLGNPTHILRIGESYKEKQRTIQAKKEVEQRRAGGYSRKYASKAKNLADDMVRNTARDLLYYAVTQDAMLIFENLSRGFGRQGKRTFMAERQYTRMEDWLTAKLAYEGLSKTYLSKTLAQYTSKTCSNCGFTIHTSADYDRVLEKLKKTATGWMTTINGKELKVEGQITYYNRYKRQNVVKDLSVELDRLSEESVNNDISSWTKGRSGEALSLLKKRFSHRPVQEKFVCLNCGFETHADEQAALNIARSWLFLRSQEYKKYQTNKTTGNTDKRAFVETWQSFYRKKLKEVWKPAV

SEQ ID NO: 145 - protein, 978 aa, Artificial Sequence
  CasX variant
QEIKRINKIRRRLVKDSNTKKAGKTGPMKTLLVRVMTPDLRERLENLRKKPENIPQPISNTSRANLNKLLTDYTEMKKAILHVYWEEFQKDPVGLMSRVAQPASKKIDQNKLKPEMDEKGNLTTAGFACSQCGQPLFVYKLEQVSEKGKAYTNYFGRCNVAEHEKLILLAQLKPEKDSDEAVTYSLGKFGQRALDFYSIHVTKESTHPVKPLAQIAGNRYASGPVGKALSDACMGTIASFLSKYQDIIIEHQKVVKGNQKRLESLRELAGKENLEYPSVTLPPQPHTKEGVDAYNEVIARVRMWVNLNLWQKLKLSRDDAKPLLRLKGFPSFPLVERQANEVDWWDMVCNVKKLINEKKEDGKVFWQNLAGYKRQEALRPYLSSEEDRKKGKKFARYQLGDLLLHLEKKHGEDWGKVYDEAWERIDKKVEGLSKHIKLEEERRSEDAQSKAALTDWLRAKASFVIEGLKEADKDEFCRCELKLQKWYGDLRGKPFAIEAENSILDISGFSKQYNCAFIWQKDGVKKLNLYLIINYFKGGKLRFKKIKPEAFEANRFYTVINKKSGEIVPMEVNFNFDDPNLIILPLAFGKRQGREFIWNDLLSLETGSLKLANGRVIEKTLYNRRTRQDEPALFVALTFERREVLDSSNIKPMNLIGVDRGENIPAVIALTDPEGCPLSRFKDSLGNPTHILRIGESYKEKQRTIQAKKEVEQRRAGGYSRKYASKAKNLADDMVRNTARDLLYYAVTQDAMLIFENLSRGFGRQGKRTFMAERQYTRMEDWLTAKLAYEGLPSKTYLSKTLAQYTSKTCSNCGFTITSADYDRVLEKLKKTATGWMTTINGKELKVEGQITYYNRYKRQNVVKDLSVELDRLSEESVNNDISSWTKGRSGEALSLLKKRFSHRPVQEKFVCLNCGFETHADEQAALNIARSWLFLRSQEYKKYQTNKTTGNTDKRAFVETWQSFYRKKLKEVWKPAV

SEQ ID NO: 146 - protein, 977 aa, Artificial Sequence
  CasX variant
QEIKRINKIRRRLVKDSNTKKAGKTGPMKTLLVRVMTPDLRERLENLRKKPENIPQPISNTSRANLNKLLTDYTEMKKAILHVYWEEFQKDPVGLMSRVAQPASKKIDQNKLKPEMDEKGNLTTAGFACSQCGQPLFVYKLEQVSEKGKAYTNYFGRCNVAEHEKLILLAQLKPEKDSDEAVTYSLGKFGQRALDFYSIHVTKESTHPVKPLAQIAGNRYASGPVGKALSDACMGTIASFLSKYQDIIIEHQKVVKGNQKRLESLRELAGKENLEYPSVTLPPQPHTKEGVDAYNEVIARVRMWVNHNLWQKLKLSRDDAKPLLRLKGFPSFPLVERQANEVDWWDMVCNVKKLINEKKEDGKVFWQNLAGYKRQEALRPYLSSEEDRKKGKKFARYQLGDLLLHLEKKHGEDWGKVYDEAWERIDKKVEGLSKHIKLEEERRSEDAQSKAALTDWLRAKASFVIEGLKEADKDEFCRCELKLQKWYGDLRGKPFAIEAENSILDISGFSKQYNCAFIWQKDGVKKLNLYLIINYFKGGKLRFKKIKPEAFEANRFYTVINKKSGEIVPMEVNFNFDDPNLIILPLAFGKRQGREFIWNDLLSLETGSLKLANGRVIEKTLYNRRTRQDEPALFVALTFERREVLDSSNIKPMNLIGVDRGENIPAVIALTDPEGCPLSRFKDSLGNPTHILRIGESYKEKQRTIQAKKEVEQRRAGGYSRKYASKAKNLADDMVRNTARDLLYYAVTQDAMLIFENLSRGFGRQGKRTFMAERQYTRMEDWLTAKLAYEGLSKTYLSKTLAQYTSKTCSNCGFTITSADYDRVLEKLKKTATGWMTTINGKELKVEGQITYYNRYKRQNVVKDLSVELDRLSEESVNNDISSWTKGRSGEALSLLKKRFSHRPVQEKFVCLNCGFETHADEQAALNIARSWLFLRSQEYKKYQTNKTTGNTDKRAFVETWQSFYRKKLKEVWKPAV

SEQ ID NO: 147 - protein, 978 aa, Artificial Sequence
  CasX variant
QEIKRINKIRRRLVKDSNTKKAGKTGPMKTLLVRVMTPDLRERLENLRKKPENIPQPISNTSRANLNKLLTDYTEMKKAILHVYWEEFQKDPVGLMSRVAQPASKKIDQNKLKPEMDEKGNLTTAGFACSQCGQPLFVYKLEQVSEKGKAYTNYFGRCNVAEHEKLILLAQLKPEKDSDEAVTYSLGKFGQRALDFYSIHVTKESTHPVKPLAQIAGNRYASGAPVGKALSDACMGTIASFLSKYQDIIIEHQKVVKGNQKRLESLRELAGKENLEYPSVTLPPQPHTKEGVDAYNEVIARVRMWVNLNLWQKLKLSRDDAKPLLRLKGFPSFPLVERQANEVDWWDMVCNVKKLINEKKEDGKVFWQNLAGYKRQEALRPYLSSEEDRKKGKKFARYQLGDLLLHLEKKHGEDWGKVYDEAWERIDKKVEGLSKHIKLEEERRSEDAQSKAALTDWLRAKASFVIEGLKEADKDEFCRCELKLQKWYGDLRGKPFAIEAENSILDISGFSKQYNCAFIWQKDGVKKLNLYLIINYFKGGKLRFKKIKPEAFEANRFYTVINKKSGEIVPMEVNFNFDDPNLIILPLAFGKRQGREFIWNDLLSLETGSLKLANGRVIEKTLYNRRTRQDEPALFVALTFERREVLDSSNIKPMNLIGVDRGENIPAVIALTDPEGCPLSRFKDSLGNPTHILRIGESYKEKQRTIQAKKEVEQRRAGGYSRKYASKAKNLADDMVRNTARDLLYYAVTQDAMLIFENLSRGFGRQGKRTFMAERQYTRMEDWLTAKLAYEGLSKTYLSKTLAQYTSKTCSNCGFTITSADYDRVLEKLKKTATGWMTTINGKELKVEGQITYYNRYKRQNVVKDLSVELDRLSEESVNNDISSWTKGRSGEALSLLKKRFSHRPVQEKFVCLNCGFETHADEQAALNIARSWLFLRSQEYKKYQTNKTTGNTDKRAFVETWQSFYRKKLKEVWKPAV

SEQ ID NO: 148 - protein, 979 aa, Artificial Sequence
  CasX variant
RQEIKRINKIRRRLVKDSNTKKAGKTGPMKTLLVRVMTPDLRERLENLRKKPENIPQPISNTSRANLNKLLTDYTEMKKAILHVYWEEFQKDPVGLMSRVAQPASKKIDQNKLKPEMDEKGNLTTAGFACSQCGQPLFVYKLEQVSEKGKAYTNYFGRCNVAEHEKLILLAQLKPEKDSDEAVTYSLGKFGQRALDFYSIHVTKESTHPVKPLAQIAGNRYASGAPVGKALSDACMGTIASFLSKYQDIIIEHQKVVKGNQKRLESLRELAGKENLEYPSVTLPPQPHTKEGVDAYNEVIARVRMWVNLNLWQKLKLSRDDAKPLLRLKGFPSFPLVERQANEVDWWDMVCNVKKLINEKKEDGKVFWQNLAGYKRQEALRPYLSSEEDRKKGKKFARYQLGDLLLHLEKKHGEDWGKVYDEAWERIDKKVEGLSKHIKLEEERRSEDAQSKAALTDWLRAKASFVIEGLKEADKDEFCRCELKLQKWYGDLRGKPFAIEAENSILDISGFSKQYNCAFIWQKDGVKKLNLYLIINYFKGGKLRFKKIKPEAFEANRFYTVINKKSGEIVPMEVNFNFDDPNLIILPLAFGKRQGREFIWNDLLSLETGSLKLANGRVIEKTLYNRRTRQDEPALFVALTFERREVLDSSNIKPMNLIGVDRGENIPAVIALTDPEGCPLSRFKDSLGNPTHILRIGESYKEKQRTIQAKKEVEQRRAGGYSRKYASKAKNLADDMVRNTARDLLYYAVTQDAMLIFENLSRGFGRQGKRTFMAERQYTRMEDWLTAKLAYEGLSKTYLSKTLAQYTSKTCSNCGFTITSADYDRVLEKLKKTATGWMTTINGKELKVEGQITYYNRYKRQNVVKDLSVELDRLSEESVNNDISSWTKGRSGEALSLLKKRFSHRPVQEKFVCLNCGFETHADEQAALNIARSWLFLRSQEYKKYQTNKTTGNTDKRAFVETWQSFYRKKLKEVWKPAV

SEQ ID NO: 149 - protein, 978 aa, Artificial Sequence
  CasX variant
QEIKRINKIRRRLVKDSNTKKAGKTGPMKTLLVRVMTPDLRERLENLRKKPENIPQPISNTSRANLNKLLTDYTEMKKAILHVYWEEFQKDPVGLMSRVAQPASKKIDQNKLKPEMDEKGNLTTAGFACSQCGQPLFVYKLEQVSEKGKAYTNYFGRCNVAEHEKLILLAQLKPEKDSDEAVTYSLGKFGQRALDFYSIHVTKESTHPVKPLAQIAGNRYASGPVGKALSDACMGTIASFLSKYQDIIIEHQKVVKGNQKRLESLRELAGKENLEYPSVTLPPQPHTKEGVDAYNEVIARVRMWVNLNLWQKLKLSRDDAKPLLRLKGFPSFPLVERQANEVDWWDMVCNVKKLINEKKEDGKVFWQNLAGYKRQEALRPYLSSEEDRKKGKKFARYQLGDLLLHLEKKHGEDWGKVYDEAWERIDKKVEGLSKHIKLEEERRSEDAQSKAALTDWLRAKASFVIEGLKEADKDEFCRCELKLQKWYGDLRGKPFAIEAENSILDISGFSKQYNCAFIWQKDGVKKLNLYLIINYFKGGKLRFKKIKPEAFEANRFYTVINKKSGEIVPMEVNFNFDDPNLIILPLAFGKRQGREFIWNDLLSLETGSLKLANGRVIEKTLYNRRTRQDEPALFVALTFERREVLDSSNIKPMNLIGVDRGENIPAVIALTDPEGCPLSRFKDSLGNPTHIQLRIGESYKEKQRTIQAKKEVEQRRAGGYSRKYASKAKNLADDMVRNTARDLLYYAVTQDAMLIFENLSRGFGRQGKRTFMAERQYTRMEDWLTAKLAYEGLSKTYLSKTLAQYTSKTCSNCGFTITSADYDRVLEKLKKTATGWMTTINGKELKVEGQITYYNRYKRQNVVKDLSVELDRLSEESVNNDISSWTKGRSGEALSLLKKRFSHRPVQEKFVCLNCGFETHADEQAALNIARSWLFLRSQEYKKYQTNKTTGNTDKRAFVETWQSFYRKKLKEVWKPAV

SEQ ID NO: 150 - protein, 977 aa, Artificial Sequence
  CasX variant
QEIKRINKIRRRLVKDSNTKKAGKTGPMKTLLVRVMTPDLRERLENLRKKPENIPQPISNTSRANLNKLLTDYTEMKKAILHVYWEEFQKDPVGLMSRVAQPASKKIDQNKLKPEMDEKGNLTTAGFACSQCGQPLFVYKLEQVSEKGKAYTNYFGRCNVAEHEKLILLAQLKPEKDSDEAVTYSLGKFGQRALDFYSIHVTKESTHPVKPLAQIAGNRYASGPVGKALSDACMGTIASFLSKYQDIIIEHQKVVKGNQKRLESLRELAGKENLEYPSVTLPPQPHTKEGVDAYNEVIARVRMWVNLNLWQKLKLSRDDAKPLLRLKGFPSFPLVERQANEVDWWDMVCNVKKLINEKKEDGKVFWQNLAGYKRQEALRPYLSSEEDRKKGKKFARYQLGDLLLHLEKKHGEDWGKVYDEAWERIDKKVEGLSKHIKLEEERRSEDAQSKAALTDWLRAKASFVIEGLKEADKDEFCRCELKLQKWYGDLRGKPFAIEAENSILDISGFSKQYNCAFIWQKDGVKKLNLYLIINYFKGGKLRFKKIKPEAFEANRFYTVINKKSGEIVPMEVNFNFDDPNLIILPLAFGKRQGREFIWNDLLSLETGSLKLANGRVIEKTLYNRRTRQDEPALFVALTFERREVLDSSNIKPMNLIGVDRGENIPAVIALTDPEGCPLSRFKDSLGNPTHILRIGESYKEKQRTTQAKKEVEQRRAGGYSRKYASKAKNLADDMVRNTARDLLYYAVTQDAMLIFENLSRGFGRQGKRTFMAERQYTRMEDWLTAKLAYEGLSKTYLSKTLAQYTSKTCSNCGFTITSADYDRVLEKLKKTATGWMTTINGKELKVEGQITYYNRYKRQNVVKDLSVELDRLSEESVNNDISSWTKGRSGEALSLLKKRFSHRPVQEKFVCLNCGFETHADEQAALNIARSWLFLRSQEYKKYQTNKTTGNTDKRAFVETWQSFYRKKLKEVWKPAV

SEQ ID NO: 151 - protein, 977 aa, Artificial Sequence
  CasX variant
QEIKRINKIRRRLVKDSNTKKAGKTGPMKTLLVRVMTPDLRERLENLRKKPENIPQPISNTSRANLNKLLTDYTEMKKAILHVYWEEFQKDPVGLMSRVAQPASKKIDQNKLKPEMDEKGNLTTAGFACSQCGQPLFVYKLEQVSEKGKAYTNYFGRCNVAEHEKLILLAQLKPEKDSDEAVTYSLGKFGQRALDFYSIHVTKESTHPVKPLAQIAGNRYASGPVGKALSDACMGTIASFLSKYQDIIIEHQKVVKGNQKRLESLRELAGKENLEYPSVTLPPQPHTKEGVDAYNEVIARVRMWVNLNLWQKLKLSRDDAKPLLRLKGFPSFPLVERQANEVDWWDMVCNVKKLINEKKEDGKVFWQNLAGYKRQEALRPYLSSEEDRKKGKKFARYQLGDLLLHLEKKHGEDWGKVYDEAWERIDKKVEGLSKHIKLEEERRSEDAQSKAALTDWLRAKASFVIEGLKEADKDEFCRCELKLQKWYGDLRGKPFAIEAENSILDISGFSKQYNCAFIWQKDGVKKLNLYLIINYFKGGKLRFKKIKPEAFEANRFYTVINKKSGEIVPMEVNFNFDDPNLIILPLAFGKRQGREFIWNDLLSLETGSLKLANGRVIEKTLYNRRTRQDEPALFVALTFERREVLDSSNIKPMNLIGVDRGENIPAVIALTDPEGCPLSRFKRSLGNPTHILRIGESYKEKQRTIQAKKEVEQRRAGGYSRKYASKAKNLADDMVRNTARDLLYYAVTQDAMLIFENLSRGFGRQGKRTFMAERQYTRMEDWLTAKLAYEGLSKTYLSKTLAQYTSKTCSNCGFTITSADYDRVLEKLKKTATGWMTTINGKELKVEGQITYYNRYKRQNVVKDLSVELDRLSEESVNNDISSWTKGRSGEALSLLKKRFSHRPVQEKFVCLNCGFETHADEQAALNIARSWLFLRSQEYKKYQTNKTTGNTDKRAFVETWQSFYRKKLKEVWKPAV

SEQ ID NO: 152 - protein, 977 aa, Artificial Sequence
  CasX variant
QEIKRINKIRRRLVKDSNTKKAGKTYPMKTLLVRVMTPDLRERLENLRKKPENIPQPISNTSRANLNKLLTDYTEMKKAILHVYWEEFQKDPVGLMSRVAQPASKKIDQNKLKPEMDEKGNLTTAGFACSQCGQPLFVYKLEQVSEKGKAYTNYFGRCNVAEHEKLILLAQLKPEKDSDEAVTYSLGKFGQRALDFYSIHVTKESTHPVKPLAQIAGNRYASGPVGKALSDACMGTIASFLSKYQDIIIEHQKVVKGNQKRLESLRELAGKENLEYPSVTLPPQPHTKEGVDAYNEVIARVRMWVNLNLWQKLKLSRDDAKPLLRLKGFPSFPLVERQANEVDWWDMVCNVKKLINEKKEDGKVFWQNLAGYKRQEALRPYLSSEEDRKKGKKFARYQLGDLLLHLEKKHGEDWGKVYDEAWERIDKKVEGLSKHIKLEEERRSEDAQSKAALTDWLRAKASFVIEGLKEADKDEFCRCELKLQKWYGDLRGKPFAIEAENSILDISGFSKQYNCAFIWQKDGVKKLNLYLIINYFKGGKLRFKKIKPEAFEANRFYTVINKKSGEIVPMEVNFNFDDPNLIILPLAFGKRQGREFIWNDLLSLETGSLKLANGRVIEKTLYNRRTRQDEPALFVALTFERREVLDSSNIKPMNLIGVDRGENIPAVIALTDPEGCPLSRFKDSLGNPTHILRIGESYKEKQRTIQAKKEVEQRRAGGYSRKYASKAKNLADDMVRNTARDLLYYAVTQDAMLIFENLSRGFGRQGKRTFMAERQYTRMEDWLTAKLAYEGLSKTYLSKTLAQYTSKTCSNCGFTITSADYDRVLEKLKKTATGWMTTINGKELKVEGQITYYNRYKRQNVVKDLSVELDRLSEESVNNDISSWTKGRSGEALSLLKKRFSHRPVQEKFVCLNCGFETHADEQAALNIARSWLFLRSQEYKKYQTNKTTGNTDKRAFVETWQSFYRKKLKEVWKPAV

SEQ ID NO: 153 - protein, 977 aa, Artificial Sequence
  CasX variant
QEIKRINKIRRRLVKDSNTKKAGKTGPMKTLLVRVMTPDLRERLENLRKKPENIPQPISNTSRANLNKLLTDYTEMKKAILHVYWEEFQKDPVGLMSRVAQPASKKIDQNKLKPEMDEKGNLTTAGFACSQCGQPLFVYKLEQVSEKGKAYTNYFGRCNVAEHEKLILLAQLKPEKDSDEAVTYSLGKFGQRALDFYSIHVTKESTHPVKPLAQIAGNRYASGPVGKALSDACMGTIASFLSKYQDIIIEHQKVVKGNQKRLESLRELAGKENLEYPSVTLPPQPHTKEGVDAYNEVIARVRMWVNLNLWQKLKLSRDDAKPLLRLKGFPSFPLVERQANEVDWWDMVCNVKKLINEKKEDGKVFWQNLAGYKRQEALRPYLSSEEDRKKGKKFARYQLGDLLLHLEKKHGEDWGKVYDEAWERIDKKVEGLSKHIKLEEERRSEDAQSKAALTDWLRAKASFVIEGLKEADKDEFCRCELKLQKWYGDLRGKPFAIEAENSILDISGFSKQYNCAFIWQKDGVKKLNLYLIINYFKGGKLRFKKIKPEAFEANRFYTVINKKSGEIVPMEVNFNFDDPNLIILPLAFGKRQGREFIWNDLLSLETGSLKLANGRVIEKTLYNRRTRQDEPALFVALTFERREVLDSSNIKPMNLIGVDRGENIPAVIALTDPEGCPLSRFKDSLGNPTHILRIGESYKEKQRTIQAKKEVEQRRAGGYSRKYASKAKNLADDMVRNTARDLLYYAVTQDAMLIFENLSRGFGRQGKRTFMAERQYTRMEDWLTAKLAYEGLSKTYLSKTLAQYTSKTCSNCGFTIHSADYDRVLEKLKKTATGWMTTINGKELKVEGQITYYNRYKRQNVVKDLSVELDRLSEESVNNDISSWTKGRSGEALSLLKKRFSHRPVQEKFVCLNCGFETHADEQAALNIARSWLFLRSQEYKKYQTNKTTGNTDKRAFVETWQSFYRKKLKEVWKPAV

SEQ ID NO: 154 - protein, 977 aa, Artificial Sequence
  CasX variant
QEIKRINKIRRRLVKDSNTKKAGKTGPMKTLLVRVMTPDLRERLENLRKKPENIPQPISNTSRANLNKLLTDYTEMKKAILHVYWEEFQKDPVGLMSRVAQPASKKIDQNKLKPEMDEKGNLTTAGFACSQCGQPLFVYKLEQVSEKGKAYTNYFGRCNVAEHEKLILLAQLKPEKDSDEAVTYSLGKFGQRALDFYSIHVTKESTHPVKPLAQIAGNRYASGPVGKALSDACMGTIASFLSKYQDIIIEHQKVVKGNQKRLESLRELAGKENLEYPSVTLPPQPHTKEGVDAYNEVIARVRMWVNLNLWQKLKLSRDDAKPLLRLKGFPSFPLVERQANEVDWWDMVCNVKKLINEKKEDGKVFWQNLAGYKRQEALRPYLSSEEDRKKGKKFARYQLGDLLLHLEKKHGEDWGKVYDEAWERIDKKVEGLSKHIKLEEERRSEDAQSKAALTDWLRAKASFVIEGLKEADKDEFCRCELKLQKWYGDLRGKPFAIEAENSILDISGFSKQYNCAFIWQKDGVKKLNLYLIINYFKGGKLRFKKIKPEAFEANRFYTVINKKSGEIVPMEVNFNFDDPNLIILPLAFGKRQGREFIWNDLLSLETGSLKLANGRVIEKTLYNRRTRQDEPALFVALTFERREVLDSSNIKPMNLIGVDRGENIPAVIALTDPEGCPLSRFKDSLGNPTHILRIGESYKEKQRTIQAKKEVEQRRAGGYSRKYASKAKNLADDMVRNTARDLLYYAATQDAMLIFENLSRGFGRQGKRTFMAERQYTRMEDWLTAKLAYEGLSKTYLSKTLAQYTSKTCSNCGFTITSADYDRVLEKLKKTATGWMTTINGKELKVEGQITYYNRYKRQNVVKDLSVELDRLSEESVNNDISSWTKGRSGEALSLLKKRFSHRPVQEKFVCLNCGFETHADEQAALNIARSWLFLRSQEYKKYQTNKTTGNTDKRAFVETWQSFYRKKLKEVWKPAV

SEQ ID NO: 155 - protein, 977 aa, Artificial Sequence
  CasX variant
QEIKRINKIRRRLVKDSNTKKAGKTGPMKTLLVRVMTPDLRERLENLRKKPENIPQPISNTSRANLNKLLTDYTEMKKAILHVYWEEFQKDPVGLMSRVAQPASKKIDQNKLKPEMDEKGNLTTAGFACSQCGQPLFVYKLEQVSEKGKAYTNYFGRCNVAEHEKLILLAQLKPEKDSDEAVTYSLGKFGQRALDFYSIHVTKESTHPVKPLAQIAGNRYASGPVGKALSDACMGTIASFLSKYQDIIIEHQKVVKGNQKRLESLRELAGKENLEYPSVTLPPQPHTKEGVDAYNEVIARVRMWVNLNLWQKLKLSRDDAKPLLRLKGFPSFPLVERQANEVDWWDMVCNVKKLINEKKEDGKVFWQNLAGYKRQEALRPYLSSEEDRKKGKKFARYQLGDLLLHLEKKHGEDWGKVYDEAWERIDKKVEGLSKHIKLEEERRSEDAQSKAALTDWLRAKASFVIEGLKEADKDEFCRCELKLQKWYGDLRGKPFAIEAENSILDISGFSKQYNCAFIWQKDGVKKLNLYLIINYFKGGKLRFKKIKPEAFEANRFYTVINKKSGEIVPMEVNFNFDDPNLIILPLAFGKRQGREFIWNDLLSLETGSLKLANGRVIEKTLYNRRTRQDEPALFVALTFERREVLDSSNIKPMNLIGVDRGENIPAVIALTDPEGCPLSRFKDSLGNPTHILRIGESYKEKQRTIQAAKEVEQRRAGGYSRKYASKAKNLADDMVRNTARDLLYYAVTQDAMLIFENLSRGFGRQGKRTFMAERQYTRMEDWLTAKLAYEGLSKTYLSKTLAQYTSKTCSNCGFTITSADYDRVLEKLKKTATGWMTTINGKELKVEGQITYYNRYKRQNVVKDLSVELDRLSEESVNNDISSWTKGRSGEALSLLKKRFSHRPVQEKFVCLNCGFETHADEQAALNIARSWLFLRSQEYKKYQTNKTTGNTDKRAFVETWQSFYRKKLKEVWKPAV

SEQ ID NO: 156 - protein, 978 aa, Artificial Sequence
  CasX variant
QEIKRINKIRRRLVKDSNTKKAGKTRGPMKTLLVRVMTPDLRERLENLRKKPENIPQPISNTSRANLNKLLTDYTEMKKAILHVYWEEFQKDPVGLMSRVAQPASKKIDQNKLKPEMDEKGNLTTAGFACSQCGQPLFVYKLEQVSEKGKAYTNYFGRCNVAEHEKLILLAQLKPEKDSDEAVTYSLGKFGQRALDFYSIHVTKESTHPVKPLAQIAGNRYASGPVGKALSDACMGTIASFLSKYQDIIIEHQKVVKGNQKRLESLRELAGKENLEYPSVTLPPQPHTKEGVDAYNEVIARVRMWVNLNLWQKLKLSRDDAKPLLRLKGFPSFPLVERQANEVDWWDMVCNVKKLINEKKEDGKVFWQNLAGYKRQEALRPYLSSEEDRKKGKKFARYQLGDLLLHLEKKHGEDWGKVYDEAWERIDKKVEGLSKHIKLEEERRSEDAQSKAALTDWLRAKASFVIEGLKEADKDEFCRCELKLQKWYGDLRGKPFAIEAENSILDISGFSKQYNCAFIWQKDGVKKLNLYLIINYFKGGKLRFKKIKPEAFEANRFYTVINKKSGEIVPMEVNFNFDDPNLIILPLAFGKRQGREFIWNDLLSLETGSLKLANGRVIEKTLYNRRTRQDEPALFVALTFERREVLDSSNIKPMNLIGVDRGENIPAVIALTDPEGCPLSRFKDSLGNPTHILRIGESYKEKQRTIQAKKEVEQRRAGGYSRKYASKAKNLADDMVRNTARDLLYYAVTQDAMLIFENLSRGFGRQGKRTFMAERQYTRMEDWLTAKLAYEGLSKTYLSKTLAQYTSKTCSNCGFTITSADYDRVLEKLKKTATGWMTTINGKELKVEGQITYYNRYKRQNVVKDLSVELDRLSEESVNNDISSWTKGRSGEALSLLKKRFSHRPVQEKFVCLNCGFETHADEQAALNIARSWLFLRSQEYKKYQTNKTTGNTDKRAFVETWQSFYRKKLKEVWKPAV

SEQ ID NO: 157 - protein, 978 aa, Artificial Sequence
  CasX variant
QEIKRINKIRRRLVKDSNTKKAGKTGPMKTLLVRVMTPDLRERLENLRKKPENIPQPISNTSRANLNKLLTDYTEMKKAILHVYWEEFQKDPVGLMSRVAQPASKKIDQNKLKPEMDEKGNLTTAGFACSQCGQPLFVYKLEQVSEKGKAYTNYFGRCNVAEHEKLILLAQLKPEKDSDEAVTYSLGKFGQRALDFYSIHVTKESTHPVKPLAQIAGNRYASYPVGKALSDACMGTIASFLSKYQDIIIEHQKVVKGNQKRLESLRELAGKENLEYPSVTLPPQPHTKEGVDAYNEVIARVRMWVNLNLWQKLKLSRDDAKPLLRLKGFPSFPLVERQANEVDWWDMVCNVKKLINEKKEDGKVFWQNLAGYKRQEALRPYLSSEEDRKKGKKFARYQLGDLLLHLEKKHGEDWGKVYDEAWERIDKKVEGLSKHIKLEEERRSEDAQSKAALTDWLRAKASFVIEGLKEADKDEFCRCELKLQKWYGDLRGKPFAIEAENSILDISGFSKQYNCAFIWQKDGVKKLNLYLIINYFKGGKLRFKKIKPEAFEANRFYTVINKKSGEIVPMEVNFNFDDPNLIILPLAFGKRQGREFIWNDLLSLETGSLKLANGRVIEKTLYNRRTRQDEPALFVALTFERREVLDSSNIKPMNLIGVDRGENIPAVIALTDPEGCPLSRFKDSLGNPTHILRIGESYKEKQRTIQAKKEVEQRRAGGYSRKYASKAKNLADDMVRNTARDLLYYAVTQDAMLIFENLSRGFGRQGKRTFMAERQYTRMEDWLTAKLAYEGLPSKTYLSKTLAQYTSKTCSNCGFTITSADYDRVLEKLKKTATGWMTTINGKELKVEGQITYYNRYKRQNVVKDLSVELDRLSEESVNNDISSWTKGRSGEALSLLKKRFSHRPVQEKFVCLNCGFETHADEQAALNIARSWLFLRSQEYKKYQTNKTTGNTDKRAFVETWQSFYRKKLKEVWKPAV

SEQ ID NO: 158 - protein, 978 aa, Artificial Sequence
  CasX variant
QEIKRINKIRRRLVKDSNTKKAGKTGPMKTLLVRVMTPDLRERLENLRKKPENIPQPISNTSRANLNKLLTDYTEMKKAILHVYWEEFQKDPVGLMSRVAQPASKKIDQNKLKPEMDEKGNLTTAGFACSQCGQPLFVYKLEQVSEKGKAYTNYFGRCNVAEHEKLILLAQLKPEKDSDEAVTYSLGKFGQRALDFYSIHVTKESTHPVKPLAQIAGNRYASNPVGKALSDACMGTIASFLSKYQDIIIEHQKVVKGNQKRLESLRELAGKENLEYPSVTLPPQPHTKEGVDAYNEVIARVRMWVNLNLWQKLKLSRDDAKPLLRLKGFPSFPLVERQANEVDWWDMVCNVKKLINEKKEDGKVFWQNLAGYKRQEALRPYLSSEEDRKKGKKFARYQLGDLLLHLEKKHGEDWGKVYDEAWERIDKKVEGLSKHIKLEEERRSEDAQSKAALTDWLRAKASFVIEGLKEADKDEFCRCELKLQKWYGDLRGKPFAIEAENSILDISGFSKQYNCAFIWQKDGVKKLNLYLIINYFKGGKLRFKKIKPEAFEANRFYTVINKKSGEIVPMEVNFNFDDPNLIILPLAFGKRQGREFIWNDLLSLETGSLKLANGRVIEKTLYNRRTRQDEPALFVALTFERREVLDSSNIKPMNLIGVDRGENIPAVIALTDPEGCPLSRFKDSLGNPTHILRIGESYKEKQRTIQAKKEVEQRRAGGYSRKYASKAKNLADDMVRNTARDLLYYAVTQDAMLIFENLSRGFGRQGKRTFMAERQYTRMEDWLTAKLAYEGLPSKTYLSKTLAQYTSKTCSNCGFTITSADYDRVLEKLKKTATGWMTTINGKELKVEGQITYYNRYKRQNVVKDLSVELDRLSEESVNNDISSWTKGRSGEALSLLKKRFSHRPVQEKFVCLNCGFETHADEQAALNIARSWLFLRSQEYKKYQTNKTTGNTDKRAFVETWQSFYRKKLKEVWKPAV

SEQ ID NO: 159 - protein, 979 aa, Artificial Sequence
  CasX variant
QEIKRINKIRRRLVKDSNTKKAGKTGPMKTLLVRVMTPDLRERLENLRKKPENIPQPISNTSRANLNKLLTDYTEMKKAILHVYWEEFQKDPVGLMSRVAQPASKKIDQNKLKPEMDEKGNLTTAGFACSQCGQPLFVYKLEQVSEKGKAYTNYFGRCNVAEHEKLILLAQLKPEKDSDEAVTYSLGKFGQRALDFYSIHVTKESTHPVKPLAQIAGNRYASGPVGKALSDACMGTIASFLSKYQDIIIEHQKVVKGNQKRLESLRELAGKENLEYPSVTLPPQPHTKEGVDAYNEVIARVRMWVNLNLWQKLKLSRDDAKPLLRLKGFPSFPLVERQANEVDWWDMVCNVKKLINEKKEDGKVFWQNLAGYKRQEALRPYLSSEEDRKKGKKFARYQLGDLLLHLEKKHGEDWGKVYDEAWERIDKKVEGLSKHIKLEEERRSEDAQSKAALTDWLRAKASFVIEGLKEADKDEFCRCELKLQKWYGDLRGKPFAIEAENSILDISGFSKQYNCAFIWQKDGVKKLNLYLIINYFKGWGKLRFKKIKPEAFEANRFYTVINKKSGEIVPMEVNFNFDDPNLIILPLAFGKRQGREFIWNDLLSLETGSLKLANGRVIEKTLYNRRTRQDEPALFVALTFERREVLDSSNIKPMNLIGVDRGENIPAVIALTDPEGCPLSRFKDSLGNPTHILRIGESYKEKQRTIQAKKEVEQRRAGGYSRKYASKAKNLADDMVRNTARDLLYYAVTQDAMLIFENLSRGFGRQGKRTFMAERQYTRMEDWLTAKLAYEGLPSKTYLSKTLAQYTSKTCSNCGFTITSADYDRVLEKLKKTATGWMTTINGKELKVEGQITYYNRYKRQNVVKDLSVELDRLSEESVNNDISSWTKGRSGEALSLLKKRFSHRPVQEKFVCLNCGFETHADEQAALNIARSWLFLRSQEYKKYQTNKTTGNTDKRAFVETWQSFYRKKLKEVWKPAV

SEQ ID NO: 160 - protein, 979 aa, Artificial Sequence
  CasX variant
QEIKRINKIRRRLVKDSNTKKAGKTGPMKTLLVRVMTPDLRERLENLRKKPENIPQPISNTSRANLNKLLTDYTEMKKAILHVYWEEFQKDPVGLMSRVAQPASKKIDQNKLKPEMDEKGNLTTAGFACSQCGQPLFVYKLEQVSEKGKAYTNYFGRCNVAEHEKLILLAQLKPEKDSDEAVTYSLGKFGQRALDFYSIHVTKESTHPVKPLAQIAGNRYASGPVGKALSDACMGTIASFLSKYQDIIIEHQKVVKGNQKRLESLRELAGKENLEYPSVTLPPQPHTKEGVDAYNEVIARVRMWVNLNLWQKLKLSRDDAKPLLRLKGFPSFPLVERQANEVDWWDMVCNVKKLINEKKEDGKVFWQNLAGYKRQEALRPYLSSEEDRKKGKKFARYQLGDLLLHLEKKHGEDWGKVYDEAWERIDKKVEGLSKHIKLEEERRSEDAQSKAALTDWLRAKASFVIEGLKEADKDEFCRCELKLQKWYGDLRGKPFAIEAENSILDISGFSKQYNCAFIWQKDGVKKLNLYLIINYFKGYGKLRFKKIKPEAFEANRFYTVINKKSGEIVPMEVNFNFDDPNLIILPLAFGKRQGREFIWNDLLSLETGSLKLANGRVIEKTLYNRRTRQDEPALFVALTFERREVLDSSNIKPMNLIGVDRGENIPAVIALTDPEGCPLSRFKDSLGNPTHILRIGESYKEKQRTIQAKKEVEQRRAGGYSRKYASKAKNLADDMVRNTARDLLYYAVTQDAMLIFENLSRGFGRQGKRTFMAERQYTRMEDWLTAKLAYEGLPSKTYLSKTLAQYTSKTCSNCGFTITSADYDRVLEKLKKTATGWMTTINGKELKVEGQITYYNRYKRQNVVKDLSVELDRLSEESVNNDISSWTKGRSGEALSLLKKRFSHRPVQEKFVCLNCGFETHADEQAALNIARSWLFLRSQEYKKYQTNKTTGNTDKRAFVETWQSFYRKKLKEVWKPAV

SEQ ID NO: 161 - protein, 11 aa, Artificial Sequence
  nuclear localization signal
RQRRNELKRSP

SEQ ID NO: 162 - protein, 38 aa, Artificial Sequence
  nuclear localization signal
NQSSNFGPMKGGNFGGRSSGPYGGGGQYFAKPRNQGGY

SEQ ID NO: 163 - protein, 42 aa, Artificial Sequence
  nuclear localization signal
RMRIZFKNKGKDTAELRRRRVEVSVELRKAKKDEQILKRRNV

SEQ ID NO: 164 - protein, 8 aa, Artificial Sequence
  nuclear localization signal
VSRKRPRP

SEQ ID NO: 165 - protein, 8 aa, Artificial Sequence
  nuclear localization signal
PPKKARED

SEQ ID NO: 166 - protein, 8 aa, Artificial Sequence
  nuclear localization signal
PQPKKKPL

SEQ ID NO: 167 - protein, 12 aa, Artificial Sequence
  nuclear localization signal
SALIKKKKKMAP

SEQ ID NO: 168 - protein, 5 aa, Artificial Sequence
  nuclear localization signal
DRLRR

SEQ ID NO: 169 - protein, 7 aa, Artificial Sequence
  nuclear localization signal
PKQKKRK

SEQ ID NO: 170 - protein, 10 aa, Artificial Sequence
  nuclear localization signal
RKLKKKIKKL

SEQ ID NO: 171 - protein, 10 aa, Artificial Sequence
  nuclear localization signal
REKKKFLKRR

SEQ ID NO: 172 - protein, 20 aa, Artificial Sequence
  nuclear localization signal
KRKGDEVDGVDEVAKKKSKK

SEQ ID NO: 173 - protein, 17 aa, Artificial Sequence
  nuclear localization signal
RKCLQAGMNLEARKTKK

SEQ ID NO: 174 - protein, 8 aa, Artificial Sequence
  nuclear localization signal
PRPRKIPR

SEQ ID NO: 175 - protein, 9 aa, Artificial Sequence
  nuclear localization signal
PPRKKRTVV

SEQ ID NO: 176 - protein, 12 aa, Artificial Sequence
  nuclear localization signal
NLSKKKKRKREK

SEQ ID NO: 177 - protein, 10 aa, Artificial Sequence
  nuclear localization signal
RRPSRPFRKP

SEQ ID NO: 178 - protein, 8 aa, Artificial Sequence
  nuclear localization signal
KRPRSPSS

SEQ ID NO: 179 - protein, 19 aa, Artificial Sequence
  nuclear localization signal
KRGINDRNFWRGENERKTR

SEQ ID NO: 180 - protein, 11 aa, Artificial Sequence
  nuclear localization signal
PRPPKMARYDN

SEQ ID NO: 181 - protein, 8 aa, Artificial Sequence
  nuclear localization signal
KRSFSKAF

SEQ ID NO: 182 - protein, 9 aa, Artificial Sequence
  nuclear localization signal
KLKIKRPVK

SEQ ID NO: 183 - protein, 19 aa, Artificial Sequence
  nuclear localization signal
PKKKRKVPPPPAAKRVKLD

SEQ ID NO: 184 - protein, 17 aa, Artificial Sequence
  nuclear localization signal
PKTRRRPRRSQRKRPPT

SEQ ID NO: 185 - protein, 25 aa, Artificial Sequence
  nuclear localization signal
MSRRRKANPTKLSENAKKLAKEVEN

SEQ ID NO: 186 - protein, 16 aa, Artificial Sequence
  nuclear localization signal
KTRRRPRRSQRKRPPT

SEQ ID NO: 187 - protein, 13 aa, Artificial Sequence
  nuclear localization signal
RRKKRRPRRKKRR

SEQ ID NO: 188 - protein, 14 aa, Artificial Sequence
  nuclear localization signal
PKKKSRKPKKKSRK

SEQ ID NO: 189 - protein, 17 aa, Artificial Sequence
  nuclear localization signal
HKKKHPDASVNFSEFSK

SEQ ID NO: 190 - protein, 18 aa, Artificial Sequence
  nuclear localization signal
QRPGPYDRPQRPGPYDRP

SEQ ID NO: 191 - protein, 16 aa, Artificial Sequence
  nuclear localization signal
LSPSLSPLLSPSLSPL

SEQ ID NO: 192 - protein, 18 aa, Artificial Sequence
  nuclear localization signal
RGKGGKGLGKGGAKRHRK

SEQ ID NO: 193 - protein, 14 aa, Artificial Sequence
  nuclear localization signal
PKRGRGRPKRGRGR

SEQ ID NO: 194 - protein, 19 aa, Artificial Sequence
  nuclear localization signal
PKKKRKVPPPPAAKRVKLD

SEQ ID NO: 195 - protein, 17 aa, Artificial Sequence
  nuclear localization signal
PKKKRKVPPPPKKKRKV

SEQ ID NO: 196 - protein, 7 aa, Artificial Sequence
  nuclear localization signal
PKKKRKV

SEQ ID NO: 197 - protein, 16 aa, Artificial Sequence
  nuclear localization signal
KRPAATKKAGQAKKKK

SEQ ID NO: 198 - protein, 11 aa, Artificial Sequence
  peptide transduction domain
YGRKKRRQRRR

SEQ ID NO: 199 - protein, 8 aa, Artificial Sequence
  peptide transduction domain
RKKRRQRR

SEQ ID NO: 200 - protein, 11 aa, Artificial Sequence
  peptide transduction domain
YARAAARQARA

SEQ ID NO: 201 - protein, 11 aa, Artificial Sequence
  peptide transduction domain
THRLPRRRRRR

SEQ ID NO: 202 - protein, 11 aa, Artificial Sequence
  peptide transduction domain
GGRRARRRRRR

SEQ ID NO: 203 - protein, 50 aa, Artificial Sequence
  peptide transduction domain
  MISC_FEATURE (4)..(50): These individual amino acid residues may be present or absent
RRRRRRRRRRRRRRRRRRRRRRRRRRRRRRRRRRRRRRRRRRRRRRRRRR

SEQ ID NO: 204 - protein, 12 aa, Artificial Sequence
  peptide transduction domain
RRQRRTSKLMKR

SEQ ID NO: 205 - protein, 27 aa, Artificial Sequence
  peptide transduction domain
GWTLNSAGYLLGKINLKALAALAKKIL

SEQ ID NO: 206 - protein, 33 aa, Artificial Sequence
  peptide transduction domain
KALAWEAKLAKALAKALAKHLAKALAKALKCEA

SEQ ID NO: 207 - protein, 16 aa, Artificial Sequence
  peptide transduction domain
RQIKIWFQNRRMKWKK

SEQ ID NO: 208 - protein, 5 aa, Artificial Sequence
  Linker
GSGGS

SEQ ID NO: 209 - protein, 6 aa, Artificial Sequence
  Linker
GGSGGS

SEQ ID NO: 210 - protein, 4 aa, Artificial Sequence
  Linker
GGGS

SEQ ID NO: 211 - protein, 4 aa, Artificial Sequence
  Linker
GGSG

SEQ ID NO: 212 - protein, 5 aa, Artificial Sequence
  Linker
GGSGG

SEQ ID NO: 213 - protein, 5 aa, Artificial Sequence
  Linker
GSGSG

SEQ ID NO: 214 - protein, 5 aa, Artificial Sequence
  Linker
GSGGG

SEQ ID NO: 215 - protein, 5 aa, Artificial Sequence
  Linker
GGGSG

SEQ ID NO: 216 - protein, 5 aa, Artificial Sequence
  Linker
GSSSG

SEQ ID NO: 217 - protein, 4 aa, Artificial Sequence
  Linker
GPGP

SEQ ID NO: 218 - protein, 6 aa, Artificial Sequence
  Linker
PPAPPA

SEQ ID NO: 219 - protein, 7 aa, Artificial Sequence
  Linker
PPPGPPP

SEQ ID NO: 220 - DNA, 3120 bp, Artificial Sequence
  SV40 NLS-CasX-SV40 NLS-TEV cleavage site - TwinStrep tag
atggctccgaagaagaagcgaaaggtcagccaggaaattaaacgcatcaacaagatccgccgtcgtctggtaaaagacagcaatacgaaaaaagccggaaaaaccggtccgatgaaaacgctgctggtgcgcgtgatgacgccggatctccgcgaacgtcttgagaatttgcgtaagaaacctgaaaatattccgcaaccgatttctaacacctcgcgcgccaatctgaataaactgctgaccgattacaccgaaatgaagaaagcgattctgcacgtttactgggaagagttccagaaagacccggtcggtctgatgagccgcgttgcgcaacctgcgccgaaaaatatcgatcagcgcaagttaatcccggttaaagatggtaatgaacgtttaacctccagcggctttgcctgcagtcagtgctgccagccactttatgtttataaacttgaacaggttaacgataaagggaaaccccataccaattatttcggccgctgcaatgtcagcgaacatgaacgcctgattttgttaagcccgcataaaccggaagcgaatgacgaactggtgacctattccctgggtaaatttggtcagcgggcgctggatttttacagcattcatgtgacgcgggaaagtaaccatccggtaaagccactggaacaaatcggcggtaacagctgcgcctctggcccggttggcaaagcgcttagcgatgcctgtatgggcgcggtggcgagctttctgacaaaataccaggatattatcctggagcatcagaaggtgatcaaaaagaacgagaaacgtctggcaaatttaaaggatattgcctccgctaacggcctggcgttcccgaagattaccttaccgccgcagccgcacaccaaagaaggtatcgaagcgtataacaacgttgttgcccagatcgtcatctgggtgaatctcaacctgtggcaaaaactgaaaattggtcgtgatgaagcaaaaccgttgcagcgactgaaaggattcccgtcgtttccgctggttgaacgacaggcgaacgaagtggattggtgggatatggtttgtaacgtcaaaaaattgatcaacgaaaaaaaggaagatggcaaagttttctggcaaaatctggcgggttacaaacgtcaggaggcgttgcttccgtatctctcttcagaagaagatcgcaaaaaaggcaagaagtttgctcgctatcagtttggcgatttattactgcatctggaaaaaaaacacggcgaagactggggcaaagtgtacgatgaagcctgggagcgtatcgacaaaaaagtggaaggtttgtcgaaacatattaaactcgaagaagagcgccgcagtgaagatgcgcagtcaaaagcagcgctgacggactggttacgtgcgaaagccagttttgtgattgaaggattaaaagaagctgataaagatgaattttgccgttgcgaactgaaactgcaaaaatggtatggcgacctgcgcggcaaaccgttcgccattgaggcagaaaatagcatccttgatatctccggtttcagcaaacaatataactgcgcgtttatttggcagaaagacggcgtgaaaaagcttaacctgtatctgatcattaactattttaaaggcgggaaactgcgtttcaagaaaatcaagccggaagcatttgaagccaatcgtttttataccgttattaataaaaaaagcggtgaaatcgtgccgatggaagttaattttaactttgatgatccgaacttgattattctgccgctggcattcggtaaacggcagggccgtgagtttatctggaacgacctgttatcgctggaaacgggcagcctgaaattagccaacggtcgcgtcattgaaaaaacgctctacaaccgccgcacccgccaggatgagccggcactgtttgtcgcgctgacctttgaacggcgtgaagtcctcgatagcagcaacatcaaaccaatgaaccttatcggtattgatcgtggtgaaaacattcctgccgttatcgccctgactgatccagaaggctgcccgctttctcgcttcaaagattcactgggcaacccgacccatatcctccgtattggcgagagctacaaagagaaacagcgtaccattcaggcagccaaagaagtggagcagcgtcgcgcgggcggctatagccgtaaatatgccagcaaagctaaaaacctggcggatgacatggtgcgtaacacggcgcgcgatttgctgtactacgccgtcacccaggacgcgatgctgatttttgagaacctctcccgcggttttgggcgtcagggtaaacgcacgtttatggcggaacgccagtatacgcgtatggaggactggctgaccgcgaagctggcctatgaaggcttgccgtctaaaacttacctgagcaagaccctggctcagtacaccagtaaaacctgtagtaattgcggctttaccatcaccagcgccgattatgaccgcgtgctggaaaagctgaagaaaaccgccaccggctggatgaccaccatcaatggtaaagagcttaaagtcgaagggcagattacttattacaaccgttataagcggcaaaacgtggtgaaagatctgtcggttgagctggaccgtttgtctgaagaaagcgtgaacaatgatatcagctcctggaccaaaggtcgttccggcgaagcgttaagtctgttgaaaaagcgctttagccatcgcccggtgcaggaaaaattcgtttgcctgaactgtggcttcgaaacccacgccgacgagcaagcggcgctcaatattgcgcgtagctggctgttcctgcgcagccaggaatataaaaaatatcaaaccaacaaaacaactggcaataccgacaagcgtgcctttgttgaaacctggcagagcttctatcgcaaaaaactgaaagaggtctggaaaccggcggtagcgccaaagaaaaaacgcaaagtgagcgaaaatctttattttcaaggtagcgcatggagtcatcctcaattcgagaaaggtggaggttctggcggtggatcgggaggttcagcgtggagccacccgcagttcgaaaaaggaaggggatccggctgctaa

SEQ ID NO: 221 - protein, 976 aa, Artificial Sequence; identical to SEQ ID NO: 117
  CasX variant

SEQ ID NO: 222 - protein, 976 aa, Artificial Sequence
  CasX variant
QEIKRINKIRRRLVKDSNTKKAGKTGPMKTLLVRVMTPDLRERLENLRKKPENIPQPISNTSRANLNKLLTDYTEMKKAILHVYWEEFQKDPVGLMSRVAQPAPKNIDQRKLIPVKDGNERLTSSGFACSQCCQPLYVYKLEQVNDKGKPHTNYFGRCNVSEHERLILLSPHKPEANDELVTYSLGKFGQRALDFYSIHVTRESNHPVKPLEQIGGNSCASGPVGKALSDACMGAVASFLTKYQDIILEHKKVIKKNEKRLANLKDIASANGLAFPKITLPPQPHTKEGIEAYNNVVAQIVIWVNLNLWQKLKIGRDEAKPLQRLKGFPSFPLVERQANEVDWWDMVCNVKKLINEKKEDGKVFWQNLAGYKRQEALRPYLSSPEDRKKGKKFARYQLGDLLLHLEKKHGEDWGKVYDEAWERIDKKVEGLSKHIKLEEERRSEDAQSKAALTDWLRAKASFVIEGLKEADKDEFCRCELKLQKWYGDLRGKPFAIEAENSILDISGFSKQYNCAFIWQKDGVKKLNLYLIINYFKGGKLRFKKIKPEAFEANRFYTVINKKSGEIVPMEVNFNFDDPNLIILPLAFGKRQGREFIWNDLLSLETGSLKLANGRVIEKPLYNRRTRQDEPALFVALTFERREVLDSSNIKPMNLIGVDRGENIPAVIALTDPEGCPLSRFKDSLGNPTHILRIGESYKEKQRTIQAKKEVEQRRAGGYSRKYASKAKNLADDMVRNTARDLLYYAVTQDAMLIFENLSRGFGRQGKRTFMAERQYTRMEDWLTAKLAYEGLSKTYLSKTLAQYTSKTCSNCGFTITSADYDRVLEKLKKTATGWMTTINGKELKVEGQITYYNRRKRQNVVKDLSVELDRLSEESVNNDISSWTKGRSGEALSLLKKRFSHRPVQEKFVCLNCGFETHADEQAALNIARSWLFLRSQEYKKYQTNKTTGNTDKRAFVETWQSFYRKKLKEVWKPAV

SEQ ID NO: 223 - protein, 976 aa, Artificial Sequence
  CasX variant
QEIKRINKIRRRLVKDSNTKKAGKTGPMKTLLVRVMTPDLRERLENLRKKPENIPQPISNTSRANLNKLLTDYTEMKKAILHVYWEEFQKDPVGLMSRVAQPAPKNIDQRKLIPVKDGNERLTSSGFACSQCCQPLYVYKLEQVNDKGKPHTNYFGRCNVSEHERLILLSPHKPEANDELVTYSLGKFGQRALDFYSIHVTRESNHPVKPLEQIGGNSCASGPVGKALSDACMGAVASFLTKYQDIILEHQKVIKKNEKRLANLKDIASANGLAFPKITLPPQPHTKEGIEAYNNVVAQIVIWVNLNLWQKLKIGRDEAKPLQRLKGFPSFPLVERQANEVDWWDMVCNVKKLINEKKEDGKVFWQNLAGYKRQEALRPYLSSEEDRKKGKKFARYQLGDLLKHLEKKHGEDWGKVYDEAWERIDKKVEGLSKHIKLEEERRSEDAQSKAALTDWLRAKASFVIEGLKEADKDEFCRCELKLQKWYGDLRGKPFAIEAENSILDISGFSKQYNCAFIWQKDGVKKLNLYLIINYFKGGKLRFKKIKPEAFEANRFYTVINKKSGEIVPMEVNFNFDDPNLIILPLAFGKRQGREFIWNDLLSLETGSLKLANGRVIEKTLYNRRTRQDEPALFVALTFERREVLDSSNIKPMNLIGVDRGENIPAVIALTDPEGCPLSRFKDSLGNPTHILRIGESYKEKQRTIQAKKEVEQRRAGGYSRKYASKAKNLADDMVRNTARDLLYYAVTQDAMLIFENLSRGFGRQGKRTFMAERQYTRMEDWLTAKLAYEGLSKTYLSKTLAQYTSKTCSNCGFTITSADYDRVLEKLKKTATGWMTTINGKELKVEGQITYYNRRKRQNVVKDLSVELDRLSEESVNNDISSWTKGRSGEALSLLKKRFSHRPVQEKFVCLNCGFETHADEQAALNIARSWLFLRSQEYKKYQTNKTTGNTDKRAFVETWQSFYRKKLKEVWKPAV

SEQ ID NO: 224 - DNA, 2928 bp, Artificial Sequence
  CasX variant
caagagatcaagagaatcaacaagatcagaaggagactggtcaaggacagcaacacaaagaaggccggcaagacaggccccatgaaaaccctgctcgtcagagtgatgacccctgacctgagagagcggctggaaaacctgagaaagaagcccgagaacatccctcagcctatcagcaacaccagcagggccaacctgaacaagctgctgaccgactacaccgagatgaagaaagccatcctgcacgtgtactgggaagagttccagaaagaccccgtgggcctgatgagcagagttgctcagcccgctcctaagaacatcgaccagagaaagctgatccccgtgaaggacggcaacgagagactgacctctagcggctttgcctgcagccagtgttgccagcctctgtacgtgtacaagctggaacaagtgaacgacaagggcaagccccacaccaactacttcggcagatgcaacgtgtccgagcacgagaggctgatcctgctgtctcctcacaagcccgaggccaacgatgagctggtcacatacagcctgggcaagttcggacagagagccctggacttctacagcatccacgtgaccagggagagcaatcaccctgtgaagcccctggaacagatcggcggcaatagctgtgcctctggacctgtgggaaaagccctgagcgacgcctgtatgggagccgtggcatccttcctgaccaagtaccaggacatcatcctggaacaccagaaagtgatcaagaagaacgagaaaagactggccaacctcaaggatatcgccagcgctaacggcctggcctttcctaagatcaccctgcctccacagcctcacaccaaagagggcatcgaggcctacaacaacgtggtggcccagatcgtgatttgggtcaacctgaatctgtggcagaagctgaagatcggcagggacgaagccaagccactgcagagactgaagggcttccctagcttccctctggtggaaagacaggccaatgaagtggattggtgggacatggtctgcaacgtgaagaagctgatcaacgagaagaaagaggatggcaaggttttctggcagaacctggccggctacaagagacaagaagccctgaggccttacctgagcagcgaagaggaccggaagaagggcaagaagttcgccagataccagttcggcgacctgctgctgcacctggaaaagaagcacggcgaggactggggcaaagtgtacgatgaggcctgggagagaatcgacaagaaggtggaaggcctgagcaagcacattaagctggaagaggaaagaaggagcgaggacgcccaatctaaagccgctctgaccgattggctgagagccaaggccagctttgtgatcgagggcctgaaagaggccgacaaggacgagttctgcagatgcgagctgaagctgcagaagtggtacggcgatctgagaggcaagcccttcgccattgaggccgagaacagcatcctggacatcagcggcttcagcaagcagtacaactgcgccttcatttggcagaaagacggcgtcaagaaactgaacctgtacctgatcatcaattacttcaaaggcggcaagctgcggttcaagaagatcaaacccgaggccttcgaggctaacagattctacaccgtgatcaacaaaaagtccggcgagatcgtgcccatggaagtgaacttcaacttcgacgaccccaacctgattatcctgcctctggccttcggcaagagacagggcagagagttcatctggaacgatctgctgagcctggaaaccggctctctgaagctggccaatggcagagtgatcgagaaaaccctgtacaacaggagaaccagacaggacgagcctgctctgtttgtggccctgaccttcgagagaagagaggtgctggacagcagcaacatcaagcccatgaacctgatcggcatcgaccggggcgagaatatccctgctgtgatcgccctgacagaccctgaaggatgcccactgagcagattcaaggactccctgggcaaccctacacacatcctgagaatcggcgagagctacaaagagaagcagaggacaatccaggccaagaaagaggtggaacagagaagagccggcggatactctaggaagtacgccagcaaggccaagaatctggccgacgacatggtccgaaacaccgccagagatctgctgtactacgccgtgacacaggacgccatgctgatcttcgagaatctgagcagaggcttcggccggcagggcaagagaacctttatggccgagaggcagtacaccagaatggaagattggctcacagctaaactggcctacgagggactgagcaagacctacctgtccaaaacactggcccagtatacctccaagacctgcagcaattgcggcttcaccatcaccagcgccgactacgacagagtgctggaaaagctcaagaaaaccgccaccggctggatgaccaccatcaacggcaaagagctgaaggttgagggccagatcacctactacaacaggtacaagaggcagaacgtcgtgaaggatctgagcgtggaactggacagactgagcgaagagagcgtgaacaacgacatcagcagctggacaaagggcagatcaggcgaggctctgagcctgctgaagaagaggtttagccacagacctgtgcaagagaagttcgtgtgcctgaactgcggcttcgagacacacgccgatgaacaggctgccctgaacattgccagaagctggctgttcctgagaagccaagagtacaagaagtaccagaccaacaagaccaccggcaacaccgacaagagggcctttgtggaaacctggcagagcttctacagaaaaaagctgaaagaagtctggaagcccgccgtg

SEQ ID NO: 225 - DNA, 2928 bp, Artificial Sequence
  CasX variant
caagagatcaagagaatcaacaagatcagaaggagactggtcaaggacagcaacacaaagaaggccggcaagacaggccccatgaaaaccctgctcgtcagagtgatgacccctgacctgagagagcggctggaaaacctgagaaagaagcccgagaacatccctcagcctatcagcaacaccagcagggccaacctgaacaagctgctgaccgactacaccgagatgaagaaagccatcctgcacgtgtactgggaagagttccagaaagaccccgtgggcctgatgagcagagttgctcagcccgctcctaagaacatcgaccagagaaagctgatccccgtgaaggacggcaacgagagactgacctctagcggctttgcctgcagccagtgttgccagcctctgtacgtgtacaagctggaacaagtgaacgacaagggcaagccccacaccaactacttcggcagatgcaacgtgtccgagcacgagaggctgatcctgctgtctcctcacaagcccgaggccaacgatgagctggtcacatacagcctgggcaagttcggacagagagccctggacttctacagcatccacgtgaccagggagagcaatcaccctgtgaagcccctggaacagatcggcggcaatagctgtgcctctggacctgtgggaaaagccctgagcgacgcctgtatgggagccgtggcatccttcctgaccaagtaccaggacatcatcctggaacacaagaaagtgatcaagaagaacgagaaaagactggccaacctcaaggatatcgccagcgctaacggcctggcctttcctaagatcaccctgcctccacagcctcacaccaaagagggcatcgaggcctacaacaacgtggtggcccagatcgtgatttgggtcaacctgaatctgtggcagaagctgaagatcggcagggacgaagccaagccactgcagagactgaagggcttccctagcttccctctggtggaaagacaggccaatgaagtggattggtgggacatggtctgcaacgtgaagaagctgatcaacgagaagaaagaggatggcaaggttttctggcagaacctggccggctacaagagacaagaagccctgaggccttacctgagcagccccgaggaccggaagaagggcaagaagttcgccagataccagctgggcgacctgctgctgcacctggaaaagaagcacggcgaggactggggcaaagtgtacgatgaggcctgggagagaatcgacaagaaggtggaaggcctgagcaagcacattaagctggaagaggaaagaaggagcgaggacgcccaatctaaagccgctctgaccgattggctgagagccaaggccagctttgtgatcgagggcctgaaagaggccgacaaggacgagttctgcagatgcgagctgaagctgcagaagtggtacggcgatctgagaggcaagcccttcgccattgaggccgagaacagcatcctggacatcagcggcttcagcaagcagtacaactgcgccttcatttggcagaaagacggcgtcaagaaactgaacctgtacctgatcatcaattacttcaaaggcggcaagctgcggttcaagaagatcaaacccgaggccttcgaggctaacagattctacaccgtgatcaacaaaaagtccggcgagatcgtgcccatggaagtgaacttcaacttcgacgaccccaacctgattatcctgcctctggccttcggcaagagacagggcagagagttcatctggaacgatctgctgagcctggaaaccggctctctgaagctggccaatggcagagtgatcgagaaacccctgtacaacaggagaaccagacaggacgagcctgctctgtttgtggccctgaccttcgagagaagagaggtgctggacagcagcaacatcaagcccatgaacctgatcggcgtggaccggggcgagaatatccctgctgtgatcgccctgacagaccctgaaggatgcccactgagcagattcaaggactccctgggcaaccctacacacatcctgagaatcggcgagagctacaaagagaagcagaggacaatccaggccaagaaagaggtggaacagagaagagccggcggatactctaggaagtacgccagcaaggccaagaatctggccgacgacatggtccgaaacaccgccagagatctgctgtactacgccgtgacacaggacgccatgctgatcttcgagaatctgagcagaggcttcggccggcagggcaagagaacctttatggccgagaggcagtacaccagaatggaagattggctcacagctaaactggcctacgagggactgagcaagacctacctgtccaaaacactggcccagtatacctccaagacctgcagcaattgcggcttcaccatcaccagcgccgactacgacagagtgctggaaaagctcaagaaaaccgccaccggctggatgaccaccatcaacggcaaagagctgaaggttgagggccagatcacctactacaacaggaggaagaggcagaacgtcgtgaaggatctgagcgtggaactggacagactgagcgaagagagcgtgaacaacgacatcagcagctggacaaagggcagatcaggcgaggctctgagcctgctgaagaagaggtttagccacagacctgtgcaagagaagttcgtgtgcctgaactgcggcttcgagacacacgccgatgaacaggctgccctgaacattgccagaagctggctgttcctgagaagccaagagtacaagaagtaccagaccaacaagaccaccggcaacaccgacaagagggcctttgtggaaacctggcagagcttctacagaaaaaagctgaaagaagtctggaagcccgccgtg

SEQ ID NO: 226 - DNA, 2928 bp, Artificial Sequence
  CasX variant
caagagatcaagagaatcaacaagatcagaaggagactggtcaaggacagcaacacaaagaaggccggcaagacaggccccatgaaaaccctgctcgtcagagtgatgacccctgacctgagagagcggctggaaaacctgagaaagaagcccgagaacatccctcagcctatcagcaacaccagcagggccaacctgaacaagctgctgaccgactacaccgagatgaagaaagccatcctgcacgtgtactgggaagagttccagaaagaccccgtgggcctgatgagcagagttgctcagcccgctcctaagaacatcgaccagagaaagctgatccccgtgaaggacggcaacgagagactgacctctagcggctttgcctgcagccagtgttgccagcctctgtacgtgtacaagctggaacaagtgaacgacaagggcaagccccacaccaactacttcggcagatgcaacgtgtccgagcacgagaggctgatcctgctgtctcctcacaagcccgaggccaacgatgagctggtcacatacagcctgggcaagttcggacagagagccctggacttctacagcatccacgtgaccagggagagcaatcaccctgtgaagcccctggaacagatcggcggcaatagctgtgcctctggacctgtgggaaaagccctgagcgacgcctgtatgggagccgtggcatccttcctgaccaagtaccaggacatcatcctggaacaccagaaagtgatcaagaagaacgagaaaagactggccaacctcaaggatatcgccagcgctaacggcctggcctttcctaagatcaccctgcctccacagcctcacaccaaagagggcatcgaggcctacaacaacgtggtggcccagatcgtgatttgggtcaacctgaatctgtggcagaagctgaagatcggcagggacgaagccaagccactgcagagactgaagggcttccctagcttccctctggtggaaagacaggccaatgaagtggattggtgggacatggtctgcaacgtgaagaagctgatcaacgagaagaaagaggatggcaaggttttctggcagaacctggccggctacaagagacaagaagccctgaggccttacctgagcagcgaagaggaccggaagaagggcaagaagttcgccagataccagctgggcgacctgctgaagcacctggaaaagaagcacggcgaggactggggcaaagtgtacgatgaggcctgggagagaatcgacaagaaggtggaaggcctgagcaagcacattaagctggaagaggaaagaaggagcgaggacgcccaatctaaagccgctctgaccgattggctgagagccaaggccagctttgtgatcgagggcctgaaagaggccgacaaggacgagttctgcagatgcgagctgaagctgcagaagtggtacggcgatctgagaggcaagcccttcgccattgaggccgagaacagcatcctggacatcagcggcttcagcaagcagtacaactgcgccttcatttggcagaaagacggcgtcaagaaactgaacctgtacctgatcatcaattacttcaaaggcggcaagctgcggttcaagaagatcaaacccgaggccttcgaggctaacagattctacaccgtgatcaacaaaaagtccggcgagatcgtgcccatggaagtgaacttcaacttcgacgaccccaacctgattatcctgcctctggccttcggcaagagacagggcagagagttcatctggaacgatctgctgagcctggaaaccggctctctgaagctggccaatggcagagtgatcgagaaaaccctgtacaacaggagaaccagacaggacgagcctgctctgtttgtggccctgaccttcgagagaagagaggtgctggacagcagcaacatcaagcccatgaacctgatcggcgtggaccggggcgagaatatccctgctgtgatcgccctgacagaccctgaaggatgcccactgagcagattcaaggactccctgggcaaccctacacacatcctgagaatcggcgagagctacaaagagaagcagaggacaatccaggccaagaaagaggtggaacagagaagagccggcggatactctaggaagtacgccagcaaggccaagaatctggccgacgacatggtccgaaacaccgccagagatctgctgtactacgccgtgacacaggacgccatgctgatcttcgagaatctgagcagaggcttcggccggcagggcaagagaacctttatggccgagaggcagtacaccagaatggaagattggctcacagctaaactggcctacgagggactgagcaagacctacctgtccaaaacactggcccagtatacctccaagacctgcagcaattgcggcttcaccatcaccagcgccgactacgacagagtgctggaaaagctcaagaaaaccgccaccggctggatgaccaccatcaacggcaaagagctgaaggttgagggccagatcacctactacaacaggaggaagaggcagaacgtcgtgaaggatctgagcgtggaactggacagactgagcgaagagagcgtgaacaacgacatcagcagctggacaaagggcagatcaggcgaggctctgagcctgctgaagaagaggtttagccacagacctgtgcaagagaagttcgtgtgcctgaactgcggcttcgagacacacgccgatgaacaggctgccctgaacattgccagaagctggctgttcctgagaagccaagagtacaagaagtaccagaccaacaagaccaccggcaacaccgacaagagggcctttgtggaaacctggcagagcttctacagaaaaaagctgaaagaagtctggaagcccgccgtg

SEQ ID NO: 227 - protein, 977 aa, Artificial Sequence; identical to SEQ ID NO: 135
  CasX variant

SEQ ID NO: 228 - protein, 977 aa, Artificial Sequence; identical to SEQ ID NO: 138
  CasX variant

SEQ ID NO: 229 - protein, 978 aa, Artificial Sequence; identical to SEQ ID NO: 145
  CasX variant

SEQ ID NO: 230 - protein, 978 aa, Artificial Sequence; identical to SEQ ID NO: 156
  CasX variant

SEQ ID NO: 231 - DNA, 2931 bp, Artificial Sequence
  CasX variant
caagagatcaagagaatcaacaagatcagaaggagactggtcaaggacagcaacacaaagaaggccggcaagacaggccccatgaaaaccctgctcgtcagagtgatgacccctgacctgagagagcggctggaaaacctgagaaagaagcccgagaacatccctcagcctatcagcaacaccagcagggccaacctgaacaagctgctgaccgactacaccgagatgaagaaagccatcctgcacgtgtactgggaagagttccagaaagaccccgtgggcctgatgagcagagttgctcagcctgccagcaagaagatcgaccagaacaagctgaagcccgagatggacgagaagggcaatctgaccacagccggctttgcctgctctcagtgtggccagcctctgttcgtgtacaagctggaacaggtgtccgagaaaggcaaggcctacaccaactacttcggcagatgtaacgtggccgagcacgagaagctgattctgctggcccagctgaaacctgagaaggactctgatgaggccgtgacctacagcctgggcaagtttggacagagagccctggacttctacagcatccacgtgaccaaagaaagcacacaccccgtgaagcccctggctcagatcgccggcaatagatacgcctctggacctgtgggcaaagccctgtccgatgcctgcatgggaacaatcgccagcttcctgagcaagtaccaggacatcatcatcgagcaccagaaggtggtcaagggcaaccagaagagactggaaagcctgagggagctggccggcaaagagaacctggaataccccagcgtgaccctgcctcctcagcctcacacaaaagaaggcgtggacgcctacaacgaagtgatcgccagagtgagaatgtgggtcaacctgaacctgtggcagaagctgaaactgtccagggacgacgccaagcctctgctgagactgaagggcttccctagcttccctctggtggaaagacaggccaatgaagtggattggtgggacatggtctgcaacgtgaagaagctgatcaacgagaagaaagaggatggcaaggttttctggcagaacctggccggctacaagagacaagaagccctgaggccttacctgagcagcgaagaggaccggaagaagggcaagaagttcgccagataccagttcggcgacctgctgctgcacctggaaaagaagcacggcgaggactggggcaaagtgtacgatgaggcctgggagagaatcgacaagaaggtggaaggcctgagcaagcacattaagctggaagaggaaagaaggagcgaggacgcccaatctaaagccgctctgaccgattggctgagagccaaggccagctttgtgatcgagggcctgaaagaggccgacaaggacgagttctgcagatgcgagctgaagctgcagaagtggtacggcgatctgagaggcaagcccttcgccattgaggccgagaacagcatcctggacatcagcggcttcagcaagcagtacaactgcgccttcatttggcagaaagacggcgtcaagaaactgaacctgtacctgatcatcaattacttcaaaggcggcaagctgcggttcaagaagatcaaacccgaggccttcgaggctaacagattctacaccgtgatcaacaaaaagtccggcgagatcgtgcccatggaagtgaacttcaacttcgacgaccccaacctgattatcctgcctctggccttcggcaagagacagggcagagagttcatctggaacgatctgctgagcctggaaaccggctctctgaagctggccaatggcagagtgatcgagaaaaccctgtacaacaggagaaccagacaggacgagcctgctctgtttgtggccctgaccttcgagagaagagaggtgctggacagcagcaacatcaagcccatgaacctgatcggcatcgaccggggcgagaatatccctgctgtgatcgccctgacagaccctgaaggatgcccactgagcagattcaaggactccctgggcaaccctacacacatcctgagaatcggcgagagctacaaagagaagcagaggacaatccaggccaagaaagaggtggaacagagaagagccggcggatactctaggaagtacgccagcaaggccaagaatctggccgacgacatggtccgaaacaccgccagagatctgctgtactacgccgtgacacaggacgccatgctgatcttcgagaatctgagcagaggcttcggccggcagggcaagagaacctttatggccgagaggcagtacaccagaatggaagattggctcacagctaaactggcctacgagggactgagcaagacctacctgtccaaaacactggcccagtatacctccaagacctgcagcaattgcggcttcaccatcaccagcgccgactacgacagagtgctggaaaagctcaagaaaaccgccaccggctggatgaccaccatcaacggcaaagagctgaaggttgagggccagatcacctactacaacaggtacaagaggcagaacgtcgtgaaggatctgagcgtggaactggacagactgagcgaagagagcgtgaacaacgacatcagcagctggacaaagggcagatcaggcgaggctctgagcctgctgaagaagaggtttagccacagacctgtgcaagagaagttcgtgtgcctgaactgcggcttcgagacacacgccgatgaacaggctgccctgaacattgccagaagctggctgttcctgagaagccaagagtacaagaagtaccagaccaacaagaccaccggcaacaccgacaagagggcctttgtggaaacctggcagagcttctacagaaaaaagctgaaagaagtctggaagcccgccgtg

SEQ ID NO: 232 - DNA, 2931 bp, Artificial Sequence
  CasX variant
caagagatcaagagaatcaacaagatcagaaggagactggtcaaggacagcaacacaaagaaggccggcaagacaggccccatgaaaaccctgctcgtcagagtgatgacccctgacctgagagagcggctggaaaacctgagaaagaagcccgagaacatccctcagcctatcagcaacaccagcagggccaacctgaacaagctgctgaccgactacaccgagatgaagaaagccatcctgcacgtgtactgggaagagttccagaaagaccccgtgggcctgatgagcagagttgctcagcctgccagcaagaagatcgaccagaacaagctgaagcccgagatggacgagaagggcaatctgaccacagccggctttgcctgctctcagtgtggccagcctctgttcgtgtacaagctggaacaggtgtccgagaaaggcaaggcctacaccaactacttcggcagatgtaacgtggccgagcacgagaagctgattctgctggcccagctgaaacctgagaaggactctgatgaggccgtgacctacagcctgggcaagtttggacagagagccctggacttctacagcatccacgtgaccaaagaaagcacacaccccgtgaagcccctggctcagatcgccggcaatagatacgcctctggacctgtgggcaaagccctgtccgatgcctgcatgggaacaatcgccagcttcctgagcaagtaccaggacatcatcatcgagcaccagaaggtggtcaagggcaaccagaagagactggaaagcctgagggagctggccggcaaagagaacctggaataccccagcgtgaccctgcctcctcagcctcacacaaaagaaggcgtggacgcctacaacgaagtgatcgccagagtgagaatgtgggtcaacctgaacctgtggcagaagctgaaactgtccagggacgacgccaagcctctgctgagactgaagggcttccctagcttccctctggtggaaagacaggccaatgaagtggattggtgggacatggtctgcaacgtgaagaagctgatcaacgagaagaaagaggatggcaaggttttctggcagaacctggccggctacaagagacaagaagccctgaggccttacctgagcagcgaagaggaccggaagaagggcaagaagttcgccagataccagctgggcgacctgctgctgcacctggaaaagaagcacggcgaggactggggcaaagtgtacgatgaggcctgggagagaatcgacaagaaggtggaaggcctgagcaagcacattaagctggaagaggaaagaaggagcgaggacgcccaatctaaagccgctctgaccgattggctgagagccaaggccagctttgtgatcgagggcctgaaagaggccgacaaggacgagttctgcagatgcgagctgaagctgcagaagtggtacggcgatctgagaggcaagcccttcgccattgaggccgagaacagcatcctggacatcagcggcttcagcaagcagtacaactgcgccttcatttggcagaaagacggcgtcaagaaactgaacctgtacctgatcatcaattacttcaaaggcggcaagctgcggttcaagaagatcaaacccgaggccttcgaggctaacagattctacaccgtgatcaacaaaaagtccggcgagatcgtgcccatggaagtgaacttcaacttcgacgaccccaacctgattatcctgcctctggccttcggcaagagacagggcagagagttcatctggaacgatctgctgagcctggaaaccggctctctgaagctggccaatggcagagtgatcgagaaaaccctgtacaacaggagaaccagacaggacgagcctgctctgtttgtggccctgaccttcgagagaagagaggtgctggacagcagcaacatcaagcccatgaacctgatcggcgtggaccggggcgagaatatccctgctgtgatcgccctgacagaccctgaaggatgcccactgagcagattcaaggactccctgggcaaccctacacacatcctgagaatcggcgagagctacaaagagaagcagaggacaatccaggccaagaaagaggtggaacagagaagagccggcggatactctaggaagtacgccagcaaggccaagaatctggccgacgacatggtccgaaacaccgccagagatctgctgtactacgccgtgacacaggacgccatgctgatcttcgagaatctgagcagaggcttcggccggcagggcaagagaacctttatggccgagaggcagtacaccagaatggaagattggctcacagctaaactggcctacgagggactgagcaagacctacctgtccaaaacactggcccagtatacctccaagacctgcagcaattgcggcttcaccatcaccagcgccgactacgacagagtgctggaaaagctcaagaaaaccgccaccggctggatgaccaccatcaacggcaaagagctgaaggttgagggccagatcacctactacaacaggtacaagaggcagaacgtcgtgaaggatctgagcgtggaactggacagactgagcgaagagagcgtgaacaacgacatcagcagctggacaaagggcagatcaggcgaggctctgagcctgctgaagaagaggtttagccacagacctgtgcaagagaagttcgtgtgcctgaactgcggcttcgagacacacgccgatgaacaggctgccctgaacattgccagaagctggctgttcctgagaagccaagagtacaagaagtaccagaccaacaagaccaccggcaacaccgacaagagggcctttgtggaaacctggcagagcttctacagaaaaaagctgaaagaagtctggaagcccgccgtg

SEQ ID NO: 233 - DNA, 2934 bp, Artificial Sequence
  CasX variant
caagagatcaagagaatcaacaagatcagaaggagactggtcaaggacagcaacacaaagaaggccggcaagacaggccccatgaaaaccctgctcgtcagagtgatgacccctgacctgagagagcggctggaaaacctgagaaagaagcccgagaacatccctcagcctatcagcaacaccagcagggccaacctgaacaagctgctgaccgactacaccgagatgaagaaagccatcctgcacgtgtactgggaagagttccagaaagaccccgtgggcctgatgagcagagttgctcagcctgccagcaagaagatcgaccagaacaagctgaagcccgagatggacgagaagggcaatctgaccacagccggctttgcctgctctcagtgtggccagcctctgttcgtgtacaagctggaacaggtgtccgagaaaggcaaggcctacaccaactacttcggcagatgtaacgtggccgagcacgagaagctgattctgctggcccagctgaaacctgagaaggactctgatgaggccgtgacctacagcctgggcaagtttggacagagagccctggacttctacagcatccacgtgaccaaagaaagcacacaccccgtgaagcccctggctcagatcgccggcaatagatacgcctctggacctgtgggcaaagccctgtccgatgcctgcatgggaacaatcgccagcttcctgagcaagtaccaggacatcatcatcgagcaccagaaggtggtcaagggcaaccagaagagactggaaagcctgagggagctggccggcaaagagaacctggaataccccagcgtgaccctgcctcctcagcctcacacaaaagaaggcgtggacgcctacaacgaagtgatcgccagagtgagaatgtgggtcaacctgaacctgtggcagaagctgaaactgtccagggacgacgccaagcctctgctgagactgaagggcttccctagcttccctctggtggaaagacaggccaatgaagtggattggtgggacatggtctgcaacgtgaagaagctgatcaacgagaagaaagaggatggcaaggttttctggcagaacctggccggctacaagagacaagaagccctgaggccttacctgagcagcgaagaggaccggaagaagggcaagaagttcgccagataccagctgggcgacctgctgctgcacctggaaaagaagcacggcgaggactggggcaaagtgtacgatgaggcctgggagagaatcgacaagaaggtggaaggcctgagcaagcacattaagctggaagaggaaagaaggagcgaggacgcccaatctaaagccgctctgaccgattggctgagagccaaggccagctttgtgatcgagggcctgaaagaggccgacaaggacgagttctgcagatgcgagctgaagctgcagaagtggtacggcgatctgagaggcaagcccttcgccattgaggccgagaacagcatcctggacatcagcggcttcagcaagcagtacaactgcgccttcatttggcagaaagacggcgtcaagaaactgaacctgtacctgatcatcaattacttcaaaggcggcaagctgcggttcaagaagatcaaacccgaggccttcgaggctaacagattctacaccgtgatcaacaaaaagtccggcgagatcgtgcccatggaagtgaacttcaacttcgacgaccccaacctgattatcctgcctctggccttcggcaagagacagggcagagagttcatctggaacgatctgctgagcctggaaaccggctctctgaagctggccaatggcagagtgatcgagaaaaccctgtacaacaggagaaccagacaggacgagcctgctctgtttgtggccctgaccttcgagagaagagaggtgctggacagcagcaacatcaagcccatgaacctgatcggcgtggaccggggcgagaatatccctgctgtgatcgccctgacagaccctgaaggatgcccactgagcagattcaaggactccctgggcaaccctacacacatcctgagaatcggcgagagctacaaagagaagcagaggacaatccaggccaagaaagaggtggaacagagaagagccggcggatactctaggaagtacgccagcaaggccaagaatctggccgacgacatggtccgaaacaccgccagagatctgctgtactacgccgtgacacaggacgccatgctgatcttcgagaatctgagcagaggcttcggccggcagggcaagagaacctttatggccgagaggcagtacaccagaatggaagattggctcacagctaaactggcctacgagggactgcccagcaagacctacctgtccaaaacactggcccagtatacctccaagacctgcagcaattgcggcttcaccatcaccagcgccgactacgacagagtgctggaaaagctcaagaaaaccgccaccggctggatgaccaccatcaacggcaaagagctgaaggttgagggccagatcacctactacaacaggtacaagaggcagaacgtcgtgaaggatctgagcgtggaactggacagactgagcgaagagagcgtgaacaacgacatcagcagctggacaaagggcagatcaggcgaggctctgagcctgctgaagaagaggtttagccacagacctgtgcaagagaagttcgtgtgcctgaactgcggcttcgagacacacgccgatgaacaggctgccctgaacattgccagaagctggctgttcctgagaagccaagagtacaagaagtaccagaccaacaagaccaccggcaacaccgacaagagggcctttgtggaaacctggcagagcttctacagaaaaaagctgaaagaagtctggaagcccgccgtg

SEQ ID NO: 234 - DNA, 2934 bp, Artificial Sequence
  CasX variant
caagagatcaagagaatcaacaagatcagaaggagactggtcaaggacagcaacacaaagaaggccggcaagacacggggccccatgaaaaccctgctcgtcagagtgatgacccctgacctgagagagcggctggaaaacctgagaaagaagcccgagaacatccctcagcctatcagcaacaccagcagggccaacctgaacaagctgctgaccgactacaccgagatgaagaaagccatcctgcacgtgtactgggaagagttccagaaagaccccgtgggcctgatgagcagagttgctcagcctgccagcaagaagatcgaccagaacaagctgaagcccgagatggacgagaagggcaatctgaccacagccggctttgcctgctctcagtgtggccagcctctgttcgtgtacaagctggaacaggtgtccgagaaaggcaaggcctacaccaactacttcggcagatgtaacgtggccgagcacgagaagctgattctgctggcccagctgaaacctgagaaggactctgatgaggccgtgacctacagcctgggcaagtttggacagagagccctggacttctacagcatccacgtgaccaaagaaagcacacaccccgtgaagcccctggctcagatcgccggcaatagatacgcctctggacctgtgggcaaagccctgtccgatgcctgcatgggaacaatcgccagcttcctgagcaagtaccaggacatcatcatcgagcaccagaaggtggtcaagggcaaccagaagagactggaaagcctgagggagctggccggcaaagagaacctggaataccccagcgtgaccctgcctcctcagcctcacacaaaagaaggcgtggacgcctacaacgaagtgatcgccagagtgagaatgtgggtcaacctgaacctgtggcagaagctgaaactgtccagggacgacgccaagcctctgctgagactgaagggcttccctagcttccctctggtggaaagacaggccaatgaagtggattggtgggacatggtctgcaacgtgaagaagctgatcaacgagaagaaagaggatggcaaggttttctggcagaacctggccggctacaagagacaagaagccctgaggccttacctgagcagcgaagaggaccggaagaagggcaagaagttcgccagataccagctgggcgacctgctgctgcacctggaaaagaagcacggcgaggactggggcaaagtgtacgatgaggcctgggagagaatcgacaagaaggtggaaggcctgagcaagcacattaagctggaagaggaaagaaggagcgaggacgcccaatctaaagccgctctgaccgattggctgagagccaaggccagctttgtgatcgagggcctgaaagaggccgacaaggacgagttctgcagatgcgagctgaagctgcagaagtggtacggcgatctgagaggcaagcccttcgccattgaggccgagaacagcatcctggacatcagcggcttcagcaagcagtacaactgcgccttcatttggcagaaagacggcgtcaagaaactgaacctgtacctgatcatcaattacttcaaaggcggcaagctgcggttcaagaagatcaaacccgaggccttcgaggctaacagattctacaccgtgatcaacaaaaagtccggcgagatcgtgcccatggaagtgaacttcaacttcgacgaccccaacctgattatcctgcctctggccttcggcaagagacagggcagagagttcatctggaacgatctgctgagcctggaaaccggctctctgaagctggccaatggcagagtgatcgagaaaaccctgtacaacaggagaaccagacaggacgagcctgctctgtttgtggccctgaccttcgagagaagagaggtgctggacagcagcaacatcaagcccatgaacctgatcggcgtggaccggggcgagaatatccctgctgtgatcgccctgacagaccctgaaggatgcccactgagcagattcaaggactccctgggcaaccctacacacatcctgagaatcggcgagagctacaaagagaagcagaggacaatccaggccaagaaagaggtggaacagagaagagccggcggatactctaggaagtacgccagcaaggccaagaatctggccgacgacatggtccgaaacaccgccagagatctgctgtactacgccgtgacacaggacgccatgctgatcttcgagaatctgagcagaggcttcggccggcagggcaagagaacctttatggccgagaggcagtacaccagaatggaagattggctcacagctaaactggcctacgagggactgagcaagacctacctgtccaaaacactggcccagtatacctccaagacctgcagcaattgcggcttcaccatcaccagcgccgactacgacagagtgctggaaaagctcaagaaaaccgccaccggctggatgaccaccatcaacggcaaagagctgaaggttgagggccagatcacctactacaacaggtacaagaggcagaacgtcgtgaaggatctgagcgtggaactggacagactgagcgaagagagcgtgaacaacgacatcagcagctggacaaagggcagatcaggcgaggctctgagcctgctgaagaagaggtttagccacagacctgtgcaagagaagttcgtgtgcctgaactgcggcttcgagacacacgccgatgaacaggctgccctgaacattgccagaagctggctgttcctgagaagccaagagtacaagaagtaccagaccaacaagaccaccggcaacaccgacaagagggcctttgtggaaacctggcagagcttctacagaaaaaagctgaaagaagtctggaagcccgccgtg

SEQ ID NO: 235 - protein, 987 aa, Artificial Sequence
  CasX variant
MAPKKKRKVSRQEIKRINKIRRRLVKDSNTKKAGKTGPMKTLLVRVMTPDLRERLENLRKKPENIPQPISNTSRANLNKLLTDYTEMKKAILHVYWEEFQKDPVGLMSRVAQPAPKNIDQRKLIPVKDGNERLTSSGFACSQCCQPLYVYKLEQVNDKGKPHTNYFGRCNVSEHERLILLSPHKPEANDELVTYSLGKFGQRALDFYSIHVTRESNHPVKPLEQIGGNSCASGPVGKALSDACMGAVASFLTKYQDIILEHQKVIKKNEKRLANLKDIASANGLAFPKITLPPQPHTKEGIEAYNNVVAQIVIWVNLNLWQKLKIGRDEAKPLQRLKGFPSFPLVERQANEVDWWDMVCNVKKLINEKKEDGKVFWQNLAGYKRQEALRPYLSSEEDRKKGKKFARYQFGDLLLHLEKKHGEDWGKVYDEAWERIDKKVEGLSKHIKLEEERRSEDAQSKAALTDWLRAKASFVIEGLKEADKDEFCRCELKLQKWYGDLRGKPFAIEAENSILDISGFSKQYNCAFIWQKDGVKKLNLYLIINYFKGGKLRFKKIKPEAFEANRFYTVINKKSGEIVPMEVNFNFDDPNLIILPLAFGKRQGREFIWNDLLSLETGSLKLANGRVIEKTLYNRRTRQDEPALFVALTFERREVLDSSNIKPMNLIGIDRGENIPAVIALTDPEGCPLSRFKDSLGNPTHILRIGESYKEKQRTIQAKKEVEQRRAGGYSRKYASKAKNLADDMVRNTARDLLYYAVTQDAMLIFENLSRGFGRQGKRTFMAERQYTRMEDWLTAKLAYEGLSKTYLSKTLAQYTSKTCSNCGFTITSADYDRVLEKLKKTATGWMTTINGKELKVEGQITYYNRYKRQNVVKDLSVELDRLSEESVNNDISSWTKGRSGEALSLLKKRFSHRPVQEKFVCLNCGFETHADEQAALNIARSWLFLRSQEYKKYQTNKTTGNTDKRAFVETWQSFYRKKLKEVWKPAV

SEQ ID NO: 236 - protein, 986 aa, Artificial Sequence
  CasX variant
MQEIKRINKIRRRLVKDSNTKKAGKTGPMKTLLVRVMTPDLRERLENLRKKPENIPQPISNTSRANLNKLLTDYTEMKKAILHVYWEEFQKDPVGLMSRVAQPAPKNIDQRKLIPVKDGNERLTSSGFACSQCCQPLYVYKLEQVNDKGKPHTNYFGRCNVSEHERLILLSPHKPEANDELVTYSLGKFGQRALDFYSIHVTRESNHPVKPLEQIGGNSCASGPVGKALSDACMGAVASFLTKYQDIILEHQKVIKKNEKRLANLKDIASANGLAFPKITLPPQPHTKEGIEAYNNVVAQIVIWVNLNLWQKLKIGRDEAKPLQRLKGFPSFPLVERQANEVDWWDMVCNVKKLINEKKEDGKVFWQNLAGYKRQEALRPYLSSEEDRKKGKKFARYQFGDLLLHLEKKHGEDWGKVYDEAWERIDKKVEGLSKHIKLEEERRSEDAQSKAALTDWLRAKASFVIEGLKEADKDEFCRCELKLQKWYGDLRGKPFAIEAENSILDISGFSKQYNCAFIWQKDGVKKLNLYLIINYFKGGKLRFKKIKPEAFEANRFYTVINKKSGEIVPMEVNFNFDDPNLIILPLAFGKRQGREFIWNDLLSLETGSLKLANGRVIEKTLYNRRTRQDEPALFVALTFERREVLDSSNIKPMNLIGIDRGENIPAVIALTDPEGCPLSRFKDSLGNPTHILRIGESYKEKQRTIQAKKEVEQRRAGGYSRKYASKAKNLADDMVRNTARDLLYYAVTQDAMLIFENLSRGFGRQGKRTFMAERQYTRMEDWLTAKLAYEGLSKTYLSKTLAQYTSKTCSNCGFTITSADYDRVLEKLKKTATGWMTTINGKELKVEGQITYYNRYKRQNVVKDLSVELDRLSEESVNNDISSWTKGRSGEALSLLKKRFSHRPVQEKFVCLNCGFETHADEQAALNIARSWLFLRSQEYKKYQTNKTTGNTDKRAFVETWQSFYRKKLKEVWKPAVTSPKKKRKV

SEQ ID NO: 237 - protein, 996 aa, Artificial Sequence
  CasX variant
MQEIKRINKIRRRLVKDSNTKKAGKTGPMKTLLVRVMTPDLRERLENLRKKPENIPQPISNTSRANLNKLLTDYTEMKKAILHVYWEEFQKDPVGLMSRVAQPAPKNIDQRKLIPVKDGNERLTSSGFACSQCCQPLYVYKLEQVNDKGKPHTNYFGRCNVSEHERLILLSPHKPEANDELVTYSLGKFGQRALDFYSIHVTRESNHPVKPLEQIGGNSCASGPVGKALSDACMGAVASFLTKYQDIILEHQKVIKKNEKRLANLKDIASANGLAFPKITLPPQPHTKEGIEAYNNVVAQIVIWVNLNLWQKLKIGRDEAKPLQRLKGFPSFPLVERQANEVDWWDMVCNVKKLINEKKEDGKVFWQNLAGYKRQEALRPYLSSEEDRKKGKKFARYQFGDLLLHLEKKHGEDWGKVYDEAWERIDKKVEGLSKHIKLEEERRSEDAQSKAALTDWLRAKASFVIEGLKEADKDEFCRCELKLQKWYGDLRGKPFAIEAENSILDISGFSKQYNCAFIWQKDGVKKLNLYLIINYFKGGKLRFKKIKPEAFEANRFYTVINKKSGEIVPMEVNFNFDDPNLIILPLAFGKRQGREFIWNDLLSLETGSLKLANGRVIEKTLYNRRTRQDEPALFVALTFERREVLDSSNIKPMNLIGIDRGENIPAVIALTDPEGCPLSRFKDSLGNPTHILRIGESYKEKQRTIQAKKEVEQRRAGGYSRKYASKAKNLADDMVRNTARDLLYYAVTQDAMLIFENLSRGFGRQGKRTFMAERQYTRMEDWLTAKLAYEGLSKTYLSKTLAQYTSKTCSNCGFTITSADYDRVLEKLKKTATGWMTTINGKELKVEGQITYYNRYKRQNVVKDLSVELDRLSEESVNNDISSWTKGRSGEALSLLKKRFSHRPVQEKFVCLNCGFETHADEQAALNIARSWLFLRSQEYKKYQTNKTTGNTDKRAFVETWQSFYRKKLKEVWKPAVTSPKKKRKVPPPPKKKRKV

SEQ ID NO: 238 - protein, 1006 aa, Artificial Sequence
  CasX variant
MQEIKRINKIRRRLVKDSNTKKAGKTGPMKTLLVRVMTPDLRERLENLRKKPENIPQPISNTSRANLNKLLTDYTEMKKAILHVYWEEFQKDPVGLMSRVAQPAPKNIDQRKLIPVKDGNERLTSSGFACSQCCQPLYVYKLEQVNDKGKPHTNYFGRCNVSEHERLILLSPHKPEANDELVTYSLGKFGQRALDFYSIHVTRESNHPVKPLEQIGGNSCASGPVGKALSDACMGAVASFLTKYQDIILEHQKVIKKNEKRLANLKDIASANGLAFPKITLPPQPHTKEGIEAYNNVVAQIVIWVNLNLWQKLKIGRDEAKPLQRLKGFPSFPLVERQANEVDWWDMVCNVKKLINEKKEDGKVFWQNLAGYKRQEALRPYLSSEEDRKKGKKFARYQFGDLLLHLEKKHGEDWGKVYDEAWERIDKKVEGLSKHIKLEEERRSEDAQSKAALTDWLRAKASFVIEGLKEADKDEFCRCELKLQKWYGDLRGKPFAIEAENSILDISGFSKQYNCAFIWQKDGVKKLNLYLIINYFKGGKLRFKKIKPEAFEANRFYTVINKKSGEIVPMEVNFNFDDPNLIILPLAFGKRQGREFIWNDLLSLETGSLKLANGRVIEKTLYNRRTRQDEPALFVALTFERREVLDSSNIKPMNLIGIDRGENIPAVIALTDPEGCPLSRFKDSLGNPTHILRIGESYKEKQRTIQAKKEVEQRRAGGYSRKYASKAKNLADDMVRNTARDLLYYAVTQDAMLIFENLSRGFGRQGKRTFMAERQYTRMEDWLTAKLAYEGLSKTYLSKTLAQYTSKTCSNCGFTITSADYDRVLEKLKKTATGWMTTINGKELKVEGQITYYNRYKRQNVVKDLSVELDRLSEESVNNDISSWTKGRSGEALSLLKKRFSHRPVQEKFVCLNCGFETHADEQAALNIARSWLFLRSQEYKKYQTNKTTGNTDKRAFVETWQSFYRKKLKEVWKPAVTSPKKKRKVPPPHKKKHPDASVNFSEFSK

SEQ ID NO: 239 - protein, 1007 aa, Artificial Sequence
  CasX variant
MQEIKRINKIRRRLVKDSNTKKAGKTGPMKTLLVRVMTPDLRERLENLRKKPENIPQPISNTSRANLNKLLTDYTEMKKAILHVYWEEFQKDPVGLMSRVAQPAPKNIDQRKLIPVKDGNERLTSSGFACSQCCQPLYVYKLEQVNDKGKPHTNYFGRCNVSEHERLILLSPHKPEANDELVTYSLGKFGQRALDFYSIHVTRESNHPVKPLEQIGGNSCASGPVGKALSDACMGAVASFLTKYQDIILEHQKVIKKNEKRLANLKDIASANGLAFPKITLPPQPHTKEGIEAYNNVVAQIVIWVNLNLWQKLKIGRDEAKPLQRLKGFPSFPLVERQANEVDWWDMVCNVKKLINEKKEDGKVFWQNLAGYKRQEALRPYLSSEEDRKKGKKFARYQFGDLLLHLEKKHGEDWGKVYDEAWERIDKKVEGLSKHIKLEEERRSEDAQSKAALTDWLRAKASFVIEGLKEADKDEFCRCELKLQKWYGDLRGKPFAIEAENSILDISGFSKQYNCAFIWQKDGVKKLNLYLIINYFKGGKLRFKKIKPEAFEANRFYTVINKKSGEIVPMEVNFNFDDPNLIILPLAFGKRQGREFIWNDLLSLETGSLKLANGRVIEKTLYNRRTRQDEPALFVALTFERREVLDSSNIKPMNLIGIDRGENIPAVIALTDPEGCPLSRFKDSLGNPTHILRIGESYKEKQRTIQAKKEVEQRRAGGYSRKYASKAKNLADDMVRNTARDLLYYAVTQDAMLIFENLSRGFGRQGKRTFMAERQYTRMEDWLTAKLAYEGLSKTYLSKTLAQYTSKTCSNCGFTITSADYDRVLEKLKKTATGWMTTINGKELKVEGQITYYNRYKRQNVVKDLSVELDRLSEESVNNDISSWTKGRSGEALSLLKKRFSHRPVQEKFVCLNCGFETHADEQAALNIARSWLFLRSQEYKKYQTNKTTGNTDKRAFVETWQSFYRKKLKEVWKPAVTSPKKKRKVPPPQRPGPYDRPQRPGPYDRP

SEQ ID NO: 240 - protein, 1005 aa, Artificial Sequence
  CasX variant
MQEIKRINKIRRRLVKDSNTKKAGKTGPMKTLLVRVMTPDLRERLENLRKKPENIPQPISNTSRANLNKLLTDYTEMKKAILHVYWEEFQKDPVGLMSRVAQPAPKNIDQRKLIPVKDGNERLTSSGFACSQCCQPLYVYKLEQVNDKGKPHTNYFGRCNVSEHERLILLSPHKPEANDELVTYSLGKFGQRALDFYSIHVTRESNHPVKPLEQIGGNSCASGPVGKALSDACMGAVASFLTKYQDIILEHQKVIKKNEKRLANLKDIASANGLAFPKITLPPQPHTKEGIEAYNNVVAQIVIWVNLNLWQKLKIGRDEAKPLQRLKGFPSFPLVERQANEVDWWDMVCNVKKLINEKKEDGKVFWQNLAGYKRQEALRPYLSSEEDRKKGKKFARYQFGDLLLHLEKKHGEDWGKVYDEAWERIDKKVEGLSKHIKLEEERRSEDAQSKAALTDWLRAKASFVIEGLKEADKDEFCRCELKLQKWYGDLRGKPFAIEAENSILDISGFSKQYNCAFIWQKDGVKKLNLYLIINYFKGGKLRFKKIKPEAFEANRFYTVINKKSGEIVPMEVNFNFDDPNLIILPLAFGKRQGREFIWNDLLSLETGSLKLANGRVIEKTLYNRRTRQDEPALFVALTFERREVLDSSNIKPMNLIGIDRGENIPAVIALTDPEGCPLSRFKDSLGNPTHILRIGESYKEKQRTIQAKKEVEQRRAGGYSRKYASKAKNLADDMVRNTARDLLYYAVTQDAMLIFENLSRGFGRQGKRTFMAERQYTRMEDWLTAKLAYEGLSKTYLSKTLAQYTSKTCSNCGFTITSADYDRVLEKLKKTATGWMTTINGKELKVEGQITYYNRYKRQNVVKDLSVELDRLSEESVNNDISSWTKGRSGEALSLLKKRFSHRPVQEKFVCLNCGFETHADEQAALNIARSWLFLRSQEYKKYQTNKTTGNTDKRAFVETWQSFYRKKLKEVWKPAVTSPKKKRKVPPPLSPSLSPLLSPSLSPL

SEQ ID NO: 241 - protein, 1008 aa, Artificial Sequence
  CasX variant
MQEIKRINKIRRRLVKDSNTKKAGKTGPMKTLLVRVMTPDLRERLENLRKKPENIPQPISNTSRANLNKLLTDYTEMKKAILHVYWEEFQKDPVGLMSRVAQPAPKNIDQRKLIPVKDGNERLTMSSGFACSQCCQPLYVYKLEQVNDKGKPHTNYFGRCNVSEHERLILLSPHKPEANDELVTYSLGKFGQRALDFYSIHVTRESNHPVKPLEQIGGNSCASGPVGKALSDACMGAVASFLTKYQDIILEHQKVIKKNEKRLANLKDIASANGLAFPKITLPPQPHTKEGIEAYNNVVAQIVIWVNLNLWQKLKIGRDEAKPLQRLKGFPSFPLVERQANEVDWWDMVCNVKKLINEKKEDGKVFWQNLAGYKRQEALRPYLSSEEDRKKGKKFARYQFGDLLLHLEKKHGEDWGKVYDEAWERIDKKVEGLSKHIKLEEERRSEDAQSKAALTDWLRAKASFVIEGLKEADKDEFCRCELKLQKWYGDLRGKPFAIEAENSILDISGFSKQYNCAFIWQKDGVKKLNLYLIINYFKGGKLRFKKIKPEAFEANRFYTVINKKSGEIVPMEVNFNFDDPNLIILPLAFGKRQGREFIWNDLLSLETGSLKLANGRVIEKTLYNRRTRQDEPALFVALTFERREVLDSSNIKPMNLIGIDRGENIPAVIALTDPEGCPLSRFKDSLGNPTHILRIGESYKEKQRTIQAKKEVEQRRAGGYSRKYASKAKNLADDMVRNTARDLLYYAVTQDAMLIFENLSRGFGRQGKRTFMAERQYTRMEDWLTAKLAYEGLSKTYLSKTLAQYTSKTCSNCGFTITSADYDRVLEKLKKTATGWMTTINGKELKVEGQITYYNRYKRQNVVKDLSVELDRLSEESVNNDISSWTKGRSGEALSLLKKRFSHRPVQEKFVCLNCGFETHADEQAALNIARSWLFLRSQEYKKYQTNKTTGNTDKRAFVETWQSFYRKKLKEVWKPAVTSPKKKRKVPPPRGKGGKGLGKGGAKRHRK

SEQ ID NO: 242 - protein, 1013 aa, Artificial Sequence
  CasX variant
MQEIKRINKIRRRLVKDSNTKKAGKTGPMKTLLVRVMTPDLRERLENLRKKPENIPQPISNTSRANLNKLLTDYTEMKKAILHVYWEEFQKDPVGLMSRVAQPAPKNIDQRKLIPVKDGNERLTSSGFACSQCCQPLYVYKLEQVNDKGKPHTNYFGRCNVSEHERLILLSPHKPEANDELVTYSLGKFGQRALDFYSIHVTRESNHPVKPLEQIGGNSCASGPVGKALSDACMGAVASFLTKYQDIILEHQKVIKKNEKRLANLKDIASANGLAFPKITLPPQPHTKEGIEAYNNVVAQIVIWVNLNLWQKLKIGRDEAKPLQRLKGFPSFPLVERQANEVDWWDMVCNVKKLINEKKEDGKVFWQNLAGYKRQEALRPYLSSEEDRKKGKKFARYQFGDLLLHLEKKHGEDWGKVYDEAWERIDKKVEGLSKHIKLEEERRSEDAQSKAALTDWLRAKASFVIEGLKEADKDEFCRCELKLQKWYGDLRGKPFAIEAENSILDISGFSKQYNCAFIWQKDGVKKLNLYLIINYFKGGKLRFKKIKPEAFEANRFYTVINKKSGEIVPMEVNFNFDDPNLIILPLAFGKRQGREFIWNDLLSLETGSLKLANGRVIEKTLYNRRTRQDEPALFVALTFERREVLDSSNIKPMNLIGIDRGENIPAVIALTDPEGCPLSRFKDSLGNPTHILRIGESYKEKQRTIQAKKEVEQRRAGGYSRKYASKAKNLADDMVRNTARDLLYYAVTQDAMLIFENLSRGFGRQGKRTFMAERQYTRMEDWLTAKLAYEGLSKTYLSKTLAQYTSKTCSNCGFTITSADYDRVLEKLKKTATGWMTTINGKELKVEGQITYYNRYKRQNVVKDLSVELDRLSEESVNNDISSWTKGRSGEALSLLKKRFSHRPVQEKFVCLNCGFETHADEQAALNIARSWLFLRSQEYKKYQTNKTTGNTDKRAFVETWQSFYRKKLKEVWKPAVTSPKKKRKVPPPSRRRKANPTKLSENAKKLAKEVEN

SEQ ID NO: 243 - protein, 998 aa, Artificial Sequence
  CasX variant
MQEIKRINKIRRRLVKDSNTKKAGKTGPMKTLLVRVMTPDLRERLENLRKKPENIPQPISNTSRANLNKLLTDYTEMKKAILHVYWEEFQKDPVGLMSRVAQPAPKNIDQRKLIPVKDGNERLTSSGFACSQCCQPLYVYKLEQVNDKGKPHTNYFGRCNVSEHERLILLSPHKPEANDELVTYSLGKFGQRALDFYSIHVTRESNHPVKPLEQIGGNSCASGPVGKALSDACMGAVASFLTKYQDIILEHQKVIKKNEKRLANLKDIASANGLAFPKITLPPQPHTKEGIEAYNNVVAQIVIWVNLNLWQKLKIGRDEAKPLQRLKGFPSFPLVERQANEVDWWDMVCNVKKLINEKKEDGKVFWQNLAGYKRQEALRPYLSSEEDRKKGKKFARYQFGDLLLHLEKKHGEDWGKVYDEAWERIDKKVEGLSKHIKLEEERRSEDAQSKAALTDWLRAKASFVIEGLKEADKDEFCRCELKLQKWYGDLRGKPFAIEAENSILDISGFSKQYNCAFIWQKDGVKKLNLYLIINYFKGGKLRFKKIKPEAFEANRFYTVINKKSGEIVPMEVNFNFDDPNLIILPLAFGKRQGREFIWNDLLSLETGSLKLANGRVIEKTLYNRRTRQDEPALFVALTFERREVLDSSNIKPMNLIGIDRGENIPAVIALTDPEGCPLSRFKDSLGNPTHILRIGESYKEKQRTIQAKKEVEQRRAGGYSRKYASKAKNLADDMVRNTARDLLYYAVTQDAMLIFENLSRGFGRQGKRTFMAERQYTRMEDWLTAKLAYEGLSKTYLSKTLAQYTSKTCSNCGFTITSADYDRVLEKLKKTATGWMTTINGKELKVEGQITYYNRYKRQNVVKDLSVELDRLSEESVNNDISSWTKGRSGEALSLLKKRFSHRPVQEKFVCLNCGFETHADEQAALNIARSWLFLRSQEYKKYQTNKTTGNTDKRAFVETWQSFYRKKLKEVWKPAVTSPKKKRKVPPPPAAKRVKLD

SEQ ID NO: 244 - protein, 997 aa, Artificial Sequence
  CasX variant
MQEIKRINKIRRRLVKDSNTKKAGKTGPMKTLLVRVMTPDLRERLENLRKKPENIPQPISNTSRANLNKLLTDYTEMKKAILHVYWEEFQKDPVGLMSRVAQPAPKNIDQRKLIPVKDGNERLTSSGFACSQCCQPLYVYKLEQVNDKGKPHTNYFGRCNVSEHERLILLSPHKPEANDELVTYSLGKFGQRALDFYSIHVTRESNHPVKPLEQIGGNSCASGPVGKALSDACMGAVASFLTKYQDIILEHQKVIKKNEKRLANLKDIASANGLAFPKITLPPQPHTKEGIEAYNNVVAQIVIWVNLNLWQKLKIGRDEAKPLQRLKGFPSFPLVERQANEVDWWDMVCNVKKLINEKKEDGKVFWQNLAGYKRQEALRPYLSSEEDRKKGKKFARYQFGDLLLHLEKKHGEDWGKVYDEAWERIDKKVEGLSKHIKLEEERRSEDAQSKAALTDWLRAKASFVIEGLKEADKDEFCRCELKLQKWYGDLRGKPFAIEAENSILDISGFSKQYNCAFIWQKDGVKKLNLYLIINYFKGGKLRFKKIKPEAFEANRFYTVINKKSGEIVPMEVNFNFDDPNLIILPLAFGKRQGREFIWNDLLSLETGSLKLANGRVIEKTLYNRRTRQDEPALFVALTFERREVLDSSNIKPMNLIGIDRGENIPAVIALTDPEGCPLSRFKDSLGNPTHILRIGESYKEKQRTIQAKKEVEQRRAGGYSRKYASKAKNLADDMVRNTARDLLYYAVTQDAMLIFENLSRGFGRQGKRTFMAERQYTRMEDWLTAKLAYEGLSKTYLSKTLAQYTSKTCSNCGFTITSADYDRVLEKLKKTATGWMTTINGKELKVEGQITYYNRYKRQNVVKDLSVELDRLSEESVNNDISSWTKGRSGEALSLLKKRFSHRPVQEKFVCLNCGFETHADEQAALNIARSWLFLRSQEYKKYQTNKTTGNTDKRAFVETWQSFYRKKLKEVWKPAVTSPKKKRKVPPPKRSFSKAF

SEQ ID NO: 245 - protein, 1008 aa, Artificial Sequence
  CasX variant
MQEIKRINKIRRRLVKDSNTKKAGKTGPMKTLLVRVMTPDLRERLENLRKKPENIPQPISNTSRANLNKLLTDYTEMKKAILHVYWEEFQKDPVGLMSRVAQPAPKNIDQRKLIPVKDGNERLTSSGFACSQCCQPLYVYKLEQVNDKGKPHTNYFGRCNVSEHERLILLSPHKPEANDELVTYSLGKFGQRALDFYSIHVTRESNHPVKPLEQIGGNSCASGPVGKALSDACMGAVASFLTKYQDIILEHQKVIKKNEKRLANLKDIASANGLAFPKITLPPQPHTKEGIEAYNNVVAQIVIWVNLNLWQKLKIGRDEAKPLQRLKGFPSFPLVERQANEVDWWDMVCNVKKLINEKKEDGKVFWQNLAGYKRQEALRPYLSSEEDRKKGKKFARYQFGDLLLHLEKKHGEDWGKVYDEAWERIDKKVEGLSKHIKLEEERRSEDAQSKAALTDWLRAKASFVIEGLKEADKDEFCRCELKLQKWYGDLRGKPFAIEAENSILDISGFSKQYNCAFIWQKDGVKKLNLYLIINYFKGGKLRFKKIKPEAFEANRFYTVINKKSGEIVPMEVNFNFDDPNLIILPLAFGKRQGREFIWNDLLSLETGSLKLANGRVIEKTLYNRRTRQDEPALFVALTFERREVLDSSNIKPMNLIGIDRGENIPAVIALTDPEGCPLSRFKDSLGNPTHILRIGESYKEKQRTIQAKKEVEQRRAGGYSRKYASKAKNLADDMVRNTARDLLYYAVTQDAMLIFENLSRGFGRQGKRTFMAERQYTRMEDWLTAKLAYEGLSKTYLSKTLAQYTSKTCSNCGFTITSADYDRVLEKLKKTATGWMTTINGKELKVEGQITYYNRYKRQNVVKDLSVELDRLSEESVNNDISSWTKGRSGEALSLLKKRFSHRPVQEKFVCLNCGFETHADEQAALNIARSWLFLRSQEYKKYQTNKTTGNTDKRAFVETWQSFYRKKLKEVWKPAVTSPKKKRKVPPPKRGINDRNFWRGENERKTR

SEQ ID NO: 246 - protein, 1007 aa, Artificial Sequence
  CasX variant
MAPKKKRKVSRMQEIKRINKIRRRLVKDSNTKKAGKTGPMKTLLVRVMTPDLRERLENLRKKPENIPQPISNTSRANLNKLLTDYTEMKKAILHVYWEEFQKDPVGLMSRVAQPAPKNIDQRKLIPVKDGNERLTSSGFACSQCCQPLYVYKLEQVNDKGKPHTNYFGRCNVSEHERLILLSPHKPEANDELVTYSLGKFGQRALDFYSIHVTRESNHPVKPLEQIGGNSCASGPVGKALSDACMGAVASFLTKYQDIILEHQKVIKKNEKRLANLKDIASANGLAFPKITLPPQPHTKEGIEAYNNVVAQIVIWVNLNLWQKLKIGRDEAKPLQRLKGFPSFPLVERQANEVDWWDMVCNVKKLINEKKEDGKVFWQNLAGYKRQEALRPYLSSEEDRKKGKKFARYQFGDLLLHLEKKHGEDWGKVYDEAWERIDKKVEGLSKHIKLEEERRSEDAQSKAALTDWLRAKASFVIEGLKEADKDEFCRCELKLQKWYGDLRGKPFAIEAENSILDISGFSKQYNCAFIWQKDGVKKLNLYLIINYFKGGKLRFKKIKPEAFEANRFYTVINKKSGEIVPMEVNFNFDDPNLIILPLAFGKRQGREFIWNDLLSLETGSLKLANGRVIEKTLYNRRTRQDEPALFVALTFERREVLDSSNIKPMNLIGIDRGENIPAVIALTDPEGCPLSRFKDSLGNPTHILRIGESYKEKQRTIQAKKEVEQRRAGGYSRKYASKAKNLADDMVRNTARDLLYYAVTQDAMLIFENLSRGFGRQGKRTFMAERQYTRMEDWLTAKLAYEGLSKTYLSKTLAQYTSKTCSNCGFTITSADYDRVLEKLKKTATGWMTTINGKELKVEGQITYYNRYKRQNVVKDLSVELDRLSEESVNNDISSWTKGRSGEALSLLKKRFSHRPVQEKFVCLNCGFETHADEQAALNIARSWLFLRSQEYKKYQTNKTTGNTDKRAFVETWQSFYRKKLKEVWKPAVTSPKKKRKVPPPPKKKRKV

SEQ ID NO: 247 - protein, 1009 aa, Artificial Sequence
  CasX variant
MAPKKKRKVSRMQEIKRINKIRRRLVKDSNTKKAGKTGPMKTLLVRVMTPDLRERLENLRKKPENIPQPISNTSRANLNKLLTDYTEMKKAILHVYWEEFQKDPVGLMSRVAQPAPKNIDQRKLIPVKDGNERLTSSGFACSQCCQPLYVYKLEQVNDKGKPHTNYFGRCNVSEHERLILLSPHKPEANDELVTYSLGKFGQRALDFYSIHVTRESNHPVKPLEQIGGNSCASGPVGKALSDACMGAVASFLTKYQDIILEHQKVIKKNEKRLANLKDIASANGLAFPKITLPPQPHTKEGIEAYNNVVAQIVIWVNLNLWQKLKIGRDEAKPLQRLKGFPSFPLVERQANEVDWWDMVCNVKKLINEKKEDGKVFWQNLAGYKRQEALRPYLSSEEDRKKGKKFARYQFGDLLLHLEKKHGEDWGKVYDEAWERIDKKVEGLSKHIKLEEERRSEDAQSKAALTDWLRAKASFVIEGLKEADKDEFCRCELKLQKWYGDLRGKPFAIEAENSILDISGFSKQYNCAFIWQKDGVKKLNLYLIINYFKGGKLRFKKIKPEAFEANRFYTVINKKSGEIVPMEVNFNFDDPNLIILPLAFGKRQGREFIWNDLLSLETGSLKLANGRVIEKTLYNRRTRQDEPALFVALTFERREVLDSSNIKPMNLIGIDRGENIPAVIALTDPEGCPLSRFKDSLGNPTHILRIGESYKEKQRTIQAKKEVEQRRAGGYSRKYASKAKNLADDMVRNTARDLLYYAVTQDAMLIFENLSRGFGRQGKRTFMAERQYTRMEDWLTAKLAYEGLSKTYLSKTLAQYTSKTCSNCGFTITSADYDRVLEKLKKTATGWMTTINGKELKVEGQITYYNRYKRQNVVKDLSVELDRLSEESVNNDISSWTKGRSGEALSLLKKRFSHRPVQEKFVCLNCGFETHADEQAALNIARSWLFLRSQEYKKYQTNKTTGNTDKRAFVETWQSFYRKKLKEVWKPAVTSPKKKRKVPPPPAAKRVKLD

SEQ ID NO: 248 - protein, 9 aa, Artificial Sequence
  nuclear localization signal
PAAKRVKLD

SEQ ID NO: 249 - DNA, 21 bp, Artificial Sequence
  nuclear localization signal
ccaaagaagaagcggaaggtc

SEQ ID NO: 250 - DNA, 51 bp, Artificial Sequence
  nuclear localization signal
cacaagaagaaacatccagacgcatcagtcaactttagcgagttcagtaaa

SEQ ID NO: 251 - DNA, 54 bp, Artificial Sequence
  nuclear localization signal
cagcgccctgggccttacgataggccgcaaagacccggaccgtatgatcgccct

SEQ ID NO: 252 - DNA, 48 bp, Artificial Sequence
  nuclear localization signal
ctcagcccgagtcttagtccactgctttccccgtccctgtctccactg

SEQ ID NO: 253 - DNA, 54 bp, Artificial Sequence
  nuclear localization signal
cggggcaagggtggcaaggggcttggcaaggggggggcaaagaggcacaggaag

SEQ ID NO: 254 - DNA, 72 bp, Artificial Sequence
  nuclear localization signal
agccgccgcagaaaagccaatcctacaaaactgtcagaaaatgcgaaaaaacttgctaaggaggtggaaaac

SEQ ID NO: 255 - DNA, 27 bp, Artificial Sequence
  nuclear localization signal
cctgccgcaaagcgagtgaaattggac

SEQ ID NO: 256 - DNA, 24 bp, Artificial Sequence
  nuclear localization signal
aagcggtccttcagtaaggccttt

SEQ ID NO: 257 - DNA, 57 bp, Artificial Sequence
  nuclear localization signal
aaacggggaataaacgaccggaacttctggcgcggggaaaacgagcgcaaaacccga

SEQ ID NO: 258 - protein, 997 aa, Artificial Sequence
  CasX variant
MAPKKKRKVSRQEIKRINKIRRRLVKDSNTKKAGKTGPMKTLLVRVMTPDLRERLENLRKKPENIPQPISNTSRANLNKLLTDYTEMKKAILHVYWEEFQKDPVGLMSRVAQPASKKIDQNKLKPEMDEKGNLTTAGFACSQCGQPLFVYKLEQVSEKGKAYTNYFGRCNVAEHEKLILLAQLKPEKDSDEAVTYSLGKFGQRALDFYSIHVTRESNHPVKPLEQIGGNSCASGPVGKALSDACMGAVASFLTKYQDIILEHQKVIKKNEKRLANLKDIASANGLAFPKITLPPQPHTKEGIEAYNNVVAQIVIWVNLNLWQKLKIGRDEAKPLQRLKGFPSFPLVERQANEVDWWDMVCNVKKLINEKKEDGKVFWQNLAGYKRQEALRPYLSSEEDRKKGKKFARYQFGDLLLHLEKKHGEDWGKVYDEAWERIDKKVEGLSKHIKLEEERRSEDAQSKAALTDWLRAKASFVIEGLKEADKDEFCRCELKLQKWYGDLRGKPFAIEAENSILDISGFSKQYNCAFIWQKDGVKKLNLYLIINYFKGGKLRFKKIKPEAFEANRFYTVINKKSGEIVPMEVNFNFDDPNLIILPLAFGKRQGREFIWNDLLSLETGSLKLANGRVIEKTLYNRRTRQDEPALFVALTFERREVLDSSNIKPMNLIGIDRGENIPAVIALTDPEGCPLSRFKDSLGNPTHILRIGESYKEKQRTIQAKKEVEQRRAGGYSRKYASKAKNLADDMVRNTARDLLYYAVTQDAMLIFENLSRGFGRQGKRTFMAERQYTRMEDWLTAKLAYEGLSKTYLSKTLAQYTSKTCSNCGFTITSADYDRVLEKLKKTATGWMTTINGKELKVEGQITYYNRYKRQNVVKDLSVELDRLSEESVNNDISSWTKGRSGEALSLLKKRFSHRPVQEKFVCLNCGFETHADEQAALNIARSWLFLRSQEYKKYQTNKTTGNTDKRAFVETWQSFYRKKLKEVWKPAVTSPKKKRKV

SEQ ID NO: 259 - protein, 1005 aa, Artificial Sequence
  CasX variant
MAPKKKRKVSRQEIKRINKIRRRLVKDSNTKKAGKTGPMKTLLVRVMTPDLRERLENLRKKPENIPQPISNTSRANLNKLLTDYTEMKKAILHVYWEEFQKDPVGLMSRVAQPAPKNIDQRKLIPVKDGNERLTSSGFACSQCCQPLYVYKLEQVNDKGKPHTNYFGRCNVSEHERLILLSPHKPEANDELVTYSLGKFGQRALDFYSIHVTKESTHPVKPLAQIAGNRYASGPVGKALSDACMGTIASFLSKYQDIIIEHQKVVKGNQKRLESLRELAGKENLEYPSVTLPPQPHTKEGVDAYNEVIARVRMWVNLNLWQKLKLSRDDAKPLLRLKGFPSFPLVERQANEVDWWDMVCNVKKLINEKKEDGKVFWQNLAGYKRQEALRPYLSSEEDRKKGKKFARYQFGDLLLHLEKKHGEDWGKVYDEAWERIDKKVEGLSKHIKLEEERRSEDAQSKAALTDWLRAKASFVIEGLKEADKDEFCRCELKLQKWYGDLRGKPFAIEAENSILDISGFSKQYNCAFIWQKDGVKKLNLYLIINYFKGGKLRFKKIKPEAFEANRFYTVINKKSGEIVPMEVNFNFDDPNLIILPLAFGKRQGREFIWNDLLSLETGSLKLANGRVIEKTLYNRRTRQDEPALFVALTFERREVLDSSNIKPMNLIGIDRGENIPAVIALTDPEGCPLSRFKDSLGNPTHILRIGESYKEKQRTIQAKKEVEQRRAGGYSRKYASKAKNLADDMVRNTARDLLYYAVTQDAMLIFENLSRGFGRQGKRTFMAERQYTRMEDWLTAKLAYEGLSKTYLSKTLAQYTSKTCSNCGFTITSADYDRVLEKLKKTATGWMTTINGKELKVEGQITYYNRYKRQNVVKDLSVELDRLSEESVNNDISSWTKGRSGEALSLLKKRFSHRPVQEKFVCLNCGFETHADEQAALNIARSWLFLRSQEYKKYQTNKTTGNTDKRAFVETWQSFYRKKLKEVWKPAVTSPKKKRKVTSPKKKRKV

SEQ ID NO: 260 - protein, 996 aa, Artificial Sequence
  CasX variant
MAPKKKRKVSRQEIKRINKIRRRLVKDSNTKKAGKTGPMKTLLVRVMTPDLRERLENLRKKPENIPQPISNTSRANLNKLLTDYTEMKKAILHVYWEEFQKDPVGLMSRVAQPAPKNIDQRKLIPVKDGNERLTSSGFACSQCCQPLYVYKLEQVNDKGKPHTNYFGRCNVSEHERLILLSPHKPEANDELVTYSLGKFGQRALDFYSIHVTKESTHPVKPLAQIAGNRYASGPVGKALSDACMGTIASFLSKYQDIIIEHQKVVKGNQKRLESLRELAGKENLEYPSVTLPPQPHTKEGVDAYNEVIARVRMWVNLNLWQKLKLSRDDAKPLLRLKGFPSFPLVERQANEVDWWDMVCNVKKLINEKKEDGKVFWQNLAGYKRQEALRPYLSSEEDRKKGKKFARYQLGDLLLHLEKKHGEDWGKVYDEAWERIDKKVEGLSKHIKLEEERRSEDAQSKAALTDWLRAKASFVIEGLKEADKDEFCRCELKLQKWYGDLRGKPFAIEAENSILDISGFSKQYNCAFIWQKDGVKKLNLYLIINYFKGGKLRFKKIKPEAFEANRFYTVINKKSGEIVPMEVNFNFDDPNLIILPLAFGKRQGREFIWNDLLSLETGSLKLANGRVIEKTLYNRRTRQDEPALFVALTFERREVLDSSNIKPMNLIGVDRGENIPAVIALTDPEGCPLSRFKDSLGNPTHILRIGESYKEKQRTIQAKKEVEQRRAGGYSRKYASKAKNLADDMVRNTARDLLYYAVTQDAMLIFENLSRGFGRQGKRTFMAERQYTRMEDWLTAKLAYEGLSKTYLSKTLAQYTSKTCSNCGFTITSADYDRVLEKLKKTATGWMTTINGKELKVEGQITYYNRRKRQNVVKDLSVELDRLSEESVNNDISSWTKGRSGEALSLLKKRFSHRPVQEKFVCLNCGFETHADEQAALNIARSWLFLRSQEYKKYQTNKTTGNTDKRAFVETWQSFYRKKLKEVWKPAVTSPKKKRKV

SEQ ID NO: 261 - protein, 996 aa, Artificial Sequence
  CasX variant
MAPKKKRKVSRQEIKRINKIRRRLVKDSNTKKAGKTGPMKTLLVRVMTPDLRERLENLRKKPENIPQPISNTSRANLNKLLTDYTEMKKAILHVYWEEFQKDPVGLMSRVAQPAPKNIDQRKLIPVKDGNERLTSSGFACSQCCQPLYVYKLEQVNDKGKPHTNYFGRCNVSEHERLILLSPHKPEANDELVTYSLGKFGQRALDFYSIHVTKESTHPVKPLAQIAGNRYASGPVGKALSDACMGTIASFLSKYQDIIIEHQKVVKGNQKRLESLRELAGKENLEYPSVTLPPQPHTKEGVDAYNEVIARVRMWVNLNLWQKLKLSRDDAKPLLRLKGFPSFPLVERQANEVDWWDMVCNVKKLINEKKEDGKVFWQNLAGYKRQEALRPYLSSEEDRKKGKKFARYQLGDLLKHLEKKHGEDWGKVYDEAWERIDKKVEGLSKHIKLEEERRSEDAQSKAALTDWLRAKASFVIEGLKEADKDEFCRCELKLQKWYGDLRGKPFAIEAENSILDISGFSKQYNCAFIWQKDGVKKLNLYLIINYFKGGKLRFKKIKPEAFEANRFYTVINKKSGEIVPMEVNFNFDDPNLIILPLAFGKRQGREFIWNDLLSLETGSLKLANGRVIEKTLYNRRTRQDEPALFVALTFERREVLDSSNIKPMNLIGVDRGENIPAVIALTDPEGCPLSRFKDSLGNPTHILRIGESYKEKQRTIQAKKEVEQRRAGGYSRKYASKAKNLADDMVRNTARDLLYYAVTQDAMLIFENLSRGFGRQGKRTFMAERQYTRMEDWLTAKLAYEGLSKTYLSKTLAQYTSKTCSNCGFTITSADYDRVLEKLKKTATGWMTTINGKELKVEGQITYYNRRKRQNVVKDLSVELDRLSEESVNNDISSWTKGRSGEALSLLKKRFSHRPVQEKFVCLNCGFETHADEQAALNIARSWLFLRSQEYKKYQTNKTTGNTDKRAFVETWQSFYRKKLKEVWKPAVTSPKKKRKV

SEQ ID NO: 262 - protein, 996 aa, Artificial Sequence
  CasX variant
MAPKKKRKVSRQEIKRINKIRRRLVKDSNTKKAGKTGPMKTLLVRVMTPDLRERLENLRKKPENIPQPISNTSRANLNKLLTDYTEMKKAILHVYWEEFQKDPVGLMSRVAQPAPKNIDQRKLIPVKDGNERLTSSGFACSQCCQPLYVYKLEQVNDKGKPHTNYFGRCNVSEHERLILLSPHKPEANDELVTYSLGKFGQRALDFYSIHVTKESTHPVKPLAQIAGNRYASGPVGKALSDACMGTIASFLSKYQDIIIEHQKVVKGNQKRLESLRELAGKENLEYPSVTLPPQPHTKEGVDAYNEVIARVRMWVNLNLWQKLKLSRDDAKPLLRLKGFPSFPLVERQANEVDWWDMVCNVKKLINEKKEDGKVFWQNLAGYKRQEALRPYLSSEEDRKKGKKFARYQLGDLLLHLEKKHGEDWGKVYDEAWERIDKKVEGLSKHIKLEEERRSEDAQSKAALTDWLRAKASFVIEGLKEADKDEFCRCELKLQKWYGDLRGKPFAIEAENSILDISGFSKQYNCAFIWQKDGVKKLNLYLIINYFKGGKLRFKKIKPEAFEANRFYTVINKKSGEIVPMEVNFNFDDPNLIILPLAFGKRQGREFIWNDLLSLETGSLKLANGRVIEKTLYNRRTRQDEPALFVALTFERREVLDSSNIKPMNLIGVDRGENIPAVIALTDPEGCPLSRFKDSLGNPTHILRIGESYKEKQRTIQAKKEVEQRRAGGYSRKYASKAKNLADDMVRNTARDLLYYAVTQDAMLIFENLSRGFGRQGKRTFMAERQYTRMEDWLTAKLAYEGLSKTYLSKTLAQYTSKTCSNCGFTITSADYDRVLEKLKKTATGWMTTINGKELKVEGQITYYNRYKRQNVVKDLSVELDRLSEESVNNDISSWTKGRSGEALSLLKKRFSHRPVQEKFVCLNCGFETHADEQAALNIARSWLFLRSQEYKKYQTNKTTGNTDKRAFVETWQSFYRKKLKEVWKPAVTSPKKKRKV

SEQ ID NO: 263 - protein, 997 aa, Artificial Sequence
  CasX variant
MAPKKKRKVSRQEIKRINKIRRRLVKDSNTKKAGKTGPMKTLLVRVMTPDLRERLENLRKKPENIPQPISNTSRANLNKLLTDYTEMKKAILHVYWEEFQKDPVGLMSRVAQPASKKIDQNKLKPEMDEKGNLTTAGFACSQCGQPLFVYKLEQVSEKGKAYTNYFGRCNVAEHEKLILLAQLKPEKDSDEAVTYSLGKFGQRALDFYSIHVTKESTHPVKPLAQIAGNRYASGPVGKALSDACMGTIASFLSKYQDIIIEHQKVVKGNQKRLESLRELAGKENLEYPSVTLPPQPHTKEGVDAYNEVIARVRMWVNLNLWQKLKLSRDDAKPLLRLKGFPSFPLVERQANEVDWWDMVCNVKKLINEKKEDGKVFWQNLAGYKRQEALRPYLSSEEDRKKGKKFARYQFGDLLLHLEKKHGEDWGKVYDEAWERIDKKVEGLSKHIKLEEERRSEDAQSKAALTDWLRAKASFVIEGLKEADKDEFCRCELKLQKWYGDLRGKPFAIEAENSILDISGFSKQYNCAFIWQKDGVKKLNLYLIINYFKGGKLRFKKIKPEAFEANRFYTVINKKSGEIVPMEVNFNFDDPNLIILPLAFGKRQGREFIWNDLLSLETGSLKLANGRVIEKTLYNRRTRQDEPALFVALTFERREVLDSSNIKPMNLIGIDRGENIPAVIALTDPEGCPLSRFKDSLGNPTHILRIGESYKEKQRTIQAKKEVEQRRAGGYSRKYASKAKNLADDMVRNTARDLLYYAVTQDAMLIFENLSRGFGRQGKRTFMAERQYTRMEDWLTAKLAYEGLSKTYLSKTLAQYTSKTCSNCGFTITSADYDRVLEKLKKTATGWMTTINGKELKVEGQITYYNRYKRQNVVKDLSVELDRLSEESVNNDISSWTKGRSGEALSLLKKRFSHRPVQEKFVCLNCGFETHADEQAALNIARSWLFLRSQEYKKYQTNKTTGNTDKRAFVETWQSFYRKKLKEVWKPAVTSPKKKRKV

SEQ ID NO: 264 - protein, 997 aa, Artificial Sequence
  CasX variant
MAPKKKRKVSRQEIKRINKIRRRLVKDSNTKKAGKTGPMKTLLVRVMTPDLRERLENLRKKPENIPQPISNTSRANLNKLLTDYTEMKKAILHVYWEEFQKDPVGLMSRVAQPASKKIDQNKLKPEMDEKGNLTTAGFACSQCGQPLFVYKLEQVSEKGKAYTNYFGRCNVAEHEKLILLAQLKPEKDSDEAVTYSLGKFGQRALDFYSIHVTKESTHPVKPLAQIAGNRYASGPVGKALSDACMGTIASFLSKYQDIIIEHQKVVKGNQKRLESLRELAGKENLEYPSVTLPPQPHTKEGVDAYNEVIARVRMWVNLNLWQKLKLSRDDAKPLLRLKGFPSFPLVERQANEVDWWDMVCNVKKLINEKKEDGKVFWQNLAGYKRQEALRPYLSSEEDRKKGKKFARYQLGDLLLHLEKKHGEDWGKVYDEAWERIDKKVEGLSKHIKLEEERRSEDAQSKAALTDWLRAKASFVIEGLKEADKDEFCRCELKLQKWYGDLRGKPFAIEAENSILDISGFSKQYNCAFIWQKDGVKKLNLYLIINYFKGGKLRFKKIKPEAFEANRFYTVINKKSGEIVPMEVNFNFDDPNLIILPLAFGKRQGREFIWNDLLSLETGSLKLANGRVIEKTLYNRRTRQDEPALFVALTFERREVLDSSNIKPMNLIGVDRGENIPAVIALTDPEGCPLSRFKDSLGNPTHILRIGESYKEKQRTIQAKKEVEQRRAGGYSRKYASKAKNLADDMVRNTARDLLYYAVTQDAMLIFENLSRGFGRQGKRTFMAERQYTRMEDWLTAKLAYEGLSKTYLSKTLAQYTSKTCSNCGFTITSADYDRVLEKLKKTATGWMTTINGKELKVEGQITYYNRRKRQNVVKDLSVELDRLSEESVNNDISSWTKGRSGEALSLLKKRFSHRPVQEKFVCLNCGFETHADEQAALNIARSWLFLRSQEYKKYQTNKTTGNTDKRAFVETWQSFYRKKLKEVWKPAVTSPKKKRKV

SEQ ID NO: 265 - protein, 997 aa, Artificial Sequence
  CasX variant
MAPKKKRKVSRQEIKRINKIRRRLVKDSNTKKAGKTGPMKTLLVRVMTPDLRERLENLRKKPENIPQPISNTSRANLNKLLTDYTEMKKAILHVYWEEFQKDPVGLMSRVAQPASKKIDQNKLKPEMDEKGNLTTAGFACSQCGQPLFVYKLEQVSEKGKAYTNYFGRCNVAEHEKLILLAQLKPEKDSDEAVTYSLGKFGQRALDFYSIHVTKESTHPVKPLAQIAGNRYASGPVGKALSDACMGTIASFLSKYQDIIIEHQKVVKGNQKRLESLRELAGKENLEYPSVTLPPQPHTKEGVDAYNEVIARVRMWVNLNLWQKLKLSRDDAKPLLRLKGFPSFPLVERQANEVDWWDMVCNVKKLINEKKEDGKVFWQNLAGYKRQEALRPYLSSEEDRKKGKKFARYQLGDLLKHLEKKHGEDWGKVYDEAWERIDKKVEGLSKHIKLEEERRSEDAQSKAALTDWLRAKASFVIEGLKEADKDEFCRCELKLQKWYGDLRGKPFAIEAENSILDISGFSKQYNCAFIWQKDGVKKLNLYLIINYFKGGKLRFKKIKPEAFEANRFYTVINKKSGEIVPMEVNFNFDDPNLIILPLAFGKRQGREFIWNDLLSLETGSLKLANGRVIEKTLYNRRTRQDEPALFVALTFERREVLDSSNIKPMNLIGVDRGENIPAVIALTDPEGCPLSRFKDSLGNPTHILRIGESYKEKQRTIQAKKEVEQRRAGGYSRKYASKAKNLADDMVRNTARDLLYYAVTQDAMLIFENLSRGFGRQGKRTFMAERQYTRMEDWLTAKLAYEGLSKTYLSKTLAQYTSKTCSNCGFTITSADYDRVLEKLKKTATGWMTTINGKELKVEGQITYYNRRKRQNVVKDLSVELDRLSEESVNNDISSWTKGRSGEALSLLKKRFSHRPVQEKFVCLNCGFETHADEQAALNIARSWLFLRSQEYKKYQTNKTTGNTDKRAFVETWQSFYRKKLKEVWKPAVTSPKKKRKV

SEQ ID NO: 266 - protein, 997 aa, Artificial Sequence
  CasX variant
MAPKKKRKVSRQEIKRINKIRRRLVKDSNTKKAGKTGPMKTLLVRVMTPDLRERLENLRKKPENIPQPISNTSRANLNKLLTDYTEMKKAILHVYWEEFQKDPVGLMSRVAQPASKKIDQNKLKPEMDEKGNLTTAGFACSQCGQPLFVYKLEQVSEKGKAYTNYFGRCNVAEHEKLILLAQLKPEKDSDEAVTYSLGKFGQRALDFYSIHVTKESTHPVKPLAQIAGNRYASGPVGKALSDACMGTIASFLSKYQDIIIEHQKVVKGNQKRLESLRELAGKENLEYPSVTLPPQPHTKEGVDAYNEVIARVRMWVNLNLWQKLKLSRDDAKPLLRLKGFPSFPLVERQANEVDWWDMVCNVKKLINEKKEDGKVFWQNLAGYKRQEALRPYLSSEEDRKKGKKFARYQLGDLLLHLEKKHGEDWGKVYDEAWERIDKKVEGLSKHIKLEEERRSEDAQSKAALTDWLRAKASFVIEGLKEADKDEFCRCELKLQKWYGDLRGKPFAIEAENSILDISGFSKQYNCAFIWQKDGVKKLNLYLIINYFKGGKLRFKKIKPEAFEANRFYTVINKKSGEIVPMEVNFNFDDPNLIILPLAFGKRQGREFIWNDLLSLETGSLKLANGRVIEKTLYNRRTRQDEPALFVALTFERREVLDSSNIKPMNLIGVDRGENIPAVIALTDPEGCPLSRFKDSLGNPTHILRIGESYKEKQRTIQAKKEVEQRRAGGYSRKYASKAKNLADDMVRNTARDLLYYAVTQDAMLIFENLSRGFGRQGKRTFMAERQYTRMEDWLTAKLAYEGLSKTYLSKTLAQYTSKTCSNCGFTITSADYDRVLEKLKKTATGWMTTINGKELKVEGQITYYNRYKRQNVVKDLSVELDRLSEESVNNDISSWTKGRSGEALSLLKKRFSHRPVQEKFVCLNCGFETHADEQAALNIARSWLFLRSQEYKKYQTNKTTGNTDKRAFVETWQSFYRKKLKEVWKPAVTSPKKKRKV

SEQ ID NO: 267 - protein, 997 aa, Artificial Sequence
  CasX variant
MAPKKKRKVSRQEIKRINKIRRRLVKDSNTKKAGKTGPMKTLLVRVMTPDLRERLENLRKKPENIPQPISNTSRANLNKLLTDYTEMKKAILHVYWEEFQKDPVGLMSRVAQPASKKIDQNKLKPEMDEKGNLTTAGFACSQCGQPLFVYKLEQVSEKGKAYTNYFGRCNVAEHEKLILLAQLKPEKDSDEAVTYSLGKFGQRALDFYSIHVTRESNHPVKPLEQIGGNSCASGPVGKALSDACMGAVASFLTKYQDIILEHQKVIKKNEKRLANLKDIASANGLAFPKITLPPQPHTKEGIEAYNNVVAQIVIWVNLNLWQKLKIGRDEAKPLQRLKGFPSFPLVERQANEVDWWDMVCNVKKLINEKKEDGKVFWQNLAGYKRQEALRPYLSSEEDRKKGKKFARYQLGDLLLHLEKKHGEDWGKVYDEAWERIDKKVEGLSKHIKLEEERRSEDAQSKAALTDWLRAKASFVIEGLKEADKDEFCRCELKLQKWYGDLRGKPFAIEAENSILDISGFSKQYNCAFIWQKDGVKKLNLYLIINYFKGGKLRFKKIKPEAFEANRFYTVINKKSGEIVPMEVNFNFDDPNLIILPLAFGKRQGREFIWNDLLSLETGSLKLANGRVIEKTLYNRRTRQDEPALFVALTFERREVLDSSNIKPMNLIGVDRGENIPAVIALTDPEGCPLSRFKDSLGNPTHILRIGESYKEKQRTIQAKKEVEQRRAGGYSRKYASKAKNLADDMVRNTARDLLYYAVTQDAMLIFENLSRGFGRQGKRTFMAERQYTRMEDWLTAKLAYEGLSKTYLSKTLAQYTSKTCSNCGFTITSADYDRVLEKLKKTATGWMTTINGKELKVEGQITYYNRYKRQNVVKDLSVELDRLSEESVNNDISSWTKGRSGEALSLLKKRFSHRPVQEKFVCLNCGFETHADEQAALNIARSWLFLRSQEYKKYQTNKTTGNTDKRAFVETWQSFYRKKLKEVWKPAVTSPKKKRKV

SEQ ID NO: 268 - DNA, 2991 bp, Artificial Sequence
  CasX variant
atggccccaaagaagaagcggaaggtctctagacaagagatcaagagaatcaacaagatcagaaggagactggtcaaggacagcaacacaaagaaggccggcaagacaggccccatgaaaaccctgctcgtcagagtgatgacccctgacctgagagagcggctggaaaacctgagaaagaagcccgagaacatccctcagcctatcagcaacaccagcagggccaacctgaacaagctgctgaccgactacaccgagatgaagaaagccatcctgcacgtgtactgggaagagttccagaaagaccccgtgggcctgatgagcagagttgctcagcctgccagcaagaagatcgaccagaacaagctgaagcccgagatggacgagaagggcaatctgaccacagccggctttgcctgctctcagtgtggccagcctctgttcgtgtacaagctggaacaggtgtccgagaaaggcaaggcctacaccaactacttcggcagatgtaacgtggccgagcacgagaagctgattctgctggcccagctgaaacctgagaaggactctgatgaggccgtgacctacagcctgggcaagtttggacagagagccctggacttctacagcatccacgtgaccagggagagcaatcaccctgtgaagcccctggaacagatcggcggcaatagctgtgcctctggacctgtgggaaaagccctgagcgacgcctgtatgggagccgtggcatccttcctgaccaagtaccaggacatcatcctggaacaccagaaagtgatcaagaagaacgagaaaagactggccaacctcaaggatatcgccagcgctaacggcctggcctttcctaagatcaccctgcctccacagcctcacaccaaagagggcatcgaggcctacaacaacgtggtggcccagatcgtgatttgggtcaacctgaatctgtggcagaagctgaagatcggcagggacgaagccaagccactgcagagactgaagggcttccctagcttccctctggtggaaagacaggccaatgaagtggattggtgggacatggtctgcaacgtgaagaagctgatcaacgagaagaaagaggatggcaaggttttctggcagaacctggccggctacaagagacaagaagccctgaggccttacctgagcagcgaagaggaccggaagaagggcaagaagttcgccagataccagttcggcgacctgctgctgcacctggaaaagaagcacggcgaggactggggcaaagtgtacgatgaggcctgggagagaatcgacaagaaggtggaaggcctgagcaagcacattaagctggaagaggaaagaaggagcgaggacgcccaatctaaagccgctctgaccgattggctgagagccaaggccagctttgtgatcgagggcctgaaagaggccgacaaggacgagttctgcagatgcgagctgaagctgcagaagtggtacggcgatctgagaggcaagcccttcgccattgaggccgagaacagcatcctggacatcagcggcttcagcaagcagtacaactgcgccttcatttggcagaaagacggcgtcaagaaactgaacctgtacctgatcatcaattacttcaaaggcggcaagctgcggttcaagaagatcaaacccgaggccttcgaggctaacagattctacaccgtgatcaacaaaaagtccggcgagatcgtgcccatggaagtgaacttcaacttcgacgaccccaacctgattatcctgcctctggccttcggcaagagacagggcagagagttcatctggaacgatctgctgagcctggaaaccggctctctgaagctggccaatggcagagtgatcgagaaaaccctgtacaacaggagaaccagacaggacgagcctgctctgtttgtggccctgaccttcgagagaagagaggtgctggacagcagcaacatcaagcccatgaacctgatcggcatcgaccggggcgagaatatccctgctgtgatcgccctgacagaccctgaaggatgcccactgagcagattcaaggactccctgggcaaccctacacacatcctgagaatcggcgagagctacaaagagaagcagaggacaatccaggccaagaaagaggtggaacagagaagagccggcggatactctaggaagtacgccagcaaggccaagaatctggccgacgacatggtccgaaacaccgccagagatctgctgtactacgccgtgacacaggacgccatgctgatcttcgagaatctgagcagaggcttcggccggcagggcaagagaacctttatggccgagaggcagtacaccagaatggaagattggctcacagctaaactggcctacgagggactgagcaagacctacctgtccaaaacactggcccagtatacctccaagacctgcagcaattgcggcttcaccatcaccagcgccgactacgacagagtgctggaaaagctcaagaaaaccgccaccggctggatgaccaccatcaacggcaaagagctgaaggttgagggccagatcacctactacaacaggtacaagaggcagaacgtcgtgaaggatctgagcgtggaactggacagactgagcgaagagagcgtgaacaacgacatcagcagctggacaaagggcagatcaggcgaggctctgagcctgctgaagaagaggtttagccacagacctgtgcaagagaagttcgtgtgcctgaactgcggcttcgagacacacgccgatgaacaggctgccctgaacattgccagaagctggctgttcctgagaagccaagagtacaagaagtaccagaccaacaagaccaccggcaacaccgacaagagggcctttgtggaaacctggcagagcttctacagaaaaaagctgaaagaagtctggaagcccgccgtgactagtccaaaaaagaagagaaaggta

SEQ ID NO: 269 - DNA, 2988 bp, Artificial Sequence
  CasX variant
atggccccaaagaagaagcggaaggtctctagacaagagatcaagagaatcaacaagatcagaaggagactggtcaaggacagcaacacaaagaaggccggcaagacaggccccatgaaaaccctgctcgtcagagtgatgacccctgacctgagagagcggctggaaaacctgagaaagaagcccgagaacatccctcagcctatcagcaacaccagcagggccaacctgaacaagctgctgaccgactacaccgagatgaagaaagccatcctgcacgtgtactgggaagagttccagaaagaccccgtgggcctgatgagcagagttgctcagcccgctcctaagaacatcgaccagagaaagctgatccccgtgaaggacggcaacgagagactgacctctagcggctttgcctgcagccagtgttgccagcctctgtacgtgtacaagctggaacaagtgaacgacaagggcaagccccacaccaactacttcggcagatgcaacgtgtccgagcacgagaggctgatcctgctgtctcctcacaagcccgaggccaacgatgagctggtcacatacagcctgggcaagttcggacagagagccctggacttctacagcatccacgtgaccaaagaaagcacacaccccgtgaagcccctggctcagatcgccggcaatagatacgcctctggacctgtgggcaaagccctgtccgatgcctgcatgggaacaatcgccagcttcctgagcaagtaccaggacatcatcatcgagcaccagaaggtggtcaagggcaaccagaagagactggaaagcctgagggagctggccggcaaagagaacctggaataccccagcgtgaccctgcctcctcagcctcacacaaaagaaggcgtggacgcctacaacgaagtgatcgccagagtgagaatgtgggtcaacctgaacctgtggcagaagctgaaactgtccagggacgacgccaagcctctgctgagactgaagggcttccctagcttccctctggtggaaagacaggccaatgaagtggattggtgggacatggtctgcaacgtgaagaagctgatcaacgagaagaaagaggatggcaaggttttctggcagaacctggccggctacaagagacaagaagccctgaggccttacctgagcagcgaagaggaccggaagaagggcaagaagttcgccagataccagttcggcgacctgctgctgcacctggaaaagaagcacggcgaggactggggcaaagtgtacgatgaggcctgggagagaatcgacaagaaggtggaaggcctgagcaagcacattaagctggaagaggaaagaaggagcgaggacgcccaatctaaagccgctctgaccgattggctgagagccaaggccagctttgtgatcgagggcctgaaagaggccgacaaggacgagttctgcagatgcgagctgaagctgcagaagtggtacggcgatctgagaggcaagcccttcgccattgaggccgagaacagcatcctggacatcagcggcttcagcaagcagtacaactgcgccttcatttggcagaaagacggcgtcaagaaactgaacctgtacctgatcatcaattacttcaaaggcggcaagctgcggttcaagaagatcaaacccgaggccttcgaggctaacagattctacaccgtgatcaacaaaaagtccggcgagatcgtgcccatggaagtgaacttcaacttcgacgaccccaacctgattatcctgcctctggccttcggcaagagacagggcagagagttcatctggaacgatctgctgagcctggaaaccggctctctgaagctggccaatggcagagtgatcgagaaaaccctgtacaacaggagaaccagacaggacgagcctgctctgtttgtggccctgaccttcgagagaagagaggtgctggacagcagcaacatcaagcccatgaacctgatcggcatcgaccggggcgagaatatccctgctgtgatcgccctgacagaccctgaaggatgcccactgagcagattcaaggactccctgggcaaccctacacacatcctgagaatcggcgagagctacaaagagaagcagaggacaatccaggccaagaaagaggtggaacagagaagagccggcggatactctaggaagtacgccagcaaggccaagaatctggccgacgacatggtccgaaacaccgccagagatctgctgtactacgccgtgacacaggacgccatgctgatcttcgagaatctgagcagaggcttcggccggcagggcaagagaacctttatggccgagaggcagtacaccagaatggaagattggctcacagctaaactggcctacgagggactgagcaagacctacctgtccaaaacactggcccagtatacctccaagacctgcagcaattgcggcttcaccatcaccagcgccgactacgacagagtgctggaaaagctcaagaaaaccgccaccggctggatgaccaccatcaacggcaaagagctgaaggttgagggccagatcacctactacaacaggtacaagaggcagaacgtcgtgaaggatctgagcgtggaactggacagactgagcgaagagagcgtgaacaacgacatcagcagctggacaaagggcagatcaggcgaggctctgagcctgctgaagaagaggtttagccacagacctgtgcaagagaagttcgtgtgcctgaactgcggcttcgagacacacgccgatgaacaggctgccctgaacattgccagaagctggctgttcctgagaagccaagagtacaagaagtaccagaccaacaagaccaccggcaacaccgacaagagggcctttgtggaaacctggcagagcttctacagaaaaaagctgaaagaagtctggaagcccgccgtgactagtccaaaaaagaagagaaaggta

SEQ ID NO: 270 - DNA, 2988 bp, Artificial Sequence
  CasX variant
atggccccaaagaagaagcggaaggtctctagacaagagatcaagagaatcaacaagatcagaaggagactggtcaaggacagcaacacaaagaaggccggcaagacaggccccatgaaaaccctgctcgtcagagtgatgacccctgacctgagagagcggctggaaaacctgagaaagaagcccgagaacatccctcagcctatcagcaacaccagcagggccaacctgaacaagctgctgaccgactacaccgagatgaagaaagccatcctgcacgtgtactgggaagagttccagaaagaccccgtgggcctgatgagcagagttgctcagcccgctcctaagaacatcgaccagagaaagctgatccccgtgaaggacggcaacgagagactgacctctagcggctttgcctgcagccagtgttgccagcctctgtacgtgtacaagctggaacaagtgaacgacaagggcaagccccacaccaactacttcggcagatgcaacgtgtccgagcacgagaggctgatcctgctgtctcctcacaagcccgaggccaacgatgagctggtcacatacagcctgggcaagttcggacagagagccctggacttctacagcatccacgtgaccaaagaaagcacacaccccgtgaagcccctggctcagatcgccggcaatagatacgcctctggacctgtgggcaaagccctgtccgatgcctgcatgggaacaatcgccagcttcctgagcaagtaccaggacatcatcatcgagcaccagaaggtggtcaagggcaaccagaagagactggaaagcctgagggagctggccggcaaagagaacctggaataccccagcgtgaccctgcctcctcagcctcacacaaaagaaggcgtggacgcctacaacgaagtgatcgccagagtgagaatgtgggtcaacctgaacctgtggcagaagctgaaactgtccagggacgacgccaagcctctgctgagactgaagggcttccctagcttccctctggtggaaagacaggccaatgaagtggattggtgggacatggtctgcaacgtgaagaagctgatcaacgagaagaaagaggatggcaaggttttctggcagaacctggccggctacaagagacaagaagccctgaggccttacctgagcagcgaagaggaccggaagaagggcaagaagttcgccagataccagctgggcgacctgctgctgcacctggaaaagaagcacggcgaggactggggcaaagtgtacgatgaggcctgggagagaatcgacaagaaggtggaaggcctgagcaagcacattaagctggaagaggaaagaaggagcgaggacgcccaatctaaagccgctctgaccgattggctgagagccaaggccagctttgtgatcgagggcctgaaagaggccgacaaggacgagttctgcagatgcgagctgaagctgcagaagtggtacggcgatctgagaggcaagcccttcgccattgaggccgagaacagcatcctggacatcagcggcttcagcaagcagtacaactgcgccttcatttggcagaaagacggcgtcaagaaactgaacctgtacctgatcatcaattacttcaaaggcggcaagctgcggttcaagaagatcaaacccgaggccttcgaggctaacagattctacaccgtgatcaacaaaaagtccggcgagatcgtgcccatggaagtgaacttcaacttcgacgaccccaacctgattatcctgcctctggccttcggcaagagacagggcagagagttcatctggaacgatctgctgagcctggaaaccggctctctgaagctggccaatggcagagtgatcgagaaaaccctgtacaacaggagaaccagacaggacgagcctgctctgtttgtggccctgaccttcgagagaagagaggtgctggacagcagcaacatcaagcccatgaacctgatcggcgtggaccggggcgagaatatccctgctgtgatcgccctgacagaccctgaaggatgcccactgagcagattcaaggactccctgggcaaccctacacacatcctgagaatcggcgagagctacaaagagaagcagaggacaatccaggccaagaaagaggtggaacagagaagagccggcggatactctaggaagtacgccagcaaggccaagaatctggccgacgacatggtccgaaacaccgccagagatctgctgtactacgccgtgacacaggacgccatgctgatcttcgagaatctgagcagaggcttcggccggcagggcaagagaacctttatggccgagaggcagtacaccagaatggaagattggctcacagctaaactggcctacgagggactgagcaagacctacctgtccaaaacactggcccagtatacctccaagacctgcagcaattgcggcttcaccatcaccagcgccgactacgacagagtgctggaaaagctcaagaaaaccgccaccggctggatgaccaccatcaacggcaaagagctgaaggttgagggccagatcacctactacaacaggaggaagaggcagaacgtcgtgaaggatctgagcgtggaactggacagactgagcgaagagagcgtgaacaacgacatcagcagctggacaaagggcagatcaggcgaggctctgagcctgctgaagaagaggtttagccacagacctgtgcaagagaagttcgtgtgcctgaactgcggcttcgagacacacgccgatgaacaggctgccctgaacattgccagaagctggctgttcctgagaagccaagagtacaagaagtaccagaccaacaagaccaccggcaacaccgacaagagggcctttgtggaaacctggcagagcttctacagaaaaaagctgaaagaagtctggaagcccgccgtgactagtccaaaaaagaagagaaaggta

SEQ ID NO: 271 - DNA, 2988 bp, Artificial Sequence
  CasX variant
atggccccaaagaagaagcggaaggtctctagacaagagatcaagagaatcaacaagatcagaaggagactggtcaaggacagcaacacaaagaaggccggcaagacaggccccatgaaaaccctgctcgtcagagtgatgacccctgacctgagagagcggctggaaaacctgagaaagaagcccgagaacatccctcagcctatcagcaacaccagcagggccaacctgaacaagctgctgaccgactacaccgagatgaagaaagccatcctgcacgtgtactgggaagagttccagaaagaccccgtgggcctgatgagcagagttgctcagcccgctcctaagaacatcgaccagagaaagctgatccccgtgaaggacggcaacgagagactgacctctagcggctttgcctgcagccagtgttgccagcctctgtacgtgtacaagctggaacaagtgaacgacaagggcaagccccacaccaactacttcggcagatgcaacgtgtccgagcacgagaggctgatcctgctgtctcctcacaagcccgaggccaacgatgagctggtcacatacagcctgggcaagttcggacagagagccctggacttctacagcatccacgtgaccaaagaaagcacacaccccgtgaagcccctggctcagatcgccggcaatagatacgcctctggacctgtgggcaaagccctgtccgatgcctgcatgggaacaatcgccagcttcctgagcaagtaccaggacatcatcatcgagcaccagaaggtggtcaagggcaaccagaagagactggaaagcctgagggagctggccggcaaagagaacctggaataccccagcgtgaccctgcctcctcagcctcacacaaaagaaggcgtggacgcctacaacgaagtgatcgccagagtgagaatgtgggtcaacctgaacctgtggcagaagctgaaactgtccagggacgacgccaagcctctgctgagactgaagggcttccctagcttccctctggtggaaagacaggccaatgaagtggattggtgggacatggtctgcaacgtgaagaagctgatcaacgagaagaaagaggatggcaaggttttctggcagaacctggccggctacaagagacaagaagccctgaggccttacctgagcagcgaagaggaccggaagaagggcaagaagttcgccagataccagctgggcgacctgctgaagcacctggaaaagaagcacggcgaggactggggcaaagtgtacgatgaggcctgggagagaatcgacaagaaggtggaaggcctgagcaagcacattaagctggaagaggaaagaaggagcgaggacgcccaatctaaagccgctctgaccgattggctgagagccaaggccagctttgtgatcgagggcctgaaagaggccgacaaggacgagttctgcagatgcgagctgaagctgcagaagtggtacggcgatctgagaggcaagcccttcgccattgaggccgagaacagcatcctggacatcagcggcttcagcaagcagtacaactgcgccttcatttggcagaaagacggcgtcaagaaactgaacctgtacctgatcatcaattacttcaaaggcggcaagctgcggttcaagaagatcaaacccgaggccttcgaggctaacagattctacaccgtgatcaacaaaaagtccggcgagatcgtgcccatggaagtgaacttcaacttcgacgaccccaacctgattatcctgcctctggccttcggcaagagacagggcagagagttcatctggaacgatctgctgagcctggaaaccggctctctgaagctggccaatggcagagtgatcgagaaaaccctgtacaacaggagaaccagacaggacgagcctgctctgtttgtggccctgaccttcgagagaagagaggtgctggacagcagcaacatcaagcccatgaacctgatcggcgtggaccggggcgagaatatccctgctgtgatcgccctgacagaccctgaaggatgcccactgagcagattcaaggactccctgggcaaccctacacacatcctgagaatcggcgagagctacaaagagaagcagaggacaatccaggccaagaaagaggtggaacagagaagagccggcggatactctaggaagtacgccagcaaggccaagaatctggccgacgacatggtccgaaacaccgccagagatctgctgtactacgccgtgacacaggacgccatgctgatcttcgagaatctgagcagaggcttcggccggcagggcaagagaacctttatggccgagaggcagtacaccagaatggaagattggctcacagctaaactggcctacgagggactgagcaagacctacctgtccaaaacactggcccagtatacctccaagacctgcagcaattgcggcttcaccatcaccagcgccgactacgacagagtgctggaaaagctcaagaaaaccgccaccggctggatgaccaccatcaacggcaaagagctgaaggttgagggccagatcacctactacaacaggaggaagaggcagaacgtcgtgaaggatctgagcgtggaactggacagactgagcgaagagagcgtgaacaacgacatcagcagctggacaaagggcagatcaggcgaggctctgagcctgctgaagaagaggtttagccacagacctgtgcaagagaagttcgtgtgcctgaactgcggcttcgagacacacgccgatgaacaggctgccctgaacattgccagaagctggctgttcctgagaagccaagagtacaagaagtaccagaccaacaagaccaccggcaacaccgacaagagggcctttgtggaaacctggcagagcttctacagaaaaaagctgaaagaagtctggaagcccgccgtgactagtccaaaaaagaagagaaaggta

SEQ ID NO: 272 - DNA, 2988 bp, Artificial Sequence
  CasX variant
atggccccaaagaagaagcggaaggtctctagacaagagatcaagagaatcaacaagatcagaaggagactggtcaaggacagcaacacaaagaaggccggcaagacaggccccatgaaaaccctgctcgtcagagtgatgacccctgacctgagagagcggctggaaaacctgagaaagaagcccgagaacatccctcagcctatcagcaacaccagcagggccaacctgaacaagctgctgaccgactacaccgagatgaagaaagccatcctgcacgtgtactgggaagagttccagaaagaccccgtgggcctgatgagcagagttgctcagcccgctcctaagaacatcgaccagagaaagctgatccccgtgaaggacggcaacgagagactgacctctagcggctttgcctgcagccagtgttgccagcctctgtacgtgtacaagctggaacaagtgaacgacaagggcaagccccacaccaactacttcggcagatgcaacgtgtccgagcacgagaggctgatcctgctgtctcctcacaagcccgaggccaacgatgagctggtcacatacagcctgggcaagttcggacagagagccctggacttctacagcatccacgtgaccaaagaaagcacacaccccgtgaagcccctggctcagatcgccggcaatagatacgcctctggacctgtgggcaaagccctgtccgatgcctgcatgggaacaatcgccagcttcctgagcaagtaccaggacatcatcatcgagcaccagaaggtggtcaagggcaaccagaagagactggaaagcctgagggagctggccggcaaagagaacctggaataccccagcgtgaccctgcctcctcagcctcacacaaaagaaggcgtggacgcctacaacgaagtgatcgccagagtgagaatgtgggtcaacctgaacctgtggcagaagctgaaactgtccagggacgacgccaagcctctgctgagactgaagggcttccctagcttccctctggtggaaagacaggccaatgaagtggattggtgggacatggtctgcaacgtgaagaagctgatcaacgagaagaaagaggatggcaaggttttctggcagaacctggccggctacaagagacaagaagccctgaggccttacctgagcagcgaagaggaccggaagaagggcaagaagttcgccagataccagctgggcgacctgctgctgcacctggaaaagaagcacggcgaggactggggcaaagtgtacgatgaggcctgggagagaatcgacaagaaggtggaaggcctgagcaagcacattaagctggaagaggaaagaaggagcgaggacgcccaatctaaagccgctctgaccgattggctgagagccaaggccagctttgtgatcgagggcctgaaagaggccgacaaggacgagttctgcagatgcgagctgaagctgcagaagtggtacggcgatctgagaggcaagcccttcgccattgaggccgagaacagcatcctggacatcagcggcttcagcaagcagtacaactgcgccttcatttggcagaaagacggcgtcaagaaactgaacctgtacctgatcatcaattacttcaaaggcggcaagctgcggttcaagaagatcaaacccgaggccttcgaggctaacagattctacaccgtgatcaacaaaaagtccggcgagatcgtgcccatggaagtgaacttcaacttcgacgaccccaacctgattatcctgcctctggccttcggcaagagacagggcagagagttcatctggaacgatctgctgagcctggaaaccggctctctgaagctggccaatggcagagtgatcgagaaaaccctgtacaacaggagaaccagacaggacgagcctgctctgtttgtggccctgaccttcgagagaagagaggtgctggacagcagcaacatcaagcccatgaacctgatcggcgtggaccggggcgagaatatccctgctgtgatcgccctgacagaccctgaaggatgcccactgagcagattcaaggactccctgggcaaccctacacacatcctgagaatcggcgagagctacaaagagaagcagaggacaatccaggccaagaaagaggtggaacagagaagagccggcggatactctaggaagtacgccagcaaggccaagaatctggccgacgacatggtccgaaacaccgccagagatctgctgtactacgccgtgacacaggacgccatgctgatcttcgagaatctgagcagaggcttcggccggcagggcaagagaacctttatggccgagaggcagtacaccagaatggaagattggctcacagctaaactggcctacgagggactgagcaagacctacctgtccaaaacactggcccagtatacctccaagacctgcagcaattgcggcttcaccatcaccagcgccgactacgacagagtgctggaaaagctcaagaaaaccgccaccggctggatgaccaccatcaacggcaaagagctgaaggttgagggccagatcacctactacaacaggtacaagaggcagaacgtcgtgaaggatctgagcgtggaactggacagactgagcgaagagagcgtgaacaacgacatcagcagctggacaaagggcagatcaggcgaggctctgagcctgctgaagaagaggtttagccacagacctgtgcaagagaagttcgtgtgcctgaactgcggcttcgagacacacgccgatgaacaggctgccctgaacattgccagaagctggctgttcctgagaagccaagagtacaagaagtaccagaccaacaagaccaccggcaacaccgacaagagggcctttgtggaaacctggcagagcttctacagaaaaaagctgaaagaagtctggaagcccgccgtgactagtccaaaaaagaagagaaaggta

SEQ ID NO: 273 - DNA, 2991 bp, Artificial Sequence
  CasX variant
atggccccaaagaagaagcggaaggtctctagacaagagatcaagagaatcaacaagatcagaaggagactggtcaaggacagcaacacaaagaaggccggcaagacaggccccatgaaaaccctgctcgtcagagtgatgacccctgacctgagagagcggctggaaaacctgagaaagaagcccgagaacatccctcagcctatcagcaacaccagcagggccaacctgaacaagctgctgaccgactacaccgagatgaagaaagccatcctgcacgtgtactgggaagagttccagaaagaccccgtgggcctgatgagcagagttgctcagcctgccagcaagaagatcgaccagaacaagctgaagcccgagatggacgagaagggcaatctgaccacagccggctttgcctgctctcagtgtggccagcctctgttcgtgtacaagctggaacaggtgtccgagaaaggcaaggcctacaccaactacttcggcagatgtaacgtggccgagcacgagaagctgattctgctggcccagctgaaacctgagaaggactctgatgaggccgtgacctacagcctgggcaagtttggacagagagccctggacttctacagcatccacgtgaccaaagaaagcacacaccccgtgaagcccctggctcagatcgccggcaatagatacgcctctggacctgtgggcaaagccctgtccgatgcctgcatgggaacaatcgccagcttcctgagcaagtaccaggacatcatcatcgagcaccagaaggtggtcaagggcaaccagaagagactggaaagcctgagggagctggccggcaaagagaacctggaataccccagcgtgaccctgcctcctcagcctcacacaaaagaaggcgtggacgcctacaacgaagtgatcgccagagtgagaatgtgggtcaacctgaacctgtggcagaagctgaaactgtccagggacgacgccaagcctctgctgagactgaagggcttccctagcttccctctggtggaaagacaggccaatgaagtggattggtgggacatggtctgcaacgtgaagaagctgatcaacgagaagaaagaggatggcaaggttttctggcagaacctggccggctacaagagacaagaagccctgaggccttacctgagcagcgaagaggaccggaagaagggcaagaagttcgccagataccagttcggcgacctgctgctgcacctggaaaagaagcacggcgaggactggggcaaagtgtacgatgaggcctgggagagaatcgacaagaaggtggaaggcctgagcaagcacattaagctggaagaggaaagaaggagcgaggacgcccaatctaaagccgctctgaccgattggctgagagccaaggccagctttgtgatcgagggcctgaaagaggccgacaaggacgagttctgcagatgcgagctgaagctgcagaagtggtacggcgatctgagaggcaagcccttcgccattgaggccgagaacagcatcctggacatcagcggcttcagcaagcagtacaactgcgccttcatttggcagaaagacggcgtcaagaaactgaacctgtacctgatcatcaattacttcaaaggcggcaagctgcggttcaagaagatcaaacccgaggccttcgaggctaacagattctacaccgtgatcaacaaaaagtccggcgagatcgtgcccatggaagtgaacttcaacttcgacgaccccaacctgattatcctgcctctggccttcggcaagagacagggcagagagttcatctggaacgatctgctgagcctggaaaccggctctctgaagctggccaatggcagagtgatcgagaaaaccctgtacaacaggagaaccagacaggacgagcctgctctgtttgtggccctgaccttcgagagaagagaggtgctggacagcagcaacatcaagcccatgaacctgatcggcatcgaccggggcgagaatatccctgctgtgatcgccctgacagaccctgaaggatgcccactgagcagattcaaggactccctgggcaaccctacacacatcctgagaatcggcgagagctacaaagagaagcagaggacaatccaggccaagaaagaggtggaacagagaagagccggcggatactctaggaagtacgccagcaaggccaagaatctggccgacgacatggtccgaaacaccgccagagatctgctgtactacgccgtgacacaggacgccatgctgatcttcgagaatctgagcagaggcttcggccggcagggcaagagaacctttatggccgagaggcagtacaccagaatggaagattggctcacagctaaactggcctacgagggactgagcaagacctacctgtccaaaacactggcccagtatacctccaagacctgcagcaattgcggcttcaccatcaccagcgccgactacgacagagtgctggaaaagctcaagaaaaccgccaccggctggatgaccaccatcaacggcaaagagctgaaggttgagggccagatcacctactacaacaggtacaagaggcagaacgtcgtgaaggatctgagcgtggaactggacagactgagcgaagagagcgtgaacaacgacatcagcagctggacaaagggcagatcaggcgaggctctgagcctgctgaagaagaggtttagccacagacctgtgcaagagaagttcgtgtgcctgaactgcggcttcgagacacacgccgatgaacaggctgccctgaacattgccagaagctggctgttcctgagaagccaagagtacaagaagtaccagaccaacaagaccaccggcaacaccgacaagagggcctttgtggaaacctggcagagcttctacagaaaaaagctgaaagaagtctggaagcccgccgtgactagtccaaaaaagaagagaaaggta

SEQ ID NO: 274 - DNA, 2991 bp, Artificial Sequence
  CasX variant
atggccccaaagaagaagcggaaggtctctagacaagagatcaagagaatcaacaagatcagaaggagactggtcaaggacagcaacacaaagaaggccggcaagacaggccccatgaaaaccctgctcgtcagagtgatgacccctgacctgagagagcggctggaaaacctgagaaagaagcccgagaacatccctcagcctatcagcaacaccagcagggccaacctgaacaagctgctgaccgactacaccgagatgaagaaagccatcctgcacgtgtactgggaagagttccagaaagaccccgtgggcctgatgagcagagttgctcagcctgccagcaagaagatcgaccagaacaagctgaagcccgagatggacgagaagggcaatctgaccacagccggctttgcctgctctcagtgtggccagcctctgttcgtgtacaagctggaacaggtgtccgagaaaggcaaggcctacaccaactacttcggcagatgtaacgtggccgagcacgagaagctgattctgctggcccagctgaaacctgagaaggactctgatgaggccgtgacctacagcctgggcaagtttggacagagagccctggacttctacagcatccacgtgaccaaagaaagcacacaccccgtgaagcccctggctcagatcgccggcaatagatacgcctctggacctgtgggcaaagccctgtccgatgcctgcatgggaacaatcgccagcttcctgagcaagtaccaggacatcatcatcgagcaccagaaggtggtcaagggcaaccagaagagactggaaagcctgagggagctggccggcaaagagaacctggaataccccagcgtgaccctgcctcctcagcctcacacaaaagaaggcgtggacgcctacaacgaagtgatcgccagagtgagaatgtgggtcaacctgaacctgtggcagaagctgaaactgtccagggacgacgccaagcctctgctgagactgaagggcttccctagcttccctctggtggaaagacaggccaatgaagtggattggtgggacatggtctgcaacgtgaagaagctgatcaacgagaagaaagaggatggcaaggttttctggcagaacctggccggctacaagagacaagaagccctgaggccttacctgagcagcgaagaggaccggaagaagggcaagaagttcgccagataccagctgggcgacctgctgctgcacctggaaaagaagcacggcgaggactggggcaaagtgtacgatgaggcctgggagagaatcgacaagaaggtggaaggcctgagcaagcacattaagctggaagaggaaagaaggagcgaggacgcccaatctaaagccgctctgaccgattggctgagagccaaggccagctttgtgatcgagggcctgaaagaggccgacaaggacgagttctgcagatgcgagctgaagctgcagaagtggtacggcgatctgagaggcaagcccttcgccattgaggccgagaacagcatcctggacatcagcggcttcagcaagcagtacaactgcgccttcatttggcagaaagacggcgtcaagaaactgaacctgtacctgatcatcaattacttcaaaggcggcaagctgcggttcaagaagatcaaacccgaggccttcgaggctaacagattctacaccgtgatcaacaaaaagtccggcgagatcgtgcccatggaagtgaacttcaacttcgacgaccccaacctgattatcctgcctctggccttcggcaagagacagggcagagagttcatctggaacgatctgctgagcctggaaaccggctctctgaagctggccaatggcagagtgatcgagaaaaccctgtacaacaggagaaccagacaggacgagcctgctctgtttgtggccctgaccttcgagagaagagaggtgctggacagcagcaacatcaagcccatgaacctgatcggcgtggaccggggcgagaatatccctgctgtgatcgccctgacagaccctgaaggatgcccactgagcagattcaaggactccctgggcaaccctacacacatcctgagaatcggcgagagctacaaagagaagcagaggacaatccaggccaagaaagaggtggaacagagaagagccggcggatactctaggaagtacgccagcaaggccaagaatctggccgacgacatggtccgaaacaccgccagagatctgctgtactacgccgtgacacaggacgccatgctgatcttcgagaatctgagcagaggcttcggccggcagggcaagagaacctttatggccgagaggcagtacaccagaatggaagattggctcacagctaaactggcctacgagggactgagcaagacctacctgtccaaaacactggcccagtatacctccaagacctgcagcaattgcggcttcaccatcaccagcgccgactacgacagagtgctggaaaagctcaagaaaaccgccaccggctggatgaccaccatcaacggcaaagagctgaaggttgagggccagatcacctactacaacaggaggaagaggcagaacgtcgtgaaggatctgagcgtggaactggacagactgagcgaagagagcgtgaacaacgacatcagcagctggacaaagggcagatcaggcgaggctctgagcctgctgaagaagaggtttagccacagacctgtgcaagagaagttcgtgtgcctgaactgcggcttcgagacacacgccgatgaacaggctgccctgaacattgccagaagctggctgttcctgagaagccaagagtacaagaagtaccagaccaacaagaccaccggcaacaccgacaagagggcctttgtggaaacctggcagagcttctacagaaaaaagctgaaagaagtctggaagcccgccgtgactagtccaaaaaagaagagaaaggta

SEQ ID NO: 275 - DNA, 2991 bp, Artificial Sequence
  CasX variant
atggccccaaagaagaagcggaaggtctctagacaagagatcaagagaatcaacaagatcagaaggagactggtcaaggacagcaacacaaagaaggccggcaagacaggccccatgaaaaccctgctcgtcagagtgatgacccctgacctgagagagcggctggaaaacctgagaaagaagcccgagaacatccctcagcctatcagcaacaccagcagggccaacctgaacaagctgctgaccgactacaccgagatgaagaaagccatcctgcacgtgtactgggaagagttccagaaagaccccgtgggcctgatgagcagagttgctcagcctgccagcaagaagatcgaccagaacaagctgaagcccgagatggacgagaagggcaatctgaccacagccggctttgcctgctctcagtgtggccagcctctgttcgtgtacaagctggaacaggtgtccgagaaaggcaaggcctacaccaactacttcggcagatgtaacgtggccgagcacgagaagctgattctgctggcccagctgaaacctgagaaggactctgatgaggccgtgacctacagcctgggcaagtttggacagagagccctggacttctacagcatccacgtgaccaaagaaagcacacaccccgtgaagcccctggctcagatcgccggcaatagatacgcctctggacctgtgggcaaagccctgtccgatgcctgcatgggaacaatcgccagcttcctgagcaagtaccaggacatcatcatcgagcaccagaaggtggtcaagggcaaccagaagagactggaaagcctgagggagctggccggcaaagagaacctggaataccccagcgtgaccctgcctcctcagcctcacacaaaagaaggcgtggacgcctacaacgaagtgatcgccagagtgagaatgtgggtcaacctgaacctgtggcagaagctgaaactgtccagggacgacgccaagcctctgctgagactgaagggcttccctagcttccctctggtggaaagacaggccaatgaagtggattggtgggacatggtctgcaacgtgaagaagctgatcaacgagaagaaagaggatggcaaggttttctggcagaacctggccggctacaagagacaagaagccctgaggccttacctgagcagcgaagaggaccggaagaagggcaagaagttcgccagataccagctgggcgacctgctgaagcacctggaaaagaagcacggcgaggactggggcaaagtgtacgatgaggcctgggagagaatcgacaagaaggtggaaggcctgagcaagcacattaagctggaagaggaaagaaggagcgaggacgcccaatctaaagccgctctgaccgattggctgagagccaaggccagctttgtgatcgagggcctgaaagaggccgacaaggacgagttctgcagatgcgagctgaagctgcagaagtggtacggcgatctgagaggcaagcccttcgccattgaggccgagaacagcatcctggacatcagcggcttcagcaagcagtacaactgcgccttcatttggcagaaagacggcgtcaagaaactgaacctgtacctgatcatcaattacttcaaaggcggcaagctgcggttcaagaagatcaaacccgaggccttcgaggctaacagattctacaccgtgatcaacaaaaagtccggcgagatcgtgcccatggaagtgaacttcaacttcgacgaccccaacctgattatcctgcctctggccttcggcaagagacagggcagagagttcatctggaacgatctgctgagcctggaaaccggctctctgaagctggccaatggcagagtgatcgagaaaaccctgtacaacaggagaaccagacaggacgagcctgctctgtttgtggccctgaccttcgagagaagagaggtgctggacagcagcaacatcaagcccatgaacctgatcggcgtggaccggggcgagaatatccctgctgtgatcgccctgacagaccctgaaggatgcccactgagcagattcaaggactccctgggcaaccctacacacatcctgagaatcggcgagagctacaaagagaagcagaggacaatccaggccaagaaagaggtggaacagagaagagccggcggatactctaggaagtacgccagcaaggccaagaatctggccgacgacatggtccgaaacaccgccagagatctgctgtactacgccgtgacacaggacgccatgctgatcttcgagaatctgagcagaggcttcggccggcagggcaagagaacctttatggccgagaggcagtacaccagaatggaagattggctcacagctaaactggcctacgagggactgagcaagacctacctgtccaaaacactggcccagtatacctccaagacctgcagcaattgcggcttcaccatcaccagcgccgactacgacagagtgctggaaaagctcaagaaaaccgccaccggctggatgaccaccatcaacggcaaagagctgaaggttgagggccagatcacctactacaacaggaggaagaggcagaacgtcgtgaaggatctgagcgtggaactggacagactgagcgaagagagcgtgaacaacgacatcagcagctggacaaagggcagatcaggcgaggctctgagcctgctgaagaagaggtttagccacagacctgtgcaagagaagttcgtgtgcctgaactgcggcttcgagacacacgccgatgaacaggctgccctgaacattgccagaagctggctgttcctgagaagccaagagtacaagaagtaccagaccaacaagaccaccggcaacaccgacaagagggcctttgtggaaacctggcagagcttctacagaaaaaagctgaaagaagtctggaagcccgccgtgactagtccaaaaaagaagagaaaggta

SEQ ID NO: 276 - DNA, 2991 bp, Artificial Sequence
  CasX variant
atggccccaaagaagaagcggaaggtctctagacaagagatcaagagaatcaacaagatcagaaggagactggtcaaggacagcaacacaaagaaggccggcaagacaggccccatgaaaaccctgctcgtcagagtgatgacccctgacctgagagagcggctggaaaacctgagaaagaagcccgagaacatccctcagcctatcagcaacaccagcagggccaacctgaacaagctgctgaccgactacaccgagatgaagaaagccatcctgcacgtgtactgggaagagttccagaaagaccccgtgggcctgatgagcagagttgctcagcctgccagcaagaagatcgaccagaacaagctgaagcccgagatggacgagaagggcaatctgaccacagccggctttgcctgctctcagtgtggccagcctctgttcgtgtacaagctggaacaggtgtccgagaaaggcaaggcctacaccaactacttcggcagatgtaacgtggccgagcacgagaagctgattctgctggcccagctgaaacctgagaaggactctgatgaggccgtgacctacagcctgggcaagtttggacagagagccctggacttctacagcatccacgtgaccaaagaaagcacacaccccgtgaagcccctggctcagatcgccggcaatagatacgcctctggacctgtgggcaaagccctgtccgatgcctgcatgggaacaatcgccagcttcctgagcaagtaccaggacatcatcatcgagcaccagaaggtggtcaagggcaaccagaagagactggaaagcctgagggagctggccggcaaagagaacctggaataccccagcgtgaccctgcctcctcagcctcacacaaaagaaggcgtggacgcctacaacgaagtgatcgccagagtgagaatgtgggtcaacctgaacctgtggcagaagctgaaactgtccagggacgacgccaagcctctgctgagactgaagggcttccctagcttccctctggtggaaagacaggccaatgaagtggattggtgggacatggtctgcaacgtgaagaagctgatcaacgagaagaaagaggatggcaaggttttctggcagaacctggccggctacaagagacaagaagccctgaggccttacctgagcagcgaagaggaccggaagaagggcaagaagttcgccagataccagctgggcgacctgctgctgcacctggaaaagaagcacggcgaggactggggcaaagtgtacgatgaggcctgggagagaatcgacaagaaggtggaaggcctgagcaagcacattaagctggaagaggaaagaaggagcgaggacgcccaatctaaagccgctctgaccgattggctgagagccaaggccagctttgtgatcgagggcctgaaagaggccgacaaggacgagttctgcagatgcgagctgaagctgcagaagtggtacggcgatctgagaggcaagcccttcgccattgaggccgagaacagcatcctggacatcagcggcttcagcaagcagtacaactgcgccttcatttggcagaaagacggcgtcaagaaactgaacctgtacctgatcatcaattacttcaaaggcggcaagctgcggttcaagaagatcaaacccgaggccttcgaggctaacagattctacaccgtgatcaacaaaaagtccggcgagatcgtgcccatggaagtgaacttcaacttcgacgaccccaacctgattatcctgcctctggccttcggcaagagacagggcagagagttcatctggaacgatctgctgagcctggaaaccggctctctgaagctggccaatggcagagtgatcgagaaaaccctgtacaacaggagaaccagacaggacgagcctgctctgtttgtggccctgaccttcgagagaagagaggtgctggacagcagcaacatcaagcccatgaacctgatcggcgtggaccggggcgagaatatccctgctgtgatcgccctgacagaccctgaaggatgcccactgagcagattcaaggactccctgggcaaccctacacacatcctgagaatcggcgagagctacaaagagaagcagaggacaatccaggccaagaaagaggtggaacagagaagagccggcggatactctaggaagtacgccagcaaggccaagaatctggccgacgacatggtccgaaacaccgccagagatctgctgtactacgccgtgacacaggacgccatgctgatcttcgagaatctgagcagaggcttcggccggcagggcaagagaacctttatggccgagaggcagtacaccagaatggaagattggctcacagctaaactggcctacgagggactgagcaagacctacctgtccaaaacactggcccagtatacctccaagacctgcagcaattgcggcttcaccatcaccagcgccgactacgacagagtgctggaaaagctcaagaaaaccgccaccggctggatgaccaccatcaacggcaaagagctgaaggttgagggccagatcacctactacaacaggtacaagaggcagaacgtcgtgaaggatctgagcgtggaactggacagactgagcgaagagagcgtgaacaacgacatcagcagctggacaaagggcagatcaggcgaggctctgagcctgctgaagaagaggtttagccacagacctgtgcaagagaagttcgtgtgcctgaactgcggcttcgagacacacgccgatgaacaggctgccctgaacattgccagaagctggctgttcctgagaagccaagagtacaagaagtaccagaccaacaagaccaccggcaacaccgacaagagggcctttgtggaaacctggcagagcttctacagaaaaaagctgaaagaagtctggaagcccgccgtgactagtccaaaaaagaagagaaaggta

SEQ ID NO: 277 - DNA, 2991 bp, Artificial Sequence
  CasX variant
atggccccaaagaagaagcggaaggtctctagacaagagatcaagagaatcaacaagatcagaaggagactggtcaaggacagcaacacaaagaaggccggcaagacaggccccatgaaaaccctgctcgtcagagtgatgacccctgacctgagagagcggctggaaaacctgagaaagaagcccgagaacatccctcagcctatcagcaacaccagcagggccaacctgaacaagctgctgaccgactacaccgagatgaagaaagccatcctgcacgtgtactgggaagagttccagaaagaccccgtgggcctgatgagcagagttgctcagcctgccagcaagaagatcgaccagaacaagctgaagcccgagatggacgagaagggcaatctgaccacagccggctttgcctgctctcagtgtggccagcctctgttcgtgtacaagctggaacaggtgtccgagaaaggcaaggcctacaccaactacttcggcagatgtaacgtggccgagcacgagaagctgattctgctggcccagctgaaacctgagaaggactctgatgaggccgtgacctacagcctgggcaagtttggacagagagccctggacttctacagcatccacgtgaccagggagagcaatcaccctgtgaagcccctggaacagatcggcggcaatagctgtgcctctggacctgtgggaaaagccctgagcgacgcctgtatgggagccgtggcatccttcctgaccaagtaccaggacatcatcctggaacaccagaaagtgatcaagaagaacgagaaaagactggccaacctcaaggatatcgccagcgctaacggcctggcctttcctaagatcaccctgcctccacagcctcacaccaaagagggcatcgaggcctacaacaacgtggtggcccagatcgtgatttgggtcaacctgaatctgtggcagaagctgaagatcggcagggacgaagccaagccactgcagagactgaagggcttccctagcttccctctggtggaaagacaggccaatgaagtggattggtgggacatggtctgcaacgtgaagaagctgatcaacgagaagaaagaggatggcaaggttttctggcagaacctggccggctacaagagacaagaagccctgaggccttacctgagcagcgaagaggaccggaagaagggcaagaagttcgccagataccagctgggcgacctgctgctgcacctggaaaagaagcacggcgaggactggggcaaagtgtacgatgaggcctgggagagaatcgacaagaaggtggaaggcctgagcaagcacattaagctggaagaggaaagaaggagcgaggacgcccaatctaaagccgctctgaccgattggctgagagccaaggccagctttgtgatcgagggcctgaaagaggccgacaaggacgagttctgcagatgcgagctgaagctgcagaagtggtacggcgatctgagaggcaagcccttcgccattgaggccgagaacagcatcctggacatcagcggcttcagcaagcagtacaactgcgccttcatttggcagaaagacggcgtcaagaaactgaacctgtacctgatcatcaattacttcaaaggcggcaagctgcggttcaagaagatcaaacccgaggccttcgaggctaacagattctacaccgtgatcaacaaaaagtccggcgagatcgtgcccatggaagtgaacttcaacttcgacgaccccaacctgattatcctgcctctggccttcggcaagagacagggcagagagttcatctggaacgatctgctgagcctggaaaccggctctctgaagctggccaatggcagagtgatcgagaaaaccctgtacaacaggagaaccagacaggacgagcctgctctgtttgtggccctgaccttcgagagaagagaggtgctggacagcagcaacatcaagcccatgaacctgatcggcgtggaccggggcgagaatatccctgctgtgatcgccctgacagaccctgaaggatgcccactgagcagattcaaggactccctgggcaaccctacacacatcctgagaatcggcgagagctacaaagagaagcagaggacaatccaggccaagaaagaggtggaacagagaagagccggcggatactctaggaagtacgccagcaaggccaagaatctggccgacgacatggtccgaaacaccgccagagatctgctgtactacgccgtgacacaggacgccatgctgatcttcgagaatctgagcagaggcttcggccggcagggcaagagaacctttatggccgagaggcagtacaccagaatggaagattggctcacagctaaactggcctacgagggactgagcaagacctacctgtccaaaacactggcccagtatacctccaagacctgcagcaattgcggcttcaccatcaccagcgccgactacgacagagtgctggaaaagctcaagaaaaccgccaccggctggatgaccaccatcaacggcaaagagctgaaggttgagggccagatcacctactacaacaggtacaagaggcagaacgtcgtgaaggatctgagcgtggaactggacagactgagcgaagagagcgtgaacaacgacatcagcagctggacaaagggcagatcaggcgaggctctgagcctgctgaagaagaggtttagccacagacctgtgcaagagaagttcgtgtgcctgaactgcggcttcgagacacacgccgatgaacaggctgccctgaacattgccagaagctggctgttcctgagaagccaagagtacaagaagtaccagaccaacaagaccaccggcaacaccgacaagagggcctttgtggaaacctggcagagcttctacagaaaaaagctgaaagaagtctggaagcccgccgtgactagtccaaaaaagaagagaaaggta

SEQ ID NO: 278 - DNA, 22 bp, Artificial Sequence
  T7 promoter primer
gaaattaatacgactcactata

SEQ ID NO: 279 - DNA, 87 bp, Artificial Sequence
  sg2 backbone fwd primer
gaaattaatacgactcactataggtactggcgcttttatctcattactttgagagccatcaccagcgactatgtcgtatgggtaaag

SEQ ID NO: 280 - DNA, 78 bp, Artificial Sequence
  sg2 backbone rev primer
ctttgatgcttcttatttatcggatttctctccgataaataagcgctttacccatacgacatagtcgctggtgatggc

SEQ ID NO: 281 - DNA, 54 bp, Artificial Sequence
  sg2.7.37 spacer primer
cggagcgagacatctcggccctttgatgcttcttatttatcggatttctctccg

SEQ ID NO: 282 - DNA, 90 bp, Artificial Sequence
  sg32 backbone fwd primer
gaaattaatacgactcactataggtactggcgcttttatctcattactttgagagccatcaccagcgactatgtcgtatgggtaaagcgc

SEQ ID NO: 283 - DNA, 46 bp, Artificial Sequence
  sg32 backbone rev primer
ctttgatgcttccctccgaagagggcgctttacccatacgacatag

SEQ ID NO: 284 - DNA, 43 bp, Artificial Sequence
  sg32.7.37 spacer primer
cggagcgagacatctcggccctttgatgcttccctccgaagag

SEQ ID NO: 285 - DNA, 90 bp, Artificial Sequence
  sg64 backbone fwd primer
gaaattaatacgactcactataggtactggcgcctttatctcattactttgagagccatcaccagcgactatgtcgtatgggtaaagcgc

SEQ ID NO: 286 - DNA, 54 bp, Artificial Sequence
  sg64 backbone rev primer
ctttgatgcttcttacggaccgaagtccgtaagcgctttacccatacgacatag

SEQ ID NO: 287 - DNA, 45 bp, Artificial Sequence
  sg64.7.37 spacer primer
cggagcgagacatctcggccctttgatgcttcttacggaccgaag

SEQ ID NO: 288 - DNA, 87 bp, Artificial Sequence
  sg174 backbone fwd primer
gaaattaatacgactcactataactggcgcttttatctgattactttgagagccatcaccagcgactatgtcgtagtgggtaaagct

SEQ ID NO: 289 - DNA, 50 bp, Artificial Sequence
  sg174 backbone rev primer
ctttgatgctccctccgaagagggagctttacccactacgacatagtcgc

SEQ ID NO: 290 - DNA, 36 bp, Artificial Sequence
  sg174.7.37 spacer primer
cggagcgagacatctcggccctttgatgctccctcc

SEQ ID NO: 291 - RNA, 130 nt, Artificial Sequence
  sgRNA
gguacuggcgcuuuuaucucauuacuuugagagccaucaccagcgacuaugucguauggguaaagcgcuuauuuaucggagagaaauccgauaaauaagaagcaucaaagggccgagaugucucgcuccg

SEQ ID NO: 292 - RNA, 107 nt, Artificial Sequence
  sgRNA
gguacuggcgcuuuuaucucauuacuuugagagccaucaccagcgacuaugucguauggguaaagcgcccucuucggagggaagcaucaaagggccgagaugucucg

SEQ ID NO: 293 - RNA, 120 nt, Artificial Sequence
  sgRNA
gguacuggcgccuuuaucucauuacuuugagagccaucaccagcgacuaugucguauggguaaagcgcuuacggacuucgguccguaagaagcaucaaagggccgagaugucucgcuccg

SEQ ID NO: 294 - RNA, 109 nt, Artificial Sequence
  sgRNA
acuggcgcuuuuaucugauuacuuugagagccaucaccagcgacuaugucguaguggguaaagcucccucuucggagggagcaucaaagggccgagaugucucgcuccg

SEQ ID NO: 295 - DNA, 20 bp, Artificial Sequence
  spacer sequence
gaggaggacggcctggccga

SEQ ID NO: 296 - DNA, 20 bp, Artificial Sequence
  spacer sequence
accgctgcgccaaggtgcgg

SEQ ID NO: 297 - DNA, 20 bp, Artificial Sequence
  spacer sequence
gccaggccgtcctcctcgga

SEQ ID NO: 298 - DNA, 20 bp, Artificial Sequence
  spacer sequence
gtgctcgggtgcttcggcca

SEQ ID NO: 299 - DNA, 20 bp, Artificial Sequence
  spacer sequence
atggccttcttcctggcttc

SEQ ID NO: 300 - DNA, 20 bp, Artificial Sequence
  spacer sequence
gcaccaccacgtaggtgcca

SEQ ID NO: 301 - DNA, 20 bp, Artificial Sequence
  spacer sequence
tcctggcttcctggtgaaga

SEQ ID NO: 302 - DNA, 20 bp, Artificial Sequence
  spacer sequence
tggcttcctggtgaagatga

SEQ ID NO: 303 - DNA, 20 bp, Artificial Sequence
  spacer sequence
ccaggaagccaggaagaagg

SEQ ID NO: 304 - DNA, 20 bp, Artificial Sequence
  spacer sequence
tccttgcatggggccaggat

SEQ ID NO: 305 - DNA, 20 bp, Artificial Sequence
  spacer sequence
ggcggcaagttctgctcagc

SEQ ID NO: 306 - DNA, 20 bp, Artificial Sequence
  spacer sequence
tctccacgatcgtcagcgtg

SEQ ID NO: 307 - DNA, 20 bp, Artificial Sequence
  spacer sequence
acgatcgtcagcgtgagtgc

SEQ ID NO: 308 - DNA, 20 bp, Artificial Sequence
  spacer sequence
ctctagcaatggatcgtggg

SEQ ID NO: 309 - DNA, 20 bp, Artificial Sequence
  spacer sequence
caaacaaatgtgtcacaaag

SEQ ID NO: 310 - DNA, 20 bp, Artificial Sequence
  spacer sequence
gatgtgtatatcacagacaa

SEQ ID NO: 311 - DNA, 20 bp, Artificial Sequence
  spacer sequence
ggaataatgctgttgttgaa

SEQ ID NO: 312 - DNA, 20 bp, Artificial Sequence
  spacer sequence
aaatccagtgacaagtctgt

SEQ ID NO: 313 - DNA, 20 bp, Artificial Sequence
  spacer sequence
aggccacagcactgttgctc

SEQ ID NO: 314 - DNA, 20 bp, Artificial Sequence
  spacer sequence
agaagacaccttcttcccca

SEQ ID NO: 315 - DNA, 20 bp, Artificial Sequence
  spacer sequence
tccccagcccaggtaagggc

SEQ ID NO: 316 - DNA, 20 bp, Artificial Sequence
  spacer sequence
ccagcccaggtaagggcagc

SEQ ID NO: 317 - DNA, 20 bp, Artificial Sequence
  spacer sequence
agtccctcaagtccttccag

SEQ ID NO: 318 - DNA, 20 bp, Artificial Sequence
  spacer sequence
agcagcagcagcagcagcag

SEQ ID NO: 319 - DNA, 20 bp, Artificial Sequence
  spacer sequence
tcagccgccgccgcaggcac

SEQ ID NO: 320 - DNA, 20 bp, Artificial Sequence
  spacer sequence
agggtcgccatggcggtctc

SEQ ID NO: 321 - DNA, 20 bp, Artificial Sequence
  spacer sequence
tcagcttttccagggtcgcc

SEQ ID NO: 322 - DNA, 20 bp, Artificial Sequence
  spacer sequence
gccgcagccgcccccgccgc

SEQ ID NO: 323 - DNA, 20 bp, Artificial Sequence
  spacer sequence
gccacagccgggccgggtgg

SEQ ID NO: 324 - DNA, 20 bp, Artificial Sequence
  spacer sequence
tcagccacagccgggccggg

SEQ ID NO: 325 - DNA, 20 bp, Artificial Sequence
  spacer sequence
cggtcggtgcagcggctcct

SEQ ID NO: 326 - DNA, 20 bp, Artificial Sequence
  spacer sequence
ccacaccttcactggtccat

SEQ ID NO: 327 - DNA, 20 bp, Artificial Sequence
  spacer sequence
taaaggaaagtaatggacca

SEQ ID NO: 328 - DNA, 20 bp, Artificial Sequence
  spacer sequence
ctggtccattactttccttt

SEQ ID NO: 329 - DNA, 20 bp, Artificial Sequence
  spacer sequence
atgttcatgagtttggagat

SEQ ID NO: 330 - DNA, 20 bp, Artificial Sequence
  spacer sequence
tgagtttggagataatacag

SEQ ID NO: 331 - DNA, 20 bp, Artificial Sequence
  spacer sequence
atagacacatcggccacacc

SEQ ID NO: 332 - DNA, 20 bp, Artificial Sequence
  spacer sequence
ttattaggcatgttggagac

SEQ ID NO: 333 - DNA, 20 bp, Artificial Sequence
  spacer sequence
caggagaccattgcatcatt

SEQ ID NO: 334 - DNA, 20 bp, Artificial Sequence
  spacer sequence
ggcctggaggctatccagcg

SEQ ID NO: 335 - DNA, 20 bp, Artificial Sequence
  spacer sequence
ggccgagatgtctcgctccg

SEQ ID NO: 336 - DNA, 20 bp, Artificial Sequence
  spacer sequence
aggccagaaagagagagtag

SEQ ID NO: 337 - DNA, 20 bp, Artificial Sequence
  spacer sequence
cgctggatagcctccaggcc

SEQ ID NO: 338 - DNA, 20 bp, Artificial Sequence
  spacer sequence
tgaagctgacagcattcggg

SEQ ID NO: 339 - RNA, 20 nt, Artificial Sequence
  spacer sequence
gaggaggacggccuggccga

SEQ ID NO: 340 - RNA, 20 nt, Artificial Sequence
  spacer sequence
accgcugcgccaaggugcgg

SEQ ID NO: 341 - RNA, 20 nt, Artificial Sequence
  spacer sequence
gccaggccguccuccucgga

SEQ ID NO: 342 - RNA, 20 nt, Artificial Sequence
  spacer sequence
gugcucgggugcuucggcca

SEQ ID NO: 343 - RNA, 20 nt, Artificial Sequence
  spacer sequence
auggccuucuuccuggcuuc

SEQ ID NO: 344 - RNA, 20 nt, Artificial Sequence
  spacer sequence
gcaccaccacguaggugcca

SEQ ID NO: 345 - RNA, 20 nt, Artificial Sequence
  spacer sequence
uccuggcuuccuggugaaga

SEQ ID NO: 346 - RNA, 20 nt, Artificial Sequence
  spacer sequence
uggcuuccuggugaagauga

SEQ ID NO: 347 - RNA, 20 nt, Artificial Sequence
  spacer sequence
ccaggaagccaggaagaagg

SEQ ID NO: 348 - RNA, 20 nt, Artificial Sequence
  spacer sequence
uccuugcauggggccaggau

SEQ ID NO: 349 - RNA, 20 nt, Artificial Sequence
  spacer sequence
ggcggcaaguucugcucagc

SEQ ID NO: 350 - RNA, 20 nt, Artificial Sequence
  spacer sequence
ucuccacgaucgucagcgug

SEQ ID NO: 351 - RNA, 20 nt, Artificial Sequence
  spacer sequence
acgaucgucagcgugagugc

SEQ ID NO: 352 - RNA, 20 nt, Artificial Sequence
  spacer sequence
cucuagcaauggaucguggg

SEQ ID NO: 353 - RNA, 20 nt, Artificial Sequence
  spacer sequence
caaacaaaugugucacaaag

SEQ ID NO: 354 - RNA, 20 nt, Artificial Sequence
  spacer sequence
gauguguauaucacagacaa

SEQ ID NO: 355 - RNA, 20 nt, Artificial Sequence
  spacer sequence
ggaauaaugcuguuguugaa

SEQ ID NO: 356 - RNA, 20 nt, Artificial Sequence
  spacer sequence
aaauccagugacaagucugu

SEQ ID NO: 357 - RNA, 20 nt, Artificial Sequence
  spacer sequence
aggccacagcacuguugcuc

SEQ ID NO: 358 - RNA, 20 nt, Artificial Sequence
  spacer sequence
agaagacaccuucuucccca

SEQ ID NO: 359 - RNA, 20 nt, Artificial Sequence
  spacer sequence
uccccagcccagguaagggc

SEQ ID NO: 360 - RNA, 20 nt, Artificial Sequence
  spacer sequence
ccagcccagguaagggcagc

SEQ ID NO: 361 - RNA, 20 nt, Artificial Sequence
  spacer sequence
agucccucaaguccuuccag

SEQ ID NO: 362 - RNA, 20 nt, Artificial Sequence
  spacer sequence
agcagcagcagcagcagcag

SEQ ID NO: 363 - RNA, 20 nt, Artificial Sequence
  spacer sequence
ucagccgccgccgcaggcac

SEQ ID NO: 364 - RNA, 20 nt, Artificial Sequence
  spacer sequence
agggucgccauggcggucuc

SEQ ID NO: 365 - RNA, 20 nt, Artificial Sequence
  spacer sequence
ucagcuuuuccagggucgcc

SEQ ID NO: 366 - RNA, 20 nt, Artificial Sequence
  spacer sequence
gccgcagccgcccccgccgc

SEQ ID NO: 367 - RNA, 20 nt, Artificial Sequence
  spacer sequence
gccacagccgggccgggugg

SEQ ID NO: 368 - RNA, 20 nt, Artificial Sequence
  spacer sequence
ucagccacagccgggccggg

SEQ ID NO: 369 - RNA, 20 nt, Artificial Sequence
  spacer sequence
cggucggugcagcggcuccu

SEQ ID NO: 370 - RNA, 20 nt, Artificial Sequence
  spacer sequence
ccacaccuucacugguccau

SEQ ID NO: 371 - RNA, 20 nt, Artificial Sequence
  spacer sequence
uaaaggaaaguaauggacca

SEQ ID NO: 372 - RNA, 20 nt, Artificial Sequence
  spacer sequence
cugguccauuacuuuccuuu

SEQ ID NO: 373 - RNA, 20 nt, Artificial Sequence
  spacer sequence
auguucaugaguuuggagau

SEQ ID NO: 374 - RNA, 20 nt, Artificial Sequence
  spacer sequence
ugaguuuggagauaauacag

SEQ ID NO: 375 - RNA, 20 nt, Artificial Sequence
  spacer sequence
auagacacaucggccacacc

SEQ ID NO: 376 - RNA, 20 nt, Artificial Sequence
  spacer sequence
uuauuaggcauguuggagac

SEQ ID NO: 377 - RNA, 20 nt, Artificial Sequence
  spacer sequence
caggagaccauugcaucauu

SEQ ID NO: 378 - RNA, 20 nt, Artificial Sequence
  spacer sequence
ggccuggaggcuauccagcg

SEQ ID NO: 379 - RNA, 20 nt, Artificial Sequence
  spacer sequence
ggccgagaugucucgcuccg

SEQ ID NO: 380 - RNA, 20 nt, Artificial Sequence
  spacer sequence
aggccagaaagagagaguag

SEQ ID NO: 381 - RNA, 20 nt, Artificial Sequence
  spacer sequence
cgcuggauagccuccaggcc

SEQ ID NO: 382 - RNA, 20 nt, Artificial Sequence
  spacer sequence
ugaagcugacagcauucggg

SEQ ID NO: 383 - DNA, 60 bp, Artificial Sequence
  spacer target oligo
tgaagctgacagcattcgggccgagatgtctcgctccgtggccttagctgtgctcgcgct

SEQ ID NO: 384 - DNA, 60 bp, Artificial Sequence; identical to SEQ ID NO: 383
  spacer target oligo

SEQ ID NO: 385 - DNA, 89 bp, Artificial Sequence
  HDV antigenomic ribozyme
gggtcggcatggcatctccacctcctcgcggtccgacctgggcatccgaaggaggacgcacgtccactcggatggctaagggagagcca

SEQ ID NO: 386 - DNA, 86 bp, Artificial Sequence
  HDV genomic ribozyme
ggccggcatggtcccagcctcctcgctggcgccggctgggcaacattccgaggggaccgtcccctcggtaatggcgaatgggaccc

SEQ ID NO: 387 - DNA, 69 bp, Artificial Sequence
  HDV ribozyme
gatggccggcatggtcccagcctcctcgctggcgccggctgggcaacaccttcgggtggcgaatgggac

SEQ ID NO: 388 - DNA, 78 bp, Artificial Sequence
  HDV ribozyme
ttttggccggcatggtcccagcctcctcgctggcgccggctgggcaacatgcttcggcatggcgaatgggaccccggg

SEQ ID NO: 389 - DNA, 78 bp, Artificial Sequence
  Hatchet
cattcctcagaaaatgacaaacctgtggggcgtaagtagatcttcggatctatgatcgtgcagacgttaaaatcaggt

SEQ ID NO: 390 - DNA, 64 bp, Artificial Sequence
  env25 pistol ribozyme (with CUUCGG loop)
cgtggttagggccacgttaaatagttgcttaagccctaagcgttgatcttcggatcaggtgcaa

SEQ ID NO: 391 - DNA, 60 bp, Artificial Sequence
  HH15 Minimal Hammerhead ribozyme
gggagccccgctgatgaggtcggggagaccgaaagggacttcggtccctacggggctccc

SEQ ID NO: 392 - DNA, 52 bp, Artificial Sequence
  sTRSV WT viral Hammerhead ribozyme
cctgtcaccggatgtgctttccggtctgatgagtccgtgaggacgaaacagg

SEQ ID NO: 393 - DNA, 63 bp, Artificial Sequence
  Hammerhead ribozyme
cgactactgatgagtccgtgaggacgaaacgagtaagctcgtctagtcgcgtgtagcgaagca

SEQ ID NO: 394 - DNA, 49 bp, Artificial Sequence
  Hammerhead ribozyme, smaller scar
cgactactgatgagtccgtgaggacgaaacgagtaagctcgtctagtcg

SEQ ID NO: 395 - DNA, 63 bp, Artificial Sequence
  Hammerhead ribozyme, guide scaffold scar
ccagtactgatgagtccgtgaggacgaaacgagtaagctcgtctactggcgcttttatctcat

SEQ ID NO: 396 - DNA, 77 bp, Artificial Sequence
  Twisted Sister 1
acccgcaaggccgacggcatccgccgccgctggtgcaagtccagccgccccttcgggggcgggcgctcatgggtaac

SEQ ID NO: 397 - DNA, 76 bp, Artificial Sequence
  Env-9 Twister
ggcaataaagcggttacaagcccgcaaaaatagcagagtaatgtcgcgatagcgcggcattaatgcagctttattg

SEQ ID NO: 398 - DNA, 36 bp, Artificial Sequence
  RBMX recruiting motif
ccacccccaccaccacccccacccccaccaccaccc

SEQ ID NO: 399 - DNA, 20 bp, Artificial Sequence
  spacer sequence
agtccctcaagtccttccag

SEQ ID NO: 400 - DNA, 20 bp, Artificial Sequence
  spacer sequence
agcagcagcagcagcagcag

SEQ ID NO: 401 - DNA, 20 bp, Artificial Sequence
  spacer sequence
tcagccgccgccgcaggcac

SEQ ID NO: 402 - DNA, 20 bp, Artificial Sequence
  spacer sequence
agggtcgccatggcggtctc

SEQ ID NO: 403 - DNA, 20 bp, Artificial Sequence
  spacer sequence
tcagcttttccagggtcgcc

SEQ ID NO: 404 - RNA, 20 nt, Artificial Sequence
  spacer sequence
agucccucaaguccuuccag

SEQ ID NO: 405 - RNA, 20 nt, Artificial Sequence
  spacer sequence
agcagcagcagcagcagcag

SEQ ID NO: 406 - RNA, 20 nt, Artificial Sequence
  spacer sequence
ucagccgccgccgcaggcac

SEQ ID NO: 407 - RNA, 20 nt, Artificial Sequence
  spacer sequence
agggucgccauggcggucuc

SEQ ID NO: 408 - RNA, 20 nt, Artificial Sequence
  spacer sequence
ucagcuuuuccagggucgcc

SEQ ID NO: 409 - RNA, 24 nt, Artificial Sequence
  mutant HTT spacer sequence
uucguugaaaagaaaaccuuaccg

SEQ ID NO: 410 - RNA, 24 nt, Artificial Sequence
  mutant HTT spacer sequence
uucuuuucaacgaaaagcagcccc

SEQ ID NO: 411 - RNA, 24 nt, Artificial Sequence
  mutant HTT spacer sequence
uucaacgaaaagcagcccccaagc

SEQ ID NO: 412 - RNA, 24 nt, Artificial Sequence
  mutant HTT spacer sequence
uuccuagcuugaacuuccccuuua

SEQ ID NO: 413 - RNA, 24 nt, Artificial Sequence
  mutant HTT spacer sequence
uucaaauacaauguccagcacaca

SEQ ID NO: 414 - RNA, 24 nt, Artificial Sequence
  mutant HTT spacer sequence
uuccugguaauuuguguuugugug

SEQ ID NO: 415 - RNA, 24 nt, Artificial Sequence
  mutant HTT spacer sequence
uucaucccagugagaaagaucaag

SEQ ID NO: 416 - RNA, 24 nt, Artificial Sequence
  mutant HTT spacer sequence
uucucacugggaugaacuagcagc

SEQ ID NO: 417 - RNA, 24 nt, Artificial Sequence
  mutant HTT spacer sequence
uucaagcuaguaacgaugcuaacg

SEQ ID NO: 418 - RNA, 24 nt, Artificial Sequence
  mutant HTT spacer sequence
uucccgcagcuaggcuaaagaguc

SEQ ID NO: 419 - RNA, 24 nt, Artificial Sequence
  mutant HTT spacer sequence
uucuuugauuguguuucuuauuug

SEQ ID NO: 420 - RNA, 24 nt, Artificial Sequence
  mutant HTT spacer sequence
uucucaucaaauaagaaacacaau

SEQ ID NO: 421 - RNA, 24 nt, Artificial Sequence
  mutant HTT spacer sequence
uucuaaaauacaguauaccuccuc

SEQ ID NO: 422 - RNA, 24 nt, Artificial Sequence
  mutant HTT spacer sequence
uucaaacacagaggagguauacug

SEQ ID NO: 423 - RNA, 24 nt, Artificial Sequence
  mutant HTT spacer sequence
uucugauuguuaaucauaaagucu

SEQ ID NO: 424 - RNA, 24 nt, Artificial Sequence
  mutant HTT spacer sequence
uucuagacuuuaugauuaacaauc

SEQ ID NO: 425 - RNA, 24 nt, Artificial Sequence
  mutant HTT spacer sequence
uuccucauugcacuuccauguugg

SEQ ID NO: 426 - RNA, 24 nt, Artificial Sequence
  mutant HTT spacer sequence
uucauuugggauauuugaccugcg

SEQ ID NO: 427 - RNA, 24 nt, Artificial Sequence
  mutant HTT spacer sequence
uucugaagagcuacaacgcagguc

SEQ ID NO: 428 - RNA, 24 nt, Artificial Sequence
  mutant HTT spacer sequence
uucuuguucucucuuuuucuuugg

SEQ ID NO: 429 - RNA, 24 nt, Artificial Sequence
  mutant HTT spacer sequence
uucaaauggagaauacggguaaca

SEQ ID NO: 430 - RNA, 24 nt, Artificial Sequence
  mutant HTT spacer sequence
uuccaaguaguaguuaguaaucaa

SEQ ID NO: 431 - RNA, 24 nt, Artificial Sequence
  mutant HTT spacer sequence
uucacagcaaauaauuuuggaaag

SEQ ID NO: 432 - RNA, 24 nt, Artificial Sequence
  mutant HTT spacer sequence
uuccaaaauuauuugcugugaauu

SEQ ID NO: 433 - RNA, 24 nt, Artificial Sequence
  mutant HTT spacer sequence
uucuaauucacagcaaauaauuuu

SEQ ID NO: 434 - RNA, 24 nt, Artificial Sequence
  mutant HTT spacer sequence
uuccuaaacuucuaauucacagca

SEQ ID NO: 435 - RNA, 24 nt, Artificial Sequence
  mutant HTT spacer sequence
uucauucucaaguuaguuuuagau

SEQ ID NO: 436 - RNA, 24 nt, Artificial Sequence
  mutant HTT spacer sequence
uucucaaguuaguuuuagauuaga

SEQ ID NO: 437 - RNA, 24 nt, Artificial Sequence
  mutant HTT spacer sequence
uucaguccuuucugcccaccagca

SEQ ID NO: 438 - RNA, 24 nt, Artificial Sequence
  mutant HTT spacer sequence
uuucugcccaccagcacaugcuuu

SEQ ID NO: 439 - RNA, 24 nt, Artificial Sequence
  mutant HTT spacer sequence
uucugcccaccagcacaugcuuuc

SEQ ID NO: 440 - RNA, 24 nt, Artificial Sequence
  mutant HTT spacer sequence
uucuacuuguagauugauuuaggg

SEQ ID NO: 441 - RNA, 24 nt, Artificial Sequence
  mutant HTT spacer sequence
uucucccuaaaucaaucuacaagu

SEQ ID NO: 442 - RNA, 24 nt, Artificial Sequence
  mutant HTT spacer sequence
uuccuagucagucucgccuuaccu

SEQ ID NO: 443 - RNA, 24 nt, Artificial Sequence
  mutant HTT spacer sequence
uucuccugcuccgccugcaccaug

SEQ ID NO: 444 - RNA, 24 nt, Artificial Sequence
  mutant HTT spacer sequence
uucccuaaaaacaaaaacauccau

SEQ ID NO: 445 - RNA, 24 nt, Artificial Sequence
  mutant HTT spacer sequence
uuuuagggaaucagaggcaaucau

SEQ ID NO: 446 - RNA, 24 nt, Artificial Sequence
  mutant HTT spacer sequence
uucuauugucuguccccuuacccg

SEQ ID NO: 447 - RNA, 24 nt, Artificial Sequence
  mutant HTT spacer sequence
uucacucacuugcuuuucuauugu

SEQ ID NO: 448 - RNA, 24 nt, Artificial Sequence
  mutant HTT spacer sequence
uucaugcugccaagggaugcugac

SEQ ID NO: 449 - RNA, 24 nt, Artificial Sequence
  mutant HTT spacer sequence
uucuagcguugaaguacugucccc

SEQ ID NO: 450 - RNA, 24 nt, Artificial Sequence
  mutant HTT spacer sequence
uucuucuagcguugaaguacuguc

SEQ ID NO: 451 - RNA, 24 nt, Artificial Sequence
  mutant HTT spacer sequence
uuccucacugaggaugaaauggca

SEQ ID NO: 452 - RNA, 24 nt, Artificial Sequence
  mutant HTT spacer sequence
uucauccucagugaggaaggugau

SEQ ID NO: 453 - RNA, 24 nt, Artificial Sequence
  mutant HTT spacer sequence
uucaucccacagugguuugccuau

SEQ ID NO: 454 - RNA, 24 nt, Artificial Sequence
  mutant HTT spacer sequence
uuccauugcucccagcauuauaau

SEQ ID NO: 455 - RNA, 24 nt, Artificial Sequence
  mutant HTT spacer sequence
uucucuucccccgagucccuuugg

SEQ ID NO: 456 - RNA, 24 nt, Artificial Sequence
  mutant HTT spacer sequence
uucccccgagucccuuuggcuccc

SEQ ID NO: 457 - RNA, 24 nt, Artificial Sequence
  mutant HTT spacer sequence
uucuauccuguccccaaguucauc

SEQ ID NO: 458 - RNA, 24 nt, Artificial Sequence
  mutant HTT spacer sequence
uucuggugaugacaauuuauuaau

SEQ ID NO: 459 - RNA, 24 nt, Artificial Sequence
  mutant HTT spacer sequence
uucuagucccaaaucugggugcua

SEQ ID NO: 460 - RNA, 24 nt, Artificial Sequence
  mutant HTT spacer sequence
uucuguacacacguguccuugaca

SEQ ID NO: 461 - RNA, 24 nt, Artificial Sequence
  mutant HTT spacer sequence
uucagaaugccucaucuggucaaa

SEQ ID NO: 462 - RNA, 24 nt, Artificial Sequence
  mutant HTT spacer sequence
uucccgcugcgccguuucugcaua

SEQ ID NO: 463 - RNA, 24 nt, Artificial Sequence
  mutant HTT spacer sequence
uucugccagcgcauguguccuuuc

SEQ ID NO: 464 - RNA, 24 nt, Artificial Sequence
  mutant HTT spacer sequence
uuccccuugaaaggacacaugcgc

SEQ ID NO: 465 - RNA, 24 nt, Artificial Sequence
  mutant HTT spacer sequence
uuccucaucggagagcacacccug

SEQ ID NO: 466 - RNA, 24 nt, Artificial Sequence
  mutant HTT spacer sequence
uucaguugcguugauuugauuuuu

SEQ ID NO: 467 - RNA, 24 nt, Artificial Sequence
  mutant HTT spacer sequence
uucagagguucgguggacacaggc

SEQ ID NO: 468 - RNA, 24 nt, Artificial Sequence
  mutant HTT spacer sequence
uucgguggacacaggcagcugccc

SEQ ID NO: 469 - RNA, 24 nt, Artificial Sequence
  mutant HTT spacer sequence
uucugggugcuggagauaucaugg

SEQ ID NO: 470 - RNA, 24 nt, Artificial Sequence
  mutant HTT spacer sequence
uucuaccaauuuucuauuuuugga

SEQ ID NO: 471 - RNA, 24 nt, Artificial Sequence
  mutant HTT spacer sequence
uuccaccucugaaaccccgaaauu

SEQ ID NO: 472 - RNA, 24 nt, Artificial Sequence
  mutant HTT spacer sequence
uucucaaauuucgggguuucagag

SEQ ID NO: 473 - RNA, 24 nt, Artificial Sequence
  mutant HTT spacer sequence
uucgcuaugaaggccuuuaacaaa

SEQ ID NO: 474 - RNA, 24 nt, Artificial Sequence
  mutant HTT spacer sequence
uucagguucgcuaugaaggccuuu

SEQ ID NO: 475 - RNA, 24 nt, Artificial Sequence
  mutant HTT spacer sequence
uucauagcgaaccugaagucaagc

SEQ ID NO: 476 - RNA, 24 nt, Artificial Sequence
  mutant HTT spacer sequence
uucccccuguuagcaaaaacgaag

SEQ ID NO: 477 - RNA, 24 nt, Artificial Sequence
  mutant HTT spacer sequence
uucguuuuugcuaacagggggaaa

SEQ ID NO: 478 - RNA, 24 nt, Artificial Sequence
  mutant HTT spacer sequence
uucccauuggaucucucagcccau

SEQ ID NO: 479 - RNA, 24 nt, Artificial Sequence
  mutant HTT spacer sequence
uuccggccaaaaucaaagcaucuu

SEQ ID NO: 480 - RNA, 24 nt, Artificial Sequence
  mutant HTT spacer sequence
uucucuaacaaaccccccuucucu

SEQ ID NO: 481 - RNA, 24 nt, Artificial Sequence
  mutant HTT spacer sequence
uuccgugcuguucugaagauccag

SEQ ID NO: 482 - RNA, 24 nt, Artificial Sequence
  mutant HTT spacer sequence
uucagaacagcacggaaaaguuug

SEQ ID NO: 483 - RNA, 24 nt, Artificial Sequence
  mutant HTT spacer sequence
uucuccgcucagccuuggauguuc

SEQ ID NO: 484 - RNA, 24 nt, Artificial Sequence
  mutant HTT spacer sequence
uccgcucagccuuggauguucuuu

SEQ ID NO: 485 - RNA, 24 nt, Artificial Sequence
  mutant HTT spacer sequence
uuccugcaucagcuuuauuuguuc

SEQ ID NO: 486 - RNA, 24 nt, Artificial Sequence
  mutant HTT spacer sequence
uucuggccauuuugaggguucuga

SEQ ID NO: 487 - RNA, 24 nt, Artificial Sequence
  mutant HTT spacer sequence
cucaaaauggccagaauucccgau

SEQ ID NO: 488 - RNA, 24 nt, Artificial Sequence
  mutant HTT spacer sequence
uucaacucuuaucuugaaaccaau

SEQ ID NO: 489 - RNA, 24 nt, Artificial Sequence
  mutant HTT spacer sequence
uucaagauaagaguugaaauaauu

SEQ ID NO: 490 - RNA, 24 nt, Artificial Sequence
  mutant HTT spacer sequence
uuccucuguggcagaggggauggc

SEQ ID NO: 491 - RNA, 24 nt, Artificial Sequence
  mutant HTT spacer sequence
cucuguggcagaggggauggcugc

SEQ ID NO: 492 - RNA, 24 nt, Artificial Sequence
  mutant HTT spacer sequence
uucucucguggugacaggucacag

SEQ ID NO: 493 - RNA, 24 nt, Artificial Sequence
  mutant HTT spacer sequence
uucgcaguuuuugcuugaguugua

SEQ ID NO: 494 - RNA, 24 nt, Artificial Sequence
  mutant HTT spacer sequence
uucagacccuaauccugcagcccc

SEQ ID NO: 495 - RNA, 24 nt, Artificial Sequence
  mutant HTT spacer sequence
uucucaugaagcaaagcaagccuc

SEQ ID NO: 496 - RNA, 24 nt, Artificial Sequence
  mutant HTT spacer sequence
uucaugagaaccuagaccuugcug

SEQ ID NO: 497 - RNA, 24 nt, Artificial Sequence
  mutant HTT spacer sequence
uucuugguuuugacauggacgcga

SEQ ID NO: 498 - RNA, 24 nt, Artificial Sequence
  mutant HTT spacer sequence
uucucuuuguucuguuguaauuuu

SEQ ID NO: 499 - RNA, 24 nt, Artificial Sequence
  mutant HTT spacer sequence
uucauauccgccuauaccauacaa

SEQ ID NO: 500 - RNA, 24 nt, Artificial Sequence
  mutant HTT spacer sequence
uucuaccuucauauccgccuauac

SEQ ID NO: 501 - RNA, 24 nt, Artificial Sequence
  mutant HTT spacer sequence
uuccugagcaauggcgugagaaac

SEQ ID NO: 502 - RNA, 24 nt, Artificial Sequence
  mutant HTT spacer sequence
uucucacgccauugcucaggaaca

SEQ ID NO: 503 - RNA, 24 nt, Artificial Sequence
  mutant HTT spacer sequence
uucaucuaccgcaucaacacacua

SEQ ID NO: 504 - RNA, 24 nt, Artificial Sequence
  mutant HTT spacer sequence
uucaagaagccugauaaaaucucu

SEQ ID NO: 505 - RNA, 24 nt, Artificial Sequence
  mutant HTT spacer sequence
uucugucagcgucacauacaucag

SEQ ID NO: 506 - RNA, 24 nt, Artificial Sequence
  mutant HTT spacer sequence
uucacagcuaucuucucaucaaua

SEQ ID NO: 507 - RNA, 24 nt, Artificial Sequence
  mutant HTT spacer sequence
uucuucacagcuaucuucucauca

SEQ ID NO: 508 - RNA, 24 nt, Artificial Sequence
  mutant HTT spacer sequence
uucuucucuuuguucuguuguaau

SEQ ID NO: 509 - RNA, 20 nt, Artificial Sequence
  HTT spacer sequence ATCN PAM
aaagaaaaaaacauugcccu

SEQ ID NO: 510 - RNA, 20 nt, Artificial Sequence
  HTT spacer sequence ATCN PAM
uaaauugggugugcuagccc

SEQ ID NO: 511 - RNA, 20 nt, Artificial Sequence
  HTT spacer sequence ATCN PAM
agugggggggccccuccaug

SEQ ID NO: 512 - RNA, 20 nt, Artificial Sequence
  HTT spacer sequence ATCN PAM
uuccauucauccuauccaac

SEQ ID NO: 513 - RNA, 20 nt, Artificial Sequence
  HTT spacer sequence ATCN PAM
uauccaacuauucuacauua

SEQ ID NO: 514 - RNA, 20 nt, Artificial Sequence
  HTT spacer sequence ATCN PAM
aacuauucuacauuaauuac

SEQ ID NO: 515 - RNA, 20 nt, Artificial Sequence
  HTT spacer sequence ATCN PAM
auucagaucagucaaaaaau

SEQ ID NO: 516 - RNA, 20 nt, Artificial Sequence
  HTT spacer sequence ATCN PAM
gaauagauuaagcacaagua

SEQ ID NO: 517 - RNA, 20 nt, Artificial Sequence
  HTT spacer sequence ATCN PAM
gucaaaaaauauccauucac

SEQ ID NO: 518 - RNA, 20 nt, Artificial Sequence
  HTT spacer sequence ATCN PAM
auucacuuuugucuuccucc

SEQ ID NO: 519 - RNA, 20 nt, Artificial Sequence
  HTT spacer sequence ATCN PAM
auaucuaaguuuuuuuugca

SEQ ID NO: 520 - RNA, 20 nt, Artificial Sequence
  HTT spacer sequence ATCN PAM
aaguuuuuuuugcaauccaa

SEQ ID NO: 521 - RNA, 20 nt, Artificial Sequence
  HTT spacer sequence ATCN PAM
aacugaaaaaagacaaaagu

SEQ ID NO: 522 - RNA, 20 nt, Artificial Sequence
  HTT spacer sequence ATCN PAM
uuucaccaaaugggacucau

SEQ ID NO: 523 - RNA, 20 nt, Artificial Sequence
  HTT spacer sequence ATCN PAM
gaugacaguccagugccuuc

SEQ ID NO: 524 - RNA, 20 nt, Artificial Sequence
  HTT spacer sequence ATCN PAM
gauuuuacaugagucccauu

SEQ ID NO: 525 - RNA, 20 nt, Artificial Sequence
  HTT spacer sequence ATCN PAM
cagcccugcuuccuccuggc

SEQ ID NO: 526 - RNA, 20 nt, Artificial Sequence
  HTT spacer sequence ATCN PAM
gcauaguuuaaacguucaca

SEQ ID NO: 527 - RNA, 20 nt, Artificial Sequence
  HTT spacer sequence ATCN PAM
guuaaggcacugagguguga

SEQ ID NO: 528 - RNA, 20 nt, Artificial Sequence
  HTT spacer sequence ATCN PAM
ccucacaucacagugcagca

SEQ ID NO: 529 - RNA, 20 nt, Artificial Sequence
  HTT spacer sequence ATCN PAM
cagugcagcacaagugcacc

SEQ ID NO: 530 - RNA, 20 nt, Artificial Sequence
  HTT spacer sequence ATCN PAM
agacaacaaauggggggcac

SEQ ID NO: 531 - RNA, 20 nt, Artificial Sequence
  HTT spacer sequence ATCN PAM
ccccccuggggcgcaggcag

SEQ ID NO: 532 - RNA, 20 nt, Artificial Sequence
  HTT spacer sequence ATCN PAM
uucauccucagggggaccug

SEQ ID NO: 533 - RNA, 20 nt, Artificial Sequence
  HTT spacer sequence ATCN PAM
ucagggggaccuguaaccag

SEQ ID NO: 534 - RNA, 20 nt, Artificial Sequence
  HTT spacer sequence ATCN PAM
gguuacaggucccccugagg

SEQ ID NO: 535 - RNA, 20 nt, Artificial Sequence
  HTT spacer sequence ATCN PAM
acggggaugccugaggcgua

SEQ ID NO: 536 - RNA, 20 nt, Artificial Sequence
  HTT spacer sequence ATCN PAM
ccguggaucugguuacaggu

SEQ ID NO: 537 - RNA, 20 nt, Artificial Sequence
  HTT spacer sequence ATCN PAM
cagcuuccaguuccuccagc

SEQ ID NO: 538 - RNA, 20 nt, Artificial Sequence
  HTT spacer sequence ATCN PAM
cuguccaagacucacaguaa

SEQ ID NO: 539 - RNA, 20 nt, Artificial Sequence
  HTT spacer sequence ATCN PAM
ucucuguccaagacucacag

SEQ ID NO: 540 - RNA, 20 nt, Artificial Sequence
  HTT spacer sequence ATCN PAM
ccucacaugcucccaacaau

SEQ ID NO: 541 - RNA, 20 nt, Artificial Sequence
  HTT spacer sequence ATCN PAM
ccaccugacacuagggaaac

SEQ ID NO: 542 - RNA, 20 nt, Artificial Sequence
  HTT spacer sequence ATCN PAM
gcucaccauuauucaccuuu

SEQ ID NO: 543 - RNA, 20 nt, Artificial Sequence
  HTT spacer sequence ATCN PAM
gagagcugguaagugacagc

SEQ ID NO: 544 - RNA, 20 nt, Artificial Sequence
  HTT spacer sequence ATCN PAM
gguauucugggaauucuugg

SEQ ID NO: 545 - RNA, 20 nt, Artificial Sequence
  HTT spacer sequence ATCN PAM
cuccucuuaaggucgaacaa

SEQ ID NO: 546 - RNA, 20 nt, Artificial Sequence
  HTT spacer sequence ATCN PAM
auuacgugaagcucucgacu

SEQ ID NO: 547 - RNA, 20 nt, Artificial Sequence
  HTT spacer sequence ATCN PAM
cucagggcucuccuucccug

SEQ ID NO: 548 - RNA, 20 nt, Artificial Sequence
  HTT spacer sequence ATCN PAM
cucccugcgccgacucuguc

SEQ ID NO: 549 - RNA, 20 nt, Artificial Sequence
  HTT spacer sequence ATCN PAM
gcacucaggcuguggucagc

SEQ ID NO: 550 - RNA, 20 nt, Artificial Sequence
  HTT spacer sequence ATCN PAM
aggucaugccaccccuccca

SEQ ID NO: 551 - RNA, 20 nt, Artificial Sequence
  HTT spacer sequence ATCN PAM
ggaacacuggcuuuccagca

SEQ ID NO: 552 - RNA, 20 nt, Artificial Sequence
  HTT spacer sequence ATCN PAM
gcugaaaacgaauucaucag

SEQ ID NO: 553 - RNA, 20 nt, Artificial Sequence
  HTT spacer sequence ATCN PAM
guagccuggcuagaaguuau

SEQ ID NO: 554 - RNA, 20 nt, Artificial Sequence
  HTT spacer sequence ATCN PAM
cucaaaucccaagucccugg

SEQ ID NO: 555 - RNA, 20 nt, Artificial Sequence
  HTT spacer sequence ATCN PAM
caagucccuggaacaggguc

SEQ ID NO: 556 - RNA, 20 nt, Artificial Sequence
  HTT spacer sequence ATCN PAM
cccagaaguauacagcuggg

SEQ ID NO: 557 - RNA, 20 nt, Artificial Sequence
  HTT spacer sequence ATCN PAM
cugucaucgccccucacccu

SEQ ID NO: 558 - RNA, 20 nt, Artificial Sequence
  HTT spacer sequence ATCN PAM
ccccucacccucagccacca

SEQ ID NO: 559 - RNA, 20 nt, Artificial Sequence
  HTT spacer sequence ATCN PAM
cugcacuucgggaccaaaca

SEQ ID NO: 560 - RNA, 20 nt, Artificial Sequence
  HTT spacer sequence ATCN PAM
guuuggucccgaagugcaga

SEQ ID NO: 561 - RNA, 20 nt, Artificial Sequence
  HTT spacer sequence ATCN PAM
agaccuugccccacccccca

SEQ ID NO: 562 - RNA, 20 nt, Artificial Sequence
  HTT spacer sequence ATCN PAM
gccacuucguuuccagggug

SEQ ID NO: 563 - RNA, 20 nt, Artificial Sequence
  HTT spacer sequence ATCN PAM
cuaaucugggccuggaaugu

SEQ ID NO: 564 - RNA, 20 nt, Artificial Sequence
  HTT spacer sequence ATCN PAM
gggccuggaauguuuacagg

SEQ ID NO: 565 - RNA, 20 nt, Artificial Sequence
  HTT spacer sequence ATCN PAM
cucaguaaggcagauuuaua

SEQ ID NO: 566 - RNA, 20 nt, Artificial Sequence
  HTT spacer sequence ATCN PAM
gccuuacugagugaugugua

SEQ ID NO: 567 - RNA, 20 nt, Artificial Sequence
  HTT spacer sequence ATCN PAM
acccagccagcauaacccac

SEQ ID NO: 568 - RNA, 20 nt, Artificial Sequence
  HTT spacer sequence ATCN PAM
uugaggaggaauugacccuc

SEQ ID NO: 569 - RNA, 20 nt, Artificial Sequence
  HTT spacer sequence ATCN PAM
ugagugauauuaauaugcuc

SEQ ID NO: 570 - RNA, 20 nt, Artificial Sequence
  HTT spacer sequence ATCN PAM
cucaggaugaauuuguguuu

SEQ ID NO: 571 - RNA, 20 nt, Artificial Sequence
  HTT spacer sequence ATCN PAM
ccaaagagcauauuaauauc

SEQ ID NO: 572 - RNA, 20 nt, Artificial Sequence
  HTT spacer sequence ATCN PAM
cucccagguccagguaagug

SEQ ID NO: 573 - RNA, 20 nt, Artificial Sequence
  HTT spacer sequence ATCN PAM
auagaaagucauaaccaagc

SEQ ID NO: 574 - RNA, 20 nt, Artificial Sequence
  HTT spacer sequence ATCN PAM
gaaacaaaagucucagugcu

SEQ ID NO: 575 - RNA, 20 nt, Artificial Sequence
  HTT spacer sequence ATCN PAM
auaaagcaggacaagcugac

SEQ ID NO: 576 - RNA, 20 nt, Artificial Sequence
  HTT spacer sequence ATCN PAM
ugacuuugaacacucccagg

SEQ ID NO: 577 - RNA, 20 nt, Artificial Sequence
  HTT spacer sequence ATCN PAM
uguaaguauuauccugacuu

SEQ ID NO: 578 - RNA, 20 nt, Artificial Sequence
  HTT spacer sequence ATCN PAM
gaacacuuuauaccaagaaa

SEQ ID NO: 579 - RNA, 20 nt, Artificial Sequence
  HTT spacer sequence ATCN PAM
uauugguguuuaaaagacug

SEQ ID NO: 580 - RNA, 20 nt, Artificial Sequence
  HTT spacer sequence ATCN PAM
gucuuuuaaacaccaauaug

SEQ ID NO: 581 - RNA, 20 nt, Artificial Sequence
  HTT spacer sequence ATCN PAM
ucacaccuggcuaauuuuug

SEQ ID NO: 582 - RNA, 20 nt, Artificial Sequence
  HTT spacer sequence ATCN PAM
cagcuacucgggaggcuaag

SEQ ID NO: 583 - RNA, 20 nt, Artificial Sequence
  HTT spacer sequence ATCN PAM
uggcucacugcaaccuccgc

SEQ ID NO: 584 - RNA, 20 nt, Artificial Sequence
  HTT spacer sequence ATCN PAM
cgccacugcacucaagccug

SEQ ID NO: 585 - RNA, 20 nt, Artificial Sequence
  HTT spacer sequence ATCN PAM
ugccacugcucucuagccug

SEQ ID NO: 586 - RNA, 20 nt, Artificial Sequence
  HTT spacer sequence ATCN PAM
caccuuacugcagccuccaa

SEQ ID NO: 587 - RNA, 20 nt, Artificial Sequence
  HTT spacer sequence ATCN PAM
cuuaagcucagggguuggag

SEQ ID NO: 588 - RNA, 20 nt, Artificial Sequence
  HTT spacer sequence ATCN PAM
uccugaguagcugagacuac

SEQ ID NO: 589 - RNA, 20 nt, Artificial Sequence
  HTT spacer sequence ATCN PAM
ccaccaccacccgacccaaa

SEQ ID NO: 590 - RNA, 20 nt, Artificial Sequence
  HTT spacer sequence ATCN PAM
cagugagacccugucucuac

SEQ ID NO: 591 - RNA, 20 nt, Artificial Sequence
  HTT spacer sequence ATCN PAM
uagugcuuugggaggcugag

SEQ ID NO: 592 - RNA, 20 nt, Artificial Sequence
  HTT spacer sequence ATCN PAM
aaacaaaacaaagcuggcca

SEQ ID NO: 593 - RNA, 20 nt, Artificial Sequence
  HTT spacer sequence ATCN PAM
uauaaagguuaaccagacag

SEQ ID NO: 594 - RNA, 20 nt, Artificial Sequence
  HTT spacer sequence ATCN PAM
gcagucauugggagacccgg

SEQ ID NO: 595 - RNA, 20 nt, Artificial Sequence
  HTT spacer sequence ATCN PAM
acuuuccaggguagcucccu

SEQ ID NO: 596 - RNA, 20 nt, Artificial Sequence
  HTT spacer sequence ATCN PAM
gcucucccucuggccaccca

SEQ ID NO: 597 - RNA, 20 nt, Artificial Sequence
  HTT spacer sequence ATCN PAM
gagagaccagaaccuaggac

SEQ ID NO: 598 - RNA, 20 nt, Artificial Sequence
  HTT spacer sequence ATCN PAM
acuggucaguuugaucagug

SEQ ID NO: 599 - RNA, 20 nt, Artificial Sequence
  HTT spacer sequence ATCN PAM
aacugaccaguagaucugag

SEQ ID NO: 600 - RNA, 20 nt, Artificial Sequence
  HTT spacer sequence ATCN PAM
guggauuuaucucacacugu

SEQ ID NO: 601 - RNA, 20 nt, Artificial Sequence
  HTT spacer sequence ATCN PAM
acugaucaaacugaccagua

SEQ ID NO: 602 - RNA, 20 nt, Artificial Sequence
  HTT spacer sequence ATCN PAM
cacacuguccucaguguugu

SEQ ID NO: 603 - RNA, 20 nt, Artificial Sequence
  HTT spacer sequence ATCN PAM
aguccaaagcaguuauuuug

SEQ ID NO: 604 - RNA, 20 nt, Artificial Sequence
  HTT spacer sequence ATCN PAM
uucucuacuuauuuuugauu

SEQ ID NO: 605 - RNA, 20 nt, Artificial Sequence
  HTT spacer sequence ATCN PAM
aaaauaaguagagaaugauu

SEQ ID NO: 606 - RNA, 20 nt, Artificial Sequence
  HTT spacer sequence ATCN PAM
gcucagaggcagaauuccaa

SEQ ID NO: 607 - RNA, 20 nt, Artificial Sequence
  HTT spacer sequence ATCN PAM
guuugggaggccucuaaugc

SEQ ID NO: 608 - RNA, 20 nt, Artificial Sequence
  HTT spacer sequence ATCN PAM
ucagugacuagcauuagagg

SEQ ID NO: 609 - RNA, 20 nt, Artificial Sequence
  HTT spacer sequence ATCN PAM
guagauggaucguguguuca

SEQ ID NO: 610 - RNA, 20 nt, Artificial Sequence
  HTT spacer sequence ATCN PAM
acagaugccccuuauccuca

SEQ ID NO: 611 - RNA, 20 nt, Artificial Sequence
  HTT spacer sequence ATCN PAM
aucuacagaugccccuuauc

SEQ ID NO: 612 - RNA, 20 nt, Artificial Sequence
  HTT spacer sequence ATCN PAM
uguguucagggugacccuag

SEQ ID NO: 613 - RNA, 20 nt, Artificial Sequence
  HTT spacer sequence ATCN PAM
auuuuauacucuccugcagg

SEQ ID NO: 614 - RNA, 20 nt, Artificial Sequence
  HTT spacer sequence ATCN PAM
cuggauaccaggauccagag

SEQ ID NO: 615 - RNA, 20 nt, Artificial Sequence
  HTT spacer sequence ATCN PAM
agggauuccuauauuacagg

SEQ ID NO: 616 - RNA, 20 nt, Artificial Sequence
  HTT spacer sequence ATCN PAM
ugguauccagggauuccuau

SEQ ID NO: 617 - RNA, 20 nt, Artificial Sequence
  HTT spacer sequence ATCN PAM
agagguagccgucagaacau

SEQ ID NO: 618 - RNA, 20 nt, Artificial Sequence
  HTT spacer sequence ATCN PAM
gggaacccucuaaacuuugu

SEQ ID NO: 619 - RNA, 20 nt, Artificial Sequence
  HTT spacer sequence ATCN PAM
uccuugcucagccuucccag

SEQ ID NO: 620 - RNA, 20 nt, Artificial Sequence
  HTT spacer sequence ATCN PAM
cuugaacucaggaguucaag

SEQ ID NO: 621 - RNA, 20 nt, Artificial Sequence
  HTT spacer sequence ATCN PAM
uaccgcauuuuucauuuccc

SEQ ID NO: 622 - RNA, 20 nt, Artificial Sequence
  HTT spacer sequence ATCN PAM
cauuugauuaguuucccuca

SEQ ID NO: 623 - RNA, 20 nt, Artificial Sequence
  HTT spacer sequence ATCN PAM
aaugagaugaacaaagucuc

SEQ ID NO: 624 - RNA, 20 nt, Artificial Sequence
  HTT spacer sequence ATCN PAM
cugcugugucccgaggugug

SEQ ID NO: 625 - RNA, 20 nt, Artificial Sequence
  HTT spacer sequence ATCN PAM
aagacacucacaccucggga

SEQ ID NO: 626 - RNA, 20 nt, Artificial Sequence
  HTT spacer sequence ATCN PAM
aguaaaaaucaaagacacuc

SEQ ID NO: 627 - RNA, 20 nt, Artificial Sequence
  HTT spacer sequence ATCN PAM
agaccacccggcuaacacgg

SEQ ID NO: 628 - RNA, 20 nt, Artificial Sequence
  HTT spacer sequence ATCN PAM
ccugaccuugugauccaccu

SEQ ID NO: 629 - RNA, 20 nt, Artificial Sequence
  HTT spacer sequence ATCN PAM
caaggucaggagaucgagac

SEQ ID NO: 630 - RNA, 20 nt, Artificial Sequence
  HTT spacer sequence ATCN PAM
accugccucggccucccaaa

SEQ ID NO: 631 - RNA, 20 nt, Artificial Sequence
  HTT spacer sequence ATCN PAM
cagcacuuugggaggccgag

SEQ ID NO: 632 - RNA, 20 nt, Artificial Sequence
  HTT spacer sequence ATCN PAM
caaaaaaaaaaaaacagugu

SEQ ID NO: 633 - RNA, 20 nt, Artificial Sequence
  HTT spacer sequence ATCN PAM
ggccauggcacuccagccug

SEQ ID NO: 634 - RNA, 20 nt, Artificial Sequence
  HTT spacer sequence ATCN PAM
cggcucccugaaccuccagg

SEQ ID NO: 635 - RNA, 20 nt, Artificial Sequence
  HTT spacer sequence ATCN PAM
ccugaaccuggagguucagg

SEQ ID NO: 636 - RNA, 20 nt, Artificial Sequence
  HTT spacer sequence ATCN PAM
cagcuacucgggaggcugag

SEQ ID NO: 637 - RNA, 20 nt, Artificial Sequence
  HTT spacer sequence ATCN PAM
aggcgugguggcacaugccu

SEQ ID NO: 638 - RNA, 20 nt, Artificial Sequence
  HTT spacer sequence ATCN PAM
ggcguucaagaccagcccga

SEQ ID NO: 639 - RNA, 20 nt, Artificial Sequence
  HTT spacer sequence ATCN PAM
caggugauccguccgccuug

SEQ ID NO: 640 - RNA, 20 nt, Artificial Sequence
  HTT spacer sequence ATCN PAM
ccugagaucaggcguucaag

SEQ ID NO: 641 - RNA, 20 nt, Artificial Sequence
  HTT spacer sequence ATCN PAM
guccgccuuggccucccaaa

SEQ ID NO: 642 - RNA, 20 nt, Artificial Sequence
  HTT spacer sequence ATCN PAM
cagcacuuugggaggccaag

SEQ ID NO: 643 - RNA, 20 nt, Artificial Sequence
  HTT spacer sequence ATCN PAM
cacuggccgggcacaguggc

SEQ ID NO: 644 - RNA, 20 nt, Artificial Sequence
  HTT spacer sequence ATCN PAM
cugccucagccucccaagca

SEQ ID NO: 645 - RNA, 20 nt, Artificial Sequence
  HTT spacer sequence ATCN PAM
uggcucacugcaaccuccac

SEQ ID NO: 646 - RNA, 20 nt, Artificial Sequence
  HTT spacer sequence ATCN PAM
caaaaaauaaauaauuuuua

SEQ ID NO: 647 - RNA, 20 nt, Artificial Sequence
  HTT spacer sequence ATCN PAM
gggcugggugggguggcuca

SEQ ID NO: 648 - RNA, 20 nt, Artificial Sequence
  HTT spacer sequence ATCN PAM
cagcacuuugggaggccgaa

SEQ ID NO: 649 - RNA, 20 nt, Artificial Sequence
  HTT spacer sequence ATCN PAM
accagcuucggccucccaaa

SEQ ID NO: 650 - RNA, 20 nt, Artificial Sequence
  HTT spacer sequence ATCN PAM
cuugagguugggaguucaug

SEQ ID NO: 651 - RNA, 20 nt, Artificial Sequence
  HTT spacer sequence ATCN PAM
ggcuugucaugaacucccaa

SEQ ID NO: 652 - RNA, 20 nt, Artificial Sequence
  HTT spacer sequence ATCN PAM
acauagagaaaccccaucuc

SEQ ID NO: 653 - RNA, 20 nt, Artificial Sequence
  HTT spacer sequence ATCN PAM
cuacuaaaaagacaaaauua

SEQ ID NO: 654 - RNA, 20 nt, Artificial Sequence
  HTT spacer sequence ATCN PAM
uagcuacuggggaaucugag

SEQ ID NO: 655 - RNA, 20 nt, Artificial Sequence
  HTT spacer sequence ATCN PAM
gaggcaggagaaucacuuga

SEQ ID NO: 656 - RNA, 20 nt, Artificial Sequence
  HTT spacer sequence ATCN PAM
cuugaacccaggagggagag

SEQ ID NO: 657 - RNA, 20 nt, Artificial Sequence
  HTT spacer sequence ATCN PAM
caggucacugcaaccucucc

SEQ ID NO: 658 - RNA, 20 nt, Artificial Sequence
  HTT spacer sequence ATCN PAM
ucucaggucacugcaaccuc

SEQ ID NO: 659 - RNA, 20 nt, Artificial Sequence
  HTT spacer sequence ATCN PAM
guugaucuuuuccuuuaugc

SEQ ID NO: 660 - RNA, 20 nt, Artificial Sequence
  HTT spacer sequence ATCN PAM
acagauucaacuauauauau

SEQ ID NO: 661 - RNA, 20 nt, Artificial Sequence
  HTT spacer sequence ATCN PAM
uuuccuuuaugcuuuagugc

SEQ ID NO: 662 - RNA, 20 nt, Artificial Sequence
  HTT spacer sequence ATCN PAM
ucaugaccuuggguaaaggg

SEQ ID NO: 663 - RNA, 20 nt, Artificial Sequence
  HTT spacer sequence ATCN PAM
aucaucuuucacauuuaggu

SEQ ID NO: 664 - RNA, 20 nt, Artificial Sequence
  HTT spacer sequence ATCN PAM
ucuuucacauuuaggucuau

SEQ ID NO: 665 - RNA, 20 nt, Artificial Sequence
  HTT spacer sequence ATCN PAM
uucacauuuaggucuauaau

SEQ ID NO: 666 - RNA, 20 nt, Artificial Sequence
  HTT spacer sequence ATCN PAM
auucuuuaauuauagaccua

SEQ ID NO: 667 - RNA, 20 nt, Artificial Sequence
  HTT spacer sequence ATCN PAM
cacaccauacacaaaaauca

SEQ ID NO: 668 - RNA, 20 nt, Artificial Sequence
  HTT spacer sequence ATCN PAM
aguuguucuguauuaacuuc

SEQ ID NO: 669 - RNA, 20 nt, Artificial Sequence
  HTT spacer sequence ATCN PAM
ugguuauaaauuuaguguau

SEQ ID NO: 670 - RNA, 20 nt, Artificial Sequence
  HTT spacer sequence ATCN PAM
uaccuugauucuauauuccu

SEQ ID NO: 671 - RNA, 20 nt, Artificial Sequence
  HTT spacer sequence ATCN PAM
agguaugauacacggacacu

SEQ ID NO: 672 - RNA, 20 nt, Artificial Sequence
  HTT spacer sequence ATCN PAM
uugagcggccaguaccacac

SEQ ID NO: 673 - RNA, 20 nt, Artificial Sequence
  HTT spacer sequence ATCN PAM
uccugccacugcauuccagc

SEQ ID NO: 674 - RNA, 20 nt, Artificial Sequence
  HTT spacer sequence ATCN PAM
ucccaccucagccuccugag

SEQ ID NO: 675 - RNA, 20 nt, Artificial Sequence
  HTT spacer sequence ATCN PAM
cagcacuuugggaggcuugg

SEQ ID NO: 676 - RNA, 20 nt, Artificial Sequence
  HTT spacer sequence ATCN PAM
uaguccguuuguguugcuau

SEQ ID NO: 677 - RNA, 20 nt, Artificial Sequence
  HTT spacer sequence ATCN PAM
agccucagguauuccuuaua

SEQ ID NO: 678 - RNA, 20 nt, Artificial Sequence
  HTT spacer sequence ATCN PAM
ggugagagccucagguuuuu

SEQ ID NO: 679 - RNA, 20 nt, Artificial Sequence
  HTT spacer sequence ATCN PAM
ggacacacuggguccucuuc

SEQ ID NO: 680 - RNA, 20 nt, Artificial Sequence
  HTT spacer sequence ATCN PAM
ugucaucuggacacacuggg

SEQ ID NO: 681 - RNA, 20 nt, Artificial Sequence
  HTT spacer sequence ATCN PAM
cucuugcuuuuucucucauc

SEQ ID NO: 682 - RNA, 20 nt, Artificial Sequence
  HTT spacer sequence ATCN PAM
uuucaccucagacuccugag

SEQ ID NO: 683 - RNA, 20 nt, Artificial Sequence
  HTT spacer sequence ATCN PAM
cuugagcccagaaguucgag

SEQ ID NO: 684 - RNA, 20 nt, Artificial Sequence
  HTT spacer sequence ATCN PAM
uccugccucagucugccaag

SEQ ID NO: 685 - RNA, 20 nt, Artificial Sequence
  HTT spacer sequence ATCN PAM
cuugauagcccggguggugg

SEQ ID NO: 686 - RNA, 20 nt, Artificial Sequence
  HTT spacer sequence ATCN PAM
agugauccuccugccucagu

SEQ ID NO: 687 - RNA, 20 nt, Artificial Sequence
  HTT spacer sequence ATCN PAM
uggcucgcugcaaccuccac

SEQ ID NO: 688 - RNA, 20 nt, Artificial Sequence
  HTT spacer sequence ATCN PAM
ugcuacugcaguccagccua

SEQ ID NO: 689 - RNA, 20 nt, Artificial Sequence
  HTT spacer sequence ATCN PAM
uuuccuuccuuuucagugaa

SEQ ID NO: 690 - RNA, 20 nt, Artificial Sequence
  HTT spacer sequence ATCN PAM
ccucucaguagcacuucugc

SEQ ID NO: 691 - RNA, 20 nt, Artificial Sequence
  HTT spacer sequence ATCN PAM
uuguguuucuucagaguggg

SEQ ID NO: 692 - RNA, 20 nt, Artificial Sequence
  HTT spacer sequence ATCN PAM
uaauggaagugaugcaggaa

SEQ ID NO: 693 - RNA, 20 nt, Artificial Sequence
  HTT spacer sequence ATCN PAM
cuuccauuaggaugcaaaua

SEQ ID NO: 694 - RNA, 20 nt, Artificial Sequence
  HTT spacer sequence ATCN PAM
cuuucucuuucuuuccugca

SEQ ID NO: 695 - RNA, 20 nt, Artificial Sequence
  HTT spacer sequence ATCN PAM
ucacuuucucuuucuuuccu

SEQ ID NO: 696 - RNA, 20 nt, Artificial Sequence
  HTT spacer sequence ATCN PAM
gugguccucaaguggcgaca

SEQ ID NO: 697 - RNA, 20 nt, Artificial Sequence
  HTT spacer sequence ATCN PAM
gcagaccugcgccugugccc

SEQ ID NO: 698 - RNA, 20 nt, Artificial Sequence
  HTT spacer sequence ATCN PAM
uuuggaaaagcacuuggcag

SEQ ID NO: 699 - RNA, 20 nt, Artificial Sequence
  HTT spacer sequence ATCN PAM
uccuuuauacuccucagcac

SEQ ID NO: 700 - RNA, 20 nt, Artificial Sequence
  HTT spacer sequence ATCN PAM
cgagcuccgucaaugcggag

SEQ ID NO: 701 - RNA, 20 nt, Artificial Sequence
  HTT spacer sequence ATCN PAM
ccacaucuacuccacugcuc

SEQ ID NO: 702 - RNA, 20 nt, Artificial Sequence
  HTT spacer sequence ATCN PAM
acuccacugcuccccuuccu

SEQ ID NO: 703 - RNA, 20 nt, Artificial Sequence
  HTT spacer sequence ATCN PAM
uuaggcucagggaccuuggc

SEQ ID NO: 704 - RNA, 20 nt, Artificial Sequence
  HTT spacer sequence ATCN PAM
uuugacuuacauggaccaua

SEQ ID NO: 705 - RNA, 20 nt, Artificial Sequence
  HTT spacer sequence ATCN PAM
gccuggugacuuagcuuuau

SEQ ID NO: 706 - RNA, 20 nt, Artificial Sequence
  HTT spacer sequence ATCN PAM
acauuguauuaugggaagga

SEQ ID NO: 707 - RNA, 20 nt, Artificial Sequence
  HTT spacer sequence ATCN PAM
ucuccuucccauaauacaau

SEQ ID NO: 708 - RNA, 20 nt, Artificial Sequence
  HTT spacer sequence ATCN PAM
gacccaaggacagccaaacc

SEQ ID NO: 709 - RNA, 20 nt, Artificial Sequence
  HTT spacer sequence ATCN PAM
ccugugcuccccuggcagca

SEQ ID NO: 710 - RNA, 20 nt, Artificial Sequence
  HTT spacer sequence ATCN PAM
ccaucaccugugcuccccug

SEQ ID NO: 711 - RNA, 20 nt, Artificial Sequence
  HTT spacer sequence ATCN PAM
aucaccaucaccugugcucc

SEQ ID NO: 712 - RNA, 20 nt, Artificial Sequence
  HTT spacer sequence ATCN PAM
gacccucauccaucaccauc

SEQ ID NO: 713 - RNA, 20 nt, Artificial Sequence
  HTT spacer sequence ATCN PAM
ucagacccucauccaucacc

SEQ ID NO: 714 - RNA, 20 nt, Artificial Sequence
  HTT spacer sequence ATCN PAM
gcagaggugugggugacuug

SEQ ID NO: 715 - RNA, 20 nt, Artificial Sequence
  HTT spacer sequence ATCN PAM
aaaguagccauuugcacacc

SEQ ID NO: 716 - RNA, 20 nt, Artificial Sequence
  HTT spacer sequence ATCN PAM
caaaauuaagugaccugaag

SEQ ID NO: 717 - RNA, 20 nt, Artificial Sequence
  HTT spacer sequence ATCN PAM
caguaaccagucauuuugca

SEQ ID NO: 718 - RNA, 20 nt, Artificial Sequence
  HTT spacer sequence ATCN PAM
cugaagguccugaaaaauca

SEQ ID NO: 719 - RNA, 20 nt, Artificial Sequence
  HTT spacer sequence ATCN PAM
aaggccuacuaacuucucac

SEQ ID NO: 720 - RNA, 20 nt, Artificial Sequence
  HTT spacer sequence ATCN PAM
acuaaggucaaauaaaaagu

SEQ ID NO: 721 - RNA, 20 nt, Artificial Sequence
  HTT spacer sequence ATCN PAM
uuaaaguaaaguuaaucuac

SEQ ID NO: 722 - RNA, 20 nt, Artificial Sequence
  HTT spacer sequence ATCN PAM
acaaaauacuucaagucucu

SEQ ID NO: 723 - RNA, 20 nt, Artificial Sequence
  HTT spacer sequence ATCN PAM
cugcucugucaugggacagc

SEQ ID NO: 724 - RNA, 20 nt, Artificial Sequence
  HTT spacer sequence ATCN PAM
agacauguucugaggcuggc

SEQ ID NO: 725 - RNA, 20 nt, Artificial Sequence
  HTT spacer sequence ATCN PAM
gagccagccucagaacaugu

SEQ ID NO: 726 - RNA, 20 nt, Artificial Sequence
  HTT spacer sequence ATCN PAM
agaagaaaacaaauaucuga

SEQ ID NO: 727 - RNA, 20 nt, Artificial Sequence
  HTT spacer sequence ATCN PAM
aaacaaauaguaauuauauu

SEQ ID NO: 728 - RNA, 20 nt, Artificial Sequence
  HTT spacer sequence ATCN PAM
uauuuacaucuguagaacca

SEQ ID NO: 729 - RNA, 20 nt, Artificial Sequence
  HTT spacer sequence ATCN PAM
guagaaccacuggccauuua

SEQ ID NO: 730 - RNA, 20 nt, Artificial Sequence
  HTT spacer sequence ATCN PAM
uuaaaaacaguugcaguuuu

SEQ ID NO: 731 - RNA, 20 nt, Artificial Sequence
  HTT spacer sequence ATCN PAM
uucagaguucauucuuuaaa

SEQ ID NO: 732 - RNA, 20 nt, Artificial Sequence
  HTT spacer sequence ATCN PAM
uuuuaaauagcuaauauaac

SEQ ID NO: 733 - RNA, 20 nt, Artificial Sequence
  HTT spacer sequence ATCN PAM
gucacuguugaauuuuauug

SEQ ID NO: 734 - RNA, 20 nt, Artificial Sequence
  HTT spacer sequence ATCN PAM
agcaauuuauaauuucaagg

SEQ ID NO: 735 - RNA, 20 nt, Artificial Sequence
  HTT spacer sequence ATCN PAM
uacagaguaaauaucuagca

SEQ ID NO: 736 - RNA, 20 nt, Artificial Sequence
  HTT spacer sequence ATCN PAM
cagagccuuaaauacuuaag

SEQ ID NO: 737 - RNA, 20 nt, Artificial Sequence
  HTT spacer sequence ATCN PAM
ugaguuaggcacaaaauuac

SEQ ID NO: 738 - RNA, 20 nt, Artificial Sequence
  HTT spacer sequence ATCN PAM
uaucaugaguuaggcacaaa

SEQ ID NO: 739 - RNA, 20 nt, Artificial Sequence
  HTT spacer sequence ATCN PAM
cuuuguaaccacugagaagg

SEQ ID NO: 740 - RNA, 20 nt, Artificial Sequence
  HTT spacer sequence ATCN PAM
uuuauuagcuaccugcacuc

SEQ ID NO: 741 - RNA, 20 nt, Artificial Sequence
  HTT spacer sequence ATCN PAM
uguauaggcugggcuuggug

SEQ ID NO: 742 - RNA, 20 nt, Artificial Sequence
  HTT spacer sequence ATCN PAM
cagcacuuugggaggccgag

SEQ ID NO: 743 - RNA, 20 nt, Artificial Sequence
  HTT spacer sequence ATCN PAM
gccuaccucggccucccaaa

SEQ ID NO: 744 - RNA, 20 nt, Artificial Sequence
  HTT spacer sequence ATCN PAM
cgaggucaggaauuugagau

SEQ ID NO: 745 - RNA, 20 nt, Artificial Sequence
  HTT spacer sequence ATCN PAM
caaauuccugaccucgugau

SEQ ID NO: 746 - RNA, 20 nt, Artificial Sequence
  HTT spacer sequence ATCN PAM
gccugaccgacgugaugaaa

SEQ ID NO: 747 - RNA, 20 nt, Artificial Sequence
  HTT spacer sequence ATCN PAM
cgucggucaggcugaucuca

SEQ ID NO: 748 - RNA, 20 nt, Artificial Sequence
  HTT spacer sequence ATCN PAM
cuacuaaaaauacaaaaacu

SEQ ID NO: 749 - RNA, 20 nt, Artificial Sequence
  HTT spacer sequence ATCN PAM
cagcuacucaggaggcugag

SEQ ID NO: 750 - RNA, 20 nt, Artificial Sequence
  HTT spacer sequence ATCN PAM
aggaggcggagguugcaaug

SEQ ID NO: 751 - RNA, 20 nt, Artificial Sequence
  HTT spacer sequence ATCN PAM
cagcucauugcaaccuccgc

SEQ ID NO: 752 - RNA, 20 nt, Artificial Sequence
  HTT spacer sequence ATCN PAM
cgccacugcacuccagccug

SEQ ID NO: 753 - RNA, 20 nt, Artificial Sequence
  HTT spacer sequence ATCN PAM
uuuucuuucuuucuuuuuuu

SEQ ID NO: 754 - RNA, 20 nt, Artificial Sequence
  HTT spacer sequence ATCN PAM
uauauaaaaaugcagaaaau

SEQ ID NO: 755 - RNA, 20 nt, Artificial Sequence
  HTT spacer sequence ATCN PAM
cagcacuuugggaggccgag

SEQ ID NO: 756 - RNA, 20 nt, Artificial Sequence
  HTT spacer sequence ATCN PAM
gcccgccucggccucccaaa

SEQ ID NO: 757 - RNA, 20 nt, Artificial Sequence
  HTT spacer sequence ATCN PAM
cgaggucaggagaucgagac

SEQ ID NO: 758 - RNA, 20 nt, Artificial Sequence
  HTT spacer sequence ATCN PAM
ccugaccucgugaucugccc

SEQ ID NO: 759 - RNA, 20 nt, Artificial Sequence
  HTT spacer sequence ATCN PAM
agaccauccuggccaacgug

SEQ ID NO: 760 - RNA, 20 nt, Artificial Sequence
  HTT spacer sequence ATCN PAM
uggccaacguggugaaaccc

SEQ ID NO: 761 - RNA, 20 nt, Artificial Sequence
  HTT spacer sequence ATCN PAM
uccugccucagccucccaag

SEQ ID NO: 762 - RNA, 20 nt, Artificial Sequence
  HTT spacer sequence ATCN PAM
uuugaacucgggaggcagag

SEQ ID NO: 763 - RNA, 20 nt, Artificial Sequence
  HTT spacer sequence ATCN PAM
uggcucacugcaaccucugc

SEQ ID NO: 764 - RNA, 20 nt, Artificial Sequence
  HTT spacer sequence ATCN PAM
caaaaaaaaaaaacaaaaaa

SEQ ID NO: 765 - RNA, 20 nt, Artificial Sequence
  HTT spacer sequence ATCN PAM
caauuuucuguuuuuuaauu

SEQ ID NO: 766 - RNA, 20 nt, Artificial Sequence
  HTT spacer sequence ATCN PAM
auaauacacacuuugucuug

SEQ ID NO: 767 - RNA, 20 nt, Artificial Sequence
  HTT spacer sequence ATCN PAM
ucccauuagacacucaacau

SEQ ID NO: 768 - RNA, 20 nt, Artificial Sequence
  HTT spacer sequence ATCN PAM
uucacauguccaucuuccca

SEQ ID NO: 769 - RNA, 20 nt, Artificial Sequence
  HTT spacer sequence ATCN PAM
uauauucauuauacuacaaa

SEQ ID NO: 770 - RNA, 20 nt, Artificial Sequence
  HTT spacer sequence ATCN PAM
cagcauugugagaggccgag

SEQ ID NO: 771 - RNA, 20 nt, Artificial Sequence
  HTT spacer sequence ATCN PAM
acccgccucggccucucaca

SEQ ID NO: 772 - RNA, 20 nt, Artificial Sequence
  HTT spacer sequence ATCN PAM
cgaggucaggagaucgagac

SEQ ID NO: 773 - RNA, 20 nt, Artificial Sequence
  HTT spacer sequence ATCN PAM
ccugaccucgugauccaccc

SEQ ID NO: 774 - RNA, 20 nt, Artificial Sequence
  HTT spacer sequence ATCN PAM
agaccauccuggcuaacaug

SEQ ID NO: 775 - RNA, 20 nt, Artificial Sequence
  HTT spacer sequence ATCN PAM
uggcuaacauggugaaaccc

SEQ ID NO: 776 - RNA, 20 nt, Artificial Sequence
  HTT spacer sequence ATCN PAM
cagcuacuugguaggcugag

SEQ ID NO: 777 - RNA, 20 nt, Artificial Sequence
  HTT spacer sequence ATCN PAM
cuugaaccugggagguggag

SEQ ID NO: 778 - RNA, 20 nt, Artificial Sequence
  HTT spacer sequence ATCN PAM
cggcucagugcaaccuccac

SEQ ID NO: 779 - RNA, 20 nt, Artificial Sequence
  HTT spacer sequence ATCN PAM
ugccacuacaccccagccug

SEQ ID NO: 780 - RNA, 20 nt, Artificial Sequence
  HTT spacer sequence ATCN PAM
auacgugucacacgcagcua

SEQ ID NO: 781 - RNA, 20 nt, Artificial Sequence
  HTT spacer sequence ATCN PAM
cuucaaaccccacuauggua

SEQ ID NO: 782 - RNA, 20 nt, Artificial Sequence
  HTT spacer sequence ATCN PAM
ccccgccuuuccuuuacaag

SEQ ID NO: 783 - RNA, 20 nt, Artificial Sequence
  HTT spacer sequence ATCN PAM
cuuccugccuucauacuugc

SEQ ID NO: 784 - RNA, 20 nt, Artificial Sequence
  HTT spacer sequence ATCN PAM
cccacuugaaacuccuuaca

SEQ ID NO: 785 - RNA, 20 nt, Artificial Sequence
  HTT spacer sequence ATCN PAM
ugcuugauccuuugcuaagg

SEQ ID NO: 786 - RNA, 20 nt, Artificial Sequence
  HTT spacer sequence ATCN PAM
agcaggauacaccaggcccu

SEQ ID NO: 787 - RNA, 20 nt, Artificial Sequence
  HTT spacer sequence ATCN PAM
uuugcuaaggacuugaucuu

SEQ ID NO: 788 - RNA, 20 nt, Artificial Sequence
  HTT spacer sequence ATCN PAM
aguccuuagcaaaggaucaa

SEQ ID NO: 789 - RNA, 20 nt, Artificial Sequence
  HTT spacer sequence ATCN PAM
uuuuaggcagcaggaacaau

SEQ ID NO: 790 - RNA, 20 nt, Artificial Sequence
  HTT spacer sequence ATCN PAM
aaggguuuaaggcagagaau

SEQ ID NO: 791 - RNA, 20 nt, Artificial Sequence
  HTT spacer sequence ATCN PAM
ccugucaaaacccccucaca

SEQ ID NO: 792 - RNA, 20 nt, Artificial Sequence
  HTT spacer sequence ATCN PAM
ggguugugcugcuguuaccc

SEQ ID NO: 793 - RNA, 20 nt, Artificial Sequence
  HTT spacer sequence ATCN PAM
ucucggguaacagcagcaca

SEQ ID NO: 794 - RNA, 20 nt, Artificial Sequence
  HTT spacer sequence ATCN PAM
uaggguaaaaacacaguaaa

SEQ ID NO: 795 - RNA, 20 nt, Artificial Sequence
  HTT spacer sequence ATCN PAM
guaaaguauuuuuaguaaau

SEQ ID NO: 796 - RNA, 20 nt, Artificial Sequence
  HTT spacer sequence ATCN PAM
ggguuuucauguuuaauuug

SEQ ID NO: 797 - RNA, 20 nt, Artificial Sequence
  HTT spacer sequence ATCN PAM
uaauagcauuuguuuucuug

SEQ ID NO: 798 - RNA, 20 nt, Artificial Sequence
  HTT spacer sequence ATCN PAM
uaaaagacauuaaaucauaa

SEQ ID NO: 799 - RNA, 20 nt, Artificial Sequence
  HTT spacer sequence ATCN PAM
guuuauucagaaaagguaaa

SEQ ID NO: 800 - RNA, 20 nt, Artificial Sequence
  HTT spacer sequence ATCN PAM
uagaugguagaacucagcug

SEQ ID NO: 801 - RNA, 20 nt, Artificial Sequence
  HTT spacer sequence ATCN PAM
augauguauuuuaccuuuuc

SEQ ID NO: 802 - RNA, 20 nt, Artificial Sequence
  HTT spacer sequence ATCN PAM
uagccauauguccguauucu

SEQ ID NO: 803 - RNA, 20 nt, Artificial Sequence
  HTT spacer sequence ATCN PAM
uggucccuuacauggauaua

SEQ ID NO: 804 - RNA, 20 nt, Artificial Sequence
  HTT spacer sequence ATCN PAM
auguaagggaccaagauaac

SEQ ID NO: 805 - RNA, 20 nt, Artificial Sequence
  HTT spacer sequence ATCN PAM
auguguuuguaggauuuggg

SEQ ID NO: 806 - RNA, 20 nt, Artificial Sequence
  HTT spacer sequence ATCN PAM
uacaaacacauagaugaaau

SEQ ID NO: 807 - RNA, 20 nt, Artificial Sequence
  HTT spacer sequence ATCN PAM
cccaaauccuacaaacacau

SEQ ID NO: 808 - RNA, 20 nt, Artificial Sequence
  HTT spacer sequence ATCN PAM
ucccccaaauccuacaaaca

SEQ ID NO: 809 - RNA, 20 nt, Artificial Sequence
  HTT spacer sequence ATCN PAM
caaaaaaaaaaauuauauau

SEQ ID NO: 810 - RNA, 20 nt, Artificial Sequence
  HTT spacer sequence ATCN PAM
cgccacugcauuccagccug

SEQ ID NO: 811 - RNA, 20 nt, Artificial Sequence
  HTT spacer sequence ATCN PAM
gcuugccgcaaccuccgccu

SEQ ID NO: 812 - RNA, 20 nt, Artificial Sequence
  HTT spacer sequence ATCN PAM
cuugaacccaugaggcggag

SEQ ID NO: 813 - RNA, 20 nt, Artificial Sequence
  HTT spacer sequence ATCN PAM
cagcuacucaagcugaggca

SEQ ID NO: 814 - RNA, 20 nt, Artificial Sequence
  HTT spacer sequence ATCN PAM
guaaucccagcuacucaagc

SEQ ID NO: 815 - RNA, 20 nt, Artificial Sequence
  HTT spacer sequence ATCN PAM
agaggucaggaguucaagac

SEQ ID NO: 816 - RNA, 20 nt, Artificial Sequence
  HTT spacer sequence ATCN PAM
gccugccucggccucacaga

SEQ ID NO: 817 - RNA, 20 nt, Artificial Sequence
  HTT spacer sequence ATCN PAM
caacacucugugaggccgag

SEQ ID NO: 818 - RNA, 20 nt, Artificial Sequence
  HTT spacer sequence ATCN PAM
auguaacuagauuucugcuu

SEQ ID NO: 819 - RNA, 20 nt, Artificial Sequence
  HTT spacer sequence ATCN PAM
aguuacauugauauuuuuaa

SEQ ID NO: 820 - RNA, 20 nt, Artificial Sequence
  HTT spacer sequence ATCN PAM
acuucuaguuacuaccucuu

SEQ ID NO: 821 - RNA, 20 nt, Artificial Sequence
  HTT spacer sequence ATCN PAM
uccugucucaaacagugaaa

SEQ ID NO: 822 - RNA, 20 nt, Artificial Sequence
  HTT spacer sequence ATCN PAM
cuguccugccugccuguggg

SEQ ID NO: 823 - RNA, 20 nt, Artificial Sequence
  HTT spacer sequence ATCN PAM
cugagagaagaagaauaacc

SEQ ID NO: 824 - RNA, 20 nt, Artificial Sequence
  HTT spacer sequence ATCN PAM
ucagacucggucuggguagc

SEQ ID NO: 825 - RNA, 20 nt, Artificial Sequence
  HTT spacer sequence ATCN PAM
ccuugauugaggaggcugag

SEQ ID NO: 826 - RNA, 20 nt, Artificial Sequence
  HTT spacer sequence ATCN PAM
aggagauccucagacucggu

SEQ ID NO: 827 - RNA, 20 nt, Artificial Sequence
  HTT spacer sequence ATCN PAM
uacaaccugcaggacccugg

SEQ ID NO: 828 - RNA, 20 nt, Artificial Sequence
  HTT spacer sequence ATCN PAM
uccuaagcugccacccaggg

SEQ ID NO: 829 - RNA, 20 nt, Artificial Sequence
  HTT spacer sequence ATCN PAM
gaacgccuuuccucuuaccc

SEQ ID NO: 830 - RNA, 20 nt, Artificial Sequence
  HTT spacer sequence ATCN PAM
gagcuucgucaugggccaua

SEQ ID NO: 831 - RNA, 20 nt, Artificial Sequence
  HTT spacer sequence ATCN PAM
acuucccuuccugcagcccu

SEQ ID NO: 832 - RNA, 20 nt, Artificial Sequence
  HTT spacer sequence ATCN PAM
gcaguucaggagccagacag

SEQ ID NO: 833 - RNA, 20 nt, Artificial Sequence
  HTT spacer sequence ATCN PAM
caucucucucugcacgcagc

SEQ ID NO: 834 - RNA, 20 nt, Artificial Sequence
  HTT spacer sequence ATCN PAM
cucucugcacgcagccucag

SEQ ID NO: 835 - RNA, 20 nt, Artificial Sequence
  HTT spacer sequence ATCN PAM
cuccuucugcucuugucagc

SEQ ID NO: 836 - RNA, 20 nt, Artificial Sequence
  HTT spacer sequence ATCN PAM
guacccuuuaacccggugga

SEQ ID NO: 837 - RNA, 20 nt, Artificial Sequence
  HTT spacer sequence ATCN PAM
ucuuugcuguuauguuuuuc

SEQ ID NO: 838 - RNA, 20 nt, Artificial Sequence
  HTT spacer sequence ATCN PAM
cuauuuaauuaguuaauuuu

SEQ ID NO: 839 - RNA, 20 nt, Artificial Sequence
  HTT spacer sequence ATCN PAM
caugcucagggacuggucca

SEQ ID NO: 840 - RNA, 20 nt, Artificial Sequence
  HTT spacer sequence ATCN PAM
uggaugacuggugaauguac

SEQ ID NO: 841 - RNA, 20 nt, Artificial Sequence
  HTT spacer sequence ATCN PAM
aggauuuacugagcccauca

SEQ ID NO: 842 - RNA, 20 nt, Artificial Sequence
  HTT spacer sequence ATCN PAM
uaauguuaagagccagaaau

SEQ ID NO: 843 - RNA, 20 nt, Artificial Sequence
  HTT spacer sequence ATCN PAM
cauucuguaauuaaaagggc

SEQ ID NO: 844 - RNA, 20 nt, Artificial Sequence
  HTT spacer sequence ATCN PAM
gaccuuucuggcuugcccuu

SEQ ID NO: 845 - RNA, 20 nt, Artificial Sequence
  HTT spacer sequence ATCN PAM
cuggcagaacagccauaccc

SEQ ID NO: 846 - RNA, 20 nt, Artificial Sequence
  HTT spacer sequence ATCN PAM
cuuuuccucaggucuuagaa

SEQ ID NO: 847 - RNA, 20 nt, Artificial Sequence
  HTT spacer sequence ATCN PAM
gugugccuuuuuuuuuuuuu

SEQ ID NO: 848 - RNA, 20 nt, Artificial Sequence
  HTT spacer sequence ATCN PAM
caaaagccuaaaugacgaca

SEQ ID NO: 849 - RNA, 20 nt, Artificial Sequence
  HTT spacer sequence ATCN PAM
auguauuuuuccauaccaac

SEQ ID NO: 850 - RNA, 20 nt, Artificial Sequence
  HTT spacer sequence ATCN PAM
ugagcugaauguuuggggca

SEQ ID NO: 851 - RNA, 20 nt, Artificial Sequence
  HTT spacer sequence ATCN PAM
acaggguugugaguuuuccc

SEQ ID NO: 852 - RNA, 20 nt, Artificial Sequence
  HTT spacer sequence ATCN PAM
aaacugcugacuccuguuac

SEQ ID NO: 853 - RNA, 20 nt, Artificial Sequence
  HTT spacer sequence ATCN PAM
cugguucauggaaacaugug

SEQ ID NO: 854 - RNA, 20 nt, Artificial Sequence
  HTT spacer sequence ATCN PAM
uuugagucuugcugguauug

SEQ ID NO: 855 - RNA, 20 nt, Artificial Sequence
  HTT spacer sequence ATCN PAM
cuaauucauucauuuauaca

SEQ ID NO: 856 - RNA, 20 nt, Artificial Sequence
  HTT spacer sequence ATCN PAM
guuauguacaguggguccuu

SEQ ID NO: 857 - RNA, 20 nt, Artificial Sequence
  HTT spacer sequence ATCN PAM
caccaccgguauucaaaagg

SEQ ID NO: 858 - RNA, 20 nt, Artificial Sequence
  HTT spacer sequence ATCN PAM
ccacccagaagcuucuccaa

SEQ ID NO: 859 - RNA, 20 nt, Artificial Sequence
  HTT spacer sequence ATCN PAM
uaagacggguccuucacaca

SEQ ID NO: 860 - RNA, 20 nt, Artificial Sequence
  HTT spacer sequence ATCN PAM
acccaauccuaagacggguc

SEQ ID NO: 861 - RNA, 20 nt, Artificial Sequence
  HTT spacer sequence ATCN PAM
ugugucucccccgacacaca

SEQ ID NO: 862 - RNA, 20 nt, Artificial Sequence
  HTT spacer sequence ATCN PAM
cgccacugcauuccagccug

SEQ ID NO: 863 - RNA, 20 nt, Artificial Sequence
  HTT spacer sequence ATCN PAM
uggcucacugcaaccuccac

SEQ ID NO: 864 - RNA, 20 nt, Artificial Sequence
  HTT spacer sequence ATCN PAM
uuugaaccuggaagguggag

SEQ ID NO: 865 - RNA, 20 nt, Artificial Sequence
  HTT spacer sequence ATCN PAM
cagcuacucaggaggcugac

SEQ ID NO: 866 - RNA, 20 nt, Artificial Sequence
  HTT spacer sequence ATCN PAM
agccuggccaacauggugaa

SEQ ID NO: 867 - RNA, 20 nt, Artificial Sequence
  HTT spacer sequence ATCN PAM
ugccacugcacucuagccug

SEQ ID NO: 868 - RNA, 20 nt, Artificial Sequence
  HTT spacer sequence ATCN PAM
cagcucacuacagccucgac

SEQ ID NO: 869 - RNA, 20 nt, Artificial Sequence
  HTT spacer sequence ATCN PAM
ucucaccucagccucccuag

SEQ ID NO: 870 - RNA, 20 nt, Artificial Sequence
  HTT spacer sequence ATCN PAM
aacuauuagccaggcauagu

SEQ ID NO: 871 - RNA, 20 nt, Artificial Sequence
  HTT spacer sequence ATCN PAM
uuugagcucagagguuugag

SEQ ID NO: 872 - RNA, 20 nt, Artificial Sequence
  HTT spacer sequence ATCN PAM
ucucaccucugccuccccag

SEQ ID NO: 873 - RNA, 20 nt, Artificial Sequence
  HTT spacer sequence ATCN PAM
caccucugccuccccaggug

SEQ ID NO: 874 - RNA, 20 nt, Artificial Sequence
  HTT spacer sequence ATCN PAM
cagcaccuggggaggcagag

SEQ ID NO: 875 - RNA, 20 nt, Artificial Sequence
  HTT spacer sequence ATCN PAM
caggcguaagccacugugcc

SEQ ID NO: 876 - RNA, 20 nt, Artificial Sequence
  HTT spacer sequence ATCN PAM
gaaaaaaaauaaaauuagcc

SEQ ID NO: 877 - RNA, 20 nt, Artificial Sequence
  HTT spacer sequence ATCN PAM
uuugagagguuuuaagguau

SEQ ID NO: 878 - RNA, 20 nt, Artificial Sequence
  HTT spacer sequence ATCN PAM
ugccuuuuccuccuaccucu

SEQ ID NO: 879 - RNA, 20 nt, Artificial Sequence
  HTT spacer sequence ATCN PAM
gcauuuucaaauagguccua

SEQ ID NO: 880 - RNA, 20 nt, Artificial Sequence
  HTT spacer sequence ATCN PAM
ggugauaagagaugagcuca

SEQ ID NO: 881 - RNA, 20 nt, Artificial Sequence
  HTT spacer sequence ATCN PAM
ccugauguaaauaaacaucu

SEQ ID NO: 882 - RNA, 20 nt, Artificial Sequence
  HTT spacer sequence ATCN PAM
cuuaucaccugauguaaaua

SEQ ID NO: 883 - RNA, 20 nt, Artificial Sequence
  HTT spacer sequence ATCN PAM
uuacugcugggccuggaagg

SEQ ID NO: 884 - RNA, 20 nt, Artificial Sequence
  HTT spacer sequence ATCN PAM
aaggcccagacgcccuucca

SEQ ID NO: 885 - RNA, 20 nt, Artificial Sequence
  HTT spacer sequence ATCN PAM
gcucccuguuuaucuugaau

SEQ ID NO: 886 - RNA, 20 nt, Artificial Sequence
  HTT spacer sequence ATCN PAM
ugaaucuggaauuuggacag

SEQ ID NO: 887 - RNA, 20 nt, Artificial Sequence
  HTT spacer sequence ATCN PAM
ggaauuuggacagccgaccu

SEQ ID NO: 888 - RNA, 20 nt, Artificial Sequence
  HTT spacer sequence ATCN PAM
uugaggucggcuguccaaau

SEQ ID NO: 889 - RNA, 20 nt, Artificial Sequence
  HTT spacer sequence ATCN PAM
gcagacacacuuaagccaga

SEQ ID NO: 890 - RNA, 20 nt, Artificial Sequence
  HTT spacer sequence ATCN PAM
ugaaucugagcccuggugug

SEQ ID NO: 891 - RNA, 20 nt, Artificial Sequence
  HTT spacer sequence ATCN PAM
gagcccuggugugcagaugc

SEQ ID NO: 892 - RNA, 20 nt, Artificial Sequence
  HTT spacer sequence ATCN PAM
gcacaccagggcucagauuc

SEQ ID NO: 893 - RNA, 20 nt, Artificial Sequence
  HTT spacer sequence ATCN PAM
ugggcggccccaccccugcc

SEQ ID NO: 894 - RNA, 20 nt, Artificial Sequence
  HTT spacer sequence ATCN PAM
ggaccacggggcuggggggg

SEQ ID NO: 895 - RNA, 20 nt, Artificial Sequence
  HTT spacer sequence ATCN PAM
uggagguccgagcugggcgu

SEQ ID NO: 896 - RNA, 20 nt, Artificial Sequence
  HTT spacer sequence ATCN PAM
aaacuucccucugcagcggc

SEQ ID NO: 897 - RNA, 20 nt, Artificial Sequence
  HTT spacer sequence ATCN PAM
gcgccagugggcggcuuuuc

SEQ ID NO: 898 - RNA, 20 nt, Artificial Sequence
  HTT spacer sequence ATCN PAM
gucacucacacuucagugug

SEQ ID NO: 899 - RNA, 20 nt, Artificial Sequence
  HTT spacer sequence ATCN PAM
cagggguggcagagggacug

SEQ ID NO: 900 - RNA, 20 nt, Artificial Sequence
  HTT spacer sequence ATCN PAM
ccucucugugccucaguuug

SEQ ID NO: 901 - RNA, 20 nt, Artificial Sequence
  HTT spacer sequence ATCN PAM
guugacacuggggacagcug

SEQ ID NO: 902 - RNA, 20 nt, Artificial Sequence
  HTT spacer sequence ATCN PAM
aggcaggcuguccaccccag

SEQ ID NO: 903 - RNA, 20 nt, Artificial Sequence
  HTT spacer sequence ATCN PAM
ccggcccaugucaccugcaa

SEQ ID NO: 904 - RNA, 20 nt, Artificial Sequence
  HTT spacer sequence ATCN PAM
ucacucccuugcagcccucg

SEQ ID NO: 905 - RNA, 20 nt, Artificial Sequence
  HTT spacer sequence ATCN PAM
ccucucccugccacccgcca

SEQ ID NO: 906 - RNA, 20 nt, Artificial Sequence
  HTT spacer sequence ATCN PAM
gucuuccuucugccugcccc

SEQ ID NO: 907 - RNA, 20 nt, Artificial Sequence
  HTT spacer sequence ATCN PAM
ggugagaggggugcugacag

SEQ ID NO: 908 - RNA, 20 nt, Artificial Sequence
  HTT spacer sequence ATCN PAM
uggaggccuggggacucccu

SEQ ID NO: 909 - RNA, 20 nt, Artificial Sequence
  HTT spacer sequence ATCN PAM
ugggggagcccaccaaggag

SEQ ID NO: 910 - RNA, 20 nt, Artificial Sequence
  HTT spacer sequence ATCN PAM
cugggggguggggagcucca

SEQ ID NO: 911 - RNA, 20 nt, Artificial Sequence
  HTT spacer sequence ATCN PAM
cgucucucugggccccugga

SEQ ID NO: 912 - RNA, 20 nt, Artificial Sequence
  HTT spacer sequence ATCN PAM
uggcugaguuugcgcccuuc

SEQ ID NO: 913 - RNA, 20 nt, Artificial Sequence
  HTT spacer sequence ATCN PAM
ugggugugaacucagaugcc

SEQ ID NO: 914 - RNA, 20 nt, Artificial Sequence
  HTT spacer sequence ATCN PAM
gaguucacacccaagauccu

SEQ ID NO: 915 - RNA, 20 nt, Artificial Sequence
  HTT spacer sequence ATCN PAM
cacagcuggaaacugguggc

SEQ ID NO: 916 - RNA, 20 nt, Artificial Sequence
  HTT spacer sequence ATCN PAM
uggccaggaggcuucccccu

SEQ ID NO: 917 - RNA, 20 nt, Artificial Sequence
  HTT spacer sequence ATCN PAM
augaccugagggcugugaag

SEQ ID NO: 918 - RNA, 20 nt, Artificial Sequence
  HTT spacer sequence ATCN PAM
ccccuacggacacucauagc

SEQ ID NO: 919 - RNA, 20 nt, Artificial Sequence
  HTT spacer sequence ATCN PAM
ggaguggccaguguugggca

SEQ ID NO: 920 - RNA, 20 nt, Artificial Sequence
  HTT spacer sequence ATCN PAM
ugaggucaagagaggacaga

SEQ ID NO: 921 - RNA, 20 nt, Artificial Sequence
  HTT spacer sequence ATCN PAM
gcccaccucccaaagugcug

SEQ ID NO: 922 - RNA, 20 nt, Artificial Sequence
  HTT spacer sequence ATCN PAM
cagcacuuugggaggugggc

SEQ ID NO: 923 - RNA, 20 nt, Artificial Sequence
  HTT spacer sequence ATCN PAM
cugugcagccugggugggug

SEQ ID NO: 924 - RNA, 20 nt, Artificial Sequence
  HTT spacer sequence ATCN PAM
cuccuccugacggcccaccc

SEQ ID NO: 925 - RNA, 20 nt, Artificial Sequence
  HTT spacer sequence ATCN PAM
gagccgggcgggcagccaug

SEQ ID NO: 926 - RNA, 20 nt, Artificial Sequence
  HTT spacer sequence ATCN PAM
uuccuccaggauaggcggcu

SEQ ID NO: 927 - RNA, 20 nt, Artificial Sequence
  HTT spacer sequence ATCN PAM
uggaggaaggauuccagggu

SEQ ID NO: 928 - RNA, 20 nt, Artificial Sequence
  HTT spacer sequence ATCN PAM
ugucuacccucccgugcaca

SEQ ID NO: 929 - RNA, 20 nt, Artificial Sequence
  HTT spacer sequence ATCN PAM
ggaaacugagggucaggaag

SEQ ID NO: 930 - RNA, 20 nt, Artificial Sequence
  HTT spacer sequence ATCN PAM
gcaaaacgggaugacagaag

SEQ ID NO: 931 - RNA, 20 nt, Artificial Sequence
  HTT spacer sequence ATCN PAM
cguuuugcagaucaggaaac

SEQ ID NO: 932 - RNA, 20 nt, Artificial Sequence
  HTT spacer sequence ATCN PAM
agcagcgugguccagagcca

SEQ ID NO: 933 - RNA, 20 nt, Artificial Sequence
  HTT spacer sequence ATCN PAM
uucaagggugacgcgagaga

SEQ ID NO: 934 - RNA, 20 nt, Artificial Sequence
  HTT spacer sequence ATCN PAM
ggggccgggaaaccaagcag

SEQ ID NO: 935 - RNA, 20 nt, Artificial Sequence
  HTT spacer sequence ATCN PAM
cagaucgugcuggaacugcu

SEQ ID NO: 936 - RNA, 20 nt, Artificial Sequence
  HTT spacer sequence ATCN PAM
gugaucgggggccgggaaac

SEQ ID NO: 937 - RNA, 20 nt, Artificial Sequence
  HTT spacer sequence ATCN PAM
ugcuggaacugcuggcccca

SEQ ID NO: 938 - RNA, 20 nt, Artificial Sequence
  HTT spacer sequence ATCN PAM
augaagaaagggccagucac

SEQ ID NO: 939 - RNA, 20 nt, Artificial Sequence
  HTT spacer sequence ATCN PAM
gguccaucuuugucagcugg

SEQ ID NO: 940 - RNA, 20 nt, Artificial Sequence
  HTT spacer sequence ATCN PAM
uugucagcuggccucuggga

SEQ ID NO: 941 - RNA, 20 nt, Artificial Sequence
  HTT spacer sequence ATCN PAM
ccccaggcaacugcuccagg

SEQ ID NO: 942 - RNA, 20 nt, Artificial Sequence
  HTT spacer sequence ATCN PAM
gaggagcccugagggguugg

SEQ ID NO: 943 - RNA, 20 nt, Artificial Sequence
  HTT spacer sequence ATCN PAM
auacccccaucccuguagcu

SEQ ID NO: 944 - RNA, 20 nt, Artificial Sequence
  HTT spacer sequence ATCN PAM
cuguagcugagcugauucca

SEQ ID NO: 945 - RNA, 20 nt, Artificial Sequence
  HTT spacer sequence ATCN PAM
gcucagcuacagggaugggg

SEQ ID NO: 946 - RNA, 20 nt, Artificial Sequence
  HTT spacer sequence ATCN PAM
gauguuuacugcgcuccugc

SEQ ID NO: 947 - RNA, 20 nt, Artificial Sequence
  HTT spacer sequence ATCN PAM
gauucacaaggaagcagagg

SEQ ID NO: 948 - RNA, 20 nt, Artificial Sequence
  HTT spacer sequence ATCN PAM
ggccucccaugaguuagacc

SEQ ID NO: 949 - RNA, 20 nt, Artificial Sequence
  HTT spacer sequence ATCN PAM
ccaggcccgagcuagggccu

SEQ ID NO: 950 - RNA, 20 nt, Artificial Sequence
  HTT spacer sequence ATCN PAM
aggcugaaggaacuccccca

SEQ ID NO: 951 - RNA, 20 nt, Artificial Sequence
  HTT spacer sequence ATCN PAM
agggguguuguaaucuagug

SEQ ID NO: 952 - RNA, 20 nt, Artificial Sequence
  HTT spacer sequence ATCN PAM
agugaugcucuucuguggca

SEQ ID NO: 953 - RNA, 20 nt, Artificial Sequence
  HTT spacer sequence ATCN PAM
cuagauuacaacaccccugg

SEQ ID NO: 954 - RNA, 20 nt, Artificial Sequence
  HTT spacer sequence ATCN PAM
cuucccaccuuguccagggg

SEQ ID NO: 955 - RNA, 20 nt, Artificial Sequence
  HTT spacer sequence ATCN PAM
ggggucauucugggagccug

SEQ ID NO: 956 - RNA, 20 nt, Artificial Sequence
  HTT spacer sequence ATCN PAM
auggugaccuguccgccugc

SEQ ID NO: 957 - RNA, 20 nt, Artificial Sequence
  HTT spacer sequence ATCN PAM
gagccuaaugugccagucag

SEQ ID NO: 958 - RNA, 20 nt, Artificial Sequence
  HTT spacer sequence ATCN PAM
gauaauaucagacuguugug

SEQ ID NO: 959 - RNA, 20 nt, Artificial Sequence
  HTT spacer sequence ATCN PAM
gauuggaaacuccaccaacu

SEQ ID NO: 960 - RNA, 20 nt, Artificial Sequence
  HTT spacer sequence ATCN PAM
gacuguugugcuuuggucuc

SEQ ID NO: 961 - RNA, 20 nt, Artificial Sequence
  HTT spacer sequence ATCN PAM
cagccuccucccuucccccu

SEQ ID NO: 962 - RNA, 20 nt, Artificial Sequence
  HTT spacer sequence ATCN PAM
accgcugccagggccaccga

SEQ ID NO: 963 - RNA, 20 nt, Artificial Sequence
  HTT spacer sequence ATCN PAM
caagccaacacacguuuagg

SEQ ID NO: 964 - RNA, 20 nt, Artificial Sequence
  HTT spacer sequence ATCN PAM
ggccuuuugcuuggacuugc

SEQ ID NO: 965 - RNA, 20 nt, Artificial Sequence
  HTT spacer sequence ATCN PAM
uuccccauugcccuccuaau

SEQ ID NO: 966 - RNA, 20 nt, Artificial Sequence
  HTT spacer sequence ATCN PAM
agaaaagcuggccugggagc

SEQ ID NO: 967 - RNA, 20 nt, Artificial Sequence
  HTT spacer sequence ATCN PAM
ccucucucggaaacgccccu

SEQ ID NO: 968 - RNA, 20 nt, Artificial Sequence
  HTT spacer sequence ATCN PAM
gcggaccgccucgggcagcg

SEQ ID NO: 969 - RNA, 20 nt, Artificial Sequence
  HTT spacer sequence ATCN PAM
gcccagccaucagcggaccg

SEQ ID NO: 970 - RNA, 20 nt, Artificial Sequence
  HTT spacer sequence ATCN PAM
gccugccaggccaggcccca

SEQ ID NO: 971 - RNA, 20 nt, Artificial Sequence
  HTT spacer sequence ATCN PAM
guggucagcagagugaguuu

SEQ ID NO: 972 - RNA, 20 nt, Artificial Sequence
  HTT spacer sequence ATCN PAM
uccccucugcccuggucaaa

SEQ ID NO: 973 - RNA, 20 nt, Artificial Sequence
  HTT spacer sequence ATCN PAM
cccgagcugggggaagugac

SEQ ID NO: 974 - RNA, 20 nt, Artificial Sequence
  HTT spacer sequence ATCN PAM
ccucuuguggccucaggcgu

SEQ ID NO: 975 - RNA, 20 nt, Artificial Sequence
  HTT spacer sequence ATCN PAM
uccgccuucucugggcaggg

SEQ ID NO: 976 - RNA, 20 nt, Artificial Sequence
  HTT spacer sequence ATCN PAM
caugaggcugcacuuccugu

SEQ ID NO: 977 - RNA, 20 nt, Artificial Sequence
  HTT spacer sequence ATCN PAM
agcugcuggggcggggugug

SEQ ID NO: 978 - RNA, 20 nt, Artificial Sequence
  HTT spacer sequence ATCN PAM
aggccuccgggcugauuagg

SEQ ID NO: 979 - RNA, 20 nt, Artificial Sequence
  HTT spacer sequence ATCN PAM
gcccggaggccucgaugacc

SEQ ID NO: 980 - RNA, 20 nt, Artificial Sequence
  HTT spacer sequence ATCN PAM
cugaaaugccuuccccucgg

SEQ ID NO: 981 - RNA, 20 nt, Artificial Sequence
  HTT spacer sequence ATCN PAM
caccucauuaggcagcugca

SEQ ID NO: 982 - RNA, 20 nt, Artificial Sequence
  HTT spacer sequence ATCN PAM
ugggguccugggugcuggcu

SEQ ID NO: 983 - RNA, 20 nt, Artificial Sequence
  HTT spacer sequence ATCN PAM
cagagagccccugccccaag

SEQ ID NO: 984 - RNA, 20 nt, Artificial Sequence
  HTT spacer sequence ATCN PAM
accuucccauuuucuugagg

SEQ ID NO: 985 - RNA, 20 nt, Artificial Sequence
  HTT spacer sequence ATCN PAM
ucaagaaaaugggaagguug

SEQ ID NO: 986 - RNA, 20 nt, Artificial Sequence
  HTT spacer sequence ATCN PAM
cccuccuggucacauccuca

SEQ ID NO: 987 - RNA, 20 nt, Artificial Sequence
  HTT spacer sequence ATCN PAM
ucuuccuuccccagcaacuu

SEQ ID NO: 988 - RNA, 20 nt, Artificial Sequence
  HTT spacer sequence ATCN PAM
ucugcagagguggggguugg

SEQ ID NO: 989 - RNA, 20 nt, Artificial Sequence
  HTT spacer sequence ATCN PAM
agcgggccuugccccaugcc

SEQ ID NO: 990 - RNA, 20 nt, Artificial Sequence
  HTT spacer sequence ATCN PAM
aggggacagcuauuccaggg

SEQ ID NO: 991 - RNA, 20 nt, Artificial Sequence
  HTT spacer sequence ATCN PAM
uuggugcugccuuuucccag

SEQ ID NO: 992 - RNA, 20 nt, Artificial Sequence
  HTT spacer sequence ATCN PAM
gugaggcgccccuggcaucu

SEQ ID NO: 993 - RNA, 20 nt, Artificial Sequence
  HTT spacer sequence ATCN PAM
ccccgggggggccuccuuga

SEQ ID NO: 994 - RNA, 20 nt, Artificial Sequence
  HTT spacer sequence ATCN PAM
uggucacgucaccuccucca

SEQ ID NO: 995 - RNA, 20 nt, Artificial Sequence
  HTT spacer sequence ATCN PAM
ccuguagccccugugcaggg

SEQ ID NO: 996 - RNA, 20 nt, Artificial Sequence
  HTT spacer sequence ATCN PAM
cagcagucugcugcucccuc

SEQ ID NO: 997 - RNA, 20 nt, Artificial Sequence
  HTT spacer sequence ATCN PAM
ccaagucacuccugaggcug

SEQ ID NO: 998 - RNA, 20 nt, Artificial Sequence
  HTT spacer sequence ATCN PAM
gacagggagguggcacagcc

SEQ ID NO: 999 - RNA, 20 nt, Artificial Sequence
  HTT spacer sequence ATCN PAM
gcccggggggggggcgguca

SEQ ID NO: 1000 - RNA, 20 nt, Artificial Sequence
  HTT spacer sequence ATCN PAM
ccagggagcaguaagggcau

SEQ ID NO: 1001 - RNA, 20 nt, Artificial Sequence
  HTT spacer sequence ATCN PAM
gggucuccuccucuccgccc

SEQ ID NO: 1002 - RNA, 20 nt, Artificial Sequence
  HTT spacer sequence ATCN PAM
agacuccaccccugccuguc

SEQ ID NO: 1003 - RNA, 20 nt, Artificial Sequence
  HTT spacer sequence ATCN PAM
uguccccugcccgggccccg

SEQ ID NO: 1004 - RNA, 20 nt, Artificial Sequence
  HTT spacer sequence ATCN PAM
cccuuccccuguccggccag

SEQ ID NO: 1005 - RNA, 20 nt, Artificial Sequence
  HTT spacer sequence ATCN PAM
gggugggagagcaggccaca

SEQ ID NO: 1006 - RNA, 20 nt, Artificial Sequence
  HTT spacer sequence ATCN PAM
gggaaaaaaacccauguuag

SEQ ID NO: 1007 - RNA, 20 nt, Artificial Sequence
  HTT spacer sequence ATCN PAM
cagcacuuugggaggccaag

SEQ ID NO: 1008 - RNA, 20 nt, Artificial Sequence
  HTT spacer sequence ATCN PAM
acccgccuuggccucccaaa

SEQ ID NO: 1009 - RNA, 20 nt, Artificial Sequence
  HTT spacer sequence ATCN PAM
cagcuacucgggaggcugag

SEQ ID NO: 1010 - RNA, 20 nt, Artificial Sequence
  HTT spacer sequence ATCN PAM
uugcucacuccaaccucugc

SEQ ID NO: 1011 - RNA, 20 nt, Artificial Sequence
  HTT spacer sequence ATCN PAM
ggucucucugucacccaggc

SEQ ID NO: 1012 - RNA, 20 nt, Artificial Sequence
  HTT spacer sequence ATCN PAM
caaaaaaaaaggggccgggc

SEQ ID NO: 1013 - RNA, 20 nt, Artificial Sequence
  HTT spacer sequence ATCN PAM
cagcacuuugggaggccgag

SEQ ID NO: 1014 - RNA, 20 nt, Artificial Sequence
  HTT spacer sequence ATCN PAM
gccggccucggccucccaaa

SEQ ID NO: 1015 - RNA, 20 nt, Artificial Sequence
  HTT spacer sequence ATCN PAM
ccugaggucaggaguucaag

SEQ ID NO: 1016 - RNA, 20 nt, Artificial Sequence
  HTT spacer sequence ATCN PAM
cagcuauaggaggcugaggc

SEQ ID NO: 1017 - RNA, 20 nt, Artificial Sequence
  HTT spacer sequence ATCN PAM
uggcucauugcaaccucugu

SEQ ID NO: 1018 - RNA, 20 nt, Artificial Sequence
  HTT spacer sequence ATCN PAM
ugccacugcauucuagccug

SEQ ID NO: 1019 - RNA, 20 nt, Artificial Sequence
  HTT spacer sequence ATCN PAM
auauacacacacacacguaa

SEQ ID NO: 1020 - RNA, 20 nt, Artificial Sequence
  HTT spacer sequence ATCN PAM
uuuuucccuaacguuacgug

SEQ ID NO: 1021 - RNA, 20 nt, Artificial Sequence
  HTT spacer sequence ATCN PAM
cagcgaaugcauuaaggcag

SEQ ID NO: 1022 - RNA, 20 nt, Artificial Sequence
  HTT spacer sequence ATCN PAM
gucagcgggugccacaggcu

SEQ ID NO: 1023 - RNA, 20 nt, Artificial Sequence
  HTT spacer sequence ATCN PAM
uggcuccucugugcaccacu

SEQ ID NO: 1024 - RNA, 20 nt, Artificial Sequence
  HTT spacer sequence ATCN PAM
ggacaagcuccugggucagg

SEQ ID NO: 1025 - RNA, 20 nt, Artificial Sequence
  HTT spacer sequence ATCN PAM
ccgugguacuuuucguaccg

SEQ ID NO: 1026 - RNA, 20 nt, Artificial Sequence
  HTT spacer sequence ATCN PAM
ugguggcuccugaccucugc

SEQ ID NO: 1027 - RNA, 20 nt, Artificial Sequence
  HTT spacer sequence ATCN PAM
ccacucuguucccuuguuau

SEQ ID NO: 1028 - RNA, 20 nt, Artificial Sequence
  HTT spacer sequence ATCN PAM
cgcccuggugcugggauccg

SEQ ID NO: 1029 - RNA, 20 nt, Artificial Sequence
  HTT spacer sequence ATCN PAM
cagcaccagggcgagauaac

SEQ ID NO: 1030 - RNA, 20 nt, Artificial Sequence
  HTT spacer sequence ATCN PAM
gggauaagcagggugcuguc

SEQ ID NO: 1031 - RNA, 20 nt, Artificial Sequence
  HTT spacer sequence ATCN PAM
cggaucccagcaccagggcg

SEQ ID NO: 1032 - RNA, 20 nt, Artificial Sequence
  HTT spacer sequence ATCN PAM
cagggaaggucugagaugcu

SEQ ID NO: 1033 - RNA, 20 nt, Artificial Sequence
  HTT spacer sequence ATCN PAM
cagaccuucccugggaugag

SEQ ID NO: 1034 - RNA, 20 nt, Artificial Sequence
  HTT spacer sequence ATCN PAM
caugcuuggcuaacucaugu

SEQ ID NO: 1035 - RNA, 20 nt, Artificial Sequence
  HTT spacer sequence ATCN PAM
uccacaugaguuagccaagc

SEQ ID NO: 1036 - RNA, 20 nt, Artificial Sequence
  HTT spacer sequence ATCN PAM
gccagcguccugggagcaau

SEQ ID NO: 1037 - RNA, 20 nt, Artificial Sequence
  HTT spacer sequence ATCN PAM
guuccacccagacacguuga

SEQ ID NO: 1038 - RNA, 20 nt, Artificial Sequence
  HTT spacer sequence ATCN PAM
uugugacaucuguuccaccc

SEQ ID NO: 1039 - RNA, 20 nt, Artificial Sequence
  HTT spacer sequence ATCN PAM
guuagggaggcagccaccuc

SEQ ID NO: 1040 - RNA, 20 nt, Artificial Sequence
  HTT spacer sequence ATCN PAM
aagcuacugucacccucugu

SEQ ID NO: 1041 - RNA, 20 nt, Artificial Sequence
  HTT spacer sequence ATCN PAM
cgggugcaggguguggcguu

SEQ ID NO: 1042 - RNA, 20 nt, Artificial Sequence
  HTT spacer sequence ATCN PAM
ggcacaggggaggcacucag

SEQ ID NO: 1043 - RNA, 20 nt, Artificial Sequence
  HTT spacer sequence ATCN PAM
gagucucugcggaugcgugg

SEQ ID NO: 1044 - RNA, 20 nt, Artificial Sequence
  HTT spacer sequence ATCN PAM
gcagagacucggaugaggaa

SEQ ID NO: 1045 - RNA, 20 nt, Artificial Sequence
  HTT spacer sequence ATCN PAM
caagagccccuggggaggcu

SEQ ID NO: 1046 - RNA, 20 nt, Artificial Sequence
  HTT spacer sequence ATCN PAM
guuuaaaacagaagcagcuc

SEQ ID NO: 1047 - RNA, 20 nt, Artificial Sequence
  HTT spacer sequence ATCN PAM
ggagaacaaaacgagcaguu

SEQ ID NO: 1048 - RNA, 20 nt, Artificial Sequence
  HTT spacer sequence ATCN PAM
ccaacugcucguuuuguucu

SEQ ID NO: 1049 - RNA, 20 nt, Artificial Sequence
  HTT spacer sequence ATCN PAM
caagaggugacugugggcag

SEQ ID NO: 1050 - RNA, 20 nt, Artificial Sequence
  HTT spacer sequence ATCN PAM
caggagggucugguuggcgg

SEQ ID NO: 1051 - RNA, 20 nt, Artificial Sequence
  HTT spacer sequence ATCN PAM
agaggaagcagaagcagagg

SEQ ID NO: 1052 - RNA, 20 nt, Artificial Sequence
  HTT spacer sequence ATCN PAM
gccgggcaccuuccucaucu

SEQ ID NO: 1053 - RNA, 20 nt, Artificial Sequence
  HTT spacer sequence ATCN PAM
gcuguggccgggacacccca

SEQ ID NO: 1054 - RNA, 20 nt, Artificial Sequence
  HTT spacer sequence ATCN PAM
gcucagugacugcugcugcc

SEQ ID NO: 1055 - RNA, 20 nt, Artificial Sequence
  HTT spacer sequence ATCN PAM
augaggaugcuggggccggg

SEQ ID NO: 1056 - RNA, 20 nt, Artificial Sequence
  HTT spacer sequence ATCN PAM
auaggcaagggcagcagcag

SEQ ID NO: 1057 - RNA, 20 nt, Artificial Sequence
  HTT spacer sequence ATCN PAM
ucaucgauaggcaagggcag

SEQ ID NO: 1058 - RNA, 20 nt, Artificial Sequence
  HTT spacer sequence ATCN PAM
cgggggaccccuggcugcag

SEQ ID NO: 1059 - RNA, 20 nt, Artificial Sequence
  HTT spacer sequence ATCN PAM
ggccagccccaggcacccca

SEQ ID NO: 1060 - RNA, 20 nt, Artificial Sequence
  HTT spacer sequence ATCN PAM
cugcauguccgucccccaug

SEQ ID NO: 1061 - RNA, 20 nt, Artificial Sequence
  HTT spacer sequence ATCN PAM
cuccccacagaacugguguc

SEQ ID NO: 1062 - RNA, 20 nt, Artificial Sequence
  HTT spacer sequence ATCN PAM
gccccuccccugacaccagu

SEQ ID NO: 1063 - RNA, 20 nt, Artificial Sequence
  HTT spacer sequence ATCN PAM
gcaggcccugggccuucucc

SEQ ID NO: 1064 - RNA, 20 nt, Artificial Sequence
  HTT spacer sequence ATCN PAM
agaccacacuccccugggcu

SEQ ID NO: 1065 - RNA, 20 nt, Artificial Sequence
  HTT spacer sequence ATCN PAM
ccuccuccuggccuguggcc

SEQ ID NO: 1066 - RNA, 20 nt, Artificial Sequence
  HTT spacer sequence ATCN PAM
ggacucuggagaauuuuuuc

SEQ ID NO: 1067 - RNA, 20 nt, Artificial Sequence
  HTT spacer sequence ATCN PAM
cuugagaaaaaauucuccag

SEQ ID NO: 1068 - RNA, 20 nt, Artificial Sequence
  HTT spacer sequence ATCN PAM
ugagccgccucugcugcuug

SEQ ID NO: 1069 - RNA, 20 nt, Artificial Sequence
  HTT spacer sequence ATCN PAM
caagaaccuuuccuggggac

SEQ ID NO: 1070 - RNA, 20 nt, Artificial Sequence
  HTT spacer sequence ATCN PAM
ggagaugugagaacauugca

SEQ ID NO: 1071 - RNA, 20 nt, Artificial Sequence
  HTT spacer sequence ATCN PAM
ccggaugccccacugggccu

SEQ ID NO: 1072 - RNA, 20 nt, Artificial Sequence
  HTT spacer sequence ATCN PAM
accaacagcuuggccuugcu

SEQ ID NO: 1073 - RNA, 20 nt, Artificial Sequence
  HTT spacer sequence ATCN PAM
uucagagcucagagugaaaa

SEQ ID NO: 1074 - RNA, 20 nt, Artificial Sequence
  HTT spacer sequence ATCN PAM
guuugucugucuguccuucu

SEQ ID NO: 1075 - RNA, 20 nt, Artificial Sequence
  HTT spacer sequence ATCN PAM
gggccuuggagauucagugg

SEQ ID NO: 1076 - RNA, 20 nt, Artificial Sequence
  HTT spacer sequence ATCN PAM
ccaaggcccagaugggcacc

SEQ ID NO: 1077 - RNA, 20 nt, Artificial Sequence
  HTT spacer sequence ATCN PAM
ccaagucaauggcacaguuc

SEQ ID NO: 1078 - RNA, 20 nt, Artificial Sequence
  HTT spacer sequence ATCN PAM
agaaccuugcccucuucucu

SEQ ID NO: 1079 - RNA, 20 nt, Artificial Sequence
  HTT spacer sequence ATCN PAM
ucaaaggaugagggagcguu

SEQ ID NO: 1080 - RNA, 20 nt, Artificial Sequence
  HTT spacer sequence ATCN PAM
uuugaggauggaaccaucua

SEQ ID NO: 1081 - RNA, 20 nt, Artificial Sequence
  HTT spacer sequence ATCN PAM
ugguaccugcagucaccucc

SEQ ID NO: 1082 - RNA, 20 nt, Artificial Sequence
  HTT spacer sequence ATCN PAM
acguggacagggaaccaacc

SEQ ID NO: 1083 - RNA, 20 nt, Artificial Sequence
  HTT spacer sequence ATCN PAM
agacaugaacauuaggaggu

SEQ ID NO: 1084 - RNA, 20 nt, Artificial Sequence
  HTT spacer sequence ATCN PAM
aacaugagcacacagugaca

SEQ ID NO: 1085 - RNA, 20 nt, Artificial Sequence
  HTT spacer sequence ATCN PAM
ugccagggugcggggcacac

SEQ ID NO: 1086 - RNA, 20 nt, Artificial Sequence
  HTT spacer sequence ATCN PAM
ggcagugugccccgcacccu

SEQ ID NO: 1087 - RNA, 20 nt, Artificial Sequence
  HTT spacer sequence ATCN PAM
ucagaaaccuggugcauagu

SEQ ID NO: 1088 - RNA, 20 nt, Artificial Sequence
  HTT spacer sequence ATCN PAM
gaaaccuggugcauaguuua

SEQ ID NO: 1089 - RNA, 20 nt, Artificial Sequence
  HTT spacer sequence ATCN PAM
cgcgcccucaccugaagcgg

SEQ ID NO: 1090 - RNA, 20 nt, Artificial Sequence
  HTT spacer sequence ATCN PAM
aggaggugcccgucagccca

SEQ ID NO: 1091 - RNA, 20 nt, Artificial Sequence
  HTT spacer sequence ATCN PAM
cccagccccugcugcccauc

SEQ ID NO: 1092 - RNA, 20 nt, Artificial Sequence
  HTT spacer sequence ATCN PAM
gauccccugccagggcaggg

SEQ ID NO: 1093 - RNA, 20 nt, Artificial Sequence
  HTT spacer sequence ATCN PAM
gaugggcagcaggggcuggg

SEQ ID NO: 1094 - RNA, 20 nt, Artificial Sequence
  HTT spacer sequence ATCN PAM
ccugccagggcagggccacu

SEQ ID NO: 1095 - RNA, 20 nt, Artificial Sequence
  HTT spacer sequence ATCN PAM
gcuggggacguucucugccc

SEQ ID NO: 1096 - RNA, 20 nt, Artificial Sequence
  HTT spacer sequence ATCN PAM
acccuggcggggaaguugcu

SEQ ID NO: 1097 - RNA, 20 nt, Artificial Sequence
  HTT spacer sequence ATCN PAM
gccgggcauaggcacccugg

SEQ ID NO: 1098 - RNA, 20 nt, Artificial Sequence
  HTT spacer sequence ATCN PAM
agggugccuaugcccggcgg

SEQ ID NO: 1099 - RNA, 20 nt, Artificial Sequence
  HTT spacer sequence ATCN PAM
gccucaccauggccaccauc

SEQ ID NO: 1100 - RNA, 20 nt, Artificial Sequence
  HTT spacer sequence ATCN PAM
uccccugcuguaggcuggga

SEQ ID NO: 1101 - RNA, 20 nt, Artificial Sequence
  HTT spacer sequence ATCN PAM
ccaggaagccuuggcagcca

SEQ ID NO: 1102 - RNA, 20 nt, Artificial Sequence
  HTT spacer sequence ATCN PAM
ggcgacggccugcugucucc

SEQ ID NO: 1103 - RNA, 20 nt, Artificial Sequence
  HTT spacer sequence ATCN PAM
gcucagcccccuggcccugc

SEQ ID NO: 1104 - RNA, 20 nt, Artificial Sequence
  HTT spacer sequence ATCN PAM
gccgcaucacggaaccccag

SEQ ID NO: 1105 - RNA, 20 nt, Artificial Sequence
  HTT spacer sequence ATCN PAM
cggaaccccagggcgauaga

SEQ ID NO: 1106 - RNA, 20 nt, Artificial Sequence
  HTT spacer sequence ATCN PAM
cccugggguuccgugaugcg

SEQ ID NO: 1107 - RNA, 20 nt, Artificial Sequence
  HTT spacer sequence ATCN PAM
ccacaggcgcccucuaucgc

SEQ ID NO: 1108 - RNA, 20 nt, Artificial Sequence
  HTT spacer sequence ATCN PAM
ggggcuggcacacaggggca

SEQ ID NO: 1109 - RNA, 20 nt, Artificial Sequence
  HTT spacer sequence ATCN PAM
cuauggaaucaagccuccag

SEQ ID NO: 1110 - RNA, 20 nt, Artificial Sequence
  HTT spacer sequence ATCN PAM
agccuccagccccuaggccu

SEQ ID NO: 1111 - RNA, 20 nt, Artificial Sequence
  HTT spacer sequence ATCN PAM
ucugcuuccugccagagacg

SEQ ID NO: 1112 - RNA, 20 nt, Artificial Sequence
  HTT spacer sequence ATCN PAM
uugcugaccugggcucgccu

SEQ ID NO: 1113 - RNA, 20 nt, Artificial Sequence
  HTT spacer sequence ATCN PAM
gcaaagggaacgucagccuc

SEQ ID NO: 1114 - RNA, 20 nt, Artificial Sequence
  HTT spacer sequence ATCN PAM
gccuggaggccaggaaggcc

SEQ ID NO: 1115 - RNA, 20 nt, Artificial Sequence
  HTT spacer sequence ATCN PAM
gcccaggggcaggggccaag

SEQ ID NO: 1116 - RNA, 20 nt, Artificial Sequence
  HTT spacer sequence ATCN PAM
gagggccacuugcguucuca

SEQ ID NO: 1117 - RNA, 20 nt, Artificial Sequence
  HTT spacer sequence ATCN PAM
uggaggggguucucggggga

SEQ ID NO: 1118 - RNA, 20 nt, Artificial Sequence
  HTT spacer sequence ATCN PAM
cauccuggaggggguucucg

SEQ ID NO: 1119 - RNA, 20 nt, Artificial Sequence
  HTT spacer sequence ATCN PAM
ccgggcgccuccccaagcag

SEQ ID NO: 1120 - RNA, 20 nt, Artificial Sequence
  HTT spacer sequence ATCN PAM
gucucucaggucucauuggc

SEQ ID NO: 1121 - RNA, 20 nt, Artificial Sequence
  HTT spacer sequence ATCN PAM
uggggcugccuggcaccaug

SEQ ID NO: 1122 - RNA, 20 nt, Artificial Sequence
  HTT spacer sequence ATCN PAM
cuccauuggggcccccucgg

SEQ ID NO: 1123 - RNA, 20 nt, Artificial Sequence
  HTT spacer sequence ATCN PAM
uuccucaucucuccauuggg

SEQ ID NO: 1124 - RNA, 20 nt, Artificial Sequence
  HTT spacer sequence ATCN PAM
gaacgugacacgcggaggca

SEQ ID NO: 1125 - RNA, 20 nt, Artificial Sequence
  HTT spacer sequence ATCN PAM
cuugccuccgcgugucacgu

SEQ ID NO: 1126 - RNA, 20 nt, Artificial Sequence
  HTT spacer sequence ATCN PAM
ugcccagaagccaggacaug

SEQ ID NO: 1127 - RNA, 20 nt, Artificial Sequence
  HTT spacer sequence ATCN PAM
cgauggcgguggcaaaccag

SEQ ID NO: 1128 - RNA, 20 nt, Artificial Sequence
  HTT spacer sequence ATCN PAM
ggaugccaguggagaagagg

SEQ ID NO: 1129 - RNA, 20 nt, Artificial Sequence
  HTT spacer sequence ATCN PAM
ccuaggacccccucuauggc

SEQ ID NO: 1130 - RNA, 20 nt, Artificial Sequence
  HTT spacer sequence ATCN PAM
cgauaagggcuggggagguc

SEQ ID NO: 1131 - RNA, 20 nt, Artificial Sequence
  HTT spacer sequence ATCN PAM
ugauuccucauccccuagga

SEQ ID NO: 1132 - RNA, 20 nt, Artificial Sequence
  HTT spacer sequence ATCN PAM
gaccuccccagcccuuaucg

SEQ ID NO: 1133 - RNA, 20 nt, Artificial Sequence
  HTT spacer sequence ATCN PAM
accagcagccgccggagcgc

SEQ ID NO: 1134 - RNA, 20 nt, Artificial Sequence
  HTT spacer sequence ATCN PAM
cauggugggcugcucugacc

SEQ ID NO: 1135 - RNA, 20 nt, Artificial Sequence
  HTT spacer sequence ATCN PAM
gccccuuuagggugcucgcc

SEQ ID NO: 1136 - RNA, 20 nt, Artificial Sequence
  HTT spacer sequence ATCN PAM
cgcaggccagaacggccccu

SEQ ID NO: 1137 - RNA, 20 nt, Artificial Sequence
  HTT spacer sequence ATCN PAM
ccgaagccugcguuuccugc

SEQ ID NO: 1138 - RNA, 20 nt, Artificial Sequence
  HTT spacer sequence ATCN PAM
cggaccuggccccaccccac

SEQ ID NO: 1139 - RNA, 20 nt, Artificial Sequence
  HTT spacer sequence ATCN PAM
ggguuccccgcggcuucaag

SEQ ID NO: 1140 - RNA, 20 nt, Artificial Sequence
  HTT spacer sequence ATCN PAM
cgaucccgaucccgaucccg

SEQ ID NO: 1141 - RNA, 20 nt, Artificial Sequence
  HTT spacer sequence ATCN PAM
ggauccggguuccccgcggc

SEQ ID NO: 1142 - RNA, 20 nt, Artificial Sequence
  HTT spacer sequence ATCN PAM
cgaucccgaucccgauccca

SEQ ID NO: 1143 - RNA, 20 nt, Artificial Sequence
  HTT spacer sequence ATCN PAM
ggaucgggauccggguuccc

SEQ ID NO: 1144 - RNA, 20 nt, Artificial Sequence
  HTT spacer sequence ATCN PAM
cgaucccgaucccaacccca

SEQ ID NO: 1145 - RNA, 20 nt, Artificial Sequence
  HTT spacer sequence ATCN PAM
ggaucgggaucgggauccgg

SEQ ID NO: 1146 - RNA, 20 nt, Artificial Sequence
  HTT spacer sequence ATCN PAM
cgaucccaaccccaacccca

SEQ ID NO: 1147 - RNA, 20 nt, Artificial Sequence
  HTT spacer sequence ATCN PAM
ggaucgggaucgggaucggg

SEQ ID NO: 1148 - RNA, 20 nt, Artificial Sequence
  HTT spacer sequence ATCN PAM
caaccccaaccccagccccg

SEQ ID NO: 1149 - RNA, 20 nt, Artificial Sequence
  HTT spacer sequence ATCN PAM
cggggcgcgggccggggcug

SEQ ID NO: 1150 - RNA, 20 nt, Artificial Sequence
  HTT spacer sequence ATCN PAM
cgcgugcgucccggucccgc

SEQ ID NO: 1151 - RNA, 20 nt, Artificial Sequence
  HTT spacer sequence ATCN PAM
cugcacguucucuuccggcc

SEQ ID NO: 1152 - RNA, 20 nt, Artificial Sequence
  HTT spacer sequence ATCN PAM
ucugcgcccugcgggccugg

SEQ ID NO: 1153 - RNA, 20 nt, Artificial Sequence
  HTT spacer sequence ATCN PAM
uucccccucagccgccuguc

SEQ ID NO: 1154 - RNA, 20 nt, Artificial Sequence
  HTT spacer sequence ATCN PAM
gcaagcauuuuagaaggugg

SEQ ID NO: 1155 - RNA, 20 nt, Artificial Sequence
  HTT spacer sequence ATCN PAM
cacguggccgacccuaacca

SEQ ID NO: 1156 - RNA, 20 nt, Artificial Sequence
  HTT spacer sequence ATCN PAM
gguuagggucggccacguga

SEQ ID NO: 1157 - RNA, 20 nt, Artificial Sequence
  HTT spacer sequence ATCN PAM
gguggcacacauaccgccuu

SEQ ID NO: 1158 - RNA, 20 nt, Artificial Sequence
  HTT spacer sequence ATCN PAM
auuaggaagagguggggcuu

SEQ ID NO: 1159 - RNA, 20 nt, Artificial Sequence
  HTT spacer sequence ATCN PAM
cuaugaaacugccauugcaa

SEQ ID NO: 1160 - RNA, 20 nt, Artificial Sequence
  HTT spacer sequence ATCN PAM
cacugucggcaaauuuugca

SEQ ID NO: 1161 - RNA, 20 nt, Artificial Sequence
  HTT spacer sequence ATCN PAM
uuguuuuaaacuaaguuccu

SEQ ID NO: 1162 - RNA, 20 nt, Artificial Sequence
  HTT spacer sequence ATCN PAM
ucuuuguuuuaaacuaaguu

SEQ ID NO: 1163 - RNA, 20 nt, Artificial Sequence
  HTT spacer sequence ATCN PAM
ccaggaaagguuuccuuugg

SEQ ID NO: 1164 - RNA, 20 nt, Artificial Sequence
  HTT spacer sequence ATCN PAM
guuggucccacaaaagcagg

SEQ ID NO: 1165 - RNA, 20 nt, Artificial Sequence
  HTT spacer sequence ATCN PAM
uguggcuaaucuguuggucc

SEQ ID NO: 1166 - RNA, 20 nt, Artificial Sequence
  HTT spacer sequence ATCN PAM
uguagccucccgcugcguga

SEQ ID NO: 1167 - RNA, 20 nt, Artificial Sequence
  HTT spacer sequence ATCN PAM
ccaggagcaguuuggggagg

SEQ ID NO: 1168 - RNA, 20 nt, Artificial Sequence
  HTT spacer sequence ATCN PAM
ccaucguaaagccuaagauc

SEQ ID NO: 1169 - RNA, 20 nt, Artificial Sequence
  HTT spacer sequence ATCN PAM
uaaagccuaagaucagcacu

SEQ ID NO: 1170 - RNA, 20 nt, Artificial Sequence
  HTT spacer sequence ATCN PAM
uaggcuuuacgauggugaug

SEQ ID NO: 1171 - RNA, 20 nt, Artificial Sequence
  HTT spacer sequence ATCN PAM
gcacuuggugggucaccugg

SEQ ID NO: 1172 - RNA, 20 nt, Artificial Sequence
  HTT spacer sequence ATCN PAM
gauguuguggcacccaggaa

SEQ ID NO: 1173 - RNA, 20 nt, Artificial Sequence
  HTT spacer sequence ATCN PAM
gaugagccuggguggugcca

SEQ ID NO: 1174 - RNA, 20 nt, Artificial Sequence
  HTT spacer sequence ATCN PAM
cagggagucgaagcuguuuu

SEQ ID NO: 1175 - RNA, 20 nt, Artificial Sequence
  HTT spacer sequence ATCN PAM
cugaccugaccaauggguac

SEQ ID NO: 1176 - RNA, 20 nt, Artificial Sequence
  HTT spacer sequence ATCN PAM
uuaaaaacuccaaaccccag

SEQ ID NO: 1177 - RNA, 20 nt, Artificial Sequence
  HTT spacer sequence ATCN PAM
gggguuuggaguuuuuaaag

SEQ ID NO: 1178 - RNA, 20 nt, Artificial Sequence
  HTT spacer sequence ATCN PAM
agaaagggcauuugcaacag

SEQ ID NO: 1179 - RNA, 20 nt, Artificial Sequence
  HTT spacer sequence ATCN PAM
acccuuccagcuggaucacg

SEQ ID NO: 1180 - RNA, 20 nt, Artificial Sequence
  HTT spacer sequence ATCN PAM
agcuggaaggguggauaaaa

SEQ ID NO: 1181 - RNA, 20 nt, Artificial Sequence
  HTT spacer sequence ATCN PAM
cgcgcccucuucaaugacau

SEQ ID NO: 1182 - RNA, 20 nt, Artificial Sequence
  HTT spacer sequence ATCN PAM
aggacggaaggugccggcag

SEQ ID NO: 1183 - RNA, 20 nt, Artificial Sequence
  HTT spacer sequence ATCN PAM
cauagcaaggccucaaugga

SEQ ID NO: 1184 - RNA, 20 nt, Artificial Sequence
  HTT spacer sequence ATCN PAM
acaaauuuucucugccacac

SEQ ID NO: 1185 - RNA, 20 nt, Artificial Sequence
  HTT spacer sequence ATCN PAM
ugggccuacacagugacaaa

SEQ ID NO: 1186 - RNA, 20 nt, Artificial Sequence
  HTT spacer sequence ATCN PAM
accaacuaggcuggcugucu

SEQ ID NO: 1187 - RNA, 20 nt, Artificial Sequence
  HTT spacer sequence ATCN PAM
agaagagucugggguuguca

SEQ ID NO: 1188 - RNA, 20 nt, Artificial Sequence
  HTT spacer sequence ATCN PAM
acaaaucuagaagagucugg

SEQ ID NO: 1189 - RNA, 20 nt, Artificial Sequence
  HTT spacer sequence ATCN PAM
gugcaccugccagaccuguc

SEQ ID NO: 1190 - RNA, 20 nt, Artificial Sequence
  HTT spacer sequence ATCN PAM
ggggaggcuggguaagauuu

SEQ ID NO: 1191 - RNA, 20 nt, Artificial Sequence
  HTT spacer sequence ATCN PAM
uacccagccuccccagaugg

SEQ ID NO: 1192 - RNA, 20 nt, Artificial Sequence
  HTT spacer sequence ATCN PAM
ccaagcugcuggcuucagcc

SEQ ID NO: 1193 - RNA, 20 nt, Artificial Sequence
  HTT spacer sequence ATCN PAM
ucagugugagaggcaguuac

SEQ ID NO: 1194 - RNA, 20 nt, Artificial Sequence
  HTT spacer sequence ATCN PAM
ucuuccuugcucaaagaucc

SEQ ID NO: 1195 - RNA, 20 nt, Artificial Sequence
  HTT spacer sequence ATCN PAM
uugagcaaggaagaagaugc

SEQ ID NO: 1196 - RNA, 20 nt, Artificial Sequence
  HTT spacer sequence ATCN PAM
cacaccccguuagaagcugg

SEQ ID NO: 1197 - RNA, 20 nt, Artificial Sequence
  HTT spacer sequence ATCN PAM
uuacaucucaccacggucac

SEQ ID NO: 1198 - RNA, 20 nt, Artificial Sequence
  HTT spacer sequence ATCN PAM
caccacggucaccguggcua

SEQ ID NO: 1199 - RNA, 20 nt, Artificial Sequence
  HTT spacer sequence ATCN PAM
agccacggugaccgugguga

SEQ ID NO: 1200 - RNA, 20 nt, Artificial Sequence
  HTT spacer sequence ATCN PAM
cggaggucacaucuagccac

SEQ ID NO: 1201 - RNA, 20 nt, Artificial Sequence
  HTT spacer sequence ATCN PAM
cagugaccagcccugcccag

SEQ ID NO: 1202 - RNA, 20 nt, Artificial Sequence
  HTT spacer sequence ATCN PAM
caugaggugugaacuugacc

SEQ ID NO: 1203 - RNA, 20 nt, Artificial Sequence
  HTT spacer sequence ATCN PAM
caggaaagaaggccgggguc

SEQ ID NO: 1204 - RNA, 20 nt, Artificial Sequence
  HTT spacer sequence ATCN PAM
ccuggggaaugccucggccu

SEQ ID NO: 1205 - RNA, 20 nt, Artificial Sequence
  HTT spacer sequence ATCN PAM
cgaaugccacugccacuucc

SEQ ID NO: 1206 - RNA, 20 nt, Artificial Sequence
  HTT spacer sequence ATCN PAM
agagggaggucagcccucag

SEQ ID NO: 1207 - RNA, 20 nt, Artificial Sequence
  HTT spacer sequence ATCN PAM
ucugauucugaccugaaacu

SEQ ID NO: 1208 - RNA, 20 nt, Artificial Sequence
  HTT spacer sequence ATCN PAM
gaagaugugcaaguuacgca

SEQ ID NO: 1209 - RNA, 20 nt, Artificial Sequence
  HTT spacer sequence ATCN PAM
caggucggcacagacgcaac

SEQ ID NO: 1210 - RNA, 20 nt, Artificial Sequence
  HTT spacer sequence ATCN PAM
acugaaggacguaaguagga

SEQ ID NO: 1211 - RNA, 20 nt, Artificial Sequence
  HTT spacer sequence ATCN PAM
cccacagucccucugcugga

SEQ ID NO: 1212 - RNA, 20 nt, Artificial Sequence
  HTT spacer sequence ATCN PAM
gagaagggaaacaucaccca

SEQ ID NO: 1213 - RNA, 20 nt, Artificial Sequence
  HTT spacer sequence ATCN PAM
gcaaacuuguuucauuuaua

SEQ ID NO: 1214 - RNA, 20 nt, Artificial Sequence
  HTT spacer sequence ATCN PAM
ccaguccccaugaggcuugu

SEQ ID NO: 1215 - RNA, 20 nt, Artificial Sequence
  HTT spacer sequence ATCN PAM
gcugcgacugguucacugcg

SEQ ID NO: 1216 - RNA, 20 nt, Artificial Sequence
  HTT spacer sequence ATCN PAM
ggaauggucuguguguuauc

SEQ ID NO: 1217 - RNA, 20 nt, Artificial Sequence
  HTT spacer sequence ATCN PAM
cagaggugcauuucaggauu

SEQ ID NO: 1218 - RNA, 20 nt, Artificial Sequence
  HTT spacer sequence ATCN PAM
ugaaaugcaccucugggauc

SEQ ID NO: 1219 - RNA, 20 nt, Artificial Sequence
  HTT spacer sequence ATCN PAM
ggugacguuuuaacagaaac

SEQ ID NO: 1220 - RNA, 20 nt, Artificial Sequence
  HTT spacer sequence ATCN PAM
caccaacauuauagcauuau

SEQ ID NO: 1221 - RNA, 20 nt, Artificial Sequence
  HTT spacer sequence ATCN PAM
accugccuuggccccccaau

SEQ ID NO: 1222 - RNA, 20 nt, Artificial Sequence
  HTT spacer sequence ATCN PAM
gcucaacugcagaacuggca

SEQ ID NO: 1223 - RNA, 20 nt, Artificial Sequence
  HTT spacer sequence ATCN PAM
cccugggaggccagggcugu

SEQ ID NO: 1224 - RNA, 20 nt, Artificial Sequence
  HTT spacer sequence ATCN PAM
ccgacucugcgaugacucac

SEQ ID NO: 1225 - RNA, 20 nt, Artificial Sequence
  HTT spacer sequence ATCN PAM
cagagucggggauuucgugu

SEQ ID NO: 1226 - RNA, 20 nt, Artificial Sequence
  HTT spacer sequence ATCN PAM
ugcugcagggagcucgcagc

SEQ ID NO: 1227 - RNA, 20 nt, Artificial Sequence
  HTT spacer sequence ATCN PAM
caaauaugaagggaaguaaa

SEQ ID NO: 1228 - RNA, 20 nt, Artificial Sequence
  HTT spacer sequence ATCN PAM
uugcaaaaucacaaauauga

SEQ ID NO: 1229 - RNA, 20 nt, Artificial Sequence
  HTT spacer sequence ATCN PAM
aaugacugacugccaccagc

SEQ ID NO: 1230 - RNA, 20 nt, Artificial Sequence
  HTT spacer sequence ATCN PAM
ccuggcggacugcagccacc

SEQ ID NO: 1231 - RNA, 20 nt, Artificial Sequence
  HTT spacer sequence ATCN PAM
gugaggagggcuuggagagg

SEQ ID NO: 1232 - RNA, 20 nt, Artificial Sequence
  HTT spacer sequence ATCN PAM
uggggccucuccaagcccuc

SEQ ID NO: 1233 - RNA, 20 nt, Artificial Sequence
  HTT spacer sequence ATCN PAM
uuccacgccaucauggggcc

SEQ ID NO: 1234 - RNA, 20 nt, Artificial Sequence
  HTT spacer sequence ATCN PAM
gguaugugaggggaccccgc

SEQ ID NO: 1235 - RNA, 20 nt, Artificial Sequence
  HTT spacer sequence ATCN PAM
cauccgguaugugaggggac

SEQ ID NO: 1236 - RNA, 20 nt, Artificial Sequence
  HTT spacer sequence ATCN PAM
ucucuagcagacaccacgag

SEQ ID NO: 1237 - RNA, 20 nt, Artificial Sequence
  HTT spacer sequence ATCN PAM
cuguccugucgcacuuggaa

SEQ ID NO: 1238 - RNA, 20 nt, Artificial Sequence
  HTT spacer sequence ATCN PAM
acucaccuuggcuugcuuug

SEQ ID NO: 1239 - RNA, 20 nt, Artificial Sequence
  HTT spacer sequence ATCN PAM
caagaagaaaauuaauaagc

SEQ ID NO: 1240 - RNA, 20 nt, Artificial Sequence
  HTT spacer sequence ATCN PAM
ugucccuccaggacguggug

SEQ ID NO: 1241 - RNA, 20 nt, Artificial Sequence
  HTT spacer sequence ATCN PAM
cugggcugcuauuuccaacu

SEQ ID NO: 1242 - RNA, 20 nt, Artificial Sequence
  HTT spacer sequence ATCN PAM
aacccuggcaaugccgcccg

SEQ ID NO: 1243 - RNA, 20 nt, Artificial Sequence
  HTT spacer sequence ATCN PAM
uuucuuccaucucaugcauc

SEQ ID NO: 1244 - RNA, 20 nt, Artificial Sequence
  HTT spacer sequence ATCN PAM
caugcaucgcaucucggaga

SEQ ID NO: 1245 - RNA, 20 nt, Artificial Sequence
  HTT spacer sequence ATCN PAM
caucucggagaacaaauuug

SEQ ID NO: 1246 - RNA, 20 nt, Artificial Sequence
  HTT spacer sequence ATCN PAM
cggagaacaaauuugauagc

SEQ ID NO: 1247 - RNA, 20 nt, Artificial Sequence
  HTT spacer sequence ATCN PAM
aauuuguucuccgagaugcg

SEQ ID NO: 1248 - RNA, 20 nt, Artificial Sequence
  HTT spacer sequence ATCN PAM
gcaagugacgcuaucaaauu

SEQ ID NO: 1249 - RNA, 20 nt, Artificial Sequence
  HTT spacer sequence ATCN PAM
ggcaaagaugauauaagugc

SEQ ID NO: 1250 - RNA, 20 nt, Artificial Sequence
  HTT spacer sequence ATCN PAM
uugccagauguuuccugaau

SEQ ID NO: 1251 - RNA, 20 nt, Artificial Sequence
  HTT spacer sequence ATCN PAM
ucuuugccagauguuuccug

SEQ ID NO: 1252 - RNA, 20 nt, Artificial Sequence
  HTT spacer sequence ATCN PAM
aaagucauucucuccugacu

SEQ ID NO: 1253 - RNA, 20 nt, Artificial Sequence
  HTT spacer sequence ATCN PAM
cagaugacacaccauuuuua

SEQ ID NO: 1254 - RNA, 20 nt, Artificial Sequence
  HTT spacer sequence ATCN PAM
gggaugugggguuaagcaga

SEQ ID NO: 1255 - RNA, 20 nt, Artificial Sequence
  HTT spacer sequence ATCN PAM
augacugugaggucuggugg

SEQ ID NO: 1256 - RNA, 20 nt, Artificial Sequence
  HTT spacer sequence ATCN PAM
guagccaaaucgccaacgua

SEQ ID NO: 1257 - RNA, 20 nt, Artificial Sequence
  HTT spacer sequence ATCN PAM
ccaacguauuccaaaagaaa

SEQ ID NO: 1258 - RNA, 20 nt, Artificial Sequence
  HTT spacer sequence ATCN PAM
acguacuucuaauuuugcuu

SEQ ID NO: 1259 - RNA, 20 nt, Artificial Sequence
  HTT spacer sequence ATCN PAM
aucuuccuaacaacagagau

SEQ ID NO: 1260 - RNA, 20 nt, Artificial Sequence
  HTT spacer sequence ATCN PAM
auggaagagcagcuuuuggu

SEQ ID NO: 1261 - RNA, 20 nt, Artificial Sequence
  HTT spacer sequence ATCN PAM
uccuaacaacagagaucuca

SEQ ID NO: 1262 - RNA, 20 nt, Artificial Sequence
  HTT spacer sequence ATCN PAM
cuguuguuaggaagaucgau

SEQ ID NO: 1263 - RNA, 20 nt, Artificial Sequence
  HTT spacer sequence ATCN PAM
caguuccucauaggauucag

SEQ ID NO: 1264 - RNA, 20 nt, Artificial Sequence
  HTT spacer sequence ATCN PAM
uaugaggaacugagaucucu

SEQ ID NO: 1265 - RNA, 20 nt, Artificial Sequence
  HTT spacer sequence ATCN PAM
aaaacacaaaacauacugca

SEQ ID NO: 1266 - RNA, 20 nt, Artificial Sequence
  HTT spacer sequence ATCN PAM
caaaaauaaauauauauaca

SEQ ID NO: 1267 - RNA, 20 nt, Artificial Sequence
  HTT spacer sequence ATCN PAM
cagcucacugaaacuuccgc

SEQ ID NO: 1268 - RNA, 20 nt, Artificial Sequence
  HTT spacer sequence ATCN PAM
cuugaacccaggaggcggaa

SEQ ID NO: 1269 - RNA, 20 nt, Artificial Sequence
  HTT spacer sequence ATCN PAM
cagaaccugaggaaacccgc

SEQ ID NO: 1270 - RNA, 20 nt, Artificial Sequence
  HTT spacer sequence ATCN PAM
acccuuucccaggagucugc

SEQ ID NO: 1271 - RNA, 20 nt, Artificial Sequence
  HTT spacer sequence ATCN PAM
aacguggagagugaggaaga

SEQ ID NO: 1272 - RNA, 20 nt, Artificial Sequence
  HTT spacer sequence ATCN PAM
gggcugucgcucuccucugu

SEQ ID NO: 1273 - RNA, 20 nt, Artificial Sequence
  HTT spacer sequence ATCN PAM
uccucgacauucaucuuucc

SEQ ID NO: 1274 - RNA, 20 nt, Artificial Sequence
  HTT spacer sequence ATCN PAM
uuccauccuaccaagagcgu

SEQ ID NO: 1275 - RNA, 20 nt, Artificial Sequence
  HTT spacer sequence ATCN PAM
uaccaagagcguggaaacca

SEQ ID NO: 1276 - RNA, 20 nt, Artificial Sequence
  HTT spacer sequence ATCN PAM
uacuuuguaggaaagcaaac

SEQ ID NO: 1277 - RNA, 20 nt, Artificial Sequence
  HTT spacer sequence ATCN PAM
uuaucuagcacgaagccauc

SEQ ID NO: 1278 - RNA, 20 nt, Artificial Sequence
  HTT spacer sequence ATCN PAM
agcacgaagccaucauucag

SEQ ID NO: 1279 - RNA, 20 nt, Artificial Sequence
  HTT spacer sequence ATCN PAM
uucagaucaucugcugacau

SEQ ID NO: 1280 - RNA, 20 nt, Artificial Sequence
  HTT spacer sequence ATCN PAM
gaaugauggcuucgugcuag

SEQ ID NO: 1281 - RNA, 20 nt, Artificial Sequence
  HTT spacer sequence ATCN PAM
ucugcugacauauguuuugg

SEQ ID NO: 1282 - RNA, 20 nt, Artificial Sequence
  HTT spacer sequence ATCN PAM
gcugacauauguuuugguuu

SEQ ID NO: 1283 - RNA, 20 nt, Artificial Sequence
  HTT spacer sequence ATCN PAM
ucauccuuuccaagcauucu

SEQ ID NO: 1284 - RNA, 20 nt, Artificial Sequence
  HTT spacer sequence ATCN PAM
uuuccaagcauucuucgaag

SEQ ID NO: 1285 - RNA, 20 nt, Artificial Sequence
  HTT spacer sequence ATCN PAM
cauuccuuccugcucaggcu

SEQ ID NO: 1286 - RNA, 20 nt, Artificial Sequence
  HTT spacer sequence ATCN PAM
uguuagagggcugcgccuuc

SEQ ID NO: 1287 - RNA, 20 nt, Artificial Sequence
  HTT spacer sequence ATCN PAM
ugucauaugcaucgggcuaa

SEQ ID NO: 1288 - RNA, 20 nt, Artificial Sequence
  HTT spacer sequence ATCN PAM
ggcuaagguagaaagaagaa

SEQ ID NO: 1289 - RNA, 20 nt, Artificial Sequence
  HTT spacer sequence ATCN PAM
ucucguugagcuugucucuc

SEQ ID NO: 1290 - RNA, 20 nt, Artificial Sequence
  HTT spacer sequence ATCN PAM
cauaaagcauauaccucgga

SEQ ID NO: 1291 - RNA, 20 nt, Artificial Sequence
  HTT spacer sequence ATCN PAM
ucuccacgguaagacaggcu

SEQ ID NO: 1292 - RNA, 20 nt, Artificial Sequence
  HTT spacer sequence ATCN PAM
ucuucuccacgguaagacag

SEQ ID NO: 1293 - RNA, 20 nt, Artificial Sequence
  HTT spacer sequence ATCN PAM
agaacacucacuaacccacc

SEQ ID NO: 1294 - RNA, 20 nt, Artificial Sequence
  HTT spacer sequence ATCN PAM
gcucuuuccgggacuucggu

SEQ ID NO: 1295 - RNA, 20 nt, Artificial Sequence
  HTT spacer sequence ATCN PAM
aaaacugacucucaaagcuu

SEQ ID NO: 1296 - RNA, 20 nt, Artificial Sequence
  HTT spacer sequence ATCN PAM
ucagaacaaagguguacaaa

SEQ ID NO: 1297 - RNA, 20 nt, Artificial Sequence
  HTT spacer sequence ATCN PAM
ggcaaaacaccuuauuucuc

SEQ ID NO: 1298 - RNA, 20 nt, Artificial Sequence
  HTT spacer sequence ATCN PAM
aggaacguugucuggugagg

SEQ ID NO: 1299 - RNA, 20 nt, Artificial Sequence
  HTT spacer sequence ATCN PAM
ucagcaucgcugucacuguc

SEQ ID NO: 1300 - RNA, 20 nt, Artificial Sequence
  HTT spacer sequence ATCN PAM
cugucacuguccacaauguc

SEQ ID NO: 1301 - RNA, 20 nt, Artificial Sequence
  HTT spacer sequence ATCN PAM
agaagcauaaugacauugug

SEQ ID NO: 1302 - RNA, 20 nt, Artificial Sequence
  HTT spacer sequence ATCN PAM
ucauuuagauuguagaugcu

SEQ ID NO: 1303 - RNA, 20 nt, Artificial Sequence
  HTT spacer sequence ATCN PAM
aaaugaagaugaagaauuga

SEQ ID NO: 1304 - RNA, 20 nt, Artificial Sequence
  HTT spacer sequence ATCN PAM
acaaucuaaaugaagaugaa

SEQ ID NO: 1305 - RNA, 20 nt, Artificial Sequence
  HTT spacer sequence ATCN PAM
ugagaaaaaaagcaucuaca

SEQ ID NO: 1306 - RNA, 20 nt, Artificial Sequence
  HTT spacer sequence ATCN PAM
ucuucuccucggggcucaug

SEQ ID NO: 1307 - RNA, 20 nt, Artificial Sequence
  HTT spacer sequence ATCN PAM
ucuccucggggcucauguug

SEQ ID NO: 1308 - RNA, 20 nt, Artificial Sequence
  HTT spacer sequence ATCN PAM
cugaauacauuggauuuauc

SEQ ID NO: 1309 - RNA, 20 nt, Artificial Sequence
  HTT spacer sequence ATCN PAM
aauguauucagagauaaacg

SEQ ID NO: 1310 - RNA, 20 nt, Artificial Sequence
  HTT spacer sequence ATCN PAM
cuuucuuuguacucuuuuag

SEQ ID NO: 1311 - RNA, 20 nt, Artificial Sequence
  HTT spacer sequence ATCN PAM
cacaaaaaauucuugugauu

SEQ ID NO: 1312 - RNA, 20 nt, Artificial Sequence
  HTT spacer sequence ATCN PAM
caagaauuuuuugugagauu

SEQ ID NO: 1313 - RNA, 20 nt, Artificial Sequence
  HTT spacer sequence ATCN PAM
cuguccucucacagcuuucu

SEQ ID NO: 1314 - RNA, 20 nt, Artificial Sequence
  HTT spacer sequence ATCN PAM
gcagagcaaaauuuuaaaac

SEQ ID NO: 1315 - RNA, 20 nt, Artificial Sequence
  HTT spacer sequence ATCN PAM
cacuauuuaaaucacaaggu

SEQ ID NO: 1316 - RNA, 20 nt, Artificial Sequence
  HTT spacer sequence ATCN PAM
caaggucuagcuggcaauca

SEQ ID NO: 1317 - RNA, 20 nt, Artificial Sequence
  HTT spacer sequence ATCN PAM
gaugggagcacauuacaugu

SEQ ID NO: 1318 - RNA, 20 nt, Artificial Sequence
  HTT spacer sequence ATCN PAM
gauugccagcuagaccuugu

SEQ ID NO: 1319 - RNA, 20 nt, Artificial Sequence
  HTT spacer sequence ATCN PAM
agcaguacaggcuagcacau

SEQ ID NO: 1320 - RNA, 20 nt, Artificial Sequence
  HTT spacer sequence ATCN PAM
acccccuuccugcuagaagc

SEQ ID NO: 1321 - RNA, 20 nt, Artificial Sequence
  HTT spacer sequence ATCN PAM
gccaucucugccucuaaaaa

SEQ ID NO: 1322 - RNA, 20 nt, Artificial Sequence
  HTT spacer sequence ATCN PAM
cugccucuaaaaauauuagu

SEQ ID NO: 1323 - RNA, 20 nt, Artificial Sequence
  HTT spacer sequence ATCN PAM
ggaauaugauucuaugggua

SEQ ID NO: 1324 - RNA, 20 nt, Artificial Sequence
  HTT spacer sequence ATCN PAM
caauaauguagaauaacuca

SEQ ID NO: 1325 - RNA, 20 nt, Artificial Sequence
  HTT spacer sequence ATCN PAM
auauaguuuaagaaagaaag

SEQ ID NO: 1326 - RNA, 20 nt, Artificial Sequence
  HTT spacer sequence ATCN PAM
uauggaauuuacggcauaaa

SEQ ID NO: 1327 - RNA, 20 nt, Artificial Sequence
  HTT spacer sequence ATCN PAM
cauuaauauuaauauauuaa

SEQ ID NO: 1328 - RNA, 20 nt, Artificial Sequence
  HTT spacer sequence ATCN PAM
cauuaauauuaauauauuaa

SEQ ID NO: 1329 - RNA, 20 nt, Artificial Sequence
  HTT spacer sequence ATCN PAM
cauuaauauuaauauauuaa

SEQ ID NO: 1330 - RNA, 20 nt, Artificial Sequence
  HTT spacer sequence ATCN PAM
cauuaauauuaauauauuaa

SEQ ID NO: 1331 - RNA, 20 nt, Artificial Sequence
  HTT spacer sequence ATCN PAM
cauuaucaauauauuaauau

SEQ ID NO: 1332 - RNA, 20 nt, Artificial Sequence
  HTT spacer sequence ATCN PAM
auauauuaauauuauaauca

SEQ ID NO: 1333 - RNA, 20 nt, Artificial Sequence
  HTT spacer sequence ATCN PAM
cauuaucaauauauuaauau

SEQ ID NO: 1334 - RNA, 20 nt, Artificial Sequence
  HTT spacer sequence ATCN PAM
auauauuaauauuauaauua

SEQ ID NO: 1335 - RNA, 20 nt, Artificial Sequence
  HTT spacer sequence ATCN PAM
auauuauauuaauauuauau

SEQ ID NO: 1336 - RNA, 20 nt, Artificial Sequence
  HTT spacer sequence ATCN PAM
auauuauuuuaauauuauau

SEQ ID NO: 1337 - RNA, 20 nt, Artificial Sequence
  HTT spacer sequence ATCN PAM
auauaauauuaauauaauau

SEQ ID NO: 1338 - RNA, 20 nt, Artificial Sequence
  HTT spacer sequence ATCN PAM
auauuauuauauuaauauua

SEQ ID NO: 1339 - RNA, 20 nt, Artificial Sequence
  HTT spacer sequence ATCN PAM
auauuauauuaauauuauau

SEQ ID NO: 1340 - RNA, 20 nt, Artificial Sequence
  HTT spacer sequence ATCN PAM
auauuauuuuaauauuauau

SEQ ID NO: 1341 - RNA, 20 nt, Artificial Sequence
  HTT spacer sequence ATCN PAM
auauaauauuaauauaauau

SEQ ID NO: 1342 - RNA, 20 nt, Artificial Sequence
  HTT spacer sequence ATCN PAM
auauuauuauauuaauauua

SEQ ID NO: 1343 - RNA, 20 nt, Artificial Sequence
  HTT spacer sequence ATCN PAM
auauuauauuaauacuacau

SEQ ID NO: 1344 - RNA, 20 nt, Artificial Sequence
  HTT spacer sequence ATCN PAM
auauuauauuaauacuauau

SEQ ID NO: 1345 - RNA, 20 nt, Artificial Sequence
  HTT spacer sequence ATCN PAM
guaacuauauuaauauaguu

SEQ ID NO: 1346 - RNA, 20 nt, Artificial Sequence
  HTT spacer sequence ATCN PAM
ggaccccacgcugcucucgg

SEQ ID NO: 1347 - RNA, 20 nt, Artificial Sequence
  HTT spacer sequence ATCN PAM
ugccuuccggcuccccgugc

SEQ ID NO: 1348 - RNA, 20 nt, Artificial Sequence
  HTT spacer sequence ATCN PAM
ugggccggaagacgcgccac

SEQ ID NO: 1349 - RNA, 20 nt, Artificial Sequence
  HTT spacer sequence ATCN PAM
ggaacuucugccuguuaacu

SEQ ID NO: 1350 - RNA, 20 nt, Artificial Sequence
  HTT spacer sequence ATCN PAM
guucgaggugaaaguuaaca

SEQ ID NO: 1351 - RNA, 20 nt, Artificial Sequence
  HTT spacer sequence ATCN PAM
gcgaguaagccgagccugcg

SEQ ID NO: 1352 - RNA, 20 nt, Artificial Sequence
  HTT spacer sequence ATCN PAM
cccucgccucgcgcgcgcaa

SEQ ID NO: 1353 - RNA, 20 nt, Artificial Sequence
  HTT spacer sequence ATCN PAM
ccccgguucuucuuggcccc

SEQ ID NO: 1354 - RNA, 20 nt, Artificial Sequence
  HTT spacer sequence ATCN PAM
gccggcggcggcggcgccag

SEQ ID NO: 1355 - RNA, 20 nt, Artificial Sequence
  HTT spacer sequence ATCN PAM
uggccaacucgcugcugcug

SEQ ID NO: 1356 - RNA, 20 nt, Artificial Sequence
  HTT spacer sequence ATCN PAM
uuauguauagcuugauuaau

SEQ ID NO: 1357 - RNA, 20 nt, Artificial Sequence
  HTT spacer sequence ATCN PAM
agcuauacauaaugaugcuu

SEQ ID NO: 1358 - RNA, 20 nt, Artificial Sequence
  HTT spacer sequence ATCN PAM
aauauuauauauucaacuuc

SEQ ID NO: 1359 - RNA, 20 nt, Artificial Sequence
  HTT spacer sequence ATCN PAM
auguauaucuaauauuauau

SEQ ID NO: 1360 - RNA, 20 nt, Artificial Sequence
  HTT spacer sequence ATCN PAM
ccacaaaaaccacaaaauua

SEQ ID NO: 1361 - RNA, 20 nt, Artificial Sequence
  HTT spacer sequence ATCN PAM
cuugaguccagggguuccag

SEQ ID NO: 1362 - RNA, 20 nt, Artificial Sequence
  HTT spacer sequence ATCN PAM
uacccucccacuucagccuc

SEQ ID NO: 1363 - RNA, 20 nt, Artificial Sequence
  HTT spacer sequence ATCN PAM
cagcacuuugggaggcugaa

SEQ ID NO: 1364 - RNA, 20 nt, Artificial Sequence
  HTT spacer sequence ATCN PAM
gacagauaagaaauacuaag

SEQ ID NO: 1365 - RNA, 20 nt, Artificial Sequence
  HTT spacer sequence ATCN PAM
auguaguagucagccaaauu

SEQ ID NO: 1366 - RNA, 20 nt, Artificial Sequence
  HTT spacer sequence ATCN PAM
cagcacuuugggaggccgag

SEQ ID NO: 1367 - RNA, 20 nt, Artificial Sequence
  HTT spacer sequence ATCN PAM
uuuuucuuuaagguaacuau

SEQ ID NO: 1368 - RNA, 20 nt, Artificial Sequence
  HTT spacer sequence ATCN PAM
uuuuggcuuuauuaaagcuc

SEQ ID NO: 1369 - RNA, 20 nt, Artificial Sequence
  HTT spacer sequence ATCN PAM
guaggauucuucaugcuugu

SEQ ID NO: 1370 - RNA, 20 nt, Artificial Sequence
  HTT spacer sequence ATCN PAM
uacagauuauuuuguuugag

SEQ ID NO: 1371 - RNA, 20 nt, Artificial Sequence
  HTT spacer sequence ATCN PAM
aggcauaccuaccguguuca

SEQ ID NO: 1372 - RNA, 20 nt, Artificial Sequence
  HTT spacer sequence ATCN PAM
gaagcagaaguggcccaaaa

SEQ ID NO: 1373 - RNA, 20 nt, Artificial Sequence
  HTT spacer sequence ATCN PAM
uuauaaaaauggaaaauugg

SEQ ID NO: 1374 - RNA, 20 nt, Artificial Sequence
  HTT spacer sequence ATCN PAM
uguuggauuagggcccaccc

SEQ ID NO: 1375 - RNA, 20 nt, Artificial Sequence
  HTT spacer sequence ATCN PAM
aacaugauugguauccuuau

SEQ ID NO: 1376 - RNA, 20 nt, Artificial Sequence
  HTT spacer sequence ATCN PAM
ccaaauaagaucacugucug

SEQ ID NO: 1377 - RNA, 20 nt, Artificial Sequence
  HTT spacer sequence ATCN PAM
uauuuggagauaggguauuu

SEQ ID NO: 1378 - RNA, 20 nt, Artificial Sequence
  HTT spacer sequence ATCN PAM
cugucugaggguuaggggcu

SEQ ID NO: 1379 - RNA, 20 nt, Artificial Sequence
  HTT spacer sequence ATCN PAM
uaacugcuauucauacauuc

SEQ ID NO: 1380 - RNA, 20 nt, Artificial Sequence
  HTT spacer sequence ATCN PAM
ugggcuuuggagccagccag

SEQ ID NO: 1381 - RNA, 20 nt, Artificial Sequence
  HTT spacer sequence ATCN PAM
cagugcccucuuuauacuau

SEQ ID NO: 1382 - RNA, 20 nt, Artificial Sequence
  HTT spacer sequence ATCN PAM
caacgacggugucaguuacu

SEQ ID NO: 1383 - RNA, 20 nt, Artificial Sequence
  HTT spacer sequence ATCN PAM
cuagagccaagcuuagugcc

SEQ ID NO: 1384 - RNA, 20 nt, Artificial Sequence
  HTT spacer sequence ATCN PAM
cuguaucccuagagccaagc

SEQ ID NO: 1385 - RNA, 20 nt, Artificial Sequence
  HTT spacer sequence ATCN PAM
guuuuuauucaucccuguau

SEQ ID NO: 1386 - RNA, 20 nt, Artificial Sequence
  HTT spacer sequence ATCN PAM
ccuucugagaagcugacagu

SEQ ID NO: 1387 - RNA, 20 nt, Artificial Sequence
  HTT spacer sequence ATCN PAM
auccuaaagauccauauuga

SEQ ID NO: 1388 - RNA, 20 nt, Artificial Sequence
  HTT spacer sequence ATCN PAM
uaaagauccauauugagugg

SEQ ID NO: 1389 - RNA, 20 nt, Artificial Sequence
  HTT spacer sequence ATCN PAM
uuaggauagauuaauacagc

SEQ ID NO: 1390 - RNA, 20 nt, Artificial Sequence
  HTT spacer sequence ATCN PAM
auauugagugggaagaaaaa

SEQ ID NO: 1391 - RNA, 20 nt, Artificial Sequence
  HTT spacer sequence ATCN PAM
uuaaaauuacuuuauguaga

SEQ ID NO: 1392 - RNA, 20 nt, Artificial Sequence
  HTT spacer sequence ATCN PAM
agcuaccucagccuccucag

SEQ ID NO: 1393 - RNA, 20 nt, Artificial Sequence
  HTT spacer sequence ATCN PAM
cuugaguccaggaagucaag

SEQ ID NO: 1394 - RNA, 20 nt, Artificial Sequence
  HTT spacer sequence ATCN PAM
caaaaaagaaaaaaaauggu

SEQ ID NO: 1395 - RNA, 20 nt, Artificial Sequence
  HTT spacer sequence ATCN PAM
uauuuaaucuccacaacaag

SEQ ID NO: 1396 - RNA, 20 nt, Artificial Sequence
  HTT spacer sequence ATCN PAM
ccacaacaagccuacuagau

SEQ ID NO: 1397 - RNA, 20 nt, Artificial Sequence
  HTT spacer sequence ATCN PAM
aguaggcuuguuguggagau

SEQ ID NO: 1398 - RNA, 20 nt, Artificial Sequence
  HTT spacer sequence ATCN PAM
cagcaucuaguaggcuuguu

SEQ ID NO: 1399 - RNA, 20 nt, Artificial Sequence
  HTT spacer sequence ATCN PAM
caaugugcaaauaccccaga

SEQ ID NO: 1400 - RNA, 20 nt, Artificial Sequence
  HTT spacer sequence ATCN PAM
aggugcuguucugggguauu

SEQ ID NO: 1401 - RNA, 20 nt, Artificial Sequence
  HTT spacer sequence ATCN PAM
ggaccaguagugaaagacaa

SEQ ID NO: 1402 - RNA, 20 nt, Artificial Sequence
  HTT spacer sequence ATCN PAM
caugccugccaagggcaagc

SEQ ID NO: 1403 - RNA, 20 nt, Artificial Sequence
  HTT spacer sequence ATCN PAM
gccugcagaaaggagcuacc

SEQ ID NO: 1404 - RNA, 20 nt, Artificial Sequence
  HTT spacer sequence ATCN PAM
ucccaucgucugugcagccc

SEQ ID NO: 1405 - RNA, 20 nt, Artificial Sequence
  HTT spacer sequence ATCN PAM
caucgucugugcagcccuca

SEQ ID NO: 1406 - RNA, 20 nt, Artificial Sequence
  HTT spacer sequence ATCN PAM
ucugugcagcccucagagga

SEQ ID NO: 1407 - RNA, 20 nt, Artificial Sequence
  HTT spacer sequence ATCN PAM
cuggcuugaaggugagguuu

SEQ ID NO: 1408 - RNA, 20 nt, Artificial Sequence
  HTT spacer sequence ATCN PAM
uugagcagagaacaaguccc

SEQ ID NO: 1409 - RNA, 20 nt, Artificial Sequence
  HTT spacer sequence ATCN PAM
ucaguggugcuucugugccc

SEQ ID NO: 1410 - RNA, 20 nt, Artificial Sequence
  HTT spacer sequence ATCN PAM
acaagugcccugagacaugg

SEQ ID NO: 1411 - RNA, 20 nt, Artificial Sequence
  HTT spacer sequence ATCN PAM
ugcuuguuuuccacuugugg

SEQ ID NO: 1412 - RNA, 20 nt, Artificial Sequence
  HTT spacer sequence ATCN PAM
agagggcaaaauacugcauc

SEQ ID NO: 1413 - RNA, 20 nt, Artificial Sequence
  HTT spacer sequence ATCN PAM
ggcaagugacagcucagcuc

SEQ ID NO: 1414 - RNA, 20 nt, Artificial Sequence
  HTT spacer sequence ATCN PAM
ucccccucaaauccagucca

SEQ ID NO: 1415 - RNA, 20 nt, Artificial Sequence
  HTT spacer sequence ATCN PAM
uguggugugggacgugaguc

SEQ ID NO: 1416 - RNA, 20 nt, Artificial Sequence
  HTT spacer sequence ATCN PAM
aacaugacauauuguucagg

SEQ ID NO: 1417 - RNA, 20 nt, Artificial Sequence
  HTT spacer sequence ATCN PAM
uguuuacagauuuggaaacu

SEQ ID NO: 1418 - RNA, 20 nt, Artificial Sequence
  HTT spacer sequence ATCN PAM
guaaacaagaucuaacauga

SEQ ID NO: 1419 - RNA, 20 nt, Artificial Sequence
  HTT spacer sequence ATCN PAM
ugaauaaaaauacaugcuua

SEQ ID NO: 1420 - RNA, 20 nt, Artificial Sequence
  HTT spacer sequence ATCN PAM
uaacauuucuguuugagugg

SEQ ID NO: 1421 - RNA, 20 nt, Artificial Sequence
  HTT spacer sequence ATCN PAM
uccugaauuugggagaaaaa

SEQ ID NO: 1422 - RNA, 20 nt, Artificial Sequence
  HTT spacer sequence ATCN PAM
ccuuccauuuuuuacuacga

SEQ ID NO: 1423 - RNA, 20 nt, Artificial Sequence
  HTT spacer sequence ATCN PAM
aagcauuaguaggcacuauu

SEQ ID NO: 1424 - RNA, 20 nt, Artificial Sequence
  HTT spacer sequence ATCN PAM
ggcaugauaccauucauuag

SEQ ID NO: 1425 - RNA, 20 nt, Artificial Sequence
  HTT spacer sequence ATCN PAM
ugaagauauaaggagaauuu

SEQ ID NO: 1426 - RNA, 20 nt, Artificial Sequence
  HTT spacer sequence ATCN PAM
uuuagauuuucugaucugca

SEQ ID NO: 1427 - RNA, 20 nt, Artificial Sequence
  HTT spacer sequence ATCN PAM
aaaggauuuuuuuuccugag

SEQ ID NO: 1428 - RNA, 20 nt, Artificial Sequence
  HTT spacer sequence ATCN PAM
gaaaaucuaaaggauuuuuu

SEQ ID NO: 1429 - RNA, 20 nt, Artificial Sequence
  HTT spacer sequence ATCN PAM
gcaguuauaaaguuggcugu

SEQ ID NO: 1430 - RNA, 20 nt, Artificial Sequence
  HTT spacer sequence ATCN PAM
aucuuuccuuuaguacuauu

SEQ ID NO: 1431 - RNA, 20 nt, Artificial Sequence
  HTT spacer sequence ATCN PAM
uuccuuuaguacuauuguag

SEQ ID NO: 1432 - RNA, 20 nt, Artificial Sequence
  HTT spacer sequence ATCN PAM
uucuuuaaaaggaacuacaa

SEQ ID NO: 1433 - RNA, 20 nt, Artificial Sequence
  HTT spacer sequence ATCN PAM
ucuuucuuuaaaaggaacua

SEQ ID NO: 1434 - RNA, 20 nt, Artificial Sequence
  HTT spacer sequence ATCN PAM
uuuauccguuuuaaaaauug

SEQ ID NO: 1435 - RNA, 20 nt, Artificial Sequence
  HTT spacer sequence ATCN PAM
guuuuaaaaauuggauuguc

SEQ ID NO: 1436 - RNA, 20 nt, Artificial Sequence
  HTT spacer sequence ATCN PAM
aauuuuuaaaacggauaaaa

SEQ ID NO: 1437 - RNA, 20 nt, Artificial Sequence
  HTT spacer sequence ATCN PAM
uauaccucaacaacaaaaag

SEQ ID NO: 1438 - RNA, 20 nt, Artificial Sequence
  HTT spacer sequence ATCN PAM
agaacauagaaagaaaucuu

SEQ ID NO: 1439 - RNA, 20 nt, Artificial Sequence
  HTT spacer sequence ATCN PAM
aauaucuagaacauagaaag

SEQ ID NO: 1440 - RNA, 20 nt, Artificial Sequence
  HTT spacer sequence ATCN PAM
guuaagcaucuaauaucuag

SEQ ID NO: 1441 - RNA, 20 nt, Artificial Sequence
  HTT spacer sequence ATCN PAM
ccugaacccgggaggcagag

SEQ ID NO: 1442 - RNA, 20 nt, Artificial Sequence
  HTT spacer sequence ATCN PAM
agugagaacuguaaggcuua

SEQ ID NO: 1443 - RNA, 20 nt, Artificial Sequence
  HTT spacer sequence ATCN PAM
uuacaguccaccacaugcug

SEQ ID NO: 1444 - RNA, 20 nt, Artificial Sequence
  HTT spacer sequence ATCN PAM
cuuugcuucacccagaaaag

SEQ ID NO: 1445 - RNA, 20 nt, Artificial Sequence
  HTT spacer sequence ATCN PAM
uuuucugggugaagcaaagg

SEQ ID NO: 1446 - RNA, 20 nt, Artificial Sequence
  HTT spacer sequence ATCN PAM
guugcuugucacaaagacug

SEQ ID NO: 1447 - RNA, 20 nt, Artificial Sequence
  HTT spacer sequence ATCN PAM
cagaacugccugaagagacg

SEQ ID NO: 1448 - RNA, 20 nt, Artificial Sequence
  HTT spacer sequence ATCN PAM
aagaauucaaugugccucuu

SEQ ID NO: 1449 - RNA, 20 nt, Artificial Sequence
  HTT spacer sequence ATCN PAM
ccauauugagcaaccaccca

SEQ ID NO: 1450 - RNA, 20 nt, Artificial Sequence
  HTT spacer sequence ATCN PAM
uaugcuuuugaaaauguaaa

SEQ ID NO: 1451 - RNA, 20 nt, Artificial Sequence
  HTT spacer sequence ATCN PAM
cagcauuuuggaaggcugag

SEQ ID NO: 1452 - RNA, 20 nt, Artificial Sequence
  HTT spacer sequence ATCN PAM
gcccgccucagccuuccaaa

SEQ ID NO: 1453 - RNA, 20 nt, Artificial Sequence
  HTT spacer sequence ATCN PAM
ugaggucaggagaucgagac

SEQ ID NO: 1454 - RNA, 20 nt, Artificial Sequence
  HTT spacer sequence ATCN PAM
ccugaccucaugauccgccc

SEQ ID NO: 1455 - RNA, 20 nt, Artificial Sequence
  HTT spacer sequence ATCN PAM
agaccauccugaccaacaca

SEQ ID NO: 1456 - RNA, 20 nt, Artificial Sequence
  HTT spacer sequence ATCN PAM
ugaccaacacagugaaaccc

SEQ ID NO: 1457 - RNA, 20 nt, Artificial Sequence
  HTT spacer sequence ATCN PAM
cuugaaccaggaggcggagg

SEQ ID NO: 1458 - RNA, 20 nt, Artificial Sequence
  HTT spacer sequence ATCN PAM
guaucagucaggauucaacc

SEQ ID NO: 1459 - RNA, 20 nt, Artificial Sequence
  HTT spacer sequence ATCN PAM
gucaggauucaaccagagaa

SEQ ID NO: 1460 - RNA, 20 nt, Artificial Sequence
  HTT spacer sequence ATCN PAM
ugacugauacagaugccacu

SEQ ID NO: 1461 - RNA, 20 nt, Artificial Sequence
  HTT spacer sequence ATCN PAM
cuguucuuaacaccuuccaa

SEQ ID NO: 1462 - RNA, 20 nt, Artificial Sequence
  HTT spacer sequence ATCN PAM
guuggaagguguuaagaaca

SEQ ID NO: 1463 - RNA, 20 nt, Artificial Sequence
  HTT spacer sequence ATCN PAM
cuuaaaaaaaaaaaaaaaag

SEQ ID NO: 1464 - RNA, 20 nt, Artificial Sequence
  HTT spacer sequence ATCN PAM
caucucuuaaaaaaaaaaaa

SEQ ID NO: 1465 - RNA, 20 nt, Artificial Sequence
  HTT spacer sequence ATCN PAM
cgcuauguugcucaggcugg

SEQ ID NO: 1466 - RNA, 20 nt, Artificial Sequence
  HTT spacer sequence ATCN PAM
cuccaaucaggcagaauaug

SEQ ID NO: 1467 - RNA, 20 nt, Artificial Sequence
  HTT spacer sequence ATCN PAM
ggcagaauaugaaguugccg

SEQ ID NO: 1468 - RNA, 20 nt, Artificial Sequence
  HTT spacer sequence ATCN PAM
gcaacuucauauucugccug

SEQ ID NO: 1469 - RNA, 20 nt, Artificial Sequence
  HTT spacer sequence ATCN PAM
ucggcaacuucauauucugc

SEQ ID NO: 1470 - RNA, 20 nt, Artificial Sequence
  HTT spacer sequence ATCN PAM
cuucgguccucaucaucggc

SEQ ID NO: 1471 - RNA, 20 nt, Artificial Sequence
  HTT spacer sequence ATCN PAM
uagauagauucuucaaugau

SEQ ID NO: 1472 - RNA, 20 nt, Artificial Sequence
  HTT spacer sequence ATCN PAM
aagauugacaguccacaauc

SEQ ID NO: 1473 - RNA, 20 nt, Artificial Sequence
  HTT spacer sequence ATCN PAM
aucuaagauugacaguccac

SEQ ID NO: 1474 - RNA, 20 nt, Artificial Sequence
  HTT spacer sequence ATCN PAM
uugaagaaucuaucuaagau

SEQ ID NO: 1475 - RNA, 20 nt, Artificial Sequence
  HTT spacer sequence ATCN PAM
acaaauuuuuauucuaaaga

SEQ ID NO: 1476 - RNA, 20 nt, Artificial Sequence
  HTT spacer sequence ATCN PAM
cagcacuucgggaggcugag

SEQ ID NO: 1477 - RNA, 20 nt, Artificial Sequence
  HTT spacer sequence ATCN PAM
uccuuccucagccucccgaa

SEQ ID NO: 1478 - RNA, 20 nt, Artificial Sequence
  HTT spacer sequence ATCN PAM
cuuuagcccaggaguucgag

SEQ ID NO: 1479 - RNA, 20 nt, Artificial Sequence
  HTT spacer sequence ATCN PAM
cgaacuccugggcuaaagag

SEQ ID NO: 1480 - RNA, 20 nt, Artificial Sequence
  HTT spacer sequence ATCN PAM
gcauggccaacauagugaga

SEQ ID NO: 1481 - RNA, 20 nt, Artificial Sequence
  HTT spacer sequence ATCN PAM
cuacaaaaaaauaaacaaaa

SEQ ID NO: 1482 - RNA, 20 nt, Artificial Sequence
  HTT spacer sequence ATCN PAM
guagucccagcuacuuggga

SEQ ID NO: 1483 - RNA, 20 nt, Artificial Sequence
  HTT spacer sequence ATCN PAM
aacaaaaugcaaaagaggaa

SEQ ID NO: 1484 - RNA, 20 nt, Artificial Sequence
  HTT spacer sequence ATCN PAM
aauuguuaguuuccucauga

SEQ ID NO: 1485 - RNA, 20 nt, Artificial Sequence
  HTT spacer sequence ATCN PAM
cuuagaaaauugauucagug

SEQ ID NO: 1486 - RNA, 20 nt, Artificial Sequence
  HTT spacer sequence ATCN PAM
auuuucuaagagaucuaauu

SEQ ID NO: 1487 - RNA, 20 nt, Artificial Sequence
  HTT spacer sequence ATCN PAM
ugggguuuguuguacagauu

SEQ ID NO: 1488 - RNA, 20 nt, Artificial Sequence
  HTT spacer sequence ATCN PAM
guacaacaaaccccaugaug

SEQ ID NO: 1489 - RNA, 20 nt, Artificial Sequence
  HTT spacer sequence ATCN PAM
cccagguauuaagcuuagca

SEQ ID NO: 1490 - RNA, 20 nt, Artificial Sequence
  HTT spacer sequence ATCN PAM
uaaccaaaaccaagugggcu

SEQ ID NO: 1491 - RNA, 20 nt, Artificial Sequence
  HTT spacer sequence ATCN PAM
gaaaaucaauuacuauaaua

SEQ ID NO: 1492 - RNA, 20 nt, Artificial Sequence
  HTT spacer sequence ATCN PAM
auuacuauaauacaccauau

SEQ ID NO: 1493 - RNA, 20 nt, Artificial Sequence
  HTT spacer sequence ATCN PAM
ugugguuuuuaaauauuuua

SEQ ID NO: 1494 - RNA, 20 nt, Artificial Sequence
  HTT spacer sequence ATCN PAM
uaauaaaaauagaaaaagua

SEQ ID NO: 1495 - RNA, 20 nt, Artificial Sequence
  HTT spacer sequence ATCN PAM
augaaauacccacagccaac

SEQ ID NO: 1496 - RNA, 20 nt, Artificial Sequence
  HTT spacer sequence ATCN PAM
uacuuaaaugugaaagacua

SEQ ID NO: 1497 - RNA, 20 nt, Artificial Sequence
  HTT spacer sequence ATCN PAM
ugcagccuuaccagacucac

SEQ ID NO: 1498 - RNA, 20 nt, Artificial Sequence
  HTT spacer sequence ATCN PAM
aaaaaaaaagaaauuaagaa

SEQ ID NO: 1499 - RNA, 20 nt, Artificial Sequence
  HTT spacer sequence ATCN PAM
aaaaagaauaaaauacuuaa

SEQ ID NO: 1500 - RNA, 20 nt, Artificial Sequence
  HTT spacer sequence ATCN PAM
ccuguucguggaucagaaga

SEQ ID NO: 1501 - RNA, 20 nt, Artificial Sequence
  HTT spacer sequence ATCN PAM
acgaacaggagaugucuuuc

SEQ ID NO: 1502 - RNA, 20 nt, Artificial Sequence
  HTT spacer sequence ATCN PAM
gaagacuuaauauuguuaag

SEQ ID NO: 1503 - RNA, 20 nt, Artificial Sequence
  HTT spacer sequence ATCN PAM
uaacaauauuaagucuucug

SEQ ID NO: 1504 - RNA, 20 nt, Artificial Sequence
  HTT spacer sequence ATCN PAM
auuuggggaguacugccauc

SEQ ID NO: 1505 - RNA, 20 nt, Artificial Sequence
  HTT spacer sequence ATCN PAM
auagauucaauauaaucccu

SEQ ID NO: 1506 - RNA, 20 nt, Artificial Sequence
  HTT spacer sequence ATCN PAM
agacaguaugguccuggcau

SEQ ID NO: 1507 - RNA, 20 nt, Artificial Sequence
  HTT spacer sequence ATCN PAM
ugccaggaccauacugucuu

SEQ ID NO: 1508 - RNA, 20 nt, Artificial Sequence
  HTT spacer sequence ATCN PAM
uuaaacggucuugauagaau

SEQ ID NO: 1509 - RNA, 20 nt, Artificial Sequence
  HTT spacer sequence ATCN PAM
agaccguuuaaugauuaaca

SEQ ID NO: 1510 - RNA, 20 nt, Artificial Sequence
  HTT spacer sequence ATCN PAM
accugcuauuuaguuucaga

SEQ ID NO: 1511 - RNA, 20 nt, Artificial Sequence
  HTT spacer sequence ATCN PAM
guugaggucaggaguucaag

SEQ ID NO: 1512 - RNA, 20 nt, Artificial Sequence
  HTT spacer sequence ATCN PAM
acauaacucugccucccaaa

SEQ ID NO: 1513 - RNA, 20 nt, Artificial Sequence
  HTT spacer sequence ATCN PAM
aaguuguagcguauuucaga

SEQ ID NO: 1514 - RNA, 20 nt, Artificial Sequence
  HTT spacer sequence ATCN PAM
auucauccacagacaccugg

SEQ ID NO: 1515 - RNA, 20 nt, Artificial Sequence
  HTT spacer sequence ATCN PAM
acagacaccuggguuguuuu

SEQ ID NO: 1516 - RNA, 20 nt, Artificial Sequence
  HTT spacer sequence ATCN PAM
gcacacccauguucauugca

SEQ ID NO: 1517 - RNA, 20 nt, Artificial Sequence
  HTT spacer sequence ATCN PAM
ccugaagucaggaguuugag

SEQ ID NO: 1518 - RNA, 20 nt, Artificial Sequence
  HTT spacer sequence ATCN PAM
acccaccucggccucccaaa

SEQ ID NO: 1519 - RNA, 20 nt, Artificial Sequence
  HTT spacer sequence ATCN PAM
cuaaugguuauguauuuggu

SEQ ID NO: 1520 - RNA, 20 nt, Artificial Sequence
  HTT spacer sequence ATCN PAM
ggagguauuucugguaaagg

SEQ ID NO: 1521 - RNA, 20 nt, Artificial Sequence
  HTT spacer sequence ATCN PAM
acauucugucacaacaucug

SEQ ID NO: 1522 - RNA, 20 nt, Artificial Sequence
  HTT spacer sequence ATCN PAM
augacuaaccccaaaacaga

SEQ ID NO: 1523 - RNA, 20 nt, Artificial Sequence
  HTT spacer sequence ATCN PAM
aaaccacccagcuccucagu

SEQ ID NO: 1524 - RNA, 20 nt, Artificial Sequence
  HTT spacer sequence ATCN PAM
gugggguguggaacuggccg

SEQ ID NO: 1525 - RNA, 20 nt, Artificial Sequence
  HTT spacer sequence ATCN PAM
aacaagaauaaguaagauga

SEQ ID NO: 1526 - RNA, 20 nt, Artificial Sequence
  HTT spacer sequence ATCN PAM
caaacacuagaauaccauua

SEQ ID NO: 1527 - RNA, 20 nt, Artificial Sequence
  HTT spacer sequence ATCN PAM
uuuuggaaagcaguucaaau

SEQ ID NO: 1528 - RNA, 20 nt, Artificial Sequence
  HTT spacer sequence ATCN PAM
gagagcaaagaccaagccug

SEQ ID NO: 1529 - RNA, 20 nt, Artificial Sequence
  HTT spacer sequence ATCN PAM
caggaccaguaucagagagc

SEQ ID NO: 1530 - RNA, 20 nt, Artificial Sequence
  HTT spacer sequence ATCN PAM
caauaucccaggaccaguau

SEQ ID NO: 1531 - RNA, 20 nt, Artificial Sequence
  HTT spacer sequence ATCN PAM
gauuucuuccugucuucauc

SEQ ID NO: 1532 - RNA, 20 nt, Artificial Sequence
  HTT spacer sequence ATCN PAM
gauucuuaucacaauauccc

SEQ ID NO: 1533 - RNA, 20 nt, Artificial Sequence
  HTT spacer sequence ATCN PAM
gggaugccacagaggccagg

SEQ ID NO: 1534 - RNA, 20 nt, Artificial Sequence
  HTT spacer sequence ATCN PAM
cagaugaagacaggaagaaa

SEQ ID NO: 1535 - RNA, 20 nt, Artificial Sequence
  HTT spacer sequence ATCN PAM
uucaguccacgcuuuugucc

SEQ ID NO: 1536 - RNA, 20 nt, Artificial Sequence
  HTT spacer sequence ATCN PAM
cucuccugggcauguacaca

SEQ ID NO: 1537 - RNA, 20 nt, Artificial Sequence
  HTT spacer sequence ATCN PAM
ugccuauuucauacaguuac

SEQ ID NO: 1538 - RNA, 20 nt, Artificial Sequence
  HTT spacer sequence ATCN PAM
cuguuuuacagaaggagaaa

SEQ ID NO: 1539 - RNA, 20 nt, Artificial Sequence
  HTT spacer sequence ATCN PAM
agcagcaugcuucccaugug

SEQ ID NO: 1540 - RNA, 20 nt, Artificial Sequence
  HTT spacer sequence ATCN PAM
uucuauuucacugcuuuuuu

SEQ ID NO: 1541 - RNA, 20 nt, Artificial Sequence
  HTT spacer sequence ATCN PAM
uuuucuagaguugcccauaa

SEQ ID NO: 1542 - RNA, 20 nt, Artificial Sequence
  HTT spacer sequence ATCN PAM
guacauaccuuuccagccau

SEQ ID NO: 1543 - RNA, 20 nt, Artificial Sequence
  HTT spacer sequence ATCN PAM
aguuuaaaaucaguacauac

SEQ ID NO: 1544 - RNA, 20 nt, Artificial Sequence
  HTT spacer sequence ATCN PAM
uucagccucagccuccugag

SEQ ID NO: 1545 - RNA, 20 nt, Artificial Sequence
  HTT spacer sequence ATCN PAM
cguacuauagccuugaaguc

SEQ ID NO: 1546 - RNA, 20 nt, Artificial Sequence
  HTT spacer sequence ATCN PAM
ucccguacuauagccuugaa

SEQ ID NO: 1547 - RNA, 20 nt, Artificial Sequence
  HTT spacer sequence ATCN PAM
agccugugaauagccacugc

SEQ ID NO: 1548 - RNA, 20 nt, Artificial Sequence
  HTT spacer sequence ATCN PAM
cuguugguucaguggcuaga

SEQ ID NO: 1549 - RNA, 20 nt, Artificial Sequence
  HTT spacer sequence ATCN PAM
uugagguucuuuuuucaaag

SEQ ID NO: 1550 - RNA, 20 nt, Artificial Sequence
  HTT spacer sequence ATCN PAM
uuugaaaaaagaaccucaaa

SEQ ID NO: 1551 - RNA, 20 nt, Artificial Sequence
  HTT spacer sequence ATCN PAM
aggaggcggagguugcagug

SEQ ID NO: 1552 - RNA, 20 nt, Artificial Sequence
  HTT spacer sequence ATCN PAM
aggcucacugcaaccuccgc

SEQ ID NO: 1553 - RNA, 20 nt, Artificial Sequence
  HTT spacer sequence ATCN PAM
ugccacugcacuccagcccu

SEQ ID NO: 1554 - RNA, 20 nt, Artificial Sequence
  HTT spacer sequence ATCN PAM
caaaaaaaaaaaaaaaaaaa

SEQ ID NO: 1555 - RNA, 20 nt, Artificial Sequence
  HTT spacer sequence ATCN PAM
uuuuuuuuuuuuuuuuuuuu

SEQ ID NO: 1556 - RNA, 20 nt, Artificial Sequence
  HTT spacer sequence ATCN PAM
ugcuagagggagccacaguc

SEQ ID NO: 1557 - RNA, 20 nt, Artificial Sequence
  HTT spacer sequence ATCN PAM
ccuuugagcagaaugguuca

SEQ ID NO: 1558 - RNA, 20 nt, Artificial Sequence
  HTT spacer sequence ATCN PAM
augagaaaaacaaguuucag

SEQ ID NO: 1559 - RNA, 20 nt, Artificial Sequence
  HTT spacer sequence ATCN PAM
gccuuuuccuagaacucugu

SEQ ID NO: 1560 - RNA, 20 nt, Artificial Sequence
  HTT spacer sequence ATCN PAM
gcucucccaguacacuguug

SEQ ID NO: 1561 - RNA, 20 nt, Artificial Sequence
  HTT spacer sequence ATCN PAM
uugccaacugugagaaucca

SEQ ID NO: 1562 - RNA, 20 nt, Artificial Sequence
  HTT spacer sequence ATCN PAM
acauggaauuuugagcaaaa

SEQ ID NO: 1563 - RNA, 20 nt, Artificial Sequence
  HTT spacer sequence ATCN PAM
cuucucuuggugacuucacc

SEQ ID NO: 1564 - RNA, 20 nt, Artificial Sequence
  HTT spacer sequence ATCN PAM
agcauggaaaccagcuucuu

SEQ ID NO: 1565 - RNA, 20 nt, Artificial Sequence
  HTT spacer sequence ATCN PAM
gggcaaagugacugagcugg

SEQ ID NO: 1566 - RNA, 20 nt, Artificial Sequence
  HTT spacer sequence ATCN PAM
ucuuuccaucugggcaaagu

SEQ ID NO: 1567 - RNA, 20 nt, Artificial Sequence
  HTT spacer sequence ATCN PAM
uggaaauuccacaaugcgga

SEQ ID NO: 1568 - RNA, 20 nt, Artificial Sequence
  HTT spacer sequence ATCN PAM
aaagguguuuggaaaugugu

SEQ ID NO: 1569 - RNA, 20 nt, Artificial Sequence
  HTT spacer sequence ATCN PAM
uaaggaaaugacucacagac

SEQ ID NO: 1570 - RNA, 20 nt, Artificial Sequence
  HTT spacer sequence ATCN PAM
caaaacaaaacaaaacaaaa

SEQ ID NO: 1571 - RNA, 20 nt, Artificial Sequence
  HTT spacer sequence ATCN PAM
cgccauugcacuccagucua

SEQ ID NO: 1572 - RNA, 20 nt, Artificial Sequence
  HTT spacer sequence ATCN PAM
cagcucaccacaaccuccgc

SEQ ID NO: 1573 - RNA, 20 nt, Artificial Sequence
  HTT spacer sequence ATCN PAM
cuugaacucaggaggcggag

SEQ ID NO: 1574 - RNA, 20 nt, Artificial Sequence
  HTT spacer sequence ATCN PAM
cccgaggucgggaguucaag

SEQ ID NO: 1575 - RNA, 20 nt, Artificial Sequence
  HTT spacer sequence ATCN PAM
gcccuccucagccucccaaa

SEQ ID NO: 1576 - RNA, 20 nt, Artificial Sequence
  HTT spacer sequence ATCN PAM
cagcacuuugggaggcugag

SEQ ID NO: 1577 - RNA, 20 nt, Artificial Sequence
  HTT spacer sequence ATCN PAM
uauuuaaacaacaccccggg

SEQ ID NO: 1578 - RNA, 20 nt, Artificial Sequence
  HTT spacer sequence ATCN PAM
aggagacccaucauauuuaa

SEQ ID NO: 1579 - RNA, 20 nt, Artificial Sequence
  HTT spacer sequence ATCN PAM
accaacuacaguggucucca

SEQ ID NO: 1580 - RNA, 20 nt, Artificial Sequence
  HTT spacer sequence ATCN PAM
ccagaccagaacugcugcug

SEQ ID NO: 1581 - RNA, 20 nt, Artificial Sequence
  HTT spacer sequence ATCN PAM
cuuuaaauccccagaccaga

SEQ ID NO: 1582 - RNA, 20 nt, Artificial Sequence
  HTT spacer sequence ATCN PAM
cuccagguaacuaguaaggu

SEQ ID NO: 1583 - RNA, 20 nt, Artificial Sequence
  HTT spacer sequence ATCN PAM
uauggaguucaagaacuuuu

SEQ ID NO: 1584 - RNA, 20 nt, Artificial Sequence
  HTT spacer sequence ATCN PAM
gagucacacccgggcagugu

SEQ ID NO: 1585 - RNA, 20 nt, Artificial Sequence
  HTT spacer sequence ATCN PAM
guuaugcaccugcagcuuga

SEQ ID NO: 1586 - RNA, 20 nt, Artificial Sequence
  HTT spacer sequence ATCN PAM
aaucguaugcuugcucuaau

SEQ ID NO: 1587 - RNA, 20 nt, Artificial Sequence
  HTT spacer sequence ATCN PAM
uaugcuugcucuaaucccuc

SEQ ID NO: 1588 - RNA, 20 nt, Artificial Sequence
  HTT spacer sequence ATCN PAM
cuccaugauagauauuucug

SEQ ID NO: 1589 - RNA, 20 nt, Artificial Sequence
  HTT spacer sequence ATCN PAM
uggagggauuagagcaagca

SEQ ID NO: 1590 - RNA, 20 nt, Artificial Sequence
  HTT spacer sequence ATCN PAM
aucauggagggauuagagca

SEQ ID NO: 1591 - RNA, 20 nt, Artificial Sequence
  HTT spacer sequence ATCN PAM
acccucuguuugaauauguc

SEQ ID NO: 1592 - RNA, 20 nt, Artificial Sequence
  HTT spacer sequence ATCN PAM
gccuuuaaugaucugcaaau

SEQ ID NO: 1593 - RNA, 20 nt, Artificial Sequence
  HTT spacer sequence ATCN PAM
uuaaaggcagauuagcaaga

SEQ ID NO: 1594 - RNA, 20 nt, Artificial Sequence
  HTT spacer sequence ATCN PAM
gcaaauguaaugacucagau

SEQ ID NO: 1595 - RNA, 20 nt, Artificial Sequence
  HTT spacer sequence ATCN PAM
gagucauuacauuugcagau

SEQ ID NO: 1596 - RNA, 20 nt, Artificial Sequence
  HTT spacer sequence ATCN PAM
uauuaagacugacauguuuu

SEQ ID NO: 1597 - RNA, 20 nt, Artificial Sequence
  HTT spacer sequence ATCN PAM
uagcacuucgggaggccaag

SEQ ID NO: 1598 - RNA, 20 nt, Artificial Sequence
  HTT spacer sequence ATCN PAM
gccuaccuuggccucccgaa

SEQ ID NO: 1599 - RNA, 20 nt, Artificial Sequence
  HTT spacer sequence ATCN PAM
cuugagcccagaaguuccag

SEQ ID NO: 1600 - RNA, 20 nt, Artificial Sequence
  HTT spacer sequence ATCN PAM
ggaacuucugggcucaagcg

SEQ ID NO: 1601 - RNA, 20 nt, Artificial Sequence
  HTT spacer sequence ATCN PAM
gccuaggcaacauggcaaga

SEQ ID NO: 1602 - RNA, 20 nt, Artificial Sequence
  HTT spacer sequence ATCN PAM
cuauuuaaauauuuaauaua

SEQ ID NO: 1603 - RNA, 20 nt, Artificial Sequence
  HTT spacer sequence ATCN PAM
ucuuuuuuaauguauuuauu

SEQ ID NO: 1604 - RNA, 20 nt, Artificial Sequence
  HTT spacer sequence ATCN PAM
uaauuauacugagucuuucu

SEQ ID NO: 1605 - RNA, 20 nt, Artificial Sequence
  HTT spacer sequence ATCN PAM
auacaaucauaauuauacug

SEQ ID NO: 1606 - RNA, 20 nt, Artificial Sequence
  HTT spacer sequence ATCN PAM
guuaaaaaguaaucuauaca

SEQ ID NO: 1607 - RNA, 20 nt, Artificial Sequence
  HTT spacer sequence ATCN PAM
uuuguuugggaacccaagua

SEQ ID NO: 1608 - RNA, 20 nt, Artificial Sequence
  HTT spacer sequence ATCN PAM
agauucuaaucgugcauuug

SEQ ID NO: 1609 - RNA, 20 nt, Artificial Sequence
  HTT spacer sequence ATCN PAM
ggauuaaagggcaccgaggc

SEQ ID NO: 1610 - RNA, 20 nt, Artificial Sequence
  HTT spacer sequence ATCN PAM
ugcauuugcuuuuuccaagu

SEQ ID NO: 1611 - RNA, 20 nt, Artificial Sequence
  HTT spacer sequence ATCN PAM
cugcugucaugguuuuaggc

SEQ ID NO: 1612 - RNA, 20 nt, Artificial Sequence
  HTT spacer sequence ATCN PAM
cuuccagcagcgugaucuug

SEQ ID NO: 1613 - RNA, 20 nt, Artificial Sequence
  HTT spacer sequence ATCN PAM
cgcugcuggaagugauacga

SEQ ID NO: 1614 - RNA, 20 nt, Artificial Sequence
  HTT spacer sequence ATCN PAM
ugggcccgccaucgugaucu

SEQ ID NO: 1615 - RNA, 20 nt, Artificial Sequence
  HTT spacer sequence ATCN PAM
ugaucucaucucuagcaggg

SEQ ID NO: 1616 - RNA, 20 nt, Artificial Sequence
  HTT spacer sequence ATCN PAM
cgauggcgggcccaagauca

SEQ ID NO: 1617 - RNA, 20 nt, Artificial Sequence
  HTT spacer sequence ATCN PAM
caucucuagcagggaaauaa

SEQ ID NO: 1618 - RNA, 20 nt, Artificial Sequence
  HTT spacer sequence ATCN PAM
cuagcagggaaauaaucggc

SEQ ID NO: 1619 - RNA, 20 nt, Artificial Sequence
  HTT spacer sequence ATCN PAM
gcccugcccgccaggcugcu

SEQ ID NO: 1620 - RNA, 20 nt, Artificial Sequence
  HTT spacer sequence ATCN PAM
uggaauuacgggugaguuuu

SEQ ID NO: 1621 - RNA, 20 nt, Artificial Sequence
  HTT spacer sequence ATCN PAM
cuguccuuauuacuuccaau

SEQ ID NO: 1622 - RNA, 20 nt, Artificial Sequence
  HTT spacer sequence ATCN PAM
agcaaagagcuuccuuugug

SEQ ID NO: 1623 - RNA, 20 nt, Artificial Sequence
  HTT spacer sequence ATCN PAM
acuuugcacuuucuccagaa

SEQ ID NO: 1624 - RNA, 20 nt, Artificial Sequence
  HTT spacer sequence ATCN PAM
aacaaugcacagugaagacu

SEQ ID NO: 1625 - RNA, 20 nt, Artificial Sequence
  HTT spacer sequence ATCN PAM
cuccuucuauguuuucuaag

SEQ ID NO: 1626 - RNA, 20 nt, Artificial Sequence
  HTT spacer sequence ATCN PAM
guagucccccgccucccauu

SEQ ID NO: 1627 - RNA, 20 nt, Artificial Sequence
  HTT spacer sequence ATCN PAM
cagccagccagagcuuaucu

SEQ ID NO: 1628 - RNA, 20 nt, Artificial Sequence
  HTT spacer sequence ATCN PAM
cuguuugcucucagccucca

SEQ ID NO: 1629 - RNA, 20 nt, Artificial Sequence
  HTT spacer sequence ATCN PAM
ucaagcacagccaagucaca

SEQ ID NO: 1630 - RNA, 20 nt, Artificial Sequence
  HTT spacer sequence ATCN PAM
ugccauugcgcuccagccug

SEQ ID NO: 1631 - RNA, 20 nt, Artificial Sequence
  HTT spacer sequence ATCN PAM
ugggucacugcagccucaac

SEQ ID NO: 1632 - RNA, 20 nt, Artificial Sequence
  HTT spacer sequence ATCN PAM
ccaaaaaaaaaaaaaaaaaa

SEQ ID NO: 1633 - RNA, 20 nt, Artificial Sequence
  HTT spacer sequence ATCN PAM
ucccaccacagccuucugag

SEQ ID NO: 1634 - RNA, 20 nt, Artificial Sequence
  HTT spacer sequence ATCN PAM
cacucugucacccaggcugg

SEQ ID NO: 1635 - RNA, 20 nt, Artificial Sequence
  HTT spacer sequence ATCN PAM
caucucaaaaacaaagcaaa

SEQ ID NO: 1636 - RNA, 20 nt, Artificial Sequence
  HTT spacer sequence ATCN PAM
caaaaacaaagcaaaacaaa

SEQ ID NO: 1637 - RNA, 20 nt, Artificial Sequence
  HTT spacer sequence ATCN PAM
aagcauuuaagcaaaagaaa

SEQ ID NO: 1638 - RNA, 20 nt, Artificial Sequence
  HTT spacer sequence ATCN PAM
uuggccucucccaaggaacc

SEQ ID NO: 1639 - RNA, 20 nt, Artificial Sequence
  HTT spacer sequence ATCN PAM
cuuacuuucucuccucuugu

SEQ ID NO: 1640 - RNA, 20 nt, Artificial Sequence
  HTT spacer sequence ATCN PAM
uuacuaauucaagggccagu

SEQ ID NO: 1641 - RNA, 20 nt, Artificial Sequence
  HTT spacer sequence ATCN PAM
ugaccaaguuggauuuauuc

SEQ ID NO: 1642 - RNA, 20 nt, Artificial Sequence
  HTT spacer sequence ATCN PAM
aacuuggucaugauguauua

SEQ ID NO: 1643 - RNA, 20 nt, Artificial Sequence
  HTT spacer sequence ATCN PAM
aauaauguaauuuaucacgu

SEQ ID NO: 1644 - RNA, 20 nt, Artificial Sequence
  HTT spacer sequence ATCN PAM
cguuaccagaauaaagggaa

SEQ ID NO: 1645 - RNA, 20 nt, Artificial Sequence
  HTT spacer sequence ATCN PAM
cuugguuaaauccuuaauag

SEQ ID NO: 1646 - RNA, 20 nt, Artificial Sequence
  HTT spacer sequence ATCN PAM
gccacuaacaauuagaaaau

SEQ ID NO: 1647 - RNA, 20 nt, Artificial Sequence
  HTT spacer sequence ATCN PAM
guaacauuuccauuuucuaa

SEQ ID NO: 1648 - RNA, 20 nt, Artificial Sequence
  HTT spacer sequence ATCN PAM
agaaacaucaaaaucuaaga

SEQ ID NO: 1649 - RNA, 20 nt, Artificial Sequence
  HTT spacer sequence ATCN PAM
cagcuacucgggaggcugag

SEQ ID NO: 1650 - RNA, 20 nt, Artificial Sequence
  HTT spacer sequence ATCN PAM
cuugaaaccugggagacaga

SEQ ID NO: 1651 - RNA, 20 nt, Artificial Sequence
  HTT spacer sequence ATCN PAM
cggcucacugcaaccucugu

SEQ ID NO: 1652 - RNA, 20 nt, Artificial Sequence
  HTT spacer sequence ATCN PAM
uaaaaacagaacacgaacuu

SEQ ID NO: 1653 - RNA, 20 nt, Artificial Sequence
  HTT spacer sequence ATCN PAM
uugguuucauaagcguaggc

SEQ ID NO: 1654 - RNA, 20 nt, Artificial Sequence
  HTT spacer sequence ATCN PAM
ccuccauucauaauggugag

SEQ ID NO: 1655 - RNA, 20 nt, Artificial Sequence
  HTT spacer sequence ATCN PAM
cggcuuugaugagcagagag

SEQ ID NO: 1656 - RNA, 20 nt, Artificial Sequence
  HTT spacer sequence ATCN PAM
aagccgggauugcccagguu

SEQ ID NO: 1657 - RNA, 20 nt, Artificial Sequence
  HTT spacer sequence ATCN PAM
uccaagccgcaacacagcuc

SEQ ID NO: 1658 - RNA, 20 nt, Artificial Sequence
  HTT spacer sequence ATCN PAM
uggaagcagccagugugaac

SEQ ID NO: 1659 - RNA, 20 nt, Artificial Sequence
  HTT spacer sequence ATCN PAM
agggccucccagcuauucuc

SEQ ID NO: 1660 - RNA, 20 nt, Artificial Sequence
  HTT spacer sequence ATCN PAM
ccaucgagggccucccagcu

SEQ ID NO: 1661 - RNA, 20 nt, Artificial Sequence
  HTT spacer sequence ATCN PAM
gggacuugaggacccuugga

SEQ ID NO: 1662 - RNA, 20 nt, Artificial Sequence
  HTT spacer sequence ATCN PAM
aaggguccucaagucccuga

SEQ ID NO: 1663 - RNA, 20 nt, Artificial Sequence
  HTT spacer sequence ATCN PAM
aaauccaaggguccucaagu

SEQ ID NO: 1664 - RNA, 20 nt, Artificial Sequence
  HTT spacer sequence ATCN PAM
aagggaaaggggccugcugu

SEQ ID NO: 1665 - RNA, 20 nt, Artificial Sequence
  HTT spacer sequence ATCN PAM
ggucccacagcaggccccuu

SEQ ID NO: 1666 - RNA, 20 nt, Artificial Sequence
  HTT spacer sequence ATCN PAM
caaaggccacgagggccagg

SEQ ID NO: 1667 - RNA, 20 nt, Artificial Sequence
  HTT spacer sequence ATCN PAM
ugcgaggguuuuagcugcuc

SEQ ID NO: 1668 - RNA, 20 nt, Artificial Sequence
  HTT spacer sequence ATCN PAM
gcccagaguuggcccacaca

SEQ ID NO: 1669 - RNA, 20 nt, Artificial Sequence
  HTT spacer sequence ATCN PAM
ucaugcucacacccucgugc

SEQ ID NO: 1670 - RNA, 20 nt, Artificial Sequence
  HTT spacer sequence ATCN PAM
uccaacugcuccccguguug

SEQ ID NO: 1671 - RNA, 20 nt, Artificial Sequence
  HTT spacer sequence ATCN PAM
gagcagacaacacggggagc

SEQ ID NO: 1672 - RNA, 20 nt, Artificial Sequence
  HTT spacer sequence ATCN PAM
ucugacgugaccaucugagc

SEQ ID NO: 1673 - RNA, 20 nt, Artificial Sequence
  HTT spacer sequence ATCN PAM
aggacucccaagaagcucau

SEQ ID NO: 1674 - RNA, 20 nt, Artificial Sequence
  HTT spacer sequence ATCN PAM
cauuucuuccuauucugaug

SEQ ID NO: 1675 - RNA, 20 nt, Artificial Sequence
  HTT spacer sequence ATCN PAM
gaauaggaagaaaugagauc

SEQ ID NO: 1676 - RNA, 20 nt, Artificial Sequence
  HTT spacer sequence ATCN PAM
uauauaucccacagccaaua

SEQ ID NO: 1677 - RNA, 20 nt, Artificial Sequence
  HTT spacer sequence ATCN PAM
cacagccaauaugggauaaa

SEQ ID NO: 1678 - RNA, 20 nt, Artificial Sequence
  HTT spacer sequence ATCN PAM
cauauuggcugugggauaua

SEQ ID NO: 1679 - RNA, 20 nt, Artificial Sequence
  HTT spacer sequence ATCN PAM
cuuaaggaccagagaccagg

SEQ ID NO: 1680 - RNA, 20 nt, Artificial Sequence
  HTT spacer sequence ATCN PAM
accccuugcucaaugcucaa

SEQ ID NO: 1681 - RNA, 20 nt, Artificial Sequence
  HTT spacer sequence ATCN PAM
ccuauggguguguuccaugg

SEQ ID NO: 1682 - RNA, 20 nt, Artificial Sequence
  HTT spacer sequence ATCN PAM
aaucuccuauggguguguuc

SEQ ID NO: 1683 - RNA, 20 nt, Artificial Sequence
  HTT spacer sequence ATCN PAM
cacuucacaggugacuacgg

SEQ ID NO: 1684 - RNA, 20 nt, Artificial Sequence
  HTT spacer sequence ATCN PAM
ugagacugaaaccaaacaca

SEQ ID NO: 1685 - RNA, 20 nt, Artificial Sequence
  HTT spacer sequence ATCN PAM
agcucaucuugagacugaaa

SEQ ID NO: 1686 - RNA, 20 nt, Artificial Sequence
  HTT spacer sequence ATCN PAM
ucuaaccuccgguacccacu

SEQ ID NO: 1687 - RNA, 20 nt, Artificial Sequence
  HTT spacer sequence ATCN PAM
accgcuguguccacgggacu

SEQ ID NO: 1688 - RNA, 20 nt, Artificial Sequence
  HTT spacer sequence ATCN PAM
guagguaucacuaagcauuu

SEQ ID NO: 1689 - RNA, 20 nt, Artificial Sequence
  HTT spacer sequence ATCN PAM
cuaagcauuuguugaaugaa

SEQ ID NO: 1690 - RNA, 20 nt, Artificial Sequence
  HTT spacer sequence ATCN PAM
gucauucauucaacaaaugc

SEQ ID NO: 1691 - RNA, 20 nt, Artificial Sequence
  HTT spacer sequence ATCN PAM
cugaaaugucuucaaaucug

SEQ ID NO: 1692 - RNA, 20 nt, Artificial Sequence
  HTT spacer sequence ATCN PAM
guauaacuaugcaaagaagu

SEQ ID NO: 1693 - RNA, 20 nt, Artificial Sequence
  HTT spacer sequence ATCN PAM
cagcaaacaacucacaugug

SEQ ID NO: 1694 - RNA, 20 nt, Artificial Sequence
  HTT spacer sequence ATCN PAM
cagugccaacuucugaauaa

SEQ ID NO: 1695 - RNA, 20 nt, Artificial Sequence
  HTT spacer sequence ATCN PAM
aggagaauauucucaggcuu

SEQ ID NO: 1696 - RNA, 20 nt, Artificial Sequence
  HTT spacer sequence ATCN PAM
ucaaggagaauauucucagg

SEQ ID NO: 1697 - RNA, 20 nt, Artificial Sequence
  HTT spacer sequence ATCN PAM
ugguaagugggcaagccuuu

SEQ ID NO: 1698 - RNA, 20 nt, Artificial Sequence
  HTT spacer sequence ATCN PAM
aauggguagacuuuguuaga

SEQ ID NO: 1699 - RNA, 20 nt, Artificial Sequence
  HTT spacer sequence ATCN PAM
aagucccucuaacaaagucu

SEQ ID NO: 1700 - RNA, 20 nt, Artificial Sequence
  HTT spacer sequence ATCN PAM
aacuuucuguauccaagucc

SEQ ID NO: 1701 - RNA, 20 nt, Artificial Sequence
  HTT spacer sequence ATCN PAM
uuaaguccacuuucugcauc

SEQ ID NO: 1702 - RNA, 20 nt, Artificial Sequence
  HTT spacer sequence ATCN PAM
uuuuaaaaugaacacauacc

SEQ ID NO: 1703 - RNA, 20 nt, Artificial Sequence
  HTT spacer sequence ATCN PAM
cugcuucuugccuaaacaca

SEQ ID NO: 1704 - RNA, 20 nt, Artificial Sequence
  HTT spacer sequence ATCN PAM
uuaauugaaaauuaugacca

SEQ ID NO: 1705 - RNA, 20 nt, Artificial Sequence
  HTT spacer sequence ATCN PAM
uagcucacugcagccuugaa

SEQ ID NO: 1706 - RNA, 20 nt, Artificial Sequence
  HTT spacer sequence ATCN PAM
cagcuuucugcauagcuggg

SEQ ID NO: 1707 - RNA, 20 nt, Artificial Sequence
  HTT spacer sequence ATCN PAM
cuacaaaaaaaauuuaaaaa

SEQ ID NO: 1708 - RNA, 20 nt, Artificial Sequence
  HTT spacer sequence ATCN PAM
gcacccugcucugugacaca

SEQ ID NO: 1709 - RNA, 20 nt, Artificial Sequence
  HTT spacer sequence ATCN PAM
uugcauucuggguaugacuc

SEQ ID NO: 1710 - RNA, 20 nt, Artificial Sequence
  HTT spacer sequence ATCN PAM
ccgccuuagacgccuguccu

SEQ ID NO: 1711 - RNA, 20 nt, Artificial Sequence
  HTT spacer sequence ATCN PAM
ggcagaggcauaaaaggaga

SEQ ID NO: 1712 - RNA, 20 nt, Artificial Sequence
  HTT spacer sequence ATCN PAM
aauucauguaugacacccug

SEQ ID NO: 1713 - RNA, 20 nt, Artificial Sequence
  HTT spacer sequence ATCN PAM
ccuuccauuaaaugagaauu

SEQ ID NO: 1714 - RNA, 20 nt, Artificial Sequence
  HTT spacer sequence ATCN PAM
ugguaucgccuuccauuaaa

SEQ ID NO: 1715 - RNA, 20 nt, Artificial Sequence
  HTT spacer sequence ATCN PAM
gacuuguccaagguuguguc

SEQ ID NO: 1716 - RNA, 20 nt, Artificial Sequence
  HTT spacer sequence ATCN PAM
ccaagcuaugugguugaucg

SEQ ID NO: 1717 - RNA, 20 nt, Artificial Sequence
  HTT spacer sequence ATCN PAM
accacauagcuuggagauug

SEQ ID NO: 1718 - RNA, 20 nt, Artificial Sequence
  HTT spacer sequence ATCN PAM
gaacaggguacggugcagag

SEQ ID NO: 1719 - RNA, 20 nt, Artificial Sequence
  HTT spacer sequence ATCN PAM
ugagaaaugguuagaaguga

SEQ ID NO: 1720 - RNA, 20 nt, Artificial Sequence
  HTT spacer sequence ATCN PAM
cuucuaaccauuucucauga

SEQ ID NO: 1721 - RNA, 20 nt, Artificial Sequence
  HTT spacer sequence ATCN PAM
gugugcuccccugccuuguu

SEQ ID NO: 1722 - RNA, 20 nt, Artificial Sequence
  HTT spacer sequence ATCN PAM
ccuaaaaacacagaaaaagg

SEQ ID NO: 1723 - RNA, 20 nt, Artificial Sequence
  HTT spacer sequence ATCN PAM
uggcgcaggaggggaaccug

SEQ ID NO: 1724 - RNA, 20 nt, Artificial Sequence
  HTT spacer sequence ATCN PAM
gaaaggcacucccggguggg

SEQ ID NO: 1725 - RNA, 20 nt, Artificial Sequence
  HTT spacer sequence ATCN PAM
cacccgggagugccuuucag

SEQ ID NO: 1726 - RNA, 20 nt, Artificial Sequence
  HTT spacer sequence ATCN PAM
uggcaucccacccgggagug

SEQ ID NO: 1727 - RNA, 20 nt, Artificial Sequence
  HTT spacer sequence ATCN PAM
gaggacugugguccccaaga

SEQ ID NO: 1728 - RNA, 20 nt, Artificial Sequence
  HTT spacer sequence ATCN PAM
gcaucagaggacuguggucc

SEQ ID NO: 1729 - RNA, 20 nt, Artificial Sequence
  HTT spacer sequence ATCN PAM
caccugugaguagcuacugc

SEQ ID NO: 1730 - RNA, 20 nt, Artificial Sequence
  HTT spacer sequence ATCN PAM
agcagcgauuaaggauauuu

SEQ ID NO: 1731 - RNA, 20 nt, Artificial Sequence
  HTT spacer sequence ATCN PAM
cugcuggaugugguggugca

SEQ ID NO: 1732 - RNA, 20 nt, Artificial Sequence
  HTT spacer sequence ATCN PAM
uuaaucgcugcuggaugugg

SEQ ID NO: 1733 - RNA, 20 nt, Artificial Sequence
  HTT spacer sequence ATCN PAM
cuacagcccuggaggucaaa

SEQ ID NO: 1734 - RNA, 20 nt, Artificial Sequence
  HTT spacer sequence ATCN PAM
gccuugccucagccuccuga

SEQ ID NO: 1735 - RNA, 20 nt, Artificial Sequence
  HTT spacer sequence ATCN PAM
ggcuaauuuuaaaaaauugu

SEQ ID NO: 1736 - RNA, 20 nt, Artificial Sequence
  HTT spacer sequence ATCN PAM
uaguacuuugggaggcugag

SEQ ID NO: 1737 - RNA, 20 nt, Artificial Sequence
  HTT spacer sequence ATCN PAM
accugccucagccucccaaa

SEQ ID NO: 1738 - RNA, 20 nt, Artificial Sequence
  HTT spacer sequence ATCN PAM
cuugaggucaagaguucgag

SEQ ID NO: 1739 - RNA, 20 nt, Artificial Sequence
  HTT spacer sequence ATCN PAM
cagcuacucaggaggccgag

SEQ ID NO: 1740 - RNA, 20 nt, Artificial Sequence
  HTT spacer sequence ATCN PAM
cuugaacccgggcggcagag

SEQ ID NO: 1741 - RNA, 20 nt, Artificial Sequence
  HTT spacer sequence ATCN PAM
cggcucacugcaaccucugc

SEQ ID NO: 1742 - RNA, 20 nt, Artificial Sequence
  HTT spacer sequence ATCN PAM
caauauuuugggaggccaag

SEQ ID NO: 1743 - RNA, 20 nt, Artificial Sequence
  HTT spacer sequence ATCN PAM
accugccuuggccucccaaa

SEQ ID NO: 1744 - RNA, 20 nt, Artificial Sequence
  HTT spacer sequence ATCN PAM
ccugaagucaggaguucaag

SEQ ID NO: 1745 - RNA, 20 nt, Artificial Sequence
  HTT spacer sequence ATCN PAM
cuugaaccugggaggcggag

SEQ ID NO: 1746 - RNA, 20 nt, Artificial Sequence
  HTT spacer sequence ATCN PAM
agccauugcacuccagccua

SEQ ID NO: 1747 - RNA, 20 nt, Artificial Sequence
  HTT spacer sequence ATCN PAM
uucccuucugugcgguuaaa

SEQ ID NO: 1748 - RNA, 20 nt, Artificial Sequence
  HTT spacer sequence ATCN PAM
agcuggugguuuaaccgcac

SEQ ID NO: 1749 - RNA, 20 nt, Artificial Sequence
  HTT spacer sequence ATCN PAM
cuaaaaauugaaagcaaaau

SEQ ID NO: 1750 - RNA, 20 nt, Artificial Sequence
  HTT spacer sequence ATCN PAM
aauuuuuuuuuuuuuuuuuu

SEQ ID NO: 1751 - RNA, 20 nt, Artificial Sequence
  HTT spacer sequence ATCN PAM
cgccacugcacaccagccug

SEQ ID NO: 1752 - RNA, 20 nt, Artificial Sequence
  HTT spacer sequence ATCN PAM
cggcucacuguaagcuccgc

SEQ ID NO: 1753 - RNA, 20 nt, Artificial Sequence
  HTT spacer sequence ATCN PAM
uggcuaacacggugaaaccc

SEQ ID NO: 1754 - RNA, 20 nt, Artificial Sequence
  HTT spacer sequence ATCN PAM
agaccauccuggcuaacacg

SEQ ID NO: 1755 - RNA, 20 nt, Artificial Sequence
  HTT spacer sequence ATCN PAM
ccugaccuugugauccgccc

SEQ ID NO: 1756 - RNA, 20 nt, Artificial Sequence
  HTT spacer sequence ATCN PAM
caaggucaggagaucgagac

SEQ ID NO: 1757 - RNA, 20 nt, Artificial Sequence
  HTT spacer sequence ATCN PAM
gcccgccucggccucccaaa

SEQ ID NO: 1758 - RNA, 20 nt, Artificial Sequence
  HTT spacer sequence ATCN PAM
cagcacuuugggaggccgag

SEQ ID NO: 1759 - RNA, 20 nt, Artificial Sequence
  HTT spacer sequence ATCN PAM
aauuuuuuaauguuauaauu

SEQ ID NO: 1760 - RNA, 20 nt, Artificial Sequence
  HTT spacer sequence ATCN PAM
uuggaaccacauaaauguuu

SEQ ID NO: 1761 - RNA, 20 nt, Artificial Sequence
  HTT spacer sequence ATCN PAM
uaagaugucuagauuccauc

SEQ ID NO: 1762 - RNA, 20 nt, Artificial Sequence
  HTT spacer sequence ATCN PAM
uacgauacacucuauuuugc

SEQ ID NO: 1763 - RNA, 20 nt, Artificial Sequence
  HTT spacer sequence ATCN PAM
agacaucuuacgauacacuc

SEQ ID NO: 1764 - RNA, 20 nt, Artificial Sequence
  HTT spacer sequence ATCN PAM
cugaccauccccaaguaauu

SEQ ID NO: 1765 - RNA, 20 nt, Artificial Sequence
  HTT spacer sequence ATCN PAM
ccaaguaauuauuuuaacuc

SEQ ID NO: 1766 - RNA, 20 nt, Artificial Sequence
  HTT spacer sequence ATCN PAM
auacauauauaguauguaaa

SEQ ID NO: 1767 - RNA, 20 nt, Artificial Sequence
  HTT spacer sequence ATCN PAM
ccaccguauauucagugaaa

SEQ ID NO: 1768 - RNA, 20 nt, Artificial Sequence
  HTT spacer sequence ATCN PAM
ccaccggugcuguuuccguu

SEQ ID NO: 1769 - RNA, 20 nt, Artificial Sequence
  HTT spacer sequence ATCN PAM
cggcaccaacggaaacagca

SEQ ID NO: 1770 - RNA, 20 nt, Artificial Sequence
  HTT spacer sequence ATCN PAM
uugauagaguccuagaagug

SEQ ID NO: 1771 - RNA, 20 nt, Artificial Sequence
  HTT spacer sequence ATCN PAM
aggauacauucaacgaaaua

SEQ ID NO: 1772 - RNA, 20 nt, Artificial Sequence
  HTT spacer sequence ATCN PAM
gacaaauugcguaugaauuc

SEQ ID NO: 1773 - RNA, 20 nt, Artificial Sequence
  HTT spacer sequence ATCN PAM
ggcaauaucugacaaauugc

SEQ ID NO: 1774 - RNA, 20 nt, Artificial Sequence
  HTT spacer sequence ATCN PAM
auuuuuauaagaaaaauaag

SEQ ID NO: 1775 - RNA, 20 nt, Artificial Sequence
  HTT spacer sequence ATCN PAM
uugucuuauuuuucuuauaa

SEQ ID NO: 1776 - RNA, 20 nt, Artificial Sequence
  HTT spacer sequence ATCN PAM
cagcacuuugggaggccagg

SEQ ID NO: 1777 - RNA, 20 nt, Artificial Sequence
  HTT spacer sequence ATCN PAM
ucccacccuggccucccaaa

SEQ ID NO: 1778 - RNA, 20 nt, Artificial Sequence
  HTT spacer sequence ATCN PAM
cuugagcccaggaguucaag

SEQ ID NO: 1779 - RNA, 20 nt, Artificial Sequence
  HTT spacer sequence ATCN PAM
acauuucauuuucuuuucuu

SEQ ID NO: 1780 - RNA, 20 nt, Artificial Sequence
  HTT spacer sequence ATCN PAM
guacaaggggaggaaacuga

SEQ ID NO: 1781 - RNA, 20 nt, Artificial Sequence
  HTT spacer sequence ATCN PAM
ugucucaguuuccuccccuu

SEQ ID NO: 1782 - RNA, 20 nt, Artificial Sequence
  HTT spacer sequence ATCN PAM
ggcugggucugugcuccuca

SEQ ID NO: 1783 - RNA, 20 nt, Artificial Sequence
  HTT spacer sequence ATCN PAM
cgugcaugcaucugagucag

SEQ ID NO: 1784 - RNA, 20 nt, Artificial Sequence
  HTT spacer sequence ATCN PAM
gagucagaggccggcuuucc

SEQ ID NO: 1785 - RNA, 20 nt, Artificial Sequence
  HTT spacer sequence ATCN PAM
ugcagacuguuuuaaaauga

SEQ ID NO: 1786 - RNA, 20 nt, Artificial Sequence
  HTT spacer sequence ATCN PAM
uacccuggccuacaguaggu

SEQ ID NO: 1787 - RNA, 20 nt, Artificial Sequence
  HTT spacer sequence ATCN PAM
ucagcuucuaauaucauacc

SEQ ID NO: 1788 - RNA, 20 nt, Artificial Sequence
  HTT spacer sequence ATCN PAM
ucaacuuauucaccacuuau

SEQ ID NO: 1789 - RNA, 20 nt, Artificial Sequence
  HTT spacer sequence ATCN PAM
uucuacacacucaacagaau

SEQ ID NO: 1790 - RNA, 20 nt, Artificial Sequence
  HTT spacer sequence ATCN PAM
aaaacauucuguugagugug

SEQ ID NO: 1791 - RNA, 20 nt, Artificial Sequence
  HTT spacer sequence ATCN PAM
gucucaaaaaaauuauaaag

SEQ ID NO: 1792 - RNA, 20 nt, Artificial Sequence
  HTT spacer sequence ATCN PAM
caccacugcagggcaagagu

SEQ ID NO: 1793 - RNA, 20 nt, Artificial Sequence
  HTT spacer sequence ATCN PAM
ugguucaccgcagccucgac

SEQ ID NO: 1794 - RNA, 20 nt, Artificial Sequence
  HTT spacer sequence ATCN PAM
cuuaagcccagaaggucgag

SEQ ID NO: 1795 - RNA, 20 nt, Artificial Sequence
  HTT spacer sequence ATCN PAM
uccugccucagccuccagag

SEQ ID NO: 1796 - RNA, 20 nt, Artificial Sequence
  HTT spacer sequence ATCN PAM
cacccagcuaauuuuuuuaa

SEQ ID NO: 1797 - RNA, 20 nt, Artificial Sequence
  HTT spacer sequence ATCN PAM
uuuuuuauagagacaggguc

SEQ ID NO: 1798 - RNA, 20 nt, Artificial Sequence
  HTT spacer sequence ATCN PAM
uccgaccuuggccucccaaa

SEQ ID NO: 1799 - RNA, 20 nt, Artificial Sequence
  HTT spacer sequence ATCN PAM
uucuauauucaacgcauuaa

SEQ ID NO: 1800 - RNA, 20 nt, Artificial Sequence
  HTT spacer sequence ATCN PAM
uucauguguagcugucccug

SEQ ID NO: 1801 - RNA, 20 nt, Artificial Sequence
  HTT spacer sequence ATCN PAM
acuacagaacaguaaauaaa

SEQ ID NO: 1802 - RNA, 20 nt, Artificial Sequence
  HTT spacer sequence ATCN PAM
auaaaaauauaaugaauauu

SEQ ID NO: 1803 - RNA, 20 nt, Artificial Sequence
  HTT spacer sequence ATCN PAM
aguguuucugucuuaucaag

SEQ ID NO: 1804 - RNA, 20 nt, Artificial Sequence
  HTT spacer sequence ATCN PAM
agugguggccuaugauuaaa

SEQ ID NO: 1805 - RNA, 20 nt, Artificial Sequence
  HTT spacer sequence ATCN PAM
uaggccaccacuugauaaga

SEQ ID NO: 1806 - RNA, 20 nt, Artificial Sequence
  HTT spacer sequence ATCN PAM
ggaagcccuuuaaucauagg

SEQ ID NO: 1807 - RNA, 20 nt, Artificial Sequence
  HTT spacer sequence ATCN PAM
auagccaggcaaaaaucgaa

SEQ ID NO: 1808 - RNA, 20 nt, Artificial Sequence
  HTT spacer sequence ATCN PAM
aauuuuccugcugcuaguga

SEQ ID NO: 1809 - RNA, 20 nt, Artificial Sequence
  HTT spacer sequence ATCN PAM
ggauuucagaccucgguuug

SEQ ID NO: 1810 - RNA, 20 nt, Artificial Sequence
  HTT spacer sequence ATCN PAM
ggauguguccuguguguuca

SEQ ID NO: 1811 - RNA, 20 nt, Artificial Sequence
  HTT spacer sequence ATCN PAM
cuguggccaaaccgaggucu

SEQ ID NO: 1812 - RNA, 20 nt, Artificial Sequence
  HTT spacer sequence ATCN PAM
cagaaggacagaggguucga

SEQ ID NO: 1813 - RNA, 20 nt, Artificial Sequence
  HTT spacer sequence ATCN PAM
gggugccugagugccucaga

SEQ ID NO: 1814 - RNA, 20 nt, Artificial Sequence
  HTT spacer sequence ATCN PAM
acccugaauggaccggggcc

SEQ ID NO: 1815 - RNA, 20 nt, Artificial Sequence
  HTT spacer sequence ATCN PAM
acuaguguguccaaaccgag

SEQ ID NO: 1816 - RNA, 20 nt, Artificial Sequence
  HTT spacer sequence ATCN PAM
cuaaccugucagaguguuga

SEQ ID NO: 1817 - RNA, 20 nt, Artificial Sequence
  HTT spacer sequence ATCN PAM
ccagcagccucaacacucug

SEQ ID NO: 1818 - RNA, 20 nt, Artificial Sequence
  HTT spacer sequence ATCN PAM
uguaggcugcccucagcuuc

SEQ ID NO: 1819 - RNA, 20 nt, Artificial Sequence
  HTT spacer sequence ATCN PAM
guaagaagcugagggcagcc

SEQ ID NO: 1820 - RNA, 20 nt, Artificial Sequence
  HTT spacer sequence ATCN PAM
ggaugacaccgcaggucucc

SEQ ID NO: 1821 - RNA, 20 nt, Artificial Sequence
  HTT spacer sequence ATCN PAM
cgauucugcccucacuucgc

SEQ ID NO: 1822 - RNA, 20 nt, Artificial Sequence
  HTT spacer sequence ATCN PAM
ccccacucugguuauuccaa

SEQ ID NO: 1823 - RNA, 20 nt, Artificial Sequence
  HTT spacer sequence ATCN PAM
uuggaauaaccagagugggg

SEQ ID NO: 1824 - RNA, 20 nt, Artificial Sequence
  HTT spacer sequence ATCN PAM
gggggcagugccagccaacc

SEQ ID NO: 1825 - RNA, 20 nt, Artificial Sequence
  HTT spacer sequence ATCN PAM
cagggcagugaaaaacccca

SEQ ID NO: 1826 - RNA, 20 nt, Artificial Sequence
  HTT spacer sequence ATCN PAM
aucccagggcagugaaaaac

SEQ ID NO: 1827 - RNA, 20 nt, Artificial Sequence
  HTT spacer sequence ATCN PAM
uggaugaaucauacaaaugu

SEQ ID NO: 1828 - RNA, 20 nt, Artificial Sequence
  HTT spacer sequence ATCN PAM
aagaugagcugaauugccac

SEQ ID NO: 1829 - RNA, 20 nt, Artificial Sequence
  HTT spacer sequence ATCN PAM
uacaaauguuuaaaaauauu

SEQ ID NO: 1830 - RNA, 20 nt, Artificial Sequence
  HTT spacer sequence ATCN PAM
caauaaagcuaauauuuuua

SEQ ID NO: 1831 - RNA, 20 nt, Artificial Sequence
  HTT spacer sequence ATCN PAM
ucaaguccaccaguuugaag

SEQ ID NO: 1832 - RNA, 20 nt, Artificial Sequence
  HTT spacer sequence ATCN PAM
aguccaccaguuugaagugu

SEQ ID NO: 1833 - RNA, 20 nt, Artificial Sequence
  HTT spacer sequence ATCN PAM
guuguauuacacacuucaaa

SEQ ID NO: 1834 - RNA, 20 nt, Artificial Sequence
  HTT spacer sequence ATCN PAM
ccaccaucuaauuucacaac

SEQ ID NO: 1835 - RNA, 20 nt, Artificial Sequence
  HTT spacer sequence ATCN PAM
aauuucacaacuuuuuuuuu

SEQ ID NO: 1836 - RNA, 20 nt, Artificial Sequence
  HTT spacer sequence ATCN PAM
uggcucacugcaacguccac

SEQ ID NO: 1837 - RNA, 20 nt, Artificial Sequence
  HTT spacer sequence ATCN PAM
cuugugccugggagguggac

SEQ ID NO: 1838 - RNA, 20 nt, Artificial Sequence
  HTT spacer sequence ATCN PAM
ggaacuacaggcgccugccg

SEQ ID NO: 1839 - RNA, 20 nt, Artificial Sequence
  HTT spacer sequence ATCN PAM
ggaguuugagaccagccugg

SEQ ID NO: 1840 - RNA, 20 nt, Artificial Sequence
  HTT spacer sequence ATCN PAM
caggugaucugccugccuuc

SEQ ID NO: 1841 - RNA, 20 nt, Artificial Sequence
  HTT spacer sequence ATCN PAM
ccugagaucaggaguuugag

SEQ ID NO: 1842 - RNA, 20 nt, Artificial Sequence
  HTT spacer sequence ATCN PAM
gccugccuucgccucccaaa

SEQ ID NO: 1843 - RNA, 20 nt, Artificial Sequence
  HTT spacer sequence ATCN PAM
cagcauuuugggaggcgaag

SEQ ID NO: 1844 - RNA, 20 nt, Artificial Sequence
  HTT spacer sequence ATCN PAM
aaauuuaacuuaauuuccau

SEQ ID NO: 1845 - RNA, 20 nt, Artificial Sequence
  HTT spacer sequence ATCN PAM
ggacuaaacguauacuuuuc

SEQ ID NO: 1846 - RNA, 20 nt, Artificial Sequence
  HTT spacer sequence ATCN PAM
gacagccaaguccccaccaa

SEQ ID NO: 1847 - RNA, 20 nt, Artificial Sequence
  HTT spacer sequence ATCN PAM
augaaaugauucagggacau

SEQ ID NO: 1848 - RNA, 20 nt, Artificial Sequence
  HTT spacer sequence ATCN PAM
uuucauagaucagacagcca

SEQ ID NO: 1849 - RNA, 20 nt, Artificial Sequence
  HTT spacer sequence ATCN PAM
accuccucccauuugacuuu

SEQ ID NO: 1850 - RNA, 20 nt, Artificial Sequence
  HTT spacer sequence ATCN PAM
aagaaucaagaaugauaccg

SEQ ID NO: 1851 - RNA, 20 nt, Artificial Sequence
  HTT spacer sequence ATCN PAM
agaaugauaccgaggaguau

SEQ ID NO: 1852 - RNA, 20 nt, Artificial Sequence
  HTT spacer sequence ATCN PAM
uucuugauucuuugaucgac

SEQ ID NO: 1853 - RNA, 20 nt, Artificial Sequence
  HTT spacer sequence ATCN PAM
ucugaaaacuucucagaaua

SEQ ID NO: 1854 - RNA, 20 nt, Artificial Sequence
  HTT spacer sequence ATCN PAM
aucugcaggaugguaaguca

SEQ ID NO: 1855 - RNA, 20 nt, Artificial Sequence
  HTT spacer sequence ATCN PAM
gcaggaugguaagucaggcu

SEQ ID NO: 1856 - RNA, 20 nt, Artificial Sequence
  HTT spacer sequence ATCN PAM
ugcagauagauuuggcaucc

SEQ ID NO: 1857 - RNA, 20 nt, Artificial Sequence
  HTT spacer sequence ATCN PAM
ucagcaaguccuggucaccc

SEQ ID NO: 1858 - RNA, 20 nt, Artificial Sequence
  HTT spacer sequence ATCN PAM
caguggcaggagcaugggga

SEQ ID NO: 1859 - RNA, 20 nt, Artificial Sequence
  HTT spacer sequence ATCN PAM
gacaaaaagagccagugaga

SEQ ID NO: 1860 - RNA, 20 nt, Artificial Sequence
  HTT spacer sequence ATCN PAM
ugucuggaaacuuuucucac

SEQ ID NO: 1861 - RNA, 20 nt, Artificial Sequence
  HTT spacer sequence ATCN PAM
ggaaaugacuuaauuggguu

SEQ ID NO: 1862 - RNA, 20 nt, Artificial Sequence
  HTT spacer sequence ATCN PAM
aaacccaauuaagucauuuc

SEQ ID NO: 1863 - RNA, 20 nt, Artificial Sequence
  HTT spacer sequence ATCN PAM
aaccaugaauuuuacugugu

SEQ ID NO: 1864 - RNA, 20 nt, Artificial Sequence
  HTT spacer sequence ATCN PAM
uucauguauuuugagguggg

SEQ ID NO: 1865 - RNA, 20 nt, Artificial Sequence
  HTT spacer sequence ATCN PAM
cuggcagguggcuaaacccu

SEQ ID NO: 1866 - RNA, 20 nt, Artificial Sequence
  HTT spacer sequence ATCN PAM
ccuugcugugacucgcgggu

SEQ ID NO: 1867 - RNA, 20 nt, Artificial Sequence
  HTT spacer sequence ATCN PAM
gccucugggacuggacugug

SEQ ID NO: 1868 - RNA, 20 nt, Artificial Sequence
  HTT spacer sequence ATCN PAM
gugagggaaacucucuuugu

SEQ ID NO: 1869 - RNA, 20 nt, Artificial Sequence
  HTT spacer sequence ATCN PAM
uuguugaaugaaaauaaaug

SEQ ID NO: 1870 - RNA, 20 nt, Artificial Sequence
  HTT spacer sequence ATCN PAM
uguauguuccaggcaccguc

SEQ ID NO: 1871 - RNA, 20 nt, Artificial Sequence
  HTT spacer sequence ATCN PAM
cugucugcucugcccagcag

SEQ ID NO: 1872 - RNA, 20 nt, Artificial Sequence
  HTT spacer sequence ATCN PAM
uugucaagccuugaguguug

SEQ ID NO: 1873 - RNA, 20 nt, Artificial Sequence
  HTT spacer sequence ATCN PAM
gaggaagcaacacucaaggc

SEQ ID NO: 1874 - RNA, 20 nt, Artificial Sequence
  HTT spacer sequence ATCN PAM
cagggcucugugaagaguga

SEQ ID NO: 1875 - RNA, 20 nt, Artificial Sequence
  HTT spacer sequence ATCN PAM
cucuucacagagcccugcga

SEQ ID NO: 1876 - RNA, 20 nt, Artificial Sequence
  HTT spacer sequence ATCN PAM
caucacucuucacagagccc

SEQ ID NO: 1877 - RNA, 20 nt, Artificial Sequence
  HTT spacer sequence ATCN PAM
cugcaaagcccccaauggcc

SEQ ID NO: 1878 - RNA, 20 nt, Artificial Sequence
  HTT spacer sequence ATCN PAM
ccgaggucugcgucaccuuu

SEQ ID NO: 1879 - RNA, 20 nt, Artificial Sequence
  HTT spacer sequence ATCN PAM
cuucucacaccugcucugcc

SEQ ID NO: 1880 - RNA, 20 nt, Artificial Sequence
  HTT spacer sequence ATCN PAM
gccaucacuucucacaccug

SEQ ID NO: 1881 - RNA, 20 nt, Artificial Sequence
  HTT spacer sequence ATCN PAM
gacagcggucaucugccauc

SEQ ID NO: 1882 - RNA, 20 nt, Artificial Sequence
  HTT spacer sequence ATCN PAM
ugaaucugacagcggucauc

SEQ ID NO: 1883 - RNA, 20 nt, Artificial Sequence
  HTT spacer sequence ATCN PAM
auccugaaucugacagcggu

SEQ ID NO: 1884 - RNA, 20 nt, Artificial Sequence
  HTT spacer sequence ATCN PAM
ugaaggcaggugguggagaa

SEQ ID NO: 1885 - RNA, 20 nt, Artificial Sequence
  HTT spacer sequence ATCN PAM
uggagucagccugaagucuu

SEQ ID NO: 1886 - RNA, 20 nt, Artificial Sequence
  HTT spacer sequence ATCN PAM
gagaaaaagaagcuccauaa

SEQ ID NO: 1887 - RNA, 20 nt, Artificial Sequence
  HTT spacer sequence ATCN PAM
agagcccaugcggaccugaa

SEQ ID NO: 1888 - RNA, 20 nt, Artificial Sequence
  HTT spacer sequence ATCN PAM
uguugaaccugccguucccu

SEQ ID NO: 1889 - RNA, 20 nt, Artificial Sequence
  HTT spacer sequence ATCN PAM
uucuaacucuggccuggagg

SEQ ID NO: 1890 - RNA, 20 nt, Artificial Sequence
  HTT spacer sequence ATCN PAM
ccccagugacccccagccac

SEQ ID NO: 1891 - RNA, 20 nt, Artificial Sequence
  HTT spacer sequence ATCN PAM
uccauccccccagugacccc

SEQ ID NO: 1892 - RNA, 20 nt, Artificial Sequence
  HTT spacer sequence ATCN PAM
gaauaacuccucuccagcca

SEQ ID NO: 1893 - RNA, 20 nt, Artificial Sequence
  HTT spacer sequence ATCN PAM
cagcacuuugggaggucaag

SEQ ID NO: 1894 - RNA, 20 nt, Artificial Sequence
  HTT spacer sequence ATCN PAM
accugccuugaccucccaaa

SEQ ID NO: 1895 - RNA, 20 nt, Artificial Sequence
  HTT spacer sequence ATCN PAM
ugaggucaggaguuugagac

SEQ ID NO: 1896 - RNA, 20 nt, Artificial Sequence
  HTT spacer sequence ATCN PAM
uggccaggcuggucucaaac

SEQ ID NO: 1897 - RNA, 20 nt, Artificial Sequence
  HTT spacer sequence ATCN PAM
uaucucuacuaaaaaaaaaa

SEQ ID NO: 1898 - RNA, 20 nt, Artificial Sequence
  HTT spacer sequence ATCN PAM
cuacuaaaaaaaaaauuagc

SEQ ID NO: 1899 - RNA, 20 nt, Artificial Sequence
  HTT spacer sequence ATCN PAM
cagguacucggaaggcugug

SEQ ID NO: 1900 - RNA, 20 nt, Artificial Sequence
  HTT spacer sequence ATCN PAM
ugcuuuauuuuucuuccccu

SEQ ID NO: 1901 - RNA, 20 nt, Artificial Sequence
  HTT spacer sequence ATCN PAM
acuuacgacacccauugcau

SEQ ID NO: 1902 - RNA, 20 nt, Artificial Sequence
  HTT spacer sequence ATCN PAM
ugaaagccccugagccuuug

SEQ ID NO: 1903 - RNA, 20 nt, Artificial Sequence
  HTT spacer sequence ATCN PAM
gugguguuggaggugcuggg

SEQ ID NO: 1904 - RNA, 20 nt, Artificial Sequence
  HTT spacer sequence ATCN PAM
uguaaugggagcugagacuc

SEQ ID NO: 1905 - RNA, 20 nt, Artificial Sequence
  HTT spacer sequence ATCN PAM
ucucucccagcucaguuucu

SEQ ID NO: 1906 - RNA, 20 nt, Artificial Sequence
  HTT spacer sequence ATCN PAM
cucccagcucaguuucucau

SEQ ID NO: 1907 - RNA, 20 nt, Artificial Sequence
  HTT spacer sequence ATCN PAM
acauuucauaaaugagaaac

SEQ ID NO: 1908 - RNA, 20 nt, Artificial Sequence
  HTT spacer sequence ATCN PAM
uauaaaguaagagcuacucu

SEQ ID NO: 1909 - RNA, 20 nt, Artificial Sequence
  HTT spacer sequence ATCN PAM
ucccaacaauccuauaaagu

SEQ ID NO: 1910 - RNA, 20 nt, Artificial Sequence
  HTT spacer sequence ATCN PAM
uccauaauuacuaagaggag

SEQ ID NO: 1911 - RNA, 20 nt, Artificial Sequence
  HTT spacer sequence ATCN PAM
gucuuagucccuuugggcug

SEQ ID NO: 1912 - RNA, 20 nt, Artificial Sequence
  HTT spacer sequence ATCN PAM
cuuagacugaguaauuuauc

SEQ ID NO: 1913 - RNA, 20 nt, Artificial Sequence
  HTT spacer sequence ATCN PAM
acagcagaaguuuauuuucu

SEQ ID NO: 1914 - RNA, 20 nt, Artificial Sequence
  HTT spacer sequence ATCN PAM
aggacuuccagccuccugac

SEQ ID NO: 1915 - RNA, 20 nt, Artificial Sequence
  HTT spacer sequence ATCN PAM
agaugccugcagauuuggug

SEQ ID NO: 1916 - RNA, 20 nt, Artificial Sequence
  HTT spacer sequence ATCN PAM
ugaucuaggacuuccagccu

SEQ ID NO: 1917 - RNA, 20 nt, Artificial Sequence
  HTT spacer sequence ATCN PAM
gcaggcaucuugaucuagga

SEQ ID NO: 1918 - RNA, 20 nt, Artificial Sequence
  HTT spacer sequence ATCN PAM
uugaagcagagagcagcccu

SEQ ID NO: 1919 - RNA, 20 nt, Artificial Sequence
  HTT spacer sequence ATCN PAM
uagcacuuugggaggcugag

SEQ ID NO: 1920 - RNA, 20 nt, Artificial Sequence
  HTT spacer sequence ATCN PAM
ucccaccucagccucccaaa

SEQ ID NO: 1921 - RNA, 20 nt, Artificial Sequence
  HTT spacer sequence ATCN PAM
cuugagccaaggagcuagag

SEQ ID NO: 1922 - RNA, 20 nt, Artificial Sequence
  HTT spacer sequence ATCN PAM
cacuguguuacccaggcugg

SEQ ID NO: 1923 - RNA, 20 nt, Artificial Sequence
  HTT spacer sequence ATCN PAM
uucuuucuuuucuuuucuuu

SEQ ID NO: 1924 - RNA, 20 nt, Artificial Sequence
  HTT spacer sequence ATCN PAM
cauucacgagggcagagccu

SEQ ID NO: 1925 - RNA, 20 nt, Artificial Sequence
  HTT spacer sequence ATCN PAM
ccuccagaaggucccaccuc

SEQ ID NO: 1926 - RNA, 20 nt, Artificial Sequence
  HTT spacer sequence ATCN PAM
ccaaugcaauaguauugaga

SEQ ID NO: 1927 - RNA, 20 nt, Artificial Sequence
  HTT spacer sequence ATCN PAM
guaagcugaaacuuaauccc

SEQ ID NO: 1928 - RNA, 20 nt, Artificial Sequence
  HTT spacer sequence ATCN PAM
cccacaaaucuguaagcuga

SEQ ID NO: 1929 - RNA, 20 nt, Artificial Sequence
  HTT spacer sequence ATCN PAM
uggcccucgaugggagugga

SEQ ID NO: 1930 - RNA, 20 nt, Artificial Sequence
  HTT spacer sequence ATCN PAM
agggccaggaugcucugaau

SEQ ID NO: 1931 - RNA, 20 nt, Artificial Sequence
  HTT spacer sequence ATCN PAM
cagggacuccacagccccau

SEQ ID NO: 1932 - RNA, 20 nt, Artificial Sequence
  HTT spacer sequence ATCN PAM
gaaaauuaaguguaaugcaa

SEQ ID NO: 1933 - RNA, 20 nt, Artificial Sequence
  HTT spacer sequence ATCN PAM
guuuuauuaauuuauuuguu

SEQ ID NO: 1934 - RNA, 20 nt, Artificial Sequence
  HTT spacer sequence ATCN PAM
guuucuugagacuccgucuc

SEQ ID NO: 1935 - RNA, 20 nt, Artificial Sequence
  HTT spacer sequence ATCN PAM
ggcccagguuggaguacagu

SEQ ID NO: 1936 - RNA, 20 nt, Artificial Sequence
  HTT spacer sequence ATCN PAM
gccucccggguucaagggau

SEQ ID NO: 1937 - RNA, 20 nt, Artificial Sequence
  HTT spacer sequence ATCN PAM
cuugaacccgggaggcagau

SEQ ID NO: 1938 - RNA, 20 nt, Artificial Sequence
  HTT spacer sequence ATCN PAM
gccaccacguccggcuaauu

SEQ ID NO: 1939 - RNA, 20 nt, Artificial Sequence
  HTT spacer sequence ATCN PAM
uggccaacauggugaaaccc

SEQ ID NO: 1940 - RNA, 20 nt, Artificial Sequence
  HTT spacer sequence ATCN PAM
agaccauccuggccaacaug

SEQ ID NO: 1941 - RNA, 20 nt, Artificial Sequence
  HTT spacer sequence ATCN PAM
ccugaccucgugauccaccc

SEQ ID NO: 1942 - RNA, 20 nt, Artificial Sequence
  HTT spacer sequence ATCN PAM
cgaggucaggagaucaagac

SEQ ID NO: 1943 - RNA, 20 nt, Artificial Sequence
  HTT spacer sequence ATCN PAM
acccaccucggccucccaaa

SEQ ID NO: 1944 - RNA, 20 nt, Artificial Sequence
  HTT spacer sequence ATCN PAM
cagcauuuugggaggccgag

SEQ ID NO: 1945 - RNA, 20 nt, Artificial Sequence
  HTT spacer sequence ATCN PAM
guuuuaaauuaacaaagcau

SEQ ID NO: 1946 - RNA, 20 nt, Artificial Sequence
  HTT spacer sequence ATCN PAM
cagugggccagagucacaca

SEQ ID NO: 1947 - RNA, 20 nt, Artificial Sequence
  HTT spacer sequence ATCN PAM
aggagagguggaggaucccc

SEQ ID NO: 1948 - RNA, 20 nt, Artificial Sequence
  HTT spacer sequence ATCN PAM
uccaccucuccucgaugaca

SEQ ID NO: 1949 - RNA, 20 nt, Artificial Sequence
  HTT spacer sequence ATCN PAM
ccucaggcuguggcaaaaaa

SEQ ID NO: 1950 - RNA, 20 nt, Artificial Sequence
  HTT spacer sequence ATCN PAM
agugcagguaugggggccag

SEQ ID NO: 1951 - RNA, 20 nt, Artificial Sequence
  HTT spacer sequence ATCN PAM
cccaccgcucucagcuccuu

SEQ ID NO: 1952 - RNA, 20 nt, Artificial Sequence
  HTT spacer sequence ATCN PAM
cuggccaacucaaaguccca

SEQ ID NO: 1953 - RNA, 20 nt, Artificial Sequence
  HTT spacer sequence ATCN PAM
gcauacuuuucuguaaggcc

SEQ ID NO: 1954 - RNA, 20 nt, Artificial Sequence
  HTT spacer sequence ATCN PAM
ggccuuacagaaaaguaugc

SEQ ID NO: 1955 - RNA, 20 nt, Artificial Sequence
  HTT spacer sequence ATCN PAM
cuguaauagaccugcaaagu

SEQ ID NO: 1956 - RNA, 20 nt, Artificial Sequence
  HTT spacer sequence ATCN PAM
acaccacccuuuuccacuau

SEQ ID NO: 1957 - RNA, 20 nt, Artificial Sequence
  HTT spacer sequence ATCN PAM
gaaaaagcagggcugugcuc

SEQ ID NO: 1958 - RNA, 20 nt, Artificial Sequence
  HTT spacer sequence ATCN PAM
aucagaaaaagcagggcugu

SEQ ID NO: 1959 - RNA, 20 nt, Artificial Sequence
  HTT spacer sequence ATCN PAM
caaaggcaaauaagccuucc

SEQ ID NO: 1960 - RNA, 20 nt, Artificial Sequence
  HTT spacer sequence ATCN PAM
ucacaaaggcaaauaagccu

SEQ ID NO: 1961 - RNA, 20 nt, Artificial Sequence
  HTT spacer sequence ATCN PAM
cuuuagaaaguauuccucac

SEQ ID NO: 1962 - RNA, 20 nt, Artificial Sequence
  HTT spacer sequence ATCN PAM
uuucugguaauuuuaagaau

SEQ ID NO: 1963 - RNA, 20 nt, Artificial Sequence
  HTT spacer sequence ATCN PAM
ucuuaauauuuugguauucu

SEQ ID NO: 1964 - RNA, 20 nt, Artificial Sequence
  HTT spacer sequence ATCN PAM
gagguccuuagugguauuuc

SEQ ID NO: 1965 - RNA, 20 nt, Artificial Sequence
  HTT spacer sequence ATCN PAM
ccacauuuuuaugauuaauu

SEQ ID NO: 1966 - RNA, 20 nt, Artificial Sequence
  HTT spacer sequence ATCN PAM
uaaaaauguggggauuuuua

SEQ ID NO: 1967 - RNA, 20 nt, Artificial Sequence
  HTT spacer sequence ATCN PAM
auaaauaaggggucggcuau

SEQ ID NO: 1968 - RNA, 20 nt, Artificial Sequence
  HTT spacer sequence ATCN PAM
agcagaccucaggaacucag

SEQ ID NO: 1969 - RNA, 20 nt, Artificial Sequence
  HTT spacer sequence ATCN PAM
aacaaauaauuuccaagcau

SEQ ID NO: 1970 - RNA, 20 nt, Artificial Sequence
  HTT spacer sequence ATCN PAM
cagcacuuugggaggucgag

SEQ ID NO: 1971 - RNA, 20 nt, Artificial Sequence
  HTT spacer sequence ATCN PAM
acccgccucgaccucccaaa

SEQ ID NO: 1972 - RNA, 20 nt, Artificial Sequence
  HTT spacer sequence ATCN PAM
cgaggucaggagauggagac

SEQ ID NO: 1973 - RNA, 20 nt, Artificial Sequence
  HTT spacer sequence ATCN PAM
ccugaccucgugauccaccc

SEQ ID NO: 1974 - RNA, 20 nt, Artificial Sequence
  HTT spacer sequence ATCN PAM
cggcucacugcaagcucagc

SEQ ID NO: 1975 - RNA, 20 nt, Artificial Sequence
  HTT spacer sequence ATCN PAM
caccacugcacuccagccug

SEQ ID NO: 1976 - RNA, 20 nt, Artificial Sequence
  HTT spacer sequence ATCN PAM
caaaaaaagaaaaaaaaaga

SEQ ID NO: 1977 - RNA, 20 nt, Artificial Sequence
  HTT spacer sequence ATCN PAM
uuucuuuuuuuuucuuuuuu

SEQ ID NO: 1978 - RNA, 20 nt, Artificial Sequence
  HTT spacer sequence ATCN PAM
aacaaaucauuucuuuuuuu

SEQ ID NO: 1979 - RNA, 20 nt, Artificial Sequence
  HTT spacer sequence ATCN PAM
agaggcucaaguggguugca

SEQ ID NO: 1980 - RNA, 20 nt, Artificial Sequence
  HTT spacer sequence ATCN PAM
aagcaagcggcugggcugca

SEQ ID NO: 1981 - RNA, 20 nt, Artificial Sequence
  HTT spacer sequence ATCN PAM
acuucaggaggcuggaggca

SEQ ID NO: 1982 - RNA, 20 nt, Artificial Sequence
  HTT spacer sequence ATCN PAM
ggacagaaagggggcuccag

SEQ ID NO: 1983 - RNA, 20 nt, Artificial Sequence
  HTT spacer sequence ATCN PAM
cuguuccuagggcccugcuc

SEQ ID NO: 1984 - RNA, 20 nt, Artificial Sequence
  HTT spacer sequence ATCN PAM
gcacagcacgguuuuucucu

SEQ ID NO: 1985 - RNA, 20 nt, Artificial Sequence
  HTT spacer sequence ATCN PAM
cuauuuuugaaaaaagaaag

SEQ ID NO: 1986 - RNA, 20 nt, Artificial Sequence
  HTT spacer sequence ATCN PAM
cagcacugugggaggccaag

SEQ ID NO: 1987 - RNA, 20 nt, Artificial Sequence
  HTT spacer sequence ATCN PAM
guuguaauaaaaaacaaaaa

SEQ ID NO: 1988 - RNA, 20 nt, Artificial Sequence
  HTT spacer sequence ATCN PAM
gcagguacaguuagcaugug

SEQ ID NO: 1989 - RNA, 20 nt, Artificial Sequence
  HTT spacer sequence ATCN PAM
cuuggggccaggaguucaaa

SEQ ID NO: 1990 - RNA, 20 nt, Artificial Sequence
  HTT spacer sequence ATCN PAM
uccugccuugaccucccaga

SEQ ID NO: 1991 - RNA, 20 nt, Artificial Sequence
  HTT spacer sequence ATCN PAM
cagcauucugggaggucaag

SEQ ID NO: 1992 - RNA, 20 nt, Artificial Sequence
  HTT spacer sequence ATCN PAM
gcucaugccggaggcacccg

SEQ ID NO: 1993 - RNA, 20 nt, Artificial Sequence
  HTT spacer sequence ATCN PAM
cggcacugcuguccucagag

SEQ ID NO: 1994 - RNA, 20 nt, Artificial Sequence
  HTT spacer sequence ATCN PAM
gcaggucccuccucugggac

SEQ ID NO: 1995 - RNA, 20 nt, Artificial Sequence
  HTT spacer sequence ATCN PAM
cuccgcucagcucccugaau

SEQ ID NO: 1996 - RNA, 20 nt, Artificial Sequence
  HTT spacer sequence ATCN PAM
uccugcagguccacugagug

SEQ ID NO: 1997 - RNA, 20 nt, Artificial Sequence
  HTT spacer sequence ATCN PAM
cuuagugacaauucucgccc

SEQ ID NO: 1998 - RNA, 20 nt, Artificial Sequence
  HTT spacer sequence ATCN PAM
caccgcugguggccucuguc

SEQ ID NO: 1999 - RNA, 20 nt, Artificial Sequence
  HTT spacer sequence ATCN PAM
uccaauacgugcaguccacc

SEQ ID NO: 2000 - RNA, 20 nt, Artificial Sequence
  HTT spacer sequence ATCN PAM
cugaccucuguuugcaaucc

SEQ ID NO: 2001 - RNA, 20 nt, Artificial Sequence
  HTT spacer sequence ATCN PAM
auuuugcacuacggaaagga

SEQ ID NO: 2002 - RNA, 20 nt, Artificial Sequence
  HTT spacer sequence ATCN PAM
cagaauguguccucugaaga

SEQ ID NO: 2003 - RNA, 20 nt, Artificial Sequence
  HTT spacer sequence ATCN PAM
cagaggcugccccuguucuu

SEQ ID NO: 2004 - RNA, 20 nt, Artificial Sequence
  HTT spacer sequence ATCN PAM
aggacguccuuacaguaaac

SEQ ID NO: 2005 - RNA, 20 nt, Artificial Sequence
  HTT spacer sequence ATCN PAM
agcaguucucgguggugaaa

SEQ ID NO: 2006 - RNA, 20 nt, Artificial Sequence
  HTT spacer sequence ATCN PAM
cuuucaccaccgagaacugc

SEQ ID NO: 2007 - RNA, 20 nt, Artificial Sequence
  HTT spacer sequence ATCN PAM
accuggacaccgcagaugaa

SEQ ID NO: 2008 - RNA, 20 nt, Artificial Sequence
  HTT spacer sequence ATCN PAM
gcgguguccagguagauccc

SEQ ID NO: 2009 - RNA, 20 nt, Artificial Sequence
  HTT spacer sequence ATCN PAM
ccuggcagaaugagguacug

SEQ ID NO: 2010 - RNA, 20 nt, Artificial Sequence
  HTT spacer sequence ATCN PAM
cccaaauacacacagacaca

SEQ ID NO: 2011 - RNA, 20 nt, Artificial Sequence
  HTT spacer sequence ATCN PAM
cagcacuuugggaggcugag

SEQ ID NO: 2012 - RNA, 20 nt, Artificial Sequence
  HTT spacer sequence ATCN PAM
gccugccucagccucccaaa

SEQ ID NO: 2013 - RNA, 20 nt, Artificial Sequence
  HTT spacer sequence ATCN PAM
ugaggucaggaguucgagac

SEQ ID NO: 2014 - RNA, 20 nt, Artificial Sequence
  HTT spacer sequence ATCN PAM
cuacuagcugggacuacagg

SEQ ID NO: 2015 - RNA, 20 nt, Artificial Sequence
  HTT spacer sequence ATCN PAM
cuugaaccugggaggcagaa

SEQ ID NO: 2016 - RNA, 20 nt, Artificial Sequence
  HTT spacer sequence ATCN PAM
cagcucacugcaacuucugc

SEQ ID NO: 2017 - RNA, 20 nt, Artificial Sequence
  HTT spacer sequence ATCN PAM
uuuuuuuuuuuuuuuugggu

SEQ ID NO: 2018 - RNA, 20 nt, Artificial Sequence
  HTT spacer sequence ATCN PAM
gcagcuguccagaagcacag

SEQ ID NO: 2019 - RNA, 20 nt, Artificial Sequence
  HTT spacer sequence ATCN PAM
gacccaaaauagcuaccucc

SEQ ID NO: 2020 - RNA, 20 nt, Artificial Sequence
  HTT spacer sequence ATCN PAM
gcaugcacagaauaacagga

SEQ ID NO: 2021 - RNA, 20 nt, Artificial Sequence
  HTT spacer sequence ATCN PAM
ucugcaugcacagaauaaca

SEQ ID NO: 2022 - RNA, 20 nt, Artificial Sequence
  HTT spacer sequence ATCN PAM
aaucuggguguuucaaagac

SEQ ID NO: 2023 - RNA, 20 nt, Artificial Sequence
  HTT spacer sequence ATCN PAM
ggguguuucaaagacaucaa

SEQ ID NO: 2024 - RNA, 20 nt, Artificial Sequence
  HTT spacer sequence ATCN PAM
acaaaagugaaagugaggaa

SEQ ID NO: 2025 - RNA, 20 nt, Artificial Sequence
  HTT spacer sequence ATCN PAM
aauggcaaagcuuccucacu

SEQ ID NO: 2026 - RNA, 20 nt, Artificial Sequence
  HTT spacer sequence ATCN PAM
agacaagaacauacauaccc

SEQ ID NO: 2027 - RNA, 20 nt, Artificial Sequence
  HTT spacer sequence ATCN PAM
caaacagaaaaaguaccagg

SEQ ID NO: 2028 - RNA, 20 nt, Artificial Sequence
  HTT spacer sequence ATCN PAM
cagcaacaaaccucacugcg

SEQ ID NO: 2029 - RNA, 20 nt, Artificial Sequence
  HTT spacer sequence ATCN PAM
gaacagucuucaucccagca

SEQ ID NO: 2030 - RNA, 20 nt, Artificial Sequence
  HTT spacer sequence ATCN PAM
aaaacaggacuaccuuccag

SEQ ID NO: 2031 - RNA, 20 nt, Artificial Sequence
  HTT spacer sequence ATCN PAM
gcauccuguggaaccuucgu

SEQ ID NO: 2032 - RNA, 20 nt, Artificial Sequence
  HTT spacer sequence ATCN PAM
uguggaaccuucgucagaug

SEQ ID NO: 2033 - RNA, 20 nt, Artificial Sequence
  HTT spacer sequence ATCN PAM
gacgaagguuccacaggaug

SEQ ID NO: 2034 - RNA, 20 nt, Artificial Sequence
  HTT spacer sequence ATCN PAM
cucccugcucuggcucuuag

SEQ ID NO: 2035 - RNA, 20 nt, Artificial Sequence
  HTT spacer sequence ATCN PAM
acuuuccccgugcagcgggc

SEQ ID NO: 2036 - RNA, 20 nt, Artificial Sequence
  HTT spacer sequence ATCN PAM
uggcugggugcgguggcuca

SEQ ID NO: 2037 - RNA, 20 nt, Artificial Sequence
  HTT spacer sequence ATCN PAM
cagcacuuugggaggccgag

SEQ ID NO: 2038 - RNA, 20 nt, Artificial Sequence
  HTT spacer sequence ATCN PAM
accugccucggccucccaaa

SEQ ID NO: 2039 - RNA, 20 nt, Artificial Sequence
  HTT spacer sequence ATCN PAM
ccugaggucaggaguuugag

SEQ ID NO: 2040 - RNA, 20 nt, Artificial Sequence
  HTT spacer sequence ATCN PAM
cgugaacccaggagguggag

SEQ ID NO: 2041 - RNA, 20 nt, Artificial Sequence
  HTT spacer sequence ATCN PAM
cggcucacugcacccuccac

SEQ ID NO: 2042 - RNA, 20 nt, Artificial Sequence
  HTT spacer sequence ATCN PAM
ugccacuguacuccagccug

SEQ ID NO: 2043 - RNA, 20 nt, Artificial Sequence
  HTT spacer sequence ATCN PAM
caaaaagaaagaaagaaaaa

SEQ ID NO: 2044 - RNA, 20 nt, Artificial Sequence
  HTT spacer sequence ATCN PAM
uuuggaaagacuuucuguaa

SEQ ID NO: 2045 - RNA, 20 nt, Artificial Sequence
  HTT spacer sequence ATCN PAM
aaggagagacacuuugcaug

SEQ ID NO: 2046 - RNA, 20 nt, Artificial Sequence
  HTT spacer sequence ATCN PAM
uacuuugcacccuguguguu

SEQ ID NO: 2047 - RNA, 20 nt, Artificial Sequence
  HTT spacer sequence ATCN PAM
acccccugggaacacacagg

SEQ ID NO: 2048 - RNA, 20 nt, Artificial Sequence
  HTT spacer sequence ATCN PAM
aucuuucuuucaguaugaaa

SEQ ID NO: 2049 - RNA, 20 nt, Artificial Sequence
  HTT spacer sequence ATCN PAM
uucuuucaguaugaaaaaua

SEQ ID NO: 2050 - RNA, 20 nt, Artificial Sequence
  HTT spacer sequence ATCN PAM
cagcacuuugggaggcugag

SEQ ID NO: 2051 - RNA, 20 nt, Artificial Sequence
  HTT spacer sequence ATCN PAM
acccuccucagccucccaaa

SEQ ID NO: 2052 - RNA, 20 nt, Artificial Sequence
  HTT spacer sequence ATCN PAM
ccugaggucaggaguucaag

SEQ ID NO: 2053 - RNA, 20 nt, Artificial Sequence
  HTT spacer sequence ATCN PAM
cuacuaaaaauauaaaaauu

SEQ ID NO: 2054 - RNA, 20 nt, Artificial Sequence
  HTT spacer sequence ATCN PAM
cagcuaccugggagucugag

SEQ ID NO: 2055 - RNA, 20 nt, Artificial Sequence
  HTT spacer sequence ATCN PAM
cuugaaccugggaggcggag

SEQ ID NO: 2056 - RNA, 20 nt, Artificial Sequence
  HTT spacer sequence ATCN PAM
caaaguggcauuucccaugg

SEQ ID NO: 2057 - RNA, 20 nt, Artificial Sequence
  HTT spacer sequence ATCN PAM
ccaaguguggacacugggac

SEQ ID NO: 2058 - RNA, 20 nt, Artificial Sequence
  HTT spacer sequence ATCN PAM
gauugcacagagugaagccc

SEQ ID NO: 2059 - RNA, 20 nt, Artificial Sequence
  HTT spacer sequence ATCN PAM
gauucucucaacggcagguu

SEQ ID NO: 2060 - RNA, 20 nt, Artificial Sequence
  HTT spacer sequence ATCN PAM
accacaucaugaaguaaaua

SEQ ID NO: 2061 - RNA, 20 nt, Artificial Sequence
  HTT spacer sequence ATCN PAM
ugaaguaaauaaggagaaaa

SEQ ID NO: 2062 - RNA, 20 nt, Artificial Sequence
  HTT spacer sequence ATCN PAM
cagcacuuugggaggcugag

SEQ ID NO: 2063 - RNA, 20 nt, Artificial Sequence
  HTT spacer sequence ATCN PAM
ucccaccucagccucccaaa

SEQ ID NO: 2064 - RNA, 20 nt, Artificial Sequence
  HTT spacer sequence ATCN PAM
cuugagaucaggaguucgag

SEQ ID NO: 2065 - RNA, 20 nt, Artificial Sequence
  HTT spacer sequence ATCN PAM
caagugauccucccaccuca

SEQ ID NO: 2066 - RNA, 20 nt, Artificial Sequence
  HTT spacer sequence ATCN PAM
ggaguucgagagcaaccugg

SEQ ID NO: 2067 - RNA, 20 nt, Artificial Sequence
  HTT spacer sequence ATCN PAM
cuacaaccuccaccuuccag

SEQ ID NO: 2068 - RNA, 20 nt, Artificial Sequence
  HTT spacer sequence ATCN PAM
gagauccugccauugcacuc

SEQ ID NO: 2069 - RNA, 20 nt, Artificial Sequence
  HTT spacer sequence ATCN PAM
cagaucacuacaaccuccac

SEQ ID NO: 2070 - RNA, 20 nt, Artificial Sequence
  HTT spacer sequence ATCN PAM
ugccauugcacuccagccug

SEQ ID NO: 2071 - RNA, 20 nt, Artificial Sequence
  HTT spacer sequence ATCN PAM
gccgugugccugaggccgcc

SEQ ID NO: 2072 - RNA, 20 nt, Artificial Sequence
  HTT spacer sequence ATCN PAM
aaauaaaacaugccuuggga

SEQ ID NO: 2073 - RNA, 20 nt, Artificial Sequence
  HTT spacer sequence ATCN PAM
agcuuuagugaaaagacaac

SEQ ID NO: 2074 - RNA, 20 nt, Artificial Sequence
  HTT spacer sequence ATCN PAM
auucccaagcccccgcuggc

SEQ ID NO: 2075 - RNA, 20 nt, Artificial Sequence
  HTT spacer sequence ATCN PAM
cuggccgaguggugagacca

SEQ ID NO: 2076 - RNA, 20 nt, Artificial Sequence
  HTT spacer sequence ATCN PAM
cccgauggcugucccguugc

SEQ ID NO: 2077 - RNA, 20 nt, Artificial Sequence
  HTT spacer sequence ATCN PAM
ggagaugcaggaaugccaac

SEQ ID NO: 2078 - RNA, 20 nt, Artificial Sequence
  HTT spacer sequence ATCN PAM
cggugaggggcacaaggcaa

SEQ ID NO: 2079 - RNA, 20 nt, Artificial Sequence
  HTT spacer sequence ATCN PAM
aucugcccuugaaaggggcg

SEQ ID NO: 2080 - RNA, 20 nt, Artificial Sequence
  HTT spacer sequence ATCN PAM
gcccuugaaaggggcggcuc

SEQ ID NO: 2081 - RNA, 20 nt, Artificial Sequence
  HTT spacer sequence ATCN PAM
cugacacaguaccggccucu

SEQ ID NO: 2082 - RNA, 20 nt, Artificial Sequence
  HTT spacer sequence ATCN PAM
ucaugcccuggcacacgcac

SEQ ID NO: 2083 - RNA, 20 nt, Artificial Sequence
  HTT spacer sequence ATCN PAM
gggcgcagcuucaaggccgc

SEQ ID NO: 2084 - RNA, 20 nt, Artificial Sequence
  HTT spacer sequence ATCN PAM
uuagagaaggugcggaacuu

SEQ ID NO: 2085 - RNA, 20 nt, Artificial Sequence
  HTT spacer sequence ATCN PAM
ugcgaagcacaguucaggaa

SEQ ID NO: 2086 - RNA, 20 nt, Artificial Sequence
  HTT spacer sequence ATCN PAM
auucuccacugcugucaggg

SEQ ID NO: 2087 - RNA, 20 nt, Artificial Sequence
  HTT spacer sequence ATCN PAM
cggcugcaggcuccaggcag

SEQ ID NO: 2088 - RNA, 20 nt, Artificial Sequence
  HTT spacer sequence ATCN PAM
cugugcugccugcugcguga

SEQ ID NO: 2089 - RNA, 20 nt, Artificial Sequence
  HTT spacer sequence ATCN PAM
gacagcugcgcgcgggagag

SEQ ID NO: 2090 - RNA, 20 nt, Artificial Sequence
  HTT spacer sequence ATCN PAM
ggguguggggaaaaucagcu

SEQ ID NO: 2091 - RNA, 20 nt, Artificial Sequence
  HTT spacer sequence ATCN PAM
gcuuccgcaggugcccaccg

SEQ ID NO: 2092 - RNA, 20 nt, Artificial Sequence
  HTT spacer sequence ATCN PAM
ccgcugguguuuuccuccca

SEQ ID NO: 2093 - RNA, 20 nt, Artificial Sequence
  HTT spacer sequence ATCN PAM
uggagacuuggggucuuuau

SEQ ID NO: 2094 - RNA, 20 nt, Artificial Sequence
  HTT spacer sequence ATCN PAM
gaagaaaagcaaagcuauuu

SEQ ID NO: 2095 - RNA, 20 nt, Artificial Sequence
  HTT spacer sequence ATCN PAM
ucauucugcagcugaggaca

SEQ ID NO: 2096 - RNA, 20 nt, Artificial Sequence
  HTT spacer sequence ATCN PAM
cgggggcaccaacuccugcc

SEQ ID NO: 2097 - RNA, 20 nt, Artificial Sequence
  HTT spacer sequence ATCN PAM
uguagcacaguguugaauac

SEQ ID NO: 2098 - RNA, 20 nt, Artificial Sequence
  HTT spacer sequence ATCN PAM
ugggaaaauaauaccugcuc

SEQ ID NO: 2099 - RNA, 20 nt, Artificial Sequence
  HTT spacer sequence ATCN PAM
ccauuauuccacccccaccc

SEQ ID NO: 2100 - RNA, 20 nt, Artificial Sequence
  HTT spacer sequence ATCN PAM
guguagacaaaguccacagc

SEQ ID NO: 2101 - RNA, 108 nt, Artificial Sequence
  CasX scaffold variant
uacuggcgcuuuuaucucauuacuuugagagccaucaccagcgacuaugucguauggguaaagcgcaggugggacgaccucucggucguccuaucugaagcaucaaag

SEQ ID NO: 2102 - RNA, 99 nt, Artificial Sequence
  CasX scaffold variant
uacuggcgcuuuuaucucauuacuuugagagccaucaccagcgacuaugucguauggguaaagcgcugcucgacgcguccucgagcagaagcaucaaag

SEQ ID NO: 2103 - RNA, 97 nt, Artificial Sequence
  CasX scaffold variant
uacuggcgcuuuuaucucauuacuuugagagccaucaccagcgacuaugucguauggguaaagcgcugcucgcuccguucgagcagaagcaucaaag

SEQ ID NO: 2104 - RNA, 91 nt, Artificial Sequence
  CasX scaffold variant
guacuggcgcuuuuaucucauuacuuugagagccaucaccagcgacuaugucguauggguaaagcgcccucuucggagggaagcaucaaag

SEQ ID NO: 2105 - RNA, 99 nt, Artificial Sequence
  CasX scaffold variant
uacuggcgcuuuuaucucauuacuuugagagccaucaccagcgacuaugucguauggguaaagcgcaggaguuucuauggaaacccugaagcaucaaag

SEQ ID NO: 2106 - RNA, 99 nt, Artificial Sequence
  CasX scaffold variant
guacuggcgccuuuaucucauuacuuugagagccaucaccagcgacuaugucguauggguaaagcgcuuacggacuucgguccguaagaagcaucaaag

SEQ ID NO: 2107 - RNA, 90 nt, Artificial Sequence
  CasX scaffold variant
uacuggcgcuuuuaucucauuacuuugagagccaucaccagcgacuaugucguauggguaaagcgcugcgcuugcgcagaagcaucaaag

SEQ ID NO: 2108 - RNA, 108 nt, Artificial Sequence
  CasX scaffold variant
uacuggcgcuuuuaucugauuacuuugagagccaucaccagcgacuaugucguauggguaaagcgcuuauuuaucggagagaaauccgauaaauaagaagcaucaaag

SEQ ID NO: 2109 - RNA, 108 nt, Artificial Sequence
  CasX scaffold variant
uacuggcgcuuuuaucgcauuacuuugagagccaucaccagcgacuaugucguauggguaaagcgcuuauuuaucggagagaaauccgauaaauaagaagcaucaaag

SEQ ID NO: 2110 - RNA, 110 nt, Artificial Sequence
  CasX scaffold variant
uacuggcgcuuuuaucucauuacuuugagagccaucaccagcgacuaugucguauggguaaagcgcuuauuuaucggagacuucgguccgauaaauaagaagcaucaaag

SEQ ID NO: 2111 - RNA, 97 nt, Artificial Sequence
  CasX scaffold variant
uacuggcgcuuuuaucucauuacuuugagagccaucaccagcgacuaugucguauggguaaagcgcacaugaggauuacccaugugaagcaucaaag

SEQ ID NO: 2112 - RNA, 106 nt, Artificial Sequence
  CasX scaffold variant
gcuggcgcuuuuaucucauuacuuugagagccaucaccagcgacuaugucguauggguaaagcgcuuauuuaucgugagaaauccgauaaauaagaagcaucaaag

SEQ ID NO: 2113 - RNA, 96 nt, Artificial Sequence
  CasX scaffold variant
uacuggcgcuuuuaucucauuacuuugagagccaucaccagcgacuaugucguauggguaaagcgcugcaugucuaagacagcagaagcaucaaag

SEQ ID NO: 2114 - RNA, 90 nt, Artificial Sequence
  CasX scaffold variant
uacuggcgcuuuuaucucauuacuuugagagccaucaccagcgacuaugucguauggguaaagcgcagggcuucggccgaagcaucaaag

SEQ ID NO: 2115 - RNA, 98 nt, Artificial Sequence
  CasX scaffold variant
uacuggcgcuuuuaucucauuacuuugagagccaucaccagcgacuaugucguauggguaaagcgcaauccauugcacuccggauugaagcaucaaag

SEQ ID NO: 2116 - RNA, 108 nt, Artificial Sequence
  CasX scaffold variant
uacuggcgcuuuucucgcauuacuuugagagccaucaccagcgacuaugucguauggguaaagcgcuuauuuaucggagagaaauccgauaaauaagaagcaucaaag

SEQ ID NO: 2117 - RNA, 108 nt, Artificial Sequence
  CasX scaffold variant
uacuggcgcuuuuaucucauuacuuugagagccaucaccagcgacuaugucguauggguaaagcgcuuauuuaucggacuucgguccgauaaauaagaagcaucaaag

SEQ ID NO: 2118 - RNA, 100 nt, Artificial Sequence
  CasX scaffold variant
uacuggcgcuuuuaucucauuacuuugagagccaucaccagcgacuaugucguauggguaaagcgcugcucguuugcggcuacgagcagaagcaucaaag

SEQ ID NO: 2119 - RNA, 100 nt, Artificial Sequence
  CasX scaffold variant
uacuggcgcuuuuaucucauuacuuugagagccaucaccagcgacuaugucguauggguaaagcgcuuauuuaucgagagauaaauaagaagcaucaaag

SEQ ID NO: 2120 - RNA, 107 nt, Artificial Sequence
  CasX scaffold variant
uacggcgcuuuuaucucauuacuuugagagccaucaccagcgacuaugucguauggguaaagcgcuuauuuaucggagagaaauccgauaaauaagaagcaucaaag

SEQ ID NO: 2121 - RNA, 99 nt, Artificial Sequence
  CasX scaffold variant
uacuggcgccuuuuaucucauuacuuugagagccaucaccagcgacuaugucguauggguaaagcgcuuacggacuucgguccguaagaagcaucaaag

SEQ ID NO: 2122 - RNA, 108 nt, Artificial Sequence
  CasX scaffold variant
uacuggcgcuuuuaucucauuacuuugagagccaucaccagcgacuaugucguaucgguaaagcgcuuauuuaucggagagaaauccgauaaauaagaagcaucaaag

SEQ ID NO: 2123 - RNA, 108 nt, Artificial Sequence
  CasX scaffold variant
uacuggcgccuuuaucucauuacuuugagagccaucaccagcgacuaugucguauggguaaagcgcuuauuuaucggacuucgguccgauaaauaagaagcaucaaag

SEQ ID NO: 2124 - RNA, 105 nt, Artificial Sequence
  CasX scaffold variant
uacuggcgcuuuuaucucauuacuuugagagccaucaccagcgacuaugucguauggguaaagcgcuuauuuaucgagaaauccgauaaauaagaagcaucaaag

SEQ ID NO: 2125 - RNA, 103 nt, Artificial Sequence
  CasX scaffold variant
gcgcuuuuaucucauuacuuugagagccaucaccagcgacuaugucguauggguaaagcgcuuauuuaucggagagaaauccgauaaauaagaagcaucaaag

SEQ ID NO: 2126 - RNA, 103 nt, Artificial Sequence
  CasX scaffold variant
uacuggcgcuuuuaucucauuacuuugagagccaucaccagcgacuaugucguauggguaaagcgcuuauuuaucggagagagauaaauaagaagcaucaaag

SEQ ID NO: 2127 - RNA, 108 nt, Artificial Sequence
  CasX scaffold variant
uacuggcgcuuuuaucucauuacuuuggagagccaucaccagcgacuaugucguauggguaaagcgcuuauuuaucggagaguauccgauaaauaagaagcaucaaag

SEQ ID NO: 2128 - RNA, 109 nt, Artificial Sequence
  CasX scaffold variant
uacuggcgcuuuuaucucauuacuuugagagccaucaccagcgacuauguucguauggguaaagcgcuuauuuaucggagagaaauccgauaaauaagaagcaucaaag

SEQ ID NO: 2129 - RNA, 105 nt, Artificial Sequence
  CasX scaffold variant
agcgcuuuuaucucauuacuuugagagccaucaccagcgacuaugucguauggguaaagcgcuuauuuaucggagagaaaugccgauaaauaagaagcaucaaag

SEQ ID NO: 2130 - RNA, 109 nt, Artificial Sequence
  CasX scaffold variant
uacuggcgcuuuuaucucauuacuuugagagccaucaccagcgacuaugucguauggguaaagcgcuuauuuaucggagagaaauccgauaaaauaagaagcaucaaag

SEQ ID NO: 2131 - RNA, 109 nt, Artificial Sequence
  CasX scaffold variant
uacuggcgcuuuuaucucauuacuuugagagccaucaccagcgacuaugucguauggguaaagcgcuuauuguaucggagagaaauccgauaaauaagaagcaucaaag

SEQ ID NO: 2132 - RNA, 102 nt, Artificial Sequence
  CasX scaffold variant
gcgcuuuuaucucauuacuuugagagccaucaccagcgacuaugucguauggguaaagcgcuuauuuaucggacuucgguccgauaaauaagcgcaucaaag

SEQ ID NO: 2133 - RNA, 108 nt, Artificial Sequence
  CasX scaffold variant
uacuggcgcuuuucucucauuacuuugagagccaucaccagcgacuaugucguauggguaaagcgcuuauuuaucggagagaaauccgauaaauaagaagcaucaaag

SEQ ID NO: 2134 - RNA, 106 nt, Artificial Sequence
  CasX scaffold variant
guggcgcuuuuaucucauuacuuugagagccaucaccagcgacuaugucguauggguaaagcgcuuauuuaucggagagaaauccgauaaauaagaagcaucaaag

SEQ ID NO: 2135 - RNA, 110 nt, Artificial Sequence
  CasX scaffold variant
uacuggcgcuuuuaucucauuacuuugagagccaucaccagcgaccuuaugucguauggguaaagcgcuuauuuaucggagagaaauccgauaaauaagaagcaucaaag

SEQ ID NO: 2136 - RNA, 107 nt, Artificial Sequence
  CasX scaffold variant
gauggcgcuuuuaucucauuacuuugagagccaucaccagcgacuaugucguauggguaaagcgcuuauuuaucggacuucgguccgauaaauaagaagcaucaaag

SEQ ID NO: 2137 - RNA, 106 nt, Artificial Sequence
  CasX scaffold variant
uacuggcgcuuuuaucucauuacuuugagagccaucaccagcgacuaugucguauggguaaagcgcuuauuuaucggagagaaauccgauaaaagaagcaucaaag

SEQ ID NO: 2138 - RNA, 109 nt, Artificial Sequence
  CasX scaffold variant
uacuggcgcuuuuaucucauuacuuugagagccaucaccagcgaucuaugucguauggguaaagcgcuuauuuaucggagagaaauccgauaaauaagaagcaucaaag

SEQ ID NO: 2139 - RNA, 106 nt, Artificial Sequence
  CasX scaffold variant
uacuggcgcuuuuaucucauuacuuugagagccaucaccagcgacuaugucguauggguaaaggcuuauuuaucggagagaaauccgauaaaaagaagcaucaaag

SEQ ID NO: 2140 - RNA, 107 nt, Artificial Sequence
  CasX scaffold variant
uacuggcgcuuuuaucucauuacuuugagagccaucaccagcgacuaugucguauggguaaagcgcuuauuuaucggagagaaauccgauaaaaagaagcaucaaag

SEQ ID NO: 2141 - RNA, 107 nt, Artificial Sequence
  CasX scaffold variant
uacuggcgcuuuaucucauuacuuugagagccaucaccagcgacuaugucguauggguaaagcgcuuauuuaucggacuucgguccgauaaauaagaagcaucaaag

SEQ ID NO: 2142 - RNA, 98 nt, Artificial Sequence
  CasX scaffold variant
cggcgcuuuucucgcauuacuuugagagccaucaccagcgacuaugucguauggguaaagcgcuuauuguaucgagagauaaauaagaagcaucaaag

SEQ ID NO: 2143 - RNA, 107 nt, Artificial Sequence
  CasX scaffold variant
cacuggcgcuuuuaucucauuacuuugagagccaucaccagcgacuaugucguauggguaaagcgcuuauuuucggagagaaauccgauaaauaagaagcaucaaag

SEQ ID NO: 2144 - RNA, 106 nt, Artificial Sequence
  CasX scaffold variant
uacuggcgcuuuaucucauuacuuugagagccaucaccagcgacuucggucguauggguaaagcgcuuauguaucggcuucggccgauacauaagaagcaucaaag

SEQ ID NO: 2145 - RNA, 107 nt, Artificial Sequence
  CasX scaffold variant
uacuggcgcuuuuaucucauuacuuugagagccaucaccagcgacuucggucguauggguaaagcgcuuauguaucggcuucggccgauacauaagaagcaucaaag

SEQ ID NO: 2146 - RNA, 109 nt, Artificial Sequence
  CasX scaffold variant
uacuggcgcuuuuaucucauuacuuugagagccaucaccagcgacuaugucguaugggugaaagcgcuuauuuaucggagagaaauccgauaaauaagaagcaucaaag

SEQ ID NO: 2147 - RNA, 64 nt, Artificial Sequence
  CasX scaffold variant
uacuggcgcuuuuaucucauuacuuugagagccaucaccagcgacuucggucguauggguaaag

SEQ ID NO: 2148 - RNA, 62 nt, Artificial Sequence
  CasX scaffold variant
gaugggcuuuuaucucauuacuuugagagccaucaccagcgacuucggucguauggguaaag

SEQ ID NO: 2149 - RNA, 105 nt, Artificial Sequence
  CasX scaffold variant
gaugggcuuuuaucucauuacuuugagagccaucaccagcgacuucggucguauggguaaagcgcuuauuuaucggcuucggccgauaaauaagaagcaucaaag

SEQ ID NO: 2150 - RNA, 156 nt, Artificial Sequence
  CasX scaffold variant
uacuggcgcuuuuaucucauuacuuugagagccaucaccagcgacuaugucguauggguaaagcgcuacacugggaucgcugaauuagagaucggcguccuuucauucuauauacuuuggaguuuuaaaaugucucuaaguacagaagcaucaaag

SEQ ID NO: 2151 - RNA, 103 nt, Artificial Sequence
  CasX scaffold variant
ggcgcuuuuaucucauuacuuugagagccaucaccagcgacuucggucguauggguaaagcgcuuauuuaucggcuucggccgauaaauaagaagcaucaaag

SEQ ID NO: 2152 - RNA, 106 nt, Artificial Sequence
  CasX scaffold variant
gcuggcgcuuuuaucucauuacuuugagagccaucaccagcgacuucggucguauggguaaagcgcuuauuuaucggcuucggccgauaaauaagaagcaucaaag

SEQ ID NO: 2153 - RNA, 109 nt, Artificial Sequence
  CasX scaffold variant
uacuggcgcuuuuaucucauuacuuugagagccaucaccagcgacuucggucguauggguaaagcgcuuauuuaucggagagaaauccgauaaauaagaagcaucaaag

SEQ ID NO: 2154 - RNA, 112 nt, Artificial Sequence
  CasX scaffold variant
uacuggcgcuuuuaucucauuacuuugagagccaugcuccaccagcgacuaugucguauggguaaagcgcuuauuuaucggagagaaauccgauaaauaagaagcaucaaag

SEQ ID NO: 2155 - RNA, 97 nt, Artificial Sequence
  CasX scaffold variant
uacuggcgcuuuuaucucauuacuuugagagccaucaccagcgacuaugucguauggguaaagcgggguuaggguuaggguuagggaagcaucaaag

SEQ ID NO: 2156 - RNA, 96 nt, Artificial Sequence
  CasX scaffold variant
uacuggcgcuuuuaucucauuacuuugagagccaucaccagcgacuaugucguauggguaaagcggagggagggagggagagggaaagcaucaaag

SEQ ID NO: 2157 - RNA, 101 nt, Artificial Sequence
  CasX scaffold variant
uacuggcgcuuuuaucucauuacuuugagagccaucaccagcgacuaugucguauggguaaagcguuggguuaggguuaggguuagggaaaagcaucaaag

SEQ ID NO: 2158 - RNA, 91 nt, Artificial Sequence
  CasX scaffold variant
uacuggcgcuuuuaucucauuacuuugagagccaucaccagcgacuaugucguauggguaaagcgcagggcuucggccggaagcaucaaag

SEQ ID NO: 2159 - RNA, 103 nt, Artificial Sequence
  CasX scaffold variant
uacuggcgcuuuuaucucauuacuuugagagccaucaccagcgacuaugucguauggguaaagcgccugcucaguacgagaggaaccgcaggaagcaucaaag

SEQ ID NO: 2160 - RNA, 90 nt, Artificial Sequence
  CasX scaffold variant
uacuggcgcuuuuaucugauuacuuugagagccaucaccagcgacuaugucguauggguaaagcgcccucuucggagggaagcaucaaag

SEQ ID NO: 2161 - RNA, 98 nt, Artificial Sequence
  CasX scaffold variant
uacuggcgccuuuaucugauuacuuugagagccaucaccagcgacuaugucguauggguaaagcgcuuacggacuucgguccguaagaagcaucaaag

SEQ ID NO: 2162 - RNA, 98 nt, Artificial Sequence
  CasX scaffold variant
uacuggcgcuuuuaucugauuacuuugagagccaucaccagcgacuaugucguauggguaaagcgcggacgaccucucggucguccgaagcaucaaag

SEQ ID NO: 2163 - RNA, 108 nt, Artificial Sequence
  CasX scaffold variant
uacuggcgcuuuuaucugauuacuuugagagccaucaccagcgacuaugucguauggguaaagcgcaggugggacgaccucucggucguccuaucugaagcaucaaag

SEQ ID NO: 2164 - RNA, 99 nt, Artificial Sequence
  CasX scaffold variant
uacuggcgccuuuaucugcauuacuuugagagccaucaccagcgacuaugucguauggguaaagcgcuuacggacuucgguccguaagaagcaucaaag

SEQ ID NO: 2165 - RNA, 97 nt, Artificial Sequence
  CasX scaffold variant
gcuggcgcuuuuaucugauuacuuugagagccaucaccagcgacuaugucguauggguaaagcgcuuacggacuucgguccguaagaagcaucaaag

SEQ ID NO: 2166 - RNA, 108 nt, Artificial Sequence
  CasX scaffold variant
uacuggcgccuuuaucugauuacuuugagagccaucaccagcgacuaugucguauggguaaagcgcaggugggacgaccucucggucguccuaucugaagcaucaaag

SEQ ID NO: 2167 - RNA, 98 nt, Artificial Sequence
  CasX scaffold variant
uacuggcgccuuuaucugauuacuuugagagccaucaccagcgacuaugucguauggguaaagcgcggacgaccucucggucguccgaagcaucaaag

SEQ ID NO: 2168 - RNA, 90 nt, Artificial Sequence
  CasX scaffold variant
uacuggcgccuuuaucucauuacuuugagagccaucaccagcgacuaugucguauggguaaagcgcccucuucggagggaagcaucaaag

SEQ ID NO: 2169 - RNA, 98 nt, Artificial Sequence
  CasX scaffold variant
uacuggcgcuuuuaucucauuacuuugagagccaucaccagcgacuaugucguauggguaaagcgcuuacggacuucgguccguaagaagcaucaaag

SEQ ID NO: 2170 - RNA, 99 nt, Artificial Sequence
  CasX scaffold variant
uacuggcgccuuuaucaucauuacuuugagagccaucaccagcgacuaugucguauggguaaagcgcuuacggacuucgguccguaagaagcaucaaag

SEQ ID NO: 2171 - RNA, 194 nt, Artificial Sequence
  CasX scaffold variant
uacuggcgcuuuuaucucauuacuuugagagccaucaccagcgacuaugucguauggguaaagcgcuuauuuaucggagagaaauccgauaaauaagaagcaucaaagggccggcauggucccagccuccucgcuggcgccggcugggcaacauuccgaggggaccguccccucgguaauggcgaaugggaccc

SEQ ID NO: 2172 - RNA, 108 nt, Artificial Sequence
  CasX scaffold variant
uacuggcgccuuuaucucauuacuuugagagccaucaccagcgacuaugucguauggguaaagcgcaggugggacgaccucucggucguccuaucugaagcaucaaag

SEQ ID NO: 2173 - RNA, 106 nt, Artificial Sequence
  CasX scaffold variant
uacuggcgcuuuuaucucauuacuuugagagccaucaccagcgacuaugucguauggguaaagcgcuuauuuaucggagaaauccgauaaauaagaagcaucaaag

SEQ ID NO: 2174 - RNA, 98 nt, Artificial Sequence
  CasX scaffold variant
uacuggcgccuuuaucucauuacuuugagagccaucaccagcgacuaugucguauggguaaagcgcggacgaccucucggucguccgaagcaucaaag

SEQ ID NO: 2175 - RNA, 92 nt, Artificial Sequence
  CasX scaffold variant
uacuggcgcuuuuaucucauuacuuugagagccaucaccagcgacuaugucguauggguaaagcgccggacuucgguccggaagcaucaaag

SEQ ID NO: 2176 - RNA, 108 nt, Artificial Sequence
  CasX scaffold variant
uacuggcgcuuuuaucggauuacuuugagagccaucaccagcgacuaugucguauggguaaagcgcuuauuuaucggagagaaauccgauaaauaagaagcaucaaag

SEQ ID NO: 2177 - RNA, 98 nt, Artificial Sequence
  CasX scaffold variant
uacuggcgcuuuuaucucauuacuuugagagccaucaccagcgacuaugucguauggguaaagcgcggacgaccucucggucguccgaagcaucaaag

SEQ ID NO: 2178 - RNA, 89 nt, Artificial Sequence
  CasX scaffold variant
gcuggcgcuuuuaucugauuacuuugagagccaucaccagcgacuaugucguauggguaaagcgcccucuucggagggaagcaucaaag

SEQ ID NO: 2179 - RNA, 88 nt, Artificial Sequence
  CasX scaffold variant
gcuggcgccuuuaucugauuacuuugagagccaucaccagcgacuaugucguauggguaaagcucccucuucggagggagcaucaaag

SEQ ID NO: 2180 - RNA, 197 nt, Artificial Sequence
  CasX scaffold variant
uacuggcgcuuuuaucucauuacuuugagagccaucaccagcgacuaugucguauggguaaagcgcuuauuuaucggagagaaauccgauaaauaagaagcaucaaaggggucggcauggcaucuccaccuccucgcgguccgaccugggcauccgaaggaggacgcacguccacucggauggcuaagggagagcca

SEQ ID NO: 2181 - RNA, 88 nt, Artificial Sequence
  CasX scaffold variant
gcuggcgccuuuaucugauuacuuugagagccaucaccagcgacuaugucguauggguaaagcgcccucuucggagggcgcaucaaag

SEQ ID NO: 2182 - RNA, 186 nt, Artificial Sequence
  CasX scaffold variant
uacuggcgcuuuuaucucauuacuuugagagccaucaccagcgacuaugucguauggguaaagcgcuuauuuaucggagagaaauccgauaaauaagaagcaucaaaguuuuggccggcauggucccagccuccucgcuggcgccggcugggcaacaugcuucggcauggcgaaugggaccccggg

SEQ ID NO: 2183 - RNA, 97 nt, Artificial Sequence
  CasX scaffold variant
gauggcgccuuuaucucauuacuuugagagccaucaccagcgacuaugucguauggguaaagcgcuuacggacuucgguccguaagaagcaucaaag

SEQ ID NO: 2184 - RNA, 89 nt, Artificial Sequence
  CasX scaffold variant
gcuggcgcuuuuaucucauuacuuugagagccaucaccagcgacuaugucguauggguaaagcgcccucuucggagggaagcaucaaag

SEQ ID NO: 2185 - RNA, 96 nt, Artificial Sequence
  CasX scaffold variant
gcuggcgccuuuaucugauuacuuugagagccaucaccagcgacuaugucguauggguaaagcucuuacggacuucgguccguaagagcaucaaag

SEQ ID NO: 2186 - RNA, 96 nt, Artificial Sequence
  CasX scaffold variant
gcuggcgccuuuaucugauuacuuugagagccaucaccagcgacuaugucguauggguaaagcucggacgaccucucggucguccgagcaucaaag

SEQ ID NO: 2187 - RNA, 160 nt, Artificial Sequence
  CasX scaffold variant
uacuggcgcuuuuaucucauuacuuugagagccaucaccagcgacuaugucguauggguaaagcgcuuauuuaucggagagaaauccgauaaauaagaagcaucaaagccugucaccggaugugcuuuccggucugaugaguccgugaggacgaaacagg

SEQ ID NO: 2188 - RNA, 97 nt, Artificial Sequence
  CasX scaffold variant
gcuggcgcuuuuaucugauuacuuugagagccaucaccagcgacuaugucguauggguaaagcgcggacgaccucucggucguccgaagcaucaaag

SEQ ID NO: 2189 - RNA, 97 nt, Artificial Sequence
  CasX scaffold variant
gcuggcgccuuuaucugauuacuuugagagccaucaccagcgacuaugucguauggguaaagcgcggacgaccucucggucguccgaagcaucaaag

SEQ ID NO: 2190 - RNA, 106 nt, Artificial Sequence
  CasX scaffold variant
gcuggcgccuuuaucugauuacuuugagagccaucaccagcgacuaugucguauggguaaagcucaggugggacgaccucucggucguccuaucugagcaucaaag

SEQ ID NO: 2191 - RNA, 177 nt, Artificial Sequence
  CasX scaffold variant
uacuggcgcuuuuaucucauuacuuugagagccaucaccagcgacuaugucguauggguaaagcgcuuauuuaucggagagaaauccgauaaauaagaagcaucaaaggauggccggcauggucccagccuccucgcuggcgccggcugggcaacaccuucggguggcgaaugggac

SEQ ID NO: 2192 - RNA, 107 nt, Artificial Sequence
  CasX scaffold variant
gcuggcgcuuuuaucugauuacuuugagagccaucaccagcgacuaugucguauggguaaagcgcaggugggacgaccucucggucguccuaucugaagcaucaaag

SEQ ID NO: 2193 - RNA, 109 nt, Artificial Sequence
  CasX scaffold variant
uacuggcgcuuuuaucucauuacuuugagagccaucaccagcgacuaugucguacuggguaaagcgcuuauuuaucggagagaaauccgauaaauaagaagcaucaaag

SEQ ID NO: 2194 - RNA, 107 nt, Artificial Sequence
  CasX scaffold variant
uacuggcgcuuuuaucucauuacuuugagagccaucaccagcgacuaugucguauggguaaagcgcuuauuuaucgugagaaauccgauaaauaagaagcaucaaag

SEQ ID NO: 2195 - RNA, 109 nt, Artificial Sequence
  CasX scaffold variant
guacuggcgcuuuuaucucauuacuuugagagccaucaccagcgacuaugucguauggguaaagcgcuuauuuaucggagagaaauccgauaaauaagaagcaucaaag

SEQ ID NO: 2196 - RNA, 97 nt, Artificial Sequence
  CasX scaffold variant
gcuggcgcuuuuaucucauuacuuugagagccaucaccagcgacuaugucguauggguaaagcgcggacgaccucucggucguccgaagcaucaaag

SEQ ID NO: 2197 - RNA, 97 nt, Artificial Sequence
  CasX scaffold variant
gcuggcgccuuuaucugauuacuuugagagccaucaccagcgacuaugucguauggguaaagcgcuuacggacuucgguccguaagaagcaucaaag

SEQ ID NO: 2198 - RNA, 107 nt, Artificial Sequence
  CasX scaffold variant
gcuggcgcuuuuaucucauuacuuugagagccaucaccagcgacuaugucguauggguaaagcgcuuauuuaucggagagaaauccgauaaauaagaagcaucaaag

SEQ ID NO: 2199 - RNA, 97 nt, Artificial Sequence
  CasX scaffold variant
gcuggcgccuuuaucucauuacuuugagagccaucaccagcgacuaugucguauggguaaagcgcuuacggacuucgguccguaagaagcaucaaag

SEQ ID NO: 2200 - RNA, 89 nt, Artificial Sequence
  CasX scaffold variant
gcuggcgccuuuaucugauuacuuugagagccaucaccagcgacuaugucguauggguaaagcgcccucuucggagggaagcaucaaag

SEQ ID NO: 2201 - RNA, 107 nt, Artificial Sequence
  CasX scaffold variant
gcuggcgcuuuuaucucauuacuuugagagccaucaccagcgacuaugucguauggguaaagcgcaggugggacgaccucucggucguccuaucugaagcaucaaag

SEQ ID NO: 2202 - RNA, 107 nt, Artificial Sequence
  CasX scaffold variant
gcuggcgccuuuaucucauuacuuugagagccaucaccagcgacuaugucguauggguaaagcgcaggugggacgaccucucggucguccuaucugaagcaucaaag

SEQ ID NO: 2203 - RNA, 107 nt, Artificial Sequence
  CasX scaffold variant
gcuggcgccuuuaucugauuacuuugagagccaucaccagcgacuaugucguauggguaaagcgcaggugggacgaccucucggucguccuaucugaagcaucaaag

SEQ ID NO: 2204 - RNA, 98 nt, Artificial Sequence
  CasX scaffold variant
uacuggcgcuuuuaucugauuacuuugagagccaucaccagcgacuaugucguauggguaaagcgcuuacggacuucgguccguaagaagcaucaaag

SEQ ID NO: 2205 - RNA, 89 nt, Artificial Sequence
  CasX scaffold variant
gcuggcgccuuuaucucauuacuuugagagccaucaccagcgacuaugucguauggguaaagcgcccucuucggagggaagcaucaaag

SEQ ID NO: 2206 - RNA, 97 nt, Artificial Sequence
  CasX scaffold variant
gcuggcgcuuuuaucucauuacuuugagagccaucaccagcgacuaugucguauggguaaagcgcuuacggacuucgguccguaagaagcaucaaag

SEQ ID NO: 2207 - RNA, 97 nt, Artificial Sequence
  CasX scaffold variant
gcuggcgccuuuaucucauuacuuugagagccaucaccagcgacuaugucguauggguaaagcgcggacgaccucucggucguccgaagcaucaaag

SEQ ID NO: 2208 - RNA, 177 nt, Artificial Sequence
  CasX scaffold variant
gauggccggcauggucccagccuccucgcuggcgccggcugggcaacaccuucggguggcgaaugggacuacuggcgcuuuuaucucauuacuuugagagccaucaccagcgacuaugucguauggguaaagcgcuuauuuaucggagagaaauccgauaaauaagaagcaucaaag

SEQ ID NO: 2209 - RNA, 194 nt, Artificial Sequence
  CasX scaffold variant
ggccggcauggucccagccuccucgcuggcgccggcugggcaacauuccgaggggaccguccccucgguaauggcgaaugggacccuacuggcgcuuuuaucucauuacuuugagagccaucaccagcgacuaugucguauggguaaagcgcuuauuuaucggagagaaauccgauaaauaagaagcaucaaag

SEQ ID NO: 2210 - RNA, 96 nt, Artificial Sequence
  CasX scaffold variant
gcuggcgccuuuaucugauuacuuugagagccaucaccagcgacuaugucguauggguaaagcgcuuacggacuucgguccguaagcgcaucaaag

SEQ ID NO: 2211 - RNA, 172 nt, Artificial Sequence
  CasX scaffold variant
cgugguuagggccacguuaaauaguugcuuaagcccuaagcguugaucuucggaucaggugcaauacuggcgcuuuuaucucauuacuuugagagccaucaccagcgacuaugucguauggguaaagcgcuuauuuaucggagagaaauccgauaaauaagaagcaucaaag

SEQ ID NO: 2212 - RNA, 197 nt, Artificial Sequence
  CasX scaffold variant
gggucggcauggcaucuccaccuccucgcgguccgaccugggcauccgaaggaggacgcacguccacucggauggcuaagggagagccauacuggcgcuuuuaucucauuacuuugagagccaucaccagcgacuaugucguauggguaaagcgcuuauuuaucggagagaaauccgauaaauaagaagcaucaaag

SEQ ID NO: 2213 - RNA, 171 nt, Artificial Sequence
  CasX scaffold variant
uacuggcgcuuuuaucucauuacuuugagagccaucaccagcgacuaugucguauggguaaagcgcuuauuuaucggagagaaauccgauaaauaagaagcaucaaagccaguacugaugaguccgugaggacgaaacgaguaagcucgucuacuggcgcuuuuaucucau

SEQ ID NO: 2214 - RNA, 99 nt, Artificial Sequence
  CasX scaffold variant
uacuggcgccuuuaucucauuacuuuagagagccaucaccagcgacuaugucguauggguaaagcgcuuacggacuucgguccguaagaagcaucaaag

SEQ ID NO: 2215 - RNA, 157 nt, Artificial Sequence
  CasX scaffold variant
cgacuacugaugaguccgugaggacgaaacgaguaagcucgucuagucguacuggcgcuuuuaucucauuacuuugagagccaucaccagcgacuaugucguauggguaaagcgcuuauuuaucggagagaaauccgauaaauaagaagcaucaaag

SEQ ID NO: 2216 - RNA, 106 nt, Artificial Sequence
  CasX scaffold variant
gcuggcgccuuuaucugauuacuuugagagccaucaccagcgacuaugucguauggguaaagcgcaggugggacgaccucucggucguccuaucugcgcaucaaag

SEQ ID NO: 2217 - RNA, 97 nt, Artificial Sequence
  CasX scaffold variant
uacuggcgccuuuaucucauuacuuuagagccaucaccagcgacuaugucguauggguaaagcgcuuacggacuucgguccguaagaagcaucaaag

SEQ ID NO: 2218 - RNA, 186 nt, Artificial Sequence
  CasX scaffold variant
uacuggcgcuuuuaucucauuacuuugagagccaucaccagcgacuaugucguauggguaaagcgcuuauuuaucggagagaaauccgauaaauaagaagcaucaaagcauuccucagaaaaugacaaaccuguggggcguaaguagaucuucggaucuaugaucgugcagacguuaaaaucaggu

SEQ ID NO: 2219 - RNA, 171 nt, Artificial Sequence
  CasX scaffold variant
uacuggcgcuuuuaucucauuacuuugagagccaucaccagcgacuaugucguauggguaaagcgcuuauuuaucggagagaaauccgauaaauaagaagcaucaaagcgacuacugaugaguccgugaggacgaaacgaguaagcucgucuagucgcguguagcgaagca

SEQ ID NO: 2220 - RNA, 186 nt, Artificial Sequence
  CasX scaffold variant
cauuccucagaaaaugacaaaccuguggggcguaaguagaucuucggaucuaugaucgugcagacguuaaaaucagguuacuggcgcuuuuaucucauuacuuugagagccaucaccagcgacuaugucguauggguaaagcgcuuauuuaucggagagaaauccgauaaauaagaagcaucaaag

SEQ ID NO: 2221 - RNA, 186 nt, Artificial Sequence
  CasX scaffold variant
uuuuggccggcauggucccagccuccucgcuggcgccggcugggcaacaugcuucggcauggcgaaugggaccccggguacuggcgcuuuuaucucauuacuuugagagccaucaccagcgacuaugucguauggguaaagcgcuuauuuaucggagagaaauccgauaaauaagaagcaucaaag

SEQ ID NO: 2222 - RNA, 171 nt, Artificial Sequence
  CasX scaffold variant
cgacuacugaugaguccgugaggacgaaacgaguaagcucgucuagucgcguguagcgaagcauacuggcgcuuuuaucucauuacuuugagagccaucaccagcgacuaugucguauggguaaagcgcuuauuuaucggagagaaauccgauaaauaagaagcaucaaag

SEQ ID NO: 2223 - RNA, 168 nt, Artificial Sequence
  CasX scaffold variant
uacuggcgcuuuuaucucauuacuuugagagccaucaccagcgacuaugucguauggguaaagcgcuuauuuaucggagagaaauccgauaaauaagaagcaucaaaggggagccccgcugaugaggucggggagaccgaaagggacuucggucccuacggggcuccc

SEQ ID NO: 2224 - RNA, 144 nt, Artificial Sequence
  CasX scaffold variant
ccacccccaccaccacccccacccccaccaccacccuacuggcgcuuuuaucucauuacuuugagagccaucaccagcgacuaugucguauggguaaagcgcuuauuuaucggagagaaauccgauaaauaagaagcaucaaag

SEQ ID NO: 2225 - RNA, 157 nt, Artificial Sequence
  CasX scaffold variant
uacuggcgcuuuuaucucauuacuuugagagccaucaccagcgacuaugucguauggguaaagcgcuuauuuaucggagagaaauccgauaaauaagaagcaucaaagcgacuacugaugaguccgugaggacgaaacgaguaagcucgucuagucg

SEQ ID NO: 2226 - RNA, 172 nt, Artificial Sequence
  CasX scaffold variant
uacuggcgcuuuuaucucauuacuuugagagccaucaccagcgacuaugucguauggguaaagcgcuuauuuaucggagagaaauccgauaaauaagaagcaucaaagcgugguuagggccacguuaaauaguugcuuaagcccuaagcguugaucuucggaucaggugcaa

SEQ ID NO: 2227 - RNA, 184 nt, Artificial Sequence
  CasX scaffold variant
uacuggcgcuuuuaucucauuacuuugagagccaucaccagcgacuaugucguauggguaaagcgcuuauuuaucggagagaaauccgauaaauaagaagcaucaaagggcaauaaagcgguuacaagcccgcaaaaauagcagaguaaugucgcgauagcgcggcauuaaugcagcuuuauug

SEQ ID NO: 2228 - RNA, 122 nt, Artificial Sequence
  CasX scaffold variant
uacuggcgcuuuuaucucauuacuauuaucucauuacuuugagagccaucaccagcgacuaugucguauggguaaagcgcuuauuuaucggagagaaauccgauaaauaagaagcaucaaag

SEQ ID NO: 2229 - RNA, 184 nt, Artificial Sequence
  CasX scaffold variant
ggcaauaaagcgguuacaagcccgcaaaaauagcagaguaaugucgcgauagcgcggcauuaaugcagcuuuauuguacuggcgcuuuuaucucauuacuuugagagccaucaccagcgacuaugucguauggguaaagcgcuuauuuaucggagagaaauccgauaaauaagaagcaucaaag

SEQ ID NO: 2230 - RNA, 185 nt, Artificial Sequence
  CasX scaffold variant
uacuggcgcuuuuaucucauuacuuugagagccaucaccagcgacuaugucguauggguaaagcgcuuauuuaucggagagaaauccgauaaauaagaagcaucaaagacccgcaaggccgacggcauccgccgccgcuggugcaaguccagccgccccuucgggggcgggcgcucauggguaac

SEQ ID NO: 2231 - RNA, 63 nt, Artificial Sequence
  CasX scaffold variant
uacuggcgcuuuuaucucauuacuuugagagccaucaccagcgacuaugucguauggguaaag

SEQ ID NO: 2232 - RNA, 168 nt, Artificial Sequence
  CasX scaffold variant
gggagccccgcugaugaggucggggagaccgaaagggacuucggucccuacggggcucccuacuggcgcuuuuaucucauuacuuugagagccaucaccagcgacuaugucguauggguaaagcgcuuauuuaucggagagaaauccgauaaauaagaagcaucaaag

SEQ ID NO: 2233 - RNA, 171 nt, Artificial Sequence
  CasX scaffold variant
ccaguacugaugaguccgugaggacgaaacgaguaagcucgucuacuggcgcuuuuaucucauuacuggcgcuuuuaucucauuacuuugagagccaucaccagcgacuaugucguauggguaaagcgcuuauuuaucggagagaaauccgauaaauaagaagcaucaaag

SEQ ID NO: 2234 - RNA, 185 nt, Artificial Sequence
  CasX scaffold variant
acccgcaaggccgacggcauccgccgccgcuggugcaaguccagccgccccuucgggggcgggcgcucauggguaacuacuggcgcuuuuaucucauuacuuugagagccaucaccagcgacuaugucguauggguaaagcgcuuauuuaucggagagaaauccgauaaauaagaagcaucaaag

SEQ ID NO: 2235 - RNA, 160 nt, Artificial Sequence
  CasX scaffold variant
ccugucaccggaugugcuuuccggucugaugaguccgugaggacgaaacagguacuggcgcuuuuaucucauuacuuugagagccaucaccagcgacuaugucguauggguaaagcgcuuauuuaucggagagaaauccgauaaauaagaagcaucaaag

SEQ ID NO: 2236 - RNA, 100 nt, Artificial Sequence
  CasX scaffold variant
guacuggcgccuuuaucucauuacuuugagagccaucaccagcgacuaugucguaguggguaaagcgcuuacggacuucgguccguaagaagcaucaaag

SEQ ID NO: 2237 - RNA, 91 nt, Artificial Sequence
  CasX scaffold variant
guacuggcgcuuuuaucugauuacuuugagagccaucaccagcgacuaugucguaguggguaaagcucccucuucggagggagcaucaaag

SEQ ID NO: 2238 - RNA, 89 nt, Artificial Sequence
  CasX scaffold variant
acuggcgcuuuuaucugauuacuuugagagccaucaccagcgacuaugucguaguggguaaagcucccucuucggagggagcaucaaag

SEQ ID NO: 2239 - RNA, 97 nt, Artificial Sequence
  CasX scaffold variant
acuggcgccuuuaucucauuacuuugagagccaucaccagcgacuaugucguauggguaaagcgcuuacggacuucgguccguaagaagcaucaaag

SEQ ID NO: 2240 - RNA, 89 nt, Artificial Sequence
  CasX scaffold variant
gcuggcgcuuuuaucugauuacuuugagagccaucaccagcgacuaugucguaguggguaaagcucccucuucggagggagcaucaaag

SEQ ID NO: 2241 - RNA, 88 nt, Artificial Sequence
  CasX scaffold variant
acuggcgcuuuuaucugauuacuuugagagccaucaccagcgacuaugucguauggguaaagcucccucuucggagggagcaucaaag

SEQ ID NO: 2242 - RNA, 97 nt, Artificial Sequence
  CasX scaffold variant
acuggcgccuuuaucugauuacuuugagagccaucaccagcgacuaugucguauggguaaagcgcuuacggacuucgguccguaagaagcaucaaag

SEQ ID NO: 2243 - RNA, 97 nt, Artificial Sequence
  CasX scaffold variant
acuggcgcuuuuaucugauuacuuugagagccaucaccagcgacuaugucguauggguaaagcgcuuacggacuucgguccguaagaagcaucaaag

SEQ ID NO: 2244 - RNA, 98 nt, Artificial Sequence
  CasX scaffold variant
acuggcgcuuuuaucugauuacuuugagagccaucaccagcgacuaugucguaguggguaaagcgcuuacggacuucgguccguaagaagcaucaaag

SEQ ID NO: 2245 - RNA, 89 nt, Artificial Sequence
  CasX scaffold variant
acuggcgcuuuuaucugauuacuuugagagccaucaccagcgacuaugucguauuggguaaagcucccucuucggagggagcaucaaag

SEQ ID NO: 2246 - RNA, 98 nt, Artificial Sequence
  CasX scaffold variant
acuggcgcuuuuaucugauuacuuugagagccaucaccagcgacuaugucguauuggguaaagcgcuuacggacuucgguccguaagaagcaucaaag

SEQ ID NO: 2247 - RNA, 98 nt, Artificial Sequence
  CasX scaffold variant
acuggcgccuuuaucaucauuacuuugagagccaucaccagcgacuaugucguauggguaaagcgcuuacggacuucgguccguaagaagcaucaaag

SEQ ID NO: 2248 - RNA, 90 nt, Artificial Sequence
  CasX scaffold variant
acuggcgcuuuuaucugauuacuuugagagccaucaccagcgacuaugucguaguggguaaagcgcccucuucggagggaagcaucaaag

SEQ ID NO: 2249 - RNA, 96 nt, Artificial Sequence
  CasX scaffold variant
acuggcgcuuuuaucugauuacuuugagagccaucaccagcgacuaugucguaguggguaaagcucacaugaggaucacccaugugagcaucaaag

SEQ ID NO: 2250 - RNA, 89 nt, Artificial Sequence
  CasX scaffold variant
acuggcacuuuuaccugauuacuuugagagccaacaccagcgacuaugucguaguggguaaagcucccucuucggagggagcaucaaag

SEQ ID NO: 2251 - RNA, 89 nt, Artificial Sequence
  CasX scaffold variant
acuggcacuuuuaucugauuacuuugagagccaucaccagcgacuaugucguaguggguaaagcucccucuucggagggagcaucaaag

SEQ ID NO: 2252 - RNA, 89 nt, Artificial Sequence
  CasX scaffold variant
acuggcccuuuuaucugauuacuuugagagccaucaccagcgacuaugucguaguggguaaagcucccucuucggagggagcaucaaag

SEQ ID NO: 2253 - RNA, 89 nt, Artificial Sequence
  CasX scaffold variant
acuggcgcuuuuaccugauuacuuugagagccaucaccagcgacuaugucguaguggguaaagcucccucuucggagggagcaucaaag

SEQ ID NO: 2254 - RNA, 89 nt, Artificial Sequence
  CasX scaffold variant
acuggcgcuuuuaucugauuacuuugagagccaacaccagcgacuaugucguaguggguaaagcucccucuucggagggagcaucaaag

SEQ ID NO: 2255 - RNA, 97 nt, Artificial Sequence
  CasX scaffold variant
acuggcaccuuuaccugauuacuuugagagccaacaccagcgacuaugucguauggguaaagcgcuuacggacuucgguccguaagaagcaucaaag

SEQ ID NO: 2256 - RNA, 97 nt, Artificial Sequence
  CasX scaffold variant
acuggcaccuuuaucugauuacuuugagagccaucaccagcgacuaugucguauggguaaagcgcuuacggacuucgguccguaagaagcaucaaag

SEQ ID NO: 2257 - RNA, 97 nt, Artificial Sequence
  CasX scaffold variant
acuggccccuuuaucugauuacuuugagagccaucaccagcgacuaugucguauggguaaagcgcuuacggacuucgguccguaagaagcaucaaag

SEQ ID NO: 2258 - RNA, 97 nt, Artificial Sequence
  CasX scaffold variant
acuggcgccuuuaucugauuacuuugagagccaacaccagcgacuaugucguauggguaaagcgcuuacggacuucgguccguaagaagcaucaaag

SEQ ID NO: 2259 - RNA, 89 nt, Artificial Sequence; identical to SEQ ID NO: 2240
  CasX scaffold variant

SEQ ID NO: 2260 - RNA, 90 nt, Artificial Sequence
  CasX scaffold variant
gacuggcgcuuuuaucugauuacuuugagagccaucaccagcgacuaugucguaguggguaaagcucccucuucggagggagcaucaaag

SEQ ID NO: 2261 - RNA, 90 nt, Artificial Sequence
  CasX scaffold variant
acuggcgccuuuaucugauuacuuuggagagccaucaccagcgacuaugucguaguggguaaagcucccucuucggagggagcaucaaag

SEQ ID NO: 2262 - RNA, 89 nt, Artificial Sequence
  CasX scaffold variant
acuggcgcauuuaucugauuacuuugugagccaucaccagcgacuaugucguaguggguaaagcucccucuucggagggagcaucaaag

SEQ ID NO: 2263 - RNA, 89 nt, Artificial Sequence
  CasX scaffold variant
acuggcgccuuuaucugauuacuuugagagccaucaccagcgacuaugucguaguggguaaagcucccucuucggagggagcaucaaag

SEQ ID NO: 2264 - RNA, 90 nt, Artificial Sequence
  CasX scaffold variant
acuggcgcuuuuaucugauuacuuuggagagccaucaccagcgacuaugucguaguggguaaagcucccucuucggagggagcaucaaag

SEQ ID NO: 2265 - RNA, 89 nt, Artificial Sequence
  CasX scaffold variant
acuggcgcauuuaucugauuacuuugagagccaucaccagcgacuaugucguaguggguaaagcucccucuucggagggagcaucaaag

SEQ ID NO: 2266 - RNA, 89 nt, Artificial Sequence
  CasX scaffold variant
acuggcgcuuuuaucugauuacuuugugagccaucaccagcgacuaugucguaguggguaaagcucccucuucggagggagcaucaaag

SEQ ID NO: 2267 - RNA, 90 nt, Artificial Sequence
  CasX scaffold variant
acuggcgcuuuuauucugauuacuuugagagccaucaccagcgacuaugucguaguggguaaagcucccucuucggagggagcaucaaag

SEQ ID NO: 2268 - RNA, 88 nt, Artificial Sequence
  CasX scaffold variant
acggcgcuuuuaucugauuacuuugagagccaucaccagcgacuaugucguaguggguaaagcucccucuucggagggagcaucaaag

SEQ ID NO: 2269 - RNA, 89 nt, Artificial Sequence
  CasX scaffold variant
acuggcgcuuuuauaugauuacuuugagagccaucaccagcgacuaugucguaguggguaaagcucccucuucggagggagcaucaaag

SEQ ID NO: 2270 - RNA, 90 nt, Artificial Sequence
  CasX scaffold variant
acuggcgcuuuuaucuugauuacuuugagagccaucaccagcgacuaugucguaguggguaaagcucccucuucggagggagcaucaaag

SEQ ID NO: 2271 - RNA, 89 nt, Artificial Sequence
  CasX scaffold variant
acuggcgcuuuuaucugauuacuuugagagccagcaccagcgacuaugucguaguggguaaagcucccucuucggagggagcaucaaag

SEQ ID NO: 2272 - RNA, 89 nt, Artificial Sequence
  CasX scaffold variant
acuggcgcuguuaucugauuacuucgagagccaucaccagcgacuaugucguaguggguaaagcucccucuucggagggagcaucgaag

SEQ ID NO: 2273 - RNA, 89 nt, Artificial Sequence
  CasX scaffold variant
acuggcgcucuuaucugauuacuucgagagccaucaccagcgacuaugucguaguggguaaagcucccucuucggagggagcaucgaag

SEQ ID NO: 2274 - RNA, 89 nt, Artificial Sequence
  CasX scaffold variant
acuggcgcuuguaucugauuacucugagagccaucaccagcgacuaugucguaguggguaaagcucccucuucggagggagcaucagag

SEQ ID NO: 2275 - RNA, 89 nt, Artificial Sequence
  CasX scaffold variant
acuggcgcuucuaucugauuacucugagagccaucaccagcgacuaugucguaguggguaaagcucccucuucggagggagcaucagag

SEQ ID NO: 2276 - RNA, 89 nt, Artificial Sequence
  CasX scaffold variant
acuggcgcuuugaucugauuaccuugagagccaucaccagcgacuaugucguaguggguaaagcucccucuucggagggagcaucaagg

SEQ ID NO: 2277 - RNA, 89 nt, Artificial Sequence
  CasX scaffold variant
acuggcgcuuucaucugauuaccuugagagccaucaccagcgacuaugucguaguggguaaagcucccucuucggagggagcaucaagg

SEQ ID NO: 2278 - RNA, 89 nt, Artificial Sequence
  CasX scaffold variant
acuggcgcuguuaucugauuacuuugagagccaucaccagcgacuaugucguaguggguaaagcucccucuucggagggagcaucaaag

SEQ ID NO: 2279 - RNA, 89 nt, Artificial Sequence
  CasX scaffold variant
acuggcgcuuuuaucugauuacuuugagagccaucaccagcgacuaugucguaguggguaaagcucccucuucggagggagcaucgaag

SEQ ID NO: 2280 - RNA, 89 nt, Artificial Sequence
  CasX scaffold variant
acuggcgcuuuuaucugauuacuucgagagccaucaccagcgacuaugucguaguggguaaagcucccucuucggagggagcaucaaag

SEQ ID NO: 2281 - RNA, 98 nt, Artificial Sequence
  CasX scaffold variant
acuggcacuucuaucugauuacucugagagccaucaccagcgacuaugucguauggguaaagccgcuuacggacuucgguccguaagaggcaucagag

SEQ ID NO: 2282 - RNA, 89 nt, Artificial Sequence
  CasX scaffold variant
acuggcacuucuaucugauuacucugagagccaucaccagcgacuaugucguaguggguaaagcucccucuucggagggagcaucagag

SEQ ID NO: 2283 - RNA, 98 nt, Artificial Sequence
  CasX scaffold variant
acuggcaccuuuaucugauuacuuugagagccaucaccagcgacuaugucguauggguaaagccgcuuacggacuucgguccguaagaggcaucaaag

SEQ ID NO: 2284 - RNA, 98 nt, Artificial Sequence
  CasX scaffold variant
acuggcacuuguaucugauuacucugagagccaucaccagcgacuaugucguauggguaaagccgcuuacggacuucgguccguaagaggcaucagag

SEQ ID NO: 2285 - RNA, 89 nt, Artificial Sequence
  CasX scaffold variant
acuggcacuuguaucugauuacucugagagccaucaccagcgacuaugucguaguggguaaagcucccucuucggagggagcaucagag

SEQ ID NO: 2286 - RNA, 20 nt, Artificial Sequence
  HTT spacer sequence ATCN PAM
caguguagacgacucugcug

SEQ ID NO: 2287 - RNA, 20 nt, Artificial Sequence
  HTT spacer sequence ATCN PAM
ugaaugggggcuggguaaaa

SEQ ID NO: 2288 - RNA, 20 nt, Artificial Sequence
  HTT spacer sequence ATCN PAM
uguaacuaagaaugccuaac

SEQ ID NO: 2289 - RNA, 20 nt, Artificial Sequence
  HTT spacer sequence ATCN PAM
cauccuguaacuaagaaugc

SEQ ID NO: 2290 - RNA, 20 nt, Artificial Sequence
  HTT spacer sequence ATCN PAM
gcaagcucuuugggaccugu

SEQ ID NO: 2291 - RNA, 20 nt, Artificial Sequence
  HTT spacer sequence ATCN PAM
cagcacuuugggaggccgag

SEQ ID NO: 2292 - RNA, 20 nt, Artificial Sequence
  HTT spacer sequence ATCN PAM
accugccucggccucccaaa

SEQ ID NO: 2293 - RNA, 20 nt, Artificial Sequence
  HTT spacer sequence ATCN PAM
cuugaggccaggaguuagag

SEQ ID NO: 2294 - RNA, 20 nt, Artificial Sequence
  HTT spacer sequence ATCN PAM
cugcaccuggcuaauuuuug

SEQ ID NO: 2295 - RNA, 20 nt, Artificial Sequence
  HTT spacer sequence ATCN PAM
aucacugcaccuggcuaauu

SEQ ID NO: 2296 - RNA, 20 nt, Artificial Sequence
  HTT spacer sequence ATCN PAM
cuugaacccaggagucagag

SEQ ID NO: 2297 - RNA, 20 nt, Artificial Sequence
  HTT spacer sequence ATCN PAM
ucucaaaaaaaauaauaaaa

SEQ ID NO: 2298 - RNA, 20 nt, Artificial Sequence
  HTT spacer sequence ATCN PAM
ugguuuugguggguuuccca

SEQ ID NO: 2299 - RNA, 20 nt, Artificial Sequence
  HTT spacer sequence ATCN PAM
ccaucuugguuuuggugggu

SEQ ID NO: 2300 - RNA, 20 nt, Artificial Sequence
  HTT spacer sequence ATCN PAM
ucacagcucauuacaugcua

SEQ ID NO: 2301 - RNA, 20 nt, Artificial Sequence
  HTT spacer sequence ATCN PAM
gcgccaugacaguuuucaga

SEQ ID NO: 2302 - RNA, 20 nt, Artificial Sequence
  HTT spacer sequence ATCN PAM
gaaaacugucauggcgcuga

SEQ ID NO: 2303 - RNA, 20 nt, Artificial Sequence
  HTT spacer sequence ATCN PAM
cccaccccuuucccagaaau

SEQ ID NO: 2304 - RNA, 20 nt, Artificial Sequence
  HTT spacer sequence ATCN PAM
caugaauaauccaccccuug

SEQ ID NO: 2305 - RNA, 20 nt, Artificial Sequence
  HTT spacer sequence ATCN PAM
accccuuguuuagcauauaa

SEQ ID NO: 2306 - RNA, 20 nt, Artificial Sequence
  HTT spacer sequence ATCN PAM
agaaauaaccauaaaaaugg

SEQ ID NO: 2307 - RNA, 20 nt, Artificial Sequence
  HTT spacer sequence ATCN PAM
auaaagggaaagcaaguuuc

SEQ ID NO: 2308 - RNA, 20 nt, Artificial Sequence
  HTT spacer sequence ATCN PAM
cgcucaggaaacaauucgag

SEQ ID NO: 2309 - RNA, 20 nt, Artificial Sequence
  HTT spacer sequence ATCN PAM
aaguacccucuuuugggguc

SEQ ID NO: 2310 - RNA, 20 nt, Artificial Sequence
  HTT spacer sequence ATCN PAM
agaccccaaaagaggguacu

SEQ ID NO: 2311 - RNA, 20 nt, Artificial Sequence
  HTT spacer sequence ATCN PAM
ggaccccuguccaguagcac

SEQ ID NO: 2312 - RNA, 20 nt, Artificial Sequence
  HTT spacer sequence ATCN PAM
ugccugcugaggaggaaacu

SEQ ID NO: 2313 - RNA, 20 nt, Artificial Sequence
  HTT spacer sequence ATCN PAM
uucauacccugggcuggugg

SEQ ID NO: 2314 - RNA, 20 nt, Artificial Sequence
  HTT spacer sequence ATCN PAM
uggccuagguuuauuucucu

SEQ ID NO: 2315 - RNA, 20 nt, Artificial Sequence
  HTT spacer sequence ATCN PAM
cauuuuucucuuucuguuua

SEQ ID NO: 2316 - RNA, 20 nt, Artificial Sequence
  HTT spacer sequence ATCN PAM
uuccaguuuuaguguauaug

SEQ ID NO: 2317 - RNA, 20 nt, Artificial Sequence
  HTT spacer sequence ATCN PAM
ucucuguaucauuccaguuu

SEQ ID NO: 2318 - RNA, 20 nt, Artificial Sequence
  HTT spacer sequence ATCN PAM
cgucuuuaauauuagcugcu

SEQ ID NO: 2319 - RNA, 20 nt, Artificial Sequence
  HTT spacer sequence ATCN PAM
guaucaacauuuuguuugcu

SEQ ID NO: 2320 - RNA, 20 nt, Artificial Sequence
  HTT spacer sequence ATCN PAM
acauuuuguuugcuauuuau

SEQ ID NO: 2321 - RNA, 20 nt, Artificial Sequence
  HTT spacer sequence ATCN PAM
cuauauuaauuauauaaaua

SEQ ID NO: 2322 - RNA, 20 nt, Artificial Sequence
  HTT spacer sequence ATCN PAM
cgccaccgcacuccagccug

SEQ ID NO: 2323 - RNA, 20 nt, Artificial Sequence
  HTT spacer sequence ATCN PAM
cggcucacugcaaccugcau

SEQ ID NO: 2324 - RNA, 20 nt, Artificial Sequence
  HTT spacer sequence ATCN PAM
cuugaaugcagguugcagug

SEQ ID NO: 2325 - RNA, 20 nt, Artificial Sequence
  HTT spacer sequence ATCN PAM
gggaagcugaggcaugagaa

SEQ ID NO: 2326 - RNA, 20 nt, Artificial Sequence
  HTT spacer sequence ATCN PAM
cagcuauccgggaagcugag

SEQ ID NO: 2327 - RNA, 20 nt, Artificial Sequence
  HTT spacer sequence ATCN PAM
guacuaaaaaaaaaaaauua

SEQ ID NO: 2328 - RNA, 20 nt, Artificial Sequence
  HTT spacer sequence ATCN PAM
gcccaucucagccucccaaa

SEQ ID NO: 2329 - RNA, 20 nt, Artificial Sequence
  HTT spacer sequence ATCN PAM
cagccucccaaaggauuaca

SEQ ID NO: 2330 - RNA, 20 nt, Artificial Sequence
  HTT spacer sequence ATCN PAM
uuugggaggcugagaugggc

SEQ ID NO: 2331 - RNA, 20 nt, Artificial Sequence
  HTT spacer sequence ATCN PAM
uuuauuacauauuucaguca

SEQ ID NO: 2332 - RNA, 20 nt, Artificial Sequence
  HTT spacer sequence ATCN PAM
augauauugugaaguuauau

SEQ ID NO: 2333 - RNA, 20 nt, Artificial Sequence
  HTT spacer sequence ATCN PAM
uggaugacugaaauauguaa

SEQ ID NO: 2334 - RNA, 20 nt, Artificial Sequence
  HTT spacer sequence ATCN PAM
uuggaaucuucaaagugaug

SEQ ID NO: 2335 - RNA, 20 nt, Artificial Sequence
  HTT spacer sequence ATCN PAM
ucaaagugaugaaugucuuu

SEQ ID NO: 2336 - RNA, 20 nt, Artificial Sequence
  HTT spacer sequence ATCN PAM
cuuugaagauuccaaggauu

SEQ ID NO: 2337 - RNA, 20 nt, Artificial Sequence
  HTT spacer sequence ATCN PAM
ugaagcugucuaggagccac

SEQ ID NO: 2338 - RNA, 20 nt, Artificial Sequence
  HTT spacer sequence ATCN PAM
gccccucucccuucccagag

SEQ ID NO: 2339 - RNA, 20 nt, Artificial Sequence
  HTT spacer sequence ATCN PAM
gcucaaccaucagccccucu

SEQ ID NO: 2340 - RNA, 20 nt, Artificial Sequence
  HTT spacer sequence ATCN PAM
ccaauggcuaaugauuaaau

SEQ ID NO: 2341 - RNA, 20 nt, Artificial Sequence
  HTT spacer sequence ATCN PAM
uuagccauuggcgaucagcu

SEQ ID NO: 2342 - RNA, 20 nt, Artificial Sequence
  HTT spacer sequence ATCN PAM
ugccuaugugaugaagccuc

SEQ ID NO: 2343 - RNA, 20 nt, Artificial Sequence
  HTT spacer sequence ATCN PAM
cauaggcaugauuuaaucau

SEQ ID NO: 2344 - RNA, 20 nt, Artificial Sequence
  HTT spacer sequence ATCN PAM
ucucaucuggcuguucaucu

SEQ ID NO: 2345 - RNA, 20 nt, Artificial Sequence
  HTT spacer sequence ATCN PAM
ggcuguucaucuguauccug

SEQ ID NO: 2346 - RNA, 20 nt, Artificial Sequence
  HTT spacer sequence ATCN PAM
guauccuguaaaauaugccu

SEQ ID NO: 2347 - RNA, 20 nt, Artificial Sequence
  HTT spacer sequence ATCN PAM
uguaaaauaugccuuguaau

SEQ ID NO: 2348 - RNA, 20 nt, Artificial Sequence
  HTT spacer sequence ATCN PAM
gcauacagaacucagagaaa

SEQ ID NO: 2349 - RNA, 20 nt, Artificial Sequence
  HTT spacer sequence ATCN PAM
agcaaauuaauugaacccaa

SEQ ID NO: 2350 - RNA, 20 nt, Artificial Sequence
  HTT spacer sequence ATCN PAM
caggccaaauaaccaggggc

SEQ ID NO: 2351 - RNA, 20 nt, Artificial Sequence
  HTT spacer sequence ATCN PAM
aggacucaguucccacaaga

SEQ ID NO: 2352 - RNA, 20 nt, Artificial Sequence
  HTT spacer sequence ATCN PAM
guguggucaggcgcugucua

SEQ ID NO: 2353 - RNA, 20 nt, Artificial Sequence
  HTT spacer sequence ATCN PAM
accuguagacagcgccugac

SEQ ID NO: 2354 - RNA, 20 nt, Artificial Sequence
  HTT spacer sequence ATCN PAM
guucugcagcggacaccagc

SEQ ID NO: 2355 - RNA, 20 nt, Artificial Sequence
  HTT spacer sequence ATCN PAM
acacagaauacuucucccca

SEQ ID NO: 2356 - RNA, 20 nt, Artificial Sequence
  HTT spacer sequence ATCN PAM
aggggaaaagcgcagugucc

SEQ ID NO: 2357 - RNA, 20 nt, Artificial Sequence
  HTT spacer sequence ATCN PAM
ucaggguggcugaauauaca

SEQ ID NO: 2358 - RNA, 20 nt, Artificial Sequence
  HTT spacer sequence ATCN PAM
gugaggggagcaacacccag

SEQ ID NO: 2359 - RNA, 20 nt, Artificial Sequence
  HTT spacer sequence ATCN PAM
cgcuaaccccaacauuuuuu

SEQ ID NO: 2360 - RNA, 20 nt, Artificial Sequence
  HTT spacer sequence ATCN PAM
gaggaugugguuuuccuccc

SEQ ID NO: 2361 - RNA, 20 nt, Artificial Sequence
  HTT spacer sequence ATCN PAM
uccgaucacgcuaaccccaa

SEQ ID NO: 2362 - RNA, 20 nt, Artificial Sequence
  HTT spacer sequence ATCN PAM
gaggccacggccaggcaaug

SEQ ID NO: 2363 - RNA, 20 nt, Artificial Sequence
  HTT spacer sequence ATCN PAM
ucugaggccacggccaggca

SEQ ID NO: 2364 - RNA, 20 nt, Artificial Sequence
  HTT spacer sequence ATCN PAM
cacucuucuauugccuuuag

SEQ ID NO: 2365 - RNA, 20 nt, Artificial Sequence
  HTT spacer sequence ATCN PAM
uaaaaccccugccaacugag

SEQ ID NO: 2366 - RNA, 20 nt, Artificial Sequence
  HTT spacer sequence ATCN PAM
caucauaauuuuuuuuuuaa

SEQ ID NO: 2367 - RNA, 20 nt, Artificial Sequence
  HTT spacer sequence ATCN PAM
uaauuuuuuuuuuaacaaaa

SEQ ID NO: 2368 - RNA, 20 nt, Artificial Sequence
  HTT spacer sequence ATCN PAM
uucauugcucaauuaaacuc

SEQ ID NO: 2369 - RNA, 20 nt, Artificial Sequence
  HTT spacer sequence ATCN PAM
cagcagauucagagggacuc

SEQ ID NO: 2370 - RNA, 20 nt, Artificial Sequence
  HTT spacer sequence ATCN PAM
gcugugauucugggggcugc

SEQ ID NO: 2371 - RNA, 20 nt, Artificial Sequence
  HTT spacer sequence ATCN PAM
cuggagucccucugaaucug

SEQ ID NO: 2372 - RNA, 20 nt, Artificial Sequence
  HTT spacer sequence ATCN PAM
auagacaaaaaagggaagug

SEQ ID NO: 2373 - RNA, 20 nt, Artificial Sequence
  HTT spacer sequence ATCN PAM
cagcagccguacuucacucg

SEQ ID NO: 2374 - RNA, 20 nt, Artificial Sequence
  HTT spacer sequence ATCN PAM
ucacuugggagucugcaccu

SEQ ID NO: 2375 - RNA, 20 nt, Artificial Sequence
  HTT spacer sequence ATCN PAM
cucaaaauugagaaaaugac

SEQ ID NO: 2376 - RNA, 20 nt, Artificial Sequence
  HTT spacer sequence ATCN PAM
augacuaaaguuuuggucaa

SEQ ID NO: 2377 - RNA, 20 nt, Artificial Sequence
  HTT spacer sequence ATCN PAM
ccaucguaaauguacuuauu

SEQ ID NO: 2378 - RNA, 20 nt, Artificial Sequence
  HTT spacer sequence ATCN PAM
uaaauguacuuauuuggucc

SEQ ID NO: 2379 - RNA, 20 nt, Artificial Sequence
  HTT spacer sequence ATCN PAM
guuaggaucuauguguuucc

SEQ ID NO: 2380 - RNA, 20 nt, Artificial Sequence
  HTT spacer sequence ATCN PAM
uaacagauuccccuauaaac

SEQ ID NO: 2381 - RNA, 20 nt, Artificial Sequence
  HTT spacer sequence ATCN PAM
auguguuuccuuaaagucuu

SEQ ID NO: 2382 - RNA, 20 nt, Artificial Sequence
  HTT spacer sequence ATCN PAM
aacuaagacuuuaaggaaac

SEQ ID NO: 2383 - RNA, 20 nt, Artificial Sequence
  HTT spacer sequence ATCN PAM
cagcacuuugggaggccgag

SEQ ID NO: 2384 - RNA, 20 nt, Artificial Sequence
  HTT spacer sequence ATCN PAM
gcccaccucggccucccaaa

SEQ ID NO: 2385 - RNA, 20 nt, Artificial Sequence
  HTT spacer sequence ATCN PAM
ugaggucaggagaucgagac

SEQ ID NO: 2386 - RNA, 20 nt, Artificial Sequence
  HTT spacer sequence ATCN PAM
ccugaccucaugaucugccc

SEQ ID NO: 2387 - RNA, 20 nt, Artificial Sequence
  HTT spacer sequence ATCN PAM
agaccauccuggcuaacacg

SEQ ID NO: 2388 - RNA, 20 nt, Artificial Sequence
  HTT spacer sequence ATCN PAM
uggcuaacacggugaaaccc

SEQ ID NO: 2389 - RNA, 20 nt, Artificial Sequence
  HTT spacer sequence ATCN PAM
cggcucacugcaagcuccgc

SEQ ID NO: 2390 - RNA, 20 nt, Artificial Sequence
  HTT spacer sequence ATCN PAM
auuucuaguauaacuauucu

SEQ ID NO: 2391 - RNA, 20 nt, Artificial Sequence
  HTT spacer sequence ATCN PAM
auaaucuauuucuaguauaa

SEQ ID NO: 2392 - RNA, 20 nt, Artificial Sequence
  HTT spacer sequence ATCN PAM
uaucuauaaucuauuucuag

SEQ ID NO: 2393 - RNA, 20 nt, Artificial Sequence
  HTT spacer sequence ATCN PAM
aaucauaucuauaaucuauu

SEQ ID NO: 2394 - RNA, 20 nt, Artificial Sequence
  HTT spacer sequence ATCN PAM
aucauuaguuuguggcauua

SEQ ID NO: 2395 - RNA, 20 nt, Artificial Sequence
  HTT spacer sequence ATCN PAM
uuaguuuguggcauuacucu

SEQ ID NO: 2396 - RNA, 20 nt, Artificial Sequence
  HTT spacer sequence ATCN PAM
uuguucuacaauuauaaccu

SEQ ID NO: 2397 - RNA, 20 nt, Artificial Sequence
  HTT spacer sequence ATCN PAM
cuguauggccugguuuuucc

SEQ ID NO: 2398 - RNA, 20 nt, Artificial Sequence
  HTT spacer sequence ATCN PAM
cuuguggaaggccugacauc

SEQ ID NO: 2399 - RNA, 20 nt, Artificial Sequence
  HTT spacer sequence ATCN PAM
gucaggcccgcccacagcca

SEQ ID NO: 2400 - RNA, 20 nt, Artificial Sequence
  HTT spacer sequence ATCN PAM
ggaggccugaccaucucccu

SEQ ID NO: 2401 - RNA, 20 nt, Artificial Sequence
  HTT spacer sequence ATCN PAM
cccugugaugcugugcuuca

SEQ ID NO: 2402 - RNA, 20 nt, Artificial Sequence
  HTT spacer sequence ATCN PAM
cagggagauggucaggccuc

SEQ ID NO: 2403 - RNA, 20 nt, Artificial Sequence
  HTT spacer sequence ATCN PAM
ucuagauagcaguagcagaa

SEQ ID NO: 2404 - RNA, 20 nt, Artificial Sequence
  HTT spacer sequence ATCN PAM
agaagauggagccaggugua

SEQ ID NO: 2405 - RNA, 20 nt, Artificial Sequence
  HTT spacer sequence ATCN PAM
uuggagaugacucacacucc

SEQ ID NO: 2406 - RNA, 20 nt, Artificial Sequence
  HTT spacer sequence ATCN PAM
ccaaugauaggucaggucac

SEQ ID NO: 2407 - RNA, 20 nt, Artificial Sequence
  HTT spacer sequence ATCN PAM
aauaaguaacagggcagcca

SEQ ID NO: 2408 - RNA, 20 nt, Artificial Sequence
  HTT spacer sequence ATCN PAM
cuuugucuuguguccuuauu

SEQ ID NO: 2409 - RNA, 20 nt, Artificial Sequence
  HTT spacer sequence ATCN PAM
cagaaauaaggacacaagac

SEQ ID NO: 2410 - RNA, 20 nt, Artificial Sequence
  HTT spacer sequence ATCN PAM
cucaucuccgcaggugagga

SEQ ID NO: 2411 - RNA, 20 nt, Artificial Sequence
  HTT spacer sequence ATCN PAM
ccgcaggugaggagaaaaac

SEQ ID NO: 2412 - RNA, 20 nt, Artificial Sequence
  HTT spacer sequence ATCN PAM
uuuuggguuucuggucucag

SEQ ID NO: 2413 - RNA, 20 nt, Artificial Sequence
  HTT spacer sequence ATCN PAM
cuagaacaacaaauggucuc

SEQ ID NO: 2414 - RNA, 20 nt, Artificial Sequence
  HTT spacer sequence ATCN PAM
uaauaauagucucccuggug

SEQ ID NO: 2415 - RNA, 20 nt, Artificial Sequence
  HTT spacer sequence ATCN PAM
ucccaguaaucauaauaaua

SEQ ID NO: 2416 - RNA, 20 nt, Artificial Sequence
  HTT spacer sequence ATCN PAM
aauagaucagacaaugagcu

SEQ ID NO: 2417 - RNA, 20 nt, Artificial Sequence
  HTT spacer sequence ATCN PAM
auuugauuuggggugguuug

SEQ ID NO: 2418 - RNA, 20 nt, Artificial Sequence
  HTT spacer sequence ATCN PAM
gacaaugagcuagauaagag

SEQ ID NO: 2419 - RNA, 20 nt, Artificial Sequence
  HTT spacer sequence ATCN PAM
agcucauugucugaucuauu

SEQ ID NO: 2420 - RNA, 20 nt, Artificial Sequence
  HTT spacer sequence ATCN PAM
cccacaacugaaucucuaua

SEQ ID NO: 2421 - RNA, 20 nt, Artificial Sequence
  HTT spacer sequence ATCN PAM
cuauaauaccugauguauuu

SEQ ID NO: 2422 - RNA, 20 nt, Artificial Sequence
  HTT spacer sequence ATCN PAM
gguauuauagagauucaguu

SEQ ID NO: 2423 - RNA, 20 nt, Artificial Sequence
  HTT spacer sequence ATCN PAM
ugagggauacauuucugguu

SEQ ID NO: 2424 - RNA, 20 nt, Artificial Sequence
  HTT spacer sequence ATCN PAM
cucaugauaggcuguauagc

SEQ ID NO: 2425 - RNA, 20 nt, Artificial Sequence
  HTT spacer sequence ATCN PAM
cuuuuccaugguuuagagua

SEQ ID NO: 2426 - RNA, 20 nt, Artificial Sequence
  HTT spacer sequence ATCN PAM
guucacuccucuuaacccac

SEQ ID NO: 2427 - RNA, 20 nt, Artificial Sequence
  HTT spacer sequence ATCN PAM
gucagaaacagaauaucggu

SEQ ID NO: 2428 - RNA, 20 nt, Artificial Sequence
  HTT spacer sequence ATCN PAM
uuuaucuaucaaaguauaaa

SEQ ID NO: 2429 - RNA, 20 nt, Artificial Sequence
  HTT spacer sequence ATCN PAM
aucaaaguauaaaguuaucc

SEQ ID NO: 2430 - RNA, 20 nt, Artificial Sequence
  HTT spacer sequence ATCN PAM
aaguauaaaguuauccgugu

SEQ ID NO: 2431 - RNA, 20 nt, Artificial Sequence
  HTT spacer sequence ATCN PAM
guguauaaggcuggcugcaa

SEQ ID NO: 2432 - RNA, 20 nt, Artificial Sequence
  HTT spacer sequence ATCN PAM
uucacaaaugaaaguauacc

SEQ ID NO: 2433 - RNA, 20 nt, Artificial Sequence
  HTT spacer sequence ATCN PAM
guugugugcacuuauggggu

SEQ ID NO: 2434 - RNA, 20 nt, Artificial Sequence
  HTT spacer sequence ATCN PAM
ucuuuucauuucuauuauuc

SEQ ID NO: 2435 - RNA, 20 nt, Artificial Sequence
  HTT spacer sequence ATCN PAM
guuccuugcuuaugccucua

SEQ ID NO: 2436 - RNA, 20 nt, Artificial Sequence
  HTT spacer sequence ATCN PAM
uugaguaucuguuccuugcu

SEQ ID NO: 2437 - RNA, 20 nt, Artificial Sequence
  HTT spacer sequence ATCN PAM
cagcacuuugggaggccgag

SEQ ID NO: 2438 - RNA, 20 nt, Artificial Sequence
  HTT spacer sequence ATCN PAM
gcccaccucggccucccaaa

SEQ ID NO: 2439 - RNA, 20 nt, Artificial Sequence
  HTT spacer sequence ATCN PAM
ccugagguuagaaguucaaa

SEQ ID NO: 2440 - RNA, 20 nt, Artificial Sequence
  HTT spacer sequence ATCN PAM
cuacuaaaaauacaaaaauu

SEQ ID NO: 2441 - RNA, 20 nt, Artificial Sequence
  HTT spacer sequence ATCN PAM
cuugaacccaggaggcagag

SEQ ID NO: 2442 - RNA, 20 nt, Artificial Sequence
  HTT spacer sequence ATCN PAM
ccaaaaaagaaaaaaaaaag

SEQ ID NO: 2443 - RNA, 20 nt, Artificial Sequence
  HTT spacer sequence ATCN PAM
agacuucuacugucaugaga

SEQ ID NO: 2444 - RNA, 20 nt, Artificial Sequence
  HTT spacer sequence ATCN PAM
acgaucuuagcaaaagccgu

SEQ ID NO: 2445 - RNA, 20 nt, Artificial Sequence
  HTT spacer sequence ATCN PAM
uggaucaagacuucuacugu

SEQ ID NO: 2446 - RNA, 20 nt, Artificial Sequence
  HTT spacer sequence ATCN PAM
uagcaaaagccguucacauc

SEQ ID NO: 2447 - RNA, 20 nt, Artificial Sequence
  HTT spacer sequence ATCN PAM
aggaugccaucuucugggga

SEQ ID NO: 2448 - RNA, 20 nt, Artificial Sequence
  HTT spacer sequence ATCN PAM
uugaugugaacggcuuuugc

SEQ ID NO: 2449 - RNA, 20 nt, Artificial Sequence
  HTT spacer sequence ATCN PAM
ucuggggagagacuuccuug

SEQ ID NO: 2450 - RNA, 20 nt, Artificial Sequence
  HTT spacer sequence ATCN PAM
acacuccuggaacuguacac

SEQ ID NO: 2451 - RNA, 20 nt, Artificial Sequence
  HTT spacer sequence ATCN PAM
cacaacugagaaggguccau

SEQ ID NO: 2452 - RNA, 20 nt, Artificial Sequence
  HTT spacer sequence ATCN PAM
ugaaacuuggguucauaauc

SEQ ID NO: 2453 - RNA, 20 nt, Artificial Sequence
  HTT spacer sequence ATCN PAM
cuaaguuuuguugcagugcg

SEQ ID NO: 2454 - RNA, 20 nt, Artificial Sequence
  HTT spacer sequence ATCN PAM
gcacugcaacaaaacuuagg

SEQ ID NO: 2455 - RNA, 20 nt, Artificial Sequence
  HTT spacer sequence ATCN PAM
gagaaagacuguccuugcca

SEQ ID NO: 2456 - RNA, 20 nt, Artificial Sequence
  HTT spacer sequence ATCN PAM
ucugagaacaucagagaaag

SEQ ID NO: 2457 - RNA, 20 nt, Artificial Sequence
  HTT spacer sequence ATCN PAM
agucuucggguucuagaaug

SEQ ID NO: 2458 - RNA, 20 nt, Artificial Sequence
  HTT spacer sequence ATCN PAM
gcccucuuaacaugcgagag

SEQ ID NO: 2459 - RNA, 20 nt, Artificial Sequence
  HTT spacer sequence ATCN PAM
ucauuuucaaugcauguuuu

SEQ ID NO: 2460 - RNA, 20 nt, Artificial Sequence
  HTT spacer sequence ATCN PAM
cuuuauaaaauauguaaaua

SEQ ID NO: 2461 - RNA, 20 nt, Artificial Sequence
  HTT spacer sequence ATCN PAM
cacacacacacacacacaca

SEQ ID NO: 2462 - RNA, 20 nt, Artificial Sequence
  HTT spacer sequence ATCN PAM
caaaaaaaaaaaaguguaua

SEQ ID NO: 2463 - RNA, 20 nt, Artificial Sequence
  HTT spacer sequence ATCN PAM
cugucacccaggcuggagug

SEQ ID NO: 2464 - RNA, 20 nt, Artificial Sequence
  HTT spacer sequence ATCN PAM
cggcucacuccaaccucugc

SEQ ID NO: 2465 - RNA, 20 nt, Artificial Sequence
  HTT spacer sequence ATCN PAM
aaauuaaauacauuggugug

SEQ ID NO: 2466 - RNA, 20 nt, Artificial Sequence
  HTT spacer sequence ATCN PAM
uuuccaugaugagucacgaa

SEQ ID NO: 2467 - RNA, 20 nt, Artificial Sequence
  HTT spacer sequence ATCN PAM
uggaaaagauaaaguaaucc

SEQ ID NO: 2468 - RNA, 20 nt, Artificial Sequence
  HTT spacer sequence ATCN PAM
caguugcuucuccaaauuag

SEQ ID NO: 2469 - RNA, 20 nt, Artificial Sequence
  HTT spacer sequence ATCN PAM
gugcaaugcaccuaauuugg

SEQ ID NO: 2470 - RNA, 20 nt, Artificial Sequence
  HTT spacer sequence ATCN PAM
guuauccgugcaaugcaccu

SEQ ID NO: 2471 - RNA, 20 nt, Artificial Sequence
  HTT spacer sequence ATCN PAM
cagguaauuugacuuagacc

SEQ ID NO: 2472 - RNA, 20 nt, Artificial Sequence
  HTT spacer sequence ATCN PAM
auggucuaagucaaauuacc

SEQ ID NO: 2473 - RNA, 20 nt, Artificial Sequence
  HTT spacer sequence ATCN PAM
gaacuauuucagugucagcu

SEQ ID NO: 2474 - RNA, 20 nt, Artificial Sequence
  HTT spacer sequence ATCN PAM
gcugacacugaaauaguuca

SEQ ID NO: 2475 - RNA, 20 nt, Artificial Sequence
  HTT spacer sequence ATCN PAM
uaaaucagcugacacugaaa

SEQ ID NO: 2476 - RNA, 20 nt, Artificial Sequence
  HTT spacer sequence ATCN PAM
ggcaaacucuuuucuuggua

SEQ ID NO: 2477 - RNA, 20 nt, Artificial Sequence
  HTT spacer sequence ATCN PAM
uuugaacuggguaagaauuc

SEQ ID NO: 2478 - RNA, 20 nt, Artificial Sequence
  HTT spacer sequence ATCN PAM
uaucauuugaacuggguaag

SEQ ID NO: 2479 - RNA, 20 nt, Artificial Sequence
  HTT spacer sequence ATCN PAM
gucuuggaauacagguuucu

SEQ ID NO: 2480 - RNA, 20 nt, Artificial Sequence
  HTT spacer sequence ATCN PAM
uuuuaugaaucuccuaaaag

SEQ ID NO: 2481 - RNA, 20 nt, Artificial Sequence
  HTT spacer sequence ATCN PAM
ccuaaaagacaccauacuuu

SEQ ID NO: 2482 - RNA, 20 nt, Artificial Sequence
  HTT spacer sequence ATCN PAM
uagaaauaaccaaauuuccu

SEQ ID NO: 2483 - RNA, 20 nt, Artificial Sequence
  HTT spacer sequence ATCN PAM
auauaauuaugguuaaguua

SEQ ID NO: 2484 - RNA, 20 nt, Artificial Sequence
  HTT spacer sequence ATCN PAM
cauuuaauuuuggaacauau

SEQ ID NO: 2485 - RNA, 20 nt, Artificial Sequence
  HTT spacer sequence ATCN PAM
uucacuaaaauguaaccuga

SEQ ID NO: 2486 - RNA, 20 nt, Artificial Sequence
  HTT spacer sequence ATCN PAM
gauuaucccguuuaccucuc

SEQ ID NO: 2487 - RNA, 20 nt, Artificial Sequence
  HTT spacer sequence ATCN PAM
gauauguuaaguuacauggg

SEQ ID NO: 2488 - RNA, 20 nt, Artificial Sequence
  HTT spacer sequence ATCN PAM
cguuuaccucucuuuggaug

SEQ ID NO: 2489 - RNA, 20 nt, Artificial Sequence
  HTT spacer sequence ATCN PAM
aaagagagguaaacgggaua

SEQ ID NO: 2490 - RNA, 20 nt, Artificial Sequence
  HTT spacer sequence ATCN PAM
ccuaaagcauccaaagagag

SEQ ID NO: 2491 - RNA, 20 nt, Artificial Sequence
  HTT spacer sequence ATCN PAM
cuguaacaccccaaaguuag

SEQ ID NO: 2492 - RNA, 20 nt, Artificial Sequence
  HTT spacer sequence ATCN PAM
aauuucagcuucaaaauagu

SEQ ID NO: 2493 - RNA, 20 nt, Artificial Sequence
  HTT spacer sequence ATCN PAM
aauauauuaaagguuuaaaa

SEQ ID NO: 2494 - RNA, 20 nt, Artificial Sequence
  HTT spacer sequence ATCN PAM
aguguuuuaaaccuuuaaua

SEQ ID NO: 2495 - RNA, 20 nt, Artificial Sequence
  HTT spacer sequence ATCN PAM
caccucauggucaaacuggu

SEQ ID NO: 2496 - RNA, 20 nt, Artificial Sequence
  HTT spacer sequence ATCN PAM
cuuacaauuugugugugugu

SEQ ID NO: 2497 - RNA, 20 nt, Artificial Sequence
  HTT spacer sequence ATCN PAM
aaaacacacacacacacaca

SEQ ID NO: 2498 - RNA, 20 nt, Artificial Sequence
  HTT spacer sequence ATCN PAM
ugucacuguacuccagccug

SEQ ID NO: 2499 - RNA, 20 nt, Artificial Sequence
  HTT spacer sequence ATCN PAM
cggcuaccgcaaccucugcc

SEQ ID NO: 2500 - RNA, 20 nt, Artificial Sequence
  HTT spacer sequence ATCN PAM
cagcuacuagagaggcugag

SEQ ID NO: 2501 - RNA, 20 nt, Artificial Sequence
  HTT spacer sequence ATCN PAM
ccugaggucgggaguucgag

SEQ ID NO: 2502 - RNA, 20 nt, Artificial Sequence
  HTT spacer sequence ATCN PAM
accugccuuggccccccaaa

SEQ ID NO: 2503 - RNA, 20 nt, Artificial Sequence
  HTT spacer sequence ATCN PAM
cagcacuuuggggggccaag

SEQ ID NO: 2504 - RNA, 20 nt, Artificial Sequence
  HTT spacer sequence ATCN PAM
aacuggcaaaaggccaggcg

SEQ ID NO: 2505 - RNA, 20 nt, Artificial Sequence
  HTT spacer sequence ATCN PAM
uuuuuuguuucauugaacca

SEQ ID NO: 2506 - RNA, 20 nt, Artificial Sequence
  HTT spacer sequence ATCN PAM
uuuuccuuuaugauguggcu

SEQ ID NO: 2507 - RNA, 20 nt, Artificial Sequence
  HTT spacer sequence ATCN PAM
uaaaggaaaaugaucuuuuu

SEQ ID NO: 2508 - RNA, 20 nt, Artificial Sequence
  HTT spacer sequence ATCN PAM
cugagggccaagccacauca

SEQ ID NO: 2509 - RNA, 20 nt, Artificial Sequence
  HTT spacer sequence ATCN PAM
uaucccugagggccaagcca

SEQ ID NO: 2510 - RNA, 20 nt, Artificial Sequence
  HTT spacer sequence ATCN PAM
agaagccuggcacacagcaa

SEQ ID NO: 2511 - RNA, 20 nt, Artificial Sequence
  HTT spacer sequence ATCN PAM
gacugguaagaaauucuuac

SEQ ID NO: 2512 - RNA, 20 nt, Artificial Sequence
  HTT spacer sequence ATCN PAM
cugcuuaucuccucuguaaa

SEQ ID NO: 2513 - RNA, 20 nt, Artificial Sequence
  HTT spacer sequence ATCN PAM
ccucuguaaaguuuugauua

SEQ ID NO: 2514 - RNA, 20 nt, Artificial Sequence
  HTT spacer sequence ATCN PAM
aaacuuuacagaggagauaa

SEQ ID NO: 2515 - RNA, 20 nt, Artificial Sequence
  HTT spacer sequence ATCN PAM
uuuuuuccauuaaucaaaac

SEQ ID NO: 2516 - RNA, 20 nt, Artificial Sequence
  HTT spacer sequence ATCN PAM
caggcuguagugaaucucgu

SEQ ID NO: 2517 - RNA, 20 nt, Artificial Sequence
  HTT spacer sequence ATCN PAM
cguaggcuuuaugugucuuc

SEQ ID NO: 2518 - RNA, 20 nt, Artificial Sequence
  HTT spacer sequence ATCN PAM
cagaacagcacgggaagaca

SEQ ID NO: 2519 - RNA, 20 nt, Artificial Sequence
  HTT spacer sequence ATCN PAM
uaaggcgccccuuuuuauca

SEQ ID NO: 2520 - RNA, 20 nt, Artificial Sequence
  HTT spacer sequence ATCN PAM
ugagcggcgagcaagcuuau

SEQ ID NO: 2521 - RNA, 20 nt, Artificial Sequence
  HTT spacer sequence ATCN PAM
gcagcaguuacugaccagcu

SEQ ID NO: 2522 - RNA, 20 nt, Artificial Sequence
  HTT spacer sequence ATCN PAM
cugaaacaaacaaaaaaacu

SEQ ID NO: 2523 - RNA, 20 nt, Artificial Sequence
  HTT spacer sequence ATCN PAM
aguuuuuuuguuuguuucag

SEQ ID NO: 2524 - RNA, 20 nt, Artificial Sequence
  HTT spacer sequence ATCN PAM
uguuuuaagucuuugggagu

SEQ ID NO: 2525 - RNA, 20 nt, Artificial Sequence
  HTT spacer sequence ATCN PAM
aucuugaguaguuacgaggc

SEQ ID NO: 2526 - RNA, 20 nt, Artificial Sequence
  HTT spacer sequence ATCN PAM
ugaguaguuacgaggcuuug

SEQ ID NO: 2527 - RNA, 20 nt, Artificial Sequence
  HTT spacer sequence ATCN PAM
ccacugaacuauagcacugg

SEQ ID NO: 2528 - RNA, 20 nt, Artificial Sequence
  HTT spacer sequence ATCN PAM
ggguuugauuccuggcuuag

SEQ ID NO: 2529 - RNA, 20 nt, Artificial Sequence
  HTT spacer sequence ATCN PAM
aacccagaucaccacugaac

SEQ ID NO: 2530 - RNA, 20 nt, Artificial Sequence
  HTT spacer sequence ATCN PAM
auuagaaaguacucauuccc

SEQ ID NO: 2531 - RNA, 20 nt, Artificial Sequence
  HTT spacer sequence ATCN PAM
aaaaauggcaaagguuaccc

SEQ ID NO: 2532 - RNA, 20 nt, Artificial Sequence
  HTT spacer sequence ATCN PAM
ggccaaacagccaauauucc

SEQ ID NO: 2533 - RNA, 20 nt, Artificial Sequence
  HTT spacer sequence ATCN PAM
acuuuuaauuaagcugacuu

SEQ ID NO: 2534 - RNA, 20 nt, Artificial Sequence
  HTT spacer sequence ATCN PAM
acuuccaauuucugggguuu

SEQ ID NO: 2535 - RNA, 20 nt, Artificial Sequence
  HTT spacer sequence ATCN PAM
aucuacuuccaauuucuggg

SEQ ID NO: 2536 - RNA, 20 nt, Artificial Sequence
  HTT spacer sequence ATCN PAM
aaggcucuguucuguuuugc

SEQ ID NO: 2537 - RNA, 20 nt, Artificial Sequence
  HTT spacer sequence ATCN PAM
aaugcaaaacagaacagagc

SEQ ID NO: 2538 - RNA, 20 nt, Artificial Sequence
  HTT spacer sequence ATCN PAM
acuguuuuuuacuugggggu

SEQ ID NO: 2539 - RNA, 20 nt, Artificial Sequence
  HTT spacer sequence ATCN PAM
gaaauuacuucacauagaga

SEQ ID NO: 2540 - RNA, 20 nt, Artificial Sequence
  HTT spacer sequence ATCN PAM
cuaaaguauauuuccugccu

SEQ ID NO: 2541 - RNA, 20 nt, Artificial Sequence
  HTT spacer sequence ATCN PAM
cccccaaaaaagagggaguc

SEQ ID NO: 2542 - RNA, 20 nt, Artificial Sequence
  HTT spacer sequence ATCN PAM
aggaucugguauaaaaacga

SEQ ID NO: 2543 - RNA, 20 nt, Artificial Sequence
  HTT spacer sequence ATCN PAM
uggaucccccccaaaaaaga

SEQ ID NO: 2544 - RNA, 20 nt, Artificial Sequence
  HTT spacer sequence ATCN PAM
gguauaaaaacgagaccuca

SEQ ID NO: 2545 - RNA, 20 nt, Artificial Sequence
  HTT spacer sequence ATCN PAM
uagcacuuugagaggccgag

SEQ ID NO: 2546 - RNA, 20 nt, Artificial Sequence
  HTT spacer sequence ATCN PAM
acccaccucggccucucaaa

SEQ ID NO: 2547 - RNA, 20 nt, Artificial Sequence
  HTT spacer sequence ATCN PAM
cuuuaacccaggaggcggag

SEQ ID NO: 2548 - RNA, 20 nt, Artificial Sequence
  HTT spacer sequence ATCN PAM
caguucacugcaaccuccgc

SEQ ID NO: 2549 - RNA, 20 nt, Artificial Sequence
  HTT spacer sequence ATCN PAM
ccaaaaauuaagggucucuu

SEQ ID NO: 2550 - RNA, 20 nt, Artificial Sequence
  HTT spacer sequence ATCN PAM
guuuugccuuccagcugugc

SEQ ID NO: 2551 - RNA, 20 nt, Artificial Sequence
  HTT spacer sequence ATCN PAM
uaaagccaguaauccaauuu

SEQ ID NO: 2552 - RNA, 20 nt, Artificial Sequence
  HTT spacer sequence ATCN PAM
aauuuagaaacuuagaaagu

SEQ ID NO: 2553 - RNA, 20 nt, Artificial Sequence
  HTT spacer sequence ATCN PAM
uacaacuauuggaucuucuu

SEQ ID NO: 2554 - RNA, 20 nt, Artificial Sequence
  HTT spacer sequence ATCN PAM
aauaguuguaagauuuuuca

SEQ ID NO: 2555 - RNA, 20 nt, Artificial Sequence
  HTT spacer sequence ATCN PAM
ucuucugucugucuguguag

SEQ ID NO: 2556 - RNA, 20 nt, Artificial Sequence
  HTT spacer sequence ATCN PAM
caacacuuugggaggcugag

SEQ ID NO: 2557 - RNA, 20 nt, Artificial Sequence
  HTT spacer sequence ATCN PAM
acccaccucagccucccaaa

SEQ ID NO: 2558 - RNA, 20 nt, Artificial Sequence
  HTT spacer sequence ATCN PAM
ccugaggucaggaguucgag

SEQ ID NO: 2559 - RNA, 20 nt, Artificial Sequence
  HTT spacer sequence ATCN PAM
cagcuacucaggaggcugag

SEQ ID NO: 2560 - RNA, 20 nt, Artificial Sequence
  HTT spacer sequence ATCN PAM
cuugaacucaggagguggag

SEQ ID NO: 2561 - RNA, 20 nt, Artificial Sequence
  HTT spacer sequence ATCN PAM
uggcucagggcaaccuccac

SEQ ID NO: 2562 - RNA, 20 nt, Artificial Sequence
  HTT spacer sequence ATCN PAM
agacuugggugcaguggcac

SEQ ID NO: 2563 - RNA, 20 nt, Artificial Sequence
  HTT spacer sequence ATCN PAM
aauauuuugaaagaaaaaua

SEQ ID NO: 2564 - RNA, 20 nt, Artificial Sequence
  HTT spacer sequence ATCN PAM
uugggaaauaaaaaguuuua

SEQ ID NO: 2565 - RNA, 20 nt, Artificial Sequence
  HTT spacer sequence ATCN PAM
aaccugccuaauuuaggcca

SEQ ID NO: 2566 - RNA, 20 nt, Artificial Sequence
  HTT spacer sequence ATCN PAM
caaaaaaaaaaaaaaaaaag

SEQ ID NO: 2567 - RNA, 20 nt, Artificial Sequence
  HTT spacer sequence ATCN PAM
cgccauuggacuccagccug

SEQ ID NO: 2568 - RNA, 20 nt, Artificial Sequence
  HTT spacer sequence ATCN PAM
aggcucacuacaacgucugc

SEQ ID NO: 2569 - RNA, 20 nt, Artificial Sequence
  HTT spacer sequence ATCN PAM
aagcuacucgggaggcugag

SEQ ID NO: 2570 - RNA, 20 nt, Artificial Sequence
  HTT spacer sequence ATCN PAM
cuacuaaaaauacaaaaauu

SEQ ID NO: 2571 - RNA, 20 nt, Artificial Sequence
  HTT spacer sequence ATCN PAM
ugaggucaggaguucaagac

SEQ ID NO: 2572 - RNA, 20 nt, Artificial Sequence
  HTT spacer sequence ATCN PAM
ccccgccuccgccucccaaa

SEQ ID NO: 2573 - RNA, 20 nt, Artificial Sequence
  HTT spacer sequence ATCN PAM
cagcacuuugggaggcggag

SEQ ID NO: 2574 - RNA, 20 nt, Artificial Sequence
  HTT spacer sequence ATCN PAM
aaugcuccaaaauaauuuga

SEQ ID NO: 2575 - RNA, 20 nt, Artificial Sequence
  HTT spacer sequence ATCN PAM
agaaucuaaugcuccaaaau

SEQ ID NO: 2576 - RNA, 20 nt, Artificial Sequence
  HTT spacer sequence ATCN PAM
ucuuugccuagcugggggca

SEQ ID NO: 2577 - RNA, 20 nt, Artificial Sequence
  HTT spacer sequence ATCN PAM
uuucuuauauaaaauuuauu

SEQ ID NO: 2578 - RNA, 20 nt, Artificial Sequence
  HTT spacer sequence ATCN PAM
cguaugguaaauucuugccc

SEQ ID NO: 2579 - RNA, 20 nt, Artificial Sequence
  HTT spacer sequence ATCN PAM
auggcaugguuggacuuucu

SEQ ID NO: 2580 - RNA, 20 nt, Artificial Sequence
  HTT spacer sequence ATCN PAM
uuuaacaacuuacacaggcc

SEQ ID NO: 2581 - RNA, 20 nt, Artificial Sequence
  HTT spacer sequence ATCN PAM
uuuacuuuuggugcaugaau

SEQ ID NO: 2582 - RNA, 20 nt, Artificial Sequence
  HTT spacer sequence ATCN PAM
uuuaccaaaaacacauuuca

SEQ ID NO: 2583 - RNA, 20 nt, Artificial Sequence
  HTT spacer sequence ATCN PAM
aacuuaaaaacccuuuaacc

SEQ ID NO: 2584 - RNA, 20 nt, Artificial Sequence
  HTT spacer sequence ATCN PAM
uaucuaacuuaaaaacccuu

SEQ ID NO: 2585 - RNA, 20 nt, Artificial Sequence
  HTT spacer sequence ATCN PAM
uguaaaagaaauucugugug

SEQ ID NO: 2586 - RNA, 20 nt, Artificial Sequence
  HTT spacer sequence ATCN PAM
caaaaaaaaaaaauagaaag

SEQ ID NO: 2587 - RNA, 20 nt, Artificial Sequence
  HTT spacer sequence ATCN PAM
cuuaaacccagggggcagag

SEQ ID NO: 2588 - RNA, 20 nt, Artificial Sequence
  HTT spacer sequence ATCN PAM
cagcuacuccagaggcugag

SEQ ID NO: 2589 - RNA, 20 nt, Artificial Sequence
  HTT spacer sequence ATCN PAM
cgaggucaggaguucaagac

SEQ ID NO: 2590 - RNA, 20 nt, Artificial Sequence
  HTT spacer sequence ATCN PAM
gcccgccuccaccucccaaa

SEQ ID NO: 2591 - RNA, 20 nt, Artificial Sequence
  HTT spacer sequence ATCN PAM
uagcacuuugggagguggag

SEQ ID NO: 2592 - RNA, 20 nt, Artificial Sequence
  HTT spacer sequence ATCN PAM
caucacuuugggaggcugag

SEQ ID NO: 2593 - RNA, 20 nt, Artificial Sequence
  HTT spacer sequence ATCN PAM
cuuugggaggcugaggcagg

SEQ ID NO: 2594 - RNA, 20 nt, Artificial Sequence
  HTT spacer sequence ATCN PAM
accugccucagccucccaaa

SEQ ID NO: 2595 - RNA, 20 nt, Artificial Sequence
  HTT spacer sequence ATCN PAM
cgaggucaggagaucgagac

SEQ ID NO: 2596 - RNA, 20 nt, Artificial Sequence
  HTT spacer sequence ATCN PAM
ccugaccucgugaucuaccu

SEQ ID NO: 2597 - RNA, 20 nt, Artificial Sequence
  HTT spacer sequence ATCN PAM
agaccauccgggcguggugg

SEQ ID NO: 2598 - RNA, 20 nt, Artificial Sequence
  HTT spacer sequence ATCN PAM
gggcgugguggcgggcgccu

SEQ ID NO: 2599 - RNA, 20 nt, Artificial Sequence
  HTT spacer sequence ATCN PAM
cagcucacugcaagcucugc

SEQ ID NO: 2600 - RNA, 20 nt, Artificial Sequence
  HTT spacer sequence ATCN PAM
uuaacccauuuuuaacccag

SEQ ID NO: 2601 - RNA, 20 nt, Artificial Sequence
  HTT spacer sequence ATCN PAM
caugcuuuacuuagguaaaa

SEQ ID NO: 2602 - RNA, 20 nt, Artificial Sequence
  HTT spacer sequence ATCN PAM
ccuuuggauugcgauaguaa

SEQ ID NO: 2603 - RNA, 20 nt, Artificial Sequence
  HTT spacer sequence ATCN PAM
aaaggagauaggcugcagca

SEQ ID NO: 2604 - RNA, 20 nt, Artificial Sequence
  HTT spacer sequence ATCN PAM
caauccaaaggagauaggcu

SEQ ID NO: 2605 - RNA, 20 nt, Artificial Sequence
  HTT spacer sequence ATCN PAM
gcuaaccuuuuagcuuaguu

SEQ ID NO: 2606 - RNA, 20 nt, Artificial Sequence
  HTT spacer sequence ATCN PAM
aaucugcuaaccuuuuagcu

SEQ ID NO: 2607 - RNA, 20 nt, Artificial Sequence
  HTT spacer sequence ATCN PAM
uuaguaagauuucaccauuu

SEQ ID NO: 2608 - RNA, 20 nt, Artificial Sequence
  HTT spacer sequence ATCN PAM
uacuaaagaugacuacagug

SEQ ID NO: 2609 - RNA, 20 nt, Artificial Sequence
  HTT spacer sequence ATCN PAM
agggaagcugagcguaaagc

SEQ ID NO: 2610 - RNA, 20 nt, Artificial Sequence
  HTT spacer sequence ATCN PAM
uuggcuaaauuaaucaaggg

SEQ ID NO: 2611 - RNA, 20 nt, Artificial Sequence
  HTT spacer sequence ATCN PAM
ccacgaauuuucaaaagcca

SEQ ID NO: 2612 - RNA, 20 nt, Artificial Sequence
  HTT spacer sequence ATCN PAM
gacugggucugaaagaaacu

SEQ ID NO: 2613 - RNA, 20 nt, Artificial Sequence
  HTT spacer sequence ATCN PAM
aguuagaggccucuuacauc

SEQ ID NO: 2614 - RNA, 20 nt, Artificial Sequence
  HTT spacer sequence ATCN PAM
aggccgguuaauuaccguau

SEQ ID NO: 2615 - RNA, 20 nt, Artificial Sequence
  HTT spacer sequence ATCN PAM
aaucuauuccuggacccauc

SEQ ID NO: 2616 - RNA, 20 nt, Artificial Sequence
  HTT spacer sequence ATCN PAM
auuccuggacccauccauuu

SEQ ID NO: 2617 - RNA, 20 nt, Artificial Sequence
  HTT spacer sequence ATCN PAM
auuuucuuuggcgacuucca

SEQ ID NO: 2618 - RNA, 20 nt, Artificial Sequence
  HTT spacer sequence ATCN PAM
aaacuggguuuggaagucgc

SEQ ID NO: 2619 - RNA, 20 nt, Artificial Sequence
  HTT spacer sequence ATCN PAM
gaaauuugcacaaagaaaac

SEQ ID NO: 2620 - RNA, 20 nt, Artificial Sequence
  HTT spacer sequence ATCN PAM
acaguuuguguuucgagcuc

SEQ ID NO: 2621 - RNA, 20 nt, Artificial Sequence
  HTT spacer sequence ATCN PAM
ccaaaauccaagagaggacu

SEQ ID NO: 2622 - RNA, 20 nt, Artificial Sequence
  HTT spacer sequence ATCN PAM
aagagaggacuuauccauga

SEQ ID NO: 2623 - RNA, 20 nt, Artificial Sequence
  HTT spacer sequence ATCN PAM
augauccccagcugcucuga

SEQ ID NO: 2624 - RNA, 20 nt, Artificial Sequence
  HTT spacer sequence ATCN PAM
uggauaaguccucucuugga

SEQ ID NO: 2625 - RNA, 20 nt, Artificial Sequence
  HTT spacer sequence ATCN PAM
ccagcugcucugagaaauca

SEQ ID NO: 2626 - RNA, 20 nt, Artificial Sequence
  HTT spacer sequence ATCN PAM
auggacacaaguguguccag

SEQ ID NO: 2627 - RNA, 20 nt, Artificial Sequence
  HTT spacer sequence ATCN PAM
aaaguaaagcuucuaaugac

SEQ ID NO: 2628 - RNA, 20 nt, Artificial Sequence
  HTT spacer sequence ATCN PAM
cacuucugacaccauguuaa

SEQ ID NO: 2629 - RNA, 20 nt, Artificial Sequence
  HTT spacer sequence ATCN PAM
uucauugcuuaauuaaacuc

SEQ ID NO: 2630 - RNA, 20 nt, Artificial Sequence
  HTT spacer sequence ATCN PAM
cagcagauucagagagacuc

SEQ ID NO: 2631 - RNA, 20 nt, Artificial Sequence
  HTT spacer sequence ATCN PAM
gcugggauucugaggacugc

SEQ ID NO: 2632 - RNA, 20 nt, Artificial Sequence
  HTT spacer sequence ATCN PAM
cuggagucucucugaaucug

SEQ ID NO: 2633 - RNA, 20 nt, Artificial Sequence
  HTT spacer sequence ATCN PAM
cagcagccauauuucacuca

SEQ ID NO: 2634 - RNA, 20 nt, Artificial Sequence
  HTT spacer sequence ATCN PAM
ugucuaccuauaaguuaggu

SEQ ID NO: 2635 - RNA, 20 nt, Artificial Sequence
  HTT spacer sequence ATCN PAM
acaaagacucaaauacagaa

SEQ ID NO: 2636 - RNA, 20 nt, Artificial Sequence
  HTT spacer sequence ATCN PAM
gguuuuucuuuuggcaaaca

SEQ ID NO: 2637 - RNA, 20 nt, Artificial Sequence
  HTT spacer sequence ATCN PAM
uaaugauuuuuaagcauagg

SEQ ID NO: 2638 - RNA, 20 nt, Artificial Sequence
  HTT spacer sequence ATCN PAM
uuaagaugguaaauuuuaug

SEQ ID NO: 2639 - RNA, 20 nt, Artificial Sequence
  HTT spacer sequence ATCN PAM
aucauucauucaaucaguuu

SEQ ID NO: 2640 - RNA, 20 nt, Artificial Sequence
  HTT spacer sequence ATCN PAM
uucauucaaucaguuugcac

SEQ ID NO: 2641 - RNA, 20 nt, Artificial Sequence
  HTT spacer sequence ATCN PAM
guuugcacaguuaacucuuu

SEQ ID NO: 2642 - RNA, 20 nt, Artificial Sequence
  HTT spacer sequence ATCN PAM
uguaaagcugaagcucuguc

SEQ ID NO: 2643 - RNA, 20 nt, Artificial Sequence
  HTT spacer sequence ATCN PAM
ccugucucaguggaaucaga

SEQ ID NO: 2644 - RNA, 20 nt, Artificial Sequence
  HTT spacer sequence ATCN PAM
gacagcauuugccccuugug

SEQ ID NO: 2645 - RNA, 20 nt, Artificial Sequence
  HTT spacer sequence ATCN PAM
cggcucacugcaaccucugc

SEQ ID NO: 2646 - RNA, 20 nt, Artificial Sequence
  HTT spacer sequence ATCN PAM
uuaguagagacgggguuuca

SEQ ID NO: 2647 - RNA, 20 nt, Artificial Sequence
  HTT spacer sequence ATCN PAM
uggccaacacggugaaaccc

SEQ ID NO: 2648 - RNA, 20 nt, Artificial Sequence
  HTT spacer sequence ATCN PAM
ccugaccucgugaucugccc

SEQ ID NO: 2649 - RNA, 20 nt, Artificial Sequence
  HTT spacer sequence ATCN PAM
cgaggucaggagaugaagac

SEQ ID NO: 2650 - RNA, 20 nt, Artificial Sequence
  HTT spacer sequence ATCN PAM
gcccgccucggccucccaaa

SEQ ID NO: 2651 - RNA, 20 nt, Artificial Sequence
  HTT spacer sequence ATCN PAM
cagcacuuugggaggccgag

SEQ ID NO: 2652 - RNA, 20 nt, Artificial Sequence
  HTT spacer sequence ATCN PAM
auguuguagugugugucaga

SEQ ID NO: 2653 - RNA, 20 nt, Artificial Sequence
  HTT spacer sequence ATCN PAM
aagaacccucucuugggguc

SEQ ID NO: 2654 - RNA, 20 nt, Artificial Sequence
  HTT spacer sequence ATCN PAM
ugcucaagaaagaauucaga

SEQ ID NO: 2655 - RNA, 20 nt, Artificial Sequence
  HTT spacer sequence ATCN PAM
gggcugcucugcccauggag

SEQ ID NO: 2656 - RNA, 20 nt, Artificial Sequence
  HTT spacer sequence ATCN PAM
ccacugcacuccagccuggg

SEQ ID NO: 2657 - RNA, 20 nt, Artificial Sequence
  HTT spacer sequence ATCN PAM
cggcucacugcaagcuccgc

SEQ ID NO: 2658 - RNA, 20 nt, Artificial Sequence
  HTT spacer sequence ATCN PAM
uggcuaacauggugaaaccc

SEQ ID NO: 2659 - RNA, 20 nt, Artificial Sequence
  HTT spacer sequence ATCN PAM
ccugaccuugugauccgccc

SEQ ID NO: 2660 - RNA, 20 nt, Artificial Sequence
  HTT spacer sequence ATCN PAM
caaggucaggagauugagac

SEQ ID NO: 2661 - RNA, 20 nt, Artificial Sequence
  HTT spacer sequence ATCN PAM
gcccgccucagccucccaaa

SEQ ID NO: 2662 - RNA, 20 nt, Artificial Sequence
  HTT spacer sequence ATCN PAM
cagcacuuugggaggcugag

SEQ ID NO: 2663 - RNA, 20 nt, Artificial Sequence
  HTT spacer sequence ATCN PAM
gcagggcgugguggcucacg

SEQ ID NO: 2664 - RNA, 20 nt, Artificial Sequence
  HTT spacer sequence ATCN PAM
agaaauaaucagcagggcgu

SEQ ID NO: 2665 - RNA, 20 nt, Artificial Sequence
  HTT spacer sequence ATCN PAM
accucuuguuuagcauauaa

SEQ ID NO: 2666 - RNA, 20 nt, Artificial Sequence
  HTT spacer sequence ATCN PAM
cagcacuuugggaggccaag

SEQ ID NO: 2667 - RNA, 20 nt, Artificial Sequence
  HTT spacer sequence ATCN PAM
gcccgccuuggccucccaaa

SEQ ID NO: 2668 - RNA, 20 nt, Artificial Sequence
  HTT spacer sequence ATCN PAM
cuacuaaaaauaaaaaauua

SEQ ID NO: 2669 - RNA, 20 nt, Artificial Sequence
  HTT spacer sequence ATCN PAM
cuugaacccgggaagccgag

SEQ ID NO: 2670 - RNA, 20 nt, Artificial Sequence
  HTT spacer sequence ATCN PAM
cggcucaccacaaccucggc

SEQ ID NO: 2671 - RNA, 20 nt, Artificial Sequence
  HTT spacer sequence ATCN PAM
guaaacugucauggggcugg

SEQ ID NO: 2672 - RNA, 20 nt, Artificial Sequence
  HTT spacer sequence ATCN PAM
cugguuguucucacagcuca

SEQ ID NO: 2673 - RNA, 20 nt, Artificial Sequence
  HTT spacer sequence ATCN PAM
cuuucauugccaucuugguu

SEQ ID NO: 2674 - RNA, 20 nt, Artificial Sequence
  HTT spacer sequence ATCN PAM
ugguuuuggugggcuuuggc

SEQ ID NO: 2675 - RNA, 20 nt, Artificial Sequence
  HTT spacer sequence ATCN PAM
guaaggucuuugugaccugu

SEQ ID NO: 2676 - RNA, 20 nt, Artificial Sequence
  HTT spacer sequence ATCN PAM
ugugucagccuccuaccuca

SEQ ID NO: 2677 - RNA, 20 nt, Artificial Sequence
  HTT spacer sequence ATCN PAM
ugugacuaugaaugccuaac

SEQ ID NO: 2678 - RNA, 20 nt, Artificial Sequence
  HTT spacer sequence ATCN PAM
ugaauaggggcgggguaaaa

SEQ ID NO: 2679 - RNA, 20 nt, Artificial Sequence
  HTT spacer sequence ATCN PAM
uuuuacauuucuuuuuuuuu

SEQ ID NO: 2680 - RNA, 20 nt, Artificial Sequence
  HTT spacer sequence ATCN PAM
uaccacagcacuccagccug

SEQ ID NO: 2681 - RNA, 20 nt, Artificial Sequence
  HTT spacer sequence ATCN PAM
cggcucacugcaaucuccac

SEQ ID NO: 2682 - RNA, 20 nt, Artificial Sequence
  HTT spacer sequence ATCN PAM
ccaccuccgagguuccagcg

SEQ ID NO: 2683 - RNA, 20 nt, Artificial Sequence
  HTT spacer sequence ATCN PAM
cuggaaccucggagguggag

SEQ ID NO: 2684 - RNA, 20 nt, Artificial Sequence
  HTT spacer sequence ATCN PAM
uacugggcuaauuuuugugu

SEQ ID NO: 2685 - RNA, 20 nt, Artificial Sequence
  HTT spacer sequence ATCN PAM
cuacuaaaaacacaaaaauu

SEQ ID NO: 2686 - RNA, 20 nt, Artificial Sequence
  HTT spacer sequence ATCN PAM
gccugggcaacauggggaaa

SEQ ID NO: 2687 - RNA, 20 nt, Artificial Sequence
  HTT spacer sequence ATCN PAM
caaacuccugggcuuaagca

SEQ ID NO: 2688 - RNA, 20 nt, Artificial Sequence
  HTT spacer sequence ATCN PAM
caacacuuugggaggccaac

SEQ ID NO: 2689 - RNA, 20 nt, Artificial Sequence
  HTT spacer sequence ATCN PAM
uugcguccuugcagaugaau

SEQ ID NO: 2690 - RNA, 20 nt, Artificial Sequence
  HTT spacer sequence ATCN PAM
gcaaggacgcaaggauggca

SEQ ID NO: 2691 - RNA, 20 nt, Artificial Sequence
  HTT spacer sequence ATCN PAM
uaaccuagcauaguagguag

SEQ ID NO: 2692 - RNA, 20 nt, Artificial Sequence
  HTT spacer sequence ATCN PAM
ggcuguuaacgugccucacu

SEQ ID NO: 2693 - RNA, 20 nt, Artificial Sequence
  HTT spacer sequence ATCN PAM
cuagagucucccugaaucug

SEQ ID NO: 2694 - RNA, 20 nt, Artificial Sequence
  HTT spacer sequence ATCN PAM
gcugugauucugggaccugc

SEQ ID NO: 2695 - RNA, 20 nt, Artificial Sequence
  HTT spacer sequence ATCN PAM
cagcagauucagggagacuc

SEQ ID NO: 2696 - RNA, 20 nt, Artificial Sequence
  HTT spacer sequence ATCN PAM
aggaaaaaaaaaacaauuca

SEQ ID NO: 2697 - RNA, 20 nt, Artificial Sequence
  HTT spacer sequence ATCN PAM
gcuaaacucuguucaauuca

SEQ ID NO: 2698 - RNA, 20 nt, Artificial Sequence
  HTT spacer sequence ATCN PAM
ggccacugcacuccagccug

SEQ ID NO: 2699 - RNA, 20 nt, Artificial Sequence
  HTT spacer sequence ATCN PAM
cggcccacugcaaccuccac

SEQ ID NO: 2700 - RNA, 20 nt, Artificial Sequence
  HTT spacer sequence ATCN PAM
cagcuacucaggaggcugag

SEQ ID NO: 2701 - RNA, 20 nt, Artificial Sequence
  HTT spacer sequence ATCN PAM
cuacuaaaaauacaaaaauu

SEQ ID NO: 2702 - RNA, 20 nt, Artificial Sequence
  HTT spacer sequence ATCN PAM
cagcauuuugggaggccaag

SEQ ID NO: 2703 - RNA, 20 nt, Artificial Sequence
  HTT spacer sequence ATCN PAM
ucuugauauuaauguugcuu

SEQ ID NO: 2704 - RNA, 20 nt, Artificial Sequence
  HTT spacer sequence ATCN PAM
agaagaugaggccaggcgca

SEQ ID NO: 2705 - RNA, 20 nt, Artificial Sequence
  HTT spacer sequence ATCN PAM
uugucccuguguuuuuuguu

SEQ ID NO: 2706 - RNA, 20 nt, Artificial Sequence
  HTT spacer sequence ATCN PAM
cgccacugaacuccagccug

SEQ ID NO: 2707 - RNA, 20 nt, Artificial Sequence
  HTT spacer sequence ATCN PAM
cagcucacugcaaccucugu

SEQ ID NO: 2708 - RNA, 20 nt, Artificial Sequence
  HTT spacer sequence ATCN PAM
cuggaacccaggagacagag

SEQ ID NO: 2709 - RNA, 20 nt, Artificial Sequence
  HTT spacer sequence ATCN PAM
aaagacccaggaacacagcu

SEQ ID NO: 2710 - RNA, 20 nt, Artificial Sequence
  HTT spacer sequence ATCN PAM
cacuuagcauguacgcacag

SEQ ID NO: 2711 - RNA, 20 nt, Artificial Sequence
  HTT spacer sequence ATCN PAM
uuugaaagacauugccaagu

SEQ ID NO: 2712 - RNA, 20 nt, Artificial Sequence
  HTT spacer sequence ATCN PAM
cuuuucugaagagugacuug

SEQ ID NO: 2713 - RNA, 20 nt, Artificial Sequence
  HTT spacer sequence ATCN PAM
cgguuggugucucuucaauc

SEQ ID NO: 2714 - RNA, 20 nt, Artificial Sequence
  HTT spacer sequence ATCN PAM
uuccucacacuuuucuuggg

SEQ ID NO: 2715 - RNA, 20 nt, Artificial Sequence
  HTT spacer sequence ATCN PAM
ugagucuacuacauuuacac

SEQ ID NO: 2716 - RNA, 20 nt, Artificial Sequence
  HTT spacer sequence ATCN PAM
uuagaaacaggaucucauuu

SEQ ID NO: 2717 - RNA, 20 nt, Artificial Sequence
  HTT spacer sequence ATCN PAM
uguuucuaaagaugcuuuaa

SEQ ID NO: 2718 - RNA, 20 nt, Artificial Sequence
  HTT spacer sequence ATCN PAM
cauuuuguugcccaggcuag

SEQ ID NO: 2719 - RNA, 20 nt, Artificial Sequence
  HTT spacer sequence ATCN PAM
ugccaccaaacucuagccug

SEQ ID NO: 2720 - RNA, 20 nt, Artificial Sequence
  HTT spacer sequence ATCN PAM
cuugagcccaggaguaugag

SEQ ID NO: 2721 - RNA, 20 nt, Artificial Sequence
  HTT spacer sequence ATCN PAM
uuccaccucugaaaccccaa

SEQ ID NO: 2722 - RNA, 20 nt, Artificial Sequence
  HTT spacer sequence ATCN PAM
caggugugcacccucaaccu

SEQ ID NO: 2723 - RNA, 20 nt, Artificial Sequence
  HTT spacer sequence ATCN PAM
ucacaggugugcacccucaa

SEQ ID NO: 2724 - RNA, 20 nt, Artificial Sequence
  HTT spacer sequence ATCN PAM
gccuaaauaauuucuuuuua

SEQ ID NO: 2725 - RNA, 20 nt, Artificial Sequence
  HTT spacer sequence ATCN PAM
agcugcagacauacacaagc

SEQ ID NO: 2726 - RNA, 20 nt, Artificial Sequence
  HTT spacer sequence ATCN PAM
gccuggccccagguagccuu

SEQ ID NO: 2727 - RNA, 20 nt, Artificial Sequence
  HTT spacer sequence ATCN PAM
aacauggcggcuccaucuuc

SEQ ID NO: 2728 - RNA, 20 nt, Artificial Sequence
  HTT spacer sequence ATCN PAM
ucccuuuccuugucaaccau

SEQ ID NO: 2729 - RNA, 20 nt, Artificial Sequence
  HTT spacer sequence ATCN PAM
uugggcccuguguaaauuag

SEQ ID NO: 2730 - RNA, 20 nt, Artificial Sequence
  HTT spacer sequence ATCN PAM
auguucuugauuuccuuggc

SEQ ID NO: 2731 - RNA, 20 nt, Artificial Sequence
  HTT spacer sequence ATCN PAM
agaacauagauacacacgga

SEQ ID NO: 2732 - RNA, 20 nt, Artificial Sequence
  HTT spacer sequence ATCN PAM
ugaugacauguucccaagau

SEQ ID NO: 2733 - RNA, 20 nt, Artificial Sequence
  HTT spacer sequence ATCN PAM
ggauuuccugaggcuguguc

SEQ ID NO: 2734 - RNA, 20 nt, Artificial Sequence
  HTT spacer sequence ATCN PAM
ugggaacaugucaucaggau

SEQ ID NO: 2735 - RNA, 20 nt, Artificial Sequence
  HTT spacer sequence ATCN PAM
ccgauaagccuuuccaaagg

SEQ ID NO: 2736 - RNA, 20 nt, Artificial Sequence
  HTT spacer sequence ATCN PAM
gagauucaaaagaaugcaac

SEQ ID NO: 2737 - RNA, 20 nt, Artificial Sequence
  HTT spacer sequence ATCN PAM
gaauaugcgucuauugacug

SEQ ID NO: 2738 - RNA, 20 nt, Artificial Sequence
  HTT spacer sequence ATCN PAM
acccaccuccgccucccaaa

SEQ ID NO: 2739 - RNA, 20 nt, Artificial Sequence
  HTT spacer sequence ATCN PAM
ccugaggucaggaguuugag

SEQ ID NO: 2740 - RNA, 20 nt, Artificial Sequence
  HTT spacer sequence ATCN PAM
cagcuacucgggaggcugag

SEQ ID NO: 2741 - RNA, 20 nt, Artificial Sequence
  HTT spacer sequence ATCN PAM
cagcucacugcaaccucuuc

SEQ ID NO: 2742 - RNA, 20 nt, Artificial Sequence
  HTT spacer sequence ATCN PAM
cagaaaaaaaaaaaaaaggc

SEQ ID NO: 2743 - RNA, 20 nt, Artificial Sequence
  HTT spacer sequence ATCN PAM
cagcacuuugggaagccgag

SEQ ID NO: 2744 - RNA, 20 nt, Artificial Sequence
  HTT spacer sequence ATCN PAM
ccugacuuugugaccugccc

SEQ ID NO: 2745 - RNA, 20 nt, Artificial Sequence
  HTT spacer sequence ATCN PAM
uggcuaacaugaugaaaccc

SEQ ID NO: 2746 - RNA, 20 nt, Artificial Sequence
  HTT spacer sequence ATCN PAM
uguuagccaggauggucuca

SEQ ID NO: 2747 - RNA, 20 nt, Artificial Sequence
  HTT spacer sequence ATCN PAM
cuacuaaaaaauacaaaaaa

SEQ ID NO: 2748 - RNA, 20 nt, Artificial Sequence
  HTT spacer sequence ATCN PAM
cggcucacugcaagcuccgc

SEQ ID NO: 2749 - RNA, 20 nt, Artificial Sequence
  HTT spacer sequence ATCN PAM
caccacugcacuccagcccg

SEQ ID NO: 2750 - RNA, 20 nt, Artificial Sequence
  HTT spacer sequence ATCN PAM
caaauuaaaaaaaaaaaaaa

SEQ ID NO: 2751 - RNA, 20 nt, Artificial Sequence
  HTT spacer sequence ATCN PAM
aucucagugagcagaaggau

SEQ ID NO: 2752 - RNA, 20 nt, Artificial Sequence
  HTT spacer sequence ATCN PAM
cagugagcagaaggaugacu

SEQ ID NO: 2753 - RNA, 20 nt, Artificial Sequence
  HTT spacer sequence ATCN PAM
uucugcucacugagauagau

SEQ ID NO: 2754 - RNA, 20 nt, Artificial Sequence
  HTT spacer sequence ATCN PAM
cugaagcuaaaggggaaguu

SEQ ID NO: 2755 - RNA, 20 nt, Artificial Sequence
  HTT spacer sequence ATCN PAM
cagcauuucgggaggcugag

SEQ ID NO: 2756 - RNA, 20 nt, Artificial Sequence
  HTT spacer sequence ATCN PAM
ccugcacccucccuuccccu

SEQ ID NO: 2757 - RNA, 20 nt, Artificial Sequence
  HTT spacer sequence ATCN PAM
aaguccgggcucacaccaga

SEQ ID NO: 2758 - RNA, 20 nt, Artificial Sequence
  HTT spacer sequence ATCN PAM
caugcugugccuagaaucga

SEQ ID NO: 2759 - RNA, 20 nt, Artificial Sequence
  HTT spacer sequence ATCN PAM
gcgcacaggagaagugaagu

SEQ ID NO: 2760 - RNA, 20 nt, Artificial Sequence
  HTT spacer sequence ATCN PAM
ccacugugcacugcugaggg

SEQ ID NO: 2761 - RNA, 20 nt, Artificial Sequence
  HTT spacer sequence ATCN PAM
uuagaacagacucuugcggu

SEQ ID NO: 2762 - RNA, 20 nt, Artificial Sequence
  HTT spacer sequence ATCN PAM
uccaagugagaagugaaagg

SEQ ID NO: 2763 - RNA, 20 nt, Artificial Sequence
  HTT spacer sequence ATCN PAM
uguguugugugguauguggg

SEQ ID NO: 2764 - RNA, 20 nt, Artificial Sequence
  HTT spacer sequence ATCN PAM
ucuaguaaggaaacaagugg

SEQ ID NO: 2765 - RNA, 20 nt, Artificial Sequence
  HTT spacer sequence ATCN PAM
cuuuaguaaaagguccgguu

SEQ ID NO: 2766 - RNA, 20 nt, Artificial Sequence
  HTT spacer sequence ATCN PAM
uccugauccuccuccccagg

SEQ ID NO: 2767 - RNA, 20 nt, Artificial Sequence
  HTT spacer sequence ATCN PAM
ggaagaucucuuuaguaaaa

SEQ ID NO: 2768 - RNA, 20 nt, Artificial Sequence
  HTT spacer sequence ATCN PAM
uccuccccaggccaggggag

SEQ ID NO: 2769 - RNA, 20 nt, Artificial Sequence
  HTT spacer sequence ATCN PAM
uguaacuagacuaugaaugu

SEQ ID NO: 2770 - RNA, 20 nt, Artificial Sequence
  HTT spacer sequence ATCN PAM
cuguaagggucaguugaagu

SEQ ID NO: 2771 - RNA, 20 nt, Artificial Sequence
  HTT spacer sequence ATCN PAM
cuccccaugaaagaaauaua

SEQ ID NO: 2772 - RNA, 20 nt, Artificial Sequence
  HTT spacer sequence ATCN PAM
auaucccuccccaugaaaga

SEQ ID NO: 2773 - RNA, 20 nt, Artificial Sequence
  HTT spacer sequence ATCN PAM
gggaucagcagagguguuuc

SEQ ID NO: 2774 - RNA, 20 nt, Artificial Sequence
  HTT spacer sequence ATCN PAM
cugauccauaucccucccca

SEQ ID NO: 2775 - RNA, 20 nt, Artificial Sequence
  HTT spacer sequence ATCN PAM
gcagagguguuucagucccg

SEQ ID NO: 2776 - RNA, 20 nt, Artificial Sequence
  HTT spacer sequence ATCN PAM
ugagccacugucuugcugcu

SEQ ID NO: 2777 - RNA, 20 nt, Artificial Sequence
  HTT spacer sequence ATCN PAM
uaagacuaguggaguacacc

SEQ ID NO: 2778 - RNA, 20 nt, Artificial Sequence
  HTT spacer sequence ATCN PAM
cugucguccuacaagaacca

SEQ ID NO: 2779 - RNA, 20 nt, Artificial Sequence
  HTT spacer sequence ATCN PAM
gucaguggcagagccagccu

SEQ ID NO: 2780 - RNA, 20 nt, Artificial Sequence
  HTT spacer sequence ATCN PAM
agaugagacagagcuggugg

SEQ ID NO: 2781 - RNA, 20 nt, Artificial Sequence
  HTT spacer sequence ATCN PAM
agauggggccuucuguccag

SEQ ID NO: 2782 - RNA, 20 nt, Artificial Sequence
  HTT spacer sequence ATCN PAM
gccaggccguuugagcugcc

SEQ ID NO: 2783 - RNA, 20 nt, Artificial Sequence
  HTT spacer sequence ATCN PAM
cucccaggugacucucuucc

SEQ ID NO: 2784 - RNA, 20 nt, Artificial Sequence
  HTT spacer sequence ATCN PAM
ucccaccucagccuccccaa

SEQ ID NO: 2785 - RNA, 20 nt, Artificial Sequence
  HTT spacer sequence ATCN PAM
cagcgcuuggggaggcugag

SEQ ID NO: 2786 - RNA, 20 nt, Artificial Sequence
  HTT spacer sequence ATCN PAM
uuuauuggccagcauggggg

SEQ ID NO: 2787 - RNA, 20 nt, Artificial Sequence
  HTT spacer sequence ATCN PAM
ucuuuuauuggccagcaugg

SEQ ID NO: 2788 - RNA, 20 nt, Artificial Sequence
  HTT spacer sequence ATCN PAM
ccuccauaaaaucaucuuuu

SEQ ID NO: 2789 - RNA, 20 nt, Artificial Sequence
  HTT spacer sequence ATCN PAM
ugagaacuuccugggugagc

SEQ ID NO: 2790 - RNA, 20 nt, Artificial Sequence
  HTT spacer sequence ATCN PAM
uuuguucuaaugaggugacu

SEQ ID NO: 2791 - RNA, 20 nt, Artificial Sequence
  HTT spacer sequence ATCN PAM
aggagccaccaagagucacc

SEQ ID NO: 2792 - RNA, 20 nt, Artificial Sequence
  HTT spacer sequence ATCN PAM
ccagaaagaucaagccagag

SEQ ID NO: 2793 - RNA, 20 nt, Artificial Sequence
  HTT spacer sequence ATCN PAM
uucuggugauucacuccuau

SEQ ID NO: 2794 - RNA, 20 nt, Artificial Sequence
  HTT spacer sequence ATCN PAM
agccagaguuagaagcagaa

SEQ ID NO: 2795 - RNA, 20 nt, Artificial Sequence
  HTT spacer sequence ATCN PAM
caaaaaaaaaaaaaaaaacu

SEQ ID NO: 2796 - RNA, 20 nt, Artificial Sequence
  HTT spacer sequence ATCN PAM
cagcucacuacaagcucugc

SEQ ID NO: 2797 - RNA, 20 nt, Artificial Sequence
  HTT spacer sequence ATCN PAM
cuugaaccugggaggcagag

SEQ ID NO: 2798 - RNA, 20 nt, Artificial Sequence
  HTT spacer sequence ATCN PAM
ggcuaauuuuuguauuuuua

SEQ ID NO: 2799 - RNA, 20 nt, Artificial Sequence
  HTT spacer sequence ATCN PAM
caagguaaggaguuugaggc

SEQ ID NO: 2800 - RNA, 20 nt, Artificial Sequence
  HTT spacer sequence ATCN PAM
gccugccucagccucccaaa

SEQ ID NO: 2801 - RNA, 20 nt, Artificial Sequence
  HTT spacer sequence ATCN PAM
cagcacuuugggaggcugag

SEQ ID NO: 2802 - RNA, 20 nt, Artificial Sequence
  HTT spacer sequence ATCN PAM
acuaacuaaccaaauaaaua

SEQ ID NO: 2803 - RNA, 20 nt, Artificial Sequence
  HTT spacer sequence ATCN PAM
aaccuaauuaagaaacuaaa

SEQ ID NO: 2804 - RNA, 20 nt, Artificial Sequence
  HTT spacer sequence ATCN PAM
uguaaagagagaaagauaau

SEQ ID NO: 2805 - RNA, 20 nt, Artificial Sequence
  HTT spacer sequence ATCN PAM
uucucucuuuacaugauuuu

SEQ ID NO: 2806 - RNA, 20 nt, Artificial Sequence
  HTT spacer sequence ATCN PAM
aaguuuuauguuuauguuca

SEQ ID NO: 2807 - RNA, 20 nt, Artificial Sequence
  HTT spacer sequence ATCN PAM
aaacuaaccacaaguaaaau

SEQ ID NO: 2808 - RNA, 20 nt, Artificial Sequence
  HTT spacer sequence ATCN PAM
uauuuaggcuucuauuuuac

SEQ ID NO: 2809 - RNA, 20 nt, Artificial Sequence
  HTT spacer sequence ATCN PAM
gacaugggaauguuagcaca

SEQ ID NO: 2810 - RNA, 20 nt, Artificial Sequence
  HTT spacer sequence ATCN PAM
auuuauacuugcuuuauaaa

SEQ ID NO: 2811 - RNA, 20 nt, Artificial Sequence
  HTT spacer sequence ATCN PAM
uauaaagaccuuauacaaaa

SEQ ID NO: 2812 - RNA, 20 nt, Artificial Sequence
  HTT spacer sequence ATCN PAM
cuuuuaugaauacaaaaccc

SEQ ID NO: 2813 - RNA, 20 nt, Artificial Sequence
  HTT spacer sequence ATCN PAM
uaacauagugggguuuauuu

SEQ ID NO: 2814 - RNA, 20 nt, Artificial Sequence
  HTT spacer sequence ATCN PAM
augcauuauugaaauaaacc

SEQ ID NO: 2815 - RNA, 20 nt, Artificial Sequence
  HTT spacer sequence ATCN PAM
auuauauuguguuacugaau

SEQ ID NO: 2816 - RNA, 20 nt, Artificial Sequence
  HTT spacer sequence ATCN PAM
ugugaauauacccaaagaaa

SEQ ID NO: 2817 - RNA, 20 nt, Artificial Sequence
  HTT spacer sequence ATCN PAM
auuuuuucuuuggguauauu

SEQ ID NO: 2818 - RNA, 20 nt, Artificial Sequence
  HTT spacer sequence ATCN PAM
augaaaauaaucuauuuuuu

SEQ ID NO: 2819 - RNA, 20 nt, Artificial Sequence
  HTT spacer sequence ATCN PAM
ugcuaaagaaggaguaacua

SEQ ID NO: 2820 - RNA, 20 nt, Artificial Sequence
  HTT spacer sequence ATCN PAM
gcccagaaggcaucauuuua

SEQ ID NO: 2821 - RNA, 20 nt, Artificial Sequence
  HTT spacer sequence ATCN PAM
uuuuacccgauaagggcaca

SEQ ID NO: 2822 - RNA, 20 nt, Artificial Sequence
  HTT spacer sequence ATCN PAM
gguaaaaugaugccuucugg

SEQ ID NO: 2823 - RNA, 20 nt, Artificial Sequence
  HTT spacer sequence ATCN PAM
ucuuauuccuaauuuuaaca

SEQ ID NO: 2824 - RNA, 20 nt, Artificial Sequence
  HTT spacer sequence ATCN PAM
cuugaaccugggaggcgggg

SEQ ID NO: 2825 - RNA, 20 nt, Artificial Sequence
  HTT spacer sequence ATCN PAM
cuacuaaaauacaaaaaaaa

SEQ ID NO: 2826 - RNA, 20 nt, Artificial Sequence
  HTT spacer sequence ATCN PAM
caguacgugagguugggagu

SEQ ID NO: 2827 - RNA, 20 nt, Artificial Sequence
  HTT spacer sequence ATCN PAM
uuaauacugaugcuuauuga

SEQ ID NO: 2828 - RNA, 20 nt, Artificial Sequence
  HTT spacer sequence ATCN PAM
guauuaaggauaauguugaa

SEQ ID NO: 2829 - RNA, 20 nt, Artificial Sequence
  HTT spacer sequence ATCN PAM
agagguaaccccauaguaag

SEQ ID NO: 2830 - RNA, 20 nt, Artificial Sequence
  HTT spacer sequence ATCN PAM
auaauaaguugaaaauauaa

SEQ ID NO: 2831 - RNA, 20 nt, Artificial Sequence
  HTT spacer sequence ATCN PAM
uagcugagcccagccugccu

SEQ ID NO: 2832 - RNA, 20 nt, Artificial Sequence
  HTT spacer sequence ATCN PAM
cacagcagcacagucuacug

SEQ ID NO: 2833 - RNA, 20 nt, Artificial Sequence
  HTT spacer sequence ATCN PAM
gcuguuugcccuugugacug

SEQ ID NO: 2834 - RNA, 20 nt, Artificial Sequence
  HTT spacer sequence ATCN PAM
cuagccuggggaaagaucaa

SEQ ID NO: 2835 - RNA, 20 nt, Artificial Sequence
  HTT spacer sequence ATCN PAM
uuccccaggcuagugaugug

SEQ ID NO: 2836 - RNA, 20 nt, Artificial Sequence
  HTT spacer sequence ATCN PAM
aaguugaaaauuugaagugu

SEQ ID NO: 2837 - RNA, 20 nt, Artificial Sequence
  HTT spacer sequence ATCN PAM
ucaagucaaaaaauuuuagu

SEQ ID NO: 2838 - RNA, 20 nt, Artificial Sequence
  HTT spacer sequence ATCN PAM
agucaaaaaauuuuaguuga

SEQ ID NO: 2839 - RNA, 20 nt, Artificial Sequence
  HTT spacer sequence ATCN PAM
uuauuuucaggaggaacuuc

SEQ ID NO: 2840 - RNA, 20 nt, Artificial Sequence
  HTT spacer sequence ATCN PAM
auguacauggaaguuccucc

SEQ ID NO: 2841 - RNA, 20 nt, Artificial Sequence
  HTT spacer sequence ATCN PAM
uccgucaucaauguacaugg

SEQ ID NO: 2842 - RNA, 20 nt, Artificial Sequence
  HTT spacer sequence ATCN PAM
guuucuaucauccuaaugaa

SEQ ID NO: 2843 - RNA, 20 nt, Artificial Sequence
  HTT spacer sequence ATCN PAM
uccuaaugaacauaaugaau

SEQ ID NO: 2844 - RNA, 20 nt, Artificial Sequence
  HTT spacer sequence ATCN PAM
uaaugaacauaaugaauaaa

SEQ ID NO: 2845 - RNA, 20 nt, Artificial Sequence
  HTT spacer sequence ATCN PAM
agacaaacauaaacauuaac

SEQ ID NO: 2846 - RNA, 20 nt, Artificial Sequence
  HTT spacer sequence ATCN PAM
gcaaauacccgcaaagcaga

SEQ ID NO: 2847 - RNA, 20 nt, Artificial Sequence
  HTT spacer sequence ATCN PAM
ggacaagguaucuggaaggc

SEQ ID NO: 2848 - RNA, 20 nt, Artificial Sequence
  HTT spacer sequence ATCN PAM
ggaaggcugagcuaagccuc

SEQ ID NO: 2849 - RNA, 20 nt, Artificial Sequence
  HTT spacer sequence ATCN PAM
caccauugcacuccagccug

SEQ ID NO: 2850 - RNA, 20 nt, Artificial Sequence
  HTT spacer sequence ATCN PAM
cagcucacugcaaccuccac

SEQ ID NO: 2851 - RNA, 20 nt, Artificial Sequence
  HTT spacer sequence ATCN PAM
cuugaaccagggagguggag

SEQ ID NO: 2852 - RNA, 20 nt, Artificial Sequence
  HTT spacer sequence ATCN PAM
cagcuacucgggaggcugag

SEQ ID NO: 2853 - RNA, 20 nt, Artificial Sequence
  HTT spacer sequence ATCN PAM
gcuggguguaguggcgggag

SEQ ID NO: 2854 - RNA, 20 nt, Artificial Sequence
  HTT spacer sequence ATCN PAM
uggccaacauggugaaaccc

SEQ ID NO: 2855 - RNA, 20 nt, Artificial Sequence
  HTT spacer sequence ATCN PAM
agaccauccuggccaacaug

SEQ ID NO: 2856 - RNA, 20 nt, Artificial Sequence
  HTT spacer sequence ATCN PAM
cuugacgucaugaucugucc

SEQ ID NO: 2857 - RNA, 20 nt, Artificial Sequence
  HTT spacer sequence ATCN PAM
ugacgucaagagaucgagac

SEQ ID NO: 2858 - RNA, 20 nt, Artificial Sequence
  HTT spacer sequence ATCN PAM
guccaccucggccucccaaa

SEQ ID NO: 2859 - RNA, 20 nt, Artificial Sequence
  HTT spacer sequence ATCN PAM
cagcacuuugggaggccgag

SEQ ID NO: 2860 - RNA, 20 nt, Artificial Sequence
  HTT spacer sequence ATCN PAM
agcgcaugccaaguuuaggg

SEQ ID NO: 2861 - RNA, 20 nt, Artificial Sequence
  HTT spacer sequence ATCN PAM
uucuucuuggguggggugga

SEQ ID NO: 2862 - RNA, 20 nt, Artificial Sequence
  HTT spacer sequence ATCN PAM
auauuucagagcugguuuac

SEQ ID NO: 2863 - RNA, 20 nt, Artificial Sequence
  HTT spacer sequence ATCN PAM
cuucauaucaaccacaucca

SEQ ID NO: 2864 - RNA, 20 nt, Artificial Sequence
  HTT spacer sequence ATCN PAM
accacauccaguuccucaaa

SEQ ID NO: 2865 - RNA, 20 nt, Artificial Sequence
  HTT spacer sequence ATCN PAM
aguuccucaaaacuggaacu

SEQ ID NO: 2866 - RNA, 20 nt, Artificial Sequence
  HTT spacer sequence ATCN PAM
aaguuccaguuuugaggaac

SEQ ID NO: 2867 - RNA, 20 nt, Artificial Sequence
  HTT spacer sequence ATCN PAM
uaauccaaguuccaguuuug

SEQ ID NO: 2868 - RNA, 20 nt, Artificial Sequence
  HTT spacer sequence ATCN PAM
ucuccggaagaagauaauac

SEQ ID NO: 2869 - RNA, 20 nt, Artificial Sequence
  HTT spacer sequence ATCN PAM
ucuuccggagaggauuuuug

SEQ ID NO: 2870 - RNA, 20 nt, Artificial Sequence
  HTT spacer sequence ATCN PAM
cguuccugguaauuuguguu

SEQ ID NO: 2871 - RNA, 20 nt, Artificial Sequence
  HTT spacer sequence ATCN PAM
ggccucauaucacguuccug

SEQ ID NO: 2872 - RNA, 20 nt, Artificial Sequence
  HTT spacer sequence ATCN PAM
aucaggccucauaucacguu

SEQ ID NO: 2873 - RNA, 20 nt, Artificial Sequence
  HTT spacer sequence ATCN PAM
aucuagugucuagauaaugg

SEQ ID NO: 2874 - RNA, 20 nt, Artificial Sequence
  HTT spacer sequence ATCN PAM
agugucuagauaauggagau

SEQ ID NO: 2875 - RNA, 20 nt, Artificial Sequence
  HTT spacer sequence ATCN PAM
agacacuagauagauucuag

SEQ ID NO: 2876 - RNA, 20 nt, Artificial Sequence
  HTT spacer sequence ATCN PAM
ccauuaucuagacacuagau

SEQ ID NO: 2877 - RNA, 20 nt, Artificial Sequence
  HTT spacer sequence ATCN PAM
gaaacuauaaaaugugacaa

SEQ ID NO: 2878 - RNA, 20 nt, Artificial Sequence
  HTT spacer sequence ATCN PAM
gacuuacuuccuaguucucu

SEQ ID NO: 2879 - RNA, 20 nt, Artificial Sequence
  HTT spacer sequence ATCN PAM
uuucuucugcauuuuccauu

SEQ ID NO: 2880 - RNA, 20 nt, Artificial Sequence
  HTT spacer sequence ATCN PAM
ucucaccauauccuuucuuc

SEQ ID NO: 2881 - RNA, 20 nt, Artificial Sequence
  HTT spacer sequence ATCN PAM
aauauacauuuauuuggagu

SEQ ID NO: 2882 - RNA, 20 nt, Artificial Sequence
  HTT spacer sequence ATCN PAM
guuucgaagccucucaguca

SEQ ID NO: 2883 - RNA, 20 nt, Artificial Sequence
  HTT spacer sequence ATCN PAM
guucacaaauucaaagccca

SEQ ID NO: 2884 - RNA, 20 nt, Artificial Sequence
  HTT spacer sequence ATCN PAM
auacugugaaagcaagucca

SEQ ID NO: 2885 - RNA, 20 nt, Artificial Sequence
  HTT spacer sequence ATCN PAM
acaauacacaggacaggcau

SEQ ID NO: 2886 - RNA, 20 nt, Artificial Sequence
  HTT spacer sequence ATCN PAM
uaugccuguccuguguauug

SEQ ID NO: 2887 - RNA, 20 nt, Artificial Sequence
  HTT spacer sequence ATCN PAM
gaaggaggcacuucucuccc

SEQ ID NO: 2888 - RNA, 20 nt, Artificial Sequence
  HTT spacer sequence ATCN PAM
ucccagggccagggacagcu

SEQ ID NO: 2889 - RNA, 20 nt, Artificial Sequence
  HTT spacer sequence ATCN PAM
cagggccagggacagcuggu

SEQ ID NO: 2890 - RNA, 20 nt, Artificial Sequence
  HTT spacer sequence ATCN PAM
cucuccuagugaacucccua

SEQ ID NO: 2891 - RNA, 20 nt, Artificial Sequence
  HTT spacer sequence ATCN PAM
ggcuucuugucauucugggu

SEQ ID NO: 2892 - RNA, 20 nt, Artificial Sequence
  HTT spacer sequence ATCN PAM
cauagcaaugggagauuuca

SEQ ID NO: 2893 - RNA, 20 nt, Artificial Sequence
  HTT spacer sequence ATCN PAM
cccauugcuaugcgauuggc

SEQ ID NO: 2894 - RNA, 20 nt, Artificial Sequence
  HTT spacer sequence ATCN PAM
ugaccuuagaaaucuuucac

SEQ ID NO: 2895 - RNA, 20 nt, Artificial Sequence
  HTT spacer sequence ATCN PAM
uucaccgagggggaucugcg

SEQ ID NO: 2896 - RNA, 20 nt, Artificial Sequence
  HTT spacer sequence ATCN PAM
cccucggugaaagauuucua

SEQ ID NO: 2897 - RNA, 20 nt, Artificial Sequence
  HTT spacer sequence ATCN PAM
gcguuccagaacuucuggag

SEQ ID NO: 2898 - RNA, 20 nt, Artificial Sequence
  HTT spacer sequence ATCN PAM
ggccaacaagcagacuuguc

SEQ ID NO: 2899 - RNA, 20 nt, Artificial Sequence
  HTT spacer sequence ATCN PAM
cugcaaaacuacagaaaacc

SEQ ID NO: 2900 - RNA, 20 nt, Artificial Sequence
  HTT spacer sequence ATCN PAM
uaaaagcagccagauuuaaa

SEQ ID NO: 2901 - RNA, 20 nt, Artificial Sequence
  HTT spacer sequence ATCN PAM
ggcugcuuuuaagauuuucu

SEQ ID NO: 2902 - RNA, 20 nt, Artificial Sequence
  HTT spacer sequence ATCN PAM
gcugucaauuucauggcugc

SEQ ID NO: 2903 - RNA, 20 nt, Artificial Sequence
  HTT spacer sequence ATCN PAM
cagcacuuugggaggccgag

SEQ ID NO: 2904 - RNA, 20 nt, Artificial Sequence
  HTT spacer sequence ATCN PAM
acccgccucggccucccaaa

SEQ ID NO: 2905 - RNA, 20 nt, Artificial Sequence
  HTT spacer sequence ATCN PAM
cgaggucaggagaccaagac

SEQ ID NO: 2906 - RNA, 20 nt, Artificial Sequence
  HTT spacer sequence ATCN PAM
uggcuaacauggugaaaccc

SEQ ID NO: 2907 - RNA, 20 nt, Artificial Sequence
  HTT spacer sequence ATCN PAM
cggcucacugcaagcuccgc

SEQ ID NO: 2908 - RNA, 20 nt, Artificial Sequence
  HTT spacer sequence ATCN PAM
ccugaaaggaagcaacugcc

SEQ ID NO: 2909 - RNA, 20 nt, Artificial Sequence
  HTT spacer sequence ATCN PAM
aaggcggcaguugcuuccuu

SEQ ID NO: 2910 - RNA, 20 nt, Artificial Sequence
  HTT spacer sequence ATCN PAM
aaucaaaggcggcaguugcu

SEQ ID NO: 2911 - RNA, 20 nt, Artificial Sequence
  HTT spacer sequence ATCN PAM
gugaagaaggaaggcaaaau

SEQ ID NO: 2912 - RNA, 20 nt, Artificial Sequence
  HTT spacer sequence ATCN PAM
ggaaguguuuuuauuuugcc

SEQ ID NO: 2913 - RNA, 20 nt, Artificial Sequence
  HTT spacer sequence ATCN PAM
uuccaguucaaucaggaagu

SEQ ID NO: 2914 - RNA, 20 nt, Artificial Sequence
  HTT spacer sequence ATCN PAM
uuuagaauuccuuggacagu

SEQ ID NO: 2915 - RNA, 20 nt, Artificial Sequence
  HTT spacer sequence ATCN PAM
uccucuggggucauuuucuu

SEQ ID NO: 2916 - RNA, 20 nt, Artificial Sequence
  HTT spacer sequence ATCN PAM
gagauucaggaaagaaaugg

SEQ ID NO: 2917 - RNA, 20 nt, Artificial Sequence
  HTT spacer sequence ATCN PAM
cugaucuuccucugggguca

SEQ ID NO: 2918 - RNA, 20 nt, Artificial Sequence
  HTT spacer sequence ATCN PAM
cucuccauuucuuuccugaa

SEQ ID NO: 2919 - RNA, 20 nt, Artificial Sequence
  HTT spacer sequence ATCN PAM
uuuguaacauauaugugugu

SEQ ID NO: 2920 - RNA, 20 nt, Artificial Sequence
  HTT spacer sequence ATCN PAM
ugacaaaaaaaaaaaaaaaa

SEQ ID NO: 2921 - RNA, 20 nt, Artificial Sequence
  HTT spacer sequence ATCN PAM
aucuugacaaaaaaaaaaaa

SEQ ID NO: 2922 - RNA, 20 nt, Artificial Sequence
  HTT spacer sequence ATCN PAM
uuugagcccaaggggcagag

SEQ ID NO: 2923 - RNA, 20 nt, Artificial Sequence
  HTT spacer sequence ATCN PAM
cagcuacucaggaggcugag

SEQ ID NO: 2924 - RNA, 20 nt, Artificial Sequence
  HTT spacer sequence ATCN PAM
cuaguaaaaauacaaaaauu

SEQ ID NO: 2925 - RNA, 20 nt, Artificial Sequence
  HTT spacer sequence ATCN PAM
caucucuaguaaaaauacaa

SEQ ID NO: 2926 - RNA, 20 nt, Artificial Sequence
  HTT spacer sequence ATCN PAM
ccugaggucagguguucaag

SEQ ID NO: 2927 - RNA, 20 nt, Artificial Sequence
  HTT spacer sequence ATCN PAM
accugccugggccucccaaa

SEQ ID NO: 2928 - RNA, 20 nt, Artificial Sequence
  HTT spacer sequence ATCN PAM
uagcacuuugggaggcccag

SEQ ID NO: 2929 - RNA, 20 nt, Artificial Sequence
  HTT spacer sequence ATCN PAM
ggccuauguguguguuuaua

SEQ ID NO: 2930 - RNA, 20 nt, Artificial Sequence
  HTT spacer sequence ATCN PAM
agaagagaauagauuuacgu

SEQ ID NO: 2931 - RNA, 20 nt, Artificial Sequence
  HTT spacer sequence ATCN PAM
auucucuucuugauuaugca

SEQ ID NO: 2932 - RNA, 20 nt, Artificial Sequence
  HTT spacer sequence ATCN PAM
aacguaaaucuauucucuuc

SEQ ID NO: 2933 - RNA, 20 nt, Artificial Sequence
  HTT spacer sequence ATCN PAM
aaaucuaacguaaaucuauu

SEQ ID NO: 2934 - RNA, 20 nt, Artificial Sequence
  HTT spacer sequence ATCN PAM
uccagguaucaaaaucuaac

SEQ ID NO: 2935 - RNA, 20 nt, Artificial Sequence
  HTT spacer sequence ATCN PAM
caaaaaaaaaaaaacauaca

SEQ ID NO: 2936 - RNA, 20 nt, Artificial Sequence
  HTT spacer sequence ATCN PAM
caccacaacacuccagccug

SEQ ID NO: 2937 - RNA, 20 nt, Artificial Sequence
  HTT spacer sequence ATCN PAM
uggcucacugcaaccuccuc

SEQ ID NO: 2938 - RNA, 20 nt, Artificial Sequence
  HTT spacer sequence ATCN PAM
ucccaccuaggccuccagag

SEQ ID NO: 2939 - RNA, 20 nt, Artificial Sequence
  HTT spacer sequence ATCN PAM
caccuacucuggaggccuag

SEQ ID NO: 2940 - RNA, 20 nt, Artificial Sequence
  HTT spacer sequence ATCN PAM
caggcaccugccaccacacc

SEQ ID NO: 2941 - RNA, 20 nt, Artificial Sequence
  HTT spacer sequence ATCN PAM
cuacuaaauauuuaaaaaaa

SEQ ID NO: 2942 - RNA, 20 nt, Artificial Sequence
  HTT spacer sequence ATCN PAM
ccugaggucaggaguucaag

SEQ ID NO: 2943 - RNA, 20 nt, Artificial Sequence
  HTT spacer sequence ATCN PAM
gccuaccucugccucucaaa

SEQ ID NO: 2944 - RNA, 20 nt, Artificial Sequence
  HTT spacer sequence ATCN PAM
cagcacuuugagaggcagag

SEQ ID NO: 2945 - RNA, 20 nt, Artificial Sequence
  HTT spacer sequence ATCN PAM
cgcccggccaacagugauca

SEQ ID NO: 2946 - RNA, 20 nt, Artificial Sequence
  HTT spacer sequence ATCN PAM
cuguuggccgggcgcgaugg

SEQ ID NO: 2947 - RNA, 20 nt, Artificial Sequence
  HTT spacer sequence ATCN PAM
cuuucaaacuaacagagguu

SEQ ID NO: 2948 - RNA, 20 nt, Artificial Sequence
  HTT spacer sequence ATCN PAM
gacuuaaccaaaaaccaggu

SEQ ID NO: 2949 - RNA, 20 nt, Artificial Sequence
  HTT spacer sequence ATCN PAM
uaccagcucuguuaccuggu

SEQ ID NO: 2950 - RNA, 20 nt, Artificial Sequence
  HTT spacer sequence ATCN PAM
acgauuacaguuaauauuaa

SEQ ID NO: 2951 - RNA, 20 nt, Artificial Sequence
  HTT spacer sequence ATCN PAM
uugauauacgugaggucagu

SEQ ID NO: 2952 - RNA, 20 nt, Artificial Sequence
  HTT spacer sequence ATCN PAM
guccuguuuccuuagguucu

SEQ ID NO: 2953 - RNA, 20 nt, Artificial Sequence
  HTT spacer sequence ATCN PAM
uaugagacgggaaagguuuc

SEQ ID NO: 2954 - RNA, 20 nt, Artificial Sequence
  HTT spacer sequence ATCN PAM
caccuggucucgggucgggg

SEQ ID NO: 2955 - RNA, 20 nt, Artificial Sequence
  HTT spacer sequence ATCN PAM
cacugggcggggagcuaagc

SEQ ID NO: 2956 - RNA, 20 nt, Artificial Sequence
  HTT spacer sequence ATCN PAM
uccccugaauaguucauguu

SEQ ID NO: 2957 - RNA, 20 nt, Artificial Sequence
  HTT spacer sequence ATCN PAM
uugugcuuuuccauauuuuu

SEQ ID NO: 2958 - RNA, 20 nt, Artificial Sequence
  HTT spacer sequence ATCN PAM
uaaucuuugugcuuuuccau

SEQ ID NO: 2959 - RNA, 20 nt, Artificial Sequence
  HTT spacer sequence ATCN PAM
agccacugcacuccagccug

SEQ ID NO: 2960 - RNA, 20 nt, Artificial Sequence
  HTT spacer sequence ATCN PAM
cagcucacugcaaccuccgc

SEQ ID NO: 2961 - RNA, 20 nt, Artificial Sequence
  HTT spacer sequence ATCN PAM
cuugaacccaggaggcggag

SEQ ID NO: 2962 - RNA, 20 nt, Artificial Sequence
  HTT spacer sequence ATCN PAM
cagcuacucaagaggcugag

SEQ ID NO: 2963 - RNA, 20 nt, Artificial Sequence
  HTT spacer sequence ATCN PAM
uguuggucaggcggacuuga

SEQ ID NO: 2964 - RNA, 20 nt, Artificial Sequence
  HTT spacer sequence ATCN PAM
ccugaggucaggaguucaag

SEQ ID NO: 2965 - RNA, 20 nt, Artificial Sequence
  HTT spacer sequence ATCN PAM
gcccaccucggccucccaaa

SEQ ID NO: 2966 - RNA, 20 nt, Artificial Sequence
  HTT spacer sequence ATCN PAM
cagcacuuugggaggccgag

SEQ ID NO: 2967 - RNA, 20 nt, Artificial Sequence
  HTT spacer sequence ATCN PAM
cucuucuguguauguguacg

SEQ ID NO: 2968 - RNA, 20 nt, Artificial Sequence
  HTT spacer sequence ATCN PAM
ggcucuacaugguguguagu

SEQ ID NO: 2969 - RNA, 20 nt, Artificial Sequence
  HTT spacer sequence ATCN PAM
ggaacaggauucuaaugacu

SEQ ID NO: 2970 - RNA, 20 nt, Artificial Sequence
  HTT spacer sequence ATCN PAM
uguuccagaugagcacuugu

SEQ ID NO: 2971 - RNA, 20 nt, Artificial Sequence
  HTT spacer sequence ATCN PAM
caacauagccacaggcaguc

SEQ ID NO: 2972 - RNA, 20 nt, Artificial Sequence
  HTT spacer sequence ATCN PAM
aucuuuuuuccaucuuuugu

SEQ ID NO: 2973 - RNA, 20 nt, Artificial Sequence
  HTT spacer sequence ATCN PAM
uuuuuccaucuuuuguccua

SEQ ID NO: 2974 - RNA, 20 nt, Artificial Sequence
  HTT spacer sequence ATCN PAM
uuuguccuaaguguugcuau

SEQ ID NO: 2975 - RNA, 20 nt, Artificial Sequence
  HTT spacer sequence ATCN PAM
uugaucacacaugccugacu

SEQ ID NO: 2976 - RNA, 20 nt, Artificial Sequence
  HTT spacer sequence ATCN PAM
augauuuauuauagcaacac

SEQ ID NO: 2977 - RNA, 20 nt, Artificial Sequence
  HTT spacer sequence ATCN PAM
cacaugccugacuguuugca

SEQ ID NO: 2978 - RNA, 20 nt, Artificial Sequence
  HTT spacer sequence ATCN PAM
uaugcaaacagucaggcaug

SEQ ID NO: 2979 - RNA, 20 nt, Artificial Sequence
  HTT spacer sequence ATCN PAM
auacugggcagucuggcaug

SEQ ID NO: 2980 - RNA, 20 nt, Artificial Sequence
  HTT spacer sequence ATCN PAM
uuacucuuuuuagaugaugc

SEQ ID NO: 2981 - RNA, 20 nt, Artificial Sequence
  HTT spacer sequence ATCN PAM
aaaaagaguaaagaucaaua

SEQ ID NO: 2982 - RNA, 20 nt, Artificial Sequence
  HTT spacer sequence ATCN PAM
ucuaaaaagaguaaagauca

SEQ ID NO: 2983 - RNA, 20 nt, Artificial Sequence
  HTT spacer sequence ATCN PAM
aaugugaaagacuuacagaa

SEQ ID NO: 2984 - RNA, 20 nt, Artificial Sequence
  HTT spacer sequence ATCN PAM
ugacaggaaaucuaauguga

SEQ ID NO: 2985 - RNA, 20 nt, Artificial Sequence
  HTT spacer sequence ATCN PAM
uccugacaggaaaucuaaug

SEQ ID NO: 2986 - RNA, 20 nt, Artificial Sequence
  HTT spacer sequence ATCN PAM
gccuagaauugacuaucauc

SEQ ID NO: 2987 - RNA, 20 nt, Artificial Sequence
  HTT spacer sequence ATCN PAM
ucugccuagaauugacuauc

SEQ ID NO: 2988 - RNA, 20 nt, Artificial Sequence
  HTT spacer sequence ATCN PAM
caacugcuucagccauggcu

SEQ ID NO: 2989 - RNA, 20 nt, Artificial Sequence
  HTT spacer sequence ATCN PAM
ggacuuuacauggccacaac

SEQ ID NO: 2990 - RNA, 20 nt, Artificial Sequence
  HTT spacer sequence ATCN PAM
ucgggacuuuacauggccac

SEQ ID NO: 2991 - RNA, 20 nt, Artificial Sequence
  HTT spacer sequence ATCN PAM
auugccucccuggauggguu

SEQ ID NO: 2992 - RNA, 20 nt, Artificial Sequence
  HTT spacer sequence ATCN PAM
agggaggcaauggaucaucg

SEQ ID NO: 2993 - RNA, 20 nt, Artificial Sequence
  HTT spacer sequence ATCN PAM
guaagggagaaauacacuuc

SEQ ID NO: 2994 - RNA, 20 nt, Artificial Sequence
  HTT spacer sequence ATCN PAM
gggcccccuccuuccagcuc

SEQ ID NO: 2995 - RNA, 20 nt, Artificial Sequence
  HTT spacer sequence ATCN PAM
ccccaggauguggcuuuuau

SEQ ID NO: 2996 - RNA, 20 nt, Artificial Sequence
  HTT spacer sequence ATCN PAM
uggggugaugggagcuggaa

SEQ ID NO: 2997 - RNA, 20 nt, Artificial Sequence
  HTT spacer sequence ATCN PAM
gcauaaaagccacauccugg

SEQ ID NO: 2998 - RNA, 20 nt, Artificial Sequence
  HTT spacer sequence ATCN PAM
ucugcauaaaagccacaucc

SEQ ID NO: 2999 - RNA, 20 nt, Artificial Sequence
  HTT spacer sequence ATCN PAM
aaaauggcugcucaaguccc

SEQ ID NO: 3000 - RNA, 20 nt, Artificial Sequence
  HTT spacer sequence ATCN PAM
cauuccagggagcaggaaaa

SEQ ID NO: 3001 - RNA, 20 nt, Artificial Sequence
  HTT spacer sequence ATCN PAM
cauaaaaugaagggaaagac

SEQ ID NO: 3002 - RNA, 20 nt, Artificial Sequence
  HTT spacer sequence ATCN PAM
cccuggcuagcacuuacuua

SEQ ID NO: 3003 - RNA, 20 nt, Artificial Sequence
  HTT spacer sequence ATCN PAM
aagcaguuugccucuuagcu

SEQ ID NO: 3004 - RNA, 20 nt, Artificial Sequence
  HTT spacer sequence ATCN PAM
accugaaugagggacacagu

SEQ ID NO: 3005 - RNA, 20 nt, Artificial Sequence
  HTT spacer sequence ATCN PAM
cauucugagguucuggggcu

SEQ ID NO: 3006 - RNA, 20 nt, Artificial Sequence
  HTT spacer sequence ATCN PAM
cauuuuagccuccuuaccuc

SEQ ID NO: 3007 - RNA, 20 nt, Artificial Sequence
  HTT spacer sequence ATCN PAM
uuagggugggccauaauccg

SEQ ID NO: 3008 - RNA, 20 nt, Artificial Sequence
  HTT spacer sequence ATCN PAM
gacugaugucuuacaagaag

SEQ ID NO: 3009 - RNA, 20 nt, Artificial Sequence
  HTT spacer sequence ATCN PAM
gucggauuauggcccacccu

SEQ ID NO: 3010 - RNA, 20 nt, Artificial Sequence
  HTT spacer sequence ATCN PAM
cuucuuguaagacaucaguc

SEQ ID NO: 3011 - RNA, 20 nt, Artificial Sequence
  HTT spacer sequence ATCN PAM
cggacuucuagccucuagga

SEQ ID NO: 3012 - RNA, 20 nt, Artificial Sequence
  HTT spacer sequence ATCN PAM
ucucaugguccuagaggcua

SEQ ID NO: 3013 - RNA, 20 nt, Artificial Sequence
  HTT spacer sequence ATCN PAM
gcugcuggaacaaaucaccc

SEQ ID NO: 3014 - RNA, 20 nt, Artificial Sequence
  HTT spacer sequence ATCN PAM
ccccagcacuguggcuuggc

SEQ ID NO: 3015 - RNA, 20 nt, Artificial Sequence
  HTT spacer sequence ATCN PAM
ucacacguucugugggucag

SEQ ID NO: 3016 - RNA, 20 nt, Artificial Sequence
  HTT spacer sequence ATCN PAM
cacgugguguuggcaggauc

SEQ ID NO: 3017 - RNA, 20 nt, Artificial Sequence
  HTT spacer sequence ATCN PAM
ugccaacaccacgugagauu

SEQ ID NO: 3018 - RNA, 20 nt, Artificial Sequence
  HTT spacer sequence ATCN PAM
aguuccucauggccugcugg

SEQ ID NO: 3019 - RNA, 20 nt, Artificial Sequence
  HTT spacer sequence ATCN PAM
gagcauccaugccaagaagg

SEQ ID NO: 3020 - RNA, 20 nt, Artificial Sequence
  HTT spacer sequence ATCN PAM
augccaagaaggcaacagag

SEQ ID NO: 3021 - RNA, 20 nt, Artificial Sequence
  HTT spacer sequence ATCN PAM
ccuuugcccauugguuagaa

SEQ ID NO: 3022 - RNA, 20 nt, Artificial Sequence
  HTT spacer sequence ATCN PAM
uaugagucugcccacugagg

SEQ ID NO: 3023 - RNA, 20 nt, Artificial Sequence
  HTT spacer sequence ATCN PAM
ugccauugcacuccagccug

SEQ ID NO: 3024 - RNA, 20 nt, Artificial Sequence
  HTT spacer sequence ATCN PAM
uggcucacugcaaccuccac

SEQ ID NO: 3025 - RNA, 20 nt, Artificial Sequence
  HTT spacer sequence ATCN PAM
ccagaggucaggaguucgag

SEQ ID NO: 3026 - RNA, 20 nt, Artificial Sequence
  HTT spacer sequence ATCN PAM
gccugccuuggccucccaaa

SEQ ID NO: 3027 - RNA, 20 nt, Artificial Sequence
  HTT spacer sequence ATCN PAM
cagcacuuugggaggccaag

SEQ ID NO: 3028 - RNA, 20 nt, Artificial Sequence
  HTT spacer sequence ATCN PAM
cccaagcuggagugcagugg

SEQ ID NO: 3029 - RNA, 20 nt, Artificial Sequence
  HTT spacer sequence ATCN PAM
uagcucacuugcagccucaa

SEQ ID NO: 3030 - RNA, 20 nt, Artificial Sequence
  HTT spacer sequence ATCN PAM
ccugaacccaggaauuugag

SEQ ID NO: 3031 - RNA, 20 nt, Artificial Sequence
  HTT spacer sequence ATCN PAM
ucccacaucagccucccaag

SEQ ID NO: 3032 - RNA, 20 nt, Artificial Sequence
  HTT spacer sequence ATCN PAM
gccucccaagaacugggaac

SEQ ID NO: 3033 - RNA, 20 nt, Artificial Sequence
  HTT spacer sequence ATCN PAM
ccccccggcugggcgguugu

SEQ ID NO: 3034 - RNA, 20 nt, Artificial Sequence
  HTT spacer sequence ATCN PAM
uguggccauagcugcuucuc

SEQ ID NO: 3035 - RNA, 20 nt, Artificial Sequence
  HTT spacer sequence ATCN PAM
cagugccucugugggcagca

SEQ ID NO: 3036 - RNA, 20 nt, Artificial Sequence
  HTT spacer sequence ATCN PAM
gucccagcgcagcgccccgg

SEQ ID NO: 3037 - RNA, 20 nt, Artificial Sequence
  HTT spacer sequence ATCN PAM
cccgccgacgccuggagcgg

SEQ ID NO: 3038 - RNA, 20 nt, Artificial Sequence
  HTT spacer sequence ATCN PAM
uuuccgcaugggccugcgcc

SEQ ID NO: 3039 - RNA, 20 nt, Artificial Sequence
  HTT spacer sequence ATCN PAM
cgcuccgccccucagccgcc

SEQ ID NO: 3040 - RNA, 20 nt, Artificial Sequence
  HTT spacer sequence ATCN PAM
ccccgccccgcccccgucuc

SEQ ID NO: 3041 - RNA, 20 nt, Artificial Sequence
  HTT spacer sequence ATCN PAM
ccacgccccccgcaucgcca

SEQ ID NO: 3042 - RNA, 20 nt, Artificial Sequence
  HTT spacer sequence ATCN PAM
ccacgccucccuuaccaugc

SEQ ID NO: 3043 - RNA, 20 nt, Artificial Sequence
  HTT spacer sequence ATCN PAM
ugcuggccggcguggccccg

SEQ ID NO: 3044 - RNA, 20 nt, Artificial Sequence
  HTT spacer sequence ATCN PAM
uggacccgucccggcagccc

SEQ ID NO: 3045 - RNA, 20 nt, Artificial Sequence
  HTT spacer sequence ATCN PAM
gcuuuuccagggucgccaug

SEQ ID NO: 3046 - RNA, 20 nt, Artificial Sequence
  HTT spacer sequence ATCN PAM
ccgccguagccugggacccg

SEQ ID NO: 3047 - RNA, 20 nt, Artificial Sequence
  HTT spacer sequence ATCN PAM
ugcgaagggcgagagggcug

SEQ ID NO: 3048 - RNA, 20 nt, Artificial Sequence
  HTT spacer sequence ATCN PAM
cggcuccuccaaguucucuu

SEQ ID NO: 3049 - RNA, 20 nt, Artificial Sequence
  HTT spacer sequence ATCN PAM
cuccagcuccaaaccccgcc

SEQ ID NO: 3050 - RNA, 20 nt, Artificial Sequence
  HTT spacer sequence ATCN PAM
acugcccccacaucucucca

SEQ ID NO: 3051 - RNA, 20 nt, Artificial Sequence
  HTT spacer sequence ATCN PAM
cccauuggacgcgcccucac

SEQ ID NO: 3052 - RNA, 20 nt, Artificial Sequence
  HTT spacer sequence ATCN PAM
caggcuguuuuaagugccac

SEQ ID NO: 3053 - RNA, 20 nt, Artificial Sequence
  HTT spacer sequence ATCN PAM
ugaacuaaaugaaauguccu

SEQ ID NO: 3054 - RNA, 20 nt, Artificial Sequence
  HTT spacer sequence ATCN PAM
cggugguaguaacacgauuu

SEQ ID NO: 3055 - RNA, 20 nt, Artificial Sequence
  HTT spacer sequence ATCN PAM
uguuacuaccaccgugauca

SEQ ID NO: 3056 - RNA, 20 nt, Artificial Sequence
  HTT spacer sequence ATCN PAM
cuuagguggugcuuaaaauc

SEQ ID NO: 3057 - RNA, 20 nt, Artificial Sequence
  HTT spacer sequence ATCN PAM
gcucaucuaagccuaaguug

SEQ ID NO: 3058 - RNA, 20 nt, Artificial Sequence
  HTT spacer sequence ATCN PAM
aagccuaaguuggucugcag

SEQ ID NO: 3059 - RNA, 20 nt, Artificial Sequence
  HTT spacer sequence ATCN PAM
ccacguaaguucaccacuuu

SEQ ID NO: 3060 - RNA, 20 nt, Artificial Sequence
  HTT spacer sequence ATCN PAM
uaaauauuaggaagaguuga

SEQ ID NO: 3061 - RNA, 20 nt, Artificial Sequence
  HTT spacer sequence ATCN PAM
acucuuccuaauauuuaaga

SEQ ID NO: 3062 - RNA, 20 nt, Artificial Sequence
  HTT spacer sequence ATCN PAM
gcaacguguugguuuuauuc

SEQ ID NO: 3063 - RNA, 20 nt, Artificial Sequence
  HTT spacer sequence ATCN PAM
cucggcaauuaaccucccca

SEQ ID NO: 3064 - RNA, 20 nt, Artificial Sequence
  HTT spacer sequence ATCN PAM
cagaugugccagugaaaggg

SEQ ID NO: 3065 - RNA, 20 nt, Artificial Sequence
  HTT spacer sequence ATCN PAM
gagaugcccacggagucugc

SEQ ID NO: 3066 - RNA, 20 nt, Artificial Sequence
  HTT spacer sequence ATCN PAM
agcggaaccccaggacuuuc

SEQ ID NO: 3067 - RNA, 20 nt, Artificial Sequence
  HTT spacer sequence ATCN PAM
gaaauagaauacugagaggu

SEQ ID NO: 3068 - RNA, 20 nt, Artificial Sequence
  HTT spacer sequence ATCN PAM
ggaugugucccagauggcau

SEQ ID NO: 3069 - RNA, 20 nt, Artificial Sequence
  HTT spacer sequence ATCN PAM
agaucggaaauagaauacug

SEQ ID NO: 3070 - RNA, 20 nt, Artificial Sequence
  HTT spacer sequence ATCN PAM
gggacacauccagaucggaa

SEQ ID NO: 3071 - RNA, 20 nt, Artificial Sequence
  HTT spacer sequence ATCN PAM
cuguuaagacugauuaauuu

SEQ ID NO: 3072 - RNA, 20 nt, Artificial Sequence
  HTT spacer sequence ATCN PAM
gucuuaacagagauauucuu

SEQ ID NO: 3073 - RNA, 20 nt, Artificial Sequence
  HTT spacer sequence ATCN PAM
uaacagaaacaaagaacaag

SEQ ID NO: 3074 - RNA, 20 nt, Artificial Sequence
  HTT spacer sequence ATCN PAM
uugucucgucuucaaaguuu

SEQ ID NO: 3075 - RNA, 20 nt, Artificial Sequence
  HTT spacer sequence ATCN PAM
uuuucuaauuaaacuuugaa

SEQ ID NO: 3076 - RNA, 20 nt, Artificial Sequence
  HTT spacer sequence ATCN PAM
uuuagaauaauuuauuccua

SEQ ID NO: 3077 - RNA, 20 nt, Artificial Sequence
  HTT spacer sequence ATCN PAM
aaaaaguuuuuccauccuuu

SEQ ID NO: 3078 - RNA, 20 nt, Artificial Sequence
  HTT spacer sequence ATCN PAM
cuucaguaaguaauuucuca

SEQ ID NO: 3079 - RNA, 20 nt, Artificial Sequence
  HTT spacer sequence ATCN PAM
agaaauuuacuguagugcuu

SEQ ID NO: 3080 - RNA, 20 nt, Artificial Sequence
  HTT spacer sequence ATCN PAM
uguguaaacacuaaacaggg

SEQ ID NO: 3081 - RNA, 20 nt, Artificial Sequence
  HTT spacer sequence ATCN PAM
ggagcccuguuuaguguuua

SEQ ID NO: 3082 - RNA, 20 nt, Artificial Sequence
  HTT spacer sequence ATCN PAM
agugucugaagcagcccagc

SEQ ID NO: 3083 - RNA, 20 nt, Artificial Sequence
  HTT spacer sequence ATCN PAM
uucuaaaaauaugccuucuc

SEQ ID NO: 3084 - RNA, 20 nt, Artificial Sequence
  HTT spacer sequence ATCN PAM
gcauaagaaagagaaggcau

SEQ ID NO: 3085 - RNA, 20 nt, Artificial Sequence
  HTT spacer sequence ATCN PAM
ucaaaauauggguaucaaga

SEQ ID NO: 3086 - RNA, 20 nt, Artificial Sequence
  HTT spacer sequence ATCN PAM
agaaauuuccuuugcugccu

SEQ ID NO: 3087 - RNA, 20 nt, Artificial Sequence
  HTT spacer sequence ATCN PAM
ccuuugucaaggcagcaaag

SEQ ID NO: 3088 - RNA, 20 nt, Artificial Sequence
  HTT spacer sequence ATCN PAM
aucuccuuugucaaggcagc

SEQ ID NO: 3089 - RNA, 20 nt, Artificial Sequence
  HTT spacer sequence ATCN PAM
uauauuaccuuaaaguaaug

SEQ ID NO: 3090 - RNA, 20 nt, Artificial Sequence
  HTT spacer sequence ATCN PAM
ggacuggcaagguggcuuac

SEQ ID NO: 3091 - RNA, 20 nt, Artificial Sequence
  HTT spacer sequence ATCN PAM
gagcacuuugggaggccuag

SEQ ID NO: 3092 - RNA, 20 nt, Artificial Sequence
  HTT spacer sequence ATCN PAM
ccugaggucaggaguuugag

SEQ ID NO: 3093 - RNA, 20 nt, Artificial Sequence
  HTT spacer sequence ATCN PAM
aagcuaccugggaggcugag

SEQ ID NO: 3094 - RNA, 20 nt, Artificial Sequence
  HTT spacer sequence ATCN PAM
cuugaacccgggaggcagag

SEQ ID NO: 3095 - RNA, 20 nt, Artificial Sequence
  HTT spacer sequence ATCN PAM
caacucacugcagacucugc

SEQ ID NO: 3096 - RNA, 20 nt, Artificial Sequence
  HTT spacer sequence ATCN PAM
cgccacugcacuccagccug

SEQ ID NO: 3097 - RNA, 20 nt, Artificial Sequence
  HTT spacer sequence ATCN PAM
caaaaaaaauuuuuuuuaau

SEQ ID NO: 3098 - RNA, 20 nt, Artificial Sequence
  HTT spacer sequence ATCN PAM
ugucaauguauuacuuaugc

SEQ ID NO: 3099 - RNA, 20 nt, Artificial Sequence
  HTT spacer sequence ATCN PAM
uccuuccaccccuuuccucu

SEQ ID NO: 3100 - RNA, 20 nt, Artificial Sequence
  HTT spacer sequence ATCN PAM
ugccagauauaaccuguuca

SEQ ID NO: 3101 - RNA, 20 nt, Artificial Sequence
  HTT spacer sequence ATCN PAM
ggcaggauacaugaggaacu

SEQ ID NO: 3102 - RNA, 20 nt, Artificial Sequence
  HTT spacer sequence ATCN PAM
uacaauaugaacagguuaua

SEQ ID NO: 3103 - RNA, 20 nt, Artificial Sequence
  HTT spacer sequence ATCN PAM
aucuuacaauaugaacaggu

SEQ ID NO: 3104 - RNA, 20 nt, Artificial Sequence
  HTT spacer sequence ATCN PAM
auauauuuuuugagauguag

SEQ ID NO: 3105 - RNA, 20 nt, Artificial Sequence
  HTT spacer sequence ATCN PAM
caaaaaauauauagauauau

SEQ ID NO: 3106 - RNA, 20 nt, Artificial Sequence
  HTT spacer sequence ATCN PAM
cugcacuccagccuggguga

SEQ ID NO: 3107 - RNA, 20 nt, Artificial Sequence
  HTT spacer sequence ATCN PAM
cggcucacugcagucucugc

SEQ ID NO: 3108 - RNA, 20 nt, Artificial Sequence
  HTT spacer sequence ATCN PAM
cagcuacucagaaggcugag

SEQ ID NO: 3109 - RNA, 20 nt, Artificial Sequence
  HTT spacer sequence ATCN PAM
cuacuaaaaauacaaaaauu

SEQ ID NO: 3110 - RNA, 20 nt, Artificial Sequence
  HTT spacer sequence ATCN PAM
caaggucaggaguucaagac

SEQ ID NO: 3111 - RNA, 20 nt, Artificial Sequence
  HTT spacer sequence ATCN PAM
guccaccucggccucccaaa

SEQ ID NO: 3112 - RNA, 20 nt, Artificial Sequence
  HTT spacer sequence ATCN PAM
cagcacuuugggaggccgag

SEQ ID NO: 3113 - RNA, 20 nt, Artificial Sequence
  HTT spacer sequence ATCN PAM
acugcauuagguuuauuuau

SEQ ID NO: 3114 - RNA, 20 nt, Artificial Sequence
  HTT spacer sequence ATCN PAM
aaacuuugugagcaguguuu

SEQ ID NO: 3115 - RNA, 20 nt, Artificial Sequence
  HTT spacer sequence ATCN PAM
ucuucucaaaguaagauuga

SEQ ID NO: 3116 - RNA, 20 nt, Artificial Sequence
  HTT spacer sequence ATCN PAM
uacuuugagaagaggauuuu

SEQ ID NO: 3117 - RNA, 20 nt, Artificial Sequence
  HTT spacer sequence ATCN PAM
aucuuacuuugagaagagga

SEQ ID NO: 3118 - RNA, 20 nt, Artificial Sequence
  HTT spacer sequence ATCN PAM
guucuguuuuuauggcucuu

SEQ ID NO: 3119 - RNA, 20 nt, Artificial Sequence
  HTT spacer sequence ATCN PAM
uguaugcugagcagagcaca

SEQ ID NO: 3120 - RNA, 20 nt, Artificial Sequence
  HTT spacer sequence ATCN PAM
agcaugcuugggaggguccu

SEQ ID NO: 3121 - RNA, 20 nt, Artificial Sequence
  HTT spacer sequence ATCN PAM
gaaggagaauaagaaacugc

SEQ ID NO: 3122 - RNA, 20 nt, Artificial Sequence
  HTT spacer sequence ATCN PAM
gguguuucccugacuuuauu

SEQ ID NO: 3123 - RNA, 20 nt, Artificial Sequence
  HTT spacer sequence ATCN PAM
guaaauauuuacuaaacaug

SEQ ID NO: 3124 - RNA, 20 nt, Artificial Sequence
  HTT spacer sequence ATCN PAM
ugcuuacugucuauguccuu

SEQ ID NO: 3125 - RNA, 20 nt, Artificial Sequence
  HTT spacer sequence ATCN PAM
aucuugcuuacugucuaugu

SEQ ID NO: 3126 - RNA, 20 nt, Artificial Sequence
  HTT spacer sequence ATCN PAM
ccuucccugcuuugaaguuc

SEQ ID NO: 3127 - RNA, 20 nt, Artificial Sequence
  HTT spacer sequence ATCN PAM
aguguuaacuuauuuuuauu

SEQ ID NO: 3128 - RNA, 20 nt, Artificial Sequence
  HTT spacer sequence ATCN PAM
gccaggcuggagugcacuag

SEQ ID NO: 3129 - RNA, 20 nt, Artificial Sequence
  HTT spacer sequence ATCN PAM
cacuagugcacuccagccug

SEQ ID NO: 3130 - RNA, 20 nt, Artificial Sequence
  HTT spacer sequence ATCN PAM
uggcucacugcaaccucugc

SEQ ID NO: 3131 - RNA, 20 nt, Artificial Sequence
  HTT spacer sequence ATCN PAM
cuugaacccaagaggcagag

SEQ ID NO: 3132 - RNA, 20 nt, Artificial Sequence
  HTT spacer sequence ATCN PAM
cagcuaaacaggaggcugag

SEQ ID NO: 3133 - RNA, 20 nt, Artificial Sequence
  HTT spacer sequence ATCN PAM
cgccacugcacuccagccug

SEQ ID NO: 3134 - RNA, 20 nt, Artificial Sequence
  HTT spacer sequence ATCN PAM
cagcucacugcaagcuccgc

SEQ ID NO: 3135 - RNA, 20 nt, Artificial Sequence
  HTT spacer sequence ATCN PAM
uggcuaacacggugaaaccc

SEQ ID NO: 3136 - RNA, 20 nt, Artificial Sequence
  HTT spacer sequence ATCN PAM
uccuggcuaacacggugaaa

SEQ ID NO: 3137 - RNA, 20 nt, Artificial Sequence
  HTT spacer sequence ATCN PAM
ugaucuccugaccucgucau

SEQ ID NO: 3138 - RNA, 20 nt, Artificial Sequence
  HTT spacer sequence ATCN PAM
agaucauccuggcuaacacg

SEQ ID NO: 3139 - RNA, 20 nt, Artificial Sequence
  HTT spacer sequence ATCN PAM
ccugaccucgucauccgccg

SEQ ID NO: 3140 - RNA, 20 nt, Artificial Sequence
  HTT spacer sequence ATCN PAM
gccgaccuugugauccgccc

SEQ ID NO: 3141 - RNA, 20 nt, Artificial Sequence
  HTT spacer sequence ATCN PAM
caaggucggcggaugacgag

SEQ ID NO: 3142 - RNA, 20 nt, Artificial Sequence
  HTT spacer sequence ATCN PAM
gcccaccucggccucccaaa

SEQ ID NO: 3143 - RNA, 20 nt, Artificial Sequence
  HTT spacer sequence ATCN PAM
cagcacuuugggaggccgag

SEQ ID NO: 3144 - RNA, 20 nt, Artificial Sequence
  HTT spacer sequence ATCN PAM
cuacuaaaaauacaaaaauu

SEQ ID NO: 3145 - RNA, 20 nt, Artificial Sequence
  HTT spacer sequence ATCN PAM
uggcaaaaccccaucucuac

SEQ ID NO: 3146 - RNA, 20 nt, Artificial Sequence
  HTT spacer sequence ATCN PAM
caugaggccgggaguucgag

SEQ ID NO: 3147 - RNA, 20 nt, Artificial Sequence
  HTT spacer sequence ATCN PAM
gccugccuuggccucccaaa

SEQ ID NO: 3148 - RNA, 20 nt, Artificial Sequence
  HTT spacer sequence ATCN PAM
uagcacuuugggaggccaag

SEQ ID NO: 3149 - RNA, 20 nt, Artificial Sequence
  HTT spacer sequence ATCN PAM
acacuggccagguauggugg

SEQ ID NO: 3150 - RNA, 20 nt, Artificial Sequence
  HTT spacer sequence ATCN PAM
cuaucguagcucacuucagc

SEQ ID NO: 3151 - RNA, 20 nt, Artificial Sequence
  HTT spacer sequence ATCN PAM
uagcucacuucagccuugaa

SEQ ID NO: 3152 - RNA, 20 nt, Artificial Sequence
  HTT spacer sequence ATCN PAM
cuugagcccaggaguucaag

SEQ ID NO: 3153 - RNA, 20 nt, Artificial Sequence
  HTT spacer sequence ATCN PAM
ucccaccucaaccucacaau

SEQ ID NO: 3154 - RNA, 20 nt, Artificial Sequence
  HTT spacer sequence ATCN PAM
caccuggccagaugauggcu

SEQ ID NO: 3155 - RNA, 20 nt, Artificial Sequence
  HTT spacer sequence ATCN PAM
ggccaggugugauggcucac

SEQ ID NO: 3156 - RNA, 20 nt, Artificial Sequence
  HTT spacer sequence ATCN PAM
ucuggccaggugugauggcu

SEQ ID NO: 3157 - RNA, 20 nt, Artificial Sequence
  HTT spacer sequence ATCN PAM
ggaauaccacuacuucauac

SEQ ID NO: 3158 - RNA, 20 nt, Artificial Sequence
  HTT spacer sequence ATCN PAM
uccuguuucaggaauagcaa

SEQ ID NO: 3159 - RNA, 20 nt, Artificial Sequence
  HTT spacer sequence ATCN PAM
uugcuauuccugaaacagga

SEQ ID NO: 3160 - RNA, 20 nt, Artificial Sequence
  HTT spacer sequence ATCN PAM
gaccaauacuacuugccuug

SEQ ID NO: 3161 - RNA, 20 nt, Artificial Sequence
  HTT spacer sequence ATCN PAM
acaaggcaaguaguauuggu

SEQ ID NO: 3162 - RNA, 20 nt, Artificial Sequence
  HTT spacer sequence ATCN PAM
uuauuccaucuacaaggcaa

SEQ ID NO: 3163 - RNA, 20 nt, Artificial Sequence
  HTT spacer sequence ATCN PAM
cacucacauaaaugccaaua

SEQ ID NO: 3164 - RNA, 20 nt, Artificial Sequence
  HTT spacer sequence ATCN PAM
caucucacucacauaaaugc

SEQ ID NO: 3165 - RNA, 20 nt, Artificial Sequence
  HTT spacer sequence ATCN PAM
uccagugacaucccaucuca

SEQ ID NO: 3166 - RNA, 20 nt, Artificial Sequence
  HTT spacer sequence ATCN PAM
ugcuacuccucugcucuaau

SEQ ID NO: 3167 - RNA, 20 nt, Artificial Sequence
  HTT spacer sequence ATCN PAM
gaauuucaaucuuaagugaa

SEQ ID NO: 3168 - RNA, 20 nt, Artificial Sequence
  HTT spacer sequence ATCN PAM
uaagugaacucuggcugaca

SEQ ID NO: 3169 - RNA, 20 nt, Artificial Sequence
  HTT spacer sequence ATCN PAM
gagcacugcaguggcuuccu

SEQ ID NO: 3170 - RNA, 20 nt, Artificial Sequence
  HTT spacer sequence ATCN PAM
agucagucauuccucacacu

SEQ ID NO: 3171 - RNA, 20 nt, Artificial Sequence
  HTT spacer sequence ATCN PAM
gguuuguauucagcugcaag

SEQ ID NO: 3172 - RNA, 20 nt, Artificial Sequence
  HTT spacer sequence ATCN PAM
ugcugcaauagcuuaaacug

SEQ ID NO: 3173 - RNA, 20 nt, Artificial Sequence
  HTT spacer sequence ATCN PAM
gaagacaaaaauaagucugg

SEQ ID NO: 3174 - RNA, 20 nt, Artificial Sequence
  HTT spacer sequence ATCN PAM
uugcacuccagcccggguga

SEQ ID NO: 3175 - RNA, 20 nt, Artificial Sequence
  HTT spacer sequence ATCN PAM
caucauugcacuccagcccg

SEQ ID NO: 3176 - RNA, 20 nt, Artificial Sequence
  HTT spacer sequence ATCN PAM
cagcucacuaaaaccucuac

SEQ ID NO: 3177 - RNA, 20 nt, Artificial Sequence
  HTT spacer sequence ATCN PAM
cuugaacccaggagguagag

SEQ ID NO: 3178 - RNA, 20 nt, Artificial Sequence
  HTT spacer sequence ATCN PAM
caguuacuugggaggcugag

SEQ ID NO: 3179 - RNA, 20 nt, Artificial Sequence
  HTT spacer sequence ATCN PAM
cuacuaaaaacacaaaaauu

SEQ ID NO: 3180 - RNA, 20 nt, Artificial Sequence
  HTT spacer sequence ATCN PAM
ccugaggucagaaguucgag

SEQ ID NO: 3181 - RNA, 20 nt, Artificial Sequence
  HTT spacer sequence ATCN PAM
acucgccucagccugccaaa

SEQ ID NO: 3182 - RNA, 20 nt, Artificial Sequence
  HTT spacer sequence ATCN PAM
cagcacuuuggcaggcugag

SEQ ID NO: 3183 - RNA, 20 nt, Artificial Sequence
  HTT spacer sequence ATCN PAM
agaauauauaaagaacuauu

SEQ ID NO: 3184 - RNA, 20 nt, Artificial Sequence
  HTT spacer sequence ATCN PAM
aguauccagaauauauaaag

SEQ ID NO: 3185 - RNA, 20 nt, Artificial Sequence
  HTT spacer sequence ATCN PAM
gauagaugauuuguaaaaac

SEQ ID NO: 3186 - RNA, 20 nt, Artificial Sequence
  HTT spacer sequence ATCN PAM
gauaagaauccaguauccag

SEQ ID NO: 3187 - RNA, 20 nt, Artificial Sequence
  HTT spacer sequence ATCN PAM
aucugauaagaauccaguau

SEQ ID NO: 3188 - RNA, 20 nt, Artificial Sequence
  HTT spacer sequence ATCN PAM
ucuaucugauaagaauccag

SEQ ID NO: 3189 - RNA, 20 nt, Artificial Sequence
  HTT spacer sequence ATCN PAM
aaaggaagggagaguuuuua

SEQ ID NO: 3190 - RNA, 20 nt, Artificial Sequence
  HTT spacer sequence ATCN PAM
agaaaguaaaaagacaaucc

SEQ ID NO: 3191 - RNA, 20 nt, Artificial Sequence
  HTT spacer sequence ATCN PAM
aaauuaaaaacuuuuacacu

SEQ ID NO: 3192 - RNA, 20 nt, Artificial Sequence
  HTT spacer sequence ATCN PAM
auuuugucuuugguugcugu

SEQ ID NO: 3193 - RNA, 20 nt, Artificial Sequence
  HTT spacer sequence ATCN PAM
aagaaaucauugucuaaucc

SEQ ID NO: 3194 - RNA, 20 nt, Artificial Sequence
  HTT spacer sequence ATCN PAM
uugucuaauccaaagucaaa

SEQ ID NO: 3195 - RNA, 20 nt, Artificial Sequence
  HTT spacer sequence ATCN PAM
aaagucaaaaagguuuacuc

SEQ ID NO: 3196 - RNA, 20 nt, Artificial Sequence
  HTT spacer sequence ATCN PAM
gacuuaaauguaaaacucua

SEQ ID NO: 3197 - RNA, 20 nt, Artificial Sequence
  HTT spacer sequence ATCN PAM
auuuugaguuaauuuuuaua

SEQ ID NO: 3198 - RNA, 20 nt, Artificial Sequence
  HTT spacer sequence ATCN PAM
uaguacccuuguugaaaauu

SEQ ID NO: 3199 - RNA, 20 nt, Artificial Sequence
  HTT spacer sequence ATCN PAM
uccuuaauuguauaaauuua

SEQ ID NO: 3200 - RNA, 20 nt, Artificial Sequence
  HTT spacer sequence ATCN PAM
acauaaagaccaacagguag

SEQ ID NO: 3201 - RNA, 20 nt, Artificial Sequence
  HTT spacer sequence ATCN PAM
ugugccaguaccauacaguc

SEQ ID NO: 3202 - RNA, 20 nt, Artificial Sequence
  HTT spacer sequence ATCN PAM
agacuguaugguacuggcac

SEQ ID NO: 3203 - RNA, 20 nt, Artificial Sequence
  HTT spacer sequence ATCN PAM
ugaaaaggaacaaaguugga

SEQ ID NO: 3204 - RNA, 20 nt, Artificial Sequence
  HTT spacer sequence ATCN PAM
aucuugaaaaggaacaaagu

SEQ ID NO: 3205 - RNA, 20 nt, Artificial Sequence
  HTT spacer sequence ATCN PAM
uacaauucguacggaaaugc

SEQ ID NO: 3206 - RNA, 20 nt, Artificial Sequence
  HTT spacer sequence ATCN PAM
gcuugucaguuucaacaaag

SEQ ID NO: 3207 - RNA, 20 nt, Artificial Sequence
  HTT spacer sequence ATCN PAM
uacuuggcuucuuuguugaa

SEQ ID NO: 3208 - RNA, 20 nt, Artificial Sequence
  HTT spacer sequence ATCN PAM
cucucagaauccuacuuggc

SEQ ID NO: 3209 - RNA, 20 nt, Artificial Sequence
  HTT spacer sequence ATCN PAM
guagaucaacuuggggagua

SEQ ID NO: 3210 - RNA, 20 nt, Artificial Sequence
  HTT spacer sequence ATCN PAM
acagauucaacacaaucccu

SEQ ID NO: 3211 - RNA, 20 nt, Artificial Sequence
  HTT spacer sequence ATCN PAM
acuuggggaguauucgcauc

SEQ ID NO: 3212 - RNA, 20 nt, Artificial Sequence
  HTT spacer sequence ATCN PAM
uaacaauauugucuuccacc

SEQ ID NO: 3213 - RNA, 20 nt, Artificial Sequence
  HTT spacer sequence ATCN PAM
gaccauuuacacaaaguuug

SEQ ID NO: 3214 - RNA, 20 nt, Artificial Sequence
  HTT spacer sequence ATCN PAM
caugacaggugaaaauuaua

SEQ ID NO: 3215 - RNA, 20 nt, Artificial Sequence
  HTT spacer sequence ATCN PAM
aauacuaucucaugacaggu

SEQ ID NO: 3216 - RNA, 20 nt, Artificial Sequence
  HTT spacer sequence ATCN PAM
uauuuuaaccuaggaguggg

SEQ ID NO: 3217 - RNA, 20 nt, Artificial Sequence
  HTT spacer sequence ATCN PAM
cgccacugcacuccagccug

SEQ ID NO: 3218 - RNA, 20 nt, Artificial Sequence
  HTT spacer sequence ATCN PAM
cggcucacugcaaccucugc

SEQ ID NO: 3219 - RNA, 20 nt, Artificial Sequence
  HTT spacer sequence ATCN PAM
cagcuacuagggaggccgug

SEQ ID NO: 3220 - RNA, 20 nt, Artificial Sequence
  HTT spacer sequence ATCN PAM
ccugaggucaggaguucaag

SEQ ID NO: 3221 - RNA, 20 nt, Artificial Sequence
  HTT spacer sequence ATCN PAM
acccgccucagccucccaaa

SEQ ID NO: 3222 - RNA, 20 nt, Artificial Sequence
  HTT spacer sequence ATCN PAM
cagcacuuugggaggcugag

SEQ ID NO: 3223 - RNA, 20 nt, Artificial Sequence
  HTT spacer sequence ATCN PAM
ucaagcagcacagaugaaaa

SEQ ID NO: 3224 - RNA, 20 nt, Artificial Sequence
  HTT spacer sequence ATCN PAM
gugcugcuugaagauauuuu

SEQ ID NO: 3225 - RNA, 20 nt, Artificial Sequence
  HTT spacer sequence ATCN PAM
uugucuaacuuccuaagaac

SEQ ID NO: 3226 - RNA, 20 nt, Artificial Sequence
  HTT spacer sequence ATCN PAM
gggaagaagacacaagaaac

SEQ ID NO: 3227 - RNA, 20 nt, Artificial Sequence
  HTT spacer sequence ATCN PAM
cagucaagcaaacaaaaaau

SEQ ID NO: 3228 - RNA, 20 nt, Artificial Sequence
  HTT spacer sequence ATCN PAM
cauuacauauguauuuuuuu

SEQ ID NO: 3229 - RNA, 20 nt, Artificial Sequence
  HTT spacer sequence ATCN PAM
augacacauuguuaaguaaa

SEQ ID NO: 3230 - RNA, 20 nt, Artificial Sequence
  HTT spacer sequence ATCN PAM
ccaaaaguccucuuuuaaaa

SEQ ID NO: 3231 - RNA, 20 nt, Artificial Sequence
  HTT spacer sequence ATCN PAM
ccaucaccuccauuuccugu

SEQ ID NO: 3232 - RNA, 20 nt, Artificial Sequence
  HTT spacer sequence ATCN PAM
ccuccauuuccuguaaauaa

SEQ ID NO: 3233 - RNA, 20 nt, Artificial Sequence
  HTT spacer sequence ATCN PAM
agugguugacuuauuuacag

SEQ ID NO: 3234 - RNA, 20 nt, Artificial Sequence
  HTT spacer sequence ATCN PAM
auucaaagguaguuuaucaa

SEQ ID NO: 3235 - RNA, 20 nt, Artificial Sequence
  HTT spacer sequence ATCN PAM
acacucaaaacauuuagucu

SEQ ID NO: 3236 - RNA, 20 nt, Artificial Sequence
  HTT spacer sequence ATCN PAM
aauuuaauacaauauuaaac

SEQ ID NO: 3237 - RNA, 20 nt, Artificial Sequence
  HTT spacer sequence ATCN PAM
auuugggggcuagaauguau

SEQ ID NO: 3238 - RNA, 20 nt, Artificial Sequence
  HTT spacer sequence ATCN PAM
ugucucuaacauacauucua

SEQ ID NO: 3239 - RNA, 20 nt, Artificial Sequence
  HTT spacer sequence ATCN PAM
cagugaggucucagggacag

SEQ ID NO: 3240 - RNA, 20 nt, Artificial Sequence
  HTT spacer sequence ATCN PAM
uuugggaucucauaagcaga

SEQ ID NO: 3241 - RNA, 20 nt, Artificial Sequence
  HTT spacer sequence ATCN PAM
caaaugauaccaaacgacug

SEQ ID NO: 3242 - RNA, 20 nt, Artificial Sequence
  HTT spacer sequence ATCN PAM
cauaagcagacucucucugc

SEQ ID NO: 3243 - RNA, 20 nt, Artificial Sequence
  HTT spacer sequence ATCN PAM
gagucuguguuuuaacaggu

SEQ ID NO: 3244 - RNA, 20 nt, Artificial Sequence
  HTT spacer sequence ATCN PAM
gcuguagggccguugagcau

SEQ ID NO: 3245 - RNA, 20 nt, Artificial Sequence
  HTT spacer sequence ATCN PAM
cagcuacagaaaugcucaac

SEQ ID NO: 3246 - RNA, 20 nt, Artificial Sequence
  HTT spacer sequence ATCN PAM
aagcgagucccacuaccaau

SEQ ID NO: 3247 - RNA, 20 nt, Artificial Sequence
  HTT spacer sequence ATCN PAM
gagcagccacuauggagaaa

SEQ ID NO: 3248 - RNA, 20 nt, Artificial Sequence
  HTT spacer sequence ATCN PAM
uuauuucugcccuucaccuu

SEQ ID NO: 3249 - RNA, 20 nt, Artificial Sequence
  HTT spacer sequence ATCN PAM
cucgcagccucauccuuauu

SEQ ID NO: 3250 - RNA, 20 nt, Artificial Sequence
  HTT spacer sequence ATCN PAM
uggugcacaagacgcucguc

SEQ ID NO: 3251 - RNA, 20 nt, Artificial Sequence
  HTT spacer sequence ATCN PAM
uuuaaaaacauaaauuaaac

SEQ ID NO: 3252 - RNA, 20 nt, Artificial Sequence
  HTT spacer sequence ATCN PAM
uuuuggcugggcacaauggu

SEQ ID NO: 3253 - RNA, 20 nt, Artificial Sequence
  HTT spacer sequence ATCN PAM
ucccaccacaccgucucaaa

SEQ ID NO: 3254 - RNA, 20 nt, Artificial Sequence
  HTT spacer sequence ATCN PAM
uccagccuccucagccuccu

SEQ ID NO: 3255 - RNA, 20 nt, Artificial Sequence
  HTT spacer sequence ATCN PAM
uagcucacugcagccucaaa

SEQ ID NO: 3256 - RNA, 20 nt, Artificial Sequence
  HTT spacer sequence ATCN PAM
aaaugcauauauauacauau

SEQ ID NO: 3257 - RNA, 20 nt, Artificial Sequence
  HTT spacer sequence ATCN PAM
uuucaucuaaaugcauauau

SEQ ID NO: 3258 - RNA, 20 nt, Artificial Sequence
  HTT spacer sequence ATCN PAM
cuuugacaauaccacaugcu

SEQ ID NO: 3259 - RNA, 20 nt, Artificial Sequence
  HTT spacer sequence ATCN PAM
ucaccagcaugugguauugu

SEQ ID NO: 3260 - RNA, 20 nt, Artificial Sequence
  HTT spacer sequence ATCN PAM
ugggcauuaauccuagagaa

SEQ ID NO: 3261 - RNA, 20 nt, Artificial Sequence
  HTT spacer sequence ATCN PAM
uagagaaaugaaaccuuaau

SEQ ID NO: 3262 - RNA, 20 nt, Artificial Sequence
  HTT spacer sequence ATCN PAM
aagaacuggaaucagcucag

SEQ ID NO: 3263 - RNA, 20 nt, Artificial Sequence
  HTT spacer sequence ATCN PAM
gcucagauguccuucaacag

SEQ ID NO: 3264 - RNA, 20 nt, Artificial Sequence
  HTT spacer sequence ATCN PAM
gagcugauuccaguucuuag

SEQ ID NO: 3265 - RNA, 20 nt, Artificial Sequence
  HTT spacer sequence ATCN PAM
guagcucauuccuuuuuauu

SEQ ID NO: 3266 - RNA, 20 nt, Artificial Sequence
  HTT spacer sequence ATCN PAM
caaaagguuauacauacugu

SEQ ID NO: 3267 - RNA, 20 nt, Artificial Sequence
  HTT spacer sequence ATCN PAM
uacaguauguauaaccuuuu

SEQ ID NO: 3268 - RNA, 20 nt, Artificial Sequence
  HTT spacer sequence ATCN PAM
cuaaaacugugccauugcaa

SEQ ID NO: 3269 - RNA, 20 nt, Artificial Sequence
  HTT spacer sequence ATCN PAM
auucuccaucccuaaaacug

SEQ ID NO: 3270 - RNA, 20 nt, Artificial Sequence
  HTT spacer sequence ATCN PAM
cuaaccccaggcaaccacua

SEQ ID NO: 3271 - RNA, 20 nt, Artificial Sequence
  HTT spacer sequence ATCN PAM
ugccacugcacuccagccug

SEQ ID NO: 3272 - RNA, 20 nt, Artificial Sequence
  HTT spacer sequence ATCN PAM
uuucucacugcaaccucugc

SEQ ID NO: 3273 - RNA, 20 nt, Artificial Sequence
  HTT spacer sequence ATCN PAM
cuugaacccaggaggcagag

SEQ ID NO: 3274 - RNA, 20 nt, Artificial Sequence
  HTT spacer sequence ATCN PAM
aaauaauccaacacacauga

SEQ ID NO: 3275 - RNA, 20 nt, Artificial Sequence
  HTT spacer sequence ATCN PAM
aacacacaugacauuaaaac

SEQ ID NO: 3276 - RNA, 20 nt, Artificial Sequence
  HTT spacer sequence ATCN PAM
agaucaggucggacguggug

SEQ ID NO: 3277 - RNA, 20 nt, Artificial Sequence
  HTT spacer sequence ATCN PAM
ugauguuuuaaugucaugug

SEQ ID NO: 3278 - RNA, 20 nt, Artificial Sequence
  HTT spacer sequence ATCN PAM
ggucggacgugguggcucau

SEQ ID NO: 3279 - RNA, 20 nt, Artificial Sequence
  HTT spacer sequence ATCN PAM
cagcacuuuugggaggccaa

SEQ ID NO: 3280 - RNA, 20 nt, Artificial Sequence
  HTT spacer sequence ATCN PAM
gcccaccuuggccucccaaa

SEQ ID NO: 3281 - RNA, 20 nt, Artificial Sequence
  HTT spacer sequence ATCN PAM
cuugaggucaggaguucgag

SEQ ID NO: 3282 - RNA, 20 nt, Artificial Sequence
  HTT spacer sequence ATCN PAM
uguuggcccggcuggucucg

SEQ ID NO: 3283 - RNA, 20 nt, Artificial Sequence
  HTT spacer sequence ATCN PAM
ugacuaaaaauacaaaaauu

SEQ ID NO: 3284 - RNA, 20 nt, Artificial Sequence
  HTT spacer sequence ATCN PAM
ccaaaaaaaaaaaaccaaga

SEQ ID NO: 3285 - RNA, 20 nt, Artificial Sequence
  HTT spacer sequence ATCN PAM
ugguuuuuuuuuuuuggaga

SEQ ID NO: 3286 - RNA, 20 nt, Artificial Sequence
  HTT spacer sequence ATCN PAM
auuaaaauacagcauuacug

SEQ ID NO: 3287 - RNA, 20 nt, Artificial Sequence
  HTT spacer sequence ATCN PAM
cagcacuuugggaggccgag

SEQ ID NO: 3288 - RNA, 20 nt, Artificial Sequence
  HTT spacer sequence ATCN PAM
cggccucccaaagugcuggg

SEQ ID NO: 3289 - RNA, 20 nt, Artificial Sequence
  HTT spacer sequence ATCN PAM
gcccaucucggccucccaaa

SEQ ID NO: 3290 - RNA, 20 nt, Artificial Sequence
  HTT spacer sequence ATCN PAM
cgaggucaggagauccagac

SEQ ID NO: 3291 - RNA, 20 nt, Artificial Sequence
  HTT spacer sequence ATCN PAM
ccugaccucgugaucugccc

SEQ ID NO: 3292 - RNA, 20 nt, Artificial Sequence
  HTT spacer sequence ATCN PAM
agaccaucccggcuaacacg

SEQ ID NO: 3293 - RNA, 20 nt, Artificial Sequence
  HTT spacer sequence ATCN PAM
cggcuaacacggugaaaccc

SEQ ID NO: 3294 - RNA, 20 nt, Artificial Sequence
  HTT spacer sequence ATCN PAM
cagcucacugccagcucugc

SEQ ID NO: 3295 - RNA, 20 nt, Artificial Sequence
  HTT spacer sequence ATCN PAM
cgccacugcacuccagccug

SEQ ID NO: 3296 - RNA, 20 nt, Artificial Sequence
  HTT spacer sequence ATCN PAM
gcacgggcacacaagcguaa

SEQ ID NO: 3297 - RNA, 20 nt, Artificial Sequence
  HTT spacer sequence ATCN PAM
agcaaucugcacgggcacac

SEQ ID NO: 3298 - RNA, 20 nt, Artificial Sequence
  HTT spacer sequence ATCN PAM
uccgccagccuccucuaauu

SEQ ID NO: 3299 - RNA, 20 nt, Artificial Sequence
  HTT spacer sequence ATCN PAM
uggugcacugcaaccucugc

SEQ ID NO: 3300 - RNA, 20 nt, Artificial Sequence
  HTT spacer sequence ATCN PAM
cagcuacucgggaggcugcg

SEQ ID NO: 3301 - RNA, 20 nt, Artificial Sequence
  HTT spacer sequence ATCN PAM
gaggucaggaguucgagacc

SEQ ID NO: 3302 - RNA, 20 nt, Artificial Sequence
  HTT spacer sequence ATCN PAM
ucugaggucaggaguucgag

SEQ ID NO: 3303 - RNA, 20 nt, Artificial Sequence
  HTT spacer sequence ATCN PAM
gcugccccagccucccaaag

SEQ ID NO: 3304 - RNA, 20 nt, Artificial Sequence
  HTT spacer sequence ATCN PAM
cagcacuuugggaggcuggg

SEQ ID NO: 3305 - RNA, 20 nt, Artificial Sequence
  HTT spacer sequence ATCN PAM
cuuuugguaaauguagucac

SEQ ID NO: 3306 - RNA, 20 nt, Artificial Sequence
  HTT spacer sequence ATCN PAM
ccauacuuacuuuucaugua

SEQ ID NO: 3307 - RNA, 20 nt, Artificial Sequence
  HTT spacer sequence ATCN PAM
guucaucaucuuaacuaaau

SEQ ID NO: 3308 - RNA, 20 nt, Artificial Sequence
  HTT spacer sequence ATCN PAM
ucuuaacuaaauuccauggg

SEQ ID NO: 3309 - RNA, 20 nt, Artificial Sequence
  HTT spacer sequence ATCN PAM
uaacuaaauuccauggggga

SEQ ID NO: 3310 - RNA, 20 nt, Artificial Sequence
  HTT spacer sequence ATCN PAM
cauuuuguccaauaagcaaa

SEQ ID NO: 3311 - RNA, 20 nt, Artificial Sequence
  HTT spacer sequence ATCN PAM
aacuuaaaaacacugccuug

SEQ ID NO: 3312 - RNA, 20 nt, Artificial Sequence
  HTT spacer sequence ATCN PAM
aaaacauaggaccaacuaaa

SEQ ID NO: 3313 - RNA, 20 nt, Artificial Sequence
  HTT spacer sequence ATCN PAM
ccccucucuacuuuauuuug

SEQ ID NO: 3314 - RNA, 20 nt, Artificial Sequence
  HTT spacer sequence ATCN PAM
aaauaaaguagagaggggug

SEQ ID NO: 3315 - RNA, 20 nt, Artificial Sequence
  HTT spacer sequence ATCN PAM
gaagccauagguuuggaugg

SEQ ID NO: 3316 - RNA, 20 nt, Artificial Sequence
  HTT spacer sequence ATCN PAM
aaaccuauggcuucagaugu

SEQ ID NO: 3317 - RNA, 20 nt, Artificial Sequence
  HTT spacer sequence ATCN PAM
uuagccugaucaucuucgcc

SEQ ID NO: 3318 - RNA, 20 nt, Artificial Sequence
  HTT spacer sequence ATCN PAM
ggcuaaagaugccuccuucc

SEQ ID NO: 3319 - RNA, 20 nt, Artificial Sequence
  HTT spacer sequence ATCN PAM
ucuucgccaggcuguuuauc

SEQ ID NO: 3320 - RNA, 20 nt, Artificial Sequence
  HTT spacer sequence ATCN PAM
ucgccaggcuguuuaucucc

SEQ ID NO: 3321 - RNA, 20 nt, Artificial Sequence
  HTT spacer sequence ATCN PAM
ccuuuugcuuggcugagaag

SEQ ID NO: 3322 - RNA, 20 nt, Artificial Sequence
  HTT spacer sequence ATCN PAM
acauaccacacagaccucag

SEQ ID NO: 3323 - RNA, 20 nt, Artificial Sequence
  HTT spacer sequence ATCN PAM
uuaacugacuacaaucaaca

SEQ ID NO: 3324 - RNA, 20 nt, Artificial Sequence
  HTT spacer sequence ATCN PAM
cuuguaaucuaugccaucau

SEQ ID NO: 3325 - RNA, 20 nt, Artificial Sequence
  HTT spacer sequence ATCN PAM
augccaucaucuucuguacu

SEQ ID NO: 3326 - RNA, 20 nt, Artificial Sequence
  HTT spacer sequence ATCN PAM
ucuucuguacugcugagaaa

SEQ ID NO: 3327 - RNA, 20 nt, Artificial Sequence
  HTT spacer sequence ATCN PAM
ucuguacugcugagaaagaa

SEQ ID NO: 3328 - RNA, 20 nt, Artificial Sequence
  HTT spacer sequence ATCN PAM
aacuauaccacugguuguaa

SEQ ID NO: 3329 - RNA, 20 nt, Artificial Sequence
  HTT spacer sequence ATCN PAM
uacaaccagugguauaguuu

SEQ ID NO: 3330 - RNA, 20 nt, Artificial Sequence
  HTT spacer sequence ATCN PAM
cuaaagccaaacugcaucuu

SEQ ID NO: 3331 - RNA, 20 nt, Artificial Sequence
  HTT spacer sequence ATCN PAM
uguguuaacaucacuaaagc

SEQ ID NO: 3332 - RNA, 20 nt, Artificial Sequence
  HTT spacer sequence ATCN PAM
auuucacguuugaaucaugu

SEQ ID NO: 3333 - RNA, 20 nt, Artificial Sequence
  HTT spacer sequence ATCN PAM
ccucuguauuucaccaauac

SEQ ID NO: 3334 - RNA, 20 nt, Artificial Sequence
  HTT spacer sequence ATCN PAM
gugugaucuugggcauguca

SEQ ID NO: 3335 - RNA, 20 nt, Artificial Sequence
  HTT spacer sequence ATCN PAM
cacagauaugaagucauaca

SEQ ID NO: 3336 - RNA, 20 nt, Artificial Sequence
  HTT spacer sequence ATCN PAM
ugggcaugucaugguuggca

SEQ ID NO: 3337 - RNA, 20 nt, Artificial Sequence
  HTT spacer sequence ATCN PAM
cagugcuuugggaggccaag

SEQ ID NO: 3338 - RNA, 20 nt, Artificial Sequence
  HTT spacer sequence ATCN PAM
uggccucccaaagcacuggg

SEQ ID NO: 3339 - RNA, 20 nt, Artificial Sequence
  HTT spacer sequence ATCN PAM
ucccaucuuggccucccaaa

SEQ ID NO: 3340 - RNA, 20 nt, Artificial Sequence
  HTT spacer sequence ATCN PAM
cuugaggccaggaguuugag

SEQ ID NO: 3341 - RNA, 20 nt, Artificial Sequence
  HTT spacer sequence ATCN PAM
ugaggccccgucucuacaaa

SEQ ID NO: 3342 - RNA, 20 nt, Artificial Sequence
  HTT spacer sequence ATCN PAM
ucccgucucagccuccugag

SEQ ID NO: 3343 - RNA, 20 nt, Artificial Sequence
  HTT spacer sequence ATCN PAM
uuucagccuaggaguuuaag

SEQ ID NO: 3344 - RNA, 20 nt, Artificial Sequence
  HTT spacer sequence ATCN PAM
uggcucacuuuagccuuaaa

SEQ ID NO: 3345 - RNA, 20 nt, Artificial Sequence
  HTT spacer sequence ATCN PAM
uacuccagccugggcagcag

SEQ ID NO: 3346 - RNA, 20 nt, Artificial Sequence
  HTT spacer sequence ATCN PAM
ugcucugcugcccaggcugg

SEQ ID NO: 3347 - RNA, 20 nt, Artificial Sequence
  HTT spacer sequence ATCN PAM
ugacucuaaaaaaaaguaaa

SEQ ID NO: 3348 - RNA, 20 nt, Artificial Sequence
  HTT spacer sequence ATCN PAM
ucuguuuuuucugugagcag

SEQ ID NO: 3349 - RNA, 20 nt, Artificial Sequence
  HTT spacer sequence ATCN PAM
guuuuuucugugagcagcgu

SEQ ID NO: 3350 - RNA, 20 nt, Artificial Sequence
  HTT spacer sequence ATCN PAM
ggacagggaagcacagggca

SEQ ID NO: 3351 - RNA, 20 nt, Artificial Sequence
  HTT spacer sequence ATCN PAM
ccauucugcccgcaacaugg

SEQ ID NO: 3352 - RNA, 20 nt, Artificial Sequence
  HTT spacer sequence ATCN PAM
uugucugacaauaugugaaa

SEQ ID NO: 3353 - RNA, 20 nt, Artificial Sequence
  HTT spacer sequence ATCN PAM
auuuaaaauagcugggacac

SEQ ID NO: 3354 - RNA, 20 nt, Artificial Sequence
  HTT spacer sequence ATCN PAM
auuuaagaugaagaaggacc

SEQ ID NO: 3355 - RNA, 20 nt, Artificial Sequence
  HTT spacer sequence ATCN PAM
uaaauggauuucugaaucca

SEQ ID NO: 3356 - RNA, 20 nt, Artificial Sequence
  HTT spacer sequence ATCN PAM
uuguauauagccagaaauau

SEQ ID NO: 3357 - RNA, 20 nt, Artificial Sequence
  HTT spacer sequence ATCN PAM
agacacugaaaugaauaaug

SEQ ID NO: 3358 - RNA, 20 nt, Artificial Sequence
  HTT spacer sequence ATCN PAM
uuuaugcaaaaauuaaaacc

SEQ ID NO: 3359 - RNA, 20 nt, Artificial Sequence
  HTT spacer sequence ATCN PAM
augguuugauauuuuugcau

SEQ ID NO: 3360 - RNA, 20 nt, Artificial Sequence
  HTT spacer sequence ATCN PAM
aaccauagaugguuuuaaaa

SEQ ID NO: 3361 - RNA, 20 nt, Artificial Sequence
  HTT spacer sequence ATCN PAM
cgaagcacagaggagugggc

SEQ ID NO: 3362 - RNA, 20 nt, Artificial Sequence
  HTT spacer sequence ATCN PAM
ccacuaaucccgaagcacag

SEQ ID NO: 3363 - RNA, 20 nt, Artificial Sequence
  HTT spacer sequence ATCN PAM
uggggcauugacuguagguc

SEQ ID NO: 3364 - RNA, 20 nt, Artificial Sequence
  HTT spacer sequence ATCN PAM
agcaaggaaagcugaccuac

SEQ ID NO: 3365 - RNA, 20 nt, Artificial Sequence
  HTT spacer sequence ATCN PAM
uucucacugggaugaacuag

SEQ ID NO: 3366 - RNA, 20 nt, Artificial Sequence
  HTT spacer sequence ATCN PAM
cagugagaaagaucaagcaa

SEQ ID NO: 3367 - RNA, 20 nt, Artificial Sequence
  HTT spacer sequence ATCN PAM
uucugaccguuguuccuagu

SEQ ID NO: 3368 - RNA, 20 nt, Artificial Sequence
  HTT spacer sequence ATCN PAM
acagcuacuaggaacaacgg

SEQ ID NO: 3369 - RNA, 20 nt, Artificial Sequence
  HTT spacer sequence ATCN PAM
uaggugaauaugucuccuac

SEQ ID NO: 3370 - RNA, 20 nt, Artificial Sequence
  HTT spacer sequence ATCN PAM
gaauucuguuacccacaugg

SEQ ID NO: 3371 - RNA, 20 nt, Artificial Sequence
  HTT spacer sequence ATCN PAM
ugauuuuaguacugacaaaa

SEQ ID NO: 3372 - RNA, 20 nt, Artificial Sequence
  HTT spacer sequence ATCN PAM
agauuauuugucuaaaaauu

SEQ ID NO: 3373 - RNA, 20 nt, Artificial Sequence
  HTT spacer sequence ATCN PAM
ccacacguuuuugucaguac

SEQ ID NO: 3374 - RNA, 20 nt, Artificial Sequence
  HTT spacer sequence ATCN PAM
cgccauugcacuccagccug

SEQ ID NO: 3375 - RNA, 20 nt, Artificial Sequence
  HTT spacer sequence ATCN PAM
cggcucacugcaaccucugc

SEQ ID NO: 3376 - RNA, 20 nt, Artificial Sequence
  HTT spacer sequence ATCN PAM
cuugaacccaggaggcagag

SEQ ID NO: 3377 - RNA, 20 nt, Artificial Sequence
  HTT spacer sequence ATCN PAM
cuacuaaaaauacaaaauua

SEQ ID NO: 3378 - RNA, 20 nt, Artificial Sequence
  HTT spacer sequence ATCN PAM
gccugaccaacaucucuacu

SEQ ID NO: 3379 - RNA, 20 nt, Artificial Sequence
  HTT spacer sequence ATCN PAM
cgaacucccaaccuuaggug

SEQ ID NO: 3380 - RNA, 20 nt, Artificial Sequence
  HTT spacer sequence ATCN PAM
ccuaagguugggaguucgag

SEQ ID NO: 3381 - RNA, 20 nt, Artificial Sequence
  HTT spacer sequence ATCN PAM
gcccgccucagccucccaaa

SEQ ID NO: 3382 - RNA, 20 nt, Artificial Sequence
  HTT spacer sequence ATCN PAM
cagcacuuugggaggcugag

SEQ ID NO: 3383 - RNA, 20 nt, Artificial Sequence
  HTT spacer sequence ATCN PAM
ccgggcgcccuggcucacgc

SEQ ID NO: 3384 - RNA, 20 nt, Artificial Sequence
  HTT spacer sequence ATCN PAM
ugacuccgucucaaaaaaaa

SEQ ID NO: 3385 - RNA, 20 nt, Artificial Sequence
  HTT spacer sequence ATCN PAM
gucacccaggcuggagugca

SEQ ID NO: 3386 - RNA, 20 nt, Artificial Sequence
  HTT spacer sequence ATCN PAM
ugccacugcacuccagccug

SEQ ID NO: 3387 - RNA, 20 nt, Artificial Sequence
  HTT spacer sequence ATCN PAM
uggcuuacugcaagcucugc

SEQ ID NO: 3388 - RNA, 20 nt, Artificial Sequence
  HTT spacer sequence ATCN PAM
cuacuaaaaauacaaaaaau

SEQ ID NO: 3389 - RNA, 20 nt, Artificial Sequence
  HTT spacer sequence ATCN PAM
agaccacggugaaaccccau

SEQ ID NO: 3390 - RNA, 20 nt, Artificial Sequence
  HTT spacer sequence ATCN PAM
ccugaccucaugacccgcuc

SEQ ID NO: 3391 - RNA, 20 nt, Artificial Sequence
  HTT spacer sequence ATCN PAM
cagcacuuugggaggcugag

SEQ ID NO: 3392 - RNA, 20 nt, Artificial Sequence
  HTT spacer sequence ATCN PAM
cugccaucuacuucauaagu

SEQ ID NO: 3393 - RNA, 20 nt, Artificial Sequence
  HTT spacer sequence ATCN PAM
acuucauaaguuuuucuucu

SEQ ID NO: 3394 - RNA, 20 nt, Artificial Sequence
  HTT spacer sequence ATCN PAM
gucuucauuaaacucccuau

SEQ ID NO: 3395 - RNA, 20 nt, Artificial Sequence
  HTT spacer sequence ATCN PAM
uccauucuuuccuguagucc

SEQ ID NO: 3396 - RNA, 20 nt, Artificial Sequence
  HTT spacer sequence ATCN PAM
auucuuuccuguagucccuu

SEQ ID NO: 3397 - RNA, 20 nt, Artificial Sequence
  HTT spacer sequence ATCN PAM
acuuacaugaggucuccaga

SEQ ID NO: 3398 - RNA, 20 nt, Artificial Sequence
  HTT spacer sequence ATCN PAM
uguaggaauccacuuacaug

SEQ ID NO: 3399 - RNA, 20 nt, Artificial Sequence
  HTT spacer sequence ATCN PAM
ccaaaaaaaaaacacaaauc

SEQ ID NO: 3400 - RNA, 20 nt, Artificial Sequence
  HTT spacer sequence ATCN PAM
gcuuauuuuuaaugccucug

SEQ ID NO: 3401 - RNA, 20 nt, Artificial Sequence
  HTT spacer sequence ATCN PAM
cuuugaaaguauauaauaca

SEQ ID NO: 3402 - RNA, 20 nt, Artificial Sequence
  HTT spacer sequence ATCN PAM
uacacaguauuucacaaaca

SEQ ID NO: 3403 - RNA, 20 nt, Artificial Sequence
  HTT spacer sequence ATCN PAM
uagcguuguauucuacaaua

SEQ ID NO: 3404 - RNA, 20 nt, Artificial Sequence
  HTT spacer sequence ATCN PAM
cugcuaccuguguaagcugg

SEQ ID NO: 3405 - RNA, 20 nt, Artificial Sequence
  HTT spacer sequence ATCN PAM
aaagucacccagcuuacaca

SEQ ID NO: 3406 - RNA, 20 nt, Artificial Sequence
  HTT spacer sequence ATCN PAM
cuaguuacacaguucuugug

SEQ ID NO: 3407 - RNA, 20 nt, Artificial Sequence
  HTT spacer sequence ATCN PAM
cacaagaacuguguaacuag

SEQ ID NO: 3408 - RNA, 20 nt, Artificial Sequence
  HTT spacer sequence ATCN PAM
gaugguacaugugaaacacu

SEQ ID NO: 3409 - RNA, 20 nt, Artificial Sequence
  HTT spacer sequence ATCN PAM
gaucccacaagaacugugua

SEQ ID NO: 3410 - RNA, 20 nt, Artificial Sequence
  HTT spacer sequence ATCN PAM
augcaguugcuuuuucacag

SEQ ID NO: 3411 - RNA, 20 nt, Artificial Sequence
  HTT spacer sequence ATCN PAM
cauugcgaugcccaucaucc

SEQ ID NO: 3412 - RNA, 20 nt, Artificial Sequence
  HTT spacer sequence ATCN PAM
caaugggauacgcuucccgc

SEQ ID NO: 3413 - RNA, 20 nt, Artificial Sequence
  HTT spacer sequence ATCN PAM
uccaaagcuauauguuaucu

SEQ ID NO: 3414 - RNA, 20 nt, Artificial Sequence
  HTT spacer sequence ATCN PAM
aaagcuauauguuaucuuua

SEQ ID NO: 3415 - RNA, 20 nt, Artificial Sequence
  HTT spacer sequence ATCN PAM
uuacuuuuuuuuuuuugaga

SEQ ID NO: 3416 - RNA, 20 nt, Artificial Sequence
  HTT spacer sequence ATCN PAM
cagcucacugcaagcuccac

SEQ ID NO: 3417 - RNA, 20 nt, Artificial Sequence
  HTT spacer sequence ATCN PAM
cuacuaaaaauacaaaaauu

SEQ ID NO: 3418 - RNA, 20 nt, Artificial Sequence
  HTT spacer sequence ATCN PAM
uggcuaacacggugaaaccc

SEQ ID NO: 3419 - RNA, 20 nt, Artificial Sequence
  HTT spacer sequence ATCN PAM
agaccauccuggcuaacacg

SEQ ID NO: 3420 - RNA, 20 nt, Artificial Sequence
  HTT spacer sequence ATCN PAM
ccugaccucgugauccgccc

SEQ ID NO: 3421 - RNA, 20 nt, Artificial Sequence
  HTT spacer sequence ATCN PAM
cgaggucaggagaucaagac

SEQ ID NO: 3422 - RNA, 20 nt, Artificial Sequence
  HTT spacer sequence ATCN PAM
gcccgccucggccucccaaa

SEQ ID NO: 3423 - RNA, 20 nt, Artificial Sequence
  HTT spacer sequence ATCN PAM
cagcacuuugggaggccgag

SEQ ID NO: 3424 - RNA, 20 nt, Artificial Sequence
  HTT spacer sequence ATCN PAM
uuacuuuuuuugugaaauga

SEQ ID NO: 3425 - RNA, 20 nt, Artificial Sequence
  HTT spacer sequence ATCN PAM
gaucuccaccauccaggucu

SEQ ID NO: 3426 - RNA, 20 nt, Artificial Sequence
  HTT spacer sequence ATCN PAM
gaugaacaaugaccaaaugu

SEQ ID NO: 3427 - RNA, 20 nt, Artificial Sequence
  HTT spacer sequence ATCN PAM
ccaccauccaggucucagag

SEQ ID NO: 3428 - RNA, 20 nt, Artificial Sequence
  HTT spacer sequence ATCN PAM
aggucucagagaacauaauu

SEQ ID NO: 3429 - RNA, 20 nt, Artificial Sequence
  HTT spacer sequence ATCN PAM
uauuuccugggucaauaagc

SEQ ID NO: 3430 - RNA, 20 nt, Artificial Sequence
  HTT spacer sequence ATCN PAM
cuuucaaucugagugcguca

SEQ ID NO: 3431 - RNA, 20 nt, Artificial Sequence
  HTT spacer sequence ATCN PAM
gagugcgucaggcuuuauuc

SEQ ID NO: 3432 - RNA, 20 nt, Artificial Sequence
  HTT spacer sequence ATCN PAM
aaagacaaaaugacaagaau

SEQ ID NO: 3433 - RNA, 20 nt, Artificial Sequence
  HTT spacer sequence ATCN PAM
uaagauugauuugugguucu

SEQ ID NO: 3434 - RNA, 20 nt, Artificial Sequence
  HTT spacer sequence ATCN PAM
uaagaugucucaacauacuu

SEQ ID NO: 3435 - RNA, 20 nt, Artificial Sequence
  HTT spacer sequence ATCN PAM
aucuuaagaugucucaacau

SEQ ID NO: 3436 - RNA, 20 nt, Artificial Sequence
  HTT spacer sequence ATCN PAM
aaauaauagcuguuaauggu

SEQ ID NO: 3437 - RNA, 20 nt, Artificial Sequence
  HTT spacer sequence ATCN PAM
uaugaaaccaagaauaaccu

SEQ ID NO: 3438 - RNA, 20 nt, Artificial Sequence
  HTT spacer sequence ATCN PAM
cuaaaaaguauagaguguau

SEQ ID NO: 3439 - RNA, 20 nt, Artificial Sequence
  HTT spacer sequence ATCN PAM
ccuucagcuauauacucuga

SEQ ID NO: 3440 - RNA, 20 nt, Artificial Sequence
  HTT spacer sequence ATCN PAM
cuguuuccuguuaacucucc

SEQ ID NO: 3441 - RNA, 20 nt, Artificial Sequence
  HTT spacer sequence ATCN PAM
auacuuaggaaccaguaacu

SEQ ID NO: 3442 - RNA, 20 nt, Artificial Sequence
  HTT spacer sequence ATCN PAM
aaaucaucuggaaaauuugu

SEQ ID NO: 3443 - RNA, 20 nt, Artificial Sequence
  HTT spacer sequence ATCN PAM
ucuggaaaauuuguuaaaaa

SEQ ID NO: 3444 - RNA, 20 nt, Artificial Sequence
  HTT spacer sequence ATCN PAM
ggaaaauuuguuaaaaauac

SEQ ID NO: 3445 - RNA, 20 nt, Artificial Sequence
  HTT spacer sequence ATCN PAM
ucuugggaauacccaggaau

SEQ ID NO: 3446 - RNA, 20 nt, Artificial Sequence
  HTT spacer sequence ATCN PAM
agguacauauuaguaagagg

SEQ ID NO: 3447 - RNA, 20 nt, Artificial Sequence
  HTT spacer sequence ATCN PAM
auagaucucccauauauuag

SEQ ID NO: 3448 - RNA, 20 nt, Artificial Sequence
  HTT spacer sequence ATCN PAM
auggauuuuuguauauuuau

SEQ ID NO: 3449 - RNA, 20 nt, Artificial Sequence
  HTT spacer sequence ATCN PAM
cccauauauuagcauaaauc

SEQ ID NO: 3450 - RNA, 20 nt, Artificial Sequence
  HTT spacer sequence ATCN PAM
gcuagaaaauauaacguuua

SEQ ID NO: 3451 - RNA, 20 nt, Artificial Sequence
  HTT spacer sequence ATCN PAM
uuaaacguuauauuuucuag

SEQ ID NO: 3452 - RNA, 20 nt, Artificial Sequence
  HTT spacer sequence ATCN PAM
aguucacaguagcaccaaua

SEQ ID NO: 3453 - RNA, 20 nt, Artificial Sequence
  HTT spacer sequence ATCN PAM
aacucuaaggaaucgauaaa

SEQ ID NO: 3454 - RNA, 20 nt, Artificial Sequence
  HTT spacer sequence ATCN PAM
auaaauaugcaaaaacuuua

SEQ ID NO: 3455 - RNA, 20 nt, Artificial Sequence
  HTT spacer sequence ATCN PAM
auuccuuagaguucgauaua

SEQ ID NO: 3456 - RNA, 20 nt, Artificial Sequence
  HTT spacer sequence ATCN PAM
uucagaaacauuaacagaag

SEQ ID NO: 3457 - RNA, 20 nt, Artificial Sequence
  HTT spacer sequence ATCN PAM
agaaaguggucaccuauauc

SEQ ID NO: 3458 - RNA, 20 nt, Artificial Sequence
  HTT spacer sequence ATCN PAM
uccuaucuagaaagugguca

SEQ ID NO: 3459 - RNA, 20 nt, Artificial Sequence
  HTT spacer sequence ATCN PAM
ugaucaaaauucuaguagag

SEQ ID NO: 3460 - RNA, 20 nt, Artificial Sequence
  HTT spacer sequence ATCN PAM
agauuauuuuaaauuucugu

SEQ ID NO: 3461 - RNA, 20 nt, Artificial Sequence
  HTT spacer sequence ATCN PAM
aaauucuaguagagguauuu

SEQ ID NO: 3462 - RNA, 20 nt, Artificial Sequence
  HTT spacer sequence ATCN PAM
caaaaucaucaccaggccug

SEQ ID NO: 3463 - RNA, 20 nt, Artificial Sequence
  HTT spacer sequence ATCN PAM
ucaccaggccugguguggug

SEQ ID NO: 3464 - RNA, 20 nt, Artificial Sequence
  HTT spacer sequence ATCN PAM
ccaggccuggugugguggcc

SEQ ID NO: 3465 - RNA, 20 nt, Artificial Sequence
  HTT spacer sequence ATCN PAM
cagcacuuugggaggcugag

SEQ ID NO: 3466 - RNA, 20 nt, Artificial Sequence
  HTT spacer sequence ATCN PAM
gccugccucagccucccaaa

SEQ ID NO: 3467 - RNA, 20 nt, Artificial Sequence
  HTT spacer sequence ATCN PAM
ccugaggucaagaguuugag

SEQ ID NO: 3468 - RNA, 20 nt, Artificial Sequence
  HTT spacer sequence ATCN PAM
aggcucaccgcaaccuguac

SEQ ID NO: 3469 - RNA, 20 nt, Artificial Sequence
  HTT spacer sequence ATCN PAM
caccacugcauuccagccug

SEQ ID NO: 3470 - RNA, 20 nt, Artificial Sequence
  HTT spacer sequence ATCN PAM
acacuaauauggugagacuu

SEQ ID NO: 3471 - RNA, 20 nt, Artificial Sequence
  HTT spacer sequence ATCN PAM
cuauuuuaaugucacauaca

SEQ ID NO: 3472 - RNA, 20 nt, Artificial Sequence
  HTT spacer sequence ATCN PAM
aaucacuauuuuaaugucac

SEQ ID NO: 3473 - RNA, 20 nt, Artificial Sequence
  HTT spacer sequence ATCN PAM
guaugaauuuaugaugggug

SEQ ID NO: 3474 - RNA, 20 nt, Artificial Sequence
  HTT spacer sequence ATCN PAM
uaaauucauacagauacaca

SEQ ID NO: 3475 - RNA, 20 nt, Artificial Sequence
  HTT spacer sequence ATCN PAM
uuucccucauuucccuaaua

SEQ ID NO: 3476 - RNA, 20 nt, Artificial Sequence
  HTT spacer sequence ATCN PAM
cuaccucauauugcaaacaa

SEQ ID NO: 3477 - RNA, 20 nt, Artificial Sequence
  HTT spacer sequence ATCN PAM
gaacuuuauguuuguuugca

SEQ ID NO: 3478 - RNA, 20 nt, Artificial Sequence
  HTT spacer sequence ATCN PAM
uaguuugaggaagguuaaca

SEQ ID NO: 3479 - RNA, 20 nt, Artificial Sequence
  HTT spacer sequence ATCN PAM
accuucaacaaaauugaaag

SEQ ID NO: 3480 - RNA, 20 nt, Artificial Sequence
  HTT spacer sequence ATCN PAM
auaugcugucaauacuuucc

SEQ ID NO: 3481 - RNA, 20 nt, Artificial Sequence
  HTT spacer sequence ATCN PAM
aagguuacuagccuguguaa

SEQ ID NO: 3482 - RNA, 20 nt, Artificial Sequence
  HTT spacer sequence ATCN PAM
uuaagaaaaacacugucgac

SEQ ID NO: 3483 - RNA, 20 nt, Artificial Sequence
  HTT spacer sequence ATCN PAM
gcuugaguuucuauaacaaa

SEQ ID NO: 3484 - RNA, 20 nt, Artificial Sequence
  HTT spacer sequence ATCN PAM
guagacugaaacugaaacaa

SEQ ID NO: 3485 - RNA, 20 nt, Artificial Sequence
  HTT spacer sequence ATCN PAM
gaauauucuuaauguuugcc

SEQ ID NO: 3486 - RNA, 20 nt, Artificial Sequence
  HTT spacer sequence ATCN PAM
ccucugacaaaaaucugaau

SEQ ID NO: 3487 - RNA, 20 nt, Artificial Sequence
  HTT spacer sequence ATCN PAM
aaagcuuuauauuuucccaa

SEQ ID NO: 3488 - RNA, 20 nt, Artificial Sequence
  HTT spacer sequence ATCN PAM
uuacacacuuuccuaggggu

SEQ ID NO: 3489 - RNA, 20 nt, Artificial Sequence
  HTT spacer sequence ATCN PAM
cauuagaaaauuaaaaauaa

SEQ ID NO: 3490 - RNA, 20 nt, Artificial Sequence
  HTT spacer sequence ATCN PAM
ccuuuuagugguaggccauu

SEQ ID NO: 3491 - RNA, 20 nt, Artificial Sequence
  HTT spacer sequence ATCN PAM
uaaauuuucaauccccuuuu

SEQ ID NO: 3492 - RNA, 20 nt, Artificial Sequence
  HTT spacer sequence ATCN PAM
caauaaacacauaaauaaau

SEQ ID NO: 3493 - RNA, 20 nt, Artificial Sequence
  HTT spacer sequence ATCN PAM
caccauugcacucuggccca

SEQ ID NO: 3494 - RNA, 20 nt, Artificial Sequence
  HTT spacer sequence ATCN PAM
cggcucacugcaaccucugc

SEQ ID NO: 3495 - RNA, 20 nt, Artificial Sequence
  HTT spacer sequence ATCN PAM
caugaacccgggaagcagag

SEQ ID NO: 3496 - RNA, 20 nt, Artificial Sequence
  HTT spacer sequence ATCN PAM
cagcuacucaggaggcugag

SEQ ID NO: 3497 - RNA, 20 nt, Artificial Sequence
  HTT spacer sequence ATCN PAM
cuacuaaaaauacaaaaaau

SEQ ID NO: 3498 - RNA, 20 nt, Artificial Sequence
  HTT spacer sequence ATCN PAM
ugaggucaggaguucgagac

SEQ ID NO: 3499 - RNA, 20 nt, Artificial Sequence
  HTT spacer sequence ATCN PAM
gcgccccucggccucccagu

SEQ ID NO: 3500 - RNA, 20 nt, Artificial Sequence
  HTT spacer sequence ATCN PAM
caacacugggaggccgaggg

SEQ ID NO: 3501 - RNA, 20 nt, Artificial Sequence
  HTT spacer sequence ATCN PAM
ggccaggcgcaguggcucac

SEQ ID NO: 3502 - RNA, 20 nt, Artificial Sequence
  HTT spacer sequence ATCN PAM
augaauguuaacuaacauuc

SEQ ID NO: 3503 - RNA, 20 nt, Artificial Sequence
  HTT spacer sequence ATCN PAM
ugucucuaaaaaaaauuuuu

SEQ ID NO: 3504 - RNA, 20 nt, Artificial Sequence
  HTT spacer sequence ATCN PAM
uacucugucacccaggcagg

SEQ ID NO: 3505 - RNA, 20 nt, Artificial Sequence
  HTT spacer sequence ATCN PAM
ugccugggugacagaguaag

SEQ ID NO: 3506 - RNA, 20 nt, Artificial Sequence
  HTT spacer sequence ATCN PAM
uagcccacugcagccugaac

SEQ ID NO: 3507 - RNA, 20 nt, Artificial Sequence
  HTT spacer sequence ATCN PAM
cuuaagcccaggaguucagg

SEQ ID NO: 3508 - RNA, 20 nt, Artificial Sequence
  HTT spacer sequence ATCN PAM
uucugccucagccuuuugag

SEQ ID NO: 3509 - RNA, 20 nt, Artificial Sequence
  HTT spacer sequence ATCN PAM
auaaaacauuuaaaaauuag

SEQ ID NO: 3510 - RNA, 20 nt, Artificial Sequence
  HTT spacer sequence ATCN PAM
caucuauaaaacauuuaaaa

SEQ ID NO: 3511 - RNA, 20 nt, Artificial Sequence
  HTT spacer sequence ATCN PAM
ugcuguauugcccaggcugg

SEQ ID NO: 3512 - RNA, 20 nt, Artificial Sequence
  HTT spacer sequence ATCN PAM
cuugggcccaggaauucuag

SEQ ID NO: 3513 - RNA, 20 nt, Artificial Sequence
  HTT spacer sequence ATCN PAM
ucccaccuuggccucccaaa

SEQ ID NO: 3514 - RNA, 20 nt, Artificial Sequence
  HTT spacer sequence ATCN PAM
cagcgcuuugggaggccaag

SEQ ID NO: 3515 - RNA, 20 nt, Artificial Sequence
  HTT spacer sequence ATCN PAM
auuggucagaagugguggcu

SEQ ID NO: 3516 - RNA, 20 nt, Artificial Sequence
  HTT spacer sequence ATCN PAM
uucauuauuuuuuaacugaa

SEQ ID NO: 3517 - RNA, 20 nt, Artificial Sequence
  HTT spacer sequence ATCN PAM
uagccagaagcaaaaaucuu

SEQ ID NO: 3518 - RNA, 20 nt, Artificial Sequence
  HTT spacer sequence ATCN PAM
ucuugccuugaaauaguuga

SEQ ID NO: 3519 - RNA, 20 nt, Artificial Sequence
  HTT spacer sequence ATCN PAM
ggcaaagaagaauaguuauc

SEQ ID NO: 3520 - RNA, 20 nt, Artificial Sequence
  HTT spacer sequence ATCN PAM
caggaaaaugaauguggaga

SEQ ID NO: 3521 - RNA, 20 nt, Artificial Sequence
  HTT spacer sequence ATCN PAM
cugcacucccagcucugccu

SEQ ID NO: 3522 - RNA, 20 nt, Artificial Sequence
  HTT spacer sequence ATCN PAM
uuucagguggcucuaccucc

SEQ ID NO: 3523 - RNA, 20 nt, Artificial Sequence
  HTT spacer sequence ATCN PAM
caccaguuggaguggaaaac

SEQ ID NO: 3524 - RNA, 20 nt, Artificial Sequence
  HTT spacer sequence ATCN PAM
cuuuuuaauauuagguaggg

SEQ ID NO: 3525 - RNA, 20 nt, Artificial Sequence
  HTT spacer sequence ATCN PAM
uuuggggaaagaggggagca

SEQ ID NO: 3526 - RNA, 20 nt, Artificial Sequence
  HTT spacer sequence ATCN PAM
aguccuaaucccuggagccu

SEQ ID NO: 3527 - RNA, 20 nt, Artificial Sequence
  HTT spacer sequence ATCN PAM
cuggagccuguaaauauuac

SEQ ID NO: 3528 - RNA, 20 nt, Artificial Sequence
  HTT spacer sequence ATCN PAM
uaaaacaauuuuccauauaa

SEQ ID NO: 3529 - RNA, 20 nt, Artificial Sequence
  HTT spacer sequence ATCN PAM
caucauaaaacaauuuucca

SEQ ID NO: 3530 - RNA, 20 nt, Artificial Sequence
  HTT spacer sequence ATCN PAM
ugaauuuaaucacaucauaa

SEQ ID NO: 3531 - RNA, 20 nt, Artificial Sequence
  HTT spacer sequence ATCN PAM
ugagaugagggggcuaucuu

SEQ ID NO: 3532 - RNA, 20 nt, Artificial Sequence
  HTT spacer sequence ATCN PAM
caagauccugaauuuaauca

SEQ ID NO: 3533 - RNA, 20 nt, Artificial Sequence
  HTT spacer sequence ATCN PAM
uggaugaucuggguaggcac

SEQ ID NO: 3534 - RNA, 20 nt, Artificial Sequence
  HTT spacer sequence ATCN PAM
aagauagcccccucaucuca

SEQ ID NO: 3535 - RNA, 20 nt, Artificial Sequence
  HTT spacer sequence ATCN PAM
uccaagauagcccccucauc

SEQ ID NO: 3536 - RNA, 20 nt, Artificial Sequence
  HTT spacer sequence ATCN PAM
ggguaggcacuaaaugcaau

SEQ ID NO: 3537 - RNA, 20 nt, Artificial Sequence
  HTT spacer sequence ATCN PAM
cauauauauaaaaaggaggc

SEQ ID NO: 3538 - RNA, 20 nt, Artificial Sequence
  HTT spacer sequence ATCN PAM
cccucugccuccuuuuuaua

SEQ ID NO: 3539 - RNA, 20 nt, Artificial Sequence
  HTT spacer sequence ATCN PAM
ucacagggccuucucucugu

SEQ ID NO: 3540 - RNA, 20 nt, Artificial Sequence
  HTT spacer sequence ATCN PAM
uucuguuccaucuucacagg

SEQ ID NO: 3541 - RNA, 20 nt, Artificial Sequence
  HTT spacer sequence ATCN PAM
cuccaauuuucaaggccagc

SEQ ID NO: 3542 - RNA, 20 nt, Artificial Sequence
  HTT spacer sequence ATCN PAM
uaaaaaaaaaaaaaaaaaag

SEQ ID NO: 3543 - RNA, 20 nt, Artificial Sequence
  HTT spacer sequence ATCN PAM
uuuaccccuuuaaguugguu

SEQ ID NO: 3544 - RNA, 20 nt, Artificial Sequence
  HTT spacer sequence ATCN PAM
auaaauacuaaaaaaaaaaa

SEQ ID NO: 3545 - RNA, 20 nt, Artificial Sequence
  HTT spacer sequence ATCN PAM
uucuuggguguuucuuggag

SEQ ID NO: 3546 - RNA, 20 nt, Artificial Sequence
  HTT spacer sequence ATCN PAM
cccucuccaagaaacaccca

SEQ ID NO: 3547 - RNA, 20 nt, Artificial Sequence
  HTT spacer sequence ATCN PAM
gcugaccuucccuccacuau

SEQ ID NO: 3548 - RNA, 20 nt, Artificial Sequence
  HTT spacer sequence ATCN PAM
caaguacccagggacacaaa

SEQ ID NO: 3549 - RNA, 20 nt, Artificial Sequence
  HTT spacer sequence ATCN PAM
ccacucccuaaucucaagua

SEQ ID NO: 3550 - RNA, 20 nt, Artificial Sequence
  HTT spacer sequence ATCN PAM
guuuaacaaagcacaucuug

SEQ ID NO: 3551 - RNA, 20 nt, Artificial Sequence
  HTT spacer sequence ATCN PAM
ugcaccgcccuuaauccauu

SEQ ID NO: 3552 - RNA, 20 nt, Artificial Sequence
  HTT spacer sequence ATCN PAM
auuuaacccuuaguggacac

SEQ ID NO: 3553 - RNA, 20 nt, Artificial Sequence
  HTT spacer sequence ATCN PAM
auaaccuuacccccaacccc

SEQ ID NO: 3554 - RNA, 20 nt, Artificial Sequence
  HTT spacer sequence ATCN PAM
caaggcagaagaauuuuucu

SEQ ID NO: 3555 - RNA, 20 nt, Artificial Sequence
  HTT spacer sequence ATCN PAM
gaucucucuuucuuuuccca

SEQ ID NO: 3556 - RNA, 20 nt, Artificial Sequence
  HTT spacer sequence ATCN PAM
gauuguuacugugucugcgu

SEQ ID NO: 3557 - RNA, 20 nt, Artificial Sequence
  HTT spacer sequence ATCN PAM
cucuuucuuuucccacauuu

SEQ ID NO: 3558 - RNA, 20 nt, Artificial Sequence
  HTT spacer sequence ATCN PAM
uggacuguucucaaugagcu

SEQ ID NO: 3559 - RNA, 20 nt, Artificial Sequence
  HTT spacer sequence ATCN PAM
gggagguguacccaauagcu

SEQ ID NO: 3560 - RNA, 20 nt, Artificial Sequence
  HTT spacer sequence ATCN PAM
gggaagugaggagccccucu

SEQ ID NO: 3561 - RNA, 20 nt, Artificial Sequence
  HTT spacer sequence ATCN PAM
cagacggggcggcggggcag

SEQ ID NO: 3562 - RNA, 20 nt, Artificial Sequence
  HTT spacer sequence ATCN PAM
ucugggaaguggggagcacc

SEQ ID NO: 3563 - RNA, 20 nt, Artificial Sequence
  HTT spacer sequence ATCN PAM
cugcccggccgcccaucguc

SEQ ID NO: 3564 - RNA, 20 nt, Artificial Sequence
  HTT spacer sequence ATCN PAM
aggaagugaggagcaucucu

SEQ ID NO: 3565 - RNA, 20 nt, Artificial Sequence
  HTT spacer sequence ATCN PAM
caucuaggaagugaggagca

SEQ ID NO: 3566 - RNA, 20 nt, Artificial Sequence
  HTT spacer sequence ATCN PAM
cagacgaugggcggccaggc

SEQ ID NO: 3567 - RNA, 20 nt, Artificial Sequence
  HTT spacer sequence ATCN PAM
ucugggaugugaggagcccc

SEQ ID NO: 3568 - RNA, 20 nt, Artificial Sequence
  HTT spacer sequence ATCN PAM
uggcacuuugggaggccaag

SEQ ID NO: 3569 - RNA, 20 nt, Artificial Sequence
  HTT spacer sequence ATCN PAM
cgggucacuacaaccuucac

SEQ ID NO: 3570 - RNA, 20 nt, Artificial Sequence
  HTT spacer sequence ATCN PAM
cgccacugcacuccagccug

SEQ ID NO: 3571 - RNA, 20 nt, Artificial Sequence
  HTT spacer sequence ATCN PAM
cggcaccucgggaggccgag

SEQ ID NO: 3572 - RNA, 20 nt, Artificial Sequence
  HTT spacer sequence ATCN PAM
gccagccucggccucccgag

SEQ ID NO: 3573 - RNA, 20 nt, Artificial Sequence
  HTT spacer sequence ATCN PAM
cuugcagucaggagcuggag

SEQ ID NO: 3574 - RNA, 20 nt, Artificial Sequence
  HTT spacer sequence ATCN PAM
caggcacuuggcaggcugag

SEQ ID NO: 3575 - RNA, 20 nt, Artificial Sequence
  HTT spacer sequence ATCN PAM
gguagggagguugcagugag

SEQ ID NO: 3576 - RNA, 20 nt, Artificial Sequence
  HTT spacer sequence ATCN PAM
cuacucacugcaaccucccu

SEQ ID NO: 3577 - RNA, 20 nt, Artificial Sequence
  HTT spacer sequence ATCN PAM
gagggagacugugcgagggc

SEQ ID NO: 3578 - RNA, 20 nt, Artificial Sequence
  HTT spacer sequence ATCN PAM
cuaaacugaaauuaaggaau

SEQ ID NO: 3579 - RNA, 20 nt, Artificial Sequence
  HTT spacer sequence ATCN PAM
accuuauuacaccauuucac

SEQ ID NO: 3580 - RNA, 20 nt, Artificial Sequence
  HTT spacer sequence ATCN PAM
caaucuaccuuauuacacca

SEQ ID NO: 3581 - RNA, 20 nt, Artificial Sequence
  HTT spacer sequence ATCN PAM
ucaucacaaucuaccuuauu

SEQ ID NO: 3582 - RNA, 20 nt, Artificial Sequence
  HTT spacer sequence ATCN PAM
ccuuuuuugguucauuagcu

SEQ ID NO: 3583 - RNA, 20 nt, Artificial Sequence
  HTT spacer sequence ATCN PAM
caaagaagccagaaauaggg

SEQ ID NO: 3584 - RNA, 20 nt, Artificial Sequence
  HTT spacer sequence ATCN PAM
agcucuuucuuuccuuuauu

SEQ ID NO: 3585 - RNA, 20 nt, Artificial Sequence
  HTT spacer sequence ATCN PAM
accaucaagcucuuucuuuc

SEQ ID NO: 3586 - RNA, 20 nt, Artificial Sequence
  HTT spacer sequence ATCN PAM
cugccuuuuacauguaaugu

SEQ ID NO: 3587 - RNA, 20 nt, Artificial Sequence
  HTT spacer sequence ATCN PAM
gaaaaaucgcugccuuuuac

SEQ ID NO: 3588 - RNA, 20 nt, Artificial Sequence
  HTT spacer sequence ATCN PAM
aauucuuguaagcacaguga

SEQ ID NO: 3589 - RNA, 20 nt, Artificial Sequence
  HTT spacer sequence ATCN PAM
gacaaaguggauuucaaagc

SEQ ID NO: 3590 - RNA, 20 nt, Artificial Sequence
  HTT spacer sequence ATCN PAM
acuuugucugauauuaacag

SEQ ID NO: 3591 - RNA, 20 nt, Artificial Sequence
  HTT spacer sequence ATCN PAM
ugggcaagagccuuugcuuu

SEQ ID NO: 3592 - RNA, 20 nt, Artificial Sequence
  HTT spacer sequence ATCN PAM
cauccugggcaagagccuuu

SEQ ID NO: 3593 - RNA, 20 nt, Artificial Sequence
  HTT spacer sequence ATCN PAM
uuaugaaaugaccaucucau

SEQ ID NO: 3594 - RNA, 20 nt, Artificial Sequence
  HTT spacer sequence ATCN PAM
ccuucaucauuaugaaauga

SEQ ID NO: 3595 - RNA, 20 nt, Artificial Sequence
  HTT spacer sequence ATCN PAM
gccuggcauagcaagcugaa

SEQ ID NO: 3596 - RNA, 20 nt, Artificial Sequence
  HTT spacer sequence ATCN PAM
acagugauagagauuucagu

SEQ ID NO: 3597 - RNA, 20 nt, Artificial Sequence
  HTT spacer sequence ATCN PAM
cuguggauuugucuguuucu

SEQ ID NO: 3598 - RNA, 20 nt, Artificial Sequence
  HTT spacer sequence ATCN PAM
cuaucacuguggauuugucu

SEQ ID NO: 3599 - RNA, 20 nt, Artificial Sequence
  HTT spacer sequence ATCN PAM
uugagagcggcuacugaaau

SEQ ID NO: 3600 - RNA, 20 nt, Artificial Sequence
  HTT spacer sequence ATCN PAM
ggaucuagaacacuugacca

SEQ ID NO: 3601 - RNA, 20 nt, Artificial Sequence
  HTT spacer sequence ATCN PAM
agauauuauggcuacguguu

SEQ ID NO: 3602 - RNA, 20 nt, Artificial Sequence
  HTT spacer sequence ATCN PAM
agaacacuugaccaacacug

SEQ ID NO: 3603 - RNA, 20 nt, Artificial Sequence
  HTT spacer sequence ATCN PAM
uggcaaacauucugugagca

SEQ ID NO: 3604 - RNA, 20 nt, Artificial Sequence
  HTT spacer sequence ATCN PAM
gcucuaucuuggcaaacauu

SEQ ID NO: 3605 - RNA, 20 nt, Artificial Sequence
  HTT spacer sequence ATCN PAM
uuaaguuggaauauauuaua

SEQ ID NO: 3606 - RNA, 20 nt, Artificial Sequence
  HTT spacer sequence ATCN PAM
uccuauaauauauuccaacu

SEQ ID NO: 3607 - RNA, 20 nt, Artificial Sequence
  HTT spacer sequence ATCN PAM
gaggcuuuuccagguuaucu

SEQ ID NO: 3608 - RNA, 20 nt, Artificial Sequence
  HTT spacer sequence ATCN PAM
aaaagacuuucaaauuuccc

SEQ ID NO: 3609 - RNA, 20 nt, Artificial Sequence
  HTT spacer sequence ATCN PAM
gucaauccaaaagacuuuca

SEQ ID NO: 3610 - RNA, 20 nt, Artificial Sequence
  HTT spacer sequence ATCN PAM
auuguuuuuauaucagucaa

SEQ ID NO: 3611 - RNA, 20 nt, Artificial Sequence
  HTT spacer sequence ATCN PAM
uucuuuccuaaaacaggcau

SEQ ID NO: 3612 - RNA, 20 nt, Artificial Sequence
  HTT spacer sequence ATCN PAM
augaccucagcuucuaccuu

SEQ ID NO: 3613 - RNA, 20 nt, Artificial Sequence
  HTT spacer sequence ATCN PAM
agaguuaccagaagggccag

SEQ ID NO: 3614 - RNA, 20 nt, Artificial Sequence
  HTT spacer sequence ATCN PAM
accugccucggccucccaaa

SEQ ID NO: 3615 - RNA, 20 nt, Artificial Sequence
  HTT spacer sequence ATCN PAM
acaaaaaacaaaaaaauuag

SEQ ID NO: 3616 - RNA, 20 nt, Artificial Sequence
  HTT spacer sequence ATCN PAM
ucccaccuuagacuccuggu

SEQ ID NO: 3617 - RNA, 20 nt, Artificial Sequence
  HTT spacer sequence ATCN PAM
caguucacugcagccucaac

SEQ ID NO: 3618 - RNA, 20 nt, Artificial Sequence
  HTT spacer sequence ATCN PAM
ugggcaacagaaugagaccc

SEQ ID NO: 3619 - RNA, 20 nt, Artificial Sequence
  HTT spacer sequence ATCN PAM
uaaagauaggagcagaaguc

SEQ ID NO: 3620 - RNA, 20 nt, Artificial Sequence
  HTT spacer sequence ATCN PAM
uuaugauguccauucuucua

SEQ ID NO: 3621 - RNA, 20 nt, Artificial Sequence
  HTT spacer sequence ATCN PAM
auaaaaccaaaagcugguuc

SEQ ID NO: 3622 - RNA, 20 nt, Artificial Sequence
  HTT spacer sequence ATCN PAM
agaacaucaauaaauuggua

SEQ ID NO: 3623 - RNA, 20 nt, Artificial Sequence
  HTT spacer sequence ATCN PAM
auaaauugguaaagcugaua

SEQ ID NO: 3624 - RNA, 20 nt, Artificial Sequence
  HTT spacer sequence ATCN PAM
gcuuuaccaauuuauugaug

SEQ ID NO: 3625 - RNA, 20 nt, Artificial Sequence
  HTT spacer sequence ATCN PAM
ggaaugagggagaugacagu

SEQ ID NO: 3626 - RNA, 20 nt, Artificial Sequence
  HTT spacer sequence ATCN PAM
cccucauuccugauauugcu

SEQ ID NO: 3627 - RNA, 20 nt, Artificial Sequence
  HTT spacer sequence ATCN PAM
auacuacugucaucucccuc

SEQ ID NO: 3628 - RNA, 20 nt, Artificial Sequence
  HTT spacer sequence ATCN PAM
auauaaucuauacuacuguc

SEQ ID NO: 3629 - RNA, 20 nt, Artificial Sequence
  HTT spacer sequence ATCN PAM
cagcaccuugggaggccgag

SEQ ID NO: 3630 - RNA, 20 nt, Artificial Sequence
  HTT spacer sequence ATCN PAM
guccaccucggccucccaag

SEQ ID NO: 3631 - RNA, 20 nt, Artificial Sequence
  HTT spacer sequence ATCN PAM
ccugaggucaggaguuuggg

SEQ ID NO: 3632 - RNA, 20 nt, Artificial Sequence
  HTT spacer sequence ATCN PAM
cagcuacuugggaggcugag

SEQ ID NO: 3633 - RNA, 20 nt, Artificial Sequence
  HTT spacer sequence ATCN PAM
cagcucacugcaaccuccgc

SEQ ID NO: 3634 - RNA, 20 nt, Artificial Sequence
  HTT spacer sequence ATCN PAM
caaaacaaauaaauaaauaa

SEQ ID NO: 3635 - RNA, 20 nt, Artificial Sequence
  HTT spacer sequence ATCN PAM
auaaguugucaaauuuauug

SEQ ID NO: 3636 - RNA, 20 nt, Artificial Sequence
  HTT spacer sequence ATCN PAM
auuucaucuauaaguuguca

SEQ ID NO: 3637 - RNA, 20 nt, Artificial Sequence
  HTT spacer sequence ATCN PAM
ucuugagagagcuuuaauag

SEQ ID NO: 3638 - RNA, 20 nt, Artificial Sequence
  HTT spacer sequence ATCN PAM
auaucuucuugagagagcuu

SEQ ID NO: 3639 - RNA, 20 nt, Artificial Sequence
  HTT spacer sequence ATCN PAM
gcuuaucuauaucuucuuga

SEQ ID NO: 3640 - RNA, 20 nt, Artificial Sequence
  HTT spacer sequence ATCN PAM
auuuuauugaauuuaaaugu

SEQ ID NO: 3641 - RNA, 20 nt, Artificial Sequence
  HTT spacer sequence ATCN PAM
auauuuaguuacuggaaaac

SEQ ID NO: 3642 - RNA, 20 nt, Artificial Sequence
  HTT spacer sequence ATCN PAM
cagguaaagguuuucugaug

SEQ ID NO: 3643 - RNA, 20 nt, Artificial Sequence
  HTT spacer sequence ATCN PAM
gaaaaccuuuaccugugauu

SEQ ID NO: 3644 - RNA, 20 nt, Artificial Sequence
  HTT spacer sequence ATCN PAM
caauucagacacuaaauuuu

SEQ ID NO: 3645 - RNA, 20 nt, Artificial Sequence
  HTT spacer sequence ATCN PAM
uaauuauuucuucacauuaa

SEQ ID NO: 3646 - RNA, 20 nt, Artificial Sequence
  HTT spacer sequence ATCN PAM
ugccuguuuucuuuuuacuu

SEQ ID NO: 3647 - RNA, 20 nt, Artificial Sequence
  HTT spacer sequence ATCN PAM
aaaguaaaaagaaaacaggc

SEQ ID NO: 3648 - RNA, 20 nt, Artificial Sequence
  HTT spacer sequence ATCN PAM
uucaaacacugugcuccaaa

SEQ ID NO: 3649 - RNA, 20 nt, Artificial Sequence
  HTT spacer sequence ATCN PAM
aucauuucaaagaccuuucc

SEQ ID NO: 3650 - RNA, 20 nt, Artificial Sequence
  HTT spacer sequence ATCN PAM
uuucaaagaccuuuccucag

SEQ ID NO: 3651 - RNA, 20 nt, Artificial Sequence
  HTT spacer sequence ATCN PAM
auguggaauacagacagcca

SEQ ID NO: 3652 - RNA, 20 nt, Artificial Sequence
  HTT spacer sequence ATCN PAM
acaaacuuauaaaagcauaa

SEQ ID NO: 3653 - RNA, 20 nt, Artificial Sequence
  HTT spacer sequence ATCN PAM
uuacugauguggacuuuugg

SEQ ID NO: 3654 - RNA, 20 nt, Artificial Sequence
  HTT spacer sequence ATCN PAM
guaaugaucaacaaacuuau

SEQ ID NO: 3655 - RNA, 20 nt, Artificial Sequence
  HTT spacer sequence ATCN PAM
uccaaccauuguuugcaauu

SEQ ID NO: 3656 - RNA, 20 nt, Artificial Sequence
  HTT spacer sequence ATCN PAM
cuagguaaaaauugcaaaca

SEQ ID NO: 3657 - RNA, 20 nt, Artificial Sequence
  HTT spacer sequence ATCN PAM
aacuacucugaaaccaaaug

SEQ ID NO: 3658 - RNA, 20 nt, Artificial Sequence
  HTT spacer sequence ATCN PAM
caaucuaacuacucugaaac

SEQ ID NO: 3659 - RNA, 20 nt, Artificial Sequence
  HTT spacer sequence ATCN PAM
ugaaagagcaaccucauuuu

SEQ ID NO: 3660 - RNA, 20 nt, Artificial Sequence
  HTT spacer sequence ATCN PAM
aaaugagguugcucuuucau

SEQ ID NO: 3661 - RNA, 20 nt, Artificial Sequence
  HTT spacer sequence ATCN PAM
cccguauuacugggauuugc

SEQ ID NO: 3662 - RNA, 20 nt, Artificial Sequence
  HTT spacer sequence ATCN PAM
caguaauacgggggaugugc

SEQ ID NO: 3663 - RNA, 20 nt, Artificial Sequence
  HTT spacer sequence ATCN PAM
caagaauagcaaaucccagu

SEQ ID NO: 3664 - RNA, 20 nt, Artificial Sequence
  HTT spacer sequence ATCN PAM
uuguguuacugguuuggaug

SEQ ID NO: 3665 - RNA, 20 nt, Artificial Sequence
  HTT spacer sequence ATCN PAM
aaaccaguaacacaaggaug

SEQ ID NO: 3666 - RNA, 20 nt, Artificial Sequence
  HTT spacer sequence ATCN PAM
guuuagcucucucuuggcuu

SEQ ID NO: 3667 - RNA, 20 nt, Artificial Sequence
  HTT spacer sequence ATCN PAM
ugcuccaacugucuaaacaa

SEQ ID NO: 3668 - RNA, 20 nt, Artificial Sequence
  HTT spacer sequence ATCN PAM
gaccaugaucaucuggcauc

SEQ ID NO: 3669 - RNA, 20 nt, Artificial Sequence
  HTT spacer sequence ATCN PAM
uggucagauuguguuuuugu

SEQ ID NO: 3670 - RNA, 20 nt, Artificial Sequence
  HTT spacer sequence ATCN PAM
ucuggcaucuuagggugaaa

SEQ ID NO: 3671 - RNA, 20 nt, Artificial Sequence
  HTT spacer sequence ATCN PAM
ggcaucuuagggugaaauau

SEQ ID NO: 3672 - RNA, 20 nt, Artificial Sequence
  HTT spacer sequence ATCN PAM
uagggugaaauaugguuaua

SEQ ID NO: 3673 - RNA, 20 nt, Artificial Sequence
  HTT spacer sequence ATCN PAM
ugcuuucgguaugggccaaa

SEQ ID NO: 3674 - RNA, 20 nt, Artificial Sequence
  HTT spacer sequence ATCN PAM
cuccugccccuuuuuaaucu

SEQ ID NO: 3675 - RNA, 20 nt, Artificial Sequence
  HTT spacer sequence ATCN PAM
guucagcagucuaucucucc

SEQ ID NO: 3676 - RNA, 20 nt, Artificial Sequence
  HTT spacer sequence ATCN PAM
uagacaacccacugcuuucu

SEQ ID NO: 3677 - RNA, 20 nt, Artificial Sequence
  HTT spacer sequence ATCN PAM
gaaguuuuuaaacgaaaauu

SEQ ID NO: 3678 - RNA, 20 nt, Artificial Sequence
  HTT spacer sequence ATCN PAM
cuucuuuuuuaaaaaauaaa

SEQ ID NO: 3679 - RNA, 20 nt, Artificial Sequence
  HTT spacer sequence ATCN PAM
aaaacuauuucaaaauaaag

SEQ ID NO: 3680 - RNA, 20 nt, Artificial Sequence
  HTT spacer sequence ATCN PAM
aauuuuuuucuauaaaucua

SEQ ID NO: 3681 - RNA, 20 nt, Artificial Sequence
  HTT spacer sequence ATCN PAM
aguuaccccaguuauuauca

SEQ ID NO: 3682 - RNA, 20 nt, Artificial Sequence
  HTT spacer sequence ATCN PAM
uccuaauuuagugugagaca

SEQ ID NO: 3683 - RNA, 20 nt, Artificial Sequence
  HTT spacer sequence ATCN PAM
uaauuuagugugagacauuu

SEQ ID NO: 3684 - RNA, 20 nt, Artificial Sequence
  HTT spacer sequence ATCN PAM
auauugauaugcuauuaacu

SEQ ID NO: 3685 - RNA, 20 nt, Artificial Sequence
  HTT spacer sequence ATCN PAM
auauugauucauuaaacaug

SEQ ID NO: 3686 - RNA, 20 nt, Artificial Sequence
  HTT spacer sequence ATCN PAM
gaauaaagucuggacuuaag

SEQ ID NO: 3687 - RNA, 20 nt, Artificial Sequence
  HTT spacer sequence ATCN PAM
gguguccugcauggaauucu

SEQ ID NO: 3688 - RNA, 20 nt, Artificial Sequence
  HTT spacer sequence ATCN PAM
cuauggaacuuuuucugcug

SEQ ID NO: 3689 - RNA, 20 nt, Artificial Sequence
  HTT spacer sequence ATCN PAM
cugcacagcagaaaaaguuc

SEQ ID NO: 3690 - RNA, 20 nt, Artificial Sequence
  HTT spacer sequence ATCN PAM
gacucugcgucaucacugca

SEQ ID NO: 3691 - RNA, 20 nt, Artificial Sequence
  HTT spacer sequence ATCN PAM
ugacaucugacucugcguca

SEQ ID NO: 3692 - RNA, 20 nt, Artificial Sequence
  HTT spacer sequence ATCN PAM
aaguaagaaccguguggaug

SEQ ID NO: 3693 - RNA, 20 nt, Artificial Sequence
  HTT spacer sequence ATCN PAM
acacgguucuuacuuugaua

SEQ ID NO: 3694 - RNA, 20 nt, Artificial Sequence
  HTT spacer sequence ATCN PAM
uccacacgguucuuacuuug

SEQ ID NO: 3695 - RNA, 20 nt, Artificial Sequence
  HTT spacer sequence ATCN PAM
uuguuguaggcugagagaag

SEQ ID NO: 3696 - RNA, 20 nt, Artificial Sequence
  HTT spacer sequence ATCN PAM
cuucuucucucagccuacaa

SEQ ID NO: 3697 - RNA, 20 nt, Artificial Sequence
  HTT spacer sequence ATCN PAM
uugaguguucuucuguuuug

SEQ ID NO: 3698 - RNA, 20 nt, Artificial Sequence
  HTT spacer sequence ATCN PAM
ucagggacucaaaacagaag

SEQ ID NO: 3699 - RNA, 20 nt, Artificial Sequence
  HTT spacer sequence ATCN PAM
gaaaggaaaaaagugcagac

SEQ ID NO: 3700 - RNA, 20 nt, Artificial Sequence
  HTT spacer sequence ATCN PAM
ccaaaccauacaagagcacc

SEQ ID NO: 3701 - RNA, 20 nt, Artificial Sequence
  HTT spacer sequence ATCN PAM
ccaaaccauacaauagagca

SEQ ID NO: 3702 - RNA, 20 nt, Artificial Sequence
  HTT spacer sequence ATCN PAM
gccugcauugcuugccacac

SEQ ID NO: 3703 - RNA, 20 nt, Artificial Sequence
  HTT spacer sequence ATCN PAM
guucccuucauugaccuagg

SEQ ID NO: 3704 - RNA, 20 nt, Artificial Sequence
  HTT spacer sequence ATCN PAM
aguggcuaccaucgguuccc

SEQ ID NO: 3705 - RNA, 20 nt, Artificial Sequence
  HTT spacer sequence ATCN PAM
cauuuuaugguuaagaaaac

SEQ ID NO: 3706 - RNA, 20 nt, Artificial Sequence
  HTT spacer sequence ATCN PAM
auguuuuuguggcaugugua

SEQ ID NO: 3707 - RNA, 20 nt, Artificial Sequence
  HTT spacer sequence ATCN PAM
ucacacauacacagacacac

SEQ ID NO: 3708 - RNA, 20 nt, Artificial Sequence
  HTT spacer sequence ATCN PAM
aguaguggcaauuaguccuc

SEQ ID NO: 3709 - RNA, 20 nt, Artificial Sequence
  HTT spacer sequence ATCN PAM
ucaaagugguaagaaguguu

SEQ ID NO: 3710 - RNA, 20 nt, Artificial Sequence
  HTT spacer sequence ATCN PAM
uuacacucuuacccagcaag

SEQ ID NO: 3711 - RNA, 20 nt, Artificial Sequence
  HTT spacer sequence ATCN PAM
ugcuggguaagaguguaagg

SEQ ID NO: 3712 - RNA, 20 nt, Artificial Sequence
  HTT spacer sequence ATCN PAM
aucuugcuggguaagagugu

SEQ ID NO: 3713 - RNA, 20 nt, Artificial Sequence
  HTT spacer sequence ATCN PAM
caugguuuccaugguauccu

SEQ ID NO: 3714 - RNA, 20 nt, Artificial Sequence
  HTT spacer sequence ATCN PAM
uuuugcccagggaaucuuug

SEQ ID NO: 3715 - RNA, 20 nt, Artificial Sequence
  HTT spacer sequence ATCN PAM
uugcuuuguggcuagcacuu

SEQ ID NO: 3716 - RNA, 20 nt, Artificial Sequence
  HTT spacer sequence ATCN PAM
cgcuuucuguggucaggacg

SEQ ID NO: 3717 - RNA, 20 nt, Artificial Sequence
  HTT spacer sequence ATCN PAM
cauggcuccagagaagccag

SEQ ID NO: 3718 - RNA, 20 nt, Artificial Sequence
  HTT spacer sequence ATCN PAM
cacuuaugcagugacguaua

SEQ ID NO: 3719 - RNA, 20 nt, Artificial Sequence
  HTT spacer sequence ATCN PAM
guuucaccuuguucuccgug

SEQ ID NO: 3720 - RNA, 20 nt, Artificial Sequence
  HTT spacer sequence ATCN PAM
gcaggcacggagaacaaggu

SEQ ID NO: 3721 - RNA, 20 nt, Artificial Sequence
  HTT spacer sequence ATCN PAM
uuggcaccacuugcauggug

SEQ ID NO: 3722 - RNA, 20 nt, Artificial Sequence
  HTT spacer sequence ATCN PAM
uugcuugcuucuuuuauucu

SEQ ID NO: 3723 - RNA, 20 nt, Artificial Sequence
  HTT spacer sequence ATCN PAM
gccacugcacuccagccugg

SEQ ID NO: 3724 - RNA, 20 nt, Artificial Sequence
  HTT spacer sequence ATCN PAM
cggcucauugcagccuugag

SEQ ID NO: 3725 - RNA, 20 nt, Artificial Sequence
  HTT spacer sequence ATCN PAM
uccuggcuuggccccuugag

SEQ ID NO: 3726 - RNA, 20 nt, Artificial Sequence
  HTT spacer sequence ATCN PAM
cuacaaauaauuuuaaaaau

SEQ ID NO: 3727 - RNA, 20 nt, Artificial Sequence
  HTT spacer sequence ATCN PAM
caucucuacaaauaauuuua

SEQ ID NO: 3728 - RNA, 20 nt, Artificial Sequence
  HTT spacer sequence ATCN PAM
cgccagguugcccaggcugg

SEQ ID NO: 3729 - RNA, 20 nt, Artificial Sequence
  HTT spacer sequence ATCN PAM
cuugagcccaggcguucaag

SEQ ID NO: 3730 - RNA, 20 nt, Artificial Sequence
  HTT spacer sequence ATCN PAM
ucccuccuugguuucccaaa

SEQ ID NO: 3731 - RNA, 20 nt, Artificial Sequence
  HTT spacer sequence ATCN PAM
cagcacuuugggaaaccaag

SEQ ID NO: 3732 - RNA, 20 nt, Artificial Sequence
  HTT spacer sequence ATCN PAM
caggugugagccacugugcc

SEQ ID NO: 3733 - RNA, 20 nt, Artificial Sequence
  HTT spacer sequence ATCN PAM
agggccaggcacaguggcuc

SEQ ID NO: 3734 - RNA, 20 nt, Artificial Sequence
  HTT spacer sequence ATCN PAM
agaacugaaacaucaagggc

SEQ ID NO: 3735 - RNA, 20 nt, Artificial Sequence
  HTT spacer sequence ATCN PAM
aauaucaagaacugaaacau

SEQ ID NO: 3736 - RNA, 20 nt, Artificial Sequence
  HTT spacer sequence ATCN PAM
ucagagucagaaaaucuaaa

SEQ ID NO: 3737 - RNA, 20 nt, Artificial Sequence
  HTT spacer sequence ATCN PAM
aaaaagagggcuaucccagg

SEQ ID NO: 3738 - RNA, 20 nt, Artificial Sequence
  HTT spacer sequence ATCN PAM
cagguugccuugguucaugg

SEQ ID NO: 3739 - RNA, 20 nt, Artificial Sequence
  HTT spacer sequence ATCN PAM
gagagcagccaaacccugcu

SEQ ID NO: 3740 - RNA, 20 nt, Artificial Sequence
  HTT spacer sequence ATCN PAM
gaggaagcaggaaucugaga

SEQ ID NO: 3741 - RNA, 20 nt, Artificial Sequence
  HTT spacer sequence ATCN PAM
cgcugccagcccgcugggcc

SEQ ID NO: 3742 - RNA, 20 nt, Artificial Sequence
  HTT spacer sequence ATCN PAM
ggaucuggcuagguuugcuc

SEQ ID NO: 3743 - RNA, 20 nt, Artificial Sequence
  HTT spacer sequence ATCN PAM
ugaucccgcugccagcccgc

SEQ ID NO: 3744 - RNA, 20 nt, Artificial Sequence
  HTT spacer sequence ATCN PAM
ggcuagguuugcucucacug

SEQ ID NO: 3745 - RNA, 20 nt, Artificial Sequence
  HTT spacer sequence ATCN PAM
gacauagccuggcagcaugc

SEQ ID NO: 3746 - RNA, 20 nt, Artificial Sequence
  HTT spacer sequence ATCN PAM
ccaccaccgucaagaggcug

SEQ ID NO: 3747 - RNA, 20 nt, Artificial Sequence
  HTT spacer sequence ATCN PAM
cuucagccucuugacggugg

SEQ ID NO: 3748 - RNA, 20 nt, Artificial Sequence
  HTT spacer sequence ATCN PAM
acucuuucaccuacuggcug

SEQ ID NO: 3749 - RNA, 20 nt, Artificial Sequence
  HTT spacer sequence ATCN PAM
ucaccgccucuugucucaag

SEQ ID NO: 3750 - RNA, 20 nt, Artificial Sequence
  HTT spacer sequence ATCN PAM
ccgccucuugucucaagggg

SEQ ID NO: 3751 - RNA, 20 nt, Artificial Sequence
  HTT spacer sequence ATCN PAM
uaugcugccagagaguggga

SEQ ID NO: 3752 - RNA, 20 nt, Artificial Sequence
  HTT spacer sequence ATCN PAM
aaagucuucaagagccccua

SEQ ID NO: 3753 - RNA, 20 nt, Artificial Sequence
  HTT spacer sequence ATCN PAM
uuuaggaagagugacccggu

SEQ ID NO: 3754 - RNA, 20 nt, Artificial Sequence
  HTT spacer sequence ATCN PAM
uggcucgaggcccugcacuc

SEQ ID NO: 3755 - RNA, 20 nt, Artificial Sequence
  HTT spacer sequence ATCN PAM
cccagcgacuggcguagauu

SEQ ID NO: 3756 - RNA, 20 nt, Artificial Sequence
  HTT spacer sequence ATCN PAM
acgccagucgcugggugaug

SEQ ID NO: 3757 - RNA, 20 nt, Artificial Sequence
  HTT spacer sequence ATCN PAM
agguuugauaaggcuucuag

SEQ ID NO: 3758 - RNA, 20 nt, Artificial Sequence
  HTT spacer sequence ATCN PAM
aaccuugauuuagcuuuaca

SEQ ID NO: 3759 - RNA, 20 nt, Artificial Sequence
  HTT spacer sequence ATCN PAM
uguuguugcaguuuguacug

SEQ ID NO: 3760 - RNA, 20 nt, Artificial Sequence
  HTT spacer sequence ATCN PAM
uaauccuguuguugcaguuu

SEQ ID NO: 3761 - RNA, 20 nt, Artificial Sequence
  HTT spacer sequence ATCN PAM
cagaaacguuuaaauccuaa

SEQ ID NO: 3762 - RNA, 20 nt, Artificial Sequence
  HTT spacer sequence ATCN PAM
cauucugggaaauucugagg

SEQ ID NO: 3763 - RNA, 20 nt, Artificial Sequence
  HTT spacer sequence ATCN PAM
gguuuugauuuucaagcuug

SEQ ID NO: 3764 - RNA, 20 nt, Artificial Sequence
  HTT spacer sequence ATCN PAM
aaaccagaucacauucuggg

SEQ ID NO: 3765 - RNA, 20 nt, Artificial Sequence
  HTT spacer sequence ATCN PAM
caguccacuuacaucaacug

SEQ ID NO: 3766 - RNA, 20 nt, Artificial Sequence
  HTT spacer sequence ATCN PAM
acugcccaugccacgguuaa

SEQ ID NO: 3767 - RNA, 20 nt, Artificial Sequence
  HTT spacer sequence ATCN PAM
cuuuaaccguggcaugggca

SEQ ID NO: 3768 - RNA, 20 nt, Artificial Sequence
  HTT spacer sequence ATCN PAM
ucgacugauguuuggcacag

SEQ ID NO: 3769 - RNA, 20 nt, Artificial Sequence
  HTT spacer sequence ATCN PAM
acugauguuuggcacagcuu

SEQ ID NO: 3770 - RNA, 20 nt, Artificial Sequence
  HTT spacer sequence ATCN PAM
gucgaugaucucuuuaaccg

SEQ ID NO: 3771 - RNA, 20 nt, Artificial Sequence
  HTT spacer sequence ATCN PAM
ccuagcuugagaagcccuuc

SEQ ID NO: 3772 - RNA, 20 nt, Artificial Sequence
  HTT spacer sequence ATCN PAM
uuacuagcuugaaguugacc

SEQ ID NO: 3773 - RNA, 20 nt, Artificial Sequence
  HTT spacer sequence ATCN PAM
ggacguacuuucugguuuag

SEQ ID NO: 3774 - RNA, 20 nt, Artificial Sequence
  HTT spacer sequence ATCN PAM
cucaacccuccuugcucacu

SEQ ID NO: 3775 - RNA, 20 nt, Artificial Sequence
  HTT spacer sequence ATCN PAM
uuuucugcagguguggcccc

SEQ ID NO: 3776 - RNA, 20 nt, Artificial Sequence
  HTT spacer sequence ATCN PAM
gcagggucccgagcacugug

SEQ ID NO: 3777 - RNA, 20 nt, Artificial Sequence
  HTT spacer sequence ATCN PAM
uccaacagaauguucugcua

SEQ ID NO: 3778 - RNA, 20 nt, Artificial Sequence
  HTT spacer sequence ATCN PAM
aacagaauguucugcuagug

SEQ ID NO: 3779 - RNA, 20 nt, Artificial Sequence
  HTT spacer sequence ATCN PAM
ucacuagcagaacauucugu

SEQ ID NO: 3780 - RNA, 20 nt, Artificial Sequence
  HTT spacer sequence ATCN PAM
uuaaucuucacuagcagaac

SEQ ID NO: 3781 - RNA, 20 nt, Artificial Sequence
  HTT spacer sequence ATCN PAM
uaaagccccuggaguaaauc

SEQ ID NO: 3782 - RNA, 20 nt, Artificial Sequence
  HTT spacer sequence ATCN PAM
uauauauauaauuuuuuuuu

SEQ ID NO: 3783 - RNA, 20 nt, Artificial Sequence
  HTT spacer sequence ATCN PAM
caaaaaaaaaaaaaaaaaaa

SEQ ID NO: 3784 - RNA, 20 nt, Artificial Sequence
  HTT spacer sequence ATCN PAM
cgccauugcacuccagccug

SEQ ID NO: 3785 - RNA, 20 nt, Artificial Sequence
  HTT spacer sequence ATCN PAM
uggcucacugcaaccuccgc

SEQ ID NO: 3786 - RNA, 20 nt, Artificial Sequence
  HTT spacer sequence ATCN PAM
cagcuacucgagaggcugag

SEQ ID NO: 3787 - RNA, 20 nt, Artificial Sequence
  HTT spacer sequence ATCN PAM
ccugaggucaggaguucaag

SEQ ID NO: 3788 - RNA, 20 nt, Artificial Sequence
  HTT spacer sequence ATCN PAM
gcccgccuuggccucccaaa

SEQ ID NO: 3789 - RNA, 20 nt, Artificial Sequence
  HTT spacer sequence ATCN PAM
cagcacuuugggaggccaag

SEQ ID NO: 3790 - RNA, 20 nt, Artificial Sequence
  HTT spacer sequence ATCN PAM
uggccaggugggguggcuca

SEQ ID NO: 3791 - RNA, 20 nt, Artificial Sequence
  HTT spacer sequence ATCN PAM
accauuuuaauuuugauguu

SEQ ID NO: 3792 - RNA, 20 nt, Artificial Sequence
  HTT spacer sequence ATCN PAM
aaauuaaaaugguagauggu

SEQ ID NO: 3793 - RNA, 20 nt, Artificial Sequence
  HTT spacer sequence ATCN PAM
aauacuacauaacaucaaaa

SEQ ID NO: 3794 - RNA, 20 nt, Artificial Sequence
  HTT spacer sequence ATCN PAM
ucaaauacuacauaacauca

SEQ ID NO: 3795 - RNA, 20 nt, Artificial Sequence
  HTT spacer sequence ATCN PAM
aguuuauucaguaacuuccu

SEQ ID NO: 3796 - RNA, 20 nt, Artificial Sequence
  HTT spacer sequence ATCN PAM
uaguuuccuuuuagcucguu

SEQ ID NO: 3797 - RNA, 20 nt, Artificial Sequence
  HTT spacer sequence ATCN PAM
cuaguucuaaaacgagcuaa

SEQ ID NO: 3798 - RNA, 20 nt, Artificial Sequence
  HTT spacer sequence ATCN PAM
caucacuaguucuaaaacga

SEQ ID NO: 3799 - RNA, 20 nt, Artificial Sequence
  HTT spacer sequence ATCN PAM
cuugugauuuguuguaggcu

SEQ ID NO: 3800 - RNA, 20 nt, Artificial Sequence
  HTT spacer sequence ATCN PAM
caagagauuuauggaagaca

SEQ ID NO: 3801 - RNA, 20 nt, Artificial Sequence
  HTT spacer sequence ATCN PAM
aagccuacaacaaaucacaa

SEQ ID NO: 3802 - RNA, 20 nt, Artificial Sequence
  HTT spacer sequence ATCN PAM
aucaaagccuacaacaaauc

SEQ ID NO: 3803 - RNA, 20 nt, Artificial Sequence
  HTT spacer sequence ATCN PAM
uccaagguuacagcucgagc

SEQ ID NO: 3804 - RNA, 20 nt, Artificial Sequence
  HTT spacer sequence ATCN PAM
cauguaccccauaaauauau

SEQ ID NO: 3805 - RNA, 20 nt, Artificial Sequence
  HTT spacer sequence ATCN PAM
aaauaucucauguaccccau

SEQ ID NO: 3806 - RNA, 20 nt, Artificial Sequence
  HTT spacer sequence ATCN PAM
caccauggaaaguuggauau

SEQ ID NO: 3807 - RNA, 20 nt, Artificial Sequence
  HTT spacer sequence ATCN PAM
aacuuuccauggugugauua

SEQ ID NO: 3808 - RNA, 20 nt, Artificial Sequence
  HTT spacer sequence ATCN PAM
augcccucaagcauuuaucc

SEQ ID NO: 3809 - RNA, 20 nt, Artificial Sequence
  HTT spacer sequence ATCN PAM
uuuguguuacaaacaaucca

SEQ ID NO: 3810 - RNA, 20 nt, Artificial Sequence
  HTT spacer sequence ATCN PAM
aguuacaugcuuuacuuauu

SEQ ID NO: 3811 - RNA, 20 nt, Artificial Sequence
  HTT spacer sequence ATCN PAM
ccugaggucaggaguuugag

SEQ ID NO: 3812 - RNA, 20 nt, Artificial Sequence
  HTT spacer sequence ATCN PAM
gcccgccucggccucccaaa

SEQ ID NO: 3813 - RNA, 20 nt, Artificial Sequence
  HTT spacer sequence ATCN PAM
caacacuuugggaggccgag

SEQ ID NO: 3814 - RNA, 20 nt, Artificial Sequence
  HTT spacer sequence ATCN PAM
ggcccggcacaguggcucac

SEQ ID NO: 3815 - RNA, 20 nt, Artificial Sequence
  HTT spacer sequence ATCN PAM
cagcauuuugggaggcugag

SEQ ID NO: 3816 - RNA, 20 nt, Artificial Sequence
  HTT spacer sequence ATCN PAM
ccugccucagccucccaaaa

SEQ ID NO: 3817 - RNA, 20 nt, Artificial Sequence
  HTT spacer sequence ATCN PAM
ccugagaucaggaguucgag

SEQ ID NO: 3818 - RNA, 20 nt, Artificial Sequence
  HTT spacer sequence ATCN PAM
caggugaucaccugccucag

SEQ ID NO: 3819 - RNA, 20 nt, Artificial Sequence
  HTT spacer sequence ATCN PAM
ggaguucgagaccagccugg

SEQ ID NO: 3820 - RNA, 20 nt, Artificial Sequence
  HTT spacer sequence ATCN PAM
uggcuacucgggaggcugag

SEQ ID NO: 3821 - RNA, 20 nt, Artificial Sequence
  HTT spacer sequence ATCN PAM
cuugaaccuggggguggagg

SEQ ID NO: 3822 - RNA, 20 nt, Artificial Sequence
  HTT spacer sequence ATCN PAM
cggcucacugcaaccuccac

SEQ ID NO: 3823 - RNA, 20 nt, Artificial Sequence
  HTT spacer sequence ATCN PAM
cgccacugcauuccagccug

SEQ ID NO: 3824 - RNA, 20 nt, Artificial Sequence
  HTT spacer sequence ATCN PAM
accugccucagguucccaaa

SEQ ID NO: 3825 - RNA, 20 nt, Artificial Sequence
  HTT spacer sequence ATCN PAM
cccaaguagcugagacuaua

SEQ ID NO: 3826 - RNA, 20 nt, Artificial Sequence
  HTT spacer sequence ATCN PAM
ucccaccucaaucucccaag

SEQ ID NO: 3827 - RNA, 20 nt, Artificial Sequence
  HTT spacer sequence ATCN PAM
auagguagcugagauugugc

SEQ ID NO: 3828 - RNA, 20 nt, Artificial Sequence
  HTT spacer sequence ATCN PAM
cagcuaccuauagauucaac

SEQ ID NO: 3829 - RNA, 20 nt, Artificial Sequence
  HTT spacer sequence ATCN PAM
acuauauauuauugucuaug

SEQ ID NO: 3830 - RNA, 20 nt, Artificial Sequence
  HTT spacer sequence ATCN PAM
uagacaauaauauauagucg

SEQ ID NO: 3831 - RNA, 20 nt, Artificial Sequence
  HTT spacer sequence ATCN PAM
cucugcugugcugucgaaua

SEQ ID NO: 3832 - RNA, 20 nt, Artificial Sequence
  HTT spacer sequence ATCN PAM
cugagcaaacuucacucugu

SEQ ID NO: 3833 - RNA, 20 nt, Artificial Sequence
  HTT spacer sequence ATCN PAM
cacaccugcugcuuaacaga

SEQ ID NO: 3834 - RNA, 20 nt, Artificial Sequence
  HTT spacer sequence ATCN PAM
uuauucaguaauucacaaug

SEQ ID NO: 3835 - RNA, 20 nt, Artificial Sequence
  HTT spacer sequence ATCN PAM
ucuaccaaacagcauuuccu

SEQ ID NO: 3836 - RNA, 20 nt, Artificial Sequence
  HTT spacer sequence ATCN PAM
aauaaagaguaaccuuuuga

SEQ ID NO: 3837 - RNA, 20 nt, Artificial Sequence
  HTT spacer sequence ATCN PAM
caucuaauaaagaguaaccu

SEQ ID NO: 3838 - RNA, 20 nt, Artificial Sequence
  HTT spacer sequence ATCN PAM
uuauaauugaagcccacuag

SEQ ID NO: 3839 - RNA, 20 nt, Artificial Sequence
  HTT spacer sequence ATCN PAM
gguaacuacuuuaaggucua

SEQ ID NO: 3840 - RNA, 20 nt, Artificial Sequence
  HTT spacer sequence ATCN PAM
agaguguacaacuuaccugc

SEQ ID NO: 3841 - RNA, 20 nt, Artificial Sequence
  HTT spacer sequence ATCN PAM
guagcagcuggcccccgaca

SEQ ID NO: 3842 - RNA, 20 nt, Artificial Sequence
  HTT spacer sequence ATCN PAM
uuuaugucucagcucagaug

SEQ ID NO: 3843 - RNA, 20 nt, Artificial Sequence
  HTT spacer sequence ATCN PAM
gagcugagacauaaaggauc

SEQ ID NO: 3844 - RNA, 20 nt, Artificial Sequence
  HTT spacer sequence ATCN PAM
augucagaaauugucacgua

SEQ ID NO: 3845 - RNA, 20 nt, Artificial Sequence
  HTT spacer sequence ATCN PAM
gugugcuuguuuauuuucua

SEQ ID NO: 3846 - RNA, 20 nt, Artificial Sequence
  HTT spacer sequence ATCN PAM
cacccuuccgcaagagacuu

SEQ ID NO: 3847 - RNA, 20 nt, Artificial Sequence
  HTT spacer sequence ATCN PAM
cauaagucucuugcggaagg

SEQ ID NO: 3848 - RNA, 20 nt, Artificial Sequence
  HTT spacer sequence ATCN PAM
cugcugggcugcaacagagc

SEQ ID NO: 3849 - RNA, 20 nt, Artificial Sequence
  HTT spacer sequence ATCN PAM
uuuaagcaaguacuaugugc

SEQ ID NO: 3850 - RNA, 20 nt, Artificial Sequence
  HTT spacer sequence ATCN PAM
auuugucuguuacaugaguu

SEQ ID NO: 3851 - RNA, 20 nt, Artificial Sequence
  HTT spacer sequence ATCN PAM
uaacggauugagaaacaaaa

SEQ ID NO: 3852 - RNA, 20 nt, Artificial Sequence
  HTT spacer sequence ATCN PAM
guuaagauacaacuguuuug

SEQ ID NO: 3853 - RNA, 20 nt, Artificial Sequence
  HTT spacer sequence ATCN PAM
gcucccuccuucuccuuaac

SEQ ID NO: 3854 - RNA, 20 nt, Artificial Sequence
  HTT spacer sequence ATCN PAM
gcauguauugcugguuaagg

SEQ ID NO: 3855 - RNA, 20 nt, Artificial Sequence
  HTT spacer sequence ATCN PAM
gcaucagcauguauugcugg

SEQ ID NO: 3856 - RNA, 20 nt, Artificial Sequence
  HTT spacer sequence ATCN PAM
cauagacccucagcuccauc

SEQ ID NO: 3857 - RNA, 20 nt, Artificial Sequence
  HTT spacer sequence ATCN PAM
ugagucacugggaauguggu

SEQ ID NO: 3858 - RNA, 20 nt, Artificial Sequence
  HTT spacer sequence ATCN PAM
uauaugggucgggcauagug

SEQ ID NO: 3859 - RNA, 20 nt, Artificial Sequence
  HTT spacer sequence ATCN PAM
aagguaugagccacuaugcc

SEQ ID NO: 3860 - RNA, 20 nt, Artificial Sequence
  HTT spacer sequence ATCN PAM
cagcacuucaggaggccaag

SEQ ID NO: 3861 - RNA, 20 nt, Artificial Sequence
  HTT spacer sequence ATCN PAM
accugccuuggccuccugaa

SEQ ID NO: 3862 - RNA, 20 nt, Artificial Sequence
  HTT spacer sequence ATCN PAM
ucccaccucagccucucgag

SEQ ID NO: 3863 - RNA, 20 nt, Artificial Sequence
  HTT spacer sequence ATCN PAM
cuugagccugggagguggag

SEQ ID NO: 3864 - RNA, 20 nt, Artificial Sequence
  HTT spacer sequence ATCN PAM
uggcucaacacgaccuccac

SEQ ID NO: 3865 - RNA, 20 nt, Artificial Sequence
  HTT spacer sequence ATCN PAM
caccacugcacuccagccug

SEQ ID NO: 3866 - RNA, 20 nt, Artificial Sequence
  HTT spacer sequence ATCN PAM
agaaaagaacuuauauggcu

SEQ ID NO: 3867 - RNA, 20 nt, Artificial Sequence
  HTT spacer sequence ATCN PAM
cuaaggaaauuuccuuuugu

SEQ ID NO: 3868 - RNA, 20 nt, Artificial Sequence
  HTT spacer sequence ATCN PAM
uuuuucuuuuacuaucauuu

SEQ ID NO: 3869 - RNA, 20 nt, Artificial Sequence
  HTT spacer sequence ATCN PAM
uuuaaaaaaauguguuauau

SEQ ID NO: 3870 - RNA, 20 nt, Artificial Sequence
  HTT spacer sequence ATCN PAM
agguucugcacauagcagcc

SEQ ID NO: 3871 - RNA, 20 nt, Artificial Sequence
  HTT spacer sequence ATCN PAM
aaacggcacugggaaauggg

SEQ ID NO: 3872 - RNA, 20 nt, Artificial Sequence
  HTT spacer sequence ATCN PAM
cuaucuaaacggcacuggga

SEQ ID NO: 3873 - RNA, 20 nt, Artificial Sequence
  HTT spacer sequence ATCN PAM
gacuaaugagucaaugcagg

SEQ ID NO: 3874 - RNA, 20 nt, Artificial Sequence
  HTT spacer sequence ATCN PAM
ggaggaagaaaaaccugacu

SEQ ID NO: 3875 - RNA, 20 nt, Artificial Sequence
  HTT spacer sequence ATCN PAM
caggaauucacccaacacac

SEQ ID NO: 3876 - RNA, 20 nt, Artificial Sequence
  HTT spacer sequence ATCN PAM
gugacucacugcucuguguc

SEQ ID NO: 3877 - RNA, 20 nt, Artificial Sequence
  HTT spacer sequence ATCN PAM
uaauacuucuuaaaacacuc

SEQ ID NO: 3878 - RNA, 20 nt, Artificial Sequence
  HTT spacer sequence ATCN PAM
aaaaggcuggguuuaaaaau

SEQ ID NO: 3879 - RNA, 20 nt, Artificial Sequence
  HTT spacer sequence ATCN PAM
ucugugaucauaagagaaau

SEQ ID NO: 3880 - RNA, 20 nt, Artificial Sequence
  HTT spacer sequence ATCN PAM
cagaggaucuaaaaggcugg

SEQ ID NO: 3881 - RNA, 20 nt, Artificial Sequence
  HTT spacer sequence ATCN PAM
uaagagaaaugaaggauguc

SEQ ID NO: 3882 - RNA, 20 nt, Artificial Sequence
  HTT spacer sequence ATCN PAM
uucauuucucuuaugaucac

SEQ ID NO: 3883 - RNA, 20 nt, Artificial Sequence
  HTT spacer sequence ATCN PAM
acauuucauccuccuguucu

SEQ ID NO: 3884 - RNA, 20 nt, Artificial Sequence
  HTT spacer sequence ATCN PAM
uccuguucuuucagcugagu

SEQ ID NO: 3885 - RNA, 20 nt, Artificial Sequence
  HTT spacer sequence ATCN PAM
cauuagggacuguuggaaua

SEQ ID NO: 3886 - RNA, 20 nt, Artificial Sequence
  HTT spacer sequence ATCN PAM
guccaggagaccuuggcugc

SEQ ID NO: 3887 - RNA, 20 nt, Artificial Sequence
  HTT spacer sequence ATCN PAM
uaccuuaauuucauugucau

SEQ ID NO: 3888 - RNA, 20 nt, Artificial Sequence
  HTT spacer sequence ATCN PAM
cucgcauguuugugaccuga

SEQ ID NO: 3889 - RNA, 20 nt, Artificial Sequence
  HTT spacer sequence ATCN PAM
uuuguguuauuuuugaggca

SEQ ID NO: 3890 - RNA, 20 nt, Artificial Sequence
  HTT spacer sequence ATCN PAM
cccaauucaacucuucaccc

SEQ ID NO: 3891 - RNA, 20 nt, Artificial Sequence
  HTT spacer sequence ATCN PAM
agaaaccaucucccaauuca

SEQ ID NO: 3892 - RNA, 20 nt, Artificial Sequence
  HTT spacer sequence ATCN PAM
gcucuggaaaaaugccuuuu

SEQ ID NO: 3893 - RNA, 20 nt, Artificial Sequence
  HTT spacer sequence ATCN PAM
ucccgcagcuagguuaaaga

SEQ ID NO: 3894 - RNA, 20 nt, Artificial Sequence
  HTT spacer sequence ATCN PAM
gagccuguuggcuuccuguu

SEQ ID NO: 3895 - RNA, 20 nt, Artificial Sequence
  HTT spacer sequence ATCN PAM
ucuucaaacccacuuuagug

SEQ ID NO: 3896 - RNA, 20 nt, Artificial Sequence
  HTT spacer sequence ATCN PAM
ucaaacccacuuuaguguuu

SEQ ID NO: 3897 - RNA, 20 nt, Artificial Sequence
  HTT spacer sequence ATCN PAM
guagagcaugugacaggguc

SEQ ID NO: 3898 - RNA, 20 nt, Artificial Sequence
  HTT spacer sequence ATCN PAM
uguaaucuguagagcaugug

SEQ ID NO: 3899 - RNA, 20 nt, Artificial Sequence
  HTT spacer sequence ATCN PAM
ccucccaggagggucacuug

SEQ ID NO: 3900 - RNA, 20 nt, Artificial Sequence
  HTT spacer sequence ATCN PAM
ucaccucccaggagggucac

SEQ ID NO: 3901 - RNA, 20 nt, Artificial Sequence
  HTT spacer sequence ATCN PAM
gauggacuuggauuagaauu

SEQ ID NO: 3902 - RNA, 20 nt, Artificial Sequence
  HTT spacer sequence ATCN PAM
gauuccacucuacccagugu

SEQ ID NO: 3903 - RNA, 20 nt, Artificial Sequence
  HTT spacer sequence ATCN PAM
aaguccaucugauuccacuc

SEQ ID NO: 3904 - RNA, 20 nt, Artificial Sequence
  HTT spacer sequence ATCN PAM
aagcccuucccgugggugac

SEQ ID NO: 3905 - RNA, 20 nt, Artificial Sequence
  HTT spacer sequence ATCN PAM
uucagcuaauaagagcagua

SEQ ID NO: 3906 - RNA, 20 nt, Artificial Sequence
  HTT spacer sequence ATCN PAM
ccuuaguauuaacaagaaaa

SEQ ID NO: 3907 - RNA, 20 nt, Artificial Sequence
  HTT spacer sequence ATCN PAM
cccuucgucauuccaaaacc

SEQ ID NO: 3908 - RNA, 20 nt, Artificial Sequence
  HTT spacer sequence ATCN PAM
ucucccuucgucauuccaaa

SEQ ID NO: 3909 - RNA, 20 nt, Artificial Sequence
  HTT spacer sequence ATCN PAM
aaagaauuuaguguaauauu

SEQ ID NO: 3910 - RNA, 20 nt, Artificial Sequence
  HTT spacer sequence ATCN PAM
cuuuggaaugggaguaggug

SEQ ID NO: 3911 - RNA, 20 nt, Artificial Sequence
  HTT spacer sequence ATCN PAM
guacacuggggucuguugaa

SEQ ID NO: 3912 - RNA, 20 nt, Artificial Sequence
  HTT spacer sequence ATCN PAM
cagaggggacugccuucaac

SEQ ID NO: 3913 - RNA, 20 nt, Artificial Sequence
  HTT spacer sequence ATCN PAM
cuggcugucagagcucagau

SEQ ID NO: 3914 - RNA, 20 nt, Artificial Sequence
  HTT spacer sequence ATCN PAM
gagcucugacagccagagau

SEQ ID NO: 3915 - RNA, 20 nt, Artificial Sequence
  HTT spacer sequence ATCN PAM
ucugagcucugacagccaga

SEQ ID NO: 3916 - RNA, 20 nt, Artificial Sequence
  HTT spacer sequence ATCN PAM
aucaucugagcucugacagc

SEQ ID NO: 3917 - RNA, 20 nt, Artificial Sequence
  HTT spacer sequence ATCN PAM
uuuucaugauuucgaucacc

SEQ ID NO: 3918 - RNA, 20 nt, Artificial Sequence
  HTT spacer sequence ATCN PAM
ugaaaaugaugagaacuaag

SEQ ID NO: 3919 - RNA, 20 nt, Artificial Sequence
  HTT spacer sequence ATCN PAM
aaaucaugaaaaugaugaga

SEQ ID NO: 3920 - RNA, 20 nt, Artificial Sequence
  HTT spacer sequence ATCN PAM
ccauuugaguaugaugaugc

SEQ ID NO: 3921 - RNA, 20 nt, Artificial Sequence
  HTT spacer sequence ATCN PAM
uacucaaauggugaucgaaa

SEQ ID NO: 3922 - RNA, 20 nt, Artificial Sequence
  HTT spacer sequence ATCN PAM
ucauacucaaauggugaucg

SEQ ID NO: 3923 - RNA, 20 nt, Artificial Sequence
  HTT spacer sequence ATCN PAM
guuaauuacuuccuuccuga

SEQ ID NO: 3924 - RNA, 20 nt, Artificial Sequence
  HTT spacer sequence ATCN PAM
auucugcuaccucucugcuc

SEQ ID NO: 3925 - RNA, 20 nt, Artificial Sequence
  HTT spacer sequence ATCN PAM
agagccugguacaguggcuu

SEQ ID NO: 3926 - RNA, 20 nt, Artificial Sequence
  HTT spacer sequence ATCN PAM
uccuaccucagccucccaag

SEQ ID NO: 3927 - RNA, 20 nt, Artificial Sequence
  HTT spacer sequence ATCN PAM
ugcccaggcuggucucaaac

SEQ ID NO: 3928 - RNA, 20 nt, Artificial Sequence
  HTT spacer sequence ATCN PAM
cuaaaaaaacugaaaaaaaa

SEQ ID NO: 3929 - RNA, 20 nt, Artificial Sequence
  HTT spacer sequence ATCN PAM
uguccagcuaauuuuuuuuc

SEQ ID NO: 3930 - RNA, 20 nt, Artificial Sequence
  HTT spacer sequence ATCN PAM
cagcucaguguagccucgaa

SEQ ID NO: 3931 - RNA, 20 nt, Artificial Sequence
  HTT spacer sequence ATCN PAM
uguuuuaccacccaugcugg

SEQ ID NO: 3932 - RNA, 20 nt, Artificial Sequence
  HTT spacer sequence ATCN PAM
augaaauucaguaguaccaa

SEQ ID NO: 3933 - RNA, 20 nt, Artificial Sequence
  HTT spacer sequence ATCN PAM
uguugguacuacugaauuuc

SEQ ID NO: 3934 - RNA, 20 nt, Artificial Sequence
  HTT spacer sequence ATCN PAM
uuguuuauaauccuguuggu

SEQ ID NO: 3935 - RNA, 20 nt, Artificial Sequence
  HTT spacer sequence ATCN PAM
uugugucucacaggcaaaca

SEQ ID NO: 3936 - RNA, 20 nt, Artificial Sequence
  HTT spacer sequence ATCN PAM
caaagaaaaaaaaagaaaga

SEQ ID NO: 3937 - RNA, 20 nt, Artificial Sequence
  HTT spacer sequence ATCN PAM
uggcucaccacaaccucugu

SEQ ID NO: 3938 - RNA, 20 nt, Artificial Sequence
  HTT spacer sequence ATCN PAM
cuugaacccgggagacagag

SEQ ID NO: 3939 - RNA, 20 nt, Artificial Sequence
  HTT spacer sequence ATCN PAM
cagcuacuaggaggcugagg

SEQ ID NO: 3940 - RNA, 20 nt, Artificial Sequence
  HTT spacer sequence ATCN PAM
ccacgcucggcuaauuuugu

SEQ ID NO: 3941 - RNA, 20 nt, Artificial Sequence
  HTT spacer sequence ATCN PAM
cuacuaaaaguacaaaauua

SEQ ID NO: 3942 - RNA, 20 nt, Artificial Sequence
  HTT spacer sequence ATCN PAM
ccugaggucaggaguucgag

SEQ ID NO: 3943 - RNA, 20 nt, Artificial Sequence
  HTT spacer sequence ATCN PAM
ucccaccucagccucccaaa

SEQ ID NO: 3944 - RNA, 20 nt, Artificial Sequence
  HTT spacer sequence ATCN PAM
cagcacuuugggaggcugag

SEQ ID NO: 3945 - RNA, 20 nt, Artificial Sequence
  HTT spacer sequence ATCN PAM
gaauucaguguguacguuau

SEQ ID NO: 3946 - RNA, 20 nt, Artificial Sequence
  HTT spacer sequence ATCN PAM
aagaaauauaauacguaagc

SEQ ID NO: 3947 - RNA, 20 nt, Artificial Sequence
  HTT spacer sequence ATCN PAM
aauaagaaacacaaucaaag

SEQ ID NO: 3948 - RNA, 20 nt, Artificial Sequence
  HTT spacer sequence ATCN PAM
guccuccuccuccuccccag

SEQ ID NO: 3949 - RNA, 20 nt, Artificial Sequence
  HTT spacer sequence ATCN PAM
ccgggugcugagaacccagc

SEQ ID NO: 3950 - RNA, 20 nt, Artificial Sequence
  HTT spacer sequence ATCN PAM
gcugaucaccuacucauagg

SEQ ID NO: 3951 - RNA, 20 nt, Artificial Sequence
  HTT spacer sequence ATCN PAM
gcagauccccgggugcugag

SEQ ID NO: 3952 - RNA, 20 nt, Artificial Sequence
  HTT spacer sequence ATCN PAM
ccuacucauaggccaggccc

SEQ ID NO: 3953 - RNA, 20 nt, Artificial Sequence
  HTT spacer sequence ATCN PAM
aaguucuaggugacccagug

SEQ ID NO: 3954 - RNA, 20 nt, Artificial Sequence
  HTT spacer sequence ATCN PAM
uggaggugggggcuacagug

SEQ ID NO: 3955 - RNA, 20 nt, Artificial Sequence
  HTT spacer sequence ATCN PAM
uuaggaaggcaucuuggagg

SEQ ID NO: 3956 - RNA, 20 nt, Artificial Sequence
  HTT spacer sequence ATCN PAM
uggagguggaggagacagcc

SEQ ID NO: 3957 - RNA, 20 nt, Artificial Sequence
  HTT spacer sequence ATCN PAM
agaagugggcggcugucucc

SEQ ID NO: 3958 - RNA, 20 nt, Artificial Sequence
  HTT spacer sequence ATCN PAM
ccaugucguguucaaucuuc

SEQ ID NO: 3959 - RNA, 20 nt, Artificial Sequence
  HTT spacer sequence ATCN PAM
ucuuccagauccugacuucu

SEQ ID NO: 3960 - RNA, 20 nt, Artificial Sequence
  HTT spacer sequence ATCN PAM
ggaagaagauugaacacgac

SEQ ID NO: 3961 - RNA, 20 nt, Artificial Sequence
  HTT spacer sequence ATCN PAM
ugacuucuagguucagcuuu

SEQ ID NO: 3962 - RNA, 20 nt, Artificial Sequence
  HTT spacer sequence ATCN PAM
aggcacaagccagcaaagag

SEQ ID NO: 3963 - RNA, 20 nt, Artificial Sequence
  HTT spacer sequence ATCN PAM
ucacaucuguuuucuuggag

SEQ ID NO: 3964 - RNA, 20 nt, Artificial Sequence
  HTT spacer sequence ATCN PAM
guuuucuuggaguuaaucgu

SEQ ID NO: 3965 - RNA, 20 nt, Artificial Sequence
  HTT spacer sequence ATCN PAM
uuaccucuauaucgcuugcu

SEQ ID NO: 3966 - RNA, 20 nt, Artificial Sequence
  HTT spacer sequence ATCN PAM
cuugcuuauuauucuuuggc

SEQ ID NO: 3967 - RNA, 20 nt, Artificial Sequence
  HTT spacer sequence ATCN PAM
guuuuuccccagugugguca

SEQ ID NO: 3968 - RNA, 20 nt, Artificial Sequence
  HTT spacer sequence ATCN PAM
aacuugaguuauccagcucu

SEQ ID NO: 3969 - RNA, 20 nt, Artificial Sequence
  HTT spacer sequence ATCN PAM
agcucucugccccagucugg

SEQ ID NO: 3970 - RNA, 20 nt, Artificial Sequence
  HTT spacer sequence ATCN PAM
accugcccagacuggggcag

SEQ ID NO: 3971 - RNA, 20 nt, Artificial Sequence
  HTT spacer sequence ATCN PAM
ucaggucuguaguacacuug

SEQ ID NO: 3972 - RNA, 20 nt, Artificial Sequence
  HTT spacer sequence ATCN PAM
uaggacuucucuuugccauu

SEQ ID NO: 3973 - RNA, 20 nt, Artificial Sequence
  HTT spacer sequence ATCN PAM
aacgggagaacugcaaagga

SEQ ID NO: 3974 - RNA, 20 nt, Artificial Sequence
  HTT spacer sequence ATCN PAM
aggaacugggcauccaacgg

SEQ ID NO: 3975 - RNA, 20 nt, Artificial Sequence
  HTT spacer sequence ATCN PAM
ucuaguagcuuccugagaga

SEQ ID NO: 3976 - RNA, 20 nt, Artificial Sequence
  HTT spacer sequence ATCN PAM
ucucucaggaagcuacuaga

SEQ ID NO: 3977 - RNA, 20 nt, Artificial Sequence
  HTT spacer sequence ATCN PAM
uuuucccucagaaaugcaaa

SEQ ID NO: 3978 - RNA, 20 nt, Artificial Sequence
  HTT spacer sequence ATCN PAM
ccaacgugacccgauuccuu

SEQ ID NO: 3979 - RNA, 20 nt, Artificial Sequence
  HTT spacer sequence ATCN PAM
ggucacguuggagauuuuaa

SEQ ID NO: 3980 - RNA, 20 nt, Artificial Sequence
  HTT spacer sequence ATCN PAM
cuucaguucugggaaaauuu

SEQ ID NO: 3981 - RNA, 20 nt, Artificial Sequence
  HTT spacer sequence ATCN PAM
aacuaaccaauuucaggaga

SEQ ID NO: 3982 - RNA, 20 nt, Artificial Sequence
  HTT spacer sequence ATCN PAM
aggaggaccaacauccaacu

SEQ ID NO: 3983 - RNA, 20 nt, Artificial Sequence
  HTT spacer sequence ATCN PAM
uaccuuuuucuuuucuuuuu

SEQ ID NO: 3984 - RNA, 20 nt, Artificial Sequence
  HTT spacer sequence ATCN PAM
aaaaaguaccagaaaaagaa

SEQ ID NO: 3985 - RNA, 20 nt, Artificial Sequence
  HTT spacer sequence ATCN PAM
aucucaaacucuucuauuca

SEQ ID NO: 3986 - RNA, 20 nt, Artificial Sequence
  HTT spacer sequence ATCN PAM
caaacucuucuauucauugu

SEQ ID NO: 3987 - RNA, 20 nt, Artificial Sequence
  HTT spacer sequence ATCN PAM
agagacaaagaaaagaaaga

SEQ ID NO: 3988 - RNA, 20 nt, Artificial Sequence
  HTT spacer sequence ATCN PAM
caccacugcaccacaaccug

SEQ ID NO: 3989 - RNA, 20 nt, Artificial Sequence
  HTT spacer sequence ATCN PAM
uagcucacugcagccucaaa

SEQ ID NO: 3990 - RNA, 20 nt, Artificial Sequence
  HTT spacer sequence ATCN PAM
caaaaaaaaaaaaaaaaaag

SEQ ID NO: 3991 - RNA, 20 nt, Artificial Sequence
  HTT spacer sequence ATCN PAM
caccaccgcacucuagccug

SEQ ID NO: 3992 - RNA, 20 nt, Artificial Sequence
  HTT spacer sequence ATCN PAM
cagcuacuugagaggcugag

SEQ ID NO: 3993 - RNA, 20 nt, Artificial Sequence
  HTT spacer sequence ATCN PAM
ccugaggucaggcguucgag

SEQ ID NO: 3994 - RNA, 20 nt, Artificial Sequence
  HTT spacer sequence ATCN PAM
gccugccuuggccuccgaaa

SEQ ID NO: 3995 - RNA, 20 nt, Artificial Sequence
  HTT spacer sequence ATCN PAM
cggcacuuucggaggccaag

SEQ ID NO: 3996 - RNA, 20 nt, Artificial Sequence
  HTT spacer sequence ATCN PAM
uuagaucuuuaaauaccagu

SEQ ID NO: 3997 - RNA, 20 nt, Artificial Sequence
  HTT spacer sequence ATCN PAM
aaugaugggcucacgccugu

SEQ ID NO: 3998 - RNA, 20 nt, Artificial Sequence
  HTT spacer sequence ATCN PAM
uuaaauaccaguaucuauaa

SEQ ID NO: 3999 - RNA, 20 nt, Artificial Sequence
  HTT spacer sequence ATCN PAM
auaagucuuuuccucuugag

SEQ ID NO: 4000 - RNA, 20 nt, Artificial Sequence
  HTT spacer sequence ATCN PAM
cuggaaggaaauuacucauu

SEQ ID NO: 4001 - RNA, 20 nt, Artificial Sequence
  HTT spacer sequence ATCN PAM
ugcaaccggggacuggaagg

SEQ ID NO: 4002 - RNA, 20 nt, Artificial Sequence
  HTT spacer sequence ATCN PAM
cacgucuguccucagccuau

SEQ ID NO: 4003 - RNA, 20 nt, Artificial Sequence
  HTT spacer sequence ATCN PAM
caagagguguuuacauaggc

SEQ ID NO: 4004 - RNA, 20 nt, Artificial Sequence
  HTT spacer sequence ATCN PAM
cucucaaucuuugccggagg

SEQ ID NO: 4005 - RNA, 20 nt, Artificial Sequence
  HTT spacer sequence ATCN PAM
uugccggaggugggggaggg

SEQ ID NO: 4006 - RNA, 20 nt, Artificial Sequence
  HTT spacer sequence ATCN PAM
aaggcagcccaggaagcagc

SEQ ID NO: 4007 - RNA, 20 nt, Artificial Sequence
  HTT spacer sequence ATCN PAM
cuccacuuucagauguaugu

SEQ ID NO: 4008 - RNA, 20 nt, Artificial Sequence
  HTT spacer sequence ATCN PAM
gaaaguggagggauggagag

SEQ ID NO: 4009 - RNA, 20 nt, Artificial Sequence
  HTT spacer sequence ATCN PAM
cuccuacccuccccuguccc

SEQ ID NO: 4010 - RNA, 20 nt, Artificial Sequence
  HTT spacer sequence ATCN PAM
gucaguuauguagcucuugu

SEQ ID NO: 4011 - RNA, 20 nt, Artificial Sequence
  HTT spacer sequence ATCN PAM
uguaaagaaguuguauaaag

SEQ ID NO: 4012 - RNA, 20 nt, Artificial Sequence
  HTT spacer sequence ATCN PAM
agcguguuggauuagaaauc

SEQ ID NO: 4013 - RNA, 20 nt, Artificial Sequence
  HTT spacer sequence ATCN PAM
aacacgcuggauugaacuug

SEQ ID NO: 4014 - RNA, 20 nt, Artificial Sequence
  HTT spacer sequence ATCN PAM
cccacccucugguuuauucu

SEQ ID NO: 4015 - RNA, 20 nt, Artificial Sequence
  HTT spacer sequence ATCN PAM
guguuuggcagguaauuuug

SEQ ID NO: 4016 - RNA, 20 nt, Artificial Sequence
  HTT spacer sequence ATCN PAM
uuaguguaucccuuggugaa

SEQ ID NO: 4017 - RNA, 20 nt, Artificial Sequence
  HTT spacer sequence ATCN PAM
cuuggugaauaaccacaaag

SEQ ID NO: 4018 - RNA, 20 nt, Artificial Sequence
  HTT spacer sequence ATCN PAM
auggucuauguacacagaau

SEQ ID NO: 4019 - RNA, 20 nt, Artificial Sequence
  HTT spacer sequence ATCN PAM
uguguauuaguauuccugua

SEQ ID NO: 4020 - RNA, 20 nt, Artificial Sequence
  HTT spacer sequence ATCN PAM
cuacaauggaaugcuaugaa

SEQ ID NO: 4021 - RNA, 20 nt, Artificial Sequence
  HTT spacer sequence ATCN PAM
cuggguuguuucuaguucuu

SEQ ID NO: 4022 - RNA, 20 nt, Artificial Sequence
  HTT spacer sequence ATCN PAM
ugcacagcuagagguggagu

SEQ ID NO: 4023 - RNA, 20 nt, Artificial Sequence
  HTT spacer sequence ATCN PAM
cccaacaacuccaccucuag

SEQ ID NO: 4024 - RNA, 20 nt, Artificial Sequence
  HTT spacer sequence ATCN PAM
cagcugcaguagaaacugcc

SEQ ID NO: 4025 - RNA, 20 nt, Artificial Sequence
  HTT spacer sequence ATCN PAM
ccauacacaguggcaaaagg

SEQ ID NO: 4026 - RNA, 20 nt, Artificial Sequence
  HTT spacer sequence ATCN PAM
gcaauuccaagugcuagcga

SEQ ID NO: 4027 - RNA, 20 nt, Artificial Sequence
  HTT spacer sequence ATCN PAM
ggaaggcuaagaguaaaagc

SEQ ID NO: 4028 - RNA, 20 nt, Artificial Sequence
  HTT spacer sequence ATCN PAM
cauuaugauuuuaauuucca

SEQ ID NO: 4029 - RNA, 20 nt, Artificial Sequence
  HTT spacer sequence ATCN PAM
uaaugugauuccagaaaaca

SEQ ID NO: 4030 - RNA, 20 nt, Artificial Sequence
  HTT spacer sequence ATCN PAM
uuaaacuucagagccaaggg

SEQ ID NO: 4031 - RNA, 20 nt, Artificial Sequence
  HTT spacer sequence ATCN PAM
cuucccuuuugaaguacucu

SEQ ID NO: 4032 - RNA, 20 nt, Artificial Sequence
  HTT spacer sequence ATCN PAM
auucuaaaauacaguaugcc

SEQ ID NO: 4033 - RNA, 20 nt, Artificial Sequence
  HTT spacer sequence ATCN PAM
cuucuccaagccagcuaaca

SEQ ID NO: 4034 - RNA, 20 nt, Artificial Sequence
  HTT spacer sequence ATCN PAM
caagaaucccuucuccaagc

SEQ ID NO: 4035 - RNA, 20 nt, Artificial Sequence
  HTT spacer sequence ATCN PAM
cuacaaucccaagaaucccu

SEQ ID NO: 4036 - RNA, 20 nt, Artificial Sequence
  HTT spacer sequence ATCN PAM
uaauaaugaguagcucucau

SEQ ID NO: 4037 - RNA, 20 nt, Artificial Sequence
  HTT spacer sequence ATCN PAM
uuguaugaguccaaauagac

SEQ ID NO: 4038 - RNA, 20 nt, Artificial Sequence
  HTT spacer sequence ATCN PAM
cggcucacugcagccuccac

SEQ ID NO: 4039 - RNA, 20 nt, Artificial Sequence
  HTT spacer sequence ATCN PAM
cuugaaccugggagguggag

SEQ ID NO: 4040 - RNA, 20 nt, Artificial Sequence
  HTT spacer sequence ATCN PAM
cuugaggucaggaguuugag

SEQ ID NO: 4041 - RNA, 20 nt, Artificial Sequence
  HTT spacer sequence ATCN PAM
gccuucuucagccucccaaa

SEQ ID NO: 4042 - RNA, 20 nt, Artificial Sequence
  HTT spacer sequence ATCN PAM
cagcacuuugggaggcugaa

SEQ ID NO: 4043 - RNA, 20 nt, Artificial Sequence
  HTT spacer sequence ATCN PAM
uaaaaaacuacuuuggccaa

SEQ ID NO: 4044 - RNA, 20 nt, Artificial Sequence
  HTT spacer sequence ATCN PAM
uuucuugcagcuaaaaaagu

SEQ ID NO: 4045 - RNA, 20 nt, Artificial Sequence
  HTT spacer sequence ATCN PAM
cugacaaacuuuuuuagcug

SEQ ID NO: 4046 - RNA, 20 nt, Artificial Sequence
  HTT spacer sequence ATCN PAM
ucucugacaaacuuuuuuag

SEQ ID NO: 4047 - RNA, 20 nt, Artificial Sequence
  HTT spacer sequence ATCN PAM
ugugccuaacaguguccaga

SEQ ID NO: 4048 - RNA, 20 nt, Artificial Sequence
  HTT spacer sequence ATCN PAM
ggggucucacagccuuuaga

SEQ ID NO: 4049 - RNA, 20 nt, Artificial Sequence
  HTT spacer sequence ATCN PAM
cuguucagggcucucagcuc

SEQ ID NO: 4050 - RNA, 20 nt, Artificial Sequence
  HTT spacer sequence ATCN PAM
auagaaacaaugcuaaugac

SEQ ID NO: 4051 - RNA, 20 nt, Artificial Sequence
  HTT spacer sequence ATCN PAM
cuuaugggaaacgaggggau

SEQ ID NO: 4052 - RNA, 20 nt, Artificial Sequence
  HTT spacer sequence ATCN PAM
ccucguuucccauaagggau

SEQ ID NO: 4053 - RNA, 20 nt, Artificial Sequence
  HTT spacer sequence ATCN PAM
gugccuuaaggacaugcucc

SEQ ID NO: 4054 - RNA, 20 nt, Artificial Sequence
  HTT spacer sequence ATCN PAM
cucaugcuauuguuuguggc

SEQ ID NO: 4055 - RNA, 20 nt, Artificial Sequence
  HTT spacer sequence ATCN PAM
cugaagcacuguaacauguu

SEQ ID NO: 4056 - RNA, 20 nt, Artificial Sequence
  HTT spacer sequence ATCN PAM
ggccauaaacuggccccaaa

SEQ ID NO: 4057 - RNA, 20 nt, Artificial Sequence
  HTT spacer sequence ATCN PAM
ccucccagggaauuuacacg

SEQ ID NO: 4058 - RNA, 20 nt, Artificial Sequence
  HTT spacer sequence ATCN PAM
gaugccaguuacuaguuuac

SEQ ID NO: 4059 - RNA, 20 nt, Artificial Sequence
  HTT spacer sequence ATCN PAM
gauuuauaaauaaguuucuc

SEQ ID NO: 4060 - RNA, 20 nt, Artificial Sequence
  HTT spacer sequence ATCN PAM
uuguucagcaugcacugagc

SEQ ID NO: 4061 - RNA, 20 nt, Artificial Sequence
  HTT spacer sequence ATCN PAM
agucauggcucagagcauag

SEQ ID NO: 4062 - RNA, 20 nt, Artificial Sequence
  HTT spacer sequence ATCN PAM
auuucccauuauucaaaacu

SEQ ID NO: 4063 - RNA, 20 nt, Artificial Sequence
  HTT spacer sequence ATCN PAM
uggugacuauguuacuuaag

SEQ ID NO: 4064 - RNA, 20 nt, Artificial Sequence
  HTT spacer sequence ATCN PAM
uaaaauugaaaaggggugac

SEQ ID NO: 4065 - RNA, 20 nt, Artificial Sequence
  HTT spacer sequence ATCN PAM
agauuuaaauggccaucauu

SEQ ID NO: 4066 - RNA, 20 nt, Artificial Sequence
  HTT spacer sequence ATCN PAM
ugauaaaaauauccuaaaau

SEQ ID NO: 4067 - RNA, 20 nt, Artificial Sequence
  HTT spacer sequence ATCN PAM
uuagaguuauagcacuuucu

SEQ ID NO: 4068 - RNA, 20 nt, Artificial Sequence
  HTT spacer sequence ATCN PAM
aaaggagaaagugcuauaac

SEQ ID NO: 4069 - RNA, 20 nt, Artificial Sequence
  HTT spacer sequence ATCN PAM
gcaauuuaacuggacaugac

SEQ ID NO: 4070 - RNA, 20 nt, Artificial Sequence
  HTT spacer sequence ATCN PAM
gaaauaucugcaauuuaacu

SEQ ID NO: 4071 - RNA, 20 nt, Artificial Sequence
  HTT spacer sequence ATCN PAM
aagauguuccaguccugaga

SEQ ID NO: 4072 - RNA, 20 nt, Artificial Sequence
  HTT spacer sequence ATCN PAM
ucgaucggaaauaucugcaa

SEQ ID NO: 4073 - RNA, 20 nt, Artificial Sequence
  HTT spacer sequence ATCN PAM
cuuaggguggggcauuuacu

SEQ ID NO: 4074 - RNA, 20 nt, Artificial Sequence
  HTT spacer sequence ATCN PAM
acaaaugacaaaguuaagga

SEQ ID NO: 4075 - RNA, 20 nt, Artificial Sequence
  HTT spacer sequence ATCN PAM
agaauugaggccuccaccau

SEQ ID NO: 4076 - RNA, 20 nt, Artificial Sequence
  HTT spacer sequence ATCN PAM
auguccucuccgcaauggug

SEQ ID NO: 4077 - RNA, 20 nt, Artificial Sequence
  HTT spacer sequence ATCN PAM
uguauuacauaaaacuuaac

SEQ ID NO: 4078 - RNA, 20 nt, Artificial Sequence
  HTT spacer sequence ATCN PAM
uuuaucuacuuggacuuuug

SEQ ID NO: 4079 - RNA, 20 nt, Artificial Sequence
  HTT spacer sequence ATCN PAM
acuuggacuuuugcuuccgu

SEQ ID NO: 4080 - RNA, 20 nt, Artificial Sequence
  HTT spacer sequence ATCN PAM
agccgcuguccgccgaaugg

SEQ ID NO: 4081 - RNA, 20 nt, Artificial Sequence
  HTT spacer sequence ATCN PAM
gcagugagcaucugccagca

SEQ ID NO: 4082 - RNA, 20 nt, Artificial Sequence
  HTT spacer sequence ATCN PAM
gccagcacucaagaaggaca

SEQ ID NO: 4083 - RNA, 20 nt, Artificial Sequence
  HTT spacer sequence ATCN PAM
ugaguacaugcuggagacuc

SEQ ID NO: 4084 - RNA, 20 nt, Artificial Sequence
  HTT spacer sequence ATCN PAM
gguuuuauuuauuucaaagg

SEQ ID NO: 4085 - RNA, 20 nt, Artificial Sequence
  HTT spacer sequence ATCN PAM
ucugguuuuauuuauuucaa

SEQ ID NO: 4086 - RNA, 20 nt, Artificial Sequence
  HTT spacer sequence ATCN PAM
cucagcuucuagaccaggcu

SEQ ID NO: 4087 - RNA, 20 nt, Artificial Sequence
  HTT spacer sequence ATCN PAM
accagugccaaauagccugg

SEQ ID NO: 4088 - RNA, 20 nt, Artificial Sequence
  HTT spacer sequence ATCN PAM
gcagggucacagagacccau

SEQ ID NO: 4089 - RNA, 20 nt, Artificial Sequence
  HTT spacer sequence ATCN PAM
cacguccacaugcucgcuuc

SEQ ID NO: 4090 - RNA, 20 nt, Artificial Sequence
  HTT spacer sequence ATCN PAM
cuagcucagcaagguccuuu

SEQ ID NO: 4091 - RNA, 20 nt, Artificial Sequence
  HTT spacer sequence ATCN PAM
ugaacgaguacgccaugagg

SEQ ID NO: 4092 - RNA, 20 nt, Artificial Sequence
  HTT spacer sequence ATCN PAM
uguuugugccaucuugaucu

SEQ ID NO: 4093 - RNA, 20 nt, Artificial Sequence
  HTT spacer sequence ATCN PAM
ugaucucucaggaucucuuc

SEQ ID NO: 4094 - RNA, 20 nt, Artificial Sequence
  HTT spacer sequence ATCN PAM
agauggcacaaacaugauca

SEQ ID NO: 4095 - RNA, 20 nt, Artificial Sequence
  HTT spacer sequence ATCN PAM
cucaggaucucuucuuuuuu

SEQ ID NO: 4096 - RNA, 20 nt, Artificial Sequence
  HTT spacer sequence ATCN PAM
ugagagaucaagauggcaca

SEQ ID NO: 4097 - RNA, 20 nt, Artificial Sequence
  HTT spacer sequence ATCN PAM
cuucuuuuuuaacagauuaa

SEQ ID NO: 4098 - RNA, 20 nt, Artificial Sequence
  HTT spacer sequence ATCN PAM
guuaaaaaagaagagauccu

SEQ ID NO: 4099 - RNA, 20 nt, Artificial Sequence
  HTT spacer sequence ATCN PAM
ccaaacagugagucagaugu

SEQ ID NO: 4100 - RNA, 20 nt, Artificial Sequence
  HTT spacer sequence ATCN PAM
gacucacuguuuggagauuc

SEQ ID NO: 4101 - RNA, 20 nt, Artificial Sequence
  HTT spacer sequence ATCN PAM
uaacaucugacucacuguuu

SEQ ID NO: 4102 - RNA, 20 nt, Artificial Sequence
  HTT spacer sequence ATCN PAM
ucgacaggaacgaguaagcc

SEQ ID NO: 4103 - RNA, 20 nt, Artificial Sequence
  HTT spacer sequence ATCN PAM
gcagaguggaguguucaucc

SEQ ID NO: 4104 - RNA, 20 nt, Artificial Sequence
  HTT spacer sequence ATCN PAM
guucuuugaaugucagucau

SEQ ID NO: 4105 - RNA, 20 nt, Artificial Sequence
  HTT spacer sequence ATCN PAM
cccgcauuugacucacggug

SEQ ID NO: 4106 - RNA, 20 nt, Artificial Sequence
  HTT spacer sequence ATCN PAM
ugaccucugguuuuagaaac

SEQ ID NO: 4107 - RNA, 20 nt, Artificial Sequence
  HTT spacer sequence ATCN PAM
acccaguaaauacugauuga

SEQ ID NO: 4108 - RNA, 20 nt, Artificial Sequence
  HTT spacer sequence ATCN PAM
guauuuacuggguggaugaa

SEQ ID NO: 4109 - RNA, 20 nt, Artificial Sequence
  HTT spacer sequence ATCN PAM
cagagccuagcacacagugg

SEQ ID NO: 4110 - RNA, 20 nt, Artificial Sequence
  HTT spacer sequence ATCN PAM
ccuugagugagcauauacca

SEQ ID NO: 4111 - RNA, 20 nt, Artificial Sequence
  HTT spacer sequence ATCN PAM
caguacauuagaauuacugc

SEQ ID NO: 4112 - RNA, 20 nt, Artificial Sequence
  HTT spacer sequence ATCN PAM
aauugcuuaaaaugaggcug

SEQ ID NO: 4113 - RNA, 20 nt, Artificial Sequence
  HTT spacer sequence ATCN PAM
uacaaaacuuagcuaaaugg

SEQ ID NO: 4114 - RNA, 20 nt, Artificial Sequence
  HTT spacer sequence ATCN PAM
uuuuaagccacuuacaauuu

SEQ ID NO: 4115 - RNA, 20 nt, Artificial Sequence
  HTT spacer sequence ATCN PAM
ugaauugaagauaaugcuaa

SEQ ID NO: 4116 - RNA, 20 nt, Artificial Sequence
  HTT spacer sequence ATCN PAM
ucaauucaugauucuauuaa

SEQ ID NO: 4117 - RNA, 20 nt, Artificial Sequence
  HTT spacer sequence ATCN PAM
acacgcagcacuuacauggc

SEQ ID NO: 4118 - RNA, 20 nt, Artificial Sequence
  HTT spacer sequence ATCN PAM
caugagacucugcuuuuauu

SEQ ID NO: 4119 - RNA, 20 nt, Artificial Sequence
  HTT spacer sequence ATCN PAM
uuaccuugccuuguuuuuuu

SEQ ID NO: 4120 - RNA, 20 nt, Artificial Sequence
  HTT spacer sequence ATCN PAM
acucaugaccaguuauauuu

SEQ ID NO: 4121 - RNA, 20 nt, Artificial Sequence
  HTT spacer sequence ATCN PAM
uacuucucccuuuuuuuauu

SEQ ID NO: 4122 - RNA, 20 nt, Artificial Sequence
  HTT spacer sequence ATCN PAM
ucuuauuucaucuauaagua

SEQ ID NO: 4123 - RNA, 20 nt, Artificial Sequence
  HTT spacer sequence ATCN PAM
auaaguauuucaguaucucu

SEQ ID NO: 4124 - RNA, 20 nt, Artificial Sequence
  HTT spacer sequence ATCN PAM
cuauagaugaggacucuucu

SEQ ID NO: 4125 - RNA, 20 nt, Artificial Sequence
  HTT spacer sequence ATCN PAM
auagagauacugaaauacuu

SEQ ID NO: 4126 - RNA, 20 nt, Artificial Sequence
  HTT spacer sequence ATCN PAM
uuuuaaaaauaaaguuuuaa

SEQ ID NO: 4127 - RNA, 20 nt, Artificial Sequence
  HTT spacer sequence ATCN PAM
gaccaucauuuuaaaaauaa

SEQ ID NO: 4128 - RNA, 20 nt, Artificial Sequence
  HTT spacer sequence ATCN PAM
cagaacuuugggaggccaag

SEQ ID NO: 4129 - RNA, 20 nt, Artificial Sequence
  HTT spacer sequence ATCN PAM
gcccagcuuggccucccaaa

SEQ ID NO: 4130 - RNA, 20 nt, Artificial Sequence
  HTT spacer sequence ATCN PAM
cuugaaccugggaguuugag

SEQ ID NO: 4131 - RNA, 20 nt, Artificial Sequence
  HTT spacer sequence ATCN PAM
gccaaguguggugaugcaug

SEQ ID NO: 4132 - RNA, 20 nt, Artificial Sequence
  HTT spacer sequence ATCN PAM
ccacacuuggcugauuuuuu

SEQ ID NO: 4133 - RNA, 20 nt, Artificial Sequence
  HTT spacer sequence ATCN PAM
cagccucccaaguagcuggg

SEQ ID NO: 4134 - RNA, 20 nt, Artificial Sequence
  HTT spacer sequence ATCN PAM
uccaggcucaugugacccuc

SEQ ID NO: 4135 - RNA, 20 nt, Artificial Sequence
  HTT spacer sequence ATCN PAM
aggcugcagugauccaugau

SEQ ID NO: 4136 - RNA, 20 nt, Artificial Sequence
  HTT spacer sequence ATCN PAM
cugcagccuugaucuuccag

SEQ ID NO: 4137 - RNA, 20 nt, Artificial Sequence
  HTT spacer sequence ATCN PAM
augauuguaccacugcacuc

SEQ ID NO: 4138 - RNA, 20 nt, Artificial Sequence
  HTT spacer sequence ATCN PAM
uggaucacugcagccuugau

SEQ ID NO: 4139 - RNA, 20 nt, Artificial Sequence
  HTT spacer sequence ATCN PAM
ugggugauggagcaagauuc

SEQ ID NO: 4140 - RNA, 20 nt, Artificial Sequence
  HTT spacer sequence ATCN PAM
cccaggauggagugcagugg

SEQ ID NO: 4141 - RNA, 20 nt, Artificial Sequence
  HTT spacer sequence ATCN PAM
ugcuccaucacccaggaugg

SEQ ID NO: 4142 - RNA, 20 nt, Artificial Sequence
  HTT spacer sequence ATCN PAM
aauacccaccaacucauuau

SEQ ID NO: 4143 - RNA, 20 nt, Artificial Sequence
  HTT spacer sequence ATCN PAM
auuuuucucucuacucuuuu

SEQ ID NO: 4144 - RNA, 20 nt, Artificial Sequence
  HTT spacer sequence ATCN PAM
gcaucuaaauaaaauugguc

SEQ ID NO: 4145 - RNA, 20 nt, Artificial Sequence
  HTT spacer sequence ATCN PAM
aaauaaaauuggucgauaag

SEQ ID NO: 4146 - RNA, 20 nt, Artificial Sequence
  HTT spacer sequence ATCN PAM
accaauuuuauuuagaugcu

SEQ ID NO: 4147 - RNA, 20 nt, Artificial Sequence
  HTT spacer sequence ATCN PAM
uuaucgaccaauuuuauuua

SEQ ID NO: 4148 - RNA, 20 nt, Artificial Sequence
  HTT spacer sequence ATCN PAM
cuuugaugaacugguucccc

SEQ ID NO: 4149 - RNA, 20 nt, Artificial Sequence
  HTT spacer sequence ATCN PAM
aagagauuuacaauccuuau

SEQ ID NO: 4150 - RNA, 20 nt, Artificial Sequence
  HTT spacer sequence ATCN PAM
caguuuuuuucccuuagagu

SEQ ID NO: 4151 - RNA, 20 nt, Artificial Sequence
  HTT spacer sequence ATCN PAM
gguuucucaauaaaugaacu

SEQ ID NO: 4152 - RNA, 20 nt, Artificial Sequence
  HTT spacer sequence ATCN PAM
gaccacaggaaaacuuagaa

SEQ ID NO: 4153 - RNA, 20 nt, Artificial Sequence
  HTT spacer sequence ATCN PAM
ccacuguguaaauuaacacc

SEQ ID NO: 4154 - RNA, 20 nt, Artificial Sequence
  HTT spacer sequence ATCN PAM
auaauuggaggaaaagccuu

SEQ ID NO: 4155 - RNA, 20 nt, Artificial Sequence
  HTT spacer sequence ATCN PAM
gacaaggcuuuuccuccaau

SEQ ID NO: 4156 - RNA, 20 nt, Artificial Sequence
  HTT spacer sequence ATCN PAM
gaguccaguauuucuuauau

SEQ ID NO: 4157 - RNA, 20 nt, Artificial Sequence
  HTT spacer sequence ATCN PAM
uaaaauauuauauaagaaau

SEQ ID NO: 4158 - RNA, 20 nt, Artificial Sequence
  HTT spacer sequence ATCN PAM
guuaaaaaaaauugagcaua

SEQ ID NO: 4159 - RNA, 20 nt, Artificial Sequence
  HTT spacer sequence ATCN PAM
agcagccuucuuaaaagcau

SEQ ID NO: 4160 - RNA, 20 nt, Artificial Sequence
  HTT spacer sequence ATCN PAM
uaaaaguuuagagaucauug

SEQ ID NO: 4161 - RNA, 20 nt, Artificial Sequence
  HTT spacer sequence ATCN PAM
cuaaacuuuuaugaucaagc

SEQ ID NO: 4162 - RNA, 20 nt, Artificial Sequence
  HTT spacer sequence ATCN PAM
uuggucugaugggaaaagca

SEQ ID NO: 4163 - RNA, 20 nt, Artificial Sequence
  HTT spacer sequence ATCN PAM
gaccaaugaucucuaaacuu

SEQ ID NO: 4164 - RNA, 20 nt, Artificial Sequence
  HTT spacer sequence ATCN PAM
gacccggcacagaguuggga

SEQ ID NO: 4165 - RNA, 20 nt, Artificial Sequence
  HTT spacer sequence ATCN PAM
augagaaagccugcaggccu

SEQ ID NO: 4166 - RNA, 20 nt, Artificial Sequence
  HTT spacer sequence ATCN PAM
guucacaaauguuagaaacc

SEQ ID NO: 4167 - RNA, 20 nt, Artificial Sequence
  HTT spacer sequence ATCN PAM
aaacuguguuaaauugggau

SEQ ID NO: 4168 - RNA, 20 nt, Artificial Sequence
  HTT spacer sequence ATCN PAM
caauuuaacacaguuucgau

SEQ ID NO: 4169 - RNA, 20 nt, Artificial Sequence
  HTT spacer sequence ATCN PAM
uggaaggacagggauagagg

SEQ ID NO: 4170 - RNA, 20 nt, Artificial Sequence
  HTT spacer sequence ATCN PAM
cuguccuuccaggauuacug

SEQ ID NO: 4171 - RNA, 20 nt, Artificial Sequence
  HTT spacer sequence ATCN PAM
auacccuuuuuuccccuuca

SEQ ID NO: 4172 - RNA, 20 nt, Artificial Sequence
  HTT spacer sequence ATCN PAM
gcaauuaagucucacaucca

SEQ ID NO: 4173 - RNA, 20 nt, Artificial Sequence
  HTT spacer sequence ATCN PAM
uuuauuuacuuuggagaaag

SEQ ID NO: 4174 - RNA, 20 nt, Artificial Sequence
  HTT spacer sequence ATCN PAM
agaguuuagaauuugccagu

SEQ ID NO: 4175 - RNA, 20 nt, Artificial Sequence
  HTT spacer sequence ATCN PAM
uaucuagaguuuagaauuug

SEQ ID NO: 4176 - RNA, 20 nt, Artificial Sequence
  HTT spacer sequence ATCN PAM
cuauaacauaucuuacucca

SEQ ID NO: 4177 - RNA, 20 nt, Artificial Sequence
  HTT spacer sequence ATCN PAM
uacuccaucuucuuuugacu

SEQ ID NO: 4178 - RNA, 20 nt, Artificial Sequence
  HTT spacer sequence ATCN PAM
ucuuuugacuaaaaacuguu

SEQ ID NO: 4179 - RNA, 20 nt, Artificial Sequence
  HTT spacer sequence ATCN PAM
uaggccuggccaaacuauua

SEQ ID NO: 4180 - RNA, 20 nt, Artificial Sequence
  HTT spacer sequence ATCN PAM
auauuuugcccacacuugcu

SEQ ID NO: 4181 - RNA, 20 nt, Artificial Sequence
  HTT spacer sequence ATCN PAM
aaaauuaucaauauuuugcc

SEQ ID NO: 4182 - RNA, 20 nt, Artificial Sequence
  HTT spacer sequence ATCN PAM
aagaagcaaacucucucacc

SEQ ID NO: 4183 - RNA, 20 nt, Artificial Sequence
  HTT spacer sequence ATCN PAM
uagaauugcuuuuacugcau

SEQ ID NO: 4184 - RNA, 20 nt, Artificial Sequence
  HTT spacer sequence ATCN PAM
uccuagaauugcuuuuacug

SEQ ID NO: 4185 - RNA, 20 nt, Artificial Sequence
  HTT spacer sequence ATCN PAM
acaaggagggagaaaaaggc

SEQ ID NO: 4186 - RNA, 20 nt, Artificial Sequence
  HTT spacer sequence ATCN PAM
auaggagggucagcaagauu

SEQ ID NO: 4187 - RNA, 20 nt, Artificial Sequence
  HTT spacer sequence ATCN PAM
ugcugacccuccuauggaug

SEQ ID NO: 4188 - RNA, 20 nt, Artificial Sequence
  HTT spacer sequence ATCN PAM
caaauuuccuuuauaaaucu

SEQ ID NO: 4189 - RNA, 20 nt, Artificial Sequence
  HTT spacer sequence ATCN PAM
aaguaugaagcaaaauaagg

SEQ ID NO: 4190 - RNA, 20 nt, Artificial Sequence
  HTT spacer sequence ATCN PAM
auuacuugcuuaaaauuuau

SEQ ID NO: 4191 - RNA, 20 nt, Artificial Sequence
  HTT spacer sequence ATCN PAM
uucuuucuuucugagucuag

SEQ ID NO: 4192 - RNA, 20 nt, Artificial Sequence
  HTT spacer sequence ATCN PAM
cguguucauaaauguuauuc

SEQ ID NO: 4193 - RNA, 20 nt, Artificial Sequence
  HTT spacer sequence ATCN PAM
uacacaucacguguucauaa

SEQ ID NO: 4194 - RNA, 20 nt, Artificial Sequence
  HTT spacer sequence ATCN PAM
ccauaguaugaaagcagugc

SEQ ID NO: 4195 - RNA, 20 nt, Artificial Sequence
  HTT spacer sequence ATCN PAM
gcccccuccuaaauucuguu

SEQ ID NO: 4196 - RNA, 20 nt, Artificial Sequence
  HTT spacer sequence ATCN PAM
gcacccacauuuccuucacc

SEQ ID NO: 4197 - RNA, 20 nt, Artificial Sequence
  HTT spacer sequence ATCN PAM
ccuggcuccucucaauguaa

SEQ ID NO: 4198 - RNA, 20 nt, Artificial Sequence
  HTT spacer sequence ATCN PAM
auuuugaacaaagaaucucc

SEQ ID NO: 4199 - RNA, 20 nt, Artificial Sequence
  HTT spacer sequence ATCN PAM
gcuuauacuuugacuucuua

SEQ ID NO: 4200 - RNA, 20 nt, Artificial Sequence
  HTT spacer sequence ATCN PAM
ggccccuuacacaaaacauu

SEQ ID NO: 4201 - RNA, 20 nt, Artificial Sequence
  HTT spacer sequence ATCN PAM
caagucuguggcagcuacuc

SEQ ID NO: 4202 - RNA, 20 nt, Artificial Sequence
  HTT spacer sequence ATCN PAM
caggucagcaaaccacagug

SEQ ID NO: 4203 - RNA, 20 nt, Artificial Sequence
  HTT spacer sequence ATCN PAM
gaagagcuaaaagugagacu

SEQ ID NO: 4204 - RNA, 20 nt, Artificial Sequence
  HTT spacer sequence ATCN PAM
gacaguguagaagaguauaa

SEQ ID NO: 4205 - RNA, 20 nt, Artificial Sequence
  HTT spacer sequence ATCN PAM
uuaauauuauaaaauacaug

SEQ ID NO: 4206 - RNA, 20 nt, Artificial Sequence
  HTT spacer sequence ATCN PAM
gaaguucaaauuucacuggu

SEQ ID NO: 4207 - RNA, 20 nt, Artificial Sequence
  HTT spacer sequence ATCN PAM
ugugggacauacuuacacua

SEQ ID NO: 4208 - RNA, 20 nt, Artificial Sequence
  HTT spacer sequence ATCN PAM
ggcaacuguaauuaaaggga

SEQ ID NO: 4209 - RNA, 20 nt, Artificial Sequence
  HTT spacer sequence ATCN PAM
cauuauaugaacauaaugaa

SEQ ID NO: 4210 - RNA, 20 nt, Artificial Sequence
  HTT spacer sequence ATCN PAM
gacaggaggcggugcucagg

SEQ ID NO: 4211 - RNA, 20 nt, Artificial Sequence
  HTT spacer sequence ATCN PAM
guggcagcauuagauuccca

SEQ ID NO: 4212 - RNA, 20 nt, Artificial Sequence
  HTT spacer sequence ATCN PAM
aaugcugccacugaucugac

SEQ ID NO: 4213 - RNA, 20 nt, Artificial Sequence
  HTT spacer sequence ATCN PAM
aaugccugaugaucugaggu

SEQ ID NO: 4214 - RNA, 20 nt, Artificial Sequence
  HTT spacer sequence ATCN PAM
ggcauuagauucucauaagg

SEQ ID NO: 4215 - RNA, 20 nt, Artificial Sequence
  HTT spacer sequence ATCN PAM
ucaggcauuagauucucaua

SEQ ID NO: 4216 - RNA, 20 nt, Artificial Sequence
  HTT spacer sequence ATCN PAM
gagguggaacagucucgucu

SEQ ID NO: 4217 - RNA, 20 nt, Artificial Sequence
  HTT spacer sequence ATCN PAM
ccuggcccuguggaaaaauu

SEQ ID NO: 4218 - RNA, 20 nt, Artificial Sequence
  HTT spacer sequence ATCN PAM
cagugcuacccaaccuuucu

SEQ ID NO: 4219 - RNA, 20 nt, Artificial Sequence
  HTT spacer sequence ATCN PAM
aaaaacacuauuaugagugc

SEQ ID NO: 4220 - RNA, 20 nt, Artificial Sequence
  HTT spacer sequence ATCN PAM
cuauuucccaaaacugguga

SEQ ID NO: 4221 - RNA, 20 nt, Artificial Sequence
  HTT spacer sequence ATCN PAM
ucauucucaugcugcuccuc

SEQ ID NO: 4222 - RNA, 20 nt, Artificial Sequence
  HTT spacer sequence ATCN PAM
ugggaauuuagaaaacaaca

SEQ ID NO: 4223 - RNA, 20 nt, Artificial Sequence
  HTT spacer sequence ATCN PAM
uuagcuuccauguuguuuuc

SEQ ID NO: 4224 - RNA, 20 nt, Artificial Sequence
  HTT spacer sequence ATCN PAM
cauugguggaagugauaggg

SEQ ID NO: 4225 - RNA, 20 nt, Artificial Sequence
  HTT spacer sequence ATCN PAM
cuuccaccaaugugaucauu

SEQ ID NO: 4226 - RNA, 20 nt, Artificial Sequence
  HTT spacer sequence ATCN PAM
uaagcuucacuuuuuuguug

SEQ ID NO: 4227 - RNA, 20 nt, Artificial Sequence
  HTT spacer sequence ATCN PAM
uacacagcaccaagaccaca

SEQ ID NO: 4228 - RNA, 20 nt, Artificial Sequence
  HTT spacer sequence ATCN PAM
auagaguguaacuaguauua

SEQ ID NO: 4229 - RNA, 20 nt, Artificial Sequence
  HTT spacer sequence ATCN PAM
uccuugccaaaacuuauaau

SEQ ID NO: 4230 - RNA, 20 nt, Artificial Sequence
  HTT spacer sequence ATCN PAM
uuauuuuauaaauaggggag

SEQ ID NO: 4231 - RNA, 20 nt, Artificial Sequence
  HTT spacer sequence ATCN PAM
uuccaaagugcugaaauuac

SEQ ID NO: 4232 - RNA, 20 nt, Artificial Sequence
  HTT spacer sequence ATCN PAM
cuucagcccaggaguuugag

SEQ ID NO: 4233 - RNA, 20 nt, Artificial Sequence
  HTT spacer sequence ATCN PAM
uaccaccucagccuccaaag

SEQ ID NO: 4234 - RNA, 20 nt, Artificial Sequence
  HTT spacer sequence ATCN PAM
ugauggcagcugcacugagc

SEQ ID NO: 4235 - RNA, 20 nt, Artificial Sequence
  HTT spacer sequence ATCN PAM
agauucacugcagccucaac

SEQ ID NO: 4236 - RNA, 20 nt, Artificial Sequence
  HTT spacer sequence ATCN PAM
ugcucugucaccaggcucag

SEQ ID NO: 4237 - RNA, 20 nt, Artificial Sequence
  HTT spacer sequence ATCN PAM
ggaggaggggcuuuaaaugu

SEQ ID NO: 4238 - RNA, 20 nt, Artificial Sequence
  HTT spacer sequence ATCN PAM
uggaacuauuuucccuacug

SEQ ID NO: 4239 - RNA, 20 nt, Artificial Sequence
  HTT spacer sequence ATCN PAM
ucauguuaauuugccagaaa

SEQ ID NO: 4240 - RNA, 20 nt, Artificial Sequence
  HTT spacer sequence ATCN PAM
ucaagucgucagagggaucu

SEQ ID NO: 4241 - RNA, 20 nt, Artificial Sequence
  HTT spacer sequence ATCN PAM
cucugacgacuugaagaugc

SEQ ID NO: 4242 - RNA, 20 nt, Artificial Sequence
  HTT spacer sequence ATCN PAM
gagaguuccuuccuggccug

SEQ ID NO: 4243 - RNA, 20 nt, Artificial Sequence
  HTT spacer sequence ATCN PAM
gucuguccccagcucugcgu

SEQ ID NO: 4244 - RNA, 20 nt, Artificial Sequence
  HTT spacer sequence ATCN PAM
agcucccaaaggcagcucuc

SEQ ID NO: 4245 - RNA, 20 nt, Artificial Sequence
  HTT spacer sequence ATCN PAM
cagccucuaccacugggucu

SEQ ID NO: 4246 - RNA, 20 nt, Artificial Sequence
  HTT spacer sequence ATCN PAM
auagccugcuaggcaccaga

SEQ ID NO: 4247 - RNA, 20 nt, Artificial Sequence
  HTT spacer sequence ATCN PAM
gacugaagucuuacugcugc

SEQ ID NO: 4248 - RNA, 20 nt, Artificial Sequence
  HTT spacer sequence ATCN PAM
gccuuguuuccuguccuuua

SEQ ID NO: 4249 - RNA, 20 nt, Artificial Sequence
  HTT spacer sequence ATCN PAM
cuaaugaaaaguuauacuug

SEQ ID NO: 4250 - RNA, 20 nt, Artificial Sequence
  HTT spacer sequence ATCN PAM
gagauuucuaauacuuuuaa

SEQ ID NO: 4251 - RNA, 20 nt, Artificial Sequence
  HTT spacer sequence ATCN PAM
cagauuauuuagcugacuaa

SEQ ID NO: 4252 - RNA, 20 nt, Artificial Sequence
  HTT spacer sequence ATCN PAM
uagcuuuuuugauuucuuag

SEQ ID NO: 4253 - RNA, 20 nt, Artificial Sequence
  HTT spacer sequence ATCN PAM
aaaaagcuaagauaaauugc

SEQ ID NO: 4254 - RNA, 20 nt, Artificial Sequence
  HTT spacer sequence ATCN PAM
uuagaacuauauauuugaau

SEQ ID NO: 4255 - RNA, 20 nt, Artificial Sequence
  HTT spacer sequence ATCN PAM
caguucaacauuuuaauuuc

SEQ ID NO: 4256 - RNA, 20 nt, Artificial Sequence
  HTT spacer sequence ATCN PAM
agcuguuugaagauuuucac

SEQ ID NO: 4257 - RNA, 20 nt, Artificial Sequence
  HTT spacer sequence ATCN PAM
ucaaacagcuugauucaacu

SEQ ID NO: 4258 - RNA, 20 nt, Artificial Sequence
  HTT spacer sequence ATCN PAM
agaagaaaugugaaaaucuu

SEQ ID NO: 4259 - RNA, 20 nt, Artificial Sequence
  HTT spacer sequence ATCN PAM
gcuuguuacuuuaucuguca

SEQ ID NO: 4260 - RNA, 20 nt, Artificial Sequence
  HTT spacer sequence ATCN PAM
gucacuuucugugauuugca

SEQ ID NO: 4261 - RNA, 20 nt, Artificial Sequence
  HTT spacer sequence ATCN PAM
cagaaagugacagauaaagu

SEQ ID NO: 4262 - RNA, 20 nt, Artificial Sequence
  HTT spacer sequence ATCN PAM
ccuuuuuguuuucuugaaag

SEQ ID NO: 4263 - RNA, 20 nt, Artificial Sequence
  HTT spacer sequence ATCN PAM
gagucuuguguugaaucuua

SEQ ID NO: 4264 - RNA, 20 nt, Artificial Sequence
  HTT spacer sequence ATCN PAM
uacugauuuucuuguauuuc

SEQ ID NO: 4265 - RNA, 20 nt, Artificial Sequence
  HTT spacer sequence ATCN PAM
guaagauucaacacaagacu

SEQ ID NO: 4266 - RNA, 20 nt, Artificial Sequence
  HTT spacer sequence ATCN PAM
uguauuucuuguaauacugu

SEQ ID NO: 4267 - RNA, 20 nt, Artificial Sequence
  HTT spacer sequence ATCN PAM
cuucucagaugagugauuau

SEQ ID NO: 4268 - RNA, 20 nt, Artificial Sequence
  HTT spacer sequence ATCN PAM
gagaagagauauacacagag

SEQ ID NO: 4269 - RNA, 20 nt, Artificial Sequence
  HTT spacer sequence ATCN PAM
cucaucugagaagagauaua

SEQ ID NO: 4270 - RNA, 20 nt, Artificial Sequence
  HTT spacer sequence ATCN PAM
gauaaccaggccugaauagu

SEQ ID NO: 4271 - RNA, 20 nt, Artificial Sequence
  HTT spacer sequence ATCN PAM
gauuccagcaacauucacac

SEQ ID NO: 4272 - RNA, 20 nt, Artificial Sequence
  HTT spacer sequence ATCN PAM
gaauugcuuugucauaaauu

SEQ ID NO: 4273 - RNA, 20 nt, Artificial Sequence
  HTT spacer sequence ATCN PAM
uaaauuucuaauguucgggg

SEQ ID NO: 4274 - RNA, 20 nt, Artificial Sequence
  HTT spacer sequence ATCN PAM
uagcuuuaugggccauaugg

SEQ ID NO: 4275 - RNA, 20 nt, Artificial Sequence
  HTT spacer sequence ATCN PAM
ucuugccucagcccccugag

SEQ ID NO: 4276 - RNA, 20 nt, Artificial Sequence
  HTT spacer sequence ATCN PAM
uuuuucagccauauuuaacu

SEQ ID NO: 4277 - RNA, 20 nt, Artificial Sequence
  HTT spacer sequence ATCN PAM
gaauguucugauaaaacuua

SEQ ID NO: 4278 - RNA, 20 nt, Artificial Sequence
  HTT spacer sequence ATCN PAM
gaacauucugauauguacaa

SEQ ID NO: 4279 - RNA, 20 nt, Artificial Sequence
  HTT spacer sequence ATCN PAM
caaacacuuuaauaaaaguu

SEQ ID NO: 4280 - RNA, 20 nt, Artificial Sequence
  HTT spacer sequence ATCN PAM
gcuaguuuugguacacauua

SEQ ID NO: 4281 - RNA, 20 nt, Artificial Sequence
  HTT spacer sequence ATCN PAM
uuugcaaugccaguuauuuu

SEQ ID NO: 4282 - RNA, 20 nt, Artificial Sequence
  HTT spacer sequence ATCN PAM
uaaaagacugauccuuuuuu

SEQ ID NO: 4283 - RNA, 20 nt, Artificial Sequence
  HTT spacer sequence ATCN PAM
gucuuuuaagauuucaaaau

SEQ ID NO: 4284 - RNA, 20 nt, Artificial Sequence
  HTT spacer sequence ATCN PAM
uuuuuugugucaugauuuga

SEQ ID NO: 4285 - RNA, 20 nt, Artificial Sequence
  HTT spacer sequence ATCN PAM
ugacacaaaaaaggaucagu

SEQ ID NO: 4286 - RNA, 20 nt, Artificial Sequence
  HTT spacer sequence ATCN PAM
cauuuaauacugcaaauaau

SEQ ID NO: 4287 - RNA, 20 nt, Artificial Sequence
  HTT spacer sequence ATCN PAM
uaacaggaauagcauucuag

SEQ ID NO: 4288 - RNA, 20 nt, Artificial Sequence
  HTT spacer sequence ATCN PAM
auaauauuugcgucaucaua

SEQ ID NO: 4289 - RNA, 20 nt, Artificial Sequence
  HTT spacer sequence ATCN PAM
uaguaugagauacuuaauca

SEQ ID NO: 4290 - RNA, 20 nt, Artificial Sequence
  HTT spacer sequence ATCN PAM
cauacuaugaugacgcaaau

SEQ ID NO: 4291 - RNA, 20 nt, Artificial Sequence
  HTT spacer sequence ATCN PAM
aguuugagauuuuagugaaa

SEQ ID NO: 4292 - RNA, 20 nt, Artificial Sequence
  HTT spacer sequence ATCN PAM
caaacuugauuaaguaucuc

SEQ ID NO: 4293 - RNA, 20 nt, Artificial Sequence
  HTT spacer sequence ATCN PAM
uuuuggcuucuaaacaaugu

SEQ ID NO: 4294 - RNA, 20 nt, Artificial Sequence
  HTT spacer sequence ATCN PAM
cuccuaauucaagaauauag

SEQ ID NO: 4295 - RNA, 20 nt, Artificial Sequence
  HTT spacer sequence ATCN PAM
ucguucucaccgccacugga

SEQ ID NO: 4296 - RNA, 20 nt, Artificial Sequence
  HTT spacer sequence ATCN PAM
gucaucuucguucucaccgc

SEQ ID NO: 4297 - RNA, 20 nt, Artificial Sequence
  HTT spacer sequence ATCN PAM
gagcaaugugaaucagucau

SEQ ID NO: 4298 - RNA, 20 nt, Artificial Sequence
  HTT spacer sequence ATCN PAM
ucuucuggcugggacauggg

SEQ ID NO: 4299 - RNA, 20 nt, Artificial Sequence
  HTT spacer sequence ATCN PAM
caugucccagccagaagagg

SEQ ID NO: 4300 - RNA, 20 nt, Artificial Sequence
  HTT spacer sequence ATCN PAM
ugucucuuuuaagccuuuuu

SEQ ID NO: 4301 - RNA, 20 nt, Artificial Sequence
  HTT spacer sequence ATCN PAM
uuuuuaagugaaaucugccc

SEQ ID NO: 4302 - RNA, 20 nt, Artificial Sequence
  HTT spacer sequence ATCN PAM
gcccaaauuauaagacagau

SEQ ID NO: 4303 - RNA, 20 nt, Artificial Sequence
  HTT spacer sequence ATCN PAM
gucuuauaauuugggcagau

SEQ ID NO: 4304 - RNA, 20 nt, Artificial Sequence
  HTT spacer sequence ATCN PAM
aacacaacucuaccuucauc

SEQ ID NO: 4305 - RNA, 20 nt, Artificial Sequence
  HTT spacer sequence ATCN PAM
uauauccaacacaacucuac

SEQ ID NO: 4306 - RNA, 20 nt, Artificial Sequence
  HTT spacer sequence ATCN PAM
gugguuugcaaauauguucc

SEQ ID NO: 4307 - RNA, 20 nt, Artificial Sequence
  HTT spacer sequence ATCN PAM
uccaaaucagugguuugcaa

SEQ ID NO: 4308 - RNA, 20 nt, Artificial Sequence
  HTT spacer sequence ATCN PAM
cuaucuuccaaaucaguggu

SEQ ID NO: 4309 - RNA, 20 nt, Artificial Sequence
  HTT spacer sequence ATCN PAM
uaacaaaagccaucucuauc

SEQ ID NO: 4310 - RNA, 20 nt, Artificial Sequence
  HTT spacer sequence ATCN PAM
gaauucaccuuuuuggcauu

SEQ ID NO: 4311 - RNA, 20 nt, Artificial Sequence
  HTT spacer sequence ATCN PAM
aauaaaaugccaaaaaggug

SEQ ID NO: 4312 - RNA, 20 nt, Artificial Sequence
  HTT spacer sequence ATCN PAM
acuaaauaauaggaaacuuu

SEQ ID NO: 4313 - RNA, 20 nt, Artificial Sequence
  HTT spacer sequence ATCN PAM
acauggaauuaacacagcaa

SEQ ID NO: 4314 - RNA, 20 nt, Artificial Sequence
  HTT spacer sequence ATCN PAM
cacaucauuguaaguuuaug

SEQ ID NO: 4315 - RNA, 20 nt, Artificial Sequence
  HTT spacer sequence ATCN PAM
uuguaaguuuauggaaguua

SEQ ID NO: 4316 - RNA, 20 nt, Artificial Sequence
  HTT spacer sequence ATCN PAM
uacuucugacuuuuucuuug

SEQ ID NO: 4317 - RNA, 20 nt, Artificial Sequence
  HTT spacer sequence ATCN PAM
aaauaauuauugggaauuuc

SEQ ID NO: 4318 - RNA, 20 nt, Artificial Sequence
  HTT spacer sequence ATCN PAM
caugugagugucauuaaaug

SEQ ID NO: 4319 - RNA, 20 nt, Artificial Sequence
  HTT spacer sequence ATCN PAM
uuguggcuacaucacaugug

SEQ ID NO: 4320 - RNA, 20 nt, Artificial Sequence
  HTT spacer sequence ATCN PAM
uauuaagacuguugguuuca

SEQ ID NO: 4321 - RNA, 20 nt, Artificial Sequence
  HTT spacer sequence ATCN PAM
ucagaauuacauuaaugaga

SEQ ID NO: 4322 - RNA, 20 nt, Artificial Sequence
  HTT spacer sequence ATCN PAM
uuccagaucauauaaugcuu

SEQ ID NO: 4323 - RNA, 20 nt, Artificial Sequence
  HTT spacer sequence ATCN PAM
ggaaggaugaaauaauauuu

SEQ ID NO: 4324 - RNA, 20 nt, Artificial Sequence
  HTT spacer sequence ATCN PAM
uauaaugcuuaaguucugau

SEQ ID NO: 4325 - RNA, 20 nt, Artificial Sequence
  HTT spacer sequence ATCN PAM
gaacuuaagcauuauaugau

SEQ ID NO: 4326 - RNA, 20 nt, Artificial Sequence
  HTT spacer sequence ATCN PAM
uaaagucuagaaaauuaaaa

SEQ ID NO: 4327 - RNA, 20 nt, Artificial Sequence
  HTT spacer sequence ATCN PAM
uuuaauuuucuagacuuuau

SEQ ID NO: 4328 - RNA, 20 nt, Artificial Sequence
  HTT spacer sequence ATCN PAM
aaugcuauuggccuuugaaa

SEQ ID NO: 4329 - RNA, 20 nt, Artificial Sequence
  HTT spacer sequence ATCN PAM
uuacaguuauaacuuaccau

SEQ ID NO: 4330 - RNA, 20 nt, Artificial Sequence
  HTT spacer sequence ATCN PAM
auauuacuacuuaaacuuaa

SEQ ID NO: 4331 - RNA, 20 nt, Artificial Sequence
  HTT spacer sequence ATCN PAM
aaaucaauaaauauuaauua

SEQ ID NO: 4332 - RNA, 20 nt, Artificial Sequence
  HTT spacer sequence ATCN PAM
auaaauauuaauuauuaaaa

SEQ ID NO: 4333 - RNA, 20 nt, Artificial Sequence
  HTT spacer sequence ATCN PAM
uugcuuuuaacuuuuuccau

SEQ ID NO: 4334 - RNA, 20 nt, Artificial Sequence
  HTT spacer sequence ATCN PAM
cuacauucuuuguguuuaau

SEQ ID NO: 4335 - RNA, 20 nt, Artificial Sequence
  HTT spacer sequence ATCN PAM
uauauaaguauuuuuauacc

SEQ ID NO: 4336 - RNA, 20 nt, Artificial Sequence
  HTT spacer sequence ATCN PAM
ucauauauaaguauuuuuau

SEQ ID NO: 4337 - RNA, 20 nt, Artificial Sequence
  HTT spacer sequence ATCN PAM
uccaaggcuucuucuucucc

SEQ ID NO: 4338 - RNA, 20 nt, Artificial Sequence
  HTT spacer sequence ATCN PAM
agaucggaugucagcagcuc

SEQ ID NO: 4339 - RNA, 20 nt, Artificial Sequence
  HTT spacer sequence ATCN PAM
cgauucagagucauccucca

SEQ ID NO: 4340 - RNA, 20 nt, Artificial Sequence
  HTT spacer sequence ATCN PAM
gaugucagcagcucugccuu

SEQ ID NO: 4341 - RNA, 20 nt, Artificial Sequence
  HTT spacer sequence ATCN PAM
gaucucgauucagagucauc

SEQ ID NO: 4342 - RNA, 20 nt, Artificial Sequence
  HTT spacer sequence ATCN PAM
uauauuuguuguuuuccaug

SEQ ID NO: 4343 - RNA, 20 nt, Artificial Sequence
  HTT spacer sequence ATCN PAM
ccuacucacaaagcccuaug

SEQ ID NO: 4344 - RNA, 20 nt, Artificial Sequence
  HTT spacer sequence ATCN PAM
caugaguuggauggguuaug

SEQ ID NO: 4345 - RNA, 20 nt, Artificial Sequence
  HTT spacer sequence ATCN PAM
aacucaugagauguuucgac

SEQ ID NO: 4346 - RNA, 20 nt, Artificial Sequence
  HTT spacer sequence ATCN PAM
cauuucccaacccccagcau

SEQ ID NO: 4347 - RNA, 20 nt, Artificial Sequence
  HTT spacer sequence ATCN PAM
cauaauuuuucaucccauuu

SEQ ID NO: 4348 - RNA, 20 nt, Artificial Sequence
  HTT spacer sequence ATCN PAM
auaggcaauuuuucauccca

SEQ ID NO: 4349 - RNA, 20 nt, Artificial Sequence
  HTT spacer sequence ATCN PAM
gccuuuguuuacagauaguu

SEQ ID NO: 4350 - RNA, 20 nt, Artificial Sequence
  HTT spacer sequence ATCN PAM
guaaacaaaggcagauucuu

SEQ ID NO: 4351 - RNA, 20 nt, Artificial Sequence
  HTT spacer sequence ATCN PAM
uuuuucuuuuuugagauaga

SEQ ID NO: 4352 - RNA, 20 nt, Artificial Sequence
  HTT spacer sequence ATCN PAM
caaaaaagaaaaaagauaac

SEQ ID NO: 4353 - RNA, 20 nt, Artificial Sequence
  HTT spacer sequence ATCN PAM
gcacugggugacagugugag

SEQ ID NO: 4354 - RNA, 20 nt, Artificial Sequence
  HTT spacer sequence ATCN PAM
cuggaacccagaaggcggag

SEQ ID NO: 4355 - RNA, 20 nt, Artificial Sequence
  HTT spacer sequence ATCN PAM
cuugaggucaggaguucaag

SEQ ID NO: 4356 - RNA, 20 nt, Artificial Sequence
  HTT spacer sequence ATCN PAM
gccugccucagccucccaca

SEQ ID NO: 4357 - RNA, 20 nt, Artificial Sequence
  HTT spacer sequence ATCN PAM
cggcacugugggaggcugag

SEQ ID NO: 4358 - RNA, 20 nt, Artificial Sequence
  HTT spacer sequence ATCN PAM
guaacuggccgggcacagug

SEQ ID NO: 4359 - RNA, 20 nt, Artificial Sequence
  HTT spacer sequence ATCN PAM
aaugaaauucucuguguacu

SEQ ID NO: 4360 - RNA, 20 nt, Artificial Sequence
  HTT spacer sequence ATCN PAM
uuuauaaaguacacagagaa

SEQ ID NO: 4361 - RNA, 20 nt, Artificial Sequence
  HTT spacer sequence ATCN PAM
ucaucuuuuauaaaguacac

SEQ ID NO: 4362 - RNA, 20 nt, Artificial Sequence
  HTT spacer sequence ATCN PAM
aguuauuaguaccuucaguu

SEQ ID NO: 4363 - RNA, 20 nt, Artificial Sequence
  HTT spacer sequence ATCN PAM
uaucuaaaagaauauuuuag

SEQ ID NO: 4364 - RNA, 20 nt, Artificial Sequence
  HTT spacer sequence ATCN PAM
aaaagaauauuuuagcuaua

SEQ ID NO: 4365 - RNA, 20 nt, Artificial Sequence
  HTT spacer sequence ATCN PAM
gaauaauucuaguaguaauu

SEQ ID NO: 4366 - RNA, 20 nt, Artificial Sequence
  HTT spacer sequence ATCN PAM
auuuuuauuuuguaaauaaa

SEQ ID NO: 4367 - RNA, 20 nt, Artificial Sequence
  HTT spacer sequence ATCN PAM
aaaaaaaaucuauuuuuauu

SEQ ID NO: 4368 - RNA, 20 nt, Artificial Sequence
  HTT spacer sequence ATCN PAM
cagcaauccggauacuauaa

SEQ ID NO: 4369 - RNA, 20 nt, Artificial Sequence
  HTT spacer sequence ATCN PAM
ggauacuauaaagcucacau

SEQ ID NO: 4370 - RNA, 20 nt, Artificial Sequence
  HTT spacer sequence ATCN PAM
ggauugcugugauguuuuau

SEQ ID NO: 4371 - RNA, 20 nt, Artificial Sequence
  HTT spacer sequence ATCN PAM
uccaggagaauaggacugga

SEQ ID NO: 4372 - RNA, 20 nt, Artificial Sequence
  HTT spacer sequence ATCN PAM
cgacuccaguccuauucucc

SEQ ID NO: 4373 - RNA, 20 nt, Artificial Sequence
  HTT spacer sequence ATCN PAM
ugaauguggcuuggaagaag

SEQ ID NO: 4374 - RNA, 20 nt, Artificial Sequence
  HTT spacer sequence ATCN PAM
cucuggggugggcuugccuu

SEQ ID NO: 4375 - RNA, 20 nt, Artificial Sequence
  HTT spacer sequence ATCN PAM
ccuucugauaagccuuauuu

SEQ ID NO: 4376 - RNA, 20 nt, Artificial Sequence
  HTT spacer sequence ATCN PAM
gaaggugauauucucaaaug

SEQ ID NO: 4377 - RNA, 20 nt, Artificial Sequence
  HTT spacer sequence ATCN PAM
cucacacugccucccacuac

SEQ ID NO: 4378 - RNA, 20 nt, Artificial Sequence
  HTT spacer sequence ATCN PAM
uucaagcaucucucacacug

SEQ ID NO: 4379 - RNA, 20 nt, Artificial Sequence
  HTT spacer sequence ATCN PAM
ucaggaugcugugcagcuga

SEQ ID NO: 4380 - RNA, 20 nt, Artificial Sequence
  HTT spacer sequence ATCN PAM
ugaagaugcugaaaugcagg

SEQ ID NO: 4381 - RNA, 20 nt, Artificial Sequence
  HTT spacer sequence ATCN PAM
aauguuucagcugcacagca

SEQ ID NO: 4382 - RNA, 20 nt, Artificial Sequence
  HTT spacer sequence ATCN PAM
caggcuugcaaaauaacgaa

SEQ ID NO: 4383 - RNA, 20 nt, Artificial Sequence
  HTT spacer sequence ATCN PAM
uucacugaggcugaagacag

SEQ ID NO: 4384 - RNA, 20 nt, Artificial Sequence
  HTT spacer sequence ATCN PAM
cauccuucacugaggcugaa

SEQ ID NO: 4385 - RNA, 20 nt, Artificial Sequence
  HTT spacer sequence ATCN PAM
guggagagcuggcugcuucu

SEQ ID NO: 4386 - RNA, 20 nt, Artificial Sequence
  HTT spacer sequence ATCN PAM
ucacagaacagccacgguca

SEQ ID NO: 4387 - RNA, 20 nt, Artificial Sequence
  HTT spacer sequence ATCN PAM
cagaacagccacggucacag

SEQ ID NO: 4388 - RNA, 20 nt, Artificial Sequence
  HTT spacer sequence ATCN PAM
acugaguccgccugcagugu

SEQ ID NO: 4389 - RNA, 20 nt, Artificial Sequence
  HTT spacer sequence ATCN PAM
ggccagcugugacuugacaa

SEQ ID NO: 4390 - RNA, 20 nt, Artificial Sequence
  HTT spacer sequence ATCN PAM
guggcagagcuugucaaguc

SEQ ID NO: 4391 - RNA, 20 nt, Artificial Sequence
  HTT spacer sequence ATCN PAM
ccaucaguggcagagcuugu

SEQ ID NO: 4392 - RNA, 20 nt, Artificial Sequence
  HTT spacer sequence ATCN PAM
uccucauccccaucaguggc

SEQ ID NO: 4393 - RNA, 20 nt, Artificial Sequence
  HTT spacer sequence ATCN PAM
ugagccacagcuccagccag

SEQ ID NO: 4394 - RNA, 20 nt, Artificial Sequence
  HTT spacer sequence ATCN PAM
gacccugccauggaccugaa

SEQ ID NO: 4395 - RNA, 20 nt, Artificial Sequence
  HTT spacer sequence ATCN PAM
uucagguccauggcaggguc

SEQ ID NO: 4396 - RNA, 20 nt, Artificial Sequence
  HTT spacer sequence ATCN PAM
gcgacagcucccagaccacc

SEQ ID NO: 4397 - RNA, 20 nt, Artificial Sequence
  HTT spacer sequence ATCN PAM
ggcccuucggugguggucug

SEQ ID NO: 4398 - RNA, 20 nt, Artificial Sequence
  HTT spacer sequence ATCN PAM
uuuuuuuuauuuuuuauuug

SEQ ID NO: 4399 - RNA, 20 nt, Artificial Sequence
  HTT spacer sequence ATCN PAM
cagcacuuugggagacugag

SEQ ID NO: 4400 - RNA, 20 nt, Artificial Sequence
  HTT spacer sequence ATCN PAM
gccugccucagucucccaaa

SEQ ID NO: 4401 - RNA, 20 nt, Artificial Sequence
  HTT spacer sequence ATCN PAM
cuugaggucaggaguucgag

SEQ ID NO: 4402 - RNA, 20 nt, Artificial Sequence
  HTT spacer sequence ATCN PAM
cggcucauugcaaccucugc

SEQ ID NO: 4403 - RNA, 20 nt, Artificial Sequence
  HTT spacer sequence ATCN PAM
ugacacugcacuccagcccg

SEQ ID NO: 4404 - RNA, 20 nt, Artificial Sequence
  HTT spacer sequence ATCN PAM
cucgagccugggaggcagaa

SEQ ID NO: 4405 - RNA, 20 nt, Artificial Sequence
  HTT spacer sequence ATCN PAM
caccuacucaggaggcugag

SEQ ID NO: 4406 - RNA, 20 nt, Artificial Sequence
  HTT spacer sequence ATCN PAM
aaggucaggaguuugagacc

SEQ ID NO: 4407 - RNA, 20 nt, Artificial Sequence
  HTT spacer sequence ATCN PAM
ucuaaggucaggaguuugag

SEQ ID NO: 4408 - RNA, 20 nt, Artificial Sequence
  HTT spacer sequence ATCN PAM
acccaccuuggccuccuaaa

SEQ ID NO: 4409 - RNA, 20 nt, Artificial Sequence
  HTT spacer sequence ATCN PAM
caauacuuuaggaggccaag

SEQ ID NO: 4410 - RNA, 20 nt, Artificial Sequence
  HTT spacer sequence ATCN PAM
uuugaguucuucccuggaga

SEQ ID NO: 4411 - RNA, 20 nt, Artificial Sequence
  HTT spacer sequence ATCN PAM
aauaccccuauugacagcgc

SEQ ID NO: 4412 - RNA, 20 nt, Artificial Sequence
  HTT spacer sequence ATCN PAM
aagcugcgcugucaauaggg

SEQ ID NO: 4413 - RNA, 20 nt, Artificial Sequence
  HTT spacer sequence ATCN PAM
uuaauggagagcuugaccuc

SEQ ID NO: 4414 - RNA, 20 nt, Artificial Sequence
  HTT spacer sequence ATCN PAM
gauaccuucacugaaggaaa

SEQ ID NO: 4415 - RNA, 20 nt, Artificial Sequence
  HTT spacer sequence ATCN PAM
gaugaggucaagcucuccau

SEQ ID NO: 4416 - RNA, 20 nt, Artificial Sequence
  HTT spacer sequence ATCN PAM
acuauuccaauuuuuuaccu

SEQ ID NO: 4417 - RNA, 20 nt, Artificial Sequence
  HTT spacer sequence ATCN PAM
uuaaggagccuauuauaaac

SEQ ID NO: 4418 - RNA, 20 nt, Artificial Sequence
  HTT spacer sequence ATCN PAM
guuuauaauaggcuccuuaa

SEQ ID NO: 4419 - RNA, 20 nt, Artificial Sequence
  HTT spacer sequence ATCN PAM
guggucuuaaugaaauguga

SEQ ID NO: 4420 - RNA, 20 nt, Artificial Sequence
  HTT spacer sequence ATCN PAM
cauuucauuaagaccacaga

SEQ ID NO: 4421 - RNA, 20 nt, Artificial Sequence
  HTT spacer sequence ATCN PAM
aaugggaaauguuguaaaag

SEQ ID NO: 4422 - RNA, 20 nt, Artificial Sequence
  HTT spacer sequence ATCN PAM
cuaaguuaguggacaaaaaa

SEQ ID NO: 4423 - RNA, 20 nt, Artificial Sequence
  HTT spacer sequence ATCN PAM
augaggguuuuuuguccacu

SEQ ID NO: 4424 - RNA, 20 nt, Artificial Sequence
  HTT spacer sequence ATCN PAM
uugcuaccacccaucucugu

SEQ ID NO: 4425 - RNA, 20 nt, Artificial Sequence
  HTT spacer sequence ATCN PAM
cuguaaccuuuugaucaugu

SEQ ID NO: 4426 - RNA, 20 nt, Artificial Sequence
  HTT spacer sequence ATCN PAM
aaagguuacagagaugggug

SEQ ID NO: 4427 - RNA, 20 nt, Artificial Sequence
  HTT spacer sequence ATCN PAM
uguaacacugaagcucuguu

SEQ ID NO: 4428 - RNA, 20 nt, Artificial Sequence
  HTT spacer sequence ATCN PAM
ugguugccagggacuuggcg

SEQ ID NO: 4429 - RNA, 20 nt, Artificial Sequence
  HTT spacer sequence ATCN PAM
auacaauggaauaguauuug

SEQ ID NO: 4430 - RNA, 20 nt, Artificial Sequence
  HTT spacer sequence ATCN PAM
ugcuguuaugaacgugggug

SEQ ID NO: 4431 - RNA, 20 nt, Artificial Sequence
  HTT spacer sequence ATCN PAM
guacacccacguucauaaca

SEQ ID NO: 4432 - RNA, 20 nt, Artificial Sequence
  HTT spacer sequence ATCN PAM
uugaguguuuuacuuaauag

SEQ ID NO: 4433 - RNA, 20 nt, Artificial Sequence
  HTT spacer sequence ATCN PAM
ugugauguggaaucaugccc

SEQ ID NO: 4434 - RNA, 20 nt, Artificial Sequence
  HTT spacer sequence ATCN PAM
caagauguuucauguccacu

SEQ ID NO: 4435 - RNA, 20 nt, Artificial Sequence
  HTT spacer sequence ATCN PAM
ugccccaagcugauggcuaa

SEQ ID NO: 4436 - RNA, 20 nt, Artificial Sequence
  HTT spacer sequence ATCN PAM
gcuuggggcaugauuccaca

SEQ ID NO: 4437 - RNA, 20 nt, Artificial Sequence
  HTT spacer sequence ATCN PAM
acuaaauuuaggguauggua

SEQ ID NO: 4438 - RNA, 20 nt, Artificial Sequence
  HTT spacer sequence ATCN PAM
ccuaaauugcaaagacuaaa

SEQ ID NO: 4439 - RNA, 20 nt, Artificial Sequence
  HTT spacer sequence ATCN PAM
cucauucccacuacauuaug

SEQ ID NO: 4440 - RNA, 20 nt, Artificial Sequence
  HTT spacer sequence ATCN PAM
guaagcucuuagcaguuucc

SEQ ID NO: 4441 - RNA, 20 nt, Artificial Sequence
  HTT spacer sequence ATCN PAM
gucauuuauuucaaggcaca

SEQ ID NO: 4442 - RNA, 20 nt, Artificial Sequence
  HTT spacer sequence ATCN PAM
ccaagagacaagcccuccaa

SEQ ID NO: 4443 - RNA, 20 nt, Artificial Sequence
  HTT spacer sequence ATCN PAM
cacuucaaaauucucacagc

SEQ ID NO: 4444 - RNA, 20 nt, Artificial Sequence
  HTT spacer sequence ATCN PAM
gcaggcccaaauacugguug

SEQ ID NO: 4445 - RNA, 20 nt, Artificial Sequence
  HTT spacer sequence ATCN PAM
uggggcuguccaaucugcag

SEQ ID NO: 4446 - RNA, 20 nt, Artificial Sequence
  HTT spacer sequence ATCN PAM
ucauccuggggcuguccaau

SEQ ID NO: 4447 - RNA, 20 nt, Artificial Sequence
  HTT spacer sequence ATCN PAM
ggaagaauaccuguggcuuc

SEQ ID NO: 4448 - RNA, 20 nt, Artificial Sequence
  HTT spacer sequence ATCN PAM
ccuguaguccacauacccau

SEQ ID NO: 4449 - RNA, 20 nt, Artificial Sequence
  HTT spacer sequence ATCN PAM
uaauuauaucuuugcuucca

SEQ ID NO: 4450 - RNA, 20 nt, Artificial Sequence
  HTT spacer sequence ATCN PAM
uugcuuccaagaagaagucc

SEQ ID NO: 4451 - RNA, 20 nt, Artificial Sequence
  HTT spacer sequence ATCN PAM
aaggacuucuucuuggaagc

SEQ ID NO: 4452 - RNA, 20 nt, Artificial Sequence
  HTT spacer sequence ATCN PAM
gcuauucagaacucagaaaa

SEQ ID NO: 4453 - RNA, 20 nt, Artificial Sequence
  HTT spacer sequence ATCN PAM
uacuuuuucuugaucuaaau

SEQ ID NO: 4454 - RNA, 20 nt, Artificial Sequence
  HTT spacer sequence ATCN PAM
agaaaaaguaugauuauucc

SEQ ID NO: 4455 - RNA, 20 nt, Artificial Sequence
  HTT spacer sequence ATCN PAM
aaaucuuauacuuuugaguu

SEQ ID NO: 4456 - RNA, 20 nt, Artificial Sequence
  HTT spacer sequence ATCN PAM
uauacuuuugaguuaucuua

SEQ ID NO: 4457 - RNA, 20 nt, Artificial Sequence
  HTT spacer sequence ATCN PAM
uagcauaaauguauaauugu

SEQ ID NO: 4458 - RNA, 20 nt, Artificial Sequence
  HTT spacer sequence ATCN PAM
ugauuucucuguuuuuaaag

SEQ ID NO: 4459 - RNA, 20 nt, Artificial Sequence
  HTT spacer sequence ATCN PAM
agauuaagugacaaauuucc

SEQ ID NO: 4460 - RNA, 20 nt, Artificial Sequence
  HTT spacer sequence ATCN PAM
acacugcugucagaaggcug

SEQ ID NO: 4461 - RNA, 20 nt, Artificial Sequence
  HTT spacer sequence ATCN PAM
cucaacacaaauuuaucaac

SEQ ID NO: 4462 - RNA, 20 nt, Artificial Sequence
  HTT spacer sequence ATCN PAM
cccgguucaguagcuucauc

SEQ ID NO: 4463 - RNA, 20 nt, Artificial Sequence
  HTT spacer sequence ATCN PAM
agaaaacaaggugagggaca

SEQ ID NO: 4464 - RNA, 20 nt, Artificial Sequence
  HTT spacer sequence ATCN PAM
ucacacaagcucagaaacac

SEQ ID NO: 4465 - RNA, 20 nt, Artificial Sequence
  HTT spacer sequence ATCN PAM
cccuggcuacugucuacuuu

SEQ ID NO: 4466 - RNA, 20 nt, Artificial Sequence
  HTT spacer sequence ATCN PAM
cugggccuuuaaauuucccc

SEQ ID NO: 4467 - RNA, 20 nt, Artificial Sequence
  HTT spacer sequence ATCN PAM
auucuguacugaauguuucc

SEQ ID NO: 4468 - RNA, 20 nt, Artificial Sequence
  HTT spacer sequence ATCN PAM
gacaaggaaacauucaguac

SEQ ID NO: 4469 - RNA, 20 nt, Artificial Sequence
  HTT spacer sequence ATCN PAM
aagaaaucagacaaggaaac

SEQ ID NO: 4470 - RNA, 20 nt, Artificial Sequence
  HTT spacer sequence ATCN PAM
uucauuugaugguugcguau

SEQ ID NO: 4471 - RNA, 20 nt, Artificial Sequence
  HTT spacer sequence ATCN PAM
aaugaaugauccaagaaauc

SEQ ID NO: 4472 - RNA, 20 nt, Artificial Sequence
  HTT spacer sequence ATCN PAM
uuuuacauguaaauguaacu

SEQ ID NO: 4473 - RNA, 20 nt, Artificial Sequence
  HTT spacer sequence ATCN PAM
aucagaauuauagccuuugg

SEQ ID NO: 4474 - RNA, 20 nt, Artificial Sequence
  HTT spacer sequence ATCN PAM
gaauuauagccuuuggcauc

SEQ ID NO: 4475 - RNA, 20 nt, Artificial Sequence
  HTT spacer sequence ATCN PAM
cccuaucuaccaggcccacu

SEQ ID NO: 4476 - RNA, 20 nt, Artificial Sequence
  HTT spacer sequence ATCN PAM
accaggcccacuuccucuua

SEQ ID NO: 4477 - RNA, 20 nt, Artificial Sequence
  HTT spacer sequence ATCN PAM
aagaggaagugggccuggua

SEQ ID NO: 4478 - RNA, 20 nt, Artificial Sequence
  HTT spacer sequence ATCN PAM
ccugccacagcccugugacc

SEQ ID NO: 4479 - RNA, 20 nt, Artificial Sequence
  HTT spacer sequence ATCN PAM
cuuuauccccagcaccuggc

SEQ ID NO: 4480 - RNA, 20 nt, Artificial Sequence
  HTT spacer sequence ATCN PAM
ccagcaccuggcuuaagugc

SEQ ID NO: 4481 - RNA, 20 nt, Artificial Sequence
  HTT spacer sequence ATCN PAM
guugaaugaacuaaugcaug

SEQ ID NO: 4482 - RNA, 20 nt, Artificial Sequence
  HTT spacer sequence ATCN PAM
aaggugacauuggacagucc

SEQ ID NO: 4483 - RNA, 20 nt, Artificial Sequence
  HTT spacer sequence ATCN PAM
guggacuguccaaugucacc

SEQ ID NO: 4484 - RNA, 20 nt, Artificial Sequence
  HTT spacer sequence ATCN PAM
ucaguggacuguccaauguc

SEQ ID NO: 4485 - RNA, 20 nt, Artificial Sequence
  HTT spacer sequence ATCN PAM
gcuucguuuuugcuaacagg

SEQ ID NO: 4486 - RNA, 20 nt, Artificial Sequence
  HTT spacer sequence ATCN PAM
ccuuuuguacucaccauuuu

SEQ ID NO: 4487 - RNA, 20 nt, Artificial Sequence
  HTT spacer sequence ATCN PAM
gaggaugaguuugguuuuca

SEQ ID NO: 4488 - RNA, 20 nt, Artificial Sequence
  HTT spacer sequence ATCN PAM
ucagauucuacuuccucugc

SEQ ID NO: 4489 - RNA, 20 nt, Artificial Sequence
  HTT spacer sequence ATCN PAM
uuuccucccuccccucggcu

SEQ ID NO: 4490 - RNA, 20 nt, Artificial Sequence
  HTT spacer sequence ATCN PAM
guuguuugaggcugaaggug

SEQ ID NO: 4491 - RNA, 20 nt, Artificial Sequence
  HTT spacer sequence ATCN PAM
cccaagccaccuucagccuc

SEQ ID NO: 4492 - RNA, 20 nt, Artificial Sequence
  HTT spacer sequence ATCN PAM
cuguccggaaccagcacugc

SEQ ID NO: 4493 - RNA, 20 nt, Artificial Sequence
  HTT spacer sequence ATCN PAM
uucuucagcaaacucuauaa

SEQ ID NO: 4494 - RNA, 20 nt, Artificial Sequence
  HTT spacer sequence ATCN PAM
uauuuucucagauuuaauca

SEQ ID NO: 4495 - RNA, 20 nt, Artificial Sequence
  HTT spacer sequence ATCN PAM
gagaaaauaagaugugaacu

SEQ ID NO: 4496 - RNA, 20 nt, Artificial Sequence
  HTT spacer sequence ATCN PAM
uuauuguaaaaacuauuuca

SEQ ID NO: 4497 - RNA, 20 nt, Artificial Sequence
  HTT spacer sequence ATCN PAM
caaaugaacucaaaacacuu

SEQ ID NO: 4498 - RNA, 20 nt, Artificial Sequence
  HTT spacer sequence ATCN PAM
aaagggaacccaugaaacaa

SEQ ID NO: 4499 - RNA, 20 nt, Artificial Sequence
  HTT spacer sequence ATCN PAM
gauuuaaaccuaaagcacaa

SEQ ID NO: 4500 - RNA, 20 nt, Artificial Sequence
  HTT spacer sequence ATCN PAM
gauguguauauauguuggcu

SEQ ID NO: 4501 - RNA, 20 nt, Artificial Sequence
  HTT spacer sequence ATCN PAM
cgcccaugcuuacuauggag

SEQ ID NO: 4502 - RNA, 20 nt, Artificial Sequence
  HTT spacer sequence ATCN PAM
uuuuuaaguggaaucuggaa

SEQ ID NO: 4503 - RNA, 20 nt, Artificial Sequence
  HTT spacer sequence ATCN PAM
ggaauuuuaaucagauuuau

SEQ ID NO: 4504 - RNA, 20 nt, Artificial Sequence
  HTT spacer sequence ATCN PAM
gauuuauuaucugacaaccu

SEQ ID NO: 4505 - RNA, 20 nt, Artificial Sequence
  HTT spacer sequence ATCN PAM
gauuaaaauuccagauucca

SEQ ID NO: 4506 - RNA, 20 nt, Artificial Sequence
  HTT spacer sequence ATCN PAM
gacaaccuagaauuauaauc

SEQ ID NO: 4507 - RNA, 20 nt, Artificial Sequence
  HTT spacer sequence ATCN PAM
agaaagucugugguauugag

SEQ ID NO: 4508 - RNA, 20 nt, Artificial Sequence
  HTT spacer sequence ATCN PAM
uauugccaauauguccucaa

SEQ ID NO: 4509 - RNA, 20 nt, Artificial Sequence
  HTT spacer sequence ATCN PAM
cuaauucuuaaauccugaaa

SEQ ID NO: 4510 - RNA, 20 nt, Artificial Sequence
  HTT spacer sequence ATCN PAM
ugaaacuuuuuuuuuuuuaa

SEQ ID NO: 4511 - RNA, 20 nt, Artificial Sequence
  HTT spacer sequence ATCN PAM
cuuaggguuauuauagugaa

SEQ ID NO: 4512 - RNA, 20 nt, Artificial Sequence
  HTT spacer sequence ATCN PAM
aaauucagaaaugacuucac

SEQ ID NO: 4513 - RNA, 20 nt, Artificial Sequence
  HTT spacer sequence ATCN PAM
ucucuucacaccucuuuuuc

SEQ ID NO: 4514 - RNA, 20 nt, Artificial Sequence
  HTT spacer sequence ATCN PAM
acuuucuaacucgaaacaaa

SEQ ID NO: 4515 - RNA, 20 nt, Artificial Sequence
  HTT spacer sequence ATCN PAM
ccacagaggaacaguauguc

SEQ ID NO: 4516 - RNA, 20 nt, Artificial Sequence
  HTT spacer sequence ATCN PAM
ugaacuacaucgaucaugga

SEQ ID NO: 4517 - RNA, 20 nt, Artificial Sequence
  HTT spacer sequence ATCN PAM
aucauggagacccacagguu

SEQ ID NO: 4518 - RNA, 20 nt, Artificial Sequence
  HTT spacer sequence ATCN PAM
auguaguucaagaugucuga

SEQ ID NO: 4519 - RNA, 20 nt, Artificial Sequence
  HTT spacer sequence ATCN PAM
uggagacccacagguucgag

SEQ ID NO: 4520 - RNA, 20 nt, Artificial Sequence
  HTT spacer sequence ATCN PAM
gcuccauccucagcaggucc

SEQ ID NO: 4521 - RNA, 20 nt, Artificial Sequence
  HTT spacer sequence ATCN PAM
ucagcaggucccgcuuccac

SEQ ID NO: 4522 - RNA, 20 nt, Artificial Sequence
  HTT spacer sequence ATCN PAM
cccacguggaagcgggaccu

SEQ ID NO: 4523 - RNA, 20 nt, Artificial Sequence
  HTT spacer sequence ATCN PAM
aaucucccacguggaagcgg

SEQ ID NO: 4524 - RNA, 20 nt, Artificial Sequence
  HTT spacer sequence ATCN PAM
aaacuuaaaccuuaguaagc

SEQ ID NO: 4525 - RNA, 20 nt, Artificial Sequence
  HTT spacer sequence ATCN PAM
ucuaaacuuaaaccuuagua

SEQ ID NO: 4526 - RNA, 20 nt, Artificial Sequence
  HTT spacer sequence ATCN PAM
ucaucuaaacuuaaaccuua

SEQ ID NO: 4527 - RNA, 20 nt, Artificial Sequence
  HTT spacer sequence ATCN PAM
gccaaagaaaauguauuucc

SEQ ID NO: 4528 - RNA, 20 nt, Artificial Sequence
  HTT spacer sequence ATCN PAM
uucaguguuuuccgcagcaa

SEQ ID NO: 4529 - RNA, 20 nt, Artificial Sequence
  HTT spacer sequence ATCN PAM
ucuguggaaccauuucuuca

SEQ ID NO: 4530 - RNA, 20 nt, Artificial Sequence
  HTT spacer sequence ATCN PAM
uugcuacaauuaaaauugga

SEQ ID NO: 4531 - RNA, 20 nt, Artificial Sequence
  HTT spacer sequence ATCN PAM
aucucucagcuuuagaaaga

SEQ ID NO: 4532 - RNA, 20 nt, Artificial Sequence
  HTT spacer sequence ATCN PAM
cucagcuuuagaaagaaaac

SEQ ID NO: 4533 - RNA, 20 nt, Artificial Sequence
  HTT spacer sequence ATCN PAM
uuuaggaagaggucuauuuc

SEQ ID NO: 4534 - RNA, 20 nt, Artificial Sequence
  HTT spacer sequence ATCN PAM
uuaaguguaaagucuguuga

SEQ ID NO: 4535 - RNA, 20 nt, Artificial Sequence
  HTT spacer sequence ATCN PAM
gaccacuuugggaggccaag

SEQ ID NO: 4536 - RNA, 20 nt, Artificial Sequence
  HTT spacer sequence ATCN PAM
uuccaccuuggccucccaaa

SEQ ID NO: 4537 - RNA, 20 nt, Artificial Sequence
  HTT spacer sequence ATCN PAM
ccccuccaccucagcuuccc

SEQ ID NO: 4538 - RNA, 20 nt, Artificial Sequence
  HTT spacer sequence ATCN PAM
cuggggcucaagcaaucccc

SEQ ID NO: 4539 - RNA, 20 nt, Artificial Sequence
  HTT spacer sequence ATCN PAM
aggcugcaguaaggcguggu

SEQ ID NO: 4540 - RNA, 20 nt, Artificial Sequence
  HTT spacer sequence ATCN PAM
guugaauuaaaaaaaaaaaa

SEQ ID NO: 4541 - RNA, 20 nt, Artificial Sequence
  HTT spacer sequence ATCN PAM
cuaaggcucacuuuaacucu

SEQ ID NO: 4542 - RNA, 20 nt, Artificial Sequence
  HTT spacer sequence ATCN PAM
cuuaaagaauugagccuauu

SEQ ID NO: 4543 - RNA, 20 nt, Artificial Sequence
  HTT spacer sequence ATCN PAM
aagcaaaaaaccuacaauug

SEQ ID NO: 4544 - RNA, 20 nt, Artificial Sequence
  HTT spacer sequence ATCN PAM
cacaaauuugacaauuguag

SEQ ID NO: 4545 - RNA, 20 nt, Artificial Sequence
  HTT spacer sequence ATCN PAM
uguggcuagcugggggucuu

SEQ ID NO: 4546 - RNA, 20 nt, Artificial Sequence
  HTT spacer sequence ATCN PAM
caugcauggcugacacaaag

SEQ ID NO: 4547 - RNA, 20 nt, Artificial Sequence
  HTT spacer sequence ATCN PAM
cagacccagggguaggaaca

SEQ ID NO: 4548 - RNA, 20 nt, Artificial Sequence
  HTT spacer sequence ATCN PAM
guuacagaggggccugccgc

SEQ ID NO: 4549 - RNA, 20 nt, Artificial Sequence
  HTT spacer sequence ATCN PAM
auguuugugaaguugcuguu

SEQ ID NO: 4550 - RNA, 20 nt, Artificial Sequence
  HTT spacer sequence ATCN PAM
caguaaauacaagcuuaaaa

SEQ ID NO: 4551 - RNA, 20 nt, Artificial Sequence
  HTT spacer sequence ATCN PAM
auguucuugagagguguggg

SEQ ID NO: 4552 - RNA, 20 nt, Artificial Sequence
  HTT spacer sequence ATCN PAM
ugguugcaguuaaacccaga

SEQ ID NO: 4553 - RNA, 20 nt, Artificial Sequence
  HTT spacer sequence ATCN PAM
gcugcaguccuaacucacug

SEQ ID NO: 4554 - RNA, 20 nt, Artificial Sequence
  HTT spacer sequence ATCN PAM
ucgaugugcugacucugagg

SEQ ID NO: 4555 - RNA, 20 nt, Artificial Sequence
  HTT spacer sequence ATCN PAM
augugcugacucugaggaac

SEQ ID NO: 4556 - RNA, 20 nt, Artificial Sequence
  HTT spacer sequence ATCN PAM
augaucagcugcaguccuaa

SEQ ID NO: 4557 - RNA, 20 nt, Artificial Sequence
  HTT spacer sequence ATCN PAM
cugcaaggguuuccagaagc

SEQ ID NO: 4558 - RNA, 20 nt, Artificial Sequence
  HTT spacer sequence ATCN PAM
auuagauuucaugaacuaag

SEQ ID NO: 4559 - RNA, 20 nt, Artificial Sequence
  HTT spacer sequence ATCN PAM
aauggaugugacucacuuac

SEQ ID NO: 4560 - RNA, 20 nt, Artificial Sequence
  HTT spacer sequence ATCN PAM
cagaacuuucaauugagcuu

SEQ ID NO: 4561 - RNA, 20 nt, Artificial Sequence
  HTT spacer sequence ATCN PAM
cuugaugcaaggaaugaugu

SEQ ID NO: 4562 - RNA, 20 nt, Artificial Sequence
  HTT spacer sequence ATCN PAM
agugaucccagaacuuucaa

SEQ ID NO: 4563 - RNA, 20 nt, Artificial Sequence
  HTT spacer sequence ATCN PAM
uuccuugcaucaagugaucc

SEQ ID NO: 4564 - RNA, 20 nt, Artificial Sequence
  HTT spacer sequence ATCN PAM
aguacccuguccaucagaaa

SEQ ID NO: 4565 - RNA, 20 nt, Artificial Sequence
  HTT spacer sequence ATCN PAM
gaaauccgagugguuuaggu

SEQ ID NO: 4566 - RNA, 20 nt, Artificial Sequence
  HTT spacer sequence ATCN PAM
gagugguuuagguagaugac

SEQ ID NO: 4567 - RNA, 20 nt, Artificial Sequence
  HTT spacer sequence ATCN PAM
accuaaaccacucggauuuc

SEQ ID NO: 4568 - RNA, 20 nt, Artificial Sequence
  HTT spacer sequence ATCN PAM
cugucaucuaccuaaaccac

SEQ ID NO: 4569 - RNA, 20 nt, Artificial Sequence
  HTT spacer sequence ATCN PAM
ugucucuaaauaaauaauaa

SEQ ID NO: 4570 - RNA, 20 nt, Artificial Sequence
  HTT spacer sequence ATCN PAM
ugcucugucgcccaggcuug

SEQ ID NO: 4571 - RNA, 20 nt, Artificial Sequence
  HTT spacer sequence ATCN PAM
uagcucacugaagcuuugaa

SEQ ID NO: 4572 - RNA, 20 nt, Artificial Sequence
  HTT spacer sequence ATCN PAM
ggaggcugaggcaggaggac

SEQ ID NO: 4573 - RNA, 20 nt, Artificial Sequence
  HTT spacer sequence ATCN PAM
agcccaggaguuugagacca

SEQ ID NO: 4574 - RNA, 20 nt, Artificial Sequence
  HTT spacer sequence ATCN PAM
aucaagcccaggaguuugag

SEQ ID NO: 4575 - RNA, 20 nt, Artificial Sequence
  HTT spacer sequence ATCN PAM
uccaucuuggccucccaaag

SEQ ID NO: 4576 - RNA, 20 nt, Artificial Sequence
  HTT spacer sequence ATCN PAM
uggccucccaaagugcuggg

SEQ ID NO: 4577 - RNA, 20 nt, Artificial Sequence
  HTT spacer sequence ATCN PAM
cagcacuuugggaggccaag

SEQ ID NO: 4578 - RNA, 20 nt, Artificial Sequence
  HTT spacer sequence ATCN PAM
acucuucuacuuauauuuua

SEQ ID NO: 4579 - RNA, 20 nt, Artificial Sequence
  HTT spacer sequence ATCN PAM
agaauacuuaaaugacgagg

SEQ ID NO: 4580 - RNA, 20 nt, Artificial Sequence
  HTT spacer sequence ATCN PAM
uugucuuaaacuuuuaaaaa

SEQ ID NO: 4581 - RNA, 20 nt, Artificial Sequence
  HTT spacer sequence ATCN PAM
uggcucacugcaaccacagc

SEQ ID NO: 4582 - RNA, 20 nt, Artificial Sequence
  HTT spacer sequence ATCN PAM
uuagaauguuuauaaaucug

SEQ ID NO: 4583 - RNA, 20 nt, Artificial Sequence
  HTT spacer sequence ATCN PAM
gggcuuguucucggcuccac

SEQ ID NO: 4584 - RNA, 20 nt, Artificial Sequence
  HTT spacer sequence ATCN PAM
guggguggagccgagaacaa

SEQ ID NO: 4585 - RNA, 20 nt, Artificial Sequence
  HTT spacer sequence ATCN PAM
ugcugcccacucaugcacgc

SEQ ID NO: 4586 - RNA, 20 nt, Artificial Sequence
  HTT spacer sequence ATCN PAM
aggugcccuggaaggaccuu

SEQ ID NO: 4587 - RNA, 20 nt, Artificial Sequence
  HTT spacer sequence ATCN PAM
uuuaguuacucaguaaacac

SEQ ID NO: 4588 - RNA, 20 nt, Artificial Sequence
  HTT spacer sequence ATCN PAM
uuauacagggguaagcgguu

SEQ ID NO: 4589 - RNA, 20 nt, Artificial Sequence
  HTT spacer sequence ATCN PAM
cacaaaaauaaaccgcuuac

SEQ ID NO: 4590 - RNA, 20 nt, Artificial Sequence
  HTT spacer sequence ATCN PAM
aaaacaugacgaaugcauuu

SEQ ID NO: 4591 - RNA, 20 nt, Artificial Sequence
  HTT spacer sequence ATCN PAM
ugaaaguuauaaucuuguca

SEQ ID NO: 4592 - RNA, 20 nt, Artificial Sequence
  HTT spacer sequence ATCN PAM
ugucauauggauuuaagucu

SEQ ID NO: 4593 - RNA, 20 nt, Artificial Sequence
  HTT spacer sequence ATCN PAM
auaugacaagauuauaacuu

SEQ ID NO: 4594 - RNA, 20 nt, Artificial Sequence
  HTT spacer sequence ATCN PAM
uaccuaaaauuuagucaaau

SEQ ID NO: 4595 - RNA, 20 nt, Artificial Sequence
  HTT spacer sequence ATCN PAM
uguauuugacuaaauuuuag

SEQ ID NO: 4596 - RNA, 20 nt, Artificial Sequence
  HTT spacer sequence ATCN PAM
uucucucuaaagcuuuuaaa

SEQ ID NO: 4597 - RNA, 20 nt, Artificial Sequence
  HTT spacer sequence ATCN PAM
auuugcuuggagaugaagac

SEQ ID NO: 4598 - RNA, 20 nt, Artificial Sequence
  HTT spacer sequence ATCN PAM
ccaagcaaauggaugacaac

SEQ ID NO: 4599 - RNA, 20 nt, Artificial Sequence
  HTT spacer sequence ATCN PAM
cuaauuagguauuuaccaau

SEQ ID NO: 4600 - RNA, 20 nt, Artificial Sequence
  HTT spacer sequence ATCN PAM
cuuuuccuuuuuugguugaa

SEQ ID NO: 4601 - RNA, 20 nt, Artificial Sequence
  HTT spacer sequence ATCN PAM
uuuaguacuucaaccaaaaa

SEQ ID NO: 4602 - RNA, 20 nt, Artificial Sequence
  HTT spacer sequence ATCN PAM
uuugaauucuucccucucuu

SEQ ID NO: 4603 - RNA, 20 nt, Artificial Sequence
  HTT spacer sequence ATCN PAM
gagcucauuucagccauucu

SEQ ID NO: 4604 - RNA, 20 nt, Artificial Sequence
  HTT spacer sequence ATCN PAM
aaaaaagucuaaaauuauaa

SEQ ID NO: 4605 - RNA, 20 nt, Artificial Sequence
  HTT spacer sequence ATCN PAM
ccuucaauucugcugccacc

SEQ ID NO: 4606 - RNA, 20 nt, Artificial Sequence
  HTT spacer sequence ATCN PAM
cuguuaauauuuugcuauau

SEQ ID NO: 4607 - RNA, 20 nt, Artificial Sequence
  HTT spacer sequence ATCN PAM
ggucaaaauuacaugcaauu

SEQ ID NO: 4608 - RNA, 20 nt, Artificial Sequence
  HTT spacer sequence ATCN PAM
gacaauuuccacuuaauauu

SEQ ID NO: 4609 - RNA, 20 nt, Artificial Sequence
  HTT spacer sequence ATCN PAM
caaccgcauagcaaaacaac

SEQ ID NO: 4610 - RNA, 20 nt, Artificial Sequence
  HTT spacer sequence ATCN PAM
cggcucacugcaaccucugu

SEQ ID NO: 4611 - RNA, 20 nt, Artificial Sequence
  HTT spacer sequence ATCN PAM
cuugaaccagggagacagag

SEQ ID NO: 4612 - RNA, 20 nt, Artificial Sequence
  HTT spacer sequence ATCN PAM
cagcuacucgggaggcugag

SEQ ID NO: 4613 - RNA, 20 nt, Artificial Sequence
  HTT spacer sequence ATCN PAM
ugaaacccugucucuacuaa

SEQ ID NO: 4614 - RNA, 20 nt, Artificial Sequence
  HTT spacer sequence ATCN PAM
cggggucagaaguucgagac

SEQ ID NO: 4615 - RNA, 20 nt, Artificial Sequence
  HTT spacer sequence ATCN PAM
accugcauuggccucccaaa

SEQ ID NO: 4616 - RNA, 20 nt, Artificial Sequence
  HTT spacer sequence ATCN PAM
cagcacuuugggaggccaau

SEQ ID NO: 4617 - RNA, 20 nt, Artificial Sequence
  HTT spacer sequence ATCN PAM
ucuaauagcuuuauggaggu

SEQ ID NO: 4618 - RNA, 20 nt, Artificial Sequence
  HTT spacer sequence ATCN PAM
cauuucugucaccccaaaug

SEQ ID NO: 4619 - RNA, 20 nt, Artificial Sequence
  HTT spacer sequence ATCN PAM
uugugcccauuugcuguaac

SEQ ID NO: 4620 - RNA, 20 nt, Artificial Sequence
  HTT spacer sequence ATCN PAM
auuuucugucccuuaagauu

SEQ ID NO: 4621 - RNA, 20 nt, Artificial Sequence
  HTT spacer sequence ATCN PAM
uaagggacagaaaauagaug

SEQ ID NO: 4622 - RNA, 20 nt, Artificial Sequence
  HTT spacer sequence ATCN PAM
cagcacuuugggaggccgag

SEQ ID NO: 4623 - RNA, 20 nt, Artificial Sequence
  HTT spacer sequence ATCN PAM
accaaccucggccucccaaa

SEQ ID NO: 4624 - RNA, 20 nt, Artificial Sequence
  HTT spacer sequence ATCN PAM
cuugaggucaggaguucgag

SEQ ID NO: 4625 - RNA, 20 nt, Artificial Sequence
  HTT spacer sequence ATCN PAM
gacuaauuuuuguauuuuua

SEQ ID NO: 4626 - RNA, 20 nt, Artificial Sequence
  HTT spacer sequence ATCN PAM
cagcuacucgggaggcugag

SEQ ID NO: 4627 - RNA, 20 nt, Artificial Sequence
  HTT spacer sequence ATCN PAM
cuugaaccugggaggcggag

SEQ ID NO: 4628 - RNA, 20 nt, Artificial Sequence
  HTT spacer sequence ATCN PAM
cugcucacugcaaccuccgc

SEQ ID NO: 4629 - RNA, 20 nt, Artificial Sequence
  HTT spacer sequence ATCN PAM
cgccacugccuuccaaccug

SEQ ID NO: 4630 - RNA, 20 nt, Artificial Sequence
  HTT spacer sequence ATCN PAM
uuguuuguuuugagacaguc

SEQ ID NO: 4631 - RNA, 20 nt, Artificial Sequence
  HTT spacer sequence ATCN PAM
auacuaugaccccaguacua

SEQ ID NO: 4632 - RNA, 20 nt, Artificial Sequence
  HTT spacer sequence ATCN PAM
cacaauuaaguaaaagaagc

SEQ ID NO: 4633 - RNA, 20 nt, Artificial Sequence
  HTT spacer sequence ATCN PAM
guaguuuguucauuuuuauu

SEQ ID NO: 4634 - RNA, 20 nt, Artificial Sequence
  HTT spacer sequence ATCN PAM
auccaucagauggauauuau

SEQ ID NO: 4635 - RNA, 20 nt, Artificial Sequence
  HTT spacer sequence ATCN PAM
aucagauggauauuauagag

SEQ ID NO: 4636 - RNA, 20 nt, Artificial Sequence
  HTT spacer sequence ATCN PAM
gauggauauuauagaguuca

SEQ ID NO: 4637 - RNA, 20 nt, Artificial Sequence
  HTT spacer sequence ATCN PAM
gauggauagauaaaauaugg

SEQ ID NO: 4638 - RNA, 20 nt, Artificial Sequence
  HTT spacer sequence ATCN PAM
aucugauggauagauaaaau

SEQ ID NO: 4639 - RNA, 20 nt, Artificial Sequence
  HTT spacer sequence ATCN PAM
ugcaggcaaauguucacagu

SEQ ID NO: 4640 - RNA, 20 nt, Artificial Sequence
  HTT spacer sequence ATCN PAM
acucaagagaaaugaagaca

SEQ ID NO: 4641 - RNA, 20 nt, Artificial Sequence
  HTT spacer sequence ATCN PAM
ccuagaaguggauuuuuaaa

SEQ ID NO: 4642 - RNA, 20 nt, Artificial Sequence
  HTT spacer sequence ATCN PAM
acuucuaggugaucuacuca

SEQ ID NO: 4643 - RNA, 20 nt, Artificial Sequence
  HTT spacer sequence ATCN PAM
cagacuucaccauguaacca

SEQ ID NO: 4644 - RNA, 20 nt, Artificial Sequence
  HTT spacer sequence ATCN PAM
cauucugguagugggaguau

SEQ ID NO: 4645 - RNA, 20 nt, Artificial Sequence
  HTT spacer sequence ATCN PAM
ggcacaaucacauucuggua

SEQ ID NO: 4646 - RNA, 20 nt, Artificial Sequence
  HTT spacer sequence ATCN PAM
guuuuuugggcagaaguuga

SEQ ID NO: 4647 - RNA, 20 nt, Artificial Sequence
  HTT spacer sequence ATCN PAM
acuucugcccaaaaaacuga

SEQ ID NO: 4648 - RNA, 20 nt, Artificial Sequence
  HTT spacer sequence ATCN PAM
caaaaaaaauaaauaaauaa

SEQ ID NO: 4649 - RNA, 20 nt, Artificial Sequence
  HTT spacer sequence ATCN PAM
uagaaugagacccuaucuca

SEQ ID NO: 4650 - RNA, 20 nt, Artificial Sequence
  HTT spacer sequence ATCN PAM
caccaccacacuccagccug

SEQ ID NO: 4651 - RNA, 20 nt, Artificial Sequence
  HTT spacer sequence ATCN PAM
cggcucacugcagucucugc

SEQ ID NO: 4652 - RNA, 20 nt, Artificial Sequence
  HTT spacer sequence ATCN PAM
cuugaaccugggaggcagag

SEQ ID NO: 4653 - RNA, 20 nt, Artificial Sequence
  HTT spacer sequence ATCN PAM
cuaccaaaaaauacaaaaau

SEQ ID NO: 4654 - RNA, 20 nt, Artificial Sequence
  HTT spacer sequence ATCN PAM
cuugaggucaggagcuugag

SEQ ID NO: 4655 - RNA, 20 nt, Artificial Sequence
  HTT spacer sequence ATCN PAM
accugccuuggccuuccaaa

SEQ ID NO: 4656 - RNA, 20 nt, Artificial Sequence
  HTT spacer sequence ATCN PAM
cagcacuuuggaaggccaag

SEQ ID NO: 4657 - RNA, 20 nt, Artificial Sequence
  HTT spacer sequence ATCN PAM
gccgggugugguagcucacg

SEQ ID NO: 4658 - RNA, 20 nt, Artificial Sequence
  HTT spacer sequence ATCN PAM
uuguaaucaaacuacugaaa

SEQ ID NO: 4659 - RNA, 20 nt, Artificial Sequence
  HTT spacer sequence ATCN PAM
aacuacugaaaagaaaacca

SEQ ID NO: 4660 - RNA, 20 nt, Artificial Sequence
  HTT spacer sequence ATCN PAM
uuguaauuugcauuucuuug

SEQ ID NO: 4661 - RNA, 20 nt, Artificial Sequence
  HTT spacer sequence ATCN PAM
aagaaaugcaaauuacaaug

SEQ ID NO: 4662 - RNA, 20 nt, Artificial Sequence
  HTT spacer sequence ATCN PAM
cugaauaggcaagucauaua

SEQ ID NO: 4663 - RNA, 20 nt, Artificial Sequence
  HTT spacer sequence ATCN PAM
uuugcagaaaaugguaaagc

SEQ ID NO: 4664 - RNA, 20 nt, Artificial Sequence
  HTT spacer sequence ATCN PAM
uggcucauugcaacuauugc

SEQ ID NO: 4665 - RNA, 20 nt, Artificial Sequence
  HTT spacer sequence ATCN PAM
cuugaacccaggaggcaaua

SEQ ID NO: 4666 - RNA, 20 nt, Artificial Sequence
  HTT spacer sequence ATCN PAM
cagcuacuugggaggcugag

SEQ ID NO: 4667 - RNA, 20 nt, Artificial Sequence
  HTT spacer sequence ATCN PAM
uuaguagagaugggguuuug

SEQ ID NO: 4668 - RNA, 20 nt, Artificial Sequence
  HTT spacer sequence ATCN PAM
cuacuaaagauacaaaaauu

SEQ ID NO: 4669 - RNA, 20 nt, Artificial Sequence
  HTT spacer sequence ATCN PAM
gcccggccaacauggcaaaa

SEQ ID NO: 4670 - RNA, 20 nt, Artificial Sequence
  HTT spacer sequence ATCN PAM
ugaacuccuggccucaagcg

SEQ ID NO: 4671 - RNA, 20 nt, Artificial Sequence
  HTT spacer sequence ATCN PAM
cagcacuuugggaggccgag

SEQ ID NO: 4672 - RNA, 20 nt, Artificial Sequence
  HTT spacer sequence ATCN PAM
ugaguagaauuuuuucuaga

SEQ ID NO: 4673 - RNA, 20 nt, Artificial Sequence
  HTT spacer sequence ATCN PAM
agucuccaugaggaaagaga

SEQ ID NO: 4674 - RNA, 20 nt, Artificial Sequence
  HTT spacer sequence ATCN PAM
ucaauuaaagucucuuuccu

SEQ ID NO: 4675 - RNA, 20 nt, Artificial Sequence
  HTT spacer sequence ATCN PAM
uggggcuugcagaccaauau

SEQ ID NO: 4676 - RNA, 20 nt, Artificial Sequence
  HTT spacer sequence ATCN PAM
uauuggucugcaagccccau

SEQ ID NO: 4677 - RNA, 20 nt, Artificial Sequence
  HTT spacer sequence ATCN PAM
acacucaguaauacuuuuag

SEQ ID NO: 4678 - RNA, 20 nt, Artificial Sequence
  HTT spacer sequence ATCN PAM
gccaucaacacucaguaaua

SEQ ID NO: 4679 - RNA, 20 nt, Artificial Sequence
  HTT spacer sequence ATCN PAM
aaacugaauucaaauggaga

SEQ ID NO: 4680 - RNA, 20 nt, Artificial Sequence
  HTT spacer sequence ATCN PAM
cagcuuaagcuuugccaucu

SEQ ID NO: 4681 - RNA, 20 nt, Artificial Sequence
  HTT spacer sequence ATCN PAM
gggaguguuugggacaguuu

SEQ ID NO: 4682 - RNA, 20 nt, Artificial Sequence
  HTT spacer sequence ATCN PAM
acaagugcugaacagugucu

SEQ ID NO: 4683 - RNA, 20 nt, Artificial Sequence
  HTT spacer sequence ATCN PAM
gaagguuuagaaagagaacu

SEQ ID NO: 4684 - RNA, 20 nt, Artificial Sequence
  HTT spacer sequence ATCN PAM
cuuucuauuuacacuauuaa

SEQ ID NO: 4685 - RNA, 20 nt, Artificial Sequence
  HTT spacer sequence ATCN PAM
agcacuauggggggcugagg

SEQ ID NO: 4686 - RNA, 20 nt, Artificial Sequence
  HTT spacer sequence ATCN PAM
acccaccucagccccccaua

SEQ ID NO: 4687 - RNA, 20 nt, Artificial Sequence
  HTT spacer sequence ATCN PAM
cgaggucaggaguucaagag

SEQ ID NO: 4688 - RNA, 20 nt, Artificial Sequence
  HTT spacer sequence ATCN PAM
ccuuggccaggcuguucuug

SEQ ID NO: 4689 - RNA, 20 nt, Artificial Sequence
  HTT spacer sequence ATCN PAM
cagcuacucaggaggcugag

SEQ ID NO: 4690 - RNA, 20 nt, Artificial Sequence
  HTT spacer sequence ATCN PAM
cuugaaccuggacggcagag

SEQ ID NO: 4691 - RNA, 20 nt, Artificial Sequence
  HTT spacer sequence ATCN PAM
uggcucacugcaaccucugc

SEQ ID NO: 4692 - RNA, 20 nt, Artificial Sequence
  HTT spacer sequence ATCN PAM
cagggucacucucaugcacc

SEQ ID NO: 4693 - RNA, 20 nt, Artificial Sequence
  HTT spacer sequence ATCN PAM
gcagggaggaggguggucua

SEQ ID NO: 4694 - RNA, 20 nt, Artificial Sequence
  HTT spacer sequence ATCN PAM
caggugaguuucaucuacuu

SEQ ID NO: 4695 - RNA, 20 nt, Artificial Sequence
  HTT spacer sequence ATCN PAM
acuuucuuaagcaaauuaac

SEQ ID NO: 4696 - RNA, 20 nt, Artificial Sequence
  HTT spacer sequence ATCN PAM
gcuuguccuuggucacauuu

SEQ ID NO: 4697 - RNA, 20 nt, Artificial Sequence
  HTT spacer sequence ATCN PAM
aguaguggccguggcaagag

SEQ ID NO: 4698 - RNA, 20 nt, Artificial Sequence
  HTT spacer sequence ATCN PAM
cuugccacggccacuacugg

SEQ ID NO: 4699 - RNA, 20 nt, Artificial Sequence
  HTT spacer sequence ATCN PAM
aagcaguguuuaccugaaac

SEQ ID NO: 4700 - RNA, 20 nt, Artificial Sequence
  HTT spacer sequence ATCN PAM
cauuucuccgucagcacaau

SEQ ID NO: 4701 - RNA, 20 nt, Artificial Sequence
  HTT spacer sequence ATCN PAM
ucacauugucgggaaaaugc

SEQ ID NO: 4702 - RNA, 20 nt, Artificial Sequence
  HTT spacer sequence ATCN PAM
ggaaagggcauuuucccgac

SEQ ID NO: 4703 - RNA, 20 nt, Artificial Sequence
  HTT spacer sequence ATCN PAM
ugagcugaagcuuuuuucua

SEQ ID NO: 4704 - RNA, 20 nt, Artificial Sequence
  HTT spacer sequence ATCN PAM
aaggacugaccuacacucaa

SEQ ID NO: 4705 - RNA, 20 nt, Artificial Sequence
  HTT spacer sequence ATCN PAM
uaucaaaggacugaccuaca

SEQ ID NO: 4706 - RNA, 20 nt, Artificial Sequence
  HTT spacer sequence ATCN PAM
uuuugaggauugaccacacc

SEQ ID NO: 4707 - RNA, 20 nt, Artificial Sequence
  HTT spacer sequence ATCN PAM
ucaaaaugauaauauccuau

SEQ ID NO: 4708 - RNA, 20 nt, Artificial Sequence
  HTT spacer sequence ATCN PAM
cucagcugugacacuguaaa

SEQ ID NO: 4709 - RNA, 20 nt, Artificial Sequence
  HTT spacer sequence ATCN PAM
cuuaauaguuuauuacauuc

SEQ ID NO: 4710 - RNA, 20 nt, Artificial Sequence
  HTT spacer sequence ATCN PAM
guuaaaacauuuucacuuua

SEQ ID NO: 4711 - RNA, 20 nt, Artificial Sequence
  HTT spacer sequence ATCN PAM
ucuuuaaagguaacacaacu

SEQ ID NO: 4712 - RNA, 20 nt, Artificial Sequence
  HTT spacer sequence ATCN PAM
ugccuguugauuuuuuggug

SEQ ID NO: 4713 - RNA, 20 nt, Artificial Sequence
  HTT spacer sequence ATCN PAM
acaggcaugauagaauacaa

SEQ ID NO: 4714 - RNA, 20 nt, Artificial Sequence
  HTT spacer sequence ATCN PAM
acuaguucagugauuugcga

SEQ ID NO: 4715 - RNA, 20 nt, Artificial Sequence
  HTT spacer sequence ATCN PAM
cugaacuaguggauaacccu

SEQ ID NO: 4716 - RNA, 20 nt, Artificial Sequence
  HTT spacer sequence ATCN PAM
cgcaaaucacugaacuagug

SEQ ID NO: 4717 - RNA, 20 nt, Artificial Sequence
  HTT spacer sequence ATCN PAM
uucacauuuauuguggagcu

SEQ ID NO: 4718 - RNA, 20 nt, Artificial Sequence
  HTT spacer sequence ATCN PAM
ugucaaauggccacauauau

SEQ ID NO: 4719 - RNA, 20 nt, Artificial Sequence
  HTT spacer sequence ATCN PAM
cauucuuaucugcuucuuag

SEQ ID NO: 4720 - RNA, 20 nt, Artificial Sequence
  HTT spacer sequence ATCN PAM
gcuucuuaggugagugggac

SEQ ID NO: 4721 - RNA, 20 nt, Artificial Sequence
  HTT spacer sequence ATCN PAM
ucagaauucuagcuugcaga

SEQ ID NO: 4722 - RNA, 20 nt, Artificial Sequence
  HTT spacer sequence ATCN PAM
ucucugcaagcuagaauucu

SEQ ID NO: 4723 - RNA, 20 nt, Artificial Sequence
  HTT spacer sequence ATCN PAM
cuucugcaaucuucucugca

SEQ ID NO: 4724 - RNA, 20 nt, Artificial Sequence
  HTT spacer sequence ATCN PAM
uauaaagccaauuuuuaaaa

SEQ ID NO: 4725 - RNA, 20 nt, Artificial Sequence
  HTT spacer sequence ATCN PAM
uuuaagcuuagaagucauuu

SEQ ID NO: 4726 - RNA, 20 nt, Artificial Sequence
  HTT spacer sequence ATCN PAM
cuugaugcuuuuuuucugaa

SEQ ID NO: 4727 - RNA, 20 nt, Artificial Sequence
  HTT spacer sequence ATCN PAM
agugaucauuuaagcuuaga

SEQ ID NO: 4728 - RNA, 20 nt, Artificial Sequence
  HTT spacer sequence ATCN PAM
aauaucaaagucauaauucc

SEQ ID NO: 4729 - RNA, 20 nt, Artificial Sequence
  HTT spacer sequence ATCN PAM
aagucauaauuccugaauaa

SEQ ID NO: 4730 - RNA, 20 nt, Artificial Sequence
  HTT spacer sequence ATCN PAM
uaacacuuugggaggcccag

SEQ ID NO: 4731 - RNA, 20 nt, Artificial Sequence
  HTT spacer sequence ATCN PAM
cagcuacucgggaggcugag

SEQ ID NO: 4732 - RNA, 20 nt, Artificial Sequence
  HTT spacer sequence ATCN PAM
cucagccucccgaguagcug

SEQ ID NO: 4733 - RNA, 20 nt, Artificial Sequence
  HTT spacer sequence ATCN PAM
cuugagccccggaggcagag

SEQ ID NO: 4734 - RNA, 20 nt, Artificial Sequence
  HTT spacer sequence ATCN PAM
uggcucacugcaaccucugc

SEQ ID NO: 4735 - RNA, 20 nt, Artificial Sequence
  HTT spacer sequence ATCN PAM
gaggggaaauauuaaggugg

SEQ ID NO: 4736 - RNA, 20 nt, Artificial Sequence
  HTT spacer sequence ATCN PAM
ucuccaagagagaaaaugcc

SEQ ID NO: 4737 - RNA, 20 nt, Artificial Sequence
  HTT spacer sequence ATCN PAM
uaaaggaguauuuguccuga

SEQ ID NO: 4738 - RNA, 20 nt, Artificial Sequence
  HTT spacer sequence ATCN PAM
ucuuucacugcuucuacuua

SEQ ID NO: 4739 - RNA, 20 nt, Artificial Sequence
  HTT spacer sequence ATCN PAM
aauccucuuucacugcuucu

SEQ ID NO: 4740 - RNA, 20 nt, Artificial Sequence
  HTT spacer sequence ATCN PAM
ggaauuugauaagcuuagaa

SEQ ID NO: 4741 - RNA, 20 nt, Artificial Sequence
  HTT spacer sequence ATCN PAM
aauuccugauaaucaaaucc

SEQ ID NO: 4742 - RNA, 20 nt, Artificial Sequence
  HTT spacer sequence ATCN PAM
ucugaaaugacauuaagaag

SEQ ID NO: 4743 - RNA, 20 nt, Artificial Sequence
  HTT spacer sequence ATCN PAM
auuaauaaauauucaucuuc

SEQ ID NO: 4744 - RNA, 20 nt, Artificial Sequence
  HTT spacer sequence ATCN PAM
caguuggcaucuauuaauaa

SEQ ID NO: 4745 - RNA, 20 nt, Artificial Sequence
  HTT spacer sequence ATCN PAM
uuaaaauugauuacuaacua

SEQ ID NO: 4746 - RNA, 20 nt, Artificial Sequence
  HTT spacer sequence ATCN PAM
auuuuaaugauaucucaguu

SEQ ID NO: 4747 - RNA, 20 nt, Artificial Sequence
  HTT spacer sequence ATCN PAM
cgcaagacccaauugaccac

SEQ ID NO: 4748 - RNA, 20 nt, Artificial Sequence
  HTT spacer sequence ATCN PAM
aucacgcaagacccaauuga

SEQ ID NO: 4749 - RNA, 20 nt, Artificial Sequence
  HTT spacer sequence ATCN PAM
uaaucuccuuaguuuuguug

SEQ ID NO: 4750 - RNA, 20 nt, Artificial Sequence
  HTT spacer sequence ATCN PAM
ccuuaguuuuguugaguguc

SEQ ID NO: 4751 - RNA, 20 nt, Artificial Sequence
  HTT spacer sequence ATCN PAM
cucacagugucuuguccacg

SEQ ID NO: 4752 - RNA, 20 nt, Artificial Sequence
  HTT spacer sequence ATCN PAM
gauuggcuuuauucaaacca

SEQ ID NO: 4753 - RNA, 20 nt, Artificial Sequence
  HTT spacer sequence ATCN PAM
gauuuuguaucccucacagu

SEQ ID NO: 4754 - RNA, 20 nt, Artificial Sequence
  HTT spacer sequence ATCN PAM
cccauuauaguuauauacaa

SEQ ID NO: 4755 - RNA, 20 nt, Artificial Sequence
  HTT spacer sequence ATCN PAM
cccacggcacuuuuuugcau

SEQ ID NO: 4756 - RNA, 20 nt, Artificial Sequence
  HTT spacer sequence ATCN PAM
guuuaaguugaaauacaugc

SEQ ID NO: 4757 - RNA, 20 nt, Artificial Sequence
  HTT spacer sequence ATCN PAM
uuauuccauaacaauggcug

SEQ ID NO: 4758 - RNA, 20 nt, Artificial Sequence
  HTT spacer sequence ATCN PAM
aaauuuauuuucagcccguu

SEQ ID NO: 4759 - RNA, 20 nt, Artificial Sequence
  HTT spacer sequence ATCN PAM
uuaaucuuaaacuuuuaaau

SEQ ID NO: 4760 - RNA, 20 nt, Artificial Sequence
  HTT spacer sequence ATCN PAM
uaaacuuuuaaaugccauuu

SEQ ID NO: 4761 - RNA, 20 nt, Artificial Sequence
  HTT spacer sequence ATCN PAM
aauggcauuuaaaaguuuaa

SEQ ID NO: 4762 - RNA, 20 nt, Artificial Sequence
  HTT spacer sequence ATCN PAM
uuaaaaauauauguuuuaau

SEQ ID NO: 4763 - RNA, 20 nt, Artificial Sequence
  HTT spacer sequence ATCN PAM
caucaaccaccagagcacuc

SEQ ID NO: 4764 - RNA, 20 nt, Artificial Sequence
  HTT spacer sequence ATCN PAM
accaccagagcacucacagu

SEQ ID NO: 4765 - RNA, 20 nt, Artificial Sequence
  HTT spacer sequence ATCN PAM
agaaagagacuuacugugag

SEQ ID NO: 4766 - RNA, 20 nt, Artificial Sequence
  HTT spacer sequence ATCN PAM
gucuuacugacauuguaaua

SEQ ID NO: 4767 - RNA, 20 nt, Artificial Sequence
  HTT spacer sequence ATCN PAM
uacggugaggugcuugucuu

SEQ ID NO: 4768 - RNA, 20 nt, Artificial Sequence
  HTT spacer sequence ATCN PAM
augaggcuugcuaagaaauu

SEQ ID NO: 4769 - RNA, 20 nt, Artificial Sequence
  HTT spacer sequence ATCN PAM
cagcuuacuccaggaaugua

SEQ ID NO: 4770 - RNA, 20 nt, Artificial Sequence
  HTT spacer sequence ATCN PAM
gaaaaaacauagucauuuac

SEQ ID NO: 4771 - RNA, 20 nt, Artificial Sequence
  HTT spacer sequence ATCN PAM
cagcacuuugggaggccaag

SEQ ID NO: 4772 - RNA, 20 nt, Artificial Sequence
  HTT spacer sequence ATCN PAM
gacuccugaccucaagugag

SEQ ID NO: 4773 - RNA, 20 nt, Artificial Sequence
  HTT spacer sequence ATCN PAM
cuacuaaaaauacaaaaauu

SEQ ID NO: 4774 - RNA, 20 nt, Artificial Sequence
  HTT spacer sequence ATCN PAM
cagcuacucaggaggcugag

SEQ ID NO: 4775 - RNA, 20 nt, Artificial Sequence
  HTT spacer sequence ATCN PAM
cuugaaccugggagguagag

SEQ ID NO: 4776 - RNA, 20 nt, Artificial Sequence
  HTT spacer sequence ATCN PAM
gaaguuuaaaaugucuagau

SEQ ID NO: 4777 - RNA, 20 nt, Artificial Sequence
  HTT spacer sequence ATCN PAM
agacauuuuaaacuucugau

SEQ ID NO: 4778 - RNA, 20 nt, Artificial Sequence
  HTT spacer sequence ATCN PAM
ugccauugcacuccagccug

SEQ ID NO: 4779 - RNA, 20 nt, Artificial Sequence
  HTT spacer sequence ATCN PAM
cagcucaccacaaccuccac

SEQ ID NO: 4780 - RNA, 20 nt, Artificial Sequence
  HTT spacer sequence ATCN PAM
cagcuacucaggaggcugag

SEQ ID NO: 4781 - RNA, 20 nt, Artificial Sequence
  HTT spacer sequence ATCN PAM
ccugagguugggaguuugag

SEQ ID NO: 4782 - RNA, 20 nt, Artificial Sequence
  HTT spacer sequence ATCN PAM
gcccuccucgaccccccaaa

SEQ ID NO: 4783 - RNA, 20 nt, Artificial Sequence
  HTT spacer sequence ATCN PAM
cagcacuuuggggggucgag

SEQ ID NO: 4784 - RNA, 20 nt, Artificial Sequence
  HTT spacer sequence ATCN PAM
aagaauccaagaauaauuaa

SEQ ID NO: 4785 - RNA, 20 nt, Artificial Sequence
  HTT spacer sequence ATCN PAM
aagaauaauuaaauuaugua

SEQ ID NO: 4786 - RNA, 20 nt, Artificial Sequence
  HTT spacer sequence ATCN PAM
cacuauauacuagcauaugu

SEQ ID NO: 4787 - RNA, 20 nt, Artificial Sequence
  HTT spacer sequence ATCN PAM
ccauauuguuaaaaauucuc

SEQ ID NO: 4788 - RNA, 20 nt, Artificial Sequence
  HTT spacer sequence ATCN PAM
ggauuguaauauugagugaa

SEQ ID NO: 4789 - RNA, 20 nt, Artificial Sequence
  HTT spacer sequence ATCN PAM
agauuauacaucuccauauu

SEQ ID NO: 4790 - RNA, 20 nt, Artificial Sequence
  HTT spacer sequence ATCN PAM
gacuauacccccaccagguu

SEQ ID NO: 4791 - RNA, 20 nt, Artificial Sequence
  HTT spacer sequence ATCN PAM
gccagugugagaaauguaua

SEQ ID NO: 4792 - RNA, 20 nt, Artificial Sequence
  HTT spacer sequence ATCN PAM
ccaagauaaauuuugggauu

SEQ ID NO: 4793 - RNA, 20 nt, Artificial Sequence
  HTT spacer sequence ATCN PAM
uggugauuaucugccagugu

SEQ ID NO: 4794 - RNA, 20 nt, Artificial Sequence
  HTT spacer sequence ATCN PAM
caaaauuuaucuuggugauu

SEQ ID NO: 4795 - RNA, 20 nt, Artificial Sequence
  HTT spacer sequence ATCN PAM
acaaucccaaaauuuaucuu

SEQ ID NO: 4796 - RNA, 20 nt, Artificial Sequence
  HTT spacer sequence ATCN PAM
uccacaaucccaaaauuuau

SEQ ID NO: 4797 - RNA, 20 nt, Artificial Sequence
  HTT spacer sequence ATCN PAM
gaaaaauauaaagaagaaaa

SEQ ID NO: 4798 - RNA, 20 nt, Artificial Sequence
  HTT spacer sequence ATCN PAM
gaaaaaaauaauauacaaaa

SEQ ID NO: 4799 - RNA, 20 nt, Artificial Sequence
  HTT spacer sequence ATCN PAM
caaaaaauaaaaauaaaaag

SEQ ID NO: 4800 - RNA, 20 nt, Artificial Sequence
  HTT spacer sequence ATCN PAM
cacucuguugcccaggcuag

SEQ ID NO: 4801 - RNA, 20 nt, Artificial Sequence
  HTT spacer sequence ATCN PAM
ugccacugugcucuagccug

SEQ ID NO: 4802 - RNA, 20 nt, Artificial Sequence
  HTT spacer sequence ATCN PAM
uggcucacugcagccuccgc

SEQ ID NO: 4803 - RNA, 20 nt, Artificial Sequence
  HTT spacer sequence ATCN PAM
uuugaacccaggaagcggag

SEQ ID NO: 4804 - RNA, 20 nt, Artificial Sequence
  HTT spacer sequence ATCN PAM
cgaggucaggaguucgagac

SEQ ID NO: 4805 - RNA, 20 nt, Artificial Sequence
  HTT spacer sequence ATCN PAM
acccaccucggccucccaaa

SEQ ID NO: 4806 - RNA, 20 nt, Artificial Sequence
  HTT spacer sequence ATCN PAM
cagcacuuugggaggccgag

SEQ ID NO: 4807 - RNA, 20 nt, Artificial Sequence
  HTT spacer sequence ATCN PAM
agggaagaccauacugcaga

SEQ ID NO: 4808 - RNA, 20 nt, Artificial Sequence
  HTT spacer sequence ATCN PAM
uaaacuuugcuuauuuauuu

SEQ ID NO: 4809 - RNA, 20 nt, Artificial Sequence
  HTT spacer sequence ATCN PAM
caagccuacaacagugcccg

SEQ ID NO: 4810 - RNA, 20 nt, Artificial Sequence
  HTT spacer sequence ATCN PAM
uguuuuuccaucccaagccu

SEQ ID NO: 4811 - RNA, 20 nt, Artificial Sequence
  HTT spacer sequence ATCN PAM
ucucccugaccagccugcag

SEQ ID NO: 4812 - RNA, 20 nt, Artificial Sequence
  HTT spacer sequence ATCN PAM
uuaggagcugagcuccagcu

SEQ ID NO: 4813 - RNA, 20 nt, Artificial Sequence
  HTT spacer sequence ATCN PAM
cccacccuuccgccucucaa

SEQ ID NO: 4814 - RNA, 20 nt, Artificial Sequence
  HTT spacer sequence ATCN PAM
uuccagggugugggcagcac

SEQ ID NO: 4815 - RNA, 20 nt, Artificial Sequence
  HTT spacer sequence ATCN PAM
caaugaagagagguuccugu

SEQ ID NO: 4816 - RNA, 20 nt, Artificial Sequence
  HTT spacer sequence ATCN PAM
gaauggcaauuauaucccaa

SEQ ID NO: 4817 - RNA, 20 nt, Artificial Sequence
  HTT spacer sequence ATCN PAM
gucccaccaugguacaacuu

SEQ ID NO: 4818 - RNA, 20 nt, Artificial Sequence
  HTT spacer sequence ATCN PAM
ugugguuaucauacacagau

SEQ ID NO: 4819 - RNA, 20 nt, Artificial Sequence
  HTT spacer sequence ATCN PAM
uacacagaucucaguuuucu

SEQ ID NO: 4820 - RNA, 20 nt, Artificial Sequence
  HTT spacer sequence ATCN PAM
guguaugauaaccacaggau

SEQ ID NO: 4821 - RNA, 20 nt, Artificial Sequence
  HTT spacer sequence ATCN PAM
caguuuucuucucauuguuu

SEQ ID NO: 4822 - RNA, 20 nt, Artificial Sequence
  HTT spacer sequence ATCN PAM
ccuguuacccuuuauaaaaa

SEQ ID NO: 4823 - RNA, 20 nt, Artificial Sequence
  HTT spacer sequence ATCN PAM
cacccaaacaccacaaaggu

SEQ ID NO: 4824 - RNA, 20 nt, Artificial Sequence
  HTT spacer sequence ATCN PAM
aaacugagaagaaagaaaca

SEQ ID NO: 4825 - RNA, 20 nt, Artificial Sequence
  HTT spacer sequence ATCN PAM
uaauaacuauguuuauguca

SEQ ID NO: 4826 - RNA, 20 nt, Artificial Sequence
  HTT spacer sequence ATCN PAM
auuuggcuuuuuggaaaaau

SEQ ID NO: 4827 - RNA, 20 nt, Artificial Sequence
  HTT spacer sequence ATCN PAM
gauggaauacuuguuucugc

SEQ ID NO: 4828 - RNA, 20 nt, Artificial Sequence
  HTT spacer sequence ATCN PAM
gauauuuuuccaaaaagcca

SEQ ID NO: 4829 - RNA, 20 nt, Artificial Sequence
  HTT spacer sequence ATCN PAM
augccuaagaacauuuggca

SEQ ID NO: 4830 - RNA, 20 nt, Artificial Sequence
  HTT spacer sequence ATCN PAM
ccauuucguaugcuagguca

SEQ ID NO: 4831 - RNA, 20 nt, Artificial Sequence
  HTT spacer sequence ATCN PAM
ucaccauuucguaugcuagg

SEQ ID NO: 4832 - RNA, 20 nt, Artificial Sequence
  HTT spacer sequence ATCN PAM
uuuuuaaauaaaagcuguua

SEQ ID NO: 4833 - RNA, 20 nt, Artificial Sequence
  HTT spacer sequence ATCN PAM
acuggaggaaaaucauuuuu

SEQ ID NO: 4834 - RNA, 20 nt, Artificial Sequence
  HTT spacer sequence ATCN PAM
gggaaauaauuucaagucuu

SEQ ID NO: 4835 - RNA, 20 nt, Artificial Sequence
  HTT spacer sequence ATCN PAM
auuacugagaaugauuuugg

SEQ ID NO: 4836 - RNA, 20 nt, Artificial Sequence
  HTT spacer sequence ATCN PAM
uucucaguaauugauacaca

SEQ ID NO: 4837 - RNA, 20 nt, Artificial Sequence
  HTT spacer sequence ATCN PAM
cauuugagaaguaaaccugc

SEQ ID NO: 4838 - RNA, 20 nt, Artificial Sequence
  HTT spacer sequence ATCN PAM
gcagguuuacuucucaaaug

SEQ ID NO: 4839 - RNA, 20 nt, Artificial Sequence
  HTT spacer sequence ATCN PAM
guuggucauuugcugacaca

SEQ ID NO: 4840 - RNA, 20 nt, Artificial Sequence
  HTT spacer sequence ATCN PAM
acuucaagcaaauaucaguu

SEQ ID NO: 4841 - RNA, 20 nt, Artificial Sequence
  HTT spacer sequence ATCN PAM
gcucuagaaugauugcuuuc

SEQ ID NO: 4842 - RNA, 20 nt, Artificial Sequence
  HTT spacer sequence ATCN PAM
uucuagagcagauaauguaa

SEQ ID NO: 4843 - RNA, 20 nt, Artificial Sequence
  HTT spacer sequence ATCN PAM
uaggucuggcacuagacuuc

SEQ ID NO: 4844 - RNA, 20 nt, Artificial Sequence
  HTT spacer sequence ATCN PAM
guucaaguaaacauacaguu

SEQ ID NO: 4845 - RNA, 20 nt, Artificial Sequence
  HTT spacer sequence ATCN PAM
auauuuuaaauuguaaaaag

SEQ ID NO: 4846 - RNA, 20 nt, Artificial Sequence
  HTT spacer sequence ATCN PAM
uuuaaaucuauauuuuaaau

SEQ ID NO: 4847 - RNA, 20 nt, Artificial Sequence
  HTT spacer sequence ATCN PAM
ucguuucugcaucuguucac

SEQ ID NO: 4848 - RNA, 20 nt, Artificial Sequence
  HTT spacer sequence ATCN PAM
guucacaagggguugauauu

SEQ ID NO: 4849 - RNA, 20 nt, Artificial Sequence
  HTT spacer sequence ATCN PAM
accccuugugaacagaugca

SEQ ID NO: 4850 - RNA, 20 nt, Artificial Sequence
  HTT spacer sequence ATCN PAM
auucuauguucucuuaaugc

SEQ ID NO: 4851 - RNA, 20 nt, Artificial Sequence
  HTT spacer sequence ATCN PAM
ccuagaaaagacaguguaag

SEQ ID NO: 4852 - RNA, 20 nt, Artificial Sequence
  HTT spacer sequence ATCN PAM
uguaguaaaaguuauugaaa

SEQ ID NO: 4853 - RNA, 20 nt, Artificial Sequence
  HTT spacer sequence ATCN PAM
uuuaacacgccauaucuugu

SEQ ID NO: 4854 - RNA, 20 nt, Artificial Sequence
  HTT spacer sequence ATCN PAM
ggaaaacuaaccacgucaga

SEQ ID NO: 4855 - RNA, 20 nt, Artificial Sequence
  HTT spacer sequence ATCN PAM
aguacacuauuuuuccauag

SEQ ID NO: 4856 - RNA, 20 nt, Artificial Sequence
  HTT spacer sequence ATCN PAM
ccaguucagcagaaccauug

SEQ ID NO: 4857 - RNA, 20 nt, Artificial Sequence
  HTT spacer sequence ATCN PAM
gaaugaaaguauuggggccu

SEQ ID NO: 4858 - RNA, 20 nt, Artificial Sequence
  HTT spacer sequence ATCN PAM
acuaccugauuucauuucuc

SEQ ID NO: 4859 - RNA, 20 nt, Artificial Sequence
  HTT spacer sequence ATCN PAM
gguaguagaucugaaugaaa

SEQ ID NO: 4860 - RNA, 20 nt, Artificial Sequence
  HTT spacer sequence ATCN PAM
uuugagaaaugaaaucaggu

SEQ ID NO: 4861 - RNA, 20 nt, Artificial Sequence
  HTT spacer sequence ATCN PAM
gagcuccauaaaaaucauuu

SEQ ID NO: 4862 - RNA, 20 nt, Artificial Sequence
  HTT spacer sequence ATCN PAM
uuccuauaaaucagagcucc

SEQ ID NO: 4863 - RNA, 20 nt, Artificial Sequence
  HTT spacer sequence ATCN PAM
acuaacaucuuuccuauaaa

SEQ ID NO: 4864 - RNA, 20 nt, Artificial Sequence
  HTT spacer sequence ATCN PAM
gaggcacucaguggaggcac

SEQ ID NO: 4865 - RNA, 20 nt, Artificial Sequence
  HTT spacer sequence ATCN PAM
caacgguacagcucuuccua

SEQ ID NO: 4866 - RNA, 20 nt, Artificial Sequence
  HTT spacer sequence ATCN PAM
uuguggccaucccaacggua

SEQ ID NO: 4867 - RNA, 20 nt, Artificial Sequence
  HTT spacer sequence ATCN PAM
aaugggaaccaagcugacga

SEQ ID NO: 4868 - RNA, 20 nt, Artificial Sequence
  HTT spacer sequence ATCN PAM
cucagcccaucaagaugcuu

SEQ ID NO: 4869 - RNA, 20 nt, Artificial Sequence
  HTT spacer sequence ATCN PAM
agaugcuuugauuuuggccg

SEQ ID NO: 4870 - RNA, 20 nt, Artificial Sequence
  HTT spacer sequence ATCN PAM
ugaugggcugagagauccaa

SEQ ID NO: 4871 - RNA, 20 nt, Artificial Sequence
  HTT spacer sequence ATCN PAM
aagcaucuugaugggcugag

SEQ ID NO: 4872 - RNA, 20 nt, Artificial Sequence
  HTT spacer sequence ATCN PAM
aaguccuggagucccuguuu

SEQ ID NO: 4873 - RNA, 20 nt, Artificial Sequence
  HTT spacer sequence ATCN PAM
aaauccaaguccuggagucc

SEQ ID NO: 4874 - RNA, 20 nt, Artificial Sequence
  HTT spacer sequence ATCN PAM
cuggcaaugaccuuauagua

SEQ ID NO: 4875 - RNA, 20 nt, Artificial Sequence
  HTT spacer sequence ATCN PAM
gaaauuugacuaaagggaca

SEQ ID NO: 4876 - RNA, 20 nt, Artificial Sequence
  HTT spacer sequence ATCN PAM
cagugcccgagggaguacug

SEQ ID NO: 4877 - RNA, 20 nt, Artificial Sequence
  HTT spacer sequence ATCN PAM
aaaacuaacuugagaaugaa

SEQ ID NO: 4878 - RNA, 20 nt, Artificial Sequence
  HTT spacer sequence ATCN PAM
cccucuaaucuaaaacuaac

SEQ ID NO: 4879 - RNA, 20 nt, Artificial Sequence
  HTT spacer sequence ATCN PAM
cucuccuugggcagauuuau

SEQ ID NO: 4880 - RNA, 20 nt, Artificial Sequence
  HTT spacer sequence ATCN PAM
gcccaaggagagugauuagg

SEQ ID NO: 4881 - RNA, 20 nt, Artificial Sequence
  HTT spacer sequence ATCN PAM
ccaaggugcuacacccucuc

SEQ ID NO: 4882 - RNA, 20 nt, Artificial Sequence
  HTT spacer sequence ATCN PAM
ucgccaaggugcuacacccu

SEQ ID NO: 4883 - RNA, 20 nt, Artificial Sequence
  HTT spacer sequence ATCN PAM
uccauuaucaucgccaaggu

SEQ ID NO: 4884 - RNA, 20 nt, Artificial Sequence
  HTT spacer sequence ATCN PAM
auuucaauggacuccgucuu

SEQ ID NO: 4885 - RNA, 20 nt, Artificial Sequence
  HTT spacer sequence ATCN PAM
ccaugaaagaauuggggccu

SEQ ID NO: 4886 - RNA, 20 nt, Artificial Sequence
  HTT spacer sequence ATCN PAM
uuuagucccuuucacgaaac

SEQ ID NO: 4887 - RNA, 20 nt, Artificial Sequence
  HTT spacer sequence ATCN PAM
uauuaaaauacucaucuuuu

SEQ ID NO: 4888 - RNA, 20 nt, Artificial Sequence
  HTT spacer sequence ATCN PAM
uucauccaacuugaacaugg

SEQ ID NO: 4889 - RNA, 20 nt, Artificial Sequence
  HTT spacer sequence ATCN PAM
aacuugaacaugggcuggag

SEQ ID NO: 4890 - RNA, 20 nt, Artificial Sequence
  HTT spacer sequence ATCN PAM
ccugagucucccuaccuucu

SEQ ID NO: 4891 - RNA, 20 nt, Artificial Sequence
  HTT spacer sequence ATCN PAM
acauuaaucuccugagucuc

SEQ ID NO: 4892 - RNA, 20 nt, Artificial Sequence
  HTT spacer sequence ATCN PAM
ugccuuagcaucaacauuaa

SEQ ID NO: 4893 - RNA, 20 nt, Artificial Sequence
  HTT spacer sequence ATCN PAM
gugucuucccuacaguccca

SEQ ID NO: 4894 - RNA, 20 nt, Artificial Sequence
  HTT spacer sequence ATCN PAM
cagguuucuuugucuucaca

SEQ ID NO: 4895 - RNA, 20 nt, Artificial Sequence
  HTT spacer sequence ATCN PAM
ugggcaggugugugguggug

SEQ ID NO: 4896 - RNA, 20 nt, Artificial Sequence
  HTT spacer sequence ATCN PAM
guguucccaauuuccaugac

SEQ ID NO: 4897 - RNA, 20 nt, Artificial Sequence
  HTT spacer sequence ATCN PAM
guuucaguuugaguuuggcu

SEQ ID NO: 4898 - RNA, 20 nt, Artificial Sequence
  HTT spacer sequence ATCN PAM
guugaauaucaggcacagau

SEQ ID NO: 4899 - RNA, 20 nt, Artificial Sequence
  HTT spacer sequence ATCN PAM
ggcacagaugucuggccaac

SEQ ID NO: 4900 - RNA, 20 nt, Artificial Sequence
  HTT spacer sequence ATCN PAM
gugccugauauucaacugau

SEQ ID NO: 4901 - RNA, 20 nt, Artificial Sequence
  HTT spacer sequence ATCN PAM
cagccagugcucccaaaucu

SEQ ID NO: 4902 - RNA, 20 nt, Artificial Sequence
  HTT spacer sequence ATCN PAM
cugagaaguucaugggccuc

SEQ ID NO: 4903 - RNA, 20 nt, Artificial Sequence
  HTT spacer sequence ATCN PAM
ccuucagcaggugagagaag

SEQ ID NO: 4904 - RNA, 20 nt, Artificial Sequence
  HTT spacer sequence ATCN PAM
aggacgugggcacaaauguu

SEQ ID NO: 4905 - RNA, 20 nt, Artificial Sequence
  HTT spacer sequence ATCN PAM
agcacccaagugggacauua

SEQ ID NO: 4906 - RNA, 20 nt, Artificial Sequence
  HTT spacer sequence ATCN PAM
gucccuucuuuauucucuuu

SEQ ID NO: 4907 - RNA, 20 nt, Artificial Sequence
  HTT spacer sequence ATCN PAM
gagcaauuuuguucauuuaa

SEQ ID NO: 4908 - RNA, 20 nt, Artificial Sequence
  HTT spacer sequence ATCN PAM
aaaugugaccauguggaugg

SEQ ID NO: 4909 - RNA, 20 nt, Artificial Sequence
  HTT spacer sequence ATCN PAM
acauggucacauuuugaugu

SEQ ID NO: 4910 - RNA, 20 nt, Artificial Sequence
  HTT spacer sequence ATCN PAM
acuugccucagucucccaaa

SEQ ID NO: 4911 - RNA, 20 nt, Artificial Sequence
  HTT spacer sequence ATCN PAM
cuugaggccaagaguucgag

SEQ ID NO: 4912 - RNA, 20 nt, Artificial Sequence
  HTT spacer sequence ATCN PAM
cgaaacccccucucuacuaa

SEQ ID NO: 4913 - RNA, 20 nt, Artificial Sequence
  HTT spacer sequence ATCN PAM
aauuuuuuguauuuuuagua

SEQ ID NO: 4914 - RNA, 20 nt, Artificial Sequence
  HTT spacer sequence ATCN PAM
cagcacuuugggaggccgag

SEQ ID NO: 4915 - RNA, 20 nt, Artificial Sequence
  HTT spacer sequence ATCN PAM
gcccaccucggccucccaaa

SEQ ID NO: 4916 - RNA, 20 nt, Artificial Sequence
  HTT spacer sequence ATCN PAM
cgaggucaagagaucaagac

SEQ ID NO: 4917 - RNA, 20 nt, Artificial Sequence
  HTT spacer sequence ATCN PAM
cuugaccucgugauccgccc

SEQ ID NO: 4918 - RNA, 20 nt, Artificial Sequence
  HTT spacer sequence ATCN PAM
agaccauccuggcuaacaca

SEQ ID NO: 4919 - RNA, 20 nt, Artificial Sequence
  HTT spacer sequence ATCN PAM
uggcuaacacagugaaaccc

SEQ ID NO: 4920 - RNA, 20 nt, Artificial Sequence
  HTT spacer sequence ATCN PAM
gagcaugguggcgggcgccu

SEQ ID NO: 4921 - RNA, 20 nt, Artificial Sequence
  HTT spacer sequence ATCN PAM
gggaggcggagcuugcagug

SEQ ID NO: 4922 - RNA, 20 nt, Artificial Sequence
  HTT spacer sequence ATCN PAM
cggcucacugcaagcuccgc

SEQ ID NO: 4923 - RNA, 20 nt, Artificial Sequence
  HTT spacer sequence ATCN PAM
ugccacugcacuccagccug

SEQ ID NO: 4924 - RNA, 20 nt, Artificial Sequence
  HTT spacer sequence ATCN PAM
aauuuuuuuuuugagacgga

SEQ ID NO: 4925 - RNA, 20 nt, Artificial Sequence
  HTT spacer sequence ATCN PAM
cagcuacuugggaggcugag

SEQ ID NO: 4926 - RNA, 20 nt, Artificial Sequence
  HTT spacer sequence ATCN PAM
aggcuuacugcaaacuccgc

SEQ ID NO: 4927 - RNA, 20 nt, Artificial Sequence
  HTT spacer sequence ATCN PAM
ucagucacuguuaucccuaa

SEQ ID NO: 4928 - RNA, 20 nt, Artificial Sequence
  HTT spacer sequence ATCN PAM
gucacuguuaucccuaagag

SEQ ID NO: 4929 - RNA, 20 nt, Artificial Sequence
  HTT spacer sequence ATCN PAM
cuaagagggaaauaccuagc

SEQ ID NO: 4930 - RNA, 20 nt, Artificial Sequence
  HTT spacer sequence ATCN PAM
auucugagcuuucuuggcua

SEQ ID NO: 4931 - RNA, 20 nt, Artificial Sequence
  HTT spacer sequence ATCN PAM
ugguuaauggcuacuguccu

SEQ ID NO: 4932 - RNA, 20 nt, Artificial Sequence
  HTT spacer sequence ATCN PAM
cagggacaguuuugcuuuuc

SEQ ID NO: 4933 - RNA, 20 nt, Artificial Sequence
  HTT spacer sequence ATCN PAM
acuucaaaacaaauguuaac

SEQ ID NO: 4934 - RNA, 20 nt, Artificial Sequence
  HTT spacer sequence ATCN PAM
auuguacaaauaguuaacau

SEQ ID NO: 4935 - RNA, 20 nt, Artificial Sequence
  HTT spacer sequence ATCN PAM
uaaauccauuguacaaauag

SEQ ID NO: 4936 - RNA, 20 nt, Artificial Sequence
  HTT spacer sequence ATCN PAM
caaaaaaaaaaaaaaaaaaa

SEQ ID NO: 4937 - RNA, 20 nt, Artificial Sequence
  HTT spacer sequence ATCN PAM
caccauugcacuccagccca

SEQ ID NO: 4938 - RNA, 20 nt, Artificial Sequence
  HTT spacer sequence ATCN PAM
cagcucacugcaacuucugc

SEQ ID NO: 4939 - RNA, 20 nt, Artificial Sequence
  HTT spacer sequence ATCN PAM
uuugaacccaggaggcagaa

SEQ ID NO: 4940 - RNA, 20 nt, Artificial Sequence
  HTT spacer sequence ATCN PAM
gccucgagaggcugaggcag

SEQ ID NO: 4941 - RNA, 20 nt, Artificial Sequence
  HTT spacer sequence ATCN PAM
cagcuguaaucugccucgag

SEQ ID NO: 4942 - RNA, 20 nt, Artificial Sequence
  HTT spacer sequence ATCN PAM
cuucaggucaggaguuugag

SEQ ID NO: 4943 - RNA, 20 nt, Artificial Sequence
  HTT spacer sequence ATCN PAM
auccgcuucggccucccaaa

SEQ ID NO: 4944 - RNA, 20 nt, Artificial Sequence
  HTT spacer sequence ATCN PAM
gcuucggccucccaaagugu

SEQ ID NO: 4945 - RNA, 20 nt, Artificial Sequence
  HTT spacer sequence ATCN PAM
caacacuuugggaggccgaa

SEQ ID NO: 4946 - RNA, 20 nt, Artificial Sequence
  HTT spacer sequence ATCN PAM
uaggcugggcgugguggcuc

SEQ ID NO: 4947 - RNA, 20 nt, Artificial Sequence
  HTT spacer sequence ATCN PAM
gauuacucucucuuugccuu

SEQ ID NO: 4948 - RNA, 20 nt, Artificial Sequence
  HTT spacer sequence ATCN PAM
gauauaaacaguaagugaac

SEQ ID NO: 4949 - RNA, 20 nt, Artificial Sequence
  HTT spacer sequence ATCN PAM
cccuacuaacuucccauucu

SEQ ID NO: 4950 - RNA, 20 nt, Artificial Sequence
  HTT spacer sequence ATCN PAM
gucuucucccuucucugcaa

SEQ ID NO: 4951 - RNA, 20 nt, Artificial Sequence
  HTT spacer sequence ATCN PAM
cuggagagucccagccucag

SEQ ID NO: 4952 - RNA, 20 nt, Artificial Sequence
  HTT spacer sequence ATCN PAM
uuccuuaaccccugcuggug

SEQ ID NO: 4953 - RNA, 20 nt, Artificial Sequence
  HTT spacer sequence ATCN PAM
gggcgggaaacgcugcuaug

SEQ ID NO: 4954 - RNA, 20 nt, Artificial Sequence
  HTT spacer sequence ATCN PAM
ugucuuuacaucucugggca

SEQ ID NO: 4955 - RNA, 20 nt, Artificial Sequence
  HTT spacer sequence ATCN PAM
cugggcacugcucugguccu

SEQ ID NO: 4956 - RNA, 20 nt, Artificial Sequence
  HTT spacer sequence ATCN PAM
ugcaggcugcuacccccauc

SEQ ID NO: 4957 - RNA, 20 nt, Artificial Sequence
  HTT spacer sequence ATCN PAM
ugaguguccucuucaguugg

SEQ ID NO: 4958 - RNA, 20 nt, Artificial Sequence
  HTT spacer sequence ATCN PAM
ggguucaguucuucagucac

SEQ ID NO: 4959 - RNA, 20 nt, Artificial Sequence
  HTT spacer sequence ATCN PAM
agacacugaagacaggagaa

SEQ ID NO: 4960 - RNA, 20 nt, Artificial Sequence
  HTT spacer sequence ATCN PAM
gcuauauguaagugucacgg

SEQ ID NO: 4961 - RNA, 20 nt, Artificial Sequence
  HTT spacer sequence ATCN PAM
acaaaucagcuauauguaag

SEQ ID NO: 4962 - RNA, 20 nt, Artificial Sequence
  HTT spacer sequence ATCN PAM
caccgugucugacauaucca

SEQ ID NO: 4963 - RNA, 20 nt, Artificial Sequence
  HTT spacer sequence ATCN PAM
gccccugccccauuuacccc

SEQ ID NO: 4964 - RNA, 20 nt, Artificial Sequence
  HTT spacer sequence ATCN PAM
agcuagaaacaggucaccac

SEQ ID NO: 4965 - RNA, 20 nt, Artificial Sequence
  HTT spacer sequence ATCN PAM
caaggucaggagaucgagac

SEQ ID NO: 4966 - RNA, 20 nt, Artificial Sequence
  HTT spacer sequence ATCN PAM
ccugaccuugugaugcacug

SEQ ID NO: 4967 - RNA, 20 nt, Artificial Sequence
  HTT spacer sequence ATCN PAM
agaccauuccggcucacacg

SEQ ID NO: 4968 - RNA, 20 nt, Artificial Sequence
  HTT spacer sequence ATCN PAM
gccucccagguagcugggac

SEQ ID NO: 4969 - RNA, 20 nt, Artificial Sequence
  HTT spacer sequence ATCN PAM
cggcucacugcaagcuccgc

SEQ ID NO: 4970 - RNA, 20 nt, Artificial Sequence
  HTT spacer sequence ATCN PAM
gagcucuaucuccucucagg

SEQ ID NO: 4971 - RNA, 20 nt, Artificial Sequence
  HTT spacer sequence ATCN PAM
ccucucaggccagugguggc

SEQ ID NO: 4972 - RNA, 20 nt, Artificial Sequence
  HTT spacer sequence ATCN PAM
aaugccaccacuggccugag

SEQ ID NO: 4973 - RNA, 20 nt, Artificial Sequence
  HTT spacer sequence ATCN PAM
ucacauggcccacaggaaaa

SEQ ID NO: 4974 - RNA, 20 nt, Artificial Sequence
  HTT spacer sequence ATCN PAM
uucuuuuucucucucucucu

SEQ ID NO: 4975 - RNA, 20 nt, Artificial Sequence
  HTT spacer sequence ATCN PAM
cccuggugcuccuuugugua

SEQ ID NO: 4976 - RNA, 20 nt, Artificial Sequence
  HTT spacer sequence ATCN PAM
uggggguaguuucuaauggu

SEQ ID NO: 4977 - RNA, 20 nt, Artificial Sequence
  HTT spacer sequence ATCN PAM
aaucaccucccaccaggccc

SEQ ID NO: 4978 - RNA, 20 nt, Artificial Sequence
  HTT spacer sequence ATCN PAM
ccucccaccaggccccaccu

SEQ ID NO: 4979 - RNA, 20 nt, Artificial Sequence
  HTT spacer sequence ATCN PAM
ccagugucggagguggggcc

SEQ ID NO: 4980 - RNA, 20 nt, Artificial Sequence
  HTT spacer sequence ATCN PAM
caugcugaauuguaaucucc

SEQ ID NO: 4981 - RNA, 20 nt, Artificial Sequence
  HTT spacer sequence ATCN PAM
gagcaugaacccuauuguga

SEQ ID NO: 4982 - RNA, 20 nt, Artificial Sequence
  HTT spacer sequence ATCN PAM
cucaaaugugcaguucacaa

SEQ ID NO: 4983 - RNA, 20 nt, Artificial Sequence
  HTT spacer sequence ATCN PAM
agguugcaugcuccuuauga

SEQ ID NO: 4984 - RNA, 20 nt, Artificial Sequence
  HTT spacer sequence ATCN PAM
aaugccugaugaugauuuga

SEQ ID NO: 4985 - RNA, 20 nt, Artificial Sequence
  HTT spacer sequence ATCN PAM
ggcauuagauucucauaagg

SEQ ID NO: 4986 - RNA, 20 nt, Artificial Sequence
  HTT spacer sequence ATCN PAM
ucaggcauuagauucucaua

SEQ ID NO: 4987 - RNA, 20 nt, Artificial Sequence
  HTT spacer sequence ATCN PAM
ucaucaggcauuagauucuc

SEQ ID NO: 4988 - RNA, 20 nt, Artificial Sequence
  HTT spacer sequence ATCN PAM
cgaaaccaucccccgccaac

SEQ ID NO: 4989 - RNA, 20 nt, Artificial Sequence
  HTT spacer sequence ATCN PAM
cccgccaacccugguuugug

SEQ ID NO: 4990 - RNA, 20 nt, Artificial Sequence
  HTT spacer sequence ATCN PAM
gucuggaccagaaguggcag

SEQ ID NO: 4991 - RNA, 20 nt, Artificial Sequence
  HTT spacer sequence ATCN PAM
cauuuggauuacugcacuag

SEQ ID NO: 4992 - RNA, 20 nt, Artificial Sequence
  HTT spacer sequence ATCN PAM
aaaugagauaguauaucagu

SEQ ID NO: 4993 - RNA, 20 nt, Artificial Sequence
  HTT spacer sequence ATCN PAM
caaaaaaauuaaauuaaauu

SEQ ID NO: 4994 - RNA, 20 nt, Artificial Sequence
  HTT spacer sequence ATCN PAM
ugacacugcacuccaagcug

SEQ ID NO: 4995 - RNA, 20 nt, Artificial Sequence
  HTT spacer sequence ATCN PAM
uagcucacugcggccucgau

SEQ ID NO: 4996 - RNA, 20 nt, Artificial Sequence
  HTT spacer sequence ATCN PAM
aggccgcagugagcuaugau

SEQ ID NO: 4997 - RNA, 20 nt, Artificial Sequence
  HTT spacer sequence ATCN PAM
cccaggcucaagugauccuu

SEQ ID NO: 4998 - RNA, 20 nt, Artificial Sequence
  HTT spacer sequence ATCN PAM
cuugagccugggagaucgag

SEQ ID NO: 4999 - RNA, 20 nt, Artificial Sequence
  HTT spacer sequence ATCN PAM
uucugccucagccuucucag

SEQ ID NO: 5000 - RNA, 20 nt, Artificial Sequence
  HTT spacer sequence ATCN PAM
aaaaauuagcugggcauggu

SEQ ID NO: 5001 - RNA, 20 nt, Artificial Sequence
  HTT spacer sequence ATCN PAM
cgccaacccacuccagccug

SEQ ID NO: 5002 - RNA, 20 nt, Artificial Sequence
  HTT spacer sequence ATCN PAM
cagcucacugcaacuucugc

SEQ ID NO: 5003 - RNA, 20 nt, Artificial Sequence
  HTT spacer sequence ATCN PAM
cuugaaccugggaggcagaa

SEQ ID NO: 5004 - RNA, 20 nt, Artificial Sequence
  HTT spacer sequence ATCN PAM
caacuacucgggaggcugag

SEQ ID NO: 5005 - RNA, 20 nt, Artificial Sequence
  HTT spacer sequence ATCN PAM
cgaggucacaaguucgagac

SEQ ID NO: 5006 - RNA, 20 nt, Artificial Sequence
  HTT spacer sequence ATCN PAM
cagcacuuugggaggccgag

SEQ ID NO: 5007 - RNA, 20 nt, Artificial Sequence
  HTT spacer sequence ATCN PAM
caagaaugcuguuuccuggc

SEQ ID NO: 5008 - RNA, 20 nt, Artificial Sequence
  HTT spacer sequence ATCN PAM
ccagaaucaguuuuagaacc

SEQ ID NO: 5009 - RNA, 20 nt, Artificial Sequence
  HTT spacer sequence ATCN PAM
guuuuagaacccauaaagga

SEQ ID NO: 5010 - RNA, 20 nt, Artificial Sequence
  HTT spacer sequence ATCN PAM
acaguaauguccagaagacg

SEQ ID NO: 5011 - RNA, 20 nt, Artificial Sequence
  HTT spacer sequence ATCN PAM
cuugaacccgggaggcagaa

SEQ ID NO: 5012 - RNA, 20 nt, Artificial Sequence
  HTT spacer sequence ATCN PAM
cuacuaaaaaaaaaaaaaaa

SEQ ID NO: 5013 - RNA, 20 nt, Artificial Sequence
  HTT spacer sequence ATCN PAM
agaccacccuggcuaacaug

SEQ ID NO: 5014 - RNA, 20 nt, Artificial Sequence
  HTT spacer sequence ATCN PAM
ccugacuucaugauccgccu

SEQ ID NO: 5015 - RNA, 20 nt, Artificial Sequence
  HTT spacer sequence ATCN PAM
ugaagucaggagaucgagac

SEQ ID NO: 5016 - RNA, 20 nt, Artificial Sequence
  HTT spacer sequence ATCN PAM
gccugccucggccucccaaa

SEQ ID NO: 5017 - RNA, 20 nt, Artificial Sequence
  HTT spacer sequence ATCN PAM
cagcacuuugggaggccgag

SEQ ID NO: 5018 - RNA, 20 nt, Artificial Sequence
  HTT spacer sequence ATCN PAM
gggaagaaaugcagacagua

SEQ ID NO: 5019 - RNA, 20 nt, Artificial Sequence
  HTT spacer sequence ATCN PAM
ggugcauggacuggaaggca

SEQ ID NO: 5020 - RNA, 20 nt, Artificial Sequence
  HTT spacer sequence ATCN PAM
uauuaugguuuaaggugacu

SEQ ID NO: 5021 - RNA, 20 nt, Artificial Sequence
  HTT spacer sequence ATCN PAM
uggacuucccaaccuccaga

SEQ ID NO: 5022 - RNA, 20 nt, Artificial Sequence
  HTT spacer sequence ATCN PAM
aggacuuucgccuugcccuc

SEQ ID NO: 5023 - RNA, 20 nt, Artificial Sequence
  HTT spacer sequence ATCN PAM
auauauaagaggccccacag

SEQ ID NO: 5024 - RNA, 20 nt, Artificial Sequence
  HTT spacer sequence ATCN PAM
cauucaugaggggucugccc

SEQ ID NO: 5025 - RNA, 20 nt, Artificial Sequence
  HTT spacer sequence ATCN PAM
cccugguaauuaaguuucag

SEQ ID NO: 5026 - RNA, 20 nt, Artificial Sequence
  HTT spacer sequence ATCN PAM
uagaaaagugcuuguuaugg

SEQ ID NO: 5027 - RNA, 20 nt, Artificial Sequence
  HTT spacer sequence ATCN PAM
gggagugaguaaguagcaga

SEQ ID NO: 5028 - RNA, 20 nt, Artificial Sequence
  HTT spacer sequence ATCN PAM
ugccuucacucugcuccaug

SEQ ID NO: 5029 - RNA, 20 nt, Artificial Sequence
  HTT spacer sequence ATCN PAM
uggagcagagugaaggcaag

SEQ ID NO: 5030 - RNA, 20 nt, Artificial Sequence
  HTT spacer sequence ATCN PAM
agacucccaaugcucuagga

SEQ ID NO: 5031 - RNA, 20 nt, Artificial Sequence
  HTT spacer sequence ATCN PAM
ccaauacacaacacaugaga

SEQ ID NO: 5032 - RNA, 20 nt, Artificial Sequence
  HTT spacer sequence ATCN PAM
ggauuuguugacuucuagcu

SEQ ID NO: 5033 - RNA, 20 nt, Artificial Sequence
  HTT spacer sequence ATCN PAM
agauguauucauaaagccuc

SEQ ID NO: 5034 - RNA, 20 nt, Artificial Sequence
  HTT spacer sequence ATCN PAM
cugagccuguuuccucuuuu

SEQ ID NO: 5035 - RNA, 20 nt, Artificial Sequence
  HTT spacer sequence ATCN PAM
cagccucccaaagugcugga

SEQ ID NO: 5036 - RNA, 20 nt, Artificial Sequence
  HTT spacer sequence ATCN PAM
ucccaucucagccucccaaa

SEQ ID NO: 5037 - RNA, 20 nt, Artificial Sequence
  HTT spacer sequence ATCN PAM
cuggagcuuggaguucgaga

SEQ ID NO: 5038 - RNA, 20 nt, Artificial Sequence
  HTT spacer sequence ATCN PAM
uagugugagauccugucucc

SEQ ID NO: 5039 - RNA, 20 nt, Artificial Sequence
  HTT spacer sequence ATCN PAM
cacacuaugaugcccaggcu

SEQ ID NO: 5040 - RNA, 20 nt, Artificial Sequence
  HTT spacer sequence ATCN PAM
ugucuccucaagaaauuaaa

SEQ ID NO: 5041 - RNA, 20 nt, Artificial Sequence
  HTT spacer sequence ATCN PAM
cccagcuaauuuuuuaauuu

SEQ ID NO: 5042 - RNA, 20 nt, Artificial Sequence
  HTT spacer sequence ATCN PAM
acucuggaggcugagguggg

SEQ ID NO: 5043 - RNA, 20 nt, Artificial Sequence
  HTT spacer sequence ATCN PAM
ucccaccucagccuccagag

SEQ ID NO: 5044 - RNA, 20 nt, Artificial Sequence
  HTT spacer sequence ATCN PAM
uauuucauuguagccucaac

SEQ ID NO: 5045 - RNA, 20 nt, Artificial Sequence
  HTT spacer sequence ATCN PAM
ugggugacgagugagacccu

SEQ ID NO: 5046 - RNA, 20 nt, Artificial Sequence
  HTT spacer sequence ATCN PAM
ucaacucauucucugugcac

SEQ ID NO: 5047 - RNA, 20 nt, Artificial Sequence
  HTT spacer sequence ATCN PAM
uuguguggguaaaaguaaau

SEQ ID NO: 5048 - RNA, 20 nt, Artificial Sequence
  HTT spacer sequence ATCN PAM
ggguccaagaacaaaaugag

SEQ ID NO: 5049 - RNA, 20 nt, Artificial Sequence
  HTT spacer sequence ATCN PAM
cauguuuuuguuuuuuuguu

SEQ ID NO: 5050 - RNA, 20 nt, Artificial Sequence
  HTT spacer sequence ATCN PAM
gacgaaaggggaaggagaaa

SEQ ID NO: 5051 - RNA, 20 nt, Artificial Sequence
  HTT spacer sequence ATCN PAM
guaccguugagucccaagaa

SEQ ID NO: 5052 - RNA, 20 nt, Artificial Sequence
  HTT spacer sequence ATCN PAM
gucauguagaaacauaggau

SEQ ID NO: 5053 - RNA, 20 nt, Artificial Sequence
  HTT spacer sequence ATCN PAM
uauguuucuacaugacagau

SEQ ID NO: 5054 - RNA, 20 nt, Artificial Sequence
  HTT spacer sequence ATCN PAM
guaaagugagagaaaguuuc

SEQ ID NO: 5055 - RNA, 20 nt, Artificial Sequence
  HTT spacer sequence ATCN PAM
ugaaccgcaccuggagaaac

SEQ ID NO: 5056 - RNA, 20 nt, Artificial Sequence
  HTT spacer sequence ATCN PAM
gucauuaguuucuaauaucu

SEQ ID NO: 5057 - RNA, 20 nt, Artificial Sequence
  HTT spacer sequence ATCN PAM
cucuccuaugcuucccuggu

SEQ ID NO: 5058 - RNA, 20 nt, Artificial Sequence
  HTT spacer sequence ATCN PAM
ccugcaaccagggaagcaua

SEQ ID NO: 5059 - RNA, 20 nt, Artificial Sequence
  HTT spacer sequence ATCN PAM
ggaggccucuccagccauca

SEQ ID NO: 5060 - RNA, 20 nt, Artificial Sequence
  HTT spacer sequence ATCN PAM
acaccacuucccuuacugaa

SEQ ID NO: 5061 - RNA, 20 nt, Artificial Sequence
  HTT spacer sequence ATCN PAM
auuccuaagcaucuacacca

SEQ ID NO: 5062 - RNA, 20 nt, Artificial Sequence
  HTT spacer sequence ATCN PAM
guuuuuucacucacuacauc

SEQ ID NO: 5063 - RNA, 20 nt, Artificial Sequence
  HTT spacer sequence ATCN PAM
gaaucaguuuuuucacucac

SEQ ID NO: 5064 - RNA, 20 nt, Artificial Sequence
  HTT spacer sequence ATCN PAM
gaauuuuugacauaucagaa

SEQ ID NO: 5065 - RNA, 20 nt, Artificial Sequence
  HTT spacer sequence ATCN PAM
ccacuuucucucgccuuuag

SEQ ID NO: 5066 - RNA, 20 nt, Artificial Sequence
  HTT spacer sequence ATCN PAM
gaguuggaggagcuuaaacc

SEQ ID NO: 5067 - RNA, 20 nt, Artificial Sequence
  HTT spacer sequence ATCN PAM
uagccccuucuguucugacc

SEQ ID NO: 5068 - RNA, 20 nt, Artificial Sequence
  HTT spacer sequence ATCN PAM
auacugcucucggugggcag

SEQ ID NO: 5069 - RNA, 20 nt, Artificial Sequence
  HTT spacer sequence ATCN PAM
gggacgccuggccaccuguc

SEQ ID NO: 5070 - RNA, 20 nt, Artificial Sequence
  HTT spacer sequence ATCN PAM
cuggccccugggugccaaga

SEQ ID NO: 5071 - RNA, 20 nt, Artificial Sequence
  HTT spacer sequence ATCN PAM
aggcuauuuauuuauuuauu

SEQ ID NO: 5072 - RNA, 20 nt, Artificial Sequence
  HTT spacer sequence ATCN PAM
cggcucagugcaagcucugc

SEQ ID NO: 5073 - RNA, 20 nt, Artificial Sequence
  HTT spacer sequence ATCN PAM
uggccaacaaggugaaaccc

SEQ ID NO: 5074 - RNA, 20 nt, Artificial Sequence
  HTT spacer sequence ATCN PAM
agaccauccuggccaacaag

SEQ ID NO: 5075 - RNA, 20 nt, Artificial Sequence
  HTT spacer sequence ATCN PAM
ccugaccucgugauccgucc

SEQ ID NO: 5076 - RNA, 20 nt, Artificial Sequence
  HTT spacer sequence ATCN PAM
cgaggucaggagaucaagac

SEQ ID NO: 5077 - RNA, 20 nt, Artificial Sequence
  HTT spacer sequence ATCN PAM
guccaccucagccucucaaa

SEQ ID NO: 5078 - RNA, 20 nt, Artificial Sequence
  HTT spacer sequence ATCN PAM
cagcacuuugagaggcugag

SEQ ID NO: 5079 - RNA, 20 nt, Artificial Sequence
  HTT spacer sequence ATCN PAM
guaauauacaacaugauguu

SEQ ID NO: 5080 - RNA, 20 nt, Artificial Sequence
  HTT spacer sequence ATCN PAM
uguuguauauuacagauaua

SEQ ID NO: 5081 - RNA, 20 nt, Artificial Sequence
  HTT spacer sequence ATCN PAM
cagcacuuugggaggcugag

SEQ ID NO: 5082 - RNA, 20 nt, Artificial Sequence
  HTT spacer sequence ATCN PAM
gcccaccucagccucccaaa

SEQ ID NO: 5083 - RNA, 20 nt, Artificial Sequence
  HTT spacer sequence ATCN PAM
cgaggucgggaguucaagac

SEQ ID NO: 5084 - RNA, 20 nt, Artificial Sequence
  HTT spacer sequence ATCN PAM
ugucucuacuaaaaauacca

SEQ ID NO: 5085 - RNA, 20 nt, Artificial Sequence
  HTT spacer sequence ATCN PAM
ggcagguggagguugcagug

SEQ ID NO: 5086 - RNA, 20 nt, Artificial Sequence
  HTT spacer sequence ATCN PAM
cccaggcuagagugcagugg

SEQ ID NO: 5087 - RNA, 20 nt, Artificial Sequence
  HTT spacer sequence ATCN PAM
ccucacguaucauuguuuug

SEQ ID NO: 5088 - RNA, 20 nt, Artificial Sequence
  HTT spacer sequence ATCN PAM
uuguuuuguggugagaacac

SEQ ID NO: 5089 - RNA, 20 nt, Artificial Sequence
  HTT spacer sequence ATCN PAM
acucuuucagugauuuucuu

SEQ ID NO: 5090 - RNA, 20 nt, Artificial Sequence
  HTT spacer sequence ATCN PAM
cugaaagaguagauuuuaag

SEQ ID NO: 5091 - RNA, 20 nt, Artificial Sequence
  HTT spacer sequence ATCN PAM
acuguauagcauggugacug

SEQ ID NO: 5092 - RNA, 20 nt, Artificial Sequence
  HTT spacer sequence ATCN PAM
cuugaacucauuccuccugu

SEQ ID NO: 5093 - RNA, 20 nt, Artificial Sequence
  HTT spacer sequence ATCN PAM
uugaccaacacauucaaggu

SEQ ID NO: 5094 - RNA, 20 nt, Artificial Sequence
  HTT spacer sequence ATCN PAM
caaaaaaaaccuugaaugug

SEQ ID NO: 5095 - RNA, 20 nt, Artificial Sequence
  HTT spacer sequence ATCN PAM
ugccaugguacuccagccug

SEQ ID NO: 5096 - RNA, 20 nt, Artificial Sequence
  HTT spacer sequence ATCN PAM
caucucacugcaaccuccgc

SEQ ID NO: 5097 - RNA, 20 nt, Artificial Sequence
  HTT spacer sequence ATCN PAM
cacugcaaccuccgccuccc

SEQ ID NO: 5098 - RNA, 20 nt, Artificial Sequence
  HTT spacer sequence ATCN PAM
cagcuacucaggaggcugag

SEQ ID NO: 5099 - RNA, 20 nt, Artificial Sequence
  HTT spacer sequence ATCN PAM
cuugaggucaggaguucgag

SEQ ID NO: 5100 - RNA, 20 nt, Artificial Sequence
  HTT spacer sequence ATCN PAM
gccugccuuggccugccaaa

SEQ ID NO: 5101 - RNA, 20 nt, Artificial Sequence
  HTT spacer sequence ATCN PAM
cagcacuuuggcaggccaag

SEQ ID NO: 5102 - RNA, 20 nt, Artificial Sequence
  HTT spacer sequence ATCN PAM
uuuaaaacgcuugaggccgg

SEQ ID NO: 5103 - RNA, 20 nt, Artificial Sequence
  HTT spacer sequence ATCN PAM
uuagaaaagagcaucuuuua

SEQ ID NO: 5104 - RNA, 20 nt, Artificial Sequence
  HTT spacer sequence ATCN PAM
uccuccuguacuacagucaa

SEQ ID NO: 5105 - RNA, 20 nt, Artificial Sequence
  HTT spacer sequence ATCN PAM
guauauuacuaucaucuuuc

SEQ ID NO: 5106 - RNA, 20 nt, Artificial Sequence
  HTT spacer sequence ATCN PAM
ucuuucugaugaauuaaaua

SEQ ID NO: 5107 - RNA, 20 nt, Artificial Sequence
  HTT spacer sequence ATCN PAM
uucugaugaauuaaauaaac

SEQ ID NO: 5108 - RNA, 20 nt, Artificial Sequence
  HTT spacer sequence ATCN PAM
gaaagaugauaguaauauac

SEQ ID NO: 5109 - RNA, 20 nt, Artificial Sequence
  HTT spacer sequence ATCN PAM
guuuaaugauaauguuugug

SEQ ID NO: 5110 - RNA, 20 nt, Artificial Sequence
  HTT spacer sequence ATCN PAM
uuaaaccgauacuaaauauu

SEQ ID NO: 5111 - RNA, 20 nt, Artificial Sequence
  HTT spacer sequence ATCN PAM
ucccuguuugauuacuuggu

SEQ ID NO: 5112 - RNA, 20 nt, Artificial Sequence
  HTT spacer sequence ATCN PAM
cuguuugauuacuuggugug

SEQ ID NO: 5113 - RNA, 20 nt, Artificial Sequence
  HTT spacer sequence ATCN PAM
aacagggaugauguaaaaau

SEQ ID NO: 5114 - RNA, 20 nt, Artificial Sequence
  HTT spacer sequence ATCN PAM
uaggcucagagagguucugg

SEQ ID NO: 5115 - RNA, 20 nt, Artificial Sequence
  HTT spacer sequence ATCN PAM
gcugcuccuaugauucucua

SEQ ID NO: 5116 - RNA, 20 nt, Artificial Sequence
  HTT spacer sequence ATCN PAM
uaggagcagcugauucaagg

SEQ ID NO: 5117 - RNA, 20 nt, Artificial Sequence
  HTT spacer sequence ATCN PAM
guuagagaaucauaggagca

SEQ ID NO: 5118 - RNA, 20 nt, Artificial Sequence
  HTT spacer sequence ATCN PAM
uaacaaaacaacugugcaca

SEQ ID NO: 5119 - RNA, 20 nt, Artificial Sequence
  HTT spacer sequence ATCN PAM
aaaggucagaggaaauacuu

SEQ ID NO: 5120 - RNA, 20 nt, Artificial Sequence
  HTT spacer sequence ATCN PAM
ugauuuccaguaaucucuuu

SEQ ID NO: 5121 - RNA, 20 nt, Artificial Sequence
  HTT spacer sequence ATCN PAM
ugauuuuuuaaaguauucua

SEQ ID NO: 5122 - RNA, 20 nt, Artificial Sequence
  HTT spacer sequence ATCN PAM
cuuuaaaacuuggcaaguua

SEQ ID NO: 5123 - RNA, 20 nt, Artificial Sequence
  HTT spacer sequence ATCN PAM
aaauaacuugccaaguuuua

SEQ ID NO: 5124 - RNA, 20 nt, Artificial Sequence
  HTT spacer sequence ATCN PAM
aaaaguuuaucuuuugugug

SEQ ID NO: 5125 - RNA, 20 nt, Artificial Sequence
  HTT spacer sequence ATCN PAM
uuugugugcauauuuuuaaa

SEQ ID NO: 5126 - RNA, 20 nt, Artificial Sequence
  HTT spacer sequence ATCN PAM
gauaccucagguccuguuac

SEQ ID NO: 5127 - RNA, 20 nt, Artificial Sequence
  HTT spacer sequence ATCN PAM
gauugucuagaagcuuuaaa

SEQ ID NO: 5128 - RNA, 20 nt, Artificial Sequence
  HTT spacer sequence ATCN PAM
ucaucacuggggaguuucua

SEQ ID NO: 5129 - RNA, 20 nt, Artificial Sequence
  HTT spacer sequence ATCN PAM
cuggggaguuucuaucaucu

SEQ ID NO: 5130 - RNA, 20 nt, Artificial Sequence
  HTT spacer sequence ATCN PAM
ucuuccuucauaccucaaac

SEQ ID NO: 5131 - RNA, 20 nt, Artificial Sequence
  HTT spacer sequence ATCN PAM
uccuucauaccucaaacugc

SEQ ID NO: 5132 - RNA, 20 nt, Artificial Sequence
  HTT spacer sequence ATCN PAM
ugcaguuugagguaugaagg

SEQ ID NO: 5133 - RNA, 20 nt, Artificial Sequence
  HTT spacer sequence ATCN PAM
uuuaaaaauauauaugcaca

SEQ ID NO: 5134 - RNA, 20 nt, Artificial Sequence
  HTT spacer sequence ATCN PAM
auuagacguaaguaugugug

SEQ ID NO: 5135 - RNA, 20 nt, Artificial Sequence
  HTT spacer sequence ATCN PAM
acuauccauuagacguaagu

SEQ ID NO: 5136 - RNA, 20 nt, Artificial Sequence
  HTT spacer sequence ATCN PAM
uaagaaaaacaucaacuauc

SEQ ID NO: 5137 - RNA, 20 nt, Artificial Sequence
  HTT spacer sequence ATCN PAM
uacaaaucauaagaaaaaca

SEQ ID NO: 5138 - RNA, 20 nt, Artificial Sequence
  HTT spacer sequence ATCN PAM
caaagggcuuauacauccua

SEQ ID NO: 5139 - RNA, 20 nt, Artificial Sequence
  HTT spacer sequence ATCN PAM
uaaacaaagcugaaagacaa

SEQ ID NO: 5140 - RNA, 20 nt, Artificial Sequence
  HTT spacer sequence ATCN PAM
uacagguguuuuggauuuuc

SEQ ID NO: 5141 - RNA, 20 nt, Artificial Sequence
  HTT spacer sequence ATCN PAM
aaaacaccuguaugauagaa

SEQ ID NO: 5142 - RNA, 20 nt, Artificial Sequence
  HTT spacer sequence ATCN PAM
uagcugugaguacaaacaau

SEQ ID NO: 5143 - RNA, 20 nt, Artificial Sequence
  HTT spacer sequence ATCN PAM
aucuuagcugugaguacaaa

SEQ ID NO: 5144 - RNA, 20 nt, Artificial Sequence
  HTT spacer sequence ATCN PAM
uagcucugucacuguaauca

SEQ ID NO: 5145 - RNA, 20 nt, Artificial Sequence
  HTT spacer sequence ATCN PAM
cuccagacuccaccagggcc

SEQ ID NO: 5146 - RNA, 20 nt, Artificial Sequence
  HTT spacer sequence ATCN PAM
guguacaggcuuccuucccu

SEQ ID NO: 5147 - RNA, 20 nt, Artificial Sequence
  HTT spacer sequence ATCN PAM
gcuagggaaaguuuauguca

SEQ ID NO: 5148 - RNA, 20 nt, Artificial Sequence
  HTT spacer sequence ATCN PAM
ggugaacaguuucuuacgcu

SEQ ID NO: 5149 - RNA, 20 nt, Artificial Sequence
  HTT spacer sequence ATCN PAM
cuagacagaaaggcuggcuc

SEQ ID NO: 5150 - RNA, 20 nt, Artificial Sequence
  HTT spacer sequence ATCN PAM
gcaauuuguuagauaugaag

SEQ ID NO: 5151 - RNA, 20 nt, Artificial Sequence
  HTT spacer sequence ATCN PAM
aacaaauugcagaugaacag

SEQ ID NO: 5152 - RNA, 20 nt, Artificial Sequence
  HTT spacer sequence ATCN PAM
aucuaucugucugcucaucu

SEQ ID NO: 5153 - RNA, 20 nt, Artificial Sequence
  HTT spacer sequence ATCN PAM
aucugucugcucaucuauua

SEQ ID NO: 5154 - RNA, 20 nt, Artificial Sequence
  HTT spacer sequence ATCN PAM
gucugcucaucuauuagaag

SEQ ID NO: 5155 - RNA, 20 nt, Artificial Sequence
  HTT spacer sequence ATCN PAM
auuagaagcauccuuguuuu

SEQ ID NO: 5156 - RNA, 20 nt, Artificial Sequence
  HTT spacer sequence ATCN PAM
uuguuuuuuuuuuuucuuuu

SEQ ID NO: 5157 - RNA, 20 nt, Artificial Sequence
  HTT spacer sequence ATCN PAM
cuugagcccugagacugcag

SEQ ID NO: 5158 - RNA, 20 nt, Artificial Sequence
  HTT spacer sequence ATCN PAM
ucccaccucagcuccugagu

SEQ ID NO: 5159 - RNA, 20 nt, Artificial Sequence
  HTT spacer sequence ATCN PAM
ucccuccuuggccucccaaa

SEQ ID NO: 5160 - RNA, 20 nt, Artificial Sequence
  HTT spacer sequence ATCN PAM
cagcacuuugggaggccaag

SEQ ID NO: 5161 - RNA, 20 nt, Artificial Sequence
  HTT spacer sequence ATCN PAM
ccucauaaauaccauuaagc

SEQ ID NO: 5162 - RNA, 20 nt, Artificial Sequence
  HTT spacer sequence ATCN PAM
guuccccuguuguucuuuag

SEQ ID NO: 5163 - RNA, 20 nt, Artificial Sequence
  HTT spacer sequence ATCN PAM
agaaaauucuaaagaacaac

SEQ ID NO: 5164 - RNA, 20 nt, Artificial Sequence
  HTT spacer sequence ATCN PAM
auaaagaagaauauccagaa

SEQ ID NO: 5165 - RNA, 20 nt, Artificial Sequence
  HTT spacer sequence ATCN PAM
caaaaucaauaaagaagaau

SEQ ID NO: 5166 - RNA, 20 nt, Artificial Sequence
  HTT spacer sequence ATCN PAM
acuucuacuuguagauugau

SEQ ID NO: 5167 - RNA, 20 nt, Artificial Sequence
  HTT spacer sequence ATCN PAM
acaaguagaaguugauucua

SEQ ID NO: 5168 - RNA, 20 nt, Artificial Sequence
  HTT spacer sequence ATCN PAM
aucuacaaguagaaguugau

SEQ ID NO: 5169 - RNA, 20 nt, Artificial Sequence
  HTT spacer sequence ATCN PAM
gagguauaaguucucccuaa

SEQ ID NO: 5170 - RNA, 20 nt, Artificial Sequence
  HTT spacer sequence ATCN PAM
cacauucuggacagggugac

SEQ ID NO: 5171 - RNA, 20 nt, Artificial Sequence
  HTT spacer sequence ATCN PAM
uuuaaauuucaugugcuucu

SEQ ID NO: 5172 - RNA, 20 nt, Artificial Sequence
  HTT spacer sequence ATCN PAM
uuaaguuuuuuuuaaaaucc

SEQ ID NO: 5173 - RNA, 20 nt, Artificial Sequence
  HTT spacer sequence ATCN PAM
agaaaugugcaagagcuaug

SEQ ID NO: 5174 - RNA, 20 nt, Artificial Sequence
  HTT spacer sequence ATCN PAM
ucagguauuccucuguuuuu

SEQ ID NO: 5175 - RNA, 20 nt, Artificial Sequence
  HTT spacer sequence ATCN PAM
uuuaucaaacguauguggcu

SEQ ID NO: 5176 - RNA, 20 nt, Artificial Sequence
  HTT spacer sequence ATCN PAM
aacguauguggcuuauuuuc

SEQ ID NO: 5177 - RNA, 20 nt, Artificial Sequence
  HTT spacer sequence ATCN PAM
uucagaaaauaagccacaua

SEQ ID NO: 5178 - RNA, 20 nt, Artificial Sequence
  HTT spacer sequence ATCN PAM
aacauccuucagaaaauaag

SEQ ID NO: 5179 - RNA, 20 nt, Artificial Sequence
  HTT spacer sequence ATCN PAM
uccaaaauuaucaaacaucc

SEQ ID NO: 5180 - RNA, 20 nt, Artificial Sequence
  HTT spacer sequence ATCN PAM
ucucuacggcauuuuucaac

SEQ ID NO: 5181 - RNA, 20 nt, Artificial Sequence
  HTT spacer sequence ATCN PAM
ucuugaauuucagggcaccu

SEQ ID NO: 5182 - RNA, 20 nt, Artificial Sequence
  HTT spacer sequence ATCN PAM
ugaauuucagggcaccuuuc

SEQ ID NO: 5183 - RNA, 20 nt, Artificial Sequence
  HTT spacer sequence ATCN PAM
guuuauuauuuuccuuccug

SEQ ID NO: 5184 - RNA, 20 nt, Artificial Sequence
  HTT spacer sequence ATCN PAM
uggacuccuguuuccuuugc

SEQ ID NO: 5185 - RNA, 20 nt, Artificial Sequence
  HTT spacer sequence ATCN PAM
ccgcggucagcuccugcugc

SEQ ID NO: 5186 - RNA, 20 nt, Artificial Sequence
  HTT spacer sequence ATCN PAM
agcaagacacgccaggcacu

SEQ ID NO: 5187 - RNA, 20 nt, Artificial Sequence
  HTT spacer sequence ATCN PAM
uugaguauugccucugguuu

SEQ ID NO: 5188 - RNA, 20 nt, Artificial Sequence
  HTT spacer sequence ATCN PAM
gaggagugcaggaagggcca

SEQ ID NO: 5189 - RNA, 20 nt, Artificial Sequence
  HTT spacer sequence ATCN PAM
uaauucucaucucaugaccu

SEQ ID NO: 5190 - RNA, 20 nt, Artificial Sequence
  HTT spacer sequence ATCN PAM
caugaccucuuuucccuucu

SEQ ID NO: 5191 - RNA, 20 nt, Artificial Sequence
  HTT spacer sequence ATCN PAM
gaccucuccuggacaacagg

SEQ ID NO: 5192 - RNA, 20 nt, Artificial Sequence
  HTT spacer sequence ATCN PAM
cacaugacaucaccacauca

SEQ ID NO: 5193 - RNA, 20 nt, Artificial Sequence
  HTT spacer sequence ATCN PAM
ccacaucaccucguuccuug

SEQ ID NO: 5194 - RNA, 20 nt, Artificial Sequence
  HTT spacer sequence ATCN PAM
ccucguuccuuggacccuca

SEQ ID NO: 5195 - RNA, 20 nt, Artificial Sequence
  HTT spacer sequence ATCN PAM
agcagugacaccacugaggg

SEQ ID NO: 5196 - RNA, 20 nt, Artificial Sequence
  HTT spacer sequence ATCN PAM
aaauaccaugacuacgcuag

SEQ ID NO: 5197 - RNA, 20 nt, Artificial Sequence
  HTT spacer sequence ATCN PAM
acucacauuuucaguuucug

SEQ ID NO: 5198 - RNA, 20 nt, Artificial Sequence
  HTT spacer sequence ATCN PAM
aagaacccuugugaaagaga

SEQ ID NO: 5199 - RNA, 20 nt, Artificial Sequence
  HTT spacer sequence ATCN PAM
uuuagaaucuuaacacaucu

SEQ ID NO: 5200 - RNA, 20 nt, Artificial Sequence
  HTT spacer sequence ATCN PAM
uaacacaucuuacaccugau

SEQ ID NO: 5201 - RNA, 20 nt, Artificial Sequence
  HTT spacer sequence ATCN PAM
uacaccugauuuaauauuuu

SEQ ID NO: 5202 - RNA, 20 nt, Artificial Sequence
  HTT spacer sequence ATCN PAM
gguguaagauguguuaagau

SEQ ID NO: 5203 - RNA, 20 nt, Artificial Sequence
  HTT spacer sequence ATCN PAM
aaauugaaccaacccuaugu

SEQ ID NO: 5204 - RNA, 20 nt, Artificial Sequence
  HTT spacer sequence ATCN PAM
cugucaaauucacauagggu

SEQ ID NO: 5205 - RNA, 20 nt, Artificial Sequence
  HTT spacer sequence ATCN PAM
cugggagaaaucacugucaa

SEQ ID NO: 5206 - RNA, 20 nt, Artificial Sequence
  HTT spacer sequence ATCN PAM
uaguguauaaggaauaggac

SEQ ID NO: 5207 - RNA, 20 nt, Artificial Sequence
  HTT spacer sequence ATCN PAM
aaaaauagaaaauacuaagu

SEQ ID NO: 5208 - RNA, 20 nt, Artificial Sequence
  HTT spacer sequence ATCN PAM
gguaugugguauaucaaaaa

SEQ ID NO: 5209 - RNA, 20 nt, Artificial Sequence
  HTT spacer sequence ATCN PAM
guaucugguaugugguauau

SEQ ID NO: 5210 - RNA, 20 nt, Artificial Sequence
  HTT spacer sequence ATCN PAM
uaaucaguaucugguaugug

SEQ ID NO: 5211 - RNA, 20 nt, Artificial Sequence
  HTT spacer sequence ATCN PAM
gaaaggaauuucuuuccaaa

SEQ ID NO: 5212 - RNA, 20 nt, Artificial Sequence
  HTT spacer sequence ATCN PAM
gcugcagccgucgauguuug

SEQ ID NO: 5213 - RNA, 20 nt, Artificial Sequence
  HTT spacer sequence ATCN PAM
acggcugcagcagaugccuc

SEQ ID NO: 5214 - RNA, 20 nt, Artificial Sequence
  HTT spacer sequence ATCN PAM
cauaauguacaaccaaagac

SEQ ID NO: 5215 - RNA, 20 nt, Artificial Sequence
  HTT spacer sequence ATCN PAM
ugacagggccaguaaccgug

SEQ ID NO: 5216 - RNA, 20 nt, Artificial Sequence
  HTT spacer sequence ATCN PAM
agcgugaccuugggaaggug

SEQ ID NO: 5217 - RNA, 20 nt, Artificial Sequence
  HTT spacer sequence ATCN PAM
ucagaacagcacggaaaagu

SEQ ID NO: 5218 - RNA, 20 nt, Artificial Sequence
  HTT spacer sequence ATCN PAM
aaggcugagcggagaaaccc

SEQ ID NO: 5219 - RNA, 20 nt, Artificial Sequence
  HTT spacer sequence ATCN PAM
gagaaagaacauccaaggcu

SEQ ID NO: 5220 - RNA, 20 nt, Artificial Sequence
  HTT spacer sequence ATCN PAM
agugugccagccacaaccca

SEQ ID NO: 5221 - RNA, 20 nt, Artificial Sequence
  HTT spacer sequence ATCN PAM
aggauggagccugguucucc

SEQ ID NO: 5222 - RNA, 20 nt, Artificial Sequence
  HTT spacer sequence ATCN PAM
uagaugaacucagcccagaa

SEQ ID NO: 5223 - RNA, 20 nt, Artificial Sequence
  HTT spacer sequence ATCN PAM
uguauuagcuuagacccagu

SEQ ID NO: 5224 - RNA, 20 nt, Artificial Sequence
  HTT spacer sequence ATCN PAM
guggguuucaaaauguguuu

SEQ ID NO: 5225 - RNA, 20 nt, Artificial Sequence
  HTT spacer sequence ATCN PAM
gugucagagaauaugacugu

SEQ ID NO: 5226 - RNA, 20 nt, Artificial Sequence
  HTT spacer sequence ATCN PAM
cacagaaagucagcggcaga

SEQ ID NO: 5227 - RNA, 20 nt, Artificial Sequence
  HTT spacer sequence ATCN PAM
acgagacuuuuaacucaggc

SEQ ID NO: 5228 - RNA, 20 nt, Artificial Sequence
  HTT spacer sequence ATCN PAM
uggcacguguauaccuaugu

SEQ ID NO: 5229 - RNA, 20 nt, Artificial Sequence
  HTT spacer sequence ATCN PAM
acccaucaccuacauuaggu

SEQ ID NO: 5230 - RNA, 20 nt, Artificial Sequence
  HTT spacer sequence ATCN PAM
ccuacauuagguauuucucc

SEQ ID NO: 5231 - RNA, 20 nt, Artificial Sequence
  HTT spacer sequence ATCN PAM
cucccccaguccccucacuc

SEQ ID NO: 5232 - RNA, 20 nt, Artificial Sequence
  HTT spacer sequence ATCN PAM
cacaccggggcccaugggga

SEQ ID NO: 5233 - RNA, 20 nt, Artificial Sequence
  HTT spacer sequence ATCN PAM
gaaaaccaaacaccgcaugu

SEQ ID NO: 5234 - RNA, 20 nt, Artificial Sequence
  HTT spacer sequence ATCN PAM
ugugauaguuugcugagaau

SEQ ID NO: 5235 - RNA, 20 nt, Artificial Sequence
  HTT spacer sequence ATCN PAM
caagaucagaaaaccaaaca

SEQ ID NO: 5236 - RNA, 20 nt, Artificial Sequence
  HTT spacer sequence ATCN PAM
uucucagcaaacuaucacaa

SEQ ID NO: 5237 - RNA, 20 nt, Artificial Sequence
  HTT spacer sequence ATCN PAM
uccaugugccugcaaaggac

SEQ ID NO: 5238 - RNA, 20 nt, Artificial Sequence
  HTT spacer sequence ATCN PAM
augugccugcaaaggacaug

SEQ ID NO: 5239 - RNA, 20 nt, Artificial Sequence
  HTT spacer sequence ATCN PAM
uuuuuuauggcuguauagua

SEQ ID NO: 5240 - RNA, 20 nt, Artificial Sequence
  HTT spacer sequence ATCN PAM
agucuaucauugauggacau

SEQ ID NO: 5241 - RNA, 20 nt, Artificial Sequence
  HTT spacer sequence ATCN PAM
uugauggacauucggguugg

SEQ ID NO: 5242 - RNA, 20 nt, Artificial Sequence
  HTT spacer sequence ATCN PAM
augauagacuggauuaagaa

SEQ ID NO: 5243 - RNA, 20 nt, Artificial Sequence
  HTT spacer sequence ATCN PAM
uagaaugauuuauaauccuu

SEQ ID NO: 5244 - RNA, 20 nt, Artificial Sequence
  HTT spacer sequence ATCN PAM
uucuacgauaaagacacaug

SEQ ID NO: 5245 - RNA, 20 nt, Artificial Sequence
  HTT spacer sequence ATCN PAM
uuuggguauaugcccaguaa

SEQ ID NO: 5246 - RNA, 20 nt, Artificial Sequence
  HTT spacer sequence ATCN PAM
cauuacugggcauauaccca

SEQ ID NO: 5247 - RNA, 20 nt, Artificial Sequence
  HTT spacer sequence ATCN PAM
ccagacugucuuccacaaua

SEQ ID NO: 5248 - RNA, 20 nt, Artificial Sequence
  HTT spacer sequence ATCN PAM
guuguuucgugacuuuuuaa

SEQ ID NO: 5249 - RNA, 20 nt, Artificial Sequence
  HTT spacer sequence ATCN PAM
uuaaaaagucacgaaacaac

SEQ ID NO: 5250 - RNA, 20 nt, Artificial Sequence
  HTT spacer sequence ATCN PAM
ccauccuaacuggcgugaga

SEQ ID NO: 5251 - RNA, 20 nt, Artificial Sequence
  HTT spacer sequence ATCN PAM
uaacuggcgugagaugguau

SEQ ID NO: 5252 - RNA, 20 nt, Artificial Sequence
  HTT spacer sequence ATCN PAM
cacgccaguuaggauggcga

SEQ ID NO: 5253 - RNA, 20 nt, Artificial Sequence
  HTT spacer sequence ATCN PAM
cauugugauuuugaucugca

SEQ ID NO: 5254 - RNA, 20 nt, Artificial Sequence
  HTT spacer sequence ATCN PAM
caaugagauaccaucucacg

SEQ ID NO: 5255 - RNA, 20 nt, Artificial Sequence
  HTT spacer sequence ATCN PAM
aaaucacaaugagauaccau

SEQ ID NO: 5256 - RNA, 20 nt, Artificial Sequence
  HTT spacer sequence ATCN PAM
gcauuucucuaaugaccagu

SEQ ID NO: 5257 - RNA, 20 nt, Artificial Sequence
  HTT spacer sequence ATCN PAM
ccacuggucauuagagaaau

SEQ ID NO: 5258 - RNA, 20 nt, Artificial Sequence
  HTT spacer sequence ATCN PAM
uuuguccauuuuuugauggg

SEQ ID NO: 5259 - RNA, 20 nt, Artificial Sequence
  HTT spacer sequence ATCN PAM
aaaaauggacaaaggauaug

SEQ ID NO: 5260 - RNA, 20 nt, Artificial Sequence
  HTT spacer sequence ATCN PAM
acaaagaacuuaaacaaauu

SEQ ID NO: 5261 - RNA, 20 nt, Artificial Sequence
  HTT spacer sequence ATCN PAM
agaaucuacaaagaacuuaa

SEQ ID NO: 5262 - RNA, 20 nt, Artificial Sequence
  HTT spacer sequence ATCN PAM
uuugucagauggguagauug

SEQ ID NO: 5263 - RNA, 20 nt, Artificial Sequence
  HTT spacer sequence ATCN PAM
gacaaaagauuaacauccag

SEQ ID NO: 5264 - RNA, 20 nt, Artificial Sequence
  HTT spacer sequence ATCN PAM
acccaucugacaaaagauua

SEQ ID NO: 5265 - RNA, 20 nt, Artificial Sequence
  HTT spacer sequence ATCN PAM
cauucuguagguugccuguu

SEQ ID NO: 5266 - RNA, 20 nt, Artificial Sequence
  HTT spacer sequence ATCN PAM
gagugaacaggcaaccuaca

SEQ ID NO: 5267 - RNA, 20 nt, Artificial Sequence
  HTT spacer sequence ATCN PAM
ucagagugaacaggcaaccu

SEQ ID NO: 5268 - RNA, 20 nt, Artificial Sequence
  HTT spacer sequence ATCN PAM
aauuaaacuaaagagcuucu

SEQ ID NO: 5269 - RNA, 20 nt, Artificial Sequence
  HTT spacer sequence ATCN PAM
cguuugucaauuuuggcuuu

SEQ ID NO: 5270 - RNA, 20 nt, Artificial Sequence
  HTT spacer sequence ATCN PAM
uagaagaaaaccugggccau

SEQ ID NO: 5271 - RNA, 20 nt, Artificial Sequence
  HTT spacer sequence ATCN PAM
aagacuuaaacauaagaccu

SEQ ID NO: 5272 - RNA, 20 nt, Artificial Sequence
  HTT spacer sequence ATCN PAM
aucuugaguugauuuuugug

SEQ ID NO: 5273 - RNA, 20 nt, Artificial Sequence
  HTT spacer sequence ATCN PAM
ugaguugauuuuuguguaag

SEQ ID NO: 5274 - RNA, 20 nt, Artificial Sequence
  HTT spacer sequence ATCN PAM
acucaagauggaucaaagac

SEQ ID NO: 5275 - RNA, 20 nt, Artificial Sequence
  HTT spacer sequence ATCN PAM
uuuccccauugcuuaugugu

SEQ ID NO: 5276 - RNA, 20 nt, Artificial Sequence
  HTT spacer sequence ATCN PAM
uugacaaaccugacacacau

SEQ ID NO: 5277 - RNA, 20 nt, Artificial Sequence
  HTT spacer sequence ATCN PAM
gaugauuguagauguguggu

SEQ ID NO: 5278 - RNA, 20 nt, Artificial Sequence
  HTT spacer sequence ATCN PAM
gaucuuugacaaaccugaca

SEQ ID NO: 5279 - RNA, 20 nt, Artificial Sequence
  HTT spacer sequence ATCN PAM
ucugaucuuugacaaaccug

SEQ ID NO: 5280 - RNA, 20 nt, Artificial Sequence
  HTT spacer sequence ATCN PAM
acaaucaucugaucuuugac

SEQ ID NO: 5281 - RNA, 20 nt, Artificial Sequence
  HTT spacer sequence ATCN PAM
guuuugguaccaguaccaug

SEQ ID NO: 5282 - RNA, 20 nt, Artificial Sequence
  HTT spacer sequence ATCN PAM
cacuaccugacuucaaacua

SEQ ID NO: 5283 - RNA, 20 nt, Artificial Sequence
  HTT spacer sequence ATCN PAM
ugggcuagaagaacaaagcu

SEQ ID NO: 5284 - RNA, 20 nt, Artificial Sequence
  HTT spacer sequence ATCN PAM
cugacuuucuucacagaauu

SEQ ID NO: 5285 - RNA, 20 nt, Artificial Sequence
  HTT spacer sequence ATCN PAM
agcuaucacugacuuucuuc

SEQ ID NO: 5286 - RNA, 20 nt, Artificial Sequence
  HTT spacer sequence ATCN PAM
ccccaucaagcuaucacuga

SEQ ID NO: 5287 - RNA, 20 nt, Artificial Sequence
  HTT spacer sequence ATCN PAM
auaaauuacuuugggcagca

SEQ ID NO: 5288 - RNA, 20 nt, Artificial Sequence
  HTT spacer sequence ATCN PAM
ugaaaauggccuugcugccc

SEQ ID NO: 5289 - RNA, 20 nt, Artificial Sequence
  HTT spacer sequence ATCN PAM
auaucgugaaaauggccuug

SEQ ID NO: 5290 - RNA, 20 nt, Artificial Sequence
  HTT spacer sequence ATCN PAM
augaacauggaauguuuuuc

SEQ ID NO: 5291 - RNA, 20 nt, Artificial Sequence
  HTT spacer sequence ATCN PAM
cuuguaaguugucuuccuag

SEQ ID NO: 5292 - RNA, 20 nt, Artificial Sequence
  HTT spacer sequence ATCN PAM
ugagugaacucccauucaca

SEQ ID NO: 5293 - RNA, 20 nt, Artificial Sequence
  HTT spacer sequence ATCN PAM
caagcauuccuauacaccaa

SEQ ID NO: 5294 - RNA, 20 nt, Artificial Sequence
  HTT spacer sequence ATCN PAM
augugcaaaaaucacaagca

SEQ ID NO: 5295 - RNA, 20 nt, Artificial Sequence
  HTT spacer sequence ATCN PAM
ugagacuuugcugaaguugc

SEQ ID NO: 5296 - RNA, 20 nt, Artificial Sequence
  HTT spacer sequence ATCN PAM
gcuuaaggagauuuugagcu

SEQ ID NO: 5297 - RNA, 20 nt, Artificial Sequence
  HTT spacer sequence ATCN PAM
ccuuaagcugauuagcaacu

SEQ ID NO: 5298 - RNA, 20 nt, Artificial Sequence
  HTT spacer sequence ATCN PAM
ugucaucugcaaacagggac

SEQ ID NO: 5299 - RNA, 20 nt, Artificial Sequence
  HTT spacer sequence ATCN PAM
gcaaacagggacaguuuuac

SEQ ID NO: 5300 - RNA, 20 nt, Artificial Sequence
  HTT spacer sequence ATCN PAM
ggcaagagaaagcaauaaag

SEQ ID NO: 5301 - RNA, 20 nt, Artificial Sequence
  HTT spacer sequence ATCN PAM
uugucuugugccgguuuucg

SEQ ID NO: 5302 - RNA, 20 nt, Artificial Sequence
  HTT spacer sequence ATCN PAM
uacugaaugggcaaaaacug

SEQ ID NO: 5303 - RNA, 20 nt, Artificial Sequence
  HTT spacer sequence ATCN PAM
caacauaguaagagcuauuu

SEQ ID NO: 5304 - RNA, 20 nt, Artificial Sequence
  HTT spacer sequence ATCN PAM
auaccuaguuuauugagagu

SEQ ID NO: 5305 - RNA, 20 nt, Artificial Sequence
  HTT spacer sequence ATCN PAM
auggaacguaucucaacaua

SEQ ID NO: 5306 - RNA, 20 nt, Artificial Sequence
  HTT spacer sequence ATCN PAM
guugagauaaucauaugguu

SEQ ID NO: 5307 - RNA, 20 nt, Artificial Sequence
  HTT spacer sequence ATCN PAM
caacagaugcagaaaaggcc

SEQ ID NO: 5308 - RNA, 20 nt, Artificial Sequence
  HTT spacer sequence ATCN PAM
uaugguuuuuguuguugguu

SEQ ID NO: 5309 - RNA, 20 nt, Artificial Sequence
  HTT spacer sequence ATCN PAM
cauaaacagaaccaacaaca

SEQ ID NO: 5310 - RNA, 20 nt, Artificial Sequence
  HTT spacer sequence ATCN PAM
aucacauaaacagaaccaac

SEQ ID NO: 5311 - RNA, 20 nt, Artificial Sequence
  HTT spacer sequence ATCN PAM
auaaacguaauccaucacau

SEQ ID NO: 5312 - RNA, 20 nt, Artificial Sequence
  HTT spacer sequence ATCN PAM
cuggaaugcaaggcugguuc

SEQ ID NO: 5313 - RNA, 20 nt, Artificial Sequence
  HTT spacer sequence ATCN PAM
agucagcuucaucccuggaa

SEQ ID NO: 5314 - RNA, 20 nt, Artificial Sequence
  HTT spacer sequence ATCN PAM
accacaaucaagucagcuuc

SEQ ID NO: 5315 - RNA, 20 nt, Artificial Sequence
  HTT spacer sequence ATCN PAM
aaaagcuuauccaccacaau

SEQ ID NO: 5316 - RNA, 20 nt, Artificial Sequence
  HTT spacer sequence ATCN PAM
agcagcacaucaaaaagcuu

SEQ ID NO: 5317 - RNA, 20 nt, Artificial Sequence
  HTT spacer sequence ATCN PAM
ucaauaaaauacuggcaaac

SEQ ID NO: 5318 - RNA, 20 nt, Artificial Sequence
  HTT spacer sequence ATCN PAM
auguucaucagggauauugg

SEQ ID NO: 5319 - RNA, 20 nt, Artificial Sequence
  HTT spacer sequence ATCN PAM
augugaaaauccucaauaaa

SEQ ID NO: 5320 - RNA, 20 nt, Artificial Sequence
  HTT spacer sequence ATCN PAM
gggauauuggccuaaaauuc

SEQ ID NO: 5321 - RNA, 20 nt, Artificial Sequence
  HTT spacer sequence ATCN PAM
cugaugaacaucgaugugaa

SEQ ID NO: 5322 - RNA, 20 nt, Artificial Sequence
  HTT spacer sequence ATCN PAM
ggaugaugcuggccucauaa

SEQ ID NO: 5323 - RNA, 20 nt, Artificial Sequence
  HTT spacer sequence ATCN PAM
ugauaccaaagccuggcaga

SEQ ID NO: 5324 - RNA, 20 nt, Artificial Sequence
  HTT spacer sequence ATCN PAM
uccugauaccaaagccuggc

SEQ ID NO: 5325 - RNA, 20 nt, Artificial Sequence
  HTT spacer sequence ATCN PAM
ucccuaacucauuuuaugag

SEQ ID NO: 5326 - RNA, 20 nt, Artificial Sequence
  HTT spacer sequence ATCN PAM
auagaaaaagagagaauccu

SEQ ID NO: 5327 - RNA, 20 nt, Artificial Sequence
  HTT spacer sequence ATCN PAM
ccucuuuguaccucugguag

SEQ ID NO: 5328 - RNA, 20 nt, Artificial Sequence
  HTT spacer sequence ATCN PAM
auccuggacuuuuuuugguu

SEQ ID NO: 5329 - RNA, 20 nt, Artificial Sequence
  HTT spacer sequence ATCN PAM
uggacuuuuuuugguuagua

SEQ ID NO: 5330 - RNA, 20 nt, Artificial Sequence
  HTT spacer sequence ATCN PAM
gucuauucagagauucagcu

SEQ ID NO: 5331 - RNA, 20 nt, Artificial Sequence
  HTT spacer sequence ATCN PAM
cugaauagacugauaacagg

SEQ ID NO: 5332 - RNA, 20 nt, Artificial Sequence
  HTT spacer sequence ATCN PAM
auuucuucuagauuuucuag

SEQ ID NO: 5333 - RNA, 20 nt, Artificial Sequence
  HTT spacer sequence ATCN PAM
agaagaaauggauaaauucc

SEQ ID NO: 5334 - RNA, 20 nt, Artificial Sequence
  HTT spacer sequence ATCN PAM
cuacccaaauaaacuagaaa

SEQ ID NO: 5335 - RNA, 20 nt, Artificial Sequence
  HTT spacer sequence ATCN PAM
gagaauacuauaaacaucuc

SEQ ID NO: 5336 - RNA, 20 nt, Artificial Sequence
  HTT spacer sequence ATCN PAM
cacagaaauacaaacuacca

SEQ ID NO: 5337 - RNA, 20 nt, Artificial Sequence
  HTT spacer sequence ATCN PAM
guggugauauccccuuuauc

SEQ ID NO: 5338 - RNA, 20 nt, Artificial Sequence
  HTT spacer sequence ATCN PAM
ccaccgaucccacagaaaua

SEQ ID NO: 5339 - RNA, 20 nt, Artificial Sequence
  HTT spacer sequence ATCN PAM
ccuuuaucguuuuuauugag

SEQ ID NO: 5340 - RNA, 20 nt, Artificial Sequence
  HTT spacer sequence ATCN PAM
uuuuuauugagucuauuuga

SEQ ID NO: 5341 - RNA, 20 nt, Artificial Sequence
  HTT spacer sequence ATCN PAM
aauagacucaauaaaaacga

SEQ ID NO: 5342 - RNA, 20 nt, Artificial Sequence
  HTT spacer sequence ATCN PAM
auaaaauagguagaccgcua

SEQ ID NO: 5343 - RNA, 20 nt, Artificial Sequence
  HTT spacer sequence ATCN PAM
uuucaaaaaaccagcaccug

SEQ ID NO: 5344 - RNA, 20 nt, Artificial Sequence
  HTT spacer sequence ATCN PAM
aggugcugguuuuuugaaaa

SEQ ID NO: 5345 - RNA, 20 nt, Artificial Sequence
  HTT spacer sequence ATCN PAM
augaauccaggugcugguuu

SEQ ID NO: 5346 - RNA, 20 nt, Artificial Sequence
  HTT spacer sequence ATCN PAM
ccuucaguucugcucugauc

SEQ ID NO: 5347 - RNA, 20 nt, Artificial Sequence
  HTT spacer sequence ATCN PAM
gagcagaacugaaggagaua

SEQ ID NO: 5348 - RNA, 20 nt, Artificial Sequence
  HTT spacer sequence ATCN PAM
uaguuauuuuuugucuucug

SEQ ID NO: 5349 - RNA, 20 nt, Artificial Sequence
  HTT spacer sequence ATCN PAM
caauuaaaagaacuagaaaa

SEQ ID NO: 5350 - RNA, 20 nt, Artificial Sequence
  HTT spacer sequence ATCN PAM
aaaauuaacacccuaacauc

SEQ ID NO: 5351 - RNA, 20 nt, Artificial Sequence
  HTT spacer sequence ATCN PAM
uuucugcuuucucuuguggg

SEQ ID NO: 5352 - RNA, 20 nt, Artificial Sequence
  HTT spacer sequence ATCN PAM
cugggacacauuuaaagcag

SEQ ID NO: 5353 - RNA, 20 nt, Artificial Sequence
  HTT spacer sequence ATCN PAM
cacucaaaaccacacaacua

SEQ ID NO: 5354 - RNA, 20 nt, Artificial Sequence
  HTT spacer sequence ATCN PAM
ugaguucuaauuugauugca

SEQ ID NO: 5355 - RNA, 20 nt, Artificial Sequence
  HTT spacer sequence ATCN PAM
aauuagaacucaggauugag

SEQ ID NO: 5356 - RNA, 20 nt, Artificial Sequence
  HTT spacer sequence ATCN PAM
caacaaacugucugucagac

SEQ ID NO: 5357 - RNA, 20 nt, Artificial Sequence
  HTT spacer sequence ATCN PAM
acagaacauacauucuucuc

SEQ ID NO: 5358 - RNA, 20 nt, Artificial Sequence
  HTT spacer sequence ATCN PAM
acagaacucugcaccccaaa

SEQ ID NO: 5359 - RNA, 20 nt, Artificial Sequence
  HTT spacer sequence ATCN PAM
aggacuugaacucagcacug

SEQ ID NO: 5360 - RNA, 20 nt, Artificial Sequence
  HTT spacer sequence ATCN PAM
uuguuaauuuucuggcucau

SEQ ID NO: 5361 - RNA, 20 nt, Artificial Sequence
  HTT spacer sequence ATCN PAM
augagccagaaaauuaacaa

SEQ ID NO: 5362 - RNA, 20 nt, Artificial Sequence
  HTT spacer sequence ATCN PAM
gccuaauauugacagugggg

SEQ ID NO: 5363 - RNA, 20 nt, Artificial Sequence
  HTT spacer sequence ATCN PAM
gggugcuccuguauuggggg

SEQ ID NO: 5364 - RNA, 20 nt, Artificial Sequence
  HTT spacer sequence ATCN PAM
uaaauauacacgcccccaau

SEQ ID NO: 5365 - RNA, 20 nt, Artificial Sequence
  HTT spacer sequence ATCN PAM
auucaacaagaagagcuaac

SEQ ID NO: 5366 - RNA, 20 nt, Artificial Sequence
  HTT spacer sequence ATCN PAM
cuuuaccauuauguaauggc

SEQ ID NO: 5367 - RNA, 20 nt, Artificial Sequence
  HTT spacer sequence ATCN PAM
acaaaguucaaaggagacaa

SEQ ID NO: 5368 - RNA, 20 nt, Artificial Sequence
  HTT spacer sequence ATCN PAM
gagacuaggauugcaauccc

SEQ ID NO: 5369 - RNA, 20 nt, Artificial Sequence
  HTT spacer sequence ATCN PAM
uagucucugauaaaacagac

SEQ ID NO: 5370 - RNA, 20 nt, Artificial Sequence
  HTT spacer sequence ATCN PAM
cugcuuuuuuuuugcuuucc

SEQ ID NO: 5371 - RNA, 20 nt, Artificial Sequence
  HTT spacer sequence ATCN PAM
aacaagcaaauggaaagcaa

SEQ ID NO: 5372 - RNA, 20 nt, Artificial Sequence
  HTT spacer sequence ATCN PAM
uccuccaucccuuuauuuug

SEQ ID NO: 5373 - RNA, 20 nt, Artificial Sequence
  HTT spacer sequence ATCN PAM
cuuuauuuugagccaaugag

SEQ ID NO: 5374 - RNA, 20 nt, Artificial Sequence
  HTT spacer sequence ATCN PAM
cacaugcaaagacacucauu

SEQ ID NO: 5375 - RNA, 20 nt, Artificial Sequence
  HTT spacer sequence ATCN PAM
aauuugccagucugugucuu

SEQ ID NO: 5376 - RNA, 20 nt, Artificial Sequence
  HTT spacer sequence ATCN PAM
aauucacacauagcaauauu

SEQ ID NO: 5377 - RNA, 20 nt, Artificial Sequence
  HTT spacer sequence ATCN PAM
ugucauuaugauccuaguug

SEQ ID NO: 5378 - RNA, 20 nt, Artificial Sequence
  HTT spacer sequence ATCN PAM
uaaugacaggaucaaauuca

SEQ ID NO: 5379 - RNA, 20 nt, Artificial Sequence
  HTT spacer sequence ATCN PAM
uaguugguuauuuugcccgu

SEQ ID NO: 5380 - RNA, 20 nt, Artificial Sequence
  HTT spacer sequence ATCN PAM
guuaacgggcaaaauaacca

SEQ ID NO: 5381 - RNA, 20 nt, Artificial Sequence
  HTT spacer sequence ATCN PAM
cugcauuugcuugucuguaa

SEQ ID NO: 5382 - RNA, 20 nt, Artificial Sequence
  HTT spacer sequence ATCN PAM
uuuacagacaagcaaaugca

SEQ ID NO: 5383 - RNA, 20 nt, Artificial Sequence
  HTT spacer sequence ATCN PAM
agccaaacuaagcuucauaa

SEQ ID NO: 5384 - RNA, 20 nt, Artificial Sequence
  HTT spacer sequence ATCN PAM
uacaagccagaaaagagugg

SEQ ID NO: 5385 - RNA, 20 nt, Artificial Sequence
  HTT spacer sequence ATCN PAM
cucugcagaaauccuacaag

SEQ ID NO: 5386 - RNA, 20 nt, Artificial Sequence
  HTT spacer sequence ATCN PAM
gcuguuagucugaugggcuu

SEQ ID NO: 5387 - RNA, 20 nt, Artificial Sequence
  HTT spacer sequence ATCN PAM
gacuaacagcagaucucucu

SEQ ID NO: 5388 - RNA, 20 nt, Artificial Sequence
  HTT spacer sequence ATCN PAM
ugguggaucugaugauuaug

SEQ ID NO: 5389 - RNA, 20 nt, Artificial Sequence
  HTT spacer sequence ATCN PAM
accaagauugaaaugaagga

SEQ ID NO: 5390 - RNA, 20 nt, Artificial Sequence
  HTT spacer sequence ATCN PAM
gaugauuaugugucuugggg

SEQ ID NO: 5391 - RNA, 20 nt, Artificial Sequence
  HTT spacer sequence ATCN PAM
gauccaccaagauugaaaug

SEQ ID NO: 5392 - RNA, 20 nt, Artificial Sequence
  HTT spacer sequence ATCN PAM
ucagauccaccaagauugaa

SEQ ID NO: 5393 - RNA, 20 nt, Artificial Sequence
  HTT spacer sequence ATCN PAM
uugugguguucucuguauuu

SEQ ID NO: 5394 - RNA, 20 nt, Artificial Sequence
  HTT spacer sequence ATCN PAM
aggagaacuuccccaaccua

SEQ ID NO: 5395 - RNA, 20 nt, Artificial Sequence
  HTT spacer sequence ATCN PAM
ugaagaguguuuucuaacuu

SEQ ID NO: 5396 - RNA, 20 nt, Artificial Sequence
  HTT spacer sequence ATCN PAM
cuuucagguacaccaaucaa

SEQ ID NO: 5397 - RNA, 20 nt, Artificial Sequence
  HTT spacer sequence ATCN PAM
aacguagauuuggucuuuuc

SEQ ID NO: 5398 - RNA, 20 nt, Artificial Sequence
  HTT spacer sequence ATCN PAM
acguuugauugguguaccug

SEQ ID NO: 5399 - RNA, 20 nt, Artificial Sequence
  HTT spacer sequence ATCN PAM
ugucuucucgcuuuauuuca

SEQ ID NO: 5400 - RNA, 20 nt, Artificial Sequence
  HTT spacer sequence ATCN PAM
aauuaaugaaauaaagcgag

SEQ ID NO: 5401 - RNA, 20 nt, Artificial Sequence
  HTT spacer sequence ATCN PAM
ucaaucacugauauccuuuc

SEQ ID NO: 5402 - RNA, 20 nt, Artificial Sequence
  HTT spacer sequence ATCN PAM
cugauauccuuucuucugcu

SEQ ID NO: 5403 - RNA, 20 nt, Artificial Sequence
  HTT spacer sequence ATCN PAM
gugauugaagaucaaauuaa

SEQ ID NO: 5404 - RNA, 20 nt, Artificial Sequence
  HTT spacer sequence ATCN PAM
uuucuucugcuugauugaau

SEQ ID NO: 5405 - RNA, 20 nt, Artificial Sequence
  HTT spacer sequence ATCN PAM
agcagaagaaaggauaucag

SEQ ID NO: 5406 - RNA, 20 nt, Artificial Sequence
  HTT spacer sequence ATCN PAM
gcugucgaagcuuguguaua

SEQ ID NO: 5407 - RNA, 20 nt, Artificial Sequence
  HTT spacer sequence ATCN PAM
ggucauuuaagcucuucucu

SEQ ID NO: 5408 - RNA, 20 nt, Artificial Sequence
  HTT spacer sequence ATCN PAM
caaggaagcuaaaaaccuug

SEQ ID NO: 5409 - RNA, 20 nt, Artificial Sequence
  HTT spacer sequence ATCN PAM
aacucauucuccauccaguu

SEQ ID NO: 5410 - RNA, 20 nt, Artificial Sequence
  HTT spacer sequence ATCN PAM
aguuuuguucccuugcuggu

SEQ ID NO: 5411 - RNA, 20 nt, Artificial Sequence
  HTT spacer sequence ATCN PAM
caacuccucaccagcaaggg

SEQ ID NO: 5412 - RNA, 20 nt, Artificial Sequence
  HTT spacer sequence ATCN PAM
uuuggaggagaagagguguu

SEQ ID NO: 5413 - RNA, 20 nt, Artificial Sequence
  HTT spacer sequence ATCN PAM
uugugguuuuaucuaccuuu

SEQ ID NO: 5414 - RNA, 20 nt, Artificial Sequence
  HTT spacer sequence ATCN PAM
accuuuggucuuugauguug

SEQ ID NO: 5415 - RNA, 20 nt, Artificial Sequence
  HTT spacer sequence ATCN PAM
aagaccaaagguagauaaaa

SEQ ID NO: 5416 - RNA, 20 nt, Artificial Sequence
  HTT spacer sequence ATCN PAM
guaggucaccaacaucaaag

SEQ ID NO: 5417 - RNA, 20 nt, Artificial Sequence
  HTT spacer sequence ATCN PAM
acaaaaaggacacccacacc

SEQ ID NO: 5418 - RNA, 20 nt, Artificial Sequence
  HTT spacer sequence ATCN PAM
acaucaacaaaaaggacacc

SEQ ID NO: 5419 - RNA, 20 nt, Artificial Sequence
  HTT spacer sequence ATCN PAM
ccagcagaggcugcagaaca

SEQ ID NO: 5420 - RNA, 20 nt, Artificial Sequence
  HTT spacer sequence ATCN PAM
ggcagcaauauuugcuguuc

SEQ ID NO: 5421 - RNA, 20 nt, Artificial Sequence
  HTT spacer sequence ATCN PAM
uuccucuggaaacaucgucc

SEQ ID NO: 5422 - RNA, 20 nt, Artificial Sequence
  HTT spacer sequence ATCN PAM
ucccagagcacgaagguguc

SEQ ID NO: 5423 - RNA, 20 nt, Artificial Sequence
  HTT spacer sequence ATCN PAM
gagcuugaaugccguaccgg

SEQ ID NO: 5424 - RNA, 20 nt, Artificial Sequence
  HTT spacer sequence ATCN PAM
ggagaagcugucugcugccu

SEQ ID NO: 5425 - RNA, 20 nt, Artificial Sequence
  HTT spacer sequence ATCN PAM
gaacaaaaggcagcagacag

SEQ ID NO: 5426 - RNA, 20 nt, Artificial Sequence
  HTT spacer sequence ATCN PAM
agagaggcaguaggccuugc

SEQ ID NO: 5427 - RNA, 20 nt, Artificial Sequence
  HTT spacer sequence ATCN PAM
caggucgauuucagagugcu

SEQ ID NO: 5428 - RNA, 20 nt, Artificial Sequence
  HTT spacer sequence ATCN PAM
accugggaugcaggagcuug

SEQ ID NO: 5429 - RNA, 20 nt, Artificial Sequence
  HTT spacer sequence ATCN PAM
ccuggucugcugguugugaa

SEQ ID NO: 5430 - RNA, 20 nt, Artificial Sequence
  HTT spacer sequence ATCN PAM
cacugggacuugcuggacag

SEQ ID NO: 5431 - RNA, 20 nt, Artificial Sequence
  HTT spacer sequence ATCN PAM
ccugucuucugugucgaucu

SEQ ID NO: 5432 - RNA, 20 nt, Artificial Sequence
  HTT spacer sequence ATCN PAM
acacagaagacaggugauuu

SEQ ID NO: 5433 - RNA, 20 nt, Artificial Sequence
  HTT spacer sequence ATCN PAM
cacugggagcuguagacugg

SEQ ID NO: 5434 - RNA, 20 nt, Artificial Sequence
  HTT spacer sequence ATCN PAM
cuuguuuuuugagguggagu

SEQ ID NO: 5435 - RNA, 20 nt, Artificial Sequence
  HTT spacer sequence ATCN PAM
gcacaaucucggcccacugc

SEQ ID NO: 5436 - RNA, 20 nt, Artificial Sequence
  HTT spacer sequence ATCN PAM
cggcccacugcaaccuuugc

SEQ ID NO: 5437 - RNA, 20 nt, Artificial Sequence
  HTT spacer sequence ATCN PAM
cuugaaaccaggaggcaaag

SEQ ID NO: 5438 - RNA, 20 nt, Artificial Sequence
  HTT spacer sequence ATCN PAM
cagcuacuccggaggcugag

SEQ ID NO: 5439 - RNA, 20 nt, Artificial Sequence
  HTT spacer sequence ATCN PAM
ccacuaaaaauacaaaaaau

SEQ ID NO: 5440 - RNA, 20 nt, Artificial Sequence
  HTT spacer sequence ATCN PAM
caaggucaggaguucgagac

SEQ ID NO: 5441 - RNA, 20 nt, Artificial Sequence
  HTT spacer sequence ATCN PAM
acccaccucagccuccuaga

SEQ ID NO: 5442 - RNA, 20 nt, Artificial Sequence
  HTT spacer sequence ATCN PAM
cagcacucuaggaggcugag

SEQ ID NO: 5443 - RNA, 20 nt, Artificial Sequence
  HTT spacer sequence ATCN PAM
caggugucagccaccacgcc

SEQ ID NO: 5444 - RNA, 20 nt, Artificial Sequence
  HTT spacer sequence ATCN PAM
gaaaauauggcugggcgugg

SEQ ID NO: 5445 - RNA, 20 nt, Artificial Sequence
  HTT spacer sequence ATCN PAM
cccucucuuugcccuaaacc

SEQ ID NO: 5446 - RNA, 20 nt, Artificial Sequence
  HTT spacer sequence ATCN PAM
cacguucaaauuuaaaacau

SEQ ID NO: 5447 - RNA, 20 nt, Artificial Sequence
  HTT spacer sequence ATCN PAM
ucuaacugggauucuuuaaa

SEQ ID NO: 5448 - RNA, 20 nt, Artificial Sequence
  HTT spacer sequence ATCN PAM
aacugggauucuuuaaauag

SEQ ID NO: 5449 - RNA, 20 nt, Artificial Sequence
  HTT spacer sequence ATCN PAM
caguuagaugauuuuuauuu

SEQ ID NO: 5450 - RNA, 20 nt, Artificial Sequence
  HTT spacer sequence ATCN PAM
uacuauuuaaagaaucccag

SEQ ID NO: 5451 - RNA, 20 nt, Artificial Sequence
  HTT spacer sequence ATCN PAM
aaugcugccuuauccaaaua

SEQ ID NO: 5452 - RNA, 20 nt, Artificial Sequence
  HTT spacer sequence ATCN PAM
aaauaauaaaaguaaauuau

SEQ ID NO: 5453 - RNA, 20 nt, Artificial Sequence
  HTT spacer sequence ATCN PAM
ucauuaaauugugacuuauu

SEQ ID NO: 5454 - RNA, 20 nt, Artificial Sequence
  HTT spacer sequence ATCN PAM
aucuucauuaaauugugacu

SEQ ID NO: 5455 - RNA, 20 nt, Artificial Sequence
  HTT spacer sequence ATCN PAM
acuaacaucaaucuucauua

SEQ ID NO: 5456 - RNA, 20 nt, Artificial Sequence
  HTT spacer sequence ATCN PAM
uuauauucuugaaaucagcc

SEQ ID NO: 5457 - RNA, 20 nt, Artificial Sequence
  HTT spacer sequence ATCN PAM
gccauaugguugugugugua

SEQ ID NO: 5458 - RNA, 20 nt, Artificial Sequence
  HTT spacer sequence ATCN PAM
uuauguaccuuuaaaaauau

SEQ ID NO: 5459 - RNA, 20 nt, Artificial Sequence
  HTT spacer sequence ATCN PAM
cugaaaauuuuuacauuugg

SEQ ID NO: 5460 - RNA, 20 nt, Artificial Sequence
  HTT spacer sequence ATCN PAM
aguuauucuuaugccaaaug

SEQ ID NO: 5461 - RNA, 20 nt, Artificial Sequence
  HTT spacer sequence ATCN PAM
uauucucuggccugugucuu

SEQ ID NO: 5462 - RNA, 20 nt, Artificial Sequence
  HTT spacer sequence ATCN PAM
accuuuaacuguaaagacac

SEQ ID NO: 5463 - RNA, 20 nt, Artificial Sequence
  HTT spacer sequence ATCN PAM
uuuuugcuguuucaagacag

SEQ ID NO: 5464 - RNA, 20 nt, Artificial Sequence
  HTT spacer sequence ATCN PAM
uuuuguuuguacuuuggaag

SEQ ID NO: 5465 - RNA, 20 nt, Artificial Sequence
  HTT spacer sequence ATCN PAM
guggucuuuuagagggggau

SEQ ID NO: 5466 - RNA, 20 nt, Artificial Sequence
  HTT spacer sequence ATCN PAM
cccucuaaaagaccacggau

SEQ ID NO: 5467 - RNA, 20 nt, Artificial Sequence
  HTT spacer sequence ATCN PAM
cccucacugacucacagcau

SEQ ID NO: 5468 - RNA, 20 nt, Artificial Sequence
  HTT spacer sequence ATCN PAM
gaaaccuugccaugcuguga

SEQ ID NO: 5469 - RNA, 20 nt, Artificial Sequence
  HTT spacer sequence ATCN PAM
cuuucugccacacagcaguu

SEQ ID NO: 5470 - RNA, 20 nt, Artificial Sequence
  HTT spacer sequence ATCN PAM
uuccagcugccucagaacug

SEQ ID NO: 5471 - RNA, 20 nt, Artificial Sequence
  HTT spacer sequence ATCN PAM
agaugcuuagauugucaggc

SEQ ID NO: 5472 - RNA, 20 nt, Artificial Sequence
  HTT spacer sequence ATCN PAM
ggauaucuuuccagcugccu

SEQ ID NO: 5473 - RNA, 20 nt, Artificial Sequence
  HTT spacer sequence ATCN PAM
aagcaucuggauaucuuucc

SEQ ID NO: 5474 - RNA, 20 nt, Artificial Sequence
  HTT spacer sequence ATCN PAM
caagccuggccugacaaucu

SEQ ID NO: 5475 - RNA, 20 nt, Artificial Sequence
  HTT spacer sequence ATCN PAM
gugaccuugcuuaggugaag

SEQ ID NO: 5476 - RNA, 20 nt, Artificial Sequence
  HTT spacer sequence ATCN PAM
gagccccugcaccaacaugc

SEQ ID NO: 5477 - RNA, 20 nt, Artificial Sequence
  HTT spacer sequence ATCN PAM
agcucaccucuccagcuaca

SEQ ID NO: 5478 - RNA, 20 nt, Artificial Sequence
  HTT spacer sequence ATCN PAM
uggaacuagguaaacucaca

SEQ ID NO: 5479 - RNA, 20 nt, Artificial Sequence
  HTT spacer sequence ATCN PAM
uuuucuuuuucuaaauagca

SEQ ID NO: 5480 - RNA, 20 nt, Artificial Sequence
  HTT spacer sequence ATCN PAM
uuauuuauuccauacucauu

SEQ ID NO: 5481 - RNA, 20 nt, Artificial Sequence
  HTT spacer sequence ATCN PAM
aaugcauaauacauuucaau

SEQ ID NO: 5482 - RNA, 20 nt, Artificial Sequence
  HTT spacer sequence ATCN PAM
ucuauaauauaaugcaaaag

SEQ ID NO: 5483 - RNA, 20 nt, Artificial Sequence
  HTT spacer sequence ATCN PAM
gcaaaccgggaaacugucuc

SEQ ID NO: 5484 - RNA, 20 nt, Artificial Sequence
  HTT spacer sequence ATCN PAM
ucccaccucagccccgagua

SEQ ID NO: 5485 - RNA, 20 nt, Artificial Sequence
  HTT spacer sequence ATCN PAM
uggcucuuugcagccucaac

SEQ ID NO: 5486 - RNA, 20 nt, Artificial Sequence
  HTT spacer sequence ATCN PAM
ugccauugcacuccagcaug

SEQ ID NO: 5487 - RNA, 20 nt, Artificial Sequence
  HTT spacer sequence ATCN PAM
cccaaaacagacaguauaaa

SEQ ID NO: 5488 - RNA, 20 nt, Artificial Sequence
  HTT spacer sequence ATCN PAM
aaucacccaaaacagacagu

SEQ ID NO: 5489 - RNA, 20 nt, Artificial Sequence
  HTT spacer sequence ATCN PAM
uuaucaaaucacccaaaaca

SEQ ID NO: 5490 - RNA, 20 nt, Artificial Sequence
  HTT spacer sequence ATCN PAM
gggcauaucauuaucaaauc

SEQ ID NO: 5491 - RNA, 20 nt, Artificial Sequence
  HTT spacer sequence ATCN PAM
uguguuucuugugccugggu

SEQ ID NO: 5492 - RNA, 20 nt, Artificial Sequence
  HTT spacer sequence ATCN PAM
uggcucacugcaagcucugc

SEQ ID NO: 5493 - RNA, 20 nt, Artificial Sequence
  HTT spacer sequence ATCN PAM
uggcuaacacagugaaaccu

SEQ ID NO: 5494 - RNA, 20 nt, Artificial Sequence
  HTT spacer sequence ATCN PAM
ccugaccucgugaucugccc

SEQ ID NO: 5495 - RNA, 20 nt, Artificial Sequence
  HTT spacer sequence ATCN PAM
cgaggucaggagauugagac

SEQ ID NO: 5496 - RNA, 20 nt, Artificial Sequence
  HTT spacer sequence ATCN PAM
gcccgccugggccucccaaa

SEQ ID NO: 5497 - RNA, 20 nt, Artificial Sequence
  HTT spacer sequence ATCN PAM
cagcacuuugggaggcccag

SEQ ID NO: 5498 - RNA, 20 nt, Artificial Sequence
  HTT spacer sequence ATCN PAM
uugaagaaauaauggccuag

SEQ ID NO: 5499 - RNA, 20 nt, Artificial Sequence
  HTT spacer sequence ATCN PAM
cagccccuuuaagagaggga

SEQ ID NO: 5500 - RNA, 20 nt, Artificial Sequence
  HTT spacer sequence ATCN PAM
uucaggaaaucacagccccu

SEQ ID NO: 5501 - RNA, 20 nt, Artificial Sequence
  HTT spacer sequence ATCN PAM
guaagcuaugggacaacacu

SEQ ID NO: 5502 - RNA, 20 nt, Artificial Sequence
  HTT spacer sequence ATCN PAM
aacacugaaaagagcaucag

SEQ ID NO: 5503 - RNA, 20 nt, Artificial Sequence
  HTT spacer sequence ATCN PAM
gagaacuugaaaacacaaua

SEQ ID NO: 5504 - RNA, 20 nt, Artificial Sequence
  HTT spacer sequence ATCN PAM
uuucuucuacagugucuacu

SEQ ID NO: 5505 - RNA, 20 nt, Artificial Sequence
  HTT spacer sequence ATCN PAM
guuaaucuguuguuaauccu

SEQ ID NO: 5506 - RNA, 20 nt, Artificial Sequence
  HTT spacer sequence ATCN PAM
guuguuaauccuguccagcg

SEQ ID NO: 5507 - RNA, 20 nt, Artificial Sequence
  HTT spacer sequence ATCN PAM
uguccagcguauuuuuuuuu

SEQ ID NO: 5508 - RNA, 20 nt, Artificial Sequence
  HTT spacer sequence ATCN PAM
caccacuaaacuccagccug

SEQ ID NO: 5509 - RNA, 20 nt, Artificial Sequence
  HTT spacer sequence ATCN PAM
gcucacugcaaccuccaccu

SEQ ID NO: 5510 - RNA, 20 nt, Artificial Sequence
  HTT spacer sequence ATCN PAM
cuaauaaaaauacacaaauu

SEQ ID NO: 5511 - RNA, 20 nt, Artificial Sequence
  HTT spacer sequence ATCN PAM
ccugaggucaggaguucaag

SEQ ID NO: 5512 - RNA, 20 nt, Artificial Sequence
  HTT spacer sequence ATCN PAM
gccucggucucccaaagugu

SEQ ID NO: 5513 - RNA, 20 nt, Artificial Sequence
  HTT spacer sequence ATCN PAM
caacacuuugggagaccgag

SEQ ID NO: 5514 - RNA, 20 nt, Artificial Sequence
  HTT spacer sequence ATCN PAM
cuaauuuuguuuuuaucucu

SEQ ID NO: 5515 - RNA, 20 nt, Artificial Sequence
  HTT spacer sequence ATCN PAM
cuagaaguuugauuuagguc

SEQ ID NO: 5516 - RNA, 20 nt, Artificial Sequence
  HTT spacer sequence ATCN PAM
aacuucuagagauaaaaaca

SEQ ID NO: 5517 - RNA, 20 nt, Artificial Sequence
  HTT spacer sequence ATCN PAM
uucucugcuaguucuaagau

SEQ ID NO: 5518 - RNA, 20 nt, Artificial Sequence
  HTT spacer sequence ATCN PAM
uagaacuagcagagaaggau

SEQ ID NO: 5519 - RNA, 20 nt, Artificial Sequence
  HTT spacer sequence ATCN PAM
ucuaauaacuucccaguucu

SEQ ID NO: 5520 - RNA, 20 nt, Artificial Sequence
  HTT spacer sequence ATCN PAM
accaaugagaaacaccaaga

SEQ ID NO: 5521 - RNA, 20 nt, Artificial Sequence
  HTT spacer sequence ATCN PAM
aucaaccaaugagaaacacc

SEQ ID NO: 5522 - RNA, 20 nt, Artificial Sequence
  HTT spacer sequence ATCN PAM
aauaaaaaauuggcagccau

SEQ ID NO: 5523 - RNA, 20 nt, Artificial Sequence
  HTT spacer sequence ATCN PAM
aacaaaguaaaauucacaag

SEQ ID NO: 5524 - RNA, 20 nt, Artificial Sequence
  HTT spacer sequence ATCN PAM
augggaacacaaaaauauau

SEQ ID NO: 5525 - RNA, 20 nt, Artificial Sequence
  HTT spacer sequence ATCN PAM
ucuugagcuuuguucugagg

SEQ ID NO: 5526 - RNA, 20 nt, Artificial Sequence
  HTT spacer sequence ATCN PAM
auauguaacucaacuaaccu

SEQ ID NO: 5527 - RNA, 20 nt, Artificial Sequence
  HTT spacer sequence ATCN PAM
gacaaauuauaaagcaagac

SEQ ID NO: 5528 - RNA, 20 nt, Artificial Sequence
  HTT spacer sequence ATCN PAM
ugaguacucuaccuaaugaa

SEQ ID NO: 5529 - RNA, 20 nt, Artificial Sequence
  HTT spacer sequence ATCN PAM
uuuccaaugcuucuuucccu

SEQ ID NO: 5530 - RNA, 20 nt, Artificial Sequence
  HTT spacer sequence ATCN PAM
cugcugaguacucgagaggg

SEQ ID NO: 5531 - RNA, 20 nt, Artificial Sequence
  HTT spacer sequence ATCN PAM
ggggaaggucccucucgagu

SEQ ID NO: 5532 - RNA, 20 nt, Artificial Sequence
  HTT spacer sequence ATCN PAM
ccagagcucucucugucuug

SEQ ID NO: 5533 - RNA, 20 nt, Artificial Sequence
  HTT spacer sequence ATCN PAM
aaggagaccaagacagccac

SEQ ID NO: 5534 - RNA, 20 nt, Artificial Sequence
  HTT spacer sequence ATCN PAM
cugggagacgagagacuaag

SEQ ID NO: 5535 - RNA, 20 nt, Artificial Sequence
  HTT spacer sequence ATCN PAM
cuguccuucauugcucaugu

SEQ ID NO: 5536 - RNA, 20 nt, Artificial Sequence
  HTT spacer sequence ATCN PAM
aauguaauagagugagacuu

SEQ ID NO: 5537 - RNA, 20 nt, Artificial Sequence
  HTT spacer sequence ATCN PAM
agcauuccauacacauuugu

SEQ ID NO: 5538 - RNA, 20 nt, Artificial Sequence
  HTT spacer sequence ATCN PAM
cuacuugucuaacaaaggac

SEQ ID NO: 5539 - RNA, 20 nt, Artificial Sequence
  HTT spacer sequence ATCN PAM
gcugggagcuaguaaaaaca

SEQ ID NO: 5540 - RNA, 20 nt, Artificial Sequence
  HTT spacer sequence ATCN PAM
gaauuuuaaaaauguguggc

SEQ ID NO: 5541 - RNA, 20 nt, Artificial Sequence
  HTT spacer sequence ATCN PAM
auugcuuauuaguagaggau

SEQ ID NO: 5542 - RNA, 20 nt, Artificial Sequence
  HTT spacer sequence ATCN PAM
ucuacuaauaagcaauagau

SEQ ID NO: 5543 - RNA, 20 nt, Artificial Sequence
  HTT spacer sequence ATCN PAM
gcugcuaaaagccaacacca

SEQ ID NO: 5544 - RNA, 20 nt, Artificial Sequence
  HTT spacer sequence ATCN PAM
cgaacugguuuccaucagcu

SEQ ID NO: 5545 - RNA, 20 nt, Artificial Sequence
  HTT spacer sequence ATCN PAM
aggcauucagaaugguggcg

SEQ ID NO: 5546 - RNA, 20 nt, Artificial Sequence
  HTT spacer sequence ATCN PAM
ucuucuuucuugauucuuuu

SEQ ID NO: 5547 - RNA, 20 nt, Artificial Sequence
  HTT spacer sequence ATCN PAM
agaaagaagaagaugcuaac

SEQ ID NO: 5548 - RNA, 20 nt, Artificial Sequence
  HTT spacer sequence ATCN PAM
caaaaaaaaaaaaaaaagaa

SEQ ID NO: 5549 - RNA, 20 nt, Artificial Sequence
  HTT spacer sequence ATCN PAM
cggcucacuguaaccucugc

SEQ ID NO: 5550 - RNA, 20 nt, Artificial Sequence
  HTT spacer sequence ATCN PAM
cuugaaccagggaggcagag

SEQ ID NO: 5551 - RNA, 20 nt, Artificial Sequence
  HTT spacer sequence ATCN PAM
cagcuacuugagaggcugag

SEQ ID NO: 5552 - RNA, 20 nt, Artificial Sequence
  HTT spacer sequence ATCN PAM
cuaccaaaaauacaaaauua

SEQ ID NO: 5553 - RNA, 20 nt, Artificial Sequence
  HTT spacer sequence ATCN PAM
cuugaggucaggaguucaag

SEQ ID NO: 5554 - RNA, 20 nt, Artificial Sequence
  HTT spacer sequence ATCN PAM
aggcaggugcaucacuugag

SEQ ID NO: 5555 - RNA, 20 nt, Artificial Sequence
  HTT spacer sequence ATCN PAM
cccaaaaugcugggauuaca

SEQ ID NO: 5556 - RNA, 20 nt, Artificial Sequence
  HTT spacer sequence ATCN PAM
cagcauuuugggagaucgag

SEQ ID NO: 5557 - RNA, 20 nt, Artificial Sequence
  HTT spacer sequence ATCN PAM
agaaggggcugggaguggug

SEQ ID NO: 5558 - RNA, 20 nt, Artificial Sequence
  HTT spacer sequence ATCN PAM
cguuauagauguugauaaaa

SEQ ID NO: 5559 - RNA, 20 nt, Artificial Sequence
  HTT spacer sequence ATCN PAM
auaacgagauguacagcacc

SEQ ID NO: 5560 - RNA, 20 nt, Artificial Sequence
  HTT spacer sequence ATCN PAM
acaucuauaacgagauguac

SEQ ID NO: 5561 - RNA, 20 nt, Artificial Sequence
  HTT spacer sequence ATCN PAM
gcaaaaaugaccaaauaacu

SEQ ID NO: 5562 - RNA, 20 nt, Artificial Sequence
  HTT spacer sequence ATCN PAM
guccuagaauugucuuaaaa

SEQ ID NO: 5563 - RNA, 20 nt, Artificial Sequence
  HTT spacer sequence ATCN PAM
cacauugcuguaucauaguu

SEQ ID NO: 5564 - RNA, 20 nt, Artificial Sequence
  HTT spacer sequence ATCN PAM
uaguuguguucacugaacau

SEQ ID NO: 5565 - RNA, 20 nt, Artificial Sequence
  HTT spacer sequence ATCN PAM
guagagccccugaauauguu

SEQ ID NO: 5566 - RNA, 20 nt, Artificial Sequence
  HTT spacer sequence ATCN PAM
aguccuguucgcagggcagg

SEQ ID NO: 5567 - RNA, 20 nt, Artificial Sequence
  HTT spacer sequence ATCN PAM
aguaccuguugucuauuagg

SEQ ID NO: 5568 - RNA, 20 nt, Artificial Sequence
  HTT spacer sequence ATCN PAM
guucauucacucauuaauuc

SEQ ID NO: 5569 - RNA, 20 nt, Artificial Sequence
  HTT spacer sequence ATCN PAM
aaguuauauacauuacaacc

SEQ ID NO: 5570 - RNA, 20 nt, Artificial Sequence
  HTT spacer sequence ATCN PAM
gaggaaaguuuucaauuucu

SEQ ID NO: 5571 - RNA, 20 nt, Artificial Sequence
  HTT spacer sequence ATCN PAM
uguaccuucaauuucugucu

SEQ ID NO: 5572 - RNA, 20 nt, Artificial Sequence
  HTT spacer sequence ATCN PAM
uagacagaaauugaagguac

SEQ ID NO: 5573 - RNA, 20 nt, Artificial Sequence
  HTT spacer sequence ATCN PAM
cugagucgcuuaaugucuca

SEQ ID NO: 5574 - RNA, 20 nt, Artificial Sequence
  HTT spacer sequence ATCN PAM
cuucaacacacuguagaaag

SEQ ID NO: 5575 - RNA, 20 nt, Artificial Sequence
  HTT spacer sequence ATCN PAM
uaggauaccugaaauccugc

SEQ ID NO: 5576 - RNA, 20 nt, Artificial Sequence
  HTT spacer sequence ATCN PAM
uaggaucucuucaacacacu

SEQ ID NO: 5577 - RNA, 20 nt, Artificial Sequence
  HTT spacer sequence ATCN PAM
ugcuuuagucgagaaccaau

SEQ ID NO: 5578 - RNA, 20 nt, Artificial Sequence
  HTT spacer sequence ATCN PAM
uugguucucgacuaaagcag

SEQ ID NO: 5579 - RNA, 20 nt, Artificial Sequence
  HTT spacer sequence ATCN PAM
gcugggaggauugugggguc

SEQ ID NO: 5580 - RNA, 20 nt, Artificial Sequence
  HTT spacer sequence ATCN PAM
ucccagcugauuaugccaac

SEQ ID NO: 5581 - RNA, 20 nt, Artificial Sequence
  HTT spacer sequence ATCN PAM
uggacugagccaaaaagugc

SEQ ID NO: 5582 - RNA, 20 nt, Artificial Sequence
  HTT spacer sequence ATCN PAM
uucccuucacuccccaggag

SEQ ID NO: 5583 - RNA, 20 nt, Artificial Sequence
  HTT spacer sequence ATCN PAM
cauuuagaauugcaaggaaa

SEQ ID NO: 5584 - RNA, 20 nt, Artificial Sequence
  HTT spacer sequence ATCN PAM
caugagguauuaauagugau

SEQ ID NO: 5585 - RNA, 20 nt, Artificial Sequence
  HTT spacer sequence ATCN PAM
cuauuaauaccucaugagau

SEQ ID NO: 5586 - RNA, 20 nt, Artificial Sequence
  HTT spacer sequence ATCN PAM
aguuauuuacagauggauuu

SEQ ID NO: 5587 - RNA, 20 nt, Artificial Sequence
  HTT spacer sequence ATCN PAM
guaaauaacuggauauguua

SEQ ID NO: 5588 - RNA, 20 nt, Artificial Sequence
  HTT spacer sequence ATCN PAM
aucuguaaauaacuggauau

SEQ ID NO: 5589 - RNA, 20 nt, Artificial Sequence
  HTT spacer sequence ATCN PAM
aauccaucuguaaauaacug

SEQ ID NO: 5590 - RNA, 20 nt, Artificial Sequence
  HTT spacer sequence ATCN PAM
cccacacaaauaucaaaucc

SEQ ID NO: 5591 - RNA, 20 nt, Artificial Sequence
  HTT spacer sequence ATCN PAM
acaauguggcgugaacaaca

SEQ ID NO: 5592 - RNA, 20 nt, Artificial Sequence
  HTT spacer sequence ATCN PAM
aacugggaggccaaguuugu

SEQ ID NO: 5593 - RNA, 20 nt, Artificial Sequence
  HTT spacer sequence ATCN PAM
uccaaccccagcaagucaca

SEQ ID NO: 5594 - RNA, 20 nt, Artificial Sequence
  HTT spacer sequence ATCN PAM
ucuaauagucugcuguauuc

SEQ ID NO: 5595 - RNA, 20 nt, Artificial Sequence
  HTT spacer sequence ATCN PAM
ccuagaguucucugaauaca

SEQ ID NO: 5596 - RNA, 20 nt, Artificial Sequence
  HTT spacer sequence ATCN PAM
accauauauaucuccuagag

SEQ ID NO: 5597 - RNA, 20 nt, Artificial Sequence
  HTT spacer sequence ATCN PAM
uugcaucaaccauauauauc

SEQ ID NO: 5598 - RNA, 20 nt, Artificial Sequence
  HTT spacer sequence ATCN PAM
ucuuugcaucaaccauauau

SEQ ID NO: 5599 - RNA, 20 nt, Artificial Sequence
  HTT spacer sequence ATCN PAM
cacucacuggccacacacuu

SEQ ID NO: 5600 - RNA, 20 nt, Artificial Sequence
  HTT spacer sequence ATCN PAM
cagagguggggguagaggag

SEQ ID NO: 5601 - RNA, 20 nt, Artificial Sequence
  HTT spacer sequence ATCN PAM
uuguuacaggccugaaaagu

SEQ ID NO: 5602 - RNA, 20 nt, Artificial Sequence
  HTT spacer sequence ATCN PAM
uggauauauuaccuuguguu

SEQ ID NO: 5603 - RNA, 20 nt, Artificial Sequence
  HTT spacer sequence ATCN PAM
aagaugcuucuauggccuuc

SEQ ID NO: 5604 - RNA, 20 nt, Artificial Sequence
  HTT spacer sequence ATCN PAM
cagcucacugcaagcucugc

SEQ ID NO: 5605 - RNA, 20 nt, Artificial Sequence
  HTT spacer sequence ATCN PAM
uggguucaugccauucuccu

SEQ ID NO: 5606 - RNA, 20 nt, Artificial Sequence
  HTT spacer sequence ATCN PAM
cgccuggcuaacuuuuuuuu

SEQ ID NO: 5607 - RNA, 20 nt, Artificial Sequence
  HTT spacer sequence ATCN PAM
uggcuaacauggugaaaccc

SEQ ID NO: 5608 - RNA, 20 nt, Artificial Sequence
  HTT spacer sequence ATCN PAM
agaccauccuggcuaacaug

SEQ ID NO: 5609 - RNA, 20 nt, Artificial Sequence
  HTT spacer sequence ATCN PAM
ccugaccucgugaucugccc

SEQ ID NO: 5610 - RNA, 20 nt, Artificial Sequence
  HTT spacer sequence ATCN PAM
cgaggucaggagaucgagac

SEQ ID NO: 5611 - RNA, 20 nt, Artificial Sequence
  HTT spacer sequence ATCN PAM
gcccgucccggccucccaaa

SEQ ID NO: 5612 - RNA, 20 nt, Artificial Sequence
  HTT spacer sequence ATCN PAM
cagcacuuugggaggccggg

SEQ ID NO: 5613 - RNA, 20 nt, Artificial Sequence
  HTT spacer sequence ATCN PAM
guauaguagcaauaauagaa

SEQ ID NO: 5614 - RNA, 20 nt, Artificial Sequence
  HTT spacer sequence ATCN PAM
cuuguuuuuccuuuuauaaa

SEQ ID NO: 5615 - RNA, 20 nt, Artificial Sequence
  HTT spacer sequence ATCN PAM
cuaaauuuauaaaaggaaaa

SEQ ID NO: 5616 - RNA, 20 nt, Artificial Sequence
  HTT spacer sequence ATCN PAM
cuaacauacagccuggaaca

SEQ ID NO: 5617 - RNA, 20 nt, Artificial Sequence
  HTT spacer sequence ATCN PAM
cuucuaagaaacauauauga

SEQ ID NO: 5618 - RNA, 20 nt, Artificial Sequence
  HTT spacer sequence ATCN PAM
uugauguaaauauuuuaaag

SEQ ID NO: 5619 - RNA, 20 nt, Artificial Sequence
  HTT spacer sequence ATCN PAM
augauaucccuucuaagaaa

SEQ ID NO: 5620 - RNA, 20 nt, Artificial Sequence
  HTT spacer sequence ATCN PAM
uguaauuucuucuaaauuac

SEQ ID NO: 5621 - RNA, 20 nt, Artificial Sequence
  HTT spacer sequence ATCN PAM
guaauuuagaagaaauuaca

SEQ ID NO: 5622 - RNA, 20 nt, Artificial Sequence
  HTT spacer sequence ATCN PAM
uuuaaaugaccuucaccuuu

SEQ ID NO: 5623 - RNA, 20 nt, Artificial Sequence
  HTT spacer sequence ATCN PAM
cacuuaagacugggcugagu

SEQ ID NO: 5624 - RNA, 20 nt, Artificial Sequence
  HTT spacer sequence ATCN PAM
agucuccucacucgcagaag

SEQ ID NO: 5625 - RNA, 20 nt, Artificial Sequence
  HTT spacer sequence ATCN PAM
gaagagggcgaugcugccac

SEQ ID NO: 5626 - RNA, 20 nt, Artificial Sequence
  HTT spacer sequence ATCN PAM
cccucuucagauaaugacac

SEQ ID NO: 5627 - RNA, 20 nt, Artificial Sequence
  HTT spacer sequence ATCN PAM
gacacguucugaucguguga

SEQ ID NO: 5628 - RNA, 20 nt, Artificial Sequence
  HTT spacer sequence ATCN PAM
gaacgugucagauugagaaa

SEQ ID NO: 5629 - RNA, 20 nt, Artificial Sequence
  HTT spacer sequence ATCN PAM
ugugaaugugaaauugguuu

SEQ ID NO: 5630 - RNA, 20 nt, Artificial Sequence
  HTT spacer sequence ATCN PAM
gagugcagaggagauuauuu

SEQ ID NO: 5631 - RNA, 20 nt, Artificial Sequence
  HTT spacer sequence ATCN PAM
ccucugcacucagauauacu

SEQ ID NO: 5632 - RNA, 20 nt, Artificial Sequence
  HTT spacer sequence ATCN PAM
uuaaauaaucuccucugcac

SEQ ID NO: 5633 - RNA, 20 nt, Artificial Sequence
  HTT spacer sequence ATCN PAM
gccaaaugggaauaaaaggg

SEQ ID NO: 5634 - RNA, 20 nt, Artificial Sequence
  HTT spacer sequence ATCN PAM
aaccaucugccaaaugggaa

SEQ ID NO: 5635 - RNA, 20 nt, Artificial Sequence
  HTT spacer sequence ATCN PAM
gcacgguucuuugugacacu

SEQ ID NO: 5636 - RNA, 20 nt, Artificial Sequence
  HTT spacer sequence ATCN PAM
auaaguaagccuucaacuaa

SEQ ID NO: 5637 - RNA, 20 nt, Artificial Sequence
  HTT spacer sequence ATCN PAM
cauucguuuguuugaaccuc

SEQ ID NO: 5638 - RNA, 20 nt, Artificial Sequence
  HTT spacer sequence ATCN PAM
aaaaccugcuucuguaacug

SEQ ID NO: 5639 - RNA, 20 nt, Artificial Sequence
  HTT spacer sequence ATCN PAM
agaagacaguaauuaacccg

SEQ ID NO: 5640 - RNA, 20 nt, Artificial Sequence
  HTT spacer sequence ATCN PAM
gaauccagaagacaguaauu

SEQ ID NO: 5641 - RNA, 20 nt, Artificial Sequence
  HTT spacer sequence ATCN PAM
gguuugucacuuuuaucuuu

SEQ ID NO: 5642 - RNA, 20 nt, Artificial Sequence
  HTT spacer sequence ATCN PAM
uucauccaucauaccuguuc

SEQ ID NO: 5643 - RNA, 20 nt, Artificial Sequence
  HTT spacer sequence ATCN PAM
aucauaccuguuccuaauuu

SEQ ID NO: 5644 - RNA, 20 nt, Artificial Sequence
  HTT spacer sequence ATCN PAM
uaccuguuccuaauuuagua

SEQ ID NO: 5645 - RNA, 20 nt, Artificial Sequence
  HTT spacer sequence ATCN PAM
acuuuaaagaaauguggucu

SEQ ID NO: 5646 - RNA, 20 nt, Artificial Sequence
  HTT spacer sequence ATCN PAM
guugcugcugcuuaucuuuu

SEQ ID NO: 5647 - RNA, 20 nt, Artificial Sequence
  HTT spacer sequence ATCN PAM
uuuucaugcaccuagcuggu

SEQ ID NO: 5648 - RNA, 20 nt, Artificial Sequence
  HTT spacer sequence ATCN PAM
uugccccagcucccuggacu

SEQ ID NO: 5649 - RNA, 20 nt, Artificial Sequence
  HTT spacer sequence ATCN PAM
cuaacagccaaccccagguu

SEQ ID NO: 5650 - RNA, 20 nt, Artificial Sequence
  HTT spacer sequence ATCN PAM
acuugccuccccuccaaaau

SEQ ID NO: 5651 - RNA, 20 nt, Artificial Sequence
  HTT spacer sequence ATCN PAM
cacaauuuaaauucaaacuu

SEQ ID NO: 5652 - RNA, 20 nt, Artificial Sequence
  HTT spacer sequence ATCN PAM
uaauuguaucucacaauuua

SEQ ID NO: 5653 - RNA, 20 nt, Artificial Sequence
  HTT spacer sequence ATCN PAM
agaguuaguuuaaacagauu

SEQ ID NO: 5654 - RNA, 20 nt, Artificial Sequence
  HTT spacer sequence ATCN PAM
guuuaaacuaacucuagauu

SEQ ID NO: 5655 - RNA, 20 nt, Artificial Sequence
  HTT spacer sequence ATCN PAM
auuauuaccauaauugauca

SEQ ID NO: 5656 - RNA, 20 nt, Artificial Sequence
  HTT spacer sequence ATCN PAM
auuaugguaauaauugauaa

SEQ ID NO: 5657 - RNA, 20 nt, Artificial Sequence
  HTT spacer sequence ATCN PAM
ucugcaguuucaagcuaucu

SEQ ID NO: 5658 - RNA, 20 nt, Artificial Sequence
  HTT spacer sequence ATCN PAM
gcaguuucaagcuaucuaac

SEQ ID NO: 5659 - RNA, 20 nt, Artificial Sequence
  HTT spacer sequence ATCN PAM
aacagguucacuuaccucuu

SEQ ID NO: 5660 - RNA, 20 nt, Artificial Sequence
  HTT spacer sequence ATCN PAM
ggugcccacagcaacuauag

SEQ ID NO: 5661 - RNA, 20 nt, Artificial Sequence
  HTT spacer sequence ATCN PAM
ugaagggacaggacuagcca

SEQ ID NO: 5662 - RNA, 20 nt, Artificial Sequence
  HTT spacer sequence ATCN PAM
ugaggaaaaugugcaucaug

SEQ ID NO: 5663 - RNA, 20 nt, Artificial Sequence
  HTT spacer sequence ATCN PAM
cugcagaugaaacugccuuu

SEQ ID NO: 5664 - RNA, 20 nt, Artificial Sequence
  HTT spacer sequence ATCN PAM
gcagugauuuaacugggacg

SEQ ID NO: 5665 - RNA, 20 nt, Artificial Sequence
  HTT spacer sequence ATCN PAM
ucaaaauuuaacugucauuu

SEQ ID NO: 5666 - RNA, 20 nt, Artificial Sequence
  HTT spacer sequence ATCN PAM
cggcucaaaaaugacaguua

SEQ ID NO: 5667 - RNA, 20 nt, Artificial Sequence
  HTT spacer sequence ATCN PAM
ugggcuacuuucuuaugugg

SEQ ID NO: 5668 - RNA, 20 nt, Artificial Sequence
  HTT spacer sequence ATCN PAM
guuaauccugucagcacugu

SEQ ID NO: 5669 - RNA, 20 nt, Artificial Sequence
  HTT spacer sequence ATCN PAM
ugucagcacuguuacucacc

SEQ ID NO: 5670 - RNA, 20 nt, Artificial Sequence
  HTT spacer sequence ATCN PAM
guguugaccgagugcccuca

SEQ ID NO: 5671 - RNA, 20 nt, Artificial Sequence
  HTT spacer sequence ATCN PAM
gcuuguuuuuuuuguuguug

SEQ ID NO: 5672 - RNA, 20 nt, Artificial Sequence
  HTT spacer sequence ATCN PAM
caaaaaaaaaacaaaaaaaa

SEQ ID NO: 5673 - RNA, 20 nt, Artificial Sequence
  HTT spacer sequence ATCN PAM
caccccugcacuccagccug

SEQ ID NO: 5674 - RNA, 20 nt, Artificial Sequence
  HTT spacer sequence ATCN PAM
cggcucacugccagcuccgc

SEQ ID NO: 5675 - RNA, 20 nt, Artificial Sequence
  HTT spacer sequence ATCN PAM
uggcuaacacagugaaaccu

SEQ ID NO: 5676 - RNA, 20 nt, Artificial Sequence
  HTT spacer sequence ATCN PAM
ccugaccucgugaucugccc

SEQ ID NO: 5677 - RNA, 20 nt, Artificial Sequence
  HTT spacer sequence ATCN PAM
cgaggucaggagauggagac

SEQ ID NO: 5678 - RNA, 20 nt, Artificial Sequence
  HTT spacer sequence ATCN PAM
gcccgccucggccucccaaa

SEQ ID NO: 5679 - RNA, 20 nt, Artificial Sequence
  HTT spacer sequence ATCN PAM
cagcacuuugggaggccgag

SEQ ID NO: 5680 - RNA, 20 nt, Artificial Sequence
  HTT spacer sequence ATCN PAM
aggggugggcuuugcguugg

SEQ ID NO: 5681 - RNA, 20 nt, Artificial Sequence
  HTT spacer sequence ATCN PAM
ggccaacgcaaagcccaccc

SEQ ID NO: 5682 - RNA, 20 nt, Artificial Sequence
  HTT spacer sequence ATCN PAM
uucuuucacaaaaccugucc

SEQ ID NO: 5683 - RNA, 20 nt, Artificial Sequence
  HTT spacer sequence ATCN PAM
gucuaaaugggccauugcuc

SEQ ID NO: 5684 - RNA, 20 nt, Artificial Sequence
  HTT spacer sequence ATCN PAM
gggcucuggcuucccuuggg

SEQ ID NO: 5685 - RNA, 20 nt, Artificial Sequence
  HTT spacer sequence ATCN PAM
gaacaaacaugaaaccagag

SEQ ID NO: 5686 - RNA, 20 nt, Artificial Sequence
  HTT spacer sequence ATCN PAM
accgguccccuuucucccag

SEQ ID NO: 5687 - RNA, 20 nt, Artificial Sequence
  HTT spacer sequence ATCN PAM
uaagaacugggagaaagggg

SEQ ID NO: 5688 - RNA, 20 nt, Artificial Sequence
  HTT spacer sequence ATCN PAM
gcauagaguucaaugguuug

SEQ ID NO: 5689 - RNA, 20 nt, Artificial Sequence
  HTT spacer sequence ATCN PAM
uuaucagcauagaguucaau

SEQ ID NO: 5690 - RNA, 20 nt, Artificial Sequence
  HTT spacer sequence ATCN PAM
auggaagcuccccgucaggu

SEQ ID NO: 5691 - RNA, 20 nt, Artificial Sequence
  HTT spacer sequence ATCN PAM
gagaggcgacacguaagggc

SEQ ID NO: 5692 - RNA, 20 nt, Artificial Sequence
  HTT spacer sequence ATCN PAM
uauuacuaaaccaguuucag

SEQ ID NO: 5693 - RNA, 20 nt, Artificial Sequence
  HTT spacer sequence ATCN PAM
gugccacccuaucugccauu

SEQ ID NO: 5694 - RNA, 20 nt, Artificial Sequence
  HTT spacer sequence ATCN PAM
gccauuaacgugaacagaug

SEQ ID NO: 5695 - RNA, 20 nt, Artificial Sequence
  HTT spacer sequence ATCN PAM
guucacguuaauggcagaua

SEQ ID NO: 5696 - RNA, 20 nt, Artificial Sequence
  HTT spacer sequence ATCN PAM
gacaauacccaaaauuacac

SEQ ID NO: 5697 - RNA, 20 nt, Artificial Sequence
  HTT spacer sequence ATCN PAM
cauuggaaaaacaaauaaua

SEQ ID NO: 5698 - RNA, 20 nt, Artificial Sequence
  HTT spacer sequence ATCN PAM
ccucaacaacuuuacuauac

SEQ ID NO: 5699 - RNA, 20 nt, Artificial Sequence
  HTT spacer sequence ATCN PAM
aggaauccccucaacaacuu

SEQ ID NO: 5700 - RNA, 20 nt, Artificial Sequence
  HTT spacer sequence ATCN PAM
aggcugauuucagaauagag

SEQ ID NO: 5701 - RNA, 20 nt, Artificial Sequence
  HTT spacer sequence ATCN PAM
gccuagauaauugcagaaca

SEQ ID NO: 5702 - RNA, 20 nt, Artificial Sequence
  HTT spacer sequence ATCN PAM
gcugucaagaauuuuauuua

SEQ ID NO: 5703 - RNA, 20 nt, Artificial Sequence
  HTT spacer sequence ATCN PAM
gcauaaauuuuaaauaaaau

SEQ ID NO: 5704 - RNA, 20 nt, Artificial Sequence
  HTT spacer sequence ATCN PAM
uauuauugaugugaaauuuu

SEQ ID NO: 5705 - RNA, 20 nt, Artificial Sequence
  HTT spacer sequence ATCN PAM
auaauaggauuaaaauguaa

SEQ ID NO: 5706 - RNA, 20 nt, Artificial Sequence
  HTT spacer sequence ATCN PAM
aaaauaauaaaaugcuauua

SEQ ID NO: 5707 - RNA, 20 nt, Artificial Sequence
  HTT spacer sequence ATCN PAM
gacuaacauacugugcauuu

SEQ ID NO: 5708 - RNA, 20 nt, Artificial Sequence
  HTT spacer sequence ATCN PAM
caagacuuguuuggaaguag

SEQ ID NO: 5709 - RNA, 20 nt, Artificial Sequence
  HTT spacer sequence ATCN PAM
gaaaauuccauauguuguca

SEQ ID NO: 5710 - RNA, 20 nt, Artificial Sequence
  HTT spacer sequence ATCN PAM
gucaacacaauuaaaugcuu

SEQ ID NO: 5711 - RNA, 20 nt, Artificial Sequence
  HTT spacer sequence ATCN PAM
ugugguggagcacuaguuuu

SEQ ID NO: 5712 - RNA, 20 nt, Artificial Sequence
  HTT spacer sequence ATCN PAM
ucuuagagaaagcaguuuua

SEQ ID NO: 5713 - RNA, 20 nt, Artificial Sequence
  HTT spacer sequence ATCN PAM
agcaagaaaaagcugcagag

SEQ ID NO: 5714 - RNA, 20 nt, Artificial Sequence
  HTT spacer sequence ATCN PAM
gggaacacuuuccuucugca

SEQ ID NO: 5715 - RNA, 20 nt, Artificial Sequence
  HTT spacer sequence ATCN PAM
uccuagcucuccucugccuc

SEQ ID NO: 5716 - RNA, 20 nt, Artificial Sequence
  HTT spacer sequence ATCN PAM
uagcugcugugccccugugc

SEQ ID NO: 5717 - RNA, 20 nt, Artificial Sequence
  HTT spacer sequence ATCN PAM
gugcccucgcgcagagcagg

SEQ ID NO: 5718 - RNA, 20 nt, Artificial Sequence
  HTT spacer sequence ATCN PAM
caucugugcccucgcgcaga

SEQ ID NO: 5719 - RNA, 20 nt, Artificial Sequence
  HTT spacer sequence ATCN PAM
acucuaaccccaccccugcc

SEQ ID NO: 5720 - RNA, 20 nt, Artificial Sequence
  HTT spacer sequence ATCN PAM
cggacaccuguuagcuugau

SEQ ID NO: 5721 - RNA, 20 nt, Artificial Sequence
  HTT spacer sequence ATCN PAM
agcuaacagguguccgugau

SEQ ID NO: 5722 - RNA, 20 nt, Artificial Sequence
  HTT spacer sequence ATCN PAM
ugaauuauuuuauguugcuu

SEQ ID NO: 5723 - RNA, 20 nt, Artificial Sequence
  HTT spacer sequence ATCN PAM
auauaagcaacauaaaauaa

SEQ ID NO: 5724 - RNA, 20 nt, Artificial Sequence
  HTT spacer sequence ATCN PAM
uaauuuuaaaagaaaggucu

SEQ ID NO: 5725 - RNA, 20 nt, Artificial Sequence
  HTT spacer sequence ATCN PAM
auuuagaccuuucuuuuaaa

SEQ ID NO: 5726 - RNA, 20 nt, Artificial Sequence
  HTT spacer sequence ATCN PAM
gaggcaaucauuccaaacau

SEQ ID NO: 5727 - RNA, 20 nt, Artificial Sequence
  HTT spacer sequence ATCN PAM
uuccaaacaucuuuuucuuc

SEQ ID NO: 5728 - RNA, 20 nt, Artificial Sequence
  HTT spacer sequence ATCN PAM
uuuucuucuugguauuacua

SEQ ID NO: 5729 - RNA, 20 nt, Artificial Sequence
  HTT spacer sequence ATCN PAM
uaugaacgcuaucauucaaa

SEQ ID NO: 5730 - RNA, 20 nt, Artificial Sequence
  HTT spacer sequence ATCN PAM
uucaaaacagaucauuggaa

SEQ ID NO: 5731 - RNA, 20 nt, Artificial Sequence
  HTT spacer sequence ATCN PAM
guuuugaaugauagcguuca

SEQ ID NO: 5732 - RNA, 20 nt, Artificial Sequence
  HTT spacer sequence ATCN PAM
uuggaauuccuaaaaucauu

SEQ ID NO: 5733 - RNA, 20 nt, Artificial Sequence
  HTT spacer sequence ATCN PAM
uucagcucugugauggcauc

SEQ ID NO: 5734 - RNA, 20 nt, Artificial Sequence
  HTT spacer sequence ATCN PAM
cagagcugaaugauuuuagg

SEQ ID NO: 5735 - RNA, 20 nt, Artificial Sequence
  HTT spacer sequence ATCN PAM
uggccaguggaaggaaggcu

SEQ ID NO: 5736 - RNA, 20 nt, Artificial Sequence
  HTT spacer sequence ATCN PAM
cgacaccgaagacgacagug

SEQ ID NO: 5737 - RNA, 20 nt, Artificial Sequence
  HTT spacer sequence ATCN PAM
ucucagggaaaaaaauucaa

SEQ ID NO: 5738 - RNA, 20 nt, Artificial Sequence
  HTT spacer sequence ATCN PAM
uacuguuucuugaauuuuuu

SEQ ID NO: 5739 - RNA, 20 nt, Artificial Sequence
  HTT spacer sequence ATCN PAM
guaccuuagguuaucuuacu

SEQ ID NO: 5740 - RNA, 20 nt, Artificial Sequence
  HTT spacer sequence ATCN PAM
aucuguaccuuagguuaucu

SEQ ID NO: 5741 - RNA, 20 nt, Artificial Sequence
  HTT spacer sequence ATCN PAM
agugaagaacuuuuagcguu

SEQ ID NO: 5742 - RNA, 20 nt, Artificial Sequence
  HTT spacer sequence ATCN PAM
uagccaaaaggccaagaagc

SEQ ID NO: 5743 - RNA, 20 nt, Artificial Sequence
  HTT spacer sequence ATCN PAM
cuucuuggccuuuuggcuaa

SEQ ID NO: 5744 - RNA, 20 nt, Artificial Sequence
  HTT spacer sequence ATCN PAM
aacuugccgugaauuaaauu

SEQ ID NO: 5745 - RNA, 20 nt, Artificial Sequence
  HTT spacer sequence ATCN PAM
aaauuuaauucacggcaagu

SEQ ID NO: 5746 - RNA, 20 nt, Artificial Sequence
  HTT spacer sequence ATCN PAM
cucauccagugguauuggag

SEQ ID NO: 5747 - RNA, 20 nt, Artificial Sequence
  HTT spacer sequence ATCN PAM
agugguauuggagauauagu

SEQ ID NO: 5748 - RNA, 20 nt, Artificial Sequence
  HTT spacer sequence ATCN PAM
ccaauaccacuggaugagag

SEQ ID NO: 5749 - RNA, 20 nt, Artificial Sequence
  HTT spacer sequence ATCN PAM
ggcaaaacagaaagcccuga

SEQ ID NO: 5750 - RNA, 20 nt, Artificial Sequence
  HTT spacer sequence ATCN PAM
ucaggcaaaacagaaagccc

SEQ ID NO: 5751 - RNA, 20 nt, Artificial Sequence
  HTT spacer sequence ATCN PAM
ccuggguuccuuauuuaagc

SEQ ID NO: 5752 - RNA, 20 nt, Artificial Sequence
  HTT spacer sequence ATCN PAM
uucuuugagcuuuuugaacu

SEQ ID NO: 5753 - RNA, 20 nt, Artificial Sequence
  HTT spacer sequence ATCN PAM
guucaaaaagcucaaagaaa

SEQ ID NO: 5754 - RNA, 20 nt, Artificial Sequence
  HTT spacer sequence ATCN PAM
uccagcauugcccuauugac

SEQ ID NO: 5755 - RNA, 20 nt, Artificial Sequence
  HTT spacer sequence ATCN PAM
guaggcuuuugaacuuugac

SEQ ID NO: 5756 - RNA, 20 nt, Artificial Sequence
  HTT spacer sequence ATCN PAM
uaagacccuugcaaacuccc

SEQ ID NO: 5757 - RNA, 20 nt, Artificial Sequence
  HTT spacer sequence ATCN PAM
gggaguuugcaagggucuua

SEQ ID NO: 5758 - RNA, 20 nt, Artificial Sequence
  HTT spacer sequence ATCN PAM
accgggcuguguugcgaggc

SEQ ID NO: 5759 - RNA, 20 nt, Artificial Sequence
  HTT spacer sequence ATCN PAM
gaagcccuugugaggccgug

SEQ ID NO: 5760 - RNA, 20 nt, Artificial Sequence
  HTT spacer sequence ATCN PAM
auacuuuggcugugugaauc

SEQ ID NO: 5761 - RNA, 20 nt, Artificial Sequence
  HTT spacer sequence ATCN PAM
guaggcaaccacacccagua

SEQ ID NO: 5762 - RNA, 20 nt, Artificial Sequence
  HTT spacer sequence ATCN PAM
gugagagggucagagaguau

SEQ ID NO: 5763 - RNA, 20 nt, Artificial Sequence
  HTT spacer sequence ATCN PAM
aucuaaugacagagugaguu

SEQ ID NO: 5764 - RNA, 20 nt, Artificial Sequence
  HTT spacer sequence ATCN PAM
aaugacagagugaguuuacu

SEQ ID NO: 5765 - RNA, 20 nt, Artificial Sequence
  HTT spacer sequence ATCN PAM
aguggcuuugacuaaaugua

SEQ ID NO: 5766 - RNA, 20 nt, Artificial Sequence
  HTT spacer sequence ATCN PAM
gaaaagacaauaaagacuuc

SEQ ID NO: 5767 - RNA, 20 nt, Artificial Sequence
  HTT spacer sequence ATCN PAM
aguagauuauucuugagacc

SEQ ID NO: 5768 - RNA, 20 nt, Artificial Sequence
  HTT spacer sequence ATCN PAM
acuugauucaucugaaaaga

SEQ ID NO: 5769 - RNA, 20 nt, Artificial Sequence
  HTT spacer sequence ATCN PAM
uuuucaaauugacuuuugaa

SEQ ID NO: 5770 - RNA, 20 nt, Artificial Sequence
  HTT spacer sequence ATCN PAM
caaaaugaucaguguucaga

SEQ ID NO: 5771 - RNA, 20 nt, Artificial Sequence
  HTT spacer sequence ATCN PAM
uuuugugaugacuucuaaaa

SEQ ID NO: 5772 - RNA, 20 nt, Artificial Sequence
  HTT spacer sequence ATCN PAM
guguucagaggaagagcuuu

SEQ ID NO: 5773 - RNA, 20 nt, Artificial Sequence
  HTT spacer sequence ATCN PAM
uuauaccauguggaagguca

SEQ ID NO: 5774 - RNA, 20 nt, Artificial Sequence
  HTT spacer sequence ATCN PAM
aucauuauaccauguggaag

SEQ ID NO: 5775 - RNA, 20 nt, Artificial Sequence
  HTT spacer sequence ATCN PAM
cuuaccauaaaccaaguaug

SEQ ID NO: 5776 - RNA, 20 nt, Artificial Sequence
  HTT spacer sequence ATCN PAM
acaaaaugcuuucaagaaau

SEQ ID NO: 5777 - RNA, 20 nt, Artificial Sequence
  HTT spacer sequence ATCN PAM
ggcauuucauggaaauuaca

SEQ ID NO: 5778 - RNA, 20 nt, Artificial Sequence
  HTT spacer sequence ATCN PAM
gcuuuauuuguuccucuuaa

SEQ ID NO: 5779 - RNA, 20 nt, Artificial Sequence
  HTT spacer sequence ATCN PAM
aguaccaucagguaagagga

SEQ ID NO: 5780 - RNA, 20 nt, Artificial Sequence
  HTT spacer sequence ATCN PAM
gguaagaggaauguauguug

SEQ ID NO: 5781 - RNA, 20 nt, Artificial Sequence
  HTT spacer sequence ATCN PAM
acgacaguuccaacauacau

SEQ ID NO: 5782 - RNA, 20 nt, Artificial Sequence
  HTT spacer sequence ATCN PAM
gcacgggucaauaaaguauc

SEQ ID NO: 5783 - RNA, 20 nt, Artificial Sequence
  HTT spacer sequence ATCN PAM
acccaggccccagaaagccc

SEQ ID NO: 5784 - RNA, 20 nt, Artificial Sequence
  HTT spacer sequence ATCN PAM
cccugcaccggcaucuaccc

SEQ ID NO: 5785 - RNA, 20 nt, Artificial Sequence
  HTT spacer sequence ATCN PAM
uuuuuuuuuuuuugagaugg

SEQ ID NO: 5786 - RNA, 20 nt, Artificial Sequence
  HTT spacer sequence ATCN PAM
caaaaaaaaaaaaaggauac

SEQ ID NO: 5787 - RNA, 20 nt, Artificial Sequence
  HTT spacer sequence ATCN PAM
ugccaccacacuccagccug

SEQ ID NO: 5788 - RNA, 20 nt, Artificial Sequence
  HTT spacer sequence ATCN PAM
uggcucauugcaagcuccac

SEQ ID NO: 5789 - RNA, 20 nt, Artificial Sequence
  HTT spacer sequence ATCN PAM
cagcuacucgggagguggag

SEQ ID NO: 5790 - RNA, 20 nt, Artificial Sequence
  HTT spacer sequence ATCN PAM
cuacuaaaaauacaaaaaaa

SEQ ID NO: 5791 - RNA, 20 nt, Artificial Sequence
  HTT spacer sequence ATCN PAM
uggugaaaccccaucucuac

SEQ ID NO: 5792 - RNA, 20 nt, Artificial Sequence
  HTT spacer sequence ATCN PAM
cuugaggucaggaguucgaa

SEQ ID NO: 5793 - RNA, 20 nt, Artificial Sequence
  HTT spacer sequence ATCN PAM
uccugccuuggccucccaaa

SEQ ID NO: 5794 - RNA, 20 nt, Artificial Sequence
  HTT spacer sequence ATCN PAM
uagcacuuugggaggccaag

SEQ ID NO: 5795 - RNA, 20 nt, Artificial Sequence
  HTT spacer sequence ATCN PAM
uuaaagugggcacagccaca

SEQ ID NO: 5796 - RNA, 20 nt, Artificial Sequence
  HTT spacer sequence ATCN PAM
cgugacucucagaccaggag

SEQ ID NO: 5797 - RNA, 20 nt, Artificial Sequence
  HTT spacer sequence ATCN PAM
uucaagauagugaggcccuc

SEQ ID NO: 5798 - RNA, 20 nt, Artificial Sequence
  HTT spacer sequence ATCN PAM
ugaacgaucucgugacucuc

SEQ ID NO: 5799 - RNA, 20 nt, Artificial Sequence
  HTT spacer sequence ATCN PAM
auugacaguguuggucaaga

SEQ ID NO: 5800 - RNA, 20 nt, Artificial Sequence
  HTT spacer sequence ATCN PAM
ugaccaacacugucaauuga

SEQ ID NO: 5801 - RNA, 20 nt, Artificial Sequence
  HTT spacer sequence ATCN PAM
uuuuaagguuucuaccaucu

SEQ ID NO: 5802 - RNA, 20 nt, Artificial Sequence
  HTT spacer sequence ATCN PAM
caacucugaaauaaaaacuu

SEQ ID NO: 5803 - RNA, 20 nt, Artificial Sequence
  HTT spacer sequence ATCN PAM
gcucaaagaaaaagaccuua

SEQ ID NO: 5804 - RNA, 20 nt, Artificial Sequence
  HTT spacer sequence ATCN PAM
cucuuuuuaaaugacuucuc

SEQ ID NO: 5805 - RNA, 20 nt, Artificial Sequence
  HTT spacer sequence ATCN PAM
ucauaaagccauagcuuuuc

SEQ ID NO: 5806 - RNA, 20 nt, Artificial Sequence
  HTT spacer sequence ATCN PAM
cauaauugcaaugcaaaagu

SEQ ID NO: 5807 - RNA, 20 nt, Artificial Sequence
  HTT spacer sequence ATCN PAM
uaaagaggucugaaaaugag

SEQ ID NO: 5808 - RNA, 20 nt, Artificial Sequence
  HTT spacer sequence ATCN PAM
gccacauguucagugagcuc

SEQ ID NO: 5809 - RNA, 20 nt, Artificial Sequence
  HTT spacer sequence ATCN PAM
agagcucacugaacaugugg

SEQ ID NO: 5810 - RNA, 20 nt, Artificial Sequence
  HTT spacer sequence ATCN PAM
uuucuaaacagacauaucca

SEQ ID NO: 5811 - RNA, 20 nt, Artificial Sequence
  HTT spacer sequence ATCN PAM
cuaauaaacuugugcucaac

SEQ ID NO: 5812 - RNA, 20 nt, Artificial Sequence
  HTT spacer sequence ATCN PAM
acugaagagcaccugcuucc

SEQ ID NO: 5813 - RNA, 20 nt, Artificial Sequence
  HTT spacer sequence ATCN PAM
uuggcaaacuucaaacacag

SEQ ID NO: 5814 - RNA, 20 nt, Artificial Sequence
  HTT spacer sequence ATCN PAM
aauguauauuaaucuuuggc

SEQ ID NO: 5815 - RNA, 20 nt, Artificial Sequence
  HTT spacer sequence ATCN PAM
gagaaaaggcacaacaugaa

SEQ ID NO: 5816 - RNA, 20 nt, Artificial Sequence
  HTT spacer sequence ATCN PAM
uuguuauuuguauagaauuu

SEQ ID NO: 5817 - RNA, 20 nt, Artificial Sequence
  HTT spacer sequence ATCN PAM
uccugagcaaagugugcacc

SEQ ID NO: 5818 - RNA, 20 nt, Artificial Sequence
  HTT spacer sequence ATCN PAM
gaacgaaacacaaguuccuc

SEQ ID NO: 5819 - RNA, 20 nt, Artificial Sequence
  HTT spacer sequence ATCN PAM
cagcgaggacagggggacac

SEQ ID NO: 5820 - RNA, 20 nt, Artificial Sequence
  HTT spacer sequence ATCN PAM
caucuguuuggauccuagag

SEQ ID NO: 5821 - RNA, 20 nt, Artificial Sequence
  HTT spacer sequence ATCN PAM
guuuggauccuagagucuuc

SEQ ID NO: 5822 - RNA, 20 nt, Artificial Sequence
  HTT spacer sequence ATCN PAM
aaacagaugugaucccagcg

SEQ ID NO: 5823 - RNA, 20 nt, Artificial Sequence
  HTT spacer sequence ATCN PAM
uagagucuuccagcugaacu

SEQ ID NO: 5824 - RNA, 20 nt, Artificial Sequence
  HTT spacer sequence ATCN PAM
ccaacaccuauaagagcgug

SEQ ID NO: 5825 - RNA, 20 nt, Artificial Sequence
  HTT spacer sequence ATCN PAM
gucgagacagucgcuuccac

SEQ ID NO: 5826 - RNA, 20 nt, Artificial Sequence
  HTT spacer sequence ATCN PAM
uccucccaauguuagccaaa

SEQ ID NO: 5827 - RNA, 20 nt, Artificial Sequence
  HTT spacer sequence ATCN PAM
ucccaauguuagccaaacag

SEQ ID NO: 5828 - RNA, 20 nt, Artificial Sequence
  HTT spacer sequence ATCN PAM
cuaugcaacaacaagccaag

SEQ ID NO: 5829 - RNA, 20 nt, Artificial Sequence
  HTT spacer sequence ATCN PAM
gcucuuccuucaguccuaau

SEQ ID NO: 5830 - RNA, 20 nt, Artificial Sequence
  HTT spacer sequence ATCN PAM
gugccuugauagcaguucuc

SEQ ID NO: 5831 - RNA, 20 nt, Artificial Sequence
  HTT spacer sequence ATCN PAM
aggcacagauuaggacugaa

SEQ ID NO: 5832 - RNA, 20 nt, Artificial Sequence
  HTT spacer sequence ATCN PAM
cagguugguauugcccaccu

SEQ ID NO: 5833 - RNA, 20 nt, Artificial Sequence
  HTT spacer sequence ATCN PAM
ccccuguaaaguaggugggc

SEQ ID NO: 5834 - RNA, 20 nt, Artificial Sequence
  HTT spacer sequence ATCN PAM
cacagcuccgagagguuaug

SEQ ID NO: 5835 - RNA, 20 nt, Artificial Sequence
  HTT spacer sequence ATCN PAM
ccuccauaaccucucggagc

SEQ ID NO: 5836 - RNA, 20 nt, Artificial Sequence
  HTT spacer sequence ATCN PAM
ggcagcacacagcuuuagag

SEQ ID NO: 5837 - RNA, 20 nt, Artificial Sequence
  HTT spacer sequence ATCN PAM
aaccaccaaauaaaacacug

SEQ ID NO: 5838 - RNA, 20 nt, Artificial Sequence
  HTT spacer sequence ATCN PAM
cacugcaacaaccucugccu

SEQ ID NO: 5839 - RNA, 20 nt, Artificial Sequence
  HTT spacer sequence ATCN PAM
cuacuaaaaauacaaaaaac

SEQ ID NO: 5840 - RNA, 20 nt, Artificial Sequence
  HTT spacer sequence ATCN PAM
cuugcgcccaggaguuuaaa

SEQ ID NO: 5841 - RNA, 20 nt, Artificial Sequence
  HTT spacer sequence ATCN PAM
accaaccuuggccugccaaa

SEQ ID NO: 5842 - RNA, 20 nt, Artificial Sequence
  HTT spacer sequence ATCN PAM
cuaaucagaauuucuaugau

SEQ ID NO: 5843 - RNA, 20 nt, Artificial Sequence
  HTT spacer sequence ATCN PAM
gaauuucuaugaucaaauga

SEQ ID NO: 5844 - RNA, 20 nt, Artificial Sequence
  HTT spacer sequence ATCN PAM
uagaaauucugauuagugau

SEQ ID NO: 5845 - RNA, 20 nt, Artificial Sequence
  HTT spacer sequence ATCN PAM
aaugacaugaaucauuguuu

SEQ ID NO: 5846 - RNA, 20 nt, Artificial Sequence
  HTT spacer sequence ATCN PAM
uuguuuccacaacugcagug

SEQ ID NO: 5847 - RNA, 20 nt, Artificial Sequence
  HTT spacer sequence ATCN PAM
caugagcugccuggcacagc

SEQ ID NO: 5848 - RNA, 20 nt, Artificial Sequence
  HTT spacer sequence ATCN PAM
ugauuauacacaauaaacaa

SEQ ID NO: 5849 - RNA, 20 nt, Artificial Sequence
  HTT spacer sequence ATCN PAM
agaugaacaaacauguauuu

SEQ ID NO: 5850 - RNA, 20 nt, Artificial Sequence
  HTT spacer sequence ATCN PAM
aaugccaaaaaccacggacu

SEQ ID NO: 5851 - RNA, 20 nt, Artificial Sequence
  HTT spacer sequence ATCN PAM
caugccucuaaguuuaaauc

SEQ ID NO: 5852 - RNA, 20 nt, Artificial Sequence
  HTT spacer sequence ATCN PAM
auaucacaugccucuaaguu

SEQ ID NO: 5853 - RNA, 20 nt, Artificial Sequence
  HTT spacer sequence ATCN PAM
gaaugggggugcagucauga

SEQ ID NO: 5854 - RNA, 20 nt, Artificial Sequence
  HTT spacer sequence ATCN PAM
ugagaccaguuagacaacag

SEQ ID NO: 5855 - RNA, 20 nt, Artificial Sequence
  HTT spacer sequence ATCN PAM
cuguccuguugucuaacugg

SEQ ID NO: 5856 - RNA, 20 nt, Artificial Sequence
  HTT spacer sequence ATCN PAM
uggcuucuggugagauugac

SEQ ID NO: 5857 - RNA, 20 nt, Artificial Sequence
  HTT spacer sequence ATCN PAM
caccagaagccaagaucccu

SEQ ID NO: 5858 - RNA, 20 nt, Artificial Sequence
  HTT spacer sequence ATCN PAM
guaggcagggagacccugac

SEQ ID NO: 5859 - RNA, 20 nt, Artificial Sequence
  HTT spacer sequence ATCN PAM
cauucuuuucugugcguaau

SEQ ID NO: 5860 - RNA, 20 nt, Artificial Sequence
  HTT spacer sequence ATCN PAM
gaguagaguggagaucgaag

SEQ ID NO: 5861 - RNA, 20 nt, Artificial Sequence
  HTT spacer sequence ATCN PAM
ccacucuacucagauuacgc

SEQ ID NO: 5862 - RNA, 20 nt, Artificial Sequence
  HTT spacer sequence ATCN PAM
aaggccugaauacauaguaa

SEQ ID NO: 5863 - RNA, 20 nt, Artificial Sequence
  HTT spacer sequence ATCN PAM
gccgcaauggaaauugugug

SEQ ID NO: 5864 - RNA, 20 nt, Artificial Sequence
  HTT spacer sequence ATCN PAM
cacaauuuccauugcggcag

SEQ ID NO: 5865 - RNA, 20 nt, Artificial Sequence
  HTT spacer sequence ATCN PAM
agcacuacuucugaaugcaa

SEQ ID NO: 5866 - RNA, 20 nt, Artificial Sequence
  HTT spacer sequence ATCN PAM
uguuacuggcagugcauaca

SEQ ID NO: 5867 - RNA, 20 nt, Artificial Sequence
  HTT spacer sequence ATCN PAM
gugaucaaagcagauuaaag

SEQ ID NO: 5868 - RNA, 20 nt, Artificial Sequence
  HTT spacer sequence ATCN PAM
cugauguaugcacugccagu

SEQ ID NO: 5869 - RNA, 20 nt, Artificial Sequence
  HTT spacer sequence ATCN PAM
aagcagauuaaagaaagacc

SEQ ID NO: 5870 - RNA, 20 nt, Artificial Sequence
  HTT spacer sequence ATCN PAM
gcuuugaucacugauguaug

SEQ ID NO: 5871 - RNA, 20 nt, Artificial Sequence
  HTT spacer sequence ATCN PAM
ucacuccaagaaggcagggg

SEQ ID NO: 5872 - RNA, 20 nt, Artificial Sequence
  HTT spacer sequence ATCN PAM
caacaaaaucuucacuccaa

SEQ ID NO: 5873 - RNA, 20 nt, Artificial Sequence
  HTT spacer sequence ATCN PAM
gccgccaugguauagacuuc

SEQ ID NO: 5874 - RNA, 20 nt, Artificial Sequence
  HTT spacer sequence ATCN PAM
ggaacaccguacagaagaau

SEQ ID NO: 5875 - RNA, 20 nt, Artificial Sequence
  HTT spacer sequence ATCN PAM
aggagggaagagaguuaggu

SEQ ID NO: 5876 - RNA, 20 nt, Artificial Sequence
  HTT spacer sequence ATCN PAM
ccagcugaacaaugccacuc

SEQ ID NO: 5877 - RNA, 20 nt, Artificial Sequence
  HTT spacer sequence ATCN PAM
ccaaagcuucuucucaucac

SEQ ID NO: 5878 - RNA, 20 nt, Artificial Sequence
  HTT spacer sequence ATCN PAM
ggugacauuugagugaauuu

SEQ ID NO: 5879 - RNA, 20 nt, Artificial Sequence
  HTT spacer sequence ATCN PAM
uuccuuucugcaaauucacu

SEQ ID NO: 5880 - RNA, 20 nt, Artificial Sequence
  HTT spacer sequence ATCN PAM
ccuaggcuuguaucuuuccu

SEQ ID NO: 5881 - RNA, 20 nt, Artificial Sequence
  HTT spacer sequence ATCN PAM
gcgcaaacccucucaaggcu

SEQ ID NO: 5882 - RNA, 20 nt, Artificial Sequence
  HTT spacer sequence ATCN PAM
ugcuaaaaccuacaccacau

SEQ ID NO: 5883 - RNA, 20 nt, Artificial Sequence
  HTT spacer sequence ATCN PAM
uucuuauuccugaguugaga

SEQ ID NO: 5884 - RNA, 20 nt, Artificial Sequence
  HTT spacer sequence ATCN PAM
cuuggcagcaugaaagcaaa

SEQ ID NO: 5885 - RNA, 20 nt, Artificial Sequence
  HTT spacer sequence ATCN PAM
aagccaccagcaaaccuugc

SEQ ID NO: 5886 - RNA, 20 nt, Artificial Sequence
  HTT spacer sequence ATCN PAM
cccccaaagcccugcucucu

SEQ ID NO: 5887 - RNA, 20 nt, Artificial Sequence
  HTT spacer sequence ATCN PAM
agacaggcucugaccuccug

SEQ ID NO: 5888 - RNA, 20 nt, Artificial Sequence
  HTT spacer sequence ATCN PAM
gguguaugagccuggaguug

SEQ ID NO: 5889 - RNA, 20 nt, Artificial Sequence
  HTT spacer sequence ATCN PAM
gagauguccacucacagugg

SEQ ID NO: 5890 - RNA, 20 nt, Artificial Sequence
  HTT spacer sequence ATCN PAM
cagaugcugacccccugccc

SEQ ID NO: 5891 - RNA, 20 nt, Artificial Sequence
  HTT spacer sequence ATCN PAM
uggcuuuaggaaccccacac

SEQ ID NO: 5892 - RNA, 20 nt, Artificial Sequence
  HTT spacer sequence ATCN PAM
gcugucagcaccuugggaac

SEQ ID NO: 5893 - RNA, 20 nt, Artificial Sequence
  HTT spacer sequence ATCN PAM
gugcccucggugcugccaaa

SEQ ID NO: 5894 - RNA, 20 nt, Artificial Sequence
  HTT spacer sequence ATCN PAM
ucccuguugcuucugcccuc

SEQ ID NO: 5895 - RNA, 20 nt, Artificial Sequence
  HTT spacer sequence ATCN PAM
guucaugacacaggagacac

SEQ ID NO: 5896 - RNA, 20 nt, Artificial Sequence
  HTT spacer sequence ATCN PAM
ccguugugguguucacagac

SEQ ID NO: 5897 - RNA, 20 nt, Artificial Sequence
  HTT spacer sequence ATCN PAM
uaacccaugucugugaacac

SEQ ID NO: 5898 - RNA, 20 nt, Artificial Sequence
  HTT spacer sequence ATCN PAM
augcagccaauccuaaccca

SEQ ID NO: 5899 - RNA, 20 nt, Artificial Sequence
  HTT spacer sequence ATCN PAM
uggacccucgccugugcuca

SEQ ID NO: 5900 - RNA, 20 nt, Artificial Sequence
  HTT spacer sequence ATCN PAM
uggagcucaagucaguuguu

SEQ ID NO: 5901 - RNA, 20 nt, Artificial Sequence
  HTT spacer sequence ATCN PAM
uacaacaagggaacaacuga

SEQ ID NO: 5902 - RNA, 20 nt, Artificial Sequence
  HTT spacer sequence ATCN PAM
gugccuugaaaaacaccaca

SEQ ID NO: 5903 - RNA, 20 nt, Artificial Sequence
  HTT spacer sequence ATCN PAM
guuugcagaguuguuuacua

SEQ ID NO: 5904 - RNA, 20 nt, Artificial Sequence
  HTT spacer sequence ATCN PAM
auaaguaaugguugaacaca

SEQ ID NO: 5905 - RNA, 20 nt, Artificial Sequence
  HTT spacer sequence ATCN PAM
ugcaaaauagcccaagcuaa

SEQ ID NO: 5906 - RNA, 20 nt, Artificial Sequence
  HTT spacer sequence ATCN PAM
cagcacuuugggaggccaag

SEQ ID NO: 5907 - RNA, 20 nt, Artificial Sequence
  HTT spacer sequence ATCN PAM
gccugccuuggccucccaaa

SEQ ID NO: 5908 - RNA, 20 nt, Artificial Sequence
  HTT spacer sequence ATCN PAM
ucccaccucagccuccugag

SEQ ID NO: 5909 - RNA, 20 nt, Artificial Sequence
  HTT spacer sequence ATCN PAM
cuugagcccauucgugcgcc

SEQ ID NO: 5910 - RNA, 20 nt, Artificial Sequence
  HTT spacer sequence ATCN PAM
uaaacgucucugcucuucuc

SEQ ID NO: 5911 - RNA, 20 nt, Artificial Sequence
  HTT spacer sequence ATCN PAM
uugcccccucacccacagag

SEQ ID NO: 5912 - RNA, 20 nt, Artificial Sequence
  HTT spacer sequence ATCN PAM
gccccauguuccuauagcca

SEQ ID NO: 5913 - RNA, 20 nt, Artificial Sequence
  HTT spacer sequence ATCN PAM
cuuucuuaaucugccccaug

SEQ ID NO: 5914 - RNA, 20 nt, Artificial Sequence
  HTT spacer sequence ATCN PAM
cucccacaacaguuguaaca

SEQ ID NO: 5915 - RNA, 20 nt, Artificial Sequence
  HTT spacer sequence ATCN PAM
cauguauguguauacaaagg

SEQ ID NO: 5916 - RNA, 20 nt, Artificial Sequence
  HTT spacer sequence ATCN PAM
uuaccaacauuuuggggacc

SEQ ID NO: 5917 - RNA, 20 nt, Artificial Sequence
  HTT spacer sequence ATCN PAM
acuagcacugcagcacccug

SEQ ID NO: 5918 - RNA, 20 nt, Artificial Sequence
  HTT spacer sequence ATCN PAM
aaaugacaagauuucuguua

SEQ ID NO: 5919 - RNA, 20 nt, Artificial Sequence
  HTT spacer sequence ATCN PAM
ugucauuuagauuuuuauua

SEQ ID NO: 5920 - RNA, 20 nt, Artificial Sequence
  HTT spacer sequence ATCN PAM
ucaccuucccucauuuaaaa

SEQ ID NO: 5921 - RNA, 20 nt, Artificial Sequence
  HTT spacer sequence ATCN PAM
caucgucaccuucccucauu

SEQ ID NO: 5922 - RNA, 20 nt, Artificial Sequence
  HTT spacer sequence ATCN PAM
ucucaucgucaccuucccuc

SEQ ID NO: 5923 - RNA, 20 nt, Artificial Sequence
  HTT spacer sequence ATCN PAM
uaaucaucucaucgucaccu

SEQ ID NO: 5924 - RNA, 20 nt, Artificial Sequence
  HTT spacer sequence ATCN PAM
ucauaaucaucucaucguca

SEQ ID NO: 5925 - RNA, 20 nt, Artificial Sequence
  HTT spacer sequence ATCN PAM
guggaauuagacaccacaaa

SEQ ID NO: 5926 - RNA, 20 nt, Artificial Sequence
  HTT spacer sequence ATCN PAM
caaauaauguauuuaacacu

SEQ ID NO: 5927 - RNA, 20 nt, Artificial Sequence
  HTT spacer sequence ATCN PAM
gcugagccaggcgagagacu

SEQ ID NO: 5928 - RNA, 20 nt, Artificial Sequence
  HTT spacer sequence ATCN PAM
ggacggcuuguucaggcucu

SEQ ID NO: 5929 - RNA, 20 nt, Artificial Sequence
  HTT spacer sequence ATCN PAM
gagccugaacaagccgucca

SEQ ID NO: 5930 - RNA, 20 nt, Artificial Sequence
  HTT spacer sequence ATCN PAM
ugacacuguacuccagccug

SEQ ID NO: 5931 - RNA, 20 nt, Artificial Sequence
  HTT spacer sequence ATCN PAM
cggcucacugcaagcucugc

SEQ ID NO: 5932 - RNA, 20 nt, Artificial Sequence
  HTT spacer sequence ATCN PAM
cuacuaaaaauacaaaaaaa

SEQ ID NO: 5933 - RNA, 20 nt, Artificial Sequence
  HTT spacer sequence ATCN PAM
uggcuaacacggugaaaccc

SEQ ID NO: 5934 - RNA, 20 nt, Artificial Sequence
  HTT spacer sequence ATCN PAM
agaccauccuggcuaacacg

SEQ ID NO: 5935 - RNA, 20 nt, Artificial Sequence
  HTT spacer sequence ATCN PAM
ccugaccucgugacccgccc

SEQ ID NO: 5936 - RNA, 20 nt, Artificial Sequence
  HTT spacer sequence ATCN PAM
cagccucccaaagugcuggg

SEQ ID NO: 5937 - RNA, 20 nt, Artificial Sequence
  HTT spacer sequence ATCN PAM
cagcacuuugggaggcugag

SEQ ID NO: 5938 - RNA, 20 nt, Artificial Sequence
  HTT spacer sequence ATCN PAM
ccaaaaaaaauaaaaaggcc

SEQ ID NO: 5939 - RNA, 20 nt, Artificial Sequence
  HTT spacer sequence ATCN PAM
uggcuaacacagugaaaccc

SEQ ID NO: 5940 - RNA, 20 nt, Artificial Sequence
  HTT spacer sequence ATCN PAM
cgaccauccuggcuaacaca

SEQ ID NO: 5941 - RNA, 20 nt, Artificial Sequence
  HTT spacer sequence ATCN PAM
ccugaccuugugauccgccc

SEQ ID NO: 5942 - RNA, 20 nt, Artificial Sequence
  HTT spacer sequence ATCN PAM
caaggucaggagaucgcgac

SEQ ID NO: 5943 - RNA, 20 nt, Artificial Sequence
  HTT spacer sequence ATCN PAM
gcccgccucggccucccaaa

SEQ ID NO: 5944 - RNA, 20 nt, Artificial Sequence
  HTT spacer sequence ATCN PAM
caacacuuugggaggccgag

SEQ ID NO: 5945 - RNA, 20 nt, Artificial Sequence
  HTT spacer sequence ATCN PAM
cugagucccaaagugugcuc

SEQ ID NO: 5946 - RNA, 20 nt, Artificial Sequence
  HTT spacer sequence ATCN PAM
uaccaauaaaccucucuauc

SEQ ID NO: 5947 - RNA, 20 nt, Artificial Sequence
  HTT spacer sequence ATCN PAM
uccuuuuuucuucagcugug

SEQ ID NO: 5948 - RNA, 20 nt, Artificial Sequence
  HTT spacer sequence ATCN PAM
acaguugaacagugcucacg

SEQ ID NO: 5949 - RNA, 20 nt, Artificial Sequence
  HTT spacer sequence ATCN PAM
ggaauucuggccauuuugag

SEQ ID NO: 5950 - RNA, 20 nt, Artificial Sequence
  HTT spacer sequence ATCN PAM
gaacccucaaaauggccaga

SEQ ID NO: 5951 - RNA, 20 nt, Artificial Sequence
  HTT spacer sequence ATCN PAM
ucaguugacugggaaaucag

SEQ ID NO: 5952 - RNA, 20 nt, Artificial Sequence
  HTT spacer sequence ATCN PAM
ccuguacaguaauuaauagg

SEQ ID NO: 5953 - RNA, 20 nt, Artificial Sequence
  HTT spacer sequence ATCN PAM
cuuaaccuauuaauuacugu

SEQ ID NO: 5954 - RNA, 20 nt, Artificial Sequence
  HTT spacer sequence ATCN PAM
gagccuauaacuaacccaug

SEQ ID NO: 5955 - RNA, 20 nt, Artificial Sequence
  HTT spacer sequence ATCN PAM
cgugacuucccaaaaggcau

SEQ ID NO: 5956 - RNA, 20 nt, Artificial Sequence
  HTT spacer sequence ATCN PAM
guguaauuuucuaauccguc

SEQ ID NO: 5957 - RNA, 20 nt, Artificial Sequence
  HTT spacer sequence ATCN PAM
guccugcauuaucuauggcu

SEQ ID NO: 5958 - RNA, 20 nt, Artificial Sequence
  HTT spacer sequence ATCN PAM
auggcucuugguucauaccu

SEQ ID NO: 5959 - RNA, 20 nt, Artificial Sequence
  HTT spacer sequence ATCN PAM
cuacugaggacaagagacag

SEQ ID NO: 5960 - RNA, 20 nt, Artificial Sequence
  HTT spacer sequence ATCN PAM
gagacucacuuuuacuggcu

SEQ ID NO: 5961 - RNA, 20 nt, Artificial Sequence
  HTT spacer sequence ATCN PAM
aauccugucuucccucauaa

SEQ ID NO: 5962 - RNA, 20 nt, Artificial Sequence
  HTT spacer sequence ATCN PAM
ugucuucccucauaaauugu

SEQ ID NO: 5963 - RNA, 20 nt, Artificial Sequence
  HTT spacer sequence ATCN PAM
cuguccuuggggagcuucca

SEQ ID NO: 5964 - RNA, 20 nt, Artificial Sequence
  HTT spacer sequence ATCN PAM
aggcagcaagcacuuacgag

SEQ ID NO: 5965 - RNA, 20 nt, Artificial Sequence
  HTT spacer sequence ATCN PAM
agcaaagguggagagggacc

SEQ ID NO: 5966 - RNA, 20 nt, Artificial Sequence
  HTT spacer sequence ATCN PAM
guggagaugcccuguguugu

SEQ ID NO: 5967 - RNA, 20 nt, Artificial Sequence
  HTT spacer sequence ATCN PAM
ccacugaugacaaaccaagu

SEQ ID NO: 5968 - RNA, 20 nt, Artificial Sequence
  HTT spacer sequence ATCN PAM
ccuucgacaacacagggcau

SEQ ID NO: 5969 - RNA, 20 nt, Artificial Sequence
  HTT spacer sequence ATCN PAM
auuuuagccagcugcuucaa

SEQ ID NO: 5970 - RNA, 20 nt, Artificial Sequence
  HTT spacer sequence ATCN PAM
ucaauuuuagccagcugcuu

SEQ ID NO: 5971 - RNA, 20 nt, Artificial Sequence
  HTT spacer sequence ATCN PAM
gucacaggaauuuaauguau

SEQ ID NO: 5972 - RNA, 20 nt, Artificial Sequence
  HTT spacer sequence ATCN PAM
ucugucacaggaauuuaaug

SEQ ID NO: 5973 - RNA, 20 nt, Artificial Sequence
  HTT spacer sequence ATCN PAM
gcuuguauuuguguaauggu

SEQ ID NO: 5974 - RNA, 20 nt, Artificial Sequence
  HTT spacer sequence ATCN PAM
ucagugaggaaggugauaca

SEQ ID NO: 5975 - RNA, 20 nt, Artificial Sequence
  HTT spacer sequence ATCN PAM
ccuuccucacugaggaugaa

SEQ ID NO: 5976 - RNA, 20 nt, Artificial Sequence
  HTT spacer sequence ATCN PAM
uuucauguauacuuggcgua

SEQ ID NO: 5977 - RNA, 20 nt, Artificial Sequence
  HTT spacer sequence ATCN PAM
uuuuuguuucuuggaagguu

SEQ ID NO: 5978 - RNA, 20 nt, Artificial Sequence
  HTT spacer sequence ATCN PAM
gacacauuagcagugugccu

SEQ ID NO: 5979 - RNA, 20 nt, Artificial Sequence
  HTT spacer sequence ATCN PAM
acaucuucaagucugguagg

SEQ ID NO: 5980 - RNA, 20 nt, Artificial Sequence
  HTT spacer sequence ATCN PAM
ucaagucugguaggugaauc

SEQ ID NO: 5981 - RNA, 20 nt, Artificial Sequence
  HTT spacer sequence ATCN PAM
cauuagucuuccuggagugu

SEQ ID NO: 5982 - RNA, 20 nt, Artificial Sequence
  HTT spacer sequence ATCN PAM
gguguacucuuacagcaaca

SEQ ID NO: 5983 - RNA, 20 nt, Artificial Sequence
  HTT spacer sequence ATCN PAM
uuucaccacccugcuuucca

SEQ ID NO: 5984 - RNA, 20 nt, Artificial Sequence
  HTT spacer sequence ATCN PAM
ugaauaaugcugcuaugaau

SEQ ID NO: 5985 - RNA, 20 nt, Artificial Sequence
  HTT spacer sequence ATCN PAM
agggacacuucaguugguuc

SEQ ID NO: 5986 - RNA, 20 nt, Artificial Sequence
  HTT spacer sequence ATCN PAM
aucgagggacacuucaguug

SEQ ID NO: 5987 - RNA, 20 nt, Artificial Sequence
  HTT spacer sequence ATCN PAM
auucauccaucgagggacac

SEQ ID NO: 5988 - RNA, 20 nt, Artificial Sequence
  HTT spacer sequence ATCN PAM
gguguauauuuacaguggaa

SEQ ID NO: 5989 - RNA, 20 nt, Artificial Sequence
  HTT spacer sequence ATCN PAM
cauaguauuuguccuuuugu

SEQ ID NO: 5990 - RNA, 20 nt, Artificial Sequence
  HTT spacer sequence ATCN PAM
augaauuaacuacuccaggu

SEQ ID NO: 5991 - RNA, 20 nt, Artificial Sequence
  HTT spacer sequence ATCN PAM
uguaaaaauaacuccccucc

SEQ ID NO: 5992 - RNA, 20 nt, Artificial Sequence
  HTT spacer sequence ATCN PAM
ccaccauucauuucuagaau

SEQ ID NO: 5993 - RNA, 20 nt, Artificial Sequence
  HTT spacer sequence ATCN PAM
aagcacuuugagaggccaag

SEQ ID NO: 5994 - RNA, 20 nt, Artificial Sequence
  HTT spacer sequence ATCN PAM
uccugccuuggccucucaaa

SEQ ID NO: 5995 - RNA, 20 nt, Artificial Sequence
  HTT spacer sequence ATCN PAM
guacaaacaaacuagccggg

SEQ ID NO: 5996 - RNA, 20 nt, Artificial Sequence
  HTT spacer sequence ATCN PAM
ccggcuaguuuguuuguaca

SEQ ID NO: 5997 - RNA, 20 nt, Artificial Sequence
  HTT spacer sequence ATCN PAM
uccagccucagucuccugag

SEQ ID NO: 5998 - RNA, 20 nt, Artificial Sequence
  HTT spacer sequence ATCN PAM
cuugagcccaggagguuaag

SEQ ID NO: 5999 - RNA, 20 nt, Artificial Sequence
  HTT spacer sequence ATCN PAM
cacuagagacuuaaccuccu

SEQ ID NO: 6000 - RNA, 20 nt, Artificial Sequence
  HTT spacer sequence ATCN PAM
uaaccauuuuuggcucuugu

SEQ ID NO: 6001 - RNA, 20 nt, Artificial Sequence
  HTT spacer sequence ATCN PAM
caguggcuuaugccuguaau

SEQ ID NO: 6002 - RNA, 20 nt, Artificial Sequence
  HTT spacer sequence ATCN PAM
caacacuuugggaggucaag

SEQ ID NO: 6003 - RNA, 20 nt, Artificial Sequence
  HTT spacer sequence ATCN PAM
uuuuaccuugaccucccaaa

SEQ ID NO: 6004 - RNA, 20 nt, Artificial Sequence
  HTT spacer sequence ATCN PAM
cuugaagccaggagcuuggg

SEQ ID NO: 6005 - RNA, 20 nt, Artificial Sequence
  HTT spacer sequence ATCN PAM
agaccccuaucucuacaaag

SEQ ID NO: 6006 - RNA, 20 nt, Artificial Sequence
  HTT spacer sequence ATCN PAM
cuacaaagaaaaucaaaaac

SEQ ID NO: 6007 - RNA, 20 nt, Artificial Sequence
  HTT spacer sequence ATCN PAM
aaaacuagcuagauauggug

SEQ ID NO: 6008 - RNA, 20 nt, Artificial Sequence
  HTT spacer sequence ATCN PAM
agcuaguuuuugauuuucuu

SEQ ID NO: 6009 - RNA, 20 nt, Artificial Sequence
  HTT spacer sequence ATCN PAM
ucccaccucagccucccaag

SEQ ID NO: 6010 - RNA, 20 nt, Artificial Sequence
  HTT spacer sequence ATCN PAM
cuugagcucaggaguucgag

SEQ ID NO: 6011 - RNA, 20 nt, Artificial Sequence
  HTT spacer sequence ATCN PAM
uucuguagcccaggcuggag

SEQ ID NO: 6012 - RNA, 20 nt, Artificial Sequence
  HTT spacer sequence ATCN PAM
aaaaaaaaaaaaaaguaaac

SEQ ID NO: 6013 - RNA, 20 nt, Artificial Sequence
  HTT spacer sequence ATCN PAM
uggccuccaaauuuaacaca

SEQ ID NO: 6014 - RNA, 20 nt, Artificial Sequence
  HTT spacer sequence ATCN PAM
uuuguaaaaguaacaaaaac

SEQ ID NO: 6015 - RNA, 20 nt, Artificial Sequence
  HTT spacer sequence ATCN PAM
aggacggugaagguugggca

SEQ ID NO: 6016 - RNA, 20 nt, Artificial Sequence
  HTT spacer sequence ATCN PAM
cagcacuuugggaggcugag

SEQ ID NO: 6017 - RNA, 20 nt, Artificial Sequence
  HTT spacer sequence ATCN PAM
ccccgccucagccucccaaa

SEQ ID NO: 6018 - RNA, 20 nt, Artificial Sequence
  HTT spacer sequence ATCN PAM
cuugagcuugagaccagccu

SEQ ID NO: 6019 - RNA, 20 nt, Artificial Sequence
  HTT spacer sequence ATCN PAM
ccacaaaaauaaaaaaauaa

SEQ ID NO: 6020 - RNA, 20 nt, Artificial Sequence
  HTT spacer sequence ATCN PAM
uggcucacuacagcuugacc

SEQ ID NO: 6021 - RNA, 20 nt, Artificial Sequence
  HTT spacer sequence ATCN PAM
ugccacugcacuccagccug

SEQ ID NO: 6022 - RNA, 20 nt, Artificial Sequence
  HTT spacer sequence ATCN PAM
cgcccaggcuggagugcagu

SEQ ID NO: 6023 - RNA, 20 nt, Artificial Sequence
  HTT spacer sequence ATCN PAM
agaccaugucucuagagaaa

SEQ ID NO: 6024 - RNA, 20 nt, Artificial Sequence
  HTT spacer sequence ATCN PAM
uaugacuuucuuggguucac

SEQ ID NO: 6025 - RNA, 20 nt, Artificial Sequence
  HTT spacer sequence ATCN PAM
uucuucuuggaaaacacacu

SEQ ID NO: 6026 - RNA, 20 nt, Artificial Sequence
  HTT spacer sequence ATCN PAM
uuuguaaugagaaugcuuug

SEQ ID NO: 6027 - RNA, 20 nt, Artificial Sequence
  HTT spacer sequence ATCN PAM
ccuagaacuaggcuucuagc

SEQ ID NO: 6028 - RNA, 20 nt, Artificial Sequence
  HTT spacer sequence ATCN PAM
agccacauuuugguuugccu

SEQ ID NO: 6029 - RNA, 20 nt, Artificial Sequence
  HTT spacer sequence ATCN PAM
acugcugaacaaucaagcca

SEQ ID NO: 6030 - RNA, 20 nt, Artificial Sequence
  HTT spacer sequence ATCN PAM
guuggaagcccuugauauua

SEQ ID NO: 6031 - RNA, 20 nt, Artificial Sequence
  HTT spacer sequence ATCN PAM
agggcuuccaacagaucaac

SEQ ID NO: 6032 - RNA, 20 nt, Artificial Sequence
  HTT spacer sequence ATCN PAM
ugacuccuaagccgcuuaaa

SEQ ID NO: 6033 - RNA, 20 nt, Artificial Sequence
  HTT spacer sequence ATCN PAM
aagaccuauagaaagagaug

SEQ ID NO: 6034 - RNA, 20 nt, Artificial Sequence
  HTT spacer sequence ATCN PAM
cuuucuauaggucuuugauc

SEQ ID NO: 6035 - RNA, 20 nt, Artificial Sequence
  HTT spacer sequence ATCN PAM
uucuaggauccuuggcucuc

SEQ ID NO: 6036 - RNA, 20 nt, Artificial Sequence
  HTT spacer sequence ATCN PAM
uagaaggauggcaucucuuu

SEQ ID NO: 6037 - RNA, 20 nt, Artificial Sequence
  HTT spacer sequence ATCN PAM
uuggcucucuugggaacuag

SEQ ID NO: 6038 - RNA, 20 nt, Artificial Sequence
  HTT spacer sequence ATCN PAM
aguucccaagagagccaagg

SEQ ID NO: 6039 - RNA, 20 nt, Artificial Sequence
  HTT spacer sequence ATCN PAM
gaaucuaguucccaagagag

SEQ ID NO: 6040 - RNA, 20 nt, Artificial Sequence
  HTT spacer sequence ATCN PAM
uggagugcaauggugccauc

SEQ ID NO: 6041 - RNA, 20 nt, Artificial Sequence
  HTT spacer sequence ATCN PAM
cggcucaccgcaaccucugc

SEQ ID NO: 6042 - RNA, 20 nt, Artificial Sequence
  HTT spacer sequence ATCN PAM
cagcuacucgggaggcugag

SEQ ID NO: 6043 - RNA, 20 nt, Artificial Sequence
  HTT spacer sequence ATCN PAM
ccugaggucaggaguucgag

SEQ ID NO: 6044 - RNA, 20 nt, Artificial Sequence
  HTT spacer sequence ATCN PAM
acccgccucggccucccaaa

SEQ ID NO: 6045 - RNA, 20 nt, Artificial Sequence
  HTT spacer sequence ATCN PAM
cagcacuuugggaggccgag

SEQ ID NO: 6046 - RNA, 20 nt, Artificial Sequence
  HTT spacer sequence ATCN PAM
auguaugacugaaacacuga

SEQ ID NO: 6047 - RNA, 20 nt, Artificial Sequence
  HTT spacer sequence ATCN PAM
gaaccgaagacauuuucauu

SEQ ID NO: 6048 - RNA, 20 nt, Artificial Sequence
  HTT spacer sequence ATCN PAM
acuugccaaauuaacuuggu

SEQ ID NO: 6049 - RNA, 20 nt, Artificial Sequence
  HTT spacer sequence ATCN PAM
cuaccaucuacuugccaaau

SEQ ID NO: 6050 - RNA, 20 nt, Artificial Sequence
  HTT spacer sequence ATCN PAM
ucaccuagcauuguugggau

SEQ ID NO: 6051 - RNA, 20 nt, Artificial Sequence
  HTT spacer sequence ATCN PAM
caacaaugcuaggugaagau

SEQ ID NO: 6052 - RNA, 20 nt, Artificial Sequence
  HTT spacer sequence ATCN PAM
ucugaaguugacagaccaaa

SEQ ID NO: 6053 - RNA, 20 nt, Artificial Sequence
  HTT spacer sequence ATCN PAM
gaaguugacagaccaaaaua

SEQ ID NO: 6054 - RNA, 20 nt, Artificial Sequence
  HTT spacer sequence ATCN PAM
gaauuacauguuuaguucua

SEQ ID NO: 6055 - RNA, 20 nt, Artificial Sequence
  HTT spacer sequence ATCN PAM
caucuuuauuacgguagagu

SEQ ID NO: 6056 - RNA, 20 nt, Artificial Sequence
  HTT spacer sequence ATCN PAM
uuauuacgguagaguuaaug

SEQ ID NO: 6057 - RNA, 20 nt, Artificial Sequence
  HTT spacer sequence ATCN PAM
cccauuaacucuaccguaau

SEQ ID NO: 6058 - RNA, 20 nt, Artificial Sequence
  HTT spacer sequence ATCN PAM
ugacaaauuaugauguggug

SEQ ID NO: 6059 - RNA, 20 nt, Artificial Sequence
  HTT spacer sequence ATCN PAM
uaauuugucaugauuuauag

SEQ ID NO: 6060 - RNA, 20 nt, Artificial Sequence
  HTT spacer sequence ATCN PAM
ccacaucauaauuugucaug

SEQ ID NO: 6061 - RNA, 20 nt, Artificial Sequence
  HTT spacer sequence ATCN PAM
cugcaacugaaagacuguug

SEQ ID NO: 6062 - RNA, 20 nt, Artificial Sequence
  HTT spacer sequence ATCN PAM
aguguuguaauucugugguc

SEQ ID NO: 6063 - RNA, 20 nt, Artificial Sequence
  HTT spacer sequence ATCN PAM
cagcucugcuuucuucuuuu

SEQ ID NO: 6064 - RNA, 20 nt, Artificial Sequence
  HTT spacer sequence ATCN PAM
uuaaaauaaaauuuaaaaau

SEQ ID NO: 6065 - RNA, 20 nt, Artificial Sequence
  HTT spacer sequence ATCN PAM
aggcauguugguacaugccu

SEQ ID NO: 6066 - RNA, 20 nt, Artificial Sequence
  HTT spacer sequence ATCN PAM
ccugaagcuaagaguuaaag

SEQ ID NO: 6067 - RNA, 20 nt, Artificial Sequence
  HTT spacer sequence ATCN PAM
uccugccucugccucccaaa

SEQ ID NO: 6068 - RNA, 20 nt, Artificial Sequence
  HTT spacer sequence ATCN PAM
cugcuuccuguguuaguuuu

SEQ ID NO: 6069 - RNA, 20 nt, Artificial Sequence
  HTT spacer sequence ATCN PAM
ucggucaugugaaaacagcc

SEQ ID NO: 6070 - RNA, 20 nt, Artificial Sequence
  HTT spacer sequence ATCN PAM
cauaggccuacuugaggggc

SEQ ID NO: 6071 - RNA, 20 nt, Artificial Sequence
  HTT spacer sequence ATCN PAM
auggaaugcuguccagucuc

SEQ ID NO: 6072 - RNA, 20 nt, Artificial Sequence
  HTT spacer sequence ATCN PAM
guuacugcaugugcuccucu

SEQ ID NO: 6073 - RNA, 20 nt, Artificial Sequence
  HTT spacer sequence ATCN PAM
cuugcagcagaccaucaguu

SEQ ID NO: 6074 - RNA, 20 nt, Artificial Sequence
  HTT spacer sequence ATCN PAM
uuucuguuuucaguucuggu

SEQ ID NO: 6075 - RNA, 20 nt, Artificial Sequence
  HTT spacer sequence ATCN PAM
cuuuuuaaggcaacuacuug

SEQ ID NO: 6076 - RNA, 20 nt, Artificial Sequence
  HTT spacer sequence ATCN PAM
caaaagcacccugcucccau

SEQ ID NO: 6077 - RNA, 20 nt, Artificial Sequence
  HTT spacer sequence ATCN PAM
aagcuccuuucucuuacugg

SEQ ID NO: 6078 - RNA, 20 nt, Artificial Sequence
  HTT spacer sequence ATCN PAM
aguaagagaaaggagcuuug

SEQ ID NO: 6079 - RNA, 20 nt, Artificial Sequence
  HTT spacer sequence ATCN PAM
uagaguaaaagauagcauuu

SEQ ID NO: 6080 - RNA, 20 nt, Artificial Sequence
  HTT spacer sequence ATCN PAM
uuuacucuaagauauguaug

SEQ ID NO: 6081 - RNA, 20 nt, Artificial Sequence
  HTT spacer sequence ATCN PAM
ucaaauggaccaaggcugaa

SEQ ID NO: 6082 - RNA, 20 nt, Artificial Sequence
  HTT spacer sequence ATCN PAM
uggcucuugccugcacggaa

SEQ ID NO: 6083 - RNA, 20 nt, Artificial Sequence
  HTT spacer sequence ATCN PAM
caagucuugauauuuccuau

SEQ ID NO: 6084 - RNA, 20 nt, Artificial Sequence
  HTT spacer sequence ATCN PAM
agacuugugauacugacgca

SEQ ID NO: 6085 - RNA, 20 nt, Artificial Sequence
  HTT spacer sequence ATCN PAM
ugccucugccugcccaccca

SEQ ID NO: 6086 - RNA, 20 nt, Artificial Sequence
  HTT spacer sequence ATCN PAM
ugccugccugccuguacucu

SEQ ID NO: 6087 - RNA, 20 nt, Artificial Sequence
  HTT spacer sequence ATCN PAM
uggagaaaggggccucuuca

SEQ ID NO: 6088 - RNA, 20 nt, Artificial Sequence
  HTT spacer sequence ATCN PAM
uuaaaaagaaacaagaaaau

SEQ ID NO: 6089 - RNA, 20 nt, Artificial Sequence
  HTT spacer sequence ATCN PAM
ucggauuaugcuucacugac

SEQ ID NO: 6090 - RNA, 20 nt, Artificial Sequence
  HTT spacer sequence ATCN PAM
gaagaucuuuaaaaagaaac

SEQ ID NO: 6091 - RNA, 20 nt, Artificial Sequence
  HTT spacer sequence ATCN PAM
uucauuaacaagccauauuu

SEQ ID NO: 6092 - RNA, 20 nt, Artificial Sequence
  HTT spacer sequence ATCN PAM
aaaccaacugguggcaaaau

SEQ ID NO: 6093 - RNA, 20 nt, Artificial Sequence
  HTT spacer sequence ATCN PAM
aauccaaaccaacugguggc

SEQ ID NO: 6094 - RNA, 20 nt, Artificial Sequence
  HTT spacer sequence ATCN PAM
cacaaaggcaagacuagucc

SEQ ID NO: 6095 - RNA, 20 nt, Artificial Sequence
  HTT spacer sequence ATCN PAM
cucggacauguagaaggaca

SEQ ID NO: 6096 - RNA, 20 nt, Artificial Sequence
  HTT spacer sequence ATCN PAM
cugugcagcucaaauguggu

SEQ ID NO: 6097 - RNA, 20 nt, Artificial Sequence
  HTT spacer sequence ATCN PAM
gcgcaauaagacagugacca

SEQ ID NO: 6098 - RNA, 20 nt, Artificial Sequence
  HTT spacer sequence ATCN PAM
cacaauugaggcaaaauauu

SEQ ID NO: 6099 - RNA, 20 nt, Artificial Sequence
  HTT spacer sequence ATCN PAM
ugucucugcuggaaguccua

SEQ ID NO: 6100 - RNA, 20 nt, Artificial Sequence
  HTT spacer sequence ATCN PAM
gaccagccacauuucaggua

SEQ ID NO: 6101 - RNA, 20 nt, Artificial Sequence
  HTT spacer sequence ATCN PAM
aaucagaccagccacauuuc

SEQ ID NO: 6102 - RNA, 20 nt, Artificial Sequence
  HTT spacer sequence ATCN PAM
acacagagcuguuuaaauuu

SEQ ID NO: 6103 - RNA, 20 nt, Artificial Sequence
  HTT spacer sequence ATCN PAM
uuugaccuuauuuaaucugc

SEQ ID NO: 6104 - RNA, 20 nt, Artificial Sequence
  HTT spacer sequence ATCN PAM
gcccaacauuugcaaguaag

SEQ ID NO: 6105 - RNA, 20 nt, Artificial Sequence
  HTT spacer sequence ATCN PAM
aauacaguaauucugccacc

SEQ ID NO: 6106 - RNA, 20 nt, Artificial Sequence
  HTT spacer sequence ATCN PAM
ugaaaccaaucaaauacagu

SEQ ID NO: 6107 - RNA, 20 nt, Artificial Sequence
  HTT spacer sequence ATCN PAM
cguguuuuuauauaaguaag

SEQ ID NO: 6108 - RNA, 20 nt, Artificial Sequence
  HTT spacer sequence ATCN PAM
caaagugguuugccuauuuc

SEQ ID NO: 6109 - RNA, 20 nt, Artificial Sequence
  HTT spacer sequence ATCN PAM
aggauaagcagaauagccaa

SEQ ID NO: 6110 - RNA, 20 nt, Artificial Sequence
  HTT spacer sequence ATCN PAM
uagauggaaugugaaauagg

SEQ ID NO: 6111 - RNA, 20 nt, Artificial Sequence
  HTT spacer sequence ATCN PAM
uucuuggcuauucugcuuau

SEQ ID NO: 6112 - RNA, 20 nt, Artificial Sequence
  HTT spacer sequence ATCN PAM
cucucuuuugguccaagaua

SEQ ID NO: 6113 - RNA, 20 nt, Artificial Sequence
  HTT spacer sequence ATCN PAM
uggaccaaaagagagggaug

SEQ ID NO: 6114 - RNA, 20 nt, Artificial Sequence
  HTT spacer sequence ATCN PAM
guuucuaaaccagucuaucu

SEQ ID NO: 6115 - RNA, 20 nt, Artificial Sequence
  HTT spacer sequence ATCN PAM
ucuguuucuaaaccagucua

SEQ ID NO: 6116 - RNA, 20 nt, Artificial Sequence
  HTT spacer sequence ATCN PAM
gcuuuguuuguuguccaugu

SEQ ID NO: 6117 - RNA, 20 nt, Artificial Sequence
  HTT spacer sequence ATCN PAM
cggugagcaaagcuggaagg

SEQ ID NO: 6118 - RNA, 20 nt, Artificial Sequence
  HTT spacer sequence ATCN PAM
ugugcucuucccugccugcc

SEQ ID NO: 6119 - RNA, 20 nt, Artificial Sequence
  HTT spacer sequence ATCN PAM
agacuauacccagucagggu

SEQ ID NO: 6120 - RNA, 20 nt, Artificial Sequence
  HTT spacer sequence ATCN PAM
ccaccacccacgaccaggac

SEQ ID NO: 6121 - RNA, 20 nt, Artificial Sequence
  HTT spacer sequence ATCN PAM
ccucugccacagaggaaggg

SEQ ID NO: 6122 - RNA, 20 nt, Artificial Sequence
  HTT spacer sequence ATCN PAM
augucaacuuuauuacuaua

SEQ ID NO: 6123 - RNA, 20 nt, Artificial Sequence
  HTT spacer sequence ATCN PAM
caguuaauucuuagaacugc

SEQ ID NO: 6124 - RNA, 20 nt, Artificial Sequence
  HTT spacer sequence ATCN PAM
uuuagaacuuaagcacaaag

SEQ ID NO: 6125 - RNA, 20 nt, Artificial Sequence
  HTT spacer sequence ATCN PAM
ugugccaaaaccaagaauga

SEQ ID NO: 6126 - RNA, 20 nt, Artificial Sequence
  HTT spacer sequence ATCN PAM
aucuuucucucaucaggcca

SEQ ID NO: 6127 - RNA, 20 nt, Artificial Sequence
  HTT spacer sequence ATCN PAM
augggcaagaaagaaugcuu

SEQ ID NO: 6128 - RNA, 20 nt, Artificial Sequence
  HTT spacer sequence ATCN PAM
uucucucaucaggccacuuc

SEQ ID NO: 6129 - RNA, 20 nt, Artificial Sequence
  HTT spacer sequence ATCN PAM
ggccacuucuuggguugaua

SEQ ID NO: 6130 - RNA, 20 nt, Artificial Sequence
  HTT spacer sequence ATCN PAM
acccaagaaguggccugaug

SEQ ID NO: 6131 - RNA, 20 nt, Artificial Sequence
  HTT spacer sequence ATCN PAM
cuucuccacgccacacagug

SEQ ID NO: 6132 - RNA, 20 nt, Artificial Sequence
  HTT spacer sequence ATCN PAM
agagcuccuagggcagaaac

SEQ ID NO: 6133 - RNA, 20 nt, Artificial Sequence
  HTT spacer sequence ATCN PAM
caauuccaccaucgagagcu

SEQ ID NO: 6134 - RNA, 20 nt, Artificial Sequence
  HTT spacer sequence ATCN PAM
caucccaauuccaccaucga

SEQ ID NO: 6135 - RNA, 20 nt, Artificial Sequence
  HTT spacer sequence ATCN PAM
cacauccugccuguuuugaa

SEQ ID NO: 6136 - RNA, 20 nt, Artificial Sequence
  HTT spacer sequence ATCN PAM
ugccuguuuugaaaacagca

SEQ ID NO: 6137 - RNA, 20 nt, Artificial Sequence
  HTT spacer sequence ATCN PAM
gccuuccugcccgccuccuu

SEQ ID NO: 6138 - RNA, 20 nt, Artificial Sequence
  HTT spacer sequence ATCN PAM
uggucuccgggcacuugguc

SEQ ID NO: 6139 - RNA, 20 nt, Artificial Sequence
  HTT spacer sequence ATCN PAM
caaggguggcacaggggagc

SEQ ID NO: 6140 - RNA, 20 nt, Artificial Sequence
  HTT spacer sequence ATCN PAM
acaggcucugccuucuuucu

SEQ ID NO: 6141 - RNA, 20 nt, Artificial Sequence
  HTT spacer sequence ATCN PAM
cuacucgggacccuaggaag

SEQ ID NO: 6142 - RNA, 20 nt, Artificial Sequence
  HTT spacer sequence ATCN PAM
ucucaucucagccacguucu

SEQ ID NO: 6143 - RNA, 20 nt, Artificial Sequence
  HTT spacer sequence ATCN PAM
cagccacguucucagugcca

SEQ ID NO: 6144 - RNA, 20 nt, Artificial Sequence
  HTT spacer sequence ATCN PAM
gugaaccaagaacacccuca

SEQ ID NO: 6145 - RNA, 20 nt, Artificial Sequence
  HTT spacer sequence ATCN PAM
ucugugucugguuggggaca

SEQ ID NO: 6146 - RNA, 20 nt, Artificial Sequence
  HTT spacer sequence ATCN PAM
aaggccacaaagccuucuuu

SEQ ID NO: 6147 - RNA, 20 nt, Artificial Sequence
  HTT spacer sequence ATCN PAM
gagaccacagugcugcugcu

SEQ ID NO: 6148 - RNA, 20 nt, Artificial Sequence
  HTT spacer sequence ATCN PAM
ucacagaaaacacaucagag

SEQ ID NO: 6149 - RNA, 20 nt, Artificial Sequence
  HTT spacer sequence ATCN PAM
ccuguuuuuauccucacaga

SEQ ID NO: 6150 - RNA, 20 nt, Artificial Sequence
  HTT spacer sequence ATCN PAM
uggaaucaccuguuuuuauc

SEQ ID NO: 6151 - RNA, 20 nt, Artificial Sequence
  HTT spacer sequence ATCN PAM
cauggugacacccgccuggu

SEQ ID NO: 6152 - RNA, 20 nt, Artificial Sequence
  HTT spacer sequence ATCN PAM
gaauagcaaaagcuuuagaa

SEQ ID NO: 6153 - RNA, 20 nt, Artificial Sequence
  HTT spacer sequence ATCN PAM
cucucucugcggagagcaag

SEQ ID NO: 6154 - RNA, 20 nt, Artificial Sequence
  HTT spacer sequence ATCN PAM
uucucaugagccucugucca

SEQ ID NO: 6155 - RNA, 20 nt, Artificial Sequence
  HTT spacer sequence ATCN PAM
cagcggaacaggggaccuuc

SEQ ID NO: 6156 - RNA, 20 nt, Artificial Sequence
  HTT spacer sequence ATCN PAM
uguccccaaguucauccuca

SEQ ID NO: 6157 - RNA, 20 nt, Artificial Sequence
  HTT spacer sequence ATCN PAM
ucauccuccugccggcuucc

SEQ ID NO: 6158 - RNA, 20 nt, Artificial Sequence
  HTT spacer sequence ATCN PAM
uccugccggcuuccuggccc

SEQ ID NO: 6159 - RNA, 20 nt, Artificial Sequence
  HTT spacer sequence ATCN PAM
uucuggauucucuggaauug

SEQ ID NO: 6160 - RNA, 20 nt, Artificial Sequence
  HTT spacer sequence ATCN PAM
agaaggauguggcgucagga

SEQ ID NO: 6161 - RNA, 20 nt, Artificial Sequence
  HTT spacer sequence ATCN PAM
aaggcaaaauucaauuccag

SEQ ID NO: 6162 - RNA, 20 nt, Artificial Sequence
  HTT spacer sequence ATCN PAM
auugcaggccagguguggug

SEQ ID NO: 6163 - RNA, 20 nt, Artificial Sequence
  HTT spacer sequence ATCN PAM
ugugcacuuugggaagccaa

SEQ ID NO: 6164 - RNA, 20 nt, Artificial Sequence
  HTT spacer sequence ATCN PAM
gcccaccuuggcuucccaaa

SEQ ID NO: 6165 - RNA, 20 nt, Artificial Sequence
  HTT spacer sequence ATCN PAM
caaacuccugggcucaagca

SEQ ID NO: 6166 - RNA, 20 nt, Artificial Sequence
  HTT spacer sequence ATCN PAM
uguuucuauagaaaauacaa

SEQ ID NO: 6167 - RNA, 20 nt, Artificial Sequence
  HTT spacer sequence ATCN PAM
uccugucucagguuccugag

SEQ ID NO: 6168 - RNA, 20 nt, Artificial Sequence
  HTT spacer sequence ATCN PAM
auugagccccggaggccaaa

SEQ ID NO: 6169 - RNA, 20 nt, Artificial Sequence
  HTT spacer sequence ATCN PAM
cagcccacuguagcuuuggc

SEQ ID NO: 6170 - RNA, 20 nt, Artificial Sequence
  HTT spacer sequence ATCN PAM
ugccacuguacuccagucug

SEQ ID NO: 6171 - RNA, 20 nt, Artificial Sequence
  HTT spacer sequence ATCN PAM
auugcauacuucaccguagc

SEQ ID NO: 6172 - RNA, 20 nt, Artificial Sequence
  HTT spacer sequence ATCN PAM
uaggcccuccagcuugauuc

SEQ ID NO: 6173 - RNA, 20 nt, Artificial Sequence
  HTT spacer sequence ATCN PAM
agcuggagggccuaggauga

SEQ ID NO: 6174 - RNA, 20 nt, Artificial Sequence
  HTT spacer sequence ATCN PAM
auuaaguggcuagacagaga

SEQ ID NO: 6175 - RNA, 20 nt, Artificial Sequence
  HTT spacer sequence ATCN PAM
ccuuugugaccuuggcuguu

SEQ ID NO: 6176 - RNA, 20 nt, Artificial Sequence
  HTT spacer sequence ATCN PAM
agcuucucgacacgggacuu

SEQ ID NO: 6177 - RNA, 20 nt, Artificial Sequence
  HTT spacer sequence ATCN PAM
aauuaacaagaagaggcccu

SEQ ID NO: 6178 - RNA, 20 nt, Artificial Sequence
  HTT spacer sequence ATCN PAM
uuagggauguucagaauccc

SEQ ID NO: 6179 - RNA, 20 nt, Artificial Sequence
  HTT spacer sequence ATCN PAM
cuaaugaucuaauuaacaag

SEQ ID NO: 6180 - RNA, 20 nt, Artificial Sequence
  HTT spacer sequence ATCN PAM
cagcaucauaguauguuccu

SEQ ID NO: 6181 - RNA, 20 nt, Artificial Sequence
  HTT spacer sequence ATCN PAM
uaguauguuccuccucccgc

SEQ ID NO: 6182 - RNA, 20 nt, Artificial Sequence
  HTT spacer sequence ATCN PAM
acuaggagguggcccucaga

SEQ ID NO: 6183 - RNA, 20 nt, Artificial Sequence
  HTT spacer sequence ATCN PAM
uccaccugaacuucccuaau

SEQ ID NO: 6184 - RNA, 20 nt, Artificial Sequence
  HTT spacer sequence ATCN PAM
guucgcagggcuguaauaag

SEQ ID NO: 6185 - RNA, 20 nt, Artificial Sequence
  HTT spacer sequence ATCN PAM
uacaccuaaggaagcugagg

SEQ ID NO: 6186 - RNA, 20 nt, Artificial Sequence
  HTT spacer sequence ATCN PAM
aaggucacccagguaguaga

SEQ ID NO: 6187 - RNA, 20 nt, Artificial Sequence
  HTT spacer sequence ATCN PAM
uggcucuacugucuacuacc

SEQ ID NO: 6188 - RNA, 20 nt, Artificial Sequence
  HTT spacer sequence ATCN PAM
gaaccaggcagucugauuca

SEQ ID NO: 6189 - RNA, 20 nt, Artificial Sequence
  HTT spacer sequence ATCN PAM
gacugccugguucagaucgu

SEQ ID NO: 6190 - RNA, 20 nt, Artificial Sequence
  HTT spacer sequence ATCN PAM
aagcuguguucuagguggcu

SEQ ID NO: 6191 - RNA, 20 nt, Artificial Sequence
  HTT spacer sequence ATCN PAM
cgggucugucccugcacgug

SEQ ID NO: 6192 - RNA, 20 nt, Artificial Sequence
  HTT spacer sequence ATCN PAM
uccuugaaggcagugcaugc

SEQ ID NO: 6193 - RNA, 20 nt, Artificial Sequence
  HTT spacer sequence ATCN PAM
uucuguggggcccucuguuc

SEQ ID NO: 6194 - RNA, 20 nt, Artificial Sequence
  HTT spacer sequence ATCN PAM
caggaaaccuggaggagcca

SEQ ID NO: 6195 - RNA, 20 nt, Artificial Sequence
  HTT spacer sequence ATCN PAM
ccaaagugaaaggguccuaa

SEQ ID NO: 6196 - RNA, 20 nt, Artificial Sequence
  HTT spacer sequence ATCN PAM
acacauccccaaagugaaag

SEQ ID NO: 6197 - RNA, 20 nt, Artificial Sequence
  HTT spacer sequence ATCN PAM
caaaaaaaaaaaaaaaaaaa

SEQ ID NO: 6198 - RNA, 20 nt, Artificial Sequence
  HTT spacer sequence ATCN PAM
ugccacugcacucuagccug

SEQ ID NO: 6199 - RNA, 20 nt, Artificial Sequence
  HTT spacer sequence ATCN PAM
uggccacugcugccccugcc

SEQ ID NO: 6200 - RNA, 20 nt, Artificial Sequence
  HTT spacer sequence ATCN PAM
cagguauuugggaggcggga

SEQ ID NO: 6201 - RNA, 20 nt, Artificial Sequence
  HTT spacer sequence ATCN PAM
cuugaggucaggaguucgag

SEQ ID NO: 6202 - RNA, 20 nt, Artificial Sequence
  HTT spacer sequence ATCN PAM
gcccaccuuggccucccaaa

SEQ ID NO: 6203 - RNA, 20 nt, Artificial Sequence
  HTT spacer sequence ATCN PAM
cagcacuuugggaggccaag

SEQ ID NO: 6204 - RNA, 20 nt, Artificial Sequence
  HTT spacer sequence ATCN PAM
gaaauaaaauuuugauccca

SEQ ID NO: 6205 - RNA, 20 nt, Artificial Sequence
  HTT spacer sequence ATCN PAM
aaauuuuauuucugauuuaa

SEQ ID NO: 6206 - RNA, 20 nt, Artificial Sequence
  HTT spacer sequence ATCN PAM
caacagugaugccaggcagc

SEQ ID NO: 6207 - RNA, 20 nt, Artificial Sequence
  HTT spacer sequence ATCN PAM
cuguugggaucaaaauuuua

SEQ ID NO: 6208 - RNA, 20 nt, Artificial Sequence
  HTT spacer sequence ATCN PAM
gggcugccuggcaucacugu

SEQ ID NO: 6209 - RNA, 20 nt, Artificial Sequence
  HTT spacer sequence ATCN PAM
gggggagaggguggccuugg

SEQ ID NO: 6210 - RNA, 20 nt, Artificial Sequence
  HTT spacer sequence ATCN PAM
aaaggagaggauagaaugaa

SEQ ID NO: 6211 - RNA, 20 nt, Artificial Sequence
  HTT spacer sequence ATCN PAM
ucuccuuuggauaaacaagg

SEQ ID NO: 6212 - RNA, 20 nt, Artificial Sequence
  HTT spacer sequence ATCN PAM
ugacuucauucuauccucuc

SEQ ID NO: 6213 - RNA, 20 nt, Artificial Sequence
  HTT spacer sequence ATCN PAM
uucucagggcuccaggaauc

SEQ ID NO: 6214 - RNA, 20 nt, Artificial Sequence
  HTT spacer sequence ATCN PAM
agcugaguguguugcugagg

SEQ ID NO: 6215 - RNA, 20 nt, Artificial Sequence
  HTT spacer sequence ATCN PAM
ugggccuaggcaggccaagc

SEQ ID NO: 6216 - RNA, 20 nt, Artificial Sequence
  HTT spacer sequence ATCN PAM
cugcacucgggccacagcgg

SEQ ID NO: 6217 - RNA, 20 nt, Artificial Sequence
  HTT spacer sequence ATCN PAM
cacuuauuuaauggacuggu

SEQ ID NO: 6218 - RNA, 20 nt, Artificial Sequence
  HTT spacer sequence ATCN PAM
cagcacuuugggaggcugag

SEQ ID NO: 6219 - RNA, 20 nt, Artificial Sequence
  HTT spacer sequence ATCN PAM
acccgccucagccucccaaa

SEQ ID NO: 6220 - RNA, 20 nt, Artificial Sequence
  HTT spacer sequence ATCN PAM
cgagcucaggaguucaagac

SEQ ID NO: 6221 - RNA, 20 nt, Artificial Sequence
  HTT spacer sequence ATCN PAM
uagcuacuugggaggcugag

SEQ ID NO: 6222 - RNA, 20 nt, Artificial Sequence
  HTT spacer sequence ATCN PAM
uggcucacugcaaacuccac

SEQ ID NO: 6223 - RNA, 20 nt, Artificial Sequence
  HTT spacer sequence ATCN PAM
caaaaaaaaaaaaaaaagua

SEQ ID NO: 6224 - RNA, 20 nt, Artificial Sequence
  HTT spacer sequence ATCN PAM
uacuuuuuuuuuuuuuuuug

SEQ ID NO: 6225 - RNA, 20 nt, Artificial Sequence
  HTT spacer sequence ATCN PAM
guuucugcuuagaaaaauca

SEQ ID NO: 6226 - RNA, 20 nt, Artificial Sequence
  HTT spacer sequence ATCN PAM
gaauuuucuaaaugccaggu

SEQ ID NO: 6227 - RNA, 20 nt, Artificial Sequence
  HTT spacer sequence ATCN PAM
ucgcguagccauguggcacu

SEQ ID NO: 6228 - RNA, 20 nt, Artificial Sequence
  HTT spacer sequence ATCN PAM
cgguccagugccacauggcu

SEQ ID NO: 6229 - RNA, 20 nt, Artificial Sequence
  HTT spacer sequence ATCN PAM
cagcagcugccacuaggcug

SEQ ID NO: 6230 - RNA, 20 nt, Artificial Sequence
  HTT spacer sequence ATCN PAM
cugcggaacagccuaguggc

SEQ ID NO: 6231 - RNA, 20 nt, Artificial Sequence
  HTT spacer sequence ATCN PAM
uggaacgagcccgcaaguuc

SEQ ID NO: 6232 - RNA, 20 nt, Artificial Sequence
  HTT spacer sequence ATCN PAM
ccacccacccggcccuggug

SEQ ID NO: 6233 - RNA, 20 nt, Artificial Sequence
  HTT spacer sequence ATCN PAM
gacaccagagcagcaccagg

SEQ ID NO: 6234 - RNA, 20 nt, Artificial Sequence
  HTT spacer sequence ATCN PAM
cauuuagaaagcaacugcua

SEQ ID NO: 6235 - RNA, 20 nt, Artificial Sequence
  HTT spacer sequence ATCN PAM
ugugggauaugcuugucaug

SEQ ID NO: 6236 - RNA, 20 nt, Artificial Sequence
  HTT spacer sequence ATCN PAM
cacaagaugcaaugguguca

SEQ ID NO: 6237 - RNA, 20 nt, Artificial Sequence
  HTT spacer sequence ATCN PAM
uuagauaaugaaguaacagu

SEQ ID NO: 6238 - RNA, 20 nt, Artificial Sequence
  HTT spacer sequence ATCN PAM
aaggauaaccagaaccacau

SEQ ID NO: 6239 - RNA, 20 nt, Artificial Sequence
  HTT spacer sequence ATCN PAM
ucagcacaguauuucuggaa

SEQ ID NO: 6240 - RNA, 20 nt, Artificial Sequence
  HTT spacer sequence ATCN PAM
ugagccuuccagaaauacug

SEQ ID NO: 6241 - RNA, 20 nt, Artificial Sequence
  HTT spacer sequence ATCN PAM
cacgcuggggaaaagaaguu

SEQ ID NO: 6242 - RNA, 20 nt, Artificial Sequence
  HTT spacer sequence ATCN PAM
auacugagcagagaggcacg

SEQ ID NO: 6243 - RNA, 20 nt, Artificial Sequence
  HTT spacer sequence ATCN PAM
acucugugccguauguagug

SEQ ID NO: 6244 - RNA, 20 nt, Artificial Sequence
  HTT spacer sequence ATCN PAM
accaagcauuucaaaugucg

SEQ ID NO: 6245 - RNA, 20 nt, Artificial Sequence
  HTT spacer sequence ATCN PAM
uaacaggccuaagacaucca

SEQ ID NO: 6246 - RNA, 20 nt, Artificial Sequence
  HTT spacer sequence ATCN PAM
gcugcggauucagcagauca

SEQ ID NO: 6247 - RNA, 20 nt, Artificial Sequence
  HTT spacer sequence ATCN PAM
gcagcugauuucuaugcacg

SEQ ID NO: 6248 - RNA, 20 nt, Artificial Sequence
  HTT spacer sequence ATCN PAM
gcugaauccgcagcugauuu

SEQ ID NO: 6249 - RNA, 20 nt, Artificial Sequence
  HTT spacer sequence ATCN PAM
cuccuuuucugacagauggg

SEQ ID NO: 6250 - RNA, 20 nt, Artificial Sequence
  HTT spacer sequence ATCN PAM
gucagaaaaggagugaucug

SEQ ID NO: 6251 - RNA, 20 nt, Artificial Sequence
  HTT spacer sequence ATCN PAM
gaguaagcaggcccaucugu

SEQ ID NO: 6252 - RNA, 20 nt, Artificial Sequence
  HTT spacer sequence ATCN PAM
gaaagcucugaaucugggaa

SEQ ID NO: 6253 - RNA, 20 nt, Artificial Sequence
  HTT spacer sequence ATCN PAM
gggaauuguguccccugaau

SEQ ID NO: 6254 - RNA, 20 nt, Artificial Sequence
  HTT spacer sequence ATCN PAM
aagcauuucuguuacuccaa

SEQ ID NO: 6255 - RNA, 20 nt, Artificial Sequence
  HTT spacer sequence ATCN PAM
ucuaagcauuucuguuacuc

SEQ ID NO: 6256 - RNA, 20 nt, Artificial Sequence
  HTT spacer sequence ATCN PAM
gagggggucacgaaacaguc

SEQ ID NO: 6257 - RNA, 20 nt, Artificial Sequence
  HTT spacer sequence ATCN PAM
aguuuuccuuuauaaccuuc

SEQ ID NO: 6258 - RNA, 20 nt, Artificial Sequence
  HTT spacer sequence ATCN PAM
ugaaauaacauuaauagauu

SEQ ID NO: 6259 - RNA, 20 nt, Artificial Sequence
  HTT spacer sequence ATCN PAM
auuaauguuauuucaggaua

SEQ ID NO: 6260 - RNA, 20 nt, Artificial Sequence
  HTT spacer sequence ATCN PAM
cagcaccuugggaagccaag

SEQ ID NO: 6261 - RNA, 20 nt, Artificial Sequence
  HTT spacer sequence ATCN PAM
gcccgccuuggcuucccaag

SEQ ID NO: 6262 - RNA, 20 nt, Artificial Sequence
  HTT spacer sequence ATCN PAM
ccugaggccaggacuucgag

SEQ ID NO: 6263 - RNA, 20 nt, Artificial Sequence
  HTT spacer sequence ATCN PAM
uguuggccaggcuggucucg

SEQ ID NO: 6264 - RNA, 20 nt, Artificial Sequence
  HTT spacer sequence ATCN PAM
cuugaaccuaggaggaaaag

SEQ ID NO: 6265 - RNA, 20 nt, Artificial Sequence
  HTT spacer sequence ATCN PAM
cagcucacugcaaccuuuuc

SEQ ID NO: 6266 - RNA, 20 nt, Artificial Sequence
  HTT spacer sequence ATCN PAM
cgccacugcacucuagccug

SEQ ID NO: 6267 - RNA, 20 nt, Artificial Sequence
  HTT spacer sequence ATCN PAM
caaaaaaaaaaaaaaaaaaa

SEQ ID NO: 6268 - RNA, 20 nt, Artificial Sequence
  HTT spacer sequence ATCN PAM
auuaauuuuuuuuuuuuuuu

SEQ ID NO: 6269 - RNA, 20 nt, Artificial Sequence
  HTT spacer sequence ATCN PAM
auggauuuuuaaccuaauaa

SEQ ID NO: 6270 - RNA, 20 nt, Artificial Sequence
  HTT spacer sequence ATCN PAM
auugauccauuaauuuuuuu

SEQ ID NO: 6271 - RNA, 20 nt, Artificial Sequence
  HTT spacer sequence ATCN PAM
uucuuuaaugguaauguaaa

SEQ ID NO: 6272 - RNA, 20 nt, Artificial Sequence
  HTT spacer sequence ATCN PAM
uaauuuuaccuuuacauuac

SEQ ID NO: 6273 - RNA, 20 nt, Artificial Sequence
  HTT spacer sequence ATCN PAM
ccauaaguguccaagaugcc

SEQ ID NO: 6274 - RNA, 20 nt, Artificial Sequence
  HTT spacer sequence ATCN PAM
uggacacuuauggggauuua

SEQ ID NO: 6275 - RNA, 20 nt, Artificial Sequence
  HTT spacer sequence ATCN PAM
cccaccacccacagcuggaa

SEQ ID NO: 6276 - RNA, 20 nt, Artificial Sequence
  HTT spacer sequence ATCN PAM
uuuuauuuccaugagaugag

SEQ ID NO: 6277 - RNA, 20 nt, Artificial Sequence
  HTT spacer sequence ATCN PAM
cauggaaauaaaaagauacu

SEQ ID NO: 6278 - RNA, 20 nt, Artificial Sequence
  HTT spacer sequence ATCN PAM
aguugcagaaauuccugcug

SEQ ID NO: 6279 - RNA, 20 nt, Artificial Sequence
  HTT spacer sequence ATCN PAM
ccucucaggcuggcucccag

SEQ ID NO: 6280 - RNA, 20 nt, Artificial Sequence
  HTT spacer sequence ATCN PAM
gggagccagccugagaggag

SEQ ID NO: 6281 - RNA, 20 nt, Artificial Sequence
  HTT spacer sequence ATCN PAM
uaaacccacagugacagagu

SEQ ID NO: 6282 - RNA, 20 nt, Artificial Sequence
  HTT spacer sequence ATCN PAM
gucuuaccucuuggugaacu

SEQ ID NO: 6283 - RNA, 20 nt, Artificial Sequence
  HTT spacer sequence ATCN PAM
uguguaccacaacacaccca

SEQ ID NO: 6284 - RNA, 20 nt, Artificial Sequence
  HTT spacer sequence ATCN PAM
uguucugagucacccuagau

SEQ ID NO: 6285 - RNA, 20 nt, Artificial Sequence
  HTT spacer sequence ATCN PAM
agggugacucagaacaagau

SEQ ID NO: 6286 - RNA, 20 nt, Artificial Sequence
  HTT spacer sequence ATCN PAM
caggccauacaccgcccggu

SEQ ID NO: 6287 - RNA, 20 nt, Artificial Sequence
  HTT spacer sequence ATCN PAM
acuguagucaguaacagccc

SEQ ID NO: 6288 - RNA, 20 nt, Artificial Sequence
  HTT spacer sequence ATCN PAM
agauauagaggagugcuguc

SEQ ID NO: 6289 - RNA, 20 nt, Artificial Sequence
  HTT spacer sequence ATCN PAM
ugaugugguugggggagggg

SEQ ID NO: 6290 - RNA, 20 nt, Artificial Sequence
  HTT spacer sequence ATCN PAM
ugccccuccccaggucuaac

SEQ ID NO: 6291 - RNA, 20 nt, Artificial Sequence
  HTT spacer sequence ATCN PAM
gugcucugucccucuguuca

SEQ ID NO: 6292 - RNA, 20 nt, Artificial Sequence
  HTT spacer sequence ATCN PAM
auaggcuaggugugguggcu

SEQ ID NO: 6293 - RNA, 20 nt, Artificial Sequence
  HTT spacer sequence ATCN PAM
caguauuuugagaggcugaa

SEQ ID NO: 6294 - RNA, 20 nt, Artificial Sequence
  HTT spacer sequence ATCN PAM
ucccacuucagccucucaaa

SEQ ID NO: 6295 - RNA, 20 nt, Artificial Sequence
  HTT spacer sequence ATCN PAM
ccagaaaaaaaaaauuuaaa

SEQ ID NO: 6296 - RNA, 20 nt, Artificial Sequence
  HTT spacer sequence ATCN PAM
cgucccuguaguucagcugc

SEQ ID NO: 6297 - RNA, 20 nt, Artificial Sequence
  HTT spacer sequence ATCN PAM
uccugccucagccucccaag

SEQ ID NO: 6298 - RNA, 20 nt, Artificial Sequence
  HTT spacer sequence ATCN PAM
cuugagcucaggaguuagag

SEQ ID NO: 6299 - RNA, 20 nt, Artificial Sequence
  HTT spacer sequence ATCN PAM
uagcucacuguaaccucuaa

SEQ ID NO: 6300 - RNA, 20 nt, Artificial Sequence
  HTT spacer sequence ATCN PAM
ugccacugugcuccagccua

SEQ ID NO: 6301 - RNA, 20 nt, Artificial Sequence
  HTT spacer sequence ATCN PAM
guagaauuuugguuuuuacc

SEQ ID NO: 6302 - RNA, 20 nt, Artificial Sequence
  HTT spacer sequence ATCN PAM
ugagggauuacaggaaaagu

SEQ ID NO: 6303 - RNA, 20 nt, Artificial Sequence
  HTT spacer sequence ATCN PAM
cucaggauuuagaagagaac

SEQ ID NO: 6304 - RNA, 20 nt, Artificial Sequence
  HTT spacer sequence ATCN PAM
agcuaagaauauucugaaau

SEQ ID NO: 6305 - RNA, 20 nt, Artificial Sequence
  HTT spacer sequence ATCN PAM
uguuuaaaaacacuucuucc

SEQ ID NO: 6306 - RNA, 20 nt, Artificial Sequence
  HTT spacer sequence ATCN PAM
acauguuuagaguggugaug

SEQ ID NO: 6307 - RNA, 20 nt, Artificial Sequence
  HTT spacer sequence ATCN PAM
ccacucuaaacauguugaug

SEQ ID NO: 6308 - RNA, 20 nt, Artificial Sequence
  HTT spacer sequence ATCN PAM
gccgugaaaguugccaacug

SEQ ID NO: 6309 - RNA, 20 nt, Artificial Sequence
  HTT spacer sequence ATCN PAM
aacauagccagugugaguuc

SEQ ID NO: 6310 - RNA, 20 nt, Artificial Sequence
  HTT spacer sequence ATCN PAM
gcaccuuuauuucagaacuc

SEQ ID NO: 6311 - RNA, 20 nt, Artificial Sequence
  HTT spacer sequence ATCN PAM
accauaaagcugcacauuca

SEQ ID NO: 6312 - RNA, 20 nt, Artificial Sequence
  HTT spacer sequence ATCN PAM
auuccuaagcuacaauaaac

SEQ ID NO: 6313 - RNA, 20 nt, Artificial Sequence
  HTT spacer sequence ATCN PAM
gaauguuguauguguaauau

SEQ ID NO: 6314 - RNA, 20 nt, Artificial Sequence
  HTT spacer sequence ATCN PAM
ucuucaguauuuugcaaaua

SEQ ID NO: 6315 - RNA, 20 nt, Artificial Sequence
  HTT spacer sequence ATCN PAM
ucaguauuuugcaaauaagc

SEQ ID NO: 6316 - RNA, 20 nt, Artificial Sequence
  HTT spacer sequence ATCN PAM
agaaacauugucaaugcauc

SEQ ID NO: 6317 - RNA, 20 nt, Artificial Sequence
  HTT spacer sequence ATCN PAM
guugcuccuucuagaagaca

SEQ ID NO: 6318 - RNA, 20 nt, Artificial Sequence
  HTT spacer sequence ATCN PAM
ggggacuaaguaacuuugug

SEQ ID NO: 6319 - RNA, 20 nt, Artificial Sequence
  HTT spacer sequence ATCN PAM
uccucuucuccagacaucug

SEQ ID NO: 6320 - RNA, 20 nt, Artificial Sequence
  HTT spacer sequence ATCN PAM
cagaagagaaugagagcccc

SEQ ID NO: 6321 - RNA, 20 nt, Artificial Sequence
  HTT spacer sequence ATCN PAM
uguguagaugacacuugcau

SEQ ID NO: 6322 - RNA, 20 nt, Artificial Sequence
  HTT spacer sequence ATCN PAM
acacaggauguucuccuggu

SEQ ID NO: 6323 - RNA, 20 nt, Artificial Sequence
  HTT spacer sequence ATCN PAM
aaacuaaaucuagaaugaau

SEQ ID NO: 6324 - RNA, 20 nt, Artificial Sequence
  HTT spacer sequence ATCN PAM
agaaugaauguuuacuucug

SEQ ID NO: 6325 - RNA, 20 nt, Artificial Sequence
  HTT spacer sequence ATCN PAM
agugacuggaaggccaggcc

SEQ ID NO: 6326 - RNA, 20 nt, Artificial Sequence
  HTT spacer sequence ATCN PAM
aaugcccggcuauuggcuca

SEQ ID NO: 6327 - RNA, 20 nt, Artificial Sequence
  HTT spacer sequence ATCN PAM
uguaggcgugagccaauagc

SEQ ID NO: 6328 - RNA, 20 nt, Artificial Sequence
  HTT spacer sequence ATCN PAM
uuaguuauuauuauuccauu

SEQ ID NO: 6329 - RNA, 20 nt, Artificial Sequence
  HTT spacer sequence ATCN PAM
gaaccccacuacagucaaug

SEQ ID NO: 6330 - RNA, 20 nt, Artificial Sequence
  HTT spacer sequence ATCN PAM
uccuaccucagccucucgag

SEQ ID NO: 6331 - RNA, 20 nt, Artificial Sequence
  HTT spacer sequence ATCN PAM
cuugagcccaggaguuugag

SEQ ID NO: 6332 - RNA, 20 nt, Artificial Sequence
  HTT spacer sequence ATCN PAM
cuaaaaaaauaaaaaauaaa

SEQ ID NO: 6333 - RNA, 20 nt, Artificial Sequence
  HTT spacer sequence ATCN PAM
aagugugguggcucgugccu

SEQ ID NO: 6334 - RNA, 20 nt, Artificial Sequence
  HTT spacer sequence ATCN PAM
cagcucuuugagaagcugag

SEQ ID NO: 6335 - RNA, 20 nt, Artificial Sequence
  HTT spacer sequence ATCN PAM
uccgcccucagcuucucaaa

SEQ ID NO: 6336 - RNA, 20 nt, Artificial Sequence
  HTT spacer sequence ATCN PAM
ucccuucucagucucucagg

SEQ ID NO: 6337 - RNA, 20 nt, Artificial Sequence
  HTT spacer sequence ATCN PAM
aacaccuuuucuacaaauua

SEQ ID NO: 6338 - RNA, 20 nt, Artificial Sequence
  HTT spacer sequence ATCN PAM
uaaaaugugacaaagaacau

SEQ ID NO: 6339 - RNA, 20 nt, Artificial Sequence
  HTT spacer sequence ATCN PAM
aucauaaaaugugacaaaga

SEQ ID NO: 6340 - RNA, 20 nt, Artificial Sequence
  HTT spacer sequence ATCN PAM
cauauuuaccauggagaauu

SEQ ID NO: 6341 - RNA, 20 nt, Artificial Sequence
  HTT spacer sequence ATCN PAM
uacuacucagagauaacuug

SEQ ID NO: 6342 - RNA, 20 nt, Artificial Sequence
  HTT spacer sequence ATCN PAM
cugaguaguaugauuacagg

SEQ ID NO: 6343 - RNA, 20 nt, Artificial Sequence
  HTT spacer sequence ATCN PAM
aacagcaaguuaucucugag

SEQ ID NO: 6344 - RNA, 20 nt, Artificial Sequence
  HTT spacer sequence ATCN PAM
agaccaaaaucuaacagcaa

SEQ ID NO: 6345 - RNA, 20 nt, Artificial Sequence
  HTT spacer sequence ATCN PAM
uauagauacuacugucacau

SEQ ID NO: 6346 - RNA, 20 nt, Artificial Sequence
  HTT spacer sequence ATCN PAM
auaagauaccauguuuguga

SEQ ID NO: 6347 - RNA, 20 nt, Artificial Sequence
  HTT spacer sequence ATCN PAM
gaaaaggaagccgacucucc

SEQ ID NO: 6348 - RNA, 20 nt, Artificial Sequence
  HTT spacer sequence ATCN PAM
uagagacuuuuucuggugau

SEQ ID NO: 6349 - RNA, 20 nt, Artificial Sequence
  HTT spacer sequence ATCN PAM
ccagaaaaagucucuaggau

SEQ ID NO: 6350 - RNA, 20 nt, Artificial Sequence
  HTT spacer sequence ATCN PAM
uuaaaaguagaacaaaauag

SEQ ID NO: 6351 - RNA, 20 nt, Artificial Sequence
  HTT spacer sequence ATCN PAM
uuuuucuuauauuucuguga

SEQ ID NO: 6352 - RNA, 20 nt, Artificial Sequence
  HTT spacer sequence ATCN PAM
aacuuuauuaacuuauaaaa

SEQ ID NO: 6353 - RNA, 20 nt, Artificial Sequence
  HTT spacer sequence ATCN PAM
ucccaaauccaaaaaucuga

SEQ ID NO: 6354 - RNA, 20 nt, Artificial Sequence
  HTT spacer sequence ATCN PAM
caaauccaaaaaucugaaau

SEQ ID NO: 6355 - RNA, 20 nt, Artificial Sequence
  HTT spacer sequence ATCN PAM
aaaaaucugaaauccaaaau

SEQ ID NO: 6356 - RNA, 20 nt, Artificial Sequence
  HTT spacer sequence ATCN PAM
gaaauccaaaaugcuccaaa

SEQ ID NO: 6357 - RNA, 20 nt, Artificial Sequence
  HTT spacer sequence ATCN PAM
aaaaugcuccaaauucugaa

SEQ ID NO: 6358 - RNA, 20 nt, Artificial Sequence
  HTT spacer sequence ATCN PAM
gaaaccuuccaaugaacauu

SEQ ID NO: 6359 - RNA, 20 nt, Artificial Sequence
  HTT spacer sequence ATCN PAM
gaaaaucugaaaccuuccaa

SEQ ID NO: 6360 - RNA, 20 nt, Artificial Sequence
  HTT spacer sequence ATCN PAM
uaaauucagaauacuucuga

SEQ ID NO: 6361 - RNA, 20 nt, Artificial Sequence
  HTT spacer sequence ATCN PAM
gaaguauucugaauuuagga

SEQ ID NO: 6362 - RNA, 20 nt, Artificial Sequence
  HTT spacer sequence ATCN PAM
caaacauuucagauaagggu

SEQ ID NO: 6363 - RNA, 20 nt, Artificial Sequence
  HTT spacer sequence ATCN PAM
gaaauguuugggaucagaag

SEQ ID NO: 6364 - RNA, 20 nt, Artificial Sequence
  HTT spacer sequence ATCN PAM
gacaguacagguugaauaac

SEQ ID NO: 6365 - RNA, 20 nt, Artificial Sequence
  HTT spacer sequence ATCN PAM
ucugacaguacagguugaau

SEQ ID NO: 6366 - RNA, 20 nt, Artificial Sequence
  HTT spacer sequence ATCN PAM
caaaugaaaaauauuaaucg

SEQ ID NO: 6367 - RNA, 20 nt, Artificial Sequence
  HTT spacer sequence ATCN PAM
uuaaccaaauaucaaggaau

SEQ ID NO: 6368 - RNA, 20 nt, Artificial Sequence
  HTT spacer sequence ATCN PAM
aggaauugaucacauuuuac

SEQ ID NO: 6369 - RNA, 20 nt, Artificial Sequence
  HTT spacer sequence ATCN PAM
auuccuugauauuugguuaa

SEQ ID NO: 6370 - RNA, 20 nt, Artificial Sequence
  HTT spacer sequence ATCN PAM
cauuuuacaguuucugccua

SEQ ID NO: 6371 - RNA, 20 nt, Artificial Sequence
  HTT spacer sequence ATCN PAM
uaggcagaaacuguaaaaug

SEQ ID NO: 6372 - RNA, 20 nt, Artificial Sequence
  HTT spacer sequence ATCN PAM
agaugaaaaggcucugcaug

SEQ ID NO: 6373 - RNA, 20 nt, Artificial Sequence
  HTT spacer sequence ATCN PAM
ugauucauaauccuaggcag

SEQ ID NO: 6374 - RNA, 20 nt, Artificial Sequence
  HTT spacer sequence ATCN PAM
uaaauaucuacacuuaagau

SEQ ID NO: 6375 - RNA, 20 nt, Artificial Sequence
  HTT spacer sequence ATCN PAM
acacuuaagauuuauuugau

SEQ ID NO: 6376 - RNA, 20 nt, Artificial Sequence
  HTT spacer sequence ATCN PAM
uaaguguagauauuuaagau

SEQ ID NO: 6377 - RNA, 20 nt, Artificial Sequence
  HTT spacer sequence ATCN PAM
aauaaaucuuaaguguagau

SEQ ID NO: 6378 - RNA, 20 nt, Artificial Sequence
  HTT spacer sequence ATCN PAM
cacauaucaaauaaaucuua

SEQ ID NO: 6379 - RNA, 20 nt, Artificial Sequence
  HTT spacer sequence ATCN PAM
auucauauuuuggauucaac

SEQ ID NO: 6380 - RNA, 20 nt, Artificial Sequence
  HTT spacer sequence ATCN PAM
aaaauaugaauggaucccac

SEQ ID NO: 6381 - RNA, 20 nt, Artificial Sequence
  HTT spacer sequence ATCN PAM
cugccacaguuuugacagaa

SEQ ID NO: 6382 - RNA, 20 nt, Artificial Sequence
  HTT spacer sequence ATCN PAM
ccuaucacugccacaguuuu

SEQ ID NO: 6383 - RNA, 20 nt, Artificial Sequence
  HTT spacer sequence ATCN PAM
caaaauuggaaaaagaguaa

SEQ ID NO: 6384 - RNA, 20 nt, Artificial Sequence
  HTT spacer sequence ATCN PAM
acagcacugccugcccucuc

SEQ ID NO: 6385 - RNA, 20 nt, Artificial Sequence
  HTT spacer sequence ATCN PAM
cagcgcaacgcugccccugc

SEQ ID NO: 6386 - RNA, 20 nt, Artificial Sequence
  HTT spacer sequence ATCN PAM
gcagguagcaggggcagcgu

SEQ ID NO: 6387 - RNA, 20 nt, Artificial Sequence
  HTT spacer sequence ATCN PAM
cgcugaggccugccuuuguc

SEQ ID NO: 6388 - RNA, 20 nt, Artificial Sequence
  HTT spacer sequence ATCN PAM
aguuuccuaccuccucaauu

SEQ ID NO: 6389 - RNA, 20 nt, Artificial Sequence
  HTT spacer sequence ATCN PAM
caaauauaaaccucacuaaa

SEQ ID NO: 6390 - RNA, 20 nt, Artificial Sequence
  HTT spacer sequence ATCN PAM
cucaucauauuuuuccuuag

SEQ ID NO: 6391 - RNA, 20 nt, Artificial Sequence
  HTT spacer sequence ATCN PAM
uauuuuuccuuagugucaga

SEQ ID NO: 6392 - RNA, 20 nt, Artificial Sequence
  HTT spacer sequence ATCN PAM
cauucaagaucugaucagcc

SEQ ID NO: 6393 - RNA, 20 nt, Artificial Sequence
  HTT spacer sequence ATCN PAM
ugaaugugauuuacaaugag

SEQ ID NO: 6394 - RNA, 20 nt, Artificial Sequence
  HTT spacer sequence ATCN PAM
gaucagccuuucccacgagc

SEQ ID NO: 6395 - RNA, 20 nt, Artificial Sequence
  HTT spacer sequence ATCN PAM
gaucuugaaugugauuuaca

SEQ ID NO: 6396 - RNA, 20 nt, Artificial Sequence
  HTT spacer sequence ATCN PAM
gccuuucccacgagccucca

SEQ ID NO: 6397 - RNA, 20 nt, Artificial Sequence
  HTT spacer sequence ATCN PAM
gugccguucaucggaacucu

SEQ ID NO: 6398 - RNA, 20 nt, Artificial Sequence
  HTT spacer sequence ATCN PAM
gaacucugcugccagcggcc

SEQ ID NO: 6399 - RNA, 20 nt, Artificial Sequence
  HTT spacer sequence ATCN PAM
aggcaauucagucucguugu

SEQ ID NO: 6400 - RNA, 20 nt, Artificial Sequence
  HTT spacer sequence ATCN PAM
ugccgacuauugccaguugc

SEQ ID NO: 6401 - RNA, 20 nt, Artificial Sequence
  HTT spacer sequence ATCN PAM
gaaauuaaaguuaaaaauuu

SEQ ID NO: 6402 - RNA, 20 nt, Artificial Sequence
  HTT spacer sequence ATCN PAM
uuuguucuuuuccuucuugc

SEQ ID NO: 6403 - RNA, 20 nt, Artificial Sequence
  HTT spacer sequence ATCN PAM
ccuccaagcacugaagaguu

SEQ ID NO: 6404 - RNA, 20 nt, Artificial Sequence
  HTT spacer sequence ATCN PAM
aucucagccagucgggagcu

SEQ ID NO: 6405 - RNA, 20 nt, Artificial Sequence
  HTT spacer sequence ATCN PAM
cagccagucgggagcugugc

SEQ ID NO: 6406 - RNA, 20 nt, Artificial Sequence
  HTT spacer sequence ATCN PAM
uugcuugucgccggguagaa

SEQ ID NO: 6407 - RNA, 20 nt, Artificial Sequence
  HTT spacer sequence ATCN PAM
ggguuucucuucccaauacc

SEQ ID NO: 6408 - RNA, 20 nt, Artificial Sequence
  HTT spacer sequence ATCN PAM
auaucaggguuucucuuccc

SEQ ID NO: 6409 - RNA, 20 nt, Artificial Sequence
  HTT spacer sequence ATCN PAM
gugaccaugucaagaccaua

SEQ ID NO: 6410 - RNA, 20 nt, Artificial Sequence
  HTT spacer sequence ATCN PAM
gcaaacuugccguuacucgu

SEQ ID NO: 6411 - RNA, 20 nt, Artificial Sequence
  HTT spacer sequence ATCN PAM
gacacacgaguaacggcaag

SEQ ID NO: 6412 - RNA, 20 nt, Artificial Sequence
  HTT spacer sequence ATCN PAM
gacuguuucuuguauuuuuu

SEQ ID NO: 6413 - RNA, 20 nt, Artificial Sequence
  HTT spacer sequence ATCN PAM
uaguaagggcagacuagaaa

SEQ ID NO: 6414 - RNA, 20 nt, Artificial Sequence
  HTT spacer sequence ATCN PAM
guucauccuuuuuaaaugag

SEQ ID NO: 6415 - RNA, 20 nt, Artificial Sequence
  HTT spacer sequence ATCN PAM
uuuuuaaaugagcaugaggu

SEQ ID NO: 6416 - RNA, 20 nt, Artificial Sequence
  HTT spacer sequence ATCN PAM
aggaauaccuucagagcagc

SEQ ID NO: 6417 - RNA, 20 nt, Artificial Sequence
  HTT spacer sequence ATCN PAM
uggguuguccuaacacaagg

SEQ ID NO: 6418 - RNA, 20 nt, Artificial Sequence
  HTT spacer sequence ATCN PAM
uuuauauccuggguuguccu

SEQ ID NO: 6419 - RNA, 20 nt, Artificial Sequence
  HTT spacer sequence ATCN PAM
auauccuuuauauccugggu

SEQ ID NO: 6420 - RNA, 20 nt, Artificial Sequence
  HTT spacer sequence ATCN PAM
augugccuuauagguggguu

SEQ ID NO: 6421 - RNA, 20 nt, Artificial Sequence
  HTT spacer sequence ATCN PAM
auuucuuguccugugaauuu

SEQ ID NO: 6422 - RNA, 20 nt, Artificial Sequence
  HTT spacer sequence ATCN PAM
gguuguuuuaaaaguaggaa

SEQ ID NO: 6423 - RNA, 20 nt, Artificial Sequence
  HTT spacer sequence ATCN PAM
cacuuucuaaagaguaaagg

SEQ ID NO: 6424 - RNA, 20 nt, Artificial Sequence
  HTT spacer sequence ATCN PAM
uuuacucuuuagaaagugag

SEQ ID NO: 6425 - RNA, 20 nt, Artificial Sequence
  HTT spacer sequence ATCN PAM
ugccggucauccuuuacucu

SEQ ID NO: 6426 - RNA, 20 nt, Artificial Sequence
  HTT spacer sequence ATCN PAM
cgucugugacgugaguggag

SEQ ID NO: 6427 - RNA, 20 nt, Artificial Sequence
  HTT spacer sequence ATCN PAM
caggacagugaauacaggca

SEQ ID NO: 6428 - RNA, 20 nt, Artificial Sequence
  HTT spacer sequence ATCN PAM
gguuuaucuuagcaaaauca

SEQ ID NO: 6429 - RNA, 20 nt, Artificial Sequence
  HTT spacer sequence ATCN PAM
uagcaaaaucaaagcauguc

SEQ ID NO: 6430 - RNA, 20 nt, Artificial Sequence
  HTT spacer sequence ATCN PAM
aagcaugucaucuaauugcu

SEQ ID NO: 6431 - RNA, 20 nt, Artificial Sequence
  HTT spacer sequence ATCN PAM
aauugcuaaacaagaguugg

SEQ ID NO: 6432 - RNA, 20 nt, Artificial Sequence
  HTT spacer sequence ATCN PAM
gagagacauuacucaauccu

SEQ ID NO: 6433 - RNA, 20 nt, Artificial Sequence
  HTT spacer sequence ATCN PAM
uuggcaugcaggacuuacau

SEQ ID NO: 6434 - RNA, 20 nt, Artificial Sequence
  HTT spacer sequence ATCN PAM
gcauccuguugccauuuuau

SEQ ID NO: 6435 - RNA, 20 nt, Artificial Sequence
  HTT spacer sequence ATCN PAM
uguugccauuuuaugucuuc

SEQ ID NO: 6436 - RNA, 20 nt, Artificial Sequence
  HTT spacer sequence ATCN PAM
uuuaguuguguuugcaaagu

SEQ ID NO: 6437 - RNA, 20 nt, Artificial Sequence
  HTT spacer sequence ATCN PAM
cuacaucuccuaugugagug

SEQ ID NO: 6438 - RNA, 20 nt, Artificial Sequence
  HTT spacer sequence ATCN PAM
ccuaugugaguguauuucca

SEQ ID NO: 6439 - RNA, 20 nt, Artificial Sequence
  HTT spacer sequence ATCN PAM
cugccccccaccccgccccg

SEQ ID NO: 6440 - RNA, 20 nt, Artificial Sequence
  HTT spacer sequence ATCN PAM
ugcuguguacuuugagcuga

SEQ ID NO: 6441 - RNA, 20 nt, Artificial Sequence
  HTT spacer sequence ATCN PAM
acaagguacucuaaagacug

SEQ ID NO: 6442 - RNA, 20 nt, Artificial Sequence
  HTT spacer sequence ATCN PAM
cauuuaaaaacaccaucaac

SEQ ID NO: 6443 - RNA, 20 nt, Artificial Sequence
  HTT spacer sequence ATCN PAM
caaacuguccaccuaauugu

SEQ ID NO: 6444 - RNA, 20 nt, Artificial Sequence
  HTT spacer sequence ATCN PAM
ucccaaacuguccaccuaau

SEQ ID NO: 6445 - RNA, 20 nt, Artificial Sequence
  HTT spacer sequence ATCN PAM
gcuaugagagugacaacuuc

SEQ ID NO: 6446 - RNA, 20 nt, Artificial Sequence
  HTT spacer sequence ATCN PAM
cccgccaucugcuaugagag

SEQ ID NO: 6447 - RNA, 20 nt, Artificial Sequence
  HTT spacer sequence ATCN PAM
ggacugaagacuaagucuag

SEQ ID NO: 6448 - RNA, 20 nt, Artificial Sequence
  HTT spacer sequence ATCN PAM
cccucaucuggacugaagac

SEQ ID NO: 6449 - RNA, 20 nt, Artificial Sequence
  HTT spacer sequence ATCN PAM
uuuaaucucccucaucugga

SEQ ID NO: 6450 - RNA, 20 nt, Artificial Sequence
  HTT spacer sequence ATCN PAM
ugugccagaugaggugauuu

SEQ ID NO: 6451 - RNA, 20 nt, Artificial Sequence
  HTT spacer sequence ATCN PAM
ggcacaagauauuuauaauc

SEQ ID NO: 6452 - RNA, 20 nt, Artificial Sequence
  HTT spacer sequence ATCN PAM
ccucaucuggcacaagauau

SEQ ID NO: 6453 - RNA, 20 nt, Artificial Sequence
  HTT spacer sequence ATCN PAM
guugucuuacugggauauuu

SEQ ID NO: 6454 - RNA, 20 nt, Artificial Sequence
  HTT spacer sequence ATCN PAM
caguaagacaacugauagga

SEQ ID NO: 6455 - RNA, 20 nt, Artificial Sequence
  HTT spacer sequence ATCN PAM
aauaucccaguaagacaacu

SEQ ID NO: 6456 - RNA, 20 nt, Artificial Sequence
  HTT spacer sequence ATCN PAM
aagacucaaaugcacaaauu

SEQ ID NO: 6457 - RNA, 20 nt, Artificial Sequence
  HTT spacer sequence ATCN PAM
ucuaagacucaaaugcacaa

SEQ ID NO: 6458 - RNA, 20 nt, Artificial Sequence
  HTT spacer sequence ATCN PAM
guuuuacauuuauuaagaaa

SEQ ID NO: 6459 - RNA, 20 nt, Artificial Sequence
  HTT spacer sequence ATCN PAM
caguuuguacuccauuaaua

SEQ ID NO: 6460 - RNA, 20 nt, Artificial Sequence
  HTT spacer sequence ATCN PAM
ugaccuguuugaguauugau

SEQ ID NO: 6461 - RNA, 20 nt, Artificial Sequence
  HTT spacer sequence ATCN PAM
auacucaaacaggucaugau

SEQ ID NO: 6462 - RNA, 20 nt, Artificial Sequence
  HTT spacer sequence ATCN PAM
ucucaucaauacucaaacag

SEQ ID NO: 6463 - RNA, 20 nt, Artificial Sequence
  HTT spacer sequence ATCN PAM
ccuuagaguguauauuucua

SEQ ID NO: 6464 - RNA, 20 nt, Artificial Sequence
  HTT spacer sequence ATCN PAM
uagugugcagaguuuagacu

SEQ ID NO: 6465 - RNA, 20 nt, Artificial Sequence
  HTT spacer sequence ATCN PAM
ccguccagcgggugggaaga

SEQ ID NO: 6466 - RNA, 20 nt, Artificial Sequence
  HTT spacer sequence ATCN PAM
gccacaggugacagaggcac

SEQ ID NO: 6467 - RNA, 20 nt, Artificial Sequence
  HTT spacer sequence ATCN PAM
aggucugagggagccaagca

SEQ ID NO: 6468 - RNA, 20 nt, Artificial Sequence
  HTT spacer sequence ATCN PAM
gcacugcuuggcucccucag

SEQ ID NO: 6469 - RNA, 20 nt, Artificial Sequence
  HTT spacer sequence ATCN PAM
aggaauagucggccguggcc

SEQ ID NO: 6470 - RNA, 20 nt, Artificial Sequence
  HTT spacer sequence ATCN PAM
ccucauaccuucuggccacc

SEQ ID NO: 6471 - RNA, 20 nt, Artificial Sequence
  HTT spacer sequence ATCN PAM
aaauucauauucauaagcug

SEQ ID NO: 6472 - RNA, 20 nt, Artificial Sequence
  HTT spacer sequence ATCN PAM
cuccccagcaaccagggcag

SEQ ID NO: 6473 - RNA, 20 nt, Artificial Sequence
  HTT spacer sequence ATCN PAM
ucuccuggguugucugcuuu

SEQ ID NO: 6474 - RNA, 20 nt, Artificial Sequence
  HTT spacer sequence ATCN PAM
cuggagcuacaggccuaggc

SEQ ID NO: 6475 - RNA, 20 nt, Artificial Sequence
  HTT spacer sequence ATCN PAM
uguuccccuuauccauuuuu

SEQ ID NO: 6476 - RNA, 20 nt, Artificial Sequence
  HTT spacer sequence ATCN PAM
auuuuuuucuucccaggacu

SEQ ID NO: 6477 - RNA, 20 nt, Artificial Sequence
  HTT spacer sequence ATCN PAM
ugucaaaucccaguguugga

SEQ ID NO: 6478 - RNA, 20 nt, Artificial Sequence
  HTT spacer sequence ATCN PAM
caguguuggaccaggucaga

SEQ ID NO: 6479 - RNA, 20 nt, Artificial Sequence
  HTT spacer sequence ATCN PAM
gaccugguccaacacuggga

SEQ ID NO: 6480 - RNA, 20 nt, Artificial Sequence
  HTT spacer sequence ATCN PAM
gauuccugcugaagauauga

SEQ ID NO: 6481 - RNA, 20 nt, Artificial Sequence
  HTT spacer sequence ATCN PAM
gauucaccagcucugcaccu

SEQ ID NO: 6482 - RNA, 20 nt, Artificial Sequence
  HTT spacer sequence ATCN PAM
ucagcaggaauccgauucac

SEQ ID NO: 6483 - RNA, 20 nt, Artificial Sequence
  HTT spacer sequence ATCN PAM
ugaaggcauucauaucuuca

SEQ ID NO: 6484 - RNA, 20 nt, Artificial Sequence
  HTT spacer sequence ATCN PAM
ucagcuuuucuugugacuuc

SEQ ID NO: 6485 - RNA, 20 nt, Artificial Sequence
  HTT spacer sequence ATCN PAM
cacuuggaagucacaagaaa

SEQ ID NO: 6486 - RNA, 20 nt, Artificial Sequence
  HTT spacer sequence ATCN PAM
ucaugugacccacuuguuga

SEQ ID NO: 6487 - RNA, 20 nt, Artificial Sequence
  HTT spacer sequence ATCN PAM
ugugacccacuuguugacaa

SEQ ID NO: 6488 - RNA, 20 nt, Artificial Sequence
  HTT spacer sequence ATCN PAM
cgucccugcccagacuggag

SEQ ID NO: 6489 - RNA, 20 nt, Artificial Sequence
  HTT spacer sequence ATCN PAM
gaaauggaguccuccccacu

SEQ ID NO: 6490 - RNA, 20 nt, Artificial Sequence
  HTT spacer sequence ATCN PAM
gcauaacccccaugucccga

SEQ ID NO: 6491 - RNA, 20 nt, Artificial Sequence
  HTT spacer sequence ATCN PAM
agacagaaaagcacauuguu

SEQ ID NO: 6492 - RNA, 20 nt, Artificial Sequence
  HTT spacer sequence ATCN PAM
acggagguguuguuuugaaa

SEQ ID NO: 6493 - RNA, 20 nt, Artificial Sequence
  HTT spacer sequence ATCN PAM
agcuggccccaaggcugggu

SEQ ID NO: 6494 - RNA, 20 nt, Artificial Sequence
  HTT spacer sequence ATCN PAM
caaaccauacacccagccuu

SEQ ID NO: 6495 - RNA, 20 nt, Artificial Sequence
  HTT spacer sequence ATCN PAM
ggccuccacuggaggaacaa

SEQ ID NO: 6496 - RNA, 20 nt, Artificial Sequence
  HTT spacer sequence ATCN PAM
uguguuuguuccuccagugg

SEQ ID NO: 6497 - RNA, 20 nt, Artificial Sequence
  HTT spacer sequence ATCN PAM
ucuaagcuccauggccaaga

SEQ ID NO: 6498 - RNA, 20 nt, Artificial Sequence
  HTT spacer sequence ATCN PAM
aagcuccauggccaagacag

SEQ ID NO: 6499 - RNA, 20 nt, Artificial Sequence
  HTT spacer sequence ATCN PAM
acuuccaagacacuagaaac

SEQ ID NO: 6500 - RNA, 20 nt, Artificial Sequence
  HTT spacer sequence ATCN PAM
uuagucguaaaagagacccu

SEQ ID NO: 6501 - RNA, 20 nt, Artificial Sequence
  HTT spacer sequence ATCN PAM
aagggucucuuuuacgacua

SEQ ID NO: 6502 - RNA, 20 nt, Artificial Sequence
  HTT spacer sequence ATCN PAM
cgcugcauccaagggucucu

SEQ ID NO: 6503 - RNA, 20 nt, Artificial Sequence
  HTT spacer sequence ATCN PAM
aacagaggugugaguagagg

SEQ ID NO: 6504 - RNA, 20 nt, Artificial Sequence
  HTT spacer sequence ATCN PAM
gggguuggggggugaagaac

SEQ ID NO: 6505 - RNA, 20 nt, Artificial Sequence
  HTT spacer sequence ATCN PAM
acgcagggcuaaagcaccag

SEQ ID NO: 6506 - RNA, 20 nt, Artificial Sequence
  HTT spacer sequence ATCN PAM
gaacacacuguuguguugcc

SEQ ID NO: 6507 - RNA, 20 nt, Artificial Sequence
  HTT spacer sequence ATCN PAM
auuuacuaaaauuguuuauc

SEQ ID NO: 6508 - RNA, 20 nt, Artificial Sequence
  HTT spacer sequence ATCN PAM
uuuuuuuuuuuuuugagaca

SEQ ID NO: 6509 - RNA, 20 nt, Artificial Sequence
  HTT spacer sequence ATCN PAM
uggcucacugcaaccuccgc

SEQ ID NO: 6510 - RNA, 20 nt, Artificial Sequence
  HTT spacer sequence ATCN PAM
uaugaacccaggaggcggag

SEQ ID NO: 6511 - RNA, 20 nt, Artificial Sequence
  HTT spacer sequence ATCN PAM
cgucucuacuaaaaauacaa

SEQ ID NO: 6512 - RNA, 20 nt, Artificial Sequence
  HTT spacer sequence ATCN PAM
ccugaggucaggaguuugag

SEQ ID NO: 6513 - RNA, 20 nt, Artificial Sequence
  HTT spacer sequence ATCN PAM
gcccaccucggccucccaaa

SEQ ID NO: 6514 - RNA, 20 nt, Artificial Sequence
  HTT spacer sequence ATCN PAM
cagcacuuugggaggccgag

SEQ ID NO: 6515 - RNA, 20 nt, Artificial Sequence
  HTT spacer sequence ATCN PAM
uaagauucaugcagugaaag

SEQ ID NO: 6516 - RNA, 20 nt, Artificial Sequence
  HTT spacer sequence ATCN PAM
uaagauaaacaauuuuaggc

SEQ ID NO: 6517 - RNA, 20 nt, Artificial Sequence
  HTT spacer sequence ATCN PAM
cucaguaaguuagcuuucac

SEQ ID NO: 6518 - RNA, 20 nt, Artificial Sequence
  HTT spacer sequence ATCN PAM
cuaagcaaauuuaucacuca

SEQ ID NO: 6519 - RNA, 20 nt, Artificial Sequence
  HTT spacer sequence ATCN PAM
guuuauuagguuuuccaaau

SEQ ID NO: 6520 - RNA, 20 nt, Artificial Sequence
  HTT spacer sequence ATCN PAM
ugaaugccaaaaguugaagc

SEQ ID NO: 6521 - RNA, 20 nt, Artificial Sequence
  HTT spacer sequence ATCN PAM
uaguuuaauacucagaaaag

SEQ ID NO: 6522 - RNA, 20 nt, Artificial Sequence
  HTT spacer sequence ATCN PAM
aucuuaguuuaauacucaga

SEQ ID NO: 6523 - RNA, 20 nt, Artificial Sequence
  HTT spacer sequence ATCN PAM
uucagguaaaacaucuaucu

SEQ ID NO: 6524 - RNA, 20 nt, Artificial Sequence
  HTT spacer sequence ATCN PAM
gccaccaaucuuuaaauggc

SEQ ID NO: 6525 - RNA, 20 nt, Artificial Sequence
  HTT spacer sequence ATCN PAM
uuaaauggcuaaacaaaagg

SEQ ID NO: 6526 - RNA, 20 nt, Artificial Sequence
  HTT spacer sequence ATCN PAM
aaauugacauaagaaauacc

SEQ ID NO: 6527 - RNA, 20 nt, Artificial Sequence
  HTT spacer sequence ATCN PAM
uuuucaaacuuuaggguggu

SEQ ID NO: 6528 - RNA, 20 nt, Artificial Sequence
  HTT spacer sequence ATCN PAM
cugaggucuuggaugacacu

SEQ ID NO: 6529 - RNA, 20 nt, Artificial Sequence
  HTT spacer sequence ATCN PAM
aagaccucagugauacacca

SEQ ID NO: 6530 - RNA, 20 nt, Artificial Sequence
  HTT spacer sequence ATCN PAM
aagcuaaagugucauccaag

SEQ ID NO: 6531 - RNA, 20 nt, Artificial Sequence
  HTT spacer sequence ATCN PAM
aagagcauaaaaaauuaaaa

SEQ ID NO: 6532 - RNA, 20 nt, Artificial Sequence
  HTT spacer sequence ATCN PAM
guucucucuuaguauuuuaa

SEQ ID NO: 6533 - RNA, 20 nt, Artificial Sequence
  HTT spacer sequence ATCN PAM
aaaauauuuuuaagaaaauu

SEQ ID NO: 6534 - RNA, 20 nt, Artificial Sequence
  HTT spacer sequence ATCN PAM
gguaagaaaaacacaacaga

SEQ ID NO: 6535 - RNA, 20 nt, Artificial Sequence
  HTT spacer sequence ATCN PAM
guuguuauuguuuguuaacc

SEQ ID NO: 6536 - RNA, 20 nt, Artificial Sequence
  HTT spacer sequence ATCN PAM
gagcauuaaagguuaacaaa

SEQ ID NO: 6537 - RNA, 20 nt, Artificial Sequence
  HTT spacer sequence ATCN PAM
cuaggcuuaagcauggagcu

SEQ ID NO: 6538 - RNA, 20 nt, Artificial Sequence
  HTT spacer sequence ATCN PAM
ugucuuccagcccgagcugc

SEQ ID NO: 6539 - RNA, 20 nt, Artificial Sequence
  HTT spacer sequence ATCN PAM
uucaacuugcuccaguaggc

SEQ ID NO: 6540 - RNA, 20 nt, Artificial Sequence
  HTT spacer sequence ATCN PAM
guuugguaauuaaaauuaaa

SEQ ID NO: 6541 - RNA, 20 nt, Artificial Sequence
  HTT spacer sequence ATCN PAM
uauuuuuaaaaagcauucca

SEQ ID NO: 6542 - RNA, 20 nt, Artificial Sequence
  HTT spacer sequence ATCN PAM
acugccuuuauuguacauuu

SEQ ID NO: 6543 - RNA, 20 nt, Artificial Sequence
  HTT spacer sequence ATCN PAM
aauacauugaaagcguuuac

SEQ ID NO: 6544 - RNA, 20 nt, Artificial Sequence
  HTT spacer sequence ATCN PAM
ccccugaggucuggcccagc

SEQ ID NO: 6545 - RNA, 20 nt, Artificial Sequence
  HTT spacer sequence ATCN PAM
guccacaggacugcacgugg

SEQ ID NO: 6546 - RNA, 20 nt, Artificial Sequence
  HTT spacer sequence ATCN PAM
acacauccguccacaggacu

SEQ ID NO: 6547 - RNA, 20 nt, Artificial Sequence
  HTT spacer sequence ATCN PAM
gauucucagagaauugcuug

SEQ ID NO: 6548 - RNA, 20 nt, Artificial Sequence
  HTT spacer sequence ATCN PAM
gaugaaagcucaagacauug

SEQ ID NO: 6549 - RNA, 20 nt, Artificial Sequence
  HTT spacer sequence ATCN PAM
acuucgaaaggcagucaagc

SEQ ID NO: 6550 - RNA, 20 nt, Artificial Sequence
  HTT spacer sequence ATCN PAM
gugcucacguuugcacccac

SEQ ID NO: 6551 - RNA, 20 nt, Artificial Sequence
  HTT spacer sequence ATCN PAM
ccugaaacagaaggaccucg

SEQ ID NO: 6552 - RNA, 20 nt, Artificial Sequence
  HTT spacer sequence ATCN PAM
gucccugcccacucuggccc

SEQ ID NO: 6553 - RNA, 20 nt, Artificial Sequence
  HTT spacer sequence ATCN PAM
ugcuuuucaaauaaaacugc

SEQ ID NO: 6554 - RNA, 20 nt, Artificial Sequence
  HTT spacer sequence ATCN PAM
cugaccaguccagucacuuu

SEQ ID NO: 6555 - RNA, 20 nt, Artificial Sequence
  HTT spacer sequence ATCN PAM
cagccuggcaguaagucuug

SEQ ID NO: 6556 - RNA, 20 nt, Artificial Sequence
  HTT spacer sequence ATCN PAM
uucacccucaccucgccacu

SEQ ID NO: 6557 - RNA, 20 nt, Artificial Sequence
  HTT spacer sequence ATCN PAM
gcaccuaccauguuaggugg

SEQ ID NO: 6558 - RNA, 20 nt, Artificial Sequence
  HTT spacer sequence ATCN PAM
accuaacaugguaggugcag

SEQ ID NO: 6559 - RNA, 20 nt, Artificial Sequence
  HTT spacer sequence ATCN PAM
uaauuuuagagacaugaaaa

SEQ ID NO: 6560 - RNA, 20 nt, Artificial Sequence
  HTT spacer sequence ATCN PAM
ucuggaaguacuuuaugucu

SEQ ID NO: 6561 - RNA, 20 nt, Artificial Sequence
  HTT spacer sequence ATCN PAM
ggaaguacuuuaugucuuaa

SEQ ID NO: 6562 - RNA, 20 nt, Artificial Sequence
  HTT spacer sequence ATCN PAM
agaacguguacacauucugg

SEQ ID NO: 6563 - RNA, 20 nt, Artificial Sequence
  HTT spacer sequence ATCN PAM
uuaaagggccaucgcugugc

SEQ ID NO: 6564 - RNA, 20 nt, Artificial Sequence
  HTT spacer sequence ATCN PAM
cugugcugccugcccucagc

SEQ ID NO: 6565 - RNA, 20 nt, Artificial Sequence
  HTT spacer sequence ATCN PAM
gugccauuacucacaaaaug

SEQ ID NO: 6566 - RNA, 20 nt, Artificial Sequence
  HTT spacer sequence ATCN PAM
uuuugugaguaauggcacug

SEQ ID NO: 6567 - RNA, 20 nt, Artificial Sequence
  HTT spacer sequence ATCN PAM
caaaccauaugacuccacgu

SEQ ID NO: 6568 - RNA, 20 nt, Artificial Sequence
  HTT spacer sequence ATCN PAM
cuguccuucagguuucagcu

SEQ ID NO: 6569 - RNA, 20 nt, Artificial Sequence
  HTT spacer sequence ATCN PAM
cacgcugacuuucccacuuc

SEQ ID NO: 6570 - RNA, 20 nt, Artificial Sequence
  HTT spacer sequence ATCN PAM
cagcacagggugauugcugc

SEQ ID NO: 6571 - RNA, 20 nt, Artificial Sequence
  HTT spacer sequence ATCN PAM
cccugugcugugaucacacg

SEQ ID NO: 6572 - RNA, 20 nt, Artificial Sequence
  HTT spacer sequence ATCN PAM
gcagcaaucacccugugcug

SEQ ID NO: 6573 - RNA, 20 nt, Artificial Sequence
  HTT spacer sequence ATCN PAM
ugcauacagcaggcacauaa

SEQ ID NO: 6574 - RNA, 20 nt, Artificial Sequence
  HTT spacer sequence ATCN PAM
uauuugacucucacaacccc

SEQ ID NO: 6575 - RNA, 20 nt, Artificial Sequence
  HTT spacer sequence ATCN PAM
cacaggggguugugagaguc

SEQ ID NO: 6576 - RNA, 20 nt, Artificial Sequence
  HTT spacer sequence ATCN PAM
cuagaacccacgcucucaaa

SEQ ID NO: 6577 - RNA, 20 nt, Artificial Sequence
  HTT spacer sequence ATCN PAM
cuccugggcuacguggccac

SEQ ID NO: 6578 - RNA, 20 nt, Artificial Sequence
  HTT spacer sequence ATCN PAM
caguuguggaaccguccaaa

SEQ ID NO: 6579 - RNA, 20 nt, Artificial Sequence
  HTT spacer sequence ATCN PAM
aaugccaggacagggccuaa

SEQ ID NO: 6580 - RNA, 20 nt, Artificial Sequence
  HTT spacer sequence ATCN PAM
augagcagaucccgcugagu

SEQ ID NO: 6581 - RNA, 20 nt, Artificial Sequence
  HTT spacer sequence ATCN PAM
gcucauggaucaaaugccag

SEQ ID NO: 6582 - RNA, 20 nt, Artificial Sequence
  HTT spacer sequence ATCN PAM
cgcugagucuggaucuccag

SEQ ID NO: 6583 - RNA, 20 nt, Artificial Sequence
  HTT spacer sequence ATCN PAM
agacucagcgggaucugcuc

SEQ ID NO: 6584 - RNA, 20 nt, Artificial Sequence
  HTT spacer sequence ATCN PAM
ccaggcagggcuggacugcu

SEQ ID NO: 6585 - RNA, 20 nt, Artificial Sequence
  HTT spacer sequence ATCN PAM
acugugugcacuucauccug

SEQ ID NO: 6586 - RNA, 20 nt, Artificial Sequence
  HTT spacer sequence ATCN PAM
uggaggccggugaguccccg

SEQ ID NO: 6587 - RNA, 20 nt, Artificial Sequence
  HTT spacer sequence ATCN PAM
uaguuccugucugcuucacc

SEQ ID NO: 6588 - RNA, 20 nt, Artificial Sequence
  HTT spacer sequence ATCN PAM
ccaauuccuagcuuaguacc

SEQ ID NO: 6589 - RNA, 20 nt, Artificial Sequence
  HTT spacer sequence ATCN PAM
accucuccauccccaauucc

SEQ ID NO: 6590 - RNA, 20 nt, Artificial Sequence
  HTT spacer sequence ATCN PAM
ggaagggcugggccccaucu

SEQ ID NO: 6591 - RNA, 20 nt, Artificial Sequence
  HTT spacer sequence ATCN PAM
cuuacucuccaauauauugg

SEQ ID NO: 6592 - RNA, 20 nt, Artificial Sequence
  HTT spacer sequence ATCN PAM
aaauaaaaugacuaaaaaag

SEQ ID NO: 6593 - RNA, 20 nt, Artificial Sequence
  HTT spacer sequence ATCN PAM
aaaauaccucuaaacuuuau

SEQ ID NO: 6594 - RNA, 20 nt, Artificial Sequence
  HTT spacer sequence ATCN PAM
cagagacauaaaguuuagag

SEQ ID NO: 6595 - RNA, 20 nt, Artificial Sequence
  HTT spacer sequence ATCN PAM
uuggucuuagcuguuuuaug

SEQ ID NO: 6596 - RNA, 20 nt, Artificial Sequence
  HTT spacer sequence ATCN PAM
uauaagacuaaauacauaaa

SEQ ID NO: 6597 - RNA, 20 nt, Artificial Sequence
  HTT spacer sequence ATCN PAM
uaagauuaauaacauuacau

SEQ ID NO: 6598 - RNA, 20 nt, Artificial Sequence
  HTT spacer sequence ATCN PAM
uaugaucauauaagacuaaa

SEQ ID NO: 6599 - RNA, 20 nt, Artificial Sequence
  HTT spacer sequence ATCN PAM
ucugaauguaauguuauuaa

SEQ ID NO: 6600 - RNA, 20 nt, Artificial Sequence
  HTT spacer sequence ATCN PAM
ucaacaagggucauuagcca

SEQ ID NO: 6601 - RNA, 20 nt, Artificial Sequence
  HTT spacer sequence ATCN PAM
cucuauaacauuuaauuuaa

SEQ ID NO: 6602 - RNA, 20 nt, Artificial Sequence
  HTT spacer sequence ATCN PAM
gugcauuuguagccaacuug

SEQ ID NO: 6603 - RNA, 20 nt, Artificial Sequence
  HTT spacer sequence ATCN PAM
uuguuuucaaguuggcuaca

SEQ ID NO: 6604 - RNA, 20 nt, Artificial Sequence
  HTT spacer sequence ATCN PAM
agggauuacuacuuaaaagc

SEQ ID NO: 6605 - RNA, 20 nt, Artificial Sequence
  HTT spacer sequence ATCN PAM
cuggaucuuuguuuucaagu

SEQ ID NO: 6606 - RNA, 20 nt, Artificial Sequence
  HTT spacer sequence ATCN PAM
cuauaaccuccaagaagucu

SEQ ID NO: 6607 - RNA, 20 nt, Artificial Sequence
  HTT spacer sequence ATCN PAM
ucacuauaaccuccaagaag

SEQ ID NO: 6608 - RNA, 20 nt, Artificial Sequence
  HTT spacer sequence ATCN PAM
aaaucaucacuauaaccucc

SEQ ID NO: 6609 - RNA, 20 nt, Artificial Sequence
  HTT spacer sequence ATCN PAM
ugagccgucucauaauaacc

SEQ ID NO: 6610 - RNA, 20 nt, Artificial Sequence
  HTT spacer sequence ATCN PAM
cucacccugagguuauuaug

SEQ ID NO: 6611 - RNA, 20 nt, Artificial Sequence
  HTT spacer sequence ATCN PAM
gaaugaaaucugaaguucaa

SEQ ID NO: 6612 - RNA, 20 nt, Artificial Sequence
  HTT spacer sequence ATCN PAM
gaaguucaaaucuucagaca

SEQ ID NO: 6613 - RNA, 20 nt, Artificial Sequence
  HTT spacer sequence ATCN PAM
ucagacauauaccacuaacc

SEQ ID NO: 6614 - RNA, 20 nt, Artificial Sequence
  HTT spacer sequence ATCN PAM
cuugguuagugguauauguc

SEQ ID NO: 6615 - RNA, 20 nt, Artificial Sequence
  HTT spacer sequence ATCN PAM
aggcuagucugucuaucccu

SEQ ID NO: 6616 - RNA, 20 nt, Artificial Sequence
  HTT spacer sequence ATCN PAM
cuuucaacuuuugugaggcu

SEQ ID NO: 6617 - RNA, 20 nt, Artificial Sequence
  HTT spacer sequence ATCN PAM
gugcuuuuuauucaacauuu

SEQ ID NO: 6618 - RNA, 20 nt, Artificial Sequence
  HTT spacer sequence ATCN PAM
gcgaggaggaggaggaagua

SEQ ID NO: 6619 - RNA, 20 nt, Artificial Sequence
  HTT spacer sequence ATCN PAM
acuuccuccuccuccucgcu

SEQ ID NO: 6620 - RNA, 20 nt, Artificial Sequence
  HTT spacer sequence ATCN PAM
aaacacacagaguaagucuc

SEQ ID NO: 6621 - RNA, 20 nt, Artificial Sequence
  HTT spacer sequence ATCN PAM
uucacagagacgugcaccgc

SEQ ID NO: 6622 - RNA, 20 nt, Artificial Sequence
  HTT spacer sequence ATCN PAM
guacacaugcggcugucucu

SEQ ID NO: 6623 - RNA, 20 nt, Artificial Sequence
  HTT spacer sequence ATCN PAM
cagcuggucuguagggucag

SEQ ID NO: 6624 - RNA, 20 nt, Artificial Sequence
  HTT spacer sequence ATCN PAM
cagaauaacugcagagugug

SEQ ID NO: 6625 - RNA, 20 nt, Artificial Sequence
  HTT spacer sequence ATCN PAM
uugagggcagggaacagguu

SEQ ID NO: 6626 - RNA, 20 nt, Artificial Sequence
  HTT spacer sequence ATCN PAM
cucaacaaaagguuguugcu

SEQ ID NO: 6627 - RNA, 20 nt, Artificial Sequence
  HTT spacer sequence ATCN PAM
guuuugguggauauuuaaaa

SEQ ID NO: 6628 - RNA, 20 nt, Artificial Sequence
  HTT spacer sequence ATCN PAM
accaaaacagauggcugaac

SEQ ID NO: 6629 - RNA, 20 nt, Artificial Sequence
  HTT spacer sequence ATCN PAM
aaaucccagugauuuaagcc

SEQ ID NO: 6630 - RNA, 20 nt, Artificial Sequence
  HTT spacer sequence ATCN PAM
cagugauuuaagccaguuau

SEQ ID NO: 6631 - RNA, 20 nt, Artificial Sequence
  HTT spacer sequence ATCN PAM
cugggauuuggauuuuuuuu

SEQ ID NO: 6632 - RNA, 20 nt, Artificial Sequence
  HTT spacer sequence ATCN PAM
uccucccaacaggcacugcc

SEQ ID NO: 6633 - RNA, 20 nt, Artificial Sequence
  HTT spacer sequence ATCN PAM
ggcaucuuuuccaugcucug

SEQ ID NO: 6634 - RNA, 20 nt, Artificial Sequence
  HTT spacer sequence ATCN PAM
uuuccaugcucuguggcuca

SEQ ID NO: 6635 - RNA, 20 nt, Artificial Sequence
  HTT spacer sequence ATCN PAM
ugagugcaccagugcuuuug

SEQ ID NO: 6636 - RNA, 20 nt, Artificial Sequence
  HTT spacer sequence ATCN PAM
ugguuguggauggaguuuuc

SEQ ID NO: 6637 - RNA, 20 nt, Artificial Sequence
  HTT spacer sequence ATCN PAM
acaaccaggauugcacaaaa

SEQ ID NO: 6638 - RNA, 20 nt, Artificial Sequence
  HTT spacer sequence ATCN PAM
caaaccucuguggguccuuc

SEQ ID NO: 6639 - RNA, 20 nt, Artificial Sequence
  HTT spacer sequence ATCN PAM
caaacugaagccugaaggac

SEQ ID NO: 6640 - RNA, 20 nt, Artificial Sequence
  HTT spacer sequence ATCN PAM
ugaaaucacaaacugaagcc

SEQ ID NO: 6641 - RNA, 20 nt, Artificial Sequence
  HTT spacer sequence ATCN PAM
uccagccgaguggcaccuca

SEQ ID NO: 6642 - RNA, 20 nt, Artificial Sequence
  HTT spacer sequence ATCN PAM
acagccugaggugccacucg

SEQ ID NO: 6643 - RNA, 20 nt, Artificial Sequence
  HTT spacer sequence ATCN PAM
ugugcuucuguggugaggau

SEQ ID NO: 6644 - RNA, 20 nt, Artificial Sequence
  HTT spacer sequence ATCN PAM
ucaccacagaagcacaggau

SEQ ID NO: 6645 - RNA, 20 nt, Artificial Sequence
  HTT spacer sequence ATCN PAM
acacgguuggcacuauucuu

SEQ ID NO: 6646 - RNA, 20 nt, Artificial Sequence
  HTT spacer sequence ATCN PAM
aucaguuaaucccuccaugu

SEQ ID NO: 6647 - RNA, 20 nt, Artificial Sequence
  HTT spacer sequence ATCN PAM
guuaaucccuccauguaaag

SEQ ID NO: 6648 - RNA, 20 nt, Artificial Sequence
  HTT spacer sequence ATCN PAM
cuccauguaaagcaccugga

SEQ ID NO: 6649 - RNA, 20 nt, Artificial Sequence
  HTT spacer sequence ATCN PAM
guuccaggugcuuuacaugg

SEQ ID NO: 6650 - RNA, 20 nt, Artificial Sequence
  HTT spacer sequence ATCN PAM
ugauuuuuaguuagauuucc

SEQ ID NO: 6651 - RNA, 20 nt, Artificial Sequence
  HTT spacer sequence ATCN PAM
ugauagcauuuguugaguau

SEQ ID NO: 6652 - RNA, 20 nt, Artificial Sequence
  HTT spacer sequence ATCN PAM
aacuaaaaaucaugauagca

SEQ ID NO: 6653 - RNA, 20 nt, Artificial Sequence
  HTT spacer sequence ATCN PAM
uggcgguuugaguuagagca

SEQ ID NO: 6654 - RNA, 20 nt, Artificial Sequence
  HTT spacer sequence ATCN PAM
ucacccaaacagaacccacu

SEQ ID NO: 6655 - RNA, 20 nt, Artificial Sequence
  HTT spacer sequence ATCN PAM
ucuucacccaaacagaaccc

SEQ ID NO: 6656 - RNA, 20 nt, Artificial Sequence
  HTT spacer sequence ATCN PAM
ccucgauaggacguuacuuc

SEQ ID NO: 6657 - RNA, 20 nt, Artificial Sequence
  HTT spacer sequence ATCN PAM
aggugauuaaaaaaacaaag

SEQ ID NO: 6658 - RNA, 20 nt, Artificial Sequence
  HTT spacer sequence ATCN PAM
aauaaauauuaauaggccgg

SEQ ID NO: 6659 - RNA, 20 nt, Artificial Sequence
  HTT spacer sequence ATCN PAM
cagcacuuugggaggccgag

SEQ ID NO: 6660 - RNA, 20 nt, Artificial Sequence
  HTT spacer sequence ATCN PAM
gcccgccucggccucccaaa

SEQ ID NO: 6661 - RNA, 20 nt, Artificial Sequence
  HTT spacer sequence ATCN PAM
cgaggucaggagaucgagac

SEQ ID NO: 6662 - RNA, 20 nt, Artificial Sequence
  HTT spacer sequence ATCN PAM
ccugaccucgugauccgccc

SEQ ID NO: 6663 - RNA, 20 nt, Artificial Sequence
  HTT spacer sequence ATCN PAM
agaccaucccagcuaaaacg

SEQ ID NO: 6664 - RNA, 20 nt, Artificial Sequence
  HTT spacer sequence ATCN PAM
cagcuaaaacggugaaaccc

SEQ ID NO: 6665 - RNA, 20 nt, Artificial Sequence
  HTT spacer sequence ATCN PAM
cggcucacugcaagcuccgc

SEQ ID NO: 6666 - RNA, 20 nt, Artificial Sequence
  HTT spacer sequence ATCN PAM
cgccacugcacuccagccug

SEQ ID NO: 6667 - RNA, 20 nt, Artificial Sequence
  HTT spacer sequence ATCN PAM
uaggaaguugcccaaacugu

SEQ ID NO: 6668 - RNA, 20 nt, Artificial Sequence
  HTT spacer sequence ATCN PAM
cguggccuguggguaauagc

SEQ ID NO: 6669 - RNA, 20 nt, Artificial Sequence
  HTT spacer sequence ATCN PAM
uauuuuaguagguaugauau

SEQ ID NO: 6670 - RNA, 20 nt, Artificial Sequence
  HTT spacer sequence ATCN PAM
uaccuacuaaaauaugauuu

SEQ ID NO: 6671 - RNA, 20 nt, Artificial Sequence
  HTT spacer sequence ATCN PAM
acagaauggugucuugaguc

SEQ ID NO: 6672 - RNA, 20 nt, Artificial Sequence
  HTT spacer sequence ATCN PAM
ucccaagggugugaaguguc

SEQ ID NO: 6673 - RNA, 20 nt, Artificial Sequence
  HTT spacer sequence ATCN PAM
uugcuucacuggcuuuccua

SEQ ID NO: 6674 - RNA, 20 nt, Artificial Sequence
  HTT spacer sequence ATCN PAM
aagggccauguugucauccu

SEQ ID NO: 6675 - RNA, 20 nt, Artificial Sequence
  HTT spacer sequence ATCN PAM
uguggcuccucagccucaga

SEQ ID NO: 6676 - RNA, 20 nt, Artificial Sequence
  HTT spacer sequence ATCN PAM
cagagagugggccagagggc

SEQ ID NO: 6677 - RNA, 20 nt, Artificial Sequence
  HTT spacer sequence ATCN PAM
cagcagaaaauggggagaau

SEQ ID NO: 6678 - RNA, 20 nt, Artificial Sequence
  HTT spacer sequence ATCN PAM
gccuauaccauacaauucuc

SEQ ID NO: 6679 - RNA, 20 nt, Artificial Sequence
  HTT spacer sequence ATCN PAM
gcaggccuucaguggccaac

SEQ ID NO: 6680 - RNA, 20 nt, Artificial Sequence
  HTT spacer sequence ATCN PAM
acuuagacucugaguuggcc

SEQ ID NO: 6681 - RNA, 20 nt, Artificial Sequence
  HTT spacer sequence ATCN PAM
uauaugcccaguguagaaag

SEQ ID NO: 6682 - RNA, 20 nt, Artificial Sequence
  HTT spacer sequence ATCN PAM
aaacaagcaacgguuaagag

SEQ ID NO: 6683 - RNA, 20 nt, Artificial Sequence
  HTT spacer sequence ATCN PAM
uaaguauaucacugcagccu

SEQ ID NO: 6684 - RNA, 20 nt, Artificial Sequence
  HTT spacer sequence ATCN PAM
cugcagccugugagauggug

SEQ ID NO: 6685 - RNA, 20 nt, Artificial Sequence
  HTT spacer sequence ATCN PAM
cacaggcugcagugauauac

SEQ ID NO: 6686 - RNA, 20 nt, Artificial Sequence
  HTT spacer sequence ATCN PAM
ucaucagccuggcccgccug

SEQ ID NO: 6687 - RNA, 20 nt, Artificial Sequence
  HTT spacer sequence ATCN PAM
ucagccuggcccgccugccc

SEQ ID NO: 6688 - RNA, 20 nt, Artificial Sequence
  HTT spacer sequence ATCN PAM
gccuggcccgccugccccuu

SEQ ID NO: 6689 - RNA, 20 nt, Artificial Sequence
  HTT spacer sequence ATCN PAM
ccgcagcccagaggcugccu

SEQ ID NO: 6690 - RNA, 20 nt, Artificial Sequence
  HTT spacer sequence ATCN PAM
cuaagagauuaguguuagac

SEQ ID NO: 6691 - RNA, 20 nt, Artificial Sequence
  HTT spacer sequence ATCN PAM
cuuagggauguagggccuca

SEQ ID NO: 6692 - RNA, 20 nt, Artificial Sequence
  HTT spacer sequence ATCN PAM
ggucuaacacuaaucucuua

SEQ ID NO: 6693 - RNA, 20 nt, Artificial Sequence
  HTT spacer sequence ATCN PAM
cacucacucgagggggugug

SEQ ID NO: 6694 - RNA, 20 nt, Artificial Sequence
  HTT spacer sequence ATCN PAM
ccaaaggaaaaucucacuca

SEQ ID NO: 6695 - RNA, 20 nt, Artificial Sequence
  HTT spacer sequence ATCN PAM
cagcacuuugggaagccaag

SEQ ID NO: 6696 - RNA, 20 nt, Artificial Sequence
  HTT spacer sequence ATCN PAM
gcccaccuuggcuucccaaa

SEQ ID NO: 6697 - RNA, 20 nt, Artificial Sequence
  HTT spacer sequence ATCN PAM
cuugaggucaggauuucgag

SEQ ID NO: 6698 - RNA, 20 nt, Artificial Sequence
  HTT spacer sequence ATCN PAM
ugaccucaagugauccgccc

SEQ ID NO: 6699 - RNA, 20 nt, Artificial Sequence
  HTT spacer sequence ATCN PAM
cuacuaaaaauauaaaaauu

SEQ ID NO: 6700 - RNA, 20 nt, Artificial Sequence
  HTT spacer sequence ATCN PAM
cagcuacucaggagacugag

SEQ ID NO: 6701 - RNA, 20 nt, Artificial Sequence
  HTT spacer sequence ATCN PAM
cuugaacccaggaggcgaag

SEQ ID NO: 6702 - RNA, 20 nt, Artificial Sequence
  HTT spacer sequence ATCN PAM
cggcuuacugcaaccuucgc

SEQ ID NO: 6703 - RNA, 20 nt, Artificial Sequence
  HTT spacer sequence ATCN PAM
cgccacugcacucuagccug

SEQ ID NO: 6704 - RNA, 20 nt, Artificial Sequence
  HTT spacer sequence ATCN PAM
auaacaccuaccuuuuuuuu

SEQ ID NO: 6705 - RNA, 20 nt, Artificial Sequence
  HTT spacer sequence ATCN PAM
gaacccuuguuucagauaac

SEQ ID NO: 6706 - RNA, 20 nt, Artificial Sequence
  HTT spacer sequence ATCN PAM
gaaacaaggguucugaucaa

SEQ ID NO: 6707 - RNA, 20 nt, Artificial Sequence
  HTT spacer sequence ATCN PAM
acccucacucuccucaagcu

SEQ ID NO: 6708 - RNA, 20 nt, Artificial Sequence
  HTT spacer sequence ATCN PAM
ucucccaccagcccgcugaa

SEQ ID NO: 6709 - RNA, 20 nt, Artificial Sequence
  HTT spacer sequence ATCN PAM
cccaccagcccgcugaaaua

SEQ ID NO: 6710 - RNA, 20 nt, Artificial Sequence
  HTT spacer sequence ATCN PAM
uauuucagcgggcugguggg

SEQ ID NO: 6711 - RNA, 20 nt, Artificial Sequence
  HTT spacer sequence ATCN PAM
ucuuauuucagcgggcuggu

SEQ ID NO: 6712 - RNA, 20 nt, Artificial Sequence
  HTT spacer sequence ATCN PAM
ucaggcaggaaagaaaggcc

SEQ ID NO: 6713 - RNA, 20 nt, Artificial Sequence
  HTT spacer sequence ATCN PAM
aacaauacugcguccuugga

SEQ ID NO: 6714 - RNA, 20 nt, Artificial Sequence
  HTT spacer sequence ATCN PAM
ugagagauaaggauucugcc

SEQ ID NO: 6715 - RNA, 20 nt, Artificial Sequence
  HTT spacer sequence ATCN PAM
cucaggaucaaacaauacug

SEQ ID NO: 6716 - RNA, 20 nt, Artificial Sequence
  HTT spacer sequence ATCN PAM
uuaucucucaggaucaaaca

SEQ ID NO: 6717 - RNA, 20 nt, Artificial Sequence
  HTT spacer sequence ATCN PAM
ggaauaccuucauucccugc

SEQ ID NO: 6718 - RNA, 20 nt, Artificial Sequence
  HTT spacer sequence ATCN PAM
gguuaugagacaguaacugc

SEQ ID NO: 6719 - RNA, 20 nt, Artificial Sequence
  HTT spacer sequence ATCN PAM
ucaggugugcucuggacggc

SEQ ID NO: 6720 - RNA, 20 nt, Artificial Sequence
  HTT spacer sequence ATCN PAM
ggaaggcagcuguaacaggc

SEQ ID NO: 6721 - RNA, 20 nt, Artificial Sequence
  HTT spacer sequence ATCN PAM
guuaugcuccccuaugcucc

SEQ ID NO: 6722 - RNA, 20 nt, Artificial Sequence
  HTT spacer sequence ATCN PAM
cuuaccucaccacaggaaag

SEQ ID NO: 6723 - RNA, 20 nt, Artificial Sequence
  HTT spacer sequence ATCN PAM
uagagcccccucugccuuug

SEQ ID NO: 6724 - RNA, 20 nt, Artificial Sequence
  HTT spacer sequence ATCN PAM
gcacaaaggcagagggggcu

SEQ ID NO: 6725 - RNA, 20 nt, Artificial Sequence
  HTT spacer sequence ATCN PAM
ugggguuccguuggguccuu

SEQ ID NO: 6726 - RNA, 20 nt, Artificial Sequence
  HTT spacer sequence ATCN PAM
gcucacggucuggccagcuc

SEQ ID NO: 6727 - RNA, 20 nt, Artificial Sequence
  HTT spacer sequence ATCN PAM
ugccacuugaacagcaucaa

SEQ ID NO: 6728 - RNA, 20 nt, Artificial Sequence
  HTT spacer sequence ATCN PAM
agccugccucuggauucuuc

SEQ ID NO: 6729 - RNA, 20 nt, Artificial Sequence
  HTT spacer sequence ATCN PAM
agaggcaggcuugaugcugu

SEQ ID NO: 6730 - RNA, 20 nt, Artificial Sequence
  HTT spacer sequence ATCN PAM
gagcugaaccucauugaacg

SEQ ID NO: 6731 - RNA, 20 nt, Artificial Sequence
  HTT spacer sequence ATCN PAM
ugaggcugcuggcacacccc

SEQ ID NO: 6732 - RNA, 20 nt, Artificial Sequence
  HTT spacer sequence ATCN PAM
gcucugcccucccacuuccu

SEQ ID NO: 6733 - RNA, 20 nt, Artificial Sequence
  HTT spacer sequence ATCN PAM
aguggcccucccaaaucugc

SEQ ID NO: 6734 - RNA, 20 nt, Artificial Sequence
  HTT spacer sequence ATCN PAM
gaguugagucaggacagaca

SEQ ID NO: 6735 - RNA, 20 nt, Artificial Sequence
  HTT spacer sequence ATCN PAM
uccgaguugagucaggacag

SEQ ID NO: 6736 - RNA, 20 nt, Artificial Sequence
  HTT spacer sequence ATCN PAM
ucucagguguggaagcuugg

SEQ ID NO: 6737 - RNA, 20 nt, Artificial Sequence
  HTT spacer sequence ATCN PAM
aagcuuccacaccugagaag

SEQ ID NO: 6738 - RNA, 20 nt, Artificial Sequence
  HTT spacer sequence ATCN PAM
ccucccgguuugggugacca

SEQ ID NO: 6739 - RNA, 20 nt, Artificial Sequence
  HTT spacer sequence ATCN PAM
cagggaaugcugugccaaaa

SEQ ID NO: 6740 - RNA, 20 nt, Artificial Sequence
  HTT spacer sequence ATCN PAM
ccguggaguuccuccaggaa

SEQ ID NO: 6741 - RNA, 20 nt, Artificial Sequence
  HTT spacer sequence ATCN PAM
accgcaucaacacacuaggu

SEQ ID NO: 6742 - RNA, 20 nt, Artificial Sequence
  HTT spacer sequence ATCN PAM
acacacuagguacucuuggg

SEQ ID NO: 6743 - RNA, 20 nt, Artificial Sequence
  HTT spacer sequence ATCN PAM
accgggaggaaauccagagc

SEQ ID NO: 6744 - RNA, 20 nt, Artificial Sequence
  HTT spacer sequence ATCN PAM
agagcccccaguacugggau

SEQ ID NO: 6745 - RNA, 20 nt, Artificial Sequence
  HTT spacer sequence ATCN PAM
caguacugggggcucuggau

SEQ ID NO: 6746 - RNA, 20 nt, Artificial Sequence
  HTT spacer sequence ATCN PAM
ucucauuugacuccagaaaa

SEQ ID NO: 6747 - RNA, 20 nt, Artificial Sequence
  HTT spacer sequence ATCN PAM
uuucuggagucaaaugagaa

SEQ ID NO: 6748 - RNA, 20 nt, Artificial Sequence
  HTT spacer sequence ATCN PAM
ugcuuaaaucuuuucuggag

SEQ ID NO: 6749 - RNA, 20 nt, Artificial Sequence
  HTT spacer sequence ATCN PAM
auuuucucaguauaaaagga

SEQ ID NO: 6750 - RNA, 20 nt, Artificial Sequence
  HTT spacer sequence ATCN PAM
caguuccuguguuuuguggc

SEQ ID NO: 6751 - RNA, 20 nt, Artificial Sequence
  HTT spacer sequence ATCN PAM
cagcuuuguguauuccgggc

SEQ ID NO: 6752 - RNA, 20 nt, Artificial Sequence
  HTT spacer sequence ATCN PAM
aaggcagaauuuggucucac

SEQ ID NO: 6753 - RNA, 20 nt, Artificial Sequence
  HTT spacer sequence ATCN PAM
gacuggugaacacaagaaaa

SEQ ID NO: 6754 - RNA, 20 nt, Artificial Sequence
  HTT spacer sequence ATCN PAM
uguugugucucaguggucca

SEQ ID NO: 6755 - RNA, 20 nt, Artificial Sequence
  HTT spacer sequence ATCN PAM
gcucccgucugcuuguuccc

SEQ ID NO: 6756 - RNA, 20 nt, Artificial Sequence
  HTT spacer sequence ATCN PAM
gcaacaauucuaugaaauag

SEQ ID NO: 6757 - RNA, 20 nt, Artificial Sequence
  HTT spacer sequence ATCN PAM
aauaggggcaaaagugguga

SEQ ID NO: 6758 - RNA, 20 nt, Artificial Sequence
  HTT spacer sequence ATCN PAM
caccucuugccaucaaauag

SEQ ID NO: 6759 - RNA, 20 nt, Artificial Sequence
  HTT spacer sequence ATCN PAM
uguggugggacuguaaucag

SEQ ID NO: 6760 - RNA, 20 nt, Artificial Sequence
  HTT spacer sequence ATCN PAM
gucaguucucagugacugug

SEQ ID NO: 6761 - RNA, 20 nt, Artificial Sequence
  HTT spacer sequence ATCN PAM
gcagaagcccgagggacugg

SEQ ID NO: 6762 - RNA, 20 nt, Artificial Sequence
  HTT spacer sequence ATCN PAM
aaacaagccucaaaucugca

SEQ ID NO: 6763 - RNA, 20 nt, Artificial Sequence
  HTT spacer sequence ATCN PAM
cagaagguuguggcaggaga

SEQ ID NO: 6764 - RNA, 20 nt, Artificial Sequence
  HTT spacer sequence ATCN PAM
ucacagccaggaagaggagg

SEQ ID NO: 6765 - RNA, 20 nt, Artificial Sequence
  HTT spacer sequence ATCN PAM
guaucaguggccuccugcuc

SEQ ID NO: 6766 - RNA, 20 nt, Artificial Sequence
  HTT spacer sequence ATCN PAM
guggccuccugcucucuccc

SEQ ID NO: 6767 - RNA, 20 nt, Artificial Sequence
  HTT spacer sequence ATCN PAM
gacgugcgugacccaagacu

SEQ ID NO: 6768 - RNA, 20 nt, Artificial Sequence
  HTT spacer sequence ATCN PAM
gugucugaaucaguccugca

SEQ ID NO: 6769 - RNA, 20 nt, Artificial Sequence
  HTT spacer sequence ATCN PAM
guccugcacgcucuccuucu

SEQ ID NO: 6770 - RNA, 20 nt, Artificial Sequence
  HTT spacer sequence ATCN PAM
cggggaccccgauguccauu

SEQ ID NO: 6771 - RNA, 20 nt, Artificial Sequence
  HTT spacer sequence ATCN PAM
ggguccccgugauaaacggg

SEQ ID NO: 6772 - RNA, 20 nt, Artificial Sequence
  HTT spacer sequence ATCN PAM
cgucucucuggccuuaccac

SEQ ID NO: 6773 - RNA, 20 nt, Artificial Sequence
  HTT spacer sequence ATCN PAM
ugauggggacaugaagcaca

SEQ ID NO: 6774 - RNA, 20 nt, Artificial Sequence
  HTT spacer sequence ATCN PAM
ugaugucugaggcagccacg

SEQ ID NO: 6775 - RNA, 20 nt, Artificial Sequence
  HTT spacer sequence ATCN PAM
aacgaacaguuguuucugac

SEQ ID NO: 6776 - RNA, 20 nt, Artificial Sequence
  HTT spacer sequence ATCN PAM
auagggauggagggucuguc

SEQ ID NO: 6777 - RNA, 20 nt, Artificial Sequence
  HTT spacer sequence ATCN PAM
cuauugaugagcugcauucg

SEQ ID NO: 6778 - RNA, 20 nt, Artificial Sequence
  HTT spacer sequence ATCN PAM
gacagacccuccaucccuau

SEQ ID NO: 6779 - RNA, 20 nt, Artificial Sequence
  HTT spacer sequence ATCN PAM
ccguuccuaccuugauacac

SEQ ID NO: 6780 - RNA, 20 nt, Artificial Sequence
  HTT spacer sequence ATCN PAM
agguaggaacggggauucag

SEQ ID NO: 6781 - RNA, 20 nt, Artificial Sequence
  HTT spacer sequence ATCN PAM
auucuucuagacaggucaga

SEQ ID NO: 6782 - RNA, 20 nt, Artificial Sequence
  HTT spacer sequence ATCN PAM
guaguaugugaauucuaccu

SEQ ID NO: 6783 - RNA, 20 nt, Artificial Sequence
  HTT spacer sequence ATCN PAM
acagaguugugcagccagcu

SEQ ID NO: 6784 - RNA, 20 nt, Artificial Sequence
  HTT spacer sequence ATCN PAM
ucccuggaguccagcccuga

SEQ ID NO: 6785 - RNA, 20 nt, Artificial Sequence
  HTT spacer sequence ATCN PAM
gcugcacuguccgagacaca

SEQ ID NO: 6786 - RNA, 20 nt, Artificial Sequence
  HTT spacer sequence ATCN PAM
uugaggaaaccgaaguauag

SEQ ID NO: 6787 - RNA, 20 nt, Artificial Sequence
  HTT spacer sequence ATCN PAM
ccuccauuucaucauugagg

SEQ ID NO: 6788 - RNA, 20 nt, Artificial Sequence
  HTT spacer sequence ATCN PAM
uagaacugugugagguuuaa

SEQ ID NO: 6789 - RNA, 20 nt, Artificial Sequence
  HTT spacer sequence ATCN PAM
cgaggggcugcgucaccagg

SEQ ID NO: 6790 - RNA, 20 nt, Artificial Sequence
  HTT spacer sequence ATCN PAM
gucaagacaccauucagcua

SEQ ID NO: 6791 - RNA, 20 nt, Artificial Sequence
  HTT spacer sequence ATCN PAM
cagcccccagaccucagcag

SEQ ID NO: 6792 - RNA, 20 nt, Artificial Sequence
  HTT spacer sequence ATCN PAM
uuaacauggaaugcaccgua

SEQ ID NO: 6793 - RNA, 20 nt, Artificial Sequence
  HTT spacer sequence ATCN PAM
auacgauugugcccuuucug

SEQ ID NO: 6794 - RNA, 20 nt, Artificial Sequence
  HTT spacer sequence ATCN PAM
uauugauccuuaacauggaa

SEQ ID NO: 6795 - RNA, 20 nt, Artificial Sequence
  HTT spacer sequence ATCN PAM
uuuaguuuaucaauauucag

SEQ ID NO: 6796 - RNA, 20 nt, Artificial Sequence
  HTT spacer sequence ATCN PAM
auauucagaggaguguaggu

SEQ ID NO: 6797 - RNA, 20 nt, Artificial Sequence
  HTT spacer sequence ATCN PAM
cugcaagacauuagaaaaau

SEQ ID NO: 6798 - RNA, 20 nt, Artificial Sequence
  HTT spacer sequence ATCN PAM
ggcuucuugaaguguucacg

SEQ ID NO: 6799 - RNA, 20 nt, Artificial Sequence
  HTT spacer sequence ATCN PAM
uguuagcguaauguacguga

SEQ ID NO: 6800 - RNA, 20 nt, Artificial Sequence
  HTT spacer sequence ATCN PAM
agggccugcauuccacaacu

SEQ ID NO: 6801 - RNA, 20 nt, Artificial Sequence
  HTT spacer sequence ATCN PAM
gaaucaagggccugcauucc

SEQ ID NO: 6802 - RNA, 20 nt, Artificial Sequence
  HTT spacer sequence ATCN PAM
agauugucuuuaaauucaug

SEQ ID NO: 6803 - RNA, 20 nt, Artificial Sequence
  HTT spacer sequence ATCN PAM
ugaugacuugugacauaugu

SEQ ID NO: 6804 - RNA, 20 nt, Artificial Sequence
  HTT spacer sequence ATCN PAM
uugaauucccucauacauuu

SEQ ID NO: 6805 - RNA, 20 nt, Artificial Sequence
  HTT spacer sequence ATCN PAM
aggacuccuuugggcacaaa

SEQ ID NO: 6806 - RNA, 20 nt, Artificial Sequence
  HTT spacer sequence ATCN PAM
gauuguuucagggcccgugu

SEQ ID NO: 6807 - RNA, 20 nt, Artificial Sequence
  HTT spacer sequence ATCN PAM
gaugggcaaaagcccauuuu

SEQ ID NO: 6808 - RNA, 20 nt, Artificial Sequence
  HTT spacer sequence ATCN PAM
uuugguagcacuuaaggcuc

SEQ ID NO: 6809 - RNA, 20 nt, Artificial Sequence
  HTT spacer sequence ATCN PAM
ggguccucucugugucuucc

SEQ ID NO: 6810 - RNA, 20 nt, Artificial Sequence
  HTT spacer sequence ATCN PAM
acguccuggccgugcaggcc

SEQ ID NO: 6811 - RNA, 20 nt, Artificial Sequence
  HTT spacer sequence ATCN PAM
ccucacuggugcucagugca

SEQ ID NO: 6812 - RNA, 20 nt, Artificial Sequence
  HTT spacer sequence ATCN PAM
ccugcacaggccacacggac

SEQ ID NO: 6813 - RNA, 20 nt, Artificial Sequence
  HTT spacer sequence ATCN PAM
uacaagugaaaaacaccaga

SEQ ID NO: 6814 - RNA, 20 nt, Artificial Sequence
  HTT spacer sequence ATCN PAM
gagggauuguggagcaagag

SEQ ID NO: 6815 - RNA, 20 nt, Artificial Sequence
  HTT spacer sequence ATCN PAM
cucugauaaugcucagcuuc

SEQ ID NO: 6816 - RNA, 20 nt, Artificial Sequence
  HTT spacer sequence ATCN PAM
cuugcuccacaaucccucug

SEQ ID NO: 6817 - RNA, 20 nt, Artificial Sequence
  HTT spacer sequence ATCN PAM
uuuauaucaggcaugggauc

SEQ ID NO: 6818 - RNA, 20 nt, Artificial Sequence
  HTT spacer sequence ATCN PAM
ggcaugggauccugucccuu

SEQ ID NO: 6819 - RNA, 20 nt, Artificial Sequence
  HTT spacer sequence ATCN PAM
caugccugauauaaaugaug

SEQ ID NO: 6820 - RNA, 20 nt, Artificial Sequence
  HTT spacer sequence ATCN PAM
ugucccuucucugucuccgg

SEQ ID NO: 6821 - RNA, 20 nt, Artificial Sequence
  HTT spacer sequence ATCN PAM
cugguguggugagcaugcca

SEQ ID NO: 6822 - RNA, 20 nt, Artificial Sequence
  HTT spacer sequence ATCN PAM
ggaaaugaaugagaagcauu

SEQ ID NO: 6823 - RNA, 20 nt, Artificial Sequence
  HTT spacer sequence ATCN PAM
ugcuggucuuacagcccgug

SEQ ID NO: 6824 - RNA, 20 nt, Artificial Sequence
  HTT spacer sequence ATCN PAM
acacaagcugaaucuccagc

SEQ ID NO: 6825 - RNA, 20 nt, Artificial Sequence
  HTT spacer sequence ATCN PAM
ccagcuuuuccuaagaaacc

SEQ ID NO: 6826 - RNA, 20 nt, Artificial Sequence
  HTT spacer sequence ATCN PAM
caggcaucggagcuugucac

SEQ ID NO: 6827 - RNA, 20 nt, Artificial Sequence
  HTT spacer sequence ATCN PAM
gagcuugucaccugguuuaa

SEQ ID NO: 6828 - RNA, 20 nt, Artificial Sequence
  HTT spacer sequence ATCN PAM
ccacacaacucucuucuuuu

SEQ ID NO: 6829 - RNA, 20 nt, Artificial Sequence
  HTT spacer sequence ATCN PAM
caaauccccacacaacucuc

SEQ ID NO: 6830 - RNA, 20 nt, Artificial Sequence
  HTT spacer sequence ATCN PAM
cagagcucuacgcuaaaaua

SEQ ID NO: 6831 - RNA, 20 nt, Artificial Sequence
  HTT spacer sequence ATCN PAM
auggcccuccaagugcucag

SEQ ID NO: 6832 - RNA, 20 nt, Artificial Sequence
  HTT spacer sequence ATCN PAM
agccuucaaggagcucauaa

SEQ ID NO: 6833 - RNA, 20 nt, Artificial Sequence
  HTT spacer sequence ATCN PAM
acuugccuccuccaaagggg

SEQ ID NO: 6834 - RNA, 20 nt, Artificial Sequence
  HTT spacer sequence ATCN PAM
ggggucuggcagaggguuag

SEQ ID NO: 6835 - RNA, 20 nt, Artificial Sequence
  HTT spacer sequence ATCN PAM
ccccaauucccgggcaccag

SEQ ID NO: 6836 - RNA, 20 nt, Artificial Sequence
  HTT spacer sequence ATCN PAM
ugcucccgcuccugccggcu

SEQ ID NO: 6837 - RNA, 20 nt, Artificial Sequence
  HTT spacer sequence ATCN PAM
ggucagccugggcaccgagg

SEQ ID NO: 6838 - RNA, 20 nt, Artificial Sequence
  HTT spacer sequence ATCN PAM
gggucccccagagagcuugc

SEQ ID NO: 6839 - RNA, 20 nt, Artificial Sequence
  HTT spacer sequence ATCN PAM
ccaagacccacagggcucug

SEQ ID NO: 6840 - RNA, 20 nt, Artificial Sequence
  HTT spacer sequence ATCN PAM
gcacaggggggcagggccgc

SEQ ID NO: 6841 - RNA, 20 nt, Artificial Sequence
  HTT spacer sequence ATCN PAM
agacucagggugcugguguu

SEQ ID NO: 6842 - RNA, 20 nt, Artificial Sequence
  HTT spacer sequence ATCN PAM
gccacgagaagcugcugcua

SEQ ID NO: 6843 - RNA, 20 nt, Artificial Sequence
  HTT spacer sequence ATCN PAM
guagcagcagcuucucgugg

SEQ ID NO: 6844 - RNA, 20 nt, Artificial Sequence
  HTT spacer sequence ATCN PAM
accccgagcgggagcugggg

SEQ ID NO: 6845 - RNA, 20 nt, Artificial Sequence
  HTT spacer sequence ATCN PAM
guuuuauuccuaggucccgc

SEQ ID NO: 6846 - RNA, 20 nt, Artificial Sequence
  HTT spacer sequence ATCN PAM
cuacaugugaggucucuuaa

SEQ ID NO: 6847 - RNA, 20 nt, Artificial Sequence
  HTT spacer sequence ATCN PAM
cuaucgcuacaugugagguc

SEQ ID NO: 6848 - RNA, 20 nt, Artificial Sequence
  HTT spacer sequence ATCN PAM
gaggaggaaacagaagcaca

SEQ ID NO: 6849 - RNA, 20 nt, Artificial Sequence
  HTT spacer sequence ATCN PAM
cuucacuuaucugaggagga

SEQ ID NO: 6850 - RNA, 20 nt, Artificial Sequence
  HTT spacer sequence ATCN PAM
auaacauuuuaggaggcuga

SEQ ID NO: 6851 - RNA, 20 nt, Artificial Sequence
  HTT spacer sequence ATCN PAM
uggcucacugcagccucaac

SEQ ID NO: 6852 - RNA, 20 nt, Artificial Sequence
  HTT spacer sequence ATCN PAM
uaugcaaauggcccuacguu

SEQ ID NO: 6853 - RNA, 20 nt, Artificial Sequence
  HTT spacer sequence ATCN PAM
ggaacccggugagcgaaaga

SEQ ID NO: 6854 - RNA, 20 nt, Artificial Sequence
  HTT spacer sequence ATCN PAM
caggguuucugcugugaagg

SEQ ID NO: 6855 - RNA, 20 nt, Artificial Sequence
  HTT spacer sequence ATCN PAM
gucaaaggugaaaggacaga

SEQ ID NO: 6856 - RNA, 20 nt, Artificial Sequence
  HTT spacer sequence ATCN PAM
ugggguggaaacaucuguca

SEQ ID NO: 6857 - RNA, 20 nt, Artificial Sequence
  HTT spacer sequence ATCN PAM
uauuggucauuuucacuuau

SEQ ID NO: 6858 - RNA, 20 nt, Artificial Sequence
  HTT spacer sequence ATCN PAM
ccccaaccccgcugcauuug

SEQ ID NO: 6859 - RNA, 20 nt, Artificial Sequence
  HTT spacer sequence ATCN PAM
uucaauguuugcguuguguc

SEQ ID NO: 6860 - RNA, 20 nt, Artificial Sequence
  HTT spacer sequence ATCN PAM
caugacaguugguuugcgga

SEQ ID NO: 6861 - RNA, 20 nt, Artificial Sequence
  HTT spacer sequence ATCN PAM
uacuggggcugaaguacggu

SEQ ID NO: 6862 - RNA, 20 nt, Artificial Sequence
  HTT spacer sequence ATCN PAM
cagacagggcagggguggca

SEQ ID NO: 6863 - RNA, 20 nt, Artificial Sequence
  HTT spacer sequence ATCN PAM
aggggcuaaacaucccagac

SEQ ID NO: 6864 - RNA, 20 nt, Artificial Sequence
  HTT spacer sequence ATCN PAM
cuggcacuagccccaacuca

SEQ ID NO: 6865 - RNA, 20 nt, Artificial Sequence
  HTT spacer sequence ATCN PAM
ucacuggcacuagccccaac

SEQ ID NO: 6866 - RNA, 20 nt, Artificial Sequence
  HTT spacer sequence ATCN PAM
cgcagccaccacgcagucag

SEQ ID NO: 6867 - RNA, 20 nt, Artificial Sequence
  HTT spacer sequence ATCN PAM
agagcgcgggucacaaaggc

SEQ ID NO: 6868 - RNA, 20 nt, Artificial Sequence
  HTT spacer sequence ATCN PAM
cacguauugguuccguguuu

SEQ ID NO: 6869 - RNA, 20 nt, Artificial Sequence
  HTT spacer sequence ATCN PAM
gaauggaguccccaaaacac

SEQ ID NO: 6870 - RNA, 20 nt, Artificial Sequence
  HTT spacer sequence ATCN PAM
cuucguagagccucuuucug

SEQ ID NO: 6871 - RNA, 20 nt, Artificial Sequence
  HTT spacer sequence ATCN PAM
ggggccagucaaccccagga

SEQ ID NO: 6872 - RNA, 20 nt, Artificial Sequence
  HTT spacer sequence ATCN PAM
caccccugagggaggaggaa

SEQ ID NO: 6873 - RNA, 20 nt, Artificial Sequence
  HTT spacer sequence ATCN PAM
gucauuugauuuguuugagg

SEQ ID NO: 6874 - RNA, 20 nt, Artificial Sequence
  HTT spacer sequence ATCN PAM
aaugacugauaagaaauuuc

SEQ ID NO: 6875 - RNA, 20 nt, Artificial Sequence
  HTT spacer sequence ATCN PAM
cauguacuuggaaaauaccc

SEQ ID NO: 6876 - RNA, 20 nt, Artificial Sequence
  HTT spacer sequence ATCN PAM
cgcauauuccacaggaaaca

SEQ ID NO: 6877 - RNA, 20 nt, Artificial Sequence
  HTT spacer sequence ATCN PAM
acuccuguucgcaguuuuug

SEQ ID NO: 6878 - RNA, 20 nt, Artificial Sequence
  HTT spacer sequence ATCN PAM
agcggcuguacaacucaagc

SEQ ID NO: 6879 - RNA, 20 nt, Artificial Sequence
  HTT spacer sequence ATCN PAM
ugccguccagcucagccagg

SEQ ID NO: 6880 - RNA, 20 nt, Artificial Sequence
  HTT spacer sequence ATCN PAM
ugaucagugagguggucaga

SEQ ID NO: 6881 - RNA, 20 nt, Artificial Sequence
  HTT spacer sequence ATCN PAM
ggauggccgggguccuccug

SEQ ID NO: 6882 - RNA, 20 nt, Artificial Sequence
  HTT spacer sequence ATCN PAM
gugagguggucagauccgua

SEQ ID NO: 6883 - RNA, 20 nt, Artificial Sequence
  HTT spacer sequence ATCN PAM
gaccaccucacugaucagga

SEQ ID NO: 6884 - RNA, 20 nt, Artificial Sequence
  HTT spacer sequence ATCN PAM
guaagugagccuucccauuc

SEQ ID NO: 6885 - RNA, 20 nt, Artificial Sequence
  HTT spacer sequence ATCN PAM
agaacgcuacuacuggcaag

SEQ ID NO: 6886 - RNA, 20 nt, Artificial Sequence
  HTT spacer sequence ATCN PAM
aggcaacgcauccagaacgc

SEQ ID NO: 6887 - RNA, 20 nt, Artificial Sequence
  HTT spacer sequence ATCN PAM
cgcuguuagaauccaggcaa

SEQ ID NO: 6888 - RNA, 20 nt, Artificial Sequence
  HTT spacer sequence ATCN PAM
ccagcuucuaguggucucag

SEQ ID NO: 6889 - RNA, 20 nt, Artificial Sequence
  HTT spacer sequence ATCN PAM
gcucaaacugguugcgcucg

SEQ ID NO: 6890 - RNA, 20 nt, Artificial Sequence
  HTT spacer sequence ATCN PAM
cgucuucugaagggugcacc

SEQ ID NO: 6891 - RNA, 20 nt, Artificial Sequence
  HTT spacer sequence ATCN PAM
ucgcucaguaccuggugccu

SEQ ID NO: 6892 - RNA, 20 nt, Artificial Sequence
  HTT spacer sequence ATCN PAM
caaggacggcagcugccuug

SEQ ID NO: 6893 - RNA, 20 nt, Artificial Sequence
  HTT spacer sequence ATCN PAM
gccuugggaccugguguugg

SEQ ID NO: 6894 - RNA, 20 nt, Artificial Sequence
  HTT spacer sequence ATCN PAM
gagaagcacugcagcucacg

SEQ ID NO: 6895 - RNA, 20 nt, Artificial Sequence
  HTT spacer sequence ATCN PAM
cagugaccugugaauggcac

SEQ ID NO: 6896 - RNA, 20 nt, Artificial Sequence
  HTT spacer sequence ATCN PAM
cugggcuuaugacaucauug

SEQ ID NO: 6897 - RNA, 20 nt, Artificial Sequence
  HTT spacer sequence ATCN PAM
uuguaguagcccauccccac

SEQ ID NO: 6898 - RNA, 20 nt, Artificial Sequence
  HTT spacer sequence ATCN PAM
ccacagaaccacggugugug

SEQ ID NO: 6899 - RNA, 20 nt, Artificial Sequence
  HTT spacer sequence ATCN PAM
uagaugguggaaaugcuacu

SEQ ID NO: 6900 - RNA, 20 nt, Artificial Sequence
  HTT spacer sequence ATCN PAM
acgaugccucagcgccacca

SEQ ID NO: 6901 - RNA, 20 nt, Artificial Sequence
  HTT spacer sequence ATCN PAM
gggugcuauagucucuuuuu

SEQ ID NO: 6902 - RNA, 20 nt, Artificial Sequence
  HTT spacer sequence ATCN PAM
gcuggcaccuugaccaugaa

SEQ ID NO: 6903 - RNA, 20 nt, Artificial Sequence
  HTT spacer sequence ATCN PAM
cacaccaaaucugcuggcac

SEQ ID NO: 6904 - RNA, 20 nt, Artificial Sequence
  HTT spacer sequence ATCN PAM
augaagcagagagcagcccu

SEQ ID NO: 6905 - RNA, 20 nt, Artificial Sequence
  HTT spacer sequence ATCN PAM
ucuggcuggguccucacggu

SEQ ID NO: 6906 - RNA, 20 nt, Artificial Sequence
  HTT spacer sequence ATCN PAM
acaagggcucucccaucaug

SEQ ID NO: 6907 - RNA, 20 nt, Artificial Sequence
  HTT spacer sequence ATCN PAM
ugaccucaucaccucccaag

SEQ ID NO: 6908 - RNA, 20 nt, Artificial Sequence
  HTT spacer sequence ATCN PAM
ccucccaaggccccaccuuc

SEQ ID NO: 6909 - RNA, 20 nt, Artificial Sequence
  HTT spacer sequence ATCN PAM
cuccugaaacuccuacacug

SEQ ID NO: 6910 - RNA, 20 nt, Artificial Sequence
  HTT spacer sequence ATCN PAM
cagcggucaaguguucaucc

SEQ ID NO: 6911 - RNA, 20 nt, Artificial Sequence
  HTT spacer sequence ATCN PAM
ucuugaguuccuccuuauuc

SEQ ID NO: 6912 - RNA, 20 nt, Artificial Sequence
  HTT spacer sequence ATCN PAM
ggauucagccagugcagcau

SEQ ID NO: 6913 - RNA, 20 nt, Artificial Sequence
  HTT spacer sequence ATCN PAM
ugauaaaccagaagcagaau

SEQ ID NO: 6914 - RNA, 20 nt, Artificial Sequence
  HTT spacer sequence ATCN PAM
ccacaugguauuugccaagu

SEQ ID NO: 6915 - RNA, 20 nt, Artificial Sequence
  HTT spacer sequence ATCN PAM
aucaccugcacacgugaaau

SEQ ID NO: 6916 - RNA, 20 nt, Artificial Sequence
  HTT spacer sequence ATCN PAM
ccugcacacgugaaaucauu

SEQ ID NO: 6917 - RNA, 20 nt, Artificial Sequence
  HTT spacer sequence ATCN PAM
uugcccgugggucccgacau

SEQ ID NO: 6918 - RNA, 20 nt, Artificial Sequence
  HTT spacer sequence ATCN PAM
ggcgaagcauauucaaggau

SEQ ID NO: 6919 - RNA, 20 nt, Artificial Sequence
  HTT spacer sequence ATCN PAM
uugaauaugcuucgccagau

SEQ ID NO: 6920 - RNA, 20 nt, Artificial Sequence
  HTT spacer sequence ATCN PAM
auuuuaugauagcaauggaa

SEQ ID NO: 6921 - RNA, 20 nt, Artificial Sequence
  HTT spacer sequence ATCN PAM
uaaaauggauuacuagguaa

SEQ ID NO: 6922 - RNA, 20 nt, Artificial Sequence
  HTT spacer sequence ATCN PAM
gggccugccuagcccgugcu

SEQ ID NO: 6923 - RNA, 20 nt, Artificial Sequence
  HTT spacer sequence ATCN PAM
uucaccgucaugacagcauu

SEQ ID NO: 6924 - RNA, 20 nt, Artificial Sequence
  HTT spacer sequence ATCN PAM
cuccagccgcuaacauuugc

SEQ ID NO: 6925 - RNA, 20 nt, Artificial Sequence
  HTT spacer sequence ATCN PAM
ucccuuguggguguccuuca

SEQ ID NO: 6926 - RNA, 20 nt, Artificial Sequence
  HTT spacer sequence ATCN PAM
cucuucacggcgaacacccu

SEQ ID NO: 6927 - RNA, 20 nt, Artificial Sequence
  HTT spacer sequence ATCN PAM
ugugggcaacacccagaggg

SEQ ID NO: 6928 - RNA, 20 nt, Artificial Sequence
  HTT spacer sequence ATCN PAM
gggccugagcacaaaaccac

SEQ ID NO: 6929 - RNA, 20 nt, Artificial Sequence
  HTT spacer sequence ATCN PAM
cccuaggcaaguguugugcc

SEQ ID NO: 6930 - RNA, 20 nt, Artificial Sequence
  HTT spacer sequence ATCN PAM
guaaucaaaugagaaauaau

SEQ ID NO: 6931 - RNA, 20 nt, Artificial Sequence
  HTT spacer sequence ATCN PAM
aaugagaaauaaucauuuug

SEQ ID NO: 6932 - RNA, 20 nt, Artificial Sequence
  HTT spacer sequence ATCN PAM
uuuugaaaagcagauccuaa

SEQ ID NO: 6933 - RNA, 20 nt, Artificial Sequence
  HTT spacer sequence ATCN PAM
gcuuuucaaaaugauuauuu

SEQ ID NO: 6934 - RNA, 20 nt, Artificial Sequence
  HTT spacer sequence ATCN PAM
uaaggcaggauggucaugga

SEQ ID NO: 6935 - RNA, 20 nt, Artificial Sequence
  HTT spacer sequence ATCN PAM
ugccuuaggaucugcuuuuc

SEQ ID NO: 6936 - RNA, 20 nt, Artificial Sequence
  HTT spacer sequence ATCN PAM
uccagaaagcaugagugcac

SEQ ID NO: 6937 - RNA, 20 nt, Artificial Sequence
  HTT spacer sequence ATCN PAM
ucugugaagguuuucagcgc

SEQ ID NO: 6938 - RNA, 20 nt, Artificial Sequence
  HTT spacer sequence ATCN PAM
agagcaugucguuuugaggu

SEQ ID NO: 6939 - RNA, 20 nt, Artificial Sequence
  HTT spacer sequence ATCN PAM
gugccacccgagagcagguc

SEQ ID NO: 6940 - RNA, 20 nt, Artificial Sequence
  HTT spacer sequence ATCN PAM
ggaccugcucucggguggca

SEQ ID NO: 6941 - RNA, 20 nt, Artificial Sequence
  HTT spacer sequence ATCN PAM
ccucacacgcacaacgccac

SEQ ID NO: 6942 - RNA, 20 nt, Artificial Sequence
  HTT spacer sequence ATCN PAM
caggaacaaggaccaaaaga

SEQ ID NO: 6943 - RNA, 20 nt, Artificial Sequence
  HTT spacer sequence ATCN PAM
uuccacaaaaacaagaggcc

SEQ ID NO: 6944 - RNA, 20 nt, Artificial Sequence
  HTT spacer sequence ATCN PAM
agcgcuccaugggaauucug

SEQ ID NO: 6945 - RNA, 20 nt, Artificial Sequence
  HTT spacer sequence ATCN PAM
gcucuuuaacagugaggaga

SEQ ID NO: 6946 - RNA, 20 nt, Artificial Sequence
  HTT spacer sequence ATCN PAM
accuaaacacuuagcccacg

SEQ ID NO: 6947 - RNA, 20 nt, Artificial Sequence
  HTT spacer sequence ATCN PAM
aaaaccuagcaggguuaaau

SEQ ID NO: 6948 - RNA, 20 nt, Artificial Sequence
  HTT spacer sequence ATCN PAM
gggauccccaagacuacccc

SEQ ID NO: 6949 - RNA, 20 nt, Artificial Sequence
  HTT spacer sequence ATCN PAM
cugauagugguuucugucaa

SEQ ID NO: 6950 - RNA, 20 nt, Artificial Sequence
  HTT spacer sequence ATCN PAM
ccaagacuaccccaggcuuu

SEQ ID NO: 6951 - RNA, 20 nt, Artificial Sequence
  HTT spacer sequence ATCN PAM
uagcugagagucuuucuaga

SEQ ID NO: 6952 - RNA, 20 nt, Artificial Sequence
  HTT spacer sequence ATCN PAM
gcaaagaaaauuagcaaggg

SEQ ID NO: 6953 - RNA, 20 nt, Artificial Sequence
  HTT spacer sequence ATCN PAM
ccccaugggccucugcccuu

SEQ ID NO: 6954 - RNA, 20 nt, Artificial Sequence
  HTT spacer sequence ATCN PAM
ucucccagcggggucgugca

SEQ ID NO: 6955 - RNA, 20 nt, Artificial Sequence
  HTT spacer sequence ATCN PAM
ucacugaggaggggcucccu

SEQ ID NO: 6956 - RNA, 20 nt, Artificial Sequence
  HTT spacer sequence ATCN PAM
ugagaggccugugugcaagg

SEQ ID NO: 6957 - RNA, 20 nt, Artificial Sequence
  HTT spacer sequence ATCN PAM
cggucaucagcgacuaucuc

SEQ ID NO: 6958 - RNA, 20 nt, Artificial Sequence
  HTT spacer sequence ATCN PAM
gcgacuaucuccucuccaac

SEQ ID NO: 6959 - RNA, 20 nt, Artificial Sequence
  HTT spacer sequence ATCN PAM
ccucuccaaccugaaaggga

SEQ ID NO: 6960 - RNA, 20 nt, Artificial Sequence
  HTT spacer sequence ATCN PAM
cuuucagguuggagaggaga

SEQ ID NO: 6961 - RNA, 20 nt, Artificial Sequence
  HTT spacer sequence ATCN PAM
cccagugagugggagccugg

SEQ ID NO: 6962 - RNA, 20 nt, Artificial Sequence
  HTT spacer sequence ATCN PAM
cccucuccaagugcccaggc

SEQ ID NO: 6963 - RNA, 20 nt, Artificial Sequence
  HTT spacer sequence ATCN PAM
ggccaggagccugggcacuu

SEQ ID NO: 6964 - RNA, 20 nt, Artificial Sequence
  HTT spacer sequence ATCN PAM
gugggaacccaggugggugc

SEQ ID NO: 6965 - RNA, 20 nt, Artificial Sequence
  HTT spacer sequence ATCN PAM
gcucucauucucugcuccca

SEQ ID NO: 6966 - RNA, 20 nt, Artificial Sequence
  HTT spacer sequence ATCN PAM
caguggaaacaagagggagg

SEQ ID NO: 6967 - RNA, 20 nt, Artificial Sequence
  HTT spacer sequence ATCN PAM
uaaagcugcuggacggcagg

SEQ ID NO: 6968 - RNA, 20 nt, Artificial Sequence
  HTT spacer sequence ATCN PAM
cugugaagagcuugacuugc

SEQ ID NO: 6969 - RNA, 20 nt, Artificial Sequence
  HTT spacer sequence ATCN PAM
cugcuaaagccucugcgacu

SEQ ID NO: 6970 - RNA, 20 nt, Artificial Sequence
  HTT spacer sequence ATCN PAM
gccacccacaugggggaguu

SEQ ID NO: 6971 - RNA, 20 nt, Artificial Sequence
  HTT spacer sequence ATCN PAM
uugcuccuaauucuugcccu

SEQ ID NO: 6972 - RNA, 20 nt, Artificial Sequence
  HTT spacer sequence ATCN PAM
cuggccauuccucccagacc

SEQ ID NO: 6973 - RNA, 20 nt, Artificial Sequence
  HTT spacer sequence ATCN PAM
ccuuugacaagugggcagga

SEQ ID NO: 6974 - RNA, 20 nt, Artificial Sequence
  HTT spacer sequence ATCN PAM
ugccagacggccaccggcau

SEQ ID NO: 6975 - RNA, 20 nt, Artificial Sequence
  HTT spacer sequence ATCN PAM
ggggccauugcccucaucca

SEQ ID NO: 6976 - RNA, 20 nt, Artificial Sequence
  HTT spacer sequence ATCN PAM
aggccagagugucacaagcc

SEQ ID NO: 6977 - RNA, 20 nt, Artificial Sequence
  HTT spacer sequence ATCN PAM
uugcugggcagugggugcug

SEQ ID NO: 6978 - RNA, 20 nt, Artificial Sequence
  HTT spacer sequence ATCN PAM
cuggagccuggcauagggcc

SEQ ID NO: 6979 - RNA, 20 nt, Artificial Sequence
  HTT spacer sequence ATCN PAM
ggcacauauguuggugcagu

SEQ ID NO: 6980 - RNA, 20 nt, Artificial Sequence
  HTT spacer sequence ATCN PAM
cgucacugcaccaacauaug

SEQ ID NO: 6981 - RNA, 20 nt, Artificial Sequence
  HTT spacer sequence ATCN PAM
caaacgcaacuccuggacca

SEQ ID NO: 6982 - RNA, 20 nt, Artificial Sequence
  HTT spacer sequence ATCN PAM
agguagaaauggugcguggg

SEQ ID NO: 6983 - RNA, 20 nt, Artificial Sequence
  HTT spacer sequence ATCN PAM
gucaccacguggucccaccu

SEQ ID NO: 6984 - RNA, 20 nt, Artificial Sequence
  HTT spacer sequence ATCN PAM
cugggcacguuuuugugggu

SEQ ID NO: 6985 - RNA, 20 nt, Artificial Sequence
  HTT spacer sequence ATCN PAM
uauuggcuccucuguucaca

SEQ ID NO: 6986 - RNA, 20 nt, Artificial Sequence
  HTT spacer sequence ATCN PAM
cccgacagcgccggccuucc

SEQ ID NO: 6987 - RNA, 20 nt, Artificial Sequence
  HTT spacer sequence ATCN PAM
cagaaggcagcacgucauga

SEQ ID NO: 6988 - RNA, 20 nt, Artificial Sequence
  HTT spacer sequence ATCN PAM
ugacgugcugccuucuguga

SEQ ID NO: 6989 - RNA, 20 nt, Artificial Sequence
  HTT spacer sequence ATCN PAM
agggccucguugagggacag

SEQ ID NO: 6990 - RNA, 20 nt, Artificial Sequence
  HTT spacer sequence ATCN PAM
aacguggagagggcuucaca

SEQ ID NO: 6991 - RNA, 20 nt, Artificial Sequence
  HTT spacer sequence ATCN PAM
aggcucagccacccccaucc

SEQ ID NO: 6992 - RNA, 20 nt, Artificial Sequence
  HTT spacer sequence ATCN PAM
ucuggacguagggccggaau

SEQ ID NO: 6993 - RNA, 20 nt, Artificial Sequence
  HTT spacer sequence ATCN PAM
auaauacaggugagugggcc

SEQ ID NO: 6994 - RNA, 20 nt, Artificial Sequence
  HTT spacer sequence ATCN PAM
ugcaaggaaaagagaaggga

SEQ ID NO: 6995 - RNA, 20 nt, Artificial Sequence
  HTT spacer sequence ATCN PAM
uaccagugggccaguuuuga

SEQ ID NO: 6996 - RNA, 20 nt, Artificial Sequence
  HTT spacer sequence ATCN PAM
cugcacagucucagguguuc

SEQ ID NO: 6997 - RNA, 20 nt, Artificial Sequence
  HTT spacer sequence ATCN PAM
gcacagggagaaaggccucu

SEQ ID NO: 6998 - RNA, 20 nt, Artificial Sequence
  HTT spacer sequence ATCN PAM
ccccacacaucugcacaggg

SEQ ID NO: 6999 - RNA, 20 nt, Artificial Sequence
  HTT spacer sequence ATCN PAM
uuuaccacugugcccucaga

SEQ ID NO: 7000 - RNA, 20 nt, Artificial Sequence
  HTT spacer sequence ATCN PAM
aggcgggagagcugcucaga

SEQ ID NO: 7001 - RNA, 20 nt, Artificial Sequence
  HTT spacer sequence ATCN PAM
cuggucaagcugagugugga

SEQ ID NO: 7002 - RNA, 20 nt, Artificial Sequence
  HTT spacer sequence ATCN PAM
ggcccagagccgccauggcc

SEQ ID NO: 7003 - RNA, 20 nt, Artificial Sequence
  HTT spacer sequence ATCN PAM
gagggcaccuagucgagguc

SEQ ID NO: 7004 - RNA, 20 nt, Artificial Sequence
  HTT spacer sequence ATCN PAM
ccuugcaagaaaggcucugg

SEQ ID NO: 7005 - RNA, 20 nt, Artificial Sequence
  HTT spacer sequence ATCN PAM
cauguggcugagcugggcug

SEQ ID NO: 7006 - RNA, 20 nt, Artificial Sequence
  HTT spacer sequence ATCN PAM
gccccuugcuugcccaggac

SEQ ID NO: 7007 - RNA, 20 nt, Artificial Sequence
  HTT spacer sequence ATCN PAM
ccugcuuucagaucuccagg

SEQ ID NO: 7008 - RNA, 20 nt, Artificial Sequence
  HTT spacer sequence ATCN PAM
gaaagcaggugauaucagcc

SEQ ID NO: 7009 - RNA, 20 nt, Artificial Sequence
  HTT spacer sequence ATCN PAM
ccagggacucacuggacccc

SEQ ID NO: 7010 - RNA, 20 nt, Artificial Sequence
  HTT spacer sequence ATCN PAM
ugcagcccccgacagcgagu

SEQ ID NO: 7011 - RNA, 20 nt, Artificial Sequence
  HTT spacer sequence ATCN PAM
cugacucgcugucgggggcu

SEQ ID NO: 7012 - RNA, 20 nt, Artificial Sequence
  HTT spacer sequence ATCN PAM
guucuuuuugauagguaaga

SEQ ID NO: 7013 - RNA, 20 nt, Artificial Sequence
  HTT spacer sequence ATCN PAM
aaaagaacagauacccgcuc

SEQ ID NO: 7014 - RNA, 20 nt, Artificial Sequence
  HTT spacer sequence ATCN PAM
cucagccguuagcuucccua

SEQ ID NO: 7015 - RNA, 20 nt, Artificial Sequence
  HTT spacer sequence ATCN PAM
gcagacacacacaaaagcac

SEQ ID NO: 7016 - RNA, 20 nt, Artificial Sequence
  HTT spacer sequence ATCN PAM
ccuggcgcuguugcuggagu

SEQ ID NO: 7017 - RNA, 20 nt, Artificial Sequence
  HTT spacer sequence ATCN PAM
cuggcaggacuccagcaaca

SEQ ID NO: 7018 - RNA, 20 nt, Artificial Sequence
  HTT spacer sequence ATCN PAM
cuccugagggcucagggaca

SEQ ID NO: 7019 - RNA, 20 nt, Artificial Sequence
  HTT spacer sequence ATCN PAM
ugagaggggagcccacgggg

SEQ ID NO: 7020 - RNA, 20 nt, Artificial Sequence
  HTT spacer sequence ATCN PAM
uccugccgcugcuccucacc

SEQ ID NO: 7021 - RNA, 20 nt, Artificial Sequence
  HTT spacer sequence ATCN PAM
uugagacccguguggucagu

SEQ ID NO: 7022 - RNA, 20 nt, Artificial Sequence
  HTT spacer sequence ATCN PAM
ggggcccuuguccuugagaa

SEQ ID NO: 7023 - RNA, 20 nt, Artificial Sequence
  HTT spacer sequence ATCN PAM
accaugucgccaggacugag

SEQ ID NO: 7024 - RNA, 20 nt, Artificial Sequence
  HTT spacer sequence ATCN PAM
ggagccuuguugcacugccu

SEQ ID NO: 7025 - RNA, 20 nt, Artificial Sequence
  HTT spacer sequence ATCN PAM
ggguggccaguggggagcca

SEQ ID NO: 7026 - RNA, 20 nt, Artificial Sequence
  HTT spacer sequence ATCN PAM
ggucaaacaguggagcaagg

SEQ ID NO: 7027 - RNA, 20 nt, Artificial Sequence
  HTT spacer sequence ATCN PAM
acaugaaaacagaccagcac

SEQ ID NO: 7028 - RNA, 20 nt, Artificial Sequence
  HTT spacer sequence ATCN PAM
caaaaagaaaagaaaaaaaa

SEQ ID NO: 7029 - RNA, 20 nt, Artificial Sequence
  HTT spacer sequence ATCN PAM
caccauugcacuccagccug

SEQ ID NO: 7030 - RNA, 20 nt, Artificial Sequence
  HTT spacer sequence ATCN PAM
cggcucacugcaaccuccgc

SEQ ID NO: 7031 - RNA, 20 nt, Artificial Sequence
  HTT spacer sequence ATCN PAM
cuugaacccgggaggcggag

SEQ ID NO: 7032 - RNA, 20 nt, Artificial Sequence
  HTT spacer sequence ATCN PAM
cagcuacuagggaggcugag

SEQ ID NO: 7033 - RNA, 20 nt, Artificial Sequence
  HTT spacer sequence ATCN PAM
cuugaguucaggaguucgag

SEQ ID NO: 7034 - RNA, 20 nt, Artificial Sequence
  HTT spacer sequence ATCN PAM
acccuccuuggccucccaaa

SEQ ID NO: 7035 - RNA, 20 nt, Artificial Sequence
  HTT spacer sequence ATCN PAM
cagcacuuugggaggccaag

SEQ ID NO: 7036 - RNA, 20 nt, Artificial Sequence
  HTT spacer sequence ATCN PAM
acaugggggccgggcgcagu

SEQ ID NO: 7037 - RNA, 20 nt, Artificial Sequence
  HTT spacer sequence ATCN PAM
uucuucaguccccauaugcu

SEQ ID NO: 7038 - RNA, 20 nt, Artificial Sequence
  HTT spacer sequence ATCN PAM
guggucagcugcgaggugcc

SEQ ID NO: 7039 - RNA, 20 nt, Artificial Sequence
  HTT spacer sequence ATCN PAM
gugcacacaugccagccgug

SEQ ID NO: 7040 - RNA, 20 nt, Artificial Sequence
  HTT spacer sequence ATCN PAM
cguucccgucucaucagugc

SEQ ID NO: 7041 - RNA, 20 nt, Artificial Sequence
  HTT spacer sequence ATCN PAM
cuuucagugcugaaaagcaa

SEQ ID NO: 7042 - RNA, 20 nt, Artificial Sequence
  HTT spacer sequence ATCN PAM
ugaaacacgcccccugagca

SEQ ID NO: 7043 - RNA, 20 nt, Artificial Sequence
  HTT spacer sequence ATCN PAM
gguuagggaagaagcagcga

SEQ ID NO: 7044 - RNA, 20 nt, Artificial Sequence
  HTT spacer sequence ATCN PAM
gugcucucgcugcuucuucc

SEQ ID NO: 7045 - RNA, 20 nt, Artificial Sequence
  HTT spacer sequence ATCN PAM
cuauguguucuaacgcuucg

SEQ ID NO: 7046 - RNA, 20 nt, Artificial Sequence
  HTT spacer sequence ATCN PAM
uaacaaaagaacccguuccc

SEQ ID NO: 7047 - RNA, 20 nt, Artificial Sequence
  HTT spacer sequence ATCN PAM
cuuuuguaacauccuucccg

SEQ ID NO: 7048 - RNA, 20 nt, Artificial Sequence
  HTT spacer sequence ATCN PAM
uucccgcugcgccguuucug

SEQ ID NO: 7049 - RNA, 20 nt, Artificial Sequence
  HTT spacer sequence ATCN PAM
gggcugggagggacccucgg

SEQ ID NO: 7050 - RNA, 20 nt, Artificial Sequence
  HTT spacer sequence ATCN PAM
gcauuuuccccaguauuaga

SEQ ID NO: 7051 - RNA, 20 nt, Artificial Sequence
  HTT spacer sequence ATCN PAM
ugggaggagggacgcagguc

SEQ ID NO: 7052 - RNA, 20 nt, Artificial Sequence
  HTT spacer sequence ATCN PAM
ggaaaggcuuuccuugugaa

SEQ ID NO: 7053 - RNA, 20 nt, Artificial Sequence
  HTT spacer sequence ATCN PAM
uggccaccacucuggcuuca

SEQ ID NO: 7054 - RNA, 20 nt, Artificial Sequence
  HTT spacer sequence ATCN PAM
ugccccaguuucuagacgac

SEQ ID NO: 7055 - RNA, 20 nt, Artificial Sequence
  HTT spacer sequence ATCN PAM
ugaacaaagucaucggagag

SEQ ID NO: 7056 - RNA, 20 nt, Artificial Sequence
  HTT spacer sequence ATCN PAM
gagaguuucuguccaaccag

SEQ ID NO: 7057 - RNA, 20 nt, Artificial Sequence
  HTT spacer sequence ATCN PAM
cacaugcaaccucaccuuau

SEQ ID NO: 7058 - RNA, 20 nt, Artificial Sequence
  HTT spacer sequence ATCN PAM
ccaucccacaugcaaccuca

SEQ ID NO: 7059 - RNA, 20 nt, Artificial Sequence
  HTT spacer sequence ATCN PAM
gcugggaagucggaggcaac

SEQ ID NO: 7060 - RNA, 20 nt, Artificial Sequence
  HTT spacer sequence ATCN PAM
ccgcgacccacgggcuggug

SEQ ID NO: 7061 - RNA, 20 nt, Artificial Sequence
  HTT spacer sequence ATCN PAM
ucucugggucccuggugcug

SEQ ID NO: 7062 - RNA, 20 nt, Artificial Sequence
  HTT spacer sequence ATCN PAM
ugaaacaugagccucggugu

SEQ ID NO: 7063 - RNA, 20 nt, Artificial Sequence
  HTT spacer sequence ATCN PAM
gugggguuuuugcaaagguu

SEQ ID NO: 7064 - RNA, 20 nt, Artificial Sequence
  HTT spacer sequence ATCN PAM
aggcacaaugaccaaagcua

SEQ ID NO: 7065 - RNA, 20 nt, Artificial Sequence
  HTT spacer sequence ATCN PAM
cccucucggggaaaggcuua

SEQ ID NO: 7066 - RNA, 20 nt, Artificial Sequence
  HTT spacer sequence ATCN PAM
uuacuuaagccuuuccccga

SEQ ID NO: 7067 - RNA, 20 nt, Artificial Sequence
  HTT spacer sequence ATCN PAM
aguucccacccccagaugcu

SEQ ID NO: 7068 - RNA, 20 nt, Artificial Sequence
  HTT spacer sequence ATCN PAM
gggggugggaacuggaucuu

SEQ ID NO: 7069 - RNA, 20 nt, Artificial Sequence
  HTT spacer sequence ATCN PAM
agccagccaaggguugcagg

SEQ ID NO: 7070 - RNA, 20 nt, Artificial Sequence
  HTT spacer sequence ATCN PAM
gcgccuccaccuccauuccu

SEQ ID NO: 7071 - RNA, 20 nt, Artificial Sequence
  HTT spacer sequence ATCN PAM
agguggcccuuccggggcuc

SEQ ID NO: 7072 - RNA, 20 nt, Artificial Sequence
  HTT spacer sequence ATCN PAM
gcaggaugggcaagcuggag

SEQ ID NO: 7073 - RNA, 20 nt, Artificial Sequence
  HTT spacer sequence ATCN PAM
ugcugaugacaugugggagg

SEQ ID NO: 7074 - RNA, 20 nt, Artificial Sequence
  HTT spacer sequence ATCN PAM
ggugucuguagaagucugug

SEQ ID NO: 7075 - RNA, 20 nt, Artificial Sequence
  HTT spacer sequence ATCN PAM
ccggcugcugacuuguuuac

SEQ ID NO: 7076 - RNA, 20 nt, Artificial Sequence
  HTT spacer sequence ATCN PAM
ggagaaaggaccuggucacc

SEQ ID NO: 7077 - RNA, 20 nt, Artificial Sequence
  HTT spacer sequence ATCN PAM
gggccagaaguccucccucc

SEQ ID NO: 7078 - RNA, 20 nt, Artificial Sequence
  HTT spacer sequence ATCN PAM
agacacggggcguggcaugc

SEQ ID NO: 7079 - RNA, 20 nt, Artificial Sequence
  HTT spacer sequence ATCN PAM
gugcauccagacacggggcg

SEQ ID NO: 7080 - RNA, 20 nt, Artificial Sequence
  HTT spacer sequence ATCN PAM
ugagaagaaaagagagaagg

SEQ ID NO: 7081 - RNA, 20 nt, Artificial Sequence
  HTT spacer sequence ATCN PAM
guaaagagauuaauuuuaac

SEQ ID NO: 7082 - RNA, 20 nt, Artificial Sequence
  HTT spacer sequence ATCN PAM
cuuuacugauauaauuaaau

SEQ ID NO: 7083 - RNA, 20 nt, Artificial Sequence
  HTT spacer sequence ATCN PAM
caaggccugugcugcaugcg

SEQ ID NO: 7084 - RNA, 20 nt, Artificial Sequence
  HTT spacer sequence ATCN PAM
cagucaccuugugaaugcau

SEQ ID NO: 7085 - RNA, 20 nt, Artificial Sequence
  HTT spacer sequence ATCN PAM
uaggggugcgcucaccugca

SEQ ID NO: 7086 - RNA, 20 nt, Artificial Sequence
  HTT spacer sequence ATCN PAM
auggagcagcaggucccaac

SEQ ID NO: 7087 - RNA, 20 nt, Artificial Sequence
  HTT spacer sequence ATCN PAM
cuucugcccccguuccagcu

SEQ ID NO: 7088 - RNA, 20 nt, Artificial Sequence
  HTT spacer sequence ATCN PAM
ugcacggugaccccuuuuag

SEQ ID NO: 7089 - RNA, 20 nt, Artificial Sequence
  HTT spacer sequence ATCN PAM
gcacucuccugacuaaaagg

SEQ ID NO: 7090 - RNA, 20 nt, Artificial Sequence
  HTT spacer sequence ATCN PAM
gugcucaucggagacugccc

SEQ ID NO: 7091 - RNA, 20 nt, Artificial Sequence
  HTT spacer sequence ATCN PAM
gagacugccccacggcccug

SEQ ID NO: 7092 - RNA, 20 nt, Artificial Sequence
  HTT spacer sequence ATCN PAM
ccaggccaggucccuggacc

SEQ ID NO: 7093 - RNA, 20 nt, Artificial Sequence
  HTT spacer sequence ATCN PAM
acuuccauuuuaaugacuug

SEQ ID NO: 7094 - RNA, 20 nt, Artificial Sequence
  HTT spacer sequence ATCN PAM
agaauccacuuccauuuuaa

SEQ ID NO: 7095 - RNA, 20 nt, Artificial Sequence
  HTT spacer sequence ATCN PAM
gcagcagcccggccauccag

SEQ ID NO: 7096 - RNA, 20 nt, Artificial Sequence
  HTT spacer sequence ATCN PAM
agcuccuacaucagcagcag

SEQ ID NO: 7097 - RNA, 20 nt, Artificial Sequence
  HTT spacer sequence ATCN PAM
acgggcaugaccaaaccaag

SEQ ID NO: 7098 - RNA, 20 nt, Artificial Sequence
  HTT spacer sequence ATCN PAM
cagcugcuccccagcugcca

SEQ ID NO: 7099 - RNA, 20 nt, Artificial Sequence
  HTT spacer sequence ATCN PAM
gaccccuuucuaccgcuccu

SEQ ID NO: 7100 - RNA, 20 nt, Artificial Sequence
  HTT spacer sequence ATCN PAM
ccauuccguauugguugggg

SEQ ID NO: 7101 - RNA, 20 nt, Artificial Sequence
  HTT spacer sequence ATCN PAM
uagcuuuuuccuggaaagcc

SEQ ID NO: 7102 - RNA, 20 nt, Artificial Sequence
  HTT spacer sequence ATCN PAM
caggccagauguuguuccug

SEQ ID NO: 7103 - RNA, 20 nt, Artificial Sequence
  HTT spacer sequence ATCN PAM
ggccugugauacugcugucu

SEQ ID NO: 7104 - RNA, 20 nt, Artificial Sequence
  HTT spacer sequence ATCN PAM
agccaggaacaacaucuggc

SEQ ID NO: 7105 - RNA, 20 nt, Artificial Sequence
  HTT spacer sequence ATCN PAM
cugggcucaacauagaguuu

SEQ ID NO: 7106 - RNA, 20 nt, Artificial Sequence
  HTT spacer sequence ATCN PAM
cgucguaaacaagaggaaga

SEQ ID NO: 7107 - RNA, 20 nt, Artificial Sequence
  HTT spacer sequence ATCN PAM
aaaccaguccuuagcaaggg

SEQ ID NO: 7108 - RNA, 20 nt, Artificial Sequence
  HTT spacer sequence ATCN PAM
ccggagcacacaggcagguc

SEQ ID NO: 7109 - RNA, 20 nt, Artificial Sequence
  HTT spacer sequence ATCN PAM
augcaugugcauauagacac

SEQ ID NO: 7110 - RNA, 20 nt, Artificial Sequence
  HTT spacer sequence ATCN PAM
auaauuuuacacacacaccu

SEQ ID NO: 7111 - RNA, 20 nt, Artificial Sequence
  HTT spacer sequence ATCN PAM
ccgucuugagaggugugugu

SEQ ID NO: 7112 - RNA, 20 nt, Artificial Sequence
  HTT spacer sequence ATCN PAM
aggcgugggacguggucagg

SEQ ID NO: 7113 - RNA, 20 nt, Artificial Sequence
  HTT spacer sequence ATCN PAM
uagugggcaaugaaugagcc

SEQ ID NO: 7114 - RNA, 20 nt, Artificial Sequence
  HTT spacer sequence ATCN PAM
cacuggcgaagauggucucc

SEQ ID NO: 7115 - RNA, 20 nt, Artificial Sequence
  HTT spacer sequence ATCN PAM
ucgccagugggauccuagug

SEQ ID NO: 7116 - RNA, 20 nt, Artificial Sequence
  HTT spacer sequence ATCN PAM
gcucucugcagaagggagga

SEQ ID NO: 7117 - RNA, 20 nt, Artificial Sequence
  HTT spacer sequence ATCN PAM
uguuccuaaaaaucuguggc

SEQ ID NO: 7118 - RNA, 20 nt, Artificial Sequence
  HTT spacer sequence ATCN PAM
guggcaagcacccaucguau

SEQ ID NO: 7119 - RNA, 20 nt, Artificial Sequence
  HTT spacer sequence ATCN PAM
uauuauccaaauuuuguugc

SEQ ID NO: 7120 - RNA, 20 nt, Artificial Sequence
  HTT spacer sequence ATCN PAM
aaauuuuguugcaaauguga

SEQ ID NO: 7121 - RNA, 20 nt, Artificial Sequence
  HTT spacer sequence ATCN PAM
cauuugcaacaaaauuugga

SEQ ID NO: 7122 - RNA, 20 nt, Artificial Sequence
  HTT spacer sequence ATCN PAM
ccccacagcccacccccaaa

SEQ ID NO: 7123 - RNA, 20 nt, Artificial Sequence
  HTT spacer sequence ATCN PAM
ggaaagauuuuaaugaaacc

SEQ ID NO: 7124 - RNA, 20 nt, Artificial Sequence
  HTT spacer sequence ATCN PAM
uucccgauauuaccagcagg

SEQ ID NO: 7125 - RNA, 20 nt, Artificial Sequence
  HTT spacer sequence ATCN PAM
ccuacauagacucagcuggg

SEQ ID NO: 7126 - RNA, 20 nt, Artificial Sequence
  HTT spacer sequence ATCN PAM
gagaaggcccugugcccuaa

SEQ ID NO: 7127 - RNA, 20 nt, Artificial Sequence
  HTT spacer sequence ATCN PAM
ucauggagggggucauuuca

SEQ ID NO: 7128 - RNA, 20 nt, Artificial Sequence
  HTT spacer sequence ATCN PAM
cagcuccaagaggaggagcu

SEQ ID NO: 7129 - RNA, 20 nt, Artificial Sequence
  HTT spacer sequence ATCN PAM
gucccgagcuccacgugggg

SEQ ID NO: 7130 - RNA, 20 nt, Artificial Sequence
  HTT spacer sequence ATCN PAM
uucccagcagacauccucau

SEQ ID NO: 7131 - RNA, 20 nt, Artificial Sequence
  HTT spacer sequence ATCN PAM
ucaucgggcuuugucccucc

SEQ ID NO: 7132 - RNA, 20 nt, Artificial Sequence
  HTT spacer sequence ATCN PAM
ggcuuugucccucccccgcu

SEQ ID NO: 7133 - RNA, 20 nt, Artificial Sequence
  HTT spacer sequence ATCN PAM
uccuucuucucacuccuaca

SEQ ID NO: 7134 - RNA, 20 nt, Artificial Sequence
  HTT spacer sequence ATCN PAM
ugagagcugcugagggaccu

SEQ ID NO: 7135 - RNA, 20 nt, Artificial Sequence
  HTT spacer sequence ATCN PAM
ugagcucuccaaggucccuc

SEQ ID NO: 7136 - RNA, 20 nt, Artificial Sequence
  HTT spacer sequence ATCN PAM
gggugguaacugccagccuu

SEQ ID NO: 7137 - RNA, 20 nt, Artificial Sequence
  HTT spacer sequence ATCN PAM
uccaaggcuggcaguuacca

SEQ ID NO: 7138 - RNA, 20 nt, Artificial Sequence
  HTT spacer sequence ATCN PAM
uggccaacguggaccugccu

SEQ ID NO: 7139 - RNA, 20 nt, Artificial Sequence
  HTT spacer sequence ATCN PAM
cagcccugcuggcuccaggg

SEQ ID NO: 7140 - RNA, 20 nt, Artificial Sequence
  HTT spacer sequence ATCN PAM
cucgucaguccuucccuuug

SEQ ID NO: 7141 - RNA, 20 nt, Artificial Sequence
  HTT spacer sequence ATCN PAM
aaauuaaaggaaaaaaaugg

SEQ ID NO: 7142 - RNA, 20 nt, Artificial Sequence
  HTT spacer sequence ATCN PAM
guuguugcugugugaggcuu

SEQ ID NO: 7143 - RNA, 20 nt, Artificial Sequence
  HTT spacer sequence ATCN PAM
ggcauuauggaggguccccc

SEQ ID NO: 7144 - RNA, 20 nt, Artificial Sequence
  HTT spacer sequence ATCN PAM
cuggcuacagaaaacacggg

SEQ ID NO: 7145 - RNA, 20 nt, Artificial Sequence
  HTT spacer sequence ATCN PAM
gcagggcaggaagaccaccu

SEQ ID NO: 7146 - RNA, 20 nt, Artificial Sequence
  HTT spacer sequence ATCN PAM
uaagcuuauaugacauacac

SEQ ID NO: 7147 - RNA, 20 nt, Artificial Sequence
  HTT spacer sequence ATCN PAM
ggcccagcacagagacuaga

SEQ ID NO: 7148 - RNA, 20 nt, Artificial Sequence
  HTT spacer sequence ATCN PAM
caccucugguguggccgggg

SEQ ID NO: 7149 - RNA, 20 nt, Artificial Sequence
  HTT spacer sequence ATCN PAM
ccgcugggcugagcagaggc

SEQ ID NO: 7150 - RNA, 20 nt, Artificial Sequence
  HTT spacer sequence ATCN PAM
ccaaggcuuccgagaggcuc

SEQ ID NO: 7151 - RNA, 20 nt, Artificial Sequence
  HTT spacer sequence ATCN PAM
ugggaugcagaugucuuacc

SEQ ID NO: 7152 - RNA, 20 nt, Artificial Sequence
  HTT spacer sequence ATCN PAM
caagaugacuacaccaccaa

SEQ ID NO: 7153 - RNA, 20 nt, Artificial Sequence
  HTT spacer sequence ATCN PAM
gcaucccaagaugacuacac

SEQ ID NO: 7154 - RNA, 20 nt, Artificial Sequence
  HTT spacer sequence ATCN PAM
cugcucagagaaagggggcc

SEQ ID NO: 7155 - RNA, 20 nt, Artificial Sequence
  HTT spacer sequence ATCN PAM
cuaucccugcucagagaaag

SEQ ID NO: 7156 - RNA, 20 nt, Artificial Sequence
  HTT spacer sequence ATCN PAM
gucugccggagggauguggu

SEQ ID NO: 7157 - RNA, 20 nt, Artificial Sequence
  HTT spacer sequence ATCN PAM
cuccggcagacugaucccua

SEQ ID NO: 7158 - RNA, 20 nt, Artificial Sequence
  HTT spacer sequence ATCN PAM
gucuccucauaggugacacc

SEQ ID NO: 7159 - RNA, 20 nt, Artificial Sequence
  HTT spacer sequence ATCN PAM
gagagcacacccuguccccu

SEQ ID NO: 7160 - RNA, 20 nt, Artificial Sequence
  HTT spacer sequence ATCN PAM
aauaccaccgaaggcacagg

SEQ ID NO: 7161 - RNA, 20 nt, Artificial Sequence
  HTT spacer sequence ATCN PAM
caacaaagccaguagcagcc

SEQ ID NO: 7162 - RNA, 20 nt, Artificial Sequence
  HTT spacer sequence ATCN PAM
ggaagucgcuuccccugcgu

SEQ ID NO: 7163 - RNA, 20 nt, Artificial Sequence
  HTT spacer sequence ATCN PAM
gacuuacagugcuccacgca

SEQ ID NO: 7164 - RNA, 20 nt, Artificial Sequence
  HTT spacer sequence ATCN PAM
uguagaggcaaggccccccu

SEQ ID NO: 7165 - RNA, 20 nt, Artificial Sequence
  HTT spacer sequence ATCN PAM
uccgcgagcccacgagucug

SEQ ID NO: 7166 - RNA, 20 nt, Artificial Sequence
  HTT spacer sequence ATCN PAM
ccaggaccucuuuugggaaa

SEQ ID NO: 7167 - RNA, 20 nt, Artificial Sequence
  HTT spacer sequence ATCN PAM
cuugcgggucccccaggcuc

SEQ ID NO: 7168 - RNA, 20 nt, Artificial Sequence
  HTT spacer sequence ATCN PAM
ucugggggggcccgccagug

SEQ ID NO: 7169 - RNA, 20 nt, Artificial Sequence
  HTT spacer sequence ATCN PAM
cuggaggcagagggcugaag

SEQ ID NO: 7170 - RNA, 20 nt, Artificial Sequence
  HTT spacer sequence ATCN PAM
accucaggaccagccugucc

SEQ ID NO: 7171 - RNA, 20 nt, Artificial Sequence
  HTT spacer sequence ATCN PAM
uggccccuguacccucugga

SEQ ID NO: 7172 - RNA, 20 nt, Artificial Sequence
  HTT spacer sequence ATCN PAM
uuccccuccuggccccaauu

SEQ ID NO: 7173 - RNA, 20 nt, Artificial Sequence
  HTT spacer sequence ATCN PAM
cggggggccccugggcaggc

SEQ ID NO: 7174 - RNA, 20 nt, Artificial Sequence
  HTT spacer sequence ATCN PAM
ccacccaucugcacaggcug

SEQ ID NO: 7175 - RNA, 20 nt, Artificial Sequence
  HTT spacer sequence ATCN PAM
gcacaggcugugcucaccac

SEQ ID NO: 7176 - RNA, 20 nt, Artificial Sequence
  HTT spacer sequence ATCN PAM
acccagaaaugcugagcagg

SEQ ID NO: 7177 - RNA, 20 nt, Artificial Sequence
  HTT spacer sequence ATCN PAM
ugcucagcauuucugggugg

SEQ ID NO: 7178 - RNA, 20 nt, Artificial Sequence
  HTT spacer sequence ATCN PAM
cuucuaaauaaugaggcugg

SEQ ID NO: 7179 - RNA, 20 nt, Artificial Sequence
  HTT spacer sequence ATCN PAM
guccccugcuggggaggggc

SEQ ID NO: 7180 - RNA, 20 nt, Artificial Sequence
  HTT spacer sequence ATCN PAM
gcugccugccugguucuugu

SEQ ID NO: 7181 - RNA, 20 nt, Artificial Sequence
  HTT spacer sequence ATCN PAM
uccaggcagcauucccaggg

SEQ ID NO: 7182 - RNA, 20 nt, Artificial Sequence
  HTT spacer sequence ATCN PAM
accuuggagcugcuggggac

SEQ ID NO: 7183 - RNA, 20 nt, Artificial Sequence
  HTT spacer sequence ATCN PAM
cccagcauggugcuggcuaa

SEQ ID NO: 7184 - RNA, 20 nt, Artificial Sequence
  HTT spacer sequence ATCN PAM
gacuauaucacccagcaugg

SEQ ID NO: 7185 - RNA, 20 nt, Artificial Sequence
  HTT spacer sequence ATCN PAM
uguuaccccuguuguggagg

SEQ ID NO: 7186 - RNA, 20 nt, Artificial Sequence
  HTT spacer sequence ATCN PAM
cccggcacaagggguaagca

SEQ ID NO: 7187 - RNA, 20 nt, Artificial Sequence
  HTT spacer sequence ATCN PAM
cuuggcaucucccggcacaa

SEQ ID NO: 7188 - RNA, 20 nt, Artificial Sequence
  HTT spacer sequence ATCN PAM
gcaggcacuccacagagcuc

SEQ ID NO: 7189 - RNA, 20 nt, Artificial Sequence
  HTT spacer sequence ATCN PAM
ccacucgacuaaggucagcc

SEQ ID NO: 7190 - RNA, 20 nt, Artificial Sequence
  HTT spacer sequence ATCN PAM
cuacugccuggcacuggggc

SEQ ID NO: 7191 - RNA, 20 nt, Artificial Sequence
  HTT spacer sequence ATCN PAM
ucccuacugccuggcacugg

SEQ ID NO: 7192 - RNA, 20 nt, Artificial Sequence
  HTT spacer sequence ATCN PAM
gggccucaggagacaucauc

SEQ ID NO: 7193 - RNA, 20 nt, Artificial Sequence
  HTT spacer sequence ATCN PAM
gccccaugagacuaguccag

SEQ ID NO: 7194 - RNA, 20 nt, Artificial Sequence
  HTT spacer sequence ATCN PAM
cuggggcccuccccauacac

SEQ ID NO: 7195 - RNA, 20 nt, Artificial Sequence
  HTT spacer sequence ATCN PAM
ugacugcgggcaagagggag

SEQ ID NO: 7196 - RNA, 20 nt, Artificial Sequence
  HTT spacer sequence ATCN PAM
cggccucugcccgcugcccc

SEQ ID NO: 7197 - RNA, 20 nt, Artificial Sequence
  HTT spacer sequence ATCN PAM
gcacccgaaacguaacacau

SEQ ID NO: 7198 - RNA, 20 nt, Artificial Sequence
  HTT spacer sequence ATCN PAM
ggggcucucggcaggcugug

SEQ ID NO: 7199 - RNA, 20 nt, Artificial Sequence
  HTT spacer sequence ATCN PAM
cagucccucagccccacagg

SEQ ID NO: 7200 - RNA, 20 nt, Artificial Sequence
  HTT spacer sequence ATCN PAM
ggcugcccaucagcucccug

SEQ ID NO: 7201 - RNA, 20 nt, Artificial Sequence
  HTT spacer sequence ATCN PAM
gcucccugcguacccagacu

SEQ ID NO: 7202 - RNA, 20 nt, Artificial Sequence
  HTT spacer sequence ATCN PAM
gcccagcaagccagggggag

SEQ ID NO: 7203 - RNA, 20 nt, Artificial Sequence
  HTT spacer sequence ATCN PAM
cugcuguccucaccggccgg

SEQ ID NO: 7204 - RNA, 20 nt, Artificial Sequence
  HTT spacer sequence ATCN PAM
gcccccaguucagugccgcc

SEQ ID NO: 7205 - RNA, 20 nt, Artificial Sequence
  HTT spacer sequence ATCN PAM
gccugggcggcggugagagg

SEQ ID NO: 7206 - RNA, 20 nt, Artificial Sequence
  HTT spacer sequence ATCN PAM
auauugcggcgagcgggcca

SEQ ID NO: 7207 - RNA, 20 nt, Artificial Sequence
  HTT spacer sequence ATCN PAM
gggcugcacugacgggccau

SEQ ID NO: 7208 - RNA, 20 nt, Artificial Sequence
  HTT spacer sequence ATCN PAM
aaaugacguuucccguuuaa

SEQ ID NO: 7209 - RNA, 20 nt, Artificial Sequence
  HTT spacer sequence ATCN PAM
gacaggcaggaauuuaguua

SEQ ID NO: 7210 - RNA, 20 nt, Artificial Sequence
  HTT spacer sequence ATCN PAM
cggcguccguccaguugcgg

SEQ ID NO: 7211 - RNA, 20 nt, Artificial Sequence
  HTT spacer sequence ATCN PAM
ucucguacaccuuggcguug

SEQ ID NO: 7212 - RNA, 20 nt, Artificial Sequence
  HTT spacer sequence ATCN PAM
cgaagagcuugcuggccauc

SEQ ID NO: 7213 - RNA, 20 nt, Artificial Sequence
  HTT spacer sequence ATCN PAM
ccucgcccagccugcgcucg

SEQ ID NO: 7214 - RNA, 20 nt, Artificial Sequence
  HTT spacer sequence ATCN PAM
agaucaagaucaccaacaug

SEQ ID NO: 7215 - RNA, 20 nt, Artificial Sequence
  HTT spacer sequence ATCN PAM
ugaucuccucgcccagccug

SEQ ID NO: 7216 - RNA, 20 nt, Artificial Sequence
  HTT spacer sequence ATCN PAM
agaucaccaacaugaccuuc

SEQ ID NO: 7217 - RNA, 20 nt, Artificial Sequence
  HTT spacer sequence ATCN PAM
ugaucuugaucuccucgccc

SEQ ID NO: 7218 - RNA, 20 nt, Artificial Sequence
  HTT spacer sequence ATCN PAM
ccaacaugaccuuccaguac

SEQ ID NO: 7219 - RNA, 20 nt, Artificial Sequence
  HTT spacer sequence ATCN PAM
ucccgacucagagcuccaag

SEQ ID NO: 7220 - RNA, 20 nt, Artificial Sequence
  HTT spacer sequence ATCN PAM
uggccucugcccagcaccag

SEQ ID NO: 7221 - RNA, 20 nt, Artificial Sequence
  HTT spacer sequence ATCN PAM
acugagccucugccaugagc

SEQ ID NO: 7222 - RNA, 20 nt, Artificial Sequence
  HTT spacer sequence ATCN PAM
ccaggugaggugcaggacca

SEQ ID NO: 7223 - RNA, 20 nt, Artificial Sequence
  HTT spacer sequence ATCN PAM
cccuggcugggugguccccu

SEQ ID NO: 7224 - RNA, 20 nt, Artificial Sequence
  HTT spacer sequence ATCN PAM
uaaagugcguggguccccag

SEQ ID NO: 7225 - RNA, 20 nt, Artificial Sequence
  HTT spacer sequence ATCN PAM
ccccacaccugugaccuuca

SEQ ID NO: 7226 - RNA, 20 nt, Artificial Sequence
  HTT spacer sequence ATCN PAM
uggaagcugacaggcucucc

SEQ ID NO: 7227 - RNA, 20 nt, Artificial Sequence
  HTT spacer sequence ATCN PAM
acgcaacugaaagcggagac

SEQ ID NO: 7228 - RNA, 20 nt, Artificial Sequence
  HTT spacer sequence ATCN PAM
aaucaacgcaacugaaagcg

SEQ ID NO: 7229 - RNA, 20 nt, Artificial Sequence
  HTT spacer sequence ATCN PAM
gucaugcucagcacccuagg

SEQ ID NO: 7230 - RNA, 20 nt, Artificial Sequence
  HTT spacer sequence ATCN PAM
ucagagguucgguggacaca

SEQ ID NO: 7231 - RNA, 20 nt, Artificial Sequence
  HTT spacer sequence ATCN PAM
cucagccuccaggaauggag

SEQ ID NO: 7232 - RNA, 20 nt, Artificial Sequence
  HTT spacer sequence ATCN PAM
gccaugacgugcagugcacc

SEQ ID NO: 7233 - RNA, 20 nt, Artificial Sequence
  HTT spacer sequence ATCN PAM
agucacccagccacagcuuc

SEQ ID NO: 7234 - RNA, 20 nt, Artificial Sequence
  HTT spacer sequence ATCN PAM
uuguccuuuuucuuuauacc

SEQ ID NO: 7235 - RNA, 20 nt, Artificial Sequence
  HTT spacer sequence ATCN PAM
cuaaccucugccccaggcuu

SEQ ID NO: 7236 - RNA, 20 nt, Artificial Sequence
  HTT spacer sequence ATCN PAM
ccugcucaccaucuggcugu

SEQ ID NO: 7237 - RNA, 20 nt, Artificial Sequence
  HTT spacer sequence ATCN PAM
ggcugugccuguuugcuggg

SEQ ID NO: 7238 - RNA, 20 nt, Artificial Sequence
  HTT spacer sequence ATCN PAM
agcuuauuguuuccaacggc

SEQ ID NO: 7239 - RNA, 20 nt, Artificial Sequence
  HTT spacer sequence ATCN PAM
cugccucacuggacccagua

SEQ ID NO: 7240 - RNA, 20 nt, Artificial Sequence
  HTT spacer sequence ATCN PAM
ggcagugugggaaggggccc

SEQ ID NO: 7241 - RNA, 20 nt, Artificial Sequence
  HTT spacer sequence ATCN PAM
ggcccaccccagggccucug

SEQ ID NO: 7242 - RNA, 20 nt, Artificial Sequence
  HTT spacer sequence ATCN PAM
agcgcuacaaccugcaaccu

SEQ ID NO: 7243 - RNA, 20 nt, Artificial Sequence
  HTT spacer sequence ATCN PAM
aggcuccugcccagacugua

SEQ ID NO: 7244 - RNA, 20 nt, Artificial Sequence
  HTT spacer sequence ATCN PAM
gcccuguagcugggggaggg

SEQ ID NO: 7245 - RNA, 20 nt, Artificial Sequence
  HTT spacer sequence ATCN PAM
aaguaagccccucccccagc

SEQ ID NO: 7246 - RNA, 20 nt, Artificial Sequence
  HTT spacer sequence ATCN PAM
ucacuaugucauugauauaa

SEQ ID NO: 7247 - RNA, 20 nt, Artificial Sequence
  HTT spacer sequence ATCN PAM
cuaugucauugauauaaaaa

SEQ ID NO: 7248 - RNA, 20 nt, Artificial Sequence
  HTT spacer sequence ATCN PAM
augacauagugaugaucaaa

SEQ ID NO: 7249 - RNA, 20 nt, Artificial Sequence
  HTT spacer sequence ATCN PAM
ccacacuuugcugugugacu

SEQ ID NO: 7250 - RNA, 20 nt, Artificial Sequence
  HTT spacer sequence ATCN PAM
caucuccacacuuugcugug

SEQ ID NO: 7251 - RNA, 20 nt, Artificial Sequence
  HTT spacer sequence ATCN PAM
cuauauuuauauaucuuaua

SEQ ID NO: 7252 - RNA, 20 nt, Artificial Sequence
  HTT spacer sequence ATCN PAM
uauaauaccuuauuauuaca

SEQ ID NO: 7253 - RNA, 20 nt, Artificial Sequence
  HTT spacer sequence ATCN PAM
gugcaugcugggaccuuggg

SEQ ID NO: 7254 - RNA, 20 nt, Artificial Sequence
  HTT spacer sequence ATCN PAM
gagcccguguagguccugaa

SEQ ID NO: 7255 - RNA, 20 nt, Artificial Sequence
  HTT spacer sequence ATCN PAM
ugacccuggagccuggccga

SEQ ID NO: 7256 - RNA, 20 nt, Artificial Sequence
  HTT spacer sequence ATCN PAM
gccaggcuccagggucaaga

SEQ ID NO: 7257 - RNA, 20 nt, Artificial Sequence
  HTT spacer sequence ATCN PAM
gucaugcauuuuaauuuccu

SEQ ID NO: 7258 - RNA, 20 nt, Artificial Sequence
  HTT spacer sequence ATCN PAM
auggcuagguaauagggcca

SEQ ID NO: 7259 - RNA, 20 nt, Artificial Sequence
  HTT spacer sequence ATCN PAM
caucaauggcuagguaauag

SEQ ID NO: 7260 - RNA, 20 nt, Artificial Sequence
  HTT spacer sequence ATCN PAM
caggacucggggaccuuggc

SEQ ID NO: 7261 - RNA, 20 nt, Artificial Sequence
  HTT spacer sequence ATCN PAM
ucgaagcggccuucguagga

SEQ ID NO: 7262 - RNA, 20 nt, Artificial Sequence
  HTT spacer sequence ATCN PAM
uccucgaagcggccuucgua

SEQ ID NO: 7263 - RNA, 20 nt, Artificial Sequence
  HTT spacer sequence ATCN PAM
cuccgacagcuccuccagcu

SEQ ID NO: 7264 - RNA, 20 nt, Artificial Sequence
  HTT spacer sequence ATCN PAM
cagcccccaccauuuagaga

SEQ ID NO: 7265 - RNA, 20 nt, Artificial Sequence
  HTT spacer sequence ATCN PAM
cuuuugagcugcacggaaag

SEQ ID NO: 7266 - RNA, 20 nt, Artificial Sequence
  HTT spacer sequence ATCN PAM
guaccuuucucagagggugg

SEQ ID NO: 7267 - RNA, 20 nt, Artificial Sequence
  HTT spacer sequence ATCN PAM
caggagagaagacgcagcau

SEQ ID NO: 7268 - RNA, 20 nt, Artificial Sequence
  HTT spacer sequence ATCN PAM
cguguugccgugggcaugac

SEQ ID NO: 7269 - RNA, 20 nt, Artificial Sequence
  HTT spacer sequence ATCN PAM
aucccacaccucagacccgu

SEQ ID NO: 7270 - RNA, 20 nt, Artificial Sequence
  HTT spacer sequence ATCN PAM
cacaccucagacccgucccg

SEQ ID NO: 7271 - RNA, 20 nt, Artificial Sequence
  HTT spacer sequence ATCN PAM
ugcaggcacagucacguggc

SEQ ID NO: 7272 - RNA, 20 nt, Artificial Sequence
  HTT spacer sequence ATCN PAM
uccuguucuugccuccaaau

SEQ ID NO: 7273 - RNA, 20 nt, Artificial Sequence
  HTT spacer sequence ATCN PAM
acaaucuuccuguucuugcc

SEQ ID NO: 7274 - RNA, 20 nt, Artificial Sequence
  HTT spacer sequence ATCN PAM
uuaguagagaaggcgucucc

SEQ ID NO: 7275 - RNA, 20 nt, Artificial Sequence
  HTT spacer sequence ATCN PAM
ugagucaagcagcggccccc

SEQ ID NO: 7276 - RNA, 20 nt, Artificial Sequence
  HTT spacer sequence ATCN PAM
caggccuccugcugguuccu

SEQ ID NO: 7277 - RNA, 20 nt, Artificial Sequence
  HTT spacer sequence ATCN PAM
gggagggcagcccccacgcc

SEQ ID NO: 7278 - RNA, 20 nt, Artificial Sequence
  HTT spacer sequence ATCN PAM
ggcccaaagcgcggaucuca

SEQ ID NO: 7279 - RNA, 20 nt, Artificial Sequence
  HTT spacer sequence ATCN PAM
gcgcuuugggccugaucagg

SEQ ID NO: 7280 - RNA, 20 nt, Artificial Sequence
  HTT spacer sequence ATCN PAM
cacgccccugagguuggcug

SEQ ID NO: 7281 - RNA, 20 nt, Artificial Sequence
  HTT spacer sequence ATCN PAM
cuggcccacacucugcucug

SEQ ID NO: 7282 - RNA, 20 nt, Artificial Sequence
  HTT spacer sequence ATCN PAM
cccggcggccuagaaauggg

SEQ ID NO: 7283 - RNA, 20 nt, Artificial Sequence
  HTT spacer sequence ATCN PAM
caggcccuuccuucugggac

SEQ ID NO: 7284 - RNA, 20 nt, Artificial Sequence
  HTT spacer sequence ATCN PAM
gccuaaggccggguggggcu

SEQ ID NO: 7285 - RNA, 20 nt, Artificial Sequence
  HTT spacer sequence ATCN PAM
cucccuggggguggucucuc

SEQ ID NO: 7286 - RNA, 20 nt, Artificial Sequence
  HTT spacer sequence ATCN PAM
ugccagggagcacccuucac

SEQ ID NO: 7287 - RNA, 20 nt, Artificial Sequence
  HTT spacer sequence ATCN PAM
cacccuuuccagaccgaagg

SEQ ID NO: 7288 - RNA, 20 nt, Artificial Sequence
  HTT spacer sequence ATCN PAM
acaccccuucggucuggaaa

SEQ ID NO: 7289 - RNA, 20 nt, Artificial Sequence
  HTT spacer sequence ATCN PAM
gcuagucgcaaaggacggca

SEQ ID NO: 7290 - RNA, 20 nt, Artificial Sequence
  HTT spacer sequence ATCN PAM
cgccacugcucucugcacaa

SEQ ID NO: 7291 - RNA, 20 nt, Artificial Sequence
  HTT spacer sequence ATCN PAM
uggcucacugcaaccuccgc

SEQ ID NO: 7292 - RNA, 20 nt, Artificial Sequence
  HTT spacer sequence ATCN PAM
cuugaacccacgaggcggag

SEQ ID NO: 7293 - RNA, 20 nt, Artificial Sequence
  HTT spacer sequence ATCN PAM
cagcuacucgggaggcugag

SEQ ID NO: 7294 - RNA, 20 nt, Artificial Sequence
  HTT spacer sequence ATCN PAM
cuacuaaaaauacaaaaauu

SEQ ID NO: 7295 - RNA, 20 nt, Artificial Sequence
  HTT spacer sequence ATCN PAM
ccugaggucaggaguucaag

SEQ ID NO: 7296 - RNA, 20 nt, Artificial Sequence
  HTT spacer sequence ATCN PAM
accugccucugccucccaaa

SEQ ID NO: 7297 - RNA, 20 nt, Artificial Sequence
  HTT spacer sequence ATCN PAM
cagcacuuugggaggcagag

SEQ ID NO: 7298 - RNA, 20 nt, Artificial Sequence
  HTT spacer sequence ATCN PAM
uacugggcaaauggggaaac

SEQ ID NO: 7299 - RNA, 20 nt, Artificial Sequence
  HTT spacer sequence ATCN PAM
ugcaggugcagagccugcag

SEQ ID NO: 7300 - RNA, 20 nt, Artificial Sequence
  HTT spacer sequence ATCN PAM
ugcgcuccugcagcugcagg

SEQ ID NO: 7301 - RNA, 20 nt, Artificial Sequence
  HTT spacer sequence ATCN PAM
ucuccagcagacucaucaug

SEQ ID NO: 7302 - RNA, 20 nt, Artificial Sequence
  HTT spacer sequence ATCN PAM
ucaccaaguccagcgucuag

SEQ ID NO: 7303 - RNA, 20 nt, Artificial Sequence
  HTT spacer sequence ATCN PAM
ccaaguccagcgucuaggcc

SEQ ID NO: 7304 - RNA, 20 nt, Artificial Sequence
  HTT spacer sequence ATCN PAM
ugccagaggccagguggaag

SEQ ID NO: 7305 - RNA, 20 nt, Artificial Sequence
  HTT spacer sequence ATCN PAM
augauacuugacguggcuuu

SEQ ID NO: 7306 - RNA, 20 nt, Artificial Sequence
  HTT spacer sequence ATCN PAM
uugauaguaacgacacugga

SEQ ID NO: 7307 - RNA, 20 nt, Artificial Sequence
  HTT spacer sequence ATCN PAM
aagccacgucaaguaucauu

SEQ ID NO: 7308 - RNA, 20 nt, Artificial Sequence
  HTT spacer sequence ATCN PAM
ucaccaagccagcaacagca

SEQ ID NO: 7309 - RNA, 20 nt, Artificial Sequence
  HTT spacer sequence ATCN PAM
gggcauccucaccaagccag

SEQ ID NO: 7310 - RNA, 20 nt, Artificial Sequence
  HTT spacer sequence ATCN PAM
aucagggcauccucaccaag

SEQ ID NO: 7311 - RNA, 20 nt, Artificial Sequence
  HTT spacer sequence ATCN PAM
aucaaucagggcauccucac

SEQ ID NO: 7312 - RNA, 20 nt, Artificial Sequence
  HTT spacer sequence ATCN PAM
cgaaaaugaaagcagaugga

SEQ ID NO: 7313 - RNA, 20 nt, Artificial Sequence
  HTT spacer sequence ATCN PAM
gcuuucauuuucgggaucca

SEQ ID NO: 7314 - RNA, 20 nt, Artificial Sequence
  HTT spacer sequence ATCN PAM
ggcgucagaggccauuuaag

SEQ ID NO: 7315 - RNA, 20 nt, Artificial Sequence
  HTT spacer sequence ATCN PAM
gguguuuccacugccuccuu

SEQ ID NO: 7316 - RNA, 20 nt, Artificial Sequence
  HTT spacer sequence ATCN PAM
ccagcacccagaacacucaa

SEQ ID NO: 7317 - RNA, 20 nt, Artificial Sequence
  HTT spacer sequence ATCN PAM
ugguggaugacacaaaggcc

SEQ ID NO: 7318 - RNA, 20 nt, Artificial Sequence
  HTT spacer sequence ATCN PAM
accaugauaucuccagcacc

SEQ ID NO: 7319 - RNA, 20 nt, Artificial Sequence
  HTT spacer sequence ATCN PAM
caaccugcaaccauuucucu

SEQ ID NO: 7320 - RNA, 20 nt, Artificial Sequence
  HTT spacer sequence ATCN PAM
gugggggacagagggguggu

SEQ ID NO: 7321 - RNA, 20 nt, Artificial Sequence
  HTT spacer sequence ATCN PAM
cccucuggcugccaagcgag

SEQ ID NO: 7322 - RNA, 20 nt, Artificial Sequence
  HTT spacer sequence ATCN PAM
ugccaggcagugcugcaguc

SEQ ID NO: 7323 - RNA, 20 nt, Artificial Sequence
  HTT spacer sequence ATCN PAM
ugcgacaagcagcagcagcu

SEQ ID NO: 7324 - RNA, 20 nt, Artificial Sequence
  HTT spacer sequence ATCN PAM
uacccucuagggggucuuga

SEQ ID NO: 7325 - RNA, 20 nt, Artificial Sequence
  HTT spacer sequence ATCN PAM
ugcuugcccagcuccccuuu

SEQ ID NO: 7326 - RNA, 20 nt, Artificial Sequence
  HTT spacer sequence ATCN PAM
ccccagagccugugugccga

SEQ ID NO: 7327 - RNA, 20 nt, Artificial Sequence
  HTT spacer sequence ATCN PAM
cacagcaacaugggccgagu

SEQ ID NO: 7328 - RNA, 20 nt, Artificial Sequence
  HTT spacer sequence ATCN PAM
ggcagcuggaaacuggcacc

SEQ ID NO: 7329 - RNA, 20 nt, Artificial Sequence
  HTT spacer sequence ATCN PAM
cuucucaaccacagggucag

SEQ ID NO: 7330 - RNA, 20 nt, Artificial Sequence
  HTT spacer sequence ATCN PAM
ucuguccuccuggggccacc

SEQ ID NO: 7331 - RNA, 20 nt, Artificial Sequence
  HTT spacer sequence ATCN PAM
gaugcgggccugaguuuugg

SEQ ID NO: 7332 - RNA, 20 nt, Artificial Sequence
  HTT spacer sequence ATCN PAM
gaugugcccgcauccucugu

SEQ ID NO: 7333 - RNA, 20 nt, Artificial Sequence
  HTT spacer sequence ATCN PAM
uuugcuuaacaaacacacug

SEQ ID NO: 7334 - RNA, 20 nt, Artificial Sequence
  HTT spacer sequence ATCN PAM
aggguggcacagguguccag

SEQ ID NO: 7335 - RNA, 20 nt, Artificial Sequence
  HTT spacer sequence ATCN PAM
guuaugucuugugggagcgu

SEQ ID NO: 7336 - RNA, 20 nt, Artificial Sequence
  HTT spacer sequence ATCN PAM
uuuagaaccuccaucuguua

SEQ ID NO: 7337 - RNA, 20 nt, Artificial Sequence
  HTT spacer sequence ATCN PAM
gggacagcacaccgcgaguc

SEQ ID NO: 7338 - RNA, 20 nt, Artificial Sequence
  HTT spacer sequence ATCN PAM
gagucagugauucaugcccu

SEQ ID NO: 7339 - RNA, 20 nt, Artificial Sequence
  HTT spacer sequence ATCN PAM
cugacucugauuagagaggg

SEQ ID NO: 7340 - RNA, 20 nt, Artificial Sequence
  HTT spacer sequence ATCN PAM
ccuuagagaaggggcaggcg

SEQ ID NO: 7341 - RNA, 20 nt, Artificial Sequence
  HTT spacer sequence ATCN PAM
ccucaugucagcagaacuca

SEQ ID NO: 7342 - RNA, 20 nt, Artificial Sequence
  HTT spacer sequence ATCN PAM
ugggguuggugccuuucauc

SEQ ID NO: 7343 - RNA, 20 nt, Artificial Sequence
  HTT spacer sequence ATCN PAM
gcagcauguccuuaacaacu

SEQ ID NO: 7344 - RNA, 20 nt, Artificial Sequence
  HTT spacer sequence ATCN PAM
gaaaguuguuaaggacaugc

SEQ ID NO: 7345 - RNA, 20 nt, Artificial Sequence
  HTT spacer sequence ATCN PAM
uuuuuuuucuccuuaaugga

SEQ ID NO: 7346 - RNA, 20 nt, Artificial Sequence
  HTT spacer sequence ATCN PAM
cagccauugcuaaaauauuu

SEQ ID NO: 7347 - RNA, 20 nt, Artificial Sequence
  HTT spacer sequence ATCN PAM
aauauuuuagcaauggcuga

SEQ ID NO: 7348 - RNA, 20 nt, Artificial Sequence
  HTT spacer sequence ATCN PAM
uaucaaauauuuuagcaaug

SEQ ID NO: 7349 - RNA, 20 nt, Artificial Sequence
  HTT spacer sequence ATCN PAM
ggagccaggcagaugugcuu

SEQ ID NO: 7350 - RNA, 20 nt, Artificial Sequence
  HTT spacer sequence ATCN PAM
gccuggcuccugauucuagu

SEQ ID NO: 7351 - RNA, 20 nt, Artificial Sequence
  HTT spacer sequence ATCN PAM
uaaugcauuagcuaaaaacg

SEQ ID NO: 7352 - RNA, 20 nt, Artificial Sequence
  HTT spacer sequence ATCN PAM
cagcacuuugggaggcugag

SEQ ID NO: 7353 - RNA, 20 nt, Artificial Sequence
  HTT spacer sequence ATCN PAM
ucccgccucagccucccaaa

SEQ ID NO: 7354 - RNA, 20 nt, Artificial Sequence
  HTT spacer sequence ATCN PAM
ucugaggucaggaguucaag

SEQ ID NO: 7355 - RNA, 20 nt, Artificial Sequence
  HTT spacer sequence ATCN PAM
cagcuacuugggaggcugag

SEQ ID NO: 7356 - RNA, 20 nt, Artificial Sequence
  HTT spacer sequence ATCN PAM
cuugaacccgggaggcggag

SEQ ID NO: 7357 - RNA, 20 nt, Artificial Sequence
  HTT spacer sequence ATCN PAM
cagcucacugcaaccuccgc

SEQ ID NO: 7358 - RNA, 20 nt, Artificial Sequence
  HTT spacer sequence ATCN PAM
uuuuuuaauuuuuuuuuuuu

SEQ ID NO: 7359 - RNA, 20 nt, Artificial Sequence
  HTT spacer sequence ATCN PAM
ugcuuauuuuauuuaucuuu

SEQ ID NO: 7360 - RNA, 20 nt, Artificial Sequence
  HTT spacer sequence ATCN PAM
gaaaacaaagguaacucuac

SEQ ID NO: 7361 - RNA, 20 nt, Artificial Sequence
  HTT spacer sequence ATCN PAM
ucauuuucaacaaguuuaag

SEQ ID NO: 7362 - RNA, 20 nt, Artificial Sequence
  HTT spacer sequence ATCN PAM
cauucagaguuggaaugaau

SEQ ID NO: 7363 - RNA, 20 nt, Artificial Sequence
  HTT spacer sequence ATCN PAM
aaauaauaccugagcgcugg

SEQ ID NO: 7364 - RNA, 20 nt, Artificial Sequence
  HTT spacer sequence ATCN PAM
uuuuauuaaugucauuccaa

SEQ ID NO: 7365 - RNA, 20 nt, Artificial Sequence
  HTT spacer sequence ATCN PAM
cuucuugguuuugacaugga

SEQ ID NO: 7366 - RNA, 20 nt, Artificial Sequence
  HTT spacer sequence ATCN PAM
cguccaugucaaaaccaaga

SEQ ID NO: 7367 - RNA, 20 nt, Artificial Sequence
  HTT spacer sequence ATCN PAM
ucgcguccaugucaaaacca

SEQ ID NO: 7368 - RNA, 20 nt, Artificial Sequence
  HTT spacer sequence ATCN PAM
cagucugcgguuccaacucc

SEQ ID NO: 7369 - RNA, 20 nt, Artificial Sequence
  HTT spacer sequence ATCN PAM
uguggcugcuggaggccagg

SEQ ID NO: 7370 - RNA, 20 nt, Artificial Sequence
  HTT spacer sequence ATCN PAM
caccagcaacgcaggagucu

SEQ ID NO: 7371 - RNA, 20 nt, Artificial Sequence
  HTT spacer sequence ATCN PAM
uuaaaagugggccaggugcg

SEQ ID NO: 7372 - RNA, 20 nt, Artificial Sequence
  HTT spacer sequence ATCN PAM
cagcacuuugggaggccaag

SEQ ID NO: 7373 - RNA, 20 nt, Artificial Sequence
  HTT spacer sequence ATCN PAM
gccugucuuggccucccaaa

SEQ ID NO: 7374 - RNA, 20 nt, Artificial Sequence
  HTT spacer sequence ATCN PAM
cgaggucaggacauugagau

SEQ ID NO: 7375 - RNA, 20 nt, Artificial Sequence
  HTT spacer sequence ATCN PAM
caauguccugaccucgugau

SEQ ID NO: 7376 - RNA, 20 nt, Artificial Sequence
  HTT spacer sequence ATCN PAM
uccuggcuaacacggugaaa

SEQ ID NO: 7377 - RNA, 20 nt, Artificial Sequence
  HTT spacer sequence ATCN PAM
uggcuaacacggugaaaccc

SEQ ID NO: 7378 - RNA, 20 nt, Artificial Sequence
  HTT spacer sequence ATCN PAM
cagcucacugcaagcuccac

SEQ ID NO: 7379 - RNA, 20 nt, Artificial Sequence
  HTT spacer sequence ATCN PAM
cuccacugcacuccagccug

SEQ ID NO: 7380 - RNA, 20 nt, Artificial Sequence
  HTT spacer sequence ATCN PAM
uauuagaaauuaaaccugag

SEQ ID NO: 7381 - RNA, 20 nt, Artificial Sequence
  HTT spacer sequence ATCN PAM
cuggcuuaagagaagcccac

SEQ ID NO: 7382 - RNA, 20 nt, Artificial Sequence
  HTT spacer sequence ATCN PAM
ggguaagaaugagcuucucc

SEQ ID NO: 7383 - RNA, 20 nt, Artificial Sequence
  HTT spacer sequence ATCN PAM
guauauucuuccgugauccu

SEQ ID NO: 7384 - RNA, 20 nt, Artificial Sequence
  HTT spacer sequence ATCN PAM
cggaagaauauaccgauuau

SEQ ID NO: 7385 - RNA, 20 nt, Artificial Sequence
  HTT spacer sequence ATCN PAM
uauuccaacacuggacaggu

SEQ ID NO: 7386 - RNA, 20 nt, Artificial Sequence
  HTT spacer sequence ATCN PAM
cgccacugcacuccagccug

SEQ ID NO: 7387 - RNA, 20 nt, Artificial Sequence
  HTT spacer sequence ATCN PAM
cuacuaaaaauacaaaaaau

SEQ ID NO: 7388 - RNA, 20 nt, Artificial Sequence
  HTT spacer sequence ATCN PAM
uggcuaacacagugaaaccc

SEQ ID NO: 7389 - RNA, 20 nt, Artificial Sequence
  HTT spacer sequence ATCN PAM
ccugacaucgugauccaccc

SEQ ID NO: 7390 - RNA, 20 nt, Artificial Sequence
  HTT spacer sequence ATCN PAM
ugauccacccgccucggccu

SEQ ID NO: 7391 - RNA, 20 nt, Artificial Sequence
  HTT spacer sequence ATCN PAM
cgaugucaggagauugagac

SEQ ID NO: 7392 - RNA, 20 nt, Artificial Sequence
  HTT spacer sequence ATCN PAM
acccgccucggccucccaaa

SEQ ID NO: 7393 - RNA, 20 nt, Artificial Sequence
  HTT spacer sequence ATCN PAM
gauacccuaucaaugaacuu

SEQ ID NO: 7394 - RNA, 20 nt, Artificial Sequence
  HTT spacer sequence ATCN PAM
gauuccacacacaaccggcc

SEQ ID NO: 7395 - RNA, 20 nt, Artificial Sequence
  HTT spacer sequence ATCN PAM
augaacuucuacuucauuuc

SEQ ID NO: 7396 - RNA, 20 nt, Artificial Sequence
  HTT spacer sequence ATCN PAM
auugguccgucuugugcuuc

SEQ ID NO: 7397 - RNA, 20 nt, Artificial Sequence
  HTT spacer sequence ATCN PAM
ugccuuugugaccucacacg

SEQ ID NO: 7398 - RNA, 20 nt, Artificial Sequence
  HTT spacer sequence ATCN PAM
gcauaacuuagugaaccaaa

SEQ ID NO: 7399 - RNA, 20 nt, Artificial Sequence
  HTT spacer sequence ATCN PAM
guauuuuaaaaucacuuuug

SEQ ID NO: 7400 - RNA, 20 nt, Artificial Sequence
  HTT spacer sequence ATCN PAM
cuuuuggcgauaucaccaau

SEQ ID NO: 7401 - RNA, 20 nt, Artificial Sequence
  HTT spacer sequence ATCN PAM
ccaaaagugauuuuaaaaua

SEQ ID NO: 7402 - RNA, 20 nt, Artificial Sequence
  HTT spacer sequence ATCN PAM
ccaaucuuagaaaagucuuu

SEQ ID NO: 7403 - RNA, 20 nt, Artificial Sequence
  HTT spacer sequence ATCN PAM
uagaaaagucuuucaguugg

SEQ ID NO: 7404 - RNA, 20 nt, Artificial Sequence
  HTT spacer sequence ATCN PAM
gaauucugaaagacaccacc

SEQ ID NO: 7405 - RNA, 20 nt, Artificial Sequence
  HTT spacer sequence ATCN PAM
uugguaacaaaugcugucag

SEQ ID NO: 7406 - RNA, 20 nt, Artificial Sequence
  HTT spacer sequence ATCN PAM
uuuuuuugaguaaaaagugu

SEQ ID NO: 7407 - RNA, 20 nt, Artificial Sequence
  HTT spacer sequence ATCN PAM
ggaacacacguauggagcac

SEQ ID NO: 7408 - RNA, 20 nt, Artificial Sequence
  HTT spacer sequence ATCN PAM
agacggcagcucagcccauu

SEQ ID NO: 7409 - RNA, 20 nt, Artificial Sequence
  HTT spacer sequence ATCN PAM
uuucaacguccugcccgagc

SEQ ID NO: 7410 - RNA, 20 nt, Artificial Sequence
  HTT spacer sequence ATCN PAM
cggacauuuggaagugaccg

SEQ ID NO: 7411 - RNA, 20 nt, Artificial Sequence
  HTT spacer sequence ATCN PAM
gugcgcaugucagcuccgug

SEQ ID NO: 7412 - RNA, 20 nt, Artificial Sequence
  HTT spacer sequence ATCN PAM
cggggucuucacggggucuu

SEQ ID NO: 7413 - RNA, 20 nt, Artificial Sequence
  HTT spacer sequence ATCN PAM
ucagacuaugaugaaagcag

SEQ ID NO: 7414 - RNA, 20 nt, Artificial Sequence
  HTT spacer sequence ATCN PAM
gacuaugaugaaagcagcug

SEQ ID NO: 7415 - RNA, 20 nt, Artificial Sequence
  HTT spacer sequence ATCN PAM
uagucugaugaucacggggu

SEQ ID NO: 7416 - RNA, 20 nt, Artificial Sequence
  HTT spacer sequence ATCN PAM
ccagugagccagcucugggu

SEQ ID NO: 7417 - RNA, 20 nt, Artificial Sequence
  HTT spacer sequence ATCN PAM
cagacagcgugugggaaccg

SEQ ID NO: 7418 - RNA, 20 nt, Artificial Sequence
  HTT spacer sequence ATCN PAM
ccagugccuacaagacagca

SEQ ID NO: 7419 - RNA, 20 nt, Artificial Sequence
  HTT spacer sequence ATCN PAM
gcuuuccaccugacccuauc

SEQ ID NO: 7420 - RNA, 20 nt, Artificial Sequence
  HTT spacer sequence ATCN PAM
uugucuuuacaggguuucga

SEQ ID NO: 7421 - RNA, 20 nt, Artificial Sequence
  HTT spacer sequence ATCN PAM
cccuacagccuuauuucccu

SEQ ID NO: 7422 - RNA, 20 nt, Artificial Sequence
  HTT spacer sequence ATCN PAM
gcucacaugacauuuuuuga

SEQ ID NO: 7423 - RNA, 20 nt, Artificial Sequence
  HTT spacer sequence ATCN PAM
uggccuaggggaggauagaa

SEQ ID NO: 7424 - RNA, 20 nt, Artificial Sequence
  HTT spacer sequence ATCN PAM
uccccuaggccaggaugccu

SEQ ID NO: 7425 - RNA, 20 nt, Artificial Sequence
  HTT spacer sequence ATCN PAM
ccaggacucagaacaugcga

SEQ ID NO: 7426 - RNA, 20 nt, Artificial Sequence
  HTT spacer sequence ATCN PAM
cagcuggguccggagggaga

SEQ ID NO: 7427 - RNA, 20 nt, Artificial Sequence
  HTT spacer sequence ATCN PAM
uacaguagaaaaagccaguu

SEQ ID NO: 7428 - RNA, 20 nt, Artificial Sequence
  HTT spacer sequence ATCN PAM
gugagggacaugaccagcca

SEQ ID NO: 7429 - RNA, 20 nt, Artificial Sequence
  HTT spacer sequence ATCN PAM
guggcuugugcagggaccac

SEQ ID NO: 7430 - RNA, 20 nt, Artificial Sequence
  HTT spacer sequence ATCN PAM
ccgccuugcugggcacuagc

SEQ ID NO: 7431 - RNA, 20 nt, Artificial Sequence
  HTT spacer sequence ATCN PAM
gcucuccugcucugcaccac

SEQ ID NO: 7432 - RNA, 20 nt, Artificial Sequence
  HTT spacer sequence ATCN PAM
aaaugaggcccaaguguggc

SEQ ID NO: 7433 - RNA, 20 nt, Artificial Sequence
  HTT spacer sequence ATCN PAM
gggaaaacauccaaaugagg

SEQ ID NO: 7434 - RNA, 20 nt, Artificial Sequence
  HTT spacer sequence ATCN PAM
uuuuuccagguagcccacag

SEQ ID NO: 7435 - RNA, 20 nt, Artificial Sequence
  HTT spacer sequence ATCN PAM
ccucugcccagcacgcccgg

SEQ ID NO: 7436 - RNA, 20 nt, Artificial Sequence
  HTT spacer sequence ATCN PAM
gacucaggcugagaggugca

SEQ ID NO: 7437 - RNA, 20 nt, Artificial Sequence
  HTT spacer sequence ATCN PAM
cacagagacugugugagcug

SEQ ID NO: 7438 - RNA, 20 nt, Artificial Sequence
  HTT spacer sequence ATCN PAM
ggcaggcuggcaugagcuga

SEQ ID NO: 7439 - RNA, 20 nt, Artificial Sequence
  HTT spacer sequence ATCN PAM
gccgcuaagaaccagcgcug

SEQ ID NO: 7440 - RNA, 20 nt, Artificial Sequence
  HTT spacer sequence ATCN PAM
gauuccaguguguggaggca

SEQ ID NO: 7441 - RNA, 20 nt, Artificial Sequence
  HTT spacer sequence ATCN PAM
gauucucccguucaagagga

SEQ ID NO: 7442 - RNA, 20 nt, Artificial Sequence
  HTT spacer sequence ATCN PAM
cgugggucccuuacugaugg

SEQ ID NO: 7443 - RNA, 20 nt, Artificial Sequence
  HTT spacer sequence ATCN PAM
guaagggacccacgagauga

SEQ ID NO: 7444 - RNA, 20 nt, Artificial Sequence
  HTT spacer sequence ATCN PAM
gcugcaccacgguuuauugc

SEQ ID NO: 7445 - RNA, 20 nt, Artificial Sequence
  HTT spacer sequence ATCN PAM
uucaaaacucacuaguguac

SEQ ID NO: 7446 - RNA, 20 nt, Artificial Sequence
  HTT spacer sequence ATCN PAM
caacccgaccucacguguaa

SEQ ID NO: 7447 - RNA, 20 nt, Artificial Sequence
  HTT spacer sequence ATCN PAM
guguggaaaaaaguaaaucu

SEQ ID NO: 7448 - RNA, 20 nt, Artificial Sequence
  HTT spacer sequence ATCN PAM
cguuguuacagcaccguuug

SEQ ID NO: 7449 - RNA, 20 nt, Artificial Sequence
  HTT spacer sequence ATCN PAM
ucaagaaagaguccaaagcc

SEQ ID NO: 7450 - RNA, 20 nt, Artificial Sequence
  HTT spacer sequence ATCN PAM
aucuucaagaaagaguccaa

SEQ ID NO: 7451 - RNA, 20 nt, Artificial Sequence
  HTT spacer sequence ATCN PAM
acaggccauccaucuucaag

SEQ ID NO: 7452 - RNA, 20 nt, Artificial Sequence
  HTT spacer sequence ATCN PAM
aagccuuaauaccaaaaccc

SEQ ID NO: 7453 - RNA, 20 nt, Artificial Sequence
  HTT spacer sequence ATCN PAM
gguuuugguauuaaggcuuu

SEQ ID NO: 7454 - RNA, 20 nt, Artificial Sequence
  HTT spacer sequence ATCN PAM
ggccuguuuuguacuucuaa

SEQ ID NO: 7455 - RNA, 20 nt, Artificial Sequence
  HTT spacer sequence ATCN PAM
gccaggacccacacuuccaa

SEQ ID NO: 7456 - RNA, 20 nt, Artificial Sequence
  HTT spacer sequence ATCN PAM
ccaccugugugcuucuagag

SEQ ID NO: 7457 - RNA, 20 nt, Artificial Sequence
  HTT spacer sequence ATCN PAM
gucugcucuagaagcacaca

SEQ ID NO: 7458 - RNA, 20 nt, Artificial Sequence
  HTT spacer sequence ATCN PAM
ccgcugccucaccucugacc

SEQ ID NO: 7459 - RNA, 20 nt, Artificial Sequence
  HTT spacer sequence ATCN PAM
guggccucugccaaccaugg

SEQ ID NO: 7460 - RNA, 20 nt, Artificial Sequence
  HTT spacer sequence ATCN PAM
cugucuugcuucuccugacc

SEQ ID NO: 7461 - RNA, 20 nt, Artificial Sequence
  HTT spacer sequence ATCN PAM
cgcaggugccgguuugucgg

SEQ ID NO: 7462 - RNA, 20 nt, Artificial Sequence
  HTT spacer sequence ATCN PAM
cugcagcuggcugccccggc

SEQ ID NO: 7463 - RNA, 20 nt, Artificial Sequence
  HTT spacer sequence ATCN PAM
agcaaucuuaucuaggagcc

SEQ ID NO: 7464 - RNA, 20 nt, Artificial Sequence
  HTT spacer sequence ATCN PAM
uaucuaggagccugcagggu

SEQ ID NO: 7465 - RNA, 20 nt, Artificial Sequence
  HTT spacer sequence ATCN PAM
aggagccugcagggucccau

SEQ ID NO: 7466 - RNA, 20 nt, Artificial Sequence
  HTT spacer sequence ATCN PAM
cacuugucucaugggacccu

SEQ ID NO: 7467 - RNA, 20 nt, Artificial Sequence
  HTT spacer sequence ATCN PAM
ggcaaacugccuuaaagggg

SEQ ID NO: 7468 - RNA, 20 nt, Artificial Sequence
  HTT spacer sequence ATCN PAM
gccuucuagggcccugaggc

SEQ ID NO: 7469 - RNA, 20 nt, Artificial Sequence
  HTT spacer sequence ATCN PAM
gccuuccagccugcagcagg

SEQ ID NO: 7470 - RNA, 20 nt, Artificial Sequence
  HTT spacer sequence ATCN PAM
ccuucuuggggaacuuugcu

SEQ ID NO: 7471 - RNA, 20 nt, Artificial Sequence
  HTT spacer sequence ATCN PAM
caccggcuuucauagcaccc

SEQ ID NO: 7472 - RNA, 20 nt, Artificial Sequence
  HTT spacer sequence ATCN PAM
ggggccccguggagccuggu

SEQ ID NO: 7473 - RNA, 20 nt, Artificial Sequence
  HTT spacer sequence ATCN PAM
ggggacuguccagucaccgg

SEQ ID NO: 7474 - RNA, 20 nt, Artificial Sequence
  HTT spacer sequence ATCN PAM
gaccccauccugccuucaag

SEQ ID NO: 7475 - RNA, 20 nt, Artificial Sequence
  HTT spacer sequence ATCN PAM
ugccuucaagccagcguaga

SEQ ID NO: 7476 - RNA, 20 nt, Artificial Sequence
  HTT spacer sequence ATCN PAM
acgcuggcuugaaggcagga

SEQ ID NO: 7477 - RNA, 20 nt, Artificial Sequence
  HTT spacer sequence ATCN PAM
ggucuggguacacugggccu

SEQ ID NO: 7478 - RNA, 20 nt, Artificial Sequence
  HTT spacer sequence ATCN PAM
uccccuccuugagggccaac

SEQ ID NO: 7479 - RNA, 20 nt, Artificial Sequence
  HTT spacer sequence ATCN PAM
acaaccaaugccaggcuccc

SEQ ID NO: 7480 - RNA, 20 nt, Artificial Sequence
  HTT spacer sequence ATCN PAM
uggcagcacgggugaguaag

SEQ ID NO: 7481 - RNA, 20 nt, Artificial Sequence
  HTT spacer sequence ATCN PAM
ucagcucagggcgggugggg

SEQ ID NO: 7482 - RNA, 20 nt, Artificial Sequence
  HTT spacer sequence ATCN PAM
aaauuccgagcgugaauggg

SEQ ID NO: 7483 - RNA, 20 nt, Artificial Sequence
  HTT spacer sequence ATCN PAM
ugugcaauuaucauuaaauu

SEQ ID NO: 7484 - RNA, 20 nt, Artificial Sequence
  HTT spacer sequence ATCN PAM
uuaaauuacagggacaauuu

SEQ ID NO: 7485 - RNA, 20 nt, Artificial Sequence
  HTT spacer sequence ATCN PAM
ugaaauuaaaauugucccug

SEQ ID NO: 7486 - RNA, 20 nt, Artificial Sequence
  HTT spacer sequence ATCN PAM
acugccgcucagccuucgaa

SEQ ID NO: 7487 - RNA, 20 nt, Artificial Sequence
  HTT spacer sequence ATCN PAM
ccuuauugauuucuaucccc

SEQ ID NO: 7488 - RNA, 20 nt, Artificial Sequence
  HTT spacer sequence ATCN PAM
auaaggugauuuaaaauuua

SEQ ID NO: 7489 - RNA, 20 nt, Artificial Sequence
  HTT spacer sequence ATCN PAM
ccaaaaaagccugcugaaau

SEQ ID NO: 7490 - RNA, 20 nt, Artificial Sequence
  HTT spacer sequence ATCN PAM
caauacaaauuucagcaggc

SEQ ID NO: 7491 - RNA, 20 nt, Artificial Sequence
  HTT spacer sequence ATCN PAM
cuaugucuuuuauuucucuu

SEQ ID NO: 7492 - RNA, 20 nt, Artificial Sequence
  HTT spacer sequence ATCN PAM
agagaaaaagaaauuacagc

SEQ ID NO: 7493 - RNA, 20 nt, Artificial Sequence
  HTT spacer sequence ATCN PAM
aaaccugacaaggacaucaa

SEQ ID NO: 7494 - RNA, 20 nt, Artificial Sequence
  HTT spacer sequence ATCN PAM
gaguuacauggguuucauac

SEQ ID NO: 7495 - RNA, 20 nt, Artificial Sequence
  HTT spacer sequence ATCN PAM
uucucuuuuuucugaaaaaa

SEQ ID NO: 7496 - RNA, 20 nt, Artificial Sequence
  HTT spacer sequence ATCN PAM
uuacacaauuuuuuucagaa

SEQ ID NO: 7497 - RNA, 20 nt, Artificial Sequence
  HTT spacer sequence ATCN PAM
cugaaacagaaaacagccaa

SEQ ID NO: 7498 - RNA, 20 nt, Artificial Sequence
  HTT spacer sequence ATCN PAM
gagcuuccacauuaagaagc

SEQ ID NO: 7499 - RNA, 20 nt, Artificial Sequence
  HTT spacer sequence ATCN PAM
uuuauuucaaacuaguuuuu

SEQ ID NO: 7500 - RNA, 20 nt, Artificial Sequence
  HTT spacer sequence ATCN PAM
aaauuuguaguauauaacua

SEQ ID NO: 7501 - RNA, 20 nt, Artificial Sequence
  HTT spacer sequence ATCN PAM
caaagaaaacuagaaaauua

SEQ ID NO: 7502 - RNA, 20 nt, Artificial Sequence
  HTT spacer sequence ATCN PAM
uguuugaccugaguuauuua

SEQ ID NO: 7503 - RNA, 20 nt, Artificial Sequence
  HTT spacer sequence ATCN PAM
cauuaaaugcuaaaggacug

SEQ ID NO: 7504 - RNA, 20 nt, Artificial Sequence
  HTT spacer sequence ATCN PAM
acuauagaauaaauacucuu

SEQ ID NO: 7505 - RNA, 20 nt, Artificial Sequence
  HTT spacer sequence ATCN PAM
aaccuaauuaacacauauag

SEQ ID NO: 7506 - RNA, 20 nt, Artificial Sequence
  HTT spacer sequence ATCN PAM
uuuauguucuuuuuuuuuuu

SEQ ID NO: 7507 - RNA, 20 nt, Artificial Sequence
  HTT spacer sequence ATCN PAM
guaagaacauaaggccgggu

SEQ ID NO: 7508 - RNA, 20 nt, Artificial Sequence
  HTT spacer sequence ATCN PAM
gaaauaagaccauaccauau

SEQ ID NO: 7509 - RNA, 20 nt, Artificial Sequence
  HTT spacer sequence ATCN PAM
acuuugaaaucauauuauac

SEQ ID NO: 7510 - RNA, 20 nt, Artificial Sequence
  HTT spacer sequence ATCN PAM
uauuauacuauuugauauau

SEQ ID NO: 7511 - RNA, 20 nt, Artificial Sequence
  HTT spacer sequence ATCN PAM
aauaguauaauaugauuuca

SEQ ID NO: 7512 - RNA, 20 nt, Artificial Sequence
  HTT spacer sequence ATCN PAM
accagcaauggauuccugca

SEQ ID NO: 7513 - RNA, 20 nt, Artificial Sequence
  HTT spacer sequence ATCN PAM
auugcugguagaugcacacu

SEQ ID NO: 7514 - RNA, 20 nt, Artificial Sequence
  HTT spacer sequence ATCN PAM
gaaaacaccuuuauuuugcu

SEQ ID NO: 7515 - RNA, 20 nt, Artificial Sequence
  HTT spacer sequence ATCN PAM
uuaaaaaaugaaagcaaaau

SEQ ID NO: 7516 - RNA, 20 nt, Artificial Sequence
  HTT spacer sequence ATCN PAM
ccaaagcucaauaaauccca

SEQ ID NO: 7517 - RNA, 20 nt, Artificial Sequence
  HTT spacer sequence ATCN PAM
augagugauuuuuuuaaauu

SEQ ID NO: 7518 - RNA, 20 nt, Artificial Sequence
  HTT spacer sequence ATCN PAM
cucauagauccccaaagcuc

SEQ ID NO: 7519 - RNA, 20 nt, Artificial Sequence
  HTT spacer sequence ATCN PAM
aaagaaacuguggccaaaau

SEQ ID NO: 7520 - RNA, 20 nt, Artificial Sequence
  HTT spacer sequence ATCN PAM
gaaauaaaacauguauuggu

SEQ ID NO: 7521 - RNA, 20 nt, Artificial Sequence
  HTT spacer sequence ATCN PAM
ugguaucugaaauaaaacau

SEQ ID NO: 7522 - RNA, 20 nt, Artificial Sequence
  HTT spacer sequence ATCN PAM
caaauagaaauaugaagaaa

SEQ ID NO: 7523 - RNA, 20 nt, Artificial Sequence
  HTT spacer sequence ATCN PAM
uguagugacugcucugcuca

SEQ ID NO: 7524 - RNA, 20 nt, Artificial Sequence
  HTT spacer sequence ATCN PAM
uuuaaaaauaaaaaaaacua

SEQ ID NO: 7525 - RNA, 20 nt, Artificial Sequence
  HTT spacer sequence ATCN PAM
cagccuccacagccuccccu

SEQ ID NO: 7526 - RNA, 20 nt, Artificial Sequence
  HTT spacer sequence ATCN PAM
caauggguaagggaagagga

SEQ ID NO: 7527 - RNA, 20 nt, Artificial Sequence
  HTT spacer sequence ATCN PAM
ucaggguauuccaaagcaca

SEQ ID NO: 7528 - RNA, 20 nt, Artificial Sequence
  HTT spacer sequence ATCN PAM
aacauaauccucaggguauu

SEQ ID NO: 7529 - RNA, 20 nt, Artificial Sequence
  HTT spacer sequence ATCN PAM
ucccaaagaugggacaucuu

SEQ ID NO: 7530 - RNA, 20 nt, Artificial Sequence
  HTT spacer sequence ATCN PAM
uugggaagaugcagaaacua

SEQ ID NO: 7531 - RNA, 20 nt, Artificial Sequence
  HTT spacer sequence ATCN PAM
ugacucaauguguaucauau

SEQ ID NO: 7532 - RNA, 20 nt, Artificial Sequence
  HTT spacer sequence ATCN PAM
uauuugaccuuauaaucacc

SEQ ID NO: 7533 - RNA, 20 nt, Artificial Sequence
  HTT spacer sequence ATCN PAM
cccucagaaccacaaaagaa

SEQ ID NO: 7534 - RNA, 20 nt, Artificial Sequence
  HTT spacer sequence ATCN PAM
aauugcuuuaacagcauuua

SEQ ID NO: 7535 - RNA, 20 nt, Artificial Sequence
  HTT spacer sequence ATCN PAM
ugaauacuguauaaauucaa

SEQ ID NO: 7536 - RNA, 20 nt, Artificial Sequence
  HTT spacer sequence ATCN PAM
aaugacuagaacagagcaug

SEQ ID NO: 7537 - RNA, 20 nt, Artificial Sequence
  HTT spacer sequence ATCN PAM
aaacauuuuaaacauaaaau

SEQ ID NO: 7538 - RNA, 20 nt, Artificial Sequence
  HTT spacer sequence ATCN PAM
aaagaaaucagaacaaagaa

SEQ ID NO: 7539 - RNA, 20 nt, Artificial Sequence
  HTT spacer sequence ATCN PAM
gaacaaagaaaugaaaacau

SEQ ID NO: 7540 - RNA, 20 nt, Artificial Sequence
  HTT spacer sequence ATCN PAM
uuaaagauuauuuacaugug

SEQ ID NO: 7541 - RNA, 20 nt, Artificial Sequence
  HTT spacer sequence ATCN PAM
guauagaaucauuaaagauu

SEQ ID NO: 7542 - RNA, 20 nt, Artificial Sequence
  HTT spacer sequence ATCN PAM
aaaauggcagaaaauaaucu

SEQ ID NO: 7543 - RNA, 20 nt, Artificial Sequence
  HTT spacer sequence ATCN PAM
caauugaagagagaugugaa

SEQ ID NO: 7544 - RNA, 20 nt, Artificial Sequence
  HTT spacer sequence ATCN PAM
cucuucaauugagauuauuc

SEQ ID NO: 7545 - RNA, 20 nt, Artificial Sequence
  HTT spacer sequence ATCN PAM
cucaguuuauucacaucucu

SEQ ID NO: 7546 - RNA, 20 nt, Artificial Sequence
  HTT spacer sequence ATCN PAM
cagcacuggcaaauuugaaa

SEQ ID NO: 7547 - RNA, 20 nt, Artificial Sequence
  HTT spacer sequence ATCN PAM
agguguugcuuuaagagaug

SEQ ID NO: 7548 - RNA, 20 nt, Artificial Sequence
  HTT spacer sequence ATCN PAM
cuuaaagcaacaccuagauu

SEQ ID NO: 7549 - RNA, 20 nt, Artificial Sequence
  HTT spacer sequence ATCN PAM
ugcuauacaucacagugauu

SEQ ID NO: 7550 - RNA, 20 nt, Artificial Sequence
  HTT spacer sequence ATCN PAM
cagugauuuuugugaugaaa

SEQ ID NO: 7551 - RNA, 20 nt, Artificial Sequence
  HTT spacer sequence ATCN PAM
cugugauguauagcaagauu

SEQ ID NO: 7552 - RNA, 20 nt, Artificial Sequence
  HTT spacer sequence ATCN PAM
caaaaaucacugugauguau

SEQ ID NO: 7553 - RNA, 20 nt, Artificial Sequence
  HTT spacer sequence ATCN PAM
acccaccugggccucccaaa

SEQ ID NO: 7554 - RNA, 20 nt, Artificial Sequence
  HTT spacer sequence ATCN PAM
cuugaggguaggaguuccaa

SEQ ID NO: 7555 - RNA, 20 nt, Artificial Sequence
  HTT spacer sequence ATCN PAM
ugggggagacagaguuuggg

SEQ ID NO: 7556 - RNA, 20 nt, Artificial Sequence
  HTT spacer sequence ATCN PAM
caaacucugucucccccacg

SEQ ID NO: 7557 - RNA, 20 nt, Artificial Sequence
  HTT spacer sequence ATCN PAM
acacuucucagauaaagaua

SEQ ID NO: 7558 - RNA, 20 nt, Artificial Sequence
  HTT spacer sequence ATCN PAM
gagaaguguugauuuucuuc

SEQ ID NO: 7559 - RNA, 20 nt, Artificial Sequence
  HTT spacer sequence ATCN PAM
uuaucugagaaguguugauu

SEQ ID NO: 7560 - RNA, 20 nt, Artificial Sequence
  HTT spacer sequence ATCN PAM
acuucuaagccuaugcagug

SEQ ID NO: 7561 - RNA, 20 nt, Artificial Sequence
  HTT spacer sequence ATCN PAM
aauccacuucuaagccuaug

SEQ ID NO: 7562 - RNA, 20 nt, Artificial Sequence
  HTT spacer sequence ATCN PAM
gugaauuugaagauacagca

SEQ ID NO: 7563 - RNA, 20 nt, Artificial Sequence
  HTT spacer sequence ATCN PAM
ucaaauucacugauuuucuu

SEQ ID NO: 7564 - RNA, 20 nt, Artificial Sequence
  HTT spacer sequence ATCN PAM
ggauaaaaaugauugcagca

SEQ ID NO: 7565 - RNA, 20 nt, Artificial Sequence
  HTT spacer sequence ATCN PAM
agaugcuucagacugggcca

SEQ ID NO: 7566 - RNA, 20 nt, Artificial Sequence
  HTT spacer sequence ATCN PAM
uuuuuauccagaugcuucag

SEQ ID NO: 7567 - RNA, 20 nt, Artificial Sequence
  HTT spacer sequence ATCN PAM
uguggcagacugcaugugga

SEQ ID NO: 7568 - RNA, 20 nt, Artificial Sequence
  HTT spacer sequence ATCN PAM
gucaccuuuauuucuucaac

SEQ ID NO: 7569 - RNA, 20 nt, Artificial Sequence
  HTT spacer sequence ATCN PAM
aagaaauccaacaaacccca

SEQ ID NO: 7570 - RNA, 20 nt, Artificial Sequence
  HTT spacer sequence ATCN PAM
aacaaaccccacacaggauu

SEQ ID NO: 7571 - RNA, 20 nt, Artificial Sequence
  HTT spacer sequence ATCN PAM
ugugugggguuuguuggauu

SEQ ID NO: 7572 - RNA, 20 nt, Artificial Sequence
  HTT spacer sequence ATCN PAM
cacccagaaacaucauagcc

SEQ ID NO: 7573 - RNA, 20 nt, Artificial Sequence
  HTT spacer sequence ATCN PAM
ugaaaauagccagaaacaau

SEQ ID NO: 7574 - RNA, 20 nt, Artificial Sequence
  HTT spacer sequence ATCN PAM
uuguucuuuucauguaaggu

SEQ ID NO: 7575 - RNA, 20 nt, Artificial Sequence
  HTT spacer sequence ATCN PAM
gaaauaauaguggucagagg

SEQ ID NO: 7576 - RNA, 20 nt, Artificial Sequence
  HTT spacer sequence ATCN PAM
cacuggccaaagccaaccag

SEQ ID NO: 7577 - RNA, 20 nt, Artificial Sequence
  HTT spacer sequence ATCN PAM
cugcugguguaucccacugg

SEQ ID NO: 7578 - RNA, 20 nt, Artificial Sequence
  HTT spacer sequence ATCN PAM
gacuccagagagagcacagc

SEQ ID NO: 7579 - RNA, 20 nt, Artificial Sequence
  HTT spacer sequence ATCN PAM
gcugggcuggcugaagccca

SEQ ID NO: 7580 - RNA, 20 nt, Artificial Sequence
  HTT spacer sequence ATCN PAM
ugcuggcgcuucccauuggc

SEQ ID NO: 7581 - RNA, 20 nt, Artificial Sequence
  HTT spacer sequence ATCN PAM
gugugugcuggcugcucagc

SEQ ID NO: 7582 - RNA, 20 nt, Artificial Sequence
  HTT spacer sequence ATCN PAM
ggcggggcgcauggcucaug

SEQ ID NO: 7583 - RNA, 20 nt, Artificial Sequence
  HTT spacer sequence ATCN PAM
caacacucaggaggcugagg

SEQ ID NO: 7584 - RNA, 20 nt, Artificial Sequence
  HTT spacer sequence ATCN PAM
uccuaccucagccuccugag

SEQ ID NO: 7585 - RNA, 20 nt, Artificial Sequence
  HTT spacer sequence ATCN PAM
cagcucacugcagccucaac

SEQ ID NO: 7586 - RNA, 20 nt, Artificial Sequence
  HTT spacer sequence ATCN PAM
cacugcuacacucuagccug

SEQ ID NO: 7587 - RNA, 20 nt, Artificial Sequence
  HTT spacer sequence ATCN PAM
caaaaaaaaaaaaaaaaaaa

SEQ ID NO: 7588 - RNA, 20 nt, Artificial Sequence
  HTT spacer sequence ATCN PAM
gcucacugauggugaauucc

SEQ ID NO: 7589 - RNA, 20 nt, Artificial Sequence
  HTT spacer sequence ATCN PAM
gugagcagaugaaauaaauu

SEQ ID NO: 7590 - RNA, 20 nt, Artificial Sequence
  HTT spacer sequence ATCN PAM
cauaguauauuuauauauuu

SEQ ID NO: 7591 - RNA, 20 nt, Artificial Sequence
  HTT spacer sequence ATCN PAM
gaugcuuugauauauguuua

SEQ ID NO: 7592 - RNA, 20 nt, Artificial Sequence
  HTT spacer sequence ATCN PAM
gauuguacaauuuuucauuu

SEQ ID NO: 7593 - RNA, 20 nt, Artificial Sequence
  HTT spacer sequence ATCN PAM
aagcaucagauuguacaauu

SEQ ID NO: 7594 - RNA, 20 nt, Artificial Sequence
  HTT spacer sequence ATCN PAM
uccagagcagcgccaagcca

SEQ ID NO: 7595 - RNA, 20 nt, Artificial Sequence
  HTT spacer sequence ATCN PAM
gcgcauaggcaggagccaag

SEQ ID NO: 7596 - RNA, 20 nt, Artificial Sequence
  HTT spacer sequence ATCN PAM
caaaaaaaaaaaaaaaagag

SEQ ID NO: 7597 - RNA, 20 nt, Artificial Sequence
  HTT spacer sequence ATCN PAM
cggcucacagcaaccuccgc

SEQ ID NO: 7598 - RNA, 20 nt, Artificial Sequence
  HTT spacer sequence ATCN PAM
aguguagacagagaggggac

SEQ ID NO: 7599 - RNA, 20 nt, Artificial Sequence
  HTT spacer sequence ATCN PAM
cuuuuucaggggaagaaacu

SEQ ID NO: 7600 - RNA, 20 nt, Artificial Sequence
  HTT spacer sequence ATCN PAM
uggccagugcuuuuggggac

SEQ ID NO: 7601 - RNA, 20 nt, Artificial Sequence
  HTT spacer sequence ATCN PAM
caaguccccaaaagcacugg

SEQ ID NO: 7602 - RNA, 20 nt, Artificial Sequence
  HTT spacer sequence ATCN PAM
ucucaaguccccaaaagcac

SEQ ID NO: 7603 - RNA, 20 nt, Artificial Sequence
  HTT spacer sequence ATCN PAM
ggugcccgggcccugcgugg

SEQ ID NO: 7604 - RNA, 20 nt, Artificial Sequence
  HTT spacer sequence ATCN PAM
uugcaguuaccagggcuaga

SEQ ID NO: 7605 - RNA, 20 nt, Artificial Sequence
  HTT spacer sequence ATCN PAM
gcaucauugcaguuaccagg

SEQ ID NO: 7606 - RNA, 20 nt, Artificial Sequence
  HTT spacer sequence ATCN PAM
agggucaagggcuggcuccc

SEQ ID NO: 7607 - RNA, 20 nt, Artificial Sequence
  HTT spacer sequence ATCN PAM
uaaacagggcagaaagggag

SEQ ID NO: 7608 - RNA, 20 nt, Artificial Sequence
  HTT spacer sequence ATCN PAM
uaaagcccagaccauuuuac

SEQ ID NO: 7609 - RNA, 20 nt, Artificial Sequence
  HTT spacer sequence ATCN PAM
cauagguauuuuuuuugguc

SEQ ID NO: 7610 - RNA, 20 nt, Artificial Sequence
  HTT spacer sequence ATCN PAM
aggaccaaaaaaaauaccua

SEQ ID NO: 7611 - RNA, 20 nt, Artificial Sequence
  HTT spacer sequence ATCN PAM
uuauuuuacucuccaauuac

SEQ ID NO: 7612 - RNA, 20 nt, Artificial Sequence
  HTT spacer sequence ATCN PAM
uugucuaaaauuuuauaccc

SEQ ID NO: 7613 - RNA, 20 nt, Artificial Sequence
  HTT spacer sequence ATCN PAM
aguuccaaccagacacaaga

SEQ ID NO: 7614 - RNA, 20 nt, Artificial Sequence
  HTT spacer sequence ATCN PAM
ucccacgcugcuaaaucaag

SEQ ID NO: 7615 - RNA, 20 nt, Artificial Sequence
  HTT spacer sequence ATCN PAM
cagcuucuggggauugggcc

SEQ ID NO: 7616 - RNA, 20 nt, Artificial Sequence
  HTT spacer sequence ATCN PAM
ccagaagcugugauugugac

SEQ ID NO: 7617 - RNA, 20 nt, Artificial Sequence
  HTT spacer sequence ATCN PAM
uuggggcugccguuugcccc

SEQ ID NO: 7618 - RNA, 20 nt, Artificial Sequence
  HTT spacer sequence ATCN PAM
gugcagagugagacuauaaa

SEQ ID NO: 7619 - RNA, 20 nt, Artificial Sequence
  HTT spacer sequence ATCN PAM
aguagagauaaaaagggaaa

SEQ ID NO: 7620 - RNA, 20 nt, Artificial Sequence
  HTT spacer sequence ATCN PAM
cuacuugauauuuacuucug

SEQ ID NO: 7621 - RNA, 20 nt, Artificial Sequence
  HTT spacer sequence ATCN PAM
cugcccaagcaccuguccca

SEQ ID NO: 7622 - RNA, 20 nt, Artificial Sequence
  HTT spacer sequence ATCN PAM
cuguuagaagaccucacauc

SEQ ID NO: 7623 - RNA, 20 nt, Artificial Sequence
  HTT spacer sequence ATCN PAM
cugcuggcuguuggccagag

SEQ ID NO: 7624 - RNA, 20 nt, Artificial Sequence
  HTT spacer sequence ATCN PAM
auuccuugucacgugggcgg

SEQ ID NO: 7625 - RNA, 20 nt, Artificial Sequence
  HTT spacer sequence ATCN PAM
accgucacucccugacccca

SEQ ID NO: 7626 - RNA, 20 nt, Artificial Sequence
  HTT spacer sequence ATCN PAM
auuaauaguaaagcuagcag

SEQ ID NO: 7627 - RNA, 20 nt, Artificial Sequence
  HTT spacer sequence ATCN PAM
cauaaguucagcuuauaguu

SEQ ID NO: 7628 - RNA, 20 nt, Artificial Sequence
  HTT spacer sequence ATCN PAM
gagcaauuuaaauugccaga

SEQ ID NO: 7629 - RNA, 20 nt, Artificial Sequence
  HTT spacer sequence ATCN PAM
aauauaaaaccaguuugcau

SEQ ID NO: 7630 - RNA, 20 nt, Artificial Sequence
  HTT spacer sequence ATCN PAM
cuuacuguauugcuuuuuaa

SEQ ID NO: 7631 - RNA, 20 nt, Artificial Sequence
  HTT spacer sequence ATCN PAM
cuuuaaaaagcaauacagua

SEQ ID NO: 7632 - RNA, 20 nt, Artificial Sequence
  HTT spacer sequence ATCN PAM
uuaaagagucuugcagaaga

SEQ ID NO: 7633 - RNA, 20 nt, Artificial Sequence
  HTT spacer sequence ATCN PAM
uucuccaccacucacuggua

SEQ ID NO: 7634 - RNA, 20 nt, Artificial Sequence
  HTT spacer sequence ATCN PAM
agcauuccuugaaauauggc

SEQ ID NO: 7635 - RNA, 20 nt, Artificial Sequence
  HTT spacer sequence ATCN PAM
gaauguuuagagcuggggag

SEQ ID NO: 7636 - RNA, 20 nt, Artificial Sequence
  HTT spacer sequence ATCN PAM
guagccggcccucccccggg

SEQ ID NO: 7637 - RNA, 20 nt, Artificial Sequence
  HTT spacer sequence ATCN PAM
gcagggcucccucucaugac

SEQ ID NO: 7638 - RNA, 20 nt, Artificial Sequence
  HTT spacer sequence ATCN PAM
ggucuccagcucggaggccc

SEQ ID NO: 7639 - RNA, 20 nt, Artificial Sequence
  HTT spacer sequence ATCN PAM
acgugaaaaaagcaucucau

SEQ ID NO: 7640 - RNA, 20 nt, Artificial Sequence
  HTT spacer sequence ATCN PAM
caugaagauguagugaaauu

SEQ ID NO: 7641 - RNA, 20 nt, Artificial Sequence
  HTT spacer sequence ATCN PAM
ucaugagaugcuuuuuucac

SEQ ID NO: 7642 - RNA, 20 nt, Artificial Sequence
  HTT spacer sequence ATCN PAM
ccaugugaaggacaccagag

SEQ ID NO: 7643 - RNA, 20 nt, Artificial Sequence
  HTT spacer sequence ATCN PAM
uguuccagugaugaagaagg

SEQ ID NO: 7644 - RNA, 20 nt, Artificial Sequence
  HTT spacer sequence ATCN PAM
cuggaacaggauucgaagcg

SEQ ID NO: 7645 - RNA, 20 nt, Artificial Sequence
  HTT spacer sequence ATCN PAM
agcuugggcuucagccagcc

SEQ ID NO: 7646 - RNA, 20 nt, Artificial Sequence
  HTT spacer sequence ATCN PAM
uauugaaaauuccaccagac

SEQ ID NO: 7647 - RNA, 20 nt, Artificial Sequence
  HTT spacer sequence ATCN PAM
uuguuucaauuucaagggcu

SEQ ID NO: 7648 - RNA, 20 nt, Artificial Sequence
  HTT spacer sequence ATCN PAM
cuuucagagucggccgcaac

SEQ ID NO: 7649 - RNA, 20 nt, Artificial Sequence
  HTT spacer sequence ATCN PAM
aguugcggccgacucugaaa

SEQ ID NO: 7650 - RNA, 20 nt, Artificial Sequence
  HTT spacer sequence ATCN PAM
aaucgaguugcggccgacuc

SEQ ID NO: 7651 - RNA, 20 nt, Artificial Sequence
  HTT spacer sequence ATCN PAM
aaaucccaacaugcuuucua

SEQ ID NO: 7652 - RNA, 20 nt, Artificial Sequence
  HTT spacer sequence ATCN PAM
caacaugcuuucuaaggagg

SEQ ID NO: 7653 - RNA, 20 nt, Artificial Sequence
  HTT spacer sequence ATCN PAM
aaaguuauucaugaugauuc

SEQ ID NO: 7654 - RNA, 20 nt, Artificial Sequence
  HTT spacer sequence ATCN PAM
ugaauaacuuuugauauuuc

SEQ ID NO: 7655 - RNA, 20 nt, Artificial Sequence
  HTT spacer sequence ATCN PAM
ucaugaauaacuuuugauau

SEQ ID NO: 7656 - RNA, 20 nt, Artificial Sequence
  HTT spacer sequence ATCN PAM
ucaugacuuucuaguccaau

SEQ ID NO: 7657 - RNA, 20 nt, Artificial Sequence
  HTT spacer sequence ATCN PAM
aaugcaaaaucgucaugacu

SEQ ID NO: 7658 - RNA, 20 nt, Artificial Sequence
  HTT spacer sequence ATCN PAM
ccacguuuaaaauacuugca

SEQ ID NO: 7659 - RNA, 20 nt, Artificial Sequence
  HTT spacer sequence ATCN PAM
ucgccacguuuaaaauacuu

SEQ ID NO: 7660 - RNA, 20 nt, Artificial Sequence
  HTT spacer sequence ATCN PAM
ugggcuacuuaggcuccauu

SEQ ID NO: 7661 - RNA, 20 nt, Artificial Sequence
  HTT spacer sequence ATCN PAM
gcggcugcaugcggcgccug

SEQ ID NO: 7662 - RNA, 20 nt, Artificial Sequence
  HTT spacer sequence ATCN PAM
acucgcuggugaccaugaag

SEQ ID NO: 7663 - RNA, 20 nt, Artificial Sequence
  HTT spacer sequence ATCN PAM
ucauggucaccagcgagugg

SEQ ID NO: 7664 - RNA, 20 nt, Artificial Sequence
  HTT spacer sequence ATCN PAM
ugcacgacugugugcagcug

SEQ ID NO: 7665 - RNA, 20 nt, Artificial Sequence
  HTT spacer sequence ATCN PAM
ccggucguccgggcacacgg

SEQ ID NO: 7666 - RNA, 20 nt, Artificial Sequence
  HTT spacer sequence ATCN PAM
caagauccaccaaggcauug

SEQ ID NO: 7667 - RNA, 20 nt, Artificial Sequence
  HTT spacer sequence ATCN PAM
ugugauuaaacaagucuggg

SEQ ID NO: 7668 - RNA, 20 nt, Artificial Sequence
  HTT spacer sequence ATCN PAM
accaaggcauugcucggcgg

SEQ ID NO: 7669 - RNA, 20 nt, Artificial Sequence
  HTT spacer sequence ATCN PAM
cuguccuguaccgagacaug

SEQ ID NO: 7670 - RNA, 20 nt, Artificial Sequence
  HTT spacer sequence ATCN PAM
gcucacccaugucucgguac

SEQ ID NO: 7671 - RNA, 20 nt, Artificial Sequence
  HTT spacer sequence ATCN PAM
gcguccccguccagaaaggc

SEQ ID NO: 7672 - RNA, 20 nt, Artificial Sequence
  HTT spacer sequence ATCN PAM
gacugacagguucugggacc

SEQ ID NO: 7673 - RNA, 20 nt, Artificial Sequence
  HTT spacer sequence ATCN PAM
guguaagaguccuggucgcu

SEQ ID NO: 7674 - RNA, 20 nt, Artificial Sequence
  HTT spacer sequence ATCN PAM
guggaaucuguguaagaguc

SEQ ID NO: 7675 - RNA, 20 nt, Artificial Sequence
  HTT spacer sequence ATCN PAM
acugcggcacacugcccccu

SEQ ID NO: 7676 - RNA, 20 nt, Artificial Sequence
  HTT spacer sequence ATCN PAM
ugcucauaggagggggcagu

SEQ ID NO: 7677 - RNA, 20 nt, Artificial Sequence
  HTT spacer sequence ATCN PAM
ccgcagaccgcuacagggug

SEQ ID NO: 7678 - RNA, 20 nt, Artificial Sequence
  HTT spacer sequence ATCN PAM
aaauguucgaaagacuaagg

SEQ ID NO: 7679 - RNA, 20 nt, Artificial Sequence
  HTT spacer sequence ATCN PAM
uccuuagucuuucgaacauu

SEQ ID NO: 7680 - RNA, 20 nt, Artificial Sequence
  HTT spacer sequence ATCN PAM
uaaacagccggaguaguuuc

SEQ ID NO: 7681 - RNA, 20 nt, Artificial Sequence
  HTT spacer sequence ATCN PAM
ugagaccauccuaagaagac

SEQ ID NO: 7682 - RNA, 20 nt, Artificial Sequence
  HTT spacer sequence ATCN PAM
uaagaagacccucuaaggcu

SEQ ID NO: 7683 - RNA, 20 nt, Artificial Sequence
  HTT spacer sequence ATCN PAM
gacucaccuaacuacacagg

SEQ ID NO: 7684 - RNA, 20 nt, Artificial Sequence
  HTT spacer sequence ATCN PAM
cauagccuccccaguuagag

SEQ ID NO: 7685 - RNA, 20 nt, Artificial Sequence
  HTT spacer sequence ATCN PAM
uguggccgccucaugacccc

SEQ ID NO: 7686 - RNA, 20 nt, Artificial Sequence
  HTT spacer sequence ATCN PAM
uugucagcuucucccuccuc

SEQ ID NO: 7687 - RNA, 20 nt, Artificial Sequence
  HTT spacer sequence ATCN PAM
auuguauggaaauuuuaaga

SEQ ID NO: 7688 - RNA, 20 nt, Artificial Sequence
  HTT spacer sequence ATCN PAM
caaauaacauauuuucauuu

SEQ ID NO: 7689 - RNA, 20 nt, Artificial Sequence
  HTT spacer sequence ATCN PAM
uuuacauaucacaaauaaca

SEQ ID NO: 7690 - RNA, 20 nt, Artificial Sequence
  HTT spacer sequence ATCN PAM
auccuuuacauaucacaaau

SEQ ID NO: 7691 - RNA, 20 nt, Artificial Sequence
  HTT spacer sequence ATCN PAM
guccccaguugauggcaacc

SEQ ID NO: 7692 - RNA, 20 nt, Artificial Sequence
  HTT spacer sequence ATCN PAM
acuggggacugauucaguaa

SEQ ID NO: 7693 - RNA, 20 nt, Artificial Sequence
  HTT spacer sequence ATCN PAM
aggaaccuacccaaaagaaa

SEQ ID NO: 7694 - RNA, 20 nt, Artificial Sequence
  HTT spacer sequence ATCN PAM
aaauaacacaaauucuccuu

SEQ ID NO: 7695 - RNA, 20 nt, Artificial Sequence
  HTT spacer sequence ATCN PAM
guggcucacguugccaagcu

SEQ ID NO: 7696 - RNA, 20 nt, Artificial Sequence
  HTT spacer sequence ATCN PAM
cugggaaagcuagcucuggg

SEQ ID NO: 7697 - RNA, 20 nt, Artificial Sequence
  HTT spacer sequence ATCN PAM
gccaucgcugggaaagcuag

SEQ ID NO: 7698 - RNA, 20 nt, Artificial Sequence
  HTT spacer sequence ATCN PAM
ugucauaucuguugucgugg

SEQ ID NO: 7699 - RNA, 20 nt, Artificial Sequence
  HTT spacer sequence ATCN PAM
guugucgugggucuugauag

SEQ ID NO: 7700 - RNA, 20 nt, Artificial Sequence
  HTT spacer sequence ATCN PAM
agacccacgacaacagauau

SEQ ID NO: 7701 - RNA, 20 nt, Artificial Sequence
  HTT spacer sequence ATCN PAM
caggacgcaggcaggcagga

SEQ ID NO: 7702 - RNA, 20 nt, Artificial Sequence
  HTT spacer sequence ATCN PAM
cacgugacguggcucccacu

SEQ ID NO: 7703 - RNA, 20 nt, Artificial Sequence
  HTT spacer sequence ATCN PAM
ccacccgcugagccuucucg

SEQ ID NO: 7704 - RNA, 20 nt, Artificial Sequence
  HTT spacer sequence ATCN PAM
accccugcuggaaggacaag

SEQ ID NO: 7705 - RNA, 20 nt, Artificial Sequence
  HTT spacer sequence ATCN PAM
cuuaguggggauguccccug

SEQ ID NO: 7706 - RNA, 20 nt, Artificial Sequence
  HTT spacer sequence ATCN PAM
ccacuaagagauggaccacu

SEQ ID NO: 7707 - RNA, 20 nt, Artificial Sequence
  HTT spacer sequence ATCN PAM
caggaggugcuuucagccau

SEQ ID NO: 7708 - RNA, 20 nt, Artificial Sequence
  HTT spacer sequence ATCN PAM
uccaugaauggcugaaagca

SEQ ID NO: 7709 - RNA, 20 nt, Artificial Sequence
  HTT spacer sequence ATCN PAM
ggcugcaguggcaaagggcc

SEQ ID NO: 7710 - RNA, 20 nt, Artificial Sequence
  HTT spacer sequence ATCN PAM
ucuuggccaucugcugcugc

SEQ ID NO: 7711 - RNA, 20 nt, Artificial Sequence
  HTT spacer sequence ATCN PAM
gcugcugcaugguggcaggg

SEQ ID NO: 7712 - RNA, 20 nt, Artificial Sequence
  HTT spacer sequence ATCN PAM
uagguagcuggagaagaggc

SEQ ID NO: 7713 - RNA, 20 nt, Artificial Sequence
  HTT spacer sequence ATCN PAM
guguuuuauuuauuugccaa

SEQ ID NO: 7714 - RNA, 20 nt, Artificial Sequence
  HTT spacer sequence ATCN PAM
gccaaaggggaaaaauugaa

SEQ ID NO: 7715 - RNA, 20 nt, Artificial Sequence
  HTT spacer sequence ATCN PAM
ccuuucagaaaacuccuccc

SEQ ID NO: 7716 - RNA, 20 nt, Artificial Sequence
  HTT spacer sequence ATCN PAM
uuuacccuccaagcaugcau

SEQ ID NO: 7717 - RNA, 20 nt, Artificial Sequence
  HTT spacer sequence ATCN PAM
uauccuuuacccuccaagca

SEQ ID NO: 7718 - RNA, 20 nt, Artificial Sequence
  HTT spacer sequence ATCN PAM
aaauaaaacuuaagccgcau

SEQ ID NO: 7719 - RNA, 20 nt, Artificial Sequence
  HTT spacer sequence ATCN PAM
aacaaaucaaaauaaaacuu

SEQ ID NO: 7720 - RNA, 20 nt, Artificial Sequence
  HTT spacer sequence ATCN PAM
auuaguaaauuugguuacuu

SEQ ID NO: 7721 - RNA, 20 nt, Artificial Sequence
  HTT spacer sequence ATCN PAM
aaaagauaauacgcuaugau

SEQ ID NO: 7722 - RNA, 20 nt, Artificial Sequence
  HTT spacer sequence ATCN PAM
uuuugaugugcugcuugagu

SEQ ID NO: 7723 - RNA, 20 nt, Artificial Sequence
  HTT spacer sequence ATCN PAM
uagcguauuaucuuuuugau

SEQ ID NO: 7724 - RNA, 20 nt, Artificial Sequence
  HTT spacer sequence ATCN PAM
cuggcacauaacacaucaua

SEQ ID NO: 7725 - RNA, 20 nt, Artificial Sequence
  HTT spacer sequence ATCN PAM
uugcaucccuggcacauaac

SEQ ID NO: 7726 - RNA, 20 nt, Artificial Sequence
  HTT spacer sequence ATCN PAM
auaaaugugauauaucccau

SEQ ID NO: 7727 - RNA, 20 nt, Artificial Sequence
  HTT spacer sequence ATCN PAM
cauuuauugauuugcauaug

SEQ ID NO: 7728 - RNA, 20 nt, Artificial Sequence
  HTT spacer sequence ATCN PAM
cuccuauucaacauaguacu

SEQ ID NO: 7729 - RNA, 20 nt, Artificial Sequence
  HTT spacer sequence ATCN PAM
ugguuugcugaugacauaau

SEQ ID NO: 7730 - RNA, 20 nt, Artificial Sequence
  HTT spacer sequence ATCN PAM
uaggucacuguaaccucaaa

SEQ ID NO: 7731 - RNA, 20 nt, Artificial Sequence
  HTT spacer sequence ATCN PAM
cuugaguccaagaguuugag

SEQ ID NO: 7732 - RNA, 20 nt, Artificial Sequence
  HTT spacer sequence ATCN PAM
ucccgccucagccucccaag

SEQ ID NO: 7733 - RNA, 20 nt, Artificial Sequence
  HTT spacer sequence ATCN PAM
guaguauuucuuuauaccaa

SEQ ID NO: 7734 - RNA, 20 nt, Artificial Sequence
  HTT spacer sequence ATCN PAM
uuauugguauaaagaaauac

SEQ ID NO: 7735 - RNA, 20 nt, Artificial Sequence
  HTT spacer sequence ATCN PAM
agcugagaaagaaaucaagg

SEQ ID NO: 7736 - RNA, 20 nt, Artificial Sequence
  HTT spacer sequence ATCN PAM
aggaagcaaucccauuuaca

SEQ ID NO: 7737 - RNA, 20 nt, Artificial Sequence
  HTT spacer sequence ATCN PAM
cauuuacaauaacuacaaaa

SEQ ID NO: 7738 - RNA, 20 nt, Artificial Sequence
  HTT spacer sequence ATCN PAM
acauauucaauguaaucccu

SEQ ID NO: 7739 - RNA, 20 nt, Artificial Sequence
  HTT spacer sequence ATCN PAM
cuaccaaaauaccuacguaa

SEQ ID NO: 7740 - RNA, 20 nt, Artificial Sequence
  HTT spacer sequence ATCN PAM
uaaaauuuauauggaaccaa

SEQ ID NO: 7741 - RNA, 20 nt, Artificial Sequence
  HTT spacer sequence ATCN PAM
ccagcuuuguucuuuuugcu

SEQ ID NO: 7742 - RNA, 20 nt, Artificial Sequence
  HTT spacer sequence ATCN PAM
cagauggccacucugcucac

SEQ ID NO: 7743 - RNA, 20 nt, Artificial Sequence
  HTT spacer sequence ATCN PAM
guuaccuggccugacuuuuc

SEQ ID NO: 7744 - RNA, 20 nt, Artificial Sequence
  HTT spacer sequence ATCN PAM
agacuggacaugguuaguag

SEQ ID NO: 7745 - RNA, 20 nt, Artificial Sequence
  HTT spacer sequence ATCN PAM
aaaaaaauauuaagugccuu

SEQ ID NO: 7746 - RNA, 20 nt, Artificial Sequence
  HTT spacer sequence ATCN PAM
augugcugaaccugaaacuc

SEQ ID NO: 7747 - RNA, 20 nt, Artificial Sequence
  HTT spacer sequence ATCN PAM
auuuugaaacuuccucucau

SEQ ID NO: 7748 - RNA, 20 nt, Artificial Sequence
  HTT spacer sequence ATCN PAM
acacuuuuuuuuuuuuuaca

SEQ ID NO: 7749 - RNA, 20 nt, Artificial Sequence
  HTT spacer sequence ATCN PAM
cggcacuuugggaggccaag

SEQ ID NO: 7750 - RNA, 20 nt, Artificial Sequence
  HTT spacer sequence ATCN PAM
guuuugaccucaaguaguaa

SEQ ID NO: 7751 - RNA, 20 nt, Artificial Sequence
  HTT spacer sequence ATCN PAM
caaugaaugcaaaauaacaa

SEQ ID NO: 7752 - RNA, 20 nt, Artificial Sequence
  HTT spacer sequence ATCN PAM
uguuucugccuuuugaugcu

SEQ ID NO: 7753 - RNA, 20 nt, Artificial Sequence
  HTT spacer sequence ATCN PAM
aaaggcagaaacaugaucuc

SEQ ID NO: 7754 - RNA, 20 nt, Artificial Sequence
  HTT spacer sequence ATCN PAM
uuguaauuugccauguuagc

SEQ ID NO: 7755 - RNA, 20 nt, Artificial Sequence
  HTT spacer sequence ATCN PAM
aucauuguaauuugccaugu

SEQ ID NO: 7756 - RNA, 20 nt, Artificial Sequence
  HTT spacer sequence ATCN PAM
caggaaugcaaguauggucu

SEQ ID NO: 7757 - RNA, 20 nt, Artificial Sequence
  HTT spacer sequence ATCN PAM
guguauaaaaaaugaucaua

SEQ ID NO: 7758 - RNA, 20 nt, Artificial Sequence
  HTT spacer sequence ATCN PAM
cguacuuucccuucucauua

SEQ ID NO: 7759 - RNA, 20 nt, Artificial Sequence
  HTT spacer sequence ATCN PAM
uauauuuuauuuuuauccuc

SEQ ID NO: 7760 - RNA, 20 nt, Artificial Sequence
  HTT spacer sequence ATCN PAM
ucccuccagaggauuucaau

SEQ ID NO: 7761 - RNA, 20 nt, Artificial Sequence
  HTT spacer sequence ATCN PAM
ucuggagggaggauaaaaau

SEQ ID NO: 7762 - RNA, 20 nt, Artificial Sequence
  HTT spacer sequence ATCN PAM
cuaauuuuaaaauuuuuaaa

SEQ ID NO: 7763 - RNA, 20 nt, Artificial Sequence
  HTT spacer sequence ATCN PAM
ggugaaagcagccuuuucug

SEQ ID NO: 7764 - RNA, 20 nt, Artificial Sequence
  HTT spacer sequence ATCN PAM
gccacuuauaguaacaauuc

SEQ ID NO: 7765 - RNA, 20 nt, Artificial Sequence
  HTT spacer sequence ATCN PAM
ucuucuugagcugucagaac

SEQ ID NO: 7766 - RNA, 20 nt, Artificial Sequence
  HTT spacer sequence ATCN PAM
ggcagaugcgggucacugau

SEQ ID NO: 7767 - RNA, 20 nt, Artificial Sequence
  HTT spacer sequence ATCN PAM
gugacccgcaucugccugau

SEQ ID NO: 7768 - RNA, 20 nt, Artificial Sequence
  HTT spacer sequence ATCN PAM
cagagccaagacucaaugug

SEQ ID NO: 7769 - RNA, 20 nt, Artificial Sequence
  HTT spacer sequence ATCN PAM
acuuuuucuagguucucccu

SEQ ID NO: 7770 - RNA, 20 nt, Artificial Sequence
  HTT spacer sequence ATCN PAM
aaacaaaacaaaacauaagg

SEQ ID NO: 7771 - RNA, 20 nt, Artificial Sequence
  HTT spacer sequence ATCN PAM
uaggcccuaagauauuuugg

SEQ ID NO: 7772 - RNA, 20 nt, Artificial Sequence
  HTT spacer sequence ATCN PAM
uagggccuaugaugucccaa

SEQ ID NO: 7773 - RNA, 20 nt, Artificial Sequence
  HTT spacer sequence ATCN PAM
cuacuuaaaugucuuuucau

SEQ ID NO: 7774 - RNA, 20 nt, Artificial Sequence
  HTT spacer sequence ATCN PAM
acaaaauuccauuucaaaca

SEQ ID NO: 7775 - RNA, 20 nt, Artificial Sequence
  HTT spacer sequence ATCN PAM
guuacaaaacucugugcggc

SEQ ID NO: 7776 - RNA, 20 nt, Artificial Sequence
  HTT spacer sequence ATCN PAM
caggaaggcugggcgcagug

SEQ ID NO: 7777 - RNA, 20 nt, Artificial Sequence
  HTT spacer sequence ATCN PAM
aaauaauaucacaggaaggc

SEQ ID NO: 7778 - RNA, 20 nt, Artificial Sequence
  HTT spacer sequence ATCN PAM
ugucgcaaucuaaauaauau

SEQ ID NO: 7779 - RNA, 20 nt, Artificial Sequence
  HTT spacer sequence ATCN PAM
acaaucaugucgcaaucuaa

SEQ ID NO: 7780 - RNA, 20 nt, Artificial Sequence
  HTT spacer sequence ATCN PAM
uccacaaucaugucgcaauc

SEQ ID NO: 7781 - RNA, 20 nt, Artificial Sequence
  HTT spacer sequence ATCN PAM
gugacguggcugccccagag

SEQ ID NO: 7782 - RNA, 20 nt, Artificial Sequence
  HTT spacer sequence ATCN PAM
gaggcucuggggcagccacg

SEQ ID NO: 7783 - RNA, 20 nt, Artificial Sequence
  HTT spacer sequence ATCN PAM
cuucacuguccucucauugg

SEQ ID NO: 7784 - RNA, 20 nt, Artificial Sequence
  HTT spacer sequence ATCN PAM
aucucuucacuguccucuca

SEQ ID NO: 7785 - RNA, 20 nt, Artificial Sequence
  HTT spacer sequence ATCN PAM
uccucccccgcagagucugu

SEQ ID NO: 7786 - RNA, 20 nt, Artificial Sequence
  HTT spacer sequence ATCN PAM
gggguccacugccagcccug

SEQ ID NO: 7787 - RNA, 20 nt, Artificial Sequence
  HTT spacer sequence ATCN PAM
ugucugaccaccccaaccuc

SEQ ID NO: 7788 - RNA, 20 nt, Artificial Sequence
  HTT spacer sequence ATCN PAM
cggcagcaccuucucguucg

SEQ ID NO: 7789 - RNA, 20 nt, Artificial Sequence
  HTT spacer sequence ATCN PAM
aggcaggaaccccuuccugc

SEQ ID NO: 7790 - RNA, 20 nt, Artificial Sequence
  HTT spacer sequence ATCN PAM
cugggcaggcacucugcugc

SEQ ID NO: 7791 - RNA, 20 nt, Artificial Sequence
  HTT spacer sequence ATCN PAM
gaucaaacacggguuugucc

SEQ ID NO: 7792 - RNA, 20 nt, Artificial Sequence
  HTT spacer sequence ATCN PAM
gaucccugggcaggcacucu

SEQ ID NO: 7793 - RNA, 20 nt, Artificial Sequence
  HTT spacer sequence ATCN PAM
aacacggguuuguccagccu

SEQ ID NO: 7794 - RNA, 20 nt, Artificial Sequence
  HTT spacer sequence ATCN PAM
guguccccuggugagccagc

SEQ ID NO: 7795 - RNA, 20 nt, Artificial Sequence
  HTT spacer sequence ATCN PAM
gaagaggcuggcucaccagg

SEQ ID NO: 7796 - RNA, 20 nt, Artificial Sequence
  HTT spacer sequence ATCN PAM
gggcgaccuggcacugcacu

SEQ ID NO: 7797 - RNA, 20 nt, Artificial Sequence
  HTT spacer sequence ATCN PAM
gggcucccguuggggccgcc

SEQ ID NO: 7798 - RNA, 20 nt, Artificial Sequence
  HTT spacer sequence ATCN PAM
ggugcccgcccacccaagca

SEQ ID NO: 7799 - RNA, 20 nt, Artificial Sequence
  HTT spacer sequence ATCN PAM
ggggcuuggcucugggcuug

SEQ ID NO: 7800 - RNA, 20 nt, Artificial Sequence
  HTT spacer sequence ATCN PAM
cugcccucccacaggagugg

SEQ ID NO: 7801 - RNA, 20 nt, Artificial Sequence
  HTT spacer sequence ATCN PAM
ugcccuguaagugacacaca

SEQ ID NO: 7802 - RNA, 20 nt, Artificial Sequence
  HTT spacer sequence ATCN PAM
caacaugucugacauuacag

SEQ ID NO: 7803 - RNA, 20 nt, Artificial Sequence
  HTT spacer sequence ATCN PAM
guucuuuucacaugaaaagg

SEQ ID NO: 7804 - RNA, 20 nt, Artificial Sequence
  HTT spacer sequence ATCN PAM
uuuucaugugaaaagaacag

SEQ ID NO: 7805 - RNA, 20 nt, Artificial Sequence
  HTT spacer sequence ATCN PAM
gaggaacacaaggggcagac

SEQ ID NO: 7806 - RNA, 20 nt, Artificial Sequence
  HTT spacer sequence ATCN PAM
gacacaguugcagacugaaa

SEQ ID NO: 7807 - RNA, 20 nt, Artificial Sequence
  HTT spacer sequence ATCN PAM
gaaauugugacuuaccgcca

SEQ ID NO: 7808 - RNA, 20 nt, Artificial Sequence
  HTT spacer sequence ATCN PAM
aauggcaaauacacuuucac

SEQ ID NO: 7809 - RNA, 20 nt, Artificial Sequence
  HTT spacer sequence ATCN PAM
cacugguguucagggccaug

SEQ ID NO: 7810 - RNA, 20 nt, Artificial Sequence
  HTT spacer sequence ATCN PAM
uaacuugcugguuuaaaagc

SEQ ID NO: 7811 - RNA, 20 nt, Artificial Sequence
  HTT spacer sequence ATCN PAM
cacacucucaauucgucuau

SEQ ID NO: 7812 - RNA, 20 nt, Artificial Sequence
  HTT spacer sequence ATCN PAM
aaaacuuacuuucuguguuu

SEQ ID NO: 7813 - RNA, 20 nt, Artificial Sequence
  HTT spacer sequence ATCN PAM
cugugcacaaaauucuuuaa

SEQ ID NO: 7814 - RNA, 20 nt, Artificial Sequence
  HTT spacer sequence ATCN PAM
guccaugaaaagaaucccug

SEQ ID NO: 7815 - RNA, 20 nt, Artificial Sequence
  HTT spacer sequence ATCN PAM
ucagugaaauaagacauucc

SEQ ID NO: 7816 - RNA, 20 nt, Artificial Sequence
  HTT spacer sequence ATCN PAM
gagaaaucuucagugaaaua

SEQ ID NO: 7817 - RNA, 20 nt, Artificial Sequence
  HTT spacer sequence ATCN PAM
uuaucauuuugguucaauga

SEQ ID NO: 7818 - RNA, 20 nt, Artificial Sequence
  HTT spacer sequence ATCN PAM
uuuugguucaaugauuuaaa

SEQ ID NO: 7819 - RNA, 20 nt, Artificial Sequence
  HTT spacer sequence ATCN PAM
uugaaccaaaaugauaagga

SEQ ID NO: 7820 - RNA, 20 nt, Artificial Sequence
  HTT spacer sequence ATCN PAM
ucaccucacgcuuuuguccc

SEQ ID NO: 7821 - RNA, 20 nt, Artificial Sequence
  HTT spacer sequence ATCN PAM
cugugggccagggaugggcu

SEQ ID NO: 7822 - RNA, 20 nt, Artificial Sequence
  HTT spacer sequence ATCN PAM
cuggcccacagcgaugccag

SEQ ID NO: 7823 - RNA, 20 nt, Artificial Sequence
  HTT spacer sequence ATCN PAM
uggguuacacacgcacuggc

SEQ ID NO: 7824 - RNA, 20 nt, Artificial Sequence
  HTT spacer sequence ATCN PAM
cucuggucucggcuucaggu

SEQ ID NO: 7825 - RNA, 20 nt, Artificial Sequence
  HTT spacer sequence ATCN PAM
cgacacucgugugguggaga

SEQ ID NO: 7826 - RNA, 20 nt, Artificial Sequence
  HTT spacer sequence ATCN PAM
ccaccacacgagugucggga

SEQ ID NO: 7827 - RNA, 20 nt, Artificial Sequence
  HTT spacer sequence ATCN PAM
ugucauuuaaucagucuuaa

SEQ ID NO: 7828 - RNA, 20 nt, Artificial Sequence
  HTT spacer sequence ATCN PAM
gucuuaagguggagggagga

SEQ ID NO: 7829 - RNA, 20 nt, Artificial Sequence
  HTT spacer sequence ATCN PAM
ucccuccaccuuaagacuga

SEQ ID NO: 7830 - RNA, 20 nt, Artificial Sequence
  HTT spacer sequence ATCN PAM
aggauaaagugaccgguguu

SEQ ID NO: 7831 - RNA, 20 nt, Artificial Sequence
  HTT spacer sequence ATCN PAM
uggauuugguuccggguccu

SEQ ID NO: 7832 - RNA, 20 nt, Artificial Sequence
  HTT spacer sequence ATCN PAM
uucaaaacaccggucacuuu

SEQ ID NO: 7833 - RNA, 20 nt, Artificial Sequence
  HTT spacer sequence ATCN PAM
guucaugcuuucucuuucug

SEQ ID NO: 7834 - RNA, 20 nt, Artificial Sequence
  HTT spacer sequence ATCN PAM
uucauguauaaauugccugc

SEQ ID NO: 7835 - RNA, 20 nt, Artificial Sequence
  HTT spacer sequence ATCN PAM
uuuggaggcaaauaaaacuu

SEQ ID NO: 7836 - RNA, 20 nt, Artificial Sequence
  HTT spacer sequence ATCN PAM
auugcugacagaagcaaucu

SEQ ID NO: 7837 - RNA, 20 nt, Artificial Sequence
  HTT spacer sequence ATCN PAM
uggccacgcagagauccccu

SEQ ID NO: 7838 - RNA, 20 nt, Artificial Sequence
  HTT spacer sequence ATCN PAM
cugcguggccaggauacacu

SEQ ID NO: 7839 - RNA, 20 nt, Artificial Sequence
  HTT spacer sequence ATCN PAM
ccuggugcuagggcuuucca

SEQ ID NO: 7840 - RNA, 20 nt, Artificial Sequence
  HTT spacer sequence ATCN PAM
gcacacccugaauuucagga

SEQ ID NO: 7841 - RNA, 20 nt, Artificial Sequence
  HTT spacer sequence ATCN PAM
agcccgcccacugcgguucc

SEQ ID NO: 7842 - RNA, 20 nt, Artificial Sequence
  HTT spacer sequence ATCN PAM
ucaguuucuuugcuuauaag

SEQ ID NO: 7843 - RNA, 20 nt, Artificial Sequence
  HTT spacer sequence ATCN PAM
uguuuaaugugcacaugagc

SEQ ID NO: 7844 - RNA, 20 nt, Artificial Sequence
  HTT spacer sequence ATCN PAM
agagcucaugugcacauuaa

SEQ ID NO: 7845 - RNA, 20 nt, Artificial Sequence
  HTT spacer sequence ATCN PAM
gugucacauucugccguugu

SEQ ID NO: 7846 - RNA, 20 nt, Artificial Sequence
  HTT spacer sequence ATCN PAM
aacaacggcagaaugugaca

SEQ ID NO: 7847 - RNA, 20 nt, Artificial Sequence
  HTT spacer sequence ATCN PAM
ccccacucugccucggugcc

SEQ ID NO: 7848 - RNA, 20 nt, Artificial Sequence
  HTT spacer sequence ATCN PAM
agcagcucacaguagucugc

SEQ ID NO: 7849 - RNA, 20 nt, Artificial Sequence
  HTT spacer sequence ATCN PAM
caccugcagacuacugugag

SEQ ID NO: 7850 - RNA, 20 nt, Artificial Sequence
  HTT spacer sequence ATCN PAM
cuguguggaaacacagccag

SEQ ID NO: 7851 - RNA, 20 nt, Artificial Sequence
  HTT spacer sequence ATCN PAM
uuuuauaggcuguggucagu

SEQ ID NO: 7852 - RNA, 20 nt, Artificial Sequence
  HTT spacer sequence ATCN PAM
gcucagcugggcugucucug

SEQ ID NO: 7853 - RNA, 20 nt, Artificial Sequence
  HTT spacer sequence ATCN PAM
ugucuaguuuuggugauuaa

SEQ ID NO: 7854 - RNA, 20 nt, Artificial Sequence
  HTT spacer sequence ATCN PAM
ccaaaacuagacaggaugac

SEQ ID NO: 7855 - RNA, 20 nt, Artificial Sequence
  HTT spacer sequence ATCN PAM
auuaaucaccaaaacuagac

SEQ ID NO: 7856 - RNA, 20 nt, Artificial Sequence
  HTT spacer sequence ATCN PAM
cucacuuagaaauauuuugu

SEQ ID NO: 7857 - RNA, 20 nt, Artificial Sequence
  HTT spacer sequence ATCN PAM
ugcuuuuauagcuuaggcuc

SEQ ID NO: 7858 - RNA, 20 nt, Artificial Sequence
  HTT spacer sequence ATCN PAM
uugucaaguuggaguguguu

SEQ ID NO: 7859 - RNA, 20 nt, Artificial Sequence
  HTT spacer sequence ATCN PAM
gccccuuucuucugaaaaag

SEQ ID NO: 7860 - RNA, 20 nt, Artificial Sequence
  HTT spacer sequence ATCN PAM
gcucccugcccccacccaca

SEQ ID NO: 7861 - RNA, 20 nt, Artificial Sequence
  HTT spacer sequence ATCN PAM
cccuccagcucgaccucaca

SEQ ID NO: 7862 - RNA, 20 nt, Artificial Sequence
  HTT spacer sequence ATCN PAM
uccuuuucucauuucuucac

SEQ ID NO: 7863 - RNA, 20 nt, Artificial Sequence
  HTT spacer sequence ATCN PAM
ccucacccacugcagccucc

SEQ ID NO: 7864 - RNA, 20 nt, Artificial Sequence
  HTT spacer sequence ATCN PAM
accuguggaggcugcagugg

SEQ ID NO: 7865 - RNA, 20 nt, Artificial Sequence
  HTT spacer sequence ATCN PAM
gggagcucccagagcgccca

SEQ ID NO: 7866 - RNA, 20 nt, Artificial Sequence
  HTT spacer sequence ATCN PAM
ccauguccuccucaugccuu

SEQ ID NO: 7867 - RNA, 20 nt, Artificial Sequence
  HTT spacer sequence ATCN PAM
ucccgcucccuucuccugaa

SEQ ID NO: 7868 - RNA, 20 nt, Artificial Sequence
  HTT spacer sequence ATCN PAM
cugcugcugcugugggggca

SEQ ID NO: 7869 - RNA, 20 nt, Artificial Sequence
  HTT spacer sequence ATCN PAM
gcccagccccugcacuggac

SEQ ID NO: 7870 - RNA, 20 nt, Artificial Sequence
  HTT spacer sequence ATCN PAM
ugcgucccacccuggucucc

SEQ ID NO: 7871 - RNA, 20 nt, Artificial Sequence
  HTT spacer sequence ATCN PAM
ugagcgauggccacugucaa

SEQ ID NO: 7872 - RNA, 20 nt, Artificial Sequence
  HTT spacer sequence ATCN PAM
cucaggaugggggcaggugg

SEQ ID NO: 7873 - RNA, 20 nt, Artificial Sequence
  HTT spacer sequence ATCN PAM
uuuuaauuauucaucugugu

SEQ ID NO: 7874 - RNA, 20 nt, Artificial Sequence
  HTT spacer sequence ATCN PAM
guguuggugcuuuugucccc

SEQ ID NO: 7875 - RNA, 20 nt, Artificial Sequence
  HTT spacer sequence ATCN PAM
uucacucaacagacagcucu

SEQ ID NO: 7876 - RNA, 20 nt, Artificial Sequence
  HTT spacer sequence ATCN PAM
gguguucagcagacaucagc

SEQ ID NO: 7877 - RNA, 20 nt, Artificial Sequence
  HTT spacer sequence ATCN PAM
gccagagcgucagggcgagg

SEQ ID NO: 7878 - RNA, 20 nt, Artificial Sequence
  HTT spacer sequence ATCN PAM
cugaaagccacuguccccgc

SEQ ID NO: 7879 - RNA, 20 nt, Artificial Sequence
  HTT spacer sequence ATCN PAM
uccgccauggccaggucuga

SEQ ID NO: 7880 - RNA, 20 nt, Artificial Sequence
  HTT spacer sequence ATCN PAM
gccugucagcuguggagcug

SEQ ID NO: 7881 - RNA, 20 nt, Artificial Sequence
  HTT spacer sequence ATCN PAM
cuuggggcaagucacuuucu

SEQ ID NO: 7882 - RNA, 20 nt, Artificial Sequence
  HTT spacer sequence ATCN PAM
cgccgguccuuguuagcgaa

SEQ ID NO: 7883 - RNA, 20 nt, Artificial Sequence
  HTT spacer sequence ATCN PAM
ggcagccguuugugacagcu

SEQ ID NO: 7884 - RNA, 20 nt, Artificial Sequence
  HTT spacer sequence ATCN PAM
ggcaauuacgguaacccucc

SEQ ID NO: 7885 - RNA, 20 nt, Artificial Sequence
  HTT spacer sequence ATCN PAM
caugcuacuuuuggugcaca

SEQ ID NO: 7886 - RNA, 20 nt, Artificial Sequence
  HTT spacer sequence ATCN PAM
acauggguaaguacuccgag

SEQ ID NO: 7887 - RNA, 20 nt, Artificial Sequence
  HTT spacer sequence ATCN PAM
cuugguuucugaaaaaggug

SEQ ID NO: 7888 - RNA, 20 nt, Artificial Sequence
  HTT spacer sequence ATCN PAM
agcugaaaaaaaaaaauagu

SEQ ID NO: 7889 - RNA, 20 nt, Artificial Sequence
  HTT spacer sequence ATCN PAM
uacuauuuuuuuuuuucagc

SEQ ID NO: 7890 - RNA, 20 nt, Artificial Sequence
  HTT spacer sequence ATCN PAM
aacagacacauagagagcuu

SEQ ID NO: 7891 - RNA, 20 nt, Artificial Sequence
  HTT spacer sequence ATCN PAM
acuucuauucaaauacacug

SEQ ID NO: 7892 - RNA, 20 nt, Artificial Sequence
  HTT spacer sequence ATCN PAM
uaaaaugauaacaaaaaaga

SEQ ID NO: 7893 - RNA, 20 nt, Artificial Sequence
  HTT spacer sequence ATCN PAM
uuuuaugaucgacuucuauu

SEQ ID NO: 7894 - RNA, 20 nt, Artificial Sequence
  HTT spacer sequence ATCN PAM
augggucaaggaagaaauua

SEQ ID NO: 7895 - RNA, 20 nt, Artificial Sequence
  HTT spacer sequence ATCN PAM
uacaguuuagaaccauuuau

SEQ ID NO: 7896 - RNA, 20 nt, Artificial Sequence
  HTT spacer sequence ATCN PAM
ucaccaguagaauauaauca

SEQ ID NO: 7897 - RNA, 20 nt, Artificial Sequence
  HTT spacer sequence ATCN PAM
ccaguagaauauaaucaaag

SEQ ID NO: 7898 - RNA, 20 nt, Artificial Sequence
  HTT spacer sequence ATCN PAM
aagugauuuucagugaaaaa

SEQ ID NO: 7899 - RNA, 20 nt, Artificial Sequence
  HTT spacer sequence ATCN PAM
cuuugauuauauucuacugg

SEQ ID NO: 7900 - RNA, 20 nt, Artificial Sequence
  HTT spacer sequence ATCN PAM
ucauuuccuuaauuugcauu

SEQ ID NO: 7901 - RNA, 20 nt, Artificial Sequence
  HTT spacer sequence ATCN PAM
aaauagaaaaaaccaaacag

SEQ ID NO: 7902 - RNA, 20 nt, Artificial Sequence
  HTT spacer sequence ATCN PAM
agaaaaagagggaggccagg

SEQ ID NO: 7903 - RNA, 20 nt, Artificial Sequence
  HTT spacer sequence ATCN PAM
cagcacuuugggaggcugau

SEQ ID NO: 7904 - RNA, 20 nt, Artificial Sequence
  HTT spacer sequence ATCN PAM
gccucccaaagugcugagau

SEQ ID NO: 7905 - RNA, 20 nt, Artificial Sequence
  HTT spacer sequence ATCN PAM
uccugcaucagccucccaaa

SEQ ID NO: 7906 - RNA, 20 nt, Artificial Sequence
  HTT spacer sequence ATCN PAM
cuugggcccaggaauuugag

SEQ ID NO: 7907 - RNA, 20 nt, Artificial Sequence
  HTT spacer sequence ATCN PAM
cuacaaaaaaagaaaaagag

SEQ ID NO: 7908 - RNA, 20 nt, Artificial Sequence
  HTT spacer sequence ATCN PAM
uuguccucuuccucuuuuuc

SEQ ID NO: 7909 - RNA, 20 nt, Artificial Sequence
  HTT spacer sequence ATCN PAM
agaaugaaagacagguccua

SEQ ID NO: 7910 - RNA, 20 nt, Artificial Sequence
  HTT spacer sequence ATCN PAM
aauguacaguauaaaguugu

SEQ ID NO: 7911 - RNA, 20 nt, Artificial Sequence
  HTT spacer sequence ATCN PAM
uuaggaaaauauaaaugauc

SEQ ID NO: 7912 - RNA, 20 nt, Artificial Sequence
  HTT spacer sequence ATCN PAM
uuuauauuuuccuaaagauu

SEQ ID NO: 7913 - RNA, 20 nt, Artificial Sequence
  HTT spacer sequence ATCN PAM
aaguuggccuaagaagaagu

SEQ ID NO: 7914 - RNA, 20 nt, Artificial Sequence
  HTT spacer sequence ATCN PAM
guuucuacuucuucuuaggc

SEQ ID NO: 7915 - RNA, 20 nt, Artificial Sequence
  HTT spacer sequence ATCN PAM
aaucaguuucuacuucuucu

SEQ ID NO: 7916 - RNA, 20 nt, Artificial Sequence
  HTT spacer sequence ATCN PAM
acauaggcaaaaaugauuug

SEQ ID NO: 7917 - RNA, 20 nt, Artificial Sequence
  HTT spacer sequence ATCN PAM
uuuuugccuauguugauuua

SEQ ID NO: 7918 - RNA, 20 nt, Artificial Sequence
  HTT spacer sequence ATCN PAM
uugacuuccaaaucauuuuu

SEQ ID NO: 7919 - RNA, 20 nt, Artificial Sequence
  HTT spacer sequence ATCN PAM
aaacccccauaggcaccaug

SEQ ID NO: 7920 - RNA, 20 nt, Artificial Sequence
  HTT spacer sequence ATCN PAM
guauauugguuugggcaugg

SEQ ID NO: 7921 - RNA, 20 nt, Artificial Sequence
  HTT spacer sequence ATCN PAM
gucagcuuaggcuaaguaau

SEQ ID NO: 7922 - RNA, 20 nt, Artificial Sequence
  HTT spacer sequence ATCN PAM
ugguggguuuaacaaagcag

SEQ ID NO: 7923 - RNA, 20 nt, Artificial Sequence
  HTT spacer sequence ATCN PAM
gcuuuguuaaacccaccagg

SEQ ID NO: 7924 - RNA, 20 nt, Artificial Sequence
  HTT spacer sequence ATCN PAM
ggucauggcucucagccaua

SEQ ID NO: 7925 - RNA, 20 nt, Artificial Sequence
  HTT spacer sequence ATCN PAM
cagcuuuauaggaaaguuaa

SEQ ID NO: 7926 - RNA, 20 nt, Artificial Sequence
  HTT spacer sequence ATCN PAM
gacucagagcuccgcuccuu

SEQ ID NO: 7927 - RNA, 20 nt, Artificial Sequence
  HTT spacer sequence ATCN PAM
aaacagugugacucuggaac

SEQ ID NO: 7928 - RNA, 20 nt, Artificial Sequence
  HTT spacer sequence ATCN PAM
ucagccugguguuaccuagu

SEQ ID NO: 7929 - RNA, 20 nt, Artificial Sequence
  HTT spacer sequence ATCN PAM
accuccuagaauacagcuug

SEQ ID NO: 7930 - RNA, 20 nt, Artificial Sequence
  HTT spacer sequence ATCN PAM
cgucagcaccugugaaucgu

SEQ ID NO: 7931 - RNA, 20 nt, Artificial Sequence
  HTT spacer sequence ATCN PAM
ugagaaggaggcgguggccu

SEQ ID NO: 7932 - RNA, 20 nt, Artificial Sequence
  HTT spacer sequence ATCN PAM
ggucaccaugcuggucccau

SEQ ID NO: 7933 - RNA, 20 nt, Artificial Sequence
  HTT spacer sequence ATCN PAM
aacuuaaaaagucauuuguc

SEQ ID NO: 7934 - RNA, 20 nt, Artificial Sequence
  HTT spacer sequence ATCN PAM
aacaaucaaacuuaaaaagu

SEQ ID NO: 7935 - RNA, 20 nt, Artificial Sequence
  HTT spacer sequence ATCN PAM
gaaguuauauaaaagguaca

SEQ ID NO: 7936 - RNA, 20 nt, Artificial Sequence
  HTT spacer sequence ATCN PAM
aacauauuauauuuauuauu

SEQ ID NO: 7937 - RNA, 20 nt, Artificial Sequence
  HTT spacer sequence ATCN PAM
cagucccagcaaauaccauu

SEQ ID NO: 7938 - RNA, 20 nt, Artificial Sequence
  HTT spacer sequence ATCN PAM
accaucugccccugaugugu

SEQ ID NO: 7939 - RNA, 20 nt, Artificial Sequence
  HTT spacer sequence ATCN PAM
gccccugauguguagaguag

SEQ ID NO: 7940 - RNA, 20 nt, Artificial Sequence
  HTT spacer sequence ATCN PAM
ggggcagaugguggaugcuc

SEQ ID NO: 7941 - RNA, 20 nt, Artificial Sequence
  HTT spacer sequence ATCN PAM
uuuaugcuuuuacacacuca

SEQ ID NO: 7942 - RNA, 20 nt, Artificial Sequence
  HTT spacer sequence ATCN PAM
cuggacucuuucaguggaag

SEQ ID NO: 7943 - RNA, 20 nt, Artificial Sequence
  HTT spacer sequence ATCN PAM
aaaugaaguaagucaguuuc

SEQ ID NO: 7944 - RNA, 20 nt, Artificial Sequence
  HTT spacer sequence ATCN PAM
acccuaacugacuucauuua

SEQ ID NO: 7945 - RNA, 20 nt, Artificial Sequence
  HTT spacer sequence ATCN PAM
uugaaaaauguucugugucu

SEQ ID NO: 7946 - RNA, 20 nt, Artificial Sequence
  HTT spacer sequence ATCN PAM
ugagggcucccuguggucag

SEQ ID NO: 7947 - RNA, 20 nt, Artificial Sequence
  HTT spacer sequence ATCN PAM
gaccacagggagcccucagg

SEQ ID NO: 7948 - RNA, 20 nt, Artificial Sequence
  HTT spacer sequence ATCN PAM
uaaaaauucagagugacaag

SEQ ID NO: 7949 - RNA, 20 nt, Artificial Sequence
  HTT spacer sequence ATCN PAM
ccuaacacuucccacacuga

SEQ ID NO: 7950 - RNA, 20 nt, Artificial Sequence
  HTT spacer sequence ATCN PAM
cacguuucuaguacugacuc

SEQ ID NO: 7951 - RNA, 20 nt, Artificial Sequence
  HTT spacer sequence ATCN PAM
gaauucugggucuuuccugg

SEQ ID NO: 7952 - RNA, 20 nt, Artificial Sequence
  HTT spacer sequence ATCN PAM
cgagggguccgugagaccug

SEQ ID NO: 7953 - RNA, 20 nt, Artificial Sequence
  HTT spacer sequence ATCN PAM
ccagcagcacuuucugggcu

SEQ ID NO: 7954 - RNA, 20 nt, Artificial Sequence
  HTT spacer sequence ATCN PAM
gugacuaugcugggcccaga

SEQ ID NO: 7955 - RNA, 20 nt, Artificial Sequence
  HTT spacer sequence ATCN PAM
guaaaaugggcugauugacu

SEQ ID NO: 7956 - RNA, 20 nt, Artificial Sequence
  HTT spacer sequence ATCN PAM
gcccauuuuacagaugaagc

SEQ ID NO: 7957 - RNA, 20 nt, Artificial Sequence
  HTT spacer sequence ATCN PAM
cagucaaucagcccauuuua

SEQ ID NO: 7958 - RNA, 20 nt, Artificial Sequence
  HTT spacer sequence ATCN PAM
auagcauguaaacacuuuuc

SEQ ID NO: 7959 - RNA, 20 nt, Artificial Sequence
  HTT spacer sequence ATCN PAM
aucucagucaaucagcccau

SEQ ID NO: 7960 - RNA, 20 nt, Artificial Sequence
  HTT spacer sequence ATCN PAM
ggaauagcaccuccucagaa

SEQ ID NO: 7961 - RNA, 20 nt, Artificial Sequence
  HTT spacer sequence ATCN PAM
cuguuuucuaacccucagca

SEQ ID NO: 7962 - RNA, 20 nt, Artificial Sequence
  HTT spacer sequence ATCN PAM
caacaaaagccugccacaac

SEQ ID NO: 7963 - RNA, 20 nt, Artificial Sequence
  HTT spacer sequence ATCN PAM
ggcauccuaugggcaggcca

SEQ ID NO: 7964 - RNA, 20 nt, Artificial Sequence
  HTT spacer sequence ATCN PAM
uaugggcaggccagaagugu

SEQ ID NO: 7965 - RNA, 20 nt, Artificial Sequence
  HTT spacer sequence ATCN PAM
gguaaggcuguaugagugag

SEQ ID NO: 7966 - RNA, 20 nt, Artificial Sequence
  HTT spacer sequence ATCN PAM
acauuucccaguaccaccac

SEQ ID NO: 7967 - RNA, 20 nt, Artificial Sequence
  HTT spacer sequence ATCN PAM
ccaaguggccuggugugugg

SEQ ID NO: 7968 - RNA, 20 nt, Artificial Sequence
  HTT spacer sequence ATCN PAM
uccccuuggaaucaccuugg

SEQ ID NO: 7969 - RNA, 20 nt, Artificial Sequence
  HTT spacer sequence ATCN PAM
ccuuggaaucaccuuggaaa

SEQ ID NO: 7970 - RNA, 20 nt, Artificial Sequence
  HTT spacer sequence ATCN PAM
ccuuggaaaacccuggauca

SEQ ID NO: 7971 - RNA, 20 nt, Artificial Sequence
  HTT spacer sequence ATCN PAM
aggguuuuccaaggugauuc

SEQ ID NO: 7972 - RNA, 20 nt, Artificial Sequence
  HTT spacer sequence ATCN PAM
uuuugaaagaugcucaugga

SEQ ID NO: 7973 - RNA, 20 nt, Artificial Sequence
  HTT spacer sequence ATCN PAM
uucaaaaugauccaggguuu

SEQ ID NO: 7974 - RNA, 20 nt, Artificial Sequence
  HTT spacer sequence ATCN PAM
cauuggggcucaucacagua

SEQ ID NO: 7975 - RNA, 20 nt, Artificial Sequence
  HTT spacer sequence ATCN PAM
caguaucaagguagaagagg

SEQ ID NO: 7976 - RNA, 20 nt, Artificial Sequence
  HTT spacer sequence ATCN PAM
agguagaagaggaagcugag

SEQ ID NO: 7977 - RNA, 20 nt, Artificial Sequence
  HTT spacer sequence ATCN PAM
uacuggucucagcuuccucu

SEQ ID NO: 7978 - RNA, 20 nt, Artificial Sequence
  HTT spacer sequence ATCN PAM
caugguggcugaagguggug

SEQ ID NO: 7979 - RNA, 20 nt, Artificial Sequence
  HTT spacer sequence ATCN PAM
cugccagaccccauggucgu

SEQ ID NO: 7980 - RNA, 20 nt, Artificial Sequence
  HTT spacer sequence ATCN PAM
ugaaagaggaggacaccaca

SEQ ID NO: 7981 - RNA, 20 nt, Artificial Sequence
  HTT spacer sequence ATCN PAM
ggucuccaagaaccaagggg

SEQ ID NO: 7982 - RNA, 20 nt, Artificial Sequence
  HTT spacer sequence ATCN PAM
accccuuccuacucaguggc

SEQ ID NO: 7983 - RNA, 20 nt, Artificial Sequence
  HTT spacer sequence ATCN PAM
uguguguuccaggcugugug

SEQ ID NO: 7984 - RNA, 20 nt, Artificial Sequence
  HTT spacer sequence ATCN PAM
cuacagggagaggcagggcc

SEQ ID NO: 7985 - RNA, 20 nt, Artificial Sequence
  HTT spacer sequence ATCN PAM
gcugcccugggcgccuggca

SEQ ID NO: 7986 - RNA, 20 nt, Artificial Sequence
  HTT spacer sequence ATCN PAM
caggcccccaaggggcuggc

SEQ ID NO: 7987 - RNA, 20 nt, Artificial Sequence
  HTT spacer sequence ATCN PAM
cccacccacccccgcaguca

SEQ ID NO: 7988 - RNA, 20 nt, Artificial Sequence
  HTT spacer sequence ATCN PAM
ccgaagcaccaaagccaacc

SEQ ID NO: 7989 - RNA, 20 nt, Artificial Sequence
  HTT spacer sequence ATCN PAM
aagagacaggucuccggugg

SEQ ID NO: 7990 - RNA, 20 nt, Artificial Sequence
  HTT spacer sequence ATCN PAM
caggggcaguggggaggggc

SEQ ID NO: 7991 - RNA, 20 nt, Artificial Sequence
  HTT spacer sequence ATCN PAM
ggagcccugggcgccccucc

SEQ ID NO: 7992 - RNA, 20 nt, Artificial Sequence
  HTT spacer sequence ATCN PAM
gcugaccucagagcagggcu

SEQ ID NO: 7993 - RNA, 20 nt, Artificial Sequence
  HTT spacer sequence ATCN PAM
gggcagcgugaggccucaca

SEQ ID NO: 7994 - RNA, 20 nt, Artificial Sequence
  HTT spacer sequence ATCN PAM
agacccuaggcugggcucug

SEQ ID NO: 7995 - RNA, 20 nt, Artificial Sequence
  HTT spacer sequence ATCN PAM
cauccagacccuaggcuggg

SEQ ID NO: 7996 - RNA, 20 nt, Artificial Sequence
  HTT spacer sequence ATCN PAM
ucacggggcugacgguucuc

SEQ ID NO: 7997 - RNA, 20 nt, Artificial Sequence
  HTT spacer sequence ATCN PAM
ucuagggugccaucgccccu

SEQ ID NO: 7998 - RNA, 20 nt, Artificial Sequence
  HTT spacer sequence ATCN PAM
ccccuccccacugcuguucc

SEQ ID NO: 7999 - RNA, 20 nt, Artificial Sequence
  HTT spacer sequence ATCN PAM
gcuggguguccccaacccca

SEQ ID NO: 8000 - RNA, 20 nt, Artificial Sequence
  HTT spacer sequence ATCN PAM
gagagacggccuccaccacc

SEQ ID NO: 8001 - RNA, 20 nt, Artificial Sequence
  HTT spacer sequence ATCN PAM
agguucuucugcagagaggc

SEQ ID NO: 8002 - RNA, 20 nt, Artificial Sequence
  HTT spacer sequence ATCN PAM
aaugcccaggccagagcuug

SEQ ID NO: 8003 - RNA, 20 nt, Artificial Sequence
  HTT spacer sequence ATCN PAM
gagccggcuggccuaaccag

SEQ ID NO: 8004 - RNA, 20 nt, Artificial Sequence
  HTT spacer sequence ATCN PAM
caggcaagagcaggcccugg

SEQ ID NO: 8005 - RNA, 20 nt, Artificial Sequence
  HTT spacer sequence ATCN PAM
ccaggcuucccccacacuga

SEQ ID NO: 8006 - RNA, 20 nt, Artificial Sequence
  HTT spacer sequence ATCN PAM
uaggccugggcugccugugg

SEQ ID NO: 8007 - RNA, 20 nt, Artificial Sequence
  HTT spacer sequence ATCN PAM
gccccuaccccaggggucac

SEQ ID NO: 8008 - RNA, 20 nt, Artificial Sequence
  HTT spacer sequence ATCN PAM
ggcuucccagacuggcaucu

SEQ ID NO: 8009 - RNA, 20 nt, Artificial Sequence
  HTT spacer sequence ATCN PAM
gccccgcucugggcacugcu

SEQ ID NO: 8010 - RNA, 20 nt, Artificial Sequence
  HTT spacer sequence ATCN PAM
gggcucagacgcucagacca

SEQ ID NO: 8011 - RNA, 20 nt, Artificial Sequence
  HTT spacer sequence ATCN PAM
ucugucaugguuccgcgccg

SEQ ID NO: 8012 - RNA, 20 nt, Artificial Sequence
  HTT spacer sequence ATCN PAM
ccgccgcugucaccccgccg

SEQ ID NO: 8013 - RNA, 20 nt, Artificial Sequence
  HTT spacer sequence ATCN PAM
cacccagacccgggccuggc

SEQ ID NO: 8014 - RNA, 20 nt, Artificial Sequence
  HTT spacer sequence ATCN PAM
cugccccacacccucccugg

SEQ ID NO: 8015 - RNA, 20 nt, Artificial Sequence
  HTT spacer sequence ATCN PAM
cuccugcguccccucugcag

SEQ ID NO: 8016 - RNA, 20 nt, Artificial Sequence
  HTT spacer sequence ATCN PAM
cuuccuauaccagguccccu

SEQ ID NO: 8017 - RNA, 20 nt, Artificial Sequence
  HTT spacer sequence ATCN PAM
gccccagccuggcagggccu

SEQ ID NO: 8018 - RNA, 20 nt, Artificial Sequence
  HTT spacer sequence ATCN PAM
ccugccccaccacggccccg

SEQ ID NO: 8019 - RNA, 20 nt, Artificial Sequence
  HTT spacer sequence ATCN PAM
accaagcaucaccugcccca

SEQ ID NO: 8020 - RNA, 20 nt, Artificial Sequence
  HTT spacer sequence ATCN PAM
caggaaggcacccgggacag

SEQ ID NO: 8021 - RNA, 20 nt, Artificial Sequence
  HTT spacer sequence ATCN PAM
cuccaacagggacaaagacu

SEQ ID NO: 8022 - RNA, 20 nt, Artificial Sequence
  HTT spacer sequence ATCN PAM
gacagucccaggaggcaggg

SEQ ID NO: 8023 - RNA, 20 nt, Artificial Sequence
  HTT spacer sequence ATCN PAM
gugagucuguaggugaacau

SEQ ID NO: 8024 - RNA, 20 nt, Artificial Sequence
  HTT spacer sequence ATCN PAM
cguauccugcgcaguugaga

SEQ ID NO: 8025 - RNA, 20 nt, Artificial Sequence
  HTT spacer sequence ATCN PAM
ugcgcaguugagaucugcag

SEQ ID NO: 8026 - RNA, 20 nt, Artificial Sequence
  HTT spacer sequence ATCN PAM
caacugcgcaggauacggga

SEQ ID NO: 8027 - RNA, 20 nt, Artificial Sequence
  HTT spacer sequence ATCN PAM
gcagccuucuggggcuggcg

SEQ ID NO: 8028 - RNA, 20 nt, Artificial Sequence
  HTT spacer sequence ATCN PAM
ccucccacgccagccccaga

SEQ ID NO: 8029 - RNA, 20 nt, Artificial Sequence
  HTT spacer sequence ATCN PAM
acccagagggggcauggcac

SEQ ID NO: 8030 - RNA, 20 nt, Artificial Sequence
  HTT spacer sequence ATCN PAM
gaccgaccucugggcaaccc

SEQ ID NO: 8031 - RNA, 20 nt, Artificial Sequence
  HTT spacer sequence ATCN PAM
ccucaucugaccgaccucug

SEQ ID NO: 8032 - RNA, 20 nt, Artificial Sequence
  HTT spacer sequence ATCN PAM
gggccucugagcggagagga

SEQ ID NO: 8033 - RNA, 20 nt, Artificial Sequence
  HTT spacer sequence ATCN PAM
agggaggcuuaugaggggcc

SEQ ID NO: 8034 - RNA, 20 nt, Artificial Sequence
  HTT spacer sequence ATCN PAM
acaagggagguggucuccag

SEQ ID NO: 8035 - RNA, 20 nt, Artificial Sequence
  HTT spacer sequence ATCN PAM
ccacugguaacaaaaagaac

SEQ ID NO: 8036 - RNA, 20 nt, Artificial Sequence
  HTT spacer sequence ATCN PAM
gggcccuucccagaaggaaa

SEQ ID NO: 8037 - RNA, 20 nt, Artificial Sequence
  HTT spacer sequence ATCN PAM
ugagcacgucuuucuguuau

SEQ ID NO: 8038 - RNA, 20 nt, Artificial Sequence
  HTT spacer sequence ATCN PAM
aagggcugcucagccacagc

SEQ ID NO: 8039 - RNA, 20 nt, Artificial Sequence
  HTT spacer sequence ATCN PAM
uguggagaguguggccccag

SEQ ID NO: 8040 - RNA, 20 nt, Artificial Sequence
  HTT spacer sequence ATCN PAM
agcucagaaaagccaccggg

SEQ ID NO: 8041 - RNA, 20 nt, Artificial Sequence
  HTT spacer sequence ATCN PAM
cucggguuucugaguuucag

SEQ ID NO: 8042 - RNA, 20 nt, Artificial Sequence
  HTT spacer sequence ATCN PAM
ggcccaagacauggacugcu

SEQ ID NO: 8043 - RNA, 20 nt, Artificial Sequence
  HTT spacer sequence ATCN PAM
gcccgggggcaggcgcggaa

SEQ ID NO: 8044 - RNA, 20 nt, Artificial Sequence
  HTT spacer sequence ATCN PAM
uugcucucggugggacugag

SEQ ID NO: 8045 - RNA, 20 nt, Artificial Sequence
  HTT spacer sequence ATCN PAM
accaccaggaggcucugcuc

SEQ ID NO: 8046 - RNA, 20 nt, Artificial Sequence
  HTT spacer sequence ATCN PAM
cagcuccgggcugaagaccg

SEQ ID NO: 8047 - RNA, 20 nt, Artificial Sequence
  HTT spacer sequence ATCN PAM
ucuccccauagaaacaucaa

SEQ ID NO: 8048 - RNA, 20 nt, Artificial Sequence
  HTT spacer sequence ATCN PAM
agaacagggcgaccuucccu

SEQ ID NO: 8049 - RNA, 20 nt, Artificial Sequence
  HTT spacer sequence ATCN PAM
gagagcugggguucagcucu

SEQ ID NO: 8050 - RNA, 20 nt, Artificial Sequence
  HTT spacer sequence ATCN PAM
ggagccucguccugggcugc

SEQ ID NO: 8051 - RNA, 20 nt, Artificial Sequence
  HTT spacer sequence ATCN PAM
ccaagggcagcccaggacga

SEQ ID NO: 8052 - RNA, 20 nt, Artificial Sequence
  HTT spacer sequence CTCN PAM
aaaacugaaauccaaagaaa

SEQ ID NO: 8053 - RNA, 20 nt, Artificial Sequence
  HTT spacer sequence CTCN PAM
ccaggaagccgguguaaaau

SEQ ID NO: 8054 - RNA, 20 nt, Artificial Sequence
  HTT spacer sequence CTCN PAM
cccaccagaaaggugguauu

SEQ ID NO: 8055 - RNA, 20 nt, Artificial Sequence
  HTT spacer sequence CTCN PAM
cccccaccagaaagguggua

SEQ ID NO: 8056 - RNA, 20 nt, Artificial Sequence
  HTT spacer sequence CTCN PAM
agcugugcugcgcuuggcuc

SEQ ID NO: 8057 - RNA, 20 nt, Artificial Sequence
  HTT spacer sequence CTCN PAM
gccacggguggguuuugcuc

SEQ ID NO: 8058 - RNA, 20 nt, Artificial Sequence
  HTT spacer sequence CTCN PAM
aagucucugccacggguggg

SEQ ID NO: 8059 - RNA, 20 nt, Artificial Sequence
  HTT spacer sequence CTCN PAM
cuaagucucugccacgggug

SEQ ID NO: 8060 - RNA, 20 nt, Artificial Sequence
  HTT spacer sequence CTCN PAM
auggacaaggaacauggguc

SEQ ID NO: 8061 - RNA, 20 nt, Artificial Sequence
  HTT spacer sequence CTCN PAM
cuccagcaggaaaacaauga

SEQ ID NO: 8062 - RNA, 20 nt, Artificial Sequence
  HTT spacer sequence CTCN PAM
agcaggaaaacaaugagaaa

SEQ ID NO: 8063 - RNA, 20 nt, Artificial Sequence
  HTT spacer sequence CTCN PAM
uuguuuuccugcuggaggga

SEQ ID NO: 8064 - RNA, 20 nt, Artificial Sequence
  HTT spacer sequence CTCN PAM
uccauuucucauuguuuucc

SEQ ID NO: 8065 - RNA, 20 nt, Artificial Sequence
  HTT spacer sequence CTCN PAM
uucaaacacuugacuugccc

SEQ ID NO: 8066 - RNA, 20 nt, Artificial Sequence
  HTT spacer sequence CTCN PAM
uguaaaauccgaugacaguc

SEQ ID NO: 8067 - RNA, 20 nt, Artificial Sequence
  HTT spacer sequence CTCN PAM
uuuccugcaggaaggcacug

SEQ ID NO: 8068 - RNA, 20 nt, Artificial Sequence
  HTT spacer sequence CTCN PAM
ggggucccgcggacaggagu

SEQ ID NO: 8069 - RNA, 20 nt, Artificial Sequence
  HTT spacer sequence CTCN PAM
uguccgcgggaccccagagc

SEQ ID NO: 8070 - RNA, 20 nt, Artificial Sequence
  HTT spacer sequence CTCN PAM
uggcuguagagguucgagca

SEQ ID NO: 8071 - RNA, 20 nt, Artificial Sequence
  HTT spacer sequence CTCN PAM
acagccaggaggaagcaggg

SEQ ID NO: 8072 - RNA, 20 nt, Artificial Sequence
  HTT spacer sequence CTCN PAM
aaccucuacagccaggagga

SEQ ID NO: 8073 - RNA, 20 nt, Artificial Sequence
  HTT spacer sequence CTCN PAM
agacaagucaccuugcucga

SEQ ID NO: 8074 - RNA, 20 nt, Artificial Sequence
  HTT spacer sequence CTCN PAM
caccucagugccuuaacgga

SEQ ID NO: 8075 - RNA, 20 nt, Artificial Sequence
  HTT spacer sequence CTCN PAM
gugccuuaacggauagaagc

SEQ ID NO: 8076 - RNA, 20 nt, Artificial Sequence
  HTT spacer sequence CTCN PAM
uccccucacaucacagugca

SEQ ID NO: 8077 - RNA, 20 nt, Artificial Sequence
  HTT spacer sequence CTCN PAM
caucacagugcagcacaagu

SEQ ID NO: 8078 - RNA, 20 nt, Artificial Sequence
  HTT spacer sequence CTCN PAM
gguggcagcggggaaggggc

SEQ ID NO: 8079 - RNA, 20 nt, Artificial Sequence
  HTT spacer sequence CTCN PAM
agggcucggguggcagcggg

SEQ ID NO: 8080 - RNA, 20 nt, Artificial Sequence
  HTT spacer sequence CTCN PAM
ccuagguccugggcauccag

SEQ ID NO: 8081 - RNA, 20 nt, Artificial Sequence
  HTT spacer sequence CTCN PAM
uagguccugggcauccagac

SEQ ID NO: 8082 - RNA, 20 nt, Artificial Sequence
  HTT spacer sequence CTCN PAM
cauggccugugccccccauu

SEQ ID NO: 8083 - RNA, 20 nt, Artificial Sequence
  HTT spacer sequence CTCN PAM
ugcuguccucccauggccug

SEQ ID NO: 8084 - RNA, 20 nt, Artificial Sequence
  HTT spacer sequence CTCN PAM
caugcuguccucccauggcc

SEQ ID NO: 8085 - RNA, 20 nt, Artificial Sequence
  HTT spacer sequence CTCN PAM
augguugucaggaccagggc

SEQ ID NO: 8086 - RNA, 20 nt, Artificial Sequence
  HTT spacer sequence CTCN PAM
ucuaugguugucaggaccag

SEQ ID NO: 8087 - RNA, 20 nt, Artificial Sequence
  HTT spacer sequence CTCN PAM
cguggugagugagcacaugg

SEQ ID NO: 8088 - RNA, 20 nt, Artificial Sequence
  HTT spacer sequence CTCN PAM
ccacgugagcaccugccucc

SEQ ID NO: 8089 - RNA, 20 nt, Artificial Sequence
  HTT spacer sequence CTCN PAM
cucaccacgugagcaccugc

SEQ ID NO: 8090 - RNA, 20 nt, Artificial Sequence
  HTT spacer sequence CTCN PAM
ccccuggggcgcaggcaggg

SEQ ID NO: 8091 - RNA, 20 nt, Artificial Sequence
  HTT spacer sequence CTCN PAM
gggggaccuguaaccagauc

SEQ ID NO: 8092 - RNA, 20 nt, Artificial Sequence
  HTT spacer sequence CTCN PAM
ggcauccccguggaucuggu

SEQ ID NO: 8093 - RNA, 20 nt, Artificial Sequence
  HTT spacer sequence CTCN PAM
gugggggccugccaccccug

SEQ ID NO: 8094 - RNA, 20 nt, Artificial Sequence
  HTT spacer sequence CTCN PAM
cagaauggccuggcuggagg

SEQ ID NO: 8095 - RNA, 20 nt, Artificial Sequence
  HTT spacer sequence CTCN PAM
gaauggccuggcuggaggaa

SEQ ID NO: 8096 - RNA, 20 nt, Artificial Sequence
  HTT spacer sequence CTCN PAM
agccaggccauucugagagu

SEQ ID NO: 8097 - RNA, 20 nt, Artificial Sequence
  HTT spacer sequence CTCN PAM
gagacuccaagaaacacuga

SEQ ID NO: 8098 - RNA, 20 nt, Artificial Sequence
  HTT spacer sequence CTCN PAM
gaggccaucacagcuuccag

SEQ ID NO: 8099 - RNA, 20 nt, Artificial Sequence
  HTT spacer sequence CTCN PAM
aagaaacacugacaugaaac

SEQ ID NO: 8100 - RNA, 20 nt, Artificial Sequence
  HTT spacer sequence CTCN PAM
accaaugaccccagucaaua

SEQ ID NO: 8101 - RNA, 20 nt, Artificial Sequence
  HTT spacer sequence CTCN PAM
caguaacagcucaaccaaug

SEQ ID NO: 8102 - RNA, 20 nt, Artificial Sequence
  HTT spacer sequence CTCN PAM
guccaagacucacaguaaca

SEQ ID NO: 8103 - RNA, 20 nt, Artificial Sequence
  HTT spacer sequence CTCN PAM
ucacaugcucccaacaauuc

SEQ ID NO: 8104 - RNA, 20 nt, Artificial Sequence
  HTT spacer sequence CTCN PAM
caugcucccaacaauuccag

SEQ ID NO: 8105 - RNA, 20 nt, Artificial Sequence
  HTT spacer sequence CTCN PAM
caacaauuccagaaggcagg

SEQ ID NO: 8106 - RNA, 20 nt, Artificial Sequence
  HTT spacer sequence CTCN PAM
gcauccccaccugacacuag

SEQ ID NO: 8107 - RNA, 20 nt, Artificial Sequence
  HTT spacer sequence CTCN PAM
guuucccuagugucaggugg

SEQ ID NO: 8108 - RNA, 20 nt, Artificial Sequence
  HTT spacer sequence CTCN PAM
cacaccugugccucaguuuc

SEQ ID NO: 8109 - RNA, 20 nt, Artificial Sequence
  HTT spacer sequence CTCN PAM
ucccucccacaccugugccu

SEQ ID NO: 8110 - RNA, 20 nt, Artificial Sequence
  HTT spacer sequence CTCN PAM
agggccuggcugggaauucu

SEQ ID NO: 8111 - RNA, 20 nt, Artificial Sequence
  HTT spacer sequence CTCN PAM
aaugcuauuuagacacauga

SEQ ID NO: 8112 - RNA, 20 nt, Artificial Sequence
  HTT spacer sequence CTCN PAM
gcauuuauuuuucuucaaau

SEQ ID NO: 8113 - RNA, 20 nt, Artificial Sequence
  HTT spacer sequence CTCN PAM
ccauuauucaccuuugcacc

SEQ ID NO: 8114 - RNA, 20 nt, Artificial Sequence
  HTT spacer sequence CTCN PAM
aacaaaaccacacccuggcu

SEQ ID NO: 8115 - RNA, 20 nt, Artificial Sequence
  HTT spacer sequence CTCN PAM
cagaugugcaccuucacaca

SEQ ID NO: 8116 - RNA, 20 nt, Artificial Sequence
  HTT spacer sequence CTCN PAM
gaugugcaccuucacacauu

SEQ ID NO: 8117 - RNA, 20 nt, Artificial Sequence
  HTT spacer sequence CTCN PAM
aaaugugugaaggugcacau

SEQ ID NO: 8118 - RNA, 20 nt, Artificial Sequence
  HTT spacer sequence CTCN PAM
ccucuuaaggucgaacaaaa

SEQ ID NO: 8119 - RNA, 20 nt, Artificial Sequence
  HTT spacer sequence CTCN PAM
ucuuaaggucgaacaaaaug

SEQ ID NO: 8120 - RNA, 20 nt, Artificial Sequence
  HTT spacer sequence CTCN PAM
uaaggucgaacaaaaugacc

SEQ ID NO: 8121 - RNA, 20 nt, Artificial Sequence
  HTT spacer sequence CTCN PAM
gccuguggggcaggacacug

SEQ ID NO: 8122 - RNA, 20 nt, Artificial Sequence
  HTT spacer sequence CTCN PAM
guguccugccccacaggcug

SEQ ID NO: 8123 - RNA, 20 nt, Artificial Sequence
  HTT spacer sequence CTCN PAM
cccgucugcccugccugcug

SEQ ID NO: 8124 - RNA, 20 nt, Artificial Sequence
  HTT spacer sequence CTCN PAM
gcaggcagggcagacggggg

SEQ ID NO: 8125 - RNA, 20 nt, Artificial Sequence
  HTT spacer sequence CTCN PAM
cgacucucugccucugacuc

SEQ ID NO: 8126 - RNA, 20 nt, Artificial Sequence
  HTT spacer sequence CTCN PAM
acucucugccucugacucgc

SEQ ID NO: 8127 - RNA, 20 nt, Artificial Sequence
  HTT spacer sequence CTCN PAM
cugccucugacucgcccauu

SEQ ID NO: 8128 - RNA, 20 nt, Artificial Sequence
  HTT spacer sequence CTCN PAM
gccucugacucgcccauuua

SEQ ID NO: 8129 - RNA, 20 nt, Artificial Sequence
  HTT spacer sequence CTCN PAM
gacucgcccauuuaacagaa

SEQ ID NO: 8130 - RNA, 20 nt, Artificial Sequence
  HTT spacer sequence CTCN PAM
cccauuuaacagaaaccaua

SEQ ID NO: 8131 - RNA, 20 nt, Artificial Sequence
  HTT spacer sequence CTCN PAM
uucccuggcagggcagggcu

SEQ ID NO: 8132 - RNA, 20 nt, Artificial Sequence
  HTT spacer sequence CTCN PAM
ccuucccuggcagggcaggg

SEQ ID NO: 8133 - RNA, 20 nt, Artificial Sequence
  HTT spacer sequence CTCN PAM
gggcucuccuucccuggcag

SEQ ID NO: 8134 - RNA, 20 nt, Artificial Sequence
  HTT spacer sequence CTCN PAM
gucaucacucagggcucucc

SEQ ID NO: 8135 - RNA, 20 nt, Artificial Sequence
  HTT spacer sequence CTCN PAM
cugcgccgacucugucauca

SEQ ID NO: 8136 - RNA, 20 nt, Artificial Sequence
  HTT spacer sequence CTCN PAM
cccucugucugcagcccagg

SEQ ID NO: 8137 - RNA, 20 nt, Artificial Sequence
  HTT spacer sequence CTCN PAM
gucugcagcccaggcucuua

SEQ ID NO: 8138 - RNA, 20 nt, Artificial Sequence
  HTT spacer sequence CTCN PAM
uaauugcccugcaaaugccg

SEQ ID NO: 8139 - RNA, 20 nt, Artificial Sequence
  HTT spacer sequence CTCN PAM
caugccuugccuugugccag

SEQ ID NO: 8140 - RNA, 20 nt, Artificial Sequence
  HTT spacer sequence CTCN PAM
cccaaccacaaacagaaacc

SEQ ID NO: 8141 - RNA, 20 nt, Artificial Sequence
  HTT spacer sequence CTCN PAM
gcaaagcgcaggaaaugaga

SEQ ID NO: 8142 - RNA, 20 nt, Artificial Sequence
  HTT spacer sequence CTCN PAM
uuuccugcgcuuugcugagg

SEQ ID NO: 8143 - RNA, 20 nt, Artificial Sequence
  HTT spacer sequence CTCN PAM
cgucucauuuccugcgcuuu

SEQ ID NO: 8144 - RNA, 20 nt, Artificial Sequence
  HTT spacer sequence CTCN PAM
gcgggcagcucacgucucau

SEQ ID NO: 8145 - RNA, 20 nt, Artificial Sequence
  HTT spacer sequence CTCN PAM
cagcgggcagcucacgucuc

SEQ ID NO: 8146 - RNA, 20 nt, Artificial Sequence
  HTT spacer sequence CTCN PAM
uaggaagugacucucagcgg

SEQ ID NO: 8147 - RNA, 20 nt, Artificial Sequence
  HTT spacer sequence CTCN PAM
cuggccucuuaggaagugac

SEQ ID NO: 8148 - RNA, 20 nt, Artificial Sequence
  HTT spacer sequence CTCN PAM
agagcacaugggcucucagg

SEQ ID NO: 8149 - RNA, 20 nt, Artificial Sequence
  HTT spacer sequence CTCN PAM
ugagguggcuuuguagaacc

SEQ ID NO: 8150 - RNA, 20 nt, Artificial Sequence
  HTT spacer sequence CTCN PAM
caggcguccgcacugcacuc

SEQ ID NO: 8151 - RNA, 20 nt, Artificial Sequence
  HTT spacer sequence CTCN PAM
ggcguccgcacugcacuccc

SEQ ID NO: 8152 - RNA, 20 nt, Artificial Sequence
  HTT spacer sequence CTCN PAM
cgcugaccacagccugagug

SEQ ID NO: 8153 - RNA, 20 nt, Artificial Sequence
  HTT spacer sequence CTCN PAM
ggcuguggucagcgggagug

SEQ ID NO: 8154 - RNA, 20 nt, Artificial Sequence
  HTT spacer sequence CTCN PAM
cagaaagccuuccuuuuucc

SEQ ID NO: 8155 - RNA, 20 nt, Artificial Sequence
  HTT spacer sequence CTCN PAM
gcauccaggucaugccaccc

SEQ ID NO: 8156 - RNA, 20 nt, Artificial Sequence
  HTT spacer sequence CTCN PAM
cccggcggcucugcauccag

SEQ ID NO: 8157 - RNA, 20 nt, Artificial Sequence
  HTT spacer sequence CTCN PAM
ggggcucccccggcggcucu

SEQ ID NO: 8158 - RNA, 20 nt, Artificial Sequence
  HTT spacer sequence CTCN PAM
gaauucagaaggcucugggg

SEQ ID NO: 8159 - RNA, 20 nt, Artificial Sequence
  HTT spacer sequence CTCN PAM
gcugugugugguucucugaa

SEQ ID NO: 8160 - RNA, 20 nt, Artificial Sequence
  HTT spacer sequence CTCN PAM
cagcugugugugguucucug

SEQ ID NO: 8161 - RNA, 20 nt, Artificial Sequence
  HTT spacer sequence CTCN PAM
cucagcugugugugguucuc

SEQ ID NO: 8162 - RNA, 20 nt, Artificial Sequence
  HTT spacer sequence CTCN PAM
gacucagcacugccaagcgu

SEQ ID NO: 8163 - RNA, 20 nt, Artificial Sequence
  HTT spacer sequence CTCN PAM
gcacugccaagcguccuccc

SEQ ID NO: 8164 - RNA, 20 nt, Artificial Sequence
  HTT spacer sequence CTCN PAM
caggacuuccugagcccccu

SEQ ID NO: 8165 - RNA, 20 nt, Artificial Sequence
  HTT spacer sequence CTCN PAM
ggaaguccugggaggacgcu

SEQ ID NO: 8166 - RNA, 20 nt, Artificial Sequence
  HTT spacer sequence CTCN PAM
gugccaggcgcccgccagga

SEQ ID NO: 8167 - RNA, 20 nt, Artificial Sequence
  HTT spacer sequence CTCN PAM
uggcgggcgccuggcacgga

SEQ ID NO: 8168 - RNA, 20 nt, Artificial Sequence
  HTT spacer sequence CTCN PAM
ccuggcgggcgccuggcacg

SEQ ID NO: 8169 - RNA, 20 nt, Artificial Sequence
  HTT spacer sequence CTCN PAM
cucuccuggcgggcgccugg

SEQ ID NO: 8170 - RNA, 20 nt, Artificial Sequence
  HTT spacer sequence CTCN PAM
gccugugcagcauccggaac

SEQ ID NO: 8171 - RNA, 20 nt, Artificial Sequence
  HTT spacer sequence CTCN PAM
ccucagagagaaacgugcca

SEQ ID NO: 8172 - RNA, 20 nt, Artificial Sequence
  HTT spacer sequence CTCN PAM
gagagaaacgugccaggcca

SEQ ID NO: 8173 - RNA, 20 nt, Artificial Sequence
  HTT spacer sequence CTCN PAM
gaggugagcugcuggaaagc

SEQ ID NO: 8174 - RNA, 20 nt, Artificial Sequence
  HTT spacer sequence CTCN PAM
cugaggugagcugcuggaaa

SEQ ID NO: 8175 - RNA, 20 nt, Artificial Sequence
  HTT spacer sequence CTCN PAM
aagugcccagcuguggcagg

SEQ ID NO: 8176 - RNA, 20 nt, Artificial Sequence
  HTT spacer sequence CTCN PAM
aaucccaagucccuggaaca

SEQ ID NO: 8177 - RNA, 20 nt, Artificial Sequence
  HTT spacer sequence CTCN PAM
cauaggccccacucgugcca

SEQ ID NO: 8178 - RNA, 20 nt, Artificial Sequence
  HTT spacer sequence CTCN PAM
uaggccccacucgugccagg

SEQ ID NO: 8179 - RNA, 20 nt, Artificial Sequence
  HTT spacer sequence CTCN PAM
ugccaggccccaguguccac

SEQ ID NO: 8180 - RNA, 20 nt, Artificial Sequence
  HTT spacer sequence CTCN PAM
cacagccuuccaagccccag

SEQ ID NO: 8181 - RNA, 20 nt, Artificial Sequence
  HTT spacer sequence CTCN PAM
gucaucgccccucacccuca

SEQ ID NO: 8182 - RNA, 20 nt, Artificial Sequence
  HTT spacer sequence CTCN PAM
cccucagccaccagugggga

SEQ ID NO: 8183 - RNA, 20 nt, Artificial Sequence
  HTT spacer sequence CTCN PAM
gccaccaguggggagcccca

SEQ ID NO: 8184 - RNA, 20 nt, Artificial Sequence
  HTT spacer sequence CTCN PAM
ccacugguggcugaggguga

SEQ ID NO: 8185 - RNA, 20 nt, Artificial Sequence
  HTT spacer sequence CTCN PAM
uuuuggggcuccccacuggu

SEQ ID NO: 8186 - RNA, 20 nt, Artificial Sequence
  HTT spacer sequence CTCN PAM
ucucugcacuucgggaccaa

SEQ ID NO: 8187 - RNA, 20 nt, Artificial Sequence
  HTT spacer sequence CTCN PAM
gcacuucgggaccaaacaga

SEQ ID NO: 8188 - RNA, 20 nt, Artificial Sequence
  HTT spacer sequence CTCN PAM
ggggcccgcccccaucugcc

SEQ ID NO: 8189 - RNA, 20 nt, Artificial Sequence
  HTT spacer sequence CTCN PAM
caaccagguggccaagguac

SEQ ID NO: 8190 - RNA, 20 nt, Artificial Sequence
  HTT spacer sequence CTCN PAM
accagguggccaagguacag

SEQ ID NO: 8191 - RNA, 20 nt, Artificial Sequence
  HTT spacer sequence CTCN PAM
guaccuuggccaccugguug

SEQ ID NO: 8192 - RNA, 20 nt, Artificial Sequence
  HTT spacer sequence CTCN PAM
cuucaagggcccaugaccaa

SEQ ID NO: 8193 - RNA, 20 nt, Artificial Sequence
  HTT spacer sequence CTCN PAM
ucaagggcccaugaccaagu

SEQ ID NO: 8194 - RNA, 20 nt, Artificial Sequence
  HTT spacer sequence CTCN PAM
ggugacugaggcuggguuaa

SEQ ID NO: 8195 - RNA, 20 nt, Artificial Sequence
  HTT spacer sequence CTCN PAM
gucaccugaggguuuucggg

SEQ ID NO: 8196 - RNA, 20 nt, Artificial Sequence
  HTT spacer sequence CTCN PAM
uguuaacccagccucaguca

SEQ ID NO: 8197 - RNA, 20 nt, Artificial Sequence
  HTT spacer sequence CTCN PAM
guacugcucaguccuggcag

SEQ ID NO: 8198 - RNA, 20 nt, Artificial Sequence
  HTT spacer sequence CTCN PAM
guccuggcagguucccacaa

SEQ ID NO: 8199 - RNA, 20 nt, Artificial Sequence
  HTT spacer sequence CTCN PAM
ggcuucucuuggcaaaggcc

SEQ ID NO: 8200 - RNA, 20 nt, Artificial Sequence
  HTT spacer sequence CTCN PAM
uggcaaaggccaugucaucg

SEQ ID NO: 8201 - RNA, 20 nt, Artificial Sequence
  HTT spacer sequence CTCN PAM
guaaggcagauuuauaagga

SEQ ID NO: 8202 - RNA, 20 nt, Artificial Sequence
  HTT spacer sequence CTCN PAM
uacaaagcggggggacaaga

SEQ ID NO: 8203 - RNA, 20 nt, Artificial Sequence
  HTT spacer sequence CTCN PAM
gaaaacggucugggggugca

SEQ ID NO: 8204 - RNA, 20 nt, Artificial Sequence
  HTT spacer sequence CTCN PAM
cuugucugcacccccagacc

SEQ ID NO: 8205 - RNA, 20 nt, Artificial Sequence
  HTT spacer sequence CTCN PAM
ucucggagugcaagguugag

SEQ ID NO: 8206 - RNA, 20 nt, Artificial Sequence
  HTT spacer sequence CTCN PAM
gagugcaagguugagcaugg

SEQ ID NO: 8207 - RNA, 20 nt, Artificial Sequence
  HTT spacer sequence CTCN PAM
gagaagagcucgcuugucug

SEQ ID NO: 8208 - RNA, 20 nt, Artificial Sequence
  HTT spacer sequence CTCN PAM
accuugcacuccgagaagag

SEQ ID NO: 8209 - RNA, 20 nt, Artificial Sequence
  HTT spacer sequence CTCN PAM
guggguuaugcuggcugggu

SEQ ID NO: 8210 - RNA, 20 nt, Artificial Sequence
  HTT spacer sequence CTCN PAM
ucaaagauggaaaacacaaa

SEQ ID NO: 8211 - RNA, 20 nt, Artificial Sequence
  HTT spacer sequence CTCN PAM
aagauggaaaacacaaauuc

SEQ ID NO: 8212 - RNA, 20 nt, Artificial Sequence
  HTT spacer sequence CTCN PAM
ggaugaauuuguguuuucca

SEQ ID NO: 8213 - RNA, 20 nt, Artificial Sequence
  HTT spacer sequence CTCN PAM
uuggugauggccaggaaauc

SEQ ID NO: 8214 - RNA, 20 nt, Artificial Sequence
  HTT spacer sequence CTCN PAM
cccagguccagguaaguguc

SEQ ID NO: 8215 - RNA, 20 nt, Artificial Sequence
  HTT spacer sequence CTCN PAM
cagguccagguaagugucca

SEQ ID NO: 8216 - RNA, 20 nt, Artificial Sequence
  HTT spacer sequence CTCN PAM
cccccaugccgggaauucuc

SEQ ID NO: 8217 - RNA, 20 nt, Artificial Sequence
  HTT spacer sequence CTCN PAM
cccaugccgggaauucucac

SEQ ID NO: 8218 - RNA, 20 nt, Artificial Sequence
  HTT spacer sequence CTCN PAM
ccuccuagugaccaggaacu

SEQ ID NO: 8219 - RNA, 20 nt, Artificial Sequence
  HTT spacer sequence CTCN PAM
uagugaccaggaacuuccag

SEQ ID NO: 8220 - RNA, 20 nt, Artificial Sequence
  HTT spacer sequence CTCN PAM
gugcuguguuucuugcuugg

SEQ ID NO: 8221 - RNA, 20 nt, Artificial Sequence
  HTT spacer sequence CTCN PAM
cuugaaaagacuuuaaagaa

SEQ ID NO: 8222 - RNA, 20 nt, Artificial Sequence
  HTT spacer sequence CTCN PAM
ugaaaagacuuuaaagaaag

SEQ ID NO: 8223 - RNA, 20 nt, Artificial Sequence
  HTT spacer sequence CTCN PAM
uccugggaguguucaaaguc

SEQ ID NO: 8224 - RNA, 20 nt, Artificial Sequence
  HTT spacer sequence CTCN PAM
caggaagagacggugcagga

SEQ ID NO: 8225 - RNA, 20 nt, Artificial Sequence
  HTT spacer sequence CTCN PAM
ggaggcuaaggcaggagaau

SEQ ID NO: 8226 - RNA, 20 nt, Artificial Sequence
  HTT spacer sequence CTCN PAM
cgaguagcugggauuacagg

SEQ ID NO: 8227 - RNA, 20 nt, Artificial Sequence
  HTT spacer sequence CTCN PAM
ugccuuagccucccgaguag

SEQ ID NO: 8228 - RNA, 20 nt, Artificial Sequence
  HTT spacer sequence CTCN PAM
uggguucaaguaauucuccu

SEQ ID NO: 8229 - RNA, 20 nt, Artificial Sequence
  HTT spacer sequence CTCN PAM
gccuccuggguucaaguaau

SEQ ID NO: 8230 - RNA, 20 nt, Artificial Sequence
  HTT spacer sequence CTCN PAM
cugcaaccuccgccuccugg

SEQ ID NO: 8231 - RNA, 20 nt, Artificial Sequence
  HTT spacer sequence CTCN PAM
agccugggcgacagagcaag

SEQ ID NO: 8232 - RNA, 20 nt, Artificial Sequence
  HTT spacer sequence CTCN PAM
gucgcccaggcuugagugca

SEQ ID NO: 8233 - RNA, 20 nt, Artificial Sequence
  HTT spacer sequence CTCN PAM
gucucaaaaaaaaaaaaaaa

SEQ ID NO: 8234 - RNA, 20 nt, Artificial Sequence
  HTT spacer sequence CTCN PAM
aaaaaaaaaaaaaagaaaag

SEQ ID NO: 8235 - RNA, 20 nt, Artificial Sequence
  HTT spacer sequence CTCN PAM
cucuguugcccaggcuagag

SEQ ID NO: 8236 - RNA, 20 nt, Artificial Sequence
  HTT spacer sequence CTCN PAM
guugcccaggcuagagagca

SEQ ID NO: 8237 - RNA, 20 nt, Artificial Sequence
  HTT spacer sequence CTCN PAM
agccugggcaacagagugag

SEQ ID NO: 8238 - RNA, 20 nt, Artificial Sequence
  HTT spacer sequence CTCN PAM
cuagccugggcaacagagug

SEQ ID NO: 8239 - RNA, 20 nt, Artificial Sequence
  HTT spacer sequence CTCN PAM
aaccccugagcuuaagugau

SEQ ID NO: 8240 - RNA, 20 nt, Artificial Sequence
  HTT spacer sequence CTCN PAM
gggguuggaggcugcaguaa

SEQ ID NO: 8241 - RNA, 20 nt, Artificial Sequence
  HTT spacer sequence CTCN PAM
cacauuauccuccugaguag

SEQ ID NO: 8242 - RNA, 20 nt, Artificial Sequence
  HTT spacer sequence CTCN PAM
ugaguagcugagacuacagg

SEQ ID NO: 8243 - RNA, 20 nt, Artificial Sequence
  HTT spacer sequence CTCN PAM
ggaggauaaugugggagaau

SEQ ID NO: 8244 - RNA, 20 nt, Artificial Sequence
  HTT spacer sequence CTCN PAM
gcuacucaggaggauaaugu

SEQ ID NO: 8245 - RNA, 20 nt, Artificial Sequence
  HTT spacer sequence CTCN PAM
acaaaaauauuaaaaaauca

SEQ ID NO: 8246 - RNA, 20 nt, Artificial Sequence
  HTT spacer sequence CTCN PAM
cugugaugcccaggcugguc

SEQ ID NO: 8247 - RNA, 20 nt, Artificial Sequence
  HTT spacer sequence CTCN PAM
ugggcucaagcagucaccca

SEQ ID NO: 8248 - RNA, 20 nt, Artificial Sequence
  HTT spacer sequence CTCN PAM
agcagucacccaccucagcc

SEQ ID NO: 8249 - RNA, 20 nt, Artificial Sequence
  HTT spacer sequence CTCN PAM
gccucccaaagcacuaggau

SEQ ID NO: 8250 - RNA, 20 nt, Artificial Sequence
  HTT spacer sequence CTCN PAM
caaagcacuaggauuacagg

SEQ ID NO: 8251 - RNA, 20 nt, Artificial Sequence
  HTT spacer sequence CTCN PAM
caccuguaauccuagugcuu

SEQ ID NO: 8252 - RNA, 20 nt, Artificial Sequence
  HTT spacer sequence CTCN PAM
ugcuaaaagggcuuccucuc

SEQ ID NO: 8253 - RNA, 20 nt, Artificial Sequence
  HTT spacer sequence CTCN PAM
cugaacuucccuaccuuucu

SEQ ID NO: 8254 - RNA, 20 nt, Artificial Sequence
  HTT spacer sequence CTCN PAM
gaacuucccuaccuuucuuc

SEQ ID NO: 8255 - RNA, 20 nt, Artificial Sequence
  HTT spacer sequence CTCN PAM
auguuggcaguccuacuccc

SEQ ID NO: 8256 - RNA, 20 nt, Artificial Sequence
  HTT spacer sequence CTCN PAM
caauuaaccuggggcugucu

SEQ ID NO: 8257 - RNA, 20 nt, Artificial Sequence
  HTT spacer sequence CTCN PAM
caaugacugcagaucuuaua

SEQ ID NO: 8258 - RNA, 20 nt, Artificial Sequence
  HTT spacer sequence CTCN PAM
acaccaauauuccugguccc

SEQ ID NO: 8259 - RNA, 20 nt, Artificial Sequence
  HTT spacer sequence CTCN PAM
cucaacaccaauauuccugg

SEQ ID NO: 8260 - RNA, 20 nt, Artificial Sequence
  HTT spacer sequence CTCN PAM
ggccacccauccacuuucca

SEQ ID NO: 8261 - RNA, 20 nt, Artificial Sequence
  HTT spacer sequence CTCN PAM
cucuggccacccauccacuu

SEQ ID NO: 8262 - RNA, 20 nt, Artificial Sequence
  HTT spacer sequence CTCN PAM
cccucuggccacccauccac

SEQ ID NO: 8263 - RNA, 20 nt, Artificial Sequence
  HTT spacer sequence CTCN PAM
cuuuuaccuaucagcucucc

SEQ ID NO: 8264 - RNA, 20 nt, Artificial Sequence
  HTT spacer sequence CTCN PAM
uggcuugggaagcaggaguc

SEQ ID NO: 8265 - RNA, 20 nt, Artificial Sequence
  HTT spacer sequence CTCN PAM
ugcuucccaagccaggagcg

SEQ ID NO: 8266 - RNA, 20 nt, Artificial Sequence
  HTT spacer sequence CTCN PAM
cagaucuacuggucaguuug

SEQ ID NO: 8267 - RNA, 20 nt, Artificial Sequence
  HTT spacer sequence CTCN PAM
gaucuacuggucaguuugau

SEQ ID NO: 8268 - RNA, 20 nt, Artificial Sequence
  HTT spacer sequence CTCN PAM
cacuguccucaguguuguca

SEQ ID NO: 8269 - RNA, 20 nt, Artificial Sequence
  HTT spacer sequence CTCN PAM
guguugucagccacaaaaua

SEQ ID NO: 8270 - RNA, 20 nt, Artificial Sequence
  HTT spacer sequence CTCN PAM
ugcuaaucauucucuacuua

SEQ ID NO: 8271 - RNA, 20 nt, Artificial Sequence
  HTT spacer sequence CTCN PAM
acuuauuuuugauuuuaaua

SEQ ID NO: 8272 - RNA, 20 nt, Artificial Sequence
  HTT spacer sequence CTCN PAM
guguaaauucauaaacuggc

SEQ ID NO: 8273 - RNA, 20 nt, Artificial Sequence
  HTT spacer sequence CTCN PAM
aguauaugucucaguguaaa

SEQ ID NO: 8274 - RNA, 20 nt, Artificial Sequence
  HTT spacer sequence CTCN PAM
gagcagaucuguuugggagg

SEQ ID NO: 8275 - RNA, 20 nt, Artificial Sequence
  HTT spacer sequence CTCN PAM
gaggcagaauuccaaacuca

SEQ ID NO: 8276 - RNA, 20 nt, Artificial Sequence
  HTT spacer sequence CTCN PAM
caaacagaucugcucagagg

SEQ ID NO: 8277 - RNA, 20 nt, Artificial Sequence
  HTT spacer sequence CTCN PAM
aaugcuagucacugaggaua

SEQ ID NO: 8278 - RNA, 20 nt, Artificial Sequence
  HTT spacer sequence CTCN PAM
gugacuagcauuagaggccu

SEQ ID NO: 8279 - RNA, 20 nt, Artificial Sequence
  HTT spacer sequence CTCN PAM
ugcaggugcagccuaggguc

SEQ ID NO: 8280 - RNA, 20 nt, Artificial Sequence
  HTT spacer sequence CTCN PAM
ccugcaggugcagccuaggg

SEQ ID NO: 8281 - RNA, 20 nt, Artificial Sequence
  HTT spacer sequence CTCN PAM
aacuauucgacagguccugg

SEQ ID NO: 8282 - RNA, 20 nt, Artificial Sequence
  HTT spacer sequence CTCN PAM
aguagcucuguaccuguaau

SEQ ID NO: 8283 - RNA, 20 nt, Artificial Sequence
  HTT spacer sequence CTCN PAM
guaccuguaauauaggaauc

SEQ ID NO: 8284 - RNA, 20 nt, Artificial Sequence
  HTT spacer sequence CTCN PAM
ggauccugguauccagggau

SEQ ID NO: 8285 - RNA, 20 nt, Artificial Sequence
  HTT spacer sequence CTCN PAM
aaacuuugugccuguggucc

SEQ ID NO: 8286 - RNA, 20 nt, Artificial Sequence
  HTT spacer sequence CTCN PAM
gccuucccaguagcugggac

SEQ ID NO: 8287 - RNA, 20 nt, Artificial Sequence
  HTT spacer sequence CTCN PAM
uugcucagccuucccaguag

SEQ ID NO: 8288 - RNA, 20 nt, Artificial Sequence
  HTT spacer sequence CTCN PAM
ggaguucaaggcaagccugg

SEQ ID NO: 8289 - RNA, 20 nt, Artificial Sequence
  HTT spacer sequence CTCN PAM
ugaguucaagugauccuccu

SEQ ID NO: 8290 - RNA, 20 nt, Artificial Sequence
  HTT spacer sequence CTCN PAM
cuauguugcccaggcuugcc

SEQ ID NO: 8291 - RNA, 20 nt, Artificial Sequence
  HTT spacer sequence CTCN PAM
cugcaucuuaccgcauuuuu

SEQ ID NO: 8292 - RNA, 20 nt, Artificial Sequence
  HTT spacer sequence CTCN PAM
cacugcaucuuaccgcauuu

SEQ ID NO: 8293 - RNA, 20 nt, Artificial Sequence
  HTT spacer sequence CTCN PAM
uuugauuaguuucccucaaa

SEQ ID NO: 8294 - RNA, 20 nt, Artificial Sequence
  HTT spacer sequence CTCN PAM
aaaugaacuuucauuuuugg

SEQ ID NO: 8295 - RNA, 20 nt, Artificial Sequence
  HTT spacer sequence CTCN PAM
ggacacagcagugaugccuu

SEQ ID NO: 8296 - RNA, 20 nt, Artificial Sequence
  HTT spacer sequence CTCN PAM
caccucgggacacagcagug

SEQ ID NO: 8297 - RNA, 20 nt, Artificial Sequence
  HTT spacer sequence CTCN PAM
uuagaaaagucuggcauuua

SEQ ID NO: 8298 - RNA, 20 nt, Artificial Sequence
  HTT spacer sequence CTCN PAM
gggugugguggugggcgccu

SEQ ID NO: 8299 - RNA, 20 nt, Artificial Sequence
  HTT spacer sequence CTCN PAM
acuaaaaauacaaaaaauuc

SEQ ID NO: 8300 - RNA, 20 nt, Artificial Sequence
  HTT spacer sequence CTCN PAM
aucuccugaccuugugaucc

SEQ ID NO: 8301 - RNA, 20 nt, Artificial Sequence
  HTT spacer sequence CTCN PAM
ugaccuugugauccaccugc

SEQ ID NO: 8302 - RNA, 20 nt, Artificial Sequence
  HTT spacer sequence CTCN PAM
gccucccaaagugcugggau

SEQ ID NO: 8303 - RNA, 20 nt, Artificial Sequence
  HTT spacer sequence CTCN PAM
caaagugcugggauuacaag

SEQ ID NO: 8304 - RNA, 20 nt, Artificial Sequence
  HTT spacer sequence CTCN PAM
cgcuuguaaucccagcacuu

SEQ ID NO: 8305 - RNA, 20 nt, Artificial Sequence
  HTT spacer sequence CTCN PAM
cacgcuuguaaucccagcac

SEQ ID NO: 8306 - RNA, 20 nt, Artificial Sequence
  HTT spacer sequence CTCN PAM
aaaaaaaaaaaacagugucu

SEQ ID NO: 8307 - RNA, 20 nt, Artificial Sequence
  HTT spacer sequence CTCN PAM
agccugggcaacaaaagcaa

SEQ ID NO: 8308 - RNA, 20 nt, Artificial Sequence
  HTT spacer sequence CTCN PAM
gcucccugaaccuccagguu

SEQ ID NO: 8309 - RNA, 20 nt, Artificial Sequence
  HTT spacer sequence CTCN PAM
cugaaccuccagguucaggc

SEQ ID NO: 8310 - RNA, 20 nt, Artificial Sequence
  HTT spacer sequence CTCN PAM
agguucaggcgauuccccug

SEQ ID NO: 8311 - RNA, 20 nt, Artificial Sequence
  HTT spacer sequence CTCN PAM
gccucccgaguagcugggau

SEQ ID NO: 8312 - RNA, 20 nt, Artificial Sequence
  HTT spacer sequence CTCN PAM
cgaguagcugggauuacagg

SEQ ID NO: 8313 - RNA, 20 nt, Artificial Sequence
  HTT spacer sequence CTCN PAM
ggaggcugagacaggggaau

SEQ ID NO: 8314 - RNA, 20 nt, Artificial Sequence
  HTT spacer sequence CTCN PAM
acuaaacauacaaaauuauc

SEQ ID NO: 8315 - RNA, 20 nt, Artificial Sequence
  HTT spacer sequence CTCN PAM
ggugauccguccgccuuggc

SEQ ID NO: 8316 - RNA, 20 nt, Artificial Sequence
  HTT spacer sequence CTCN PAM
caaagugcugggauuacagg

SEQ ID NO: 8317 - RNA, 20 nt, Artificial Sequence
  HTT spacer sequence CTCN PAM
ugccuguaaucccagcacuu

SEQ ID NO: 8318 - RNA, 20 nt, Artificial Sequence
  HTT spacer sequence CTCN PAM
cuggccgggcacaguggcuc

SEQ ID NO: 8319 - RNA, 20 nt, Artificial Sequence
  HTT spacer sequence CTCN PAM
caagcagcuaggacuacagg

SEQ ID NO: 8320 - RNA, 20 nt, Artificial Sequence
  HTT spacer sequence CTCN PAM
gccucccaagcagcuaggac

SEQ ID NO: 8321 - RNA, 20 nt, Artificial Sequence
  HTT spacer sequence CTCN PAM
cagguucaagcaauuauccc

SEQ ID NO: 8322 - RNA, 20 nt, Artificial Sequence
  HTT spacer sequence CTCN PAM
accucccagguucaagcaau

SEQ ID NO: 8323 - RNA, 20 nt, Artificial Sequence
  HTT spacer sequence CTCN PAM
cugcaaccuccaccucccag

SEQ ID NO: 8324 - RNA, 20 nt, Artificial Sequence
  HTT spacer sequence CTCN PAM
gccacccaggcuggugugca

SEQ ID NO: 8325 - RNA, 20 nt, Artificial Sequence
  HTT spacer sequence CTCN PAM
cucugccacccaggcuggug

SEQ ID NO: 8326 - RNA, 20 nt, Artificial Sequence
  HTT spacer sequence CTCN PAM
aaaaauaaauaauuuuuaaa

SEQ ID NO: 8327 - RNA, 20 nt, Artificial Sequence
  HTT spacer sequence CTCN PAM
ugccuguaaucucagcacuu

SEQ ID NO: 8328 - RNA, 20 nt, Artificial Sequence
  HTT spacer sequence CTCN PAM
gcacuuugggaggccgaagc

SEQ ID NO: 8329 - RNA, 20 nt, Artificial Sequence
  HTT spacer sequence CTCN PAM
caaagugcugagauuacagg

SEQ ID NO: 8330 - RNA, 20 nt, Artificial Sequence
  HTT spacer sequence CTCN PAM
agugauccaccagcuucggc

SEQ ID NO: 8331 - RNA, 20 nt, Artificial Sequence
  HTT spacer sequence CTCN PAM
caaccucaagugauccacca

SEQ ID NO: 8332 - RNA, 20 nt, Artificial Sequence
  HTT spacer sequence CTCN PAM
auguugaucaggcuugucau

SEQ ID NO: 8333 - RNA, 20 nt, Artificial Sequence
  HTT spacer sequence CTCN PAM
acuaaaaagacaaaauuagc

SEQ ID NO: 8334 - RNA, 20 nt, Artificial Sequence
  HTT spacer sequence CTCN PAM
gauuccccaguagcuaggau

SEQ ID NO: 8335 - RNA, 20 nt, Artificial Sequence
  HTT spacer sequence CTCN PAM
ugccucagauuccccaguag

SEQ ID NO: 8336 - RNA, 20 nt, Artificial Sequence
  HTT spacer sequence CTCN PAM
uggguucaagugauucuccu

SEQ ID NO: 8337 - RNA, 20 nt, Artificial Sequence
  HTT spacer sequence CTCN PAM
cuccuggguucaagugauuc

SEQ ID NO: 8338 - RNA, 20 nt, Artificial Sequence
  HTT spacer sequence CTCN PAM
cccuccuggguucaagugau

SEQ ID NO: 8339 - RNA, 20 nt, Artificial Sequence
  HTT spacer sequence CTCN PAM
ggucacugcaaccucucccu

SEQ ID NO: 8340 - RNA, 20 nt, Artificial Sequence
  HTT spacer sequence CTCN PAM
agccugggcaacaagagcaa

SEQ ID NO: 8341 - RNA, 20 nt, Artificial Sequence
  HTT spacer sequence CTCN PAM
uguugcccaggcuggagugc

SEQ ID NO: 8342 - RNA, 20 nt, Artificial Sequence
  HTT spacer sequence CTCN PAM
gucucaaaaaaaaaaauaua

SEQ ID NO: 8343 - RNA, 20 nt, Artificial Sequence
  HTT spacer sequence CTCN PAM
aaaaaaaaaauauauauaua

SEQ ID NO: 8344 - RNA, 20 nt, Artificial Sequence
  HTT spacer sequence CTCN PAM
ugaccuuggguaaagggaaa

SEQ ID NO: 8345 - RNA, 20 nt, Artificial Sequence
  HTT spacer sequence CTCN PAM
caccauacacaaaaaucaau

SEQ ID NO: 8346 - RNA, 20 nt, Artificial Sequence
  HTT spacer sequence CTCN PAM
aggauagaaaaguagacgaa

SEQ ID NO: 8347 - RNA, 20 nt, Artificial Sequence
  HTT spacer sequence CTCN PAM
cugaauuauuauagcauuug

SEQ ID NO: 8348 - RNA, 20 nt, Artificial Sequence
  HTT spacer sequence CTCN PAM
gaauuauuauagcauuuguu

SEQ ID NO: 8349 - RNA, 20 nt, Artificial Sequence
  HTT spacer sequence CTCN PAM
acaacaacaaaugcuauaau

SEQ ID NO: 8350 - RNA, 20 nt, Artificial Sequence
  HTT spacer sequence CTCN PAM
guugcccaggcuggaaugca

SEQ ID NO: 8351 - RNA, 20 nt, Artificial Sequence
  HTT spacer sequence CTCN PAM
ugccacugcauuccagccug

SEQ ID NO: 8352 - RNA, 20 nt, Artificial Sequence
  HTT spacer sequence CTCN PAM
uuguagccucaaccuccugg

SEQ ID NO: 8353 - RNA, 20 nt, Artificial Sequence
  HTT spacer sequence CTCN PAM
accuccugggcucaagcaau

SEQ ID NO: 8354 - RNA, 20 nt, Artificial Sequence
  HTT spacer sequence CTCN PAM
ugggcucaagcaaucuuccc

SEQ ID NO: 8355 - RNA, 20 nt, Artificial Sequence
  HTT spacer sequence CTCN PAM
agcaaucuucccaccucagc

SEQ ID NO: 8356 - RNA, 20 nt, Artificial Sequence
  HTT spacer sequence CTCN PAM
gccuccugaguggcugggac

SEQ ID NO: 8357 - RNA, 20 nt, Artificial Sequence
  HTT spacer sequence CTCN PAM
ugaguggcugggacuacagg

SEQ ID NO: 8358 - RNA, 20 nt, Artificial Sequence
  HTT spacer sequence CTCN PAM
ggaggcugaggugggaagau

SEQ ID NO: 8359 - RNA, 20 nt, Artificial Sequence
  HTT spacer sequence CTCN PAM
acaaaaaauuuaaaaauaag

SEQ ID NO: 8360 - RNA, 20 nt, Artificial Sequence
  HTT spacer sequence CTCN PAM
cucuguugcucaggcggucu

SEQ ID NO: 8361 - RNA, 20 nt, Artificial Sequence
  HTT spacer sequence CTCN PAM
guugcucaggcggucuugaa

SEQ ID NO: 8362 - RNA, 20 nt, Artificial Sequence
  HTT spacer sequence CTCN PAM
ggcggucuugaacuccuggg

SEQ ID NO: 8363 - RNA, 20 nt, Artificial Sequence
  HTT spacer sequence CTCN PAM
ugggcucaagcaacccuuuc

SEQ ID NO: 8364 - RNA, 20 nt, Artificial Sequence
  HTT spacer sequence CTCN PAM
agcaacccuuucacccaagc

SEQ ID NO: 8365 - RNA, 20 nt, Artificial Sequence
  HTT spacer sequence CTCN PAM
caaagugcugggauuacagg

SEQ ID NO: 8366 - RNA, 20 nt, Artificial Sequence
  HTT spacer sequence CTCN PAM
uguaaucccagcacuuuggg

SEQ ID NO: 8367 - RNA, 20 nt, Artificial Sequence
  HTT spacer sequence CTCN PAM
gccuaguauagcuuuuuaau

SEQ ID NO: 8368 - RNA, 20 nt, Artificial Sequence
  HTT spacer sequence CTCN PAM
gguauuccuuauagcaacac

SEQ ID NO: 8369 - RNA, 20 nt, Artificial Sequence
  HTT spacer sequence CTCN PAM
ugguucugcaagcuguguaa

SEQ ID NO: 8370 - RNA, 20 nt, Artificial Sequence
  HTT spacer sequence CTCN PAM
ccagaugcaaaugcugugca

SEQ ID NO: 8371 - RNA, 20 nt, Artificial Sequence
  HTT spacer sequence CTCN PAM
caccagaugcaaaugcugug

SEQ ID NO: 8372 - RNA, 20 nt, Artificial Sequence
  HTT spacer sequence CTCN PAM
gguuuuuuccacuuacggca

SEQ ID NO: 8373 - RNA, 20 nt, Artificial Sequence
  HTT spacer sequence CTCN PAM
ucaccuugugccguaagugg

SEQ ID NO: 8374 - RNA, 20 nt, Artificial Sequence
  HTT spacer sequence CTCN PAM
ucaugucaucuggacacacu

SEQ ID NO: 8375 - RNA, 20 nt, Artificial Sequence
  HTT spacer sequence CTCN PAM
caucaugucaucuggacaca

SEQ ID NO: 8376 - RNA, 20 nt, Artificial Sequence
  HTT spacer sequence CTCN PAM
ugcuuuuucucucaucaugu

SEQ ID NO: 8377 - RNA, 20 nt, Artificial Sequence
  HTT spacer sequence CTCN PAM
cuugcuuuuucucucaucau

SEQ ID NO: 8378 - RNA, 20 nt, Artificial Sequence
  HTT spacer sequence CTCN PAM
uuucccaucucucuugcuuu

SEQ ID NO: 8379 - RNA, 20 nt, Artificial Sequence
  HTT spacer sequence CTCN PAM
cagggaacuaauggaaugag

SEQ ID NO: 8380 - RNA, 20 nt, Artificial Sequence
  HTT spacer sequence CTCN PAM
gggaacuaauggaaugagaa

SEQ ID NO: 8381 - RNA, 20 nt, Artificial Sequence
  HTT spacer sequence CTCN PAM
uuccauuaguucccugagag

SEQ ID NO: 8382 - RNA, 20 nt, Artificial Sequence
  HTT spacer sequence CTCN PAM
cucagugcuggaaagacagc

SEQ ID NO: 8383 - RNA, 20 nt, Artificial Sequence
  HTT spacer sequence CTCN PAM
gugcuggaaagacagcacca

SEQ ID NO: 8384 - RNA, 20 nt, Artificial Sequence
  HTT spacer sequence CTCN PAM
ugaauggcuuggugcugucu

SEQ ID NO: 8385 - RNA, 20 nt, Artificial Sequence
  HTT spacer sequence CTCN PAM
ugacccaugcacuucccauu

SEQ ID NO: 8386 - RNA, 20 nt, Artificial Sequence
  HTT spacer sequence CTCN PAM
agcacugggugugguggcac

SEQ ID NO: 8387 - RNA, 20 nt, Artificial Sequence
  HTT spacer sequence CTCN PAM
gcugcucaggagucugaggu

SEQ ID NO: 8388 - RNA, 20 nt, Artificial Sequence
  HTT spacer sequence CTCN PAM
ggagucugaggugaaaggau

SEQ ID NO: 8389 - RNA, 20 nt, Artificial Sequence
  HTT spacer sequence CTCN PAM
ugagcagcugagaccacagg

SEQ ID NO: 8390 - RNA, 20 nt, Artificial Sequence
  HTT spacer sequence CTCN PAM
gacuccugagcagcugagac

SEQ ID NO: 8391 - RNA, 20 nt, Artificial Sequence
  HTT spacer sequence CTCN PAM
agcgauccuuucaccucaga

SEQ ID NO: 8392 - RNA, 20 nt, Artificial Sequence
  HTT spacer sequence CTCN PAM
aacuucugggcucaagcgau

SEQ ID NO: 8393 - RNA, 20 nt, Artificial Sequence
  HTT spacer sequence CTCN PAM
ucucugcuaaaaauacaaaa

SEQ ID NO: 8394 - RNA, 20 nt, Artificial Sequence
  HTT spacer sequence CTCN PAM
gcuaaaaauacaaaaauuag

SEQ ID NO: 8395 - RNA, 20 nt, Artificial Sequence
  HTT spacer sequence CTCN PAM
gucugccaaguagcuggaac

SEQ ID NO: 8396 - RNA, 20 nt, Artificial Sequence
  HTT spacer sequence CTCN PAM
ugccucagucugccaaguag

SEQ ID NO: 8397 - RNA, 20 nt, Artificial Sequence
  HTT spacer sequence CTCN PAM
accacccgggcuaucaagug

SEQ ID NO: 8398 - RNA, 20 nt, Artificial Sequence
  HTT spacer sequence CTCN PAM
cugcaaccuccaccacccgg

SEQ ID NO: 8399 - RNA, 20 nt, Artificial Sequence
  HTT spacer sequence CTCN PAM
guugccuaggcuggacugca

SEQ ID NO: 8400 - RNA, 20 nt, Artificial Sequence
  HTT spacer sequence CTCN PAM
aaauauguaaauaaaagaaa

SEQ ID NO: 8401 - RNA, 20 nt, Artificial Sequence
  HTT spacer sequence CTCN PAM
uucuuuucaaaauuuuuuuc

SEQ ID NO: 8402 - RNA, 20 nt, Artificial Sequence
  HTT spacer sequence CTCN PAM
gaaggaauucacugaaaagg

SEQ ID NO: 8403 - RNA, 20 nt, Artificial Sequence
  HTT spacer sequence CTCN PAM
cugccuaucuuuuccuuccu

SEQ ID NO: 8404 - RNA, 20 nt, Artificial Sequence
  HTT spacer sequence CTCN PAM
cacugccuaucuuuuccuuc

SEQ ID NO: 8405 - RNA, 20 nt, Artificial Sequence
  HTT spacer sequence CTCN PAM
guagcacuucugccccagcu

SEQ ID NO: 8406 - RNA, 20 nt, Artificial Sequence
  HTT spacer sequence CTCN PAM
caguagcacuucugccccag

SEQ ID NO: 8407 - RNA, 20 nt, Artificial Sequence
  HTT spacer sequence CTCN PAM
ucucaguagcacuucugccc

SEQ ID NO: 8408 - RNA, 20 nt, Artificial Sequence
  HTT spacer sequence CTCN PAM
gaagaaacacaacgaucucc

SEQ ID NO: 8409 - RNA, 20 nt, Artificial Sequence
  HTT spacer sequence CTCN PAM
cacucugaagaaacacaacg

SEQ ID NO: 8410 - RNA, 20 nt, Artificial Sequence
  HTT spacer sequence CTCN PAM
uucuuuccugcaucacuucc

SEQ ID NO: 8411 - RNA, 20 nt, Artificial Sequence
  HTT spacer sequence CTCN PAM
uaucaucacuuucucuuucu

SEQ ID NO: 8412 - RNA, 20 nt, Artificial Sequence
  HTT spacer sequence CTCN PAM
ucucauaucaucacuuucuc

SEQ ID NO: 8413 - RNA, 20 nt, Artificial Sequence
  HTT spacer sequence CTCN PAM
aguggcgacagggugggguc

SEQ ID NO: 8414 - RNA, 20 nt, Artificial Sequence
  HTT spacer sequence CTCN PAM
ucacaaccagaccccacccu

SEQ ID NO: 8415 - RNA, 20 nt, Artificial Sequence
  HTT spacer sequence CTCN PAM
aacuagcucuucacaaccag

SEQ ID NO: 8416 - RNA, 20 nt, Artificial Sequence
  HTT spacer sequence CTCN PAM
aauguccuccaacuagcucu

SEQ ID NO: 8417 - RNA, 20 nt, Artificial Sequence
  HTT spacer sequence CTCN PAM
ccaauguccuccaacuagcu

SEQ ID NO: 8418 - RNA, 20 nt, Artificial Sequence
  HTT spacer sequence CTCN PAM
ucuccaauguccuccaacua

SEQ ID NO: 8419 - RNA, 20 nt, Artificial Sequence
  HTT spacer sequence CTCN PAM
cacacauccgcagaccugcg

SEQ ID NO: 8420 - RNA, 20 nt, Artificial Sequence
  HTT spacer sequence CTCN PAM
caccacccucagcagucugu

SEQ ID NO: 8421 - RNA, 20 nt, Artificial Sequence
  HTT spacer sequence CTCN PAM
gcagucugugaauacccauc

SEQ ID NO: 8422 - RNA, 20 nt, Artificial Sequence
  HTT spacer sequence CTCN PAM
ucagcacagaguccaugucc

SEQ ID NO: 8423 - RNA, 20 nt, Artificial Sequence
  HTT spacer sequence CTCN PAM
gcacagaguccaugucccug

SEQ ID NO: 8424 - RNA, 20 nt, Artificial Sequence
  HTT spacer sequence CTCN PAM
gugcugaggaguauaaagga

SEQ ID NO: 8425 - RNA, 20 nt, Artificial Sequence
  HTT spacer sequence CTCN PAM
ugggcacccugcuccgcauu

SEQ ID NO: 8426 - RNA, 20 nt, Artificial Sequence
  HTT spacer sequence CTCN PAM
gcauugacggagcucgagau

SEQ ID NO: 8427 - RNA, 20 nt, Artificial Sequence
  HTT spacer sequence CTCN PAM
gucaaugcggagcagggugc

SEQ ID NO: 8428 - RNA, 20 nt, Artificial Sequence
  HTT spacer sequence CTCN PAM
agauccccacaucuacucca

SEQ ID NO: 8429 - RNA, 20 nt, Artificial Sequence
  HTT spacer sequence CTCN PAM
agcuccgucaaugcggagca

SEQ ID NO: 8430 - RNA, 20 nt, Artificial Sequence
  HTT spacer sequence CTCN PAM
acugcuccccuuccucucaa

SEQ ID NO: 8431 - RNA, 20 nt, Artificial Sequence
  HTT spacer sequence CTCN PAM
ccuuccucucaacuuccauc

SEQ ID NO: 8432 - RNA, 20 nt, Artificial Sequence
  HTT spacer sequence CTCN PAM
caacuuccaucauuaggcuc

SEQ ID NO: 8433 - RNA, 20 nt, Artificial Sequence
  HTT spacer sequence CTCN PAM
acuuccaucauuaggcucag

SEQ ID NO: 8434 - RNA, 20 nt, Artificial Sequence
  HTT spacer sequence CTCN PAM
gggaccuuggcccuuucccu

SEQ ID NO: 8435 - RNA, 20 nt, Artificial Sequence
  HTT spacer sequence CTCN PAM
uuaccuuaagucgucuccuc

SEQ ID NO: 8436 - RNA, 20 nt, Artificial Sequence
  HTT spacer sequence CTCN PAM
ucaucuuuugacuuacaugg

SEQ ID NO: 8437 - RNA, 20 nt, Artificial Sequence
  HTT spacer sequence CTCN PAM
ucuuuugacuuacauggacc

SEQ ID NO: 8438 - RNA, 20 nt, Artificial Sequence
  HTT spacer sequence CTCN PAM
uucccauaauacaauguuga

SEQ ID NO: 8439 - RNA, 20 nt, Artificial Sequence
  HTT spacer sequence CTCN PAM
ccuucccauaauacaauguu

SEQ ID NO: 8440 - RNA, 20 nt, Artificial Sequence
  HTT spacer sequence CTCN PAM
gguuuggcuguccuuggguc

SEQ ID NO: 8441 - RNA, 20 nt, Artificial Sequence
  HTT spacer sequence CTCN PAM
cugcugccaggggagcacag

SEQ ID NO: 8442 - RNA, 20 nt, Artificial Sequence
  HTT spacer sequence CTCN PAM
ccuggcagcagggaggcauc

SEQ ID NO: 8443 - RNA, 20 nt, Artificial Sequence
  HTT spacer sequence CTCN PAM
uccaucaccaucaccugugc

SEQ ID NO: 8444 - RNA, 20 nt, Artificial Sequence
  HTT spacer sequence CTCN PAM
ccaucagcagaggugugggu

SEQ ID NO: 8445 - RNA, 20 nt, Artificial Sequence
  HTT spacer sequence CTCN PAM
gcugauggggagguccccau

SEQ ID NO: 8446 - RNA, 20 nt, Artificial Sequence
  HTT spacer sequence CTCN PAM
aaauuaagugaccugaagca

SEQ ID NO: 8447 - RNA, 20 nt, Artificial Sequence
  HTT spacer sequence CTCN PAM
gaauaaaagccacuuucagc

SEQ ID NO: 8448 - RNA, 20 nt, Artificial Sequence
  HTT spacer sequence CTCN PAM
guucuauuuaaguaguuuua

SEQ ID NO: 8449 - RNA, 20 nt, Artificial Sequence
  HTT spacer sequence CTCN PAM
cuggucauuucuggguauug

SEQ ID NO: 8450 - RNA, 20 nt, Artificial Sequence
  HTT spacer sequence CTCN PAM
ggucauuucuggguauugcu

SEQ ID NO: 8451 - RNA, 20 nt, Artificial Sequence
  HTT spacer sequence CTCN PAM
gaagguccugaaaaaucaca

SEQ ID NO: 8452 - RNA, 20 nt, Artificial Sequence
  HTT spacer sequence CTCN PAM
cacugcaguuuguaacccuu

SEQ ID NO: 8453 - RNA, 20 nt, Artificial Sequence
  HTT spacer sequence CTCN PAM
auacagcaaaagggcaaaac

SEQ ID NO: 8454 - RNA, 20 nt, Artificial Sequence
  HTT spacer sequence CTCN PAM
acauucaggcuccauacagc

SEQ ID NO: 8455 - RNA, 20 nt, Artificial Sequence
  HTT spacer sequence CTCN PAM
gucaugggacagcacaaaua

SEQ ID NO: 8456 - RNA, 20 nt, Artificial Sequence
  HTT spacer sequence CTCN PAM
gaacaugucuggaugccagg

SEQ ID NO: 8457 - RNA, 20 nt, Artificial Sequence
  HTT spacer sequence CTCN PAM
gauauuuguuuucuucugga

SEQ ID NO: 8458 - RNA, 20 nt, Artificial Sequence
  HTT spacer sequence CTCN PAM
auguaauguuacuaaugugg

SEQ ID NO: 8459 - RNA, 20 nt, Artificial Sequence
  HTT spacer sequence CTCN PAM
ugaauugcccuauuaaaugg

SEQ ID NO: 8460 - RNA, 20 nt, Artificial Sequence
  HTT spacer sequence CTCN PAM
guuuauucuaauauguaaac

SEQ ID NO: 8461 - RNA, 20 nt, Artificial Sequence
  HTT spacer sequence CTCN PAM
gaaggauuuacuuuuaauuu

SEQ ID NO: 8462 - RNA, 20 nt, Artificial Sequence
  HTT spacer sequence CTCN PAM
auaaaauucaacagugacug

SEQ ID NO: 8463 - RNA, 20 nt, Artificial Sequence
  HTT spacer sequence CTCN PAM
guaagauuacagaaauuauu

SEQ ID NO: 8464 - RNA, 20 nt, Artificial Sequence
  HTT spacer sequence CTCN PAM
gugauaaauaauuucuguaa

SEQ ID NO: 8465 - RNA, 20 nt, Artificial Sequence
  HTT spacer sequence CTCN PAM
ugauaugauuguuaccaauc

SEQ ID NO: 8466 - RNA, 20 nt, Artificial Sequence
  HTT spacer sequence CTCN PAM
uuguaaccacugagaaggag

SEQ ID NO: 8467 - RNA, 20 nt, Artificial Sequence
  HTT spacer sequence CTCN PAM
gugguuacaaagagauuggu

SEQ ID NO: 8468 - RNA, 20 nt, Artificial Sequence
  HTT spacer sequence CTCN PAM
uucucagugguuacaaagag

SEQ ID NO: 8469 - RNA, 20 nt, Artificial Sequence
  HTT spacer sequence CTCN PAM
ccaggcaaugccuuuugcuc

SEQ ID NO: 8470 - RNA, 20 nt, Artificial Sequence
  HTT spacer sequence CTCN PAM
aggcaaugccuuuugcucag

SEQ ID NO: 8471 - RNA, 20 nt, Artificial Sequence
  HTT spacer sequence CTCN PAM
gagaaccugcauaugcuuug

SEQ ID NO: 8472 - RNA, 20 nt, Artificial Sequence
  HTT spacer sequence CTCN PAM
gagcaaaaggcauugccugg

SEQ ID NO: 8473 - RNA, 20 nt, Artificial Sequence
  HTT spacer sequence CTCN PAM
gcuuucccaaagcauaugca

SEQ ID NO: 8474 - RNA, 20 nt, Artificial Sequence
  HTT spacer sequence CTCN PAM
aguccagggaacacuguuau

SEQ ID NO: 8475 - RNA, 20 nt, Artificial Sequence
  HTT spacer sequence CTCN PAM
caaagugcugggauuacagg

SEQ ID NO: 8476 - RNA, 20 nt, Artificial Sequence
  HTT spacer sequence CTCN PAM
gccucccaaagugcugggau

SEQ ID NO: 8477 - RNA, 20 nt, Artificial Sequence
  HTT spacer sequence CTCN PAM
ugaucugccuaccucggccu

SEQ ID NO: 8478 - RNA, 20 nt, Artificial Sequence
  HTT spacer sequence CTCN PAM
aauuccugaccucgugaucu

SEQ ID NO: 8479 - RNA, 20 nt, Artificial Sequence
  HTT spacer sequence CTCN PAM
acuaaaaauacaaaaacuag

SEQ ID NO: 8480 - RNA, 20 nt, Artificial Sequence
  HTT spacer sequence CTCN PAM
ggaggcugaggcaggagaau

SEQ ID NO: 8481 - RNA, 20 nt, Artificial Sequence
  HTT spacer sequence CTCN PAM
ugaguagcugggauuacaug

SEQ ID NO: 8482 - RNA, 20 nt, Artificial Sequence
  HTT spacer sequence CTCN PAM
gccuccugaguagcugggau

SEQ ID NO: 8483 - RNA, 20 nt, Artificial Sequence
  HTT spacer sequence CTCN PAM
ugccucagccuccugaguag

SEQ ID NO: 8484 - RNA, 20 nt, Artificial Sequence
  HTT spacer sequence CTCN PAM
uggauucaagcaauucuccu

SEQ ID NO: 8485 - RNA, 20 nt, Artificial Sequence
  HTT spacer sequence CTCN PAM
gccuccuggauucaagcaau

SEQ ID NO: 8486 - RNA, 20 nt, Artificial Sequence
  HTT spacer sequence CTCN PAM
uugcaaccuccgccuccugg

SEQ ID NO: 8487 - RNA, 20 nt, Artificial Sequence
  HTT spacer sequence CTCN PAM
gcucauugcaaccuccgccu

SEQ ID NO: 8488 - RNA, 20 nt, Artificial Sequence
  HTT spacer sequence CTCN PAM
agccugggcaacagagcgag

SEQ ID NO: 8489 - RNA, 20 nt, Artificial Sequence
  HTT spacer sequence CTCN PAM
guugcccaggcuggagugca

SEQ ID NO: 8490 - RNA, 20 nt, Artificial Sequence
  HTT spacer sequence CTCN PAM
cucuguugcccaggcuggag

SEQ ID NO: 8491 - RNA, 20 nt, Artificial Sequence
  HTT spacer sequence CTCN PAM
gucucaaaaaaaaaaaaaaa

SEQ ID NO: 8492 - RNA, 20 nt, Artificial Sequence
  HTT spacer sequence CTCN PAM
aaaaaaaaaaaaaagaaaga

SEQ ID NO: 8493 - RNA, 20 nt, Artificial Sequence
  HTT spacer sequence CTCN PAM
cgccuguaaucccagcacuu

SEQ ID NO: 8494 - RNA, 20 nt, Artificial Sequence
  HTT spacer sequence CTCN PAM
caaagugcugggauuacagg

SEQ ID NO: 8495 - RNA, 20 nt, Artificial Sequence
  HTT spacer sequence CTCN PAM
gccucccaaagugcugggau

SEQ ID NO: 8496 - RNA, 20 nt, Artificial Sequence
  HTT spacer sequence CTCN PAM
ugaucugcccgccucggccu

SEQ ID NO: 8497 - RNA, 20 nt, Artificial Sequence
  HTT spacer sequence CTCN PAM
ugaccucgugaucugcccgc

SEQ ID NO: 8498 - RNA, 20 nt, Artificial Sequence
  HTT spacer sequence CTCN PAM
aucuccugaccucgugaucu

SEQ ID NO: 8499 - RNA, 20 nt, Artificial Sequence
  HTT spacer sequence CTCN PAM
acuaacaacgccugucuggg

SEQ ID NO: 8500 - RNA, 20 nt, Artificial Sequence
  HTT spacer sequence CTCN PAM
ugccuguagucccagcuacu

SEQ ID NO: 8501 - RNA, 20 nt, Artificial Sequence
  HTT spacer sequence CTCN PAM
caaguagcugggacuacagg

SEQ ID NO: 8502 - RNA, 20 nt, Artificial Sequence
  HTT spacer sequence CTCN PAM
gccucccaaguagcugggac

SEQ ID NO: 8503 - RNA, 20 nt, Artificial Sequence
  HTT spacer sequence CTCN PAM
ugccucagccucccaaguag

SEQ ID NO: 8504 - RNA, 20 nt, Artificial Sequence
  HTT spacer sequence CTCN PAM
ggaggcagagguugcaguga

SEQ ID NO: 8505 - RNA, 20 nt, Artificial Sequence
  HTT spacer sequence CTCN PAM
cgaguucaaaugauccuccu

SEQ ID NO: 8506 - RNA, 20 nt, Artificial Sequence
  HTT spacer sequence CTCN PAM
gccucccgaguucaaaugau

SEQ ID NO: 8507 - RNA, 20 nt, Artificial Sequence
  HTT spacer sequence CTCN PAM
cugcaaccucugccucccga

SEQ ID NO: 8508 - RNA, 20 nt, Artificial Sequence
  HTT spacer sequence CTCN PAM
gucaccaggcuggaaugcag

SEQ ID NO: 8509 - RNA, 20 nt, Artificial Sequence
  HTT spacer sequence CTCN PAM
cucugucaccaggcuggaau

SEQ ID NO: 8510 - RNA, 20 nt, Artificial Sequence
  HTT spacer sequence CTCN PAM
aucucaaaaaaaaaaaacaa

SEQ ID NO: 8511 - RNA, 20 nt, Artificial Sequence
  HTT spacer sequence CTCN PAM
aaaaaaaaaaacaaaaaaaa

SEQ ID NO: 8512 - RNA, 20 nt, Artificial Sequence
  HTT spacer sequence CTCN PAM
aucacaauuuucuguuuuuu

SEQ ID NO: 8513 - RNA, 20 nt, Artificial Sequence
  HTT spacer sequence CTCN PAM
acauuaugaauguccauaau

SEQ ID NO: 8514 - RNA, 20 nt, Artificial Sequence
  HTT spacer sequence CTCN PAM
caccuguaaucccagcauug

SEQ ID NO: 8515 - RNA, 20 nt, Artificial Sequence
  HTT spacer sequence CTCN PAM
caaugcugggauuacaggug

SEQ ID NO: 8516 - RNA, 20 nt, Artificial Sequence
  HTT spacer sequence CTCN PAM
cacaaugcugggauuacagg

SEQ ID NO: 8517 - RNA, 20 nt, Artificial Sequence
  HTT spacer sequence CTCN PAM
gccucucacaaugcugggau

SEQ ID NO: 8518 - RNA, 20 nt, Artificial Sequence
  HTT spacer sequence CTCN PAM
ugauccacccgccucggccu

SEQ ID NO: 8519 - RNA, 20 nt, Artificial Sequence
  HTT spacer sequence CTCN PAM
ugaccucgugauccacccgc

SEQ ID NO: 8520 - RNA, 20 nt, Artificial Sequence
  HTT spacer sequence CTCN PAM
aucuccugaccucgugaucc

SEQ ID NO: 8521 - RNA, 20 nt, Artificial Sequence
  HTT spacer sequence CTCN PAM
acuaaaaauacaaaaaauua

SEQ ID NO: 8522 - RNA, 20 nt, Artificial Sequence
  HTT spacer sequence CTCN PAM
gccuaccaaguagcugggau

SEQ ID NO: 8523 - RNA, 20 nt, Artificial Sequence
  HTT spacer sequence CTCN PAM
ugccucagccuaccaaguag

SEQ ID NO: 8524 - RNA, 20 nt, Artificial Sequence
  HTT spacer sequence CTCN PAM
cagguucaagugauucuccu

SEQ ID NO: 8525 - RNA, 20 nt, Artificial Sequence
  HTT spacer sequence CTCN PAM
accucccagguucaagugau

SEQ ID NO: 8526 - RNA, 20 nt, Artificial Sequence
  HTT spacer sequence CTCN PAM
gugcaaccuccaccucccag

SEQ ID NO: 8527 - RNA, 20 nt, Artificial Sequence
  HTT spacer sequence CTCN PAM
gcucagugcaaccuccaccu

SEQ ID NO: 8528 - RNA, 20 nt, Artificial Sequence
  HTT spacer sequence CTCN PAM
gugacccaggcuggggugua

SEQ ID NO: 8529 - RNA, 20 nt, Artificial Sequence
  HTT spacer sequence CTCN PAM
cucucaaaaaaaaaaaaaga

SEQ ID NO: 8530 - RNA, 20 nt, Artificial Sequence
  HTT spacer sequence CTCN PAM
caaaaaaaaaaaaagagugu

SEQ ID NO: 8531 - RNA, 20 nt, Artificial Sequence
  HTT spacer sequence CTCN PAM
aaaaaaaaaaaagaguguag

SEQ ID NO: 8532 - RNA, 20 nt, Artificial Sequence
  HTT spacer sequence CTCN PAM
uuuuuuuuuuuugagaggga

SEQ ID NO: 8533 - RNA, 20 nt, Artificial Sequence
  HTT spacer sequence CTCN PAM
uguacaacuucuacacucuu

SEQ ID NO: 8534 - RNA, 20 nt, Artificial Sequence
  HTT spacer sequence CTCN PAM
aucaauacgugucacacgca

SEQ ID NO: 8535 - RNA, 20 nt, Artificial Sequence
  HTT spacer sequence CTCN PAM
cuaccccucaaucaauacgu

SEQ ID NO: 8536 - RNA, 20 nt, Artificial Sequence
  HTT spacer sequence CTCN PAM
caguugucuuguaaaggaaa

SEQ ID NO: 8537 - RNA, 20 nt, Artificial Sequence
  HTT spacer sequence CTCN PAM
ccgccuuuccuuuacaagac

SEQ ID NO: 8538 - RNA, 20 nt, Artificial Sequence
  HTT spacer sequence CTCN PAM
uccugccuucauacuugcug

SEQ ID NO: 8539 - RNA, 20 nt, Artificial Sequence
  HTT spacer sequence CTCN PAM
cgccccaaccaacuaugugg

SEQ ID NO: 8540 - RNA, 20 nt, Artificial Sequence
  HTT spacer sequence CTCN PAM
uuacaguuccacacucccgc

SEQ ID NO: 8541 - RNA, 20 nt, Artificial Sequence
  HTT spacer sequence CTCN PAM
gccuuaaacccuucgauugu

SEQ ID NO: 8542 - RNA, 20 nt, Artificial Sequence
  HTT spacer sequence CTCN PAM
cacuguaccuaugaccagaa

SEQ ID NO: 8543 - RNA, 20 nt, Artificial Sequence
  HTT spacer sequence CTCN PAM
ugucaaaacccccucacacu

SEQ ID NO: 8544 - RNA, 20 nt, Artificial Sequence
  HTT spacer sequence CTCN PAM
aucuccugucaaaacccccu

SEQ ID NO: 8545 - RNA, 20 nt, Artificial Sequence
  HTT spacer sequence CTCN PAM
ccacaugcccuccaucuccu

SEQ ID NO: 8546 - RNA, 20 nt, Artificial Sequence
  HTT spacer sequence CTCN PAM
ugccgaccggccuucagggc

SEQ ID NO: 8547 - RNA, 20 nt, Artificial Sequence
  HTT spacer sequence CTCN PAM
ugcauuagccuucauagggc

SEQ ID NO: 8548 - RNA, 20 nt, Artificial Sequence
  HTT spacer sequence CTCN PAM
gguaacagcagcacaaccca

SEQ ID NO: 8549 - RNA, 20 nt, Artificial Sequence
  HTT spacer sequence CTCN PAM
cggguaacagcagcacaacc

SEQ ID NO: 8550 - RNA, 20 nt, Artificial Sequence
  HTT spacer sequence CTCN PAM
cacccccaugcacacaggcc

SEQ ID NO: 8551 - RNA, 20 nt, Artificial Sequence
  HTT spacer sequence CTCN PAM
gcuguuaguaguguucccaa

SEQ ID NO: 8552 - RNA, 20 nt, Artificial Sequence
  HTT spacer sequence CTCN PAM
uaugcaaaaauuucuggguu

SEQ ID NO: 8553 - RNA, 20 nt, Artificial Sequence
  HTT spacer sequence CTCN PAM
aaaaaaaaaauuauauauau

SEQ ID NO: 8554 - RNA, 20 nt, Artificial Sequence
  HTT spacer sequence CTCN PAM
aucucaaaaaaaaaaauuau

SEQ ID NO: 8555 - RNA, 20 nt, Artificial Sequence
  HTT spacer sequence CTCN PAM
guuugcccaggcuggaaugc

SEQ ID NO: 8556 - RNA, 20 nt, Artificial Sequence
  HTT spacer sequence CTCN PAM
gccucauggguucaagugau

SEQ ID NO: 8557 - RNA, 20 nt, Artificial Sequence
  HTT spacer sequence CTCN PAM
uggguucaagugauucuccu

SEQ ID NO: 8558 - RNA, 20 nt, Artificial Sequence
  HTT spacer sequence CTCN PAM
ugccucagcuugaguagcug

SEQ ID NO: 8559 - RNA, 20 nt, Artificial Sequence
  HTT spacer sequence CTCN PAM
gcuugaguagcugggauuac

SEQ ID NO: 8560 - RNA, 20 nt, Artificial Sequence
  HTT spacer sequence CTCN PAM
agcugaggcaggagaaucac

SEQ ID NO: 8561 - RNA, 20 nt, Artificial Sequence
  HTT spacer sequence CTCN PAM
ugaccucuugaucugccugc

SEQ ID NO: 8562 - RNA, 20 nt, Artificial Sequence
  HTT spacer sequence CTCN PAM
ugaucugccugccucggccu

SEQ ID NO: 8563 - RNA, 20 nt, Artificial Sequence
  HTT spacer sequence CTCN PAM
gccucacagaguguugggau

SEQ ID NO: 8564 - RNA, 20 nt, Artificial Sequence
  HTT spacer sequence CTCN PAM
cagaguguugggauuacagg

SEQ ID NO: 8565 - RNA, 20 nt, Artificial Sequence
  HTT spacer sequence CTCN PAM
gugaggccgaggcaggcaga

SEQ ID NO: 8566 - RNA, 20 nt, Artificial Sequence
  HTT spacer sequence CTCN PAM
caccuguaaucccaacacuc

SEQ ID NO: 8567 - RNA, 20 nt, Artificial Sequence
  HTT spacer sequence CTCN PAM
ugcuuggaagcagaaaucua

SEQ ID NO: 8568 - RNA, 20 nt, Artificial Sequence
  HTT spacer sequence CTCN PAM
aacagugaaacaaaggacca

SEQ ID NO: 8569 - RNA, 20 nt, Artificial Sequence
  HTT spacer sequence CTCN PAM
gggaucacuguccugccugc

SEQ ID NO: 8570 - RNA, 20 nt, Artificial Sequence
  HTT spacer sequence CTCN PAM
cagggaucacuguccugccu

SEQ ID NO: 8571 - RNA, 20 nt, Artificial Sequence
  HTT spacer sequence CTCN PAM
agccuugcccaggcuuccug

SEQ ID NO: 8572 - RNA, 20 nt, Artificial Sequence
  HTT spacer sequence CTCN PAM
aggcaggaagccugggcaag

SEQ ID NO: 8573 - RNA, 20 nt, Artificial Sequence
  HTT spacer sequence CTCN PAM
ccaggcaggaagccugggca

SEQ ID NO: 8574 - RNA, 20 nt, Artificial Sequence
  HTT spacer sequence CTCN PAM
cuccaggcaggaagccuggg

SEQ ID NO: 8575 - RNA, 20 nt, Artificial Sequence
  HTT spacer sequence CTCN PAM
aaguccuagccuucagacuc

SEQ ID NO: 8576 - RNA, 20 nt, Artificial Sequence
  HTT spacer sequence CTCN PAM
ccaaguccuagccuucagac

SEQ ID NO: 8577 - RNA, 20 nt, Artificial Sequence
  HTT spacer sequence CTCN PAM
gucuggguagcucuccaagu

SEQ ID NO: 8578 - RNA, 20 nt, Artificial Sequence
  HTT spacer sequence CTCN PAM
gacucggucuggguagcucu

SEQ ID NO: 8579 - RNA, 20 nt, Artificial Sequence
  HTT spacer sequence CTCN PAM
uugauugaggaggcugaguu

SEQ ID NO: 8580 - RNA, 20 nt, Artificial Sequence
  HTT spacer sequence CTCN PAM
aucaaggagauccucagacu

SEQ ID NO: 8581 - RNA, 20 nt, Artificial Sequence
  HTT spacer sequence CTCN PAM
ucaaucaaggagauccucag

SEQ ID NO: 8582 - RNA, 20 nt, Artificial Sequence
  HTT spacer sequence CTCN PAM
gccuccucaaucaaggagau

SEQ ID NO: 8583 - RNA, 20 nt, Artificial Sequence
  HTT spacer sequence CTCN PAM
acucagccuccucaaucaag

SEQ ID NO: 8584 - RNA, 20 nt, Artificial Sequence
  HTT spacer sequence CTCN PAM
ccaaagucucaacucagccu

SEQ ID NO: 8585 - RNA, 20 nt, Artificial Sequence
  HTT spacer sequence CTCN PAM
gcccugcaaauuuacuuugg

SEQ ID NO: 8586 - RNA, 20 nt, Artificial Sequence
  HTT spacer sequence CTCN PAM
gguacucugcccugcaaauu

SEQ ID NO: 8587 - RNA, 20 nt, Artificial Sequence
  HTT spacer sequence CTCN PAM
cugguacucugcccugcaaa

SEQ ID NO: 8588 - RNA, 20 nt, Artificial Sequence
  HTT spacer sequence CTCN PAM
ucucugguacucugcccugc

SEQ ID NO: 8589 - RNA, 20 nt, Artificial Sequence
  HTT spacer sequence CTCN PAM
ccucucugguacucugcccu

SEQ ID NO: 8590 - RNA, 20 nt, Artificial Sequence
  HTT spacer sequence CTCN PAM
cuccucucugguacucugcc

SEQ ID NO: 8591 - RNA, 20 nt, Artificial Sequence
  HTT spacer sequence CTCN PAM
uugcagcucucuccucucug

SEQ ID NO: 8592 - RNA, 20 nt, Artificial Sequence
  HTT spacer sequence CTCN PAM
uccuuccccucuuugcagcu

SEQ ID NO: 8593 - RNA, 20 nt, Artificial Sequence
  HTT spacer sequence CTCN PAM
gcauaggguucuccccaagc

SEQ ID NO: 8594 - RNA, 20 nt, Artificial Sequence
  HTT spacer sequence CTCN PAM
ccaagcccagcugagggcgc

SEQ ID NO: 8595 - RNA, 20 nt, Artificial Sequence
  HTT spacer sequence CTCN PAM
gcugggcuuggggagaaccc

SEQ ID NO: 8596 - RNA, 20 nt, Artificial Sequence
  HTT spacer sequence CTCN PAM
cugcgccugggcuagcaccc

SEQ ID NO: 8597 - RNA, 20 nt, Artificial Sequence
  HTT spacer sequence CTCN PAM
gcgccugggcuagcacccug

SEQ ID NO: 8598 - RNA, 20 nt, Artificial Sequence
  HTT spacer sequence CTCN PAM
cuuccagggugcuagcccag

SEQ ID NO: 8599 - RNA, 20 nt, Artificial Sequence
  HTT spacer sequence CTCN PAM
ucacuuccagggugcuagcc

SEQ ID NO: 8600 - RNA, 20 nt, Artificial Sequence
  HTT spacer sequence CTCN PAM
cacagggccaggagcagugu

SEQ ID NO: 8601 - RNA, 20 nt, Artificial Sequence
  HTT spacer sequence CTCN PAM
uggcccugugugagcugcaa

SEQ ID NO: 8602 - RNA, 20 nt, Artificial Sequence
  HTT spacer sequence CTCN PAM
uaagcugccacccagggucc

SEQ ID NO: 8603 - RNA, 20 nt, Artificial Sequence
  HTT spacer sequence CTCN PAM
guuguggguaagaggaaagg

SEQ ID NO: 8604 - RNA, 20 nt, Artificial Sequence
  HTT spacer sequence CTCN PAM
uacccacaacugaggcaaua

SEQ ID NO: 8605 - RNA, 20 nt, Artificial Sequence
  HTT spacer sequence CTCN PAM
guaaggcagcaucagaacgc

SEQ ID NO: 8606 - RNA, 20 nt, Artificial Sequence
  HTT spacer sequence CTCN PAM
ucccaaacaacccuccuaug

SEQ ID NO: 8607 - RNA, 20 nt, Artificial Sequence
  HTT spacer sequence CTCN PAM
uauggcccaugacgaagcuc

SEQ ID NO: 8608 - RNA, 20 nt, Artificial Sequence
  HTT spacer sequence CTCN PAM
gauacugaaggaaugaaaaa

SEQ ID NO: 8609 - RNA, 20 nt, Artificial Sequence
  HTT spacer sequence CTCN PAM
ucuccuccucucacaccuca

SEQ ID NO: 8610 - RNA, 20 nt, Artificial Sequence
  HTT spacer sequence CTCN PAM
uccucucacaccucacagcu

SEQ ID NO: 8611 - RNA, 20 nt, Artificial Sequence
  HTT spacer sequence CTCN PAM
ucucacaccucacagcuggc

SEQ ID NO: 8612 - RNA, 20 nt, Artificial Sequence
  HTT spacer sequence CTCN PAM
cacaccucacagcuggcucc

SEQ ID NO: 8613 - RNA, 20 nt, Artificial Sequence
  HTT spacer sequence CTCN PAM
caccucacagcuggcuccuu

SEQ ID NO: 8614 - RNA, 20 nt, Artificial Sequence
  HTT spacer sequence CTCN PAM
cagcuggcuccuucacagcc

SEQ ID NO: 8615 - RNA, 20 nt, Artificial Sequence
  HTT spacer sequence CTCN PAM
uucacagccuuauccacuuc

SEQ ID NO: 8616 - RNA, 20 nt, Artificial Sequence
  HTT spacer sequence CTCN PAM
ugaacugcagauagucguuu

SEQ ID NO: 8617 - RNA, 20 nt, Artificial Sequence
  HTT spacer sequence CTCN PAM
cucugcacgcagccucagag

SEQ ID NO: 8618 - RNA, 20 nt, Artificial Sequence
  HTT spacer sequence CTCN PAM
cugcacgcagccucagaguc

SEQ ID NO: 8619 - RNA, 20 nt, Artificial Sequence
  HTT spacer sequence CTCN PAM
gcacgcagccucagagucac

SEQ ID NO: 8620 - RNA, 20 nt, Artificial Sequence
  HTT spacer sequence CTCN PAM
gagucacuccuugacuucag

SEQ ID NO: 8621 - RNA, 20 nt, Artificial Sequence
  HTT spacer sequence CTCN PAM
gaggcugcgugcagagagag

SEQ ID NO: 8622 - RNA, 20 nt, Artificial Sequence
  HTT spacer sequence CTCN PAM
uugacuucaguggcccucag

SEQ ID NO: 8623 - RNA, 20 nt, Artificial Sequence
  HTT spacer sequence CTCN PAM
gcucucccccaucucuccuu

SEQ ID NO: 8624 - RNA, 20 nt, Artificial Sequence
  HTT spacer sequence CTCN PAM
cccccaucucuccuucugcu

SEQ ID NO: 8625 - RNA, 20 nt, Artificial Sequence
  HTT spacer sequence CTCN PAM
cccaucucuccuucugcucu

SEQ ID NO: 8626 - RNA, 20 nt, Artificial Sequence
  HTT spacer sequence CTCN PAM
ccuucugcucuugucagccc

SEQ ID NO: 8627 - RNA, 20 nt, Artificial Sequence
  HTT spacer sequence CTCN PAM
uucugcucuugucagcccca

SEQ ID NO: 8628 - RNA, 20 nt, Artificial Sequence
  HTT spacer sequence CTCN PAM
ugucagccccaugccagcca

SEQ ID NO: 8629 - RNA, 20 nt, Artificial Sequence
  HTT spacer sequence CTCN PAM
ccacaagguacagccauguc

SEQ ID NO: 8630 - RNA, 20 nt, Artificial Sequence
  HTT spacer sequence CTCN PAM
ucaaggaggcccucacuguc

SEQ ID NO: 8631 - RNA, 20 nt, Artificial Sequence
  HTT spacer sequence CTCN PAM
aggaggcccucacuguccac

SEQ ID NO: 8632 - RNA, 20 nt, Artificial Sequence
  HTT spacer sequence CTCN PAM
uugaggagacccccgaagcc

SEQ ID NO: 8633 - RNA, 20 nt, Artificial Sequence
  HTT spacer sequence CTCN PAM
cuguccaccggguuaaaggg

SEQ ID NO: 8634 - RNA, 20 nt, Artificial Sequence
  HTT spacer sequence CTCN PAM
uuaucacuauuuaauuaguu

SEQ ID NO: 8635 - RNA, 20 nt, Artificial Sequence
  HTT spacer sequence CTCN PAM
gugccuggaccagucccuga

SEQ ID NO: 8636 - RNA, 20 nt, Artificial Sequence
  HTT spacer sequence CTCN PAM
gggacugguccaggcacuga

SEQ ID NO: 8637 - RNA, 20 nt, Artificial Sequence
  HTT spacer sequence CTCN PAM
guaaauccuggaugacuggu

SEQ ID NO: 8638 - RNA, 20 nt, Artificial Sequence
  HTT spacer sequence CTCN PAM
uguacauucaccagucaucc

SEQ ID NO: 8639 - RNA, 20 nt, Artificial Sequence
  HTT spacer sequence CTCN PAM
gcuccuguacauucaccagu

SEQ ID NO: 8640 - RNA, 20 nt, Artificial Sequence
  HTT spacer sequence CTCN PAM
cuggucauuucuggcucuua

SEQ ID NO: 8641 - RNA, 20 nt, Artificial Sequence
  HTT spacer sequence CTCN PAM
ggucauuucuggcucuuaac

SEQ ID NO: 8642 - RNA, 20 nt, Artificial Sequence
  HTT spacer sequence CTCN PAM
uaacauuaugauuuuaggcu

SEQ ID NO: 8643 - RNA, 20 nt, Artificial Sequence
  HTT spacer sequence CTCN PAM
acaggcccaaagguccccaa

SEQ ID NO: 8644 - RNA, 20 nt, Artificial Sequence
  HTT spacer sequence CTCN PAM
uucuguaauuaaaagggcaa

SEQ ID NO: 8645 - RNA, 20 nt, Artificial Sequence
  HTT spacer sequence CTCN PAM
caucacuggcagaacagcca

SEQ ID NO: 8646 - RNA, 20 nt, Artificial Sequence
  HTT spacer sequence CTCN PAM
ggucuuagaaaacagcuccc

SEQ ID NO: 8647 - RNA, 20 nt, Artificial Sequence
  HTT spacer sequence CTCN PAM
uuuccucaggucuuagaaaa

SEQ ID NO: 8648 - RNA, 20 nt, Artificial Sequence
  HTT spacer sequence CTCN PAM
ugguacucggugguuugagu

SEQ ID NO: 8649 - RNA, 20 nt, Artificial Sequence
  HTT spacer sequence CTCN PAM
gugguuugaguagucuggcg

SEQ ID NO: 8650 - RNA, 20 nt, Artificial Sequence
  HTT spacer sequence CTCN PAM
aaccaccgaguaccaugaga

SEQ ID NO: 8651 - RNA, 20 nt, Artificial Sequence
  HTT spacer sequence CTCN PAM
aggacacuguggggagguag

SEQ ID NO: 8652 - RNA, 20 nt, Artificial Sequence
  HTT spacer sequence CTCN PAM
ccacaguguccuagagaacg

SEQ ID NO: 8653 - RNA, 20 nt, Artificial Sequence
  HTT spacer sequence CTCN PAM
ggauggcugcugagcugggu

SEQ ID NO: 8654 - RNA, 20 nt, Artificial Sequence
  HTT spacer sequence CTCN PAM
gcagccauccugagcugaau

SEQ ID NO: 8655 - RNA, 20 nt, Artificial Sequence
  HTT spacer sequence CTCN PAM
caacccuguggauguaacag

SEQ ID NO: 8656 - RNA, 20 nt, Artificial Sequence
  HTT spacer sequence CTCN PAM
uguuacauccacaggguugu

SEQ ID NO: 8657 - RNA, 20 nt, Artificial Sequence
  HTT spacer sequence CTCN PAM
cauguuuccaugaaccagug

SEQ ID NO: 8658 - RNA, 20 nt, Artificial Sequence
  HTT spacer sequence CTCN PAM
aaagauguucauauauauuc

SEQ ID NO: 8659 - RNA, 20 nt, Artificial Sequence
  HTT spacer sequence CTCN PAM
auucuuaagacuuccugcug

SEQ ID NO: 8660 - RNA, 20 nt, Artificial Sequence
  HTT spacer sequence CTCN PAM
uuuggaccccaggcuccauu

SEQ ID NO: 8661 - RNA, 20 nt, Artificial Sequence
  HTT spacer sequence CTCN PAM
cauuuggaccccaggcucca

SEQ ID NO: 8662 - RNA, 20 nt, Artificial Sequence
  HTT spacer sequence CTCN PAM
guggcuguucaggggccaau

SEQ ID NO: 8663 - RNA, 20 nt, Artificial Sequence
  HTT spacer sequence CTCN PAM
ccaucccaccaccgguauuc

SEQ ID NO: 8664 - RNA, 20 nt, Artificial Sequence
  HTT spacer sequence CTCN PAM
aggcugugggaagagcuaca

SEQ ID NO: 8665 - RNA, 20 nt, Artificial Sequence
  HTT spacer sequence CTCN PAM
agcugucuccccaucccacc

SEQ ID NO: 8666 - RNA, 20 nt, Artificial Sequence
  HTT spacer sequence CTCN PAM
ucccacagccucgagcuguc

SEQ ID NO: 8667 - RNA, 20 nt, Artificial Sequence
  HTT spacer sequence CTCN PAM
aaggccggcuagaccuguag

SEQ ID NO: 8668 - RNA, 20 nt, Artificial Sequence
  HTT spacer sequence CTCN PAM
acccagaagcuucuccaagg

SEQ ID NO: 8669 - RNA, 20 nt, Artificial Sequence
  HTT spacer sequence CTCN PAM
aucuccacccagaagcuucu

SEQ ID NO: 8670 - RNA, 20 nt, Artificial Sequence
  HTT spacer sequence CTCN PAM
cuucccaccuggcaugucuu

SEQ ID NO: 8671 - RNA, 20 nt, Artificial Sequence
  HTT spacer sequence CTCN PAM
ucccaccuggcaugucuugc

SEQ ID NO: 8672 - RNA, 20 nt, Artificial Sequence
  HTT spacer sequence CTCN PAM
ugccguguaggguguccuug

SEQ ID NO: 8673 - RNA, 20 nt, Artificial Sequence
  HTT spacer sequence CTCN PAM
ccugccguguaggguguccu

SEQ ID NO: 8674 - RNA, 20 nt, Artificial Sequence
  HTT spacer sequence CTCN PAM
caccuccaccccacugugug

SEQ ID NO: 8675 - RNA, 20 nt, Artificial Sequence
  HTT spacer sequence CTCN PAM
ccuccaccccacugugugcc

SEQ ID NO: 8676 - RNA, 20 nt, Artificial Sequence
  HTT spacer sequence CTCN PAM
accccacugugugcccuuuu

SEQ ID NO: 8677 - RNA, 20 nt, Artificial Sequence
  HTT spacer sequence CTCN PAM
ggaaggccaggcgaggcuuc

SEQ ID NO: 8678 - RNA, 20 nt, Artificial Sequence
  HTT spacer sequence CTCN PAM
ccuggccuuccagaggcagc

SEQ ID NO: 8679 - RNA, 20 nt, Artificial Sequence
  HTT spacer sequence CTCN PAM
cugggagugccucccuccag

SEQ ID NO: 8680 - RNA, 20 nt, Artificial Sequence
  HTT spacer sequence CTCN PAM
cagggagcagggcaaaggga

SEQ ID NO: 8681 - RNA, 20 nt, Artificial Sequence
  HTT spacer sequence CTCN PAM
cuccagccucuccucagggu

SEQ ID NO: 8682 - RNA, 20 nt, Artificial Sequence
  HTT spacer sequence CTCN PAM
agccucuccucaggguucga

SEQ ID NO: 8683 - RNA, 20 nt, Artificial Sequence
  HTT spacer sequence CTCN PAM
ccucaggguucgaaggggcu

SEQ ID NO: 8684 - RNA, 20 nt, Artificial Sequence
  HTT spacer sequence CTCN PAM
ucaggguucgaaggggcuuc

SEQ ID NO: 8685 - RNA, 20 nt, Artificial Sequence
  HTT spacer sequence CTCN PAM
ggguucgaaggggcuuccuc

SEQ ID NO: 8686 - RNA, 20 nt, Artificial Sequence
  HTT spacer sequence CTCN PAM
uaaggugcagaggcagcccu

SEQ ID NO: 8687 - RNA, 20 nt, Artificial Sequence
  HTT spacer sequence CTCN PAM
gcaccuuaggaggaagcccc

SEQ ID NO: 8688 - RNA, 20 nt, Artificial Sequence
  HTT spacer sequence CTCN PAM
cccgacacacacacacuugc

SEQ ID NO: 8689 - RNA, 20 nt, Artificial Sequence
  HTT spacer sequence CTCN PAM
cacaacuggaaaugggguua

SEQ ID NO: 8690 - RNA, 20 nt, Artificial Sequence
  HTT spacer sequence CTCN PAM
guuucuuucuuuuucuuuuc

SEQ ID NO: 8691 - RNA, 20 nt, Artificial Sequence
  HTT spacer sequence CTCN PAM
aaaaaaaaaaaaaaaaaaaa

SEQ ID NO: 8692 - RNA, 20 nt, Artificial Sequence
  HTT spacer sequence CTCN PAM
auugcccaggcuggaaugca

SEQ ID NO: 8693 - RNA, 20 nt, Artificial Sequence
  HTT spacer sequence CTCN PAM
cugcaaccuccaccuuccag

SEQ ID NO: 8694 - RNA, 20 nt, Artificial Sequence
  HTT spacer sequence CTCN PAM
accuuccagguucaaacgau

SEQ ID NO: 8695 - RNA, 20 nt, Artificial Sequence
  HTT spacer sequence CTCN PAM
ugcgucagccuccugaguag

SEQ ID NO: 8696 - RNA, 20 nt, Artificial Sequence
  HTT spacer sequence CTCN PAM
ugaguagcugggauuacagg

SEQ ID NO: 8697 - RNA, 20 nt, Artificial Sequence
  HTT spacer sequence CTCN PAM
ggaggcugacgcaggagaau

SEQ ID NO: 8698 - RNA, 20 nt, Artificial Sequence
  HTT spacer sequence CTCN PAM
cacccaggcuagagugcagu

SEQ ID NO: 8699 - RNA, 20 nt, Artificial Sequence
  HTT spacer sequence CTCN PAM
cccaggcuagagugcagugg

SEQ ID NO: 8700 - RNA, 20 nt, Artificial Sequence
  HTT spacer sequence CTCN PAM
agccugggugagagggcaag

SEQ ID NO: 8701 - RNA, 20 nt, Artificial Sequence
  HTT spacer sequence CTCN PAM
cuacagccucgacuugcugg

SEQ ID NO: 8702 - RNA, 20 nt, Artificial Sequence
  HTT spacer sequence CTCN PAM
acuugcuggguuuuagcaau

SEQ ID NO: 8703 - RNA, 20 nt, Artificial Sequence
  HTT spacer sequence CTCN PAM
caccucagccucccuaguag

SEQ ID NO: 8704 - RNA, 20 nt, Artificial Sequence
  HTT spacer sequence CTCN PAM
ccucagccucccuaguagcu

SEQ ID NO: 8705 - RNA, 20 nt, Artificial Sequence
  HTT spacer sequence CTCN PAM
gccucccuaguagcugggac

SEQ ID NO: 8706 - RNA, 20 nt, Artificial Sequence
  HTT spacer sequence CTCN PAM
cuaguagcugggacuacagg

SEQ ID NO: 8707 - RNA, 20 nt, Artificial Sequence
  HTT spacer sequence CTCN PAM
gcaaaaaauccaacuauuag

SEQ ID NO: 8708 - RNA, 20 nt, Artificial Sequence
  HTT spacer sequence CTCN PAM
guaacauagcaagacuucgc

SEQ ID NO: 8709 - RNA, 20 nt, Artificial Sequence
  HTT spacer sequence CTCN PAM
aaccucugagcucaaaugau

SEQ ID NO: 8710 - RNA, 20 nt, Artificial Sequence
  HTT spacer sequence CTCN PAM
gagcucaaaugaucaucuca

SEQ ID NO: 8711 - RNA, 20 nt, Artificial Sequence
  HTT spacer sequence CTCN PAM
gagguuugagaccagccuca

SEQ ID NO: 8712 - RNA, 20 nt, Artificial Sequence
  HTT spacer sequence CTCN PAM
aaugaucaucucaccucugc

SEQ ID NO: 8713 - RNA, 20 nt, Artificial Sequence
  HTT spacer sequence CTCN PAM
ccucugccuccccaggugcu

SEQ ID NO: 8714 - RNA, 20 nt, Artificial Sequence
  HTT spacer sequence CTCN PAM
gccuccccaggugcugggau

SEQ ID NO: 8715 - RNA, 20 nt, Artificial Sequence
  HTT spacer sequence CTCN PAM
ccaggugcugggaucacagg

SEQ ID NO: 8716 - RNA, 20 nt, Artificial Sequence
  HTT spacer sequence CTCN PAM
aucagaaaaaaaauaaaauu

SEQ ID NO: 8717 - RNA, 20 nt, Artificial Sequence
  HTT spacer sequence CTCN PAM
aaagauaaccacccacucua

SEQ ID NO: 8718 - RNA, 20 nt, Artificial Sequence
  HTT spacer sequence CTCN PAM
caaaagauaaccacccacuc

SEQ ID NO: 8719 - RNA, 20 nt, Artificial Sequence
  HTT spacer sequence CTCN PAM
uaccucuaaggccucuuccc

SEQ ID NO: 8720 - RNA, 20 nt, Artificial Sequence
  HTT spacer sequence CTCN PAM
aaggccucuuccccuugccc

SEQ ID NO: 8721 - RNA, 20 nt, Artificial Sequence
  HTT spacer sequence CTCN PAM
uccccuugccccacauugua

SEQ ID NO: 8722 - RNA, 20 nt, Artificial Sequence
  HTT spacer sequence CTCN PAM
uaucaccugauguaaauaaa

SEQ ID NO: 8723 - RNA, 20 nt, Artificial Sequence
  HTT spacer sequence CTCN PAM
ucucuuaucaccugauguaa

SEQ ID NO: 8724 - RNA, 20 nt, Artificial Sequence
  HTT spacer sequence CTCN PAM
gcaucauuacugcugggccu

SEQ ID NO: 8725 - RNA, 20 nt, Artificial Sequence
  HTT spacer sequence CTCN PAM
cuguuuaucuugaaucugga

SEQ ID NO: 8726 - RNA, 20 nt, Artificial Sequence
  HTT spacer sequence CTCN PAM
aagaugguuugcaucugcag

SEQ ID NO: 8727 - RNA, 20 nt, Artificial Sequence
  HTT spacer sequence CTCN PAM
gauucaagauggcaauucug

SEQ ID NO: 8728 - RNA, 20 nt, Artificial Sequence
  HTT spacer sequence CTCN PAM
agaauaguaguuucagacuu

SEQ ID NO: 8729 - RNA, 20 nt, Artificial Sequence
  HTT spacer sequence CTCN PAM
auuuucagacuguuuaccag

SEQ ID NO: 8730 - RNA, 20 nt, Artificial Sequence
  HTT spacer sequence CTCN PAM
cagugacaccccagugccca

SEQ ID NO: 8731 - RNA, 20 nt, Artificial Sequence
  HTT spacer sequence CTCN PAM
ugcgugucccucccagugac

SEQ ID NO: 8732 - RNA, 20 nt, Artificial Sequence
  HTT spacer sequence CTCN PAM
cucacgggcgagaacuaagc

SEQ ID NO: 8733 - RNA, 20 nt, Artificial Sequence
  HTT spacer sequence CTCN PAM
cgggcgagaacuaagcaccu

SEQ ID NO: 8734 - RNA, 20 nt, Artificial Sequence
  HTT spacer sequence CTCN PAM
cccgugagugagguagcgug

SEQ ID NO: 8735 - RNA, 20 nt, Artificial Sequence
  HTT spacer sequence CTCN PAM
ucccggggccgcggaggcca

SEQ ID NO: 8736 - RNA, 20 nt, Artificial Sequence
  HTT spacer sequence CTCN PAM
gcggccccgggacgaggccc

SEQ ID NO: 8737 - RNA, 20 nt, Artificial Sequence
  HTT spacer sequence CTCN PAM
gggugggcggggaacugcac

SEQ ID NO: 8738 - RNA, 20 nt, Artificial Sequence
  HTT spacer sequence CTCN PAM
gaccuccaggauugcgggac

SEQ ID NO: 8739 - RNA, 20 nt, Artificial Sequence
  HTT spacer sequence CTCN PAM
aggauugcgggacccgccgg

SEQ ID NO: 8740 - RNA, 20 nt, Artificial Sequence
  HTT spacer sequence CTCN PAM
ccggcgggucccgcaauccu

SEQ ID NO: 8741 - RNA, 20 nt, Artificial Sequence
  HTT spacer sequence CTCN PAM
uggccccgccccggccccgc

SEQ ID NO: 8742 - RNA, 20 nt, Artificial Sequence
  HTT spacer sequence CTCN PAM
uccuggccccgccccggccc

SEQ ID NO: 8743 - RNA, 20 nt, Artificial Sequence
  HTT spacer sequence CTCN PAM
gucccgcccgcgcccgccca

SEQ ID NO: 8744 - RNA, 20 nt, Artificial Sequence
  HTT spacer sequence CTCN PAM
cgcccgcgggacccgccgcc

SEQ ID NO: 8745 - RNA, 20 nt, Artificial Sequence
  HTT spacer sequence CTCN PAM
gccgccaggcgcucccgccc

SEQ ID NO: 8746 - RNA, 20 nt, Artificial Sequence
  HTT spacer sequence CTCN PAM
acccagggcccgcgggccag

SEQ ID NO: 8747 - RNA, 20 nt, Artificial Sequence
  HTT spacer sequence CTCN PAM
uggcccgcgggcccuggguc

SEQ ID NO: 8748 - RNA, 20 nt, Artificial Sequence
  HTT spacer sequence CTCN PAM
ccuggcccgcgggcccuggg

SEQ ID NO: 8749 - RNA, 20 nt, Artificial Sequence
  HTT spacer sequence CTCN PAM
gcggguaagccucggcggcg

SEQ ID NO: 8750 - RNA, 20 nt, Artificial Sequence
  HTT spacer sequence CTCN PAM
gcggcgggucucggcggguc

SEQ ID NO: 8751 - RNA, 20 nt, Artificial Sequence
  HTT spacer sequence CTCN PAM
gcgggucucgggggucucgc

SEQ ID NO: 8752 - RNA, 20 nt, Artificial Sequence
  HTT spacer sequence CTCN PAM
ggggucucgcgggggggcgg

SEQ ID NO: 8753 - RNA, 20 nt, Artificial Sequence
  HTT spacer sequence CTCN PAM
cgggggggcggucuccgcgu

SEQ ID NO: 8754 - RNA, 20 nt, Artificial Sequence
  HTT spacer sequence CTCN PAM
gcgucuggaaggggcucggc

SEQ ID NO: 8755 - RNA, 20 nt, Artificial Sequence
  HTT spacer sequence CTCN PAM
gcgggccuuggcggucuggg

SEQ ID NO: 8756 - RNA, 20 nt, Artificial Sequence
  HTT spacer sequence CTCN PAM
cggcgggucucgggggucuc

SEQ ID NO: 8757 - RNA, 20 nt, Artificial Sequence
  HTT spacer sequence CTCN PAM
gcgggucucgggggucucgg

SEQ ID NO: 8758 - RNA, 20 nt, Artificial Sequence
  HTT spacer sequence CTCN PAM
ggggucucgggggagucucg

SEQ ID NO: 8759 - RNA, 20 nt, Artificial Sequence
  HTT spacer sequence CTCN PAM
ggggagucucggggucccga

SEQ ID NO: 8760 - RNA, 20 nt, Artificial Sequence
  HTT spacer sequence CTCN PAM
cccgagacccccgagacccg

SEQ ID NO: 8761 - RNA, 20 nt, Artificial Sequence
  HTT spacer sequence CTCN PAM
gggucccgacaggucucggc

SEQ ID NO: 8762 - RNA, 20 nt, Artificial Sequence
  HTT spacer sequence CTCN PAM
gcgggucucgggggucucgg

SEQ ID NO: 8763 - RNA, 20 nt, Artificial Sequence
  HTT spacer sequence CTCN PAM
ggggucucgggggagucucc

SEQ ID NO: 8764 - RNA, 20 nt, Artificial Sequence
  HTT spacer sequence CTCN PAM
ggggagucuccggggagucu

SEQ ID NO: 8765 - RNA, 20 nt, Artificial Sequence
  HTT spacer sequence CTCN PAM
cccgagacccccgagacccg

SEQ ID NO: 8766 - RNA, 20 nt, Artificial Sequence
  HTT spacer sequence CTCN PAM
ggggagucucaggggucccg

SEQ ID NO: 8767 - RNA, 20 nt, Artificial Sequence
  HTT spacer sequence CTCN PAM
ccggagacucccccgagacc

SEQ ID NO: 8768 - RNA, 20 nt, Artificial Sequence
  HTT spacer sequence CTCN PAM
ggggucccggcaggucuugg

SEQ ID NO: 8769 - RNA, 20 nt, Artificial Sequence
  HTT spacer sequence CTCN PAM
ggggagucucagggucccgg

SEQ ID NO: 8770 - RNA, 20 nt, Artificial Sequence
  HTT spacer sequence CTCN PAM
cccgagaccugccaagaccu

SEQ ID NO: 8771 - RNA, 20 nt, Artificial Sequence
  HTT spacer sequence CTCN PAM
gggucccggcagguaugggc

SEQ ID NO: 8772 - RNA, 20 nt, Artificial Sequence
  HTT spacer sequence CTCN PAM
ggugcgcagcagccuccccc

SEQ ID NO: 8773 - RNA, 20 nt, Artificial Sequence
  HTT spacer sequence CTCN PAM
cccgggccccggggccuccg

SEQ ID NO: 8774 - RNA, 20 nt, Artificial Sequence
  HTT spacer sequence CTCN PAM
guguccuugccaaaggacgc

SEQ ID NO: 8775 - RNA, 20 nt, Artificial Sequence
  HTT spacer sequence CTCN PAM
ggcacugcccgccgugccca

SEQ ID NO: 8776 - RNA, 20 nt, Artificial Sequence
  HTT spacer sequence CTCN PAM
cucgggcacugcccgccgug

SEQ ID NO: 8777 - RNA, 20 nt, Artificial Sequence
  HTT spacer sequence CTCN PAM
ggggugggaggcggugcgac

SEQ ID NO: 8778 - RNA, 20 nt, Artificial Sequence
  HTT spacer sequence CTCN PAM
caccccugagcccccggcaa

SEQ ID NO: 8779 - RNA, 20 nt, Artificial Sequence
  HTT spacer sequence CTCN PAM
cgccccucuggccccgcggc

SEQ ID NO: 8780 - RNA, 20 nt, Artificial Sequence
  HTT spacer sequence CTCN PAM
ggccccgcggcggggccccu

SEQ ID NO: 8781 - RNA, 20 nt, Artificial Sequence
  HTT spacer sequence CTCN PAM
ccacaagacucaaaggcugc

SEQ ID NO: 8782 - RNA, 20 nt, Artificial Sequence
  HTT spacer sequence CTCN PAM
aaggcugcggcgggcacucg

SEQ ID NO: 8783 - RNA, 20 nt, Artificial Sequence
  HTT spacer sequence CTCN PAM
cucuccgcccuucccggaau

SEQ ID NO: 8784 - RNA, 20 nt, Artificial Sequence
  HTT spacer sequence CTCN PAM
ccgcccuucccggaauccaa

SEQ ID NO: 8785 - RNA, 20 nt, Artificial Sequence
  HTT spacer sequence CTCN PAM
gcccuucccggaauccaaac

SEQ ID NO: 8786 - RNA, 20 nt, Artificial Sequence
  HTT spacer sequence CTCN PAM
gcagcggccgcgcuucacgg

SEQ ID NO: 8787 - RNA, 20 nt, Artificial Sequence
  HTT spacer sequence CTCN PAM
gugaagcgcggccgcugcag

SEQ ID NO: 8788 - RNA, 20 nt, Artificial Sequence
  HTT spacer sequence CTCN PAM
cacuucagugugaaucagcg

SEQ ID NO: 8789 - RNA, 20 nt, Artificial Sequence
  HTT spacer sequence CTCN PAM
gacgcccggcuaucagucac

SEQ ID NO: 8790 - RNA, 20 nt, Artificial Sequence
  HTT spacer sequence CTCN PAM
caugggcaacagggaaucuc

SEQ ID NO: 8791 - RNA, 20 nt, Artificial Sequence
  HTT spacer sequence CTCN PAM
ugggcaacagggaaucucag

SEQ ID NO: 8792 - RNA, 20 nt, Artificial Sequence
  HTT spacer sequence CTCN PAM
gggguggcagagggacugga

SEQ ID NO: 8793 - RNA, 20 nt, Artificial Sequence
  HTT spacer sequence CTCN PAM
gccaccccugagauucccug

SEQ ID NO: 8794 - RNA, 20 nt, Artificial Sequence
  HTT spacer sequence CTCN PAM
agucccucugccaccccuga

SEQ ID NO: 8795 - RNA, 20 nt, Artificial Sequence
  HTT spacer sequence CTCN PAM
uccagucccucugccacccc

SEQ ID NO: 8796 - RNA, 20 nt, Artificial Sequence
  HTT spacer sequence CTCN PAM
cugcagcccagcacuuuccc

SEQ ID NO: 8797 - RNA, 20 nt, Artificial Sequence
  HTT spacer sequence CTCN PAM
gggccucggcucccuggggg

SEQ ID NO: 8798 - RNA, 20 nt, Artificial Sequence
  HTT spacer sequence CTCN PAM
gcucccuggggguauugagg

SEQ ID NO: 8799 - RNA, 20 nt, Artificial Sequence
  HTT spacer sequence CTCN PAM
cuggggguauugagggccug

SEQ ID NO: 8800 - RNA, 20 nt, Artificial Sequence
  HTT spacer sequence CTCN PAM
auacccccagggagccgagg

SEQ ID NO: 8801 - RNA, 20 nt, Artificial Sequence
  HTT spacer sequence CTCN PAM
ggcccucaauacccccaggg

SEQ ID NO: 8802 - RNA, 20 nt, Artificial Sequence
  HTT spacer sequence CTCN PAM
ccacagcagggcucaggccc

SEQ ID NO: 8803 - RNA, 20 nt, Artificial Sequence
  HTT spacer sequence CTCN PAM
uuuccgugagcaccuccuau

SEQ ID NO: 8804 - RNA, 20 nt, Artificial Sequence
  HTT spacer sequence CTCN PAM
cggaaaggagcaccagcaga

SEQ ID NO: 8805 - RNA, 20 nt, Artificial Sequence
  HTT spacer sequence CTCN PAM
uauccccucucugugccuca

SEQ ID NO: 8806 - RNA, 20 nt, Artificial Sequence
  HTT spacer sequence CTCN PAM
cugugccucaguuugcucau

SEQ ID NO: 8807 - RNA, 20 nt, Artificial Sequence
  HTT spacer sequence CTCN PAM
gugccucaguuugcucaucu

SEQ ID NO: 8808 - RNA, 20 nt, Artificial Sequence
  HTT spacer sequence CTCN PAM
guuugcucaucuguugacac

SEQ ID NO: 8809 - RNA, 20 nt, Artificial Sequence
  HTT spacer sequence CTCN PAM
ucuguugacacuggggacag

SEQ ID NO: 8810 - RNA, 20 nt, Artificial Sequence
  HTT spacer sequence CTCN PAM
uggucuaguggccacacuua

SEQ ID NO: 8811 - RNA, 20 nt, Artificial Sequence
  HTT spacer sequence CTCN PAM
gugugggcugcuggggugga

SEQ ID NO: 8812 - RNA, 20 nt, Artificial Sequence
  HTT spacer sequence CTCN PAM
uccuugccgaagcaagccuc

SEQ ID NO: 8813 - RNA, 20 nt, Artificial Sequence
  HTT spacer sequence CTCN PAM
uugccgaagcaagccucugg

SEQ ID NO: 8814 - RNA, 20 nt, Artificial Sequence
  HTT spacer sequence CTCN PAM
ggguucaggucagcccugca

SEQ ID NO: 8815 - RNA, 20 nt, Artificial Sequence
  HTT spacer sequence CTCN PAM
augagccuggacaagcuccu

SEQ ID NO: 8816 - RNA, 20 nt, Artificial Sequence
  HTT spacer sequence CTCN PAM
uggaguuggugcagggcuga

SEQ ID NO: 8817 - RNA, 20 nt, Artificial Sequence
  HTT spacer sequence CTCN PAM
ugcccucacuggcucaggcc

SEQ ID NO: 8818 - RNA, 20 nt, Artificial Sequence
  HTT spacer sequence CTCN PAM
cuggcucaggcccuguggga

SEQ ID NO: 8819 - RNA, 20 nt, Artificial Sequence
  HTT spacer sequence CTCN PAM
ggcccugugggaccagagga

SEQ ID NO: 8820 - RNA, 20 nt, Artificial Sequence
  HTT spacer sequence CTCN PAM
ggucccacagggccugagcc

SEQ ID NO: 8821 - RNA, 20 nt, Artificial Sequence
  HTT spacer sequence CTCN PAM
ucuggucccacagggccuga

SEQ ID NO: 8822 - RNA, 20 nt, Artificial Sequence
  HTT spacer sequence CTCN PAM
acccccuccugguucuuccc

SEQ ID NO: 8823 - RNA, 20 nt, Artificial Sequence
  HTT spacer sequence CTCN PAM
ugguucuucccacucugucc

SEQ ID NO: 8824 - RNA, 20 nt, Artificial Sequence
  HTT spacer sequence CTCN PAM
guccacugucuccucuacgu

SEQ ID NO: 8825 - RNA, 20 nt, Artificial Sequence
  HTT spacer sequence CTCN PAM
ucuacguagacaccgucgaa

SEQ ID NO: 8826 - RNA, 20 nt, Artificial Sequence
  HTT spacer sequence CTCN PAM
acguagacaccgucgaaggg

SEQ ID NO: 8827 - RNA, 20 nt, Artificial Sequence
  HTT spacer sequence CTCN PAM
uggagcccaaccucagggcc

SEQ ID NO: 8828 - RNA, 20 nt, Artificial Sequence
  HTT spacer sequence CTCN PAM
aagagggcccuucgacggug

SEQ ID NO: 8829 - RNA, 20 nt, Artificial Sequence
  HTT spacer sequence CTCN PAM
gggccccacuccaggcacuc

SEQ ID NO: 8830 - RNA, 20 nt, Artificial Sequence
  HTT spacer sequence CTCN PAM
aggcacuccacuccuggcag

SEQ ID NO: 8831 - RNA, 20 nt, Artificial Sequence
  HTT spacer sequence CTCN PAM
acuccuggcaggacaggagg

SEQ ID NO: 8832 - RNA, 20 nt, Artificial Sequence
  HTT spacer sequence CTCN PAM
uggcaggacaggaggccugg

SEQ ID NO: 8833 - RNA, 20 nt, Artificial Sequence
  HTT spacer sequence CTCN PAM
uguccugccaggaguggagu

SEQ ID NO: 8834 - RNA, 20 nt, Artificial Sequence
  HTT spacer sequence CTCN PAM
ucccaggccuccuguccugc

SEQ ID NO: 8835 - RNA, 20 nt, Artificial Sequence
  HTT spacer sequence CTCN PAM
cuugcagcccucgucccagg

SEQ ID NO: 8836 - RNA, 20 nt, Artificial Sequence
  HTT spacer sequence CTCN PAM
cucccuugcagcccucgucc

SEQ ID NO: 8837 - RNA, 20 nt, Artificial Sequence
  HTT spacer sequence CTCN PAM
cccugccacccgccaggcuc

SEQ ID NO: 8838 - RNA, 20 nt, Artificial Sequence
  HTT spacer sequence CTCN PAM
cugccacccgccaggcuccc

SEQ ID NO: 8839 - RNA, 20 nt, Artificial Sequence
  HTT spacer sequence CTCN PAM
cuuugccuggcucugugccc

SEQ ID NO: 8840 - RNA, 20 nt, Artificial Sequence
  HTT spacer sequence CTCN PAM
gugcccugcguuaggcacac

SEQ ID NO: 8841 - RNA, 20 nt, Artificial Sequence
  HTT spacer sequence CTCN PAM
agggugugccuaacgcaggg

SEQ ID NO: 8842 - RNA, 20 nt, Artificial Sequence
  HTT spacer sequence CTCN PAM
ccagauggcccuggcuggca

SEQ ID NO: 8843 - RNA, 20 nt, Artificial Sequence
  HTT spacer sequence CTCN PAM
caccagauggcccuggcugg

SEQ ID NO: 8844 - RNA, 20 nt, Artificial Sequence
  HTT spacer sequence CTCN PAM
cugaaaggccagguccccug

SEQ ID NO: 8845 - RNA, 20 nt, Artificial Sequence
  HTT spacer sequence CTCN PAM
aggaucaugggggagcccac

SEQ ID NO: 8846 - RNA, 20 nt, Artificial Sequence
  HTT spacer sequence CTCN PAM
cccaugauccuggaggccug

SEQ ID NO: 8847 - RNA, 20 nt, Artificial Sequence
  HTT spacer sequence CTCN PAM
uuggugggcucccccaugau

SEQ ID NO: 8848 - RNA, 20 nt, Artificial Sequence
  HTT spacer sequence CTCN PAM
ucaggccagccuccuuggug

SEQ ID NO: 8849 - RNA, 20 nt, Artificial Sequence
  HTT spacer sequence CTCN PAM
gucugccucuucaggccagc

SEQ ID NO: 8850 - RNA, 20 nt, Artificial Sequence
  HTT spacer sequence CTCN PAM
cucugucugccucuucaggc

SEQ ID NO: 8851 - RNA, 20 nt, Artificial Sequence
  HTT spacer sequence CTCN PAM
gggccugccuuggcccuuuc

SEQ ID NO: 8852 - RNA, 20 nt, Artificial Sequence
  HTT spacer sequence CTCN PAM
guccaugugggcagaaaggg

SEQ ID NO: 8853 - RNA, 20 nt, Artificial Sequence
  HTT spacer sequence CTCN PAM
gcacccugcuuccucugucc

SEQ ID NO: 8854 - RNA, 20 nt, Artificial Sequence
  HTT spacer sequence CTCN PAM
agcugacucagcacccugcu

SEQ ID NO: 8855 - RNA, 20 nt, Artificial Sequence
  HTT spacer sequence CTCN PAM
ccaccccccagggaugcacg

SEQ ID NO: 8856 - RNA, 20 nt, Artificial Sequence
  HTT spacer sequence CTCN PAM
gggccccuggacuucccguc

SEQ ID NO: 8857 - RNA, 20 nt, Artificial Sequence
  HTT spacer sequence CTCN PAM
cugggccccuggacuucccg

SEQ ID NO: 8858 - RNA, 20 nt, Artificial Sequence
  HTT spacer sequence CTCN PAM
ucucucugggccccuggacu

SEQ ID NO: 8859 - RNA, 20 nt, Artificial Sequence
  HTT spacer sequence CTCN PAM
ggaaccaaggcuggccaucu

SEQ ID NO: 8860 - RNA, 20 nt, Artificial Sequence
  HTT spacer sequence CTCN PAM
cugccccucaggaaccaagg

SEQ ID NO: 8861 - RNA, 20 nt, Artificial Sequence
  HTT spacer sequence CTCN PAM
gccaggaucuugggugugaa

SEQ ID NO: 8862 - RNA, 20 nt, Artificial Sequence
  HTT spacer sequence CTCN PAM
gaugccaccaguuuccagcu

SEQ ID NO: 8863 - RNA, 20 nt, Artificial Sequence
  HTT spacer sequence CTCN PAM
uggccaugaucacacagcug

SEQ ID NO: 8864 - RNA, 20 nt, Artificial Sequence
  HTT spacer sequence CTCN PAM
guuuucucauccaugaccug

SEQ ID NO: 8865 - RNA, 20 nt, Artificial Sequence
  HTT spacer sequence CTCN PAM
uccaugaccugagggcugug

SEQ ID NO: 8866 - RNA, 20 nt, Artificial Sequence
  HTT spacer sequence CTCN PAM
ggucauggaugagaaaacgg

SEQ ID NO: 8867 - RNA, 20 nt, Artificial Sequence
  HTT spacer sequence CTCN PAM
uagccacccaccagguacaa

SEQ ID NO: 8868 - RNA, 20 nt, Artificial Sequence
  HTT spacer sequence CTCN PAM
gcgacccacugucacugaau

SEQ ID NO: 8869 - RNA, 20 nt, Artificial Sequence
  HTT spacer sequence CTCN PAM
cccugguccucagggccgcu

SEQ ID NO: 8870 - RNA, 20 nt, Artificial Sequence
  HTT spacer sequence CTCN PAM
cugguccucagggccgcugu

SEQ ID NO: 8871 - RNA, 20 nt, Artificial Sequence
  HTT spacer sequence CTCN PAM
gggccgcuguauguccuguu

SEQ ID NO: 8872 - RNA, 20 nt, Artificial Sequence
  HTT spacer sequence CTCN PAM
aggccagucccugcccccac

SEQ ID NO: 8873 - RNA, 20 nt, Artificial Sequence
  HTT spacer sequence CTCN PAM
ccaggccagucccugccccc

SEQ ID NO: 8874 - RNA, 20 nt, Artificial Sequence
  HTT spacer sequence CTCN PAM
cagguuccugcccacauugg

SEQ ID NO: 8875 - RNA, 20 nt, Artificial Sequence
  HTT spacer sequence CTCN PAM
ggccuuaguccaaugugggc

SEQ ID NO: 8876 - RNA, 20 nt, Artificial Sequence
  HTT spacer sequence CTCN PAM
ugauggacucaggccuuagu

SEQ ID NO: 8877 - RNA, 20 nt, Artificial Sequence
  HTT spacer sequence CTCN PAM
aaagcucccuuguggggaca

SEQ ID NO: 8878 - RNA, 20 nt, Artificial Sequence
  HTT spacer sequence CTCN PAM
cuuguggggacaccccaggu

SEQ ID NO: 8879 - RNA, 20 nt, Artificial Sequence
  HTT spacer sequence CTCN PAM
gcccuccucacucucugucc

SEQ ID NO: 8880 - RNA, 20 nt, Artificial Sequence
  HTT spacer sequence CTCN PAM
ucacucucuguccucucuug

SEQ ID NO: 8881 - RNA, 20 nt, Artificial Sequence
  HTT spacer sequence CTCN PAM
cucucuguccucucuugacc

SEQ ID NO: 8882 - RNA, 20 nt, Artificial Sequence
  HTT spacer sequence CTCN PAM
cuguccucucuugaccucau

SEQ ID NO: 8883 - RNA, 20 nt, Artificial Sequence
  HTT spacer sequence CTCN PAM
guccucucuugaccucauga

SEQ ID NO: 8884 - RNA, 20 nt, Artificial Sequence
  HTT spacer sequence CTCN PAM
cuugaccucaugaucugccc

SEQ ID NO: 8885 - RNA, 20 nt, Artificial Sequence
  HTT spacer sequence CTCN PAM
ugaccucaugaucugcccac

SEQ ID NO: 8886 - RNA, 20 nt, Artificial Sequence
  HTT spacer sequence CTCN PAM
ugaucugcccaccucccaaa

SEQ ID NO: 8887 - RNA, 20 nt, Artificial Sequence
  HTT spacer sequence CTCN PAM
caaagugcugggauuacagg

SEQ ID NO: 8888 - RNA, 20 nt, Artificial Sequence
  HTT spacer sequence CTCN PAM
cgccuguaaucccagcacuu

SEQ ID NO: 8889 - RNA, 20 nt, Artificial Sequence
  HTT spacer sequence CTCN PAM
gccaggcgugggggcucacg

SEQ ID NO: 8890 - RNA, 20 nt, Artificial Sequence
  HTT spacer sequence CTCN PAM
cccacccaggcugcacagug

SEQ ID NO: 8891 - RNA, 20 nt, Artificial Sequence
  HTT spacer sequence CTCN PAM
ucacccacccaggcugcaca

SEQ ID NO: 8892 - RNA, 20 nt, Artificial Sequence
  HTT spacer sequence CTCN PAM
ccuuguggcaaauuccccgu

SEQ ID NO: 8893 - RNA, 20 nt, Artificial Sequence
  HTT spacer sequence CTCN PAM
caccuuguggcaaauucccc

SEQ ID NO: 8894 - RNA, 20 nt, Artificial Sequence
  HTT spacer sequence CTCN PAM
acugcgucugggguaggaca

SEQ ID NO: 8895 - RNA, 20 nt, Artificial Sequence
  HTT spacer sequence CTCN PAM
caccccucgggccaaugaau

SEQ ID NO: 8896 - RNA, 20 nt, Artificial Sequence
  HTT spacer sequence CTCN PAM
ggccaaugaauacagggugg

SEQ ID NO: 8897 - RNA, 20 nt, Artificial Sequence
  HTT spacer sequence CTCN PAM
ugacggcccacccuguauuc

SEQ ID NO: 8898 - RNA, 20 nt, Artificial Sequence
  HTT spacer sequence CTCN PAM
uccugacggcccacccugua

SEQ ID NO: 8899 - RNA, 20 nt, Artificial Sequence
  HTT spacer sequence CTCN PAM
gaucccuccuccugacggcc

SEQ ID NO: 8900 - RNA, 20 nt, Artificial Sequence
  HTT spacer sequence CTCN PAM
cuaccgcccgccuuuggcuu

SEQ ID NO: 8901 - RNA, 20 nt, Artificial Sequence
  HTT spacer sequence CTCN PAM
cacccucccuaccgcccgcc

SEQ ID NO: 8902 - RNA, 20 nt, Artificial Sequence
  HTT spacer sequence CTCN PAM
cgucaaacuggucucccacc

SEQ ID NO: 8903 - RNA, 20 nt, Artificial Sequence
  HTT spacer sequence CTCN PAM
ccacaccuggcaugcaaagg

SEQ ID NO: 8904 - RNA, 20 nt, Artificial Sequence
  HTT spacer sequence CTCN PAM
auacccucaccacaccuggc

SEQ ID NO: 8905 - RNA, 20 nt, Artificial Sequence
  HTT spacer sequence CTCN PAM
caggccccuccauacccuca

SEQ ID NO: 8906 - RNA, 20 nt, Artificial Sequence
  HTT spacer sequence CTCN PAM
uugccucccaggccccucca

SEQ ID NO: 8907 - RNA, 20 nt, Artificial Sequence
  HTT spacer sequence CTCN PAM
aggauaggcggcuccucccc

SEQ ID NO: 8908 - RNA, 20 nt, Artificial Sequence
  HTT spacer sequence CTCN PAM
uccccagaaggccucugcau

SEQ ID NO: 8909 - RNA, 20 nt, Artificial Sequence
  HTT spacer sequence CTCN PAM
ccagaaggccucugcauucu

SEQ ID NO: 8910 - RNA, 20 nt, Artificial Sequence
  HTT spacer sequence CTCN PAM
gcauucuucugguggcccug

SEQ ID NO: 8911 - RNA, 20 nt, Artificial Sequence
  HTT spacer sequence CTCN PAM
guguccagacagggccacca

SEQ ID NO: 8912 - RNA, 20 nt, Artificial Sequence
  HTT spacer sequence CTCN PAM
agccccucgguguccagaca

SEQ ID NO: 8913 - RNA, 20 nt, Artificial Sequence
  HTT spacer sequence CTCN PAM
gggacuuaggcagcccacac

SEQ ID NO: 8914 - RNA, 20 nt, Artificial Sequence
  HTT spacer sequence CTCN PAM
cuaccacccccucugggacu

SEQ ID NO: 8915 - RNA, 20 nt, Artificial Sequence
  HTT spacer sequence CTCN PAM
cuggcuggcccccuucccug

SEQ ID NO: 8916 - RNA, 20 nt, Artificial Sequence
  HTT spacer sequence CTCN PAM
ucaccaccccuuggccugug

SEQ ID NO: 8917 - RNA, 20 nt, Artificial Sequence
  HTT spacer sequence CTCN PAM
ccaccccuuggccugugcac

SEQ ID NO: 8918 - RNA, 20 nt, Artificial Sequence
  HTT spacer sequence CTCN PAM
cgugcacaggccaaggggug

SEQ ID NO: 8919 - RNA, 20 nt, Artificial Sequence
  HTT spacer sequence CTCN PAM
uggcaccauccugucuaccc

SEQ ID NO: 8920 - RNA, 20 nt, Artificial Sequence
  HTT spacer sequence CTCN PAM
gccacgggccaggagaccug

SEQ ID NO: 8921 - RNA, 20 nt, Artificial Sequence
  HTT spacer sequence CTCN PAM
uggcccguggcugagggcca

SEQ ID NO: 8922 - RNA, 20 nt, Artificial Sequence
  HTT spacer sequence CTCN PAM
ggucuccuggcccguggcug

SEQ ID NO: 8923 - RNA, 20 nt, Artificial Sequence
  HTT spacer sequence CTCN PAM
guuuccugaucugcaaaacg

SEQ ID NO: 8924 - RNA, 20 nt, Artificial Sequence
  HTT spacer sequence CTCN PAM
ggaccacgcugcuggauuug

SEQ ID NO: 8925 - RNA, 20 nt, Artificial Sequence
  HTT spacer sequence CTCN PAM
uccuucaagggugacgcgag

SEQ ID NO: 8926 - RNA, 20 nt, Artificial Sequence
  HTT spacer sequence CTCN PAM
cgucacccuugaaggaugag

SEQ ID NO: 8927 - RNA, 20 nt, Artificial Sequence
  HTT spacer sequence CTCN PAM
cgcgucacccuugaaggaug

SEQ ID NO: 8928 - RNA, 20 nt, Artificial Sequence
  HTT spacer sequence CTCN PAM
acccgccccgaaccugggca

SEQ ID NO: 8929 - RNA, 20 nt, Artificial Sequence
  HTT spacer sequence CTCN PAM
ugucugacccaggucuccac

SEQ ID NO: 8930 - RNA, 20 nt, Artificial Sequence
  HTT spacer sequence CTCN PAM
aacuccugucugacccaggu

SEQ ID NO: 8931 - RNA, 20 nt, Artificial Sequence
  HTT spacer sequence CTCN PAM
caggaggggagaaaggugcc

SEQ ID NO: 8932 - RNA, 20 nt, Artificial Sequence
  HTT spacer sequence CTCN PAM
ugggagccugcaccaccucg

SEQ ID NO: 8933 - RNA, 20 nt, Artificial Sequence
  HTT spacer sequence CTCN PAM
ccuccugggagccugcacca

SEQ ID NO: 8934 - RNA, 20 nt, Artificial Sequence
  HTT spacer sequence CTCN PAM
cccaaccuucucucuucucc

SEQ ID NO: 8935 - RNA, 20 nt, Artificial Sequence
  HTT spacer sequence CTCN PAM
cuucuccccaggcucuguaa

SEQ ID NO: 8936 - RNA, 20 nt, Artificial Sequence
  HTT spacer sequence CTCN PAM
ucuccccaggcucuguaacu

SEQ ID NO: 8937 - RNA, 20 nt, Artificial Sequence
  HTT spacer sequence CTCN PAM
ccaggcucuguaacuuccaa

SEQ ID NO: 8938 - RNA, 20 nt, Artificial Sequence
  HTT spacer sequence CTCN PAM
guaacuuccaaggccaugag

SEQ ID NO: 8939 - RNA, 20 nt, Artificial Sequence
  HTT spacer sequence CTCN PAM
uggccuuggaaguuacagag

SEQ ID NO: 8940 - RNA, 20 nt, Artificial Sequence
  HTT spacer sequence CTCN PAM
cauggccuuggaaguuacag

SEQ ID NO: 8941 - RNA, 20 nt, Artificial Sequence
  HTT spacer sequence CTCN PAM
gggcguuggggccagcaguu

SEQ ID NO: 8942 - RNA, 20 nt, Artificial Sequence
  HTT spacer sequence CTCN PAM
gggaagaaugugggcucggc

SEQ ID NO: 8943 - RNA, 20 nt, Artificial Sequence
  HTT spacer sequence CTCN PAM
gccaccuggagcaguugccu

SEQ ID NO: 8944 - RNA, 20 nt, Artificial Sequence
  HTT spacer sequence CTCN PAM
agguggccgagcccacauuc

SEQ ID NO: 8945 - RNA, 20 nt, Artificial Sequence
  HTT spacer sequence CTCN PAM
ccaggcaacugcuccaggug

SEQ ID NO: 8946 - RNA, 20 nt, Artificial Sequence
  HTT spacer sequence CTCN PAM
gaucuccccaggcaacugcu

SEQ ID NO: 8947 - RNA, 20 nt, Artificial Sequence
  HTT spacer sequence CTCN PAM
ucugaucuccccaggcaacu

SEQ ID NO: 8948 - RNA, 20 nt, Artificial Sequence
  HTT spacer sequence CTCN PAM
gggcuccucugaucucccca

SEQ ID NO: 8949 - RNA, 20 nt, Artificial Sequence
  HTT spacer sequence CTCN PAM
gccaaccccucagggcuccu

SEQ ID NO: 8950 - RNA, 20 nt, Artificial Sequence
  HTT spacer sequence CTCN PAM
ugguauccauacccccaucc

SEQ ID NO: 8951 - RNA, 20 nt, Artificial Sequence
  HTT spacer sequence CTCN PAM
gcuacagggauggggguaug

SEQ ID NO: 8952 - RNA, 20 nt, Artificial Sequence
  HTT spacer sequence CTCN PAM
gcuuccuugugaaucagaug

SEQ ID NO: 8953 - RNA, 20 nt, Artificial Sequence
  HTT spacer sequence CTCN PAM
ugcugagccugcuccaggca

SEQ ID NO: 8954 - RNA, 20 nt, Artificial Sequence
  HTT spacer sequence CTCN PAM
gcaggagcgcaguaaacauc

SEQ ID NO: 8955 - RNA, 20 nt, Artificial Sequence
  HTT spacer sequence CTCN PAM
aggcagcuggguggggcgua

SEQ ID NO: 8956 - RNA, 20 nt, Artificial Sequence
  HTT spacer sequence CTCN PAM
agccugcagagggaggccag

SEQ ID NO: 8957 - RNA, 20 nt, Artificial Sequence
  HTT spacer sequence CTCN PAM
gcaggcuugagcagacaggc

SEQ ID NO: 8958 - RNA, 20 nt, Artificial Sequence
  HTT spacer sequence CTCN PAM
cucugcaggcuugagcagac

SEQ ID NO: 8959 - RNA, 20 nt, Artificial Sequence
  HTT spacer sequence CTCN PAM
ccaccccagggucagccagg

SEQ ID NO: 8960 - RNA, 20 nt, Artificial Sequence
  HTT spacer sequence CTCN PAM
agaaggcagugugcgugcca

SEQ ID NO: 8961 - RNA, 20 nt, Artificial Sequence
  HTT spacer sequence CTCN PAM
gccccgugugccauggcacg

SEQ ID NO: 8962 - RNA, 20 nt, Artificial Sequence
  HTT spacer sequence CTCN PAM
cggccucagccccgugugcc

SEQ ID NO: 8963 - RNA, 20 nt, Artificial Sequence
  HTT spacer sequence CTCN PAM
gccccugccucgcggccuca

SEQ ID NO: 8964 - RNA, 20 nt, Artificial Sequence
  HTT spacer sequence CTCN PAM
gugccgcuucccucggcccc

SEQ ID NO: 8965 - RNA, 20 nt, Artificial Sequence
  HTT spacer sequence CTCN PAM
caggcaccagaggggagcug

SEQ ID NO: 8966 - RNA, 20 nt, Artificial Sequence
  HTT spacer sequence CTCN PAM
ggcaccagaggggagcugag

SEQ ID NO: 8967 - RNA, 20 nt, Artificial Sequence
  HTT spacer sequence CTCN PAM
ggugccugagagaagcucug

SEQ ID NO: 8968 - RNA, 20 nt, Artificial Sequence
  HTT spacer sequence CTCN PAM
ccucuggugccugagagaag

SEQ ID NO: 8969 - RNA, 20 nt, Artificial Sequence
  HTT spacer sequence CTCN PAM
gcuccccucuggugccugag

SEQ ID NO: 8970 - RNA, 20 nt, Artificial Sequence
  HTT spacer sequence CTCN PAM
gagcaggcuucgucugaggg

SEQ ID NO: 8971 - RNA, 20 nt, Artificial Sequence
  HTT spacer sequence CTCN PAM
gagcccagaacucagcuccc

SEQ ID NO: 8972 - RNA, 20 nt, Artificial Sequence
  HTT spacer sequence CTCN PAM
gacgaagccugcucugagcc

SEQ ID NO: 8973 - RNA, 20 nt, Artificial Sequence
  HTT spacer sequence CTCN PAM
uugugaaauggggugaaagu

SEQ ID NO: 8974 - RNA, 20 nt, Artificial Sequence
  HTT spacer sequence CTCN PAM
ugggaggccagauccccagg

SEQ ID NO: 8975 - RNA, 20 nt, Artificial Sequence
  HTT spacer sequence CTCN PAM
caugaguuagaccuacuuuc

SEQ ID NO: 8976 - RNA, 20 nt, Artificial Sequence
  HTT spacer sequence CTCN PAM
ggccuggggaucuggccucc

SEQ ID NO: 8977 - RNA, 20 nt, Artificial Sequence
  HTT spacer sequence CTCN PAM
cugcccuugacacuguguga

SEQ ID NO: 8978 - RNA, 20 nt, Artificial Sequence
  HTT spacer sequence CTCN PAM
guuugggggaguuccuucag

SEQ ID NO: 8979 - RNA, 20 nt, Artificial Sequence
  HTT spacer sequence CTCN PAM
cccaaacggagcugcccauu

SEQ ID NO: 8980 - RNA, 20 nt, Artificial Sequence
  HTT spacer sequence CTCN PAM
auccagggguguuguaaucu

SEQ ID NO: 8981 - RNA, 20 nt, Artificial Sequence
  HTT spacer sequence CTCN PAM
ucuguggcauuugagggucc

SEQ ID NO: 8982 - RNA, 20 nt, Artificial Sequence
  HTT spacer sequence CTCN PAM
aaugccacagaagagcauca

SEQ ID NO: 8983 - RNA, 20 nt, Artificial Sequence
  HTT spacer sequence CTCN PAM
ggacaguggacagggcugca

SEQ ID NO: 8984 - RNA, 20 nt, Artificial Sequence
  HTT spacer sequence CTCN PAM
cagaaugaccccugaucccu

SEQ ID NO: 8985 - RNA, 20 nt, Artificial Sequence
  HTT spacer sequence CTCN PAM
gccuugggagucuggggcag

SEQ ID NO: 8986 - RNA, 20 nt, Artificial Sequence
  HTT spacer sequence CTCN PAM
caaggcugagaaaaagccaa

SEQ ID NO: 8987 - RNA, 20 nt, Artificial Sequence
  HTT spacer sequence CTCN PAM
ggggcagugguggaccuccu

SEQ ID NO: 8988 - RNA, 20 nt, Artificial Sequence
  HTT spacer sequence CTCN PAM
uucagaaggcugcugcccag

SEQ ID NO: 8989 - RNA, 20 nt, Artificial Sequence
  HTT spacer sequence CTCN PAM
ugcaacacugggugccugug

SEQ ID NO: 8990 - RNA, 20 nt, Artificial Sequence
  HTT spacer sequence CTCN PAM
ugcagugcaugccuagccca

SEQ ID NO: 8991 - RNA, 20 nt, Artificial Sequence
  HTT spacer sequence CTCN PAM
gaccuguggccugucugcuc

SEQ ID NO: 8992 - RNA, 20 nt, Artificial Sequence
  HTT spacer sequence CTCN PAM
ccugccuggcccaccuugcc

SEQ ID NO: 8993 - RNA, 20 nt, Artificial Sequence
  HTT spacer sequence CTCN PAM
cucccuuagaagcaauuuca

SEQ ID NO: 8994 - RNA, 20 nt, Artificial Sequence
  HTT spacer sequence CTCN PAM
cccuuagaagcaauuucagc

SEQ ID NO: 8995 - RNA, 20 nt, Artificial Sequence
  HTT spacer sequence CTCN PAM
cuuagaagcaauuucagcug

SEQ ID NO: 8996 - RNA, 20 nt, Artificial Sequence
  HTT spacer sequence CTCN PAM
ggguacccucccuggccacc

SEQ ID NO: 8997 - RNA, 20 nt, Artificial Sequence
  HTT spacer sequence CTCN PAM
cuggccacccccaacuccac

SEQ ID NO: 8998 - RNA, 20 nt, Artificial Sequence
  HTT spacer sequence CTCN PAM
acccugagcugggugccuuc

SEQ ID NO: 8999 - RNA, 20 nt, Artificial Sequence
  HTT spacer sequence CTCN PAM
ggguggaguuggggguggcc

SEQ ID NO: 9000 - RNA, 20 nt, Artificial Sequence
  HTT spacer sequence CTCN PAM
ggaaggcacccagcucaggg

SEQ ID NO: 9001 - RNA, 20 nt, Artificial Sequence
  HTT spacer sequence CTCN PAM
ugcuugggaacucaggaagg

SEQ ID NO: 9002 - RNA, 20 nt, Artificial Sequence
  HTT spacer sequence CTCN PAM
ggaaggucagggucgcgucu

SEQ ID NO: 9003 - RNA, 20 nt, Artificial Sequence
  HTT spacer sequence CTCN PAM
gacgcgacccugaccuuccu

SEQ ID NO: 9004 - RNA, 20 nt, Artificial Sequence
  HTT spacer sequence CTCN PAM
cagacgcgacccugaccuuc

SEQ ID NO: 9005 - RNA, 20 nt, Artificial Sequence
  HTT spacer sequence CTCN PAM
gggacaggcccacgugggca

SEQ ID NO: 9006 - RNA, 20 nt, Artificial Sequence
  HTT spacer sequence CTCN PAM
cccuuccucugggacaggcc

SEQ ID NO: 9007 - RNA, 20 nt, Artificial Sequence
  HTT spacer sequence CTCN PAM
ccucacccuuccucugggac

SEQ ID NO: 9008 - RNA, 20 nt, Artificial Sequence
  HTT spacer sequence CTCN PAM
cccagccucccacuccuggg

SEQ ID NO: 9009 - RNA, 20 nt, Artificial Sequence
  HTT spacer sequence CTCN PAM
cagccucccacuccugggca

SEQ ID NO: 9010 - RNA, 20 nt, Artificial Sequence
  HTT spacer sequence CTCN PAM
cacuccugggcagggaagug

SEQ ID NO: 9011 - RNA, 20 nt, Artificial Sequence
  HTT spacer sequence CTCN PAM
ugggcagggaaguggcgcgg

SEQ ID NO: 9012 - RNA, 20 nt, Artificial Sequence
  HTT spacer sequence CTCN PAM
uugaagguggcuugucacuc

SEQ ID NO: 9013 - RNA, 20 nt, Artificial Sequence
  HTT spacer sequence CTCN PAM
ccccaccuguguuuaacucu

SEQ ID NO: 9014 - RNA, 20 nt, Artificial Sequence
  HTT spacer sequence CTCN PAM
acugagcaucagagccuaau

SEQ ID NO: 9015 - RNA, 20 nt, Artificial Sequence
  HTT spacer sequence CTCN PAM
guagaguuaaacacaggugg

SEQ ID NO: 9016 - RNA, 20 nt, Artificial Sequence
  HTT spacer sequence CTCN PAM
gaugcucaguagaguuaaac

SEQ ID NO: 9017 - RNA, 20 nt, Artificial Sequence
  HTT spacer sequence CTCN PAM
accaacugggcggcagcugc

SEQ ID NO: 9018 - RNA, 20 nt, Artificial Sequence
  HTT spacer sequence CTCN PAM
cacgaaacucuucagguuuc

SEQ ID NO: 9019 - RNA, 20 nt, Artificial Sequence
  HTT spacer sequence CTCN PAM
ucagguuuccaucacagccu

SEQ ID NO: 9020 - RNA, 20 nt, Artificial Sequence
  HTT spacer sequence CTCN PAM
ucccuucccccugcgggcug

SEQ ID NO: 9021 - RNA, 20 nt, Artificial Sequence
  HTT spacer sequence CTCN PAM
cuucccccugcgggcugcgc

SEQ ID NO: 9022 - RNA, 20 nt, Artificial Sequence
  HTT spacer sequence CTCN PAM
guggcccuggcagcgguaga

SEQ ID NO: 9023 - RNA, 20 nt, Artificial Sequence
  HTT spacer sequence CTCN PAM
cuaucuaccgcugccagggc

SEQ ID NO: 9024 - RNA, 20 nt, Artificial Sequence
  HTT spacer sequence CTCN PAM
ccaggcuuugguccucccua

SEQ ID NO: 9025 - RNA, 20 nt, Artificial Sequence
  HTT spacer sequence CTCN PAM
uccucaccaggcuuuggucc

SEQ ID NO: 9026 - RNA, 20 nt, Artificial Sequence
  HTT spacer sequence CTCN PAM
gcggcucuuccucaccaggc

SEQ ID NO: 9027 - RNA, 20 nt, Artificial Sequence
  HTT spacer sequence CTCN PAM
gcucggcggcucuuccucac

SEQ ID NO: 9028 - RNA, 20 nt, Artificial Sequence
  HTT spacer sequence CTCN PAM
cccugaacgaaagugcuuuc

SEQ ID NO: 9029 - RNA, 20 nt, Artificial Sequence
  HTT spacer sequence CTCN PAM
cugaacgaaagugcuuucuu

SEQ ID NO: 9030 - RNA, 20 nt, Artificial Sequence
  HTT spacer sequence CTCN PAM
guagcugcucuuccuaaacg

SEQ ID NO: 9031 - RNA, 20 nt, Artificial Sequence
  HTT spacer sequence CTCN PAM
uccuaaacguguguuggcuu

SEQ ID NO: 9032 - RNA, 20 nt, Artificial Sequence
  HTT spacer sequence CTCN PAM
agccaacacacguuuaggaa

SEQ ID NO: 9033 - RNA, 20 nt, Artificial Sequence
  HTT spacer sequence CTCN PAM
aaucucaagccaacacacgu

SEQ ID NO: 9034 - RNA, 20 nt, Artificial Sequence
  HTT spacer sequence CTCN PAM
uugggacccaaagcccuggu

SEQ ID NO: 9035 - RNA, 20 nt, Artificial Sequence
  HTT spacer sequence CTCN PAM
ggugccagcucuuugggacc

SEQ ID NO: 9036 - RNA, 20 nt, Artificial Sequence
  HTT spacer sequence CTCN PAM
ccauuaggagggcaaugggg

SEQ ID NO: 9037 - RNA, 20 nt, Artificial Sequence
  HTT spacer sequence CTCN PAM
uaauggugagaaauccggcc

SEQ ID NO: 9038 - RNA, 20 nt, Artificial Sequence
  HTT spacer sequence CTCN PAM
caggccagcuuuucuggauc

SEQ ID NO: 9039 - RNA, 20 nt, Artificial Sequence
  HTT spacer sequence CTCN PAM
gggcucccaggccagcuuuu

SEQ ID NO: 9040 - RNA, 20 nt, Artificial Sequence
  HTT spacer sequence CTCN PAM
augcagggcuguguaccccc

SEQ ID NO: 9041 - RNA, 20 nt, Artificial Sequence
  HTT spacer sequence CTCN PAM
gagccagaggaggcaggcca

SEQ ID NO: 9042 - RNA, 20 nt, Artificial Sequence
  HTT spacer sequence CTCN PAM
gagccuggucuccaugcagg

SEQ ID NO: 9043 - RNA, 20 nt, Artificial Sequence
  HTT spacer sequence CTCN PAM
ggcucugagccuggucucca

SEQ ID NO: 9044 - RNA, 20 nt, Artificial Sequence
  HTT spacer sequence CTCN PAM
ucuggcucugagccuggucu

SEQ ID NO: 9045 - RNA, 20 nt, Artificial Sequence
  HTT spacer sequence CTCN PAM
gcacucaucuccucucucgg

SEQ ID NO: 9046 - RNA, 20 nt, Artificial Sequence
  HTT spacer sequence CTCN PAM
ucuccucucucggaaacgcc

SEQ ID NO: 9047 - RNA, 20 nt, Artificial Sequence
  HTT spacer sequence CTCN PAM
ucucucggaaacgccccucc

SEQ ID NO: 9048 - RNA, 20 nt, Artificial Sequence
  HTT spacer sequence CTCN PAM
cucggaaacgccccucccug

SEQ ID NO: 9049 - RNA, 20 nt, Artificial Sequence
  HTT spacer sequence CTCN PAM
cggaaacgccccucccugac

SEQ ID NO: 9050 - RNA, 20 nt, Artificial Sequence
  HTT spacer sequence CTCN PAM
gaaacgccccucccugaccc

SEQ ID NO: 9051 - RNA, 20 nt, Artificial Sequence
  HTT spacer sequence CTCN PAM
cugaccccagcugcuuccuc

SEQ ID NO: 9052 - RNA, 20 nt, Artificial Sequence
  HTT spacer sequence CTCN PAM
ccuccuacucgaggccagaa

SEQ ID NO: 9053 - RNA, 20 nt, Artificial Sequence
  HTT spacer sequence CTCN PAM
uccuacucgaggccagaaag

SEQ ID NO: 9054 - RNA, 20 nt, Artificial Sequence
  HTT spacer sequence CTCN PAM
uacucgaggccagaaaggga

SEQ ID NO: 9055 - RNA, 20 nt, Artificial Sequence
  HTT spacer sequence CTCN PAM
aggccagaaagggaagcccc

SEQ ID NO: 9056 - RNA, 20 nt, Artificial Sequence
  HTT spacer sequence CTCN PAM
aguaggaggagaggaagcag

SEQ ID NO: 9057 - RNA, 20 nt, Artificial Sequence
  HTT spacer sequence CTCN PAM
ccccacuggaaaggggcuuc

SEQ ID NO: 9058 - RNA, 20 nt, Artificial Sequence
  HTT spacer sequence CTCN PAM
ggcagcgccagccacucacc

SEQ ID NO: 9059 - RNA, 20 nt, Artificial Sequence
  HTT spacer sequence CTCN PAM
gcugaccacugaucugccug

SEQ ID NO: 9060 - RNA, 20 nt, Artificial Sequence
  HTT spacer sequence CTCN PAM
cucugcugaccacugaucug

SEQ ID NO: 9061 - RNA, 20 nt, Artificial Sequence
  HTT spacer sequence CTCN PAM
gcccuggucaaacucacucu

SEQ ID NO: 9062 - RNA, 20 nt, Artificial Sequence
  HTT spacer sequence CTCN PAM
ggggaugcacccccgucauc

SEQ ID NO: 9063 - RNA, 20 nt, Artificial Sequence
  HTT spacer sequence CTCN PAM
uguggccucaggcguuccca

SEQ ID NO: 9064 - RNA, 20 nt, Artificial Sequence
  HTT spacer sequence CTCN PAM
ggcguucccaggcugagacc

SEQ ID NO: 9065 - RNA, 20 nt, Artificial Sequence
  HTT spacer sequence CTCN PAM
gccugggaacgccugaggcc

SEQ ID NO: 9066 - RNA, 20 nt, Artificial Sequence
  HTT spacer sequence CTCN PAM
aggaacacaggugcugggug

SEQ ID NO: 9067 - RNA, 20 nt, Artificial Sequence
  HTT spacer sequence CTCN PAM
gguggcuccaccaggccagg

SEQ ID NO: 9068 - RNA, 20 nt, Artificial Sequence
  HTT spacer sequence CTCN PAM
accaggccaggccgugugac

SEQ ID NO: 9069 - RNA, 20 nt, Artificial Sequence
  HTT spacer sequence CTCN PAM
gccuucucugggcagggcag

SEQ ID NO: 9070 - RNA, 20 nt, Artificial Sequence
  HTT spacer sequence CTCN PAM
gggcagggcagggacaggaa

SEQ ID NO: 9071 - RNA, 20 nt, Artificial Sequence
  HTT spacer sequence CTCN PAM
ugggaugcgugagggugagg

SEQ ID NO: 9072 - RNA, 20 nt, Artificial Sequence
  HTT spacer sequence CTCN PAM
cgcaucccaugaggcugcac

SEQ ID NO: 9073 - RNA, 20 nt, Artificial Sequence
  HTT spacer sequence CTCN PAM
cccucacgcaucccaugagg

SEQ ID NO: 9074 - RNA, 20 nt, Artificial Sequence
  HTT spacer sequence CTCN PAM
cacacaccccgccccagcag

SEQ ID NO: 9075 - RNA, 20 nt, Artificial Sequence
  HTT spacer sequence CTCN PAM
uggggggccacucccacaca

SEQ ID NO: 9076 - RNA, 20 nt, Artificial Sequence
  HTT spacer sequence CTCN PAM
aaagccggcgucaggucauc

SEQ ID NO: 9077 - RNA, 20 nt, Artificial Sequence
  HTT spacer sequence CTCN PAM
augaccugacgccggcuuug

SEQ ID NO: 9078 - RNA, 20 nt, Artificial Sequence
  HTT spacer sequence CTCN PAM
gggcugauuaggacuaaugg

SEQ ID NO: 9079 - RNA, 20 nt, Artificial Sequence
  HTT spacer sequence CTCN PAM
ggggugcagccucagccucc

SEQ ID NO: 9080 - RNA, 20 nt, Artificial Sequence
  HTT spacer sequence CTCN PAM
gccuccacccgccacccgua

SEQ ID NO: 9081 - RNA, 20 nt, Artificial Sequence
  HTT spacer sequence CTCN PAM
acccgccacccguacccgcc

SEQ ID NO: 9082 - RNA, 20 nt, Artificial Sequence
  HTT spacer sequence CTCN PAM
ggacuucguuccugcuguac

SEQ ID NO: 9083 - RNA, 20 nt, Artificial Sequence
  HTT spacer sequence CTCN PAM
uuccuccccaccggaggagc

SEQ ID NO: 9084 - RNA, 20 nt, Artificial Sequence
  HTT spacer sequence CTCN PAM
ccaccggaggagcugcuccc

SEQ ID NO: 9085 - RNA, 20 nt, Artificial Sequence
  HTT spacer sequence CTCN PAM
gguggggaggaaggagccac

SEQ ID NO: 9086 - RNA, 20 nt, Artificial Sequence
  HTT spacer sequence CTCN PAM
uccgguggggaggaaggagc

SEQ ID NO: 9087 - RNA, 20 nt, Artificial Sequence
  HTT spacer sequence CTCN PAM
caggcgggacccugggggug

SEQ ID NO: 9088 - RNA, 20 nt, Artificial Sequence
  HTT spacer sequence CTCN PAM
gaaaugccuuccccucggga

SEQ ID NO: 9089 - RNA, 20 nt, Artificial Sequence
  HTT spacer sequence CTCN PAM
ggacccucaccgcgacugga

SEQ ID NO: 9090 - RNA, 20 nt, Artificial Sequence
  HTT spacer sequence CTCN PAM
ccgcgacuggacuucgcuca

SEQ ID NO: 9091 - RNA, 20 nt, Artificial Sequence
  HTT spacer sequence CTCN PAM
gcuucagacccugggcugca

SEQ ID NO: 9092 - RNA, 20 nt, Artificial Sequence
  HTT spacer sequence CTCN PAM
uuaggcagcugcagcccagg

SEQ ID NO: 9093 - RNA, 20 nt, Artificial Sequence
  HTT spacer sequence CTCN PAM
acuuuacacacccagggccc

SEQ ID NO: 9094 - RNA, 20 nt, Artificial Sequence
  HTT spacer sequence CTCN PAM
cuccacuuuacacacccagg

SEQ ID NO: 9095 - RNA, 20 nt, Artificial Sequence
  HTT spacer sequence CTCN PAM
gagcccugagccauccuggg

SEQ ID NO: 9096 - RNA, 20 nt, Artificial Sequence
  HTT spacer sequence CTCN PAM
gagguggccacugccccucc

SEQ ID NO: 9097 - RNA, 20 nt, Artificial Sequence
  HTT spacer sequence CTCN PAM
gggcucagagguggccacug

SEQ ID NO: 9098 - RNA, 20 nt, Artificial Sequence
  HTT spacer sequence CTCN PAM
cugagaucaaccuucccauu

SEQ ID NO: 9099 - RNA, 20 nt, Artificial Sequence
  HTT spacer sequence CTCN PAM
gagaucaaccuucccauuuu

SEQ ID NO: 9100 - RNA, 20 nt, Artificial Sequence
  HTT spacer sequence CTCN PAM
gagagccccugccccaagua

SEQ ID NO: 9101 - RNA, 20 nt, Artificial Sequence
  HTT spacer sequence CTCN PAM
agaaaaugggaagguugauc

SEQ ID NO: 9102 - RNA, 20 nt, Artificial Sequence
  HTT spacer sequence CTCN PAM
uggucacauccucaagaaaa

SEQ ID NO: 9103 - RNA, 20 nt, Artificial Sequence
  HTT spacer sequence CTCN PAM
ggggcaggaaguugcugggg

SEQ ID NO: 9104 - RNA, 20 nt, Artificial Sequence
  HTT spacer sequence CTCN PAM
aucuucuuccuuccccagca

SEQ ID NO: 9105 - RNA, 20 nt, Artificial Sequence
  HTT spacer sequence CTCN PAM
gcagaggaucuagcgggccu

SEQ ID NO: 9106 - RNA, 20 nt, Artificial Sequence
  HTT spacer sequence CTCN PAM
gcagagguggggguuggggg

SEQ ID NO: 9107 - RNA, 20 nt, Artificial Sequence
  HTT spacer sequence CTCN PAM
ggacaccagcccuggaauag

SEQ ID NO: 9108 - RNA, 20 nt, Artificial Sequence
  HTT spacer sequence CTCN PAM
aagaccuacccagagccacc

SEQ ID NO: 9109 - RNA, 20 nt, Artificial Sequence
  HTT spacer sequence CTCN PAM
ggguaggucuucgagggggc

SEQ ID NO: 9110 - RNA, 20 nt, Artificial Sequence
  HTT spacer sequence CTCN PAM
cggauccccccgggggggcc

SEQ ID NO: 9111 - RNA, 20 nt, Artificial Sequence
  HTT spacer sequence CTCN PAM
uugagggggagcaggaggag

SEQ ID NO: 9112 - RNA, 20 nt, Artificial Sequence
  HTT spacer sequence CTCN PAM
aggaggcccccccgggggga

SEQ ID NO: 9113 - RNA, 20 nt, Artificial Sequence
  HTT spacer sequence CTCN PAM
cccucaaggaggcccccccg

SEQ ID NO: 9114 - RNA, 20 nt, Artificial Sequence
  HTT spacer sequence CTCN PAM
ugcucccccucaaggaggcc

SEQ ID NO: 9115 - RNA, 20 nt, Artificial Sequence
  HTT spacer sequence CTCN PAM
uccugcucccccucaaggag

SEQ ID NO: 9116 - RNA, 20 nt, Artificial Sequence
  HTT spacer sequence CTCN PAM
gccuggccccuccuccugcu

SEQ ID NO: 9117 - RNA, 20 nt, Artificial Sequence
  HTT spacer sequence CTCN PAM
ggcugugugaaagacacccu

SEQ ID NO: 9118 - RNA, 20 nt, Artificial Sequence
  HTT spacer sequence CTCN PAM
cuuuucaaaaccaggguguc

SEQ ID NO: 9119 - RNA, 20 nt, Artificial Sequence
  HTT spacer sequence CTCN PAM
cccuuuucaaaaccagggug

SEQ ID NO: 9120 - RNA, 20 nt, Artificial Sequence
  HTT spacer sequence CTCN PAM
agccccucucccuuuucaaa

SEQ ID NO: 9121 - RNA, 20 nt, Artificial Sequence
  HTT spacer sequence CTCN PAM
cuagccccucucccuuuuca

SEQ ID NO: 9122 - RNA, 20 nt, Artificial Sequence
  HTT spacer sequence CTCN PAM
ggccccaccucucuagcccc

SEQ ID NO: 9123 - RNA, 20 nt, Artificial Sequence
  HTT spacer sequence CTCN PAM
ggggucuggagaccacugcc

SEQ ID NO: 9124 - RNA, 20 nt, Artificial Sequence
  HTT spacer sequence CTCN PAM
agaccccagaguaagcuuga

SEQ ID NO: 9125 - RNA, 20 nt, Artificial Sequence
  HTT spacer sequence CTCN PAM
aagcaguggccacaagaaga

SEQ ID NO: 9126 - RNA, 20 nt, Artificial Sequence
  HTT spacer sequence CTCN PAM
uggucuucuuguggccacug

SEQ ID NO: 9127 - RNA, 20 nt, Artificial Sequence
  HTT spacer sequence CTCN PAM
ucauggucuucuuguggcca

SEQ ID NO: 9128 - RNA, 20 nt, Artificial Sequence
  HTT spacer sequence CTCN PAM
ggcggggucuggggaaaggg

SEQ ID NO: 9129 - RNA, 20 nt, Artificial Sequence
  HTT spacer sequence CTCN PAM
acgaacccacuucugucugu

SEQ ID NO: 9130 - RNA, 20 nt, Artificial Sequence
  HTT spacer sequence CTCN PAM
cacccagccuucugcagccu

SEQ ID NO: 9131 - RNA, 20 nt, Artificial Sequence
  HTT spacer sequence CTCN PAM
acucccacccagccuucugc

SEQ ID NO: 9132 - RNA, 20 nt, Artificial Sequence
  HTT spacer sequence CTCN PAM
uccacucccacccagccuuc

SEQ ID NO: 9133 - RNA, 20 nt, Artificial Sequence
  HTT spacer sequence CTCN PAM
ccuuucauccccuguagccc

SEQ ID NO: 9134 - RNA, 20 nt, Artificial Sequence
  HTT spacer sequence CTCN PAM
cuccccuuucauccccugua

SEQ ID NO: 9135 - RNA, 20 nt, Artificial Sequence
  HTT spacer sequence CTCN PAM
gcagucugcugcucccuccc

SEQ ID NO: 9136 - RNA, 20 nt, Artificial Sequence
  HTT spacer sequence CTCN PAM
gucucccuccuccuuggcug

SEQ ID NO: 9137 - RNA, 20 nt, Artificial Sequence
  HTT spacer sequence CTCN PAM
cuccuccuuggcuggcuuuu

SEQ ID NO: 9138 - RNA, 20 nt, Artificial Sequence
  HTT spacer sequence CTCN PAM
uccuuggcuggcuuuucugg

SEQ ID NO: 9139 - RNA, 20 nt, Artificial Sequence
  HTT spacer sequence CTCN PAM
uuggcuggcuuuucuggcag

SEQ ID NO: 9140 - RNA, 20 nt, Artificial Sequence
  HTT spacer sequence CTCN PAM
ggaccaugccacugucugcc

SEQ ID NO: 9141 - RNA, 20 nt, Artificial Sequence
  HTT spacer sequence CTCN PAM
cuggggagggaaagggcauc

SEQ ID NO: 9142 - RNA, 20 nt, Artificial Sequence
  HTT spacer sequence CTCN PAM
ccagggaggcagcucuggac

SEQ ID NO: 9143 - RNA, 20 nt, Artificial Sequence
  HTT spacer sequence CTCN PAM
ugaggcuguguccccagagu

SEQ ID NO: 9144 - RNA, 20 nt, Artificial Sequence
  HTT spacer sequence CTCN PAM
ggagugacuuggggaugccc

SEQ ID NO: 9145 - RNA, 20 nt, Artificial Sequence
  HTT spacer sequence CTCN PAM
ggggacacagccucaggagu

SEQ ID NO: 9146 - RNA, 20 nt, Artificial Sequence
  HTT spacer sequence CTCN PAM
cugucugaugcagccugccc

SEQ ID NO: 9147 - RNA, 20 nt, Artificial Sequence
  HTT spacer sequence CTCN PAM
ggcaggggcaggcugcauca

SEQ ID NO: 9148 - RNA, 20 nt, Artificial Sequence
  HTT spacer sequence CTCN PAM
ggcagcucaggcaggggcag

SEQ ID NO: 9149 - RNA, 20 nt, Artificial Sequence
  HTT spacer sequence CTCN PAM
uggcugggaagcagccacgg

SEQ ID NO: 9150 - RNA, 20 nt, Artificial Sequence
  HTT spacer sequence CTCN PAM
uccuggcugggaagcagcca

SEQ ID NO: 9151 - RNA, 20 nt, Artificial Sequence
  HTT spacer sequence CTCN PAM
agagucuuacugccacccga

SEQ ID NO: 9152 - RNA, 20 nt, Artificial Sequence
  HTT spacer sequence CTCN PAM
ggagucagcagggccuguaa

SEQ ID NO: 9153 - RNA, 20 nt, Artificial Sequence
  HTT spacer sequence CTCN PAM
gguggcaguaagacucugga

SEQ ID NO: 9154 - RNA, 20 nt, Artificial Sequence
  HTT spacer sequence CTCN PAM
acguacugcucggguggcag

SEQ ID NO: 9155 - RNA, 20 nt, Artificial Sequence
  HTT spacer sequence CTCN PAM
ggggaggcugucucgggcuc

SEQ ID NO: 9156 - RNA, 20 nt, Artificial Sequence
  HTT spacer sequence CTCN PAM
ccagagcccccaggugaagu

SEQ ID NO: 9157 - RNA, 20 nt, Artificial Sequence
  HTT spacer sequence CTCN PAM
ggcucccgugccaggggugg

SEQ ID NO: 9158 - RNA, 20 nt, Artificial Sequence
  HTT spacer sequence CTCN PAM
cgugccaggggugggugcag

SEQ ID NO: 9159 - RNA, 20 nt, Artificial Sequence
  HTT spacer sequence CTCN PAM
cugcacccaccccuggcacg

SEQ ID NO: 9160 - RNA, 20 nt, Artificial Sequence
  HTT spacer sequence CTCN PAM
ugccugcccagccucccugc

SEQ ID NO: 9161 - RNA, 20 nt, Artificial Sequence
  HTT spacer sequence CTCN PAM
ccugccugcccagccucccu

SEQ ID NO: 9162 - RNA, 20 nt, Artificial Sequence
  HTT spacer sequence CTCN PAM
ggccucggcucccacggguc

SEQ ID NO: 9163 - RNA, 20 nt, Artificial Sequence
  HTT spacer sequence CTCN PAM
gcucccacgggucuggggcu

SEQ ID NO: 9164 - RNA, 20 nt, Artificial Sequence
  HTT spacer sequence CTCN PAM
cacgggucuggggcuguggu

SEQ ID NO: 9165 - RNA, 20 nt, Artificial Sequence
  HTT spacer sequence CTCN PAM
aguuaggguccccaaccacc

SEQ ID NO: 9166 - RNA, 20 nt, Artificial Sequence
  HTT spacer sequence CTCN PAM
gaggaaggaccuggccugga

SEQ ID NO: 9167 - RNA, 20 nt, Artificial Sequence
  HTT spacer sequence CTCN PAM
gaggggugaauggcucuagu

SEQ ID NO: 9168 - RNA, 20 nt, Artificial Sequence
  HTT spacer sequence CTCN PAM
aggccagguccuuccucaga

SEQ ID NO: 9169 - RNA, 20 nt, Artificial Sequence
  HTT spacer sequence CTCN PAM
cuggggauggcgcuccaggc

SEQ ID NO: 9170 - RNA, 20 nt, Artificial Sequence
  HTT spacer sequence CTCN PAM
cgccuggccuucugcccccg

SEQ ID NO: 9171 - RNA, 20 nt, Artificial Sequence
  HTT spacer sequence CTCN PAM
agccguuccccaccugcaaa

SEQ ID NO: 9172 - RNA, 20 nt, Artificial Sequence
  HTT spacer sequence CTCN PAM
uggaacagccugagaggugu

SEQ ID NO: 9173 - RNA, 20 nt, Artificial Sequence
  HTT spacer sequence CTCN PAM
ggcuguuccacgaguuccuc

SEQ ID NO: 9174 - RNA, 20 nt, Artificial Sequence
  HTT spacer sequence CTCN PAM
caggcuguuccacgaguucc

SEQ ID NO: 9175 - RNA, 20 nt, Artificial Sequence
  HTT spacer sequence CTCN PAM
ccggacaccucucaggcugu

SEQ ID NO: 9176 - RNA, 20 nt, Artificial Sequence
  HTT spacer sequence CTCN PAM
aggccacccaugcccuaccu

SEQ ID NO: 9177 - RNA, 20 nt, Artificial Sequence
  HTT spacer sequence CTCN PAM
gggcucaaggccacccaugc

SEQ ID NO: 9178 - RNA, 20 nt, Artificial Sequence
  HTT spacer sequence CTCN PAM
gccucagggcucaaggccac

SEQ ID NO: 9179 - RNA, 20 nt, Artificial Sequence
  HTT spacer sequence CTCN PAM
gcucagccucagggcucaag

SEQ ID NO: 9180 - RNA, 20 nt, Artificial Sequence
  HTT spacer sequence CTCN PAM
aagacagcuccgcucagccu

SEQ ID NO: 9181 - RNA, 20 nt, Artificial Sequence
  HTT spacer sequence CTCN PAM
caaagacagcuccgcucagc

SEQ ID NO: 9182 - RNA, 20 nt, Artificial Sequence
  HTT spacer sequence CTCN PAM
gcugaggcugcagcagaaag

SEQ ID NO: 9183 - RNA, 20 nt, Artificial Sequence
  HTT spacer sequence CTCN PAM
gcagagguggcucucaaaga

SEQ ID NO: 9184 - RNA, 20 nt, Artificial Sequence
  HTT spacer sequence CTCN PAM
gagggaggaaggagcugggc

SEQ ID NO: 9185 - RNA, 20 nt, Artificial Sequence
  HTT spacer sequence CTCN PAM
gagccagccugucacagccu

SEQ ID NO: 9186 - RNA, 20 nt, Artificial Sequence
  HTT spacer sequence CTCN PAM
cucggagccagccugucaca

SEQ ID NO: 9187 - RNA, 20 nt, Artificial Sequence
  HTT spacer sequence CTCN PAM
uuccucccucggagccagcc

SEQ ID NO: 9188 - RNA, 20 nt, Artificial Sequence
  HTT spacer sequence CTCN PAM
gcccccaaccaugcaacugu

SEQ ID NO: 9189 - RNA, 20 nt, Artificial Sequence
  HTT spacer sequence CTCN PAM
ccgcccccaaccaugcaacu

SEQ ID NO: 9190 - RNA, 20 nt, Artificial Sequence
  HTT spacer sequence CTCN PAM
ucuccgcccccaaccaugca

SEQ ID NO: 9191 - RNA, 20 nt, Artificial Sequence
  HTT spacer sequence CTCN PAM
uccucuccgcccccaaccau

SEQ ID NO: 9192 - RNA, 20 nt, Artificial Sequence
  HTT spacer sequence CTCN PAM
accccugccugucuugaccg

SEQ ID NO: 9193 - RNA, 20 nt, Artificial Sequence
  HTT spacer sequence CTCN PAM
gcggucaagacaggcagggg

SEQ ID NO: 9194 - RNA, 20 nt, Artificial Sequence
  HTT spacer sequence CTCN PAM
gcaccccugcagucugggcc

SEQ ID NO: 9195 - RNA, 20 nt, Artificial Sequence
  HTT spacer sequence CTCN PAM
cugcaccccugcagucuggg

SEQ ID NO: 9196 - RNA, 20 nt, Artificial Sequence
  HTT spacer sequence CTCN PAM
gccgcagccucucugcaccc

SEQ ID NO: 9197 - RNA, 20 nt, Artificial Sequence
  HTT spacer sequence CTCN PAM
uuucccggcaggccgggccc

SEQ ID NO: 9198 - RNA, 20 nt, Artificial Sequence
  HTT spacer sequence CTCN PAM
cugggccucucugaacagug

SEQ ID NO: 9199 - RNA, 20 nt, Artificial Sequence
  HTT spacer sequence CTCN PAM
cugaacaguggagcguugug

SEQ ID NO: 9200 - RNA, 20 nt, Artificial Sequence
  HTT spacer sequence CTCN PAM
gaacaguggagcguugugag

SEQ ID NO: 9201 - RNA, 20 nt, Artificial Sequence
  HTT spacer sequence CTCN PAM
acuguucagagaggcccagu

SEQ ID NO: 9202 - RNA, 20 nt, Artificial Sequence
  HTT spacer sequence CTCN PAM
caacgcuccacuguucagag

SEQ ID NO: 9203 - RNA, 20 nt, Artificial Sequence
  HTT spacer sequence CTCN PAM
gggccacgcugagggugagg

SEQ ID NO: 9204 - RNA, 20 nt, Artificial Sequence
  HTT spacer sequence CTCN PAM
gcguggcccagagggggccu

SEQ ID NO: 9205 - RNA, 20 nt, Artificial Sequence
  HTT spacer sequence CTCN PAM
cccucagcguggcccagagg

SEQ ID NO: 9206 - RNA, 20 nt, Artificial Sequence
  HTT spacer sequence CTCN PAM
uguccucacccucagcgugg

SEQ ID NO: 9207 - RNA, 20 nt, Artificial Sequence
  HTT spacer sequence CTCN PAM
ugcccgcuggcuccuguccu

SEQ ID NO: 9208 - RNA, 20 nt, Artificial Sequence
  HTT spacer sequence CTCN PAM
gggcccgggcaggggacagg

SEQ ID NO: 9209 - RNA, 20 nt, Artificial Sequence
  HTT spacer sequence CTCN PAM
gggguucccaggcugaggag

SEQ ID NO: 9210 - RNA, 20 nt, Artificial Sequence
  HTT spacer sequence CTCN PAM
gccugggaaccccagagccu

SEQ ID NO: 9211 - RNA, 20 nt, Artificial Sequence
  HTT spacer sequence CTCN PAM
ucagccugggaaccccagag

SEQ ID NO: 9212 - RNA, 20 nt, Artificial Sequence
  HTT spacer sequence CTCN PAM
cgguuccccaacccgggguc

SEQ ID NO: 9213 - RNA, 20 nt, Artificial Sequence
  HTT spacer sequence CTCN PAM
guuccccaacccggggucug

SEQ ID NO: 9214 - RNA, 20 nt, Artificial Sequence
  HTT spacer sequence CTCN PAM
uucuuccuucuuuuugccuc

SEQ ID NO: 9215 - RNA, 20 nt, Artificial Sequence
  HTT spacer sequence CTCN PAM
cugucagcaccucuuccugu

SEQ ID NO: 9216 - RNA, 20 nt, Artificial Sequence
  HTT spacer sequence CTCN PAM
gucagcaccucuuccuguug

SEQ ID NO: 9217 - RNA, 20 nt, Artificial Sequence
  HTT spacer sequence CTCN PAM
uccuguugccucccucuugc

SEQ ID NO: 9218 - RNA, 20 nt, Artificial Sequence
  HTT spacer sequence CTCN PAM
cucuugcuccugggccugcc

SEQ ID NO: 9219 - RNA, 20 nt, Artificial Sequence
  HTT spacer sequence CTCN PAM
ugcuccugggccugccugca

SEQ ID NO: 9220 - RNA, 20 nt, Artificial Sequence
  HTT spacer sequence CTCN PAM
ugggccugccugcaucuccc

SEQ ID NO: 9221 - RNA, 20 nt, Artificial Sequence
  HTT spacer sequence CTCN PAM
cuuccccuguccggccagag

SEQ ID NO: 9222 - RNA, 20 nt, Artificial Sequence
  HTT spacer sequence CTCN PAM
ggccggacaggggaagggag

SEQ ID NO: 9223 - RNA, 20 nt, Artificial Sequence
  HTT spacer sequence CTCN PAM
caggccggggucucuggccg

SEQ ID NO: 9224 - RNA, 20 nt, Artificial Sequence
  HTT spacer sequence CTCN PAM
cccaccccgaugccugcugc

SEQ ID NO: 9225 - RNA, 20 nt, Artificial Sequence
  HTT spacer sequence CTCN PAM
caccccgaugccugcugcag

SEQ ID NO: 9226 - RNA, 20 nt, Artificial Sequence
  HTT spacer sequence CTCN PAM
gcuggggcugcagcaggcau

SEQ ID NO: 9227 - RNA, 20 nt, Artificial Sequence
  HTT spacer sequence CTCN PAM
aggcgacaggccagccccuc

SEQ ID NO: 9228 - RNA, 20 nt, Artificial Sequence
  HTT spacer sequence CTCN PAM
caggccagcacaggugggcu

SEQ ID NO: 9229 - RNA, 20 nt, Artificial Sequence
  HTT spacer sequence CTCN PAM
uggggccacucacaggccag

SEQ ID NO: 9230 - RNA, 20 nt, Artificial Sequence
  HTT spacer sequence CTCN PAM
ugaggccaaccuaaaauuua

SEQ ID NO: 9231 - RNA, 20 nt, Artificial Sequence
  HTT spacer sequence CTCN PAM
ggagguuuccugucuaggcu

SEQ ID NO: 9232 - RNA, 20 nt, Artificial Sequence
  HTT spacer sequence CTCN PAM
ggguuuauuauucuauuccc

SEQ ID NO: 9233 - RNA, 20 nt, Artificial Sequence
  HTT spacer sequence CTCN PAM
cuggguuuauuauucuauuc

SEQ ID NO: 9234 - RNA, 20 nt, Artificial Sequence
  HTT spacer sequence CTCN PAM
ugccuguaaucccagcacuu

SEQ ID NO: 9235 - RNA, 20 nt, Artificial Sequence
  HTT spacer sequence CTCN PAM
caaagugcugggauuacagg

SEQ ID NO: 9236 - RNA, 20 nt, Artificial Sequence
  HTT spacer sequence CTCN PAM
acuaauccacccgccuuggc

SEQ ID NO: 9237 - RNA, 20 nt, Artificial Sequence
  HTT spacer sequence CTCN PAM
ugaccucaacuaauccaccc

SEQ ID NO: 9238 - RNA, 20 nt, Artificial Sequence
  HTT spacer sequence CTCN PAM
acuaaaaauacaaaaauaag

SEQ ID NO: 9239 - RNA, 20 nt, Artificial Sequence
  HTT spacer sequence CTCN PAM
ggaggcugagacgugagaau

SEQ ID NO: 9240 - RNA, 20 nt, Artificial Sequence
  HTT spacer sequence CTCN PAM
cgaguagcugggauuacaag

SEQ ID NO: 9241 - RNA, 20 nt, Artificial Sequence
  HTT spacer sequence CTCN PAM
gccucccgaguagcugggau

SEQ ID NO: 9242 - RNA, 20 nt, Artificial Sequence
  HTT spacer sequence CTCN PAM
cgucucagccucccgaguag

SEQ ID NO: 9243 - RNA, 20 nt, Artificial Sequence
  HTT spacer sequence CTCN PAM
caguuucaagcaauucucac

SEQ ID NO: 9244 - RNA, 20 nt, Artificial Sequence
  HTT spacer sequence CTCN PAM
gccucccaguuucaagcaau

SEQ ID NO: 9245 - RNA, 20 nt, Artificial Sequence
  HTT spacer sequence CTCN PAM
aaccucugccucccaguuuc

SEQ ID NO: 9246 - RNA, 20 nt, Artificial Sequence
  HTT spacer sequence CTCN PAM
cuccaaccucugccucccag

SEQ ID NO: 9247 - RNA, 20 nt, Artificial Sequence
  HTT spacer sequence CTCN PAM
agccugggugacagagagac

SEQ ID NO: 9248 - RNA, 20 nt, Artificial Sequence
  HTT spacer sequence CTCN PAM
gucacccaggcuggagugca

SEQ ID NO: 9249 - RNA, 20 nt, Artificial Sequence
  HTT spacer sequence CTCN PAM
cugucacccaggcuggagug

SEQ ID NO: 9250 - RNA, 20 nt, Artificial Sequence
  HTT spacer sequence CTCN PAM
aaaaaaaaggggccgggcgc

SEQ ID NO: 9251 - RNA, 20 nt, Artificial Sequence
  HTT spacer sequence CTCN PAM
cacuuguaaucccagcacuu

SEQ ID NO: 9252 - RNA, 20 nt, Artificial Sequence
  HTT spacer sequence CTCN PAM
caaagugcugggauuacaag

SEQ ID NO: 9253 - RNA, 20 nt, Artificial Sequence
  HTT spacer sequence CTCN PAM
gccucccaaagugcugggau

SEQ ID NO: 9254 - RNA, 20 nt, Artificial Sequence
  HTT spacer sequence CTCN PAM
ggugaucugccggccucggc

SEQ ID NO: 9255 - RNA, 20 nt, Artificial Sequence
  HTT spacer sequence CTCN PAM
ugaccucaggugaucugccg

SEQ ID NO: 9256 - RNA, 20 nt, Artificial Sequence
  HTT spacer sequence CTCN PAM
acuaaaaauacaaauuagcu

SEQ ID NO: 9257 - RNA, 20 nt, Artificial Sequence
  HTT spacer sequence CTCN PAM
uauagcugggauuacagguc

SEQ ID NO: 9258 - RNA, 20 nt, Artificial Sequence
  HTT spacer sequence CTCN PAM
gccuccuauagcugggauua

SEQ ID NO: 9259 - RNA, 20 nt, Artificial Sequence
  HTT spacer sequence CTCN PAM
ugccucagccuccuauagcu

SEQ ID NO: 9260 - RNA, 20 nt, Artificial Sequence
  HTT spacer sequence CTCN PAM
uugguucaagcacuucuccu

SEQ ID NO: 9261 - RNA, 20 nt, Artificial Sequence
  HTT spacer sequence CTCN PAM
gucuccuugguucaagcacu

SEQ ID NO: 9262 - RNA, 20 nt, Artificial Sequence
  HTT spacer sequence CTCN PAM
uugcaaccucugucuccuug

SEQ ID NO: 9263 - RNA, 20 nt, Artificial Sequence
  HTT spacer sequence CTCN PAM
cuuuggugcccaggcuagaa

SEQ ID NO: 9264 - RNA, 20 nt, Artificial Sequence
  HTT spacer sequence CTCN PAM
gucucaaaaaaauauaugug

SEQ ID NO: 9265 - RNA, 20 nt, Artificial Sequence
  HTT spacer sequence CTCN PAM
aaaaaauauaugugugugug

SEQ ID NO: 9266 - RNA, 20 nt, Artificial Sequence
  HTT spacer sequence CTCN PAM
agugcugaaaugaguggaca

SEQ ID NO: 9267 - RNA, 20 nt, Artificial Sequence
  HTT spacer sequence CTCN PAM
uuucagcacuugaggguuag

SEQ ID NO: 9268 - RNA, 20 nt, Artificial Sequence
  HTT spacer sequence CTCN PAM
guccacucauuucagcacuu

SEQ ID NO: 9269 - RNA, 20 nt, Artificial Sequence
  HTT spacer sequence CTCN PAM
gccuuggugggucccagccu

SEQ ID NO: 9270 - RNA, 20 nt, Artificial Sequence
  HTT spacer sequence CTCN PAM
cuuacccaggaacccuguca

SEQ ID NO: 9271 - RNA, 20 nt, Artificial Sequence
  HTT spacer sequence CTCN PAM
guggugcacagaggagccau

SEQ ID NO: 9272 - RNA, 20 nt, Artificial Sequence
  HTT spacer sequence CTCN PAM
gugcaccacugaggguccuu

SEQ ID NO: 9273 - RNA, 20 nt, Artificial Sequence
  HTT spacer sequence CTCN PAM
ucugugcaccacugaggguc

SEQ ID NO: 9274 - RNA, 20 nt, Artificial Sequence
  HTT spacer sequence CTCN PAM
ugggucagggcaaaggacgc

SEQ ID NO: 9275 - RNA, 20 nt, Artificial Sequence
  HTT spacer sequence CTCN PAM
gcccaggcacuuuacggcgu

SEQ ID NO: 9276 - RNA, 20 nt, Artificial Sequence
  HTT spacer sequence CTCN PAM
ggcucagcccaggcacuuua

SEQ ID NO: 9277 - RNA, 20 nt, Artificial Sequence
  HTT spacer sequence CTCN PAM
ugcacacaccucgggcucag

SEQ ID NO: 9278 - RNA, 20 nt, Artificial Sequence
  HTT spacer sequence CTCN PAM
cuuggaccgcacaaaaccau

SEQ ID NO: 9279 - RNA, 20 nt, Artificial Sequence
  HTT spacer sequence CTCN PAM
ucaccgugguacuuuucgua

SEQ ID NO: 9280 - RNA, 20 nt, Artificial Sequence
  HTT spacer sequence CTCN PAM
caggccacuuacugcuauac

SEQ ID NO: 9281 - RNA, 20 nt, Artificial Sequence
  HTT spacer sequence CTCN PAM
ggccacuuacugcuauacgg

SEQ ID NO: 9282 - RNA, 20 nt, Artificial Sequence
  HTT spacer sequence CTCN PAM
ugaccucugccguuggcucu

SEQ ID NO: 9283 - RNA, 20 nt, Artificial Sequence
  HTT spacer sequence CTCN PAM
gccguuggcucuggguggga

SEQ ID NO: 9284 - RNA, 20 nt, Artificial Sequence
  HTT spacer sequence CTCN PAM
gggugggagcaguggggcug

SEQ ID NO: 9285 - RNA, 20 nt, Artificial Sequence
  HTT spacer sequence CTCN PAM
cacccagagccaacggcaga

SEQ ID NO: 9286 - RNA, 20 nt, Artificial Sequence
  HTT spacer sequence CTCN PAM
gacuggcgccccuacugcau

SEQ ID NO: 9287 - RNA, 20 nt, Artificial Sequence
  HTT spacer sequence CTCN PAM
ugcugggguggcaugcagua

SEQ ID NO: 9288 - RNA, 20 nt, Artificial Sequence
  HTT spacer sequence CTCN PAM
gcaucuccacucuguucccu

SEQ ID NO: 9289 - RNA, 20 nt, Artificial Sequence
  HTT spacer sequence CTCN PAM
acucuguucccuuguuaucu

SEQ ID NO: 9290 - RNA, 20 nt, Artificial Sequence
  HTT spacer sequence CTCN PAM
guucccuuguuaucucgccc

SEQ ID NO: 9291 - RNA, 20 nt, Artificial Sequence
  HTT spacer sequence CTCN PAM
cccuggugcugggauccggg

SEQ ID NO: 9292 - RNA, 20 nt, Artificial Sequence
  HTT spacer sequence CTCN PAM
gccauaggcacuuggcccag

SEQ ID NO: 9293 - RNA, 20 nt, Artificial Sequence
  HTT spacer sequence CTCN PAM
caagcacucugccauaggca

SEQ ID NO: 9294 - RNA, 20 nt, Artificial Sequence
  HTT spacer sequence CTCN PAM
gaguccuguugcuaauaagc

SEQ ID NO: 9295 - RNA, 20 nt, Artificial Sequence
  HTT spacer sequence CTCN PAM
gaggaccaaaccagacagcu

SEQ ID NO: 9296 - RNA, 20 nt, Artificial Sequence
  HTT spacer sequence CTCN PAM
acgcuuauuagcaacaggac

SEQ ID NO: 9297 - RNA, 20 nt, Artificial Sequence
  HTT spacer sequence CTCN PAM
cccuccacgcuuauuagcaa

SEQ ID NO: 9298 - RNA, 20 nt, Artificial Sequence
  HTT spacer sequence CTCN PAM
guccucccccuccacgcuua

SEQ ID NO: 9299 - RNA, 20 nt, Artificial Sequence
  HTT spacer sequence CTCN PAM
gggagugaagugacuugccc

SEQ ID NO: 9300 - RNA, 20 nt, Artificial Sequence
  HTT spacer sequence CTCN PAM
cugagccuugcuccguccuc

SEQ ID NO: 9301 - RNA, 20 nt, Artificial Sequence
  HTT spacer sequence CTCN PAM
agcuuaagggaccaaggcug

SEQ ID NO: 9302 - RNA, 20 nt, Artificial Sequence
  HTT spacer sequence CTCN PAM
agucccagccuuggucccuu

SEQ ID NO: 9303 - RNA, 20 nt, Artificial Sequence
  HTT spacer sequence CTCN PAM
ugggcaccauucacgccugg

SEQ ID NO: 9304 - RNA, 20 nt, Artificial Sequence
  HTT spacer sequence CTCN PAM
ucccagggaaggucugagau

SEQ ID NO: 9305 - RNA, 20 nt, Artificial Sequence
  HTT spacer sequence CTCN PAM
gaccuucccugggaugagcu

SEQ ID NO: 9306 - RNA, 20 nt, Artificial Sequence
  HTT spacer sequence CTCN PAM
ccugggcauguggccuggac

SEQ ID NO: 9307 - RNA, 20 nt, Artificial Sequence
  HTT spacer sequence CTCN PAM
gucucucaugucagaaggug

SEQ ID NO: 9308 - RNA, 20 nt, Artificial Sequence
  HTT spacer sequence CTCN PAM
caugucagaaggugggugcc

SEQ ID NO: 9309 - RNA, 20 nt, Artificial Sequence
  HTT spacer sequence CTCN PAM
ugucagaaggugggugccuu

SEQ ID NO: 9310 - RNA, 20 nt, Artificial Sequence
  HTT spacer sequence CTCN PAM
uaccugcaaccccagggccu

SEQ ID NO: 9311 - RNA, 20 nt, Artificial Sequence
  HTT spacer sequence CTCN PAM
gucugacucuauguaauccc

SEQ ID NO: 9312 - RNA, 20 nt, Artificial Sequence
  HTT spacer sequence CTCN PAM
auguaaucccaugcuuggcu

SEQ ID NO: 9313 - RNA, 20 nt, Artificial Sequence
  HTT spacer sequence CTCN PAM
uguggaagauugcucccagg

SEQ ID NO: 9314 - RNA, 20 nt, Artificial Sequence
  HTT spacer sequence CTCN PAM
caggacgcuggcggaugugu

SEQ ID NO: 9315 - RNA, 20 nt, Artificial Sequence
  HTT spacer sequence CTCN PAM
cauccuugugacaucuguuc

SEQ ID NO: 9316 - RNA, 20 nt, Artificial Sequence
  HTT spacer sequence CTCN PAM
gacucacauccuugugacau

SEQ ID NO: 9317 - RNA, 20 nt, Artificial Sequence
  HTT spacer sequence CTCN PAM
cuaacagauugggagcccag

SEQ ID NO: 9318 - RNA, 20 nt, Artificial Sequence
  HTT spacer sequence CTCN PAM
caaucuguuagggaggcagc

SEQ ID NO: 9319 - RNA, 20 nt, Artificial Sequence
  HTT spacer sequence CTCN PAM
gucugggcucccaaucuguu

SEQ ID NO: 9320 - RNA, 20 nt, Artificial Sequence
  HTT spacer sequence CTCN PAM
ggcacagcaccuacaggcaa

SEQ ID NO: 9321 - RNA, 20 nt, Artificial Sequence
  HTT spacer sequence CTCN PAM
ccugugcccgauaccaugag

SEQ ID NO: 9322 - RNA, 20 nt, Artificial Sequence
  HTT spacer sequence CTCN PAM
ugguaucgggcacaggggag

SEQ ID NO: 9323 - RNA, 20 nt, Artificial Sequence
  HTT spacer sequence CTCN PAM
gccugaagucucaugguauc

SEQ ID NO: 9324 - RNA, 20 nt, Artificial Sequence
  HTT spacer sequence CTCN PAM
acucggccugaagucucaug

SEQ ID NO: 9325 - RNA, 20 nt, Artificial Sequence
  HTT spacer sequence CTCN PAM
ugcacagugucacuccacuc

SEQ ID NO: 9326 - RNA, 20 nt, Artificial Sequence
  HTT spacer sequence CTCN PAM
cuugcacagugucacuccac

SEQ ID NO: 9327 - RNA, 20 nt, Artificial Sequence
  HTT spacer sequence CTCN PAM
ccaugacuccagccgagccc

SEQ ID NO: 9328 - RNA, 20 nt, Artificial Sequence
  HTT spacer sequence CTCN PAM
agccgagcccacugaauagg

SEQ ID NO: 9329 - RNA, 20 nt, Artificial Sequence
  HTT spacer sequence CTCN PAM
gcuggagucauggugaggcu

SEQ ID NO: 9330 - RNA, 20 nt, Artificial Sequence
  HTT spacer sequence CTCN PAM
guuuccugcucucgguuucc

SEQ ID NO: 9331 - RNA, 20 nt, Artificial Sequence
  HTT spacer sequence CTCN PAM
cgguuuccucagcugccugg

SEQ ID NO: 9332 - RNA, 20 nt, Artificial Sequence
  HTT spacer sequence CTCN PAM
guuuccucagcugccuggug

SEQ ID NO: 9333 - RNA, 20 nt, Artificial Sequence
  HTT spacer sequence CTCN PAM
gcugccugguggguuccacu

SEQ ID NO: 9334 - RNA, 20 nt, Artificial Sequence
  HTT spacer sequence CTCN PAM
cugggggucuccuucugucc

SEQ ID NO: 9335 - RNA, 20 nt, Artificial Sequence
  HTT spacer sequence CTCN PAM
gggggucuccuucugucccg

SEQ ID NO: 9336 - RNA, 20 nt, Artificial Sequence
  HTT spacer sequence CTCN PAM
uucugucccggcaccgccug

SEQ ID NO: 9337 - RNA, 20 nt, Artificial Sequence
  HTT spacer sequence CTCN PAM
uguuccucauccgagucucu

SEQ ID NO: 9338 - RNA, 20 nt, Artificial Sequence
  HTT spacer sequence CTCN PAM
uccgagucucugcggaugcg

SEQ ID NO: 9339 - RNA, 20 nt, Artificial Sequence
  HTT spacer sequence CTCN PAM
gaugaggaacaggagcaggc

SEQ ID NO: 9340 - RNA, 20 nt, Artificial Sequence
  HTT spacer sequence CTCN PAM
gcggaugcguggaccccgcc

SEQ ID NO: 9341 - RNA, 20 nt, Artificial Sequence
  HTT spacer sequence CTCN PAM
gugcagccucagcacuaagu

SEQ ID NO: 9342 - RNA, 20 nt, Artificial Sequence
  HTT spacer sequence CTCN PAM
gcacuaaguccuggguccag

SEQ ID NO: 9343 - RNA, 20 nt, Artificial Sequence
  HTT spacer sequence CTCN PAM
gggacugccccaguuacucc

SEQ ID NO: 9344 - RNA, 20 nt, Artificial Sequence
  HTT spacer sequence CTCN PAM
uggggaaacugaggacugga

SEQ ID NO: 9345 - RNA, 20 nt, Artificial Sequence
  HTT spacer sequence CTCN PAM
guuuccccaggaguaacugg

SEQ ID NO: 9346 - RNA, 20 nt, Artificial Sequence
  HTT spacer sequence CTCN PAM
aguccucaguuuccccagga

SEQ ID NO: 9347 - RNA, 20 nt, Artificial Sequence
  HTT spacer sequence CTCN PAM
gcuucuuugcccgaguuuuc

SEQ ID NO: 9348 - RNA, 20 nt, Artificial Sequence
  HTT spacer sequence CTCN PAM
ggcaaagaagcagagcucca

SEQ ID NO: 9349 - RNA, 20 nt, Artificial Sequence
  HTT spacer sequence CTCN PAM
agggugagcaccagaccacu

SEQ ID NO: 9350 - RNA, 20 nt, Artificial Sequence
  HTT spacer sequence CTCN PAM
cccuagagaaaacucgggca

SEQ ID NO: 9351 - RNA, 20 nt, Artificial Sequence
  HTT spacer sequence CTCN PAM
uucuucaagggaaccagcag

SEQ ID NO: 9352 - RNA, 20 nt, Artificial Sequence
  HTT spacer sequence CTCN PAM
augcugcugguucccuugaa

SEQ ID NO: 9353 - RNA, 20 nt, Artificial Sequence
  HTT spacer sequence CTCN PAM
caggccacagcccccuuuug

SEQ ID NO: 9354 - RNA, 20 nt, Artificial Sequence
  HTT spacer sequence CTCN PAM
cccaggccacagcccccuuu

SEQ ID NO: 9355 - RNA, 20 nt, Artificial Sequence
  HTT spacer sequence CTCN PAM
ccaggggcucuugggaucag

SEQ ID NO: 9356 - RNA, 20 nt, Artificial Sequence
  HTT spacer sequence CTCN PAM
ugggaucaguuuaaaacaga

SEQ ID NO: 9357 - RNA, 20 nt, Artificial Sequence
  HTT spacer sequence CTCN PAM
uaacuccucaagggugggcu

SEQ ID NO: 9358 - RNA, 20 nt, Artificial Sequence
  HTT spacer sequence CTCN PAM
ucaagggugggcuggagccc

SEQ ID NO: 9359 - RNA, 20 nt, Artificial Sequence
  HTT spacer sequence CTCN PAM
agggugggcuggagccccug

SEQ ID NO: 9360 - RNA, 20 nt, Artificial Sequence
  HTT spacer sequence CTCN PAM
agcccacccuugaggaguua

SEQ ID NO: 9361 - RNA, 20 nt, Artificial Sequence
  HTT spacer sequence CTCN PAM
gcaggacaggaaggccuggg

SEQ ID NO: 9362 - RNA, 20 nt, Artificial Sequence
  HTT spacer sequence CTCN PAM
cuguaccccacauggcgugg

SEQ ID NO: 9363 - RNA, 20 nt, Artificial Sequence
  HTT spacer sequence CTCN PAM
uacccagagcccugcccccu

SEQ ID NO: 9364 - RNA, 20 nt, Artificial Sequence
  HTT spacer sequence CTCN PAM
ggguaggaggccaggggaca

SEQ ID NO: 9365 - RNA, 20 nt, Artificial Sequence
  HTT spacer sequence CTCN PAM
acagaggccagggcccaccc

SEQ ID NO: 9366 - RNA, 20 nt, Artificial Sequence
  HTT spacer sequence CTCN PAM
guggagggggcagggcucug

SEQ ID NO: 9367 - RNA, 20 nt, Artificial Sequence
  HTT spacer sequence CTCN PAM
gaaggaagcccaccaaccuu

SEQ ID NO: 9368 - RNA, 20 nt, Artificial Sequence
  HTT spacer sequence CTCN PAM
cagaaggaagcccaccaacc

SEQ ID NO: 9369 - RNA, 20 nt, Artificial Sequence
  HTT spacer sequence CTCN PAM
ucuccuucuuacccacccca

SEQ ID NO: 9370 - RNA, 20 nt, Artificial Sequence
  HTT spacer sequence CTCN PAM
ccuucuuacccaccccagag

SEQ ID NO: 9371 - RNA, 20 nt, Artificial Sequence
  HTT spacer sequence CTCN PAM
uucuuacccaccccagagcc

SEQ ID NO: 9372 - RNA, 20 nt, Artificial Sequence
  HTT spacer sequence CTCN PAM
gggguggguaagaaggagag

SEQ ID NO: 9373 - RNA, 20 nt, Artificial Sequence
  HTT spacer sequence CTCN PAM
gcaggaaaugccugguaggg

SEQ ID NO: 9374 - RNA, 20 nt, Artificial Sequence
  HTT spacer sequence CTCN PAM
gguuguguuguagggguggg

SEQ ID NO: 9375 - RNA, 20 nt, Artificial Sequence
  HTT spacer sequence CTCN PAM
gggugacacuagccacgcug

SEQ ID NO: 9376 - RNA, 20 nt, Artificial Sequence
  HTT spacer sequence CTCN PAM
cucagccucgagguccuaau

SEQ ID NO: 9377 - RNA, 20 nt, Artificial Sequence
  HTT spacer sequence CTCN PAM
gccucgagguccuaaucggg

SEQ ID NO: 9378 - RNA, 20 nt, Artificial Sequence
  HTT spacer sequence CTCN PAM
agguccuaaucgggagaaca

SEQ ID NO: 9379 - RNA, 20 nt, Artificial Sequence
  HTT spacer sequence CTCN PAM
aggcugagugagcugcaacg

SEQ ID NO: 9380 - RNA, 20 nt, Artificial Sequence
  HTT spacer sequence CTCN PAM
cgauuaggaccucgaggcug

SEQ ID NO: 9381 - RNA, 20 nt, Artificial Sequence
  HTT spacer sequence CTCN PAM
uuuuguucucccgauuagga

SEQ ID NO: 9382 - RNA, 20 nt, Artificial Sequence
  HTT spacer sequence CTCN PAM
aucgccaacugcucguuuug

SEQ ID NO: 9383 - RNA, 20 nt, Artificial Sequence
  HTT spacer sequence CTCN PAM
gugcccgcuccaucgccaac

SEQ ID NO: 9384 - RNA, 20 nt, Artificial Sequence
  HTT spacer sequence CTCN PAM
gaacacaguggacauuuccu

SEQ ID NO: 9385 - RNA, 20 nt, Artificial Sequence
  HTT spacer sequence CTCN PAM
cugccccucccuugguccag

SEQ ID NO: 9386 - RNA, 20 nt, Artificial Sequence
  HTT spacer sequence CTCN PAM
cuugguccagcagccuagcc

SEQ ID NO: 9387 - RNA, 20 nt, Artificial Sequence
  HTT spacer sequence CTCN PAM
uaucacaagaggugacugug

SEQ ID NO: 9388 - RNA, 20 nt, Artificial Sequence
  HTT spacer sequence CTCN PAM
ugugauaggagggcuaggcu

SEQ ID NO: 9389 - RNA, 20 nt, Artificial Sequence
  HTT spacer sequence CTCN PAM
ugggaugcgugggacgccug

SEQ ID NO: 9390 - RNA, 20 nt, Artificial Sequence
  HTT spacer sequence CTCN PAM
cgccaaccagacccuccugg

SEQ ID NO: 9391 - RNA, 20 nt, Artificial Sequence
  HTT spacer sequence CTCN PAM
gcuucugcuuccucuagaug

SEQ ID NO: 9392 - RNA, 20 nt, Artificial Sequence
  HTT spacer sequence CTCN PAM
agaugaggaaggugcccggc

SEQ ID NO: 9393 - RNA, 20 nt, Artificial Sequence
  HTT spacer sequence CTCN PAM
ucuagaggaagcagaagcag

SEQ ID NO: 9394 - RNA, 20 nt, Artificial Sequence
  HTT spacer sequence CTCN PAM
gggcccagggggugugcuua

SEQ ID NO: 9395 - RNA, 20 nt, Artificial Sequence
  HTT spacer sequence CTCN PAM
gugacugcugcugcccuugc

SEQ ID NO: 9396 - RNA, 20 nt, Artificial Sequence
  HTT spacer sequence CTCN PAM
ucgauaggcaagggcagcag

SEQ ID NO: 9397 - RNA, 20 nt, Artificial Sequence
  HTT spacer sequence CTCN PAM
cggccccagcauccucaucg

SEQ ID NO: 9398 - RNA, 20 nt, Artificial Sequence
  HTT spacer sequence CTCN PAM
agggugaccucccggcccca

SEQ ID NO: 9399 - RNA, 20 nt, Artificial Sequence
  HTT spacer sequence CTCN PAM
gcacccaccaagcgcagccu

SEQ ID NO: 9400 - RNA, 20 nt, Artificial Sequence
  HTT spacer sequence CTCN PAM
aggggcucugcacccaccaa

SEQ ID NO: 9401 - RNA, 20 nt, Artificial Sequence
  HTT spacer sequence CTCN PAM
ugcagccaggggucccccga

SEQ ID NO: 9402 - RNA, 20 nt, Artificial Sequence
  HTT spacer sequence CTCN PAM
ggggaccccuggcugcagga

SEQ ID NO: 9403 - RNA, 20 nt, Artificial Sequence
  HTT spacer sequence CTCN PAM
ugugcugaauuacaccaucu

SEQ ID NO: 9404 - RNA, 20 nt, Artificial Sequence
  HTT spacer sequence CTCN PAM
ugggcucaugugcugaauua

SEQ ID NO: 9405 - RNA, 20 nt, Artificial Sequence
  HTT spacer sequence CTCN PAM
guggggccuagcucaugggc

SEQ ID NO: 9406 - RNA, 20 nt, Artificial Sequence
  HTT spacer sequence CTCN PAM
ccguggggccuagcucaugg

SEQ ID NO: 9407 - RNA, 20 nt, Artificial Sequence
  HTT spacer sequence CTCN PAM
uccacaccccagcuggcugg

SEQ ID NO: 9408 - RNA, 20 nt, Artificial Sequence
  HTT spacer sequence CTCN PAM
ugcagcaugaacagaccucg

SEQ ID NO: 9409 - RNA, 20 nt, Artificial Sequence
  HTT spacer sequence CTCN PAM
gcauguccgucccccauguc

SEQ ID NO: 9410 - RNA, 20 nt, Artificial Sequence
  HTT spacer sequence CTCN PAM
ccccacagaacuggugucag

SEQ ID NO: 9411 - RNA, 20 nt, Artificial Sequence
  HTT spacer sequence CTCN PAM
ccacagaacuggugucaggg

SEQ ID NO: 9412 - RNA, 20 nt, Artificial Sequence
  HTT spacer sequence CTCN PAM
ccugacaccaguucuguggg

SEQ ID NO: 9413 - RNA, 20 nt, Artificial Sequence
  HTT spacer sequence CTCN PAM
cugaggagugggggcccugc

SEQ ID NO: 9414 - RNA, 20 nt, Artificial Sequence
  HTT spacer sequence CTCN PAM
gaggagugggggcccugccg

SEQ ID NO: 9415 - RNA, 20 nt, Artificial Sequence
  HTT spacer sequence CTCN PAM
gagaggcagcccccacccgg

SEQ ID NO: 9416 - RNA, 20 nt, Artificial Sequence
  HTT spacer sequence CTCN PAM
ucagagaggcagcccccacc

SEQ ID NO: 9417 - RNA, 20 nt, Artificial Sequence
  HTT spacer sequence CTCN PAM
guccacggcagggcccccac

SEQ ID NO: 9418 - RNA, 20 nt, Artificial Sequence
  HTT spacer sequence CTCN PAM
cacacaggcucaguccacgg

SEQ ID NO: 9419 - RNA, 20 nt, Artificial Sequence
  HTT spacer sequence CTCN PAM
ccugggcuggaccccaaucc

SEQ ID NO: 9420 - RNA, 20 nt, Artificial Sequence
  HTT spacer sequence CTCN PAM
ucuagaccacacuccccugg

SEQ ID NO: 9421 - RNA, 20 nt, Artificial Sequence
  HTT spacer sequence CTCN PAM
gccccgcccuugccccuugg

SEQ ID NO: 9422 - RNA, 20 nt, Artificial Sequence
  HTT spacer sequence CTCN PAM
ucugccccgcccuugccccu

SEQ ID NO: 9423 - RNA, 20 nt, Artificial Sequence
  HTT spacer sequence CTCN PAM
accuccucugccccgcccuu

SEQ ID NO: 9424 - RNA, 20 nt, Artificial Sequence
  HTT spacer sequence CTCN PAM
ccaccuccucugccccgccc

SEQ ID NO: 9425 - RNA, 20 nt, Artificial Sequence
  HTT spacer sequence CTCN PAM
accuggaacgccacccucuc

SEQ ID NO: 9426 - RNA, 20 nt, Artificial Sequence
  HTT spacer sequence CTCN PAM
gcaccuuggcagcagcagug

SEQ ID NO: 9427 - RNA, 20 nt, Artificial Sequence
  HTT spacer sequence CTCN PAM
cugcaccuuggcagcagcag

SEQ ID NO: 9428 - RNA, 20 nt, Artificial Sequence
  HTT spacer sequence CTCN PAM
gucugugccaagggccgcgg

SEQ ID NO: 9429 - RNA, 20 nt, Artificial Sequence
  HTT spacer sequence CTCN PAM
ccgcggcccuuggcacagac

SEQ ID NO: 9430 - RNA, 20 nt, Artificial Sequence
  HTT spacer sequence CTCN PAM
agaacaggcgucuccccgcg

SEQ ID NO: 9431 - RNA, 20 nt, Artificial Sequence
  HTT spacer sequence CTCN PAM
gcguccggccgugcuuuucc

SEQ ID NO: 9432 - RNA, 20 nt, Artificial Sequence
  HTT spacer sequence CTCN PAM
cuucccuugacacuagagca

SEQ ID NO: 9433 - RNA, 20 nt, Artificial Sequence
  HTT spacer sequence CTCN PAM
agugucaagggaagggagga

SEQ ID NO: 9434 - RNA, 20 nt, Artificial Sequence
  HTT spacer sequence CTCN PAM
agugaggaaacugaggcuca

SEQ ID NO: 9435 - RNA, 20 nt, Artificial Sequence
  HTT spacer sequence CTCN PAM
cuugagcagugggggugggg

SEQ ID NO: 9436 - RNA, 20 nt, Artificial Sequence
  HTT spacer sequence CTCN PAM
guuuccucacuugagcagug

SEQ ID NO: 9437 - RNA, 20 nt, Artificial Sequence
  HTT spacer sequence CTCN PAM
gagugggccacaggccagga

SEQ ID NO: 9438 - RNA, 20 nt, Artificial Sequence
  HTT spacer sequence CTCN PAM
gagccucaguuuccucacuu

SEQ ID NO: 9439 - RNA, 20 nt, Artificial Sequence
  HTT spacer sequence CTCN PAM
uggccuguggcccacucuga

SEQ ID NO: 9440 - RNA, 20 nt, Artificial Sequence
  HTT spacer sequence CTCN PAM
uccuggccuguggcccacuc

SEQ ID NO: 9441 - RNA, 20 nt, Artificial Sequence
  HTT spacer sequence CTCN PAM
auccccuccuccuggccugu

SEQ ID NO: 9442 - RNA, 20 nt, Artificial Sequence
  HTT spacer sequence CTCN PAM
auucugccugccaaggucac

SEQ ID NO: 9443 - RNA, 20 nt, Artificial Sequence
  HTT spacer sequence CTCN PAM
augcaugugaccuuggcagg

SEQ ID NO: 9444 - RNA, 20 nt, Artificial Sequence
  HTT spacer sequence CTCN PAM
cuggugggagccacugggug

SEQ ID NO: 9445 - RNA, 20 nt, Artificial Sequence
  HTT spacer sequence CTCN PAM
ggugggagccacuggguggg

SEQ ID NO: 9446 - RNA, 20 nt, Artificial Sequence
  HTT spacer sequence CTCN PAM
caccagagagggccgcucua

SEQ ID NO: 9447 - RNA, 20 nt, Artificial Sequence
  HTT spacer sequence CTCN PAM
cgggacccugcggggcuggg

SEQ ID NO: 9448 - RNA, 20 nt, Artificial Sequence
  HTT spacer sequence CTCN PAM
ggacccugcggggcuggggc

SEQ ID NO: 9449 - RNA, 20 nt, Artificial Sequence
  HTT spacer sequence CTCN PAM
ccgcagccagccugggcacc

SEQ ID NO: 9450 - RNA, 20 nt, Artificial Sequence
  HTT spacer sequence CTCN PAM
uggccugaaggguuucacug

SEQ ID NO: 9451 - RNA, 20 nt, Artificial Sequence
  HTT spacer sequence CTCN PAM
ccuggccugaaggguuucac

SEQ ID NO: 9452 - RNA, 20 nt, Artificial Sequence
  HTT spacer sequence CTCN PAM
ccucuccuggccugaagggu

SEQ ID NO: 9453 - RNA, 20 nt, Artificial Sequence
  HTT spacer sequence CTCN PAM
ccacccugccucgccucucc

SEQ ID NO: 9454 - RNA, 20 nt, Artificial Sequence
  HTT spacer sequence CTCN PAM
uccccacccugccucgccuc

SEQ ID NO: 9455 - RNA, 20 nt, Artificial Sequence
  HTT spacer sequence CTCN PAM
cacccaaggcuggggcccac

SEQ ID NO: 9456 - RNA, 20 nt, Artificial Sequence
  HTT spacer sequence CTCN PAM
ggagaauuuuuucucaagug

SEQ ID NO: 9457 - RNA, 20 nt, Artificial Sequence
  HTT spacer sequence CTCN PAM
agaguccugauguguggggu

SEQ ID NO: 9458 - RNA, 20 nt, Artificial Sequence
  HTT spacer sequence CTCN PAM
agugauuaaaagguagaaac

SEQ ID NO: 9459 - RNA, 20 nt, Artificial Sequence
  HTT spacer sequence CTCN PAM
ucaguguuugugaagaacug

SEQ ID NO: 9460 - RNA, 20 nt, Artificial Sequence
  HTT spacer sequence CTCN PAM
ggauucacacuucaguucuu

SEQ ID NO: 9461 - RNA, 20 nt, Artificial Sequence
  HTT spacer sequence CTCN PAM
gcugcuugugguuugagacu

SEQ ID NO: 9462 - RNA, 20 nt, Artificial Sequence
  HTT spacer sequence CTCN PAM
aaccacaagcagcagaggcg

SEQ ID NO: 9463 - RNA, 20 nt, Artificial Sequence
  HTT spacer sequence CTCN PAM
agucucaaaccacaagcagc

SEQ ID NO: 9464 - RNA, 20 nt, Artificial Sequence
  HTT spacer sequence CTCN PAM
ccagucucaaaccacaagca

SEQ ID NO: 9465 - RNA, 20 nt, Artificial Sequence
  HTT spacer sequence CTCN PAM
aggcgagcagcagugccagc

SEQ ID NO: 9466 - RNA, 20 nt, Artificial Sequence
  HTT spacer sequence CTCN PAM
ccuggagccacucuccaguc

SEQ ID NO: 9467 - RNA, 20 nt, Artificial Sequence
  HTT spacer sequence CTCN PAM
ccuugccucacuucacuguc

SEQ ID NO: 9468 - RNA, 20 nt, Artificial Sequence
  HTT spacer sequence CTCN PAM
cuucacugucuccagcccca

SEQ ID NO: 9469 - RNA, 20 nt, Artificial Sequence
  HTT spacer sequence CTCN PAM
agccccaccucaccgucucc

SEQ ID NO: 9470 - RNA, 20 nt, Artificial Sequence
  HTT spacer sequence CTCN PAM
ccgucuccagccccaccuca

SEQ ID NO: 9471 - RNA, 20 nt, Artificial Sequence
  HTT spacer sequence CTCN PAM
agccccaccucacccucacc

SEQ ID NO: 9472 - RNA, 20 nt, Artificial Sequence
  HTT spacer sequence CTCN PAM
cccucaccacccucggccug

SEQ ID NO: 9473 - RNA, 20 nt, Artificial Sequence
  HTT spacer sequence CTCN PAM
ccacccucggccuggaagcc

SEQ ID NO: 9474 - RNA, 20 nt, Artificial Sequence
  HTT spacer sequence CTCN PAM
gccuggaagcccgcccuggc

SEQ ID NO: 9475 - RNA, 20 nt, Artificial Sequence
  HTT spacer sequence CTCN PAM
ucccuccagccaguguacgg

SEQ ID NO: 9476 - RNA, 20 nt, Artificial Sequence
  HTT spacer sequence CTCN PAM
cuccagccaguguacggccc

SEQ ID NO: 9477 - RNA, 20 nt, Artificial Sequence
  HTT spacer sequence CTCN PAM
agccaguguacggccccugc

SEQ ID NO: 9478 - RNA, 20 nt, Artificial Sequence
  HTT spacer sequence CTCN PAM
ggccuggccaggcaggggcc

SEQ ID NO: 9479 - RNA, 20 nt, Artificial Sequence
  HTT spacer sequence CTCN PAM
gccuagggcaacccucuucc

SEQ ID NO: 9480 - RNA, 20 nt, Artificial Sequence
  HTT spacer sequence CTCN PAM
uccagguguggaggcccccg

SEQ ID NO: 9481 - RNA, 20 nt, Artificial Sequence
  HTT spacer sequence CTCN PAM
acaccuggaagaggguugcc

SEQ ID NO: 9482 - RNA, 20 nt, Artificial Sequence
  HTT spacer sequence CTCN PAM
caugcccaucucaagaaccu

SEQ ID NO: 9483 - RNA, 20 nt, Artificial Sequence
  HTT spacer sequence CTCN PAM
agaaccuuuccuggggacag

SEQ ID NO: 9484 - RNA, 20 nt, Artificial Sequence
  HTT spacer sequence CTCN PAM
guccccaggaaagguucuug

SEQ ID NO: 9485 - RNA, 20 nt, Artificial Sequence
  HTT spacer sequence CTCN PAM
ggccuggugucucugucccc

SEQ ID NO: 9486 - RNA, 20 nt, Artificial Sequence
  HTT spacer sequence CTCN PAM
caggccuggugucucugucc

SEQ ID NO: 9487 - RNA, 20 nt, Artificial Sequence
  HTT spacer sequence CTCN PAM
cucaggccuggugucucugu

SEQ ID NO: 9488 - RNA, 20 nt, Artificial Sequence
  HTT spacer sequence CTCN PAM
ggaugccccacugggccuuc

SEQ ID NO: 9489 - RNA, 20 nt, Artificial Sequence
  HTT spacer sequence CTCN PAM
caucuccggaugccccacug

SEQ ID NO: 9490 - RNA, 20 nt, Artificial Sequence
  HTT spacer sequence CTCN PAM
gaggacagagcuugagggcc

SEQ ID NO: 9491 - RNA, 20 nt, Artificial Sequence
  HTT spacer sequence CTCN PAM
gagggaagcugcaauguucu

SEQ ID NO: 9492 - RNA, 20 nt, Artificial Sequence
  HTT spacer sequence CTCN PAM
guccucagagggaagcugca

SEQ ID NO: 9493 - RNA, 20 nt, Artificial Sequence
  HTT spacer sequence CTCN PAM
agcucuguccucagagggaa

SEQ ID NO: 9494 - RNA, 20 nt, Artificial Sequence
  HTT spacer sequence CTCN PAM
cugaagcccaggugccaugc

SEQ ID NO: 9495 - RNA, 20 nt, Artificial Sequence
  HTT spacer sequence CTCN PAM
gaagcccaggugccaugcag

SEQ ID NO: 9496 - RNA, 20 nt, Artificial Sequence
  HTT spacer sequence CTCN PAM
gccuccacccugcaccgcuc

SEQ ID NO: 9497 - RNA, 20 nt, Artificial Sequence
  HTT spacer sequence CTCN PAM
acccugcaccgcucugugaa

SEQ ID NO: 9498 - RNA, 20 nt, Artificial Sequence
  HTT spacer sequence CTCN PAM
gugaagccccuggggccucu

SEQ ID NO: 9499 - RNA, 20 nt, Artificial Sequence
  HTT spacer sequence CTCN PAM
gagccccgaacacacugcgu

SEQ ID NO: 9500 - RNA, 20 nt, Artificial Sequence
  HTT spacer sequence CTCN PAM
gaggccccaggggcuucaca

SEQ ID NO: 9501 - RNA, 20 nt, Artificial Sequence
  HTT spacer sequence CTCN PAM
agugcaccagccuuucucug

SEQ ID NO: 9502 - RNA, 20 nt, Artificial Sequence
  HTT spacer sequence CTCN PAM
guuuugcagcgagcagccuc

SEQ ID NO: 9503 - RNA, 20 nt, Artificial Sequence
  HTT spacer sequence CTCN PAM
cugcaaaacagagaaaggcu

SEQ ID NO: 9504 - RNA, 20 nt, Artificial Sequence
  HTT spacer sequence CTCN PAM
cgugcgugcccagggcuggc

SEQ ID NO: 9505 - RNA, 20 nt, Artificial Sequence
  HTT spacer sequence CTCN PAM
cugggcagagguccaggggu

SEQ ID NO: 9506 - RNA, 20 nt, Artificial Sequence
  HTT spacer sequence CTCN PAM
gcccagugagacaagccgcc

SEQ ID NO: 9507 - RNA, 20 nt, Artificial Sequence
  HTT spacer sequence CTCN PAM
gcugcggccgugcugcacuc

SEQ ID NO: 9508 - RNA, 20 nt, Artificial Sequence
  HTT spacer sequence CTCN PAM
aguucuuugaaaaccucucu

SEQ ID NO: 9509 - RNA, 20 nt, Artificial Sequence
  HTT spacer sequence CTCN PAM
cucauugagaguccaauuag

SEQ ID NO: 9510 - RNA, 20 nt, Artificial Sequence
  HTT spacer sequence CTCN PAM
cauugagaguccaauuagcg

SEQ ID NO: 9511 - RNA, 20 nt, Artificial Sequence
  HTT spacer sequence CTCN PAM
uugagaguccaauuagcgcu

SEQ ID NO: 9512 - RNA, 20 nt, Artificial Sequence
  HTT spacer sequence CTCN PAM
augagagagguuuucaaaga

SEQ ID NO: 9513 - RNA, 20 nt, Artificial Sequence
  HTT spacer sequence CTCN PAM
caaugagagagguuuucaaa

SEQ ID NO: 9514 - RNA, 20 nt, Artificial Sequence
  HTT spacer sequence CTCN PAM
gagcucugaaggauguacug

SEQ ID NO: 9515 - RNA, 20 nt, Artificial Sequence
  HTT spacer sequence CTCN PAM
gagugaaaaaauugugacuu

SEQ ID NO: 9516 - RNA, 20 nt, Artificial Sequence
  HTT spacer sequence CTCN PAM
gaaggauguacugguuacaa

SEQ ID NO: 9517 - RNA, 20 nt, Artificial Sequence
  HTT spacer sequence CTCN PAM
cuggggucuggccucaugua

SEQ ID NO: 9518 - RNA, 20 nt, Artificial Sequence
  HTT spacer sequence CTCN PAM
uguauggacaugacagugaa

SEQ ID NO: 9519 - RNA, 20 nt, Artificial Sequence
  HTT spacer sequence CTCN PAM
ucuguuugucugucuguccu

SEQ ID NO: 9520 - RNA, 20 nt, Artificial Sequence
  HTT spacer sequence CTCN PAM
uggguccugccaugggccug

SEQ ID NO: 9521 - RNA, 20 nt, Artificial Sequence
  HTT spacer sequence CTCN PAM
aaggcccagaugggcaccag

SEQ ID NO: 9522 - RNA, 20 nt, Artificial Sequence
  HTT spacer sequence CTCN PAM
ccacggguccaagucccacu

SEQ ID NO: 9523 - RNA, 20 nt, Artificial Sequence
  HTT spacer sequence CTCN PAM
aagucaauggcacaguucug

SEQ ID NO: 9524 - RNA, 20 nt, Artificial Sequence
  HTT spacer sequence CTCN PAM
gaaaucuccaagucaauggc

SEQ ID NO: 9525 - RNA, 20 nt, Artificial Sequence
  HTT spacer sequence CTCN PAM
ucucugaaaucuccaaguca

SEQ ID NO: 9526 - RNA, 20 nt, Artificial Sequence
  HTT spacer sequence CTCN PAM
aaggaugagggagcguuugg

SEQ ID NO: 9527 - RNA, 20 nt, Artificial Sequence
  HTT spacer sequence CTCN PAM
uccuuugaggauggaaccau

SEQ ID NO: 9528 - RNA, 20 nt, Artificial Sequence
  HTT spacer sequence CTCN PAM
cucauccuuugaggauggaa

SEQ ID NO: 9529 - RNA, 20 nt, Artificial Sequence
  HTT spacer sequence CTCN PAM
acauggaaaccaaacgcucc

SEQ ID NO: 9530 - RNA, 20 nt, Artificial Sequence
  HTT spacer sequence CTCN PAM
cugcugcgccguggugaaug

SEQ ID NO: 9531 - RNA, 20 nt, Artificial Sequence
  HTT spacer sequence CTCN PAM
ggccacauucaccacggcgc

SEQ ID NO: 9532 - RNA, 20 nt, Artificial Sequence
  HTT spacer sequence CTCN PAM
cguucaccccuuuggccugc

SEQ ID NO: 9533 - RNA, 20 nt, Artificial Sequence
  HTT spacer sequence CTCN PAM
uggccucgcguucaccccuu

SEQ ID NO: 9534 - RNA, 20 nt, Artificial Sequence
  HTT spacer sequence CTCN PAM
ccugccaugccugacccaca

SEQ ID NO: 9535 - RNA, 20 nt, Artificial Sequence
  HTT spacer sequence CTCN PAM
ugcacacaggguccaccagc

SEQ ID NO: 9536 - RNA, 20 nt, Artificial Sequence
  HTT spacer sequence CTCN PAM
cacccuccugcacacagggu

SEQ ID NO: 9537 - RNA, 20 nt, Artificial Sequence
  HTT spacer sequence CTCN PAM
accucccacccuccugcaca

SEQ ID NO: 9538 - RNA, 20 nt, Artificial Sequence
  HTT spacer sequence CTCN PAM
ccaccucccacccuccugca

SEQ ID NO: 9539 - RNA, 20 nt, Artificial Sequence
  HTT spacer sequence CTCN PAM
ugaaggcugggcucuccacc

SEQ ID NO: 9540 - RNA, 20 nt, Artificial Sequence
  HTT spacer sequence CTCN PAM
gcaggugcccacagccuccu

SEQ ID NO: 9541 - RNA, 20 nt, Artificial Sequence
  HTT spacer sequence CTCN PAM
gcagugcccgcccagguugg

SEQ ID NO: 9542 - RNA, 20 nt, Artificial Sequence
  HTT spacer sequence CTCN PAM
acaaggcugugaccaaccug

SEQ ID NO: 9543 - RNA, 20 nt, Artificial Sequence
  HTT spacer sequence CTCN PAM
cccugacaggcacgcccaca

SEQ ID NO: 9544 - RNA, 20 nt, Artificial Sequence
  HTT spacer sequence CTCN PAM
cugacaggcacgcccacacu

SEQ ID NO: 9545 - RNA, 20 nt, Artificial Sequence
  HTT spacer sequence CTCN PAM
ugcugaaaagagaccuccua

SEQ ID NO: 9546 - RNA, 20 nt, Artificial Sequence
  HTT spacer sequence CTCN PAM
uuucagcacgagacaaacau

SEQ ID NO: 9547 - RNA, 20 nt, Artificial Sequence
  HTT spacer sequence CTCN PAM
uaauguucaugucuugauaa

SEQ ID NO: 9548 - RNA, 20 nt, Artificial Sequence
  HTT spacer sequence CTCN PAM
uggugucccucuccacggga

SEQ ID NO: 9549 - RNA, 20 nt, Artificial Sequence
  HTT spacer sequence CTCN PAM
ccacgggaacucaggguguc

SEQ ID NO: 9550 - RNA, 20 nt, Artificial Sequence
  HTT spacer sequence CTCN PAM
acgggaacucagggugucca

SEQ ID NO: 9551 - RNA, 20 nt, Artificial Sequence
  HTT spacer sequence CTCN PAM
ggguguccagggaacugcug

SEQ ID NO: 9552 - RNA, 20 nt, Artificial Sequence
  HTT spacer sequence CTCN PAM
cugucacugugugcucaugu

SEQ ID NO: 9553 - RNA, 20 nt, Artificial Sequence
  HTT spacer sequence CTCN PAM
uguuugauggggagggcucu

SEQ ID NO: 9554 - RNA, 20 nt, Artificial Sequence
  HTT spacer sequence CTCN PAM
ccaucaaacaugagcacaca

SEQ ID NO: 9555 - RNA, 20 nt, Artificial Sequence
  HTT spacer sequence CTCN PAM
gugcuggggacauccugcca

SEQ ID NO: 9556 - RNA, 20 nt, Artificial Sequence
  HTT spacer sequence CTCN PAM
aaggcuggggucagcccugg

SEQ ID NO: 9557 - RNA, 20 nt, Artificial Sequence
  HTT spacer sequence CTCN PAM
uccaaggcuggggucagccc

SEQ ID NO: 9558 - RNA, 20 nt, Artificial Sequence
  HTT spacer sequence CTCN PAM
ggcaggcuccuccaaggcug

SEQ ID NO: 9559 - RNA, 20 nt, Artificial Sequence
  HTT spacer sequence CTCN PAM
cucaggcaggcuccuccaag

SEQ ID NO: 9560 - RNA, 20 nt, Artificial Sequence
  HTT spacer sequence CTCN PAM
gcacaguggcagccugggga

SEQ ID NO: 9561 - RNA, 20 nt, Artificial Sequence
  HTT spacer sequence CTCN PAM
guuucccccucugcacagug

SEQ ID NO: 9562 - RNA, 20 nt, Artificial Sequence
  HTT spacer sequence CTCN PAM
aagagccuuggacccuuccg

SEQ ID NO: 9563 - RNA, 20 nt, Artificial Sequence
  HTT spacer sequence CTCN PAM
uugagacccucaguuucccc

SEQ ID NO: 9564 - RNA, 20 nt, Artificial Sequence
  HTT spacer sequence CTCN PAM
acugaccggaaggguccaag

SEQ ID NO: 9565 - RNA, 20 nt, Artificial Sequence
  HTT spacer sequence CTCN PAM
agcugccuuuccuggugugg

SEQ ID NO: 9566 - RNA, 20 nt, Artificial Sequence
  HTT spacer sequence CTCN PAM
aaggcugucagggcuucugu

SEQ ID NO: 9567 - RNA, 20 nt, Artificial Sequence
  HTT spacer sequence CTCN PAM
gagucacugaaggaguaagu

SEQ ID NO: 9568 - RNA, 20 nt, Artificial Sequence
  HTT spacer sequence CTCN PAM
gagcugcagcacuccaaggc

SEQ ID NO: 9569 - RNA, 20 nt, Artificial Sequence
  HTT spacer sequence CTCN PAM
uucagugacuccgagcugca

SEQ ID NO: 9570 - RNA, 20 nt, Artificial Sequence
  HTT spacer sequence CTCN PAM
agacuuacuuacuccuucag

SEQ ID NO: 9571 - RNA, 20 nt, Artificial Sequence
  HTT spacer sequence CTCN PAM
uccagacuuacuuacuccuu

SEQ ID NO: 9572 - RNA, 20 nt, Artificial Sequence
  HTT spacer sequence CTCN PAM
ggcagcuccuccagacuuac

SEQ ID NO: 9573 - RNA, 20 nt, Artificial Sequence
  HTT spacer sequence CTCN PAM
cuggacuggcgggggguggg

SEQ ID NO: 9574 - RNA, 20 nt, Artificial Sequence
  HTT spacer sequence CTCN PAM
cacucugccuggugcccaca

SEQ ID NO: 9575 - RNA, 20 nt, Artificial Sequence
  HTT spacer sequence CTCN PAM
gccuggugcccacagccugg

SEQ ID NO: 9576 - RNA, 20 nt, Artificial Sequence
  HTT spacer sequence CTCN PAM
gcuacucagccuugagcguc

SEQ ID NO: 9577 - RNA, 20 nt, Artificial Sequence
  HTT spacer sequence CTCN PAM
gccuugagcgucugugccgg

SEQ ID NO: 9578 - RNA, 20 nt, Artificial Sequence
  HTT spacer sequence CTCN PAM
aggcugaguagcugagccac

SEQ ID NO: 9579 - RNA, 20 nt, Artificial Sequence
  HTT spacer sequence CTCN PAM
gcuucugcaggaggaagaag

SEQ ID NO: 9580 - RNA, 20 nt, Artificial Sequence
  HTT spacer sequence CTCN PAM
ugcagaagcugaguuacccg

SEQ ID NO: 9581 - RNA, 20 nt, Artificial Sequence
  HTT spacer sequence CTCN PAM
ccuucuuccuccugcagaag

SEQ ID NO: 9582 - RNA, 20 nt, Artificial Sequence
  HTT spacer sequence CTCN PAM
uuuugcuccccuucuuccuc

SEQ ID NO: 9583 - RNA, 20 nt, Artificial Sequence
  HTT spacer sequence CTCN PAM
gcaguguacuggcuggccgg

SEQ ID NO: 9584 - RNA, 20 nt, Artificial Sequence
  HTT spacer sequence CTCN PAM
ccgcaguguacuggcuggcc

SEQ ID NO: 9585 - RNA, 20 nt, Artificial Sequence
  HTT spacer sequence CTCN PAM
gggacugggugacgccaccg

SEQ ID NO: 9586 - RNA, 20 nt, Artificial Sequence
  HTT spacer sequence CTCN PAM
caagugccagcccccucggg

SEQ ID NO: 9587 - RNA, 20 nt, Artificial Sequence
  HTT spacer sequence CTCN PAM
ccucccaagugccagccccc

SEQ ID NO: 9588 - RNA, 20 nt, Artificial Sequence
  HTT spacer sequence CTCN PAM
ccugaagcggccaccagggg

SEQ ID NO: 9589 - RNA, 20 nt, Artificial Sequence
  HTT spacer sequence CTCN PAM
ggccagggccgcggggcccc

SEQ ID NO: 9590 - RNA, 20 nt, Artificial Sequence
  HTT spacer sequence CTCN PAM
ccagggcagaagggcacggu

SEQ ID NO: 9591 - RNA, 20 nt, Artificial Sequence
  HTT spacer sequence CTCN PAM
ucccacaggcucaccagggc

SEQ ID NO: 9592 - RNA, 20 nt, Artificial Sequence
  HTT spacer sequence CTCN PAM
cgcucagguggcuucggccg

SEQ ID NO: 9593 - RNA, 20 nt, Artificial Sequence
  HTT spacer sequence CTCN PAM
gguggcuucggccgagggaa

SEQ ID NO: 9594 - RNA, 20 nt, Artificial Sequence
  HTT spacer sequence CTCN PAM
gccgaagccaccugagcggg

SEQ ID NO: 9595 - RNA, 20 nt, Artificial Sequence
  HTT spacer sequence CTCN PAM
ccauagccagcgaccacgga

SEQ ID NO: 9596 - RNA, 20 nt, Artificial Sequence
  HTT spacer sequence CTCN PAM
guggucgcuggcuaugguga

SEQ ID NO: 9597 - RNA, 20 nt, Artificial Sequence
  HTT spacer sequence CTCN PAM
caccagccgccgccguugug

SEQ ID NO: 9598 - RNA, 20 nt, Artificial Sequence
  HTT spacer sequence CTCN PAM
augucucccaccagccgccg

SEQ ID NO: 9599 - RNA, 20 nt, Artificial Sequence
  HTT spacer sequence CTCN PAM
ucgaugucucccaccagccg

SEQ ID NO: 9600 - RNA, 20 nt, Artificial Sequence
  HTT spacer sequence CTCN PAM
ccugggcugacgggcaccuc

SEQ ID NO: 9601 - RNA, 20 nt, Artificial Sequence
  HTT spacer sequence CTCN PAM
ccaaaggaguagagcagcag

SEQ ID NO: 9602 - RNA, 20 nt, Artificial Sequence
  HTT spacer sequence CTCN PAM
uuuggugaguggcccugccc

SEQ ID NO: 9603 - RNA, 20 nt, Artificial Sequence
  HTT spacer sequence CTCN PAM
acuccuuuggugaguggccc

SEQ ID NO: 9604 - RNA, 20 nt, Artificial Sequence
  HTT spacer sequence CTCN PAM
gcccgugcugggccuggggc

SEQ ID NO: 9605 - RNA, 20 nt, Artificial Sequence
  HTT spacer sequence CTCN PAM
ucggcuggggacguucucug

SEQ ID NO: 9606 - RNA, 20 nt, Artificial Sequence
  HTT spacer sequence CTCN PAM
ucaucggcuggggacguucu

SEQ ID NO: 9607 - RNA, 20 nt, Artificial Sequence
  HTT spacer sequence CTCN PAM
ugcugcuggugcccgccuuc

SEQ ID NO: 9608 - RNA, 20 nt, Artificial Sequence
  HTT spacer sequence CTCN PAM
gcacagcccgugcccugcag

SEQ ID NO: 9609 - RNA, 20 nt, Artificial Sequence
  HTT spacer sequence CTCN PAM
ggggacugccugccacccgc

SEQ ID NO: 9610 - RNA, 20 nt, Artificial Sequence
  HTT spacer sequence CTCN PAM
aaagcggguggcaggcaguc

SEQ ID NO: 9611 - RNA, 20 nt, Artificial Sequence
  HTT spacer sequence CTCN PAM
cuccaaagcggguggcaggc

SEQ ID NO: 9612 - RNA, 20 nt, Artificial Sequence
  HTT spacer sequence CTCN PAM
ccauggccaccauccagggu

SEQ ID NO: 9613 - RNA, 20 nt, Artificial Sequence
  HTT spacer sequence CTCN PAM
ucggccucaccauggccacc

SEQ ID NO: 9614 - RNA, 20 nt, Artificial Sequence
  HTT spacer sequence CTCN PAM
cagccuacagcaggggaaga

SEQ ID NO: 9615 - RNA, 20 nt, Artificial Sequence
  HTT spacer sequence CTCN PAM
cccuggcccugcccugggug

SEQ ID NO: 9616 - RNA, 20 nt, Artificial Sequence
  HTT spacer sequence CTCN PAM
cgcccuggcccugcccuggg

SEQ ID NO: 9617 - RNA, 20 nt, Artificial Sequence
  HTT spacer sequence CTCN PAM
cugaaauaacgccccugcuu

SEQ ID NO: 9618 - RNA, 20 nt, Artificial Sequence
  HTT spacer sequence CTCN PAM
cacaccagcgcuuccaguuc

SEQ ID NO: 9619 - RNA, 20 nt, Artificial Sequence
  HTT spacer sequence CTCN PAM
gcguguacuccaggcccgag

SEQ ID NO: 9620 - RNA, 20 nt, Artificial Sequence
  HTT spacer sequence CTCN PAM
aggcccgagaacaggaagag

SEQ ID NO: 9621 - RNA, 20 nt, Artificial Sequence
  HTT spacer sequence CTCN PAM
ggccuggaguacacgcugag

SEQ ID NO: 9622 - RNA, 20 nt, Artificial Sequence
  HTT spacer sequence CTCN PAM
uccuguucucgggccuggag

SEQ ID NO: 9623 - RNA, 20 nt, Artificial Sequence
  HTT spacer sequence CTCN PAM
accucuuccuguucucgggc

SEQ ID NO: 9624 - RNA, 20 nt, Artificial Sequence
  HTT spacer sequence CTCN PAM
gcagccugcgccgccugggc

SEQ ID NO: 9625 - RNA, 20 nt, Artificial Sequence
  HTT spacer sequence CTCN PAM
ccagggcucagcagccugcg

SEQ ID NO: 9626 - RNA, 20 nt, Artificial Sequence
  HTT spacer sequence CTCN PAM
ccccagggcucagcagccug

SEQ ID NO: 9627 - RNA, 20 nt, Artificial Sequence
  HTT spacer sequence CTCN PAM
gcacgcgccaccucucccca

SEQ ID NO: 9628 - RNA, 20 nt, Artificial Sequence
  HTT spacer sequence CTCN PAM
ccugggcuuccccgggcggc

SEQ ID NO: 9629 - RNA, 20 nt, Artificial Sequence
  HTT spacer sequence CTCN PAM
ccccugggcuuccccgggcg

SEQ ID NO: 9630 - RNA, 20 nt, Artificial Sequence
  HTT spacer sequence CTCN PAM
acgcuuggguuggucgaguc

SEQ ID NO: 9631 - RNA, 20 nt, Artificial Sequence
  HTT spacer sequence CTCN PAM
accaacccaagcguggagcc

SEQ ID NO: 9632 - RNA, 20 nt, Artificial Sequence
  HTT spacer sequence CTCN PAM
agaggguggguccuggccac

SEQ ID NO: 9633 - RNA, 20 nt, Artificial Sequence
  HTT spacer sequence CTCN PAM
ggagacaguaaggacucgac

SEQ ID NO: 9634 - RNA, 20 nt, Artificial Sequence
  HTT spacer sequence CTCN PAM
uggccaggacccacccucug

SEQ ID NO: 9635 - RNA, 20 nt, Artificial Sequence
  HTT spacer sequence CTCN PAM
gcugucgcucguggccagga

SEQ ID NO: 9636 - RNA, 20 nt, Artificial Sequence
  HTT spacer sequence CTCN PAM
gcccccuggcccugcugcgc

SEQ ID NO: 9637 - RNA, 20 nt, Artificial Sequence
  HTT spacer sequence CTCN PAM
aucgcccugggguuccguga

SEQ ID NO: 9638 - RNA, 20 nt, Artificial Sequence
  HTT spacer sequence CTCN PAM
aaugccauccccacaggcgc

SEQ ID NO: 9639 - RNA, 20 nt, Artificial Sequence
  HTT spacer sequence CTCN PAM
ccaaugccauccccacaggc

SEQ ID NO: 9640 - RNA, 20 nt, Artificial Sequence
  HTT spacer sequence CTCN PAM
ugcaggcucuccaaugccau

SEQ ID NO: 9641 - RNA, 20 nt, Artificial Sequence
  HTT spacer sequence CTCN PAM
agggucccaacaccaagaga

SEQ ID NO: 9642 - RNA, 20 nt, Artificial Sequence
  HTT spacer sequence CTCN PAM
ugguguugggacccuugagg

SEQ ID NO: 9643 - RNA, 20 nt, Artificial Sequence
  HTT spacer sequence CTCN PAM
cuugguguugggacccuuga

SEQ ID NO: 9644 - RNA, 20 nt, Artificial Sequence
  HTT spacer sequence CTCN PAM
cuggcaucuggggcuggcac

SEQ ID NO: 9645 - RNA, 20 nt, Artificial Sequence
  HTT spacer sequence CTCN PAM
agccccuaggccuguggguc

SEQ ID NO: 9646 - RNA, 20 nt, Artificial Sequence
  HTT spacer sequence CTCN PAM
aggggcagcgucucuggcag

SEQ ID NO: 9647 - RNA, 20 nt, Artificial Sequence
  HTT spacer sequence CTCN PAM
ggcaggaagcagaagaugaa

SEQ ID NO: 9648 - RNA, 20 nt, Artificial Sequence
  HTT spacer sequence CTCN PAM
gaccugcuguucaucuucug

SEQ ID NO: 9649 - RNA, 20 nt, Artificial Sequence
  HTT spacer sequence CTCN PAM
ucgcagccuccgaccugcug

SEQ ID NO: 9650 - RNA, 20 nt, Artificial Sequence
  HTT spacer sequence CTCN PAM
cugccccuggaaauggcacc

SEQ ID NO: 9651 - RNA, 20 nt, Artificial Sequence
  HTT spacer sequence CTCN PAM
gagcauagggcccaggguga

SEQ ID NO: 9652 - RNA, 20 nt, Artificial Sequence
  HTT spacer sequence CTCN PAM
gagccucccugccccuggaa

SEQ ID NO: 9653 - RNA, 20 nt, Artificial Sequence
  HTT spacer sequence CTCN PAM
cugggcuucacccugggccc

SEQ ID NO: 9654 - RNA, 20 nt, Artificial Sequence
  HTT spacer sequence CTCN PAM
gguggucuuuucccuaggcg

SEQ ID NO: 9655 - RNA, 20 nt, Artificial Sequence
  HTT spacer sequence CTCN PAM
cugugcagcucggguggucu

SEQ ID NO: 9656 - RNA, 20 nt, Artificial Sequence
  HTT spacer sequence CTCN PAM
ggcccgcagucaaggcaugg

SEQ ID NO: 9657 - RNA, 20 nt, Artificial Sequence
  HTT spacer sequence CTCN PAM
ccucuggcccgcagucaagg

SEQ ID NO: 9658 - RNA, 20 nt, Artificial Sequence
  HTT spacer sequence CTCN PAM
acggccaucguugcugaccu

SEQ ID NO: 9659 - RNA, 20 nt, Artificial Sequence
  HTT spacer sequence CTCN PAM
ccacggccaucguugcugac

SEQ ID NO: 9660 - RNA, 20 nt, Artificial Sequence
  HTT spacer sequence CTCN PAM
aggcugauugggggcaucag

SEQ ID NO: 9661 - RNA, 20 nt, Artificial Sequence
  HTT spacer sequence CTCN PAM
gagagguggcccagacugca

SEQ ID NO: 9662 - RNA, 20 nt, Artificial Sequence
  HTT spacer sequence CTCN PAM
gagcuuugcggccuuccugg

SEQ ID NO: 9663 - RNA, 20 nt, Artificial Sequence
  HTT spacer sequence CTCN PAM
cggagcuuugcggccuuccu

SEQ ID NO: 9664 - RNA, 20 nt, Artificial Sequence
  HTT spacer sequence CTCN PAM
uaugcagucugggccaccuc

SEQ ID NO: 9665 - RNA, 20 nt, Artificial Sequence
  HTT spacer sequence CTCN PAM
uggccccugccccugggcag

SEQ ID NO: 9666 - RNA, 20 nt, Artificial Sequence
  HTT spacer sequence CTCN PAM
uggccuuaagcgaccgcccc

SEQ ID NO: 9667 - RNA, 20 nt, Artificial Sequence
  HTT spacer sequence CTCN PAM
gaguagggcuuggcaaccca

SEQ ID NO: 9668 - RNA, 20 nt, Artificial Sequence
  HTT spacer sequence CTCN PAM
gagccacuccuggccuuaag

SEQ ID NO: 9669 - RNA, 20 nt, Artificial Sequence
  HTT spacer sequence CTCN PAM
acccugcccuauuucgaagc

SEQ ID NO: 9670 - RNA, 20 nt, Artificial Sequence
  HTT spacer sequence CTCN PAM
gaugcuucgaaauagggcag

SEQ ID NO: 9671 - RNA, 20 nt, Artificial Sequence
  HTT spacer sequence CTCN PAM
gugccuuccuaggggccagg

SEQ ID NO: 9672 - RNA, 20 nt, Artificial Sequence
  HTT spacer sequence CTCN PAM
uggccccuaggaaggcacug

SEQ ID NO: 9673 - RNA, 20 nt, Artificial Sequence
  HTT spacer sequence CTCN PAM
uugaaagccuggcucuggaa

SEQ ID NO: 9674 - RNA, 20 nt, Artificial Sequence
  HTT spacer sequence CTCN PAM
ggaacaggagccacuggucc

SEQ ID NO: 9675 - RNA, 20 nt, Artificial Sequence
  HTT spacer sequence CTCN PAM
uguuccagagccaggcuuuc

SEQ ID NO: 9676 - RNA, 20 nt, Artificial Sequence
  HTT spacer sequence CTCN PAM
ggggaccaguggcuccuguu

SEQ ID NO: 9677 - RNA, 20 nt, Artificial Sequence
  HTT spacer sequence CTCN PAM
aggaugcgaugagggccaac

SEQ ID NO: 9678 - RNA, 20 nt, Artificial Sequence
  HTT spacer sequence CTCN PAM
ucgcauccuggaggggguuc

SEQ ID NO: 9679 - RNA, 20 nt, Artificial Sequence
  HTT spacer sequence CTCN PAM
uggccacugguuggcccuca

SEQ ID NO: 9680 - RNA, 20 nt, Artificial Sequence
  HTT spacer sequence CTCN PAM
cucuccccaccuaaccccau

SEQ ID NO: 9681 - RNA, 20 nt, Artificial Sequence
  HTT spacer sequence CTCN PAM
ccccaccuaaccccaugggg

SEQ ID NO: 9682 - RNA, 20 nt, Artificial Sequence
  HTT spacer sequence CTCN PAM
ccaccuaaccccauggggcu

SEQ ID NO: 9683 - RNA, 20 nt, Artificial Sequence
  HTT spacer sequence CTCN PAM
cacccagccaguagccccau

SEQ ID NO: 9684 - RNA, 20 nt, Artificial Sequence
  HTT spacer sequence CTCN PAM
ucccacccagccaguagccc

SEQ ID NO: 9685 - RNA, 20 nt, Artificial Sequence
  HTT spacer sequence CTCN PAM
ccaagcagucagagguggcc

SEQ ID NO: 9686 - RNA, 20 nt, Artificial Sequence
  HTT spacer sequence CTCN PAM
gacugcuuggggaggcgccc

SEQ ID NO: 9687 - RNA, 20 nt, Artificial Sequence
  HTT spacer sequence CTCN PAM
cuggggccaccucugacugc

SEQ ID NO: 9688 - RNA, 20 nt, Artificial Sequence
  HTT spacer sequence CTCN PAM
guccugcaguuucugugugc

SEQ ID NO: 9689 - RNA, 20 nt, Artificial Sequence
  HTT spacer sequence CTCN PAM
gcauucucuguccugcaguu

SEQ ID NO: 9690 - RNA, 20 nt, Artificial Sequence
  HTT spacer sequence CTCN PAM
uuggcucggcauucucuguc

SEQ ID NO: 9691 - RNA, 20 nt, Artificial Sequence
  HTT spacer sequence CTCN PAM
ggucucauuggcucggcauu

SEQ ID NO: 9692 - RNA, 20 nt, Artificial Sequence
  HTT spacer sequence CTCN PAM
caggucucauuggcucggca

SEQ ID NO: 9693 - RNA, 20 nt, Artificial Sequence
  HTT spacer sequence CTCN PAM
uggugccaggcagccccaug

SEQ ID NO: 9694 - RNA, 20 nt, Artificial Sequence
  HTT spacer sequence CTCN PAM
aggccaauguccagccccgu

SEQ ID NO: 9695 - RNA, 20 nt, Artificial Sequence
  HTT spacer sequence CTCN PAM
ggacggggcuggacauuggc

SEQ ID NO: 9696 - RNA, 20 nt, Artificial Sequence
  HTT spacer sequence CTCN PAM
caggccauggcccuugagcc

SEQ ID NO: 9697 - RNA, 20 nt, Artificial Sequence
  HTT spacer sequence CTCN PAM
agggccauggccugugagug

SEQ ID NO: 9698 - RNA, 20 nt, Artificial Sequence
  HTT spacer sequence CTCN PAM
gcucaagggccauggccugu

SEQ ID NO: 9699 - RNA, 20 nt, Artificial Sequence
  HTT spacer sequence CTCN PAM
auuggggcccccucggcuca

SEQ ID NO: 9700 - RNA, 20 nt, Artificial Sequence
  HTT spacer sequence CTCN PAM
ccauuggggcccccucggcu

SEQ ID NO: 9701 - RNA, 20 nt, Artificial Sequence
  HTT spacer sequence CTCN PAM
ucucuccauuggggcccccu

SEQ ID NO: 9702 - RNA, 20 nt, Artificial Sequence
  HTT spacer sequence CTCN PAM
gcgugucacguucagauccu

SEQ ID NO: 9703 - RNA, 20 nt, Artificial Sequence
  HTT spacer sequence CTCN PAM
cugggcuggcaugucuggug

SEQ ID NO: 9704 - RNA, 20 nt, Artificial Sequence
  HTT spacer sequence CTCN PAM
guccuugccuucccacuccc

SEQ ID NO: 9705 - RNA, 20 nt, Artificial Sequence
  HTT spacer sequence CTCN PAM
ccaauucucgguccuugccu

SEQ ID NO: 9706 - RNA, 20 nt, Artificial Sequence
  HTT spacer sequence CTCN PAM
acgguccuauguuuggugga

SEQ ID NO: 9707 - RNA, 20 nt, Artificial Sequence
  HTT spacer sequence CTCN PAM
cuacgguccuauguuuggug

SEQ ID NO: 9708 - RNA, 20 nt, Artificial Sequence
  HTT spacer sequence CTCN PAM
gugcccuuggcgggcucucu

SEQ ID NO: 9709 - RNA, 20 nt, Artificial Sequence
  HTT spacer sequence CTCN PAM
gaacaggacacuguuguacc

SEQ ID NO: 9710 - RNA, 20 nt, Artificial Sequence
  HTT spacer sequence CTCN PAM
ucuccacuggcaucccgaug

SEQ ID NO: 9711 - RNA, 20 nt, Artificial Sequence
  HTT spacer sequence CTCN PAM
acuggcaucccgauggcggu

SEQ ID NO: 9712 - RNA, 20 nt, Artificial Sequence
  HTT spacer sequence CTCN PAM
uggcagggcgggguggacug

SEQ ID NO: 9713 - RNA, 20 nt, Artificial Sequence
  HTT spacer sequence CTCN PAM
auggcuccuggcagggcggg

SEQ ID NO: 9714 - RNA, 20 nt, Artificial Sequence
  HTT spacer sequence CTCN PAM
uccccuaggacccccucuau

SEQ ID NO: 9715 - RNA, 20 nt, Artificial Sequence
  HTT spacer sequence CTCN PAM
ccagcccuuaucgugauucc

SEQ ID NO: 9716 - RNA, 20 nt, Artificial Sequence
  HTT spacer sequence CTCN PAM
cgugggcacggccguggcuc

SEQ ID NO: 9717 - RNA, 20 nt, Artificial Sequence
  HTT spacer sequence CTCN PAM
ccaacagcccgggcagcagg

SEQ ID NO: 9718 - RNA, 20 nt, Artificial Sequence
  HTT spacer sequence CTCN PAM
aacagcccgggcagcagggg

SEQ ID NO: 9719 - RNA, 20 nt, Artificial Sequence
  HTT spacer sequence CTCN PAM
uggccuucacgcugcugcug

SEQ ID NO: 9720 - RNA, 20 nt, Artificial Sequence
  HTT spacer sequence CTCN PAM
ugcuggaccuccuggccuuc

SEQ ID NO: 9721 - RNA, 20 nt, Artificial Sequence
  HTT spacer sequence CTCN PAM
gccuccugcuggaccuccug

SEQ ID NO: 9722 - RNA, 20 nt, Artificial Sequence
  HTT spacer sequence CTCN PAM
ggcggcugcugguggauggg

SEQ ID NO: 9723 - RNA, 20 nt, Artificial Sequence
  HTT spacer sequence CTCN PAM
acccccuccccaucccaugg

SEQ ID NO: 9724 - RNA, 20 nt, Artificial Sequence
  HTT spacer sequence CTCN PAM
ccaucccauggugggcugcu

SEQ ID NO: 9725 - RNA, 20 nt, Artificial Sequence
  HTT spacer sequence CTCN PAM
gaccuggccuggguggggug

SEQ ID NO: 9726 - RNA, 20 nt, Artificial Sequence
  HTT spacer sequence CTCN PAM
gcuuccccgcuaacccgacc

SEQ ID NO: 9727 - RNA, 20 nt, Artificial Sequence
  HTT spacer sequence CTCN PAM
ggggccuggcauacccccac

SEQ ID NO: 9728 - RNA, 20 nt, Artificial Sequence
  HTT spacer sequence CTCN PAM
ccggcugucggguguggggg

SEQ ID NO: 9729 - RNA, 20 nt, Artificial Sequence
  HTT spacer sequence CTCN PAM
ggccuacggacgcaggggcc

SEQ ID NO: 9730 - RNA, 20 nt, Artificial Sequence
  HTT spacer sequence CTCN PAM
ggaccguugccuuugcggcu

SEQ ID NO: 9731 - RNA, 20 nt, Artificial Sequence
  HTT spacer sequence CTCN PAM
caggaccguugccuuugcgg

SEQ ID NO: 9732 - RNA, 20 nt, Artificial Sequence
  HTT spacer sequence CTCN PAM
cccuggucucucaggaccgu

SEQ ID NO: 9733 - RNA, 20 nt, Artificial Sequence
  HTT spacer sequence CTCN PAM
cacgcccucguaacagcgag

SEQ ID NO: 9734 - RNA, 20 nt, Artificial Sequence
  HTT spacer sequence CTCN PAM
uaacagcgagagaaaacuug

SEQ ID NO: 9735 - RNA, 20 nt, Artificial Sequence
  HTT spacer sequence CTCN PAM
cuguuacgagggcgugggag

SEQ ID NO: 9736 - RNA, 20 nt, Artificial Sequence
  HTT spacer sequence CTCN PAM
cgcuguuacgagggcguggg

SEQ ID NO: 9737 - RNA, 20 nt, Artificial Sequence
  HTT spacer sequence CTCN PAM
gucucccuggcgggggccau

SEQ ID NO: 9738 - RNA, 20 nt, Artificial Sequence
  HTT spacer sequence CTCN PAM
cuggcgggggccauggggug

SEQ ID NO: 9739 - RNA, 20 nt, Artificial Sequence
  HTT spacer sequence CTCN PAM
ugcguccggugugcacccca

SEQ ID NO: 9740 - RNA, 20 nt, Artificial Sequence
  HTT spacer sequence CTCN PAM
cacuccgccaucccgcgugc

SEQ ID NO: 9741 - RNA, 20 nt, Artificial Sequence
  HTT spacer sequence CTCN PAM
gccaucccgcgugcgucccg

SEQ ID NO: 9742 - RNA, 20 nt, Artificial Sequence
  HTT spacer sequence CTCN PAM
aacccccacgccgcgcgccu

SEQ ID NO: 9743 - RNA, 20 nt, Artificial Sequence
  HTT spacer sequence CTCN PAM
caccgcccccaccccgcgcg

SEQ ID NO: 9744 - RNA, 20 nt, Artificial Sequence
  HTT spacer sequence CTCN PAM
ccuacccugcgcaccucuca

SEQ ID NO: 9745 - RNA, 20 nt, Artificial Sequence
  HTT spacer sequence CTCN PAM
cacccgccccacccccgcgu

SEQ ID NO: 9746 - RNA, 20 nt, Artificial Sequence
  HTT spacer sequence CTCN PAM
cccgccccacccccgcguac

SEQ ID NO: 9747 - RNA, 20 nt, Artificial Sequence
  HTT spacer sequence CTCN PAM
ucccccaccccgcgcguccc

SEQ ID NO: 9748 - RNA, 20 nt, Artificial Sequence
  HTT spacer sequence CTCN PAM
cccaccccgcgcguccccug

SEQ ID NO: 9749 - RNA, 20 nt, Artificial Sequence
  HTT spacer sequence CTCN PAM
gguugggggugggacagggg

SEQ ID NO: 9750 - RNA, 20 nt, Artificial Sequence
  HTT spacer sequence CTCN PAM
ggacggacggucgcacagac

SEQ ID NO: 9751 - RNA, 20 nt, Artificial Sequence
  HTT spacer sequence CTCN PAM
gcacguucucuuccggccgg

SEQ ID NO: 9752 - RNA, 20 nt, Artificial Sequence
  HTT spacer sequence CTCN PAM
uccggccggagucaguggcg

SEQ ID NO: 9753 - RNA, 20 nt, Artificial Sequence
  HTT spacer sequence CTCN PAM
ggccggaagagaacgugcag

SEQ ID NO: 9754 - RNA, 20 nt, Artificial Sequence
  HTT spacer sequence CTCN PAM
ccgguccugcgggucgcugc

SEQ ID NO: 9755 - RNA, 20 nt, Artificial Sequence
  HTT spacer sequence CTCN PAM
gggugcugcuaacccacagc

SEQ ID NO: 9756 - RNA, 20 nt, Artificial Sequence
  HTT spacer sequence CTCN PAM
gcucagggugcugcuaaccc

SEQ ID NO: 9757 - RNA, 20 nt, Artificial Sequence
  HTT spacer sequence CTCN PAM
uccgcuccgcucagggugcu

SEQ ID NO: 9758 - RNA, 20 nt, Artificial Sequence
  HTT spacer sequence CTCN PAM
ggguuacgcggcggcgggca

SEQ ID NO: 9759 - RNA, 20 nt, Artificial Sequence
  HTT spacer sequence CTCN PAM
gccucgggguuacgcggcgg

SEQ ID NO: 9760 - RNA, 20 nt, Artificial Sequence
  HTT spacer sequence CTCN PAM
uggccuggccuccuugggcc

SEQ ID NO: 9761 - RNA, 20 nt, Artificial Sequence
  HTT spacer sequence CTCN PAM
uugggcccacgacgccugcc

SEQ ID NO: 9762 - RNA, 20 nt, Artificial Sequence
  HTT spacer sequence CTCN PAM
gcggggcaggcgucgugggc

SEQ ID NO: 9763 - RNA, 20 nt, Artificial Sequence
  HTT spacer sequence CTCN PAM
ggcccauggguccgcuccgc

SEQ ID NO: 9764 - RNA, 20 nt, Artificial Sequence
  HTT spacer sequence CTCN PAM
ggcgagcgcuggcgcagccu

SEQ ID NO: 9765 - RNA, 20 nt, Artificial Sequence
  HTT spacer sequence CTCN PAM
ccugaggccccgcacacaaa

SEQ ID NO: 9766 - RNA, 20 nt, Artificial Sequence
  HTT spacer sequence CTCN PAM
ccguggaaggaccgcgggcu

SEQ ID NO: 9767 - RNA, 20 nt, Artificial Sequence
  HTT spacer sequence CTCN PAM
ugccacacacacagcggugg

SEQ ID NO: 9768 - RNA, 20 nt, Artificial Sequence
  HTT spacer sequence CTCN PAM
ggcugcgugagcugaccccg

SEQ ID NO: 9769 - RNA, 20 nt, Artificial Sequence
  HTT spacer sequence CTCN PAM
cgcagcccgagcagaauggc

SEQ ID NO: 9770 - RNA, 20 nt, Artificial Sequence
  HTT spacer sequence CTCN PAM
cugugcaccuacuuuugcug

SEQ ID NO: 9771 - RNA, 20 nt, Artificial Sequence
  HTT spacer sequence CTCN PAM
gugcaccuacuuuugcugcg

SEQ ID NO: 9772 - RNA, 20 nt, Artificial Sequence
  HTT spacer sequence CTCN PAM
gcaccaaacgcagcaaaagu

SEQ ID NO: 9773 - RNA, 20 nt, Artificial Sequence
  HTT spacer sequence CTCN PAM
gccgccuguccugggacuuc

SEQ ID NO: 9774 - RNA, 20 nt, Artificial Sequence
  HTT spacer sequence CTCN PAM
gcccacccaauucacaccau

SEQ ID NO: 9775 - RNA, 20 nt, Artificial Sequence
  HTT spacer sequence CTCN PAM
cugggucacccgaaggagga

SEQ ID NO: 9776 - RNA, 20 nt, Artificial Sequence
  HTT spacer sequence CTCN PAM
uucgggugacccagggagcg

SEQ ID NO: 9777 - RNA, 20 nt, Artificial Sequence
  HTT spacer sequence CTCN PAM
uccuucgggugacccaggga

SEQ ID NO: 9778 - RNA, 20 nt, Artificial Sequence
  HTT spacer sequence CTCN PAM
uuccgggcgcagaagcaccc

SEQ ID NO: 9779 - RNA, 20 nt, Artificial Sequence
  HTT spacer sequence CTCN PAM
agcgugggucgggugcuucu

SEQ ID NO: 9780 - RNA, 20 nt, Artificial Sequence
  HTT spacer sequence CTCN PAM
gggcaggagaagcuuugggc

SEQ ID NO: 9781 - RNA, 20 nt, Artificial Sequence
  HTT spacer sequence CTCN PAM
ugcccagagggaccguuucc

SEQ ID NO: 9782 - RNA, 20 nt, Artificial Sequence
  HTT spacer sequence CTCN PAM
agccaggcccaaagcuucuc

SEQ ID NO: 9783 - RNA, 20 nt, Artificial Sequence
  HTT spacer sequence CTCN PAM
cggaaccacgccaacgccug

SEQ ID NO: 9784 - RNA, 20 nt, Artificial Sequence
  HTT spacer sequence CTCN PAM
caccuccccucccaccuucu

SEQ ID NO: 9785 - RNA, 20 nt, Artificial Sequence
  HTT spacer sequence CTCN PAM
ccucccaccuucuaaaaugc

SEQ ID NO: 9786 - RNA, 20 nt, Artificial Sequence
  HTT spacer sequence CTCN PAM
caccuucuaaaaugcuugcg

SEQ ID NO: 9787 - RNA, 20 nt, Artificial Sequence
  HTT spacer sequence CTCN PAM
cguggccgacccuaaccaga

SEQ ID NO: 9788 - RNA, 20 nt, Artificial Sequence
  HTT spacer sequence CTCN PAM
auagagaacuuccaauugug

SEQ ID NO: 9789 - RNA, 20 nt, Artificial Sequence
  HTT spacer sequence CTCN PAM
auggaguaaaggcgguaugu

SEQ ID NO: 9790 - RNA, 20 nt, Artificial Sequence
  HTT spacer sequence CTCN PAM
uccuaauagaugcaguuuuc

SEQ ID NO: 9791 - RNA, 20 nt, Artificial Sequence
  HTT spacer sequence CTCN PAM
gggaaaaaagcuaauaacag

SEQ ID NO: 9792 - RNA, 20 nt, Artificial Sequence
  HTT spacer sequence CTCN PAM
augaaacugccauugcaaaa

SEQ ID NO: 9793 - RNA, 20 nt, Artificial Sequence
  HTT spacer sequence CTCN PAM
cugucggcaaauuuugcaau

SEQ ID NO: 9794 - RNA, 20 nt, Artificial Sequence
  HTT spacer sequence CTCN PAM
auuuugcuucuaaccuccau

SEQ ID NO: 9795 - RNA, 20 nt, Artificial Sequence
  HTT spacer sequence CTCN PAM
augcccuccuuguuuacugc

SEQ ID NO: 9796 - RNA, 20 nt, Artificial Sequence
  HTT spacer sequence CTCN PAM
uuguuuacugcugcacgcag

SEQ ID NO: 9797 - RNA, 20 nt, Artificial Sequence
  HTT spacer sequence CTCN PAM
cacaguucaaccugcgugca

SEQ ID NO: 9798 - RNA, 20 nt, Artificial Sequence
  HTT spacer sequence CTCN PAM
ucaaccguaguuucuaaucu

SEQ ID NO: 9799 - RNA, 20 nt, Artificial Sequence
  HTT spacer sequence CTCN PAM
cgcugcgugacucuucaacc

SEQ ID NO: 9800 - RNA, 20 nt, Artificial Sequence
  HTT spacer sequence CTCN PAM
ccaaacugcuccuggcgaua

SEQ ID NO: 9801 - RNA, 20 nt, Artificial Sequence
  HTT spacer sequence CTCN PAM
uggcgauaacaucaccaucg

SEQ ID NO: 9802 - RNA, 20 nt, Artificial Sequence
  HTT spacer sequence CTCN PAM
ucugauguuguggcacccag

SEQ ID NO: 9803 - RNA, 20 nt, Artificial Sequence
  HTT spacer sequence CTCN PAM
gugcgaaaacagcuucgacu

SEQ ID NO: 9804 - RNA, 20 nt, Artificial Sequence
  HTT spacer sequence CTCN PAM
cugugauuucaucucugacc

SEQ ID NO: 9805 - RNA, 20 nt, Artificial Sequence
  HTT spacer sequence CTCN PAM
gaccugaccaauggguacuu

SEQ ID NO: 9806 - RNA, 20 nt, Artificial Sequence
  HTT spacer sequence CTCN PAM
cuggcugccccccacccacc

SEQ ID NO: 9807 - RNA, 20 nt, Artificial Sequence
  HTT spacer sequence CTCN PAM
aaaccccagaugcucaggga

SEQ ID NO: 9808 - RNA, 20 nt, Artificial Sequence
  HTT spacer sequence CTCN PAM
gggagaccgaguaauaauaa

SEQ ID NO: 9809 - RNA, 20 nt, Artificial Sequence
  HTT spacer sequence CTCN PAM
cugagcaucugggguuugga

SEQ ID NO: 9810 - RNA, 20 nt, Artificial Sequence
  HTT spacer sequence CTCN PAM
gucucccugagcaucugggg

SEQ ID NO: 9811 - RNA, 20 nt, Artificial Sequence
  HTT spacer sequence CTCN PAM
agucucccacacagcuagcu

SEQ ID NO: 9812 - RNA, 20 nt, Artificial Sequence
  HTT spacer sequence CTCN PAM
cacacagcuagcucugcgug

SEQ ID NO: 9813 - RNA, 20 nt, Artificial Sequence
  HTT spacer sequence CTCN PAM
gcgugaauuaccuuuucucu

SEQ ID NO: 9814 - RNA, 20 nt, Artificial Sequence
  HTT spacer sequence CTCN PAM
guugcaaaugcccuuucuug

SEQ ID NO: 9815 - RNA, 20 nt, Artificial Sequence
  HTT spacer sequence CTCN PAM
ucaaugacaugacacgcagc

SEQ ID NO: 9816 - RNA, 20 nt, Artificial Sequence
  HTT spacer sequence CTCN PAM
agcugcgugucaugucauug

SEQ ID NO: 9817 - RNA, 20 nt, Artificial Sequence
  HTT spacer sequence CTCN PAM
uacacucuagcugcguguca

SEQ ID NO: 9818 - RNA, 20 nt, Artificial Sequence
  HTT spacer sequence CTCN PAM
auggacagccaggugccugg

SEQ ID NO: 9819 - RNA, 20 nt, Artificial Sequence
  HTT spacer sequence CTCN PAM
uuuccucuuugcuuggccaa

SEQ ID NO: 9820 - RNA, 20 nt, Artificial Sequence
  HTT spacer sequence CTCN PAM
uugcuuggccaaagaggguu

SEQ ID NO: 9821 - RNA, 20 nt, Artificial Sequence
  HTT spacer sequence CTCN PAM
uuggccaagcaaagaggaaa

SEQ ID NO: 9822 - RNA, 20 nt, Artificial Sequence
  HTT spacer sequence CTCN PAM
ggacccuggcccaacccucu

SEQ ID NO: 9823 - RNA, 20 nt, Artificial Sequence
  HTT spacer sequence CTCN PAM
gccacacggcuacugccacu

SEQ ID NO: 9824 - RNA, 20 nt, Artificial Sequence
  HTT spacer sequence CTCN PAM
ucuagauuuguggauccgug

SEQ ID NO: 9825 - RNA, 20 nt, Artificial Sequence
  HTT spacer sequence CTCN PAM
gagccaucuggggaggcugg

SEQ ID NO: 9826 - RNA, 20 nt, Artificial Sequence
  HTT spacer sequence CTCN PAM
gagacaggucuggcaggugc

SEQ ID NO: 9827 - RNA, 20 nt, Artificial Sequence
  HTT spacer sequence CTCN PAM
ccagauggcucagagacagg

SEQ ID NO: 9828 - RNA, 20 nt, Artificial Sequence
  HTT spacer sequence CTCN PAM
ggcccugacgggggaaaucu

SEQ ID NO: 9829 - RNA, 20 nt, Artificial Sequence
  HTT spacer sequence CTCN PAM
ucuccaagcugcuggcuuca

SEQ ID NO: 9830 - RNA, 20 nt, Artificial Sequence
  HTT spacer sequence CTCN PAM
aagcugcuggcuucagccca

SEQ ID NO: 9831 - RNA, 20 nt, Artificial Sequence
  HTT spacer sequence CTCN PAM
gucuugcgcuuuccagagag

SEQ ID NO: 9832 - RNA, 20 nt, Artificial Sequence
  HTT spacer sequence CTCN PAM
ggaaagcgcaagacagagac

SEQ ID NO: 9833 - RNA, 20 nt, Artificial Sequence
  HTT spacer sequence CTCN PAM
cuggaaagcgcaagacagag

SEQ ID NO: 9834 - RNA, 20 nt, Artificial Sequence
  HTT spacer sequence CTCN PAM
cucuggaaagcgcaagacag

SEQ ID NO: 9835 - RNA, 20 nt, Artificial Sequence
  HTT spacer sequence CTCN PAM
uuuugagcuccaggccuacc

SEQ ID NO: 9836 - RNA, 20 nt, Artificial Sequence
  HTT spacer sequence CTCN PAM
aaaugagucagucucucucu

SEQ ID NO: 9837 - RNA, 20 nt, Artificial Sequence
  HTT spacer sequence CTCN PAM
aggccuaccaggcagcccaa

SEQ ID NO: 9838 - RNA, 20 nt, Artificial Sequence
  HTT spacer sequence CTCN PAM
cacacugaggauggcucaug

SEQ ID NO: 9839 - RNA, 20 nt, Artificial Sequence
  HTT spacer sequence CTCN PAM
cacugaggauggcucaugcu

SEQ ID NO: 9840 - RNA, 20 nt, Artificial Sequence
  HTT spacer sequence CTCN PAM
gugugagaggcaguuacugc

SEQ ID NO: 9841 - RNA, 20 nt, Artificial Sequence
  HTT spacer sequence CTCN PAM
ugcucugguccagccauggc

SEQ ID NO: 9842 - RNA, 20 nt, Artificial Sequence
  HTT spacer sequence CTCN PAM
gguccagccauggcuugaac

SEQ ID NO: 9843 - RNA, 20 nt, Artificial Sequence
  HTT spacer sequence CTCN PAM
caacaagaacaaagccagac

SEQ ID NO: 9844 - RNA, 20 nt, Artificial Sequence
  HTT spacer sequence CTCN PAM
uucucccuagcaucuucuuc

SEQ ID NO: 9845 - RNA, 20 nt, Artificial Sequence
  HTT spacer sequence CTCN PAM
cuagcaucuucuuccuugcu

SEQ ID NO: 9846 - RNA, 20 nt, Artificial Sequence
  HTT spacer sequence CTCN PAM
aagaucccacaccccguuag

SEQ ID NO: 9847 - RNA, 20 nt, Artificial Sequence
  HTT spacer sequence CTCN PAM
ccuccccagucguagucugg

SEQ ID NO: 9848 - RNA, 20 nt, Artificial Sequence
  HTT spacer sequence CTCN PAM
ccagucguagucugguuaau

SEQ ID NO: 9849 - RNA, 20 nt, Artificial Sequence
  HTT spacer sequence CTCN PAM
ccacggucaccguggcuaga

SEQ ID NO: 9850 - RNA, 20 nt, Artificial Sequence
  HTT spacer sequence CTCN PAM
gcgaugcuucaggcacguac

SEQ ID NO: 9851 - RNA, 20 nt, Artificial Sequence
  HTT spacer sequence CTCN PAM
ugaggugugaacuugacccc

SEQ ID NO: 9852 - RNA, 20 nt, Artificial Sequence
  HTT spacer sequence CTCN PAM
ugagaucacagugaccagcc

SEQ ID NO: 9853 - RNA, 20 nt, Artificial Sequence
  HTT spacer sequence CTCN PAM
gucauccccuggggaaugcc

SEQ ID NO: 9854 - RNA, 20 nt, Artificial Sequence
  HTT spacer sequence CTCN PAM
gccugcaagaccgcauaccg

SEQ ID NO: 9855 - RNA, 20 nt, Artificial Sequence
  HTT spacer sequence CTCN PAM
cucagcaagguggcaggucc

SEQ ID NO: 9856 - RNA, 20 nt, Artificial Sequence
  HTT spacer sequence CTCN PAM
gcaagguggcaggucccaac

SEQ ID NO: 9857 - RNA, 20 nt, Artificial Sequence
  HTT spacer sequence CTCN PAM
uggugcaaggcuuguuggga

SEQ ID NO: 9858 - RNA, 20 nt, Artificial Sequence
  HTT spacer sequence CTCN PAM
cuggccagcuugugaaguuc

SEQ ID NO: 9859 - RNA, 20 nt, Artificial Sequence
  HTT spacer sequence CTCN PAM
uuacuucuuacagcucacag

SEQ ID NO: 9860 - RNA, 20 nt, Artificial Sequence
  HTT spacer sequence CTCN PAM
cagucccucccggguccagc

SEQ ID NO: 9861 - RNA, 20 nt, Artificial Sequence
  HTT spacer sequence CTCN PAM
cggguccagcacaccugagg

SEQ ID NO: 9862 - RNA, 20 nt, Artificial Sequence
  HTT spacer sequence CTCN PAM
ggugugcuggacccgggagg

SEQ ID NO: 9863 - RNA, 20 nt, Artificial Sequence
  HTT spacer sequence CTCN PAM
cucuugauuagugcagggga

SEQ ID NO: 9864 - RNA, 20 nt, Artificial Sequence
  HTT spacer sequence CTCN PAM
ugauuagugcaggggaaaag

SEQ ID NO: 9865 - RNA, 20 nt, Artificial Sequence
  HTT spacer sequence CTCN PAM
ucccaccuccgagagugcag

SEQ ID NO: 9866 - RNA, 20 nt, Artificial Sequence
  HTT spacer sequence CTCN PAM
caccuccgagagugcagugu

SEQ ID NO: 9867 - RNA, 20 nt, Artificial Sequence
  HTT spacer sequence CTCN PAM
gagagugcaguguccugaau

SEQ ID NO: 9868 - RNA, 20 nt, Artificial Sequence
  HTT spacer sequence CTCN PAM
gaggugggaggagacugggu

SEQ ID NO: 9869 - RNA, 20 nt, Artificial Sequence
  HTT spacer sequence CTCN PAM
cggaggugggaggagacugg

SEQ ID NO: 9870 - RNA, 20 nt, Artificial Sequence
  HTT spacer sequence CTCN PAM
auucaggacacugcacucuc

SEQ ID NO: 9871 - RNA, 20 nt, Artificial Sequence
  HTT spacer sequence CTCN PAM
gcuggaacagccacaguugg

SEQ ID NO: 9872 - RNA, 20 nt, Artificial Sequence
  HTT spacer sequence CTCN PAM
gauuucuaaaauaucugcaa

SEQ ID NO: 9873 - RNA, 20 nt, Artificial Sequence
  HTT spacer sequence CTCN PAM
uggggacuggggauucuggc

SEQ ID NO: 9874 - RNA, 20 nt, Artificial Sequence
  HTT spacer sequence CTCN PAM
gggaucgggaauggucugug

SEQ ID NO: 9875 - RNA, 20 nt, Artificial Sequence
  HTT spacer sequence CTCN PAM
ccccacccgcugccugcggu

SEQ ID NO: 9876 - RNA, 20 nt, Artificial Sequence
  HTT spacer sequence CTCN PAM
agcuccccccacccgcugcc

SEQ ID NO: 9877 - RNA, 20 nt, Artificial Sequence
  HTT spacer sequence CTCN PAM
aaaaaaaauuacuuuuuugg

SEQ ID NO: 9878 - RNA, 20 nt, Artificial Sequence
  HTT spacer sequence CTCN PAM
caccuauaauuggggggcca

SEQ ID NO: 9879 - RNA, 20 nt, Artificial Sequence
  HTT spacer sequence CTCN PAM
gguaauccaccugccuuggc

SEQ ID NO: 9880 - RNA, 20 nt, Artificial Sequence
  HTT spacer sequence CTCN PAM
ugcuuccuuaacaguggcuu

SEQ ID NO: 9881 - RNA, 20 nt, Artificial Sequence
  HTT spacer sequence CTCN PAM
cagccagagccugcuuggga

SEQ ID NO: 9882 - RNA, 20 nt, Artificial Sequence
  HTT spacer sequence CTCN PAM
gccagagccugcuugggagu

SEQ ID NO: 9883 - RNA, 20 nt, Artificial Sequence
  HTT spacer sequence CTCN PAM
ggcugagagguggggacaga

SEQ ID NO: 9884 - RNA, 20 nt, Artificial Sequence
  HTT spacer sequence CTCN PAM
caagcaggcucuggcugaga

SEQ ID NO: 9885 - RNA, 20 nt, Artificial Sequence
  HTT spacer sequence CTCN PAM
guagucaucugcucaacugc

SEQ ID NO: 9886 - RNA, 20 nt, Artificial Sequence
  HTT spacer sequence CTCN PAM
acugcagaacuggcagacgc

SEQ ID NO: 9887 - RNA, 20 nt, Artificial Sequence
  HTT spacer sequence CTCN PAM
cacugagcccacagcccugg

SEQ ID NO: 9888 - RNA, 20 nt, Artificial Sequence
  HTT spacer sequence CTCN PAM
gugggagcugacggggggcg

SEQ ID NO: 9889 - RNA, 20 nt, Artificial Sequence
  HTT spacer sequence CTCN PAM
cagggagaugcugccagcac

SEQ ID NO: 9890 - RNA, 20 nt, Artificial Sequence
  HTT spacer sequence CTCN PAM
cugggaggccagggcugugg

SEQ ID NO: 9891 - RNA, 20 nt, Artificial Sequence
  HTT spacer sequence CTCN PAM
ucucacaggucagcggccgg

SEQ ID NO: 9892 - RNA, 20 nt, Artificial Sequence
  HTT spacer sequence CTCN PAM
caggucagcggccggcagag

SEQ ID NO: 9893 - RNA, 20 nt, Artificial Sequence
  HTT spacer sequence CTCN PAM
gccggccgcugaccugugag

SEQ ID NO: 9894 - RNA, 20 nt, Artificial Sequence
  HTT spacer sequence CTCN PAM
gacacagcuccugaaaaaca

SEQ ID NO: 9895 - RNA, 20 nt, Artificial Sequence
  HTT spacer sequence CTCN PAM
ugaaaaacacgaaauccccg

SEQ ID NO: 9896 - RNA, 20 nt, Artificial Sequence
  HTT spacer sequence CTCN PAM
gcgaugacucaccugcugcg

SEQ ID NO: 9897 - RNA, 20 nt, Artificial Sequence
  HTT spacer sequence CTCN PAM
ccugcugcgugcccugagcu

SEQ ID NO: 9898 - RNA, 20 nt, Artificial Sequence
  HTT spacer sequence CTCN PAM
gggcacgcagcaggugaguc

SEQ ID NO: 9899 - RNA, 20 nt, Artificial Sequence
  HTT spacer sequence CTCN PAM
acgcacggguucuguggugu

SEQ ID NO: 9900 - RNA, 20 nt, Artificial Sequence
  HTT spacer sequence CTCN PAM
cgcugccuugacaccacaga

SEQ ID NO: 9901 - RNA, 20 nt, Artificial Sequence
  HTT spacer sequence CTCN PAM
cagcacuguccucacgcugc

SEQ ID NO: 9902 - RNA, 20 nt, Artificial Sequence
  HTT spacer sequence CTCN PAM
cugcagcaggauggugcccu

SEQ ID NO: 9903 - RNA, 20 nt, Artificial Sequence
  HTT spacer sequence CTCN PAM
aguccuggcacagccggaac

SEQ ID NO: 9904 - RNA, 20 nt, Artificial Sequence
  HTT spacer sequence CTCN PAM
ucaagaagacaguggcuuua

SEQ ID NO: 9905 - RNA, 20 nt, Artificial Sequence
  HTT spacer sequence CTCN PAM
cucuucaagaagacaguggc

SEQ ID NO: 9906 - RNA, 20 nt, Artificial Sequence
  HTT spacer sequence CTCN PAM
ggggccagcccacggcccuc

SEQ ID NO: 9907 - RNA, 20 nt, Artificial Sequence
  HTT spacer sequence CTCN PAM
caggggccagcccacggccc

SEQ ID NO: 9908 - RNA, 20 nt, Artificial Sequence
  HTT spacer sequence CTCN PAM
cugaaaggaggggacuuggg

SEQ ID NO: 9909 - RNA, 20 nt, Artificial Sequence
  HTT spacer sequence CTCN PAM
gaaaggaggggacuugggga

SEQ ID NO: 9910 - RNA, 20 nt, Artificial Sequence
  HTT spacer sequence CTCN PAM
uuucagagagugcucucagg

SEQ ID NO: 9911 - RNA, 20 nt, Artificial Sequence
  HTT spacer sequence CTCN PAM
ccaaguccccuccuuucaga

SEQ ID NO: 9912 - RNA, 20 nt, Artificial Sequence
  HTT spacer sequence CTCN PAM
aacuccccaaguccccuccu

SEQ ID NO: 9913 - RNA, 20 nt, Artificial Sequence
  HTT spacer sequence CTCN PAM
ucacagccagaaacgucaac

SEQ ID NO: 9914 - RNA, 20 nt, Artificial Sequence
  HTT spacer sequence CTCN PAM
cagccagaaacgucaacaga

SEQ ID NO: 9915 - RNA, 20 nt, Artificial Sequence
  HTT spacer sequence CTCN PAM
uucccagacaaacuuggcac

SEQ ID NO: 9916 - RNA, 20 nt, Artificial Sequence
  HTT spacer sequence CTCN PAM
cggccuuucgugccaaguuu

SEQ ID NO: 9917 - RNA, 20 nt, Artificial Sequence
  HTT spacer sequence CTCN PAM
gccugggcucagacaugucc

SEQ ID NO: 9918 - RNA, 20 nt, Artificial Sequence
  HTT spacer sequence CTCN PAM
ccuggagcuccugcgggugg

SEQ ID NO: 9919 - RNA, 20 nt, Artificial Sequence
  HTT spacer sequence CTCN PAM
aggugaggcuucccggccac

SEQ ID NO: 9920 - RNA, 20 nt, Artificial Sequence
  HTT spacer sequence CTCN PAM
ugcggguggcugcaguccgc

SEQ ID NO: 9921 - RNA, 20 nt, Artificial Sequence
  HTT spacer sequence CTCN PAM
cggaucaccuggcggacugc

SEQ ID NO: 9922 - RNA, 20 nt, Artificial Sequence
  HTT spacer sequence CTCN PAM
ucacggaucaccuggcggac

SEQ ID NO: 9923 - RNA, 20 nt, Artificial Sequence
  HTT spacer sequence CTCN PAM
aagcccuccucacggaucac

SEQ ID NO: 9924 - RNA, 20 nt, Artificial Sequence
  HTT spacer sequence CTCN PAM
ccaagcccuccucacggauc

SEQ ID NO: 9925 - RNA, 20 nt, Artificial Sequence
  HTT spacer sequence CTCN PAM
uguacgggucccugccaucc

SEQ ID NO: 9926 - RNA, 20 nt, Artificial Sequence
  HTT spacer sequence CTCN PAM
cagacuguccugccuggcug

SEQ ID NO: 9927 - RNA, 20 nt, Artificial Sequence
  HTT spacer sequence CTCN PAM
ugcccucacagacuguccug

SEQ ID NO: 9928 - RNA, 20 nt, Artificial Sequence
  HTT spacer sequence CTCN PAM
ugccuccugcccucacagac

SEQ ID NO: 9929 - RNA, 20 nt, Artificial Sequence
  HTT spacer sequence CTCN PAM
ucuugccuccugcccucaca

SEQ ID NO: 9930 - RNA, 20 nt, Artificial Sequence
  HTT spacer sequence CTCN PAM
cauaccggaugugauuggcc

SEQ ID NO: 9931 - RNA, 20 nt, Artificial Sequence
  HTT spacer sequence CTCN PAM
gucgaaguuggggcccucag

SEQ ID NO: 9932 - RNA, 20 nt, Artificial Sequence
  HTT spacer sequence CTCN PAM
gucuacucgcccagcggagg

SEQ ID NO: 9933 - RNA, 20 nt, Artificial Sequence
  HTT spacer sequence CTCN PAM
cccagcggagggagaggcug

SEQ ID NO: 9934 - RNA, 20 nt, Artificial Sequence
  HTT spacer sequence CTCN PAM
gcugggcgaguagacugagg

SEQ ID NO: 9935 - RNA, 20 nt, Artificial Sequence
  HTT spacer sequence CTCN PAM
cuccgcugggcgaguagacu

SEQ ID NO: 9936 - RNA, 20 nt, Artificial Sequence
  HTT spacer sequence CTCN PAM
cccuccgcugggcgaguaga

SEQ ID NO: 9937 - RNA, 20 nt, Artificial Sequence
  HTT spacer sequence CTCN PAM
gcugccacguggccacaucc

SEQ ID NO: 9938 - RNA, 20 nt, Artificial Sequence
  HTT spacer sequence CTCN PAM
cuagcagacaccacgagcag

SEQ ID NO: 9939 - RNA, 20 nt, Artificial Sequence
  HTT spacer sequence CTCN PAM
agcagacaccacgagcaguu

SEQ ID NO: 9940 - RNA, 20 nt, Artificial Sequence
  HTT spacer sequence CTCN PAM
uggugucugcuagagaggau

SEQ ID NO: 9941 - RNA, 20 nt, Artificial Sequence
  HTT spacer sequence CTCN PAM
gaacugcucguggugucugc

SEQ ID NO: 9942 - RNA, 20 nt, Artificial Sequence
  HTT spacer sequence CTCN PAM
gaaagggugcaccagagugg

SEQ ID NO: 9943 - RNA, 20 nt, Artificial Sequence
  HTT spacer sequence CTCN PAM
ggugcacccuuucagagcgc

SEQ ID NO: 9944 - RNA, 20 nt, Artificial Sequence
  HTT spacer sequence CTCN PAM
guccugucgcacuuggaauu

SEQ ID NO: 9945 - RNA, 20 nt, Artificial Sequence
  HTT spacer sequence CTCN PAM
cucaaaucaacucaccuugg

SEQ ID NO: 9946 - RNA, 20 nt, Artificial Sequence
  HTT spacer sequence CTCN PAM
aaucaacucaccuuggcuug

SEQ ID NO: 9947 - RNA, 20 nt, Artificial Sequence
  HTT spacer sequence CTCN PAM
ccuuggcuugcuuuguuugg

SEQ ID NO: 9948 - RNA, 20 nt, Artificial Sequence
  HTT spacer sequence CTCN PAM
aaacaaagcaagccaaggug

SEQ ID NO: 9949 - RNA, 20 nt, Artificial Sequence
  HTT spacer sequence CTCN PAM
gguauaaaccucugggacaa

SEQ ID NO: 9950 - RNA, 20 nt, Artificial Sequence
  HTT spacer sequence CTCN PAM
gggacaaagccacauacucc

SEQ ID NO: 9951 - RNA, 20 nt, Artificial Sequence
  HTT spacer sequence CTCN PAM
aggaacaggcagcacacgaa

SEQ ID NO: 9952 - RNA, 20 nt, Artificial Sequence
  HTT spacer sequence CTCN PAM
aggacguggugaagggccug

SEQ ID NO: 9953 - RNA, 20 nt, Artificial Sequence
  HTT spacer sequence CTCN PAM
acaugcggcaggggucggcc

SEQ ID NO: 9954 - RNA, 20 nt, Artificial Sequence
  HTT spacer sequence CTCN PAM
ccacaugcggcaggggucgg

SEQ ID NO: 9955 - RNA, 20 nt, Artificial Sequence
  HTT spacer sequence CTCN PAM
ccaaggugcguucucuccac

SEQ ID NO: 9956 - RNA, 20 nt, Artificial Sequence
  HTT spacer sequence CTCN PAM
gucagcugcucaccaaggug

SEQ ID NO: 9957 - RNA, 20 nt, Artificial Sequence
  HTT spacer sequence CTCN PAM
ugugccucagucagcugcuc

SEQ ID NO: 9958 - RNA, 20 nt, Artificial Sequence
  HTT spacer sequence CTCN PAM
uuuauuugaaaaucacuggg

SEQ ID NO: 9959 - RNA, 20 nt, Artificial Sequence
  HTT spacer sequence CTCN PAM
gcuuaccacauccaacccug

SEQ ID NO: 9960 - RNA, 20 nt, Artificial Sequence
  HTT spacer sequence CTCN PAM
aucauuucuuccaucucaug

SEQ ID NO: 9961 - RNA, 20 nt, Artificial Sequence
  HTT spacer sequence CTCN PAM
ugcaucgcaucucggagaac

SEQ ID NO: 9962 - RNA, 20 nt, Artificial Sequence
  HTT spacer sequence CTCN PAM
gagaacaaauuugauagcgu

SEQ ID NO: 9963 - RNA, 20 nt, Artificial Sequence
  HTT spacer sequence CTCN PAM
gagaugcgaugcaugagaug

SEQ ID NO: 9964 - RNA, 20 nt, Artificial Sequence
  HTT spacer sequence CTCN PAM
ugacuuuacauuucugcuua

SEQ ID NO: 9965 - RNA, 20 nt, Artificial Sequence
  HTT spacer sequence CTCN PAM
ccugacuuuacauuucugcu

SEQ ID NO: 9966 - RNA, 20 nt, Artificial Sequence
  HTT spacer sequence CTCN PAM
cagucauugauaaguugguu

SEQ ID NO: 9967 - RNA, 20 nt, Artificial Sequence
  HTT spacer sequence CTCN PAM
gugcucagcaccaagaacaa

SEQ ID NO: 9968 - RNA, 20 nt, Artificial Sequence
  HTT spacer sequence CTCN PAM
cagcgcuccacacacacuca

SEQ ID NO: 9969 - RNA, 20 nt, Artificial Sequence
  HTT spacer sequence CTCN PAM
acacacacucaauccacgua

SEQ ID NO: 9970 - RNA, 20 nt, Artificial Sequence
  HTT spacer sequence CTCN PAM
auccacguacuucuaauuuu

SEQ ID NO: 9971 - RNA, 20 nt, Artificial Sequence
  HTT spacer sequence CTCN PAM
cagaaggaaacaaagcaaaa

SEQ ID NO: 9972 - RNA, 20 nt, Artificial Sequence
  HTT spacer sequence CTCN PAM
ggugguugcacuucugaauu

SEQ ID NO: 9973 - RNA, 20 nt, Artificial Sequence
  HTT spacer sequence CTCN PAM
ccaccaccaaaagcugcucu

SEQ ID NO: 9974 - RNA, 20 nt, Artificial Sequence
  HTT spacer sequence CTCN PAM
accaccaaaagcugcucuuc

SEQ ID NO: 9975 - RNA, 20 nt, Artificial Sequence
  HTT spacer sequence CTCN PAM
uccaucgaucuuccuaacaa

SEQ ID NO: 9976 - RNA, 20 nt, Artificial Sequence
  HTT spacer sequence CTCN PAM
guuguuaggaagaucgaugg

SEQ ID NO: 9977 - RNA, 20 nt, Artificial Sequence
  HTT spacer sequence CTCN PAM
guuccucauaggauucaggg

SEQ ID NO: 9978 - RNA, 20 nt, Artificial Sequence
  HTT spacer sequence CTCN PAM
uaggauucaggggcuaucaa

SEQ ID NO: 9979 - RNA, 20 nt, Artificial Sequence
  HTT spacer sequence CTCN PAM
aaaauaaauauauauacaua

SEQ ID NO: 9980 - RNA, 20 nt, Artificial Sequence
  HTT spacer sequence CTCN PAM
aucucaaaaauaaauauaua

SEQ ID NO: 9981 - RNA, 20 nt, Artificial Sequence
  HTT spacer sequence CTCN PAM
cucuguugcccaggcuggag

SEQ ID NO: 9982 - RNA, 20 nt, Artificial Sequence
  HTT spacer sequence CTCN PAM
guugcccaggcuggagugca

SEQ ID NO: 9983 - RNA, 20 nt, Artificial Sequence
  HTT spacer sequence CTCN PAM
agccugggcaacagagcgag

SEQ ID NO: 9984 - RNA, 20 nt, Artificial Sequence
  HTT spacer sequence CTCN PAM
gcucacugaaacuuccgccu

SEQ ID NO: 9985 - RNA, 20 nt, Artificial Sequence
  HTT spacer sequence CTCN PAM
cugaaacuuccgccuccugg

SEQ ID NO: 9986 - RNA, 20 nt, Artificial Sequence
  HTT spacer sequence CTCN PAM
uggguucaagagauucuccu

SEQ ID NO: 9987 - RNA, 20 nt, Artificial Sequence
  HTT spacer sequence CTCN PAM
ugaacccaggaggcggaagu

SEQ ID NO: 9988 - RNA, 20 nt, Artificial Sequence
  HTT spacer sequence CTCN PAM
ugccccagccugcugaguag

SEQ ID NO: 9989 - RNA, 20 nt, Artificial Sequence
  HTT spacer sequence CTCN PAM
gguucugggauaaccuuuau

SEQ ID NO: 9990 - RNA, 20 nt, Artificial Sequence
  HTT spacer sequence CTCN PAM
ucucugguagcuuuuccagc

SEQ ID NO: 9991 - RNA, 20 nt, Artificial Sequence
  HTT spacer sequence CTCN PAM
gguagcuuuuccagcucuuu

SEQ ID NO: 9992 - RNA, 20 nt, Artificial Sequence
  HTT spacer sequence CTCN PAM
uuccuugccgcuuaucaacc

SEQ ID NO: 9993 - RNA, 20 nt, Artificial Sequence
  HTT spacer sequence CTCN PAM
gcucuuuugcuggcuucucg

SEQ ID NO: 9994 - RNA, 20 nt, Artificial Sequence
  HTT spacer sequence CTCN PAM
uuugcuggcuucucguuuuc

SEQ ID NO: 9995 - RNA, 20 nt, Artificial Sequence
  HTT spacer sequence CTCN PAM
uuuucuuccucacucuccac

SEQ ID NO: 9996 - RNA, 20 nt, Artificial Sequence
  HTT spacer sequence CTCN PAM
cucuccacguuggauuccag

SEQ ID NO: 9997 - RNA, 20 nt, Artificial Sequence
  HTT spacer sequence CTCN PAM
ccacguuggauuccaggucc

SEQ ID NO: 9998 - RNA, 20 nt, Artificial Sequence
  HTT spacer sequence CTCN PAM
acguuggauuccagguccaa

SEQ ID NO: 9999 - RNA, 20 nt, Artificial Sequence
  HTT spacer sequence CTCN PAM
ccucuguguccuccccgccu

SEQ ID NO: 10000 - RNA, 20 nt, Artificial Sequence
  HTT spacer sequence CTCN PAM
ucuguguccuccccgccuga

SEQ ID NO: 10001 - RNA, 20 nt, Artificial Sequence
  HTT spacer sequence CTCN PAM
guguccuccccgccugaacu

SEQ ID NO: 10002 - RNA, 20 nt, Artificial Sequence
  HTT spacer sequence CTCN PAM
ccgccugaacugucaccuuc

SEQ ID NO: 10003 - RNA, 20 nt, Artificial Sequence
  HTT spacer sequence CTCN PAM
uugcucucagggucacuggc

SEQ ID NO: 10004 - RNA, 20 nt, Artificial Sequence
  HTT spacer sequence CTCN PAM
cagggucacuggcuuccuug

SEQ ID NO: 10005 - RNA, 20 nt, Artificial Sequence
  HTT spacer sequence CTCN PAM
gggucacuggcuuccuugcu

SEQ ID NO: 10006 - RNA, 20 nt, Artificial Sequence
  HTT spacer sequence CTCN PAM
uccuggacaucuuccucgac

SEQ ID NO: 10007 - RNA, 20 nt, Artificial Sequence
  HTT spacer sequence CTCN PAM
acauucaucuuuccauccua

SEQ ID NO: 10008 - RNA, 20 nt, Artificial Sequence
  HTT spacer sequence CTCN PAM
ugguaggauggaaagaugaa

SEQ ID NO: 10009 - RNA, 20 nt, Artificial Sequence
  HTT spacer sequence CTCN PAM
ugcccugugguuuccacgcu

SEQ ID NO: 10010 - RNA, 20 nt, Artificial Sequence
  HTT spacer sequence CTCN PAM
uuuuuuaauuuaaaaacauu

SEQ ID NO: 10011 - RNA, 20 nt, Artificial Sequence
  HTT spacer sequence CTCN PAM
cuuuuuuuaauuuaaaaaca

SEQ ID NO: 10012 - RNA, 20 nt, Artificial Sequence
  HTT spacer sequence CTCN PAM
cucuuuuuuuaauuuaaaaa

SEQ ID NO: 10013 - RNA, 20 nt, Artificial Sequence
  HTT spacer sequence CTCN PAM
uucucucucuuuuuuuaauu

SEQ ID NO: 10014 - RNA, 20 nt, Artificial Sequence
  HTT spacer sequence CTCN PAM
uccuuuccaagcauucuucg

SEQ ID NO: 10015 - RNA, 20 nt, Artificial Sequence
  HTT spacer sequence CTCN PAM
cagccugagcaggaaggaau

SEQ ID NO: 10016 - RNA, 20 nt, Artificial Sequence
  HTT spacer sequence CTCN PAM
gccugagcaggaaggaauga

SEQ ID NO: 10017 - RNA, 20 nt, Artificial Sequence
  HTT spacer sequence CTCN PAM
ggcugagagacuucgaagaa

SEQ ID NO: 10018 - RNA, 20 nt, Artificial Sequence
  HTT spacer sequence CTCN PAM
uuccuuccugcucaggcuga

SEQ ID NO: 10019 - RNA, 20 nt, Artificial Sequence
  HTT spacer sequence CTCN PAM
aagacaucucauuccuuccu

SEQ ID NO: 10020 - RNA, 20 nt, Artificial Sequence
  HTT spacer sequence CTCN PAM
uccaacauauggugaggggg

SEQ ID NO: 10021 - RNA, 20 nt, Artificial Sequence
  HTT spacer sequence CTCN PAM
ugaggugcugccacccuacc

SEQ ID NO: 10022 - RNA, 20 nt, Artificial Sequence
  HTT spacer sequence CTCN PAM
ggagcagggcugugcugcug

SEQ ID NO: 10023 - RNA, 20 nt, Artificial Sequence
  HTT spacer sequence CTCN PAM
agcuuccugaggugcuccug

SEQ ID NO: 10024 - RNA, 20 nt, Artificial Sequence
  HTT spacer sequence CTCN PAM
ggaagcuggagguagggugg

SEQ ID NO: 10025 - RNA, 20 nt, Artificial Sequence
  HTT spacer sequence CTCN PAM
ugcucuuccuuugccaauuc

SEQ ID NO: 10026 - RNA, 20 nt, Artificial Sequence
  HTT spacer sequence CTCN PAM
uccuuugccaauucugccuc

SEQ ID NO: 10027 - RNA, 20 nt, Artificial Sequence
  HTT spacer sequence CTCN PAM
gucuucauccuguuagaggg

SEQ ID NO: 10028 - RNA, 20 nt, Artificial Sequence
  HTT spacer sequence CTCN PAM
aacaggaugaagacggaggc

SEQ ID NO: 10029 - RNA, 20 nt, Artificial Sequence
  HTT spacer sequence CTCN PAM
cgaaccaucaugucauaugc

SEQ ID NO: 10030 - RNA, 20 nt, Artificial Sequence
  HTT spacer sequence CTCN PAM
gugagugaagaguuuguuuc

SEQ ID NO: 10031 - RNA, 20 nt, Artificial Sequence
  HTT spacer sequence CTCN PAM
cugagcuugggugaccgacu

SEQ ID NO: 10032 - RNA, 20 nt, Artificial Sequence
  HTT spacer sequence CTCN PAM
ucacucacugagcuugggug

SEQ ID NO: 10033 - RNA, 20 nt, Artificial Sequence
  HTT spacer sequence CTCN PAM
caccuuggguuuuuccuuuu

SEQ ID NO: 10034 - RNA, 20 nt, Artificial Sequence
  HTT spacer sequence CTCN PAM
guucucugacuugggaguuu

SEQ ID NO: 10035 - RNA, 20 nt, Artificial Sequence
  HTT spacer sequence CTCN PAM
gacuugggaguuuuguggga

SEQ ID NO: 10036 - RNA, 20 nt, Artificial Sequence
  HTT spacer sequence CTCN PAM
caagucagagaacagagaca

SEQ ID NO: 10037 - RNA, 20 nt, Artificial Sequence
  HTT spacer sequence CTCN PAM
ugucccacaaaacucccaag

SEQ ID NO: 10038 - RNA, 20 nt, Artificial Sequence
  HTT spacer sequence CTCN PAM
ccugucccacaaaacuccca

SEQ ID NO: 10039 - RNA, 20 nt, Artificial Sequence
  HTT spacer sequence CTCN PAM
gugagcucgagggcaucuuc

SEQ ID NO: 10040 - RNA, 20 nt, Artificial Sequence
  HTT spacer sequence CTCN PAM
cggagaagcuagaccaagac

SEQ ID NO: 10041 - RNA, 20 nt, Artificial Sequence
  HTT spacer sequence CTCN PAM
agggcaucuucucguugagc

SEQ ID NO: 10042 - RNA, 20 nt, Artificial Sequence
  HTT spacer sequence CTCN PAM
agcucacggagaagcuagac

SEQ ID NO: 10043 - RNA, 20 nt, Artificial Sequence
  HTT spacer sequence CTCN PAM
uugagcuugucucucccucu

SEQ ID NO: 10044 - RNA, 20 nt, Artificial Sequence
  HTT spacer sequence CTCN PAM
acgagaagaugcccucgagc

SEQ ID NO: 10045 - RNA, 20 nt, Artificial Sequence
  HTT spacer sequence CTCN PAM
cccucuggggaaaaaauaac

SEQ ID NO: 10046 - RNA, 20 nt, Artificial Sequence
  HTT spacer sequence CTCN PAM
cucuggggaaaaaauaacag

SEQ ID NO: 10047 - RNA, 20 nt, Artificial Sequence
  HTT spacer sequence CTCN PAM
ggggaaaaaauaacagacac

SEQ ID NO: 10048 - RNA, 20 nt, Artificial Sequence
  HTT spacer sequence CTCN PAM
caauaaaugcuuuuacugaa

SEQ ID NO: 10049 - RNA, 20 nt, Artificial Sequence
  HTT spacer sequence CTCN PAM
uauaaaauauuaaacacagc

SEQ ID NO: 10050 - RNA, 20 nt, Artificial Sequence
  HTT spacer sequence CTCN PAM
acgguaagacaggcucacca

SEQ ID NO: 10051 - RNA, 20 nt, Artificial Sequence
  HTT spacer sequence CTCN PAM
cuaacccaccuucucuuguu

SEQ ID NO: 10052 - RNA, 20 nt, Artificial Sequence
  HTT spacer sequence CTCN PAM
uguuuugacuuggcaaugag

SEQ ID NO: 10053 - RNA, 20 nt, Artificial Sequence
  HTT spacer sequence CTCN PAM
uugccaagucaaaacaagag

SEQ ID NO: 10054 - RNA, 20 nt, Artificial Sequence
  HTT spacer sequence CTCN PAM
ucaaucagcucuuuccggga

SEQ ID NO: 10055 - RNA, 20 nt, Artificial Sequence
  HTT spacer sequence CTCN PAM
uuccgggacuucgguuucuc

SEQ ID NO: 10056 - RNA, 20 nt, Artificial Sequence
  HTT spacer sequence CTCN PAM
cgcuccucgccuuccuguug

SEQ ID NO: 10057 - RNA, 20 nt, Artificial Sequence
  HTT spacer sequence CTCN PAM
ucgccuuccuguugagucuu

SEQ ID NO: 10058 - RNA, 20 nt, Artificial Sequence
  HTT spacer sequence CTCN PAM
ccuuccuguugagucuucuu

SEQ ID NO: 10059 - RNA, 20 nt, Artificial Sequence
  HTT spacer sequence CTCN PAM
acaggaaggcgaggagcggg

SEQ ID NO: 10060 - RNA, 20 nt, Artificial Sequence
  HTT spacer sequence CTCN PAM
uucacaagaagacucaacag

SEQ ID NO: 10061 - RNA, 20 nt, Artificial Sequence
  HTT spacer sequence CTCN PAM
uccaaagugggcagcaguca

SEQ ID NO: 10062 - RNA, 20 nt, Artificial Sequence
  HTT spacer sequence CTCN PAM
aaagugggcagcagucagcu

SEQ ID NO: 10063 - RNA, 20 nt, Artificial Sequence
  HTT spacer sequence CTCN PAM
gcugggggcaaaaggcagaa

SEQ ID NO: 10064 - RNA, 20 nt, Artificial Sequence
  HTT spacer sequence CTCN PAM
aggcccugcccagggaggug

SEQ ID NO: 10065 - RNA, 20 nt, Artificial Sequence
  HTT spacer sequence CTCN PAM
agucaccuguaccacggcgc

SEQ ID NO: 10066 - RNA, 20 nt, Artificial Sequence
  HTT spacer sequence CTCN PAM
agucaccugcacgccacggc

SEQ ID NO: 10067 - RNA, 20 nt, Artificial Sequence
  HTT spacer sequence CTCN PAM
agucaccuccacgccacggc

SEQ ID NO: 10068 - RNA, 20 nt, Artificial Sequence
  HTT spacer sequence CTCN PAM
aagcuuugucuugucagugu

SEQ ID NO: 10069 - RNA, 20 nt, Artificial Sequence
  HTT spacer sequence CTCN PAM
caaagcuuugucuugucagu

SEQ ID NO: 10070 - RNA, 20 nt, Artificial Sequence
  HTT spacer sequence CTCN PAM
gacucuggcaucgggcaaaa

SEQ ID NO: 10071 - RNA, 20 nt, Artificial Sequence
  HTT spacer sequence CTCN PAM
ggcaucgggcaaaacaccuu

SEQ ID NO: 10072 - RNA, 20 nt, Artificial Sequence
  HTT spacer sequence CTCN PAM
gagcucauggguagaacgag

SEQ ID NO: 10073 - RNA, 20 nt, Artificial Sequence
  HTT spacer sequence CTCN PAM
gagaaauaagguguuuugcc

SEQ ID NO: 10074 - RNA, 20 nt, Artificial Sequence
  HTT spacer sequence CTCN PAM
uggguagaacgagcuauuuu

SEQ ID NO: 10075 - RNA, 20 nt, Artificial Sequence
  HTT spacer sequence CTCN PAM
uucuacccaugagcucagag

SEQ ID NO: 10076 - RNA, 20 nt, Artificial Sequence
  HTT spacer sequence CTCN PAM
aaauagcucguucuacccau

SEQ ID NO: 10077 - RNA, 20 nt, Artificial Sequence
  HTT spacer sequence CTCN PAM
acgcccacaggcccgugcac

SEQ ID NO: 10078 - RNA, 20 nt, Artificial Sequence
  HTT spacer sequence CTCN PAM
ccagacaacguuccucgauc

SEQ ID NO: 10079 - RNA, 20 nt, Artificial Sequence
  HTT spacer sequence CTCN PAM
auccucagcaucgcugucac

SEQ ID NO: 10080 - RNA, 20 nt, Artificial Sequence
  HTT spacer sequence CTCN PAM
gcaucgcugucacuguccac

SEQ ID NO: 10081 - RNA, 20 nt, Artificial Sequence
  HTT spacer sequence CTCN PAM
augucugccaaagacuggcc

SEQ ID NO: 10082 - RNA, 20 nt, Artificial Sequence
  HTT spacer sequence CTCN PAM
uuauggccagucuuuggcag

SEQ ID NO: 10083 - RNA, 20 nt, Artificial Sequence
  HTT spacer sequence CTCN PAM
ugaugucgcugacagaagag

SEQ ID NO: 10084 - RNA, 20 nt, Artificial Sequence
  HTT spacer sequence CTCN PAM
ucugucagcgacaucaugag

SEQ ID NO: 10085 - RNA, 20 nt, Artificial Sequence
  HTT spacer sequence CTCN PAM
uccaguuucuuuccauaccu

SEQ ID NO: 10086 - RNA, 20 nt, Artificial Sequence
  HTT spacer sequence CTCN PAM
aguuucuuuccauaccugcu

SEQ ID NO: 10087 - RNA, 20 nt, Artificial Sequence
  HTT spacer sequence CTCN PAM
ggaacagcagguauggaaag

SEQ ID NO: 10088 - RNA, 20 nt, Artificial Sequence
  HTT spacer sequence CTCN PAM
ucaucaucuucuccucgggg

SEQ ID NO: 10089 - RNA, 20 nt, Artificial Sequence
  HTT spacer sequence CTCN PAM
ucggggcucauguugcuguu

SEQ ID NO: 10090 - RNA, 20 nt, Artificial Sequence
  HTT spacer sequence CTCN PAM
gggcucauguugcuguugua

SEQ ID NO: 10091 - RNA, 20 nt, Artificial Sequence
  HTT spacer sequence CTCN PAM
uguugcuguuguauucuccg

SEQ ID NO: 10092 - RNA, 20 nt, Artificial Sequence
  HTT spacer sequence CTCN PAM
gaagcguuuaucucugaaua

SEQ ID NO: 10093 - RNA, 20 nt, Artificial Sequence
  HTT spacer sequence CTCN PAM
gaauacauuggauuuauccc

SEQ ID NO: 10094 - RNA, 20 nt, Artificial Sequence
  HTT spacer sequence CTCN PAM
uuuaguaaagucuguguacg

SEQ ID NO: 10095 - RNA, 20 nt, Artificial Sequence
  HTT spacer sequence CTCN PAM
caaaaaauucuugugauuuc

SEQ ID NO: 10096 - RNA, 20 nt, Artificial Sequence
  HTT spacer sequence CTCN PAM
aggacagccaacuuugaaua

SEQ ID NO: 10097 - RNA, 20 nt, Artificial Sequence
  HTT spacer sequence CTCN PAM
cagcuuucuuuagggaauuc

SEQ ID NO: 10098 - RNA, 20 nt, Artificial Sequence
  HTT spacer sequence CTCN PAM
cacagcuuucuuuagggaau

SEQ ID NO: 10099 - RNA, 20 nt, Artificial Sequence
  HTT spacer sequence CTCN PAM
guccucucacagcuuucuuu

SEQ ID NO: 10100 - RNA, 20 nt, Artificial Sequence
  HTT spacer sequence CTCN PAM
cccaucucuguccucucaca

SEQ ID NO: 10101 - RNA, 20 nt, Artificial Sequence
  HTT spacer sequence CTCN PAM
gcggauaaagaauggugaag

SEQ ID NO: 10102 - RNA, 20 nt, Artificial Sequence
  HTT spacer sequence CTCN PAM
cuauuuaaaucacaaggucu

SEQ ID NO: 10103 - RNA, 20 nt, Artificial Sequence
  HTT spacer sequence CTCN PAM
caucugauugccagcuagac

SEQ ID NO: 10104 - RNA, 20 nt, Artificial Sequence
  HTT spacer sequence CTCN PAM
augaacucuguacggacaga

SEQ ID NO: 10105 - RNA, 20 nt, Artificial Sequence
  HTT spacer sequence CTCN PAM
guacggacagaggcugcuug

SEQ ID NO: 10106 - RNA, 20 nt, Artificial Sequence
  HTT spacer sequence CTCN PAM
cucccucugcagggacagac

SEQ ID NO: 10107 - RNA, 20 nt, Artificial Sequence
  HTT spacer sequence CTCN PAM
gccucuaaaaauauuaguuc

SEQ ID NO: 10108 - RNA, 20 nt, Artificial Sequence
  HTT spacer sequence CTCN PAM
aaaaauauuaguucucauua

SEQ ID NO: 10109 - RNA, 20 nt, Artificial Sequence
  HTT spacer sequence CTCN PAM
uuaucuggaauaugauucua

SEQ ID NO: 10110 - RNA, 20 nt, Artificial Sequence
  HTT spacer sequence CTCN PAM
uauuacguauuuauagccua

SEQ ID NO: 10111 - RNA, 20 nt, Artificial Sequence
  HTT spacer sequence CTCN PAM
uucuuucuuaaacuauauag

SEQ ID NO: 10112 - RNA, 20 nt, Artificial Sequence
  HTT spacer sequence CTCN PAM
ccgugcgccccccgcuuacc

SEQ ID NO: 10113 - RNA, 20 nt, Artificial Sequence
  HTT spacer sequence CTCN PAM
ggaagguaagcggggggcgc

SEQ ID NO: 10114 - RNA, 20 nt, Artificial Sequence
  HTT spacer sequence CTCN PAM
cgcacgggcccucaggaagg

SEQ ID NO: 10115 - RNA, 20 nt, Artificial Sequence
  HTT spacer sequence CTCN PAM
aacggauuggaguuggccuu

SEQ ID NO: 10116 - RNA, 20 nt, Artificial Sequence
  HTT spacer sequence CTCN PAM
aauccguucgaggugaaagu

SEQ ID NO: 10117 - RNA, 20 nt, Artificial Sequence
  HTT spacer sequence CTCN PAM
cgcucccgccggcgccccgg

SEQ ID NO: 10118 - RNA, 20 nt, Artificial Sequence
  HTT spacer sequence CTCN PAM
cgccggcgccccggaggccu

SEQ ID NO: 10119 - RNA, 20 nt, Artificial Sequence
  HTT spacer sequence CTCN PAM
ggggcgccggcgggagcgcg

SEQ ID NO: 10120 - RNA, 20 nt, Artificial Sequence
  HTT spacer sequence CTCN PAM
ggcccuugggcgcagcgggg

SEQ ID NO: 10121 - RNA, 20 nt, Artificial Sequence
  HTT spacer sequence CTCN PAM
ucucgcgagaacagcgcagc

SEQ ID NO: 10122 - RNA, 20 nt, Artificial Sequence
  HTT spacer sequence CTCN PAM
cgagaacagcgcagcaccuc

SEQ ID NO: 10123 - RNA, 20 nt, Artificial Sequence
  HTT spacer sequence CTCN PAM
cgagacgaggaagcgguucc

SEQ ID NO: 10124 - RNA, 20 nt, Artificial Sequence
  HTT spacer sequence CTCN PAM
gacucgcgagaaguaaacac

SEQ ID NO: 10125 - RNA, 20 nt, Artificial Sequence
  HTT spacer sequence CTCN PAM
cgagaaguaaacaccgcgcc

SEQ ID NO: 10126 - RNA, 20 nt, Artificial Sequence
  HTT spacer sequence CTCN PAM
cgagucggaggugcugcgcu

SEQ ID NO: 10127 - RNA, 20 nt, Artificial Sequence
  HTT spacer sequence CTCN PAM
ccgauaggcucagcgacuac

SEQ ID NO: 10128 - RNA, 20 nt, Artificial Sequence
  HTT spacer sequence CTCN PAM
gcgacuacaacucccagcag

SEQ ID NO: 10129 - RNA, 20 nt, Artificial Sequence
  HTT spacer sequence CTCN PAM
cagcaggccacgcgccgcgg

SEQ ID NO: 10130 - RNA, 20 nt, Artificial Sequence
  HTT spacer sequence CTCN PAM
uggcgcagggccuucuggga

SEQ ID NO: 10131 - RNA, 20 nt, Artificial Sequence
  HTT spacer sequence CTCN PAM
cagaaggcccugcgccaaga

SEQ ID NO: 10132 - RNA, 20 nt, Artificial Sequence
  HTT spacer sequence CTCN PAM
ccgccgcggccggggcacua

SEQ ID NO: 10133 - RNA, 20 nt, Artificial Sequence
  HTT spacer sequence CTCN PAM
cucuucagcuaagccguuag

SEQ ID NO: 10134 - RNA, 20 nt, Artificial Sequence
  HTT spacer sequence CTCN PAM
ucagcuaagccguuagcgcc

SEQ ID NO: 10135 - RNA, 20 nt, Artificial Sequence
  HTT spacer sequence CTCN PAM
gcgcuaacggcuuagcugaa

SEQ ID NO: 10136 - RNA, 20 nt, Artificial Sequence
  HTT spacer sequence CTCN PAM
cgggcgggcucggcgcuaac

SEQ ID NO: 10137 - RNA, 20 nt, Artificial Sequence
  HTT spacer sequence CTCN PAM
gucuccucggucucgcagaa

SEQ ID NO: 10138 - RNA, 20 nt, Artificial Sequence
  HTT spacer sequence CTCN PAM
ucggucucgcagaauccgcc

SEQ ID NO: 10139 - RNA, 20 nt, Artificial Sequence
  HTT spacer sequence CTCN PAM
gucucgcagaauccgccggc

SEQ ID NO: 10140 - RNA, 20 nt, Artificial Sequence
  HTT spacer sequence CTCN PAM
cagaauccgccggcggcggc

SEQ ID NO: 10141 - RNA, 20 nt, Artificial Sequence
  HTT spacer sequence CTCN PAM
auguccuggcgccgccgccg

SEQ ID NO: 10142 - RNA, 20 nt, Artificial Sequence
  HTT spacer sequence CTCN PAM
agaacaucguggccaacucg

SEQ ID NO: 10143 - RNA, 20 nt, Artificial Sequence
  HTT spacer sequence CTCN PAM
agcuccauguccuggcgccg

SEQ ID NO: 10144 - RNA, 20 nt, Artificial Sequence
  HTT spacer sequence CTCN PAM
cugcugcugaaagcgcguca

SEQ ID NO: 10145 - RNA, 20 nt, Artificial Sequence
  HTT spacer sequence CTCN PAM
ggggggggggucgggggcgc

SEQ ID NO: 10146 - RNA, 20 nt, Artificial Sequence
  HTT spacer sequence CTCN PAM
gucucggaccucaugucucc

SEQ ID NO: 10147 - RNA, 20 nt, Artificial Sequence
  HTT spacer sequence CTCN PAM
gaccucaugucucccuugcc

SEQ ID NO: 10148 - RNA, 20 nt, Artificial Sequence
  HTT spacer sequence CTCN PAM
ugucucccuugccugcgucu

SEQ ID NO: 10149 - RNA, 20 nt, Artificial Sequence
  HTT spacer sequence CTCN PAM
cuugccugcgucucaagaga

SEQ ID NO: 10150 - RNA, 20 nt, Artificial Sequence
  HTT spacer sequence CTCN PAM
agagagcuggcgacagagcc

SEQ ID NO: 10151 - RNA, 20 nt, Artificial Sequence
  HTT spacer sequence CTCN PAM
ugagacgcaggcaagggaga

SEQ ID NO: 10152 - RNA, 20 nt, Artificial Sequence
  HTT spacer sequence CTCN PAM
cuugagacgcaggcaaggga

SEQ ID NO: 10153 - RNA, 20 nt, Artificial Sequence
  HTT spacer sequence CTCN PAM
gucgccagcucucuugagac

SEQ ID NO: 10154 - RNA, 20 nt, Artificial Sequence
  HTT spacer sequence CTCN PAM
gaccucaagucccugugcua

SEQ ID NO: 10155 - RNA, 20 nt, Artificial Sequence
  HTT spacer sequence CTCN PAM
agucccugugcuagccacgg

SEQ ID NO: 10156 - RNA, 20 nt, Artificial Sequence
  HTT spacer sequence CTCN PAM
aaccauuaaucaagcuauac

SEQ ID NO: 10157 - RNA, 20 nt, Artificial Sequence
  HTT spacer sequence CTCN PAM
gcauguauccauguauaucu

SEQ ID NO: 10158 - RNA, 20 nt, Artificial Sequence
  HTT spacer sequence CTCN PAM
acaaaaaccacaaaauuauc

SEQ ID NO: 10159 - RNA, 20 nt, Artificial Sequence
  HTT spacer sequence CTCN PAM
cuauguugcccaggcuaguc

SEQ ID NO: 10160 - RNA, 20 nt, Artificial Sequence
  HTT spacer sequence CTCN PAM
agugauccuacccucccacu

SEQ ID NO: 10161 - RNA, 20 nt, Artificial Sequence
  HTT spacer sequence CTCN PAM
cacuucagccucccaaagug

SEQ ID NO: 10162 - RNA, 20 nt, Artificial Sequence
  HTT spacer sequence CTCN PAM
caaagugcugggauuacagg

SEQ ID NO: 10163 - RNA, 20 nt, Artificial Sequence
  HTT spacer sequence CTCN PAM
gccaacaaaagguuacccca

SEQ ID NO: 10164 - RNA, 20 nt, Artificial Sequence
  HTT spacer sequence CTCN PAM
caccuguaaucccagcacuu

SEQ ID NO: 10165 - RNA, 20 nt, Artificial Sequence
  HTT spacer sequence CTCN PAM
agaacauucuuuuggccagg

SEQ ID NO: 10166 - RNA, 20 nt, Artificial Sequence
  HTT spacer sequence CTCN PAM
ucaaaaaacucuagaauuag

SEQ ID NO: 10167 - RNA, 20 nt, Artificial Sequence
  HTT spacer sequence CTCN PAM
aaaaacucuagaauuagggc

SEQ ID NO: 10168 - RNA, 20 nt, Artificial Sequence
  HTT spacer sequence CTCN PAM
agaauuagggcuuucuuaag

SEQ ID NO: 10169 - RNA, 20 nt, Artificial Sequence
  HTT spacer sequence CTCN PAM
aguaaauaugugguuaauug

SEQ ID NO: 10170 - RNA, 20 nt, Artificial Sequence
  HTT spacer sequence CTCN PAM
uauuacauuuuugugcuuug

SEQ ID NO: 10171 - RNA, 20 nt, Artificial Sequence
  HTT spacer sequence CTCN PAM
aacaaaauaaucuguaggau

SEQ ID NO: 10172 - RNA, 20 nt, Artificial Sequence
  HTT spacer sequence CTCN PAM
auaaauacccuaucuccaaa

SEQ ID NO: 10173 - RNA, 20 nt, Artificial Sequence
  HTT spacer sequence CTCN PAM
aaauaagaucacugucugag

SEQ ID NO: 10174 - RNA, 20 nt, Artificial Sequence
  HTT spacer sequence CTCN PAM
gacagugaucuuauuuggag

SEQ ID NO: 10175 - RNA, 20 nt, Artificial Sequence
  HTT spacer sequence CTCN PAM
aaagcccaugaucuuaacug

SEQ ID NO: 10176 - RNA, 20 nt, Artificial Sequence
  HTT spacer sequence CTCN PAM
gugcccucuuuauacuaucu

SEQ ID NO: 10177 - RNA, 20 nt, Artificial Sequence
  HTT spacer sequence CTCN PAM
uuauacuaucucaacgacgg

SEQ ID NO: 10178 - RNA, 20 nt, Artificial Sequence
  HTT spacer sequence CTCN PAM
acgacggugucaguuacuuc

SEQ ID NO: 10179 - RNA, 20 nt, Artificial Sequence
  HTT spacer sequence CTCN PAM
aaaacgguuuauugugugcc

SEQ ID NO: 10180 - RNA, 20 nt, Artificial Sequence
  HTT spacer sequence CTCN PAM
agggauacagggaugaauaa

SEQ ID NO: 10181 - RNA, 20 nt, Artificial Sequence
  HTT spacer sequence CTCN PAM
uucugagaagcugacaguca

SEQ ID NO: 10182 - RNA, 20 nt, Artificial Sequence
  HTT spacer sequence CTCN PAM
gaaggagauauucaucuguu

SEQ ID NO: 10183 - RNA, 20 nt, Artificial Sequence
  HTT spacer sequence CTCN PAM
gugucugcuugcuucagccc

SEQ ID NO: 10184 - RNA, 20 nt, Artificial Sequence
  HTT spacer sequence CTCN PAM
ucuguuuagcucauugaaac

SEQ ID NO: 10185 - RNA, 20 nt, Artificial Sequence
  HTT spacer sequence CTCN PAM
guuuagcucauugaaacacu

SEQ ID NO: 10186 - RNA, 20 nt, Artificial Sequence
  HTT spacer sequence CTCN PAM
uugaaacacucauuguuuuc

SEQ ID NO: 10187 - RNA, 20 nt, Artificial Sequence
  HTT spacer sequence CTCN PAM
uuguuuucuuucucuuucuc

SEQ ID NO: 10188 - RNA, 20 nt, Artificial Sequence
  HTT spacer sequence CTCN PAM
uucucucuuucuuucucucu

SEQ ID NO: 10189 - RNA, 20 nt, Artificial Sequence
  HTT spacer sequence CTCN PAM
cuuucuuucucucucuuucc

SEQ ID NO: 10190 - RNA, 20 nt, Artificial Sequence
  HTT spacer sequence CTCN PAM
uucuuucucucucuuucccu

SEQ ID NO: 10191 - RNA, 20 nt, Artificial Sequence
  HTT spacer sequence CTCN PAM
auuuuagcuguaaaaaagaa

SEQ ID NO: 10192 - RNA, 20 nt, Artificial Sequence
  HTT spacer sequence CTCN PAM
auauggaucuuuaggauaga

SEQ ID NO: 10193 - RNA, 20 nt, Artificial Sequence
  HTT spacer sequence CTCN PAM
ccauggcugugcaucccaaa

SEQ ID NO: 10194 - RNA, 20 nt, Artificial Sequence
  HTT spacer sequence CTCN PAM
uccuuuccccuuuucgggug

SEQ ID NO: 10195 - RNA, 20 nt, Artificial Sequence
  HTT spacer sequence CTCN PAM
cugucugccaaauaaaagcu

SEQ ID NO: 10196 - RNA, 20 nt, Artificial Sequence
  HTT spacer sequence CTCN PAM
cccugucugccaaauaaaag

SEQ ID NO: 10197 - RNA, 20 nt, Artificial Sequence
  HTT spacer sequence CTCN PAM
gcagcugggaccacaagcau

SEQ ID NO: 10198 - RNA, 20 nt, Artificial Sequence
  HTT spacer sequence CTCN PAM
ucagcagcugggaccacaag

SEQ ID NO: 10199 - RNA, 20 nt, Artificial Sequence
  HTT spacer sequence CTCN PAM
gccuccucagcagcugggac

SEQ ID NO: 10200 - RNA, 20 nt, Artificial Sequence
  HTT spacer sequence CTCN PAM
ugaguccaggaagucaaggc

SEQ ID NO: 10201 - RNA, 20 nt, Artificial Sequence
  HTT spacer sequence CTCN PAM
agagauccagcuaccucagc

SEQ ID NO: 10202 - RNA, 20 nt, Artificial Sequence
  HTT spacer sequence CTCN PAM
cugcagccuugacuuccugg

SEQ ID NO: 10203 - RNA, 20 nt, Artificial Sequence
  HTT spacer sequence CTCN PAM
gucacccaggcuagaaugca

SEQ ID NO: 10204 - RNA, 20 nt, Artificial Sequence
  HTT spacer sequence CTCN PAM
aaaaagaaaaaaaauggucc

SEQ ID NO: 10205 - RNA, 20 nt, Artificial Sequence
  HTT spacer sequence CTCN PAM
acaacaagccuacuagaugc

SEQ ID NO: 10206 - RNA, 20 nt, Artificial Sequence
  HTT spacer sequence CTCN PAM
gcaucuaguaggcuuguugu

SEQ ID NO: 10207 - RNA, 20 nt, Artificial Sequence
  HTT spacer sequence CTCN PAM
augugcaaauaccccagaac

SEQ ID NO: 10208 - RNA, 20 nt, Artificial Sequence
  HTT spacer sequence CTCN PAM
ucuaggugcuguucuggggu

SEQ ID NO: 10209 - RNA, 20 nt, Artificial Sequence
  HTT spacer sequence CTCN PAM
uuccacccacuuggccuggc

SEQ ID NO: 10210 - RNA, 20 nt, Artificial Sequence
  HTT spacer sequence CTCN PAM
gcaccuggcuugcccuuggc

SEQ ID NO: 10211 - RNA, 20 nt, Artificial Sequence
  HTT spacer sequence CTCN PAM
ugcaacccuugcugcucugc

SEQ ID NO: 10212 - RNA, 20 nt, Artificial Sequence
  HTT spacer sequence CTCN PAM
uuugcucaugcaacccuugc

SEQ ID NO: 10213 - RNA, 20 nt, Artificial Sequence
  HTT spacer sequence CTCN PAM
uucuuccuggacaugggaca

SEQ ID NO: 10214 - RNA, 20 nt, Artificial Sequence
  HTT spacer sequence CTCN PAM
aguugucuguguaccucauu

SEQ ID NO: 10215 - RNA, 20 nt, Artificial Sequence
  HTT spacer sequence CTCN PAM
ucuugcuuacccuccaguug

SEQ ID NO: 10216 - RNA, 20 nt, Artificial Sequence
  HTT spacer sequence CTCN PAM
auaaagcaccucuucuugcu

SEQ ID NO: 10217 - RNA, 20 nt, Artificial Sequence
  HTT spacer sequence CTCN PAM
caggagacccaaaaugggua

SEQ ID NO: 10218 - RNA, 20 nt, Artificial Sequence
  HTT spacer sequence CTCN PAM
ggagacccaaaauggguagc

SEQ ID NO: 10219 - RNA, 20 nt, Artificial Sequence
  HTT spacer sequence CTCN PAM
ugagagcuguacugucacuc

SEQ ID NO: 10220 - RNA, 20 nt, Artificial Sequence
  HTT spacer sequence CTCN PAM
uuucugcaggcagaucaucc

SEQ ID NO: 10221 - RNA, 20 nt, Artificial Sequence
  HTT spacer sequence CTCN PAM
ccuucaagccagggauagac

SEQ ID NO: 10222 - RNA, 20 nt, Artificial Sequence
  HTT spacer sequence CTCN PAM
uggguagaaaggggcagggu

SEQ ID NO: 10223 - RNA, 20 nt, Artificial Sequence
  HTT spacer sequence CTCN PAM
ugcccuuguucauggugccc

SEQ ID NO: 10224 - RNA, 20 nt, Artificial Sequence
  HTT spacer sequence CTCN PAM
gugcaggccagggcacacaa

SEQ ID NO: 10225 - RNA, 20 nt, Artificial Sequence
  HTT spacer sequence CTCN PAM
gccacgccuuggccucccug

SEQ ID NO: 10226 - RNA, 20 nt, Artificial Sequence
  HTT spacer sequence CTCN PAM
cugccaugcucauugguguc

SEQ ID NO: 10227 - RNA, 20 nt, Artificial Sequence
  HTT spacer sequence CTCN PAM
uugguguccaaagucuggag

SEQ ID NO: 10228 - RNA, 20 nt, Artificial Sequence
  HTT spacer sequence CTCN PAM
agacuuuggacaccaaugag

SEQ ID NO: 10229 - RNA, 20 nt, Artificial Sequence
  HTT spacer sequence CTCN PAM
uggucuuauucauauuucac

SEQ ID NO: 10230 - RNA, 20 nt, Artificial Sequence
  HTT spacer sequence CTCN PAM
gcucaaugauucagcagcuu

SEQ ID NO: 10231 - RNA, 20 nt, Artificial Sequence
  HTT spacer sequence CTCN PAM
augauucagcagcuugggca

SEQ ID NO: 10232 - RNA, 20 nt, Artificial Sequence
  HTT spacer sequence CTCN PAM
gggcacuuguagaucaugcu

SEQ ID NO: 10233 - RNA, 20 nt, Artificial Sequence
  HTT spacer sequence CTCN PAM
agauuccacaaguggaaaac

SEQ ID NO: 10234 - RNA, 20 nt, Artificial Sequence
  HTT spacer sequence CTCN PAM
gcucuguacuccuuuaagag

SEQ ID NO: 10235 - RNA, 20 nt, Artificial Sequence
  HTT spacer sequence CTCN PAM
uaaucuucccccucaaaucc

SEQ ID NO: 10236 - RNA, 20 nt, Artificial Sequence
  HTT spacer sequence CTCN PAM
ggacaucuugugguguggga

SEQ ID NO: 10237 - RNA, 20 nt, Artificial Sequence
  HTT spacer sequence CTCN PAM
cgucccacaccacaagaugu

SEQ ID NO: 10238 - RNA, 20 nt, Artificial Sequence
  HTT spacer sequence CTCN PAM
ggacucacgucccacaccac

SEQ ID NO: 10239 - RNA, 20 nt, Artificial Sequence
  HTT spacer sequence CTCN PAM
ugaucucaguugaaauauug

SEQ ID NO: 10240 - RNA, 20 nt, Artificial Sequence
  HTT spacer sequence CTCN PAM
guuuccaaaucuguaaacaa

SEQ ID NO: 10241 - RNA, 20 nt, Artificial Sequence
  HTT spacer sequence CTCN PAM
ccauggcuucuaaauggcag

SEQ ID NO: 10242 - RNA, 20 nt, Artificial Sequence
  HTT spacer sequence CTCN PAM
gccauuuagaagccauggug

SEQ ID NO: 10243 - RNA, 20 nt, Artificial Sequence
  HTT spacer sequence CTCN PAM
aacagaaauguuaagauaua

SEQ ID NO: 10244 - RNA, 20 nt, Artificial Sequence
  HTT spacer sequence CTCN PAM
caaauucaggaggauauggc

SEQ ID NO: 10245 - RNA, 20 nt, Artificial Sequence
  HTT spacer sequence CTCN PAM
ugaauuugggagaaaaaagg

SEQ ID NO: 10246 - RNA, 20 nt, Artificial Sequence
  HTT spacer sequence CTCN PAM
uuccauuuuuuacuacgacc

SEQ ID NO: 10247 - RNA, 20 nt, Artificial Sequence
  HTT spacer sequence CTCN PAM
ugucagccagugcagugagc

SEQ ID NO: 10248 - RNA, 20 nt, Artificial Sequence
  HTT spacer sequence CTCN PAM
cugcacuggcugacaggagg

SEQ ID NO: 10249 - RNA, 20 nt, Artificial Sequence
  HTT spacer sequence CTCN PAM
ccaauggaaugucuaagcuc

SEQ ID NO: 10250 - RNA, 20 nt, Artificial Sequence
  HTT spacer sequence CTCN PAM
caggaaaaaaaauccuuuag

SEQ ID NO: 10251 - RNA, 20 nt, Artificial Sequence
  HTT spacer sequence CTCN PAM
ggaaaaaaaauccuuuagau

SEQ ID NO: 10252 - RNA, 20 nt, Artificial Sequence
  HTT spacer sequence CTCN PAM
auaaaaaauauauauuuuua

SEQ ID NO: 10253 - RNA, 20 nt, Artificial Sequence
  HTT spacer sequence CTCN PAM
ccauguugcccaggcugguc

SEQ ID NO: 10254 - RNA, 20 nt, Artificial Sequence
  HTT spacer sequence CTCN PAM
ccccaugaccgagccaauua

SEQ ID NO: 10255 - RNA, 20 nt, Artificial Sequence
  HTT spacer sequence CTCN PAM
ccaugaccgagccaauuauu

SEQ ID NO: 10256 - RNA, 20 nt, Artificial Sequence
  HTT spacer sequence CTCN PAM
gucauggggagaggaauuuu

SEQ ID NO: 10257 - RNA, 20 nt, Artificial Sequence
  HTT spacer sequence CTCN PAM
aaaaguuuacaaaugaccca

SEQ ID NO: 10258 - RNA, 20 nt, Artificial Sequence
  HTT spacer sequence CTCN PAM
acaacaaaaagacaauccaa

SEQ ID NO: 10259 - RNA, 20 nt, Artificial Sequence
  HTT spacer sequence CTCN PAM
ugcuuaucuguuaagcaucu

SEQ ID NO: 10260 - RNA, 20 nt, Artificial Sequence
  HTT spacer sequence CTCN PAM
cggguucaggcgauucuccu

SEQ ID NO: 10261 - RNA, 20 nt, Artificial Sequence
  HTT spacer sequence CTCN PAM
gccucccggguucaggcgau

SEQ ID NO: 10262 - RNA, 20 nt, Artificial Sequence
  HTT spacer sequence CTCN PAM
auacaguaaaagucaagaac

SEQ ID NO: 10263 - RNA, 20 nt, Artificial Sequence
  HTT spacer sequence CTCN PAM
cucgauacaguaaaagucaa

SEQ ID NO: 10264 - RNA, 20 nt, Artificial Sequence
  HTT spacer sequence CTCN PAM
ucaggcaguucugugauacc

SEQ ID NO: 10265 - RNA, 20 nt, Artificial Sequence
  HTT spacer sequence CTCN PAM
aaagaggcacauugaauucu

SEQ ID NO: 10266 - RNA, 20 nt, Artificial Sequence
  HTT spacer sequence CTCN PAM
uuagaguggguuugguauca

SEQ ID NO: 10267 - RNA, 20 nt, Artificial Sequence
  HTT spacer sequence CTCN PAM
ccacugcauccaagaauuca

SEQ ID NO: 10268 - RNA, 20 nt, Artificial Sequence
  HTT spacer sequence CTCN PAM
auauugagcaaccacccaau

SEQ ID NO: 10269 - RNA, 20 nt, Artificial Sequence
  HTT spacer sequence CTCN PAM
auauggagauaaacugcuca

SEQ ID NO: 10270 - RNA, 20 nt, Artificial Sequence
  HTT spacer sequence CTCN PAM
ugcuguaaucccagcauuuu

SEQ ID NO: 10271 - RNA, 20 nt, Artificial Sequence
  HTT spacer sequence CTCN PAM
gccuuccaaaaugcugggau

SEQ ID NO: 10272 - RNA, 20 nt, Artificial Sequence
  HTT spacer sequence CTCN PAM
ugauccgcccgccucagccu

SEQ ID NO: 10273 - RNA, 20 nt, Artificial Sequence
  HTT spacer sequence CTCN PAM
ugaccucaugauccgcccgc

SEQ ID NO: 10274 - RNA, 20 nt, Artificial Sequence
  HTT spacer sequence CTCN PAM
aucuccugaccucaugaucc

SEQ ID NO: 10275 - RNA, 20 nt, Artificial Sequence
  HTT spacer sequence CTCN PAM
acuaaaauacaaaaaguuag

SEQ ID NO: 10276 - RNA, 20 nt, Artificial Sequence
  HTT spacer sequence CTCN PAM
caaguagcugggacuacagg

SEQ ID NO: 10277 - RNA, 20 nt, Artificial Sequence
  HTT spacer sequence CTCN PAM
gccucccaaguagcugggac

SEQ ID NO: 10278 - RNA, 20 nt, Artificial Sequence
  HTT spacer sequence CTCN PAM
ugguucaagugauuccccug

SEQ ID NO: 10279 - RNA, 20 nt, Artificial Sequence
  HTT spacer sequence CTCN PAM
gccuccugguucaagugauu

SEQ ID NO: 10280 - RNA, 20 nt, Artificial Sequence
  HTT spacer sequence CTCN PAM
uuaaaugaauuaguggcauc

SEQ ID NO: 10281 - RNA, 20 nt, Artificial Sequence
  HTT spacer sequence CTCN PAM
gguugaauccugacugauac

SEQ ID NO: 10282 - RNA, 20 nt, Artificial Sequence
  HTT spacer sequence CTCN PAM
ggcagaauuucuuccuccag

SEQ ID NO: 10283 - RNA, 20 nt, Artificial Sequence
  HTT spacer sequence CTCN PAM
aggaagacucaucucuguuc

SEQ ID NO: 10284 - RNA, 20 nt, Artificial Sequence
  HTT spacer sequence CTCN PAM
ucucuguucuuaacaccuuc

SEQ ID NO: 10285 - RNA, 20 nt, Artificial Sequence
  HTT spacer sequence CTCN PAM
guucuuaacaccuuccaacu

SEQ ID NO: 10286 - RNA, 20 nt, Artificial Sequence
  HTT spacer sequence CTCN PAM
uaaaaaaaaaaaaaaaaguu

SEQ ID NO: 10287 - RNA, 20 nt, Artificial Sequence
  HTT spacer sequence CTCN PAM
cuauguugcucaggcuggcc

SEQ ID NO: 10288 - RNA, 20 nt, Artificial Sequence
  HTT spacer sequence CTCN PAM
ggcuggccucgaacucuuga

SEQ ID NO: 10289 - RNA, 20 nt, Artificial Sequence
  HTT spacer sequence CTCN PAM
aacucuugagcucaagugau

SEQ ID NO: 10290 - RNA, 20 nt, Artificial Sequence
  HTT spacer sequence CTCN PAM
ccaaucaggcagaauaugaa

SEQ ID NO: 10291 - RNA, 20 nt, Artificial Sequence
  HTT spacer sequence CTCN PAM
aaucaggcagaauaugaagu

SEQ ID NO: 10292 - RNA, 20 nt, Artificial Sequence
  HTT spacer sequence CTCN PAM
ucaucggcaacuucauauuc

SEQ ID NO: 10293 - RNA, 20 nt, Artificial Sequence
  HTT spacer sequence CTCN PAM
cgaagugcugggauuacagg

SEQ ID NO: 10294 - RNA, 20 nt, Artificial Sequence
  HTT spacer sequence CTCN PAM
gccucccgaagugcugggau

SEQ ID NO: 10295 - RNA, 20 nt, Artificial Sequence
  HTT spacer sequence CTCN PAM
uuccucagccucccgaagug

SEQ ID NO: 10296 - RNA, 20 nt, Artificial Sequence
  HTT spacer sequence CTCN PAM
uuagcccaggaguucgagau

SEQ ID NO: 10297 - RNA, 20 nt, Artificial Sequence
  HTT spacer sequence CTCN PAM
ugggcuaaagagauccuccu

SEQ ID NO: 10298 - RNA, 20 nt, Artificial Sequence
  HTT spacer sequence CTCN PAM
aacuccugggcuaaagagau

SEQ ID NO: 10299 - RNA, 20 nt, Artificial Sequence
  HTT spacer sequence CTCN PAM
cuauguuggccaugcugauc

SEQ ID NO: 10300 - RNA, 20 nt, Artificial Sequence
  HTT spacer sequence CTCN PAM
acaaaaaaauaaacaaaaaa

SEQ ID NO: 10301 - RNA, 20 nt, Artificial Sequence
  HTT spacer sequence CTCN PAM
uuugcauuuuguuugauguc

SEQ ID NO: 10302 - RNA, 20 nt, Artificial Sequence
  HTT spacer sequence CTCN PAM
ugacaucaaacaaaaugcaa

SEQ ID NO: 10303 - RNA, 20 nt, Artificial Sequence
  HTT spacer sequence CTCN PAM
uagaaaauugauucagugua

SEQ ID NO: 10304 - RNA, 20 nt, Artificial Sequence
  HTT spacer sequence CTCN PAM
auauucugaaacuuuaaaua

SEQ ID NO: 10305 - RNA, 20 nt, Artificial Sequence
  HTT spacer sequence CTCN PAM
aacucuauauucugaaacuu

SEQ ID NO: 10306 - RNA, 20 nt, Artificial Sequence
  HTT spacer sequence CTCN PAM
cuuggacuaaaaauaacauu

SEQ ID NO: 10307 - RNA, 20 nt, Artificial Sequence
  HTT spacer sequence CTCN PAM
uggacuaaaaauaacauuuu

SEQ ID NO: 10308 - RNA, 20 nt, Artificial Sequence
  HTT spacer sequence CTCN PAM
gcuucuucauuuuaggucaa

SEQ ID NO: 10309 - RNA, 20 nt, Artificial Sequence
  HTT spacer sequence CTCN PAM
uuaaauuacauuuugugucu

SEQ ID NO: 10310 - RNA, 20 nt, Artificial Sequence
  HTT spacer sequence CTCN PAM
cgccuguaaucccggcacuu

SEQ ID NO: 10311 - RNA, 20 nt, Artificial Sequence
  HTT spacer sequence CTCN PAM
caggguucucaaauauuaaa

SEQ ID NO: 10312 - RNA, 20 nt, Artificial Sequence
  HTT spacer sequence CTCN PAM
ggguucucaaauauuaaaau

SEQ ID NO: 10313 - RNA, 20 nt, Artificial Sequence
  HTT spacer sequence CTCN PAM
aauauuaaaauucagccaaa

SEQ ID NO: 10314 - RNA, 20 nt, Artificial Sequence
  HTT spacer sequence CTCN PAM
uguucguggaucagaagacu

SEQ ID NO: 10315 - RNA, 20 nt, Artificial Sequence
  HTT spacer sequence CTCN PAM
ccaaauugaucuauagauuc

SEQ ID NO: 10316 - RNA, 20 nt, Artificial Sequence
  HTT spacer sequence CTCN PAM
ucaauuucaaaacuuaguac

SEQ ID NO: 10317 - RNA, 20 nt, Artificial Sequence
  HTT spacer sequence CTCN PAM
auuucaaaacuuaguacaaa

SEQ ID NO: 10318 - RNA, 20 nt, Artificial Sequence
  HTT spacer sequence CTCN PAM
auuuuucugaaacuaaauag

SEQ ID NO: 10319 - RNA, 20 nt, Artificial Sequence
  HTT spacer sequence CTCN PAM
ugaccucaacugauccacau

SEQ ID NO: 10320 - RNA, 20 nt, Artificial Sequence
  HTT spacer sequence CTCN PAM
acugauccacauaacucugc

SEQ ID NO: 10321 - RNA, 20 nt, Artificial Sequence
  HTT spacer sequence CTCN PAM
gccucccaaagugcugggau

SEQ ID NO: 10322 - RNA, 20 nt, Artificial Sequence
  HTT spacer sequence CTCN PAM
aacagguaucugcacaccca

SEQ ID NO: 10323 - RNA, 20 nt, Artificial Sequence
  HTT spacer sequence CTCN PAM
acuaaaaauacaaaacuauu

SEQ ID NO: 10324 - RNA, 20 nt, Artificial Sequence
  HTT spacer sequence CTCN PAM
gucucuacuaaaaauacaaa

SEQ ID NO: 10325 - RNA, 20 nt, Artificial Sequence
  HTT spacer sequence CTCN PAM
aacuccugacuucaggugau

SEQ ID NO: 10326 - RNA, 20 nt, Artificial Sequence
  HTT spacer sequence CTCN PAM
ugacuucaggugauccaccc

SEQ ID NO: 10327 - RNA, 20 nt, Artificial Sequence
  HTT spacer sequence CTCN PAM
gccucccaaagugcugggau

SEQ ID NO: 10328 - RNA, 20 nt, Artificial Sequence
  HTT spacer sequence CTCN PAM
agauguugugacagaaugua

SEQ ID NO: 10329 - RNA, 20 nt, Artificial Sequence
  HTT spacer sequence CTCN PAM
uucagucccaaucuacauuc

SEQ ID NO: 10330 - RNA, 20 nt, Artificial Sequence
  HTT spacer sequence CTCN PAM
uccuucagucccaaucuaca

SEQ ID NO: 10331 - RNA, 20 nt, Artificial Sequence
  HTT spacer sequence CTCN PAM
aaggcuuuuuuggaaggguu

SEQ ID NO: 10332 - RNA, 20 nt, Artificial Sequence
  HTT spacer sequence CTCN PAM
gcaugaaccacuuaccuagu

SEQ ID NO: 10333 - RNA, 20 nt, Artificial Sequence
  HTT spacer sequence CTCN PAM
ugucacagcggaggaaacgg

SEQ ID NO: 10334 - RNA, 20 nt, Artificial Sequence
  HTT spacer sequence CTCN PAM
gcugugacaugagugacugu

SEQ ID NO: 10335 - RNA, 20 nt, Artificial Sequence
  HTT spacer sequence CTCN PAM
guuuccuccgcugugacaug

SEQ ID NO: 10336 - RNA, 20 nt, Artificial Sequence
  HTT spacer sequence CTCN PAM
cugggccuccguuuccuccg

SEQ ID NO: 10337 - RNA, 20 nt, Artificial Sequence
  HTT spacer sequence CTCN PAM
uggcucccugggccuccguu

SEQ ID NO: 10338 - RNA, 20 nt, Artificial Sequence
  HTT spacer sequence CTCN PAM
agagaaagccagauagagag

SEQ ID NO: 10339 - RNA, 20 nt, Artificial Sequence
  HTT spacer sequence CTCN PAM
gcacacugaggagcugggug

SEQ ID NO: 10340 - RNA, 20 nt, Artificial Sequence
  HTT spacer sequence CTCN PAM
gugugcagagaagccacacc

SEQ ID NO: 10341 - RNA, 20 nt, Artificial Sequence
  HTT spacer sequence CTCN PAM
ucagugugcagagaagccac

SEQ ID NO: 10342 - RNA, 20 nt, Artificial Sequence
  HTT spacer sequence CTCN PAM
cuaaaggaauaagcaucuaa

SEQ ID NO: 10343 - RNA, 20 nt, Artificial Sequence
  HTT spacer sequence CTCN PAM
ggcugggugccauggcucau

SEQ ID NO: 10344 - RNA, 20 nt, Artificial Sequence
  HTT spacer sequence CTCN PAM
cugauacugguccugggaua

SEQ ID NO: 10345 - RNA, 20 nt, Artificial Sequence
  HTT spacer sequence CTCN PAM
gauacugguccugggauauu

SEQ ID NO: 10346 - RNA, 20 nt, Artificial Sequence
  HTT spacer sequence CTCN PAM
guggcaucccagaugaagac

SEQ ID NO: 10347 - RNA, 20 nt, Artificial Sequence
  HTT spacer sequence CTCN PAM
guuuuacagaaggagaaacu

SEQ ID NO: 10348 - RNA, 20 nt, Artificial Sequence
  HTT spacer sequence CTCN PAM
uucuguaaaacagagauaau

SEQ ID NO: 10349 - RNA, 20 nt, Artificial Sequence
  HTT spacer sequence CTCN PAM
guuucuccuucuguaaaaca

SEQ ID NO: 10350 - RNA, 20 nt, Artificial Sequence
  HTT spacer sequence CTCN PAM
auagccucaguuucuccuuc

SEQ ID NO: 10351 - RNA, 20 nt, Artificial Sequence
  HTT spacer sequence CTCN PAM
ggucccucagccagugagug

SEQ ID NO: 10352 - RNA, 20 nt, Artificial Sequence
  HTT spacer sequence CTCN PAM
gccagugaguggcugaagcc

SEQ ID NO: 10353 - RNA, 20 nt, Artificial Sequence
  HTT spacer sequence CTCN PAM
cuggcugagggaccugagcc

SEQ ID NO: 10354 - RNA, 20 nt, Artificial Sequence
  HTT spacer sequence CTCN PAM
cucccaagaagggaaugcau

SEQ ID NO: 10355 - RNA, 20 nt, Artificial Sequence
  HTT spacer sequence CTCN PAM
caagaagggaaugcauccuu

SEQ ID NO: 10356 - RNA, 20 nt, Artificial Sequence
  HTT spacer sequence CTCN PAM
agaaaaagauuuuuuaaaau

SEQ ID NO: 10357 - RNA, 20 nt, Artificial Sequence
  HTT spacer sequence CTCN PAM
uagguaguuaugggcaacuc

SEQ ID NO: 10358 - RNA, 20 nt, Artificial Sequence
  HTT spacer sequence CTCN PAM
uauuuuucucaguuuuuaca

SEQ ID NO: 10359 - RNA, 20 nt, Artificial Sequence
  HTT spacer sequence CTCN PAM
guuuuuacaauggaaauggc

SEQ ID NO: 10360 - RNA, 20 nt, Artificial Sequence
  HTT spacer sequence CTCN PAM
auuggcuuuuaucaaguuua

SEQ ID NO: 10361 - RNA, 20 nt, Artificial Sequence
  HTT spacer sequence CTCN PAM
ggaggcugaggcugaaggau

SEQ ID NO: 10362 - RNA, 20 nt, Artificial Sequence
  HTT spacer sequence CTCN PAM
ugaguagcugggacuacagg

SEQ ID NO: 10363 - RNA, 20 nt, Artificial Sequence
  HTT spacer sequence CTCN PAM
gccuccugaguagcugggac

SEQ ID NO: 10364 - RNA, 20 nt, Artificial Sequence
  HTT spacer sequence CTCN PAM
guucucucuuuuuaaaaugg

SEQ ID NO: 10365 - RNA, 20 nt, Artificial Sequence
  HTT spacer sequence CTCN PAM
cuuuuuaaaauggcagguau

SEQ ID NO: 10366 - RNA, 20 nt, Artificial Sequence
  HTT spacer sequence CTCN PAM
uuuuaaaauggcagguaucc

SEQ ID NO: 10367 - RNA, 20 nt, Artificial Sequence
  HTT spacer sequence CTCN PAM
aaaacagcauguauaagcaa

SEQ ID NO: 10368 - RNA, 20 nt, Artificial Sequence
  HTT spacer sequence CTCN PAM
aagauguuuauacccagcgc

SEQ ID NO: 10369 - RNA, 20 nt, Artificial Sequence
  HTT spacer sequence CTCN PAM
cgaguagcugggauuacagg

SEQ ID NO: 10370 - RNA, 20 nt, Artificial Sequence
  HTT spacer sequence CTCN PAM
gccucccgaguagcugggau

SEQ ID NO: 10371 - RNA, 20 nt, Artificial Sequence
  HTT spacer sequence CTCN PAM
auccaggaggcggagguugc

SEQ ID NO: 10372 - RNA, 20 nt, Artificial Sequence
  HTT spacer sequence CTCN PAM
uggauugaggcaauuuuccu

SEQ ID NO: 10373 - RNA, 20 nt, Artificial Sequence
  HTT spacer sequence CTCN PAM
gccuccuggauugaggcaau

SEQ ID NO: 10374 - RNA, 20 nt, Artificial Sequence
  HTT spacer sequence CTCN PAM
cugcaaccuccgccuccugg

SEQ ID NO: 10375 - RNA, 20 nt, Artificial Sequence
  HTT spacer sequence CTCN PAM
agcccuggcgacagagugag

SEQ ID NO: 10376 - RNA, 20 nt, Artificial Sequence
  HTT spacer sequence CTCN PAM
gucgccagggcuggagugca

SEQ ID NO: 10377 - RNA, 20 nt, Artificial Sequence
  HTT spacer sequence CTCN PAM
cucugucgccagggcuggag

SEQ ID NO: 10378 - RNA, 20 nt, Artificial Sequence
  HTT spacer sequence CTCN PAM
aucucaaaaaaaaaaaaaaa

SEQ ID NO: 10379 - RNA, 20 nt, Artificial Sequence
  HTT spacer sequence CTCN PAM
aaaaaaaaaaaaaaaaaaaa

SEQ ID NO: 10380 - RNA, 20 nt, Artificial Sequence
  HTT spacer sequence CTCN PAM
uagagcaagucaagagcuau

SEQ ID NO: 10381 - RNA, 20 nt, Artificial Sequence
  HTT spacer sequence CTCN PAM
aagagcaauuaauucaucuu

SEQ ID NO: 10382 - RNA, 20 nt, Artificial Sequence
  HTT spacer sequence CTCN PAM
ugacuugcucuaagagcaau

SEQ ID NO: 10383 - RNA, 20 nt, Artificial Sequence
  HTT spacer sequence CTCN PAM
agcaggauagcucuugacuu

SEQ ID NO: 10384 - RNA, 20 nt, Artificial Sequence
  HTT spacer sequence CTCN PAM
cucuagcaggauagcucuug

SEQ ID NO: 10385 - RNA, 20 nt, Artificial Sequence
  HTT spacer sequence CTCN PAM
gggacuguggcucccucuag

SEQ ID NO: 10386 - RNA, 20 nt, Artificial Sequence
  HTT spacer sequence CTCN PAM
aaggggaugcccgggacaaa

SEQ ID NO: 10387 - RNA, 20 nt, Artificial Sequence
  HTT spacer sequence CTCN PAM
uuuauugaaccauucugcuc

SEQ ID NO: 10388 - RNA, 20 nt, Artificial Sequence
  HTT spacer sequence CTCN PAM
gcgcuugucuucgccucauu

SEQ ID NO: 10389 - RNA, 20 nt, Artificial Sequence
  HTT spacer sequence CTCN PAM
cauugcauuguucuuuuaaa

SEQ ID NO: 10390 - RNA, 20 nt, Artificial Sequence
  HTT spacer sequence CTCN PAM
uugauuaggcaacccguaac

SEQ ID NO: 10391 - RNA, 20 nt, Artificial Sequence
  HTT spacer sequence CTCN PAM
guaaugucuaaauguguucu

SEQ ID NO: 10392 - RNA, 20 nt, Artificial Sequence
  HTT spacer sequence CTCN PAM
aaauccgccuuuuccuagaa

SEQ ID NO: 10393 - RNA, 20 nt, Artificial Sequence
  HTT spacer sequence CTCN PAM
ccaaauccgccuuuuccuag

SEQ ID NO: 10394 - RNA, 20 nt, Artificial Sequence
  HTT spacer sequence CTCN PAM
ccucuccaaauccgccuuuu

SEQ ID NO: 10395 - RNA, 20 nt, Artificial Sequence
  HTT spacer sequence CTCN PAM
cguuacucaccucuccaaau

SEQ ID NO: 10396 - RNA, 20 nt, Artificial Sequence
  HTT spacer sequence CTCN PAM
ccacccagcuagcagcgcug

SEQ ID NO: 10397 - RNA, 20 nt, Artificial Sequence
  HTT spacer sequence CTCN PAM
ggaccuugcuccccacccag

SEQ ID NO: 10398 - RNA, 20 nt, Artificial Sequence
  HTT spacer sequence CTCN PAM
cccaguacacuguugccuua

SEQ ID NO: 10399 - RNA, 20 nt, Artificial Sequence
  HTT spacer sequence CTCN PAM
caguacacuguugccuuagu

SEQ ID NO: 10400 - RNA, 20 nt, Artificial Sequence
  HTT spacer sequence CTCN PAM
caguuggcaaagauuauucc

SEQ ID NO: 10401 - RNA, 20 nt, Artificial Sequence
  HTT spacer sequence CTCN PAM
aaauuccauguggauucuca

SEQ ID NO: 10402 - RNA, 20 nt, Artificial Sequence
  HTT spacer sequence CTCN PAM
uggugacuucaccuuuuacc

SEQ ID NO: 10403 - RNA, 20 nt, Artificial Sequence
  HTT spacer sequence CTCN PAM
uaguucugaagaagcugguu

SEQ ID NO: 10404 - RNA, 20 nt, Artificial Sequence
  HTT spacer sequence CTCN PAM
gucacuuugcccagauggaa

SEQ ID NO: 10405 - RNA, 20 nt, Artificial Sequence
  HTT spacer sequence CTCN PAM
guacuaugugaauuugggac

SEQ ID NO: 10406 - RNA, 20 nt, Artificial Sequence
  HTT spacer sequence CTCN PAM
guuuggacacguauguaccu

SEQ ID NO: 10407 - RNA, 20 nt, Artificial Sequence
  HTT spacer sequence CTCN PAM
uaccuacaucaaaagguguu

SEQ ID NO: 10408 - RNA, 20 nt, Artificial Sequence
  HTT spacer sequence CTCN PAM
cagacucacgagggguguuu

SEQ ID NO: 10409 - RNA, 20 nt, Artificial Sequence
  HTT spacer sequence CTCN PAM
cgagggguguuuuuuuuguu

SEQ ID NO: 10410 - RNA, 20 nt, Artificial Sequence
  HTT spacer sequence CTCN PAM
ugagucugugagucauuucc

SEQ ID NO: 10411 - RNA, 20 nt, Artificial Sequence
  HTT spacer sequence CTCN PAM
aaacaaaacaaaacaaaaca

SEQ ID NO: 10412 - RNA, 20 nt, Artificial Sequence
  HTT spacer sequence CTCN PAM
aucucaaaacaaaacaaaac

SEQ ID NO: 10413 - RNA, 20 nt, Artificial Sequence
  HTT spacer sequence CTCN PAM
uguugccuagacuggagugc

SEQ ID NO: 10414 - RNA, 20 nt, Artificial Sequence
  HTT spacer sequence CTCN PAM
agucuaggcaacaagagcga

SEQ ID NO: 10415 - RNA, 20 nt, Artificial Sequence
  HTT spacer sequence CTCN PAM
gcucaccacaaccuccgccu

SEQ ID NO: 10416 - RNA, 20 nt, Artificial Sequence
  HTT spacer sequence CTCN PAM
ccacaaccuccgccuccuga

SEQ ID NO: 10417 - RNA, 20 nt, Artificial Sequence
  HTT spacer sequence CTCN PAM
gccuccugaguucaagcgau

SEQ ID NO: 10418 - RNA, 20 nt, Artificial Sequence
  HTT spacer sequence CTCN PAM
ugaguucaagcgauucuccu

SEQ ID NO: 10419 - RNA, 20 nt, Artificial Sequence
  HTT spacer sequence CTCN PAM
ggaggcggagguugugguga

SEQ ID NO: 10420 - RNA, 20 nt, Artificial Sequence
  HTT spacer sequence CTCN PAM
ugccucagccucccgaguag

SEQ ID NO: 10421 - RNA, 20 nt, Artificial Sequence
  HTT spacer sequence CTCN PAM
gccucccgaguagcugguau

SEQ ID NO: 10422 - RNA, 20 nt, Artificial Sequence
  HTT spacer sequence CTCN PAM
cgaguagcugguauuacagg

SEQ ID NO: 10423 - RNA, 20 nt, Artificial Sequence
  HTT spacer sequence CTCN PAM
ggaggcugaggcaggagaau

SEQ ID NO: 10424 - RNA, 20 nt, Artificial Sequence
  HTT spacer sequence CTCN PAM
acuaaaaauacgaaaauuag

SEQ ID NO: 10425 - RNA, 20 nt, Artificial Sequence
  HTT spacer sequence CTCN PAM
cuacuaaaaauacgaaaauu

SEQ ID NO: 10426 - RNA, 20 nt, Artificial Sequence
  HTT spacer sequence CTCN PAM
auguuggucaggguggucuu

SEQ ID NO: 10427 - RNA, 20 nt, Artificial Sequence
  HTT spacer sequence CTCN PAM
cgaccucgggugauccgccc

SEQ ID NO: 10428 - RNA, 20 nt, Artificial Sequence
  HTT spacer sequence CTCN PAM
ggugauccgcccuccucagc

SEQ ID NO: 10429 - RNA, 20 nt, Artificial Sequence
  HTT spacer sequence CTCN PAM
ucagccucccaaagugcugg

SEQ ID NO: 10430 - RNA, 20 nt, Artificial Sequence
  HTT spacer sequence CTCN PAM
gccucccaaagugcugggau

SEQ ID NO: 10431 - RNA, 20 nt, Artificial Sequence
  HTT spacer sequence CTCN PAM
caaagugcugggauuacagg

SEQ ID NO: 10432 - RNA, 20 nt, Artificial Sequence
  HTT spacer sequence CTCN PAM
cgccuguaaucccagcacuu

SEQ ID NO: 10433 - RNA, 20 nt, Artificial Sequence
  HTT spacer sequence CTCN PAM
uagauggagaccacuguagu

SEQ ID NO: 10434 - RNA, 20 nt, Artificial Sequence
  HTT spacer sequence CTCN PAM
aucuaggagacccaucauau

SEQ ID NO: 10435 - RNA, 20 nt, Artificial Sequence
  HTT spacer sequence CTCN PAM
auccaccaacuacagugguc

SEQ ID NO: 10436 - RNA, 20 nt, Artificial Sequence
  HTT spacer sequence CTCN PAM
uuaaauccccagaccagaac

SEQ ID NO: 10437 - RNA, 20 nt, Artificial Sequence
  HTT spacer sequence CTCN PAM
agguaacuaguaagguaauu

SEQ ID NO: 10438 - RNA, 20 nt, Artificial Sequence
  HTT spacer sequence CTCN PAM
auaugaucacuccagguaac

SEQ ID NO: 10439 - RNA, 20 nt, Artificial Sequence
  HTT spacer sequence CTCN PAM
uagggacuuaaaaguucuug

SEQ ID NO: 10440 - RNA, 20 nt, Artificial Sequence
  HTT spacer sequence CTCN PAM
ggagcagguuacacugcccg

SEQ ID NO: 10441 - RNA, 20 nt, Artificial Sequence
  HTT spacer sequence CTCN PAM
ugaguuaaacauacaguauu

SEQ ID NO: 10442 - RNA, 20 nt, Artificial Sequence
  HTT spacer sequence CTCN PAM
gauauuacugcucccauauu

SEQ ID NO: 10443 - RNA, 20 nt, Artificial Sequence
  HTT spacer sequence CTCN PAM
cauauuacaauucaaaggaa

SEQ ID NO: 10444 - RNA, 20 nt, Artificial Sequence
  HTT spacer sequence CTCN PAM
uaggucagcuuucuaauuaa

SEQ ID NO: 10445 - RNA, 20 nt, Artificial Sequence
  HTT spacer sequence CTCN PAM
ugaaguaacaacuacguugg

SEQ ID NO: 10446 - RNA, 20 nt, Artificial Sequence
  HTT spacer sequence CTCN PAM
gguacaguuccagagaccau

SEQ ID NO: 10447 - RNA, 20 nt, Artificial Sequence
  HTT spacer sequence CTCN PAM
ggaacuguaccagagggaca

SEQ ID NO: 10448 - RNA, 20 nt, Artificial Sequence
  HTT spacer sequence CTCN PAM
aaucccuccaugauagauau

SEQ ID NO: 10449 - RNA, 20 nt, Artificial Sequence
  HTT spacer sequence CTCN PAM
augauagauauuucuguaag

SEQ ID NO: 10450 - RNA, 20 nt, Artificial Sequence
  HTT spacer sequence CTCN PAM
guuugaauauguccuagaac

SEQ ID NO: 10451 - RNA, 20 nt, Artificial Sequence
  HTT spacer sequence CTCN PAM
ugcuaaucugccuuuaauga

SEQ ID NO: 10452 - RNA, 20 nt, Artificial Sequence
  HTT spacer sequence CTCN PAM
gauuuugugaaagaacagag

SEQ ID NO: 10453 - RNA, 20 nt, Artificial Sequence
  HTT spacer sequence CTCN PAM
guucuuucacaaaaucugag

SEQ ID NO: 10454 - RNA, 20 nt, Artificial Sequence
  HTT spacer sequence CTCN PAM
cgccuguaauccuagcacuu

SEQ ID NO: 10455 - RNA, 20 nt, Artificial Sequence
  HTT spacer sequence CTCN PAM
cgaagugcuaggauuacagg

SEQ ID NO: 10456 - RNA, 20 nt, Artificial Sequence
  HTT spacer sequence CTCN PAM
agcgaucugccuaccuuggc

SEQ ID NO: 10457 - RNA, 20 nt, Artificial Sequence
  HTT spacer sequence CTCN PAM
auuuaaauauuuaauauaaa

SEQ ID NO: 10458 - RNA, 20 nt, Artificial Sequence
  HTT spacer sequence CTCN PAM
guauaauuaugauuguauag

SEQ ID NO: 10459 - RNA, 20 nt, Artificial Sequence
  HTT spacer sequence CTCN PAM
ggagguguuguacucucagu

SEQ ID NO: 10460 - RNA, 20 nt, Artificial Sequence
  HTT spacer sequence CTCN PAM
agagcaagucugugggaaac

SEQ ID NO: 10461 - RNA, 20 nt, Artificial Sequence
  HTT spacer sequence CTCN PAM
cagucaaggcccagaggcag

SEQ ID NO: 10462 - RNA, 20 nt, Artificial Sequence
  HTT spacer sequence CTCN PAM
gucaaggcccagaggcagug

SEQ ID NO: 10463 - RNA, 20 nt, Artificial Sequence
  HTT spacer sequence CTCN PAM
gggccuugacugagaguaca

SEQ ID NO: 10464 - RNA, 20 nt, Artificial Sequence
  HTT spacer sequence CTCN PAM
cugccucugggccuugacug

SEQ ID NO: 10465 - RNA, 20 nt, Artificial Sequence
  HTT spacer sequence CTCN PAM
ccccuacucugaaugccugu

SEQ ID NO: 10466 - RNA, 20 nt, Artificial Sequence
  HTT spacer sequence CTCN PAM
gaaugccugucagaaggagc

SEQ ID NO: 10467 - RNA, 20 nt, Artificial Sequence
  HTT spacer sequence CTCN PAM
uucugacaggcauucagagu

SEQ ID NO: 10468 - RNA, 20 nt, Artificial Sequence
  HTT spacer sequence CTCN PAM
ugcggggacagccucggugc

SEQ ID NO: 10469 - RNA, 20 nt, Artificial Sequence
  HTT spacer sequence CTCN PAM
gugcccuuuaauccagauuc

SEQ ID NO: 10470 - RNA, 20 nt, Artificial Sequence
  HTT spacer sequence CTCN PAM
agugggcuugagagagcaaa

SEQ ID NO: 10471 - RNA, 20 nt, Artificial Sequence
  HTT spacer sequence CTCN PAM
agcccacuggaggaagugcu

SEQ ID NO: 10472 - RNA, 20 nt, Artificial Sequence
  HTT spacer sequence CTCN PAM
caagcccacuggaggaagug

SEQ ID NO: 10473 - RNA, 20 nt, Artificial Sequence
  HTT spacer sequence CTCN PAM
cucaagcccacuggaggaag

SEQ ID NO: 10474 - RNA, 20 nt, Artificial Sequence
  HTT spacer sequence CTCN PAM
gaaaugaauuuguagggucc

SEQ ID NO: 10475 - RNA, 20 nt, Artificial Sequence
  HTT spacer sequence CTCN PAM
ggacccuacaaauucauuuc

SEQ ID NO: 10476 - RNA, 20 nt, Artificial Sequence
  HTT spacer sequence CTCN PAM
cucaggacccuacaaauuca

SEQ ID NO: 10477 - RNA, 20 nt, Artificial Sequence
  HTT spacer sequence CTCN PAM
auuccuuuaccauugugcuc

SEQ ID NO: 10478 - RNA, 20 nt, Artificial Sequence
  HTT spacer sequence CTCN PAM
gcugucaugguuuuaggcca

SEQ ID NO: 10479 - RNA, 20 nt, Artificial Sequence
  HTT spacer sequence CTCN PAM
uuccacuacagucuguggcc

SEQ ID NO: 10480 - RNA, 20 nt, Artificial Sequence
  HTT spacer sequence CTCN PAM
ggucugcccacgucugaagu

SEQ ID NO: 10481 - RNA, 20 nt, Artificial Sequence
  HTT spacer sequence CTCN PAM
ucucuagcagggaaauaauc

SEQ ID NO: 10482 - RNA, 20 nt, Artificial Sequence
  HTT spacer sequence CTCN PAM
agcagggaaauaaucggccc

SEQ ID NO: 10483 - RNA, 20 nt, Artificial Sequence
  HTT spacer sequence CTCN PAM
cagcagccuggcgggcaggg

SEQ ID NO: 10484 - RNA, 20 nt, Artificial Sequence
  HTT spacer sequence CTCN PAM
cuggcucacagcagccuggc

SEQ ID NO: 10485 - RNA, 20 nt, Artificial Sequence
  HTT spacer sequence CTCN PAM
cagcacagugccuggcacuc

SEQ ID NO: 10486 - RNA, 20 nt, Artificial Sequence
  HTT spacer sequence CTCN PAM
gcacagugccuggcacucuu

SEQ ID NO: 10487 - RNA, 20 nt, Artificial Sequence
  HTT spacer sequence CTCN PAM
ugucugcuuuccauucccuu

SEQ ID NO: 10488 - RNA, 20 nt, Artificial Sequence
  HTT spacer sequence CTCN PAM
cccguaauuccaagauaaug

SEQ ID NO: 10489 - RNA, 20 nt, Artificial Sequence
  HTT spacer sequence CTCN PAM
gccagugagggucucaucaa

SEQ ID NO: 10490 - RNA, 20 nt, Artificial Sequence
  HTT spacer sequence CTCN PAM
cuggcagagaccagcagcag

SEQ ID NO: 10491 - RNA, 20 nt, Artificial Sequence
  HTT spacer sequence CTCN PAM
ucaagcaaagagcuuccuuu

SEQ ID NO: 10492 - RNA, 20 nt, Artificial Sequence
  HTT spacer sequence CTCN PAM
uugcuugaugagacccucac

SEQ ID NO: 10493 - RNA, 20 nt, Artificial Sequence
  HTT spacer sequence CTCN PAM
uuuauuuugcuguuuaaacu

SEQ ID NO: 10494 - RNA, 20 nt, Artificial Sequence
  HTT spacer sequence CTCN PAM
cacuugacaggcgcaaaccu

SEQ ID NO: 10495 - RNA, 20 nt, Artificial Sequence
  HTT spacer sequence CTCN PAM
ucuuuauucuuuuuuuuugu

SEQ ID NO: 10496 - RNA, 20 nt, Artificial Sequence
  HTT spacer sequence CTCN PAM
aaaugagaaaagaauucugg

SEQ ID NO: 10497 - RNA, 20 nt, Artificial Sequence
  HTT spacer sequence CTCN PAM
uuuagagccauagcuucacc

SEQ ID NO: 10498 - RNA, 20 nt, Artificial Sequence
  HTT spacer sequence CTCN PAM
agaauucuuuucucauuuag

SEQ ID NO: 10499 - RNA, 20 nt, Artificial Sequence
  HTT spacer sequence CTCN PAM
ucuuagucuucacugugcau

SEQ ID NO: 10500 - RNA, 20 nt, Artificial Sequence
  HTT spacer sequence CTCN PAM
uagucuucacugugcauugu

SEQ ID NO: 10501 - RNA, 20 nt, Artificial Sequence
  HTT spacer sequence CTCN PAM
gcucacgcucacugaagccg

SEQ ID NO: 10502 - RNA, 20 nt, Artificial Sequence
  HTT spacer sequence CTCN PAM
cgcucacugaagccguggaa

SEQ ID NO: 10503 - RNA, 20 nt, Artificial Sequence
  HTT spacer sequence CTCN PAM
cugaagccguggaagucauu

SEQ ID NO: 10504 - RNA, 20 nt, Artificial Sequence
  HTT spacer sequence CTCN PAM
gaaaacaagaaaugacuucc

SEQ ID NO: 10505 - RNA, 20 nt, Artificial Sequence
  HTT spacer sequence CTCN PAM
uuuuaguaacaguuuuguuu

SEQ ID NO: 10506 - RNA, 20 nt, Artificial Sequence
  HTT spacer sequence CTCN PAM
cuucuuucuuauucaaaccu

SEQ ID NO: 10507 - RNA, 20 nt, Artificial Sequence
  HTT spacer sequence CTCN PAM
ucuuucuuauucaaaccuua

SEQ ID NO: 10508 - RNA, 20 nt, Artificial Sequence
  HTT spacer sequence CTCN PAM
uucuauguuuucuaagguuu

SEQ ID NO: 10509 - RNA, 20 nt, Artificial Sequence
  HTT spacer sequence CTCN PAM
cauucugucacucuucacac

SEQ ID NO: 10510 - RNA, 20 nt, Artificial Sequence
  HTT spacer sequence CTCN PAM
ucacaccugccagcuugcag

SEQ ID NO: 10511 - RNA, 20 nt, Artificial Sequence
  HTT spacer sequence CTCN PAM
gcaagcuggcaggugugaag

SEQ ID NO: 10512 - RNA, 20 nt, Artificial Sequence
  HTT spacer sequence CTCN PAM
agguccauuaguuacccgug

SEQ ID NO: 10513 - RNA, 20 nt, Artificial Sequence
  HTT spacer sequence CTCN PAM
ggcuggcugugauaagggaa

SEQ ID NO: 10514 - RNA, 20 nt, Artificial Sequence
  HTT spacer sequence CTCN PAM
guuugcucucagccuccagu

SEQ ID NO: 10515 - RNA, 20 nt, Artificial Sequence
  HTT spacer sequence CTCN PAM
cagccuccagucaauuucuc

SEQ ID NO: 10516 - RNA, 20 nt, Artificial Sequence
  HTT spacer sequence CTCN PAM
gccuccagucaauuucucug

SEQ ID NO: 10517 - RNA, 20 nt, Artificial Sequence
  HTT spacer sequence CTCN PAM
agucaauuucucuggccccu

SEQ ID NO: 10518 - RNA, 20 nt, Artificial Sequence
  HTT spacer sequence CTCN PAM
ggccccugggacacugugac

SEQ ID NO: 10519 - RNA, 20 nt, Artificial Sequence
  HTT spacer sequence CTCN PAM
agcacagccaagucacagug

SEQ ID NO: 10520 - RNA, 20 nt, Artificial Sequence
  HTT spacer sequence CTCN PAM
cucucucucucuuuuuuuuu

SEQ ID NO: 10521 - RNA, 20 nt, Artificial Sequence
  HTT spacer sequence CTCN PAM
cucucucucuuuuuuuuuuu

SEQ ID NO: 10522 - RNA, 20 nt, Artificial Sequence
  HTT spacer sequence CTCN PAM
cucucucuuuuuuuuuuuuu

SEQ ID NO: 10523 - RNA, 20 nt, Artificial Sequence
  HTT spacer sequence CTCN PAM
cucucuuuuuuuuuuuuuuu

SEQ ID NO: 10524 - RNA, 20 nt, Artificial Sequence
  HTT spacer sequence CTCN PAM
cucuuuuuuuuuuuuuuuuu

SEQ ID NO: 10525 - RNA, 20 nt, Artificial Sequence
  HTT spacer sequence CTCN PAM
cuuuuuuuuuuuuuuuuuug

SEQ ID NO: 10526 - RNA, 20 nt, Artificial Sequence
  HTT spacer sequence CTCN PAM
uuuuuuuuuuuuuuuuugac

SEQ ID NO: 10527 - RNA, 20 nt, Artificial Sequence
  HTT spacer sequence CTCN PAM
guuguccaggcuggagcgca

SEQ ID NO: 10528 - RNA, 20 nt, Artificial Sequence
  HTT spacer sequence CTCN PAM
agccuggacaacagagcgaa

SEQ ID NO: 10529 - RNA, 20 nt, Artificial Sequence
  HTT spacer sequence CTCN PAM
accuuccaggcccaagugau

SEQ ID NO: 10530 - RNA, 20 nt, Artificial Sequence
  HTT spacer sequence CTCN PAM
aacacuacaaaucauuuuau

SEQ ID NO: 10531 - RNA, 20 nt, Artificial Sequence
  HTT spacer sequence CTCN PAM
aagccauuuauuucuuagcc

SEQ ID NO: 10532 - RNA, 20 nt, Artificial Sequence
  HTT spacer sequence CTCN PAM
gggcuaagaaauaaauggcu

SEQ ID NO: 10533 - RNA, 20 nt, Artificial Sequence
  HTT spacer sequence CTCN PAM
gucacccaggcuggaguaca

SEQ ID NO: 10534 - RNA, 20 nt, Artificial Sequence
  HTT spacer sequence CTCN PAM
cucugucacccaggcuggag

SEQ ID NO: 10535 - RNA, 20 nt, Artificial Sequence
  HTT spacer sequence CTCN PAM
aucuccaaaaaaaaaaaaaa

SEQ ID NO: 10536 - RNA, 20 nt, Artificial Sequence
  HTT spacer sequence CTCN PAM
aaaaaaaaaaaaaaaaaaau

SEQ ID NO: 10537 - RNA, 20 nt, Artificial Sequence
  HTT spacer sequence CTCN PAM
gaaggcuguggugggaggau

SEQ ID NO: 10538 - RNA, 20 nt, Artificial Sequence
  HTT spacer sequence CTCN PAM
caccacagccuucugaguag

SEQ ID NO: 10539 - RNA, 20 nt, Artificial Sequence
  HTT spacer sequence CTCN PAM
cugcagcccugaccaccugg

SEQ ID NO: 10540 - RNA, 20 nt, Artificial Sequence
  HTT spacer sequence CTCN PAM
agccugggugacagagugag

SEQ ID NO: 10541 - RNA, 20 nt, Artificial Sequence
  HTT spacer sequence CTCN PAM
gucacccaggcuggagugca

SEQ ID NO: 10542 - RNA, 20 nt, Artificial Sequence
  HTT spacer sequence CTCN PAM
cucugucacccaggcuggag

SEQ ID NO: 10543 - RNA, 20 nt, Artificial Sequence
  HTT spacer sequence CTCN PAM
aaaacaaagcaaaacaaaaa

SEQ ID NO: 10544 - RNA, 20 nt, Artificial Sequence
  HTT spacer sequence CTCN PAM
cccaaggaaccuagagacau

SEQ ID NO: 10545 - RNA, 20 nt, Artificial Sequence
  HTT spacer sequence CTCN PAM
caaggaaccuagagacauuu

SEQ ID NO: 10546 - RNA, 20 nt, Artificial Sequence
  HTT spacer sequence CTCN PAM
agguuccuugggagaggcca

SEQ ID NO: 10547 - RNA, 20 nt, Artificial Sequence
  HTT spacer sequence CTCN PAM
ugugaauauucauucaacau

SEQ ID NO: 10548 - RNA, 20 nt, Artificial Sequence
  HTT spacer sequence CTCN PAM
ucuugugaauauucauucaa

SEQ ID NO: 10549 - RNA, 20 nt, Artificial Sequence
  HTT spacer sequence CTCN PAM
ccucuugugaauauucauuc

SEQ ID NO: 10550 - RNA, 20 nt, Artificial Sequence
  HTT spacer sequence CTCN PAM
cuggcccuugaauuaguaag

SEQ ID NO: 10551 - RNA, 20 nt, Artificial Sequence
  HTT spacer sequence CTCN PAM
gcaccucuguuacuguuuua

SEQ ID NO: 10552 - RNA, 20 nt, Artificial Sequence
  HTT spacer sequence CTCN PAM
guuacuguuuuaauacauca

SEQ ID NO: 10553 - RNA, 20 nt, Artificial Sequence
  HTT spacer sequence CTCN PAM
ggaggcugaggcaggagaau

SEQ ID NO: 10554 - RNA, 20 nt, Artificial Sequence
  HTT spacer sequence CTCN PAM
cgaguagcugggauuauagg

SEQ ID NO: 10555 - RNA, 20 nt, Artificial Sequence
  HTT spacer sequence CTCN PAM
gccucccgaguagcugggau

SEQ ID NO: 10556 - RNA, 20 nt, Artificial Sequence
  HTT spacer sequence CTCN PAM
ugccucagccucccgaguag

SEQ ID NO: 10557 - RNA, 20 nt, Artificial Sequence
  HTT spacer sequence CTCN PAM
cagguuucaagcgauucucc

SEQ ID NO: 10558 - RNA, 20 nt, Artificial Sequence
  HTT spacer sequence CTCN PAM
gucucccagguuucaagcga

SEQ ID NO: 10559 - RNA, 20 nt, Artificial Sequence
  HTT spacer sequence CTCN PAM
cugcaaccucugucucccag

SEQ ID NO: 10560 - RNA, 20 nt, Artificial Sequence
  HTT spacer sequence CTCN PAM
gcucacugcaaccucugucu

SEQ ID NO: 10561 - RNA, 20 nt, Artificial Sequence
  HTT spacer sequence CTCN PAM
agccugggcgacagagcaag

SEQ ID NO: 10562 - RNA, 20 nt, Artificial Sequence
  HTT spacer sequence CTCN PAM
ccauuaugaauggaggggau

SEQ ID NO: 10563 - RNA, 20 nt, Artificial Sequence
  HTT spacer sequence CTCN PAM
auucauaauggugagcacca

SEQ ID NO: 10564 - RNA, 20 nt, Artificial Sequence
  HTT spacer sequence CTCN PAM
ucaaagccgggauugcccag

SEQ ID NO: 10565 - RNA, 20 nt, Artificial Sequence
  HTT spacer sequence CTCN PAM
gcucaucaaagccgggauug

SEQ ID NO: 10566 - RNA, 20 nt, Artificial Sequence
  HTT spacer sequence CTCN PAM
cugcucaucaaagccgggau

SEQ ID NO: 10567 - RNA, 20 nt, Artificial Sequence
  HTT spacer sequence CTCN PAM
gcagcauagaaaacggcucu

SEQ ID NO: 10568 - RNA, 20 nt, Artificial Sequence
  HTT spacer sequence CTCN PAM
guaaaucuuccaagccgcaa

SEQ ID NO: 10569 - RNA, 20 nt, Artificial Sequence
  HTT spacer sequence CTCN PAM
auuagguagcaccguucuua

SEQ ID NO: 10570 - RNA, 20 nt, Artificial Sequence
  HTT spacer sequence CTCN PAM
aagacuugcaggcuccauua

SEQ ID NO: 10571 - RNA, 20 nt, Artificial Sequence
  HTT spacer sequence CTCN PAM
cagcccuaggcuucccuggu

SEQ ID NO: 10572 - RNA, 20 nt, Artificial Sequence
  HTT spacer sequence CTCN PAM
ugcccauccuggaagcagcc

SEQ ID NO: 10573 - RNA, 20 nt, Artificial Sequence
  HTT spacer sequence CTCN PAM
cagcuauucuccugcccauc

SEQ ID NO: 10574 - RNA, 20 nt, Artificial Sequence
  HTT spacer sequence CTCN PAM
auggugauucuuaggguugg

SEQ ID NO: 10575 - RNA, 20 nt, Artificial Sequence
  HTT spacer sequence CTCN PAM
gacuggccauauuuccaaua

SEQ ID NO: 10576 - RNA, 20 nt, Artificial Sequence
  HTT spacer sequence CTCN PAM
agucccugauauaaaauggu

SEQ ID NO: 10577 - RNA, 20 nt, Artificial Sequence
  HTT spacer sequence CTCN PAM
cuugucaccuuguaagccug

SEQ ID NO: 10578 - RNA, 20 nt, Artificial Sequence
  HTT spacer sequence CTCN PAM
uggccuuugugaugcagcuc

SEQ ID NO: 10579 - RNA, 20 nt, Artificial Sequence
  HTT spacer sequence CTCN PAM
ccacagagcccuccagccuu

SEQ ID NO: 10580 - RNA, 20 nt, Artificial Sequence
  HTT spacer sequence CTCN PAM
guggggagcugcaucacaaa

SEQ ID NO: 10581 - RNA, 20 nt, Artificial Sequence
  HTT spacer sequence CTCN PAM
agccuuggguccugcugcuc

SEQ ID NO: 10582 - RNA, 20 nt, Artificial Sequence
  HTT spacer sequence CTCN PAM
cacacccccugcccucauca

SEQ ID NO: 10583 - RNA, 20 nt, Artificial Sequence
  HTT spacer sequence CTCN PAM
ucaugcgaggguuuuagcug

SEQ ID NO: 10584 - RNA, 20 nt, Artificial Sequence
  HTT spacer sequence CTCN PAM
caugaugagggcagggggug

SEQ ID NO: 10585 - RNA, 20 nt, Artificial Sequence
  HTT spacer sequence CTCN PAM
gguguccucacuucauugua

SEQ ID NO: 10586 - RNA, 20 nt, Artificial Sequence
  HTT spacer sequence CTCN PAM
cuucauuguaccuuugcaca

SEQ ID NO: 10587 - RNA, 20 nt, Artificial Sequence
  HTT spacer sequence CTCN PAM
ccacccagccccucuuccug

SEQ ID NO: 10588 - RNA, 20 nt, Artificial Sequence
  HTT spacer sequence CTCN PAM
acccagccccucuuccuguc

SEQ ID NO: 10589 - RNA, 20 nt, Artificial Sequence
  HTT spacer sequence CTCN PAM
uccugucauucugagagacu

SEQ ID NO: 10590 - RNA, 20 nt, Artificial Sequence
  HTT spacer sequence CTCN PAM
gaaugacaggaagaggggcu

SEQ ID NO: 10591 - RNA, 20 nt, Artificial Sequence
  HTT spacer sequence CTCN PAM
cagaaugacaggaagagggg

SEQ ID NO: 10592 - RNA, 20 nt, Artificial Sequence
  HTT spacer sequence CTCN PAM
ugcucauccgcccagaguug

SEQ ID NO: 10593 - RNA, 20 nt, Artificial Sequence
  HTT spacer sequence CTCN PAM
uccgcccagaguuggcccac

SEQ ID NO: 10594 - RNA, 20 nt, Artificial Sequence
  HTT spacer sequence CTCN PAM
gggcggaugagcaggagucu

SEQ ID NO: 10595 - RNA, 20 nt, Artificial Sequence
  HTT spacer sequence CTCN PAM
ugcugugugggccaacucug

SEQ ID NO: 10596 - RNA, 20 nt, Artificial Sequence
  HTT spacer sequence CTCN PAM
cacccucgugcugugugggc

SEQ ID NO: 10597 - RNA, 20 nt, Artificial Sequence
  HTT spacer sequence CTCN PAM
ugcucacacccucgugcugu

SEQ ID NO: 10598 - RNA, 20 nt, Artificial Sequence
  HTT spacer sequence CTCN PAM
cccacauccuccaacugcuc

SEQ ID NO: 10599 - RNA, 20 nt, Artificial Sequence
  HTT spacer sequence CTCN PAM
aacugcuccccguguugucu

SEQ ID NO: 10600 - RNA, 20 nt, Artificial Sequence
  HTT spacer sequence CTCN PAM
ccguguugucugcucagaug

SEQ ID NO: 10601 - RNA, 20 nt, Artificial Sequence
  HTT spacer sequence CTCN PAM
gauggucacgucagacgaug

SEQ ID NO: 10602 - RNA, 20 nt, Artificial Sequence
  HTT spacer sequence CTCN PAM
ucgucugacgugaccaucug

SEQ ID NO: 10603 - RNA, 20 nt, Artificial Sequence
  HTT spacer sequence CTCN PAM
caagaagcucaucgucugac

SEQ ID NO: 10604 - RNA, 20 nt, Artificial Sequence
  HTT spacer sequence CTCN PAM
uuucuuccuauucugaugga

SEQ ID NO: 10605 - RNA, 20 nt, Artificial Sequence
  HTT spacer sequence CTCN PAM
uuaucuuauauaucccacag

SEQ ID NO: 10606 - RNA, 20 nt, Artificial Sequence
  HTT spacer sequence CTCN PAM
uaaggaccagagaccaggcu

SEQ ID NO: 10607 - RNA, 20 nt, Artificial Sequence
  HTT spacer sequence CTCN PAM
gguccuuaagagauauuuau

SEQ ID NO: 10608 - RNA, 20 nt, Artificial Sequence
  HTT spacer sequence CTCN PAM
gcaccuugagcauugagcaa

SEQ ID NO: 10609 - RNA, 20 nt, Artificial Sequence
  HTT spacer sequence CTCN PAM
aggugcggaggugucagccc

SEQ ID NO: 10610 - RNA, 20 nt, Artificial Sequence
  HTT spacer sequence CTCN PAM
augcucaaggugcggaggug

SEQ ID NO: 10611 - RNA, 20 nt, Artificial Sequence
  HTT spacer sequence CTCN PAM
uagccagggcagcaauccac

SEQ ID NO: 10612 - RNA, 20 nt, Artificial Sequence
  HTT spacer sequence CTCN PAM
agacacagagguggucgccu

SEQ ID NO: 10613 - RNA, 20 nt, Artificial Sequence
  HTT spacer sequence CTCN PAM
gugucuagaggacucauagc

SEQ ID NO: 10614 - RNA, 20 nt, Artificial Sequence
  HTT spacer sequence CTCN PAM
ggcgaccaccucugugucua

SEQ ID NO: 10615 - RNA, 20 nt, Artificial Sequence
  HTT spacer sequence CTCN PAM
acucaggcgaccaccucugu

SEQ ID NO: 10616 - RNA, 20 nt, Artificial Sequence
  HTT spacer sequence CTCN PAM
aagcaauggcaacaaggcuu

SEQ ID NO: 10617 - RNA, 20 nt, Artificial Sequence
  HTT spacer sequence CTCN PAM
uaccucuaagcaauggcaac

SEQ ID NO: 10618 - RNA, 20 nt, Artificial Sequence
  HTT spacer sequence CTCN PAM
uauggguguguuccaugguc

SEQ ID NO: 10619 - RNA, 20 nt, Artificial Sequence
  HTT spacer sequence CTCN PAM
uggaguaaaucacacuucac

SEQ ID NO: 10620 - RNA, 20 nt, Artificial Sequence
  HTT spacer sequence CTCN PAM
aggaguaacaaaagaaucaa

SEQ ID NO: 10621 - RNA, 20 nt, Artificial Sequence
  HTT spacer sequence CTCN PAM
gccguagucaccugugaagu

SEQ ID NO: 10622 - RNA, 20 nt, Artificial Sequence
  HTT spacer sequence CTCN PAM
agaugagcuggauuuucuca

SEQ ID NO: 10623 - RNA, 20 nt, Artificial Sequence
  HTT spacer sequence CTCN PAM
ucuugagacugaaaccaaac

SEQ ID NO: 10624 - RNA, 20 nt, Artificial Sequence
  HTT spacer sequence CTCN PAM
ugugagcuuuggcucauccu

SEQ ID NO: 10625 - RNA, 20 nt, Artificial Sequence
  HTT spacer sequence CTCN PAM
caugagaaaauccagcucau

SEQ ID NO: 10626 - RNA, 20 nt, Artificial Sequence
  HTT spacer sequence CTCN PAM
uccucuaaccuccgguaccc

SEQ ID NO: 10627 - RNA, 20 nt, Artificial Sequence
  HTT spacer sequence CTCN PAM
aaccuccgguacccacuugc

SEQ ID NO: 10628 - RNA, 20 nt, Artificial Sequence
  HTT spacer sequence CTCN PAM
gguacccacuugccucaccc

SEQ ID NO: 10629 - RNA, 20 nt, Artificial Sequence
  HTT spacer sequence CTCN PAM
cccgccugcacucagugggg

SEQ ID NO: 10630 - RNA, 20 nt, Artificial Sequence
  HTT spacer sequence CTCN PAM
gugggggcugcaccaugucu

SEQ ID NO: 10631 - RNA, 20 nt, Artificial Sequence
  HTT spacer sequence CTCN PAM
ccaucaguagguaucacuaa

SEQ ID NO: 10632 - RNA, 20 nt, Artificial Sequence
  HTT spacer sequence CTCN PAM
gcccccugaguagcugggac

SEQ ID NO: 10633 - RNA, 20 nt, Artificial Sequence
  HTT spacer sequence CTCN PAM
gggggcugaggugggaaugu

SEQ ID NO: 10634 - RNA, 20 nt, Artificial Sequence
  HTT spacer sequence CTCN PAM
agcugggugcaguggugugu

SEQ ID NO: 10635 - RNA, 20 nt, Artificial Sequence
  HTT spacer sequence CTCN PAM
uaccauuaacauauuuuuaa

SEQ ID NO: 10636 - RNA, 20 nt, Artificial Sequence
  HTT spacer sequence CTCN PAM
caugugacgacaguguaaaa

SEQ ID NO: 10637 - RNA, 20 nt, Artificial Sequence
  HTT spacer sequence CTCN PAM
gcaaacaacucacaugugac

SEQ ID NO: 10638 - RNA, 20 nt, Artificial Sequence
  HTT spacer sequence CTCN PAM
ugaagggcaguuucguguuu

SEQ ID NO: 10639 - RNA, 20 nt, Artificial Sequence
  HTT spacer sequence CTCN PAM
cgcugguuguuccuacuggg

SEQ ID NO: 10640 - RNA, 20 nt, Artificial Sequence
  HTT spacer sequence CTCN PAM
ggaaucacagugccaacuuc

SEQ ID NO: 10641 - RNA, 20 nt, Artificial Sequence
  HTT spacer sequence CTCN PAM
acaagaaacaacaacaaaag

SEQ ID NO: 10642 - RNA, 20 nt, Artificial Sequence
  HTT spacer sequence CTCN PAM
ggcuucaagucucuacaaga

SEQ ID NO: 10643 - RNA, 20 nt, Artificial Sequence
  HTT spacer sequence CTCN PAM
uugaugaucgugguaagugg

SEQ ID NO: 10644 - RNA, 20 nt, Artificial Sequence
  HTT spacer sequence CTCN PAM
aacaaagucuacccauuaga

SEQ ID NO: 10645 - RNA, 20 nt, Artificial Sequence
  HTT spacer sequence CTCN PAM
uaaucauuaaguccacuuuc

SEQ ID NO: 10646 - RNA, 20 nt, Artificial Sequence
  HTT spacer sequence CTCN PAM
ccuaaucauuaaguccacuu

SEQ ID NO: 10647 - RNA, 20 nt, Artificial Sequence
  HTT spacer sequence CTCN PAM
gugguauguguucauuuuaa

SEQ ID NO: 10648 - RNA, 20 nt, Artificial Sequence
  HTT spacer sequence CTCN PAM
gcuucuugccuaaacacagg

SEQ ID NO: 10649 - RNA, 20 nt, Artificial Sequence
  HTT spacer sequence CTCN PAM
aucauuaauugaaaauuaug

SEQ ID NO: 10650 - RNA, 20 nt, Artificial Sequence
  HTT spacer sequence CTCN PAM
agccugggcgacacagcaag

SEQ ID NO: 10651 - RNA, 20 nt, Artificial Sequence
  HTT spacer sequence CTCN PAM
cugcagccuugaacuacugg

SEQ ID NO: 10652 - RNA, 20 nt, Artificial Sequence
  HTT spacer sequence CTCN PAM
aaugacccucccaucucagc

SEQ ID NO: 10653 - RNA, 20 nt, Artificial Sequence
  HTT spacer sequence CTCN PAM
caucucagcuuucugcauag

SEQ ID NO: 10654 - RNA, 20 nt, Artificial Sequence
  HTT spacer sequence CTCN PAM
gcuuucugcauagcugggac

SEQ ID NO: 10655 - RNA, 20 nt, Artificial Sequence
  HTT spacer sequence CTCN PAM
acaaaaaaaauuuaaaaauu

SEQ ID NO: 10656 - RNA, 20 nt, Artificial Sequence
  HTT spacer sequence CTCN PAM
aacuacugcccucaagcagu

SEQ ID NO: 10657 - RNA, 20 nt, Artificial Sequence
  HTT spacer sequence CTCN PAM
agcaguccuccugccuuccc

SEQ ID NO: 10658 - RNA, 20 nt, Artificial Sequence
  HTT spacer sequence CTCN PAM
ugccuucccucccaaagcac

SEQ ID NO: 10659 - RNA, 20 nt, Artificial Sequence
  HTT spacer sequence CTCN PAM
caaagcacuaggguuacagg

SEQ ID NO: 10660 - RNA, 20 nt, Artificial Sequence
  HTT spacer sequence CTCN PAM
cucuuguuucuugcuguuga

SEQ ID NO: 10661 - RNA, 20 nt, Artificial Sequence
  HTT spacer sequence CTCN PAM
uguuucuugcuguugaccca

SEQ ID NO: 10662 - RNA, 20 nt, Artificial Sequence
  HTT spacer sequence CTCN PAM
ugcuuuauucuuuuuuauuu

SEQ ID NO: 10663 - RNA, 20 nt, Artificial Sequence
  HTT spacer sequence CTCN PAM
aaacuuugucauguugcccc

SEQ ID NO: 10664 - RNA, 20 nt, Artificial Sequence
  HTT spacer sequence CTCN PAM
ugucacauagcaugugucac

SEQ ID NO: 10665 - RNA, 20 nt, Artificial Sequence
  HTT spacer sequence CTCN PAM
gugacacaugcuaugugaca

SEQ ID NO: 10666 - RNA, 20 nt, Artificial Sequence
  HTT spacer sequence CTCN PAM
aagcagccaucugcacccug

SEQ ID NO: 10667 - RNA, 20 nt, Artificial Sequence
  HTT spacer sequence CTCN PAM
cuguccacuauuacaggguc

SEQ ID NO: 10668 - RNA, 20 nt, Artificial Sequence
  HTT spacer sequence CTCN PAM
uugucugcagcaugggugca

SEQ ID NO: 10669 - RNA, 20 nt, Artificial Sequence
  HTT spacer sequence CTCN PAM
accuugguuccucuaaggga

SEQ ID NO: 10670 - RNA, 20 nt, Artificial Sequence
  HTT spacer sequence CTCN PAM
aagggagagucauacccaga

SEQ ID NO: 10671 - RNA, 20 nt, Artificial Sequence
  HTT spacer sequence CTCN PAM
cuuagaggaaccaaggugga

SEQ ID NO: 10672 - RNA, 20 nt, Artificial Sequence
  HTT spacer sequence CTCN PAM
cccuuagaggaaccaaggug

SEQ ID NO: 10673 - RNA, 20 nt, Artificial Sequence
  HTT spacer sequence CTCN PAM
ccagcagugcaaccauccuu

SEQ ID NO: 10674 - RNA, 20 nt, Artificial Sequence
  HTT spacer sequence CTCN PAM
cacauagcucacaagcagug

SEQ ID NO: 10675 - RNA, 20 nt, Artificial Sequence
  HTT spacer sequence CTCN PAM
caagcagugcugggagagag

SEQ ID NO: 10676 - RNA, 20 nt, Artificial Sequence
  HTT spacer sequence CTCN PAM
cagcacugcuugugagcuau

SEQ ID NO: 10677 - RNA, 20 nt, Artificial Sequence
  HTT spacer sequence CTCN PAM
cccagcacugcuugugagcu

SEQ ID NO: 10678 - RNA, 20 nt, Artificial Sequence
  HTT spacer sequence CTCN PAM
cucccagcacugcuugugag

SEQ ID NO: 10679 - RNA, 20 nt, Artificial Sequence
  HTT spacer sequence CTCN PAM
cuugaaagaagcucucuccc

SEQ ID NO: 10680 - RNA, 20 nt, Artificial Sequence
  HTT spacer sequence CTCN PAM
acuagacuguaagacccuuc

SEQ ID NO: 10681 - RNA, 20 nt, Artificial Sequence
  HTT spacer sequence CTCN PAM
ugccgagaagaggacaggcg

SEQ ID NO: 10682 - RNA, 20 nt, Artificial Sequence
  HTT spacer sequence CTCN PAM
gcaggagccacugaccuugc

SEQ ID NO: 10683 - RNA, 20 nt, Artificial Sequence
  HTT spacer sequence CTCN PAM
ucucggcaggagccacugac

SEQ ID NO: 10684 - RNA, 20 nt, Artificial Sequence
  HTT spacer sequence CTCN PAM
gccuuagacgccuguccucu

SEQ ID NO: 10685 - RNA, 20 nt, Artificial Sequence
  HTT spacer sequence CTCN PAM
aucuccgccuuagacgccug

SEQ ID NO: 10686 - RNA, 20 nt, Artificial Sequence
  HTT spacer sequence CTCN PAM
uuuuaugccucugccagaug

SEQ ID NO: 10687 - RNA, 20 nt, Artificial Sequence
  HTT spacer sequence CTCN PAM
gccagaugcuuucaugcuua

SEQ ID NO: 10688 - RNA, 20 nt, Artificial Sequence
  HTT spacer sequence CTCN PAM
cagggcagggugucauacau

SEQ ID NO: 10689 - RNA, 20 nt, Artificial Sequence
  HTT spacer sequence CTCN PAM
uuccucacagggcagggugu

SEQ ID NO: 10690 - RNA, 20 nt, Artificial Sequence
  HTT spacer sequence CTCN PAM
uuuaauggaaggcgauacca

SEQ ID NO: 10691 - RNA, 20 nt, Artificial Sequence
  HTT spacer sequence CTCN PAM
ugacuuagccugugguucau

SEQ ID NO: 10692 - RNA, 20 nt, Artificial Sequence
  HTT spacer sequence CTCN PAM
ccagagguggcuuugggugg

SEQ ID NO: 10693 - RNA, 20 nt, Artificial Sequence
  HTT spacer sequence CTCN PAM
ggugagcagcacagcaccag

SEQ ID NO: 10694 - RNA, 20 nt, Artificial Sequence
  HTT spacer sequence CTCN PAM
ccacccaaagccaccucugg

SEQ ID NO: 10695 - RNA, 20 nt, Artificial Sequence
  HTT spacer sequence CTCN PAM
cuuacugaguuguuaaaagg

SEQ ID NO: 10696 - RNA, 20 nt, Artificial Sequence
  HTT spacer sequence CTCN PAM
guaagugagcagcuucgcuu

SEQ ID NO: 10697 - RNA, 20 nt, Artificial Sequence
  HTT spacer sequence CTCN PAM
guaugcaaaguggagcaauc

SEQ ID NO: 10698 - RNA, 20 nt, Artificial Sequence
  HTT spacer sequence CTCN PAM
acuuugcauacagagcacgu

SEQ ID NO: 10699 - RNA, 20 nt, Artificial Sequence
  HTT spacer sequence CTCN PAM
aagcuaugugguugaucgga

SEQ ID NO: 10700 - RNA, 20 nt, Artificial Sequence
  HTT spacer sequence CTCN PAM
gcaccguacccuguuccgau

SEQ ID NO: 10701 - RNA, 20 nt, Artificial Sequence
  HTT spacer sequence CTCN PAM
cuuuuguguaaacaaagcag

SEQ ID NO: 10702 - RNA, 20 nt, Artificial Sequence
  HTT spacer sequence CTCN PAM
uaaacauaaagaaacauaaa

SEQ ID NO: 10703 - RNA, 20 nt, Artificial Sequence
  HTT spacer sequence CTCN PAM
ugauugucccuuuauguuuc

SEQ ID NO: 10704 - RNA, 20 nt, Artificial Sequence
  HTT spacer sequence CTCN PAM
ccugccuuguuaucacuucu

SEQ ID NO: 10705 - RNA, 20 nt, Artificial Sequence
  HTT spacer sequence CTCN PAM
uaaaaacacagaaaaagguu

SEQ ID NO: 10706 - RNA, 20 nt, Artificial Sequence
  HTT spacer sequence CTCN PAM
cuucuuuagaacuuuacccc

SEQ ID NO: 10707 - RNA, 20 nt, Artificial Sequence
  HTT spacer sequence CTCN PAM
ucuuuagaacuuuaccccac

SEQ ID NO: 10708 - RNA, 20 nt, Artificial Sequence
  HTT spacer sequence CTCN PAM
aacaugugggguaaaguucu

SEQ ID NO: 10709 - RNA, 20 nt, Artificial Sequence
  HTT spacer sequence CTCN PAM
gcucaaacaugugggguaaa

SEQ ID NO: 10710 - RNA, 20 nt, Artificial Sequence
  HTT spacer sequence CTCN PAM
ugccuggcuaacuuagcaag

SEQ ID NO: 10711 - RNA, 20 nt, Artificial Sequence
  HTT spacer sequence CTCN PAM
gcccagguuccccuccugcg

SEQ ID NO: 10712 - RNA, 20 nt, Artificial Sequence
  HTT spacer sequence CTCN PAM
ugcgccacgaucugaaaggc

SEQ ID NO: 10713 - RNA, 20 nt, Artificial Sequence
  HTT spacer sequence CTCN PAM
cgggugggaugccaggaugg

SEQ ID NO: 10714 - RNA, 20 nt, Artificial Sequence
  HTT spacer sequence CTCN PAM
ucucuuggggaccacagucc

SEQ ID NO: 10715 - RNA, 20 nt, Artificial Sequence
  HTT spacer sequence CTCN PAM
uggggaccacaguccucuga

SEQ ID NO: 10716 - RNA, 20 nt, Artificial Sequence
  HTT spacer sequence CTCN PAM
gaugccgaugaccacaguuu

SEQ ID NO: 10717 - RNA, 20 nt, Artificial Sequence
  HTT spacer sequence CTCN PAM
cuaugcuacccaggcugggu

SEQ ID NO: 10718 - RNA, 20 nt, Artificial Sequence
  HTT spacer sequence CTCN PAM
augcuacccaggcugggugc

SEQ ID NO: 10719 - RNA, 20 nt, Artificial Sequence
  HTT spacer sequence CTCN PAM
caggugcgauuguggcacaa

SEQ ID NO: 10720 - RNA, 20 nt, Artificial Sequence
  HTT spacer sequence CTCN PAM
ugggccuaagcgacccuccu

SEQ ID NO: 10721 - RNA, 20 nt, Artificial Sequence
  HTT spacer sequence CTCN PAM
ugccucagccucccacguag

SEQ ID NO: 10722 - RNA, 20 nt, Artificial Sequence
  HTT spacer sequence CTCN PAM
gccucccacguagcuggagu

SEQ ID NO: 10723 - RNA, 20 nt, Artificial Sequence
  HTT spacer sequence CTCN PAM
cacguagcuggaguuucagg

SEQ ID NO: 10724 - RNA, 20 nt, Artificial Sequence
  HTT spacer sequence CTCN PAM
agcuacgugggaggcugagg

SEQ ID NO: 10725 - RNA, 20 nt, Artificial Sequence
  HTT spacer sequence CTCN PAM
cugcaguuuugaccuccagg

SEQ ID NO: 10726 - RNA, 20 nt, Artificial Sequence
  HTT spacer sequence CTCN PAM
agggcuguagcgauccgccu

SEQ ID NO: 10727 - RNA, 20 nt, Artificial Sequence
  HTT spacer sequence CTCN PAM
gccuccugaguagcugggaa

SEQ ID NO: 10728 - RNA, 20 nt, Artificial Sequence
  HTT spacer sequence CTCN PAM
ugaguagcugggaauacagg

SEQ ID NO: 10729 - RNA, 20 nt, Artificial Sequence
  HTT spacer sequence CTCN PAM
ggaggcugaggcaaggcgga

SEQ ID NO: 10730 - RNA, 20 nt, Artificial Sequence
  HTT spacer sequence CTCN PAM
ugccuguauucccagcuacu

SEQ ID NO: 10731 - RNA, 20 nt, Artificial Sequence
  HTT spacer sequence CTCN PAM
caaaguacuaggauuauagg

SEQ ID NO: 10732 - RNA, 20 nt, Artificial Sequence
  HTT spacer sequence CTCN PAM
gccucccaaaguacuaggau

SEQ ID NO: 10733 - RNA, 20 nt, Artificial Sequence
  HTT spacer sequence CTCN PAM
agugauccaccugccucagc

SEQ ID NO: 10734 - RNA, 20 nt, Artificial Sequence
  HTT spacer sequence CTCN PAM
ugaccucaagugauccaccu

SEQ ID NO: 10735 - RNA, 20 nt, Artificial Sequence
  HTT spacer sequence CTCN PAM
aacucuugaccucaagugau

SEQ ID NO: 10736 - RNA, 20 nt, Artificial Sequence
  HTT spacer sequence CTCN PAM
acuaaaaauacaaaaauuag

SEQ ID NO: 10737 - RNA, 20 nt, Artificial Sequence
  HTT spacer sequence CTCN PAM
aaucccagcuacucaggagg

SEQ ID NO: 10738 - RNA, 20 nt, Artificial Sequence
  HTT spacer sequence CTCN PAM
ggaggccgaggcaggagaau

SEQ ID NO: 10739 - RNA, 20 nt, Artificial Sequence
  HTT spacer sequence CTCN PAM
ugaguagcugggauuagagg

SEQ ID NO: 10740 - RNA, 20 nt, Artificial Sequence
  HTT spacer sequence CTCN PAM
gccuccugaguagcugggau

SEQ ID NO: 10741 - RNA, 20 nt, Artificial Sequence
  HTT spacer sequence CTCN PAM
ugccucggccuccugaguag

SEQ ID NO: 10742 - RNA, 20 nt, Artificial Sequence
  HTT spacer sequence CTCN PAM
gccgcccggguucaagcgau

SEQ ID NO: 10743 - RNA, 20 nt, Artificial Sequence
  HTT spacer sequence CTCN PAM
cugcaaccucugccgcccgg

SEQ ID NO: 10744 - RNA, 20 nt, Artificial Sequence
  HTT spacer sequence CTCN PAM
gcucacugcaaccucugccg

SEQ ID NO: 10745 - RNA, 20 nt, Artificial Sequence
  HTT spacer sequence CTCN PAM
agccugggcgacagagugag

SEQ ID NO: 10746 - RNA, 20 nt, Artificial Sequence
  HTT spacer sequence CTCN PAM
gucgcccaggcuggagugua

SEQ ID NO: 10747 - RNA, 20 nt, Artificial Sequence
  HTT spacer sequence CTCN PAM
cucugucgcccaggcuggag

SEQ ID NO: 10748 - RNA, 20 nt, Artificial Sequence
  HTT spacer sequence CTCN PAM
gucucaaaaaacaaacaaac

SEQ ID NO: 10749 - RNA, 20 nt, Artificial Sequence
  HTT spacer sequence CTCN PAM
aaaaacaaacaaacaaacaa

SEQ ID NO: 10750 - RNA, 20 nt, Artificial Sequence
  HTT spacer sequence CTCN PAM
aauuaauuuaaagucacuca

SEQ ID NO: 10751 - RNA, 20 nt, Artificial Sequence
  HTT spacer sequence CTCN PAM
gaggccgggcacaguggcuc

SEQ ID NO: 10752 - RNA, 20 nt, Artificial Sequence
  HTT spacer sequence CTCN PAM
gagugacuuuaaauuaauuu

SEQ ID NO: 10753 - RNA, 20 nt, Artificial Sequence
  HTT spacer sequence CTCN PAM
ugccuguaaucccaauauuu

SEQ ID NO: 10754 - RNA, 20 nt, Artificial Sequence
  HTT spacer sequence CTCN PAM
caaaauauugggauuacagg

SEQ ID NO: 10755 - RNA, 20 nt, Artificial Sequence
  HTT spacer sequence CTCN PAM
ugacuucaggugauccaccu

SEQ ID NO: 10756 - RNA, 20 nt, Artificial Sequence
  HTT spacer sequence CTCN PAM
acuaaaaauacaaaaauuag

SEQ ID NO: 10757 - RNA, 20 nt, Artificial Sequence
  HTT spacer sequence CTCN PAM
aguagcugggacuacaggca

SEQ ID NO: 10758 - RNA, 20 nt, Artificial Sequence
  HTT spacer sequence CTCN PAM
gccccucaaguagcugggac

SEQ ID NO: 10759 - RNA, 20 nt, Artificial Sequence
  HTT spacer sequence CTCN PAM
cagguucaagcgauucuucu

SEQ ID NO: 10760 - RNA, 20 nt, Artificial Sequence
  HTT spacer sequence CTCN PAM
gccucccagguucaagcgau

SEQ ID NO: 10761 - RNA, 20 nt, Artificial Sequence
  HTT spacer sequence CTCN PAM
cugcaaccuccgccucccag

SEQ ID NO: 10762 - RNA, 20 nt, Artificial Sequence
  HTT spacer sequence CTCN PAM
agccuaggugacagagugag

SEQ ID NO: 10763 - RNA, 20 nt, Artificial Sequence
  HTT spacer sequence CTCN PAM
gucaccuaggcuggagugca

SEQ ID NO: 10764 - RNA, 20 nt, Artificial Sequence
  HTT spacer sequence CTCN PAM
cucugucaccuaggcuggag

SEQ ID NO: 10765 - RNA, 20 nt, Artificial Sequence
  HTT spacer sequence CTCN PAM
gucucaaaaaaaaaaaaaaa

SEQ ID NO: 10766 - RNA, 20 nt, Artificial Sequence
  HTT spacer sequence CTCN PAM
aaaaaaaaaaaaaaaaaagu

SEQ ID NO: 10767 - RNA, 20 nt, Artificial Sequence
  HTT spacer sequence CTCN PAM
guaucauucccuucugugcg

SEQ ID NO: 10768 - RNA, 20 nt, Artificial Sequence
  HTT spacer sequence CTCN PAM
aaaaaaaaaaaaaaaaaaau

SEQ ID NO: 10769 - RNA, 20 nt, Artificial Sequence
  HTT spacer sequence CTCN PAM
gucucaaaaaaaaaaaaaaa

SEQ ID NO: 10770 - RNA, 20 nt, Artificial Sequence
  HTT spacer sequence CTCN PAM
gucgcccaggcuggugugca

SEQ ID NO: 10771 - RNA, 20 nt, Artificial Sequence
  HTT spacer sequence CTCN PAM
gcucacuguaagcuccgccu

SEQ ID NO: 10772 - RNA, 20 nt, Artificial Sequence
  HTT spacer sequence CTCN PAM
cuguaagcuccgccucccag

SEQ ID NO: 10773 - RNA, 20 nt, Artificial Sequence
  HTT spacer sequence CTCN PAM
gccucccagguucaugccau

SEQ ID NO: 10774 - RNA, 20 nt, Artificial Sequence
  HTT spacer sequence CTCN PAM
cagguucaugccauucuccu

SEQ ID NO: 10775 - RNA, 20 nt, Artificial Sequence
  HTT spacer sequence CTCN PAM
ugccucagccucccaagcag

SEQ ID NO: 10776 - RNA, 20 nt, Artificial Sequence
  HTT spacer sequence CTCN PAM
gccucccaagcagcugggac

SEQ ID NO: 10777 - RNA, 20 nt, Artificial Sequence
  HTT spacer sequence CTCN PAM
caagcagcugggacuacagg

SEQ ID NO: 10778 - RNA, 20 nt, Artificial Sequence
  HTT spacer sequence CTCN PAM
acuaaaaaaaauauaaaaaa

SEQ ID NO: 10779 - RNA, 20 nt, Artificial Sequence
  HTT spacer sequence CTCN PAM
aucuccugaccuugugaucc

SEQ ID NO: 10780 - RNA, 20 nt, Artificial Sequence
  HTT spacer sequence CTCN PAM
ugaccuugugauccgcccgc

SEQ ID NO: 10781 - RNA, 20 nt, Artificial Sequence
  HTT spacer sequence CTCN PAM
gccucccaaagugcugggau

SEQ ID NO: 10782 - RNA, 20 nt, Artificial Sequence
  HTT spacer sequence CTCN PAM
caaagugcugggauuacagg

SEQ ID NO: 10783 - RNA, 20 nt, Artificial Sequence
  HTT spacer sequence CTCN PAM
agccuguaaucccagcacuu

SEQ ID NO: 10784 - RNA, 20 nt, Artificial Sequence
  HTT spacer sequence CTCN PAM
auuuugcgguguuaucuuug

SEQ ID NO: 10785 - RNA, 20 nt, Artificial Sequence
  HTT spacer sequence CTCN PAM
uauuucauuccuucauuuac

SEQ ID NO: 10786 - RNA, 20 nt, Artificial Sequence
  HTT spacer sequence CTCN PAM
uuucuuaaauaaaguaguag

SEQ ID NO: 10787 - RNA, 20 nt, Artificial Sequence
  HTT spacer sequence CTCN PAM
acguggcuauuucacugaau

SEQ ID NO: 10788 - RNA, 20 nt, Artificial Sequence
  HTT spacer sequence CTCN PAM
accguauauucagugaaaua

SEQ ID NO: 10789 - RNA, 20 nt, Artificial Sequence
  HTT spacer sequence CTCN PAM
gcaacacucauggacggcuu

SEQ ID NO: 10790 - RNA, 20 nt, Artificial Sequence
  HTT spacer sequence CTCN PAM
uggacggcuuccguccgucu

SEQ ID NO: 10791 - RNA, 20 nt, Artificial Sequence
  HTT spacer sequence CTCN PAM
ugcaggcgaaccugaccugu

SEQ ID NO: 10792 - RNA, 20 nt, Artificial Sequence
  HTT spacer sequence CTCN PAM
cugguaagcgugucaucucc

SEQ ID NO: 10793 - RNA, 20 nt, Artificial Sequence
  HTT spacer sequence CTCN PAM
accggugcuguuuccguugg

SEQ ID NO: 10794 - RNA, 20 nt, Artificial Sequence
  HTT spacer sequence CTCN PAM
aucgcggcaccaacggaaac

SEQ ID NO: 10795 - RNA, 20 nt, Artificial Sequence
  HTT spacer sequence CTCN PAM
ccaucgcggcaccaacggaa

SEQ ID NO: 10796 - RNA, 20 nt, Artificial Sequence
  HTT spacer sequence CTCN PAM
aucaaggauacauucaacga

SEQ ID NO: 10797 - RNA, 20 nt, Artificial Sequence
  HTT spacer sequence CTCN PAM
aggguguuucccgucugcau

SEQ ID NO: 10798 - RNA, 20 nt, Artificial Sequence
  HTT spacer sequence CTCN PAM
ugcacugcuggugggaaugc

SEQ ID NO: 10799 - RNA, 20 nt, Artificial Sequence
  HTT spacer sequence CTCN PAM
cgugcacugcuggugggaau

SEQ ID NO: 10800 - RNA, 20 nt, Artificial Sequence
  HTT spacer sequence CTCN PAM
ccagcagaccgaguucucga

SEQ ID NO: 10801 - RNA, 20 nt, Artificial Sequence
  HTT spacer sequence CTCN PAM
gucugcuggcgaggcugugg

SEQ ID NO: 10802 - RNA, 20 nt, Artificial Sequence
  HTT spacer sequence CTCN PAM
aacuuuggaguuuuugucag

SEQ ID NO: 10803 - RNA, 20 nt, Artificial Sequence
  HTT spacer sequence CTCN PAM
aaaguucgagaacucggucu

SEQ ID NO: 10804 - RNA, 20 nt, Artificial Sequence
  HTT spacer sequence CTCN PAM
guuuaaaaauccauuuuuau

SEQ ID NO: 10805 - RNA, 20 nt, Artificial Sequence
  HTT spacer sequence CTCN PAM
acuuaaaugaaaaauacacg

SEQ ID NO: 10806 - RNA, 20 nt, Artificial Sequence
  HTT spacer sequence CTCN PAM
cgccuguaaucccagcacuu

SEQ ID NO: 10807 - RNA, 20 nt, Artificial Sequence
  HTT spacer sequence CTCN PAM
caaagugcugggauuacagg

SEQ ID NO: 10808 - RNA, 20 nt, Artificial Sequence
  HTT spacer sequence CTCN PAM
cacccuggccucccaaagug

SEQ ID NO: 10809 - RNA, 20 nt, Artificial Sequence
  HTT spacer sequence CTCN PAM
agcgauccucccacccuggc

SEQ ID NO: 10810 - RNA, 20 nt, Artificial Sequence
  HTT spacer sequence CTCN PAM
ugggcucaagcgauccuccc

SEQ ID NO: 10811 - RNA, 20 nt, Artificial Sequence
  HTT spacer sequence CTCN PAM
acaaaagaaaagaaaagaaa

SEQ ID NO: 10812 - RNA, 20 nt, Artificial Sequence
  HTT spacer sequence CTCN PAM
ccuuguacagaugcauucuu

SEQ ID NO: 10813 - RNA, 20 nt, Artificial Sequence
  HTT spacer sequence CTCN PAM
guuuccuccccuuguacaga

SEQ ID NO: 10814 - RNA, 20 nt, Artificial Sequence
  HTT spacer sequence CTCN PAM
gccauguacuaucaugucuc

SEQ ID NO: 10815 - RNA, 20 nt, Artificial Sequence
  HTT spacer sequence CTCN PAM
gacccacgccaucgggcugg

SEQ ID NO: 10816 - RNA, 20 nt, Artificial Sequence
  HTT spacer sequence CTCN PAM
ucaccccugugcucucccgc

SEQ ID NO: 10817 - RNA, 20 nt, Artificial Sequence
  HTT spacer sequence CTCN PAM
ccccugugcucucccgccuc

SEQ ID NO: 10818 - RNA, 20 nt, Artificial Sequence
  HTT spacer sequence CTCN PAM
cccgccucccagggugggcg

SEQ ID NO: 10819 - RNA, 20 nt, Artificial Sequence
  HTT spacer sequence CTCN PAM
cgccucccagggugggcgcg

SEQ ID NO: 10820 - RNA, 20 nt, Artificial Sequence
  HTT spacer sequence CTCN PAM
cagggugggcgcgcagcaag

SEQ ID NO: 10821 - RNA, 20 nt, Artificial Sequence
  HTT spacer sequence CTCN PAM
gaugcaugcacgugauacac

SEQ ID NO: 10822 - RNA, 20 nt, Artificial Sequence
  HTT spacer sequence CTCN PAM
gacucagaugcaugcacgug

SEQ ID NO: 10823 - RNA, 20 nt, Artificial Sequence
  HTT spacer sequence CTCN PAM
cuaaagcaucaugcagacug

SEQ ID NO: 10824 - RNA, 20 nt, Artificial Sequence
  HTT spacer sequence CTCN PAM
aaagcaucaugcagacuguu

SEQ ID NO: 10825 - RNA, 20 nt, Artificial Sequence
  HTT spacer sequence CTCN PAM
aaggcacuguagucauuuua

SEQ ID NO: 10826 - RNA, 20 nt, Artificial Sequence
  HTT spacer sequence CTCN PAM
auaaauauuuauuggugaaa

SEQ ID NO: 10827 - RNA, 20 nt, Artificial Sequence
  HTT spacer sequence CTCN PAM
gcuucuaauaucauacccug

SEQ ID NO: 10828 - RNA, 20 nt, Artificial Sequence
  HTT spacer sequence CTCN PAM
acagaauguuuucgauaauu

SEQ ID NO: 10829 - RNA, 20 nt, Artificial Sequence
  HTT spacer sequence CTCN PAM
aaaaaauuauaaagaaaaua

SEQ ID NO: 10830 - RNA, 20 nt, Artificial Sequence
  HTT spacer sequence CTCN PAM
cucuugcccugcaguggugu

SEQ ID NO: 10831 - RNA, 20 nt, Artificial Sequence
  HTT spacer sequence CTCN PAM
ugcccugcaguggugugauc

SEQ ID NO: 10832 - RNA, 20 nt, Artificial Sequence
  HTT spacer sequence CTCN PAM
accuucugggcuuaagcgau

SEQ ID NO: 10833 - RNA, 20 nt, Artificial Sequence
  HTT spacer sequence CTCN PAM
ugccucagccuccagaguag

SEQ ID NO: 10834 - RNA, 20 nt, Artificial Sequence
  HTT spacer sequence CTCN PAM
gccuccagaguagcugggac

SEQ ID NO: 10835 - RNA, 20 nt, Artificial Sequence
  HTT spacer sequence CTCN PAM
agaguagcugggaccauagc

SEQ ID NO: 10836 - RNA, 20 nt, Artificial Sequence
  HTT spacer sequence CTCN PAM
ggaggcugaggcaggaggau

SEQ ID NO: 10837 - RNA, 20 nt, Artificial Sequence
  HTT spacer sequence CTCN PAM
auaaaaaaagauuuuuaaaa

SEQ ID NO: 10838 - RNA, 20 nt, Artificial Sequence
  HTT spacer sequence CTCN PAM
aaauguggaacucaaguaau

SEQ ID NO: 10839 - RNA, 20 nt, Artificial Sequence
  HTT spacer sequence CTCN PAM
aguaauccuccgaccuuggc

SEQ ID NO: 10840 - RNA, 20 nt, Artificial Sequence
  HTT spacer sequence CTCN PAM
gaccuuggccucccaaagug

SEQ ID NO: 10841 - RNA, 20 nt, Artificial Sequence
  HTT spacer sequence CTCN PAM
caaagugcuggaauuacagg

SEQ ID NO: 10842 - RNA, 20 nt, Artificial Sequence
  HTT spacer sequence CTCN PAM
auuaccauuuguucucaaga

SEQ ID NO: 10843 - RNA, 20 nt, Artificial Sequence
  HTT spacer sequence CTCN PAM
agagaauaacuccauaucau

SEQ ID NO: 10844 - RNA, 20 nt, Artificial Sequence
  HTT spacer sequence CTCN PAM
ugagaacaaaugguaauaga

SEQ ID NO: 10845 - RNA, 20 nt, Artificial Sequence
  HTT spacer sequence CTCN PAM
auaucauucauguguagcug

SEQ ID NO: 10846 - RNA, 20 nt, Artificial Sequence
  HTT spacer sequence CTCN PAM
gacagaaaguauuuauuuac

SEQ ID NO: 10847 - RNA, 20 nt, Artificial Sequence
  HTT spacer sequence CTCN PAM
ggaacaguaaacguaaaaug

SEQ ID NO: 10848 - RNA, 20 nt, Artificial Sequence
  HTT spacer sequence CTCN PAM
aaaaccauggcuggaaauaa

SEQ ID NO: 10849 - RNA, 20 nt, Artificial Sequence
  HTT spacer sequence CTCN PAM
guuuggccacagagauccca

SEQ ID NO: 10850 - RNA, 20 nt, Artificial Sequence
  HTT spacer sequence CTCN PAM
guggccaaaccgaggucuga

SEQ ID NO: 10851 - RNA, 20 nt, Artificial Sequence
  HTT spacer sequence CTCN PAM
guccuucugggaucucugug

SEQ ID NO: 10852 - RNA, 20 nt, Artificial Sequence
  HTT spacer sequence CTCN PAM
aacccucuguccuucuggga

SEQ ID NO: 10853 - RNA, 20 nt, Artificial Sequence
  HTT spacer sequence CTCN PAM
uccucgaacccucuguccuu

SEQ ID NO: 10854 - RNA, 20 nt, Artificial Sequence
  HTT spacer sequence CTCN PAM
cgaacccauguagccgacug

SEQ ID NO: 10855 - RNA, 20 nt, Artificial Sequence
  HTT spacer sequence CTCN PAM
cacgaacccauguagccgac

SEQ ID NO: 10856 - RNA, 20 nt, Artificial Sequence
  HTT spacer sequence CTCN PAM
ggcacccggauagaaaggac

SEQ ID NO: 10857 - RNA, 20 nt, Artificial Sequence
  HTT spacer sequence CTCN PAM
gaacacagagaaauccaccc

SEQ ID NO: 10858 - RNA, 20 nt, Artificial Sequence
  HTT spacer sequence CTCN PAM
guguucugaggcacucaggc

SEQ ID NO: 10859 - RNA, 20 nt, Artificial Sequence
  HTT spacer sequence CTCN PAM
guuuggacacacuaguagau

SEQ ID NO: 10860 - RNA, 20 nt, Artificial Sequence
  HTT spacer sequence CTCN PAM
aaccugucagaguguugagg

SEQ ID NO: 10861 - RNA, 20 nt, Artificial Sequence
  HTT spacer sequence CTCN PAM
gacagguuagagauucaaaa

SEQ ID NO: 10862 - RNA, 20 nt, Artificial Sequence
  HTT spacer sequence CTCN PAM
acacucugacagguuagaga

SEQ ID NO: 10863 - RNA, 20 nt, Artificial Sequence
  HTT spacer sequence CTCN PAM
gcuucuuacagaugaggggu

SEQ ID NO: 10864 - RNA, 20 nt, Artificial Sequence
  HTT spacer sequence CTCN PAM
ucuguaagaagcugagggca

SEQ ID NO: 10865 - RNA, 20 nt, Artificial Sequence
  HTT spacer sequence CTCN PAM
ccccucaucuguaagaagcu

SEQ ID NO: 10866 - RNA, 20 nt, Artificial Sequence
  HTT spacer sequence CTCN PAM
ggccucaccccucaucugua

SEQ ID NO: 10867 - RNA, 20 nt, Artificial Sequence
  HTT spacer sequence CTCN PAM
caggccucaccccucaucug

SEQ ID NO: 10868 - RNA, 20 nt, Artificial Sequence
  HTT spacer sequence CTCN PAM
caaccucucaggccucaccc

SEQ ID NO: 10869 - RNA, 20 nt, Artificial Sequence
  HTT spacer sequence CTCN PAM
ggacucacaaccucucaggc

SEQ ID NO: 10870 - RNA, 20 nt, Artificial Sequence
  HTT spacer sequence CTCN PAM
gcgaagugagggcagaaucg

SEQ ID NO: 10871 - RNA, 20 nt, Artificial Sequence
  HTT spacer sequence CTCN PAM
cuucgcugagugaccucagg

SEQ ID NO: 10872 - RNA, 20 nt, Artificial Sequence
  HTT spacer sequence CTCN PAM
ucacucuaccaguguccucc

SEQ ID NO: 10873 - RNA, 20 nt, Artificial Sequence
  HTT spacer sequence CTCN PAM
cucuaccaguguccuccccu

SEQ ID NO: 10874 - RNA, 20 nt, Artificial Sequence
  HTT spacer sequence CTCN PAM
accaguguccuccccugugc

SEQ ID NO: 10875 - RNA, 20 nt, Artificial Sequence
  HTT spacer sequence CTCN PAM
ccugugcaccacggccucuc

SEQ ID NO: 10876 - RNA, 20 nt, Artificial Sequence
  HTT spacer sequence CTCN PAM
cggagccucaggaaaucacc

SEQ ID NO: 10877 - RNA, 20 nt, Artificial Sequence
  HTT spacer sequence CTCN PAM
gagccucaggaaaucacccc

SEQ ID NO: 10878 - RNA, 20 nt, Artificial Sequence
  HTT spacer sequence CTCN PAM
gagaggccguggugcacagg

SEQ ID NO: 10879 - RNA, 20 nt, Artificial Sequence
  HTT spacer sequence CTCN PAM
ggaaaucaccccacucuggu

SEQ ID NO: 10880 - RNA, 20 nt, Artificial Sequence
  HTT spacer sequence CTCN PAM
gguuauuccaaagauccggg

SEQ ID NO: 10881 - RNA, 20 nt, Artificial Sequence
  HTT spacer sequence CTCN PAM
gagagccucgcagaguccug

SEQ ID NO: 10882 - RNA, 20 nt, Artificial Sequence
  HTT spacer sequence CTCN PAM
gaggccaccccuggggguug

SEQ ID NO: 10883 - RNA, 20 nt, Artificial Sequence
  HTT spacer sequence CTCN PAM
cagaggccaccccugggggu

SEQ ID NO: 10884 - RNA, 20 nt, Artificial Sequence
  HTT spacer sequence CTCN PAM
cagaguccugcaggaagacc

SEQ ID NO: 10885 - RNA, 20 nt, Artificial Sequence
  HTT spacer sequence CTCN PAM
gcgaggcucucagaggccac

SEQ ID NO: 10886 - RNA, 20 nt, Artificial Sequence
  HTT spacer sequence CTCN PAM
ugcgucuugugggguuuuuc

SEQ ID NO: 10887 - RNA, 20 nt, Artificial Sequence
  HTT spacer sequence CTCN PAM
gugugucuggagggagcccc

SEQ ID NO: 10888 - RNA, 20 nt, Artificial Sequence
  HTT spacer sequence CTCN PAM
agacacacagagccaugccc

SEQ ID NO: 10889 - RNA, 20 nt, Artificial Sequence
  HTT spacer sequence CTCN PAM
cuccagacacacagagccau

SEQ ID NO: 10890 - RNA, 20 nt, Artificial Sequence
  HTT spacer sequence CTCN PAM
ugaaggggcucccuccagac

SEQ ID NO: 10891 - RNA, 20 nt, Artificial Sequence
  HTT spacer sequence CTCN PAM
accuccugaaggggcucccu

SEQ ID NO: 10892 - RNA, 20 nt, Artificial Sequence
  HTT spacer sequence CTCN PAM
guggcaauucagcucaucuu

SEQ ID NO: 10893 - RNA, 20 nt, Artificial Sequence
  HTT spacer sequence CTCN PAM
ucuuggaugaaucauacaaa

SEQ ID NO: 10894 - RNA, 20 nt, Artificial Sequence
  HTT spacer sequence CTCN PAM
gugaaaauacuaaaauccgu

SEQ ID NO: 10895 - RNA, 20 nt, Artificial Sequence
  HTT spacer sequence CTCN PAM
aaaaaaaaaaaaaguuguga

SEQ ID NO: 10896 - RNA, 20 nt, Artificial Sequence
  HTT spacer sequence CTCN PAM
gucucaaaaaaaaaaaaaag

SEQ ID NO: 10897 - RNA, 20 nt, Artificial Sequence
  HTT spacer sequence CTCN PAM
cucagucgcccaggcuagaa

SEQ ID NO: 10898 - RNA, 20 nt, Artificial Sequence
  HTT spacer sequence CTCN PAM
gucgcccaggcuagaaugca

SEQ ID NO: 10899 - RNA, 20 nt, Artificial Sequence
  HTT spacer sequence CTCN PAM
cugcaacguccaccucccag

SEQ ID NO: 10900 - RNA, 20 nt, Artificial Sequence
  HTT spacer sequence CTCN PAM
caggcacaagcgauucuccu

SEQ ID NO: 10901 - RNA, 20 nt, Artificial Sequence
  HTT spacer sequence CTCN PAM
ugccucagcuuccugaguau

SEQ ID NO: 10902 - RNA, 20 nt, Artificial Sequence
  HTT spacer sequence CTCN PAM
gcuuccugaguaucuggaac

SEQ ID NO: 10903 - RNA, 20 nt, Artificial Sequence
  HTT spacer sequence CTCN PAM
ggaagcugaggcaggagaau

SEQ ID NO: 10904 - RNA, 20 nt, Artificial Sequence
  HTT spacer sequence CTCN PAM
acuaaaaauacaaaaauuag

SEQ ID NO: 10905 - RNA, 20 nt, Artificial Sequence
  HTT spacer sequence CTCN PAM
aacuccugaucucaggugau

SEQ ID NO: 10906 - RNA, 20 nt, Artificial Sequence
  HTT spacer sequence CTCN PAM
ugaucucaggugaucugccu

SEQ ID NO: 10907 - RNA, 20 nt, Artificial Sequence
  HTT spacer sequence CTCN PAM
ggugaucugccugccuucgc

SEQ ID NO: 10908 - RNA, 20 nt, Artificial Sequence
  HTT spacer sequence CTCN PAM
caaaaugcugggauuauagg

SEQ ID NO: 10909 - RNA, 20 nt, Artificial Sequence
  HTT spacer sequence CTCN PAM
caccuauaaucccagcauuu

SEQ ID NO: 10910 - RNA, 20 nt, Artificial Sequence
  HTT spacer sequence CTCN PAM
cagccuuaacauaauguuuu

SEQ ID NO: 10911 - RNA, 20 nt, Artificial Sequence
  HTT spacer sequence CTCN PAM
auucaaaaaauacaaagaga

SEQ ID NO: 10912 - RNA, 20 nt, Artificial Sequence
  HTT spacer sequence CTCN PAM
uuguauuuuuugaauggaga

SEQ ID NO: 10913 - RNA, 20 nt, Artificial Sequence
  HTT spacer sequence CTCN PAM
cauuugacuuucucuuugua

SEQ ID NO: 10914 - RNA, 20 nt, Artificial Sequence
  HTT spacer sequence CTCN PAM
ucccauuugacuuucucuuu

SEQ ID NO: 10915 - RNA, 20 nt, Artificial Sequence
  HTT spacer sequence CTCN PAM
guaucauucuugauucuuug

SEQ ID NO: 10916 - RNA, 20 nt, Artificial Sequence
  HTT spacer sequence CTCN PAM
ucgguaucauucuugauucu

SEQ ID NO: 10917 - RNA, 20 nt, Artificial Sequence
  HTT spacer sequence CTCN PAM
gaauacuccucgguaucauu

SEQ ID NO: 10918 - RNA, 20 nt, Artificial Sequence
  HTT spacer sequence CTCN PAM
gaaaacuucucagaauacuc

SEQ ID NO: 10919 - RNA, 20 nt, Artificial Sequence
  HTT spacer sequence CTCN PAM
guagaggcugggaaauggca

SEQ ID NO: 10920 - RNA, 20 nt, Artificial Sequence
  HTT spacer sequence CTCN PAM
acagagccugacuuaccauc

SEQ ID NO: 10921 - RNA, 20 nt, Artificial Sequence
  HTT spacer sequence CTCN PAM
cucauucuaguuguuuucac

SEQ ID NO: 10922 - RNA, 20 nt, Artificial Sequence
  HTT spacer sequence CTCN PAM
uucuaguuguuuucacuggc

SEQ ID NO: 10923 - RNA, 20 nt, Artificial Sequence
  HTT spacer sequence CTCN PAM
caggcccugccccugccccu

SEQ ID NO: 10924 - RNA, 20 nt, Artificial Sequence
  HTT spacer sequence CTCN PAM
cuacugggcugcaggggcag

SEQ ID NO: 10925 - RNA, 20 nt, Artificial Sequence
  HTT spacer sequence CTCN PAM
ugaacacgcguguccucccu

SEQ ID NO: 10926 - RNA, 20 nt, Artificial Sequence
  HTT spacer sequence CTCN PAM
gguccaccugugucuuggcc

SEQ ID NO: 10927 - RNA, 20 nt, Artificial Sequence
  HTT spacer sequence CTCN PAM
cugcugggccaagacacagg

SEQ ID NO: 10928 - RNA, 20 nt, Artificial Sequence
  HTT spacer sequence CTCN PAM
ugaacacacguguccucccu

SEQ ID NO: 10929 - RNA, 20 nt, Artificial Sequence
  HTT spacer sequence CTCN PAM
gguccaccugucuccuggcc

SEQ ID NO: 10930 - RNA, 20 nt, Artificial Sequence
  HTT spacer sequence CTCN PAM
uggcccagcagggaggacac

SEQ ID NO: 10931 - RNA, 20 nt, Artificial Sequence
  HTT spacer sequence CTCN PAM
cugcugggccaggagacagg

SEQ ID NO: 10932 - RNA, 20 nt, Artificial Sequence
  HTT spacer sequence CTCN PAM
ugaacacgcguguccucccu

SEQ ID NO: 10933 - RNA, 20 nt, Artificial Sequence
  HTT spacer sequence CTCN PAM
gguccaccugccuccuggcc

SEQ ID NO: 10934 - RNA, 20 nt, Artificial Sequence
  HTT spacer sequence CTCN PAM
uggcccagcagggaggacac

SEQ ID NO: 10935 - RNA, 20 nt, Artificial Sequence
  HTT spacer sequence CTCN PAM
cugcugggccaggaggcagg

SEQ ID NO: 10936 - RNA, 20 nt, Artificial Sequence
  HTT spacer sequence CTCN PAM
ggaggcucacgucaaccugu

SEQ ID NO: 10937 - RNA, 20 nt, Artificial Sequence
  HTT spacer sequence CTCN PAM
ugagcacauguguccucccu

SEQ ID NO: 10938 - RNA, 20 nt, Artificial Sequence
  HTT spacer sequence CTCN PAM
cgucaaccugucucuuggcc

SEQ ID NO: 10939 - RNA, 20 nt, Artificial Sequence
  HTT spacer sequence CTCN PAM
uggcccagcagggaggacac

SEQ ID NO: 10940 - RNA, 20 nt, Artificial Sequence
  HTT spacer sequence CTCN PAM
cugcugggccaagagacagg

SEQ ID NO: 10941 - RNA, 20 nt, Artificial Sequence
  HTT spacer sequence CTCN PAM
cgucuaccugccuccuuccc

SEQ ID NO: 10942 - RNA, 20 nt, Artificial Sequence
  HTT spacer sequence CTCN PAM
uuccccaugcuccugccacu

SEQ ID NO: 10943 - RNA, 20 nt, Artificial Sequence
  HTT spacer sequence CTCN PAM
ugccacugggauuucaucag

SEQ ID NO: 10944 - RNA, 20 nt, Artificial Sequence
  HTT spacer sequence CTCN PAM
uuuugucugaugaaauccca

SEQ ID NO: 10945 - RNA, 20 nt, Artificial Sequence
  HTT spacer sequence CTCN PAM
cuggcucuuuuugucugaug

SEQ ID NO: 10946 - RNA, 20 nt, Artificial Sequence
  HTT spacer sequence CTCN PAM
aaucaaaacccaauuaaguc

SEQ ID NO: 10947 - RNA, 20 nt, Artificial Sequence
  HTT spacer sequence CTCN PAM
aauaaugcuacugaaaggga

SEQ ID NO: 10948 - RNA, 20 nt, Artificial Sequence
  HTT spacer sequence CTCN PAM
ucccuuucaguagcauuauu

SEQ ID NO: 10949 - RNA, 20 nt, Artificial Sequence
  HTT spacer sequence CTCN PAM
aaauacaugaaagauugguu

SEQ ID NO: 10950 - RNA, 20 nt, Artificial Sequence
  HTT spacer sequence CTCN PAM
gggacuacaaucccuggcag

SEQ ID NO: 10951 - RNA, 20 nt, Artificial Sequence
  HTT spacer sequence CTCN PAM
gaccugagggccuucugugu

SEQ ID NO: 10952 - RNA, 20 nt, Artificial Sequence
  HTT spacer sequence CTCN PAM
ggucagagugucucugggac

SEQ ID NO: 10953 - RNA, 20 nt, Artificial Sequence
  HTT spacer sequence CTCN PAM
gggccuggugcuggacagac

SEQ ID NO: 10954 - RNA, 20 nt, Artificial Sequence
  HTT spacer sequence CTCN PAM
gaggcugacgguggcacccg

SEQ ID NO: 10955 - RNA, 20 nt, Artificial Sequence
  HTT spacer sequence CTCN PAM
gaggcccuuagcacaguuaa

SEQ ID NO: 10956 - RNA, 20 nt, Artificial Sequence
  HTT spacer sequence CTCN PAM
cgggugccaccgucagccuc

SEQ ID NO: 10957 - RNA, 20 nt, Artificial Sequence
  HTT spacer sequence CTCN PAM
uugcugugacucgcgggugc

SEQ ID NO: 10958 - RNA, 20 nt, Artificial Sequence
  HTT spacer sequence CTCN PAM
ucuccuugcugugacucgcg

SEQ ID NO: 10959 - RNA, 20 nt, Artificial Sequence
  HTT spacer sequence CTCN PAM
accgcuuggggcucaucucc

SEQ ID NO: 10960 - RNA, 20 nt, Artificial Sequence
  HTT spacer sequence CTCN PAM
uucugggaccagggaccagg

SEQ ID NO: 10961 - RNA, 20 nt, Artificial Sequence
  HTT spacer sequence CTCN PAM
gggacuggacuguguuacca

SEQ ID NO: 10962 - RNA, 20 nt, Artificial Sequence
  HTT spacer sequence CTCN PAM
cugcccagacacucaaucag

SEQ ID NO: 10963 - RNA, 20 nt, Artificial Sequence
  HTT spacer sequence CTCN PAM
aucagugagggaaacucucu

SEQ ID NO: 10964 - RNA, 20 nt, Artificial Sequence
  HTT spacer sequence CTCN PAM
cugauugagugucugggcag

SEQ ID NO: 10965 - RNA, 20 nt, Artificial Sequence
  HTT spacer sequence CTCN PAM
cuuuguuacuuacuuuaaac

SEQ ID NO: 10966 - RNA, 20 nt, Artificial Sequence
  HTT spacer sequence CTCN PAM
uuguuacuuacuuuaaacca

SEQ ID NO: 10967 - RNA, 20 nt, Artificial Sequence
  HTT spacer sequence CTCN PAM
auaaauccuuguugaaugaa

SEQ ID NO: 10968 - RNA, 20 nt, Artificial Sequence
  HTT spacer sequence CTCN PAM
cuggcagggcggggacuucu

SEQ ID NO: 10969 - RNA, 20 nt, Artificial Sequence
  HTT spacer sequence CTCN PAM
ccacagcccacacgucuaug

SEQ ID NO: 10970 - RNA, 20 nt, Artificial Sequence
  HTT spacer sequence CTCN PAM
ggaggacggggaacugccug

SEQ ID NO: 10971 - RNA, 20 nt, Artificial Sequence
  HTT spacer sequence CTCN PAM
agagugcggguccuccccac

SEQ ID NO: 10972 - RNA, 20 nt, Artificial Sequence
  HTT spacer sequence CTCN PAM
aggcaguuccccguccucca

SEQ ID NO: 10973 - RNA, 20 nt, Artificial Sequence
  HTT spacer sequence CTCN PAM
agggggugagagggggucgg

SEQ ID NO: 10974 - RNA, 20 nt, Artificial Sequence
  HTT spacer sequence CTCN PAM
cccccuagagccugccgccc

SEQ ID NO: 10975 - RNA, 20 nt, Artificial Sequence
  HTT spacer sequence CTCN PAM
cacccccuagagccugccgc

SEQ ID NO: 10976 - RNA, 20 nt, Artificial Sequence
  HTT spacer sequence CTCN PAM
gcccagcaggccgacccccu

SEQ ID NO: 10977 - RNA, 20 nt, Artificial Sequence
  HTT spacer sequence CTCN PAM
gucugcucugcccagcaggc

SEQ ID NO: 10978 - RNA, 20 nt, Artificial Sequence
  HTT spacer sequence CTCN PAM
ugccagcagccugccacugu

SEQ ID NO: 10979 - RNA, 20 nt, Artificial Sequence
  HTT spacer sequence CTCN PAM
ugcucuugccagcagccugc

SEQ ID NO: 10980 - RNA, 20 nt, Artificial Sequence
  HTT spacer sequence CTCN PAM
aacccccuccugcucuugcc

SEQ ID NO: 10981 - RNA, 20 nt, Artificial Sequence
  HTT spacer sequence CTCN PAM
gucccgucccccucuaaccc

SEQ ID NO: 10982 - RNA, 20 nt, Artificial Sequence
  HTT spacer sequence CTCN PAM
cugucccgucccccucuaac

SEQ ID NO: 10983 - RNA, 20 nt, Artificial Sequence
  HTT spacer sequence CTCN PAM
aggcuugacaaugaugacaa

SEQ ID NO: 10984 - RNA, 20 nt, Artificial Sequence
  HTT spacer sequence CTCN PAM
gauggccaugaagccaucgc

SEQ ID NO: 10985 - RNA, 20 nt, Artificial Sequence
  HTT spacer sequence CTCN PAM
gugaagagugaugugaugag

SEQ ID NO: 10986 - RNA, 20 nt, Artificial Sequence
  HTT spacer sequence CTCN PAM
ucacagagcccugcgauggc

SEQ ID NO: 10987 - RNA, 20 nt, Artificial Sequence
  HTT spacer sequence CTCN PAM
ucacaucacucuucacagag

SEQ ID NO: 10988 - RNA, 20 nt, Artificial Sequence
  HTT spacer sequence CTCN PAM
caguggccggcaagcccagu

SEQ ID NO: 10989 - RNA, 20 nt, Artificial Sequence
  HTT spacer sequence CTCN PAM
cccaguggccggcaagccca

SEQ ID NO: 10990 - RNA, 20 nt, Artificial Sequence
  HTT spacer sequence CTCN PAM
cuguccauucauucucuccc

SEQ ID NO: 10991 - RNA, 20 nt, Artificial Sequence
  HTT spacer sequence CTCN PAM
ucccuguccauucauucucu

SEQ ID NO: 10992 - RNA, 20 nt, Artificial Sequence
  HTT spacer sequence CTCN PAM
ccugaaucgcugcaaagccc

SEQ ID NO: 10993 - RNA, 20 nt, Artificial Sequence
  HTT spacer sequence CTCN PAM
caccugaaucgcugcaaagc

SEQ ID NO: 10994 - RNA, 20 nt, Artificial Sequence
  HTT spacer sequence CTCN PAM
gugauggcagagcaggugug

SEQ ID NO: 10995 - RNA, 20 nt, Artificial Sequence
  HTT spacer sequence CTCN PAM
gccaucaccgaggucugcgu

SEQ ID NO: 10996 - RNA, 20 nt, Artificial Sequence
  HTT spacer sequence CTCN PAM
caccugcucugccaucaccg

SEQ ID NO: 10997 - RNA, 20 nt, Artificial Sequence
  HTT spacer sequence CTCN PAM
accaccugccuucaggaucc

SEQ ID NO: 10998 - RNA, 20 nt, Artificial Sequence
  HTT spacer sequence CTCN PAM
aagaugggcuggagggaagg

SEQ ID NO: 10999 - RNA, 20 nt, Artificial Sequence
  HTT spacer sequence CTCN PAM
agcccaucuuggagucagcc

SEQ ID NO: 11000 - RNA, 20 nt, Artificial Sequence
  HTT spacer sequence CTCN PAM
cuggagccaaguccuugcag

SEQ ID NO: 11001 - RNA, 20 nt, Artificial Sequence
  HTT spacer sequence CTCN PAM
agcgagugcccccuucccuc

SEQ ID NO: 11002 - RNA, 20 nt, Artificial Sequence
  HTT spacer sequence CTCN PAM
ccacugcaaggacuuggcuc

SEQ ID NO: 11003 - RNA, 20 nt, Artificial Sequence
  HTT spacer sequence CTCN PAM
ccgugcgcuggcugcugucc

SEQ ID NO: 11004 - RNA, 20 nt, Artificial Sequence
  HTT spacer sequence CTCN PAM
agugaccggagaggaggcag

SEQ ID NO: 11005 - RNA, 20 nt, Artificial Sequence
  HTT spacer sequence CTCN PAM
ggucacuggaggaacugccc

SEQ ID NO: 11006 - RNA, 20 nt, Artificial Sequence
  HTT spacer sequence CTCN PAM
ccggucacuggaggaacugc

SEQ ID NO: 11007 - RNA, 20 nt, Artificial Sequence
  HTT spacer sequence CTCN PAM
ucuccggucacuggaggaac

SEQ ID NO: 11008 - RNA, 20 nt, Artificial Sequence
  HTT spacer sequence CTCN PAM
gccuccucuccggucacugg

SEQ ID NO: 11009 - RNA, 20 nt, Artificial Sequence
  HTT spacer sequence CTCN PAM
ccagcugugcugcacuggcc

SEQ ID NO: 11010 - RNA, 20 nt, Artificial Sequence
  HTT spacer sequence CTCN PAM
cgucuccccagcugugcugc

SEQ ID NO: 11011 - RNA, 20 nt, Artificial Sequence
  HTT spacer sequence CTCN PAM
uauggagcuucuuuuucuca

SEQ ID NO: 11012 - RNA, 20 nt, Artificial Sequence
  HTT spacer sequence CTCN PAM
auaagagaccguucacagcc

SEQ ID NO: 11013 - RNA, 20 nt, Artificial Sequence
  HTT spacer sequence CTCN PAM
gauggucagccccuaguggg

SEQ ID NO: 11014 - RNA, 20 nt, Artificial Sequence
  HTT spacer sequence CTCN PAM
ccacuaggggcugaccaucu

SEQ ID NO: 11015 - RNA, 20 nt, Artificial Sequence
  HTT spacer sequence CTCN PAM
caccuuugcuccccacuagg

SEQ ID NO: 11016 - RNA, 20 nt, Artificial Sequence
  HTT spacer sequence CTCN PAM
caccugccucccaccuuugc

SEQ ID NO: 11017 - RNA, 20 nt, Artificial Sequence
  HTT spacer sequence CTCN PAM
ccuuuccucacaccugccuc

SEQ ID NO: 11018 - RNA, 20 nt, Artificial Sequence
  HTT spacer sequence CTCN PAM
acagcaucaagagcccaugc

SEQ ID NO: 11019 - RNA, 20 nt, Artificial Sequence
  HTT spacer sequence CTCN PAM
ugaugcuguugaggaaaccc

SEQ ID NO: 11020 - RNA, 20 nt, Artificial Sequence
  HTT spacer sequence CTCN PAM
cuucagguccgcaugggcuc

SEQ ID NO: 11021 - RNA, 20 nt, Artificial Sequence
  HTT spacer sequence CTCN PAM
ccucccuucagguccgcaug

SEQ ID NO: 11022 - RNA, 20 nt, Artificial Sequence
  HTT spacer sequence CTCN PAM
gagccagcagggagcugcac

SEQ ID NO: 11023 - RNA, 20 nt, Artificial Sequence
  HTT spacer sequence CTCN PAM
gagccugcaccguccaggug

SEQ ID NO: 11024 - RNA, 20 nt, Artificial Sequence
  HTT spacer sequence CTCN PAM
cugcuggcucugagccugca

SEQ ID NO: 11025 - RNA, 20 nt, Artificial Sequence
  HTT spacer sequence CTCN PAM
cccagcucugguuuguccag

SEQ ID NO: 11026 - RNA, 20 nt, Artificial Sequence
  HTT spacer sequence CTCN PAM
gguuuguccagcagcuagag

SEQ ID NO: 11027 - RNA, 20 nt, Artificial Sequence
  HTT spacer sequence CTCN PAM
agcugcuggacaaaccagag

SEQ ID NO: 11028 - RNA, 20 nt, Artificial Sequence
  HTT spacer sequence CTCN PAM
cuagcugcuggacaaaccag

SEQ ID NO: 11029 - RNA, 20 nt, Artificial Sequence
  HTT spacer sequence CTCN PAM
cucuagcugcuggacaaacc

SEQ ID NO: 11030 - RNA, 20 nt, Artificial Sequence
  HTT spacer sequence CTCN PAM
ccggccucucucuagcugcu

SEQ ID NO: 11031 - RNA, 20 nt, Artificial Sequence
  HTT spacer sequence CTCN PAM
cuggcaugcagcccagcucc

SEQ ID NO: 11032 - RNA, 20 nt, Artificial Sequence
  HTT spacer sequence CTCN PAM
agucacucccuggcaugcag

SEQ ID NO: 11033 - RNA, 20 nt, Artificial Sequence
  HTT spacer sequence CTCN PAM
acgcuggcuccaguggacga

SEQ ID NO: 11034 - RNA, 20 nt, Artificial Sequence
  HTT spacer sequence CTCN PAM
aguggacgaggaaauggaca

SEQ ID NO: 11035 - RNA, 20 nt, Artificial Sequence
  HTT spacer sequence CTCN PAM
uccacuggagccagcgucga

SEQ ID NO: 11036 - RNA, 20 nt, Artificial Sequence
  HTT spacer sequence CTCN PAM
caacuuggaccaugcuuugc

SEQ ID NO: 11037 - RNA, 20 nt, Artificial Sequence
  HTT spacer sequence CTCN PAM
aggccagaguuagaaagaug

SEQ ID NO: 11038 - RNA, 20 nt, Artificial Sequence
  HTT spacer sequence CTCN PAM
ggccuggagguguauggacu

SEQ ID NO: 11039 - RNA, 20 nt, Artificial Sequence
  HTT spacer sequence CTCN PAM
ucuuucuaacucuggccugg

SEQ ID NO: 11040 - RNA, 20 nt, Artificial Sequence
  HTT spacer sequence CTCN PAM
caucuuucuaacucuggccu

SEQ ID NO: 11041 - RNA, 20 nt, Artificial Sequence
  HTT spacer sequence CTCN PAM
gagaggaagcugcuuggagu

SEQ ID NO: 11042 - RNA, 20 nt, Artificial Sequence
  HTT spacer sequence CTCN PAM
gagcgucccucucaucuuuc

SEQ ID NO: 11043 - RNA, 20 nt, Artificial Sequence
  HTT spacer sequence CTCN PAM
cugagcgucccucucaucuu

SEQ ID NO: 11044 - RNA, 20 nt, Artificial Sequence
  HTT spacer sequence CTCN PAM
aagcagcuuccucucugagc

SEQ ID NO: 11045 - RNA, 20 nt, Artificial Sequence
  HTT spacer sequence CTCN PAM
acuccaagcagcuuccucuc

SEQ ID NO: 11046 - RNA, 20 nt, Artificial Sequence
  HTT spacer sequence CTCN PAM
gucagcuccacuccaagcag

SEQ ID NO: 11047 - RNA, 20 nt, Artificial Sequence
  HTT spacer sequence CTCN PAM
uggccagcaagcacucuguc

SEQ ID NO: 11048 - RNA, 20 nt, Artificial Sequence
  HTT spacer sequence CTCN PAM
cuggucacaccccagacucu

SEQ ID NO: 11049 - RNA, 20 nt, Artificial Sequence
  HTT spacer sequence CTCN PAM
cccuggucacaccccagacu

SEQ ID NO: 11050 - RNA, 20 nt, Artificial Sequence
  HTT spacer sequence CTCN PAM
cucccuggucacaccccaga

SEQ ID NO: 11051 - RNA, 20 nt, Artificial Sequence
  HTT spacer sequence CTCN PAM
auccccccagugacccccag

SEQ ID NO: 11052 - RNA, 20 nt, Artificial Sequence
  HTT spacer sequence CTCN PAM
agugacuucauccuccaucc

SEQ ID NO: 11053 - RNA, 20 nt, Artificial Sequence
  HTT spacer sequence CTCN PAM
ucuccagugacuucauccuc

SEQ ID NO: 11054 - RNA, 20 nt, Artificial Sequence
  HTT spacer sequence CTCN PAM
agccacugccagcccauguc

SEQ ID NO: 11055 - RNA, 20 nt, Artificial Sequence
  HTT spacer sequence CTCN PAM
ccagccacugccagcccaug

SEQ ID NO: 11056 - RNA, 20 nt, Artificial Sequence
  HTT spacer sequence CTCN PAM
ucuccagccacugccagccc

SEQ ID NO: 11057 - RNA, 20 nt, Artificial Sequence
  HTT spacer sequence CTCN PAM
uccuggagccaggggucagc

SEQ ID NO: 11058 - RNA, 20 nt, Artificial Sequence
  HTT spacer sequence CTCN PAM
aggacgagccuguagcaccc

SEQ ID NO: 11059 - RNA, 20 nt, Artificial Sequence
  HTT spacer sequence CTCN PAM
aggcugaccccuggcuccag

SEQ ID NO: 11060 - RNA, 20 nt, Artificial Sequence
  HTT spacer sequence CTCN PAM
cggcuaccucacucugcuua

SEQ ID NO: 11061 - RNA, 20 nt, Artificial Sequence
  HTT spacer sequence CTCN PAM
cucugcuuagagcugacugu

SEQ ID NO: 11062 - RNA, 20 nt, Artificial Sequence
  HTT spacer sequence CTCN PAM
gcuuagagcugacuguuaaa

SEQ ID NO: 11063 - RNA, 20 nt, Artificial Sequence
  HTT spacer sequence CTCN PAM
aagcagagugagguagccgg

SEQ ID NO: 11064 - RNA, 20 nt, Artificial Sequence
  HTT spacer sequence CTCN PAM
auuauuuaacagucagcucu

SEQ ID NO: 11065 - RNA, 20 nt, Artificial Sequence
  HTT spacer sequence CTCN PAM
cacaggacacugacagggcu

SEQ ID NO: 11066 - RNA, 20 nt, Artificial Sequence
  HTT spacer sequence CTCN PAM
auuucugguacauauuuaua

SEQ ID NO: 11067 - RNA, 20 nt, Artificial Sequence
  HTT spacer sequence CTCN PAM
uaggggcagacuccauuucu

SEQ ID NO: 11068 - RNA, 20 nt, Artificial Sequence
  HTT spacer sequence CTCN PAM
caguuuaauguuaggccuaa

SEQ ID NO: 11069 - RNA, 20 nt, Artificial Sequence
  HTT spacer sequence CTCN PAM
ugcuauaaucccagcacuuu

SEQ ID NO: 11070 - RNA, 20 nt, Artificial Sequence
  HTT spacer sequence CTCN PAM
caaagugcugggauuauagc

SEQ ID NO: 11071 - RNA, 20 nt, Artificial Sequence
  HTT spacer sequence CTCN PAM
ugauccaccugccuugaccu

SEQ ID NO: 11072 - RNA, 20 nt, Artificial Sequence
  HTT spacer sequence CTCN PAM
ugaccucaugauccaccugc

SEQ ID NO: 11073 - RNA, 20 nt, Artificial Sequence
  HTT spacer sequence CTCN PAM
aacuccugaccucaugaucc

SEQ ID NO: 11074 - RNA, 20 nt, Artificial Sequence
  HTT spacer sequence CTCN PAM
acuaaaaaaaaaauuagcca

SEQ ID NO: 11075 - RNA, 20 nt, Artificial Sequence
  HTT spacer sequence CTCN PAM
gaaggcugugccacugcacu

SEQ ID NO: 11076 - RNA, 20 nt, Artificial Sequence
  HTT spacer sequence CTCN PAM
agccuggcgacagagcauga

SEQ ID NO: 11077 - RNA, 20 nt, Artificial Sequence
  HTT spacer sequence CTCN PAM
gucgccaggcuggagugcag

SEQ ID NO: 11078 - RNA, 20 nt, Artificial Sequence
  HTT spacer sequence CTCN PAM
gucucaaaaaagaaaaaaga

SEQ ID NO: 11079 - RNA, 20 nt, Artificial Sequence
  HTT spacer sequence CTCN PAM
aaaaagaaaaaagaaaagaa

SEQ ID NO: 11080 - RNA, 20 nt, Artificial Sequence
  HTT spacer sequence CTCN PAM
gggaggggaagaaaaauaaa

SEQ ID NO: 11081 - RNA, 20 nt, Artificial Sequence
  HTT spacer sequence CTCN PAM
ccgagccuagcagaacaagu

SEQ ID NO: 11082 - RNA, 20 nt, Artificial Sequence
  HTT spacer sequence CTCN PAM
ggggcuuucaagaugaaauc

SEQ ID NO: 11083 - RNA, 20 nt, Artificial Sequence
  HTT spacer sequence CTCN PAM
aacaccacggauuucaucuu

SEQ ID NO: 11084 - RNA, 20 nt, Artificial Sequence
  HTT spacer sequence CTCN PAM
uuucccagcaccuccaacac

SEQ ID NO: 11085 - RNA, 20 nt, Artificial Sequence
  HTT spacer sequence CTCN PAM
gacaccuccuuucccagcac

SEQ ID NO: 11086 - RNA, 20 nt, Artificial Sequence
  HTT spacer sequence CTCN PAM
cucagacaccuccuuuccca

SEQ ID NO: 11087 - RNA, 20 nt, Artificial Sequence
  HTT spacer sequence CTCN PAM
gugugagaagcucuagcuuu

SEQ ID NO: 11088 - RNA, 20 nt, Artificial Sequence
  HTT spacer sequence CTCN PAM
cacagagcccucacucagac

SEQ ID NO: 11089 - RNA, 20 nt, Artificial Sequence
  HTT spacer sequence CTCN PAM
agcuuugaaguuagggccag

SEQ ID NO: 11090 - RNA, 20 nt, Artificial Sequence
  HTT spacer sequence CTCN PAM
ccuggcccuaacuucaaagc

SEQ ID NO: 11091 - RNA, 20 nt, Artificial Sequence
  HTT spacer sequence CTCN PAM
gcucccauuacaggaucauc

SEQ ID NO: 11092 - RNA, 20 nt, Artificial Sequence
  HTT spacer sequence CTCN PAM
cauuacaggaucaucucucc

SEQ ID NO: 11093 - RNA, 20 nt, Artificial Sequence
  HTT spacer sequence CTCN PAM
cccagcucaguuucucauuu

SEQ ID NO: 11094 - RNA, 20 nt, Artificial Sequence
  HTT spacer sequence CTCN PAM
cagcucaguuucucauuuau

SEQ ID NO: 11095 - RNA, 20 nt, Artificial Sequence
  HTT spacer sequence CTCN PAM
guuucucauuuaugaaaugu

SEQ ID NO: 11096 - RNA, 20 nt, Artificial Sequence
  HTT spacer sequence CTCN PAM
uuuaugaaauguagaugaga

SEQ ID NO: 11097 - RNA, 20 nt, Artificial Sequence
  HTT spacer sequence CTCN PAM
ucuacauuucauaaaugaga

SEQ ID NO: 11098 - RNA, 20 nt, Artificial Sequence
  HTT spacer sequence CTCN PAM
caucuacauuucauaaauga

SEQ ID NO: 11099 - RNA, 20 nt, Artificial Sequence
  HTT spacer sequence CTCN PAM
uacuuuauaggauuguuggg

SEQ ID NO: 11100 - RNA, 20 nt, Artificial Sequence
  HTT spacer sequence CTCN PAM
caacaauccuauaaaguaag

SEQ ID NO: 11101 - RNA, 20 nt, Artificial Sequence
  HTT spacer sequence CTCN PAM
auaauuacuaagaggagaaa

SEQ ID NO: 11102 - RNA, 20 nt, Artificial Sequence
  HTT spacer sequence CTCN PAM
uaguaauuauggaggauuau

SEQ ID NO: 11103 - RNA, 20 nt, Artificial Sequence
  HTT spacer sequence CTCN PAM
ucuuaguaauuauggaggau

SEQ ID NO: 11104 - RNA, 20 nt, Artificial Sequence
  HTT spacer sequence CTCN PAM
gguccagcugccagcaguug

SEQ ID NO: 11105 - RNA, 20 nt, Artificial Sequence
  HTT spacer sequence CTCN PAM
ccucugcucugugcugccug

SEQ ID NO: 11106 - RNA, 20 nt, Artificial Sequence
  HTT spacer sequence CTCN PAM
ucugcucugugcugccuggu

SEQ ID NO: 11107 - RNA, 20 nt, Artificial Sequence
  HTT spacer sequence CTCN PAM
gcucugugcugccuggucag

SEQ ID NO: 11108 - RNA, 20 nt, Artificial Sequence
  HTT spacer sequence CTCN PAM
gugcugccuggucaggccau

SEQ ID NO: 11109 - RNA, 20 nt, Artificial Sequence
  HTT spacer sequence CTCN PAM
gucuaagggauucugucaua

SEQ ID NO: 11110 - RNA, 20 nt, Artificial Sequence
  HTT spacer sequence CTCN PAM
gucaggaggcuggaaguccu

SEQ ID NO: 11111 - RNA, 20 nt, Artificial Sequence
  HTT spacer sequence CTCN PAM
ugacugagaaaauaaacuuc

SEQ ID NO: 11112 - RNA, 20 nt, Artificial Sequence
  HTT spacer sequence CTCN PAM
ccaacaccaaaucugcaggc

SEQ ID NO: 11113 - RNA, 20 nt, Artificial Sequence
  HTT spacer sequence CTCN PAM
cugcuucaaagauggagccu

SEQ ID NO: 11114 - RNA, 20 nt, Artificial Sequence
  HTT spacer sequence CTCN PAM
gcuucaaagauggagccuug

SEQ ID NO: 11115 - RNA, 20 nt, Artificial Sequence
  HTT spacer sequence CTCN PAM
aucuuugaagcagagagcag

SEQ ID NO: 11116 - RNA, 20 nt, Artificial Sequence
  HTT spacer sequence CTCN PAM
agccaaggcuccaucuuuga

SEQ ID NO: 11117 - RNA, 20 nt, Artificial Sequence
  HTT spacer sequence CTCN PAM
uaccuauaaucuuagcacuu

SEQ ID NO: 11118 - RNA, 20 nt, Artificial Sequence
  HTT spacer sequence CTCN PAM
caaagugcuaagauuauagg

SEQ ID NO: 11119 - RNA, 20 nt, Artificial Sequence
  HTT spacer sequence CTCN PAM
gccucccaaagugcuaagau

SEQ ID NO: 11120 - RNA, 20 nt, Artificial Sequence
  HTT spacer sequence CTCN PAM
caccucagccucccaaagug

SEQ ID NO: 11121 - RNA, 20 nt, Artificial Sequence
  HTT spacer sequence CTCN PAM
agugauccucccaccucagc

SEQ ID NO: 11122 - RNA, 20 nt, Artificial Sequence
  HTT spacer sequence CTCN PAM
uuggcucaagugauccuccc

SEQ ID NO: 11123 - RNA, 20 nt, Artificial Sequence
  HTT spacer sequence CTCN PAM
agcuccuuggcucaagugau

SEQ ID NO: 11124 - RNA, 20 nt, Artificial Sequence
  HTT spacer sequence CTCN PAM
cuguguuacccaggcugguc

SEQ ID NO: 11125 - RNA, 20 nt, Artificial Sequence
  HTT spacer sequence CTCN PAM
aucuuucuuucuuuucuuuu

SEQ ID NO: 11126 - RNA, 20 nt, Artificial Sequence
  HTT spacer sequence CTCN PAM
cugcacccucacagggcaga

SEQ ID NO: 11127 - RNA, 20 nt, Artificial Sequence
  HTT spacer sequence CTCN PAM
cagggcagaggacaaaccag

SEQ ID NO: 11128 - RNA, 20 nt, Artificial Sequence
  HTT spacer sequence CTCN PAM
gcccugugagggugcaguga

SEQ ID NO: 11129 - RNA, 20 nt, Artificial Sequence
  HTT spacer sequence CTCN PAM
cuggggccccuuuucuaaug

SEQ ID NO: 11130 - RNA, 20 nt, Artificial Sequence
  HTT spacer sequence CTCN PAM
ugaaugggauuccugccauu

SEQ ID NO: 11131 - RNA, 20 nt, Artificial Sequence
  HTT spacer sequence CTCN PAM
gcccucgugaaugggauucc

SEQ ID NO: 11132 - RNA, 20 nt, Artificial Sequence
  HTT spacer sequence CTCN PAM
ucaccuccagaaggucccac

SEQ ID NO: 11133 - RNA, 20 nt, Artificial Sequence
  HTT spacer sequence CTCN PAM
agaaggucccaccucucaau

SEQ ID NO: 11134 - RNA, 20 nt, Artificial Sequence
  HTT spacer sequence CTCN PAM
caauacuauugcauugggga

SEQ ID NO: 11135 - RNA, 20 nt, Artificial Sequence
  HTT spacer sequence CTCN PAM
auacuauugcauuggggauu

SEQ ID NO: 11136 - RNA, 20 nt, Artificial Sequence
  HTT spacer sequence CTCN PAM
gaauguguguaucccccaca

SEQ ID NO: 11137 - RNA, 20 nt, Artificial Sequence
  HTT spacer sequence CTCN PAM
augggaguggaguaugcugg

SEQ ID NO: 11138 - RNA, 20 nt, Artificial Sequence
  HTT spacer sequence CTCN PAM
caucgagggccaggaugcuc

SEQ ID NO: 11139 - RNA, 20 nt, Artificial Sequence
  HTT spacer sequence CTCN PAM
acucccaucgagggccagga

SEQ ID NO: 11140 - RNA, 20 nt, Artificial Sequence
  HTT spacer sequence CTCN PAM
accauggggcuguggagucc

SEQ ID NO: 11141 - RNA, 20 nt, Artificial Sequence
  HTT spacer sequence CTCN PAM
acagccccaugguugagcuu

SEQ ID NO: 11142 - RNA, 20 nt, Artificial Sequence
  HTT spacer sequence CTCN PAM
gggacuccacagccccaugg

SEQ ID NO: 11143 - RNA, 20 nt, Artificial Sequence
  HTT spacer sequence CTCN PAM
aagaaacaacaacaaauaaa

SEQ ID NO: 11144 - RNA, 20 nt, Artificial Sequence
  HTT spacer sequence CTCN PAM
gucucaaagaaacaacaaca

SEQ ID NO: 11145 - RNA, 20 nt, Artificial Sequence
  HTT spacer sequence CTCN PAM
agaaacagaucuggcccagg

SEQ ID NO: 11146 - RNA, 20 nt, Artificial Sequence
  HTT spacer sequence CTCN PAM
aaccugggccagaucuguuu

SEQ ID NO: 11147 - RNA, 20 nt, Artificial Sequence
  HTT spacer sequence CTCN PAM
gcucacugcagcaucugccu

SEQ ID NO: 11148 - RNA, 20 nt, Artificial Sequence
  HTT spacer sequence CTCN PAM
cugcagcaucugccucccgg

SEQ ID NO: 11149 - RNA, 20 nt, Artificial Sequence
  HTT spacer sequence CTCN PAM
cggguucaagggauucuccu

SEQ ID NO: 11150 - RNA, 20 nt, Artificial Sequence
  HTT spacer sequence CTCN PAM
ugccucaggcuccugaguag

SEQ ID NO: 11151 - RNA, 20 nt, Artificial Sequence
  HTT spacer sequence CTCN PAM
ggcuccugaguagcugggac

SEQ ID NO: 11152 - RNA, 20 nt, Artificial Sequence
  HTT spacer sequence CTCN PAM
ugaguagcugggacuacagg

SEQ ID NO: 11153 - RNA, 20 nt, Artificial Sequence
  HTT spacer sequence CTCN PAM
ggagccugaggcaggagaau

SEQ ID NO: 11154 - RNA, 20 nt, Artificial Sequence
  HTT spacer sequence CTCN PAM
acuaaaaauacaaaaauuag

SEQ ID NO: 11155 - RNA, 20 nt, Artificial Sequence
  HTT spacer sequence CTCN PAM
ugaccucgugauccacccac

SEQ ID NO: 11156 - RNA, 20 nt, Artificial Sequence
  HTT spacer sequence CTCN PAM
ugauccacccaccucggccu

SEQ ID NO: 11157 - RNA, 20 nt, Artificial Sequence
  HTT spacer sequence CTCN PAM
gccucccaaaaugcugggau

SEQ ID NO: 11158 - RNA, 20 nt, Artificial Sequence
  HTT spacer sequence CTCN PAM
caaaaugcugggauuacggg

SEQ ID NO: 11159 - RNA, 20 nt, Artificial Sequence
  HTT spacer sequence CTCN PAM
ugcccguaaucccagcauuu

SEQ ID NO: 11160 - RNA, 20 nt, Artificial Sequence
  HTT spacer sequence CTCN PAM
augcguuuauucuuugcaug

SEQ ID NO: 11161 - RNA, 20 nt, Artificial Sequence
  HTT spacer sequence CTCN PAM
guaacaguugcucaaugcgu

SEQ ID NO: 11162 - RNA, 20 nt, Artificial Sequence
  HTT spacer sequence CTCN PAM
ggcuaggugcugggguauca

SEQ ID NO: 11163 - RNA, 20 nt, Artificial Sequence
  HTT spacer sequence CTCN PAM
ggcccacugugauaccccag

SEQ ID NO: 11164 - RNA, 20 nt, Artificial Sequence
  HTT spacer sequence CTCN PAM
aagcuuccugaagcuaaggc

SEQ ID NO: 11165 - RNA, 20 nt, Artificial Sequence
  HTT spacer sequence CTCN PAM
uucucagcaagaaauacuug

SEQ ID NO: 11166 - RNA, 20 nt, Artificial Sequence
  HTT spacer sequence CTCN PAM
gcaagaaauacuugucaucg

SEQ ID NO: 11167 - RNA, 20 nt, Artificial Sequence
  HTT spacer sequence CTCN PAM
augacaaguauuucuugcug

SEQ ID NO: 11168 - RNA, 20 nt, Artificial Sequence
  HTT spacer sequence CTCN PAM
ucgaugacaaguauuucuug

SEQ ID NO: 11169 - RNA, 20 nt, Artificial Sequence
  HTT spacer sequence CTCN PAM
ccucgaugacaaguauuucu

SEQ ID NO: 11170 - RNA, 20 nt, Artificial Sequence
  HTT spacer sequence CTCN PAM
accucuccucgaugacaagu

SEQ ID NO: 11171 - RNA, 20 nt, Artificial Sequence
  HTT spacer sequence CTCN PAM
ggcuguggcaaaaaaauuug

SEQ ID NO: 11172 - RNA, 20 nt, Artificial Sequence
  HTT spacer sequence CTCN PAM
ccaaauuuuuuugccacagc

SEQ ID NO: 11173 - RNA, 20 nt, Artificial Sequence
  HTT spacer sequence CTCN PAM
ugcuaaauucuucagguuuu

SEQ ID NO: 11174 - RNA, 20 nt, Artificial Sequence
  HTT spacer sequence CTCN PAM
ucggcuugcugacuccugcu

SEQ ID NO: 11175 - RNA, 20 nt, Artificial Sequence
  HTT spacer sequence CTCN PAM
agggcugugucuacaaagcu

SEQ ID NO: 11176 - RNA, 20 nt, Artificial Sequence
  HTT spacer sequence CTCN PAM
uugcugggcugugccugcuc

SEQ ID NO: 11177 - RNA, 20 nt, Artificial Sequence
  HTT spacer sequence CTCN PAM
gcuccuugcugggcugugcc

SEQ ID NO: 11178 - RNA, 20 nt, Artificial Sequence
  HTT spacer sequence CTCN PAM
cagcuccuugcugggcugug

SEQ ID NO: 11179 - RNA, 20 nt, Artificial Sequence
  HTT spacer sequence CTCN PAM
caccgcucucagcuccuugc

SEQ ID NO: 11180 - RNA, 20 nt, Artificial Sequence
  HTT spacer sequence CTCN PAM
aagucccaaagaccagaaag

SEQ ID NO: 11181 - RNA, 20 nt, Artificial Sequence
  HTT spacer sequence CTCN PAM
gccgcuauaguggaaaaggg

SEQ ID NO: 11182 - RNA, 20 nt, Artificial Sequence
  HTT spacer sequence CTCN PAM
aaagcaacacaugaaagacc

SEQ ID NO: 11183 - RNA, 20 nt, Artificial Sequence
  HTT spacer sequence CTCN PAM
ucaaucagaaaaagcagggc

SEQ ID NO: 11184 - RNA, 20 nt, Artificial Sequence
  HTT spacer sequence CTCN PAM
gcaauucucaucaaucagaa

SEQ ID NO: 11185 - RNA, 20 nt, Artificial Sequence
  HTT spacer sequence CTCN PAM
cauacauauuuaccaucauc

SEQ ID NO: 11186 - RNA, 20 nt, Artificial Sequence
  HTT spacer sequence CTCN PAM
uuagaaaguauuccucacau

SEQ ID NO: 11187 - RNA, 20 nt, Artificial Sequence
  HTT spacer sequence CTCN PAM
aaauaucuucuuaauauuuu

SEQ ID NO: 11188 - RNA, 20 nt, Artificial Sequence
  HTT spacer sequence CTCN PAM
uucucaaaauaucuucuuaa

SEQ ID NO: 11189 - RNA, 20 nt, Artificial Sequence
  HTT spacer sequence CTCN PAM
ucugagguccuuagugguau

SEQ ID NO: 11190 - RNA, 20 nt, Artificial Sequence
  HTT spacer sequence CTCN PAM
gaugaggcaaccacuuagca

SEQ ID NO: 11191 - RNA, 20 nt, Artificial Sequence
  HTT spacer sequence CTCN PAM
uuaaaaauccccacauuuuu

SEQ ID NO: 11192 - RNA, 20 nt, Artificial Sequence
  HTT spacer sequence CTCN PAM
aaggcgaaaccuucgccccc

SEQ ID NO: 11193 - RNA, 20 nt, Artificial Sequence
  HTT spacer sequence CTCN PAM
uuugugaagugucauauaau

SEQ ID NO: 11194 - RNA, 20 nt, Artificial Sequence
  HTT spacer sequence CTCN PAM
uuaaauuauaugacacuuca

SEQ ID NO: 11195 - RNA, 20 nt, Artificial Sequence
  HTT spacer sequence CTCN PAM
gacuuuacucauuaaauuau

SEQ ID NO: 11196 - RNA, 20 nt, Artificial Sequence
  HTT spacer sequence CTCN PAM
ggaacucagacuuuacucau

SEQ ID NO: 11197 - RNA, 20 nt, Artificial Sequence
  HTT spacer sequence CTCN PAM
cgacuguaaucccagcacuu

SEQ ID NO: 11198 - RNA, 20 nt, Artificial Sequence
  HTT spacer sequence CTCN PAM
caaagugcugggauuacagu

SEQ ID NO: 11199 - RNA, 20 nt, Artificial Sequence
  HTT spacer sequence CTCN PAM
accucccaaagugcugggau

SEQ ID NO: 11200 - RNA, 20 nt, Artificial Sequence
  HTT spacer sequence CTCN PAM
ugauccacccgccucgaccu

SEQ ID NO: 11201 - RNA, 20 nt, Artificial Sequence
  HTT spacer sequence CTCN PAM
ugaccucgugauccacccgc

SEQ ID NO: 11202 - RNA, 20 nt, Artificial Sequence
  HTT spacer sequence CTCN PAM
aucuccugaccucgugaucc

SEQ ID NO: 11203 - RNA, 20 nt, Artificial Sequence
  HTT spacer sequence CTCN PAM
acuaaaaauacaaaaaauua

SEQ ID NO: 11204 - RNA, 20 nt, Artificial Sequence
  HTT spacer sequence CTCN PAM
ggaggcugaggcaggagaau

SEQ ID NO: 11205 - RNA, 20 nt, Artificial Sequence
  HTT spacer sequence CTCN PAM
cgaguagcugggacuauggg

SEQ ID NO: 11206 - RNA, 20 nt, Artificial Sequence
  HTT spacer sequence CTCN PAM
gccucccgaguagcugggac

SEQ ID NO: 11207 - RNA, 20 nt, Artificial Sequence
  HTT spacer sequence CTCN PAM
ugccucagccucccgaguag

SEQ ID NO: 11208 - RNA, 20 nt, Artificial Sequence
  HTT spacer sequence CTCN PAM
cggguucacgccauucuccu

SEQ ID NO: 11209 - RNA, 20 nt, Artificial Sequence
  HTT spacer sequence CTCN PAM
gccucccggguucacgccau

SEQ ID NO: 11210 - RNA, 20 nt, Artificial Sequence
  HTT spacer sequence CTCN PAM
cugcaagcucagccucccgg

SEQ ID NO: 11211 - RNA, 20 nt, Artificial Sequence
  HTT spacer sequence CTCN PAM
gcucacugcaagcucagccu

SEQ ID NO: 11212 - RNA, 20 nt, Artificial Sequence
  HTT spacer sequence CTCN PAM
agccugggugacagaacgag

SEQ ID NO: 11213 - RNA, 20 nt, Artificial Sequence
  HTT spacer sequence CTCN PAM
uucugucacccaggcuggag

SEQ ID NO: 11214 - RNA, 20 nt, Artificial Sequence
  HTT spacer sequence CTCN PAM
aucucaaaaaaagaaaaaaa

SEQ ID NO: 11215 - RNA, 20 nt, Artificial Sequence
  HTT spacer sequence CTCN PAM
aaaaaagaaaaaaaaagaaa

SEQ ID NO: 11216 - RNA, 20 nt, Artificial Sequence
  HTT spacer sequence CTCN PAM
gcccucccgaguccuuuggu

SEQ ID NO: 11217 - RNA, 20 nt, Artificial Sequence
  HTT spacer sequence CTCN PAM
cgaguccuuugguuauuauu

SEQ ID NO: 11218 - RNA, 20 nt, Artificial Sequence
  HTT spacer sequence CTCN PAM
ggagggcagagcaggugcau

SEQ ID NO: 11219 - RNA, 20 nt, Artificial Sequence
  HTT spacer sequence CTCN PAM
ccugcauaauaauaaccaaa

SEQ ID NO: 11220 - RNA, 20 nt, Artificial Sequence
  HTT spacer sequence CTCN PAM
aaacuccccugcauaauaau

SEQ ID NO: 11221 - RNA, 20 nt, Artificial Sequence
  HTT spacer sequence CTCN PAM
ggauaaaaaugaaaacucaa

SEQ ID NO: 11222 - RNA, 20 nt, Artificial Sequence
  HTT spacer sequence CTCN PAM
aguggguugcauuucugccu

SEQ ID NO: 11223 - RNA, 20 nt, Artificial Sequence
  HTT spacer sequence CTCN PAM
ugcaguuacucaccaagaau

SEQ ID NO: 11224 - RNA, 20 nt, Artificial Sequence
  HTT spacer sequence CTCN PAM
ccaagaauccaagcaagcgg

SEQ ID NO: 11225 - RNA, 20 nt, Artificial Sequence
  HTT spacer sequence CTCN PAM
ccccugcagcccagccgcuu

SEQ ID NO: 11226 - RNA, 20 nt, Artificial Sequence
  HTT spacer sequence CTCN PAM
cucgccccugcagcccagcc

SEQ ID NO: 11227 - RNA, 20 nt, Artificial Sequence
  HTT spacer sequence CTCN PAM
ugaaguugauguccuugaac

SEQ ID NO: 11228 - RNA, 20 nt, Artificial Sequence
  HTT spacer sequence CTCN PAM
agccuccugaaguugauguc

SEQ ID NO: 11229 - RNA, 20 nt, Artificial Sequence
  HTT spacer sequence CTCN PAM
agcauguuugccuccagccu

SEQ ID NO: 11230 - RNA, 20 nt, Artificial Sequence
  HTT spacer sequence CTCN PAM
uccuggcaaugcacuuacau

SEQ ID NO: 11231 - RNA, 20 nt, Artificial Sequence
  HTT spacer sequence CTCN PAM
uucuuuuuucaaaaauagag

SEQ ID NO: 11232 - RNA, 20 nt, Artificial Sequence
  HTT spacer sequence CTCN PAM
auuuuugaaaaaagaaagag

SEQ ID NO: 11233 - RNA, 20 nt, Artificial Sequence
  HTT spacer sequence CTCN PAM
cuguguugcccaggcugguc

SEQ ID NO: 11234 - RNA, 20 nt, Artificial Sequence
  HTT spacer sequence CTCN PAM
uggccucaagugguccucca

SEQ ID NO: 11235 - RNA, 20 nt, Artificial Sequence
  HTT spacer sequence CTCN PAM
agugguccuccaccuuggcc

SEQ ID NO: 11236 - RNA, 20 nt, Artificial Sequence
  HTT spacer sequence CTCN PAM
accuuggccucccacagugc

SEQ ID NO: 11237 - RNA, 20 nt, Artificial Sequence
  HTT spacer sequence CTCN PAM
cacagugcugggauuauagg

SEQ ID NO: 11238 - RNA, 20 nt, Artificial Sequence
  HTT spacer sequence CTCN PAM
cgccuauaaucccagcacug

SEQ ID NO: 11239 - RNA, 20 nt, Artificial Sequence
  HTT spacer sequence CTCN PAM
uggugccuguccuaccuggu

SEQ ID NO: 11240 - RNA, 20 nt, Artificial Sequence
  HTT spacer sequence CTCN PAM
cccgucaccccagugugcuu

SEQ ID NO: 11241 - RNA, 20 nt, Artificial Sequence
  HTT spacer sequence CTCN PAM
cugggccccucacagaccuc

SEQ ID NO: 11242 - RNA, 20 nt, Artificial Sequence
  HTT spacer sequence CTCN PAM
cagaccucagcggugcucua

SEQ ID NO: 11243 - RNA, 20 nt, Artificial Sequence
  HTT spacer sequence CTCN PAM
gcggugcucuagcucccugc

SEQ ID NO: 11244 - RNA, 20 nt, Artificial Sequence
  HTT spacer sequence CTCN PAM
agcucccugccucgugucac

SEQ ID NO: 11245 - RNA, 20 nt, Artificial Sequence
  HTT spacer sequence CTCN PAM
cugccucgugucacugucag

SEQ ID NO: 11246 - RNA, 20 nt, Artificial Sequence
  HTT spacer sequence CTCN PAM
ugucacugucagccucacug

SEQ ID NO: 11247 - RNA, 20 nt, Artificial Sequence
  HTT spacer sequence CTCN PAM
cugcugggggagccccccag

SEQ ID NO: 11248 - RNA, 20 nt, Artificial Sequence
  HTT spacer sequence CTCN PAM
cccagcagugaggcugacag

SEQ ID NO: 11249 - RNA, 20 nt, Artificial Sequence
  HTT spacer sequence CTCN PAM
gcuaccuggggggcuccccc

SEQ ID NO: 11250 - RNA, 20 nt, Artificial Sequence
  HTT spacer sequence CTCN PAM
uuuucacuucuuuucuagag

SEQ ID NO: 11251 - RNA, 20 nt, Artificial Sequence
  HTT spacer sequence CTCN PAM
agaaaagaagugaaaaugag

SEQ ID NO: 11252 - RNA, 20 nt, Artificial Sequence
  HTT spacer sequence CTCN PAM
cuauguugcccaggcuacuu

SEQ ID NO: 11253 - RNA, 20 nt, Artificial Sequence
  HTT spacer sequence CTCN PAM
uggccccaagugauccuccu

SEQ ID NO: 11254 - RNA, 20 nt, Artificial Sequence
  HTT spacer sequence CTCN PAM
ugccuugaccucccagaaug

SEQ ID NO: 11255 - RNA, 20 nt, Artificial Sequence
  HTT spacer sequence CTCN PAM
cagaaugcugggauuacagg

SEQ ID NO: 11256 - RNA, 20 nt, Artificial Sequence
  HTT spacer sequence CTCN PAM
ugccuguaaucccagcauuc

SEQ ID NO: 11257 - RNA, 20 nt, Artificial Sequence
  HTT spacer sequence CTCN PAM
gggcuggcuuucucucucau

SEQ ID NO: 11258 - RNA, 20 nt, Artificial Sequence
  HTT spacer sequence CTCN PAM
cucauucuuguguuucccac

SEQ ID NO: 11259 - RNA, 20 nt, Artificial Sequence
  HTT spacer sequence CTCN PAM
cauucuuguguuucccacag

SEQ ID NO: 11260 - RNA, 20 nt, Artificial Sequence
  HTT spacer sequence CTCN PAM
uucuuguguuucccacagcc

SEQ ID NO: 11261 - RNA, 20 nt, Artificial Sequence
  HTT spacer sequence CTCN PAM
cggcugugggaaacacaaga

SEQ ID NO: 11262 - RNA, 20 nt, Artificial Sequence
  HTT spacer sequence CTCN PAM
gcuucucaugagguccuggg

SEQ ID NO: 11263 - RNA, 20 nt, Artificial Sequence
  HTT spacer sequence CTCN PAM
ugagguccugggacuguggc

SEQ ID NO: 11264 - RNA, 20 nt, Artificial Sequence
  HTT spacer sequence CTCN PAM
ugagaagcagaguggggaca

SEQ ID NO: 11265 - RNA, 20 nt, Artificial Sequence
  HTT spacer sequence CTCN PAM
guacggggccaggccacagu

SEQ ID NO: 11266 - RNA, 20 nt, Artificial Sequence
  HTT spacer sequence CTCN PAM
uugugagugugcuguuggga

SEQ ID NO: 11267 - RNA, 20 nt, Artificial Sequence
  HTT spacer sequence CTCN PAM
caaggaggcacagugaccac

SEQ ID NO: 11268 - RNA, 20 nt, Artificial Sequence
  HTT spacer sequence CTCN PAM
ggacuguccccgaggggcgg

SEQ ID NO: 11269 - RNA, 20 nt, Artificial Sequence
  HTT spacer sequence CTCN PAM
gggacaguccagaggaaggu

SEQ ID NO: 11270 - RNA, 20 nt, Artificial Sequence
  HTT spacer sequence CTCN PAM
ccaccuugaggguaugaaug

SEQ ID NO: 11271 - RNA, 20 nt, Artificial Sequence
  HTT spacer sequence CTCN PAM
agguggggaggcggaagugg

SEQ ID NO: 11272 - RNA, 20 nt, Artificial Sequence
  HTT spacer sequence CTCN PAM
uucauacccucaaggugggg

SEQ ID NO: 11273 - RNA, 20 nt, Artificial Sequence
  HTT spacer sequence CTCN PAM
ucacucauucauacccucaa

SEQ ID NO: 11274 - RNA, 20 nt, Artificial Sequence
  HTT spacer sequence CTCN PAM
aacagcugugcugaccgugg

SEQ ID NO: 11275 - RNA, 20 nt, Artificial Sequence
  HTT spacer sequence CTCN PAM
aaaggccacggucagcacag

SEQ ID NO: 11276 - RNA, 20 nt, Artificial Sequence
  HTT spacer sequence CTCN PAM
cuguagugcacaaguccugg

SEQ ID NO: 11277 - RNA, 20 nt, Artificial Sequence
  HTT spacer sequence CTCN PAM
ggacugcgggugccuccggc

SEQ ID NO: 11278 - RNA, 20 nt, Artificial Sequence
  HTT spacer sequence CTCN PAM
ggcaugagcagaugaggguc

SEQ ID NO: 11279 - RNA, 20 nt, Artificial Sequence
  HTT spacer sequence CTCN PAM
ugccggaggcacccgcaguc

SEQ ID NO: 11280 - RNA, 20 nt, Artificial Sequence
  HTT spacer sequence CTCN PAM
ucugcucaugccggaggcac

SEQ ID NO: 11281 - RNA, 20 nt, Artificial Sequence
  HTT spacer sequence CTCN PAM
accugccgccaguacaguuc

SEQ ID NO: 11282 - RNA, 20 nt, Artificial Sequence
  HTT spacer sequence CTCN PAM
cuccugccugccugacccuc

SEQ ID NO: 11283 - RNA, 20 nt, Artificial Sequence
  HTT spacer sequence CTCN PAM
ugccugccugacccucugcc

SEQ ID NO: 11284 - RNA, 20 nt, Artificial Sequence
  HTT spacer sequence CTCN PAM
gccucugaggacagcagugc

SEQ ID NO: 11285 - RNA, 20 nt, Artificial Sequence
  HTT spacer sequence CTCN PAM
gaggacagcagugccgggau

SEQ ID NO: 11286 - RNA, 20 nt, Artificial Sequence
  HTT spacer sequence CTCN PAM
gaggcagagggucaggcagg

SEQ ID NO: 11287 - RNA, 20 nt, Artificial Sequence
  HTT spacer sequence CTCN PAM
uaucccggcacugcuguccu

SEQ ID NO: 11288 - RNA, 20 nt, Artificial Sequence
  HTT spacer sequence CTCN PAM
gggacaggaacccaggucug

SEQ ID NO: 11289 - RNA, 20 nt, Artificial Sequence
  HTT spacer sequence CTCN PAM
ucugggacaggaacccaggu

SEQ ID NO: 11290 - RNA, 20 nt, Artificial Sequence
  HTT spacer sequence CTCN PAM
cugaaucagcaggucccucc

SEQ ID NO: 11291 - RNA, 20 nt, Artificial Sequence
  HTT spacer sequence CTCN PAM
gcucccugaaucagcagguc

SEQ ID NO: 11292 - RNA, 20 nt, Artificial Sequence
  HTT spacer sequence CTCN PAM
gcucagcucccugaaucagc

SEQ ID NO: 11293 - RNA, 20 nt, Artificial Sequence
  HTT spacer sequence CTCN PAM
ucccuccgcucagcucccug

SEQ ID NO: 11294 - RNA, 20 nt, Artificial Sequence
  HTT spacer sequence CTCN PAM
aaggcugcaagggaccucau

SEQ ID NO: 11295 - RNA, 20 nt, Artificial Sequence
  HTT spacer sequence CTCN PAM
guggaccugcaggaggaugg

SEQ ID NO: 11296 - RNA, 20 nt, Artificial Sequence
  HTT spacer sequence CTCN PAM
ugcagguccacugagugguc

SEQ ID NO: 11297 - RNA, 20 nt, Artificial Sequence
  HTT spacer sequence CTCN PAM
cacuucccauccuccugcag

SEQ ID NO: 11298 - RNA, 20 nt, Artificial Sequence
  HTT spacer sequence CTCN PAM
gguuuucuccgggugcuuug

SEQ ID NO: 11299 - RNA, 20 nt, Artificial Sequence
  HTT spacer sequence CTCN PAM
gggugcuuugccaggagugc

SEQ ID NO: 11300 - RNA, 20 nt, Artificial Sequence
  HTT spacer sequence CTCN PAM
uggcaaagcacccggagaaa

SEQ ID NO: 11301 - RNA, 20 nt, Artificial Sequence
  HTT spacer sequence CTCN PAM
aauucuuggugcacuccugg

SEQ ID NO: 11302 - RNA, 20 nt, Artificial Sequence
  HTT spacer sequence CTCN PAM
ccccugccuccaauucuugg

SEQ ID NO: 11303 - RNA, 20 nt, Artificial Sequence
  HTT spacer sequence CTCN PAM
gucccuguucacacuucucc

SEQ ID NO: 11304 - RNA, 20 nt, Artificial Sequence
  HTT spacer sequence CTCN PAM
gguucugugcugcaucuucc

SEQ ID NO: 11305 - RNA, 20 nt, Artificial Sequence
  HTT spacer sequence CTCN PAM
guuugcaauccauuuugcac

SEQ ID NO: 11306 - RNA, 20 nt, Artificial Sequence
  HTT spacer sequence CTCN PAM
uuuccguagugcaaaaugga

SEQ ID NO: 11307 - RNA, 20 nt, Artificial Sequence
  HTT spacer sequence CTCN PAM
ggaggggugugugugugugu

SEQ ID NO: 11308 - RNA, 20 nt, Artificial Sequence
  HTT spacer sequence CTCN PAM
ugaggccaugcccuucuccu

SEQ ID NO: 11309 - RNA, 20 nt, Artificial Sequence
  HTT spacer sequence CTCN PAM
cacacacacacacacacaua

SEQ ID NO: 11310 - RNA, 20 nt, Artificial Sequence
  HTT spacer sequence CTCN PAM
uucucacacacacacacaca

SEQ ID NO: 11311 - RNA, 20 nt, Artificial Sequence
  HTT spacer sequence CTCN PAM
cucuuucucacacacacaca

SEQ ID NO: 11312 - RNA, 20 nt, Artificial Sequence
  HTT spacer sequence CTCN PAM
cccucuuucucacacacaca

SEQ ID NO: 11313 - RNA, 20 nt, Artificial Sequence
  HTT spacer sequence CTCN PAM
cucccucuuucucacacaca

SEQ ID NO: 11314 - RNA, 20 nt, Artificial Sequence
  HTT spacer sequence CTCN PAM
ucagaggacacauucuguga

SEQ ID NO: 11315 - RNA, 20 nt, Artificial Sequence
  HTT spacer sequence CTCN PAM
gaagaggugguucgccagcu

SEQ ID NO: 11316 - RNA, 20 nt, Artificial Sequence
  HTT spacer sequence CTCN PAM
agugagaggggccuggcaaa

SEQ ID NO: 11317 - RNA, 20 nt, Artificial Sequence
  HTT spacer sequence CTCN PAM
cuugaggcauuuucuaaauc

SEQ ID NO: 11318 - RNA, 20 nt, Artificial Sequence
  HTT spacer sequence CTCN PAM
cacuugaggcauuuucuaaa

SEQ ID NO: 11319 - RNA, 20 nt, Artificial Sequence
  HTT spacer sequence CTCN PAM
auucuuuugccaggccccuc

SEQ ID NO: 11320 - RNA, 20 nt, Artificial Sequence
  HTT spacer sequence CTCN PAM
cugucuccauucuuuugcca

SEQ ID NO: 11321 - RNA, 20 nt, Artificial Sequence
  HTT spacer sequence CTCN PAM
cccugucuccauucuuuugc

SEQ ID NO: 11322 - RNA, 20 nt, Artificial Sequence
  HTT spacer sequence CTCN PAM
guucccaagaaugaaacgcc

SEQ ID NO: 11323 - RNA, 20 nt, Artificial Sequence
  HTT spacer sequence CTCN PAM
cucaguucccaagaaugaaa

SEQ ID NO: 11324 - RNA, 20 nt, Artificial Sequence
  HTT spacer sequence CTCN PAM
gcucccucaguucccaagaa

SEQ ID NO: 11325 - RNA, 20 nt, Artificial Sequence
  HTT spacer sequence CTCN PAM
gaggcugccccuguucuugc

SEQ ID NO: 11326 - RNA, 20 nt, Artificial Sequence
  HTT spacer sequence CTCN PAM
gagaugacuacagcaauucu

SEQ ID NO: 11327 - RNA, 20 nt, Artificial Sequence
  HTT spacer sequence CTCN PAM
ugccguuuacuguaaggacg

SEQ ID NO: 11328 - RNA, 20 nt, Artificial Sequence
  HTT spacer sequence CTCN PAM
auauccaggacguccuuaca

SEQ ID NO: 11329 - RNA, 20 nt, Artificial Sequence
  HTT spacer sequence CTCN PAM
guggugaaagggaucuaccu

SEQ ID NO: 11330 - RNA, 20 nt, Artificial Sequence
  HTT spacer sequence CTCN PAM
guuugcuaccgggugugucu

SEQ ID NO: 11331 - RNA, 20 nt, Artificial Sequence
  HTT spacer sequence CTCN PAM
auccccuggcagaaugaggu

SEQ ID NO: 11332 - RNA, 20 nt, Artificial Sequence
  HTT spacer sequence CTCN PAM
uucugccaggggauggagac

SEQ ID NO: 11333 - RNA, 20 nt, Artificial Sequence
  HTT spacer sequence CTCN PAM
caaauacacacagacacaca

SEQ ID NO: 11334 - RNA, 20 nt, Artificial Sequence
  HTT spacer sequence CTCN PAM
cgccuguaaucccagcacuu

SEQ ID NO: 11335 - RNA, 20 nt, Artificial Sequence
  HTT spacer sequence CTCN PAM
caaagugcugggauuacagg

SEQ ID NO: 11336 - RNA, 20 nt, Artificial Sequence
  HTT spacer sequence CTCN PAM
gccucccaaagugcugggau

SEQ ID NO: 11337 - RNA, 20 nt, Artificial Sequence
  HTT spacer sequence CTCN PAM
ugaucugccugccucagccu

SEQ ID NO: 11338 - RNA, 20 nt, Artificial Sequence
  HTT spacer sequence CTCN PAM
ugaccucaugaucugccugc

SEQ ID NO: 11339 - RNA, 20 nt, Artificial Sequence
  HTT spacer sequence CTCN PAM
aacuccugaccucaugaucu

SEQ ID NO: 11340 - RNA, 20 nt, Artificial Sequence
  HTT spacer sequence CTCN PAM
acuaaaaguacaaaaauuag

SEQ ID NO: 11341 - RNA, 20 nt, Artificial Sequence
  HTT spacer sequence CTCN PAM
gcaucccuacuagcugggac

SEQ ID NO: 11342 - RNA, 20 nt, Artificial Sequence
  HTT spacer sequence CTCN PAM
ugccucagcaucccuacuag

SEQ ID NO: 11343 - RNA, 20 nt, Artificial Sequence
  HTT spacer sequence CTCN PAM
cagguucaagcgauucuccu

SEQ ID NO: 11344 - RNA, 20 nt, Artificial Sequence
  HTT spacer sequence CTCN PAM
cugcaacuucugccucccag

SEQ ID NO: 11345 - RNA, 20 nt, Artificial Sequence
  HTT spacer sequence CTCN PAM
gcucacugcaacuucugccu

SEQ ID NO: 11346 - RNA, 20 nt, Artificial Sequence
  HTT spacer sequence CTCN PAM
accuugggcgacagaacgag

SEQ ID NO: 11347 - RNA, 20 nt, Artificial Sequence
  HTT spacer sequence CTCN PAM
uucugucgcccaagguggag

SEQ ID NO: 11348 - RNA, 20 nt, Artificial Sequence
  HTT spacer sequence CTCN PAM
cccaaaaaaaaaaaaaaaaa

SEQ ID NO: 11349 - RNA, 20 nt, Artificial Sequence
  HTT spacer sequence CTCN PAM
uguccacuuccugucauugg

SEQ ID NO: 11350 - RNA, 20 nt, Artificial Sequence
  HTT spacer sequence CTCN PAM
caucagacccaaaauagcua

SEQ ID NO: 11351 - RNA, 20 nt, Artificial Sequence
  HTT spacer sequence CTCN PAM
ggguggcaggcaagcuccca

SEQ ID NO: 11352 - RNA, 20 nt, Artificial Sequence
  HTT spacer sequence CTCN PAM
cuaagcagggcuggcuggca

SEQ ID NO: 11353 - RNA, 20 nt, Artificial Sequence
  HTT spacer sequence CTCN PAM
caaagcagggaacuaccaug

SEQ ID NO: 11354 - RNA, 20 nt, Artificial Sequence
  HTT spacer sequence CTCN PAM
gagacaaggggagaggagac

SEQ ID NO: 11355 - RNA, 20 nt, Artificial Sequence
  HTT spacer sequence CTCN PAM
gaguguacucccaaagcagg

SEQ ID NO: 11356 - RNA, 20 nt, Artificial Sequence
  HTT spacer sequence CTCN PAM
ccuugucucugaguguacuc

SEQ ID NO: 11357 - RNA, 20 nt, Artificial Sequence
  HTT spacer sequence CTCN PAM
ccccuugucucugaguguac

SEQ ID NO: 11358 - RNA, 20 nt, Artificial Sequence
  HTT spacer sequence CTCN PAM
ucuccccuugucucugagug

SEQ ID NO: 11359 - RNA, 20 nt, Artificial Sequence
  HTT spacer sequence CTCN PAM
ucuuggaauaaguaaugugg

SEQ ID NO: 11360 - RNA, 20 nt, Artificial Sequence
  HTT spacer sequence CTCN PAM
uucccugcuuccugaccucu

SEQ ID NO: 11361 - RNA, 20 nt, Artificial Sequence
  HTT spacer sequence CTCN PAM
ugcacccacuguggggcccc

SEQ ID NO: 11362 - RNA, 20 nt, Artificial Sequence
  HTT spacer sequence CTCN PAM
gaggugccccgcacggggcu

SEQ ID NO: 11363 - RNA, 20 nt, Artificial Sequence
  HTT spacer sequence CTCN PAM
gagcuccugcacccacugug

SEQ ID NO: 11364 - RNA, 20 nt, Artificial Sequence
  HTT spacer sequence CTCN PAM
ugcccagccccgugcggggc

SEQ ID NO: 11365 - RNA, 20 nt, Artificial Sequence
  HTT spacer sequence CTCN PAM
cagugccagcagcuccugcc

SEQ ID NO: 11366 - RNA, 20 nt, Artificial Sequence
  HTT spacer sequence CTCN PAM
gcggcuucucuguccuguua

SEQ ID NO: 11367 - RNA, 20 nt, Artificial Sequence
  HTT spacer sequence CTCN PAM
guccuguuauucugugcaug

SEQ ID NO: 11368 - RNA, 20 nt, Artificial Sequence
  HTT spacer sequence CTCN PAM
cuuucacuuuuguugauguc

SEQ ID NO: 11369 - RNA, 20 nt, Artificial Sequence
  HTT spacer sequence CTCN PAM
guuuggucuggaaaccgggg

SEQ ID NO: 11370 - RNA, 20 nt, Artificial Sequence
  HTT spacer sequence CTCN PAM
ucagaagagggguaaaaaga

SEQ ID NO: 11371 - RNA, 20 nt, Artificial Sequence
  HTT spacer sequence CTCN PAM
ucugaagagucuauagaaga

SEQ ID NO: 11372 - RNA, 20 nt, Artificial Sequence
  HTT spacer sequence CTCN PAM
uacaggcaguuuuauacagu

SEQ ID NO: 11373 - RNA, 20 nt, Artificial Sequence
  HTT spacer sequence CTCN PAM
gacuguauaaaacugccugu

SEQ ID NO: 11374 - RNA, 20 nt, Artificial Sequence
  HTT spacer sequence CTCN PAM
cagacuguauaaaacugccu

SEQ ID NO: 11375 - RNA, 20 nt, Artificial Sequence
  HTT spacer sequence CTCN PAM
accuagcaccauguggcucu

SEQ ID NO: 11376 - RNA, 20 nt, Artificial Sequence
  HTT spacer sequence CTCN PAM
uuguucuggcuggccuccac

SEQ ID NO: 11377 - RNA, 20 nt, Artificial Sequence
  HTT spacer sequence CTCN PAM
cagugagguuuguugcuggg

SEQ ID NO: 11378 - RNA, 20 nt, Artificial Sequence
  HTT spacer sequence CTCN PAM
cugcgaggguguucucauug

SEQ ID NO: 11379 - RNA, 20 nt, Artificial Sequence
  HTT spacer sequence CTCN PAM
gaaaucggcauccuguggaa

SEQ ID NO: 11380 - RNA, 20 nt, Artificial Sequence
  HTT spacer sequence CTCN PAM
cagugcaucucucccugcuc

SEQ ID NO: 11381 - RNA, 20 nt, Artificial Sequence
  HTT spacer sequence CTCN PAM
cccugcucuggcucuuagac

SEQ ID NO: 11382 - RNA, 20 nt, Artificial Sequence
  HTT spacer sequence CTCN PAM
cugcucuggcucuuagacuc

SEQ ID NO: 11383 - RNA, 20 nt, Artificial Sequence
  HTT spacer sequence CTCN PAM
ggcucuuagacucaccuccu

SEQ ID NO: 11384 - RNA, 20 nt, Artificial Sequence
  HTT spacer sequence CTCN PAM
uagacucaccuccuucgccc

SEQ ID NO: 11385 - RNA, 20 nt, Artificial Sequence
  HTT spacer sequence CTCN PAM
ccuccuucgcccgcugcacg

SEQ ID NO: 11386 - RNA, 20 nt, Artificial Sequence
  HTT spacer sequence CTCN PAM
uucgcccgcugcacggggaa

SEQ ID NO: 11387 - RNA, 20 nt, Artificial Sequence
  HTT spacer sequence CTCN PAM
cgccuguaaucccagcacuu

SEQ ID NO: 11388 - RNA, 20 nt, Artificial Sequence
  HTT spacer sequence CTCN PAM
caaagugcugggauuacagg

SEQ ID NO: 11389 - RNA, 20 nt, Artificial Sequence
  HTT spacer sequence CTCN PAM
gccucccaaagugcugggau

SEQ ID NO: 11390 - RNA, 20 nt, Artificial Sequence
  HTT spacer sequence CTCN PAM
ggugauccaccugccucggc

SEQ ID NO: 11391 - RNA, 20 nt, Artificial Sequence
  HTT spacer sequence CTCN PAM
ugaccucaggugauccaccu

SEQ ID NO: 11392 - RNA, 20 nt, Artificial Sequence
  HTT spacer sequence CTCN PAM
aacuccugaccucaggugau

SEQ ID NO: 11393 - RNA, 20 nt, Artificial Sequence
  HTT spacer sequence CTCN PAM
caaguagcugggacuacagg

SEQ ID NO: 11394 - RNA, 20 nt, Artificial Sequence
  HTT spacer sequence CTCN PAM
gccucccaaguagcugggac

SEQ ID NO: 11395 - RNA, 20 nt, Artificial Sequence
  HTT spacer sequence CTCN PAM
ugccucagccucccaaguag

SEQ ID NO: 11396 - RNA, 20 nt, Artificial Sequence
  HTT spacer sequence CTCN PAM
uggguucacgcgauucuccu

SEQ ID NO: 11397 - RNA, 20 nt, Artificial Sequence
  HTT spacer sequence CTCN PAM
accuccuggguucacgcgau

SEQ ID NO: 11398 - RNA, 20 nt, Artificial Sequence
  HTT spacer sequence CTCN PAM
cugcacccuccaccuccugg

SEQ ID NO: 11399 - RNA, 20 nt, Artificial Sequence
  HTT spacer sequence CTCN PAM
gcucacugcacccuccaccu

SEQ ID NO: 11400 - RNA, 20 nt, Artificial Sequence
  HTT spacer sequence CTCN PAM
agccugggcaacagcgcaag

SEQ ID NO: 11401 - RNA, 20 nt, Artificial Sequence
  HTT spacer sequence CTCN PAM
aucucaaaaagaaagaaaga

SEQ ID NO: 11402 - RNA, 20 nt, Artificial Sequence
  HTT spacer sequence CTCN PAM
aaaagaaagaaagaaaaaug

SEQ ID NO: 11403 - RNA, 20 nt, Artificial Sequence
  HTT spacer sequence CTCN PAM
ccuuggauucgugggccauc

SEQ ID NO: 11404 - RNA, 20 nt, Artificial Sequence
  HTT spacer sequence CTCN PAM
uuggauucgugggccauccu

SEQ ID NO: 11405 - RNA, 20 nt, Artificial Sequence
  HTT spacer sequence CTCN PAM
gaaucaacccccugggaaca

SEQ ID NO: 11406 - RNA, 20 nt, Artificial Sequence
  HTT spacer sequence CTCN PAM
cgccuguaaucccagcacuu

SEQ ID NO: 11407 - RNA, 20 nt, Artificial Sequence
  HTT spacer sequence CTCN PAM
caaagugcugggauuacagg

SEQ ID NO: 11408 - RNA, 20 nt, Artificial Sequence
  HTT spacer sequence CTCN PAM
gccucccaaagugcugggau

SEQ ID NO: 11409 - RNA, 20 nt, Artificial Sequence
  HTT spacer sequence CTCN PAM
ucagccucccaaagugcugg

SEQ ID NO: 11410 - RNA, 20 nt, Artificial Sequence
  HTT spacer sequence CTCN PAM
ggugauccacccuccucagc

SEQ ID NO: 11411 - RNA, 20 nt, Artificial Sequence
  HTT spacer sequence CTCN PAM
ugaccucaggugauccaccc

SEQ ID NO: 11412 - RNA, 20 nt, Artificial Sequence
  HTT spacer sequence CTCN PAM
acuaaaaauauaaaaauuag

SEQ ID NO: 11413 - RNA, 20 nt, Artificial Sequence
  HTT spacer sequence CTCN PAM
cagguagcugggauuacagg

SEQ ID NO: 11414 - RNA, 20 nt, Artificial Sequence
  HTT spacer sequence CTCN PAM
gacucccagguagcugggau

SEQ ID NO: 11415 - RNA, 20 nt, Artificial Sequence
  HTT spacer sequence CTCN PAM
ugccucagacucccagguag

SEQ ID NO: 11416 - RNA, 20 nt, Artificial Sequence
  HTT spacer sequence CTCN PAM
cagguucaagcgauucuccu

SEQ ID NO: 11417 - RNA, 20 nt, Artificial Sequence
  HTT spacer sequence CTCN PAM
gccucccagguucaagcgau

SEQ ID NO: 11418 - RNA, 20 nt, Artificial Sequence
  HTT spacer sequence CTCN PAM
cuguaaccuccgccucccag

SEQ ID NO: 11419 - RNA, 20 nt, Artificial Sequence
  HTT spacer sequence CTCN PAM
gcucccuguaaccuccgccu

SEQ ID NO: 11420 - RNA, 20 nt, Artificial Sequence
  HTT spacer sequence CTCN PAM
agccugggugacaagaguga

SEQ ID NO: 11421 - RNA, 20 nt, Artificial Sequence
  HTT spacer sequence CTCN PAM
ugucacccaggcuggagcgc

SEQ ID NO: 11422 - RNA, 20 nt, Artificial Sequence
  HTT spacer sequence CTCN PAM
gucuuaaaaaaaaaaaaaaa

SEQ ID NO: 11423 - RNA, 20 nt, Artificial Sequence
  HTT spacer sequence CTCN PAM
aaguggcauuucccauggcu

SEQ ID NO: 11424 - RNA, 20 nt, Artificial Sequence
  HTT spacer sequence CTCN PAM
gagaacuaaggguuaggugu

SEQ ID NO: 11425 - RNA, 20 nt, Artificial Sequence
  HTT spacer sequence CTCN PAM
gaggaaagacagccauggga

SEQ ID NO: 11426 - RNA, 20 nt, Artificial Sequence
  HTT spacer sequence CTCN PAM
cccugacccucaguguguag

SEQ ID NO: 11427 - RNA, 20 nt, Artificial Sequence
  HTT spacer sequence CTCN PAM
cugacccucaguguguagcc

SEQ ID NO: 11428 - RNA, 20 nt, Artificial Sequence
  HTT spacer sequence CTCN PAM
guguguagccagcccugcau

SEQ ID NO: 11429 - RNA, 20 nt, Artificial Sequence
  HTT spacer sequence CTCN PAM
ucccugggccccggucccag

SEQ ID NO: 11430 - RNA, 20 nt, Artificial Sequence
  HTT spacer sequence CTCN PAM
cugggccccggucccagugu

SEQ ID NO: 11431 - RNA, 20 nt, Artificial Sequence
  HTT spacer sequence CTCN PAM
aaguguggacacugggaccg

SEQ ID NO: 11432 - RNA, 20 nt, Artificial Sequence
  HTT spacer sequence CTCN PAM
acggcagguuuuccccaaaa

SEQ ID NO: 11433 - RNA, 20 nt, Artificial Sequence
  HTT spacer sequence CTCN PAM
caacggcagguuuuccccaa

SEQ ID NO: 11434 - RNA, 20 nt, Artificial Sequence
  HTT spacer sequence CTCN PAM
gugcaaucagauucucucaa

SEQ ID NO: 11435 - RNA, 20 nt, Artificial Sequence
  HTT spacer sequence CTCN PAM
ccacacugcuucuuaggcag

SEQ ID NO: 11436 - RNA, 20 nt, Artificial Sequence
  HTT spacer sequence CTCN PAM
ggcugccuaagaagcagugu

SEQ ID NO: 11437 - RNA, 20 nt, Artificial Sequence
  HTT spacer sequence CTCN PAM
gccaugguacaugcagaacu

SEQ ID NO: 11438 - RNA, 20 nt, Artificial Sequence
  HTT spacer sequence CTCN PAM
cauacauaggaaaugcagca

SEQ ID NO: 11439 - RNA, 20 nt, Artificial Sequence
  HTT spacer sequence CTCN PAM
uuauuuacuucaugaugugg

SEQ ID NO: 11440 - RNA, 20 nt, Artificial Sequence
  HTT spacer sequence CTCN PAM
caccuguaaucucagcacuu

SEQ ID NO: 11441 - RNA, 20 nt, Artificial Sequence
  HTT spacer sequence CTCN PAM
gcacuuugggaggcugaggu

SEQ ID NO: 11442 - RNA, 20 nt, Artificial Sequence
  HTT spacer sequence CTCN PAM
caaagugcugagauuacagg

SEQ ID NO: 11443 - RNA, 20 nt, Artificial Sequence
  HTT spacer sequence CTCN PAM
gccucccaaagugcugagau

SEQ ID NO: 11444 - RNA, 20 nt, Artificial Sequence
  HTT spacer sequence CTCN PAM
caccucagccucccaaagug

SEQ ID NO: 11445 - RNA, 20 nt, Artificial Sequence
  HTT spacer sequence CTCN PAM
agugauccucccaccucagc

SEQ ID NO: 11446 - RNA, 20 nt, Artificial Sequence
  HTT spacer sequence CTCN PAM
ugaucucaagugauccuccc

SEQ ID NO: 11447 - RNA, 20 nt, Artificial Sequence
  HTT spacer sequence CTCN PAM
aacuccugaucucaagugau

SEQ ID NO: 11448 - RNA, 20 nt, Artificial Sequence
  HTT spacer sequence CTCN PAM
cgaacuccugaucucaagug

SEQ ID NO: 11449 - RNA, 20 nt, Artificial Sequence
  HTT spacer sequence CTCN PAM
gcuaaaaauacaaaacuuag

SEQ ID NO: 11450 - RNA, 20 nt, Artificial Sequence
  HTT spacer sequence CTCN PAM
ggaggcugaggaaggagaau

SEQ ID NO: 11451 - RNA, 20 nt, Artificial Sequence
  HTT spacer sequence CTCN PAM
ugaguagcuaggaccacagc

SEQ ID NO: 11452 - RNA, 20 nt, Artificial Sequence
  HTT spacer sequence CTCN PAM
gccuccugaguagcuaggac

SEQ ID NO: 11453 - RNA, 20 nt, Artificial Sequence
  HTT spacer sequence CTCN PAM
uuccucagccuccugaguag

SEQ ID NO: 11454 - RNA, 20 nt, Artificial Sequence
  HTT spacer sequence CTCN PAM
accuuccagguucaagcaau

SEQ ID NO: 11455 - RNA, 20 nt, Artificial Sequence
  HTT spacer sequence CTCN PAM
gaucacuacaaccuccaccu

SEQ ID NO: 11456 - RNA, 20 nt, Artificial Sequence
  HTT spacer sequence CTCN PAM
agccugggcgacagagugag

SEQ ID NO: 11457 - RNA, 20 nt, Artificial Sequence
  HTT spacer sequence CTCN PAM
gucgcccaggcuggagugca

SEQ ID NO: 11458 - RNA, 20 nt, Artificial Sequence
  HTT spacer sequence CTCN PAM
cucugucgcccaggcuggag

SEQ ID NO: 11459 - RNA, 20 nt, Artificial Sequence
  HTT spacer sequence CTCN PAM
aaaaauaaauaaauaaauaa

SEQ ID NO: 11460 - RNA, 20 nt, Artificial Sequence
  HTT spacer sequence CTCN PAM
ggcacacggcugaugcgaag

SEQ ID NO: 11461 - RNA, 20 nt, Artificial Sequence
  HTT spacer sequence CTCN PAM
cuggggaccauggucaggca

SEQ ID NO: 11462 - RNA, 20 nt, Artificial Sequence
  HTT spacer sequence CTCN PAM
gcauugcuuggguuccacuu

SEQ ID NO: 11463 - RNA, 20 nt, Artificial Sequence
  HTT spacer sequence CTCN PAM
gugguccgcaccggggugcu

SEQ ID NO: 11464 - RNA, 20 nt, Artificial Sequence
  HTT spacer sequence CTCN PAM
uuccuggcgccagggucugc

SEQ ID NO: 11465 - RNA, 20 nt, Artificial Sequence
  HTT spacer sequence CTCN PAM
ucccaccuggaauuguaaua

SEQ ID NO: 11466 - RNA, 20 nt, Artificial Sequence
  HTT spacer sequence CTCN PAM
caaggcauguuuuauuuaga

SEQ ID NO: 11467 - RNA, 20 nt, Artificial Sequence
  HTT spacer sequence CTCN PAM
gguauuagugcagaaagguc

SEQ ID NO: 11468 - RNA, 20 nt, Artificial Sequence
  HTT spacer sequence CTCN PAM
uggggcuuuuucuucaaucc

SEQ ID NO: 11469 - RNA, 20 nt, Artificial Sequence
  HTT spacer sequence CTCN PAM
gggguacucuuggggcuuuu

SEQ ID NO: 11470 - RNA, 20 nt, Artificial Sequence
  HTT spacer sequence CTCN PAM
cacccuagcaugcaaggcgc

SEQ ID NO: 11471 - RNA, 20 nt, Artificial Sequence
  HTT spacer sequence CTCN PAM
cugggugcagggaaagcucc

SEQ ID NO: 11472 - RNA, 20 nt, Artificial Sequence
  HTT spacer sequence CTCN PAM
cccugggugcagggaaagcu

SEQ ID NO: 11473 - RNA, 20 nt, Artificial Sequence
  HTT spacer sequence CTCN PAM
cgccacccccagacuugguc

SEQ ID NO: 11474 - RNA, 20 nt, Artificial Sequence
  HTT spacer sequence CTCN PAM
ccacucggccagagaugugg

SEQ ID NO: 11475 - RNA, 20 nt, Artificial Sequence
  HTT spacer sequence CTCN PAM
gccagagaugugguggucca

SEQ ID NO: 11476 - RNA, 20 nt, Artificial Sequence
  HTT spacer sequence CTCN PAM
ggccgaguggugagaccaag

SEQ ID NO: 11477 - RNA, 20 nt, Artificial Sequence
  HTT spacer sequence CTCN PAM
uccuggaccaccacaucucu

SEQ ID NO: 11478 - RNA, 20 nt, Artificial Sequence
  HTT spacer sequence CTCN PAM
cuuccuggaccaccacaucu

SEQ ID NO: 11479 - RNA, 20 nt, Artificial Sequence
  HTT spacer sequence CTCN PAM
cuuuccccagggcccgggug

SEQ ID NO: 11480 - RNA, 20 nt, Artificial Sequence
  HTT spacer sequence CTCN PAM
gacugucugacacccgggcc

SEQ ID NO: 11481 - RNA, 20 nt, Artificial Sequence
  HTT spacer sequence CTCN PAM
cgauggcugucccguugccu

SEQ ID NO: 11482 - RNA, 20 nt, Artificial Sequence
  HTT spacer sequence CTCN PAM
ccgagauuccuucgguuugu

SEQ ID NO: 11483 - RNA, 20 nt, Artificial Sequence
  HTT spacer sequence CTCN PAM
gugaggggcacaaggcaacg

SEQ ID NO: 11484 - RNA, 20 nt, Artificial Sequence
  HTT spacer sequence CTCN PAM
gagcauaucuaucugcccuu

SEQ ID NO: 11485 - RNA, 20 nt, Artificial Sequence
  HTT spacer sequence CTCN PAM
gagaaaaugaaaacuggcca

SEQ ID NO: 11486 - RNA, 20 nt, Artificial Sequence
  HTT spacer sequence CTCN PAM
ccaugacccugcagucaggg

SEQ ID NO: 11487 - RNA, 20 nt, Artificial Sequence
  HTT spacer sequence CTCN PAM
agcaggugcgcccggcaugc

SEQ ID NO: 11488 - RNA, 20 nt, Artificial Sequence
  HTT spacer sequence CTCN PAM
cacggugcaggcugucaccg

SEQ ID NO: 11489 - RNA, 20 nt, Artificial Sequence
  HTT spacer sequence CTCN PAM
ggggcccugacguggacucc

SEQ ID NO: 11490 - RNA, 20 nt, Artificial Sequence
  HTT spacer sequence CTCN PAM
cgggggcccugacguggacu

SEQ ID NO: 11491 - RNA, 20 nt, Artificial Sequence
  HTT spacer sequence CTCN PAM
ucccugacacaguaccggcc

SEQ ID NO: 11492 - RNA, 20 nt, Artificial Sequence
  HTT spacer sequence CTCN PAM
ucaucccugacacaguaccg

SEQ ID NO: 11493 - RNA, 20 nt, Artificial Sequence
  HTT spacer sequence CTCN PAM
ugggcuuuaguggcgcuuag

SEQ ID NO: 11494 - RNA, 20 nt, Artificial Sequence
  HTT spacer sequence CTCN PAM
uaagcgccacuaaagcccag

SEQ ID NO: 11495 - RNA, 20 nt, Artificial Sequence
  HTT spacer sequence CTCN PAM
caggcuccuaagcgccacua

SEQ ID NO: 11496 - RNA, 20 nt, Artificial Sequence
  HTT spacer sequence CTCN PAM
acgggaagcucccaggcucc

SEQ ID NO: 11497 - RNA, 20 nt, Artificial Sequence
  HTT spacer sequence CTCN PAM
gcuugugcaguuucagcgcc

SEQ ID NO: 11498 - RNA, 20 nt, Artificial Sequence
  HTT spacer sequence CTCN PAM
cagcuugugcaguuucagcg

SEQ ID NO: 11499 - RNA, 20 nt, Artificial Sequence
  HTT spacer sequence CTCN PAM
cagcagugcguggugccucu

SEQ ID NO: 11500 - RNA, 20 nt, Artificial Sequence
  HTT spacer sequence CTCN PAM
ucagcuggggugcucacccg

SEQ ID NO: 11501 - RNA, 20 nt, Artificial Sequence
  HTT spacer sequence CTCN PAM
cccgcggggagacguggcuu

SEQ ID NO: 11502 - RNA, 20 nt, Artificial Sequence
  HTT spacer sequence CTCN PAM
ccgcgggugagcaccccagc

SEQ ID NO: 11503 - RNA, 20 nt, Artificial Sequence
  HTT spacer sequence CTCN PAM
gcgggcuucagugccggucc

SEQ ID NO: 11504 - RNA, 20 nt, Artificial Sequence
  HTT spacer sequence CTCN PAM
aacgucgcccccugggaaau

SEQ ID NO: 11505 - RNA, 20 nt, Artificial Sequence
  HTT spacer sequence CTCN PAM
ccgcccagcuccaacgucgc

SEQ ID NO: 11506 - RNA, 20 nt, Artificial Sequence
  HTT spacer sequence CTCN PAM
uguucgcuccccgcccagcu

SEQ ID NO: 11507 - RNA, 20 nt, Artificial Sequence
  HTT spacer sequence CTCN PAM
cugucccuccuguucgcucc

SEQ ID NO: 11508 - RNA, 20 nt, Artificial Sequence
  HTT spacer sequence CTCN PAM
gcccucccugucccuccugu

SEQ ID NO: 11509 - RNA, 20 nt, Artificial Sequence
  HTT spacer sequence CTCN PAM
ggggccucagcccucccugu

SEQ ID NO: 11510 - RNA, 20 nt, Artificial Sequence
  HTT spacer sequence CTCN PAM
gcagggucagcucuggggcc

SEQ ID NO: 11511 - RNA, 20 nt, Artificial Sequence
  HTT spacer sequence CTCN PAM
cuggcggccuugaagcugcg

SEQ ID NO: 11512 - RNA, 20 nt, Artificial Sequence
  HTT spacer sequence CTCN PAM
aaggaucugggcgcagcuuc

SEQ ID NO: 11513 - RNA, 20 nt, Artificial Sequence
  HTT spacer sequence CTCN PAM
ccaugucaagugcugcccug

SEQ ID NO: 11514 - RNA, 20 nt, Artificial Sequence
  HTT spacer sequence CTCN PAM
cugaaccagcccucaccaug

SEQ ID NO: 11515 - RNA, 20 nt, Artificial Sequence
  HTT spacer sequence CTCN PAM
ucccugaaccagcccucacc

SEQ ID NO: 11516 - RNA, 20 nt, Artificial Sequence
  HTT spacer sequence CTCN PAM
gccccauccauucuccacug

SEQ ID NO: 11517 - RNA, 20 nt, Artificial Sequence
  HTT spacer sequence CTCN PAM
acugcugucagggcugccug

SEQ ID NO: 11518 - RNA, 20 nt, Artificial Sequence
  HTT spacer sequence CTCN PAM
aggcagcccugacagcagug

SEQ ID NO: 11519 - RNA, 20 nt, Artificial Sequence
  HTT spacer sequence CTCN PAM
gugcugccugcugcgugaga

SEQ ID NO: 11520 - RNA, 20 nt, Artificial Sequence
  HTT spacer sequence CTCN PAM
cgcagcaggcagcacagaga

SEQ ID NO: 11521 - RNA, 20 nt, Artificial Sequence
  HTT spacer sequence CTCN PAM
gugacuuugaaccagacagu

SEQ ID NO: 11522 - RNA, 20 nt, Artificial Sequence
  HTT spacer sequence CTCN PAM
cgcgcgcagcuguccgaugu

SEQ ID NO: 11523 - RNA, 20 nt, Artificial Sequence
  HTT spacer sequence CTCN PAM
cccgcgcgcagcuguccgau

SEQ ID NO: 11524 - RNA, 20 nt, Artificial Sequence
  HTT spacer sequence CTCN PAM
ggcacugugguuccucuccc

SEQ ID NO: 11525 - RNA, 20 nt, Artificial Sequence
  HTT spacer sequence CTCN PAM
cugggccgcuuucacaagag

SEQ ID NO: 11526 - RNA, 20 nt, Artificial Sequence
  HTT spacer sequence CTCN PAM
ugugaaagcggcccagggag

SEQ ID NO: 11527 - RNA, 20 nt, Artificial Sequence
  HTT spacer sequence CTCN PAM
ugcugcucuugugaaagcgg

SEQ ID NO: 11528 - RNA, 20 nt, Artificial Sequence
  HTT spacer sequence CTCN PAM
agcaggggcacuggggcccg

SEQ ID NO: 11529 - RNA, 20 nt, Artificial Sequence
  HTT spacer sequence CTCN PAM
caggacgggccccagugccc

SEQ ID NO: 11530 - RNA, 20 nt, Artificial Sequence
  HTT spacer sequence CTCN PAM
uggugacauccccgcuggug

SEQ ID NO: 11531 - RNA, 20 nt, Artificial Sequence
  HTT spacer sequence CTCN PAM
caaccucauggugacauccc

SEQ ID NO: 11532 - RNA, 20 nt, Artificial Sequence
  HTT spacer sequence CTCN PAM
uacaaagaaggcucccaacc

SEQ ID NO: 11533 - RNA, 20 nt, Artificial Sequence
  HTT spacer sequence CTCN PAM
aagauaacguccccuucccc

SEQ ID NO: 11534 - RNA, 20 nt, Artificial Sequence
  HTT spacer sequence CTCN PAM
aucagaagaaaagcaaagcu

SEQ ID NO: 11535 - RNA, 20 nt, Artificial Sequence
  HTT spacer sequence CTCN PAM
uuaaagaguaaggcuuuuug

SEQ ID NO: 11536 - RNA, 20 nt, Artificial Sequence
  HTT spacer sequence CTCN PAM
uuaaugaguuuugccucaau

SEQ ID NO: 11537 - RNA, 20 nt, Artificial Sequence
  HTT spacer sequence CTCN PAM
ggaccccucuccucugugcc

SEQ ID NO: 11538 - RNA, 20 nt, Artificial Sequence
  HTT spacer sequence CTCN PAM
ccucugugccucacuguccu

SEQ ID NO: 11539 - RNA, 20 nt, Artificial Sequence
  HTT spacer sequence CTCN PAM
ucugugccucacuguccuca

SEQ ID NO: 11540 - RNA, 20 nt, Artificial Sequence
  HTT spacer sequence CTCN PAM
gugccucacuguccucagcu

SEQ ID NO: 11541 - RNA, 20 nt, Artificial Sequence
  HTT spacer sequence CTCN PAM
cuguccucagcugcagaaug

SEQ ID NO: 11542 - RNA, 20 nt, Artificial Sequence
  HTT spacer sequence CTCN PAM
gcugcagaaugaagauggca

SEQ ID NO: 11543 - RNA, 20 nt, Artificial Sequence
  HTT spacer sequence CTCN PAM
ugccaucuucauucugcagc

SEQ ID NO: 11544 - RNA, 20 nt, Artificial Sequence
  HTT spacer sequence CTCN PAM
gcaucccgggggcaccaacu

SEQ ID NO: 11545 - RNA, 20 nt, Artificial Sequence
  HTT spacer sequence CTCN PAM
cagcaucccgggggcaccaa

SEQ ID NO: 11546 - RNA, 20 nt, Artificial Sequence
  HTT spacer sequence CTCN PAM
gaaaccugcucucagcaucc

SEQ ID NO: 11547 - RNA, 20 nt, Artificial Sequence
  HTT spacer sequence CTCN PAM
uugcagaaaauacaggaaaa

SEQ ID NO: 11548 - RNA, 20 nt, Artificial Sequence
  HTT spacer sequence CTCN PAM
gacucuuuccaggaguucuu

SEQ ID NO: 11549 - RNA, 20 nt, Artificial Sequence
  HTT spacer sequence CTCN PAM
uuccaggaguucuuccauca

SEQ ID NO: 11550 - RNA, 20 nt, Artificial Sequence
  HTT spacer sequence CTCN PAM
uggaaagagucagaguggaa

SEQ ID NO: 11551 - RNA, 20 nt, Artificial Sequence
  HTT spacer sequence CTCN PAM
gcugggggcuggggaccugg

SEQ ID NO: 11552 - RNA, 20 nt, Artificial Sequence
  HTT spacer sequence CTCN PAM
gcccagccagguccccagcc

SEQ ID NO: 11553 - RNA, 20 nt, Artificial Sequence
  HTT spacer sequence CTCN PAM
guaaaggccugccucgcgca

SEQ ID NO: 11554 - RNA, 20 nt, Artificial Sequence
  HTT spacer sequence CTCN PAM
cgcagguguugaaguuuagg

SEQ ID NO: 11555 - RNA, 20 nt, Artificial Sequence
  HTT spacer sequence CTCN PAM
gacaggcaggugucccuaaa

SEQ ID NO: 11556 - RNA, 20 nt, Artificial Sequence
  HTT spacer sequence CTCN PAM
uguucaaaugccucugacag

SEQ ID NO: 11557 - RNA, 20 nt, Artificial Sequence
  HTT spacer sequence CTCN PAM
aucuugaaugggggcugggu

SEQ ID NO: 11558 - RNA, 20 nt, Artificial Sequence
  HTT spacer sequence CTCN PAM
uuuuacccagcccccauuca

SEQ ID NO: 11559 - RNA, 20 nt, Artificial Sequence
  HTT spacer sequence CTCN PAM
ggcucauuuuacccagcccc

SEQ ID NO: 11560 - RNA, 20 nt, Artificial Sequence
  HTT spacer sequence CTCN PAM
ugggaaugcggcccagcagg

SEQ ID NO: 11561 - RNA, 20 nt, Artificial Sequence
  HTT spacer sequence CTCN PAM
uccuguaacuaagaaugccu

SEQ ID NO: 11562 - RNA, 20 nt, Artificial Sequence
  HTT spacer sequence CTCN PAM
uaucucauccuguaacuaag

SEQ ID NO: 11563 - RNA, 20 nt, Artificial Sequence
  HTT spacer sequence CTCN PAM
uugggaccuguauuuugugc

SEQ ID NO: 11564 - RNA, 20 nt, Artificial Sequence
  HTT spacer sequence CTCN PAM
ggcuucuuuaaaacagucug

SEQ ID NO: 11565 - RNA, 20 nt, Artificial Sequence
  HTT spacer sequence CTCN PAM
ugccuguaaucccagcacuu

SEQ ID NO: 11566 - RNA, 20 nt, Artificial Sequence
  HTT spacer sequence CTCN PAM
caaagugcugggauuacagg

SEQ ID NO: 11567 - RNA, 20 nt, Artificial Sequence
  HTT spacer sequence CTCN PAM
gccucccaaagugcugggau

SEQ ID NO: 11568 - RNA, 20 nt, Artificial Sequence
  HTT spacer sequence CTCN PAM
agugauccaccugccucggc

SEQ ID NO: 11569 - RNA, 20 nt, Artificial Sequence
  HTT spacer sequence CTCN PAM
uggccucaagugauccaccu

SEQ ID NO: 11570 - RNA, 20 nt, Artificial Sequence
  HTT spacer sequence CTCN PAM
aacuccuggccucaagugau

SEQ ID NO: 11571 - RNA, 20 nt, Artificial Sequence
  HTT spacer sequence CTCN PAM
aauacaaaaauuagccaggu

SEQ ID NO: 11572 - RNA, 20 nt, Artificial Sequence
  HTT spacer sequence CTCN PAM
ggaggcugaggcaggagaau

SEQ ID NO: 11573 - RNA, 20 nt, Artificial Sequence
  HTT spacer sequence CTCN PAM
cgaguagcugggaccacagg

SEQ ID NO: 11574 - RNA, 20 nt, Artificial Sequence
  HTT spacer sequence CTCN PAM
gccucccgaguagcugggac

SEQ ID NO: 11575 - RNA, 20 nt, Artificial Sequence
  HTT spacer sequence CTCN PAM
ugccucagccucccgaguag

SEQ ID NO: 11576 - RNA, 20 nt, Artificial Sequence
  HTT spacer sequence CTCN PAM
ugaacccaggagucagaggc

SEQ ID NO: 11577 - RNA, 20 nt, Artificial Sequence
  HTT spacer sequence CTCN PAM
uggguucaagagauucuccu

SEQ ID NO: 11578 - RNA, 20 nt, Artificial Sequence
  HTT spacer sequence CTCN PAM
gacuccuggguucaagagau

SEQ ID NO: 11579 - RNA, 20 nt, Artificial Sequence
  HTT spacer sequence CTCN PAM
cugcagccucugacuccugg

SEQ ID NO: 11580 - RNA, 20 nt, Artificial Sequence
  HTT spacer sequence CTCN PAM
gcucacugcagccucugacu

SEQ ID NO: 11581 - RNA, 20 nt, Artificial Sequence
  HTT spacer sequence CTCN PAM
guugcccaggucucggcuca

SEQ ID NO: 11582 - RNA, 20 nt, Artificial Sequence
  HTT spacer sequence CTCN PAM
aaaaaaauaauaaaauaaag

SEQ ID NO: 11583 - RNA, 20 nt, Artificial Sequence
  HTT spacer sequence CTCN PAM
ucgccaucuugguuuuggug

SEQ ID NO: 11584 - RNA, 20 nt, Artificial Sequence
  HTT spacer sequence CTCN PAM
caucgccaucuugguuuugg

SEQ ID NO: 11585 - RNA, 20 nt, Artificial Sequence
  HTT spacer sequence CTCN PAM
ggucauccucacagcucauu

SEQ ID NO: 11586 - RNA, 20 nt, Artificial Sequence
  HTT spacer sequence CTCN PAM
cagcucauuacaugcuaauu

SEQ ID NO: 11587 - RNA, 20 nt, Artificial Sequence
  HTT spacer sequence CTCN PAM
uuacaugcuaauuauaaugc

SEQ ID NO: 11588 - RNA, 20 nt, Artificial Sequence
  HTT spacer sequence CTCN PAM
caucagcgccaugacaguuu

SEQ ID NO: 11589 - RNA, 20 nt, Artificial Sequence
  HTT spacer sequence CTCN PAM
uuuuagaacauacaggguag

SEQ ID NO: 11590 - RNA, 20 nt, Artificial Sequence
  HTT spacer sequence CTCN PAM
ucuuuuuagaacauacaggg

SEQ ID NO: 11591 - RNA, 20 nt, Artificial Sequence
  HTT spacer sequence CTCN PAM
caguucugggaaucgcccac

SEQ ID NO: 11592 - RNA, 20 nt, Artificial Sequence
  HTT spacer sequence CTCN PAM
guucugggaaucgcccaccc

SEQ ID NO: 11593 - RNA, 20 nt, Artificial Sequence
  HTT spacer sequence CTCN PAM
ugaauaauccaccccuuguu

SEQ ID NO: 11594 - RNA, 20 nt, Artificial Sequence
  HTT spacer sequence CTCN PAM
aggcugcucugccuacggag

SEQ ID NO: 11595 - RNA, 20 nt, Artificial Sequence
  HTT spacer sequence CTCN PAM
gccuacggaguagccauucu

SEQ ID NO: 11596 - RNA, 20 nt, Artificial Sequence
  HTT spacer sequence CTCN PAM
guaggcagagcagccuagag

SEQ ID NO: 11597 - RNA, 20 nt, Artificial Sequence
  HTT spacer sequence CTCN PAM
aauuguuuccugagcgagau

SEQ ID NO: 11598 - RNA, 20 nt, Artificial Sequence
  HTT spacer sequence CTCN PAM
ggaaacaauucgaggcuaau

SEQ ID NO: 11599 - RNA, 20 nt, Artificial Sequence
  HTT spacer sequence CTCN PAM
cucaggaaacaauucgaggc

SEQ ID NO: 11600 - RNA, 20 nt, Artificial Sequence
  HTT spacer sequence CTCN PAM
uuuggggucuggaucgggac

SEQ ID NO: 11601 - RNA, 20 nt, Artificial Sequence
  HTT spacer sequence CTCN PAM
cuccaucuugccugcugagg

SEQ ID NO: 11602 - RNA, 20 nt, Artificial Sequence
  HTT spacer sequence CTCN PAM
aucuugccugcugaggagga

SEQ ID NO: 11603 - RNA, 20 nt, Artificial Sequence
  HTT spacer sequence CTCN PAM
gcaggcaagauggagggagu

SEQ ID NO: 11604 - RNA, 20 nt, Artificial Sequence
  HTT spacer sequence CTCN PAM
ucagcaggcaagauggaggg

SEQ ID NO: 11605 - RNA, 20 nt, Artificial Sequence
  HTT spacer sequence CTCN PAM
ggcccugggcccugcaaccc

SEQ ID NO: 11606 - RNA, 20 nt, Artificial Sequence
  HTT spacer sequence CTCN PAM
gacuagcuuaagcaaaaaaa

SEQ ID NO: 11607 - RNA, 20 nt, Artificial Sequence
  HTT spacer sequence CTCN PAM
gucaaagcuuucacuugggc

SEQ ID NO: 11608 - RNA, 20 nt, Artificial Sequence
  HTT spacer sequence CTCN PAM
cagucaaagcuuucacuugg

SEQ ID NO: 11609 - RNA, 20 nt, Artificial Sequence
  HTT spacer sequence CTCN PAM
uuuuucucuuucuguuuaua

SEQ ID NO: 11610 - RNA, 20 nt, Artificial Sequence
  HTT spacer sequence CTCN PAM
uucuguuuauaagcaagcau

SEQ ID NO: 11611 - RNA, 20 nt, Artificial Sequence
  HTT spacer sequence CTCN PAM
ucaauacauacaugcuugcu

SEQ ID NO: 11612 - RNA, 20 nt, Artificial Sequence
  HTT spacer sequence CTCN PAM
cuguggcagcauauacacua

SEQ ID NO: 11613 - RNA, 20 nt, Artificial Sequence
  HTT spacer sequence CTCN PAM
guaucauuccaguuuuagug

SEQ ID NO: 11614 - RNA, 20 nt, Artificial Sequence
  HTT spacer sequence CTCN PAM
ucuuuaauauuagcugcugu

SEQ ID NO: 11615 - RNA, 20 nt, Artificial Sequence
  HTT spacer sequence CTCN PAM
aaaaaaacauuaaaaauuua

SEQ ID NO: 11616 - RNA, 20 nt, Artificial Sequence
  HTT spacer sequence CTCN PAM
caaaaaaaacauuaaaaauu

SEQ ID NO: 11617 - RNA, 20 nt, Artificial Sequence
  HTT spacer sequence CTCN PAM
cucuguugcccaggcuggag

SEQ ID NO: 11618 - RNA, 20 nt, Artificial Sequence
  HTT spacer sequence CTCN PAM
guugcccaggcuggagugcg

SEQ ID NO: 11619 - RNA, 20 nt, Artificial Sequence
  HTT spacer sequence CTCN PAM
agccugggcaacagagcgag

SEQ ID NO: 11620 - RNA, 20 nt, Artificial Sequence
  HTT spacer sequence CTCN PAM
gcucacugcaaccugcauuc

SEQ ID NO: 11621 - RNA, 20 nt, Artificial Sequence
  HTT spacer sequence CTCN PAM
cugcaaccugcauucaagug

SEQ ID NO: 11622 - RNA, 20 nt, Artificial Sequence
  HTT spacer sequence CTCN PAM
ugccucagcuucccggauag

SEQ ID NO: 11623 - RNA, 20 nt, Artificial Sequence
  HTT spacer sequence CTCN PAM
gcuucccggauagcugggau

SEQ ID NO: 11624 - RNA, 20 nt, Artificial Sequence
  HTT spacer sequence CTCN PAM
aaccccuggccuuaaguaau

SEQ ID NO: 11625 - RNA, 20 nt, Artificial Sequence
  HTT spacer sequence CTCN PAM
gccucccaaaggauuacagg

SEQ ID NO: 11626 - RNA, 20 nt, Artificial Sequence
  HTT spacer sequence CTCN PAM
caaaggauuacaggugugag

SEQ ID NO: 11627 - RNA, 20 nt, Artificial Sequence
  HTT spacer sequence CTCN PAM
caccuguaauccuuugggag

SEQ ID NO: 11628 - RNA, 20 nt, Artificial Sequence
  HTT spacer sequence CTCN PAM
uggcauauauuuccccaaau

SEQ ID NO: 11629 - RNA, 20 nt, Artificial Sequence
  HTT spacer sequence CTCN PAM
uuaacauacaaaaaagacau

SEQ ID NO: 11630 - RNA, 20 nt, Artificial Sequence
  HTT spacer sequence CTCN PAM
uagacagcuucaagauagga

SEQ ID NO: 11631 - RNA, 20 nt, Artificial Sequence
  HTT spacer sequence CTCN PAM
uaucuugaagcugucuagga

SEQ ID NO: 11632 - RNA, 20 nt, Artificial Sequence
  HTT spacer sequence CTCN PAM
gcccuacucuugcccucugg

SEQ ID NO: 11633 - RNA, 20 nt, Artificial Sequence
  HTT spacer sequence CTCN PAM
ugcccucugggaagggagag

SEQ ID NO: 11634 - RNA, 20 nt, Artificial Sequence
  HTT spacer sequence CTCN PAM
gggaagggagaggggcugau

SEQ ID NO: 11635 - RNA, 20 nt, Artificial Sequence
  HTT spacer sequence CTCN PAM
cuucccagagggcaagagua

SEQ ID NO: 11636 - RNA, 20 nt, Artificial Sequence
  HTT spacer sequence CTCN PAM
cccuucccagagggcaagag

SEQ ID NO: 11637 - RNA, 20 nt, Artificial Sequence
  HTT spacer sequence CTCN PAM
accaucagccccucucccuu

SEQ ID NO: 11638 - RNA, 20 nt, Artificial Sequence
  HTT spacer sequence CTCN PAM
auaaaaacccaagaggacag

SEQ ID NO: 11639 - RNA, 20 nt, Artificial Sequence
  HTT spacer sequence CTCN PAM
uggguuuuuauggaggcuuc

SEQ ID NO: 11640 - RNA, 20 nt, Artificial Sequence
  HTT spacer sequence CTCN PAM
gaacccuguccucuuggguu

SEQ ID NO: 11641 - RNA, 20 nt, Artificial Sequence
  HTT spacer sequence CTCN PAM
cugaacccuguccucuuggg

SEQ ID NO: 11642 - RNA, 20 nt, Artificial Sequence
  HTT spacer sequence CTCN PAM
acguuacccggaagcucucu

SEQ ID NO: 11643 - RNA, 20 nt, Artificial Sequence
  HTT spacer sequence CTCN PAM
agaaaccuccacguuacccg

SEQ ID NO: 11644 - RNA, 20 nt, Artificial Sequence
  HTT spacer sequence CTCN PAM
cuucuacggggacagaagcu

SEQ ID NO: 11645 - RNA, 20 nt, Artificial Sequence
  HTT spacer sequence CTCN PAM
ugugcuugggacccuuccag

SEQ ID NO: 11646 - RNA, 20 nt, Artificial Sequence
  HTT spacer sequence CTCN PAM
cuaugcaucuucucaucugg

SEQ ID NO: 11647 - RNA, 20 nt, Artificial Sequence
  HTT spacer sequence CTCN PAM
ucuggcuguucaucuguauc

SEQ ID NO: 11648 - RNA, 20 nt, Artificial Sequence
  HTT spacer sequence CTCN PAM
gaguucuguaugcugaucua

SEQ ID NO: 11649 - RNA, 20 nt, Artificial Sequence
  HTT spacer sequence CTCN PAM
gagaaacacauuuccugguu

SEQ ID NO: 11650 - RNA, 20 nt, Artificial Sequence
  HTT spacer sequence CTCN PAM
uuggguucaauuaauuugcu

SEQ ID NO: 11651 - RNA, 20 nt, Artificial Sequence
  HTT spacer sequence CTCN PAM
guucccacaagacugaaccc

SEQ ID NO: 11652 - RNA, 20 nt, Artificial Sequence
  HTT spacer sequence CTCN PAM
aucuguguggucaggcgcug

SEQ ID NO: 11653 - RNA, 20 nt, Artificial Sequence
  HTT spacer sequence CTCN PAM
uucaagucugacggcaucua

SEQ ID NO: 11654 - RNA, 20 nt, Artificial Sequence
  HTT spacer sequence CTCN PAM
cauucaagucugacggcauc

SEQ ID NO: 11655 - RNA, 20 nt, Artificial Sequence
  HTT spacer sequence CTCN PAM
ccacccacaagcaagcaauc

SEQ ID NO: 11656 - RNA, 20 nt, Artificial Sequence
  HTT spacer sequence CTCN PAM
agaaucaacacagaauacuu

SEQ ID NO: 11657 - RNA, 20 nt, Artificial Sequence
  HTT spacer sequence CTCN PAM
cucaagaaucaacacagaau

SEQ ID NO: 11658 - RNA, 20 nt, Artificial Sequence
  HTT spacer sequence CTCN PAM
cacucaagaaucaacacaga

SEQ ID NO: 11659 - RNA, 20 nt, Artificial Sequence
  HTT spacer sequence CTCN PAM
ggguggcugaauauacauau

SEQ ID NO: 11660 - RNA, 20 nt, Artificial Sequence
  HTT spacer sequence CTCN PAM
uacagcguauuccauaugua

SEQ ID NO: 11661 - RNA, 20 nt, Artificial Sequence
  HTT spacer sequence CTCN PAM
uccuacagcguauuccauau

SEQ ID NO: 11662 - RNA, 20 nt, Artificial Sequence
  HTT spacer sequence CTCN PAM
cagauauucauaacuccucc

SEQ ID NO: 11663 - RNA, 20 nt, Artificial Sequence
  HTT spacer sequence CTCN PAM
ccucacagauauucauaacu

SEQ ID NO: 11664 - RNA, 20 nt, Artificial Sequence
  HTT spacer sequence CTCN PAM
ucaugggucacguguucaaa

SEQ ID NO: 11665 - RNA, 20 nt, Artificial Sequence
  HTT spacer sequence CTCN PAM
gaucacgcuaaccccaacau

SEQ ID NO: 11666 - RNA, 20 nt, Artificial Sequence
  HTT spacer sequence CTCN PAM
cucugacgucaaaaggugaa

SEQ ID NO: 11667 - RNA, 20 nt, Artificial Sequence
  HTT spacer sequence CTCN PAM
gacgucaaaaggugaagcag

SEQ ID NO: 11668 - RNA, 20 nt, Artificial Sequence
  HTT spacer sequence CTCN PAM
gcuucaccuuuugacgucag

SEQ ID NO: 11669 - RNA, 20 nt, Artificial Sequence
  HTT spacer sequence CTCN PAM
uguccucugcuucaccuuuu

SEQ ID NO: 11670 - RNA, 20 nt, Artificial Sequence
  HTT spacer sequence CTCN PAM
cugcaccgccucuggagacg

SEQ ID NO: 11671 - RNA, 20 nt, Artificial Sequence
  HTT spacer sequence CTCN PAM
ggagacggccacggccacug

SEQ ID NO: 11672 - RNA, 20 nt, Artificial Sequence
  HTT spacer sequence CTCN PAM
agaggcggugcagugagggu

SEQ ID NO: 11673 - RNA, 20 nt, Artificial Sequence
  HTT spacer sequence CTCN PAM
guggucucuuaccaggaagg

SEQ ID NO: 11674 - RNA, 20 nt, Artificial Sequence
  HTT spacer sequence CTCN PAM
uaccaggaagggaagcauug

SEQ ID NO: 11675 - RNA, 20 nt, Artificial Sequence
  HTT spacer sequence CTCN PAM
gaugauuggcuaaaggcaau

SEQ ID NO: 11676 - RNA, 20 nt, Artificial Sequence
  HTT spacer sequence CTCN PAM
ucuauugccuuuagccaauc

SEQ ID NO: 11677 - RNA, 20 nt, Artificial Sequence
  HTT spacer sequence CTCN PAM
cucuucuauugccuuuagcc

SEQ ID NO: 11678 - RNA, 20 nt, Artificial Sequence
  HTT spacer sequence CTCN PAM
agaaaaaaagaacagacauc

SEQ ID NO: 11679 - RNA, 20 nt, Artificial Sequence
  HTT spacer sequence CTCN PAM
gugugccccuuccuuaauac

SEQ ID NO: 11680 - RNA, 20 nt, Artificial Sequence
  HTT spacer sequence CTCN PAM
ccucagugugccccuuccuu

SEQ ID NO: 11681 - RNA, 20 nt, Artificial Sequence
  HTT spacer sequence CTCN PAM
guuuuuaagguuucucugag

SEQ ID NO: 11682 - RNA, 20 nt, Artificial Sequence
  HTT spacer sequence CTCN PAM
gaggucuccucgaccaagaa

SEQ ID NO: 11683 - RNA, 20 nt, Artificial Sequence
  HTT spacer sequence CTCN PAM
gagaaaccuuaaaaacugag

SEQ ID NO: 11684 - RNA, 20 nt, Artificial Sequence
  HTT spacer sequence CTCN PAM
ucgaccaagaagcgguccgc

SEQ ID NO: 11685 - RNA, 20 nt, Artificial Sequence
  HTT spacer sequence CTCN PAM
accaagaagcgguccgcuca

SEQ ID NO: 11686 - RNA, 20 nt, Artificial Sequence
  HTT spacer sequence CTCN PAM
guuggcagggguuuuaggau

SEQ ID NO: 11687 - RNA, 20 nt, Artificial Sequence
  HTT spacer sequence CTCN PAM
agggagcaguaaacaucaca

SEQ ID NO: 11688 - RNA, 20 nt, Artificial Sequence
  HTT spacer sequence CTCN PAM
cuugagguacauaagaaaau

SEQ ID NO: 11689 - RNA, 20 nt, Artificial Sequence
  HTT spacer sequence CTCN PAM
aaacaguguuugaacauuuu

SEQ ID NO: 11690 - RNA, 20 nt, Artificial Sequence
  HTT spacer sequence CTCN PAM
guuaaaugaaaaacuucagc

SEQ ID NO: 11691 - RNA, 20 nt, Artificial Sequence
  HTT spacer sequence CTCN PAM
uuuaaauuuaauuuggcuga

SEQ ID NO: 11692 - RNA, 20 nt, Artificial Sequence
  HTT spacer sequence CTCN PAM
auuaaacucauuuaaauuua

SEQ ID NO: 11693 - RNA, 20 nt, Artificial Sequence
  HTT spacer sequence CTCN PAM
gaaucugcugugauucuggg

SEQ ID NO: 11694 - RNA, 20 nt, Artificial Sequence
  HTT spacer sequence CTCN PAM
agggauaccucguggucaga

SEQ ID NO: 11695 - RNA, 20 nt, Artificial Sequence
  HTT spacer sequence CTCN PAM
uggucagaacaaaucuauag

SEQ ID NO: 11696 - RNA, 20 nt, Artificial Sequence
  HTT spacer sequence CTCN PAM
aauuucuauaugucacuucc

SEQ ID NO: 11697 - RNA, 20 nt, Artificial Sequence
  HTT spacer sequence CTCN PAM
ccuccaauuucuauauguca

SEQ ID NO: 11698 - RNA, 20 nt, Artificial Sequence
  HTT spacer sequence CTCN PAM
gcauuugccuuauuuggaca

SEQ ID NO: 11699 - RNA, 20 nt, Artificial Sequence
  HTT spacer sequence CTCN PAM
cagcaguguacgagugaagu

SEQ ID NO: 11700 - RNA, 20 nt, Artificial Sequence
  HTT spacer sequence CTCN PAM
gcaguguacgagugaaguac

SEQ ID NO: 11701 - RNA, 20 nt, Artificial Sequence
  HTT spacer sequence CTCN PAM
uacacugcugagaguucaaa

SEQ ID NO: 11702 - RNA, 20 nt, Artificial Sequence
  HTT spacer sequence CTCN PAM
gguacugccacaggugcaga

SEQ ID NO: 11703 - RNA, 20 nt, Artificial Sequence
  HTT spacer sequence CTCN PAM
caagugaggaugucaggguu

SEQ ID NO: 11704 - RNA, 20 nt, Artificial Sequence
  HTT spacer sequence CTCN PAM
cuugggagucugcaccugug

SEQ ID NO: 11705 - RNA, 20 nt, Artificial Sequence
  HTT spacer sequence CTCN PAM
aauagagaaguauggagucc

SEQ ID NO: 11706 - RNA, 20 nt, Artificial Sequence
  HTT spacer sequence CTCN PAM
auuugaguccuuguggacga

SEQ ID NO: 11707 - RNA, 20 nt, Artificial Sequence
  HTT spacer sequence CTCN PAM
auacuucucuauuugagucc

SEQ ID NO: 11708 - RNA, 20 nt, Artificial Sequence
  HTT spacer sequence CTCN PAM
ggccauauuuaguuugcuuu

SEQ ID NO: 11709 - RNA, 20 nt, Artificial Sequence
  HTT spacer sequence CTCN PAM
auuuugagagauugaccaaa

SEQ ID NO: 11710 - RNA, 20 nt, Artificial Sequence
  HTT spacer sequence CTCN PAM
aaauugagaaaaugaccaaa

SEQ ID NO: 11711 - RNA, 20 nt, Artificial Sequence
  HTT spacer sequence CTCN PAM
caaaauugagaaaaugacca

SEQ ID NO: 11712 - RNA, 20 nt, Artificial Sequence
  HTT spacer sequence CTCN PAM
gagaaacaguagaacaguga

SEQ ID NO: 11713 - RNA, 20 nt, Artificial Sequence
  HTT spacer sequence CTCN PAM
gaggguuucaggaccaaaua

SEQ ID NO: 11714 - RNA, 20 nt, Artificial Sequence
  HTT spacer sequence CTCN PAM
cuguucuacuguuucucaga

SEQ ID NO: 11715 - RNA, 20 nt, Artificial Sequence
  HTT spacer sequence CTCN PAM
guccuuguuccuaccuuugc

SEQ ID NO: 11716 - RNA, 20 nt, Artificial Sequence
  HTT spacer sequence CTCN PAM
uuaugcuggaacguccuguu

SEQ ID NO: 11717 - RNA, 20 nt, Artificial Sequence
  HTT spacer sequence CTCN PAM
ugcuaaaugugacauaauca

SEQ ID NO: 11718 - RNA, 20 nt, Artificial Sequence
  HTT spacer sequence CTCN PAM
auuuuuguuuggcuuagucu

SEQ ID NO: 11719 - RNA, 20 nt, Artificial Sequence
  HTT spacer sequence CTCN PAM
ugcacuaugucccaacagac

SEQ ID NO: 11720 - RNA, 20 nt, Artificial Sequence
  HTT spacer sequence CTCN PAM
guccaaaacaauggccuccc

SEQ ID NO: 11721 - RNA, 20 nt, Artificial Sequence
  HTT spacer sequence CTCN PAM
cauaauuuuauuuuaauaaa

SEQ ID NO: 11722 - RNA, 20 nt, Artificial Sequence
  HTT spacer sequence CTCN PAM
cuuaggugagugugggcggc

SEQ ID NO: 11723 - RNA, 20 nt, Artificial Sequence
  HTT spacer sequence CTCN PAM
ccuaagugagaaccuggaca

SEQ ID NO: 11724 - RNA, 20 nt, Artificial Sequence
  HTT spacer sequence CTCN PAM
gggucuugccuuggcagcug

SEQ ID NO: 11725 - RNA, 20 nt, Artificial Sequence
  HTT spacer sequence CTCN PAM
caaagugcugggauuauagg

SEQ ID NO: 11726 - RNA, 20 nt, Artificial Sequence
  HTT spacer sequence CTCN PAM
gccucccaaagugcugggau

SEQ ID NO: 11727 - RNA, 20 nt, Artificial Sequence
  HTT spacer sequence CTCN PAM
ugaucugcccaccucggccu

SEQ ID NO: 11728 - RNA, 20 nt, Artificial Sequence
  HTT spacer sequence CTCN PAM
ugaccucaugaucugcccac

SEQ ID NO: 11729 - RNA, 20 nt, Artificial Sequence
  HTT spacer sequence CTCN PAM
aucuccugaccucaugaucu

SEQ ID NO: 11730 - RNA, 20 nt, Artificial Sequence
  HTT spacer sequence CTCN PAM
acuaaaaauacaaaaaauua

SEQ ID NO: 11731 - RNA, 20 nt, Artificial Sequence
  HTT spacer sequence CTCN PAM
ggaggcugaggcaggagaau

SEQ ID NO: 11732 - RNA, 20 nt, Artificial Sequence
  HTT spacer sequence CTCN PAM
cgaguagcugggacuacagg

SEQ ID NO: 11733 - RNA, 20 nt, Artificial Sequence
  HTT spacer sequence CTCN PAM
gccucccgaguagcugggac

SEQ ID NO: 11734 - RNA, 20 nt, Artificial Sequence
  HTT spacer sequence CTCN PAM
ugccucagccucccgaguag

SEQ ID NO: 11735 - RNA, 20 nt, Artificial Sequence
  HTT spacer sequence CTCN PAM
cggguucaugccauucuccu

SEQ ID NO: 11736 - RNA, 20 nt, Artificial Sequence
  HTT spacer sequence CTCN PAM
gccucccggguucaugccau

SEQ ID NO: 11737 - RNA, 20 nt, Artificial Sequence
  HTT spacer sequence CTCN PAM
cugcaagcuccgccucccgg

SEQ ID NO: 11738 - RNA, 20 nt, Artificial Sequence
  HTT spacer sequence CTCN PAM
gcucacugcaagcuccgccu

SEQ ID NO: 11739 - RNA, 20 nt, Artificial Sequence
  HTT spacer sequence CTCN PAM
agccugggugacagagcgag

SEQ ID NO: 11740 - RNA, 20 nt, Artificial Sequence
  HTT spacer sequence CTCN PAM
gucacccaggcuggagggca

SEQ ID NO: 11741 - RNA, 20 nt, Artificial Sequence
  HTT spacer sequence CTCN PAM
cucugucacccaggcuggag

SEQ ID NO: 11742 - RNA, 20 nt, Artificial Sequence
  HTT spacer sequence CTCN PAM
gucucaaaaaacaaaaacaa

SEQ ID NO: 11743 - RNA, 20 nt, Artificial Sequence
  HTT spacer sequence CTCN PAM
aaaaacaaaaacaaaaacaa

SEQ ID NO: 11744 - RNA, 20 nt, Artificial Sequence
  HTT spacer sequence CTCN PAM
auuccaauauuauaauaauc

SEQ ID NO: 11745 - RNA, 20 nt, Artificial Sequence
  HTT spacer sequence CTCN PAM
guauggccugguuuuuccua

SEQ ID NO: 11746 - RNA, 20 nt, Artificial Sequence
  HTT spacer sequence CTCN PAM
uaucucuguauggccugguu

SEQ ID NO: 11747 - RNA, 20 nt, Artificial Sequence
  HTT spacer sequence CTCN PAM
cccugucccuucagcuccua

SEQ ID NO: 11748 - RNA, 20 nt, Artificial Sequence
  HTT spacer sequence CTCN PAM
ucuucuggucacuucucacc

SEQ ID NO: 11749 - RNA, 20 nt, Artificial Sequence
  HTT spacer sequence CTCN PAM
cacucgucuucuggucacuu

SEQ ID NO: 11750 - RNA, 20 nt, Artificial Sequence
  HTT spacer sequence CTCN PAM
gucacgcucagacagggcca

SEQ ID NO: 11751 - RNA, 20 nt, Artificial Sequence
  HTT spacer sequence CTCN PAM
gacagggccacuagagggcu

SEQ ID NO: 11752 - RNA, 20 nt, Artificial Sequence
  HTT spacer sequence CTCN PAM
aguggcccugucugagcgug

SEQ ID NO: 11753 - RNA, 20 nt, Artificial Sequence
  HTT spacer sequence CTCN PAM
cuggucuagugguaaugaca

SEQ ID NO: 11754 - RNA, 20 nt, Artificial Sequence
  HTT spacer sequence CTCN PAM
cuucccuggucggcuaagua

SEQ ID NO: 11755 - RNA, 20 nt, Artificial Sequence
  HTT spacer sequence CTCN PAM
cuuuggccaggggagagggg

SEQ ID NO: 11756 - RNA, 20 nt, Artificial Sequence
  HTT spacer sequence CTCN PAM
ccuggccaaagggagacucc

SEQ ID NO: 11757 - RNA, 20 nt, Artificial Sequence
  HTT spacer sequence CTCN PAM
ccccuggccaaagggagacu

SEQ ID NO: 11758 - RNA, 20 nt, Artificial Sequence
  HTT spacer sequence CTCN PAM
gccccucuccccuggccaaa

SEQ ID NO: 11759 - RNA, 20 nt, Artificial Sequence
  HTT spacer sequence CTCN PAM
aaccccuccgccccucuccc

SEQ ID NO: 11760 - RNA, 20 nt, Artificial Sequence
  HTT spacer sequence CTCN PAM
gcuccaccaucucuugugga

SEQ ID NO: 11761 - RNA, 20 nt, Artificial Sequence
  HTT spacer sequence CTCN PAM
accaucucuuguggaaggcc

SEQ ID NO: 11762 - RNA, 20 nt, Artificial Sequence
  HTT spacer sequence CTCN PAM
uguggaaggccugacaucag

SEQ ID NO: 11763 - RNA, 20 nt, Artificial Sequence
  HTT spacer sequence CTCN PAM
ggauggcugugggcgggccu

SEQ ID NO: 11764 - RNA, 20 nt, Artificial Sequence
  HTT spacer sequence CTCN PAM
cugugaugcugugcuucagc

SEQ ID NO: 11765 - RNA, 20 nt, Artificial Sequence
  HTT spacer sequence CTCN PAM
uguuucacuuucauguuccg

SEQ ID NO: 11766 - RNA, 20 nt, Artificial Sequence
  HTT spacer sequence CTCN PAM
guacaccuggcuccaucuuc

SEQ ID NO: 11767 - RNA, 20 nt, Artificial Sequence
  HTT spacer sequence CTCN PAM
aucuucuagauagcaguagc

SEQ ID NO: 11768 - RNA, 20 nt, Artificial Sequence
  HTT spacer sequence CTCN PAM
ucucucucuccgccucggcu

SEQ ID NO: 11769 - RNA, 20 nt, Artificial Sequence
  HTT spacer sequence CTCN PAM
cucucuccgccucggcuacc

SEQ ID NO: 11770 - RNA, 20 nt, Artificial Sequence
  HTT spacer sequence CTCN PAM
cucuccgccucggcuaccaa

SEQ ID NO: 11771 - RNA, 20 nt, Artificial Sequence
  HTT spacer sequence CTCN PAM
cuccgccucggcuaccaaac

SEQ ID NO: 11772 - RNA, 20 nt, Artificial Sequence
  HTT spacer sequence CTCN PAM
ccgccucggcuaccaaacag

SEQ ID NO: 11773 - RNA, 20 nt, Artificial Sequence
  HTT spacer sequence CTCN PAM
gccucggcuaccaaacaggg

SEQ ID NO: 11774 - RNA, 20 nt, Artificial Sequence
  HTT spacer sequence CTCN PAM
gcuaccaaacagggaagggc

SEQ ID NO: 11775 - RNA, 20 nt, Artificial Sequence
  HTT spacer sequence CTCN PAM
aaugauaggucaggucacgc

SEQ ID NO: 11776 - RNA, 20 nt, Artificial Sequence
  HTT spacer sequence CTCN PAM
cacuccuuacccugcccccu

SEQ ID NO: 11777 - RNA, 20 nt, Artificial Sequence
  HTT spacer sequence CTCN PAM
uuacccugcccccuugucuu

SEQ ID NO: 11778 - RNA, 20 nt, Artificial Sequence
  HTT spacer sequence CTCN PAM
gugucuaggugguagugguc

SEQ ID NO: 11779 - RNA, 20 nt, Artificial Sequence
  HTT spacer sequence CTCN PAM
uugucuuguguccuuauuuc

SEQ ID NO: 11780 - RNA, 20 nt, Artificial Sequence
  HTT spacer sequence CTCN PAM
caucuccgcaggugaggaga

SEQ ID NO: 11781 - RNA, 20 nt, Artificial Sequence
  HTT spacer sequence CTCN PAM
ucuccgcaggugaggagaaa

SEQ ID NO: 11782 - RNA, 20 nt, Artificial Sequence
  HTT spacer sequence CTCN PAM
gcaggugaggagaaaaaccc

SEQ ID NO: 11783 - RNA, 20 nt, Artificial Sequence
  HTT spacer sequence CTCN PAM
ccugcggagaugagagauca

SEQ ID NO: 11784 - RNA, 20 nt, Artificial Sequence
  HTT spacer sequence CTCN PAM
ucaccugcggagaugagaga

SEQ ID NO: 11785 - RNA, 20 nt, Artificial Sequence
  HTT spacer sequence CTCN PAM
ccuguaggguccagcccuac

SEQ ID NO: 11786 - RNA, 20 nt, Artificial Sequence
  HTT spacer sequence CTCN PAM
cgccuguaggguccagcccu

SEQ ID NO: 11787 - RNA, 20 nt, Artificial Sequence
  HTT spacer sequence CTCN PAM
caguuaccaucguuuugggu

SEQ ID NO: 11788 - RNA, 20 nt, Artificial Sequence
  HTT spacer sequence CTCN PAM
guuaccaucguuuuggguuu

SEQ ID NO: 11789 - RNA, 20 nt, Artificial Sequence
  HTT spacer sequence CTCN PAM
gcacgucauucauagguuac

SEQ ID NO: 11790 - RNA, 20 nt, Artificial Sequence
  HTT spacer sequence CTCN PAM
uggucacacauuucuuucag

SEQ ID NO: 11791 - RNA, 20 nt, Artificial Sequence
  HTT spacer sequence CTCN PAM
ucaacuggaauggcagaagc

SEQ ID NO: 11792 - RNA, 20 nt, Artificial Sequence
  HTT spacer sequence CTCN PAM
cuucaacuggaauggcagaa

SEQ ID NO: 11793 - RNA, 20 nt, Artificial Sequence
  HTT spacer sequence CTCN PAM
agaacaacaaauggucucuc

SEQ ID NO: 11794 - RNA, 20 nt, Artificial Sequence
  HTT spacer sequence CTCN PAM
aagguuuuaaaugucugcau

SEQ ID NO: 11795 - RNA, 20 nt, Artificial Sequence
  HTT spacer sequence CTCN PAM
caaagguuuuaaaugucugc

SEQ ID NO: 11796 - RNA, 20 nt, Artificial Sequence
  HTT spacer sequence CTCN PAM
cuggugcgcugcauucucuc

SEQ ID NO: 11797 - RNA, 20 nt, Artificial Sequence
  HTT spacer sequence CTCN PAM
caguaaucauaauaauaguc

SEQ ID NO: 11798 - RNA, 20 nt, Artificial Sequence
  HTT spacer sequence CTCN PAM
ugguauuauccucccaguaa

SEQ ID NO: 11799 - RNA, 20 nt, Artificial Sequence
  HTT spacer sequence CTCN PAM
uuacccagggucccuauaca

SEQ ID NO: 11800 - RNA, 20 nt, Artificial Sequence
  HTT spacer sequence CTCN PAM
uugucugaucuauuugauuu

SEQ ID NO: 11801 - RNA, 20 nt, Artificial Sequence
  HTT spacer sequence CTCN PAM
uaucuagcucauugucugau

SEQ ID NO: 11802 - RNA, 20 nt, Artificial Sequence
  HTT spacer sequence CTCN PAM
cucaacuaaguggccuuuuc

SEQ ID NO: 11803 - RNA, 20 nt, Artificial Sequence
  HTT spacer sequence CTCN PAM
acuaaguggccuuuucauua

SEQ ID NO: 11804 - RNA, 20 nt, Artificial Sequence
  HTT spacer sequence CTCN PAM
cacaacugaaucucuauaau

SEQ ID NO: 11805 - RNA, 20 nt, Artificial Sequence
  HTT spacer sequence CTCN PAM
auaauaccugauguauuucu

SEQ ID NO: 11806 - RNA, 20 nt, Artificial Sequence
  HTT spacer sequence CTCN PAM
cuaggccacaggugccagca

SEQ ID NO: 11807 - RNA, 20 nt, Artificial Sequence
  HTT spacer sequence CTCN PAM
acuguaaaggcuauaguuac

SEQ ID NO: 11808 - RNA, 20 nt, Artificial Sequence
  HTT spacer sequence CTCN PAM
ugauaggcuguauagcagac

SEQ ID NO: 11809 - RNA, 20 nt, Artificial Sequence
  HTT spacer sequence CTCN PAM
uuuacucuaaaccauggaaa

SEQ ID NO: 11810 - RNA, 20 nt, Artificial Sequence
  HTT spacer sequence CTCN PAM
aaaccauggaaaagugaugc

SEQ ID NO: 11811 - RNA, 20 nt, Artificial Sequence
  HTT spacer sequence CTCN PAM
uccagaagggcaucacuuuu

SEQ ID NO: 11812 - RNA, 20 nt, Artificial Sequence
  HTT spacer sequence CTCN PAM
uggcaaugcccucuuuaacc

SEQ ID NO: 11813 - RNA, 20 nt, Artificial Sequence
  HTT spacer sequence CTCN PAM
uuaacccauaguguggguua

SEQ ID NO: 11814 - RNA, 20 nt, Artificial Sequence
  HTT spacer sequence CTCN PAM
uaacccacacuauggguuaa

SEQ ID NO: 11815 - RNA, 20 nt, Artificial Sequence
  HTT spacer sequence CTCN PAM
ucuuaacccacacuaugggu

SEQ ID NO: 11816 - RNA, 20 nt, Artificial Sequence
  HTT spacer sequence CTCN PAM
uuaaaguuucucaccuacac

SEQ ID NO: 11817 - RNA, 20 nt, Artificial Sequence
  HTT spacer sequence CTCN PAM
ccuacacuggaccuucaucu

SEQ ID NO: 11818 - RNA, 20 nt, Artificial Sequence
  HTT spacer sequence CTCN PAM
augaauaauagaaaugaaaa

SEQ ID NO: 11819 - RNA, 20 nt, Artificial Sequence
  HTT spacer sequence CTCN PAM
aagauaagagucucauggcc

SEQ ID NO: 11820 - RNA, 20 nt, Artificial Sequence
  HTT spacer sequence CTCN PAM
uaucuuugaguaucuguucc

SEQ ID NO: 11821 - RNA, 20 nt, Artificial Sequence
  HTT spacer sequence CTCN PAM
uggccaggcgugguggugca

SEQ ID NO: 11822 - RNA, 20 nt, Artificial Sequence
  HTT spacer sequence CTCN PAM
caaagugcugggauuacagg

SEQ ID NO: 11823 - RNA, 20 nt, Artificial Sequence
  HTT spacer sequence CTCN PAM
gccucccaaagugcugggau

SEQ ID NO: 11824 - RNA, 20 nt, Artificial Sequence
  HTT spacer sequence CTCN PAM
ggugauccgcccaccucggc

SEQ ID NO: 11825 - RNA, 20 nt, Artificial Sequence
  HTT spacer sequence CTCN PAM
acuaaaaauacaaaaauuag

SEQ ID NO: 11826 - RNA, 20 nt, Artificial Sequence
  HTT spacer sequence CTCN PAM
gaaggcugagguaugagaau

SEQ ID NO: 11827 - RNA, 20 nt, Artificial Sequence
  HTT spacer sequence CTCN PAM
gccuuccgaguagcugguau

SEQ ID NO: 11828 - RNA, 20 nt, Artificial Sequence
  HTT spacer sequence CTCN PAM
uaccucagccuuccgaguag

SEQ ID NO: 11829 - RNA, 20 nt, Artificial Sequence
  HTT spacer sequence CTCN PAM
uggguucaagcgauucucau

SEQ ID NO: 11830 - RNA, 20 nt, Artificial Sequence
  HTT spacer sequence CTCN PAM
gccuccuggguucaagcgau

SEQ ID NO: 11831 - RNA, 20 nt, Artificial Sequence
  HTT spacer sequence CTCN PAM
cugcaaccucugccuccugg

SEQ ID NO: 11832 - RNA, 20 nt, Artificial Sequence
  HTT spacer sequence CTCN PAM
gcucacugcaaccucugccu

SEQ ID NO: 11833 - RNA, 20 nt, Artificial Sequence
  HTT spacer sequence CTCN PAM
agccugggugacagagcaag

SEQ ID NO: 11834 - RNA, 20 nt, Artificial Sequence
  HTT spacer sequence CTCN PAM
gucacccaggcuggagugcg

SEQ ID NO: 11835 - RNA, 20 nt, Artificial Sequence
  HTT spacer sequence CTCN PAM
aucuccaaaaaagaaaaaaa

SEQ ID NO: 11836 - RNA, 20 nt, Artificial Sequence
  HTT spacer sequence CTCN PAM
aaaaaagaaaaaaaaaagag

SEQ ID NO: 11837 - RNA, 20 nt, Artificial Sequence
  HTT spacer sequence CTCN PAM
uuuuuuuuucuuuuuuggag

SEQ ID NO: 11838 - RNA, 20 nt, Artificial Sequence
  HTT spacer sequence CTCN PAM
cuuuuuuuuuucuuuuuugg

SEQ ID NO: 11839 - RNA, 20 nt, Artificial Sequence
  HTT spacer sequence CTCN PAM
ugacaguagaagucuugauc

SEQ ID NO: 11840 - RNA, 20 nt, Artificial Sequence
  HTT spacer sequence CTCN PAM
ccagaagauggcauccuuga

SEQ ID NO: 11841 - RNA, 20 nt, Artificial Sequence
  HTT spacer sequence CTCN PAM
ccccagaagauggcauccuu

SEQ ID NO: 11842 - RNA, 20 nt, Artificial Sequence
  HTT spacer sequence CTCN PAM
uggaacuguacacccauugg

SEQ ID NO: 11843 - RNA, 20 nt, Artificial Sequence
  HTT spacer sequence CTCN PAM
guugugagauuaugaaccca

SEQ ID NO: 11844 - RNA, 20 nt, Artificial Sequence
  HTT spacer sequence CTCN PAM
caacugagaaggguccaucc

SEQ ID NO: 11845 - RNA, 20 nt, Artificial Sequence
  HTT spacer sequence CTCN PAM
gauguucucagaagauccag

SEQ ID NO: 11846 - RNA, 20 nt, Artificial Sequence
  HTT spacer sequence CTCN PAM
gaagauccagucuucggguu

SEQ ID NO: 11847 - RNA, 20 nt, Artificial Sequence
  HTT spacer sequence CTCN PAM
gugaaccauagaaaaauaua

SEQ ID NO: 11848 - RNA, 20 nt, Artificial Sequence
  HTT spacer sequence CTCN PAM
uaacaugcgagagcuuuuau

SEQ ID NO: 11849 - RNA, 20 nt, Artificial Sequence
  HTT spacer sequence CTCN PAM
cauguuaagagggcugaugu

SEQ ID NO: 11850 - RNA, 20 nt, Artificial Sequence
  HTT spacer sequence CTCN PAM
cgcauguuaagagggcugau

SEQ ID NO: 11851 - RNA, 20 nt, Artificial Sequence
  HTT spacer sequence CTCN PAM
aaaaaaaaaaaguguauaug

SEQ ID NO: 11852 - RNA, 20 nt, Artificial Sequence
  HTT spacer sequence CTCN PAM
gucacccaggcuggagugca

SEQ ID NO: 11853 - RNA, 20 nt, Artificial Sequence
  HTT spacer sequence CTCN PAM
agccugggugacagagauuc

SEQ ID NO: 11854 - RNA, 20 nt, Artificial Sequence
  HTT spacer sequence CTCN PAM
gcucacuccaaccucugccu

SEQ ID NO: 11855 - RNA, 20 nt, Artificial Sequence
  HTT spacer sequence CTCN PAM
cuccaaccucugccucccac

SEQ ID NO: 11856 - RNA, 20 nt, Artificial Sequence
  HTT spacer sequence CTCN PAM
aaccucugccucccacacac

SEQ ID NO: 11857 - RNA, 20 nt, Artificial Sequence
  HTT spacer sequence CTCN PAM
gccucccacacaccaaugua

SEQ ID NO: 11858 - RNA, 20 nt, Artificial Sequence
  HTT spacer sequence CTCN PAM
cacacaccaauguauuuaau

SEQ ID NO: 11859 - RNA, 20 nt, Artificial Sequence
  HTT spacer sequence CTCN PAM
ucauggaaaagauaaaguaa

SEQ ID NO: 11860 - RNA, 20 nt, Artificial Sequence
  HTT spacer sequence CTCN PAM
ggaaggacaagguggccguc

SEQ ID NO: 11861 - RNA, 20 nt, Artificial Sequence
  HTT spacer sequence CTCN PAM
gugaguccauacuuaauuaa

SEQ ID NO: 11862 - RNA, 20 nt, Artificial Sequence
  HTT spacer sequence CTCN PAM
cggagaaccaggacggccac

SEQ ID NO: 11863 - RNA, 20 nt, Artificial Sequence
  HTT spacer sequence CTCN PAM
ugaaucccaguugcuucucc

SEQ ID NO: 11864 - RNA, 20 nt, Artificial Sequence
  HTT spacer sequence CTCN PAM
aaauuaggugcauugcacgg

SEQ ID NO: 11865 - RNA, 20 nt, Artificial Sequence
  HTT spacer sequence CTCN PAM
uuucuugguauucaauuaau

SEQ ID NO: 11866 - RNA, 20 nt, Artificial Sequence
  HTT spacer sequence CTCN PAM
uaaaagacaccauacuuuug

SEQ ID NO: 11867 - RNA, 20 nt, Artificial Sequence
  HTT spacer sequence CTCN PAM
ggcauauuagaauuuuagaa

SEQ ID NO: 11868 - RNA, 20 nt, Artificial Sequence
  HTT spacer sequence CTCN PAM
ucagguuacauuuuagugaa

SEQ ID NO: 11869 - RNA, 20 nt, Artificial Sequence
  HTT spacer sequence CTCN PAM
ucuucagguuacauuuuagu

SEQ ID NO: 11870 - RNA, 20 nt, Artificial Sequence
  HTT spacer sequence CTCN PAM
cuuuggaugcuuuaggggau

SEQ ID NO: 11871 - RNA, 20 nt, Artificial Sequence
  HTT spacer sequence CTCN PAM
uuggaugcuuuaggggaucu

SEQ ID NO: 11872 - RNA, 20 nt, Artificial Sequence
  HTT spacer sequence CTCN PAM
guaacaccccaaaguuagag

SEQ ID NO: 11873 - RNA, 20 nt, Artificial Sequence
  HTT spacer sequence CTCN PAM
aacuuugggguguuacagag

SEQ ID NO: 11874 - RNA, 20 nt, Artificial Sequence
  HTT spacer sequence CTCN PAM
uggucaaacugguuaagcau

SEQ ID NO: 11875 - RNA, 20 nt, Artificial Sequence
  HTT spacer sequence CTCN PAM
ccucauggucaaacugguua

SEQ ID NO: 11876 - RNA, 20 nt, Artificial Sequence
  HTT spacer sequence CTCN PAM
aucuaaaacacacacacaca

SEQ ID NO: 11877 - RNA, 20 nt, Artificial Sequence
  HTT spacer sequence CTCN PAM
agccugggcaacaagaauga

SEQ ID NO: 11878 - RNA, 20 nt, Artificial Sequence
  HTT spacer sequence CTCN PAM
gcuaccgcaaccucugccuc

SEQ ID NO: 11879 - RNA, 20 nt, Artificial Sequence
  HTT spacer sequence CTCN PAM
gccucccagguucaaguaau

SEQ ID NO: 11880 - RNA, 20 nt, Artificial Sequence
  HTT spacer sequence CTCN PAM
cagguucaaguaauucuccu

SEQ ID NO: 11881 - RNA, 20 nt, Artificial Sequence
  HTT spacer sequence CTCN PAM
ugccucagccucucuaguag

SEQ ID NO: 11882 - RNA, 20 nt, Artificial Sequence
  HTT spacer sequence CTCN PAM
gccucucuaguagcugggau

SEQ ID NO: 11883 - RNA, 20 nt, Artificial Sequence
  HTT spacer sequence CTCN PAM
cuaguagcugggauuacagg

SEQ ID NO: 11884 - RNA, 20 nt, Artificial Sequence
  HTT spacer sequence CTCN PAM
aguagcugggauuacaggca

SEQ ID NO: 11885 - RNA, 20 nt, Artificial Sequence
  HTT spacer sequence CTCN PAM
acuaaaaauacaaaauuagc

SEQ ID NO: 11886 - RNA, 20 nt, Artificial Sequence
  HTT spacer sequence CTCN PAM
acguuggucaggcuggucuc

SEQ ID NO: 11887 - RNA, 20 nt, Artificial Sequence
  HTT spacer sequence CTCN PAM
aacucccgaccucaggugau

SEQ ID NO: 11888 - RNA, 20 nt, Artificial Sequence
  HTT spacer sequence CTCN PAM
cgaccucaggugauccaccu

SEQ ID NO: 11889 - RNA, 20 nt, Artificial Sequence
  HTT spacer sequence CTCN PAM
ggugauccaccugccuuggc

SEQ ID NO: 11890 - RNA, 20 nt, Artificial Sequence
  HTT spacer sequence CTCN PAM
caccuauaaucccagcacuu

SEQ ID NO: 11891 - RNA, 20 nt, Artificial Sequence
  HTT spacer sequence CTCN PAM
aauuuaaaaguugagaggcu

SEQ ID NO: 11892 - RNA, 20 nt, Artificial Sequence
  HTT spacer sequence CTCN PAM
acuuuuaaauuugagcagca

SEQ ID NO: 11893 - RNA, 20 nt, Artificial Sequence
  HTT spacer sequence CTCN PAM
caacuuuuaaauuugagcag

SEQ ID NO: 11894 - RNA, 20 nt, Artificial Sequence
  HTT spacer sequence CTCN PAM
gggauaugauguggagagcu

SEQ ID NO: 11895 - RNA, 20 nt, Artificial Sequence
  HTT spacer sequence CTCN PAM
acaucauaucccugagggcc

SEQ ID NO: 11896 - RNA, 20 nt, Artificial Sequence
  HTT spacer sequence CTCN PAM
ccacaucauaucccugaggg

SEQ ID NO: 11897 - RNA, 20 nt, Artificial Sequence
  HTT spacer sequence CTCN PAM
gggaaagggaauccagaagc

SEQ ID NO: 11898 - RNA, 20 nt, Artificial Sequence
  HTT spacer sequence CTCN PAM
cucucucuguguguucaaac

SEQ ID NO: 11899 - RNA, 20 nt, Artificial Sequence
  HTT spacer sequence CTCN PAM
cucucuguguguucaaacug

SEQ ID NO: 11900 - RNA, 20 nt, Artificial Sequence
  HTT spacer sequence CTCN PAM
cucuguguguucaaacuggu

SEQ ID NO: 11901 - RNA, 20 nt, Artificial Sequence
  HTT spacer sequence CTCN PAM
cuguguguucaaacugguug

SEQ ID NO: 11902 - RNA, 20 nt, Artificial Sequence
  HTT spacer sequence CTCN PAM
guguguucaaacugguugaa

SEQ ID NO: 11903 - RNA, 20 nt, Artificial Sequence
  HTT spacer sequence CTCN PAM
ucuguaaaguuuugauuaau

SEQ ID NO: 11904 - RNA, 20 nt, Artificial Sequence
  HTT spacer sequence CTCN PAM
guaaaguuuugauuaaugga

SEQ ID NO: 11905 - RNA, 20 nt, Artificial Sequence
  HTT spacer sequence CTCN PAM
caaauccuuuuuuccauuaa

SEQ ID NO: 11906 - RNA, 20 nt, Artificial Sequence
  HTT spacer sequence CTCN PAM
ggcuguagugaaucucguag

SEQ ID NO: 11907 - RNA, 20 nt, Artificial Sequence
  HTT spacer sequence CTCN PAM
uaggcuuuaugugucuuccc

SEQ ID NO: 11908 - RNA, 20 nt, Artificial Sequence
  HTT spacer sequence CTCN PAM
ccgcucaagauggcccaaca

SEQ ID NO: 11909 - RNA, 20 nt, Artificial Sequence
  HTT spacer sequence CTCN PAM
agauggcccaacaagcuggu

SEQ ID NO: 11910 - RNA, 20 nt, Artificial Sequence
  HTT spacer sequence CTCN PAM
ucuaguuuuuuuguuuguuu

SEQ ID NO: 11911 - RNA, 20 nt, Artificial Sequence
  HTT spacer sequence CTCN PAM
aucuuguuuuaagucuuugg

SEQ ID NO: 11912 - RNA, 20 nt, Artificial Sequence
  HTT spacer sequence CTCN PAM
caaagacuuaaaacaagaug

SEQ ID NO: 11913 - RNA, 20 nt, Artificial Sequence
  HTT spacer sequence CTCN PAM
accuuccaaguggaacagga

SEQ ID NO: 11914 - RNA, 20 nt, Artificial Sequence
  HTT spacer sequence CTCN PAM
acaaucuaucuugaguaguu

SEQ ID NO: 11915 - RNA, 20 nt, Artificial Sequence
  HTT spacer sequence CTCN PAM
agauagauuguagagcuaac

SEQ ID NO: 11916 - RNA, 20 nt, Artificial Sequence
  HTT spacer sequence CTCN PAM
uaacuacucaagauagauug

SEQ ID NO: 11917 - RNA, 20 nt, Artificial Sequence
  HTT spacer sequence CTCN PAM
agacucuuucugggaagggc

SEQ ID NO: 11918 - RNA, 20 nt, Artificial Sequence
  HTT spacer sequence CTCN PAM
uucugggaagggcaauggag

SEQ ID NO: 11919 - RNA, 20 nt, Artificial Sequence
  HTT spacer sequence CTCN PAM
auugcccuucccagaaagag

SEQ ID NO: 11920 - RNA, 20 nt, Artificial Sequence
  HTT spacer sequence CTCN PAM
uucccuaagccaggaaucaa

SEQ ID NO: 11921 - RNA, 20 nt, Artificial Sequence
  HTT spacer sequence CTCN PAM
cccuccacaaacugucuuga

SEQ ID NO: 11922 - RNA, 20 nt, Artificial Sequence
  HTT spacer sequence CTCN PAM
acaaacugucuugaauugcc

SEQ ID NO: 11923 - RNA, 20 nt, Artificial Sequence
  HTT spacer sequence CTCN PAM
gagcaccugggagguuacuu

SEQ ID NO: 11924 - RNA, 20 nt, Artificial Sequence
  HTT spacer sequence CTCN PAM
gagaaaggcaauucaagaca

SEQ ID NO: 11925 - RNA, 20 nt, Artificial Sequence
  HTT spacer sequence CTCN PAM
caggugcucugagaaaggca

SEQ ID NO: 11926 - RNA, 20 nt, Artificial Sequence
  HTT spacer sequence CTCN PAM
uuaauaaaaguucuuuuaaa

SEQ ID NO: 11927 - RNA, 20 nt, Artificial Sequence
  HTT spacer sequence CTCN PAM
aacagccugggacuccuugg

SEQ ID NO: 11928 - RNA, 20 nt, Artificial Sequence
  HTT spacer sequence CTCN PAM
uugggaaaacaggaggugcc

SEQ ID NO: 11929 - RNA, 20 nt, Artificial Sequence
  HTT spacer sequence CTCN PAM
uguuuucccaaggaguccca

SEQ ID NO: 11930 - RNA, 20 nt, Artificial Sequence
  HTT spacer sequence CTCN PAM
ggcaccuccuguuuucccaa

SEQ ID NO: 11931 - RNA, 20 nt, Artificial Sequence
  HTT spacer sequence CTCN PAM
guuuuacucaugaaacccca

SEQ ID NO: 11932 - RNA, 20 nt, Artificial Sequence
  HTT spacer sequence CTCN PAM
ugaaaccccagaaauuggaa

SEQ ID NO: 11933 - RNA, 20 nt, Artificial Sequence
  HTT spacer sequence CTCN PAM
guucuguuuugcauuggauu

SEQ ID NO: 11934 - RNA, 20 nt, Artificial Sequence
  HTT spacer sequence CTCN PAM
augugaaguaauuucugaua

SEQ ID NO: 11935 - RNA, 20 nt, Artificial Sequence
  HTT spacer sequence CTCN PAM
cucuuuuuugggggggaucc

SEQ ID NO: 11936 - RNA, 20 nt, Artificial Sequence
  HTT spacer sequence CTCN PAM
uuuuugggggggauccagga

SEQ ID NO: 11937 - RNA, 20 nt, Artificial Sequence
  HTT spacer sequence CTCN PAM
uuuuuauaccagauccugga

SEQ ID NO: 11938 - RNA, 20 nt, Artificial Sequence
  HTT spacer sequence CTCN PAM
ggcugggcaugguggcucac

SEQ ID NO: 11939 - RNA, 20 nt, Artificial Sequence
  HTT spacer sequence CTCN PAM
cgccuguaauccuagcacuu

SEQ ID NO: 11940 - RNA, 20 nt, Artificial Sequence
  HTT spacer sequence CTCN PAM
aagugcuaggauuacaggcg

SEQ ID NO: 11941 - RNA, 20 nt, Artificial Sequence
  HTT spacer sequence CTCN PAM
caaagugcuaggauuacagg

SEQ ID NO: 11942 - RNA, 20 nt, Artificial Sequence
  HTT spacer sequence CTCN PAM
gccucucaaagugcuaggau

SEQ ID NO: 11943 - RNA, 20 nt, Artificial Sequence
  HTT spacer sequence CTCN PAM
ggcaauccacccaccucggc

SEQ ID NO: 11944 - RNA, 20 nt, Artificial Sequence
  HTT spacer sequence CTCN PAM
ggaguucgagaccagccugg

SEQ ID NO: 11945 - RNA, 20 nt, Artificial Sequence
  HTT spacer sequence CTCN PAM
ugagcucaggcaauccaccc

SEQ ID NO: 11946 - RNA, 20 nt, Artificial Sequence
  HTT spacer sequence CTCN PAM
aacuccugagcucaggcaau

SEQ ID NO: 11947 - RNA, 20 nt, Artificial Sequence
  HTT spacer sequence CTCN PAM
acuaaaauaaaaauaaaaaa

SEQ ID NO: 11948 - RNA, 20 nt, Artificial Sequence
  HTT spacer sequence CTCN PAM
caaauagcugggacuauagg

SEQ ID NO: 11949 - RNA, 20 nt, Artificial Sequence
  HTT spacer sequence CTCN PAM
gccucccaaauagcugggac

SEQ ID NO: 11950 - RNA, 20 nt, Artificial Sequence
  HTT spacer sequence CTCN PAM
uggguuaaagcgauucuucu

SEQ ID NO: 11951 - RNA, 20 nt, Artificial Sequence
  HTT spacer sequence CTCN PAM
gccuccuggguuaaagcgau

SEQ ID NO: 11952 - RNA, 20 nt, Artificial Sequence
  HTT spacer sequence CTCN PAM
guucacugcaaccuccgccu

SEQ ID NO: 11953 - RNA, 20 nt, Artificial Sequence
  HTT spacer sequence CTCN PAM
agccuggugacagagcaaga

SEQ ID NO: 11954 - RNA, 20 nt, Artificial Sequence
  HTT spacer sequence CTCN PAM
gucaccaggcuggagugcag

SEQ ID NO: 11955 - RNA, 20 nt, Artificial Sequence
  HTT spacer sequence CTCN PAM
gucucaaaaaaaaaaaagag

SEQ ID NO: 11956 - RNA, 20 nt, Artificial Sequence
  HTT spacer sequence CTCN PAM
aaaaaaaaaaagagacccuu

SEQ ID NO: 11957 - RNA, 20 nt, Artificial Sequence
  HTT spacer sequence CTCN PAM
uuuuuuuuuuugagacggag

SEQ ID NO: 11958 - RNA, 20 nt, Artificial Sequence
  HTT spacer sequence CTCN PAM
aaaaauuaagggucucuuuu

SEQ ID NO: 11959 - RNA, 20 nt, Artificial Sequence
  HTT spacer sequence CTCN PAM
auccuaaagccaguaaucca

SEQ ID NO: 11960 - RNA, 20 nt, Artificial Sequence
  HTT spacer sequence CTCN PAM
uuuauauaaacauuaaacac

SEQ ID NO: 11961 - RNA, 20 nt, Artificial Sequence
  HTT spacer sequence CTCN PAM
aauugccaggcacauuggcu

SEQ ID NO: 11962 - RNA, 20 nt, Artificial Sequence
  HTT spacer sequence CTCN PAM
cgccuauaaucccaacacuu

SEQ ID NO: 11963 - RNA, 20 nt, Artificial Sequence
  HTT spacer sequence CTCN PAM
caaaguguugggauuauagg

SEQ ID NO: 11964 - RNA, 20 nt, Artificial Sequence
  HTT spacer sequence CTCN PAM
gccucccaaaguguugggau

SEQ ID NO: 11965 - RNA, 20 nt, Artificial Sequence
  HTT spacer sequence CTCN PAM
ggcgauccacccaccucagc

SEQ ID NO: 11966 - RNA, 20 nt, Artificial Sequence
  HTT spacer sequence CTCN PAM
ugaccucaggcgauccaccc

SEQ ID NO: 11967 - RNA, 20 nt, Artificial Sequence
  HTT spacer sequence CTCN PAM
aacuccugaccucaggcgau

SEQ ID NO: 11968 - RNA, 20 nt, Artificial Sequence
  HTT spacer sequence CTCN PAM
acuaaaaauacaaaaauuag

SEQ ID NO: 11969 - RNA, 20 nt, Artificial Sequence
  HTT spacer sequence CTCN PAM
ggaggcugaggcaggagaau

SEQ ID NO: 11970 - RNA, 20 nt, Artificial Sequence
  HTT spacer sequence CTCN PAM
ugaguagcugggauuaccag

SEQ ID NO: 11971 - RNA, 20 nt, Artificial Sequence
  HTT spacer sequence CTCN PAM
gccuccugaguagcugggau

SEQ ID NO: 11972 - RNA, 20 nt, Artificial Sequence
  HTT spacer sequence CTCN PAM
ugccucagccuccugaguag

SEQ ID NO: 11973 - RNA, 20 nt, Artificial Sequence
  HTT spacer sequence CTCN PAM
ggagguggagguugcccuga

SEQ ID NO: 11974 - RNA, 20 nt, Artificial Sequence
  HTT spacer sequence CTCN PAM
ugaguucaagugauucuccu

SEQ ID NO: 11975 - RNA, 20 nt, Artificial Sequence
  HTT spacer sequence CTCN PAM
accuccugaguucaagugau

SEQ ID NO: 11976 - RNA, 20 nt, Artificial Sequence
  HTT spacer sequence CTCN PAM
gggcaaccuccaccuccuga

SEQ ID NO: 11977 - RNA, 20 nt, Artificial Sequence
  HTT spacer sequence CTCN PAM
gucauccagacuugggugca

SEQ ID NO: 11978 - RNA, 20 nt, Artificial Sequence
  HTT spacer sequence CTCN PAM
cucugucauccagacuuggg

SEQ ID NO: 11979 - RNA, 20 nt, Artificial Sequence
  HTT spacer sequence CTCN PAM
gucucaaaauaaaaauaaaa

SEQ ID NO: 11980 - RNA, 20 nt, Artificial Sequence
  HTT spacer sequence CTCN PAM
aaauaaaaauaaaaauaaaa

SEQ ID NO: 11981 - RNA, 20 nt, Artificial Sequence
  HTT spacer sequence CTCN PAM
uuuauuuauuuuuauuuuua

SEQ ID NO: 11982 - RNA, 20 nt, Artificial Sequence
  HTT spacer sequence CTCN PAM
aauuaauuggcuuuaagaaa

SEQ ID NO: 11983 - RNA, 20 nt, Artificial Sequence
  HTT spacer sequence CTCN PAM
uuuuucuuaaagccaauuaa

SEQ ID NO: 11984 - RNA, 20 nt, Artificial Sequence
  HTT spacer sequence CTCN PAM
aaugccuuuuagugcaugua

SEQ ID NO: 11985 - RNA, 20 nt, Artificial Sequence
  HTT spacer sequence CTCN PAM
aaaaaaaaaaaaaaaaagaa

SEQ ID NO: 11986 - RNA, 20 nt, Artificial Sequence
  HTT spacer sequence CTCN PAM
aucucaaaaaaaaaaaaaaa

SEQ ID NO: 11987 - RNA, 20 nt, Artificial Sequence
  HTT spacer sequence CTCN PAM
uguugcccaggcuggagucc

SEQ ID NO: 11988 - RNA, 20 nt, Artificial Sequence
  HTT spacer sequence CTCN PAM
agccugggcaacaagaguga

SEQ ID NO: 11989 - RNA, 20 nt, Artificial Sequence
  HTT spacer sequence CTCN PAM
cuacaacgucugccucucgg

SEQ ID NO: 11990 - RNA, 20 nt, Artificial Sequence
  HTT spacer sequence CTCN PAM
cgggguucaagcaauucucc

SEQ ID NO: 11991 - RNA, 20 nt, Artificial Sequence
  HTT spacer sequence CTCN PAM
ggguucaagcaauucuccug

SEQ ID NO: 11992 - RNA, 20 nt, Artificial Sequence
  HTT spacer sequence CTCN PAM
ugccucagccucccgaguag

SEQ ID NO: 11993 - RNA, 20 nt, Artificial Sequence
  HTT spacer sequence CTCN PAM
gccucccgaguagcuuggau

SEQ ID NO: 11994 - RNA, 20 nt, Artificial Sequence
  HTT spacer sequence CTCN PAM
cgaguagcuuggauuauagg

SEQ ID NO: 11995 - RNA, 20 nt, Artificial Sequence
  HTT spacer sequence CTCN PAM
ggaggcugaggcaggagaau

SEQ ID NO: 11996 - RNA, 20 nt, Artificial Sequence
  HTT spacer sequence CTCN PAM
acuaaaaauacaaaaauuag

SEQ ID NO: 11997 - RNA, 20 nt, Artificial Sequence
  HTT spacer sequence CTCN PAM
ucucuacuaaaaauacaaaa

SEQ ID NO: 11998 - RNA, 20 nt, Artificial Sequence
  HTT spacer sequence CTCN PAM
ugaccucaugauccccccgc

SEQ ID NO: 11999 - RNA, 20 nt, Artificial Sequence
  HTT spacer sequence CTCN PAM
ugauccccccgccuccgccu

SEQ ID NO: 12000 - RNA, 20 nt, Artificial Sequence
  HTT spacer sequence CTCN PAM
gccucccaaagugcugggau

SEQ ID NO: 12001 - RNA, 20 nt, Artificial Sequence
  HTT spacer sequence CTCN PAM
caaagugcugggauuacagg

SEQ ID NO: 12002 - RNA, 20 nt, Artificial Sequence
  HTT spacer sequence CTCN PAM
caccuguaaucccagcacuu

SEQ ID NO: 12003 - RNA, 20 nt, Artificial Sequence
  HTT spacer sequence CTCN PAM
aaaauaauuugaacaauuua

SEQ ID NO: 12004 - RNA, 20 nt, Artificial Sequence
  HTT spacer sequence CTCN PAM
uaugguaaauucuugcccua

SEQ ID NO: 12005 - RNA, 20 nt, Artificial Sequence
  HTT spacer sequence CTCN PAM
uuuuaaacaaccaguuauuu

SEQ ID NO: 12006 - RNA, 20 nt, Artificial Sequence
  HTT spacer sequence CTCN PAM
uuuuaaacaccccucuuuuu

SEQ ID NO: 12007 - RNA, 20 nt, Artificial Sequence
  HTT spacer sequence CTCN PAM
ucuuuuuaaacaccccucuu

SEQ ID NO: 12008 - RNA, 20 nt, Artificial Sequence
  HTT spacer sequence CTCN PAM
cuuguccuaaacacuccucu

SEQ ID NO: 12009 - RNA, 20 nt, Artificial Sequence
  HTT spacer sequence CTCN PAM
uagcaucuuuuacuuuuggu

SEQ ID NO: 12010 - RNA, 20 nt, Artificial Sequence
  HTT spacer sequence CTCN PAM
cacaccuugcauguaaaacu

SEQ ID NO: 12011 - RNA, 20 nt, Artificial Sequence
  HTT spacer sequence CTCN PAM
ucacacaccuugcauguaaa

SEQ ID NO: 12012 - RNA, 20 nt, Artificial Sequence
  HTT spacer sequence CTCN PAM
ccucacacaccuugcaugua

SEQ ID NO: 12013 - RNA, 20 nt, Artificial Sequence
  HTT spacer sequence CTCN PAM
aaacuaggcaaaaauuuaca

SEQ ID NO: 12014 - RNA, 20 nt, Artificial Sequence
  HTT spacer sequence CTCN PAM
aacuuuuagcuuuaucuuau

SEQ ID NO: 12015 - RNA, 20 nt, Artificial Sequence
  HTT spacer sequence CTCN PAM
uuuaaauuuagucaauaugu

SEQ ID NO: 12016 - RNA, 20 nt, Artificial Sequence
  HTT spacer sequence CTCN PAM
aaaaaaaaaaauagaaagaa

SEQ ID NO: 12017 - RNA, 20 nt, Artificial Sequence
  HTT spacer sequence CTCN PAM
aucucaaaaaaaaaaaauag

SEQ ID NO: 12018 - RNA, 20 nt, Artificial Sequence
  HTT spacer sequence CTCN PAM
cucugucacccaggcuggag

SEQ ID NO: 12019 - RNA, 20 nt, Artificial Sequence
  HTT spacer sequence CTCN PAM
gucacccaggcuggagugca

SEQ ID NO: 12020 - RNA, 20 nt, Artificial Sequence
  HTT spacer sequence CTCN PAM
agccugggugacagagcgag

SEQ ID NO: 12021 - RNA, 20 nt, Artificial Sequence
  HTT spacer sequence CTCN PAM
uggcucacugcaaccucugc

SEQ ID NO: 12022 - RNA, 20 nt, Artificial Sequence
  HTT spacer sequence CTCN PAM
cugcaaccucugcccccugg

SEQ ID NO: 12023 - RNA, 20 nt, Artificial Sequence
  HTT spacer sequence CTCN PAM
gcccccuggguuuaagcgau

SEQ ID NO: 12024 - RNA, 20 nt, Artificial Sequence
  HTT spacer sequence CTCN PAM
ugccucagccucuggaguag

SEQ ID NO: 12025 - RNA, 20 nt, Artificial Sequence
  HTT spacer sequence CTCN PAM
gccucuggaguagcugugau

SEQ ID NO: 12026 - RNA, 20 nt, Artificial Sequence
  HTT spacer sequence CTCN PAM
ggaguagcugugauuauagg

SEQ ID NO: 12027 - RNA, 20 nt, Artificial Sequence
  HTT spacer sequence CTCN PAM
agaggcugaggcaggagaau

SEQ ID NO: 12028 - RNA, 20 nt, Artificial Sequence
  HTT spacer sequence CTCN PAM
acuaaaaauacaaacauuag

SEQ ID NO: 12029 - RNA, 20 nt, Artificial Sequence
  HTT spacer sequence CTCN PAM
ugaccucgugaucugcccgc

SEQ ID NO: 12030 - RNA, 20 nt, Artificial Sequence
  HTT spacer sequence CTCN PAM
ugaucugcccgccuccaccu

SEQ ID NO: 12031 - RNA, 20 nt, Artificial Sequence
  HTT spacer sequence CTCN PAM
accucccaaagugcuaggau

SEQ ID NO: 12032 - RNA, 20 nt, Artificial Sequence
  HTT spacer sequence CTCN PAM
caaagugcuaggauuacagg

SEQ ID NO: 12033 - RNA, 20 nt, Artificial Sequence
  HTT spacer sequence CTCN PAM
ugccuguaauccuagcacuu

SEQ ID NO: 12034 - RNA, 20 nt, Artificial Sequence
  HTT spacer sequence CTCN PAM
uucacaaaaauuguaagggc

SEQ ID NO: 12035 - RNA, 20 nt, Artificial Sequence
  HTT spacer sequence CTCN PAM
caccuguaaucccaucacuu

SEQ ID NO: 12036 - RNA, 20 nt, Artificial Sequence
  HTT spacer sequence CTCN PAM
caaagugaugggauuacagg

SEQ ID NO: 12037 - RNA, 20 nt, Artificial Sequence
  HTT spacer sequence CTCN PAM
gccucccaaagugaugggau

SEQ ID NO: 12038 - RNA, 20 nt, Artificial Sequence
  HTT spacer sequence CTCN PAM
ugaucuaccugccucagccu

SEQ ID NO: 12039 - RNA, 20 nt, Artificial Sequence
  HTT spacer sequence CTCN PAM
ugaccucgugaucuaccugc

SEQ ID NO: 12040 - RNA, 20 nt, Artificial Sequence
  HTT spacer sequence CTCN PAM
aucuccugaccucgugaucu

SEQ ID NO: 12041 - RNA, 20 nt, Artificial Sequence
  HTT spacer sequence CTCN PAM
ggaggcugaggcaguagaau

SEQ ID NO: 12042 - RNA, 20 nt, Artificial Sequence
  HTT spacer sequence CTCN PAM
ugaguagcugggacuacagg

SEQ ID NO: 12043 - RNA, 20 nt, Artificial Sequence
  HTT spacer sequence CTCN PAM
gccuccugaguagcugggac

SEQ ID NO: 12044 - RNA, 20 nt, Artificial Sequence
  HTT spacer sequence CTCN PAM
uggguucaugccauucuacu

SEQ ID NO: 12045 - RNA, 20 nt, Artificial Sequence
  HTT spacer sequence CTCN PAM
gccuccuggguucaugccau

SEQ ID NO: 12046 - RNA, 20 nt, Artificial Sequence
  HTT spacer sequence CTCN PAM
cugcaagcucugccuccugg

SEQ ID NO: 12047 - RNA, 20 nt, Artificial Sequence
  HTT spacer sequence CTCN PAM
agccugggcaacacagcgag

SEQ ID NO: 12048 - RNA, 20 nt, Artificial Sequence
  HTT spacer sequence CTCN PAM
cuguguugcccaggcuggag

SEQ ID NO: 12049 - RNA, 20 nt, Artificial Sequence
  HTT spacer sequence CTCN PAM
gucuaaaaaaaaaaaaaguc

SEQ ID NO: 12050 - RNA, 20 nt, Artificial Sequence
  HTT spacer sequence CTCN PAM
aacuagcccuggguugggcc

SEQ ID NO: 12051 - RNA, 20 nt, Artificial Sequence
  HTT spacer sequence CTCN PAM
ggguuaaaaauggguuaaag

SEQ ID NO: 12052 - RNA, 20 nt, Artificial Sequence
  HTT spacer sequence CTCN PAM
guaaagucccucuggguuaa

SEQ ID NO: 12053 - RNA, 20 nt, Artificial Sequence
  HTT spacer sequence CTCN PAM
ccucaguaaagucccucugg

SEQ ID NO: 12054 - RNA, 20 nt, Artificial Sequence
  HTT spacer sequence CTCN PAM
aacccaaucccaugcuuuac

SEQ ID NO: 12055 - RNA, 20 nt, Artificial Sequence
  HTT spacer sequence CTCN PAM
uuuggauugcgauaguaacu

SEQ ID NO: 12056 - RNA, 20 nt, Artificial Sequence
  HTT spacer sequence CTCN PAM
caaaaaucaaaucugcuaac

SEQ ID NO: 12057 - RNA, 20 nt, Artificial Sequence
  HTT spacer sequence CTCN PAM
gcuucccuugauuaauuuag

SEQ ID NO: 12058 - RNA, 20 nt, Artificial Sequence
  HTT spacer sequence CTCN PAM
uacaucugacugggucugaa

SEQ ID NO: 12059 - RNA, 20 nt, Artificial Sequence
  HTT spacer sequence CTCN PAM
aacuggauccaggccgguua

SEQ ID NO: 12060 - RNA, 20 nt, Artificial Sequence
  HTT spacer sequence CTCN PAM
gagagcucgaaacacaaacu

SEQ ID NO: 12061 - RNA, 20 nt, Artificial Sequence
  HTT spacer sequence CTCN PAM
gaguuuucuuugugcaaauu

SEQ ID NO: 12062 - RNA, 20 nt, Artificial Sequence
  HTT spacer sequence CTCN PAM
cugaguuuucuuugugcaaa

SEQ ID NO: 12063 - RNA, 20 nt, Artificial Sequence
  HTT spacer sequence CTCN PAM
aaacacaaacuguggaucuc

SEQ ID NO: 12064 - RNA, 20 nt, Artificial Sequence
  HTT spacer sequence CTCN PAM
aaaauccaagagaggacuua

SEQ ID NO: 12065 - RNA, 20 nt, Artificial Sequence
  HTT spacer sequence CTCN PAM
uggauuuuggagauccacag

SEQ ID NO: 12066 - RNA, 20 nt, Artificial Sequence
  HTT spacer sequence CTCN PAM
cuuggauuuuggagauccac

SEQ ID NO: 12067 - RNA, 20 nt, Artificial Sequence
  HTT spacer sequence CTCN PAM
gagaaaucaauggacacaag

SEQ ID NO: 12068 - RNA, 20 nt, Artificial Sequence
  HTT spacer sequence CTCN PAM
gagcagcuggggaucaugga

SEQ ID NO: 12069 - RNA, 20 nt, Artificial Sequence
  HTT spacer sequence CTCN PAM
gugccccaggggucauuaga

SEQ ID NO: 12070 - RNA, 20 nt, Artificial Sequence
  HTT spacer sequence CTCN PAM
uuuaaauuuaauucggcuga

SEQ ID NO: 12071 - RNA, 20 nt, Artificial Sequence
  HTT spacer sequence CTCN PAM
gaaucccagcagauucagag

SEQ ID NO: 12072 - RNA, 20 nt, Artificial Sequence
  HTT spacer sequence CTCN PAM
gaaucugcugggauucugag

SEQ ID NO: 12073 - RNA, 20 nt, Artificial Sequence
  HTT spacer sequence CTCN PAM
cugaaucugcugggauucug

SEQ ID NO: 12074 - RNA, 20 nt, Artificial Sequence
  HTT spacer sequence CTCN PAM
agggaugcuucauggucaga

SEQ ID NO: 12075 - RNA, 20 nt, Artificial Sequence
  HTT spacer sequence CTCN PAM
aauuucuguacgucacuucc

SEQ ID NO: 12076 - RNA, 20 nt, Artificial Sequence
  HTT spacer sequence CTCN PAM
ccuccaauuucuguacguca

SEQ ID NO: 12077 - RNA, 20 nt, Artificial Sequence
  HTT spacer sequence CTCN PAM
gcauuugccucauuugaacu

SEQ ID NO: 12078 - RNA, 20 nt, Artificial Sequence
  HTT spacer sequence CTCN PAM
uuugaacucucagcagugua

SEQ ID NO: 12079 - RNA, 20 nt, Artificial Sequence
  HTT spacer sequence CTCN PAM
cagcaguguaugagugaaau

SEQ ID NO: 12080 - RNA, 20 nt, Artificial Sequence
  HTT spacer sequence CTCN PAM
gcaguguaugagugaaauau

SEQ ID NO: 12081 - RNA, 20 nt, Artificial Sequence
  HTT spacer sequence CTCN PAM
uacacugcugagaguucaaa

SEQ ID NO: 12082 - RNA, 20 nt, Artificial Sequence
  HTT spacer sequence CTCN PAM
gcuacuguuacaggugcgua

SEQ ID NO: 12083 - RNA, 20 nt, Artificial Sequence
  HTT spacer sequence CTCN PAM
aauacagaaguacagagucc

SEQ ID NO: 12084 - RNA, 20 nt, Artificial Sequence
  HTT spacer sequence CTCN PAM
guacuucuguauuugagucu

SEQ ID NO: 12085 - RNA, 20 nt, Artificial Sequence
  HTT spacer sequence CTCN PAM
ggccauauuuaguuugcuuu

SEQ ID NO: 12086 - RNA, 20 nt, Artificial Sequence
  HTT spacer sequence CTCN PAM
uugcaucuuguaaagcugaa

SEQ ID NO: 12087 - RNA, 20 nt, Artificial Sequence
  HTT spacer sequence CTCN PAM
guccccaugaaacacuaauu

SEQ ID NO: 12088 - RNA, 20 nt, Artificial Sequence
  HTT spacer sequence CTCN PAM
guuuuuaugaauuugacuac

SEQ ID NO: 12089 - RNA, 20 nt, Artificial Sequence
  HTT spacer sequence CTCN PAM
acaucuccugucucagugga

SEQ ID NO: 12090 - RNA, 20 nt, Artificial Sequence
  HTT spacer sequence CTCN PAM
ugucucaguggaaucagaca

SEQ ID NO: 12091 - RNA, 20 nt, Artificial Sequence
  HTT spacer sequence CTCN PAM
guggaaucagacagcauuug

SEQ ID NO: 12092 - RNA, 20 nt, Artificial Sequence
  HTT spacer sequence CTCN PAM
aaaaaaaaagaaaaagaaaa

SEQ ID NO: 12093 - RNA, 20 nt, Artificial Sequence
  HTT spacer sequence CTCN PAM
gccucaaaaaaaaaagaaaa

SEQ ID NO: 12094 - RNA, 20 nt, Artificial Sequence
  HTT spacer sequence CTCN PAM
cucugucgcccaggcuggag

SEQ ID NO: 12095 - RNA, 20 nt, Artificial Sequence
  HTT spacer sequence CTCN PAM
gucgcccaggcuggagugca

SEQ ID NO: 12096 - RNA, 20 nt, Artificial Sequence
  HTT spacer sequence CTCN PAM
agccugggcgacagagcgag

SEQ ID NO: 12097 - RNA, 20 nt, Artificial Sequence
  HTT spacer sequence CTCN PAM
gcucacugcaaccucugccu

SEQ ID NO: 12098 - RNA, 20 nt, Artificial Sequence
  HTT spacer sequence CTCN PAM
cugcaaccucugccucccgg

SEQ ID NO: 12099 - RNA, 20 nt, Artificial Sequence
  HTT spacer sequence CTCN PAM
gccucccggguucaagcaau

SEQ ID NO: 12100 - RNA, 20 nt, Artificial Sequence
  HTT spacer sequence CTCN PAM
cggguucaagcaauacuccu

SEQ ID NO: 12101 - RNA, 20 nt, Artificial Sequence
  HTT spacer sequence CTCN PAM
ugucucagccucccgaguag

SEQ ID NO: 12102 - RNA, 20 nt, Artificial Sequence
  HTT spacer sequence CTCN PAM
gccucccgaguagcugggac

SEQ ID NO: 12103 - RNA, 20 nt, Artificial Sequence
  HTT spacer sequence CTCN PAM
cgaguagcugggacuacagg

SEQ ID NO: 12104 - RNA, 20 nt, Artificial Sequence
  HTT spacer sequence CTCN PAM
ggaggcugagacaggaguau

SEQ ID NO: 12105 - RNA, 20 nt, Artificial Sequence
  HTT spacer sequence CTCN PAM
acuaaagauacaaaaaauua

SEQ ID NO: 12106 - RNA, 20 nt, Artificial Sequence
  HTT spacer sequence CTCN PAM
ugaccucgugaucugcccgc

SEQ ID NO: 12107 - RNA, 20 nt, Artificial Sequence
  HTT spacer sequence CTCN PAM
ugaucugcccgccucggccu

SEQ ID NO: 12108 - RNA, 20 nt, Artificial Sequence
  HTT spacer sequence CTCN PAM
gccucccaaagugcugggau

SEQ ID NO: 12109 - RNA, 20 nt, Artificial Sequence
  HTT spacer sequence CTCN PAM
caaagugcugggauuacagg

SEQ ID NO: 12110 - RNA, 20 nt, Artificial Sequence
  HTT spacer sequence CTCN PAM
cgccuguaaucccagcacuu

SEQ ID NO: 12111 - RNA, 20 nt, Artificial Sequence
  HTT spacer sequence CTCN PAM
agguucauccauguuguagu

SEQ ID NO: 12112 - RNA, 20 nt, Artificial Sequence
  HTT spacer sequence CTCN PAM
uauuuaaggccaaaacuauu

SEQ ID NO: 12113 - RNA, 20 nt, Artificial Sequence
  HTT spacer sequence CTCN PAM
uggggucagcauugggaccc

SEQ ID NO: 12114 - RNA, 20 nt, Artificial Sequence
  HTT spacer sequence CTCN PAM
cuuggggucagcauugggac

SEQ ID NO: 12115 - RNA, 20 nt, Artificial Sequence
  HTT spacer sequence CTCN PAM
agaaagaauucagacgaguc

SEQ ID NO: 12116 - RNA, 20 nt, Artificial Sequence
  HTT spacer sequence CTCN PAM
ucugaauucuuucuugagca

SEQ ID NO: 12117 - RNA, 20 nt, Artificial Sequence
  HTT spacer sequence CTCN PAM
auuccuuggcuuucuuagua

SEQ ID NO: 12118 - RNA, 20 nt, Artificial Sequence
  HTT spacer sequence CTCN PAM
augggcagagcagccccgau

SEQ ID NO: 12119 - RNA, 20 nt, Artificial Sequence
  HTT spacer sequence CTCN PAM
gcccauggaguagccauucu

SEQ ID NO: 12120 - RNA, 20 nt, Artificial Sequence
  HTT spacer sequence CTCN PAM
aaaauaaauaaauaaauaaa

SEQ ID NO: 12121 - RNA, 20 nt, Artificial Sequence
  HTT spacer sequence CTCN PAM
gucucaaaaauaaauaaaua

SEQ ID NO: 12122 - RNA, 20 nt, Artificial Sequence
  HTT spacer sequence CTCN PAM
cuuuguugcccaggcuggag

SEQ ID NO: 12123 - RNA, 20 nt, Artificial Sequence
  HTT spacer sequence CTCN PAM
agccugggcaacaaagggag

SEQ ID NO: 12124 - RNA, 20 nt, Artificial Sequence
  HTT spacer sequence CTCN PAM
gcucacugcaagcuccgccu

SEQ ID NO: 12125 - RNA, 20 nt, Artificial Sequence
  HTT spacer sequence CTCN PAM
cugcaagcuccgccucccgg

SEQ ID NO: 12126 - RNA, 20 nt, Artificial Sequence
  HTT spacer sequence CTCN PAM
gccucccggguucaugccau

SEQ ID NO: 12127 - RNA, 20 nt, Artificial Sequence
  HTT spacer sequence CTCN PAM
cggguucaugccauucuucu

SEQ ID NO: 12128 - RNA, 20 nt, Artificial Sequence
  HTT spacer sequence CTCN PAM
gccuccugaguagcugggac

SEQ ID NO: 12129 - RNA, 20 nt, Artificial Sequence
  HTT spacer sequence CTCN PAM
ugaguagcugggacuauagg

SEQ ID NO: 12130 - RNA, 20 nt, Artificial Sequence
  HTT spacer sequence CTCN PAM
ggaggcugaggcagaagaau

SEQ ID NO: 12131 - RNA, 20 nt, Artificial Sequence
  HTT spacer sequence CTCN PAM
acuaaaaauacaaaaaauua

SEQ ID NO: 12132 - RNA, 20 nt, Artificial Sequence
  HTT spacer sequence CTCN PAM
aucuccugaccuugugaucc

SEQ ID NO: 12133 - RNA, 20 nt, Artificial Sequence
  HTT spacer sequence CTCN PAM
ugaccuugugauccgcccgc

SEQ ID NO: 12134 - RNA, 20 nt, Artificial Sequence
  HTT spacer sequence CTCN PAM
gccucccaaagugcugggau

SEQ ID NO: 12135 - RNA, 20 nt, Artificial Sequence
  HTT spacer sequence CTCN PAM
caaagugcugggauuacagg

SEQ ID NO: 12136 - RNA, 20 nt, Artificial Sequence
  HTT spacer sequence CTCN PAM
cgccuguaaucccagcacuu

SEQ ID NO: 12137 - RNA, 20 nt, Artificial Sequence
  HTT spacer sequence CTCN PAM
uguuuagcauauaaucaaga

SEQ ID NO: 12138 - RNA, 20 nt, Artificial Sequence
  HTT spacer sequence CTCN PAM
ugaauaauccaccucuuguu

SEQ ID NO: 12139 - RNA, 20 nt, Artificial Sequence
  HTT spacer sequence CTCN PAM
guucugggaauugcccaccc

SEQ ID NO: 12140 - RNA, 20 nt, Artificial Sequence
  HTT spacer sequence CTCN PAM
ccuuuuuagaacauauaggg

SEQ ID NO: 12141 - RNA, 20 nt, Artificial Sequence
  HTT spacer sequence CTCN PAM
cgccuguaaucccagcacuu

SEQ ID NO: 12142 - RNA, 20 nt, Artificial Sequence
  HTT spacer sequence CTCN PAM
caaagugcugggauuacagg

SEQ ID NO: 12143 - RNA, 20 nt, Artificial Sequence
  HTT spacer sequence CTCN PAM
ggucaucugcccgccuuggc

SEQ ID NO: 12144 - RNA, 20 nt, Artificial Sequence
  HTT spacer sequence CTCN PAM
ugaccucaggucaucugccc

SEQ ID NO: 12145 - RNA, 20 nt, Artificial Sequence
  HTT spacer sequence CTCN PAM
aacuccugaccucaggucau

SEQ ID NO: 12146 - RNA, 20 nt, Artificial Sequence
  HTT spacer sequence CTCN PAM
auguuggucaagcuggucuc

SEQ ID NO: 12147 - RNA, 20 nt, Artificial Sequence
  HTT spacer sequence CTCN PAM
acuaaaaauaaaaaauuagc

SEQ ID NO: 12148 - RNA, 20 nt, Artificial Sequence
  HTT spacer sequence CTCN PAM
cagcuacucgggaggcugag

SEQ ID NO: 12149 - RNA, 20 nt, Artificial Sequence
  HTT spacer sequence CTCN PAM
ggaggcugaggcaggagaau

SEQ ID NO: 12150 - RNA, 20 nt, Artificial Sequence
  HTT spacer sequence CTCN PAM
cgaguagcugggaguacagg

SEQ ID NO: 12151 - RNA, 20 nt, Artificial Sequence
  HTT spacer sequence CTCN PAM
gccucccgaguagcugggag

SEQ ID NO: 12152 - RNA, 20 nt, Artificial Sequence
  HTT spacer sequence CTCN PAM
ugccucagccucccgaguag

SEQ ID NO: 12153 - RNA, 20 nt, Artificial Sequence
  HTT spacer sequence CTCN PAM
gcuucccggguucaagcgau

SEQ ID NO: 12154 - RNA, 20 nt, Artificial Sequence
  HTT spacer sequence CTCN PAM
ccacaaccucggcuucccgg

SEQ ID NO: 12155 - RNA, 20 nt, Artificial Sequence
  HTT spacer sequence CTCN PAM
gcucaccacaaccucggcuu

SEQ ID NO: 12156 - RNA, 20 nt, Artificial Sequence
  HTT spacer sequence CTCN PAM
agccugcacaacaagaauga

SEQ ID NO: 12157 - RNA, 20 nt, Artificial Sequence
  HTT spacer sequence CTCN PAM
gucucaaaagaaaaaaaaaa

SEQ ID NO: 12158 - RNA, 20 nt, Artificial Sequence
  HTT spacer sequence CTCN PAM
aaagaaaaaaaaaaaauaga

SEQ ID NO: 12159 - RNA, 20 nt, Artificial Sequence
  HTT spacer sequence CTCN PAM
caccagccccaugacaguuu

SEQ ID NO: 12160 - RNA, 20 nt, Artificial Sequence
  HTT spacer sequence CTCN PAM
uuauaagcuaauuauaaugc

SEQ ID NO: 12161 - RNA, 20 nt, Artificial Sequence
  HTT spacer sequence CTCN PAM
cagcucauuauaagcuaauu

SEQ ID NO: 12162 - RNA, 20 nt, Artificial Sequence
  HTT spacer sequence CTCN PAM
gguuguucucacagcucauu

SEQ ID NO: 12163 - RNA, 20 nt, Artificial Sequence
  HTT spacer sequence CTCN PAM
uaccucauccugugacuaug

SEQ ID NO: 12164 - RNA, 20 nt, Artificial Sequence
  HTT spacer sequence CTCN PAM
uccugugacuaugaaugccu

SEQ ID NO: 12165 - RNA, 20 nt, Artificial Sequence
  HTT spacer sequence CTCN PAM
ugggaacgcggcccagcagg

SEQ ID NO: 12166 - RNA, 20 nt, Artificial Sequence
  HTT spacer sequence CTCN PAM
uuuuaccccgccccuauuca

SEQ ID NO: 12167 - RNA, 20 nt, Artificial Sequence
  HTT spacer sequence CTCN PAM
gacauauuagcugcaucauu

SEQ ID NO: 12168 - RNA, 20 nt, Artificial Sequence
  HTT spacer sequence CTCN PAM
gucacccaggcuggagugcu

SEQ ID NO: 12169 - RNA, 20 nt, Artificial Sequence
  HTT spacer sequence CTCN PAM
agccugggugacagagcaag

SEQ ID NO: 12170 - RNA, 20 nt, Artificial Sequence
  HTT spacer sequence CTCN PAM
gcucacugcaaucuccaccu

SEQ ID NO: 12171 - RNA, 20 nt, Artificial Sequence
  HTT spacer sequence CTCN PAM
cugcaaucuccaccuccgag

SEQ ID NO: 12172 - RNA, 20 nt, Artificial Sequence
  HTT spacer sequence CTCN PAM
accuccgagguuccagcgau

SEQ ID NO: 12173 - RNA, 20 nt, Artificial Sequence
  HTT spacer sequence CTCN PAM
gagguuccagcgauucucuu

SEQ ID NO: 12174 - RNA, 20 nt, Artificial Sequence
  HTT spacer sequence CTCN PAM
gagguggagauugcagugag

SEQ ID NO: 12175 - RNA, 20 nt, Artificial Sequence
  HTT spacer sequence CTCN PAM
ugccucagccucccgaguag

SEQ ID NO: 12176 - RNA, 20 nt, Artificial Sequence
  HTT spacer sequence CTCN PAM
gccucccgaguagcugggac

SEQ ID NO: 12177 - RNA, 20 nt, Artificial Sequence
  HTT spacer sequence CTCN PAM
cgaguagcugggacuacagg

SEQ ID NO: 12178 - RNA, 20 nt, Artificial Sequence
  HTT spacer sequence CTCN PAM
ggaggcugaggcaagagaau

SEQ ID NO: 12179 - RNA, 20 nt, Artificial Sequence
  HTT spacer sequence CTCN PAM
acuaaaaacacaaaaauuag

SEQ ID NO: 12180 - RNA, 20 nt, Artificial Sequence
  HTT spacer sequence CTCN PAM
aacuccugggcuuaagcaau

SEQ ID NO: 12181 - RNA, 20 nt, Artificial Sequence
  HTT spacer sequence CTCN PAM
ugggcuuaagcaauacagcc

SEQ ID NO: 12182 - RNA, 20 nt, Artificial Sequence
  HTT spacer sequence CTCN PAM
caaaguguugggauuacaag

SEQ ID NO: 12183 - RNA, 20 nt, Artificial Sequence
  HTT spacer sequence CTCN PAM
ugcuuguaaucccaacacuu

SEQ ID NO: 12184 - RNA, 20 nt, Artificial Sequence
  HTT spacer sequence CTCN PAM
uuuuacauuuccacuuguua

SEQ ID NO: 12185 - RNA, 20 nt, Artificial Sequence
  HTT spacer sequence CTCN PAM
ggccaguuuucaguuuaaca

SEQ ID NO: 12186 - RNA, 20 nt, Artificial Sequence
  HTT spacer sequence CTCN PAM
gccaguuccugcagccagac

SEQ ID NO: 12187 - RNA, 20 nt, Artificial Sequence
  HTT spacer sequence CTCN PAM
caggccgcaaacuguucaaa

SEQ ID NO: 12188 - RNA, 20 nt, Artificial Sequence
  HTT spacer sequence CTCN PAM
gaacacaguuugaacaguuu

SEQ ID NO: 12189 - RNA, 20 nt, Artificial Sequence
  HTT spacer sequence CTCN PAM
cuucugcuuucuguggccac

SEQ ID NO: 12190 - RNA, 20 nt, Artificial Sequence
  HTT spacer sequence CTCN PAM
agggaugcuguguggucaaa

SEQ ID NO: 12191 - RNA, 20 nt, Artificial Sequence
  HTT spacer sequence CTCN PAM
cugaaucugcugugauucug

SEQ ID NO: 12192 - RNA, 20 nt, Artificial Sequence
  HTT spacer sequence CTCN PAM
guucaauucaauuuguugga

SEQ ID NO: 12193 - RNA, 20 nt, Artificial Sequence
  HTT spacer sequence CTCN PAM
acuuccucauaaauaaguca

SEQ ID NO: 12194 - RNA, 20 nt, Artificial Sequence
  HTT spacer sequence CTCN PAM
uaaauaagucauuuuaaaug

SEQ ID NO: 12195 - RNA, 20 nt, Artificial Sequence
  HTT spacer sequence CTCN PAM
auguccaaaaauagaaaauu

SEQ ID NO: 12196 - RNA, 20 nt, Artificial Sequence
  HTT spacer sequence CTCN PAM
aaaaaagaaaaaaaaaauga

SEQ ID NO: 12197 - RNA, 20 nt, Artificial Sequence
  HTT spacer sequence CTCN PAM
gucucaaaaaaagaaaaaaa

SEQ ID NO: 12198 - RNA, 20 nt, Artificial Sequence
  HTT spacer sequence CTCN PAM
cuccgucacccaggcuggag

SEQ ID NO: 12199 - RNA, 20 nt, Artificial Sequence
  HTT spacer sequence CTCN PAM
gucacccaggcuggagugca

SEQ ID NO: 12200 - RNA, 20 nt, Artificial Sequence
  HTT spacer sequence CTCN PAM
agccugggugacggagcgag

SEQ ID NO: 12201 - RNA, 20 nt, Artificial Sequence
  HTT spacer sequence CTCN PAM
accucccuccucagccuccu

SEQ ID NO: 12202 - RNA, 20 nt, Artificial Sequence
  HTT spacer sequence CTCN PAM
cuccucagccuccugaguag

SEQ ID NO: 12203 - RNA, 20 nt, Artificial Sequence
  HTT spacer sequence CTCN PAM
ucagccuccugaguagcugg

SEQ ID NO: 12204 - RNA, 20 nt, Artificial Sequence
  HTT spacer sequence CTCN PAM
gccuccugaguagcugggau

SEQ ID NO: 12205 - RNA, 20 nt, Artificial Sequence
  HTT spacer sequence CTCN PAM
ugaguagcugggauuacagg

SEQ ID NO: 12206 - RNA, 20 nt, Artificial Sequence
  HTT spacer sequence CTCN PAM
ggaggcugaggagggaggug

SEQ ID NO: 12207 - RNA, 20 nt, Artificial Sequence
  HTT spacer sequence CTCN PAM
acuaaaaauacaaaaauuag

SEQ ID NO: 12208 - RNA, 20 nt, Artificial Sequence
  HTT spacer sequence CTCN PAM
aacuccugaccucagguggu

SEQ ID NO: 12209 - RNA, 20 nt, Artificial Sequence
  HTT spacer sequence CTCN PAM
ugaccucaggugguccaccu

SEQ ID NO: 12210 - RNA, 20 nt, Artificial Sequence
  HTT spacer sequence CTCN PAM
ggugguccaccugccuuggc

SEQ ID NO: 12211 - RNA, 20 nt, Artificial Sequence
  HTT spacer sequence CTCN PAM
caaaaugcugggauuacagg

SEQ ID NO: 12212 - RNA, 20 nt, Artificial Sequence
  HTT spacer sequence CTCN PAM
ggccuguaaucccagcauuu

SEQ ID NO: 12213 - RNA, 20 nt, Artificial Sequence
  HTT spacer sequence CTCN PAM
ucuucuugauauuaauguug

SEQ ID NO: 12214 - RNA, 20 nt, Artificial Sequence
  HTT spacer sequence CTCN PAM
aaaaaaaaaacaaaaaacac

SEQ ID NO: 12215 - RNA, 20 nt, Artificial Sequence
  HTT spacer sequence CTCN PAM
gucucaaaaaaaaaaacaaa

SEQ ID NO: 12216 - RNA, 20 nt, Artificial Sequence
  HTT spacer sequence CTCN PAM
uucauucugucacccaggcu

SEQ ID NO: 12217 - RNA, 20 nt, Artificial Sequence
  HTT spacer sequence CTCN PAM
agccugggugacagaaugaa

SEQ ID NO: 12218 - RNA, 20 nt, Artificial Sequence
  HTT spacer sequence CTCN PAM
gcucacugcaaccucugucu

SEQ ID NO: 12219 - RNA, 20 nt, Artificial Sequence
  HTT spacer sequence CTCN PAM
cugcaaccucugucuccugg

SEQ ID NO: 12220 - RNA, 20 nt, Artificial Sequence
  HTT spacer sequence CTCN PAM
gucuccuggguuccagugau

SEQ ID NO: 12221 - RNA, 20 nt, Artificial Sequence
  HTT spacer sequence CTCN PAM
uggguuccagugauucuccu

SEQ ID NO: 12222 - RNA, 20 nt, Artificial Sequence
  HTT spacer sequence CTCN PAM
ugcgucggucuccugaguag

SEQ ID NO: 12223 - RNA, 20 nt, Artificial Sequence
  HTT spacer sequence CTCN PAM
ugaguagcuguguuccuggg

SEQ ID NO: 12224 - RNA, 20 nt, Artificial Sequence
  HTT spacer sequence CTCN PAM
ggagaccgacgcaggagaau

SEQ ID NO: 12225 - RNA, 20 nt, Artificial Sequence
  HTT spacer sequence CTCN PAM
ucagaaaagugauaggaggu

SEQ ID NO: 12226 - RNA, 20 nt, Artificial Sequence
  HTT spacer sequence CTCN PAM
uaucacuuuucugaagagug

SEQ ID NO: 12227 - RNA, 20 nt, Artificial Sequence
  HTT spacer sequence CTCN PAM
uuucuacauuuccuuacuaa

SEQ ID NO: 12228 - RNA, 20 nt, Artificial Sequence
  HTT spacer sequence CTCN PAM
guuggugucucuucaaucuu

SEQ ID NO: 12229 - RNA, 20 nt, Artificial Sequence
  HTT spacer sequence CTCN PAM
ucaaucuuuccucacacuuu

SEQ ID NO: 12230 - RNA, 20 nt, Artificial Sequence
  HTT spacer sequence CTCN PAM
cacuuuucuuggguuuuucc

SEQ ID NO: 12231 - RNA, 20 nt, Artificial Sequence
  HTT spacer sequence CTCN PAM
ugauucaggaaaaacccaag

SEQ ID NO: 12232 - RNA, 20 nt, Artificial Sequence
  HTT spacer sequence CTCN PAM
uuuuguugcccaggcuagag

SEQ ID NO: 12233 - RNA, 20 nt, Artificial Sequence
  HTT spacer sequence CTCN PAM
agccugggcaacaaaaugag

SEQ ID NO: 12234 - RNA, 20 nt, Artificial Sequence
  HTT spacer sequence CTCN PAM
ucauacuccugggcucaagu

SEQ ID NO: 12235 - RNA, 20 nt, Artificial Sequence
  HTT spacer sequence CTCN PAM
uacuccugggcucaagugau

SEQ ID NO: 12236 - RNA, 20 nt, Artificial Sequence
  HTT spacer sequence CTCN PAM
ugggcucaagugauccuucc

SEQ ID NO: 12237 - RNA, 20 nt, Artificial Sequence
  HTT spacer sequence CTCN PAM
agugauccuuccaccucuga

SEQ ID NO: 12238 - RNA, 20 nt, Artificial Sequence
  HTT spacer sequence CTCN PAM
gaaaccccaaaauuugagaa

SEQ ID NO: 12239 - RNA, 20 nt, Artificial Sequence
  HTT spacer sequence CTCN PAM
aauuuugggguuucagaggu

SEQ ID NO: 12240 - RNA, 20 nt, Artificial Sequence
  HTT spacer sequence CTCN PAM
uuuaauuuagaaaguuuauu

SEQ ID NO: 12241 - RNA, 20 nt, Artificial Sequence
  HTT spacer sequence CTCN PAM
accuuggcaaaauaaacuuu

SEQ ID NO: 12242 - RNA, 20 nt, Artificial Sequence
  HTT spacer sequence CTCN PAM
uauaucaucacaggugugca

SEQ ID NO: 12243 - RNA, 20 nt, Artificial Sequence
  HTT spacer sequence CTCN PAM
guaucugccuaaauaauuuc

SEQ ID NO: 12244 - RNA, 20 nt, Artificial Sequence
  HTT spacer sequence CTCN PAM
guaagguuuucuuuucaaug

SEQ ID NO: 12245 - RNA, 20 nt, Artificial Sequence
  HTT spacer sequence CTCN PAM
uuguuagaaaagaaaaugcu

SEQ ID NO: 12246 - RNA, 20 nt, Artificial Sequence
  HTT spacer sequence CTCN PAM
auuuuacaggcugcucuuug

SEQ ID NO: 12247 - RNA, 20 nt, Artificial Sequence
  HTT spacer sequence CTCN PAM
aucuucccuuuccuugucaa

SEQ ID NO: 12248 - RNA, 20 nt, Artificial Sequence
  HTT spacer sequence CTCN PAM
uuacugugcacaugguugac

SEQ ID NO: 12249 - RNA, 20 nt, Artificial Sequence
  HTT spacer sequence CTCN PAM
ggggacacuauguugccugc

SEQ ID NO: 12250 - RNA, 20 nt, Artificial Sequence
  HTT spacer sequence CTCN PAM
acucgggggacacuauguug

SEQ ID NO: 12251 - RNA, 20 nt, Artificial Sequence
  HTT spacer sequence CTCN PAM
ccuuuuauuaugcaaauugg

SEQ ID NO: 12252 - RNA, 20 nt, Artificial Sequence
  HTT spacer sequence CTCN PAM
ucaagccugucuauaaaacc

SEQ ID NO: 12253 - RNA, 20 nt, Artificial Sequence
  HTT spacer sequence CTCN PAM
agccugucuauaaaacccug

SEQ ID NO: 12254 - RNA, 20 nt, Artificial Sequence
  HTT spacer sequence CTCN PAM
cucucuauaggagacagcua

SEQ ID NO: 12255 - RNA, 20 nt, Artificial Sequence
  HTT spacer sequence CTCN PAM
cucuauaggagacagcuauu

SEQ ID NO: 12256 - RNA, 20 nt, Artificial Sequence
  HTT spacer sequence CTCN PAM
cuauaggagacagcuauuca

SEQ ID NO: 12257 - RNA, 20 nt, Artificial Sequence
  HTT spacer sequence CTCN PAM
auaggagacagcuauucauu

SEQ ID NO: 12258 - RNA, 20 nt, Artificial Sequence
  HTT spacer sequence CTCN PAM
uauagagagagaggggugcc

SEQ ID NO: 12259 - RNA, 20 nt, Artificial Sequence
  HTT spacer sequence CTCN PAM
uucuuucaccuauuaaagcu

SEQ ID NO: 12260 - RNA, 20 nt, Artificial Sequence
  HTT spacer sequence CTCN PAM
acucuuaaccccacuccgug

SEQ ID NO: 12261 - RNA, 20 nt, Artificial Sequence
  HTT spacer sequence CTCN PAM
uaaccccacuccguguguau

SEQ ID NO: 12262 - RNA, 20 nt, Artificial Sequence
  HTT spacer sequence CTCN PAM
guguguaucuauguucuuga

SEQ ID NO: 12263 - RNA, 20 nt, Artificial Sequence
  HTT spacer sequence CTCN PAM
ugccaaggaaaucaagaaca

SEQ ID NO: 12264 - RNA, 20 nt, Artificial Sequence
  HTT spacer sequence CTCN PAM
ggaaauccugaugacauguu

SEQ ID NO: 12265 - RNA, 20 nt, Artificial Sequence
  HTT spacer sequence CTCN PAM
cuaaaauguauaaaaccaag

SEQ ID NO: 12266 - RNA, 20 nt, Artificial Sequence
  HTT spacer sequence CTCN PAM
ugucucccuaaaauguauaa

SEQ ID NO: 12267 - RNA, 20 nt, Artificial Sequence
  HTT spacer sequence CTCN PAM
aguuguccccgccuuucugg

SEQ ID NO: 12268 - RNA, 20 nt, Artificial Sequence
  HTT spacer sequence CTCN PAM
cugccucaaguuguccccgc

SEQ ID NO: 12269 - RNA, 20 nt, Artificial Sequence
  HTT spacer sequence CTCN PAM
cccugccucaaguugucccc

SEQ ID NO: 12270 - RNA, 20 nt, Artificial Sequence
  HTT spacer sequence CTCN PAM
cucccugccucaaguugucc

SEQ ID NO: 12271 - RNA, 20 nt, Artificial Sequence
  HTT spacer sequence CTCN PAM
gauaagccuuuccaaaggag

SEQ ID NO: 12272 - RNA, 20 nt, Artificial Sequence
  HTT spacer sequence CTCN PAM
uuuggaaaggcuuaucggag

SEQ ID NO: 12273 - RNA, 20 nt, Artificial Sequence
  HTT spacer sequence CTCN PAM
ugccuguaaugccagcacuu

SEQ ID NO: 12274 - RNA, 20 nt, Artificial Sequence
  HTT spacer sequence CTCN PAM
caaagugcuggcauuacagg

SEQ ID NO: 12275 - RNA, 20 nt, Artificial Sequence
  HTT spacer sequence CTCN PAM
gccucccaaagugcuggcau

SEQ ID NO: 12276 - RNA, 20 nt, Artificial Sequence
  HTT spacer sequence CTCN PAM
ggugauccacccaccuccgc

SEQ ID NO: 12277 - RNA, 20 nt, Artificial Sequence
  HTT spacer sequence CTCN PAM
ugaccucaggugauccaccc

SEQ ID NO: 12278 - RNA, 20 nt, Artificial Sequence
  HTT spacer sequence CTCN PAM
aacuccugaccucaggugau

SEQ ID NO: 12279 - RNA, 20 nt, Artificial Sequence
  HTT spacer sequence CTCN PAM
caaacuccugaccucaggug

SEQ ID NO: 12280 - RNA, 20 nt, Artificial Sequence
  HTT spacer sequence CTCN PAM
acuaaaaauacaaaaaauua

SEQ ID NO: 12281 - RNA, 20 nt, Artificial Sequence
  HTT spacer sequence CTCN PAM
ggaggcugaggcaggagaau

SEQ ID NO: 12282 - RNA, 20 nt, Artificial Sequence
  HTT spacer sequence CTCN PAM
cgaguagcugggauuacagg

SEQ ID NO: 12283 - RNA, 20 nt, Artificial Sequence
  HTT spacer sequence CTCN PAM
gccucccgaguagcugggau

SEQ ID NO: 12284 - RNA, 20 nt, Artificial Sequence
  HTT spacer sequence CTCN PAM
ugccucagccucccgaguag

SEQ ID NO: 12285 - RNA, 20 nt, Artificial Sequence
  HTT spacer sequence CTCN PAM
uccuucuggguucaagcuau

SEQ ID NO: 12286 - RNA, 20 nt, Artificial Sequence
  HTT spacer sequence CTCN PAM
cugcaaccucuuccuucugg

SEQ ID NO: 12287 - RNA, 20 nt, Artificial Sequence
  HTT spacer sequence CTCN PAM
gcucacugcaaccucuuccu

SEQ ID NO: 12288 - RNA, 20 nt, Artificial Sequence
  HTT spacer sequence CTCN PAM
agccugggcaacaagaguga

SEQ ID NO: 12289 - RNA, 20 nt, Artificial Sequence
  HTT spacer sequence CTCN PAM
uguugcccaggcuggagugc

SEQ ID NO: 12290 - RNA, 20 nt, Artificial Sequence
  HTT spacer sequence CTCN PAM
aucucagaaaaaaaaaaaaa

SEQ ID NO: 12291 - RNA, 20 nt, Artificial Sequence
  HTT spacer sequence CTCN PAM
gaaaaaaaaaaaaaaggccu

SEQ ID NO: 12292 - RNA, 20 nt, Artificial Sequence
  HTT spacer sequence CTCN PAM
cgccuguaaucccagcacuu

SEQ ID NO: 12293 - RNA, 20 nt, Artificial Sequence
  HTT spacer sequence CTCN PAM
gcuucccaaagugcugggau

SEQ ID NO: 12294 - RNA, 20 nt, Artificial Sequence
  HTT spacer sequence CTCN PAM
ugacuuugugaccugcccgc

SEQ ID NO: 12295 - RNA, 20 nt, Artificial Sequence
  HTT spacer sequence CTCN PAM
aucuccugacuuugugaccu

SEQ ID NO: 12296 - RNA, 20 nt, Artificial Sequence
  HTT spacer sequence CTCN PAM
acuaaaaaauacaaaaaacu

SEQ ID NO: 12297 - RNA, 20 nt, Artificial Sequence
  HTT spacer sequence CTCN PAM
ccaccacacccagcuaguuu

SEQ ID NO: 12298 - RNA, 20 nt, Artificial Sequence
  HTT spacer sequence CTCN PAM
gcaggcugaggcaggagaau

SEQ ID NO: 12299 - RNA, 20 nt, Artificial Sequence
  HTT spacer sequence CTCN PAM
gccugccgaguagcugggac

SEQ ID NO: 12300 - RNA, 20 nt, Artificial Sequence
  HTT spacer sequence CTCN PAM
ugccucagccugccgaguag

SEQ ID NO: 12301 - RNA, 20 nt, Artificial Sequence
  HTT spacer sequence CTCN PAM
ccgguucacgccauucuccu

SEQ ID NO: 12302 - RNA, 20 nt, Artificial Sequence
  HTT spacer sequence CTCN PAM
gccuccccgguucacgccau

SEQ ID NO: 12303 - RNA, 20 nt, Artificial Sequence
  HTT spacer sequence CTCN PAM
cugcaagcuccgccuccccg

SEQ ID NO: 12304 - RNA, 20 nt, Artificial Sequence
  HTT spacer sequence CTCN PAM
gcucacugcaagcuccgccu

SEQ ID NO: 12305 - RNA, 20 nt, Artificial Sequence
  HTT spacer sequence CTCN PAM
agcccggacgacagggcaag

SEQ ID NO: 12306 - RNA, 20 nt, Artificial Sequence
  HTT spacer sequence CTCN PAM
aucucaaauuaaaaaaaaaa

SEQ ID NO: 12307 - RNA, 20 nt, Artificial Sequence
  HTT spacer sequence CTCN PAM
aauuaaaaaaaaaaaaaaaa

SEQ ID NO: 12308 - RNA, 20 nt, Artificial Sequence
  HTT spacer sequence CTCN PAM
uuuuuuuuuuuuuuuuuuuu

SEQ ID NO: 12309 - RNA, 20 nt, Artificial Sequence
  HTT spacer sequence CTCN PAM
cuuuuuuuuuuuuuuuuuuu

SEQ ID NO: 12310 - RNA, 20 nt, Artificial Sequence
  HTT spacer sequence CTCN PAM
cucuuuuuuuuuuuuuuuuu

SEQ ID NO: 12311 - RNA, 20 nt, Artificial Sequence
  HTT spacer sequence CTCN PAM
cucucuuuuuuuuuuuuuuu

SEQ ID NO: 12312 - RNA, 20 nt, Artificial Sequence
  HTT spacer sequence CTCN PAM
gugagcagaaggaugacuuu

SEQ ID NO: 12313 - RNA, 20 nt, Artificial Sequence
  HTT spacer sequence CTCN PAM
cugagauagaugcauauucu

SEQ ID NO: 12314 - RNA, 20 nt, Artificial Sequence
  HTT spacer sequence CTCN PAM
cauuccauucaaagucaucc

SEQ ID NO: 12315 - RNA, 20 nt, Artificial Sequence
  HTT spacer sequence CTCN PAM
agguauguuccuuucacaua

SEQ ID NO: 12316 - RNA, 20 nt, Artificial Sequence
  HTT spacer sequence CTCN PAM
gccucccaaguagcugggac

SEQ ID NO: 12317 - RNA, 20 nt, Artificial Sequence
  HTT spacer sequence CTCN PAM
caaguagcugggaccacaag

SEQ ID NO: 12318 - RNA, 20 nt, Artificial Sequence
  HTT spacer sequence CTCN PAM
cuauguguccaggcuggucu

SEQ ID NO: 12319 - RNA, 20 nt, Artificial Sequence
  HTT spacer sequence CTCN PAM
gggguuuuagaccagccugg

SEQ ID NO: 12320 - RNA, 20 nt, Artificial Sequence
  HTT spacer sequence CTCN PAM
aaugguccucccgccucagc

SEQ ID NO: 12321 - RNA, 20 nt, Artificial Sequence
  HTT spacer sequence CTCN PAM
cgccucagccucccgaaaug

SEQ ID NO: 12322 - RNA, 20 nt, Artificial Sequence
  HTT spacer sequence CTCN PAM
gccucccgaaaugcugggau

SEQ ID NO: 12323 - RNA, 20 nt, Artificial Sequence
  HTT spacer sequence CTCN PAM
cgaaaugcugggauuacagg

SEQ ID NO: 12324 - RNA, 20 nt, Artificial Sequence
  HTT spacer sequence CTCN PAM
ugccuguaaucccagcauuu

SEQ ID NO: 12325 - RNA, 20 nt, Artificial Sequence
  HTT spacer sequence CTCN PAM
ccaaaaccucaugguuuucc

SEQ ID NO: 12326 - RNA, 20 nt, Artificial Sequence
  HTT spacer sequence CTCN PAM
aaaaccucaugguuuucccu

SEQ ID NO: 12327 - RNA, 20 nt, Artificial Sequence
  HTT spacer sequence CTCN PAM
ugguuuucccuguucucauc

SEQ ID NO: 12328 - RNA, 20 nt, Artificial Sequence
  HTT spacer sequence CTCN PAM
uccccugcacccucccuucc

SEQ ID NO: 12329 - RNA, 20 nt, Artificial Sequence
  HTT spacer sequence CTCN PAM
cuuccccuggaguacucacc

SEQ ID NO: 12330 - RNA, 20 nt, Artificial Sequence
  HTT spacer sequence CTCN PAM
aggggaagggagggugcagg

SEQ ID NO: 12331 - RNA, 20 nt, Artificial Sequence
  HTT spacer sequence CTCN PAM
ccuggccuuggaggucuggu

SEQ ID NO: 12332 - RNA, 20 nt, Artificial Sequence
  HTT spacer sequence CTCN PAM
aaggccaggugaguacucca

SEQ ID NO: 12333 - RNA, 20 nt, Artificial Sequence
  HTT spacer sequence CTCN PAM
caccagaccuccaaggccag

SEQ ID NO: 12334 - RNA, 20 nt, Artificial Sequence
  HTT spacer sequence CTCN PAM
ucacaugcugugccuagaau

SEQ ID NO: 12335 - RNA, 20 nt, Artificial Sequence
  HTT spacer sequence CTCN PAM
ccucugcggccugugcuuca

SEQ ID NO: 12336 - RNA, 20 nt, Artificial Sequence
  HTT spacer sequence CTCN PAM
gcggccugugcuucaccgcc

SEQ ID NO: 12337 - RNA, 20 nt, Artificial Sequence
  HTT spacer sequence CTCN PAM
cugucaaggcggugaagcac

SEQ ID NO: 12338 - RNA, 20 nt, Artificial Sequence
  HTT spacer sequence CTCN PAM
cuucggcucauucucgaagu

SEQ ID NO: 12339 - RNA, 20 nt, Artificial Sequence
  HTT spacer sequence CTCN PAM
uucucgaagucucaaacuuc

SEQ ID NO: 12340 - RNA, 20 nt, Artificial Sequence
  HTT spacer sequence CTCN PAM
aagucucaaacuucacuucu

SEQ ID NO: 12341 - RNA, 20 nt, Artificial Sequence
  HTT spacer sequence CTCN PAM
aacuucacuucuccugugcg

SEQ ID NO: 12342 - RNA, 20 nt, Artificial Sequence
  HTT spacer sequence CTCN PAM
ugugcgcugauucugaauuc

SEQ ID NO: 12343 - RNA, 20 nt, Artificial Sequence
  HTT spacer sequence CTCN PAM
ucugcuuggcguguuguuca

SEQ ID NO: 12344 - RNA, 20 nt, Artificial Sequence
  HTT spacer sequence CTCN PAM
gcagugcacaguggugauga

SEQ ID NO: 12345 - RNA, 20 nt, Artificial Sequence
  HTT spacer sequence CTCN PAM
ggaccucugcuuuaucauua

SEQ ID NO: 12346 - RNA, 20 nt, Artificial Sequence
  HTT spacer sequence CTCN PAM
gcuuuaucauuagaacagac

SEQ ID NO: 12347 - RNA, 20 nt, Artificial Sequence
  HTT spacer sequence CTCN PAM
ugcgguuucccacgacauuc

SEQ ID NO: 12348 - RNA, 20 nt, Artificial Sequence
  HTT spacer sequence CTCN PAM
cuuggaagaugagccgugag

SEQ ID NO: 12349 - RNA, 20 nt, Artificial Sequence
  HTT spacer sequence CTCN PAM
ucuuccaagugagaagugaa

SEQ ID NO: 12350 - RNA, 20 nt, Artificial Sequence
  HTT spacer sequence CTCN PAM
cggcucaucuuccaagugag

SEQ ID NO: 12351 - RNA, 20 nt, Artificial Sequence
  HTT spacer sequence CTCN PAM
agucaagcagaagcacagcc

SEQ ID NO: 12352 - RNA, 20 nt, Artificial Sequence
  HTT spacer sequence CTCN PAM
aaagcccacuuguuuccuua

SEQ ID NO: 12353 - RNA, 20 nt, Artificial Sequence
  HTT spacer sequence CTCN PAM
ggaaagaccuaugucccagu

SEQ ID NO: 12354 - RNA, 20 nt, Artificial Sequence
  HTT spacer sequence CTCN PAM
uuaguaaaagguccgguugg

SEQ ID NO: 12355 - RNA, 20 nt, Artificial Sequence
  HTT spacer sequence CTCN PAM
uccccaggccaggggagggg

SEQ ID NO: 12356 - RNA, 20 nt, Artificial Sequence
  HTT spacer sequence CTCN PAM
ccaggccaggggaggggucc

SEQ ID NO: 12357 - RNA, 20 nt, Artificial Sequence
  HTT spacer sequence CTCN PAM
ccuggccuggggaggaggau

SEQ ID NO: 12358 - RNA, 20 nt, Artificial Sequence
  HTT spacer sequence CTCN PAM
cugggguuggagccuuuagu

SEQ ID NO: 12359 - RNA, 20 nt, Artificial Sequence
  HTT spacer sequence CTCN PAM
aaccccagggaggaccccuc

SEQ ID NO: 12360 - RNA, 20 nt, Artificial Sequence
  HTT spacer sequence CTCN PAM
gacccccuacuaaaggcucc

SEQ ID NO: 12361 - RNA, 20 nt, Artificial Sequence
  HTT spacer sequence CTCN PAM
cuuccuuuguagcacuuacu

SEQ ID NO: 12362 - RNA, 20 nt, Artificial Sequence
  HTT spacer sequence CTCN PAM
guggagagggcucucuuuua

SEQ ID NO: 12363 - RNA, 20 nt, Artificial Sequence
  HTT spacer sequence CTCN PAM
acugagcaccucccuuccuu

SEQ ID NO: 12364 - RNA, 20 nt, Artificial Sequence
  HTT spacer sequence CTCN PAM
ccacugagcaccucccuucc

SEQ ID NO: 12365 - RNA, 20 nt, Artificial Sequence
  HTT spacer sequence CTCN PAM
cuuuuauguauuauauuucu

SEQ ID NO: 12366 - RNA, 20 nt, Artificial Sequence
  HTT spacer sequence CTCN PAM
uuuauguauuauauuucuuu

SEQ ID NO: 12367 - RNA, 20 nt, Artificial Sequence
  HTT spacer sequence CTCN PAM
ccaugaaagaaauauaauac

SEQ ID NO: 12368 - RNA, 20 nt, Artificial Sequence
  HTT spacer sequence CTCN PAM
gcugaucccugauccauauc

SEQ ID NO: 12369 - RNA, 20 nt, Artificial Sequence
  HTT spacer sequence CTCN PAM
ggacugaaacaccucugcug

SEQ ID NO: 12370 - RNA, 20 nt, Artificial Sequence
  HTT spacer sequence CTCN PAM
caagccacgcugacuuucuu

SEQ ID NO: 12371 - RNA, 20 nt, Artificial Sequence
  HTT spacer sequence CTCN PAM
caacucccaagccacgcuga

SEQ ID NO: 12372 - RNA, 20 nt, Artificial Sequence
  HTT spacer sequence CTCN PAM
agauaucuuaagacuagugg

SEQ ID NO: 12373 - RNA, 20 nt, Artificial Sequence
  HTT spacer sequence CTCN PAM
acuagucuuaagauaucuug

SEQ ID NO: 12374 - RNA, 20 nt, Artificial Sequence
  HTT spacer sequence CTCN PAM
gggcugccugguucuuguag

SEQ ID NO: 12375 - RNA, 20 nt, Artificial Sequence
  HTT spacer sequence CTCN PAM
gucguccuacaagaaccagg

SEQ ID NO: 12376 - RNA, 20 nt, Artificial Sequence
  HTT spacer sequence CTCN PAM
gcauacugcacccccagggg

SEQ ID NO: 12377 - RNA, 20 nt, Artificial Sequence
  HTT spacer sequence CTCN PAM
gaacagugcaaaugucaguc

SEQ ID NO: 12378 - RNA, 20 nt, Artificial Sequence
  HTT spacer sequence CTCN PAM
gccacugacagauagacuga

SEQ ID NO: 12379 - RNA, 20 nt, Artificial Sequence
  HTT spacer sequence CTCN PAM
aaggcuggcucugccacuga

SEQ ID NO: 12380 - RNA, 20 nt, Artificial Sequence
  HTT spacer sequence CTCN PAM
uugcaccccugcuccaaggc

SEQ ID NO: 12381 - RNA, 20 nt, Artificial Sequence
  HTT spacer sequence CTCN PAM
gcacuggccaggcaugcaga

SEQ ID NO: 12382 - RNA, 20 nt, Artificial Sequence
  HTT spacer sequence CTCN PAM
ucuagauggggccuucuguc

SEQ ID NO: 12383 - RNA, 20 nt, Artificial Sequence
  HTT spacer sequence CTCN PAM
gucucaucuagauggggccu

SEQ ID NO: 12384 - RNA, 20 nt, Artificial Sequence
  HTT spacer sequence CTCN PAM
uggcagcucaaacggccugg

SEQ ID NO: 12385 - RNA, 20 nt, Artificial Sequence
  HTT spacer sequence CTCN PAM
aacggccuggcagaugcuug

SEQ ID NO: 12386 - RNA, 20 nt, Artificial Sequence
  HTT spacer sequence CTCN PAM
aagcaucugccaggccguuu

SEQ ID NO: 12387 - RNA, 20 nt, Artificial Sequence
  HTT spacer sequence CTCN PAM
ccaagcaucugccaggccgu

SEQ ID NO: 12388 - RNA, 20 nt, Artificial Sequence
  HTT spacer sequence CTCN PAM
cuccaagcaucugccaggcc

SEQ ID NO: 12389 - RNA, 20 nt, Artificial Sequence
  HTT spacer sequence CTCN PAM
agaagcccccucucuccaag

SEQ ID NO: 12390 - RNA, 20 nt, Artificial Sequence
  HTT spacer sequence CTCN PAM
ucccagaaauggugcugucu

SEQ ID NO: 12391 - RNA, 20 nt, Artificial Sequence
  HTT spacer sequence CTCN PAM
cuucccagaaauggugcugu

SEQ ID NO: 12392 - RNA, 20 nt, Artificial Sequence
  HTT spacer sequence CTCN PAM
caggugacucucuucccaga

SEQ ID NO: 12393 - RNA, 20 nt, Artificial Sequence
  HTT spacer sequence CTCN PAM
ucccucccaggugacucucu

SEQ ID NO: 12394 - RNA, 20 nt, Artificial Sequence
  HTT spacer sequence CTCN PAM
ggcuuggaggugaagagagg

SEQ ID NO: 12395 - RNA, 20 nt, Artificial Sequence
  HTT spacer sequence CTCN PAM
aagccggagcguggccucau

SEQ ID NO: 12396 - RNA, 20 nt, Artificial Sequence
  HTT spacer sequence CTCN PAM
ucaccuccaagccggagcgu

SEQ ID NO: 12397 - RNA, 20 nt, Artificial Sequence
  HTT spacer sequence CTCN PAM
cuucaccuccaagccggagc

SEQ ID NO: 12398 - RNA, 20 nt, Artificial Sequence
  HTT spacer sequence CTCN PAM
aauucuuucuugcagcagcc

SEQ ID NO: 12399 - RNA, 20 nt, Artificial Sequence
  HTT spacer sequence CTCN PAM
uggccucaagcaaucuuccc

SEQ ID NO: 12400 - RNA, 20 nt, Artificial Sequence
  HTT spacer sequence CTCN PAM
agcaaucuucccaccucagc

SEQ ID NO: 12401 - RNA, 20 nt, Artificial Sequence
  HTT spacer sequence CTCN PAM
gccuccccaagcgcugggau

SEQ ID NO: 12402 - RNA, 20 nt, Artificial Sequence
  HTT spacer sequence CTCN PAM
ccaagcgcugggauuauaga

SEQ ID NO: 12403 - RNA, 20 nt, Artificial Sequence
  HTT spacer sequence CTCN PAM
ugucuauaaucccagcgcuu

SEQ ID NO: 12404 - RNA, 20 nt, Artificial Sequence
  HTT spacer sequence CTCN PAM
auaaaaucaucuuuuauugg

SEQ ID NO: 12405 - RNA, 20 nt, Artificial Sequence
  HTT spacer sequence CTCN PAM
guggcaggaacugggugcag

SEQ ID NO: 12406 - RNA, 20 nt, Artificial Sequence
  HTT spacer sequence CTCN PAM
uaaaauccugagaacuuccu

SEQ ID NO: 12407 - RNA, 20 nt, Artificial Sequence
  HTT spacer sequence CTCN PAM
ggauuuuaggagcucugugg

SEQ ID NO: 12408 - RNA, 20 nt, Artificial Sequence
  HTT spacer sequence CTCN PAM
cccaggaaguucucaggauu

SEQ ID NO: 12409 - RNA, 20 nt, Artificial Sequence
  HTT spacer sequence CTCN PAM
uuagaacaaaagaugcucac

SEQ ID NO: 12410 - RNA, 20 nt, Artificial Sequence
  HTT spacer sequence CTCN PAM
ugguggcuccuggauaggag

SEQ ID NO: 12411 - RNA, 20 nt, Artificial Sequence
  HTT spacer sequence CTCN PAM
uggauaggagugaaucacca

SEQ ID NO: 12412 - RNA, 20 nt, Artificial Sequence
  HTT spacer sequence CTCN PAM
uauccaggagccaccaagag

SEQ ID NO: 12413 - RNA, 20 nt, Artificial Sequence
  HTT spacer sequence CTCN PAM
ggcuugaucuuucuggugau

SEQ ID NO: 12414 - RNA, 20 nt, Artificial Sequence
  HTT spacer sequence CTCN PAM
aaaaaaaaaaaaaaaacuuu

SEQ ID NO: 12415 - RNA, 20 nt, Artificial Sequence
  HTT spacer sequence CTCN PAM
aucucaaaaaaaaaaaaaaa

SEQ ID NO: 12416 - RNA, 20 nt, Artificial Sequence
  HTT spacer sequence CTCN PAM
cucuguugcccaggcuggag

SEQ ID NO: 12417 - RNA, 20 nt, Artificial Sequence
  HTT spacer sequence CTCN PAM
guugcccaggcuggagugca

SEQ ID NO: 12418 - RNA, 20 nt, Artificial Sequence
  HTT spacer sequence CTCN PAM
agccugggcaacagagugag

SEQ ID NO: 12419 - RNA, 20 nt, Artificial Sequence
  HTT spacer sequence CTCN PAM
gcucacuacaagcucugccu

SEQ ID NO: 12420 - RNA, 20 nt, Artificial Sequence
  HTT spacer sequence CTCN PAM
cuacaagcucugccucccag

SEQ ID NO: 12421 - RNA, 20 nt, Artificial Sequence
  HTT spacer sequence CTCN PAM
gccucccagguucaagugau

SEQ ID NO: 12422 - RNA, 20 nt, Artificial Sequence
  HTT spacer sequence CTCN PAM
cagguucaagugauucuccu

SEQ ID NO: 12423 - RNA, 20 nt, Artificial Sequence
  HTT spacer sequence CTCN PAM
ugccucagccuccugagcag

SEQ ID NO: 12424 - RNA, 20 nt, Artificial Sequence
  HTT spacer sequence CTCN PAM
gccuccugagcaguugggac

SEQ ID NO: 12425 - RNA, 20 nt, Artificial Sequence
  HTT spacer sequence CTCN PAM
ugagcaguugggacuacagg

SEQ ID NO: 12426 - RNA, 20 nt, Artificial Sequence
  HTT spacer sequence CTCN PAM
ggaggcugaggcaggagaau

SEQ ID NO: 12427 - RNA, 20 nt, Artificial Sequence
  HTT spacer sequence CTCN PAM
gcuaaaaauacaaaaauuag

SEQ ID NO: 12428 - RNA, 20 nt, Artificial Sequence
  HTT spacer sequence CTCN PAM
aacuccuuaccuugugaucc

SEQ ID NO: 12429 - RNA, 20 nt, Artificial Sequence
  HTT spacer sequence CTCN PAM
uuaccuugugauccgccugc

SEQ ID NO: 12430 - RNA, 20 nt, Artificial Sequence
  HTT spacer sequence CTCN PAM
gccucccaaagugcugggau

SEQ ID NO: 12431 - RNA, 20 nt, Artificial Sequence
  HTT spacer sequence CTCN PAM
caaagugcugggauuacagg

SEQ ID NO: 12432 - RNA, 20 nt, Artificial Sequence
  HTT spacer sequence CTCN PAM
ugccuguaaucccagcacuu

SEQ ID NO: 12433 - RNA, 20 nt, Artificial Sequence
  HTT spacer sequence CTCN PAM
ccuugaaauuaauuuuugug

SEQ ID NO: 12434 - RNA, 20 nt, Artificial Sequence
  HTT spacer sequence CTCN PAM
uuacaugauuuuucuccccu

SEQ ID NO: 12435 - RNA, 20 nt, Artificial Sequence
  HTT spacer sequence CTCN PAM
cuuuacaugauuuuucuccc

SEQ ID NO: 12436 - RNA, 20 nt, Artificial Sequence
  HTT spacer sequence CTCN PAM
ugaaaauauccuauuuaggc

SEQ ID NO: 12437 - RNA, 20 nt, Artificial Sequence
  HTT spacer sequence CTCN PAM
aacaaucugacaugggaaug

SEQ ID NO: 12438 - RNA, 20 nt, Artificial Sequence
  HTT spacer sequence CTCN PAM
aaggugugcuaacauuccca

SEQ ID NO: 12439 - RNA, 20 nt, Artificial Sequence
  HTT spacer sequence CTCN PAM
cuaaggugugcuaacauucc

SEQ ID NO: 12440 - RNA, 20 nt, Artificial Sequence
  HTT spacer sequence CTCN PAM
agaaaaacaaaacuucccaa

SEQ ID NO: 12441 - RNA, 20 nt, Artificial Sequence
  HTT spacer sequence CTCN PAM
uuuaugaauacaaaacccuu

SEQ ID NO: 12442 - RNA, 20 nt, Artificial Sequence
  HTT spacer sequence CTCN PAM
uucuuuagcaugauaaaaua

SEQ ID NO: 12443 - RNA, 20 nt, Artificial Sequence
  HTT spacer sequence CTCN PAM
agcgugugcccuuaucgggu

SEQ ID NO: 12444 - RNA, 20 nt, Artificial Sequence
  HTT spacer sequence CTCN PAM
uauuccuaauuuuaacauua

SEQ ID NO: 12445 - RNA, 20 nt, Artificial Sequence
  HTT spacer sequence CTCN PAM
aaaaaaaaaaagaagaaaga

SEQ ID NO: 12446 - RNA, 20 nt, Artificial Sequence
  HTT spacer sequence CTCN PAM
gucucaaaaaaaaaaaagaa

SEQ ID NO: 12447 - RNA, 20 nt, Artificial Sequence
  HTT spacer sequence CTCN PAM
guugccaggcuggagugcag

SEQ ID NO: 12448 - RNA, 20 nt, Artificial Sequence
  HTT spacer sequence CTCN PAM
agccuggcaacagagcaaga

SEQ ID NO: 12449 - RNA, 20 nt, Artificial Sequence
  HTT spacer sequence CTCN PAM
cugcacgccccccgccuccc

SEQ ID NO: 12450 - RNA, 20 nt, Artificial Sequence
  HTT spacer sequence CTCN PAM
cagguucaagcgauucuccu

SEQ ID NO: 12451 - RNA, 20 nt, Artificial Sequence
  HTT spacer sequence CTCN PAM
ugccucagccucccgaguag

SEQ ID NO: 12452 - RNA, 20 nt, Artificial Sequence
  HTT spacer sequence CTCN PAM
gccucccgaguagcugggac

SEQ ID NO: 12453 - RNA, 20 nt, Artificial Sequence
  HTT spacer sequence CTCN PAM
cgaguagcugggacuacagg

SEQ ID NO: 12454 - RNA, 20 nt, Artificial Sequence
  HTT spacer sequence CTCN PAM
ggaggcugaggcaggagaau

SEQ ID NO: 12455 - RNA, 20 nt, Artificial Sequence
  HTT spacer sequence CTCN PAM
acuaaaauacaaaaaaaaau

SEQ ID NO: 12456 - RNA, 20 nt, Artificial Sequence
  HTT spacer sequence CTCN PAM
caaccucacguacugggauu

SEQ ID NO: 12457 - RNA, 20 nt, Artificial Sequence
  HTT spacer sequence CTCN PAM
cguacugggauuaccggugu

SEQ ID NO: 12458 - RNA, 20 nt, Artificial Sequence
  HTT spacer sequence CTCN PAM
caccgguaaucccaguacgu

SEQ ID NO: 12459 - RNA, 20 nt, Artificial Sequence
  HTT spacer sequence CTCN PAM
agauaaauccauaauaaguu

SEQ ID NO: 12460 - RNA, 20 nt, Artificial Sequence
  HTT spacer sequence CTCN PAM
gcuaugauguuugguagguu

SEQ ID NO: 12461 - RNA, 20 nt, Artificial Sequence
  HTT spacer sequence CTCN PAM
gacacugacgucagccuaca

SEQ ID NO: 12462 - RNA, 20 nt, Artificial Sequence
  HTT spacer sequence CTCN PAM
gcaguagacugugcugcugu

SEQ ID NO: 12463 - RNA, 20 nt, Artificial Sequence
  HTT spacer sequence CTCN PAM
caggcagccacgcagucaca

SEQ ID NO: 12464 - RNA, 20 nt, Artificial Sequence
  HTT spacer sequence CTCN PAM
ugaaaauaaagaugguccca

SEQ ID NO: 12465 - RNA, 20 nt, Artificial Sequence
  HTT spacer sequence CTCN PAM
guuaauguuuauguuugucu

SEQ ID NO: 12466 - RNA, 20 nt, Artificial Sequence
  HTT spacer sequence CTCN PAM
ucuggcuuccagccccgaaa

SEQ ID NO: 12467 - RNA, 20 nt, Artificial Sequence
  HTT spacer sequence CTCN PAM
cacccucuucuggcuuccag

SEQ ID NO: 12468 - RNA, 20 nt, Artificial Sequence
  HTT spacer sequence CTCN PAM
gcgcucccacccucuucugg

SEQ ID NO: 12469 - RNA, 20 nt, Artificial Sequence
  HTT spacer sequence CTCN PAM
cugcgcucccacccucuucu

SEQ ID NO: 12470 - RNA, 20 nt, Artificial Sequence
  HTT spacer sequence CTCN PAM
cucugcgcucccacccucuu

SEQ ID NO: 12471 - RNA, 20 nt, Artificial Sequence
  HTT spacer sequence CTCN PAM
cucucugcgcucccacccuc

SEQ ID NO: 12472 - RNA, 20 nt, Artificial Sequence
  HTT spacer sequence CTCN PAM
gccuuccagauaccuugucc

SEQ ID NO: 12473 - RNA, 20 nt, Artificial Sequence
  HTT spacer sequence CTCN PAM
uuuuuuuuugagguggcguc

SEQ ID NO: 12474 - RNA, 20 nt, Artificial Sequence
  HTT spacer sequence CTCN PAM
aaaaaaaaggaggcuuagcu

SEQ ID NO: 12475 - RNA, 20 nt, Artificial Sequence
  HTT spacer sequence CTCN PAM
cucuguugccaggcuggagu

SEQ ID NO: 12476 - RNA, 20 nt, Artificial Sequence
  HTT spacer sequence CTCN PAM
guugccaggcuggagugcaa

SEQ ID NO: 12477 - RNA, 20 nt, Artificial Sequence
  HTT spacer sequence CTCN PAM
agccuggcaacagagugaga

SEQ ID NO: 12478 - RNA, 20 nt, Artificial Sequence
  HTT spacer sequence CTCN PAM
gcucacugcaaccuccaccu

SEQ ID NO: 12479 - RNA, 20 nt, Artificial Sequence
  HTT spacer sequence CTCN PAM
cugcaaccuccaccucccug

SEQ ID NO: 12480 - RNA, 20 nt, Artificial Sequence
  HTT spacer sequence CTCN PAM
accucccugguucaagcgau

SEQ ID NO: 12481 - RNA, 20 nt, Artificial Sequence
  HTT spacer sequence CTCN PAM
cugguucaagcgauucuccu

SEQ ID NO: 12482 - RNA, 20 nt, Artificial Sequence
  HTT spacer sequence CTCN PAM
ugccucagccucccgaguag

SEQ ID NO: 12483 - RNA, 20 nt, Artificial Sequence
  HTT spacer sequence CTCN PAM
gccucccgaguagcugggau

SEQ ID NO: 12484 - RNA, 20 nt, Artificial Sequence
  HTT spacer sequence CTCN PAM
cgaguagcugggauuacagg

SEQ ID NO: 12485 - RNA, 20 nt, Artificial Sequence
  HTT spacer sequence CTCN PAM
ggaggcugaggcaggagaau

SEQ ID NO: 12486 - RNA, 20 nt, Artificial Sequence
  HTT spacer sequence CTCN PAM
cgccacuacacccagcugau

SEQ ID NO: 12487 - RNA, 20 nt, Artificial Sequence
  HTT spacer sequence CTCN PAM
acuaaaauuacaaaaaucag

SEQ ID NO: 12488 - RNA, 20 nt, Artificial Sequence
  HTT spacer sequence CTCN PAM
aucucuugacgucaugaucu

SEQ ID NO: 12489 - RNA, 20 nt, Artificial Sequence
  HTT spacer sequence CTCN PAM
ugacgucaugaucuguccac

SEQ ID NO: 12490 - RNA, 20 nt, Artificial Sequence
  HTT spacer sequence CTCN PAM
gccucccaaagugcugggau

SEQ ID NO: 12491 - RNA, 20 nt, Artificial Sequence
  HTT spacer sequence CTCN PAM
caaagugcugggauuauagg

SEQ ID NO: 12492 - RNA, 20 nt, Artificial Sequence
  HTT spacer sequence CTCN PAM
gacggggcacggugggucac

SEQ ID NO: 12493 - RNA, 20 nt, Artificial Sequence
  HTT spacer sequence CTCN PAM
ugagcauaggggacuaaaaa

SEQ ID NO: 12494 - RNA, 20 nt, Artificial Sequence
  HTT spacer sequence CTCN PAM
agaggcuuagcucagacggg

SEQ ID NO: 12495 - RNA, 20 nt, Artificial Sequence
  HTT spacer sequence CTCN PAM
gaaauauggaugguccucug

SEQ ID NO: 12496 - RNA, 20 nt, Artificial Sequence
  HTT spacer sequence CTCN PAM
gggaccauaccaaucccuuc

SEQ ID NO: 12497 - RNA, 20 nt, Artificial Sequence
  HTT spacer sequence CTCN PAM
aaacuggaacuuggauuaag

SEQ ID NO: 12498 - RNA, 20 nt, Artificial Sequence
  HTT spacer sequence CTCN PAM
ugggacacuagaaguccuag

SEQ ID NO: 12499 - RNA, 20 nt, Artificial Sequence
  HTT spacer sequence CTCN PAM
ccggaagaagauaauaccuu

SEQ ID NO: 12500 - RNA, 20 nt, Artificial Sequence
  HTT spacer sequence CTCN PAM
ggaagaagauaauaccuuaa

SEQ ID NO: 12501 - RNA, 20 nt, Artificial Sequence
  HTT spacer sequence CTCN PAM
cuaauaaauuucaaauacaa

SEQ ID NO: 12502 - RNA, 20 nt, Artificial Sequence
  HTT spacer sequence CTCN PAM
aauaaauuucaaauacaaug

SEQ ID NO: 12503 - RNA, 20 nt, Artificial Sequence
  HTT spacer sequence CTCN PAM
uaucacguuccugguaauuu

SEQ ID NO: 12504 - RNA, 20 nt, Artificial Sequence
  HTT spacer sequence CTCN PAM
ugccugaaguuucugcuaau

SEQ ID NO: 12505 - RNA, 20 nt, Artificial Sequence
  HTT spacer sequence CTCN PAM
gaggccuagaaucuaucuag

SEQ ID NO: 12506 - RNA, 20 nt, Artificial Sequence
  HTT spacer sequence CTCN PAM
gaggguauguuucucaugcc

SEQ ID NO: 12507 - RNA, 20 nt, Artificial Sequence
  HTT spacer sequence CTCN PAM
auuaucuagacacuagauag

SEQ ID NO: 12508 - RNA, 20 nt, Artificial Sequence
  HTT spacer sequence CTCN PAM
uugaacaugggaaacauagu

SEQ ID NO: 12509 - RNA, 20 nt, Artificial Sequence
  HTT spacer sequence CTCN PAM
aaaguaugcuguugucacau

SEQ ID NO: 12510 - RNA, 20 nt, Artificial Sequence
  HTT spacer sequence CTCN PAM
ggcuauuucuauucugcugu

SEQ ID NO: 12511 - RNA, 20 nt, Artificial Sequence
  HTT spacer sequence CTCN PAM
cuggcuauuucuauucugcu

SEQ ID NO: 12512 - RNA, 20 nt, Artificial Sequence
  HTT spacer sequence CTCN PAM
gugccuuauucuggguagug

SEQ ID NO: 12513 - RNA, 20 nt, Artificial Sequence
  HTT spacer sequence CTCN PAM
cagugccuuauucuggguag

SEQ ID NO: 12514 - RNA, 20 nt, Artificial Sequence
  HTT spacer sequence CTCN PAM
ccauauccuuucuucugcau

SEQ ID NO: 12515 - RNA, 20 nt, Artificial Sequence
  HTT spacer sequence CTCN PAM
caccauauccuuucuucugc

SEQ ID NO: 12516 - RNA, 20 nt, Artificial Sequence
  HTT spacer sequence CTCN PAM
aaauaaauguauauuagauc

SEQ ID NO: 12517 - RNA, 20 nt, Artificial Sequence
  HTT spacer sequence CTCN PAM
cugguacuccaaauaaaugu

SEQ ID NO: 12518 - RNA, 20 nt, Artificial Sequence
  HTT spacer sequence CTCN PAM
cccugguacuccaaauaaau

SEQ ID NO: 12519 - RNA, 20 nt, Artificial Sequence
  HTT spacer sequence CTCN PAM
cucccugguacuccaaauaa

SEQ ID NO: 12520 - RNA, 20 nt, Artificial Sequence
  HTT spacer sequence CTCN PAM
cucucccugguacuccaaau

SEQ ID NO: 12521 - RNA, 20 nt, Artificial Sequence
  HTT spacer sequence CTCN PAM
uucucucucucccugguacu

SEQ ID NO: 12522 - RNA, 20 nt, Artificial Sequence
  HTT spacer sequence CTCN PAM
gucaccguccuugaaacacg

SEQ ID NO: 12523 - RNA, 20 nt, Artificial Sequence
  HTT spacer sequence CTCN PAM
cagucaccguccuugaaaca

SEQ ID NO: 12524 - RNA, 20 nt, Artificial Sequence
  HTT spacer sequence CTCN PAM
uuggaauucacugggcuuug

SEQ ID NO: 12525 - RNA, 20 nt, Artificial Sequence
  HTT spacer sequence CTCN PAM
gaggcagaggguuaucagaa

SEQ ID NO: 12526 - RNA, 20 nt, Artificial Sequence
  HTT spacer sequence CTCN PAM
gaguguccccauuaaaugca

SEQ ID NO: 12527 - RNA, 20 nt, Artificial Sequence
  HTT spacer sequence CTCN PAM
gccucugaguguccccauua

SEQ ID NO: 12528 - RNA, 20 nt, Artificial Sequence
  HTT spacer sequence CTCN PAM
uucugauaacccucugccuc

SEQ ID NO: 12529 - RNA, 20 nt, Artificial Sequence
  HTT spacer sequence CTCN PAM
cccaaguucucaucauccca

SEQ ID NO: 12530 - RNA, 20 nt, Artificial Sequence
  HTT spacer sequence CTCN PAM
caaguucucaucaucccagg

SEQ ID NO: 12531 - RNA, 20 nt, Artificial Sequence
  HTT spacer sequence CTCN PAM
ucaucccagggccagggaca

SEQ ID NO: 12532 - RNA, 20 nt, Artificial Sequence
  HTT spacer sequence CTCN PAM
cuaaggugugaccagcuguc

SEQ ID NO: 12533 - RNA, 20 nt, Artificial Sequence
  HTT spacer sequence CTCN PAM
uagugaacucccuaaggugu

SEQ ID NO: 12534 - RNA, 20 nt, Artificial Sequence
  HTT spacer sequence CTCN PAM
ccuagugaacucccuaaggu

SEQ ID NO: 12535 - RNA, 20 nt, Artificial Sequence
  HTT spacer sequence CTCN PAM
guucccuuccaauuucccua

SEQ ID NO: 12536 - RNA, 20 nt, Artificial Sequence
  HTT spacer sequence CTCN PAM
cgguucccuuccaauuuccc

SEQ ID NO: 12537 - RNA, 20 nt, Artificial Sequence
  HTT spacer sequence CTCN PAM
cauugcuaugcgauuggcua

SEQ ID NO: 12538 - RNA, 20 nt, Artificial Sequence
  HTT spacer sequence CTCN PAM
gugaaagauuucuaagguca

SEQ ID NO: 12539 - RNA, 20 nt, Artificial Sequence
  HTT spacer sequence CTCN PAM
agaaguucuggaacgcagau

SEQ ID NO: 12540 - RNA, 20 nt, Artificial Sequence
  HTT spacer sequence CTCN PAM
aagccuuaccuauaccagcu

SEQ ID NO: 12541 - RNA, 20 nt, Artificial Sequence
  HTT spacer sequence CTCN PAM
guaggaaagcucaaagccuu

SEQ ID NO: 12542 - RNA, 20 nt, Artificial Sequence
  HTT spacer sequence CTCN PAM
agggccaucuggccaacaag

SEQ ID NO: 12543 - RNA, 20 nt, Artificial Sequence
  HTT spacer sequence CTCN PAM
agguccccuuugguaaccua

SEQ ID NO: 12544 - RNA, 20 nt, Artificial Sequence
  HTT spacer sequence CTCN PAM
ccuuacacccccagacguau

SEQ ID NO: 12545 - RNA, 20 nt, Artificial Sequence
  HTT spacer sequence CTCN PAM
uuacacccccagacguauca

SEQ ID NO: 12546 - RNA, 20 nt, Artificial Sequence
  HTT spacer sequence CTCN PAM
gucuuugguuuucuguaguu

SEQ ID NO: 12547 - RNA, 20 nt, Artificial Sequence
  HTT spacer sequence CTCN PAM
acagcaagaaugaaaagugg

SEQ ID NO: 12548 - RNA, 20 nt, Artificial Sequence
  HTT spacer sequence CTCN PAM
ggccuguaaucccagcacuu

SEQ ID NO: 12549 - RNA, 20 nt, Artificial Sequence
  HTT spacer sequence CTCN PAM
caaagugcugggauuacagg

SEQ ID NO: 12550 - RNA, 20 nt, Artificial Sequence
  HTT spacer sequence CTCN PAM
gccucccaaagugcugggau

SEQ ID NO: 12551 - RNA, 20 nt, Artificial Sequence
  HTT spacer sequence CTCN PAM
ugauccacccgccucggccu

SEQ ID NO: 12552 - RNA, 20 nt, Artificial Sequence
  HTT spacer sequence CTCN PAM
ugaccucgugauccacccgc

SEQ ID NO: 12553 - RNA, 20 nt, Artificial Sequence
  HTT spacer sequence CTCN PAM
acuaaaaauacaaaaaaauu

SEQ ID NO: 12554 - RNA, 20 nt, Artificial Sequence
  HTT spacer sequence CTCN PAM
ggaggcugaggcaggagaau

SEQ ID NO: 12555 - RNA, 20 nt, Artificial Sequence
  HTT spacer sequence CTCN PAM
cgaguagcugggacuacagg

SEQ ID NO: 12556 - RNA, 20 nt, Artificial Sequence
  HTT spacer sequence CTCN PAM
gccucccgaguagcugggac

SEQ ID NO: 12557 - RNA, 20 nt, Artificial Sequence
  HTT spacer sequence CTCN PAM
ugccucagccucccgaguag

SEQ ID NO: 12558 - RNA, 20 nt, Artificial Sequence
  HTT spacer sequence CTCN PAM
cggguucacgccauucuccu

SEQ ID NO: 12559 - RNA, 20 nt, Artificial Sequence
  HTT spacer sequence CTCN PAM
gccucccggguucacgccau

SEQ ID NO: 12560 - RNA, 20 nt, Artificial Sequence
  HTT spacer sequence CTCN PAM
cugcaagcuccgccucccgg

SEQ ID NO: 12561 - RNA, 20 nt, Artificial Sequence
  HTT spacer sequence CTCN PAM
gcucacugcaagcuccgccu

SEQ ID NO: 12562 - RNA, 20 nt, Artificial Sequence
  HTT spacer sequence CTCN PAM
agccugggugacagagcaag

SEQ ID NO: 12563 - RNA, 20 nt, Artificial Sequence
  HTT spacer sequence CTCN PAM
gucacccaggcuggagugca

SEQ ID NO: 12564 - RNA, 20 nt, Artificial Sequence
  HTT spacer sequence CTCN PAM
gucucaaaaaaaaaaaaaaa

SEQ ID NO: 12565 - RNA, 20 nt, Artificial Sequence
  HTT spacer sequence CTCN PAM
aaaaaaaaaaaaaaaaaaaa

SEQ ID NO: 12566 - RNA, 20 nt, Artificial Sequence
  HTT spacer sequence CTCN PAM
ugaaaggaagcaacugccgc

SEQ ID NO: 12567 - RNA, 20 nt, Artificial Sequence
  HTT spacer sequence CTCN PAM
ggggucauuuucuucugccu

SEQ ID NO: 12568 - RNA, 20 nt, Artificial Sequence
  HTT spacer sequence CTCN PAM
gaucuuccucuggggucauu

SEQ ID NO: 12569 - RNA, 20 nt, Artificial Sequence
  HTT spacer sequence CTCN PAM
auuucuuuccugaaucucug

SEQ ID NO: 12570 - RNA, 20 nt, Artificial Sequence
  HTT spacer sequence CTCN PAM
ccauuucuuuccugaaucuc

SEQ ID NO: 12571 - RNA, 20 nt, Artificial Sequence
  HTT spacer sequence CTCN PAM
acaacuguugugucucuauc

SEQ ID NO: 12572 - RNA, 20 nt, Artificial Sequence
  HTT spacer sequence CTCN PAM
aucuuuuguaacauauaugu

SEQ ID NO: 12573 - RNA, 20 nt, Artificial Sequence
  HTT spacer sequence CTCN PAM
cucugucgcccaggcuacag

SEQ ID NO: 12574 - RNA, 20 nt, Artificial Sequence
  HTT spacer sequence CTCN PAM
gucgcccaggcuacagugaa

SEQ ID NO: 12575 - RNA, 20 nt, Artificial Sequence
  HTT spacer sequence CTCN PAM
gcucacugcaaccucugccc

SEQ ID NO: 12576 - RNA, 20 nt, Artificial Sequence
  HTT spacer sequence CTCN PAM
cugcaaccucugccccuugg

SEQ ID NO: 12577 - RNA, 20 nt, Artificial Sequence
  HTT spacer sequence CTCN PAM
gccccuugggcucaaaugau

SEQ ID NO: 12578 - RNA, 20 nt, Artificial Sequence
  HTT spacer sequence CTCN PAM
aaugauucucuugccucagc

SEQ ID NO: 12579 - RNA, 20 nt, Artificial Sequence
  HTT spacer sequence CTCN PAM
ugccucagccuccugaguag

SEQ ID NO: 12580 - RNA, 20 nt, Artificial Sequence
  HTT spacer sequence CTCN PAM
gccuccugaguagcugagau

SEQ ID NO: 12581 - RNA, 20 nt, Artificial Sequence
  HTT spacer sequence CTCN PAM
ugaguagcugagauuacagg

SEQ ID NO: 12582 - RNA, 20 nt, Artificial Sequence
  HTT spacer sequence CTCN PAM
ggaggcugaggcaagagaau

SEQ ID NO: 12583 - RNA, 20 nt, Artificial Sequence
  HTT spacer sequence CTCN PAM
gcuacucaggaggcugaggc

SEQ ID NO: 12584 - RNA, 20 nt, Artificial Sequence
  HTT spacer sequence CTCN PAM
aguaaaaauacaaaaauuag

SEQ ID NO: 12585 - RNA, 20 nt, Artificial Sequence
  HTT spacer sequence CTCN PAM
auguuggccaggcuggucuu

SEQ ID NO: 12586 - RNA, 20 nt, Artificial Sequence
  HTT spacer sequence CTCN PAM
ggugauccaccugccugggc

SEQ ID NO: 12587 - RNA, 20 nt, Artificial Sequence
  HTT spacer sequence CTCN PAM
caaagugcuaggauuacagg

SEQ ID NO: 12588 - RNA, 20 nt, Artificial Sequence
  HTT spacer sequence CTCN PAM
cgccuguaauccuagcacuu

SEQ ID NO: 12589 - RNA, 20 nt, Artificial Sequence
  HTT spacer sequence CTCN PAM
aaauugggagaaaccaaaaa

SEQ ID NO: 12590 - RNA, 20 nt, Artificial Sequence
  HTT spacer sequence CTCN PAM
caauuuggaggguauuauug

SEQ ID NO: 12591 - RNA, 20 nt, Artificial Sequence
  HTT spacer sequence CTCN PAM
cugcauaaucaagaagagaa

SEQ ID NO: 12592 - RNA, 20 nt, Artificial Sequence
  HTT spacer sequence CTCN PAM
ucuugauuaugcagggagcu

SEQ ID NO: 12593 - RNA, 20 nt, Artificial Sequence
  HTT spacer sequence CTCN PAM
agguaucaaaaucuaacgua

SEQ ID NO: 12594 - RNA, 20 nt, Artificial Sequence
  HTT spacer sequence CTCN PAM
uuucauggucacccuagaaa

SEQ ID NO: 12595 - RNA, 20 nt, Artificial Sequence
  HTT spacer sequence CTCN PAM
ucuuuucauggucacccuag

SEQ ID NO: 12596 - RNA, 20 nt, Artificial Sequence
  HTT spacer sequence CTCN PAM
aaaaaaaaaaaacauacacc

SEQ ID NO: 12597 - RNA, 20 nt, Artificial Sequence
  HTT spacer sequence CTCN PAM
aucucaaaaaaaaaaaaaca

SEQ ID NO: 12598 - RNA, 20 nt, Artificial Sequence
  HTT spacer sequence CTCN PAM
cuuugucacccaggcuggag

SEQ ID NO: 12599 - RNA, 20 nt, Artificial Sequence
  HTT spacer sequence CTCN PAM
agccugggugacaaagugag

SEQ ID NO: 12600 - RNA, 20 nt, Artificial Sequence
  HTT spacer sequence CTCN PAM
cugcaaccuccuccucuugg

SEQ ID NO: 12601 - RNA, 20 nt, Artificial Sequence
  HTT spacer sequence CTCN PAM
uccucuuggguucaggccau

SEQ ID NO: 12602 - RNA, 20 nt, Artificial Sequence
  HTT spacer sequence CTCN PAM
ucuuggguucaggccauccu

SEQ ID NO: 12603 - RNA, 20 nt, Artificial Sequence
  HTT spacer sequence CTCN PAM
uggguucaggccauccuccc

SEQ ID NO: 12604 - RNA, 20 nt, Artificial Sequence
  HTT spacer sequence CTCN PAM
caccuaggccuccagaguag

SEQ ID NO: 12605 - RNA, 20 nt, Artificial Sequence
  HTT spacer sequence CTCN PAM
agaguaggugggaucacagg

SEQ ID NO: 12606 - RNA, 20 nt, Artificial Sequence
  HTT spacer sequence CTCN PAM
ggaggccuaggugggaggau

SEQ ID NO: 12607 - RNA, 20 nt, Artificial Sequence
  HTT spacer sequence CTCN PAM
acuaaauauuuaaaaaaaaa

SEQ ID NO: 12608 - RNA, 20 nt, Artificial Sequence
  HTT spacer sequence CTCN PAM
ugaccucaggcgaucugccu

SEQ ID NO: 12609 - RNA, 20 nt, Artificial Sequence
  HTT spacer sequence CTCN PAM
ggcgaucugccuaccucugc

SEQ ID NO: 12610 - RNA, 20 nt, Artificial Sequence
  HTT spacer sequence CTCN PAM
gccucucaaagugcugggau

SEQ ID NO: 12611 - RNA, 20 nt, Artificial Sequence
  HTT spacer sequence CTCN PAM
caaagugcugggauuacagg

SEQ ID NO: 12612 - RNA, 20 nt, Artificial Sequence
  HTT spacer sequence CTCN PAM
aagugcugggauuacaggug

SEQ ID NO: 12613 - RNA, 20 nt, Artificial Sequence
  HTT spacer sequence CTCN PAM
caccuguaaucccagcacuu

SEQ ID NO: 12614 - RNA, 20 nt, Artificial Sequence
  HTT spacer sequence CTCN PAM
guuaguuugaaagugaucac

SEQ ID NO: 12615 - RNA, 20 nt, Artificial Sequence
  HTT spacer sequence CTCN PAM
guuaccugguuuuugguuaa

SEQ ID NO: 12616 - RNA, 20 nt, Artificial Sequence
  HTT spacer sequence CTCN PAM
cguauaucaacgauuacagu

SEQ ID NO: 12617 - RNA, 20 nt, Artificial Sequence
  HTT spacer sequence CTCN PAM
aguuuaaaaacgaggguugu

SEQ ID NO: 12618 - RNA, 20 nt, Artificial Sequence
  HTT spacer sequence CTCN PAM
uuuuuaaacuagagcauuuc

SEQ ID NO: 12619 - RNA, 20 nt, Artificial Sequence
  HTT spacer sequence CTCN PAM
uuaccagcggugcaccuaga

SEQ ID NO: 12620 - RNA, 20 nt, Artificial Sequence
  HTT spacer sequence CTCN PAM
uucaucuguccuguuuccuu

SEQ ID NO: 12621 - RNA, 20 nt, Artificial Sequence
  HTT spacer sequence CTCN PAM
gccauccuaugagacgggaa

SEQ ID NO: 12622 - RNA, 20 nt, Artificial Sequence
  HTT spacer sequence CTCN PAM
uaggauggcugaggcgcagg

SEQ ID NO: 12623 - RNA, 20 nt, Artificial Sequence
  HTT spacer sequence CTCN PAM
uuaccagcuccuggcuuucu

SEQ ID NO: 12624 - RNA, 20 nt, Artificial Sequence
  HTT spacer sequence CTCN PAM
uggcuuucuucucuggaagg

SEQ ID NO: 12625 - RNA, 20 nt, Artificial Sequence
  HTT spacer sequence CTCN PAM
ggaagguuccugccuguuuu

SEQ ID NO: 12626 - RNA, 20 nt, Artificial Sequence
  HTT spacer sequence CTCN PAM
caccugcuccucucucagcc

SEQ ID NO: 12627 - RNA, 20 nt, Artificial Sequence
  HTT spacer sequence CTCN PAM
ucucucagcccucucagggg

SEQ ID NO: 12628 - RNA, 20 nt, Artificial Sequence
  HTT spacer sequence CTCN PAM
cucagcccucucaggggugg

SEQ ID NO: 12629 - RNA, 20 nt, Artificial Sequence
  HTT spacer sequence CTCN PAM
cagcccucucaggggugggg

SEQ ID NO: 12630 - RNA, 20 nt, Artificial Sequence
  HTT spacer sequence CTCN PAM
gcccucucagggguggggcu

SEQ ID NO: 12631 - RNA, 20 nt, Artificial Sequence
  HTT spacer sequence CTCN PAM
cagggguggggcuggaggcc

SEQ ID NO: 12632 - RNA, 20 nt, Artificial Sequence
  HTT spacer sequence CTCN PAM
gggguggggcuggaggccac

SEQ ID NO: 12633 - RNA, 20 nt, Artificial Sequence
  HTT spacer sequence CTCN PAM
agccccaccccugagagggc

SEQ ID NO: 12634 - RNA, 20 nt, Artificial Sequence
  HTT spacer sequence CTCN PAM
uugguggccuccagccccac

SEQ ID NO: 12635 - RNA, 20 nt, Artificial Sequence
  HTT spacer sequence CTCN PAM
ucugcucuccaguugcucga

SEQ ID NO: 12636 - RNA, 20 nt, Artificial Sequence
  HTT spacer sequence CTCN PAM
gcucuccaguugcucgacug

SEQ ID NO: 12637 - RNA, 20 nt, Artificial Sequence
  HTT spacer sequence CTCN PAM
ccaguugcucgacugcuccu

SEQ ID NO: 12638 - RNA, 20 nt, Artificial Sequence
  HTT spacer sequence CTCN PAM
aguugcucgacugcuccuca

SEQ ID NO: 12639 - RNA, 20 nt, Artificial Sequence
  HTT spacer sequence CTCN PAM
acugcuccucauuucccccu

SEQ ID NO: 12640 - RNA, 20 nt, Artificial Sequence
  HTT spacer sequence CTCN PAM
ucauuucccccuggggucug

SEQ ID NO: 12641 - RNA, 20 nt, Artificial Sequence
  HTT spacer sequence CTCN PAM
uuucccccuggggucugcgu

SEQ ID NO: 12642 - RNA, 20 nt, Artificial Sequence
  HTT spacer sequence CTCN PAM
ggucggggcugcucccgcuu

SEQ ID NO: 12643 - RNA, 20 nt, Artificial Sequence
  HTT spacer sequence CTCN PAM
cgcuuacugcccccugccca

SEQ ID NO: 12644 - RNA, 20 nt, Artificial Sequence
  HTT spacer sequence CTCN PAM
ggcugcuuucaaggccucuu

SEQ ID NO: 12645 - RNA, 20 nt, Artificial Sequence
  HTT spacer sequence CTCN PAM
ucucucuucucggcaggaca

SEQ ID NO: 12646 - RNA, 20 nt, Artificial Sequence
  HTT spacer sequence CTCN PAM
cuucucggcaggacaggcac

SEQ ID NO: 12647 - RNA, 20 nt, Artificial Sequence
  HTT spacer sequence CTCN PAM
ucucggcaggacaggcacag

SEQ ID NO: 12648 - RNA, 20 nt, Artificial Sequence
  HTT spacer sequence CTCN PAM
gcaggacaggcacaggcagg

SEQ ID NO: 12649 - RNA, 20 nt, Artificial Sequence
  HTT spacer sequence CTCN PAM
ccgcccagugagauucuuuc

SEQ ID NO: 12650 - RNA, 20 nt, Artificial Sequence
  HTT spacer sequence CTCN PAM
cugggcggggagcuaagcau

SEQ ID NO: 12651 - RNA, 20 nt, Artificial Sequence
  HTT spacer sequence CTCN PAM
auuccccugcccagagagag

SEQ ID NO: 12652 - RNA, 20 nt, Artificial Sequence
  HTT spacer sequence CTCN PAM
gggcaggggaauugagggcg

SEQ ID NO: 12653 - RNA, 20 nt, Artificial Sequence
  HTT spacer sequence CTCN PAM
cugggcaggggaauugaggg

SEQ ID NO: 12654 - RNA, 20 nt, Artificial Sequence
  HTT spacer sequence CTCN PAM
cucugggcaggggaauugag

SEQ ID NO: 12655 - RNA, 20 nt, Artificial Sequence
  HTT spacer sequence CTCN PAM
cucgcucuuuuuuuuuuuuu

SEQ ID NO: 12656 - RNA, 20 nt, Artificial Sequence
  HTT spacer sequence CTCN PAM
cgcucuuuuuuuuuuuuuug

SEQ ID NO: 12657 - RNA, 20 nt, Artificial Sequence
  HTT spacer sequence CTCN PAM
cucuuuuuuuuuuuuuugag

SEQ ID NO: 12658 - RNA, 20 nt, Artificial Sequence
  HTT spacer sequence CTCN PAM
uuuuuuuuuuuuugagacag

SEQ ID NO: 12659 - RNA, 20 nt, Artificial Sequence
  HTT spacer sequence CTCN PAM
aaaaaaaaaaaaagagcgag

SEQ ID NO: 12660 - RNA, 20 nt, Artificial Sequence
  HTT spacer sequence CTCN PAM
gucucaaaaaaaaaaaaaag

SEQ ID NO: 12661 - RNA, 20 nt, Artificial Sequence
  HTT spacer sequence CTCN PAM
gucacccaggcuggagugca

SEQ ID NO: 12662 - RNA, 20 nt, Artificial Sequence
  HTT spacer sequence CTCN PAM
agccugggugacagagcaag

SEQ ID NO: 12663 - RNA, 20 nt, Artificial Sequence
  HTT spacer sequence CTCN PAM
aucucagcucacugcaaccu

SEQ ID NO: 12664 - RNA, 20 nt, Artificial Sequence
  HTT spacer sequence CTCN PAM
gcucacugcaaccuccgccu

SEQ ID NO: 12665 - RNA, 20 nt, Artificial Sequence
  HTT spacer sequence CTCN PAM
cugcaaccuccgccuccugg

SEQ ID NO: 12666 - RNA, 20 nt, Artificial Sequence
  HTT spacer sequence CTCN PAM
gccuccuggguucaagcgau

SEQ ID NO: 12667 - RNA, 20 nt, Artificial Sequence
  HTT spacer sequence CTCN PAM
uggguucaagcgauucuccu

SEQ ID NO: 12668 - RNA, 20 nt, Artificial Sequence
  HTT spacer sequence CTCN PAM
ugccucagccucuugaguag

SEQ ID NO: 12669 - RNA, 20 nt, Artificial Sequence
  HTT spacer sequence CTCN PAM
gccucuugaguagcugggau

SEQ ID NO: 12670 - RNA, 20 nt, Artificial Sequence
  HTT spacer sequence CTCN PAM
ugaguagcugggauuacagg

SEQ ID NO: 12671 - RNA, 20 nt, Artificial Sequence
  HTT spacer sequence CTCN PAM
agaggcugaggcaggagaau

SEQ ID NO: 12672 - RNA, 20 nt, Artificial Sequence
  HTT spacer sequence CTCN PAM
acuaaaaauacaaaaauuag

SEQ ID NO: 12673 - RNA, 20 nt, Artificial Sequence
  HTT spacer sequence CTCN PAM
caacuaaaaauacaaaaauu

SEQ ID NO: 12674 - RNA, 20 nt, Artificial Sequence
  HTT spacer sequence CTCN PAM
cucaacuaaaaauacaaaaa

SEQ ID NO: 12675 - RNA, 20 nt, Artificial Sequence
  HTT spacer sequence CTCN PAM
ugaccucaggugaucagccc

SEQ ID NO: 12676 - RNA, 20 nt, Artificial Sequence
  HTT spacer sequence CTCN PAM
ggugaucagcccaccucggc

SEQ ID NO: 12677 - RNA, 20 nt, Artificial Sequence
  HTT spacer sequence CTCN PAM
gccucccaaagugcugggau

SEQ ID NO: 12678 - RNA, 20 nt, Artificial Sequence
  HTT spacer sequence CTCN PAM
caaagugcugggauuacagg

SEQ ID NO: 12679 - RNA, 20 nt, Artificial Sequence
  HTT spacer sequence CTCN PAM
caccuguaaucccagcacuu

SEQ ID NO: 12680 - RNA, 20 nt, Artificial Sequence
  HTT spacer sequence CTCN PAM
cuucuguguauguguacgcu

SEQ ID NO: 12681 - RNA, 20 nt, Artificial Sequence
  HTT spacer sequence CTCN PAM
ucuguguauguguacgcugu

SEQ ID NO: 12682 - RNA, 20 nt, Artificial Sequence
  HTT spacer sequence CTCN PAM
acaugguguguagucggcua

SEQ ID NO: 12683 - RNA, 20 nt, Artificial Sequence
  HTT spacer sequence CTCN PAM
ucuggaacaggauucuaaug

SEQ ID NO: 12684 - RNA, 20 nt, Artificial Sequence
  HTT spacer sequence CTCN PAM
gcuccuucugcccagcaucu

SEQ ID NO: 12685 - RNA, 20 nt, Artificial Sequence
  HTT spacer sequence CTCN PAM
uucugcccagcaucuaucuu

SEQ ID NO: 12686 - RNA, 20 nt, Artificial Sequence
  HTT spacer sequence CTCN PAM
gagacaccaugccagacugc

SEQ ID NO: 12687 - RNA, 20 nt, Artificial Sequence
  HTT spacer sequence CTCN PAM
gaggccuaaaaaugggcaca

SEQ ID NO: 12688 - RNA, 20 nt, Artificial Sequence
  HTT spacer sequence CTCN PAM
uuuuagaugaugccaaacuu

SEQ ID NO: 12689 - RNA, 20 nt, Artificial Sequence
  HTT spacer sequence CTCN PAM
gccauggcugaagcaguugu

SEQ ID NO: 12690 - RNA, 20 nt, Artificial Sequence
  HTT spacer sequence CTCN PAM
cuggauggguuggaauaauu

SEQ ID NO: 12691 - RNA, 20 nt, Artificial Sequence
  HTT spacer sequence CTCN PAM
caaaccaaauuauuccaacc

SEQ ID NO: 12692 - RNA, 20 nt, Artificial Sequence
  HTT spacer sequence CTCN PAM
aggucauucuguuauaugcu

SEQ ID NO: 12693 - RNA, 20 nt, Artificial Sequence
  HTT spacer sequence CTCN PAM
gacggaaguguauuucuccc

SEQ ID NO: 12694 - RNA, 20 nt, Artificial Sequence
  HTT spacer sequence CTCN PAM
cuuacagaugaaagaauucc

SEQ ID NO: 12695 - RNA, 20 nt, Artificial Sequence
  HTT spacer sequence CTCN PAM
uuccagcucccaucacccca

SEQ ID NO: 12696 - RNA, 20 nt, Artificial Sequence
  HTT spacer sequence CTCN PAM
caucaccccaggauguggcu

SEQ ID NO: 12697 - RNA, 20 nt, Artificial Sequence
  HTT spacer sequence CTCN PAM
agucccagccaacacauccc

SEQ ID NO: 12698 - RNA, 20 nt, Artificial Sequence
  HTT spacer sequence CTCN PAM
cuggaaugggauguguuggc

SEQ ID NO: 12699 - RNA, 20 nt, Artificial Sequence
  HTT spacer sequence CTCN PAM
uuacuucugcuugcaucucc

SEQ ID NO: 12700 - RNA, 20 nt, Artificial Sequence
  HTT spacer sequence CTCN PAM
cuggcuagcacuuacuuagu

SEQ ID NO: 12701 - RNA, 20 nt, Artificial Sequence
  HTT spacer sequence CTCN PAM
uagcuaguguaugacagucc

SEQ ID NO: 12702 - RNA, 20 nt, Artificial Sequence
  HTT spacer sequence CTCN PAM
aaagaaggucagagcggcug

SEQ ID NO: 12703 - RNA, 20 nt, Artificial Sequence
  HTT spacer sequence CTCN PAM
gaccuucuuuagagaccuuu

SEQ ID NO: 12704 - RNA, 20 nt, Artificial Sequence
  HTT spacer sequence CTCN PAM
auuacuuauuguuaugggac

SEQ ID NO: 12705 - RNA, 20 nt, Artificial Sequence
  HTT spacer sequence CTCN PAM
uucagguugauguccuaagc

SEQ ID NO: 12706 - RNA, 20 nt, Artificial Sequence
  HTT spacer sequence CTCN PAM
gaaugggauuguauuuggag

SEQ ID NO: 12707 - RNA, 20 nt, Artificial Sequence
  HTT spacer sequence CTCN PAM
aaauacaaucccauucugag

SEQ ID NO: 12708 - RNA, 20 nt, Artificial Sequence
  HTT spacer sequence CTCN PAM
uuaaagaaccugucuccaaa

SEQ ID NO: 12709 - RNA, 20 nt, Artificial Sequence
  HTT spacer sequence CTCN PAM
uuaccuccuuaaagaaccug

SEQ ID NO: 12710 - RNA, 20 nt, Artificial Sequence
  HTT spacer sequence CTCN PAM
uuuuagccuccuuaccuccu

SEQ ID NO: 12711 - RNA, 20 nt, Artificial Sequence
  HTT spacer sequence CTCN PAM
ucuuguaagacaucagucgg

SEQ ID NO: 12712 - RNA, 20 nt, Artificial Sequence
  HTT spacer sequence CTCN PAM
gagggacggccacgugagga

SEQ ID NO: 12713 - RNA, 20 nt, Artificial Sequence
  HTT spacer sequence CTCN PAM
gagcauguccguguccuaau

SEQ ID NO: 12714 - RNA, 20 nt, Artificial Sequence
  HTT spacer sequence CTCN PAM
cguggccgucccucugagca

SEQ ID NO: 12715 - RNA, 20 nt, Artificial Sequence
  HTT spacer sequence CTCN PAM
ggggaaaccaaccuugccaa

SEQ ID NO: 12716 - RNA, 20 nt, Artificial Sequence
  HTT spacer sequence CTCN PAM
gacuucuagccucuaggacc

SEQ ID NO: 12717 - RNA, 20 nt, Artificial Sequence
  HTT spacer sequence CTCN PAM
aggaccaugagaagauacau

SEQ ID NO: 12718 - RNA, 20 nt, Artificial Sequence
  HTT spacer sequence CTCN PAM
ugguccuagaggcuagaagu

SEQ ID NO: 12719 - RNA, 20 nt, Artificial Sequence
  HTT spacer sequence CTCN PAM
augacuagacaugugugcug

SEQ ID NO: 12720 - RNA, 20 nt, Artificial Sequence
  HTT spacer sequence CTCN PAM
acacguaacuacauauaacu

SEQ ID NO: 12721 - RNA, 20 nt, Artificial Sequence
  HTT spacer sequence CTCN PAM
acuucucgccaggguucagu

SEQ ID NO: 12722 - RNA, 20 nt, Artificial Sequence
  HTT spacer sequence CTCN PAM
ccaggguucagucaaauacc

SEQ ID NO: 12723 - RNA, 20 nt, Artificial Sequence
  HTT spacer sequence CTCN PAM
caccugagagcucagccggg

SEQ ID NO: 12724 - RNA, 20 nt, Artificial Sequence
  HTT spacer sequence CTCN PAM
ggugggaggcagcugguauu

SEQ ID NO: 12725 - RNA, 20 nt, Artificial Sequence
  HTT spacer sequence CTCN PAM
caggugggaggcagcuggua

SEQ ID NO: 12726 - RNA, 20 nt, Artificial Sequence
  HTT spacer sequence CTCN PAM
gccggggaagggucccuuuc

SEQ ID NO: 12727 - RNA, 20 nt, Artificial Sequence
  HTT spacer sequence CTCN PAM
cgugguguuggcaggaucca

SEQ ID NO: 12728 - RNA, 20 nt, Artificial Sequence
  HTT spacer sequence CTCN PAM
uggccugcuggacugagaac

SEQ ID NO: 12729 - RNA, 20 nt, Artificial Sequence
  HTT spacer sequence CTCN PAM
guccagcaggccaugaggaa

SEQ ID NO: 12730 - RNA, 20 nt, Artificial Sequence
  HTT spacer sequence CTCN PAM
guucucacugccuguuggcc

SEQ ID NO: 12731 - RNA, 20 nt, Artificial Sequence
  HTT spacer sequence CTCN PAM
cugccuguuggccagaggcc

SEQ ID NO: 12732 - RNA, 20 nt, Artificial Sequence
  HTT spacer sequence CTCN PAM
ggccaacaggcagugagaac

SEQ ID NO: 12733 - RNA, 20 nt, Artificial Sequence
  HTT spacer sequence CTCN PAM
ccaugugggccucuccaaca

SEQ ID NO: 12734 - RNA, 20 nt, Artificial Sequence
  HTT spacer sequence CTCN PAM
ccaacauggcagcugacuuc

SEQ ID NO: 12735 - RNA, 20 nt, Artificial Sequence
  HTT spacer sequence CTCN PAM
aacauggcagcugacuucau

SEQ ID NO: 12736 - RNA, 20 nt, Artificial Sequence
  HTT spacer sequence CTCN PAM
gaugaagucagcugccaugu

SEQ ID NO: 12737 - RNA, 20 nt, Artificial Sequence
  HTT spacer sequence CTCN PAM
guugccuucuuggcauggau

SEQ ID NO: 12738 - RNA, 20 nt, Artificial Sequence
  HTT spacer sequence CTCN PAM
cuguugccuucuuggcaugg

SEQ ID NO: 12739 - RNA, 20 nt, Artificial Sequence
  HTT spacer sequence CTCN PAM
cuggcccucucuguugccuu

SEQ ID NO: 12740 - RNA, 20 nt, Artificial Sequence
  HTT spacer sequence CTCN PAM
cggggaggggucauacaagg

SEQ ID NO: 12741 - RNA, 20 nt, Artificial Sequence
  HTT spacer sequence CTCN PAM
ccgugagcuugggcuguacc

SEQ ID NO: 12742 - RNA, 20 nt, Artificial Sequence
  HTT spacer sequence CTCN PAM
ugguauugacacccuuguau

SEQ ID NO: 12743 - RNA, 20 nt, Artificial Sequence
  HTT spacer sequence CTCN PAM
ccuccugguauugacacccu

SEQ ID NO: 12744 - RNA, 20 nt, Artificial Sequence
  HTT spacer sequence CTCN PAM
uaagauggccccagcacccc

SEQ ID NO: 12745 - RNA, 20 nt, Artificial Sequence
  HTT spacer sequence CTCN PAM
gugggcagacucauaagaug

SEQ ID NO: 12746 - RNA, 20 nt, Artificial Sequence
  HTT spacer sequence CTCN PAM
agguuguuaguuaccucagu

SEQ ID NO: 12747 - RNA, 20 nt, Artificial Sequence
  HTT spacer sequence CTCN PAM
gcuguuaauaagggccuuug

SEQ ID NO: 12748 - RNA, 20 nt, Artificial Sequence
  HTT spacer sequence CTCN PAM
aaaauaaauaaauaaauaaa

SEQ ID NO: 12749 - RNA, 20 nt, Artificial Sequence
  HTT spacer sequence CTCN PAM
gucucaaaaauaaauaaaua

SEQ ID NO: 12750 - RNA, 20 nt, Artificial Sequence
  HTT spacer sequence CTCN PAM
cucuugucacccaggcugga

SEQ ID NO: 12751 - RNA, 20 nt, Artificial Sequence
  HTT spacer sequence CTCN PAM
ugucacccaggcuggagugc

SEQ ID NO: 12752 - RNA, 20 nt, Artificial Sequence
  HTT spacer sequence CTCN PAM
agccugggugacaagaguga

SEQ ID NO: 12753 - RNA, 20 nt, Artificial Sequence
  HTT spacer sequence CTCN PAM
cugcaaccuccaccucccag

SEQ ID NO: 12754 - RNA, 20 nt, Artificial Sequence
  HTT spacer sequence CTCN PAM
accucccagguucaagcaau

SEQ ID NO: 12755 - RNA, 20 nt, Artificial Sequence
  HTT spacer sequence CTCN PAM
cagguucaagcaauucugcc

SEQ ID NO: 12756 - RNA, 20 nt, Artificial Sequence
  HTT spacer sequence CTCN PAM
gccuccggaauagcugggac

SEQ ID NO: 12757 - RNA, 20 nt, Artificial Sequence
  HTT spacer sequence CTCN PAM
ggaauagcugggacuacagg

SEQ ID NO: 12758 - RNA, 20 nt, Artificial Sequence
  HTT spacer sequence CTCN PAM
acuaaaaauacaaaaauuag

SEQ ID NO: 12759 - RNA, 20 nt, Artificial Sequence
  HTT spacer sequence CTCN PAM
aacuccugaccucuggugau

SEQ ID NO: 12760 - RNA, 20 nt, Artificial Sequence
  HTT spacer sequence CTCN PAM
ugaccucuggugaucugccu

SEQ ID NO: 12761 - RNA, 20 nt, Artificial Sequence
  HTT spacer sequence CTCN PAM
ggugaucugccugccuuggc

SEQ ID NO: 12762 - RNA, 20 nt, Artificial Sequence
  HTT spacer sequence CTCN PAM
caaagugcugggauuacagg

SEQ ID NO: 12763 - RNA, 20 nt, Artificial Sequence
  HTT spacer sequence CTCN PAM
cgccuguaaucccagcacuu

SEQ ID NO: 12764 - RNA, 20 nt, Artificial Sequence
  HTT spacer sequence CTCN PAM
cuggaacuuaauuuuuuuag

SEQ ID NO: 12765 - RNA, 20 nt, Artificial Sequence
  HTT spacer sequence CTCN PAM
aaaaaaauuaaguuccagcg

SEQ ID NO: 12766 - RNA, 20 nt, Artificial Sequence
  HTT spacer sequence CTCN PAM
aucacccaagcuggagugca

SEQ ID NO: 12767 - RNA, 20 nt, Artificial Sequence
  HTT spacer sequence CTCN PAM
agcuugggugauagagcgac

SEQ ID NO: 12768 - RNA, 20 nt, Artificial Sequence
  HTT spacer sequence CTCN PAM
cuugcagccucaaauuccug

SEQ ID NO: 12769 - RNA, 20 nt, Artificial Sequence
  HTT spacer sequence CTCN PAM
aauuccuggguucaggugau

SEQ ID NO: 12770 - RNA, 20 nt, Artificial Sequence
  HTT spacer sequence CTCN PAM
cacaucagccucccaagaac

SEQ ID NO: 12771 - RNA, 20 nt, Artificial Sequence
  HTT spacer sequence CTCN PAM
caagaacugggaacuaacag

SEQ ID NO: 12772 - RNA, 20 nt, Artificial Sequence
  HTT spacer sequence CTCN PAM
gcuguccuucucaagaaaag

SEQ ID NO: 12773 - RNA, 20 nt, Artificial Sequence
  HTT spacer sequence CTCN PAM
agaaaagggaggcuacugcu

SEQ ID NO: 12774 - RNA, 20 nt, Artificial Sequence
  HTT spacer sequence CTCN PAM
cuuuucuugagaaggacagc

SEQ ID NO: 12775 - RNA, 20 nt, Artificial Sequence
  HTT spacer sequence CTCN PAM
gagacaaggcggaggugcug

SEQ ID NO: 12776 - RNA, 20 nt, Artificial Sequence
  HTT spacer sequence CTCN PAM
gagccuguccuaaagggaaa

SEQ ID NO: 12777 - RNA, 20 nt, Artificial Sequence
  HTT spacer sequence CTCN PAM
gccuugucucagagccuguc

SEQ ID NO: 12778 - RNA, 20 nt, Artificial Sequence
  HTT spacer sequence CTCN PAM
guggccacaaacagcaccuc

SEQ ID NO: 12779 - RNA, 20 nt, Artificial Sequence
  HTT spacer sequence CTCN PAM
ggguugcagguguggccugg

SEQ ID NO: 12780 - RNA, 20 nt, Artificial Sequence
  HTT spacer sequence CTCN PAM
ucucugccugcaucaccccc

SEQ ID NO: 12781 - RNA, 20 nt, Artificial Sequence
  HTT spacer sequence CTCN PAM
cugccugcaucaccccccgg

SEQ ID NO: 12782 - RNA, 20 nt, Artificial Sequence
  HTT spacer sequence CTCN PAM
gccugcaucaccccccggcu

SEQ ID NO: 12783 - RNA, 20 nt, Artificial Sequence
  HTT spacer sequence CTCN PAM
gaggccaaccuuacucccug

SEQ ID NO: 12784 - RNA, 20 nt, Artificial Sequence
  HTT spacer sequence CTCN PAM
gagacaaccgcccagccggg

SEQ ID NO: 12785 - RNA, 20 nt, Artificial Sequence
  HTT spacer sequence CTCN PAM
cugcugggcaggcuggacag

SEQ ID NO: 12786 - RNA, 20 nt, Artificial Sequence
  HTT spacer sequence CTCN PAM
ccguuugccccucuaccacc

SEQ ID NO: 12787 - RNA, 20 nt, Artificial Sequence
  HTT spacer sequence CTCN PAM
guuugccccucuaccaccca

SEQ ID NO: 12788 - RNA, 20 nt, Artificial Sequence
  HTT spacer sequence CTCN PAM
accacccaaaaggcaggagg

SEQ ID NO: 12789 - RNA, 20 nt, Artificial Sequence
  HTT spacer sequence CTCN PAM
ugccuuuugggugguagagg

SEQ ID NO: 12790 - RNA, 20 nt, Artificial Sequence
  HTT spacer sequence CTCN PAM
ggagaccaggacccugcccg

SEQ ID NO: 12791 - RNA, 20 nt, Artificial Sequence
  HTT spacer sequence CTCN PAM
agagccuccugccuuuuggg

SEQ ID NO: 12792 - RNA, 20 nt, Artificial Sequence
  HTT spacer sequence CTCN PAM
cgccugggacacaggccgug

SEQ ID NO: 12793 - RNA, 20 nt, Artificial Sequence
  HTT spacer sequence CTCN PAM
gcugagcugcugcugaauga

SEQ ID NO: 12794 - RNA, 20 nt, Artificial Sequence
  HTT spacer sequence CTCN PAM
gcagaggucuguggggcacc

SEQ ID NO: 12795 - RNA, 20 nt, Artificial Sequence
  HTT spacer sequence CTCN PAM
gaccuuccggcaggaccccc

SEQ ID NO: 12796 - RNA, 20 nt, Artificial Sequence
  HTT spacer sequence CTCN PAM
cauaaagaaacgcccccagg

SEQ ID NO: 12797 - RNA, 20 nt, Artificial Sequence
  HTT spacer sequence CTCN PAM
uuccugugggcggcaucuug

SEQ ID NO: 12798 - RNA, 20 nt, Artificial Sequence
  HTT spacer sequence CTCN PAM
cugcacuaaucacagugccu

SEQ ID NO: 12799 - RNA, 20 nt, Artificial Sequence
  HTT spacer sequence CTCN PAM
gugggcagcaggcgcugacc

SEQ ID NO: 12800 - RNA, 20 nt, Artificial Sequence
  HTT spacer sequence CTCN PAM
ccucccuuccggggcgcugc

SEQ ID NO: 12801 - RNA, 20 nt, Artificial Sequence
  HTT spacer sequence CTCN PAM
ucccuuccggggcgcugcgc

SEQ ID NO: 12802 - RNA, 20 nt, Artificial Sequence
  HTT spacer sequence CTCN PAM
cuuccggggcgcugcgcugg

SEQ ID NO: 12803 - RNA, 20 nt, Artificial Sequence
  HTT spacer sequence CTCN PAM
ccagcucacugggggugggg

SEQ ID NO: 12804 - RNA, 20 nt, Artificial Sequence
  HTT spacer sequence CTCN PAM
agcucacuggggguggggug

SEQ ID NO: 12805 - RNA, 20 nt, Artificial Sequence
  HTT spacer sequence CTCN PAM
cugggggugggguggggguc

SEQ ID NO: 12806 - RNA, 20 nt, Artificial Sequence
  HTT spacer sequence CTCN PAM
ggucgugccgaccacgcgca

SEQ ID NO: 12807 - RNA, 20 nt, Artificial Sequence
  HTT spacer sequence CTCN PAM
gcgcucugcgcaggagcucg

SEQ ID NO: 12808 - RNA, 20 nt, Artificial Sequence
  HTT spacer sequence CTCN PAM
gcgcaggagcucgcccaccc

SEQ ID NO: 12809 - RNA, 20 nt, Artificial Sequence
  HTT spacer sequence CTCN PAM
ugcgcagagcgcagagaaug

SEQ ID NO: 12810 - RNA, 20 nt, Artificial Sequence
  HTT spacer sequence CTCN PAM
cccacccucuccccgugcag

SEQ ID NO: 12811 - RNA, 20 nt, Artificial Sequence
  HTT spacer sequence CTCN PAM
ccccgugcagagagccccgc

SEQ ID NO: 12812 - RNA, 20 nt, Artificial Sequence
  HTT spacer sequence CTCN PAM
ccgugcagagagccccgcag

SEQ ID NO: 12813 - RNA, 20 nt, Artificial Sequence
  HTT spacer sequence CTCN PAM
gcacggggagagggugggcg

SEQ ID NO: 12814 - RNA, 20 nt, Artificial Sequence
  HTT spacer sequence CTCN PAM
cugcacggggagaggguggg

SEQ ID NO: 12815 - RNA, 20 nt, Artificial Sequence
  HTT spacer sequence CTCN PAM
ccgcagggcuguccggguga

SEQ ID NO: 12816 - RNA, 20 nt, Artificial Sequence
  HTT spacer sequence CTCN PAM
cccggacagcccugcgggga

SEQ ID NO: 12817 - RNA, 20 nt, Artificial Sequence
  HTT spacer sequence CTCN PAM
ggccacgggccaguguggcg

SEQ ID NO: 12818 - RNA, 20 nt, Artificial Sequence
  HTT spacer sequence CTCN PAM
cgccacacuggcccguggcc

SEQ ID NO: 12819 - RNA, 20 nt, Artificial Sequence
  HTT spacer sequence CTCN PAM
gcucagaguccacggccggc

SEQ ID NO: 12820 - RNA, 20 nt, Artificial Sequence
  HTT spacer sequence CTCN PAM
gaguccacggccggcugucg

SEQ ID NO: 12821 - RNA, 20 nt, Artificial Sequence
  HTT spacer sequence CTCN PAM
gagccgagguggccuugggg

SEQ ID NO: 12822 - RNA, 20 nt, Artificial Sequence
  HTT spacer sequence CTCN PAM
aggcgucggcgggggauccu

SEQ ID NO: 12823 - RNA, 20 nt, Artificial Sequence
  HTT spacer sequence CTCN PAM
gcgcccccuccacggccccg

SEQ ID NO: 12824 - RNA, 20 nt, Artificial Sequence
  HTT spacer sequence CTCN PAM
acggccccgccccguccaug

SEQ ID NO: 12825 - RNA, 20 nt, Artificial Sequence
  HTT spacer sequence CTCN PAM
cccaugaaggacggggccau

SEQ ID NO: 12826 - RNA, 20 nt, Artificial Sequence
  HTT spacer sequence CTCN PAM
auggcccugccccuccgcgc

SEQ ID NO: 12827 - RNA, 20 nt, Artificial Sequence
  HTT spacer sequence CTCN PAM
gcgccccaccccucccucgc

SEQ ID NO: 12828 - RNA, 20 nt, Artificial Sequence
  HTT spacer sequence CTCN PAM
cucgccccaccucucaccuu

SEQ ID NO: 12829 - RNA, 20 nt, Artificial Sequence
  HTT spacer sequence CTCN PAM
ccccaccucucaccuuccug

SEQ ID NO: 12830 - RNA, 20 nt, Artificial Sequence
  HTT spacer sequence CTCN PAM
caccuuccugccccgccccc

SEQ ID NO: 12831 - RNA, 20 nt, Artificial Sequence
  HTT spacer sequence CTCN PAM
ccuuccugccccgcccccag

SEQ ID NO: 12832 - RNA, 20 nt, Artificial Sequence
  HTT spacer sequence CTCN PAM
ccaccccucaccggccaguc

SEQ ID NO: 12833 - RNA, 20 nt, Artificial Sequence
  HTT spacer sequence CTCN PAM
ccggccaguccccuccccua

SEQ ID NO: 12834 - RNA, 20 nt, Artificial Sequence
  HTT spacer sequence CTCN PAM
ccuaucccgcuccgccccuc

SEQ ID NO: 12835 - RNA, 20 nt, Artificial Sequence
  HTT spacer sequence CTCN PAM
gccccucagccgccccgccc

SEQ ID NO: 12836 - RNA, 20 nt, Artificial Sequence
  HTT spacer sequence CTCN PAM
gccgccccgccccucagccg

SEQ ID NO: 12837 - RNA, 20 nt, Artificial Sequence
  HTT spacer sequence CTCN PAM
gccggccugccuaauguccc

SEQ ID NO: 12838 - RNA, 20 nt, Artificial Sequence
  HTT spacer sequence CTCN PAM
ccccgccccucaggcggccu

SEQ ID NO: 12839 - RNA, 20 nt, Artificial Sequence
  HTT spacer sequence CTCN PAM
ggcggccucccugcugugcc

SEQ ID NO: 12840 - RNA, 20 nt, Artificial Sequence
  HTT spacer sequence CTCN PAM
cugcugugccccgccccggc

SEQ ID NO: 12841 - RNA, 20 nt, Artificial Sequence
  HTT spacer sequence CTCN PAM
ccacgccccuaccucaccac

SEQ ID NO: 12842 - RNA, 20 nt, Artificial Sequence
  HTT spacer sequence CTCN PAM
ccacgccccccgcaucgcca

SEQ ID NO: 12843 - RNA, 20 nt, Artificial Sequence
  HTT spacer sequence CTCN PAM
cuuaccaugcagucccgccc

SEQ ID NO: 12844 - RNA, 20 nt, Artificial Sequence
  HTT spacer sequence CTCN PAM
ucccgccucgccgcgacacu

SEQ ID NO: 12845 - RNA, 20 nt, Artificial Sequence
  HTT spacer sequence CTCN PAM
ccgcgacacuucacacacag

SEQ ID NO: 12846 - RNA, 20 nt, Artificial Sequence
  HTT spacer sequence CTCN PAM
ccccauuacagucucaccac

SEQ ID NO: 12847 - RNA, 20 nt, Artificial Sequence
  HTT spacer sequence CTCN PAM
ccacgccccguccccucucc

SEQ ID NO: 12848 - RNA, 20 nt, Artificial Sequence
  HTT spacer sequence CTCN PAM
ccguugagccccgcgccuuc

SEQ ID NO: 12849 - RNA, 20 nt, Artificial Sequence
  HTT spacer sequence CTCN PAM
guugagccccgcgccuucgc

SEQ ID NO: 12850 - RNA, 20 nt, Artificial Sequence
  HTT spacer sequence CTCN PAM
acggagaggggacggggcgu

SEQ ID NO: 12851 - RNA, 20 nt, Artificial Sequence
  HTT spacer sequence CTCN PAM
cacagcaaggccgcugacag

SEQ ID NO: 12852 - RNA, 20 nt, Artificial Sequence
  HTT spacer sequence CTCN PAM
gccaauggcuggccagggaa

SEQ ID NO: 12853 - RNA, 20 nt, Artificial Sequence
  HTT spacer sequence CTCN PAM
gccggcgcggccccgccucc

SEQ ID NO: 12854 - RNA, 20 nt, Artificial Sequence
  HTT spacer sequence CTCN PAM
gccggcgcagcgucugggac

SEQ ID NO: 12855 - RNA, 20 nt, Artificial Sequence
  HTT spacer sequence CTCN PAM
gguucugcuuuuaccugcgg

SEQ ID NO: 12856 - RNA, 20 nt, Artificial Sequence
  HTT spacer sequence CTCN PAM
gggccgcagguaaaagcaga

SEQ ID NO: 12857 - RNA, 20 nt, Artificial Sequence
  HTT spacer sequence CTCN PAM
gcaccggggcaaugaauggg

SEQ ID NO: 12858 - RNA, 20 nt, Artificial Sequence
  HTT spacer sequence CTCN PAM
cggcgccgcucagcaccggg

SEQ ID NO: 12859 - RNA, 20 nt, Artificial Sequence
  HTT spacer sequence CTCN PAM
ggccgacucgcggcgccgcu

SEQ ID NO: 12860 - RNA, 20 nt, Artificial Sequence
  HTT spacer sequence CTCN PAM
ggggacugccgugccgggcg

SEQ ID NO: 12861 - RNA, 20 nt, Artificial Sequence
  HTT spacer sequence CTCN PAM
cgcccggcacggcagucccc

SEQ ID NO: 12862 - RNA, 20 nt, Artificial Sequence
  HTT spacer sequence CTCN PAM
aaggccuucaucagcuuuuc

SEQ ID NO: 12863 - RNA, 20 nt, Artificial Sequence
  HTT spacer sequence CTCN PAM
aguccuuccagcagcagcag

SEQ ID NO: 12864 - RNA, 20 nt, Artificial Sequence
  HTT spacer sequence CTCN PAM
ucagcuuccucagccgccgc

SEQ ID NO: 12865 - RNA, 20 nt, Artificial Sequence
  HTT spacer sequence CTCN PAM
gcuuccucagccgccgccgc

SEQ ID NO: 12866 - RNA, 20 nt, Artificial Sequence
  HTT spacer sequence CTCN PAM
gccgccgccgcaggcacagc

SEQ ID NO: 12867 - RNA, 20 nt, Artificial Sequence
  HTT spacer sequence CTCN PAM
gccgcagccgcccccgccgc

SEQ ID NO: 12868 - RNA, 20 nt, Artificial Sequence
  HTT spacer sequence CTCN PAM
gccacagccgggccgggugg

SEQ ID NO: 12869 - RNA, 20 nt, Artificial Sequence
  HTT spacer sequence CTCN PAM
ucagccacagccgggccggg

SEQ ID NO: 12870 - RNA, 20 nt, Artificial Sequence
  HTT spacer sequence CTCN PAM
cggucggugcagcggcuccu

SEQ ID NO: 12871 - RNA, 20 nt, Artificial Sequence
  HTT spacer sequence CTCN PAM
cugucccggcgggucccagg

SEQ ID NO: 12872 - RNA, 20 nt, Artificial Sequence
  HTT spacer sequence CTCN PAM
gcggggccggggguucgugu

SEQ ID NO: 12873 - RNA, 20 nt, Artificial Sequence
  HTT spacer sequence CTCN PAM
gucucugcggggccgggggu

SEQ ID NO: 12874 - RNA, 20 nt, Artificial Sequence
  HTT spacer sequence CTCN PAM
ggguugcugggucacucugu

SEQ ID NO: 12875 - RNA, 20 nt, Artificial Sequence
  HTT spacer sequence CTCN PAM
ugggcucuggguugcugggu

SEQ ID NO: 12876 - RNA, 20 nt, Artificial Sequence
  HTT spacer sequence CTCN PAM
uggggcgaggccuuccccca

SEQ ID NO: 12877 - RNA, 20 nt, Artificial Sequence
  HTT spacer sequence CTCN PAM
ccccaggagggggcgggugu

SEQ ID NO: 12878 - RNA, 20 nt, Artificial Sequence
  HTT spacer sequence CTCN PAM
cucacuugggucuucccuug

SEQ ID NO: 12879 - RNA, 20 nt, Artificial Sequence
  HTT spacer sequence CTCN PAM
cuugggucuucccuuguccu

SEQ ID NO: 12880 - RNA, 20 nt, Artificial Sequence
  HTT spacer sequence CTCN PAM
cgcgaggggaggcagagccu

SEQ ID NO: 12881 - RNA, 20 nt, Artificial Sequence
  HTT spacer sequence CTCN PAM
cgaggggaggcagagccuug

SEQ ID NO: 12882 - RNA, 20 nt, Artificial Sequence
  HTT spacer sequence CTCN PAM
cgagaggacaagggaagacc

SEQ ID NO: 12883 - RNA, 20 nt, Artificial Sequence
  HTT spacer sequence CTCN PAM
ccucgcgagaggacaaggga

SEQ ID NO: 12884 - RNA, 20 nt, Artificial Sequence
  HTT spacer sequence CTCN PAM
gccuccccucgcgagaggac

SEQ ID NO: 12885 - RNA, 20 nt, Artificial Sequence
  HTT spacer sequence CTCN PAM
gugaauucaggacaggcccc

SEQ ID NO: 12886 - RNA, 20 nt, Artificial Sequence
  HTT spacer sequence CTCN PAM
ccucggugaauucaggacag

SEQ ID NO: 12887 - RNA, 20 nt, Artificial Sequence
  HTT spacer sequence CTCN PAM
gcccucucgcccuucgcagg

SEQ ID NO: 12888 - RNA, 20 nt, Artificial Sequence
  HTT spacer sequence CTCN PAM
cgcccuucgcaggaugcgaa

SEQ ID NO: 12889 - RNA, 20 nt, Artificial Sequence
  HTT spacer sequence CTCN PAM
cccuucgcaggaugcgaaga

SEQ ID NO: 12890 - RNA, 20 nt, Artificial Sequence
  HTT spacer sequence CTCN PAM
ucgcauccugcgaagggcga

SEQ ID NO: 12891 - RNA, 20 nt, Artificial Sequence
  HTT spacer sequence CTCN PAM
ccccaacucuucgcauccug

SEQ ID NO: 12892 - RNA, 20 nt, Artificial Sequence
  HTT spacer sequence CTCN PAM
caaauaaaaagaaacaaguu

SEQ ID NO: 12893 - RNA, 20 nt, Artificial Sequence
  HTT spacer sequence CTCN PAM
ucacaacgcaguuaaaagaa

SEQ ID NO: 12894 - RNA, 20 nt, Artificial Sequence
  HTT spacer sequence CTCN PAM
aaguucucuucacaacgcag

SEQ ID NO: 12895 - RNA, 20 nt, Artificial Sequence
  HTT spacer sequence CTCN PAM
uccaaguucucuucacaacg

SEQ ID NO: 12896 - RNA, 20 nt, Artificial Sequence
  HTT spacer sequence CTCN PAM
gcuccuccaaguucucuuca

SEQ ID NO: 12897 - RNA, 20 nt, Artificial Sequence
  HTT spacer sequence CTCN PAM
gugccacuucccucuucuag

SEQ ID NO: 12898 - RNA, 20 nt, Artificial Sequence
  HTT spacer sequence CTCN PAM
ucuagucugagagggaagag

SEQ ID NO: 12899 - RNA, 20 nt, Artificial Sequence
  HTT spacer sequence CTCN PAM
gacuagaagagggaaguggc

SEQ ID NO: 12900 - RNA, 20 nt, Artificial Sequence
  HTT spacer sequence CTCN PAM
cagacuagaagagggaagug

SEQ ID NO: 12901 - RNA, 20 nt, Artificial Sequence
  HTT spacer sequence CTCN PAM
ucccucucagacuagaagag

SEQ ID NO: 12902 - RNA, 20 nt, Artificial Sequence
  HTT spacer sequence CTCN PAM
aagugucccgcgcccccagc

SEQ ID NO: 12903 - RNA, 20 nt, Artificial Sequence
  HTT spacer sequence CTCN PAM
cgaagugucccgcgccccca

SEQ ID NO: 12904 - RNA, 20 nt, Artificial Sequence
  HTT spacer sequence CTCN PAM
ucucgaagugucccgcgccc

SEQ ID NO: 12905 - RNA, 20 nt, Artificial Sequence
  HTT spacer sequence CTCN PAM
aaaccccgccuccucucgaa

SEQ ID NO: 12906 - RNA, 20 nt, Artificial Sequence
  HTT spacer sequence CTCN PAM
agcuccaaaccccgccuccu

SEQ ID NO: 12907 - RNA, 20 nt, Artificial Sequence
  HTT spacer sequence CTCN PAM
ccagcuccaaaccccgccuc

SEQ ID NO: 12908 - RNA, 20 nt, Artificial Sequence
  HTT spacer sequence CTCN PAM
gcgggaguggcggggcaggg

SEQ ID NO: 12909 - RNA, 20 nt, Artificial Sequence
  HTT spacer sequence CTCN PAM
cgccgaggcguccuaaaagc

SEQ ID NO: 12910 - RNA, 20 nt, Artificial Sequence
  HTT spacer sequence CTCN PAM
ccgcccccccccugccccgc

SEQ ID NO: 12911 - RNA, 20 nt, Artificial Sequence
  HTT spacer sequence CTCN PAM
cuccccgcccccccccugcc

SEQ ID NO: 12912 - RNA, 20 nt, Artificial Sequence
  HTT spacer sequence CTCN PAM
cauuggacgcgcccucacuc

SEQ ID NO: 12913 - RNA, 20 nt, Artificial Sequence
  HTT spacer sequence CTCN PAM
ggcuguuuuaagugccacua

SEQ ID NO: 12914 - RNA, 20 nt, Artificial Sequence
  HTT spacer sequence CTCN PAM
aaucucaggcuguuuuaagu

SEQ ID NO: 12915 - RNA, 20 nt, Artificial Sequence
  HTT spacer sequence CTCN PAM
uccuacauugucaggacauu

SEQ ID NO: 12916 - RNA, 20 nt, Artificial Sequence
  HTT spacer sequence CTCN PAM
uagguggugcuuaaaaucgu

SEQ ID NO: 12917 - RNA, 20 nt, Artificial Sequence
  HTT spacer sequence CTCN PAM
ucuaagccuaaguuggucug

SEQ ID NO: 12918 - RNA, 20 nt, Artificial Sequence
  HTT spacer sequence CTCN PAM
uucaaacgccugcagaccaa

SEQ ID NO: 12919 - RNA, 20 nt, Artificial Sequence
  HTT spacer sequence CTCN PAM
uccuaauauuuaagauaauu

SEQ ID NO: 12920 - RNA, 20 nt, Artificial Sequence
  HTT spacer sequence CTCN PAM
ccaucagcaacguguugguu

SEQ ID NO: 12921 - RNA, 20 nt, Artificial Sequence
  HTT spacer sequence CTCN PAM
gcaauuaaccuccccaucag

SEQ ID NO: 12922 - RNA, 20 nt, Artificial Sequence
  HTT spacer sequence CTCN PAM
uucaucccucggcaauuaac

SEQ ID NO: 12923 - RNA, 20 nt, Artificial Sequence
  HTT spacer sequence CTCN PAM
gugggcaucucagaugugcc

SEQ ID NO: 12924 - RNA, 20 nt, Artificial Sequence
  HTT spacer sequence CTCN PAM
gaugugccagugaaaggguu

SEQ ID NO: 12925 - RNA, 20 nt, Artificial Sequence
  HTT spacer sequence CTCN PAM
ccaagaacaagcaacagaaa

SEQ ID NO: 12926 - RNA, 20 nt, Artificial Sequence
  HTT spacer sequence CTCN PAM
uuuccuguuucaaaaauucu

SEQ ID NO: 12927 - RNA, 20 nt, Artificial Sequence
  HTT spacer sequence CTCN PAM
cuuuuccuguuucaaaaauu

SEQ ID NO: 12928 - RNA, 20 nt, Artificial Sequence
  HTT spacer sequence CTCN PAM
acacacagacuuccagggaa

SEQ ID NO: 12929 - RNA, 20 nt, Artificial Sequence
  HTT spacer sequence CTCN PAM
uacuguacacucgacacaca

SEQ ID NO: 12930 - RNA, 20 nt, Artificial Sequence
  HTT spacer sequence CTCN PAM
ggugcaguucaggccuuucu

SEQ ID NO: 12931 - RNA, 20 nt, Artificial Sequence
  HTT spacer sequence CTCN PAM
uaccucucaguauucuauuu

SEQ ID NO: 12932 - RNA, 20 nt, Artificial Sequence
  HTT spacer sequence CTCN PAM
caguauucuauuuccgaucu

SEQ ID NO: 12933 - RNA, 20 nt, Artificial Sequence
  HTT spacer sequence CTCN PAM
guauucuauuuccgaucugg

SEQ ID NO: 12934 - RNA, 20 nt, Artificial Sequence
  HTT spacer sequence CTCN PAM
guuaagacugauuaauuuuu

SEQ ID NO: 12935 - RNA, 20 nt, Artificial Sequence
  HTT spacer sequence CTCN PAM
ucuucaaaguuuaauuagaa

SEQ ID NO: 12936 - RNA, 20 nt, Artificial Sequence
  HTT spacer sequence CTCN PAM
gaaucauuuucuaauuaaac

SEQ ID NO: 12937 - RNA, 20 nt, Artificial Sequence
  HTT spacer sequence CTCN PAM
ccgaaucauuuucuaauuaa

SEQ ID NO: 12938 - RNA, 20 nt, Artificial Sequence
  HTT spacer sequence CTCN PAM
aaauauccaaaaaguuuuuc

SEQ ID NO: 12939 - RNA, 20 nt, Artificial Sequence
  HTT spacer sequence CTCN PAM
ucaguaaguaauuucucauc

SEQ ID NO: 12940 - RNA, 20 nt, Artificial Sequence
  HTT spacer sequence CTCN PAM
uccagaaauuuacuguagug

SEQ ID NO: 12941 - RNA, 20 nt, Artificial Sequence
  HTT spacer sequence CTCN PAM
uagaaaagcacuacaguaaa

SEQ ID NO: 12942 - RNA, 20 nt, Artificial Sequence
  HTT spacer sequence CTCN PAM
ugaugggaaggaagaccuuu

SEQ ID NO: 12943 - RNA, 20 nt, Artificial Sequence
  HTT spacer sequence CTCN PAM
uucuuaugcugauuugacag

SEQ ID NO: 12944 - RNA, 20 nt, Artificial Sequence
  HTT spacer sequence CTCN PAM
uuugucaaggcagcaaagga

SEQ ID NO: 12945 - RNA, 20 nt, Artificial Sequence
  HTT spacer sequence CTCN PAM
gauuaaagguguaagccacc

SEQ ID NO: 12946 - RNA, 20 nt, Artificial Sequence
  HTT spacer sequence CTCN PAM
caaagugcucggauuaaagg

SEQ ID NO: 12947 - RNA, 20 nt, Artificial Sequence
  HTT spacer sequence CTCN PAM
ggugauucguccaccuaggc

SEQ ID NO: 12948 - RNA, 20 nt, Artificial Sequence
  HTT spacer sequence CTCN PAM
ugaccucaggugauucgucc

SEQ ID NO: 12949 - RNA, 20 nt, Artificial Sequence
  HTT spacer sequence CTCN PAM
aacuccugaccucaggugau

SEQ ID NO: 12950 - RNA, 20 nt, Artificial Sequence
  HTT spacer sequence CTCN PAM
acuaaaaauacaaaaauuag

SEQ ID NO: 12951 - RNA, 20 nt, Artificial Sequence
  HTT spacer sequence CTCN PAM
cagguagcuuggauuacagg

SEQ ID NO: 12952 - RNA, 20 nt, Artificial Sequence
  HTT spacer sequence CTCN PAM
gccucccagguagcuuggau

SEQ ID NO: 12953 - RNA, 20 nt, Artificial Sequence
  HTT spacer sequence CTCN PAM
cggguucaagcgauuuuccu

SEQ ID NO: 12954 - RNA, 20 nt, Artificial Sequence
  HTT spacer sequence CTCN PAM
gccucccggguucaagcgau

SEQ ID NO: 12955 - RNA, 20 nt, Artificial Sequence
  HTT spacer sequence CTCN PAM
cugcagacucugccucccgg

SEQ ID NO: 12956 - RNA, 20 nt, Artificial Sequence
  HTT spacer sequence CTCN PAM
acucacugcagacucugccu

SEQ ID NO: 12957 - RNA, 20 nt, Artificial Sequence
  HTT spacer sequence CTCN PAM
agccugggugacagagcgag

SEQ ID NO: 12958 - RNA, 20 nt, Artificial Sequence
  HTT spacer sequence CTCN PAM
gucacccaggcuggagugca

SEQ ID NO: 12959 - RNA, 20 nt, Artificial Sequence
  HTT spacer sequence CTCN PAM
cucugucacccaggcuggag

SEQ ID NO: 12960 - RNA, 20 nt, Artificial Sequence
  HTT spacer sequence CTCN PAM
aucucaaaaaaaauuuuuuu

SEQ ID NO: 12961 - RNA, 20 nt, Artificial Sequence
  HTT spacer sequence CTCN PAM
aaaaaaauuuuuuuuaaugu

SEQ ID NO: 12962 - RNA, 20 nt, Artificial Sequence
  HTT spacer sequence CTCN PAM
gaguaccuaacuuugucccc

SEQ ID NO: 12963 - RNA, 20 nt, Artificial Sequence
  HTT spacer sequence CTCN PAM
gaggaaagggguggaaggaa

SEQ ID NO: 12964 - RNA, 20 nt, Artificial Sequence
  HTT spacer sequence CTCN PAM
uguauccugccagauauaac

SEQ ID NO: 12965 - RNA, 20 nt, Artificial Sequence
  HTT spacer sequence CTCN PAM
aaaaacaaaaguaguuuaga

SEQ ID NO: 12966 - RNA, 20 nt, Artificial Sequence
  HTT spacer sequence CTCN PAM
aaaaauauauagauauauau

SEQ ID NO: 12967 - RNA, 20 nt, Artificial Sequence
  HTT spacer sequence CTCN PAM
cauugucacccaggcuggag

SEQ ID NO: 12968 - RNA, 20 nt, Artificial Sequence
  HTT spacer sequence CTCN PAM
agccugggugacaaugugag

SEQ ID NO: 12969 - RNA, 20 nt, Artificial Sequence
  HTT spacer sequence CTCN PAM
gcucacugcagucucugccu

SEQ ID NO: 12970 - RNA, 20 nt, Artificial Sequence
  HTT spacer sequence CTCN PAM
cugcagucucugccucccag

SEQ ID NO: 12971 - RNA, 20 nt, Artificial Sequence
  HTT spacer sequence CTCN PAM
gccucccagguucaaaugcu

SEQ ID NO: 12972 - RNA, 20 nt, Artificial Sequence
  HTT spacer sequence CTCN PAM
cagguucaaaugcuucuccu

SEQ ID NO: 12973 - RNA, 20 nt, Artificial Sequence
  HTT spacer sequence CTCN PAM
ugccucagccuucugaguag

SEQ ID NO: 12974 - RNA, 20 nt, Artificial Sequence
  HTT spacer sequence CTCN PAM
gccuucugaguagcugggau

SEQ ID NO: 12975 - RNA, 20 nt, Artificial Sequence
  HTT spacer sequence CTCN PAM
gaaggcugaggcaggagaag

SEQ ID NO: 12976 - RNA, 20 nt, Artificial Sequence
  HTT spacer sequence CTCN PAM
acuaaaaauacaaaaauuag

SEQ ID NO: 12977 - RNA, 20 nt, Artificial Sequence
  HTT spacer sequence CTCN PAM
ugaccuugugaucuguccac

SEQ ID NO: 12978 - RNA, 20 nt, Artificial Sequence
  HTT spacer sequence CTCN PAM
gccucccaaagugcugggau

SEQ ID NO: 12979 - RNA, 20 nt, Artificial Sequence
  HTT spacer sequence CTCN PAM
caaagugcugggauuacagg

SEQ ID NO: 12980 - RNA, 20 nt, Artificial Sequence
  HTT spacer sequence CTCN PAM
caccuguaaucccagcacuu

SEQ ID NO: 12981 - RNA, 20 nt, Artificial Sequence
  HTT spacer sequence CTCN PAM
gaaaucaacugcauuagguu

SEQ ID NO: 12982 - RNA, 20 nt, Artificial Sequence
  HTT spacer sequence CTCN PAM
guauuuugcuguugagaaag

SEQ ID NO: 12983 - RNA, 20 nt, Artificial Sequence
  HTT spacer sequence CTCN PAM
acagcaaaauacagagaaau

SEQ ID NO: 12984 - RNA, 20 nt, Artificial Sequence
  HTT spacer sequence CTCN PAM
uuucucaacagcaaaauaca

SEQ ID NO: 12985 - RNA, 20 nt, Artificial Sequence
  HTT spacer sequence CTCN PAM
aaauuagugaauaccuccuu

SEQ ID NO: 12986 - RNA, 20 nt, Artificial Sequence
  HTT spacer sequence CTCN PAM
caaaguuuggauuuuggcag

SEQ ID NO: 12987 - RNA, 20 nt, Artificial Sequence
  HTT spacer sequence CTCN PAM
ucucaaaguaagauugauga

SEQ ID NO: 12988 - RNA, 20 nt, Artificial Sequence
  HTT spacer sequence CTCN PAM
aaguaagauugaugaaagca

SEQ ID NO: 12989 - RNA, 20 nt, Artificial Sequence
  HTT spacer sequence CTCN PAM
ugcucuuugguguggaacug

SEQ ID NO: 12990 - RNA, 20 nt, Artificial Sequence
  HTT spacer sequence CTCN PAM
uugguguggaacuguggugu

SEQ ID NO: 12991 - RNA, 20 nt, Artificial Sequence
  HTT spacer sequence CTCN PAM
guuuaugaguguuugugcuc

SEQ ID NO: 12992 - RNA, 20 nt, Artificial Sequence
  HTT spacer sequence CTCN PAM
uaaacugaggcccaugcaug

SEQ ID NO: 12993 - RNA, 20 nt, Artificial Sequence
  HTT spacer sequence CTCN PAM
gcucagcauacaggaugcag

SEQ ID NO: 12994 - RNA, 20 nt, Artificial Sequence
  HTT spacer sequence CTCN PAM
gcauacaggaugcaggaguu

SEQ ID NO: 12995 - RNA, 20 nt, Artificial Sequence
  HTT spacer sequence CTCN PAM
ugcauccuguaugcugagca

SEQ ID NO: 12996 - RNA, 20 nt, Artificial Sequence
  HTT spacer sequence CTCN PAM
gcaaaucuagcaugcuuggg

SEQ ID NO: 12997 - RNA, 20 nt, Artificial Sequence
  HTT spacer sequence CTCN PAM
caagcaugcuagauuugcug

SEQ ID NO: 12998 - RNA, 20 nt, Artificial Sequence
  HTT spacer sequence CTCN PAM
caguaauuaggaggcaauua

SEQ ID NO: 12999 - RNA, 20 nt, Artificial Sequence
  HTT spacer sequence CTCN PAM
uaauuacugugaggacccuc

SEQ ID NO: 13000 - RNA, 20 nt, Artificial Sequence
  HTT spacer sequence CTCN PAM
uucagauuccuaucuggugu

SEQ ID NO: 13001 - RNA, 20 nt, Artificial Sequence
  HTT spacer sequence CTCN PAM
gcagugagcagacaaagcuc

SEQ ID NO: 13002 - RNA, 20 nt, Artificial Sequence
  HTT spacer sequence CTCN PAM
cugcugagcccugcaccuau

SEQ ID NO: 13003 - RNA, 20 nt, Artificial Sequence
  HTT spacer sequence CTCN PAM
gcccucgugaagcuuucauu

SEQ ID NO: 13004 - RNA, 20 nt, Artificial Sequence
  HTT spacer sequence CTCN PAM
ugaagcuuucauucuaauga

SEQ ID NO: 13005 - RNA, 20 nt, Artificial Sequence
  HTT spacer sequence CTCN PAM
acguauuaacguacuguaua

SEQ ID NO: 13006 - RNA, 20 nt, Artificial Sequence
  HTT spacer sequence CTCN PAM
auuaacccugacauuucccu

SEQ ID NO: 13007 - RNA, 20 nt, Artificial Sequence
  HTT spacer sequence CTCN PAM
uuuggaauuugucuagcagg

SEQ ID NO: 13008 - RNA, 20 nt, Artificial Sequence
  HTT spacer sequence CTCN PAM
aaaaaaacaaaacaaaacaa

SEQ ID NO: 13009 - RNA, 20 nt, Artificial Sequence
  HTT spacer sequence CTCN PAM
aucagccaggcuggagugca

SEQ ID NO: 13010 - RNA, 20 nt, Artificial Sequence
  HTT spacer sequence CTCN PAM
agccuggcugauagagcaag

SEQ ID NO: 13011 - RNA, 20 nt, Artificial Sequence
  HTT spacer sequence CTCN PAM
cugcaaccucugccucuugg

SEQ ID NO: 13012 - RNA, 20 nt, Artificial Sequence
  HTT spacer sequence CTCN PAM
gccucuuggguucaagugau

SEQ ID NO: 13013 - RNA, 20 nt, Artificial Sequence
  HTT spacer sequence CTCN PAM
uggguucaagugauucucau

SEQ ID NO: 13014 - RNA, 20 nt, Artificial Sequence
  HTT spacer sequence CTCN PAM
ugccucagccuccuguuuag

SEQ ID NO: 13015 - RNA, 20 nt, Artificial Sequence
  HTT spacer sequence CTCN PAM
gccuccuguuuagcugggau

SEQ ID NO: 13016 - RNA, 20 nt, Artificial Sequence
  HTT spacer sequence CTCN PAM
uguuuagcugggauuauaga

SEQ ID NO: 13017 - RNA, 20 nt, Artificial Sequence
  HTT spacer sequence CTCN PAM
ggggaaaaaaaaaaaauuac

SEQ ID NO: 13018 - RNA, 20 nt, Artificial Sequence
  HTT spacer sequence CTCN PAM
gucucgggggaaaaaaaaaa

SEQ ID NO: 13019 - RNA, 20 nt, Artificial Sequence
  HTT spacer sequence CTCN PAM
gucgcccaggcuggagugca

SEQ ID NO: 13020 - RNA, 20 nt, Artificial Sequence
  HTT spacer sequence CTCN PAM
agccugggcgacagagcaag

SEQ ID NO: 13021 - RNA, 20 nt, Artificial Sequence
  HTT spacer sequence CTCN PAM
gcucacugcaagcuccgcuu

SEQ ID NO: 13022 - RNA, 20 nt, Artificial Sequence
  HTT spacer sequence CTCN PAM
cugcaagcuccgcuucccga

SEQ ID NO: 13023 - RNA, 20 nt, Artificial Sequence
  HTT spacer sequence CTCN PAM
gcuucccgaguucacgccau

SEQ ID NO: 13024 - RNA, 20 nt, Artificial Sequence
  HTT spacer sequence CTCN PAM
ggaagcggagcuugcaguga

SEQ ID NO: 13025 - RNA, 20 nt, Artificial Sequence
  HTT spacer sequence CTCN PAM
ugccucagucucccaaguag

SEQ ID NO: 13026 - RNA, 20 nt, Artificial Sequence
  HTT spacer sequence CTCN PAM
gucucccaaguagcugggac

SEQ ID NO: 13027 - RNA, 20 nt, Artificial Sequence
  HTT spacer sequence CTCN PAM
caaguagcugggacuacagg

SEQ ID NO: 13028 - RNA, 20 nt, Artificial Sequence
  HTT spacer sequence CTCN PAM
auuaaaaauacaaaaaaauu

SEQ ID NO: 13029 - RNA, 20 nt, Artificial Sequence
  HTT spacer sequence CTCN PAM
ugaccucgucauccgccgac

SEQ ID NO: 13030 - RNA, 20 nt, Artificial Sequence
  HTT spacer sequence CTCN PAM
ucauccgccgaccuugugau

SEQ ID NO: 13031 - RNA, 20 nt, Artificial Sequence
  HTT spacer sequence CTCN PAM
gccucccaaagugcugggau

SEQ ID NO: 13032 - RNA, 20 nt, Artificial Sequence
  HTT spacer sequence CTCN PAM
caaagugcugggauuacagg

SEQ ID NO: 13033 - RNA, 20 nt, Artificial Sequence
  HTT spacer sequence CTCN PAM
ugccuguaaucccagcacuu

SEQ ID NO: 13034 - RNA, 20 nt, Artificial Sequence
  HTT spacer sequence CTCN PAM
acuaaaaauacaaaaauuac

SEQ ID NO: 13035 - RNA, 20 nt, Artificial Sequence
  HTT spacer sequence CTCN PAM
ucauggcaaaaccccaucuc

SEQ ID NO: 13036 - RNA, 20 nt, Artificial Sequence
  HTT spacer sequence CTCN PAM
aacucccggccucaugugau

SEQ ID NO: 13037 - RNA, 20 nt, Artificial Sequence
  HTT spacer sequence CTCN PAM
cggccucaugugaucugccu

SEQ ID NO: 13038 - RNA, 20 nt, Artificial Sequence
  HTT spacer sequence CTCN PAM
ugugaucugccugccuuggc

SEQ ID NO: 13039 - RNA, 20 nt, Artificial Sequence
  HTT spacer sequence CTCN PAM
caaagugcuaggauuacagg

SEQ ID NO: 13040 - RNA, 20 nt, Artificial Sequence
  HTT spacer sequence CTCN PAM
ugccuguaauccuagcacuu

SEQ ID NO: 13041 - RNA, 20 nt, Artificial Sequence
  HTT spacer sequence CTCN PAM
guggaccuucccugaacacc

SEQ ID NO: 13042 - RNA, 20 nt, Artificial Sequence
  HTT spacer sequence CTCN PAM
uuaacccaggcuggaaugca

SEQ ID NO: 13043 - RNA, 20 nt, Artificial Sequence
  HTT spacer sequence CTCN PAM
cuucagccuugaacuccugg

SEQ ID NO: 13044 - RNA, 20 nt, Artificial Sequence
  HTT spacer sequence CTCN PAM
ugggcucaagugauccuccc

SEQ ID NO: 13045 - RNA, 20 nt, Artificial Sequence
  HTT spacer sequence CTCN PAM
agugauccucccaccucaac

SEQ ID NO: 13046 - RNA, 20 nt, Artificial Sequence
  HTT spacer sequence CTCN PAM
caccucaaccucacaaugug

SEQ ID NO: 13047 - RNA, 20 nt, Artificial Sequence
  HTT spacer sequence CTCN PAM
accucacaauguguugggac

SEQ ID NO: 13048 - RNA, 20 nt, Artificial Sequence
  HTT spacer sequence CTCN PAM
caauguguugggacuauagg

SEQ ID NO: 13049 - RNA, 20 nt, Artificial Sequence
  HTT spacer sequence CTCN PAM
caccuauagucccaacacau

SEQ ID NO: 13050 - RNA, 20 nt, Artificial Sequence
  HTT spacer sequence CTCN PAM
aaagccaucaucuggccagg

SEQ ID NO: 13051 - RNA, 20 nt, Artificial Sequence
  HTT spacer sequence CTCN PAM
agcgaguuaagagucuagug

SEQ ID NO: 13052 - RNA, 20 nt, Artificial Sequence
  HTT spacer sequence CTCN PAM
cuugaggucuuuacucaaaa

SEQ ID NO: 13053 - RNA, 20 nt, Artificial Sequence
  HTT spacer sequence CTCN PAM
uaacucgcuugaggucuuua

SEQ ID NO: 13054 - RNA, 20 nt, Artificial Sequence
  HTT spacer sequence CTCN PAM
auucacccaacuaaaaugac

SEQ ID NO: 13055 - RNA, 20 nt, Artificial Sequence
  HTT spacer sequence CTCN PAM
cucaauucacccaacuaaaa

SEQ ID NO: 13056 - RNA, 20 nt, Artificial Sequence
  HTT spacer sequence CTCN PAM
uggaccuuacuucuuacuac

SEQ ID NO: 13057 - RNA, 20 nt, Artificial Sequence
  HTT spacer sequence CTCN PAM
cuugaccucuuggaccuuac

SEQ ID NO: 13058 - RNA, 20 nt, Artificial Sequence
  HTT spacer sequence CTCN PAM
cauaaaugccaauaucuuua

SEQ ID NO: 13059 - RNA, 20 nt, Artificial Sequence
  HTT spacer sequence CTCN PAM
cucacauaaaugccaauauc

SEQ ID NO: 13060 - RNA, 20 nt, Artificial Sequence
  HTT spacer sequence CTCN PAM
agugacaucccaucucacuc

SEQ ID NO: 13061 - RNA, 20 nt, Artificial Sequence
  HTT spacer sequence CTCN PAM
aauccuccagugacauccca

SEQ ID NO: 13062 - RNA, 20 nt, Artificial Sequence
  HTT spacer sequence CTCN PAM
gcucuaauccuccagugaca

SEQ ID NO: 13063 - RNA, 20 nt, Artificial Sequence
  HTT spacer sequence CTCN PAM
ucugcucuaauccuccagug

SEQ ID NO: 13064 - RNA, 20 nt, Artificial Sequence
  HTT spacer sequence CTCN PAM
ggcugacaacagagugaagg

SEQ ID NO: 13065 - RNA, 20 nt, Artificial Sequence
  HTT spacer sequence CTCN PAM
guugucagccagaguucacu

SEQ ID NO: 13066 - RNA, 20 nt, Artificial Sequence
  HTT spacer sequence CTCN PAM
gauaagcaugguggguucug

SEQ ID NO: 13067 - RNA, 20 nt, Artificial Sequence
  HTT spacer sequence CTCN PAM
cacugcccacagccgacagc

SEQ ID NO: 13068 - RNA, 20 nt, Artificial Sequence
  HTT spacer sequence CTCN PAM
gcuaaguauaacaauuuagc

SEQ ID NO: 13069 - RNA, 20 nt, Artificial Sequence
  HTT spacer sequence CTCN PAM
ugcuuguuaccaguuuaagc

SEQ ID NO: 13070 - RNA, 20 nt, Artificial Sequence
  HTT spacer sequence CTCN PAM
uucuuuuuuuuuuuuuugaa

SEQ ID NO: 13071 - RNA, 20 nt, Artificial Sequence
  HTT spacer sequence CTCN PAM
guuucaaaaaaaaaaaaaag

SEQ ID NO: 13072 - RNA, 20 nt, Artificial Sequence
  HTT spacer sequence CTCN PAM
ugucacccgggcuggagugc

SEQ ID NO: 13073 - RNA, 20 nt, Artificial Sequence
  HTT spacer sequence CTCN PAM
agcccgggugacaagagcga

SEQ ID NO: 13074 - RNA, 20 nt, Artificial Sequence
  HTT spacer sequence CTCN PAM
gcucacuaaaaccucuaccu

SEQ ID NO: 13075 - RNA, 20 nt, Artificial Sequence
  HTT spacer sequence CTCN PAM
cuaaaaccucuaccuccugg

SEQ ID NO: 13076 - RNA, 20 nt, Artificial Sequence
  HTT spacer sequence CTCN PAM
accuccuggguucaagugau

SEQ ID NO: 13077 - RNA, 20 nt, Artificial Sequence
  HTT spacer sequence CTCN PAM
uggguucaagugauucuucu

SEQ ID NO: 13078 - RNA, 20 nt, Artificial Sequence
  HTT spacer sequence CTCN PAM
gccucccaaguaacugggau

SEQ ID NO: 13079 - RNA, 20 nt, Artificial Sequence
  HTT spacer sequence CTCN PAM
caaguaacugggauuacagg

SEQ ID NO: 13080 - RNA, 20 nt, Artificial Sequence
  HTT spacer sequence CTCN PAM
acuaaaaacacaaaaauuag

SEQ ID NO: 13081 - RNA, 20 nt, Artificial Sequence
  HTT spacer sequence CTCN PAM
aacuucugaccucaggugau

SEQ ID NO: 13082 - RNA, 20 nt, Artificial Sequence
  HTT spacer sequence CTCN PAM
ggugauccacucgccucagc

SEQ ID NO: 13083 - RNA, 20 nt, Artificial Sequence
  HTT spacer sequence CTCN PAM
ccucagccugccaaagugcu

SEQ ID NO: 13084 - RNA, 20 nt, Artificial Sequence
  HTT spacer sequence CTCN PAM
gccugccaaagugcugggau

SEQ ID NO: 13085 - RNA, 20 nt, Artificial Sequence
  HTT spacer sequence CTCN PAM
uucuuauacuuaccuugcaa

SEQ ID NO: 13086 - RNA, 20 nt, Artificial Sequence
  HTT spacer sequence CTCN PAM
uuuuuucccuuuguauuuuu

SEQ ID NO: 13087 - RNA, 20 nt, Artificial Sequence
  HTT spacer sequence CTCN PAM
cccuuccuuuggauugucuu

SEQ ID NO: 13088 - RNA, 20 nt, Artificial Sequence
  HTT spacer sequence CTCN PAM
cuuccuuuggauugucuuuu

SEQ ID NO: 13089 - RNA, 20 nt, Artificial Sequence
  HTT spacer sequence CTCN PAM
acuucaucaaaauuaaaaac

SEQ ID NO: 13090 - RNA, 20 nt, Artificial Sequence
  HTT spacer sequence CTCN PAM
uauguuuucuucuaagaauu

SEQ ID NO: 13091 - RNA, 20 nt, Artificial Sequence
  HTT spacer sequence CTCN PAM
aaaauucuuagaagaaaaca

SEQ ID NO: 13092 - RNA, 20 nt, Artificial Sequence
  HTT spacer sequence CTCN PAM
aaauggaucagacuuaaaug

SEQ ID NO: 13093 - RNA, 20 nt, Artificial Sequence
  HTT spacer sequence CTCN PAM
ucaacaaacagugcugggac

SEQ ID NO: 13094 - RNA, 20 nt, Artificial Sequence
  HTT spacer sequence CTCN PAM
cauuucaugaauuuaaacug

SEQ ID NO: 13095 - RNA, 20 nt, Artificial Sequence
  HTT spacer sequence CTCN PAM
aacuuuguuccuuuucaaga

SEQ ID NO: 13096 - RNA, 20 nt, Artificial Sequence
  HTT spacer sequence CTCN PAM
gaauccuacuuggcuucuuu

SEQ ID NO: 13097 - RNA, 20 nt, Artificial Sequence
  HTT spacer sequence CTCN PAM
cagaauccuacuuggcuucu

SEQ ID NO: 13098 - RNA, 20 nt, Artificial Sequence
  HTT spacer sequence CTCN PAM
ccaaguugaucuacagauuc

SEQ ID NO: 13099 - RNA, 20 nt, Artificial Sequence
  HTT spacer sequence CTCN PAM
gucacagcuacgcggcucug

SEQ ID NO: 13100 - RNA, 20 nt, Artificial Sequence
  HTT spacer sequence CTCN PAM
gccauuguagcaugaaagua

SEQ ID NO: 13101 - RNA, 20 nt, Artificial Sequence
  HTT spacer sequence CTCN PAM
uacauauugcuuauggcuac

SEQ ID NO: 13102 - RNA, 20 nt, Artificial Sequence
  HTT spacer sequence CTCN PAM
ugacaggugaaaauuauaug

SEQ ID NO: 13103 - RNA, 20 nt, Artificial Sequence
  HTT spacer sequence CTCN PAM
uagguuaaaauaugauagga

SEQ ID NO: 13104 - RNA, 20 nt, Artificial Sequence
  HTT spacer sequence CTCN PAM
aaaaaaaaaaaaaaaaaaaa

SEQ ID NO: 13105 - RNA, 20 nt, Artificial Sequence
  HTT spacer sequence CTCN PAM
gucucaaaaaaaaaaaaaaa

SEQ ID NO: 13106 - RNA, 20 nt, Artificial Sequence
  HTT spacer sequence CTCN PAM
uguugcccaggcuggagugc

SEQ ID NO: 13107 - RNA, 20 nt, Artificial Sequence
  HTT spacer sequence CTCN PAM
agccugggcaacaagaguga

SEQ ID NO: 13108 - RNA, 20 nt, Artificial Sequence
  HTT spacer sequence CTCN PAM
gcucacugcaaccucugccu

SEQ ID NO: 13109 - RNA, 20 nt, Artificial Sequence
  HTT spacer sequence CTCN PAM
cugcaaccucugccucccag

SEQ ID NO: 13110 - RNA, 20 nt, Artificial Sequence
  HTT spacer sequence CTCN PAM
gccucccagguucaagacau

SEQ ID NO: 13111 - RNA, 20 nt, Artificial Sequence
  HTT spacer sequence CTCN PAM
cagguucaagacauucuccu

SEQ ID NO: 13112 - RNA, 20 nt, Artificial Sequence
  HTT spacer sequence CTCN PAM
ugcacggccucccuaguagc

SEQ ID NO: 13113 - RNA, 20 nt, Artificial Sequence
  HTT spacer sequence CTCN PAM
cuaguagcugggauuacagg

SEQ ID NO: 13114 - RNA, 20 nt, Artificial Sequence
  HTT spacer sequence CTCN PAM
acuaaaaauacaaaauuagc

SEQ ID NO: 13115 - RNA, 20 nt, Artificial Sequence
  HTT spacer sequence CTCN PAM
auguuggucaggcuggucuu

SEQ ID NO: 13116 - RNA, 20 nt, Artificial Sequence
  HTT spacer sequence CTCN PAM
ugaccucaggugauccaccc

SEQ ID NO: 13117 - RNA, 20 nt, Artificial Sequence
  HTT spacer sequence CTCN PAM
ggugauccacccgccucagc

SEQ ID NO: 13118 - RNA, 20 nt, Artificial Sequence
  HTT spacer sequence CTCN PAM
gccucccaaagugcugggau

SEQ ID NO: 13119 - RNA, 20 nt, Artificial Sequence
  HTT spacer sequence CTCN PAM
caaagugcugggauuacagg

SEQ ID NO: 13120 - RNA, 20 nt, Artificial Sequence
  HTT spacer sequence CTCN PAM
cacccuguaaucccagcacu

SEQ ID NO: 13121 - RNA, 20 nt, Artificial Sequence
  HTT spacer sequence CTCN PAM
gucaagcaaacaaaaaauga

SEQ ID NO: 13122 - RNA, 20 nt, Artificial Sequence
  HTT spacer sequence CTCN PAM
uuuaaaaagaaauucuaaaa

SEQ ID NO: 13123 - RNA, 20 nt, Artificial Sequence
  HTT spacer sequence CTCN PAM
aaaaguccucuuuuaaaaag

SEQ ID NO: 13124 - RNA, 20 nt, Artificial Sequence
  HTT spacer sequence CTCN PAM
cauuuuuguggcuguagaau

SEQ ID NO: 13125 - RNA, 20 nt, Artificial Sequence
  HTT spacer sequence CTCN PAM
cuaccuugagaaguccccau

SEQ ID NO: 13126 - RNA, 20 nt, Artificial Sequence
  HTT spacer sequence CTCN PAM
accuugagaaguccccaucc

SEQ ID NO: 13127 - RNA, 20 nt, Artificial Sequence
  HTT spacer sequence CTCN PAM
agguagagagaauaugucac

SEQ ID NO: 13128 - RNA, 20 nt, Artificial Sequence
  HTT spacer sequence CTCN PAM
auuuccuguaaauaagucaa

SEQ ID NO: 13129 - RNA, 20 nt, Artificial Sequence
  HTT spacer sequence CTCN PAM
aaacauuuagucuuauucag

SEQ ID NO: 13130 - RNA, 20 nt, Artificial Sequence
  HTT spacer sequence CTCN PAM
uuguugucugaauaagacua

SEQ ID NO: 13131 - RNA, 20 nt, Artificial Sequence
  HTT spacer sequence CTCN PAM
aacauacauucuagccccca

SEQ ID NO: 13132 - RNA, 20 nt, Artificial Sequence
  HTT spacer sequence CTCN PAM
cugugauagcaaggaccuau

SEQ ID NO: 13133 - RNA, 20 nt, Artificial Sequence
  HTT spacer sequence CTCN PAM
gggacagucguuugguauca

SEQ ID NO: 13134 - RNA, 20 nt, Artificial Sequence
  HTT spacer sequence CTCN PAM
uaagcagacucucucugcuu

SEQ ID NO: 13135 - RNA, 20 nt, Artificial Sequence
  HTT spacer sequence CTCN PAM
cucugcuugaccugacaaau

SEQ ID NO: 13136 - RNA, 20 nt, Artificial Sequence
  HTT spacer sequence CTCN PAM
cugcuugaccugacaaauca

SEQ ID NO: 13137 - RNA, 20 nt, Artificial Sequence
  HTT spacer sequence CTCN PAM
gcuugaccugacaaaucaga

SEQ ID NO: 13138 - RNA, 20 nt, Artificial Sequence
  HTT spacer sequence CTCN PAM
gauuugucaggucaagcaga

SEQ ID NO: 13139 - RNA, 20 nt, Artificial Sequence
  HTT spacer sequence CTCN PAM
cugaaccuguuaaaacacag

SEQ ID NO: 13140 - RNA, 20 nt, Artificial Sequence
  HTT spacer sequence CTCN PAM
aaugugcauguaagucacuc

SEQ ID NO: 13141 - RNA, 20 nt, Artificial Sequence
  HTT spacer sequence CTCN PAM
acuguaggugcuuagaccuu

SEQ ID NO: 13142 - RNA, 20 nt, Artificial Sequence
  HTT spacer sequence CTCN PAM
caaaugcuugcauuguuauu

SEQ ID NO: 13143 - RNA, 20 nt, Artificial Sequence
  HTT spacer sequence CTCN PAM
uauguguccagguguagcug

SEQ ID NO: 13144 - RNA, 20 nt, Artificial Sequence
  HTT spacer sequence CTCN PAM
gcuacaccuggacacauaug

SEQ ID NO: 13145 - RNA, 20 nt, Artificial Sequence
  HTT spacer sequence CTCN PAM
acggcccuacagcagauaag

SEQ ID NO: 13146 - RNA, 20 nt, Artificial Sequence
  HTT spacer sequence CTCN PAM
ucacagcuacagaaaugcuc

SEQ ID NO: 13147 - RNA, 20 nt, Artificial Sequence
  HTT spacer sequence CTCN PAM
cucaucacagcuacagaaau

SEQ ID NO: 13148 - RNA, 20 nt, Artificial Sequence
  HTT spacer sequence CTCN PAM
gcucacucaucacagcuaca

SEQ ID NO: 13149 - RNA, 20 nt, Artificial Sequence
  HTT spacer sequence CTCN PAM
ccucagcucacucaucacag

SEQ ID NO: 13150 - RNA, 20 nt, Artificial Sequence
  HTT spacer sequence CTCN PAM
gcaggcucaccucagcucac

SEQ ID NO: 13151 - RNA, 20 nt, Artificial Sequence
  HTT spacer sequence CTCN PAM
ccgcaggcucaccucagcuc

SEQ ID NO: 13152 - RNA, 20 nt, Artificial Sequence
  HTT spacer sequence CTCN PAM
cagccauugguagugggacu

SEQ ID NO: 13153 - RNA, 20 nt, Artificial Sequence
  HTT spacer sequence CTCN PAM
cuuagaugaacuggaaggac

SEQ ID NO: 13154 - RNA, 20 nt, Artificial Sequence
  HTT spacer sequence CTCN PAM
gaugaaaggguccuuccagu

SEQ ID NO: 13155 - RNA, 20 nt, Artificial Sequence
  HTT spacer sequence CTCN PAM
auaguggcugcucagaugaa

SEQ ID NO: 13156 - RNA, 20 nt, Artificial Sequence
  HTT spacer sequence CTCN PAM
uucgguuguuuuucuccaua

SEQ ID NO: 13157 - RNA, 20 nt, Artificial Sequence
  HTT spacer sequence CTCN PAM
ccucauucgguuguuuuucu

SEQ ID NO: 13158 - RNA, 20 nt, Artificial Sequence
  HTT spacer sequence CTCN PAM
ccccucauucgguuguuuuu

SEQ ID NO: 13159 - RNA, 20 nt, Artificial Sequence
  HTT spacer sequence CTCN PAM
uuugugcccuaaauaaaauu

SEQ ID NO: 13160 - RNA, 20 nt, Artificial Sequence
  HTT spacer sequence CTCN PAM
ccuuugugcccuaaauaaaa

SEQ ID NO: 13161 - RNA, 20 nt, Artificial Sequence
  HTT spacer sequence CTCN PAM
aaugucaccuucuaaccaca

SEQ ID NO: 13162 - RNA, 20 nt, Artificial Sequence
  HTT spacer sequence CTCN PAM
cgcuauacacauggcuugcc

SEQ ID NO: 13163 - RNA, 20 nt, Artificial Sequence
  HTT spacer sequence CTCN PAM
ucucccgcuauacacauggc

SEQ ID NO: 13164 - RNA, 20 nt, Artificial Sequence
  HTT spacer sequence CTCN PAM
cuucucccgcuauacacaug

SEQ ID NO: 13165 - RNA, 20 nt, Artificial Sequence
  HTT spacer sequence CTCN PAM
gccuggaccucucuucuccc

SEQ ID NO: 13166 - RNA, 20 nt, Artificial Sequence
  HTT spacer sequence CTCN PAM
aacauggaaagcauuucugc

SEQ ID NO: 13167 - RNA, 20 nt, Artificial Sequence
  HTT spacer sequence CTCN PAM
uuacugguucucaaacaugg

SEQ ID NO: 13168 - RNA, 20 nt, Artificial Sequence
  HTT spacer sequence CTCN PAM
uccuuauuucugcccuucac

SEQ ID NO: 13169 - RNA, 20 nt, Artificial Sequence
  HTT spacer sequence CTCN PAM
cagccucauccuuauuucug

SEQ ID NO: 13170 - RNA, 20 nt, Artificial Sequence
  HTT spacer sequence CTCN PAM
cgcagccucauccuuauuuc

SEQ ID NO: 13171 - RNA, 20 nt, Artificial Sequence
  HTT spacer sequence CTCN PAM
ucucucgcagccucauccuu

SEQ ID NO: 13172 - RNA, 20 nt, Artificial Sequence
  HTT spacer sequence CTCN PAM
caucucucgcagccucaucc

SEQ ID NO: 13173 - RNA, 20 nt, Artificial Sequence
  HTT spacer sequence CTCN PAM
aaccucucaucucucgcagc

SEQ ID NO: 13174 - RNA, 20 nt, Artificial Sequence
  HTT spacer sequence CTCN PAM
ucucuaaccucucaucucuc

SEQ ID NO: 13175 - RNA, 20 nt, Artificial Sequence
  HTT spacer sequence CTCN PAM
aacuacugguauuacaggca

SEQ ID NO: 13176 - RNA, 20 nt, Artificial Sequence
  HTT spacer sequence CTCN PAM
caccacaccgucucaaacua

SEQ ID NO: 13177 - RNA, 20 nt, Artificial Sequence
  HTT spacer sequence CTCN PAM
ggcaauccucccaccacacc

SEQ ID NO: 13178 - RNA, 20 nt, Artificial Sequence
  HTT spacer sequence CTCN PAM
acaaaaaacuuuaaaaaauu

SEQ ID NO: 13179 - RNA, 20 nt, Artificial Sequence
  HTT spacer sequence CTCN PAM
ggaggcugaggaggcuggag

SEQ ID NO: 13180 - RNA, 20 nt, Artificial Sequence
  HTT spacer sequence CTCN PAM
ugaguagcugggacuacagg

SEQ ID NO: 13181 - RNA, 20 nt, Artificial Sequence
  HTT spacer sequence CTCN PAM
gccuccugaguagcugggac

SEQ ID NO: 13182 - RNA, 20 nt, Artificial Sequence
  HTT spacer sequence CTCN PAM
ucagccuccugaguagcugg

SEQ ID NO: 13183 - RNA, 20 nt, Artificial Sequence
  HTT spacer sequence CTCN PAM
agccuccucagccuccugag

SEQ ID NO: 13184 - RNA, 20 nt, Artificial Sequence
  HTT spacer sequence CTCN PAM
agcaauccuccagccuccuc

SEQ ID NO: 13185 - RNA, 20 nt, Artificial Sequence
  HTT spacer sequence CTCN PAM
uggacucaagcaauccucca

SEQ ID NO: 13186 - RNA, 20 nt, Artificial Sequence
  HTT spacer sequence CTCN PAM
aacuccuggacucaagcaau

SEQ ID NO: 13187 - RNA, 20 nt, Artificial Sequence
  HTT spacer sequence CTCN PAM
cugcagccucaaacuccugg

SEQ ID NO: 13188 - RNA, 20 nt, Artificial Sequence
  HTT spacer sequence CTCN PAM
ugcccagguuguaguguagu

SEQ ID NO: 13189 - RNA, 20 nt, Artificial Sequence
  HTT spacer sequence CTCN PAM
cuugcccagguuguagugua

SEQ ID NO: 13190 - RNA, 20 nt, Artificial Sequence
  HTT spacer sequence CTCN PAM
cucucuugcccagguuguag

SEQ ID NO: 13191 - RNA, 20 nt, Artificial Sequence
  HTT spacer sequence CTCN PAM
aaauauacacacacacacac

SEQ ID NO: 13192 - RNA, 20 nt, Artificial Sequence
  HTT spacer sequence CTCN PAM
ccagcaugugguauugucaa

SEQ ID NO: 13193 - RNA, 20 nt, Artificial Sequence
  HTT spacer sequence CTCN PAM
ggaaaacaguuuggcaguuu

SEQ ID NO: 13194 - RNA, 20 nt, Artificial Sequence
  HTT spacer sequence CTCN PAM
aggauuaaugcccaggauug

SEQ ID NO: 13195 - RNA, 20 nt, Artificial Sequence
  HTT spacer sequence CTCN PAM
aguaugcauagcagcuuuac

SEQ ID NO: 13196 - RNA, 20 nt, Artificial Sequence
  HTT spacer sequence CTCN PAM
gauguccuucaacaggugaa

SEQ ID NO: 13197 - RNA, 20 nt, Artificial Sequence
  HTT spacer sequence CTCN PAM
guaauaaaaaggaaugagcu

SEQ ID NO: 13198 - RNA, 20 nt, Artificial Sequence
  HTT spacer sequence CTCN PAM
uuccuuuuuauuacugagua

SEQ ID NO: 13199 - RNA, 20 nt, Artificial Sequence
  HTT spacer sequence CTCN PAM
aucccuaaaacugugccauu

SEQ ID NO: 13200 - RNA, 20 nt, Artificial Sequence
  HTT spacer sequence CTCN PAM
aaccccaggcaaccacuaau

SEQ ID NO: 13201 - RNA, 20 nt, Artificial Sequence
  HTT spacer sequence CTCN PAM
acuaccccaucucuaacccc

SEQ ID NO: 13202 - RNA, 20 nt, Artificial Sequence
  HTT spacer sequence CTCN PAM
gccaccacuaaccuacucua

SEQ ID NO: 13203 - RNA, 20 nt, Artificial Sequence
  HTT spacer sequence CTCN PAM
ucugccaccacuaaccuacu

SEQ ID NO: 13204 - RNA, 20 nt, Artificial Sequence
  HTT spacer sequence CTCN PAM
ccucugccaccacuaaccua

SEQ ID NO: 13205 - RNA, 20 nt, Artificial Sequence
  HTT spacer sequence CTCN PAM
uuucucuccucugccaccac

SEQ ID NO: 13206 - RNA, 20 nt, Artificial Sequence
  HTT spacer sequence CTCN PAM
cuuuucucuccucugccacc

SEQ ID NO: 13207 - RNA, 20 nt, Artificial Sequence
  HTT spacer sequence CTCN PAM
cucucuuuucucuccucugc

SEQ ID NO: 13208 - RNA, 20 nt, Artificial Sequence
  HTT spacer sequence CTCN PAM
gucgccaaaaaaaaaaaaaa

SEQ ID NO: 13209 - RNA, 20 nt, Artificial Sequence
  HTT spacer sequence CTCN PAM
guugcccaggcuggagugca

SEQ ID NO: 13210 - RNA, 20 nt, Artificial Sequence
  HTT spacer sequence CTCN PAM
agccugggcaacagagcaag

SEQ ID NO: 13211 - RNA, 20 nt, Artificial Sequence
  HTT spacer sequence CTCN PAM
cugcaaccucugccuccugg

SEQ ID NO: 13212 - RNA, 20 nt, Artificial Sequence
  HTT spacer sequence CTCN PAM
gccuccuggguucaagugau

SEQ ID NO: 13213 - RNA, 20 nt, Artificial Sequence
  HTT spacer sequence CTCN PAM
uggguucaagugauacuugu

SEQ ID NO: 13214 - RNA, 20 nt, Artificial Sequence
  HTT spacer sequence CTCN PAM
gucucccauguucagaguga

SEQ ID NO: 13215 - RNA, 20 nt, Artificial Sequence
  HTT spacer sequence CTCN PAM
cauguucagagugaaacaaa

SEQ ID NO: 13216 - RNA, 20 nt, Artificial Sequence
  HTT spacer sequence CTCN PAM
gaacaugggagacugagaca

SEQ ID NO: 13217 - RNA, 20 nt, Artificial Sequence
  HTT spacer sequence CTCN PAM
gguuuguuucacucugaaca

SEQ ID NO: 13218 - RNA, 20 nt, Artificial Sequence
  HTT spacer sequence CTCN PAM
ugccuguaaucccagcacuu

SEQ ID NO: 13219 - RNA, 20 nt, Artificial Sequence
  HTT spacer sequence CTCN PAM
caaaagugcugggauuacag

SEQ ID NO: 13220 - RNA, 20 nt, Artificial Sequence
  HTT spacer sequence CTCN PAM
agugaucugcccaccuuggc

SEQ ID NO: 13221 - RNA, 20 nt, Artificial Sequence
  HTT spacer sequence CTCN PAM
ugaccucaagugaucugccc

SEQ ID NO: 13222 - RNA, 20 nt, Artificial Sequence
  HTT spacer sequence CTCN PAM
aacuccugaccucaagugau

SEQ ID NO: 13223 - RNA, 20 nt, Artificial Sequence
  HTT spacer sequence CTCN PAM
caaguagcugggacuacagg

SEQ ID NO: 13224 - RNA, 20 nt, Artificial Sequence
  HTT spacer sequence CTCN PAM
gccucccaaguagcugggac

SEQ ID NO: 13225 - RNA, 20 nt, Artificial Sequence
  HTT spacer sequence CTCN PAM
ugccucagccucccaaguag

SEQ ID NO: 13226 - RNA, 20 nt, Artificial Sequence
  HTT spacer sequence CTCN PAM
gguucaagcaguucucuugc

SEQ ID NO: 13227 - RNA, 20 nt, Artificial Sequence
  HTT spacer sequence CTCN PAM
gccccucggguucaagcagu

SEQ ID NO: 13228 - RNA, 20 nt, Artificial Sequence
  HTT spacer sequence CTCN PAM
cugcaaccucugccccucgg

SEQ ID NO: 13229 - RNA, 20 nt, Artificial Sequence
  HTT spacer sequence CTCN PAM
gcucacugcaaccucugccc

SEQ ID NO: 13230 - RNA, 20 nt, Artificial Sequence
  HTT spacer sequence CTCN PAM
cagcucacugcaaccucugc

SEQ ID NO: 13231 - RNA, 20 nt, Artificial Sequence
  HTT spacer sequence CTCN PAM
gucacacaggcugaagugca

SEQ ID NO: 13232 - RNA, 20 nt, Artificial Sequence
  HTT spacer sequence CTCN PAM
aucuccaaaaaaaaaaaacc

SEQ ID NO: 13233 - RNA, 20 nt, Artificial Sequence
  HTT spacer sequence CTCN PAM
aaaaaaaaaaaaccaagauc

SEQ ID NO: 13234 - RNA, 20 nt, Artificial Sequence
  HTT spacer sequence CTCN PAM
caccuguaaucccagcacuu

SEQ ID NO: 13235 - RNA, 20 nt, Artificial Sequence
  HTT spacer sequence CTCN PAM
caaagugcugggauuacagg

SEQ ID NO: 13236 - RNA, 20 nt, Artificial Sequence
  HTT spacer sequence CTCN PAM
gccucccaaagugcugggau

SEQ ID NO: 13237 - RNA, 20 nt, Artificial Sequence
  HTT spacer sequence CTCN PAM
ugaucugcccaucucggccu

SEQ ID NO: 13238 - RNA, 20 nt, Artificial Sequence
  HTT spacer sequence CTCN PAM
ugaccucgugaucugcccau

SEQ ID NO: 13239 - RNA, 20 nt, Artificial Sequence
  HTT spacer sequence CTCN PAM
acuaaaaaauacaaaaaauu

SEQ ID NO: 13240 - RNA, 20 nt, Artificial Sequence
  HTT spacer sequence CTCN PAM
caaguagcugggacuacagg

SEQ ID NO: 13241 - RNA, 20 nt, Artificial Sequence
  HTT spacer sequence CTCN PAM
ugcuucagccucccaaguag

SEQ ID NO: 13242 - RNA, 20 nt, Artificial Sequence
  HTT spacer sequence CTCN PAM
cggguucacaccauucuccu

SEQ ID NO: 13243 - RNA, 20 nt, Artificial Sequence
  HTT spacer sequence CTCN PAM
gccucccggguucacaccau

SEQ ID NO: 13244 - RNA, 20 nt, Artificial Sequence
  HTT spacer sequence CTCN PAM
cugccagcucugccucccgg

SEQ ID NO: 13245 - RNA, 20 nt, Artificial Sequence
  HTT spacer sequence CTCN PAM
gcucacugccagcucugccu

SEQ ID NO: 13246 - RNA, 20 nt, Artificial Sequence
  HTT spacer sequence CTCN PAM
agccugggcgacagagcaag

SEQ ID NO: 13247 - RNA, 20 nt, Artificial Sequence
  HTT spacer sequence CTCN PAM
gucgcccaggcuggagugca

SEQ ID NO: 13248 - RNA, 20 nt, Artificial Sequence
  HTT spacer sequence CTCN PAM
gucucgggggaaaaaaaaaa

SEQ ID NO: 13249 - RNA, 20 nt, Artificial Sequence
  HTT spacer sequence CTCN PAM
ggggaaaaaaaaaaauaaau

SEQ ID NO: 13250 - RNA, 20 nt, Artificial Sequence
  HTT spacer sequence CTCN PAM
aggacacuacagcauucuau

SEQ ID NO: 13251 - RNA, 20 nt, Artificial Sequence
  HTT spacer sequence CTCN PAM
uuacgcuugugugcccgugc

SEQ ID NO: 13252 - RNA, 20 nt, Artificial Sequence
  HTT spacer sequence CTCN PAM
aauuguguaaucaagcaauc

SEQ ID NO: 13253 - RNA, 20 nt, Artificial Sequence
  HTT spacer sequence CTCN PAM
ucuaauuguguaaucaagca

SEQ ID NO: 13254 - RNA, 20 nt, Artificial Sequence
  HTT spacer sequence CTCN PAM
gccagccuccucuaauugug

SEQ ID NO: 13255 - RNA, 20 nt, Artificial Sequence
  HTT spacer sequence CTCN PAM
aaaaaaaaaaaauuaaaaca

SEQ ID NO: 13256 - RNA, 20 nt, Artificial Sequence
  HTT spacer sequence CTCN PAM
guuccccaggcuagagugca

SEQ ID NO: 13257 - RNA, 20 nt, Artificial Sequence
  HTT spacer sequence CTCN PAM
agccuggggaacagagccag

SEQ ID NO: 13258 - RNA, 20 nt, Artificial Sequence
  HTT spacer sequence CTCN PAM
gccuccuggguucaagcagu

SEQ ID NO: 13259 - RNA, 20 nt, Artificial Sequence
  HTT spacer sequence CTCN PAM
uggguucaagcaguucuucu

SEQ ID NO: 13260 - RNA, 20 nt, Artificial Sequence
  HTT spacer sequence CTCN PAM
cgaguagcugggauuauagg

SEQ ID NO: 13261 - RNA, 20 nt, Artificial Sequence
  HTT spacer sequence CTCN PAM
ggaggcugcggcagaagaac

SEQ ID NO: 13262 - RNA, 20 nt, Artificial Sequence
  HTT spacer sequence CTCN PAM
acuaaaaauacaaaaaauag

SEQ ID NO: 13263 - RNA, 20 nt, Artificial Sequence
  HTT spacer sequence CTCN PAM
aacuccugaccucagaugau

SEQ ID NO: 13264 - RNA, 20 nt, Artificial Sequence
  HTT spacer sequence CTCN PAM
ugaccucagaugaucugcug

SEQ ID NO: 13265 - RNA, 20 nt, Artificial Sequence
  HTT spacer sequence CTCN PAM
gaugaucugcugccccagcc

SEQ ID NO: 13266 - RNA, 20 nt, Artificial Sequence
  HTT spacer sequence CTCN PAM
caaagugcugggauuacagg

SEQ ID NO: 13267 - RNA, 20 nt, Artificial Sequence
  HTT spacer sequence CTCN PAM
cgccuguaaucccagcacuu

SEQ ID NO: 13268 - RNA, 20 nt, Artificial Sequence
  HTT spacer sequence CTCN PAM
gagcaaggugguuucuuuuu

SEQ ID NO: 13269 - RNA, 20 nt, Artificial Sequence
  HTT spacer sequence CTCN PAM
gagcaagaacuggaaaaaca

SEQ ID NO: 13270 - RNA, 20 nt, Artificial Sequence
  HTT spacer sequence CTCN PAM
aacugacuuguucuacauga

SEQ ID NO: 13271 - RNA, 20 nt, Artificial Sequence
  HTT spacer sequence CTCN PAM
uuuuguccaauaagcaaacc

SEQ ID NO: 13272 - RNA, 20 nt, Artificial Sequence
  HTT spacer sequence CTCN PAM
gaaacuuaguagucuuuuag

SEQ ID NO: 13273 - RNA, 20 nt, Artificial Sequence
  HTT spacer sequence CTCN PAM
cuacuuuauuuugauagugc

SEQ ID NO: 13274 - RNA, 20 nt, Artificial Sequence
  HTT spacer sequence CTCN PAM
acuuuauuuugauagugcca

SEQ ID NO: 13275 - RNA, 20 nt, Artificial Sequence
  HTT spacer sequence CTCN PAM
uucccauccaaaccuauggc

SEQ ID NO: 13276 - RNA, 20 nt, Artificial Sequence
  HTT spacer sequence CTCN PAM
uuuugcuuggcugagaaguc

SEQ ID NO: 13277 - RNA, 20 nt, Artificial Sequence
  HTT spacer sequence CTCN PAM
gccaagcaaaaggagauaaa

SEQ ID NO: 13278 - RNA, 20 nt, Artificial Sequence
  HTT spacer sequence CTCN PAM
uauuaagacuucucagccaa

SEQ ID NO: 13279 - RNA, 20 nt, Artificial Sequence
  HTT spacer sequence CTCN PAM
guaaaauauaagcaauggcu

SEQ ID NO: 13280 - RNA, 20 nt, Artificial Sequence
  HTT spacer sequence CTCN PAM
aaaucguuaacugacuacaa

SEQ ID NO: 13281 - RNA, 20 nt, Artificial Sequence
  HTT spacer sequence CTCN PAM
auauauaccaggcugccuuc

SEQ ID NO: 13282 - RNA, 20 nt, Artificial Sequence
  HTT spacer sequence CTCN PAM
uguaaucuaugccaucaucu

SEQ ID NO: 13283 - RNA, 20 nt, Artificial Sequence
  HTT spacer sequence CTCN PAM
gcaguacagaagaugauggc

SEQ ID NO: 13284 - RNA, 20 nt, Artificial Sequence
  HTT spacer sequence CTCN PAM
aucaauuucacguuugaauc

SEQ ID NO: 13285 - RNA, 20 nt, Artificial Sequence
  HTT spacer sequence CTCN PAM
guauuucaccaauacucaau

SEQ ID NO: 13286 - RNA, 20 nt, Artificial Sequence
  HTT spacer sequence CTCN PAM
ucuguauuucaccaauacuc

SEQ ID NO: 13287 - RNA, 20 nt, Artificial Sequence
  HTT spacer sequence CTCN PAM
cuauaaugggggaagugagg

SEQ ID NO: 13288 - RNA, 20 nt, Artificial Sequence
  HTT spacer sequence CTCN PAM
auaaugggggaagugaggcc

SEQ ID NO: 13289 - RNA, 20 nt, Artificial Sequence
  HTT spacer sequence CTCN PAM
cuucccccauuauagagaga

SEQ ID NO: 13290 - RNA, 20 nt, Artificial Sequence
  HTT spacer sequence CTCN PAM
uaccuauaaucccagugcuu

SEQ ID NO: 13291 - RNA, 20 nt, Artificial Sequence
  HTT spacer sequence CTCN PAM
caaagcacugggauuauagg

SEQ ID NO: 13292 - RNA, 20 nt, Artificial Sequence
  HTT spacer sequence CTCN PAM
agcgaucuucccaucuuggc

SEQ ID NO: 13293 - RNA, 20 nt, Artificial Sequence
  HTT spacer sequence CTCN PAM
uggccucaagcgaucuuccc

SEQ ID NO: 13294 - RNA, 20 nt, Artificial Sequence
  HTT spacer sequence CTCN PAM
aacuccuggccucaagcgau

SEQ ID NO: 13295 - RNA, 20 nt, Artificial Sequence
  HTT spacer sequence CTCN PAM
cgauguugcccaauugcuca

SEQ ID NO: 13296 - RNA, 20 nt, Artificial Sequence
  HTT spacer sequence CTCN PAM
acaaaauauuuugaaaaaau

SEQ ID NO: 13297 - RNA, 20 nt, Artificial Sequence
  HTT spacer sequence CTCN PAM
ggaggcugagacgggaggau

SEQ ID NO: 13298 - RNA, 20 nt, Artificial Sequence
  HTT spacer sequence CTCN PAM
ugaguggcgcggaccacagg

SEQ ID NO: 13299 - RNA, 20 nt, Artificial Sequence
  HTT spacer sequence CTCN PAM
gccuccugaguggcgcggac

SEQ ID NO: 13300 - RNA, 20 nt, Artificial Sequence
  HTT spacer sequence CTCN PAM
cgucucagccuccugagugg

SEQ ID NO: 13301 - RNA, 20 nt, Artificial Sequence
  HTT spacer sequence CTCN PAM
uaggcugaaaggauccuccc

SEQ ID NO: 13302 - RNA, 20 nt, Artificial Sequence
  HTT spacer sequence CTCN PAM
cuuuagccuuaaacuccuag

SEQ ID NO: 13303 - RNA, 20 nt, Artificial Sequence
  HTT spacer sequence CTCN PAM
agccugggcagcagagcaag

SEQ ID NO: 13304 - RNA, 20 nt, Artificial Sequence
  HTT spacer sequence CTCN PAM
gcugcccaggcuggaguacg

SEQ ID NO: 13305 - RNA, 20 nt, Artificial Sequence
  HTT spacer sequence CTCN PAM
aaaaaaaaguaaaauaaagu

SEQ ID NO: 13306 - RNA, 20 nt, Artificial Sequence
  HTT spacer sequence CTCN PAM
cagaaaaaacagaugauguu

SEQ ID NO: 13307 - RNA, 20 nt, Artificial Sequence
  HTT spacer sequence CTCN PAM
ugcccugugcuucccugucc

SEQ ID NO: 13308 - RNA, 20 nt, Artificial Sequence
  HTT spacer sequence CTCN PAM
auguugcgggcagaaugggg

SEQ ID NO: 13309 - RNA, 20 nt, Artificial Sequence
  HTT spacer sequence CTCN PAM
acuacuaugaauaaaccguu

SEQ ID NO: 13310 - RNA, 20 nt, Artificial Sequence
  HTT spacer sequence CTCN PAM
cugaaugaaugaaugaggug

SEQ ID NO: 13311 - RNA, 20 nt, Artificial Sequence
  HTT spacer sequence CTCN PAM
uucauucauucagugagugu

SEQ ID NO: 13312 - RNA, 20 nt, Artificial Sequence
  HTT spacer sequence CTCN PAM
acuuaguucuacaccucauu

SEQ ID NO: 13313 - RNA, 20 nt, Artificial Sequence
  HTT spacer sequence CTCN PAM
agacaguucaaagugcaauu

SEQ ID NO: 13314 - RNA, 20 nt, Artificial Sequence
  HTT spacer sequence CTCN PAM
cuuauuugcuuuuucuuggc

SEQ ID NO: 13315 - RNA, 20 nt, Artificial Sequence
  HTT spacer sequence CTCN PAM
uauuugcuuuuucuuggcag

SEQ ID NO: 13316 - RNA, 20 nt, Artificial Sequence
  HTT spacer sequence CTCN PAM
gcuccuagcaguggcuggag

SEQ ID NO: 13317 - RNA, 20 nt, Artificial Sequence
  HTT spacer sequence CTCN PAM
uagcaguggcuggagcccac

SEQ ID NO: 13318 - RNA, 20 nt, Artificial Sequence
  HTT spacer sequence CTCN PAM
agccacugcuaggagcagag

SEQ ID NO: 13319 - RNA, 20 nt, Artificial Sequence
  HTT spacer sequence CTCN PAM
ucugugcuucgggauuagug

SEQ ID NO: 13320 - RNA, 20 nt, Artificial Sequence
  HTT spacer sequence CTCN PAM
gugcuucgggauuagugggg

SEQ ID NO: 13321 - RNA, 20 nt, Artificial Sequence
  HTT spacer sequence CTCN PAM
cugggaugaacuagcagcac

SEQ ID NO: 13322 - RNA, 20 nt, Artificial Sequence
  HTT spacer sequence CTCN PAM
guaggagacauauucaccua

SEQ ID NO: 13323 - RNA, 20 nt, Artificial Sequence
  HTT spacer sequence CTCN PAM
uacugagccauuggaaacag

SEQ ID NO: 13324 - RNA, 20 nt, Artificial Sequence
  HTT spacer sequence CTCN PAM
ugguagaagcuagaaaaagc

SEQ ID NO: 13325 - RNA, 20 nt, Artificial Sequence
  HTT spacer sequence CTCN PAM
aaaaaaaauuaaaaaaagaa

SEQ ID NO: 13326 - RNA, 20 nt, Artificial Sequence
  HTT spacer sequence CTCN PAM
gucucaaaaaaaaauuaaaa

SEQ ID NO: 13327 - RNA, 20 nt, Artificial Sequence
  HTT spacer sequence CTCN PAM
uguugcccaggcuggagugc

SEQ ID NO: 13328 - RNA, 20 nt, Artificial Sequence
  HTT spacer sequence CTCN PAM
agccugggcaacaagaguga

SEQ ID NO: 13329 - RNA, 20 nt, Artificial Sequence
  HTT spacer sequence CTCN PAM
gcucacugcaaccucugccu

SEQ ID NO: 13330 - RNA, 20 nt, Artificial Sequence
  HTT spacer sequence CTCN PAM
cugcaaccucugccuccugg

SEQ ID NO: 13331 - RNA, 20 nt, Artificial Sequence
  HTT spacer sequence CTCN PAM
gccuccuggguucaagugau

SEQ ID NO: 13332 - RNA, 20 nt, Artificial Sequence
  HTT spacer sequence CTCN PAM
uggguucaagugauucuccu

SEQ ID NO: 13333 - RNA, 20 nt, Artificial Sequence
  HTT spacer sequence CTCN PAM
ugccucagccucccaaguag

SEQ ID NO: 13334 - RNA, 20 nt, Artificial Sequence
  HTT spacer sequence CTCN PAM
gccucccaaguagcuggagu

SEQ ID NO: 13335 - RNA, 20 nt, Artificial Sequence
  HTT spacer sequence CTCN PAM
caaguagcuggaguuacagg

SEQ ID NO: 13336 - RNA, 20 nt, Artificial Sequence
  HTT spacer sequence CTCN PAM
agcuacuugggaggcugagg

SEQ ID NO: 13337 - RNA, 20 nt, Artificial Sequence
  HTT spacer sequence CTCN PAM
acuaaaaauacaaaauuagc

SEQ ID NO: 13338 - RNA, 20 nt, Artificial Sequence
  HTT spacer sequence CTCN PAM
aacucccaaccuuaggugau

SEQ ID NO: 13339 - RNA, 20 nt, Artificial Sequence
  HTT spacer sequence CTCN PAM
caaccuuaggugaucugccc

SEQ ID NO: 13340 - RNA, 20 nt, Artificial Sequence
  HTT spacer sequence CTCN PAM
gccucccaaagugcugggau

SEQ ID NO: 13341 - RNA, 20 nt, Artificial Sequence
  HTT spacer sequence CTCN PAM
caaagugcugggauuacagg

SEQ ID NO: 13342 - RNA, 20 nt, Artificial Sequence
  HTT spacer sequence CTCN PAM
cgccuguaaucccagcacuu

SEQ ID NO: 13343 - RNA, 20 nt, Artificial Sequence
  HTT spacer sequence CTCN PAM
uggccauugcuuuucacuuu

SEQ ID NO: 13344 - RNA, 20 nt, Artificial Sequence
  HTT spacer sequence CTCN PAM
aaaaaaaaaaaaaaacaaaa

SEQ ID NO: 13345 - RNA, 20 nt, Artificial Sequence
  HTT spacer sequence CTCN PAM
gucucaaaaaaaaaaaaaaa

SEQ ID NO: 13346 - RNA, 20 nt, Artificial Sequence
  HTT spacer sequence CTCN PAM
agccugggugacagaucgug

SEQ ID NO: 13347 - RNA, 20 nt, Artificial Sequence
  HTT spacer sequence CTCN PAM
gccucccagguucacgccau

SEQ ID NO: 13348 - RNA, 20 nt, Artificial Sequence
  HTT spacer sequence CTCN PAM
cagguucacgccauucuccu

SEQ ID NO: 13349 - RNA, 20 nt, Artificial Sequence
  HTT spacer sequence CTCN PAM
ugcuucagccuggcgaguag

SEQ ID NO: 13350 - RNA, 20 nt, Artificial Sequence
  HTT spacer sequence CTCN PAM
ccaggcugaagcaggagaau

SEQ ID NO: 13351 - RNA, 20 nt, Artificial Sequence
  HTT spacer sequence CTCN PAM
ccaccacacccggcuaauuu

SEQ ID NO: 13352 - RNA, 20 nt, Artificial Sequence
  HTT spacer sequence CTCN PAM
acuaaaaauacaaaaaauua

SEQ ID NO: 13353 - RNA, 20 nt, Artificial Sequence
  HTT spacer sequence CTCN PAM
ugaccucaugacccgcucaa

SEQ ID NO: 13354 - RNA, 20 nt, Artificial Sequence
  HTT spacer sequence CTCN PAM
ugacccgcucaacucagccu

SEQ ID NO: 13355 - RNA, 20 nt, Artificial Sequence
  HTT spacer sequence CTCN PAM
acucagccucccaaagugcu

SEQ ID NO: 13356 - RNA, 20 nt, Artificial Sequence
  HTT spacer sequence CTCN PAM
gccucccaaagugcugggau

SEQ ID NO: 13357 - RNA, 20 nt, Artificial Sequence
  HTT spacer sequence CTCN PAM
caaagugcugggauuacagg

SEQ ID NO: 13358 - RNA, 20 nt, Artificial Sequence
  HTT spacer sequence CTCN PAM
cgccuguaaucccagcacuu

SEQ ID NO: 13359 - RNA, 20 nt, Artificial Sequence
  HTT spacer sequence CTCN PAM
cuugucuuuuuauuguggua

SEQ ID NO: 13360 - RNA, 20 nt, Artificial Sequence
  HTT spacer sequence CTCN PAM
ugucuuuuuauugugguaaa

SEQ ID NO: 13361 - RNA, 20 nt, Artificial Sequence
  HTT spacer sequence CTCN PAM
cuaucauccauucuuuccug

SEQ ID NO: 13362 - RNA, 20 nt, Artificial Sequence
  HTT spacer sequence CTCN PAM
uacagacagaaaguagaaag

SEQ ID NO: 13363 - RNA, 20 nt, Artificial Sequence
  HTT spacer sequence CTCN PAM
ggagaccucauguaagugga

SEQ ID NO: 13364 - RNA, 20 nt, Artificial Sequence
  HTT spacer sequence CTCN PAM
agagcaguuacacucauaca

SEQ ID NO: 13365 - RNA, 20 nt, Artificial Sequence
  HTT spacer sequence CTCN PAM
uguaaguggauuccuacagg

SEQ ID NO: 13366 - RNA, 20 nt, Artificial Sequence
  HTT spacer sequence CTCN PAM
gugcauuuguauuauauacu

SEQ ID NO: 13367 - RNA, 20 nt, Artificial Sequence
  HTT spacer sequence CTCN PAM
uuucuguuguuugugaaaua

SEQ ID NO: 13368 - RNA, 20 nt, Artificial Sequence
  HTT spacer sequence CTCN PAM
uuuguuauuucauuuucuuc

SEQ ID NO: 13369 - RNA, 20 nt, Artificial Sequence
  HTT spacer sequence CTCN PAM
gcuaccuguguaagcugggu

SEQ ID NO: 13370 - RNA, 20 nt, Artificial Sequence
  HTT spacer sequence CTCN PAM
aacacguuacagcuuaucua

SEQ ID NO: 13371 - RNA, 20 nt, Artificial Sequence
  HTT spacer sequence CTCN PAM
uuuuugaaauguaaucccua

SEQ ID NO: 13372 - RNA, 20 nt, Artificial Sequence
  HTT spacer sequence CTCN PAM
gguggcuaaugaacauaucu

SEQ ID NO: 13373 - RNA, 20 nt, Artificial Sequence
  HTT spacer sequence CTCN PAM
aaaaaaaaaaaguaaagaua

SEQ ID NO: 13374 - RNA, 20 nt, Artificial Sequence
  HTT spacer sequence CTCN PAM
gucucaaaaaaaaaaaagua

SEQ ID NO: 13375 - RNA, 20 nt, Artificial Sequence
  HTT spacer sequence CTCN PAM
guugcccaggcuagagugca

SEQ ID NO: 13376 - RNA, 20 nt, Artificial Sequence
  HTT spacer sequence CTCN PAM
agccugggcaacagagcaag

SEQ ID NO: 13377 - RNA, 20 nt, Artificial Sequence
  HTT spacer sequence CTCN PAM
gcucacugcaagcuccaccu

SEQ ID NO: 13378 - RNA, 20 nt, Artificial Sequence
  HTT spacer sequence CTCN PAM
cugcaagcuccaccucccgg

SEQ ID NO: 13379 - RNA, 20 nt, Artificial Sequence
  HTT spacer sequence CTCN PAM
accucccggguucacgcuau

SEQ ID NO: 13380 - RNA, 20 nt, Artificial Sequence
  HTT spacer sequence CTCN PAM
cggguucacgcuauucuccu

SEQ ID NO: 13381 - RNA, 20 nt, Artificial Sequence
  HTT spacer sequence CTCN PAM
ugccccagccucccaaguag

SEQ ID NO: 13382 - RNA, 20 nt, Artificial Sequence
  HTT spacer sequence CTCN PAM
caaguagcugggacuacagg

SEQ ID NO: 13383 - RNA, 20 nt, Artificial Sequence
  HTT spacer sequence CTCN PAM
acuaaaaauacaaaaauuua

SEQ ID NO: 13384 - RNA, 20 nt, Artificial Sequence
  HTT spacer sequence CTCN PAM
ugaccucgugauccgcccgc

SEQ ID NO: 13385 - RNA, 20 nt, Artificial Sequence
  HTT spacer sequence CTCN PAM
ugauccgcccgccucggccu

SEQ ID NO: 13386 - RNA, 20 nt, Artificial Sequence
  HTT spacer sequence CTCN PAM
gccucccaaagugcugggau

SEQ ID NO: 13387 - RNA, 20 nt, Artificial Sequence
  HTT spacer sequence CTCN PAM
caaagugcugggauuacagg

SEQ ID NO: 13388 - RNA, 20 nt, Artificial Sequence
  HTT spacer sequence CTCN PAM
cgccuguaaucccagcacuu

SEQ ID NO: 13389 - RNA, 20 nt, Artificial Sequence
  HTT spacer sequence CTCN PAM
accauccaggucucagagaa

SEQ ID NO: 13390 - RNA, 20 nt, Artificial Sequence
  HTT spacer sequence CTCN PAM
gagaacauaauuucucucug

SEQ ID NO: 13391 - RNA, 20 nt, Artificial Sequence
  HTT spacer sequence CTCN PAM
gagaccuggaugguggagau

SEQ ID NO: 13392 - RNA, 20 nt, Artificial Sequence
  HTT spacer sequence CTCN PAM
cugaaagcuuauugacccag

SEQ ID NO: 13393 - RNA, 20 nt, Artificial Sequence
  HTT spacer sequence CTCN PAM
gaaagcuuauugacccagga

SEQ ID NO: 13394 - RNA, 20 nt, Artificial Sequence
  HTT spacer sequence CTCN PAM
uucaaucugagugcgucagg

SEQ ID NO: 13395 - RNA, 20 nt, Artificial Sequence
  HTT spacer sequence CTCN PAM
gauugaaagagaucuuauuu

SEQ ID NO: 13396 - RNA, 20 nt, Artificial Sequence
  HTT spacer sequence CTCN PAM
acauacuuuacuaauauaug

SEQ ID NO: 13397 - RNA, 20 nt, Artificial Sequence
  HTT spacer sequence CTCN PAM
uguuuuuauggaguaaugcu

SEQ ID NO: 13398 - RNA, 20 nt, Artificial Sequence
  HTT spacer sequence CTCN PAM
auaaaaacaagagacagacu

SEQ ID NO: 13399 - RNA, 20 nt, Artificial Sequence
  HTT spacer sequence CTCN PAM
gcauuacuccauaaaaacaa

SEQ ID NO: 13400 - RNA, 20 nt, Artificial Sequence
  HTT spacer sequence CTCN PAM
cagcauuacuccauaaaaac

SEQ ID NO: 13401 - RNA, 20 nt, Artificial Sequence
  HTT spacer sequence CTCN PAM
ucuguagaacaagcauaaug

SEQ ID NO: 13402 - RNA, 20 nt, Artificial Sequence
  HTT spacer sequence CTCN PAM
uuuuaacaugcucuucugua

SEQ ID NO: 13403 - RNA, 20 nt, Artificial Sequence
  HTT spacer sequence CTCN PAM
aaaaacuccuuuuaacaugc

SEQ ID NO: 13404 - RNA, 20 nt, Artificial Sequence
  HTT spacer sequence CTCN PAM
gacuccaaaaacuccuuuua

SEQ ID NO: 13405 - RNA, 20 nt, Artificial Sequence
  HTT spacer sequence CTCN PAM
cugacuccaaaaacuccuuu

SEQ ID NO: 13406 - RNA, 20 nt, Artificial Sequence
  HTT spacer sequence CTCN PAM
auacuuuuuagggauuucag

SEQ ID NO: 13407 - RNA, 20 nt, Artificial Sequence
  HTT spacer sequence CTCN PAM
gaaaucccuaaaaaguauag

SEQ ID NO: 13408 - RNA, 20 nt, Artificial Sequence
  HTT spacer sequence CTCN PAM
ucgcuguuuccuguuaacuc

SEQ ID NO: 13409 - RNA, 20 nt, Artificial Sequence
  HTT spacer sequence CTCN PAM
ccuaaaauauaauuaaacuu

SEQ ID NO: 13410 - RNA, 20 nt, Artificial Sequence
  HTT spacer sequence CTCN PAM
uaaaauauaauuaaacuuuu

SEQ ID NO: 13411 - RNA, 20 nt, Artificial Sequence
  HTT spacer sequence CTCN PAM
aaugagguuauauaaauggc

SEQ ID NO: 13412 - RNA, 20 nt, Artificial Sequence
  HTT spacer sequence CTCN PAM
uuagagacaaaaauuagucu

SEQ ID NO: 13413 - RNA, 20 nt, Artificial Sequence
  HTT spacer sequence CTCN PAM
cuaaaguggucuaaguuacu

SEQ ID NO: 13414 - RNA, 20 nt, Artificial Sequence
  HTT spacer sequence CTCN PAM
aaaguggucuaaguuacugg

SEQ ID NO: 13415 - RNA, 20 nt, Artificial Sequence
  HTT spacer sequence CTCN PAM
uccauacuuaggaaccagua

SEQ ID NO: 13416 - RNA, 20 nt, Artificial Sequence
  HTT spacer sequence CTCN PAM
cuguccuuuuucccaaacau

SEQ ID NO: 13417 - RNA, 20 nt, Artificial Sequence
  HTT spacer sequence CTCN PAM
aacagaaugcagaaguaugu

SEQ ID NO: 13418 - RNA, 20 nt, Artificial Sequence
  HTT spacer sequence CTCN PAM
ugggaauacccaggaaugcu

SEQ ID NO: 13419 - RNA, 20 nt, Artificial Sequence
  HTT spacer sequence CTCN PAM
aguaagcauuccuggguauu

SEQ ID NO: 13420 - RNA, 20 nt, Artificial Sequence
  HTT spacer sequence CTCN PAM
uacuaauauguaccuugaua

SEQ ID NO: 13421 - RNA, 20 nt, Artificial Sequence
  HTT spacer sequence CTCN PAM
cauauauuagcauaaaucag

SEQ ID NO: 13422 - RNA, 20 nt, Artificial Sequence
  HTT spacer sequence CTCN PAM
aaggaaucgauaaauaugca

SEQ ID NO: 13423 - RNA, 20 nt, Artificial Sequence
  HTT spacer sequence CTCN PAM
aaauuaacacagaaauuuaa

SEQ ID NO: 13424 - RNA, 20 nt, Artificial Sequence
  HTT spacer sequence CTCN PAM
acuagaauuuugaucaagau

SEQ ID NO: 13425 - RNA, 20 nt, Artificial Sequence
  HTT spacer sequence CTCN PAM
aaaucaucaccaggccuggu

SEQ ID NO: 13426 - RNA, 20 nt, Artificial Sequence
  HTT spacer sequence CTCN PAM
caaagugcugggauuacagg

SEQ ID NO: 13427 - RNA, 20 nt, Artificial Sequence
  HTT spacer sequence CTCN PAM
gccucccaaagugcugggau

SEQ ID NO: 13428 - RNA, 20 nt, Artificial Sequence
  HTT spacer sequence CTCN PAM
ggugaucugccugccucagc

SEQ ID NO: 13429 - RNA, 20 nt, Artificial Sequence
  HTT spacer sequence CTCN PAM
ugaccucaggugaucugccu

SEQ ID NO: 13430 - RNA, 20 nt, Artificial Sequence
  HTT spacer sequence CTCN PAM
aacucuugaccucaggugau

SEQ ID NO: 13431 - RNA, 20 nt, Artificial Sequence
  HTT spacer sequence CTCN PAM
acuaaaaauacaaaaauuag

SEQ ID NO: 13432 - RNA, 20 nt, Artificial Sequence
  HTT spacer sequence CTCN PAM
caaguagcugggacuacagg

SEQ ID NO: 13433 - RNA, 20 nt, Artificial Sequence
  HTT spacer sequence CTCN PAM
gccucccaaguagcugggac

SEQ ID NO: 13434 - RNA, 20 nt, Artificial Sequence
  HTT spacer sequence CTCN PAM
ugccucagccucccaaguag

SEQ ID NO: 13435 - RNA, 20 nt, Artificial Sequence
  HTT spacer sequence CTCN PAM
uggguucaagcaauucuccu

SEQ ID NO: 13436 - RNA, 20 nt, Artificial Sequence
  HTT spacer sequence CTCN PAM
ccgcaaccuguaccuccugg

SEQ ID NO: 13437 - RNA, 20 nt, Artificial Sequence
  HTT spacer sequence CTCN PAM
ugucgcccaggcuggaaugc

SEQ ID NO: 13438 - RNA, 20 nt, Artificial Sequence
  HTT spacer sequence CTCN PAM
agaaaaaagagaaaaaagaa

SEQ ID NO: 13439 - RNA, 20 nt, Artificial Sequence
  HTT spacer sequence CTCN PAM
uuuuucuugagacagaauuu

SEQ ID NO: 13440 - RNA, 20 nt, Artificial Sequence
  HTT spacer sequence CTCN PAM
ccauauuaguguugauuucu

SEQ ID NO: 13441 - RNA, 20 nt, Artificial Sequence
  HTT spacer sequence CTCN PAM
ucuuucuguucuauaccugu

SEQ ID NO: 13442 - RNA, 20 nt, Artificial Sequence
  HTT spacer sequence CTCN PAM
uuucccuaauacauauaugu

SEQ ID NO: 13443 - RNA, 20 nt, Artificial Sequence
  HTT spacer sequence CTCN PAM
gacuuugggagaacauuaua

SEQ ID NO: 13444 - RNA, 20 nt, Artificial Sequence
  HTT spacer sequence CTCN PAM
caaagucagagaaauguauc

SEQ ID NO: 13445 - RNA, 20 nt, Artificial Sequence
  HTT spacer sequence CTCN PAM
accucauauugcaaacaaac

SEQ ID NO: 13446 - RNA, 20 nt, Artificial Sequence
  HTT spacer sequence CTCN PAM
uauugcaaacaaacauaaag

SEQ ID NO: 13447 - RNA, 20 nt, Artificial Sequence
  HTT spacer sequence CTCN PAM
aacuaagauuacauuuuuua

SEQ ID NO: 13448 - RNA, 20 nt, Artificial Sequence
  HTT spacer sequence CTCN PAM
aaacaguuuuuuccuuuaua

SEQ ID NO: 13449 - RNA, 20 nt, Artificial Sequence
  HTT spacer sequence CTCN PAM
uuacacaggcuaguaaccuu

SEQ ID NO: 13450 - RNA, 20 nt, Artificial Sequence
  HTT spacer sequence CTCN PAM
gacucccagccuccagaacu

SEQ ID NO: 13451 - RNA, 20 nt, Artificial Sequence
  HTT spacer sequence CTCN PAM
cagccuccagaacugugacg

SEQ ID NO: 13452 - RNA, 20 nt, Artificial Sequence
  HTT spacer sequence CTCN PAM
agaacugugacgaguaagug

SEQ ID NO: 13453 - RNA, 20 nt, Artificial Sequence
  HTT spacer sequence CTCN PAM
ucacaguucuggaggcuggg

SEQ ID NO: 13454 - RNA, 20 nt, Artificial Sequence
  HTT spacer sequence CTCN PAM
agcugauuaggacacuagua

SEQ ID NO: 13455 - RNA, 20 nt, Artificial Sequence
  HTT spacer sequence CTCN PAM
gacaaaaaucugaauauucu

SEQ ID NO: 13456 - RNA, 20 nt, Artificial Sequence
  HTT spacer sequence CTCN PAM
agggugcuuaccccuaggaa

SEQ ID NO: 13457 - RNA, 20 nt, Artificial Sequence
  HTT spacer sequence CTCN PAM
auaaacacauaaauaaauau

SEQ ID NO: 13458 - RNA, 20 nt, Artificial Sequence
  HTT spacer sequence CTCN PAM
aucucaauaaacacauaaau

SEQ ID NO: 13459 - RNA, 20 nt, Artificial Sequence
  HTT spacer sequence CTCN PAM
ggcccaggcggacagugcaa

SEQ ID NO: 13460 - RNA, 20 nt, Artificial Sequence
  HTT spacer sequence CTCN PAM
gcucacugcaaccucugcuu

SEQ ID NO: 13461 - RNA, 20 nt, Artificial Sequence
  HTT spacer sequence CTCN PAM
cugcaaccucugcuucccgg

SEQ ID NO: 13462 - RNA, 20 nt, Artificial Sequence
  HTT spacer sequence CTCN PAM
gcuucccggguucaugugau

SEQ ID NO: 13463 - RNA, 20 nt, Artificial Sequence
  HTT spacer sequence CTCN PAM
ugccucagccuccugaguag

SEQ ID NO: 13464 - RNA, 20 nt, Artificial Sequence
  HTT spacer sequence CTCN PAM
gccuccugaguagcugggau

SEQ ID NO: 13465 - RNA, 20 nt, Artificial Sequence
  HTT spacer sequence CTCN PAM
ugaguagcugggauuacagg

SEQ ID NO: 13466 - RNA, 20 nt, Artificial Sequence
  HTT spacer sequence CTCN PAM
ggaggcugaggcaggagaau

SEQ ID NO: 13467 - RNA, 20 nt, Artificial Sequence
  HTT spacer sequence CTCN PAM
caccaccgcacccggcuaau

SEQ ID NO: 13468 - RNA, 20 nt, Artificial Sequence
  HTT spacer sequence CTCN PAM
acuaaaaauacaaaaaauua

SEQ ID NO: 13469 - RNA, 20 nt, Artificial Sequence
  HTT spacer sequence CTCN PAM
aacuccugaccucaugaucc

SEQ ID NO: 13470 - RNA, 20 nt, Artificial Sequence
  HTT spacer sequence CTCN PAM
ugaccucaugauccgcgccc

SEQ ID NO: 13471 - RNA, 20 nt, Artificial Sequence
  HTT spacer sequence CTCN PAM
ugauccgcgccccucggccu

SEQ ID NO: 13472 - RNA, 20 nt, Artificial Sequence
  HTT spacer sequence CTCN PAM
gccucccaguguugggauua

SEQ ID NO: 13473 - RNA, 20 nt, Artificial Sequence
  HTT spacer sequence CTCN PAM
caguguugggauuacaggug

SEQ ID NO: 13474 - RNA, 20 nt, Artificial Sequence
  HTT spacer sequence CTCN PAM
caccuguaaucccaacacug

SEQ ID NO: 13475 - RNA, 20 nt, Artificial Sequence
  HTT spacer sequence CTCN PAM
uguauaaauguaucuggcca

SEQ ID NO: 13476 - RNA, 20 nt, Artificial Sequence
  HTT spacer sequence CTCN PAM
aaaaaaaauuuuuuuaauaa

SEQ ID NO: 13477 - RNA, 20 nt, Artificial Sequence
  HTT spacer sequence CTCN PAM
gucacccaggcaggaugcag

SEQ ID NO: 13478 - RNA, 20 nt, Artificial Sequence
  HTT spacer sequence CTCN PAM
ugggcuuaagugauccuucu

SEQ ID NO: 13479 - RNA, 20 nt, Artificial Sequence
  HTT spacer sequence CTCN PAM
gccuuuugaguaccuggggg

SEQ ID NO: 13480 - RNA, 20 nt, Artificial Sequence
  HTT spacer sequence CTCN PAM
aaaggcugaggcagaaggau

SEQ ID NO: 13481 - RNA, 20 nt, Artificial Sequence
  HTT spacer sequence CTCN PAM
ucuauaaaacauuuaaaaau

SEQ ID NO: 13482 - RNA, 20 nt, Artificial Sequence
  HTT spacer sequence CTCN PAM
caccuuggccucccaaagcg

SEQ ID NO: 13483 - RNA, 20 nt, Artificial Sequence
  HTT spacer sequence CTCN PAM
caaagcgcugagauuacagg

SEQ ID NO: 13484 - RNA, 20 nt, Artificial Sequence
  HTT spacer sequence CTCN PAM
gcgcuuugggaggccaaggu

SEQ ID NO: 13485 - RNA, 20 nt, Artificial Sequence
  HTT spacer sequence CTCN PAM
ugccuguaaucucagcgcuu

SEQ ID NO: 13486 - RNA, 20 nt, Artificial Sequence
  HTT spacer sequence CTCN PAM
acauucauuuuccugggaua

SEQ ID NO: 13487 - RNA, 20 nt, Artificial Sequence
  HTT spacer sequence CTCN PAM
ccacauucauuuuccuggga

SEQ ID NO: 13488 - RNA, 20 nt, Artificial Sequence
  HTT spacer sequence CTCN PAM
ugccaugaccaggcaguaau

SEQ ID NO: 13489 - RNA, 20 nt, Artificial Sequence
  HTT spacer sequence CTCN PAM
guuuuuccucuugccaugac

SEQ ID NO: 13490 - RNA, 20 nt, Artificial Sequence
  HTT spacer sequence CTCN PAM
caguuuuuccucuugccaug

SEQ ID NO: 13491 - RNA, 20 nt, Artificial Sequence
  HTT spacer sequence CTCN PAM
ucucaguuuuuccucuugcc

SEQ ID NO: 13492 - RNA, 20 nt, Artificial Sequence
  HTT spacer sequence CTCN PAM
gucuccucucaguuuuuccu

SEQ ID NO: 13493 - RNA, 20 nt, Artificial Sequence
  HTT spacer sequence CTCN PAM
gccucagucuccucucaguu

SEQ ID NO: 13494 - RNA, 20 nt, Artificial Sequence
  HTT spacer sequence CTCN PAM
acccagcaaaccacuggcuc

SEQ ID NO: 13495 - RNA, 20 nt, Artificial Sequence
  HTT spacer sequence CTCN PAM
ucaacccagcaaaccacugg

SEQ ID NO: 13496 - RNA, 20 nt, Artificial Sequence
  HTT spacer sequence CTCN PAM
gccuccucaacccagcaaac

SEQ ID NO: 13497 - RNA, 20 nt, Artificial Sequence
  HTT spacer sequence CTCN PAM
cagcucugccuccucaaccc

SEQ ID NO: 13498 - RNA, 20 nt, Artificial Sequence
  HTT spacer sequence CTCN PAM
gcacucccagcucugccucc

SEQ ID NO: 13499 - RNA, 20 nt, Artificial Sequence
  HTT spacer sequence CTCN PAM
ccaccuugcaucucugcacu

SEQ ID NO: 13500 - RNA, 20 nt, Artificial Sequence
  HTT spacer sequence CTCN PAM
caccaccuugcaucucugca

SEQ ID NO: 13501 - RNA, 20 nt, Artificial Sequence
  HTT spacer sequence CTCN PAM
ucccugguauucuuccauau

SEQ ID NO: 13502 - RNA, 20 nt, Artificial Sequence
  HTT spacer sequence CTCN PAM
cuucccugguauucuuccau

SEQ ID NO: 13503 - RNA, 20 nt, Artificial Sequence
  HTT spacer sequence CTCN PAM
gcagcucucuucccugguau

SEQ ID NO: 13504 - RNA, 20 nt, Artificial Sequence
  HTT spacer sequence CTCN PAM
cucugcagcucucuucccug

SEQ ID NO: 13505 - RNA, 20 nt, Artificial Sequence
  HTT spacer sequence CTCN PAM
ggagaccugcacccugcccu

SEQ ID NO: 13506 - RNA, 20 nt, Artificial Sequence
  HTT spacer sequence CTCN PAM
ggagcucccucugcagcucu

SEQ ID NO: 13507 - RNA, 20 nt, Artificial Sequence
  HTT spacer sequence CTCN PAM
caguacccugucaugugugu

SEQ ID NO: 13508 - RNA, 20 nt, Artificial Sequence
  HTT spacer sequence CTCN PAM
guacccugucauguguguag

SEQ ID NO: 13509 - RNA, 20 nt, Artificial Sequence
  HTT spacer sequence CTCN PAM
gcuacacacaugacagggua

SEQ ID NO: 13510 - RNA, 20 nt, Artificial Sequence
  HTT spacer sequence CTCN PAM
ucaguacucagcuacacaca

SEQ ID NO: 13511 - RNA, 20 nt, Artificial Sequence
  HTT spacer sequence CTCN PAM
agcccugggucauuuccgca

SEQ ID NO: 13512 - RNA, 20 nt, Artificial Sequence
  HTT spacer sequence CTCN PAM
accuccagcccugggucauu

SEQ ID NO: 13513 - RNA, 20 nt, Artificial Sequence
  HTT spacer sequence CTCN PAM
aacuggugugauuagaaauu

SEQ ID NO: 13514 - RNA, 20 nt, Artificial Sequence
  HTT spacer sequence CTCN PAM
gcucucauagagcagguagg

SEQ ID NO: 13515 - RNA, 20 nt, Artificial Sequence
  HTT spacer sequence CTCN PAM
cauagagcagguaggguacu

SEQ ID NO: 13516 - RNA, 20 nt, Artificial Sequence
  HTT spacer sequence CTCN PAM
uagagcagguaggguacuca

SEQ ID NO: 13517 - RNA, 20 nt, Artificial Sequence
  HTT spacer sequence CTCN PAM
augagagcugagguuuucca

SEQ ID NO: 13518 - RNA, 20 nt, Artificial Sequence
  HTT spacer sequence CTCN PAM
gaaggguuugcccaccuagc

SEQ ID NO: 13519 - RNA, 20 nt, Artificial Sequence
  HTT spacer sequence CTCN PAM
gacccuaccuaauauuaaaa

SEQ ID NO: 13520 - RNA, 20 nt, Artificial Sequence
  HTT spacer sequence CTCN PAM
uuuuaauauuagguaggguc

SEQ ID NO: 13521 - RNA, 20 nt, Artificial Sequence
  HTT spacer sequence CTCN PAM
uccagccuuuaugcuauugu

SEQ ID NO: 13522 - RNA, 20 nt, Artificial Sequence
  HTT spacer sequence CTCN PAM
ccucuuuccccaaaagauau

SEQ ID NO: 13523 - RNA, 20 nt, Artificial Sequence
  HTT spacer sequence CTCN PAM
uuccccaaaagauaucaagu

SEQ ID NO: 13524 - RNA, 20 nt, Artificial Sequence
  HTT spacer sequence CTCN PAM
agggauuaggacuugauauc

SEQ ID NO: 13525 - RNA, 20 nt, Artificial Sequence
  HTT spacer sequence CTCN PAM
agauccugaauuuaaucaca

SEQ ID NO: 13526 - RNA, 20 nt, Artificial Sequence
  HTT spacer sequence CTCN PAM
ucucaagauccugaauuuaa

SEQ ID NO: 13527 - RNA, 20 nt, Artificial Sequence
  HTT spacer sequence CTCN PAM
uuuuuauauauaugugauug

SEQ ID NO: 13528 - RNA, 20 nt, Artificial Sequence
  HTT spacer sequence CTCN PAM
gccuccuuuuuauauauaug

SEQ ID NO: 13529 - RNA, 20 nt, Artificial Sequence
  HTT spacer sequence CTCN PAM
cucugccuccuuuuuauaua

SEQ ID NO: 13530 - RNA, 20 nt, Artificial Sequence
  HTT spacer sequence CTCN PAM
guguguaaaaucucccucug

SEQ ID NO: 13531 - RNA, 20 nt, Artificial Sequence
  HTT spacer sequence CTCN PAM
cuguguguaaaaucucccuc

SEQ ID NO: 13532 - RNA, 20 nt, Artificial Sequence
  HTT spacer sequence CTCN PAM
aauuuucaaggccagcaccu

SEQ ID NO: 13533 - RNA, 20 nt, Artificial Sequence
  HTT spacer sequence CTCN PAM
uccagcuuugguggcugcug

SEQ ID NO: 13534 - RNA, 20 nt, Artificial Sequence
  HTT spacer sequence CTCN PAM
gugccucuuccagcuuuggu

SEQ ID NO: 13535 - RNA, 20 nt, Artificial Sequence
  HTT spacer sequence CTCN PAM
uuuagagccuacuccagagg

SEQ ID NO: 13536 - RNA, 20 nt, Artificial Sequence
  HTT spacer sequence CTCN PAM
aaaugagaacugcuccgugc

SEQ ID NO: 13537 - RNA, 20 nt, Artificial Sequence
  HTT spacer sequence CTCN PAM
agagggaauguggugcugcc

SEQ ID NO: 13538 - RNA, 20 nt, Artificial Sequence
  HTT spacer sequence CTCN PAM
ggaguaggcucuaaaugaga

SEQ ID NO: 13539 - RNA, 20 nt, Artificial Sequence
  HTT spacer sequence CTCN PAM
aagaaacacccaagaaugau

SEQ ID NO: 13540 - RNA, 20 nt, Artificial Sequence
  HTT spacer sequence CTCN PAM
ccaagaaacacccaagaaug

SEQ ID NO: 13541 - RNA, 20 nt, Artificial Sequence
  HTT spacer sequence CTCN PAM
acuauuguccuaugacccug

SEQ ID NO: 13542 - RNA, 20 nt, Artificial Sequence
  HTT spacer sequence CTCN PAM
gguuuuccuaggcagagggc

SEQ ID NO: 13543 - RNA, 20 nt, Artificial Sequence
  HTT spacer sequence CTCN PAM
gccuaggaaaaccagagacc

SEQ ID NO: 13544 - RNA, 20 nt, Artificial Sequence
  HTT spacer sequence CTCN PAM
aguacccagggacacaaaca

SEQ ID NO: 13545 - RNA, 20 nt, Artificial Sequence
  HTT spacer sequence CTCN PAM
cuaaucucaaguacccaggg

SEQ ID NO: 13546 - RNA, 20 nt, Artificial Sequence
  HTT spacer sequence CTCN PAM
uaacgaguaugcugccuuca

SEQ ID NO: 13547 - RNA, 20 nt, Artificial Sequence
  HTT spacer sequence CTCN PAM
uuaagagucaucaccacucc

SEQ ID NO: 13548 - RNA, 20 nt, Artificial Sequence
  HTT spacer sequence CTCN PAM
gaaacaugugcuguguccac

SEQ ID NO: 13549 - RNA, 20 nt, Artificial Sequence
  HTT spacer sequence CTCN PAM
cugaaacaugugcugugucc

SEQ ID NO: 13550 - RNA, 20 nt, Artificial Sequence
  HTT spacer sequence CTCN PAM
auuuuguucuguacuaagaa

SEQ ID NO: 13551 - RNA, 20 nt, Artificial Sequence
  HTT spacer sequence CTCN PAM
cuuucuuuucccacauuucc

SEQ ID NO: 13552 - RNA, 20 nt, Artificial Sequence
  HTT spacer sequence CTCN PAM
uucuuuucccacauuuccuc

SEQ ID NO: 13553 - RNA, 20 nt, Artificial Sequence
  HTT spacer sequence CTCN PAM
uuuucuauucgacaaaacug

SEQ ID NO: 13554 - RNA, 20 nt, Artificial Sequence
  HTT spacer sequence CTCN PAM
augagcuauuggguacaccu

SEQ ID NO: 13555 - RNA, 20 nt, Artificial Sequence
  HTT spacer sequence CTCN PAM
uugagaacaguccaugauga

SEQ ID NO: 13556 - RNA, 20 nt, Artificial Sequence
  HTT spacer sequence CTCN PAM
cagaugggguggcggccggg

SEQ ID NO: 13557 - RNA, 20 nt, Artificial Sequence
  HTT spacer sequence CTCN PAM
gcccggccgccaccccaucu

SEQ ID NO: 13558 - RNA, 20 nt, Artificial Sequence
  HTT spacer sequence CTCN PAM
ucacuucccagauggggcgg

SEQ ID NO: 13559 - RNA, 20 nt, Artificial Sequence
  HTT spacer sequence CTCN PAM
cuucccagauggggcggccg

SEQ ID NO: 13560 - RNA, 20 nt, Artificial Sequence
  HTT spacer sequence CTCN PAM
gcccggccgccccaucuggg

SEQ ID NO: 13561 - RNA, 20 nt, Artificial Sequence
  HTT spacer sequence CTCN PAM
cagacggggcggcggcuggg

SEQ ID NO: 13562 - RNA, 20 nt, Artificial Sequence
  HTT spacer sequence CTCN PAM
cggacggggcggguggccgg

SEQ ID NO: 13563 - RNA, 20 nt, Artificial Sequence
  HTT spacer sequence CTCN PAM
cggacggggcggcuggccgg

SEQ ID NO: 13564 - RNA, 20 nt, Artificial Sequence
  HTT spacer sequence CTCN PAM
cggacggggcggguggccgg

SEQ ID NO: 13565 - RNA, 20 nt, Artificial Sequence
  HTT spacer sequence CTCN PAM
cggacggggcggcuggccgg

SEQ ID NO: 13566 - RNA, 20 nt, Artificial Sequence
  HTT spacer sequence CTCN PAM
cggacggagcggcugccggg

SEQ ID NO: 13567 - RNA, 20 nt, Artificial Sequence
  HTT spacer sequence CTCN PAM
guccgggagguggggggcag

SEQ ID NO: 13568 - RNA, 20 nt, Artificial Sequence
  HTT spacer sequence CTCN PAM
gcccggcagccgcuccgucc

SEQ ID NO: 13569 - RNA, 20 nt, Artificial Sequence
  HTT spacer sequence CTCN PAM
ucacuucccggacggggcgg

SEQ ID NO: 13570 - RNA, 20 nt, Artificial Sequence
  HTT spacer sequence CTCN PAM
cuucccggacggggcggcug

SEQ ID NO: 13571 - RNA, 20 nt, Artificial Sequence
  HTT spacer sequence CTCN PAM
gcccagcagccgccccgucc

SEQ ID NO: 13572 - RNA, 20 nt, Artificial Sequence
  HTT spacer sequence CTCN PAM
ucacuucucagacggggcgg

SEQ ID NO: 13573 - RNA, 20 nt, Artificial Sequence
  HTT spacer sequence CTCN PAM
cuucucagacggggcggcug

SEQ ID NO: 13574 - RNA, 20 nt, Artificial Sequence
  HTT spacer sequence CTCN PAM
gacggggcggcuggucagag

SEQ ID NO: 13575 - RNA, 20 nt, Artificial Sequence
  HTT spacer sequence CTCN PAM
gaccagccgccccgucugag

SEQ ID NO: 13576 - RNA, 20 nt, Artificial Sequence
  HTT spacer sequence CTCN PAM
ucaccucccagacggggugg

SEQ ID NO: 13577 - RNA, 20 nt, Artificial Sequence
  HTT spacer sequence CTCN PAM
ccucccagacgggguggcag

SEQ ID NO: 13578 - RNA, 20 nt, Artificial Sequence
  HTT spacer sequence CTCN PAM
cagacgggguggcagugggg

SEQ ID NO: 13579 - RNA, 20 nt, Artificial Sequence
  HTT spacer sequence CTCN PAM
gccccacugccaccccgucu

SEQ ID NO: 13580 - RNA, 20 nt, Artificial Sequence
  HTT spacer sequence CTCN PAM
gucugggaacuuaagaaugu

SEQ ID NO: 13581 - RNA, 20 nt, Artificial Sequence
  HTT spacer sequence CTCN PAM
gcccggccgugacuccgucu

SEQ ID NO: 13582 - RNA, 20 nt, Artificial Sequence
  HTT spacer sequence CTCN PAM
ucacaucucagacggggcgg

SEQ ID NO: 13583 - RNA, 20 nt, Artificial Sequence
  HTT spacer sequence CTCN PAM
gacggggcggcggggcagag

SEQ ID NO: 13584 - RNA, 20 nt, Artificial Sequence
  HTT spacer sequence CTCN PAM
gccccgccgccccgucugag

SEQ ID NO: 13585 - RNA, 20 nt, Artificial Sequence
  HTT spacer sequence CTCN PAM
ccacuucccagacgaugggc

SEQ ID NO: 13586 - RNA, 20 nt, Artificial Sequence
  HTT spacer sequence CTCN PAM
gcccggccgcccaucgucug

SEQ ID NO: 13587 - RNA, 20 nt, Artificial Sequence
  HTT spacer sequence CTCN PAM
ucacuuccuagaugggauga

SEQ ID NO: 13588 - RNA, 20 nt, Artificial Sequence
  HTT spacer sequence CTCN PAM
cuuccuagaugggaugacag

SEQ ID NO: 13589 - RNA, 20 nt, Artificial Sequence
  HTT spacer sequence CTCN PAM
ucccggcugucaucccaucu

SEQ ID NO: 13590 - RNA, 20 nt, Artificial Sequence
  HTT spacer sequence CTCN PAM
ucacuucccagacugggcag

SEQ ID NO: 13591 - RNA, 20 nt, Artificial Sequence
  HTT spacer sequence CTCN PAM
cuucccagacugggcagcca

SEQ ID NO: 13592 - RNA, 20 nt, Artificial Sequence
  HTT spacer sequence CTCN PAM
gccuggcugcccagucuggg

SEQ ID NO: 13593 - RNA, 20 nt, Artificial Sequence
  HTT spacer sequence CTCN PAM
ucacaucccagacgaugggc

SEQ ID NO: 13594 - RNA, 20 nt, Artificial Sequence
  HTT spacer sequence CTCN PAM
caucccagacgaugggcggc

SEQ ID NO: 13595 - RNA, 20 nt, Artificial Sequence
  HTT spacer sequence CTCN PAM
ucacuuccuagacggggugg

SEQ ID NO: 13596 - RNA, 20 nt, Artificial Sequence
  HTT spacer sequence CTCN PAM
cuuccuagacgggguggcgg

SEQ ID NO: 13597 - RNA, 20 nt, Artificial Sequence
  HTT spacer sequence CTCN PAM
gcccagccgccaccccgucu

SEQ ID NO: 13598 - RNA, 20 nt, Artificial Sequence
  HTT spacer sequence CTCN PAM
caaagugccaagauugcggc

SEQ ID NO: 13599 - RNA, 20 nt, Artificial Sequence
  HTT spacer sequence CTCN PAM
cagccgccugccuuggccuc

SEQ ID NO: 13600 - RNA, 20 nt, Artificial Sequence
  HTT spacer sequence CTCN PAM
ggucacuacaaccuucaccu

SEQ ID NO: 13601 - RNA, 20 nt, Artificial Sequence
  HTT spacer sequence CTCN PAM
agccugggcaacacugagca

SEQ ID NO: 13602 - RNA, 20 nt, Artificial Sequence
  HTT spacer sequence CTCN PAM
guguugcccaggcuggagug

SEQ ID NO: 13603 - RNA, 20 nt, Artificial Sequence
  HTT spacer sequence CTCN PAM
gugcucaguguugcccaggc

SEQ ID NO: 13604 - RNA, 20 nt, Artificial Sequence
  HTT spacer sequence CTCN PAM
cucagugcucaguguugccc

SEQ ID NO: 13605 - RNA, 20 nt, Artificial Sequence
  HTT spacer sequence CTCN PAM
cucacucagugcucaguguu

SEQ ID NO: 13606 - RNA, 20 nt, Artificial Sequence
  HTT spacer sequence CTCN PAM
gucugcaaucccggcaccuc

SEQ ID NO: 13607 - RNA, 20 nt, Artificial Sequence
  HTT spacer sequence CTCN PAM
ggaggccgaggcuggcagau

SEQ ID NO: 13608 - RNA, 20 nt, Artificial Sequence
  HTT spacer sequence CTCN PAM
cgaggugccgggauugcaga

SEQ ID NO: 13609 - RNA, 20 nt, Artificial Sequence
  HTT spacer sequence CTCN PAM
gccucccgaggugccgggau

SEQ ID NO: 13610 - RNA, 20 nt, Artificial Sequence
  HTT spacer sequence CTCN PAM
ugacugcaagugaucugcca

SEQ ID NO: 13611 - RNA, 20 nt, Artificial Sequence
  HTT spacer sequence CTCN PAM
agcuccugacugcaagugau

SEQ ID NO: 13612 - RNA, 20 nt, Artificial Sequence
  HTT spacer sequence CTCN PAM
accaaaaaacacgaaaacca

SEQ ID NO: 13613 - RNA, 20 nt, Artificial Sequence
  HTT spacer sequence CTCN PAM
gccugccaagugccugggau

SEQ ID NO: 13614 - RNA, 20 nt, Artificial Sequence
  HTT spacer sequence CTCN PAM
ugccucagccugccaagugc

SEQ ID NO: 13615 - RNA, 20 nt, Artificial Sequence
  HTT spacer sequence CTCN PAM
cuaccugauucuccugccuc

SEQ ID NO: 13616 - RNA, 20 nt, Artificial Sequence
  HTT spacer sequence CTCN PAM
cugcaaccucccuaccugau

SEQ ID NO: 13617 - RNA, 20 nt, Artificial Sequence
  HTT spacer sequence CTCN PAM
acucacugcaaccucccuac

SEQ ID NO: 13618 - RNA, 20 nt, Artificial Sequence
  HTT spacer sequence CTCN PAM
gcaucagagggagacugugc

SEQ ID NO: 13619 - RNA, 20 nt, Artificial Sequence
  HTT spacer sequence CTCN PAM
gaugccgagccaaggcugga

SEQ ID NO: 13620 - RNA, 20 nt, Artificial Sequence
  HTT spacer sequence CTCN PAM
cucugaugccgagccaaggc

SEQ ID NO: 13621 - RNA, 20 nt, Artificial Sequence
  HTT spacer sequence CTCN PAM
cacagucucccucugaugcc

SEQ ID NO: 13622 - RNA, 20 nt, Artificial Sequence
  HTT spacer sequence CTCN PAM
cccucgcacagucucccucu

SEQ ID NO: 13623 - RNA, 20 nt, Artificial Sequence
  HTT spacer sequence CTCN PAM
cccucgcccucgcacagucu

SEQ ID NO: 13624 - RNA, 20 nt, Artificial Sequence
  HTT spacer sequence CTCN PAM
cccucgcccucgcccucgca

SEQ ID NO: 13625 - RNA, 20 nt, Artificial Sequence
  HTT spacer sequence CTCN PAM
ggccucuaaaacugugaaag

SEQ ID NO: 13626 - RNA, 20 nt, Artificial Sequence
  HTT spacer sequence CTCN PAM
aaaacugugaaagaaaaaau

SEQ ID NO: 13627 - RNA, 20 nt, Artificial Sequence
  HTT spacer sequence CTCN PAM
uuuuuugguucauuagcuau

SEQ ID NO: 13628 - RNA, 20 nt, Artificial Sequence
  HTT spacer sequence CTCN PAM
uccccuauuucuggcuucuu

SEQ ID NO: 13629 - RNA, 20 nt, Artificial Sequence
  HTT spacer sequence CTCN PAM
uucuuuccuuuauuugccuc

SEQ ID NO: 13630 - RNA, 20 nt, Artificial Sequence
  HTT spacer sequence CTCN PAM
guauaugcugcugccugcaa

SEQ ID NO: 13631 - RNA, 20 nt, Artificial Sequence
  HTT spacer sequence CTCN PAM
ugcccaggaugagaugguca

SEQ ID NO: 13632 - RNA, 20 nt, Artificial Sequence
  HTT spacer sequence CTCN PAM
uccugggcaagagccuuugc

SEQ ID NO: 13633 - RNA, 20 nt, Artificial Sequence
  HTT spacer sequence CTCN PAM
guaguccggugcauaaacau

SEQ ID NO: 13634 - RNA, 20 nt, Artificial Sequence
  HTT spacer sequence CTCN PAM
aucacuguggauuugucugu

SEQ ID NO: 13635 - RNA, 20 nt, Artificial Sequence
  HTT spacer sequence CTCN PAM
caaugauuuguagaacacgu

SEQ ID NO: 13636 - RNA, 20 nt, Artificial Sequence
  HTT spacer sequence CTCN PAM
augauuuguagaacacguag

SEQ ID NO: 13637 - RNA, 20 nt, Artificial Sequence
  HTT spacer sequence CTCN PAM
uuggcauuuacaggacacuc

SEQ ID NO: 13638 - RNA, 20 nt, Artificial Sequence
  HTT spacer sequence CTCN PAM
acccagcaccagcagaagag

SEQ ID NO: 13639 - RNA, 20 nt, Artificial Sequence
  HTT spacer sequence CTCN PAM
ucugcuggugcuggguggag

SEQ ID NO: 13640 - RNA, 20 nt, Artificial Sequence
  HTT spacer sequence CTCN PAM
cucaagugcucacagaaugu

SEQ ID NO: 13641 - RNA, 20 nt, Artificial Sequence
  HTT spacer sequence CTCN PAM
caagugcucacagaauguuu

SEQ ID NO: 13642 - RNA, 20 nt, Artificial Sequence
  HTT spacer sequence CTCN PAM
agugcucacagaauguuugc

SEQ ID NO: 13643 - RNA, 20 nt, Artificial Sequence
  HTT spacer sequence CTCN PAM
cagaauguuugccaagauag

SEQ ID NO: 13644 - RNA, 20 nt, Artificial Sequence
  HTT spacer sequence CTCN PAM
aucuuggcaaacauucugug

SEQ ID NO: 13645 - RNA, 20 nt, Artificial Sequence
  HTT spacer sequence CTCN PAM
aaauuaaaagcauucaaauu

SEQ ID NO: 13646 - RNA, 20 nt, Artificial Sequence
  HTT spacer sequence CTCN PAM
gaauaauuugaaugcuuuua

SEQ ID NO: 13647 - RNA, 20 nt, Artificial Sequence
  HTT spacer sequence CTCN PAM
guaucauuaaguuggaauau

SEQ ID NO: 13648 - RNA, 20 nt, Artificial Sequence
  HTT spacer sequence CTCN PAM
gauauguggaaaaacccauu

SEQ ID NO: 13649 - RNA, 20 nt, Artificial Sequence
  HTT spacer sequence CTCN PAM
gcuucuaccuuuggaaacuu

SEQ ID NO: 13650 - RNA, 20 nt, Artificial Sequence
  HTT spacer sequence CTCN PAM
ggauuccauuugcuugucau

SEQ ID NO: 13651 - RNA, 20 nt, Artificial Sequence
  HTT spacer sequence CTCN PAM
caaaguggcagaacugcagg

SEQ ID NO: 13652 - RNA, 20 nt, Artificial Sequence
  HTT spacer sequence CTCN PAM
gccucccaaaguggcagaac

SEQ ID NO: 13653 - RNA, 20 nt, Artificial Sequence
  HTT spacer sequence CTCN PAM
aacaauccaccugccucggc

SEQ ID NO: 13654 - RNA, 20 nt, Artificial Sequence
  HTT spacer sequence CTCN PAM
cuaggcugcccaggcugguc

SEQ ID NO: 13655 - RNA, 20 nt, Artificial Sequence
  HTT spacer sequence CTCN PAM
ugguuagcugggacuacagg

SEQ ID NO: 13656 - RNA, 20 nt, Artificial Sequence
  HTT spacer sequence CTCN PAM
caccuuagacuccugguuag

SEQ ID NO: 13657 - RNA, 20 nt, Artificial Sequence
  HTT spacer sequence CTCN PAM
agcaauccucccaccuuaga

SEQ ID NO: 13658 - RNA, 20 nt, Artificial Sequence
  HTT spacer sequence CTCN PAM
cagacucaagcaauccuccc

SEQ ID NO: 13659 - RNA, 20 nt, Artificial Sequence
  HTT spacer sequence CTCN PAM
accucccagacucaagcaau

SEQ ID NO: 13660 - RNA, 20 nt, Artificial Sequence
  HTT spacer sequence CTCN PAM
uucuguugcccaggauggaa

SEQ ID NO: 13661 - RNA, 20 nt, Artificial Sequence
  HTT spacer sequence CTCN PAM
aaaacaaaaacaguuacuag

SEQ ID NO: 13662 - RNA, 20 nt, Artificial Sequence
  HTT spacer sequence CTCN PAM
uaucuuuaugauguccauuc

SEQ ID NO: 13663 - RNA, 20 nt, Artificial Sequence
  HTT spacer sequence CTCN PAM
uuccugauauugcuaauuug

SEQ ID NO: 13664 - RNA, 20 nt, Artificial Sequence
  HTT spacer sequence CTCN PAM
cucauuccugauauugcuaa

SEQ ID NO: 13665 - RNA, 20 nt, Artificial Sequence
  HTT spacer sequence CTCN PAM
uacaguccuuuuaauaucua

SEQ ID NO: 13666 - RNA, 20 nt, Artificial Sequence
  HTT spacer sequence CTCN PAM
caaggugcugggauuacagg

SEQ ID NO: 13667 - RNA, 20 nt, Artificial Sequence
  HTT spacer sequence CTCN PAM
gccucccaaggugcugggau

SEQ ID NO: 13668 - RNA, 20 nt, Artificial Sequence
  HTT spacer sequence CTCN PAM
ggugaucuguccaccucggc

SEQ ID NO: 13669 - RNA, 20 nt, Artificial Sequence
  HTT spacer sequence CTCN PAM
ugaccucaggugaucugucc

SEQ ID NO: 13670 - RNA, 20 nt, Artificial Sequence
  HTT spacer sequence CTCN PAM
gucucuacuaaaaauacaaa

SEQ ID NO: 13671 - RNA, 20 nt, Artificial Sequence
  HTT spacer sequence CTCN PAM
acuaaaaauacaaaaauuag

SEQ ID NO: 13672 - RNA, 20 nt, Artificial Sequence
  HTT spacer sequence CTCN PAM
caaguagcugggauuacagg

SEQ ID NO: 13673 - RNA, 20 nt, Artificial Sequence
  HTT spacer sequence CTCN PAM
gccucccaaguagcugggau

SEQ ID NO: 13674 - RNA, 20 nt, Artificial Sequence
  HTT spacer sequence CTCN PAM
ugccucagccucccaaguag

SEQ ID NO: 13675 - RNA, 20 nt, Artificial Sequence
  HTT spacer sequence CTCN PAM
cagguucaagcaauucuccu

SEQ ID NO: 13676 - RNA, 20 nt, Artificial Sequence
  HTT spacer sequence CTCN PAM
gccucccagguucaagcaau

SEQ ID NO: 13677 - RNA, 20 nt, Artificial Sequence
  HTT spacer sequence CTCN PAM
cugcaaccuccgccucccag

SEQ ID NO: 13678 - RNA, 20 nt, Artificial Sequence
  HTT spacer sequence CTCN PAM
gcucacugcaaccuccgccu

SEQ ID NO: 13679 - RNA, 20 nt, Artificial Sequence
  HTT spacer sequence CTCN PAM
agccugggugacagagcaag

SEQ ID NO: 13680 - RNA, 20 nt, Artificial Sequence
  HTT spacer sequence CTCN PAM
gucacccaggcuggagugca

SEQ ID NO: 13681 - RNA, 20 nt, Artificial Sequence
  HTT spacer sequence CTCN PAM
aucucaaaacaaauaaauaa

SEQ ID NO: 13682 - RNA, 20 nt, Artificial Sequence
  HTT spacer sequence CTCN PAM
aaacaaauaaauaaauaaaa

SEQ ID NO: 13683 - RNA, 20 nt, Artificial Sequence
  HTT spacer sequence CTCN PAM
uccauuucaucuauaaguug

SEQ ID NO: 13684 - RNA, 20 nt, Artificial Sequence
  HTT spacer sequence CTCN PAM
cucaagaagauauagauaag

SEQ ID NO: 13685 - RNA, 20 nt, Artificial Sequence
  HTT spacer sequence CTCN PAM
caagaagauauagauaagcu

SEQ ID NO: 13686 - RNA, 20 nt, Artificial Sequence
  HTT spacer sequence CTCN PAM
agaagauauagauaagcuga

SEQ ID NO: 13687 - RNA, 20 nt, Artificial Sequence
  HTT spacer sequence CTCN PAM
auucagacacuaaauuuuca

SEQ ID NO: 13688 - RNA, 20 nt, Artificial Sequence
  HTT spacer sequence CTCN PAM
cauucuguuucuguugacag

SEQ ID NO: 13689 - RNA, 20 nt, Artificial Sequence
  HTT spacer sequence CTCN PAM
aaagcaguacugucaacaga

SEQ ID NO: 13690 - RNA, 20 nt, Artificial Sequence
  HTT spacer sequence CTCN PAM
guucguuauucauggcuguc

SEQ ID NO: 13691 - RNA, 20 nt, Artificial Sequence
  HTT spacer sequence CTCN PAM
uaggcucauugcuaucuucc

SEQ ID NO: 13692 - RNA, 20 nt, Artificial Sequence
  HTT spacer sequence CTCN PAM
uugcuaucuuccaaccauug

SEQ ID NO: 13693 - RNA, 20 nt, Artificial Sequence
  HTT spacer sequence CTCN PAM
agguaaaaauugcaaacaau

SEQ ID NO: 13694 - RNA, 20 nt, Artificial Sequence
  HTT spacer sequence CTCN PAM
uuaucucuagguaaaaauug

SEQ ID NO: 13695 - RNA, 20 nt, Artificial Sequence
  HTT spacer sequence CTCN PAM
uucucuuuaucucuagguaa

SEQ ID NO: 13696 - RNA, 20 nt, Artificial Sequence
  HTT spacer sequence CTCN PAM
gaaaccaaaugucucuuucu

SEQ ID NO: 13697 - RNA, 20 nt, Artificial Sequence
  HTT spacer sequence CTCN PAM
uucaugaucccaaucuaacu

SEQ ID NO: 13698 - RNA, 20 nt, Artificial Sequence
  HTT spacer sequence CTCN PAM
uuuugaugcuucaaaaauag

SEQ ID NO: 13699 - RNA, 20 nt, Artificial Sequence
  HTT spacer sequence CTCN PAM
ucaguuuagcucucucuugg

SEQ ID NO: 13700 - RNA, 20 nt, Artificial Sequence
  HTT spacer sequence CTCN PAM
cucuuggcuuuguuuagaca

SEQ ID NO: 13701 - RNA, 20 nt, Artificial Sequence
  HTT spacer sequence CTCN PAM
cuuggcuuuguuuagacagu

SEQ ID NO: 13702 - RNA, 20 nt, Artificial Sequence
  HTT spacer sequence CTCN PAM
uggcuuuguuuagacaguug

SEQ ID NO: 13703 - RNA, 20 nt, Artificial Sequence
  HTT spacer sequence CTCN PAM
aacugucuaaacaaagccaa

SEQ ID NO: 13704 - RNA, 20 nt, Artificial Sequence
  HTT spacer sequence CTCN PAM
aguuuuugugacucuuuguc

SEQ ID NO: 13705 - RNA, 20 nt, Artificial Sequence
  HTT spacer sequence CTCN PAM
uugucucgcacaacaaaaac

SEQ ID NO: 13706 - RNA, 20 nt, Artificial Sequence
  HTT spacer sequence CTCN PAM
cacaacaaaaacacaaucug

SEQ ID NO: 13707 - RNA, 20 nt, Artificial Sequence
  HTT spacer sequence CTCN PAM
ugccccuuuuuaaucuugcu

SEQ ID NO: 13708 - RNA, 20 nt, Artificial Sequence
  HTT spacer sequence CTCN PAM
ccugccccuuuuuaaucuug

SEQ ID NO: 13709 - RNA, 20 nt, Artificial Sequence
  HTT spacer sequence CTCN PAM
uaaccuacaauauucuugga

SEQ ID NO: 13710 - RNA, 20 nt, Artificial Sequence
  HTT spacer sequence CTCN PAM
uuuuucuuuuuaaauuuucg

SEQ ID NO: 13711 - RNA, 20 nt, Artificial Sequence
  HTT spacer sequence CTCN PAM
ucuuuuuuaaaaaauaaacu

SEQ ID NO: 13712 - RNA, 20 nt, Artificial Sequence
  HTT spacer sequence CTCN PAM
cacuaaauuaggaugauaau

SEQ ID NO: 13713 - RNA, 20 nt, Artificial Sequence
  HTT spacer sequence CTCN PAM
uuacauuucauugucauguc

SEQ ID NO: 13714 - RNA, 20 nt, Artificial Sequence
  HTT spacer sequence CTCN PAM
ucuugacaguuucucuucuu

SEQ ID NO: 13715 - RNA, 20 nt, Artificial Sequence
  HTT spacer sequence CTCN PAM
ugacaguuucucuucuuuuu

SEQ ID NO: 13716 - RNA, 20 nt, Artificial Sequence
  HTT spacer sequence CTCN PAM
ucuuuuuuugcuuagaaauu

SEQ ID NO: 13717 - RNA, 20 nt, Artificial Sequence
  HTT spacer sequence CTCN PAM
agaauuucagaaacuucugg

SEQ ID NO: 13718 - RNA, 20 nt, Artificial Sequence
  HTT spacer sequence CTCN PAM
gcgucaucacugcacagcag

SEQ ID NO: 13719 - RNA, 20 nt, Artificial Sequence
  HTT spacer sequence CTCN PAM
acaaaguuaucaaaguaaga

SEQ ID NO: 13720 - RNA, 20 nt, Artificial Sequence
  HTT spacer sequence CTCN PAM
ucagagcuaucauuguugua

SEQ ID NO: 13721 - RNA, 20 nt, Artificial Sequence
  HTT spacer sequence CTCN PAM
gagcuaucauuguuguaggc

SEQ ID NO: 13722 - RNA, 20 nt, Artificial Sequence
  HTT spacer sequence CTCN PAM
gaggagaacaucauccacac

SEQ ID NO: 13723 - RNA, 20 nt, Artificial Sequence
  HTT spacer sequence CTCN PAM
gccuacaacaaugauagcuc

SEQ ID NO: 13724 - RNA, 20 nt, Artificial Sequence
  HTT spacer sequence CTCN PAM
cagccuacaacaaugauagc

SEQ ID NO: 13725 - RNA, 20 nt, Artificial Sequence
  HTT spacer sequence CTCN PAM
augaucgcuucuucucucag

SEQ ID NO: 13726 - RNA, 20 nt, Artificial Sequence
  HTT spacer sequence CTCN PAM
aaacagaagaacacucaaug

SEQ ID NO: 13727 - RNA, 20 nt, Artificial Sequence
  HTT spacer sequence CTCN PAM
gggacucaaaacagaagaac

SEQ ID NO: 13728 - RNA, 20 nt, Artificial Sequence
  HTT spacer sequence CTCN PAM
aaaccauacaucagaaagga

SEQ ID NO: 13729 - RNA, 20 nt, Artificial Sequence
  HTT spacer sequence CTCN PAM
guuguaugguuuggaggugc

SEQ ID NO: 13730 - RNA, 20 nt, Artificial Sequence
  HTT spacer sequence CTCN PAM
aaaccauacaacagagcacc

SEQ ID NO: 13731 - RNA, 20 nt, Artificial Sequence
  HTT spacer sequence CTCN PAM
guuguaugguuuggaggugc

SEQ ID NO: 13732 - RNA, 20 nt, Artificial Sequence
  HTT spacer sequence CTCN PAM
aaaccauacaacagagcacc

SEQ ID NO: 13733 - RNA, 20 nt, Artificial Sequence
  HTT spacer sequence CTCN PAM
auuguaugguuuggaggugc

SEQ ID NO: 13734 - RNA, 20 nt, Artificial Sequence
  HTT spacer sequence CTCN PAM
aaaccauacaauagagcacc

SEQ ID NO: 13735 - RNA, 20 nt, Artificial Sequence
  HTT spacer sequence CTCN PAM
guuguaugguuuggaggugc

SEQ ID NO: 13736 - RNA, 20 nt, Artificial Sequence
  HTT spacer sequence CTCN PAM
aaaccauacaacagagcacc

SEQ ID NO: 13737 - RNA, 20 nt, Artificial Sequence
  HTT spacer sequence CTCN PAM
uguaugguuuggaggugcuc

SEQ ID NO: 13738 - RNA, 20 nt, Artificial Sequence
  HTT spacer sequence CTCN PAM
aaaccauacaagagcaccuc

SEQ ID NO: 13739 - RNA, 20 nt, Artificial Sequence
  HTT spacer sequence CTCN PAM
uguaugguuuggaggugcuc

SEQ ID NO: 13740 - RNA, 20 nt, Artificial Sequence
  HTT spacer sequence CTCN PAM
aaaccauacaagagcaccuc

SEQ ID NO: 13741 - RNA, 20 nt, Artificial Sequence
  HTT spacer sequence CTCN PAM
guuguaugguuuggaggugg

SEQ ID NO: 13742 - RNA, 20 nt, Artificial Sequence
  HTT spacer sequence CTCN PAM
aaaccauacaacagagcacc

SEQ ID NO: 13743 - RNA, 20 nt, Artificial Sequence
  HTT spacer sequence CTCN PAM
auugcaugguuugcaggugc

SEQ ID NO: 13744 - RNA, 20 nt, Artificial Sequence
  HTT spacer sequence CTCN PAM
auuguaugguuuggaagugc

SEQ ID NO: 13745 - RNA, 20 nt, Artificial Sequence
  HTT spacer sequence CTCN PAM
uguaugguuuggaggugcuc

SEQ ID NO: 13746 - RNA, 20 nt, Artificial Sequence
  HTT spacer sequence CTCN PAM
aaaccauacaagagcacuuc

SEQ ID NO: 13747 - RNA, 20 nt, Artificial Sequence
  HTT spacer sequence CTCN PAM
uguaugguuuggagaugcuc

SEQ ID NO: 13748 - RNA, 20 nt, Artificial Sequence
  HTT spacer sequence CTCN PAM
aaaccauacaagagcaccuc

SEQ ID NO: 13749 - RNA, 20 nt, Artificial Sequence
  HTT spacer sequence CTCN PAM
auuguaugguuugcaggugc

SEQ ID NO: 13750 - RNA, 20 nt, Artificial Sequence
  HTT spacer sequence CTCN PAM
auuguaugguuuggaagugc

SEQ ID NO: 13751 - RNA, 20 nt, Artificial Sequence
  HTT spacer sequence CTCN PAM
uguaugguuuggaggugcuc

SEQ ID NO: 13752 - RNA, 20 nt, Artificial Sequence
  HTT spacer sequence CTCN PAM
aaaccauacaagagcacuuc

SEQ ID NO: 13753 - RNA, 20 nt, Artificial Sequence
  HTT spacer sequence CTCN PAM
uguaugguuuggaggugcuc

SEQ ID NO: 13754 - RNA, 20 nt, Artificial Sequence
  HTT spacer sequence CTCN PAM
aaaccauacaagagcaccuc

SEQ ID NO: 13755 - RNA, 20 nt, Artificial Sequence
  HTT spacer sequence CTCN PAM
guuguaugguuuggaggugc

SEQ ID NO: 13756 - RNA, 20 nt, Artificial Sequence
  HTT spacer sequence CTCN PAM
aaaccauacaacagagcacc

SEQ ID NO: 13757 - RNA, 20 nt, Artificial Sequence
  HTT spacer sequence CTCN PAM
guuguaugguuuggaggugc

SEQ ID NO: 13758 - RNA, 20 nt, Artificial Sequence
  HTT spacer sequence CTCN PAM
aaaccauacaacagagcacc

SEQ ID NO: 13759 - RNA, 20 nt, Artificial Sequence
  HTT spacer sequence CTCN PAM
uguaugguuuggaggugcuc

SEQ ID NO: 13760 - RNA, 20 nt, Artificial Sequence
  HTT spacer sequence CTCN PAM
aaaccauacaagagcaccuc

SEQ ID NO: 13761 - RNA, 20 nt, Artificial Sequence
  HTT spacer sequence CTCN PAM
auuguaugguuuggagaugc

SEQ ID NO: 13762 - RNA, 20 nt, Artificial Sequence
  HTT spacer sequence CTCN PAM
aaaccauacaauagagcacc

SEQ ID NO: 13763 - RNA, 20 nt, Artificial Sequence
  HTT spacer sequence CTCN PAM
gguaucugccugcauugcuu

SEQ ID NO: 13764 - RNA, 20 nt, Artificial Sequence
  HTT spacer sequence CTCN PAM
ugggaaaaugucacuacagg

SEQ ID NO: 13765 - RNA, 20 nt, Artificial Sequence
  HTT spacer sequence CTCN PAM
ggugccuguagugacauuuu

SEQ ID NO: 13766 - RNA, 20 nt, Artificial Sequence
  HTT spacer sequence CTCN PAM
ggcuucucuggugccuguag

SEQ ID NO: 13767 - RNA, 20 nt, Artificial Sequence
  HTT spacer sequence CTCN PAM
uagaaauuugggcauagcuc

SEQ ID NO: 13768 - RNA, 20 nt, Artificial Sequence
  HTT spacer sequence CTCN PAM
guuuucuuaaccauaaaaug

SEQ ID NO: 13769 - RNA, 20 nt, Artificial Sequence
  HTT spacer sequence CTCN PAM
uacacaugccacaaaaacau

SEQ ID NO: 13770 - RNA, 20 nt, Artificial Sequence
  HTT spacer sequence CTCN PAM
cacauacacagacacacacu

SEQ ID NO: 13771 - RNA, 20 nt, Artificial Sequence
  HTT spacer sequence CTCN PAM
cacauacacaauuuaauccu

SEQ ID NO: 13772 - RNA, 20 nt, Artificial Sequence
  HTT spacer sequence CTCN PAM
aagugguaagaaguguucuu

SEQ ID NO: 13773 - RNA, 20 nt, Artificial Sequence
  HTT spacer sequence CTCN PAM
uacccagcaagauugauggg

SEQ ID NO: 13774 - RNA, 20 nt, Artificial Sequence
  HTT spacer sequence CTCN PAM
uuuuccaucacaugguuucc

SEQ ID NO: 13775 - RNA, 20 nt, Artificial Sequence
  HTT spacer sequence CTCN PAM
ggagccaugggauucuagcu

SEQ ID NO: 13776 - RNA, 20 nt, Artificial Sequence
  HTT spacer sequence CTCN PAM
agagaagccagcguccugac

SEQ ID NO: 13777 - RNA, 20 nt, Artificial Sequence
  HTT spacer sequence CTCN PAM
cugucuugucccuagagugg

SEQ ID NO: 13778 - RNA, 20 nt, Artificial Sequence
  HTT spacer sequence CTCN PAM
agggacaagacagggagcua

SEQ ID NO: 13779 - RNA, 20 nt, Artificial Sequence
  HTT spacer sequence CTCN PAM
cuccgcuugcaauuccugcu

SEQ ID NO: 13780 - RNA, 20 nt, Artificial Sequence
  HTT spacer sequence CTCN PAM
ccgcuugcaauuccugcuuu

SEQ ID NO: 13781 - RNA, 20 nt, Artificial Sequence
  HTT spacer sequence CTCN PAM
gcuugcaauuccugcuuugc

SEQ ID NO: 13782 - RNA, 20 nt, Artificial Sequence
  HTT spacer sequence CTCN PAM
caucucacuuaugcagugac

SEQ ID NO: 13783 - RNA, 20 nt, Artificial Sequence
  HTT spacer sequence CTCN PAM
cuuaugcagugacguauauc

SEQ ID NO: 13784 - RNA, 20 nt, Artificial Sequence
  HTT spacer sequence CTCN PAM
gugccugcugaucauuggca

SEQ ID NO: 13785 - RNA, 20 nt, Artificial Sequence
  HTT spacer sequence CTCN PAM
acaggccuaaauauccuugc

SEQ ID NO: 13786 - RNA, 20 nt, Artificial Sequence
  HTT spacer sequence CTCN PAM
cuggcaggaccagggcgguc

SEQ ID NO: 13787 - RNA, 20 nt, Artificial Sequence
  HTT spacer sequence CTCN PAM
ugcaaagacagaccgcccug

SEQ ID NO: 13788 - RNA, 20 nt, Artificial Sequence
  HTT spacer sequence CTCN PAM
cucagucacccaggcuggag

SEQ ID NO: 13789 - RNA, 20 nt, Artificial Sequence
  HTT spacer sequence CTCN PAM
gucacccaggcuggagugca

SEQ ID NO: 13790 - RNA, 20 nt, Artificial Sequence
  HTT spacer sequence CTCN PAM
agccugggugacugagcgag

SEQ ID NO: 13791 - RNA, 20 nt, Artificial Sequence
  HTT spacer sequence CTCN PAM
uugcagccuugagcuaccgg

SEQ ID NO: 13792 - RNA, 20 nt, Artificial Sequence
  HTT spacer sequence CTCN PAM
aggcugcaaugagccgugau

SEQ ID NO: 13793 - RNA, 20 nt, Artificial Sequence
  HTT spacer sequence CTCN PAM
agcuauccuccuggcuuggc

SEQ ID NO: 13794 - RNA, 20 nt, Artificial Sequence
  HTT spacer sequence CTCN PAM
uggcuuggccccuugaguag

SEQ ID NO: 13795 - RNA, 20 nt, Artificial Sequence
  HTT spacer sequence CTCN PAM
aggggccaagccaggaggau

SEQ ID NO: 13796 - RNA, 20 nt, Artificial Sequence
  HTT spacer sequence CTCN PAM
acaaauaauuuuaaaaauua

SEQ ID NO: 13797 - RNA, 20 nt, Artificial Sequence
  HTT spacer sequence CTCN PAM
ccagguugcccaggcugguc

SEQ ID NO: 13798 - RNA, 20 nt, Artificial Sequence
  HTT spacer sequence CTCN PAM
agugauccucccuccuuggu

SEQ ID NO: 13799 - RNA, 20 nt, Artificial Sequence
  HTT spacer sequence CTCN PAM
cuccuugguuucccaaagug

SEQ ID NO: 13800 - RNA, 20 nt, Artificial Sequence
  HTT spacer sequence CTCN PAM
uugguuucccaaagugcugg

SEQ ID NO: 13801 - RNA, 20 nt, Artificial Sequence
  HTT spacer sequence CTCN PAM
caccugugaucccagcacuu

SEQ ID NO: 13802 - RNA, 20 nt, Artificial Sequence
  HTT spacer sequence CTCN PAM
gagucagaaaaucuaaaaag

SEQ ID NO: 13803 - RNA, 20 nt, Artificial Sequence
  HTT spacer sequence CTCN PAM
gaggaucaaauaucaagaac

SEQ ID NO: 13804 - RNA, 20 nt, Artificial Sequence
  HTT spacer sequence CTCN PAM
uuuuagauuuucugacucug

SEQ ID NO: 13805 - RNA, 20 nt, Artificial Sequence
  HTT spacer sequence CTCN PAM
uaacgucccauuugccauga

SEQ ID NO: 13806 - RNA, 20 nt, Artificial Sequence
  HTT spacer sequence CTCN PAM
gcccucuuaacgucccauuu

SEQ ID NO: 13807 - RNA, 20 nt, Artificial Sequence
  HTT spacer sequence CTCN PAM
cugcccucuuaacgucccau

SEQ ID NO: 13808 - RNA, 20 nt, Artificial Sequence
  HTT spacer sequence CTCN PAM
uucauuuuuuuuccaggaau

SEQ ID NO: 13809 - RNA, 20 nt, Artificial Sequence
  HTT spacer sequence CTCN PAM
gacacacaccaagccacugu

SEQ ID NO: 13810 - RNA, 20 nt, Artificial Sequence
  HTT spacer sequence CTCN PAM
ggugcucuuccuggcugucu

SEQ ID NO: 13811 - RNA, 20 nt, Artificial Sequence
  HTT spacer sequence CTCN PAM
uccuggcugucuccuugcuu

SEQ ID NO: 13812 - RNA, 20 nt, Artificial Sequence
  HTT spacer sequence CTCN PAM
uugcuucuuucccauguccu

SEQ ID NO: 13813 - RNA, 20 nt, Artificial Sequence
  HTT spacer sequence CTCN PAM
ucuuuguuuccagccauuuc

SEQ ID NO: 13814 - RNA, 20 nt, Artificial Sequence
  HTT spacer sequence CTCN PAM
cuuaugcuuaaguuuggugc

SEQ ID NO: 13815 - RNA, 20 nt, Artificial Sequence
  HTT spacer sequence CTCN PAM
cagauuccugcuuccucaga

SEQ ID NO: 13816 - RNA, 20 nt, Artificial Sequence
  HTT spacer sequence CTCN PAM
gauuccugcuuccucagaug

SEQ ID NO: 13817 - RNA, 20 nt, Artificial Sequence
  HTT spacer sequence CTCN PAM
gaugcuguaguugucaggcc

SEQ ID NO: 13818 - RNA, 20 nt, Artificial Sequence
  HTT spacer sequence CTCN PAM
cacuguggcagaguaggggg

SEQ ID NO: 13819 - RNA, 20 nt, Artificial Sequence
  HTT spacer sequence CTCN PAM
cuguggcagaguagggggag

SEQ ID NO: 13820 - RNA, 20 nt, Artificial Sequence
  HTT spacer sequence CTCN PAM
gccacagugagagcaaaccu

SEQ ID NO: 13821 - RNA, 20 nt, Artificial Sequence
  HTT spacer sequence CTCN PAM
cccuacucugccacagugag

SEQ ID NO: 13822 - RNA, 20 nt, Artificial Sequence
  HTT spacer sequence CTCN PAM
cacgccucccccuacucugc

SEQ ID NO: 13823 - RNA, 20 nt, Artificial Sequence
  HTT spacer sequence CTCN PAM
cccacgccucccccuacucu

SEQ ID NO: 13824 - RNA, 20 nt, Artificial Sequence
  HTT spacer sequence CTCN PAM
cuacagcuggccugggguca

SEQ ID NO: 13825 - RNA, 20 nt, Artificial Sequence
  HTT spacer sequence CTCN PAM
ugaguauggcugugugugua

SEQ ID NO: 13826 - RNA, 20 nt, Artificial Sequence
  HTT spacer sequence CTCN PAM
ugagaagacaaagucuagga

SEQ ID NO: 13827 - RNA, 20 nt, Artificial Sequence
  HTT spacer sequence CTCN PAM
acagaaaccacaugcaaaau

SEQ ID NO: 13828 - RNA, 20 nt, Artificial Sequence
  HTT spacer sequence CTCN PAM
cucagguagguuagucucag

SEQ ID NO: 13829 - RNA, 20 nt, Artificial Sequence
  HTT spacer sequence CTCN PAM
gguagguuagucucaggcgg

SEQ ID NO: 13830 - RNA, 20 nt, Artificial Sequence
  HTT spacer sequence CTCN PAM
ggcggugaagcacguguguc

SEQ ID NO: 13831 - RNA, 20 nt, Artificial Sequence
  HTT spacer sequence CTCN PAM
guucugugaggugcuggcaa

SEQ ID NO: 13832 - RNA, 20 nt, Artificial Sequence
  HTT spacer sequence CTCN PAM
cagaacggagacuuuaugcc

SEQ ID NO: 13833 - RNA, 20 nt, Artificial Sequence
  HTT spacer sequence CTCN PAM
ugacggugguggugauuugc

SEQ ID NO: 13834 - RNA, 20 nt, Artificial Sequence
  HTT spacer sequence CTCN PAM
cuagacaaaaaucacuucag

SEQ ID NO: 13835 - RNA, 20 nt, Artificial Sequence
  HTT spacer sequence CTCN PAM
aggaagccuuuccugccucc

SEQ ID NO: 13836 - RNA, 20 nt, Artificial Sequence
  HTT spacer sequence CTCN PAM
uucaccuacuggcugcugac

SEQ ID NO: 13837 - RNA, 20 nt, Artificial Sequence
  HTT spacer sequence CTCN PAM
aaucuacucuuucaccuacu

SEQ ID NO: 13838 - RNA, 20 nt, Artificial Sequence
  HTT spacer sequence CTCN PAM
ugucucaaggggugccagga

SEQ ID NO: 13839 - RNA, 20 nt, Artificial Sequence
  HTT spacer sequence CTCN PAM
aggggugccaggaagcugug

SEQ ID NO: 13840 - RNA, 20 nt, Artificial Sequence
  HTT spacer sequence CTCN PAM
acagcuuccuggcaccccuu

SEQ ID NO: 13841 - RNA, 20 nt, Artificial Sequence
  HTT spacer sequence CTCN PAM
ggcagcauaagauggguuca

SEQ ID NO: 13842 - RNA, 20 nt, Artificial Sequence
  HTT spacer sequence CTCN PAM
cuggcagcauaagauggguu

SEQ ID NO: 13843 - RNA, 20 nt, Artificial Sequence
  HTT spacer sequence CTCN PAM
uggugucccacucucuggca

SEQ ID NO: 13844 - RNA, 20 nt, Artificial Sequence
  HTT spacer sequence CTCN PAM
accaaacaagguacaacccc

SEQ ID NO: 13845 - RNA, 20 nt, Artificial Sequence
  HTT spacer sequence CTCN PAM
ugaagacuuuggaugugguc

SEQ ID NO: 13846 - RNA, 20 nt, Artificial Sequence
  HTT spacer sequence CTCN PAM
ccugaccacauccaaagucu

SEQ ID NO: 13847 - RNA, 20 nt, Artificial Sequence
  HTT spacer sequence CTCN PAM
uccuaaaugauacacucccc

SEQ ID NO: 13848 - RNA, 20 nt, Artificial Sequence
  HTT spacer sequence CTCN PAM
ccgggucacucuuccuaaau

SEQ ID NO: 13849 - RNA, 20 nt, Artificial Sequence
  HTT spacer sequence CTCN PAM
accccacguccucaccgggu

SEQ ID NO: 13850 - RNA, 20 nt, Artificial Sequence
  HTT spacer sequence CTCN PAM
ucuaccccacguccucaccg

SEQ ID NO: 13851 - RNA, 20 nt, Artificial Sequence
  HTT spacer sequence CTCN PAM
caccuguccuccucuacccc

SEQ ID NO: 13852 - RNA, 20 nt, Artificial Sequence
  HTT spacer sequence CTCN PAM
cucccaccuguccuccucua

SEQ ID NO: 13853 - RNA, 20 nt, Artificial Sequence
  HTT spacer sequence CTCN PAM
caccuggacucccucccacc

SEQ ID NO: 13854 - RNA, 20 nt, Artificial Sequence
  HTT spacer sequence CTCN PAM
cucccaccuggacucccucc

SEQ ID NO: 13855 - RNA, 20 nt, Artificial Sequence
  HTT spacer sequence CTCN PAM
ugcugggucuacucacuccc

SEQ ID NO: 13856 - RNA, 20 nt, Artificial Sequence
  HTT spacer sequence CTCN PAM
agccaggaugguggcagggc

SEQ ID NO: 13857 - RNA, 20 nt, Artificial Sequence
  HTT spacer sequence CTCN PAM
aggcccugcacuccugcugg

SEQ ID NO: 13858 - RNA, 20 nt, Artificial Sequence
  HTT spacer sequence CTCN PAM
cagcccugccaccauccugg

SEQ ID NO: 13859 - RNA, 20 nt, Artificial Sequence
  HTT spacer sequence CTCN PAM
ucacagcccugccaccaucc

SEQ ID NO: 13860 - RNA, 20 nt, Artificial Sequence
  HTT spacer sequence CTCN PAM
ccucacagcccugccaccau

SEQ ID NO: 13861 - RNA, 20 nt, Artificial Sequence
  HTT spacer sequence CTCN PAM
ugccccugcuuccgcagaca

SEQ ID NO: 13862 - RNA, 20 nt, Artificial Sequence
  HTT spacer sequence CTCN PAM
ucccucuugccccugcuucc

SEQ ID NO: 13863 - RNA, 20 nt, Artificial Sequence
  HTT spacer sequence CTCN PAM
caaucuacgccagucgcugg

SEQ ID NO: 13864 - RNA, 20 nt, Artificial Sequence
  HTT spacer sequence CTCN PAM
cacaaucuacgccagucgcu

SEQ ID NO: 13865 - RNA, 20 nt, Artificial Sequence
  HTT spacer sequence CTCN PAM
uaggaggggcugaguuuuag

SEQ ID NO: 13866 - RNA, 20 nt, Artificial Sequence
  HTT spacer sequence CTCN PAM
uaagagcagggaauggucuc

SEQ ID NO: 13867 - RNA, 20 nt, Artificial Sequence
  HTT spacer sequence CTCN PAM
gccccuccuaagagcaggga

SEQ ID NO: 13868 - RNA, 20 nt, Artificial Sequence
  HTT spacer sequence CTCN PAM
uguuauacaauaagcuuggu

SEQ ID NO: 13869 - RNA, 20 nt, Artificial Sequence
  HTT spacer sequence CTCN PAM
uuuaaggacuuucaguacaa

SEQ ID NO: 13870 - RNA, 20 nt, Artificial Sequence
  HTT spacer sequence CTCN PAM
gaaacguuuaaauccuaauc

SEQ ID NO: 13871 - RNA, 20 nt, Artificial Sequence
  HTT spacer sequence CTCN PAM
ucagaauuucccagaaugug

SEQ ID NO: 13872 - RNA, 20 nt, Artificial Sequence
  HTT spacer sequence CTCN PAM
gaauuucccagaaugugauc

SEQ ID NO: 13873 - RNA, 20 nt, Artificial Sequence
  HTT spacer sequence CTCN PAM
guccacuuacaucaacugcc

SEQ ID NO: 13874 - RNA, 20 nt, Artificial Sequence
  HTT spacer sequence CTCN PAM
uuaaccguggcaugggcagu

SEQ ID NO: 13875 - RNA, 20 nt, Artificial Sequence
  HTT spacer sequence CTCN PAM
cucuugggugggcaagcauu

SEQ ID NO: 13876 - RNA, 20 nt, Artificial Sequence
  HTT spacer sequence CTCN PAM
ugggugggcaagcauuugga

SEQ ID NO: 13877 - RNA, 20 nt, Artificial Sequence
  HTT spacer sequence CTCN PAM
uccaaaugcuugcccaccca

SEQ ID NO: 13878 - RNA, 20 nt, Artificial Sequence
  HTT spacer sequence CTCN PAM
uaugggugagaguggggcac

SEQ ID NO: 13879 - RNA, 20 nt, Artificial Sequence
  HTT spacer sequence CTCN PAM
cccauaggagccuucucuuc

SEQ ID NO: 13880 - RNA, 20 nt, Artificial Sequence
  HTT spacer sequence CTCN PAM
cacccauaggagccuucucu

SEQ ID NO: 13881 - RNA, 20 nt, Artificial Sequence
  HTT spacer sequence CTCN PAM
agcuaggggaugggacaggg

SEQ ID NO: 13882 - RNA, 20 nt, Artificial Sequence
  HTT spacer sequence CTCN PAM
aauguggacuuugugccguu

SEQ ID NO: 13883 - RNA, 20 nt, Artificial Sequence
  HTT spacer sequence CTCN PAM
caagugagcaaggaggguug

SEQ ID NO: 13884 - RNA, 20 nt, Artificial Sequence
  HTT spacer sequence CTCN PAM
cuugugaggcuaaaccagaa

SEQ ID NO: 13885 - RNA, 20 nt, Artificial Sequence
  HTT spacer sequence CTCN PAM
uugcucacuugugaggcuaa

SEQ ID NO: 13886 - RNA, 20 nt, Artificial Sequence
  HTT spacer sequence CTCN PAM
acccuccuugcucacuugug

SEQ ID NO: 13887 - RNA, 20 nt, Artificial Sequence
  HTT spacer sequence CTCN PAM
caacccuccuugcucacuug

SEQ ID NO: 13888 - RNA, 20 nt, Artificial Sequence
  HTT spacer sequence CTCN PAM
cagcacaucucucaacccuc

SEQ ID NO: 13889 - RNA, 20 nt, Artificial Sequence
  HTT spacer sequence CTCN PAM
gggucaggggggcagggacc

SEQ ID NO: 13890 - RNA, 20 nt, Artificial Sequence
  HTT spacer sequence CTCN PAM
cugucagguaugcccguggu

SEQ ID NO: 13891 - RNA, 20 nt, Artificial Sequence
  HTT spacer sequence CTCN PAM
ucacugucagguaugcccgu

SEQ ID NO: 13892 - RNA, 20 nt, Artificial Sequence
  HTT spacer sequence CTCN PAM
gccuugggaaguguucuagg

SEQ ID NO: 13893 - RNA, 20 nt, Artificial Sequence
  HTT spacer sequence CTCN PAM
ggccuagaacacuucccaag

SEQ ID NO: 13894 - RNA, 20 nt, Artificial Sequence
  HTT spacer sequence CTCN PAM
cucuggccuagaacacuucc

SEQ ID NO: 13895 - RNA, 20 nt, Artificial Sequence
  HTT spacer sequence CTCN PAM
ggacccugcagauguccagg

SEQ ID NO: 13896 - RNA, 20 nt, Artificial Sequence
  HTT spacer sequence CTCN PAM
gacggcacccuggacaucug

SEQ ID NO: 13897 - RNA, 20 nt, Artificial Sequence
  HTT spacer sequence CTCN PAM
aggggcuuuaggauuuauua

SEQ ID NO: 13898 - RNA, 20 nt, Artificial Sequence
  HTT spacer sequence CTCN PAM
aaaaaaaaaaaaaaaaaaau

SEQ ID NO: 13899 - RNA, 20 nt, Artificial Sequence
  HTT spacer sequence CTCN PAM
aucucaaaaaaaaaaaaaaa

SEQ ID NO: 13900 - RNA, 20 nt, Artificial Sequence
  HTT spacer sequence CTCN PAM
uguugcccaggcuggagugc

SEQ ID NO: 13901 - RNA, 20 nt, Artificial Sequence
  HTT spacer sequence CTCN PAM
agccugggcaacaagagcga

SEQ ID NO: 13902 - RNA, 20 nt, Artificial Sequence
  HTT spacer sequence CTCN PAM
cugcaaccuccgccucccgg

SEQ ID NO: 13903 - RNA, 20 nt, Artificial Sequence
  HTT spacer sequence CTCN PAM
gccucccggguucaaacuau

SEQ ID NO: 13904 - RNA, 20 nt, Artificial Sequence
  HTT spacer sequence CTCN PAM
cggguucaaacuauucuccu

SEQ ID NO: 13905 - RNA, 20 nt, Artificial Sequence
  HTT spacer sequence CTCN PAM
ugccucagccucucgaguag

SEQ ID NO: 13906 - RNA, 20 nt, Artificial Sequence
  HTT spacer sequence CTCN PAM
gccucucgaguagcugggau

SEQ ID NO: 13907 - RNA, 20 nt, Artificial Sequence
  HTT spacer sequence CTCN PAM
cgaguagcugggauuacagg

SEQ ID NO: 13908 - RNA, 20 nt, Artificial Sequence
  HTT spacer sequence CTCN PAM
aguagcugggauuacaggcg

SEQ ID NO: 13909 - RNA, 20 nt, Artificial Sequence
  HTT spacer sequence CTCN PAM
agaggcugaggcaggagaau

SEQ ID NO: 13910 - RNA, 20 nt, Artificial Sequence
  HTT spacer sequence CTCN PAM
acuaaaaaauacaaaaauua

SEQ ID NO: 13911 - RNA, 20 nt, Artificial Sequence
  HTT spacer sequence CTCN PAM
gucucuacuaaaaaauacaa

SEQ ID NO: 13912 - RNA, 20 nt, Artificial Sequence
  HTT spacer sequence CTCN PAM
auguuggucaggcuggucuu

SEQ ID NO: 13913 - RNA, 20 nt, Artificial Sequence
  HTT spacer sequence CTCN PAM
ugaccucaggugaucugccc

SEQ ID NO: 13914 - RNA, 20 nt, Artificial Sequence
  HTT spacer sequence CTCN PAM
ggugaucugcccgccuuggc

SEQ ID NO: 13915 - RNA, 20 nt, Artificial Sequence
  HTT spacer sequence CTCN PAM
caaagugcugggauuacagg

SEQ ID NO: 13916 - RNA, 20 nt, Artificial Sequence
  HTT spacer sequence CTCN PAM
ugccuguaaucccagcacuu

SEQ ID NO: 13917 - RNA, 20 nt, Artificial Sequence
  HTT spacer sequence CTCN PAM
uuuuagaacuagugauggga

SEQ ID NO: 13918 - RNA, 20 nt, Artificial Sequence
  HTT spacer sequence CTCN PAM
ugugauuuguuguaggcuuu

SEQ ID NO: 13919 - RNA, 20 nt, Artificial Sequence
  HTT spacer sequence CTCN PAM
agcucuauaaggaaauuaaa

SEQ ID NO: 13920 - RNA, 20 nt, Artificial Sequence
  HTT spacer sequence CTCN PAM
agcuguaaccuuggaagauu

SEQ ID NO: 13921 - RNA, 20 nt, Artificial Sequence
  HTT spacer sequence CTCN PAM
auaaggaaauuaaaaaggug

SEQ ID NO: 13922 - RNA, 20 nt, Artificial Sequence
  HTT spacer sequence CTCN PAM
uguaccccauaaauauauac

SEQ ID NO: 13923 - RNA, 20 nt, Artificial Sequence
  HTT spacer sequence CTCN PAM
agcauuuauccuuuguguua

SEQ ID NO: 13924 - RNA, 20 nt, Artificial Sequence
  HTT spacer sequence CTCN PAM
aaaauaaaauaaaauaagua

SEQ ID NO: 13925 - RNA, 20 nt, Artificial Sequence
  HTT spacer sequence CTCN PAM
gucucaaaaauaaaauaaaa

SEQ ID NO: 13926 - RNA, 20 nt, Artificial Sequence
  HTT spacer sequence CTCN PAM
agcaugggugaaagcaagac

SEQ ID NO: 13927 - RNA, 20 nt, Artificial Sequence
  HTT spacer sequence CTCN PAM
cugcaaccuccgccucccgg

SEQ ID NO: 13928 - RNA, 20 nt, Artificial Sequence
  HTT spacer sequence CTCN PAM
gccucccggguucaaccgaa

SEQ ID NO: 13929 - RNA, 20 nt, Artificial Sequence
  HTT spacer sequence CTCN PAM
cggguucaaccgaacuuugg

SEQ ID NO: 13930 - RNA, 20 nt, Artificial Sequence
  HTT spacer sequence CTCN PAM
aacuccugaccucaggugau

SEQ ID NO: 13931 - RNA, 20 nt, Artificial Sequence
  HTT spacer sequence CTCN PAM
ugaccucaggugauccgccc

SEQ ID NO: 13932 - RNA, 20 nt, Artificial Sequence
  HTT spacer sequence CTCN PAM
ggugauccgcccgccucggc

SEQ ID NO: 13933 - RNA, 20 nt, Artificial Sequence
  HTT spacer sequence CTCN PAM
gccucccaaaguguugggau

SEQ ID NO: 13934 - RNA, 20 nt, Artificial Sequence
  HTT spacer sequence CTCN PAM
caaaguguugggauuacagg

SEQ ID NO: 13935 - RNA, 20 nt, Artificial Sequence
  HTT spacer sequence CTCN PAM
cgccuguaaucccaacacuu

SEQ ID NO: 13936 - RNA, 20 nt, Artificial Sequence
  HTT spacer sequence CTCN PAM
ugccuguaaucccagcauuu

SEQ ID NO: 13937 - RNA, 20 nt, Artificial Sequence
  HTT spacer sequence CTCN PAM
caaaaugcugggauuacagg

SEQ ID NO: 13938 - RNA, 20 nt, Artificial Sequence
  HTT spacer sequence CTCN PAM
gccucccaaaaugcugggau

SEQ ID NO: 13939 - RNA, 20 nt, Artificial Sequence
  HTT spacer sequence CTCN PAM
ggugaucaccugccucagcc

SEQ ID NO: 13940 - RNA, 20 nt, Artificial Sequence
  HTT spacer sequence CTCN PAM
ugaucucaggugaucaccug

SEQ ID NO: 13941 - RNA, 20 nt, Artificial Sequence
  HTT spacer sequence CTCN PAM
aacuccugaucucaggugau

SEQ ID NO: 13942 - RNA, 20 nt, Artificial Sequence
  HTT spacer sequence CTCN PAM
auguuggccaggcuggucuc

SEQ ID NO: 13943 - RNA, 20 nt, Artificial Sequence
  HTT spacer sequence CTCN PAM
acuaaaaauacaaaaauuag

SEQ ID NO: 13944 - RNA, 20 nt, Artificial Sequence
  HTT spacer sequence CTCN PAM
ggaggcugagguaggggaau

SEQ ID NO: 13945 - RNA, 20 nt, Artificial Sequence
  HTT spacer sequence CTCN PAM
cgaguagccaggauuacagg

SEQ ID NO: 13946 - RNA, 20 nt, Artificial Sequence
  HTT spacer sequence CTCN PAM
gccucccgaguagccaggau

SEQ ID NO: 13947 - RNA, 20 nt, Artificial Sequence
  HTT spacer sequence CTCN PAM
acccccagguucaagcgauu

SEQ ID NO: 13948 - RNA, 20 nt, Artificial Sequence
  HTT spacer sequence CTCN PAM
cugcaaccuccacccccagg

SEQ ID NO: 13949 - RNA, 20 nt, Artificial Sequence
  HTT spacer sequence CTCN PAM
gcucacugcaaccuccaccc

SEQ ID NO: 13950 - RNA, 20 nt, Artificial Sequence
  HTT spacer sequence CTCN PAM
ggcuggaaugcaguggcgug

SEQ ID NO: 13951 - RNA, 20 nt, Artificial Sequence
  HTT spacer sequence CTCN PAM
gucgcucaggcuggaaugca

SEQ ID NO: 13952 - RNA, 20 nt, Artificial Sequence
  HTT spacer sequence CTCN PAM
cucugucgcucaggcuggaa

SEQ ID NO: 13953 - RNA, 20 nt, Artificial Sequence
  HTT spacer sequence CTCN PAM
aaaaauaaaaaugaaauaaa

SEQ ID NO: 13954 - RNA, 20 nt, Artificial Sequence
  HTT spacer sequence CTCN PAM
caccuuagucccagcacuuu

SEQ ID NO: 13955 - RNA, 20 nt, Artificial Sequence
  HTT spacer sequence CTCN PAM
gguucccaaagugcugggac

SEQ ID NO: 13956 - RNA, 20 nt, Artificial Sequence
  HTT spacer sequence CTCN PAM
agcauccaccugccucaggu

SEQ ID NO: 13957 - RNA, 20 nt, Artificial Sequence
  HTT spacer sequence CTCN PAM
uggucucaagcauccaccug

SEQ ID NO: 13958 - RNA, 20 nt, Artificial Sequence
  HTT spacer sequence CTCN PAM
aacuccuggucucaagcauc

SEQ ID NO: 13959 - RNA, 20 nt, Artificial Sequence
  HTT spacer sequence CTCN PAM
gcuacuugggagauugaggu

SEQ ID NO: 13960 - RNA, 20 nt, Artificial Sequence
  HTT spacer sequence CTCN PAM
caaguagcugagacuauagu

SEQ ID NO: 13961 - RNA, 20 nt, Artificial Sequence
  HTT spacer sequence CTCN PAM
aucucccaaguagcugagac

SEQ ID NO: 13962 - RNA, 20 nt, Artificial Sequence
  HTT spacer sequence CTCN PAM
caccucaaucucccaaguag

SEQ ID NO: 13963 - RNA, 20 nt, Artificial Sequence
  HTT spacer sequence CTCN PAM
auuaauccucccaccucaau

SEQ ID NO: 13964 - RNA, 20 nt, Artificial Sequence
  HTT spacer sequence CTCN PAM
gcuaccuauagauucaaccu

SEQ ID NO: 13965 - RNA, 20 nt, Artificial Sequence
  HTT spacer sequence CTCN PAM
cuuggucgcccaggcugaag

SEQ ID NO: 13966 - RNA, 20 nt, Artificial Sequence
  HTT spacer sequence CTCN PAM
aaagaaaaacaaaaaaacaa

SEQ ID NO: 13967 - RNA, 20 nt, Artificial Sequence
  HTT spacer sequence CTCN PAM
gcugugcugucgaauaccag

SEQ ID NO: 13968 - RNA, 20 nt, Artificial Sequence
  HTT spacer sequence CTCN PAM
gugauggaaauaagggccca

SEQ ID NO: 13969 - RNA, 20 nt, Artificial Sequence
  HTT spacer sequence CTCN PAM
guuaagcagcagguguggga

SEQ ID NO: 13970 - RNA, 20 nt, Artificial Sequence
  HTT spacer sequence CTCN PAM
uuauuagaugagaugagaau

SEQ ID NO: 13971 - RNA, 20 nt, Artificial Sequence
  HTT spacer sequence CTCN PAM
ucuaauaaagaguaaccuuu

SEQ ID NO: 13972 - RNA, 20 nt, Artificial Sequence
  HTT spacer sequence CTCN PAM
ucucaucuaauaaagaguaa

SEQ ID NO: 13973 - RNA, 20 nt, Artificial Sequence
  HTT spacer sequence CTCN PAM
aaaauuagaaaguaacaagg

SEQ ID NO: 13974 - RNA, 20 nt, Artificial Sequence
  HTT spacer sequence CTCN PAM
uggugacuaguaugugacuc

SEQ ID NO: 13975 - RNA, 20 nt, Artificial Sequence
  HTT spacer sequence CTCN PAM
uaaugcaacccucauugcac

SEQ ID NO: 13976 - RNA, 20 nt, Artificial Sequence
  HTT spacer sequence CTCN PAM
uugcacccccucagaauggu

SEQ ID NO: 13977 - RNA, 20 nt, Artificial Sequence
  HTT spacer sequence CTCN PAM
gaauggugccccucggaguu

SEQ ID NO: 13978 - RNA, 20 nt, Artificial Sequence
  HTT spacer sequence CTCN PAM
gaguuugcgugcugcccugu

SEQ ID NO: 13979 - RNA, 20 nt, Artificial Sequence
  HTT spacer sequence CTCN PAM
gaggggcaccauucugaggg

SEQ ID NO: 13980 - RNA, 20 nt, Artificial Sequence
  HTT spacer sequence CTCN PAM
acagggcagcacgcaaacuc

SEQ ID NO: 13981 - RNA, 20 nt, Artificial Sequence
  HTT spacer sequence CTCN PAM
gcaaaccuccacagggcagc

SEQ ID NO: 13982 - RNA, 20 nt, Artificial Sequence
  HTT spacer sequence CTCN PAM
ccugguucggccucagaaau

SEQ ID NO: 13983 - RNA, 20 nt, Artificial Sequence
  HTT spacer sequence CTCN PAM
gaaaugcagguaaguuguac

SEQ ID NO: 13984 - RNA, 20 nt, Artificial Sequence
  HTT spacer sequence CTCN PAM
ggauguugguuuuugucggg

SEQ ID NO: 13985 - RNA, 20 nt, Artificial Sequence
  HTT spacer sequence CTCN PAM
gcucagaugucauuucaaaa

SEQ ID NO: 13986 - RNA, 20 nt, Artificial Sequence
  HTT spacer sequence CTCN PAM
gaugucauuucaaaagucug

SEQ ID NO: 13987 - RNA, 20 nt, Artificial Sequence
  HTT spacer sequence CTCN PAM
gcccucuccaaauugcaguc

SEQ ID NO: 13988 - RNA, 20 nt, Artificial Sequence
  HTT spacer sequence CTCN PAM
ccaaauugcagucgaccuug

SEQ ID NO: 13989 - RNA, 20 nt, Artificial Sequence
  HTT spacer sequence CTCN PAM
aaauugcagucgaccuugcc

SEQ ID NO: 13990 - RNA, 20 nt, Artificial Sequence
  HTT spacer sequence CTCN PAM
uagcacuaauccaugucaga

SEQ ID NO: 13991 - RNA, 20 nt, Artificial Sequence
  HTT spacer sequence CTCN PAM
ugcggaagggugggauagaa

SEQ ID NO: 13992 - RNA, 20 nt, Artificial Sequence
  HTT spacer sequence CTCN PAM
guugcagcccagcagcgaua

SEQ ID NO: 13993 - RNA, 20 nt, Artificial Sequence
  HTT spacer sequence CTCN PAM
accuucaacaauuuggcaag

SEQ ID NO: 13994 - RNA, 20 nt, Artificial Sequence
  HTT spacer sequence CTCN PAM
uauagucagcaauaaugaaa

SEQ ID NO: 13995 - RNA, 20 nt, Artificial Sequence
  HTT spacer sequence CTCN PAM
uguaacagacaaauggauau

SEQ ID NO: 13996 - RNA, 20 nt, Artificial Sequence
  HTT spacer sequence CTCN PAM
auccguuaagauacaacugu

SEQ ID NO: 13997 - RNA, 20 nt, Artificial Sequence
  HTT spacer sequence CTCN PAM
cuccuucuccuuaaccagca

SEQ ID NO: 13998 - RNA, 20 nt, Artificial Sequence
  HTT spacer sequence CTCN PAM
uucuccuuaaccagcaauac

SEQ ID NO: 13999 - RNA, 20 nt, Artificial Sequence
  HTT spacer sequence CTCN PAM
uuaaccagcaauacaugcug

SEQ ID NO: 14000 - RNA, 20 nt, Artificial Sequence
  HTT spacer sequence CTCN PAM
gcuccauccugagucacugg

SEQ ID NO: 14001 - RNA, 20 nt, Artificial Sequence
  HTT spacer sequence CTCN PAM
auccugagucacugggaaug

SEQ ID NO: 14002 - RNA, 20 nt, Artificial Sequence
  HTT spacer sequence CTCN PAM
ggauggagcugagggucuau

SEQ ID NO: 14003 - RNA, 20 nt, Artificial Sequence
  HTT spacer sequence CTCN PAM
cuauuaauaugaacugaguu

SEQ ID NO: 14004 - RNA, 20 nt, Artificial Sequence
  HTT spacer sequence CTCN PAM
guucauauuaauagugaggg

SEQ ID NO: 14005 - RNA, 20 nt, Artificial Sequence
  HTT spacer sequence CTCN PAM
uaccuuugaucccagcacuu

SEQ ID NO: 14006 - RNA, 20 nt, Artificial Sequence
  HTT spacer sequence CTCN PAM
ugaagugcugggaucaaagg

SEQ ID NO: 14007 - RNA, 20 nt, Artificial Sequence
  HTT spacer sequence CTCN PAM
acaaaaaauacaaaacuuag

SEQ ID NO: 14008 - RNA, 20 nt, Artificial Sequence
  HTT spacer sequence CTCN PAM
agaggcugaggugggaggau

SEQ ID NO: 14009 - RNA, 20 nt, Artificial Sequence
  HTT spacer sequence CTCN PAM
aguggcugugaccacaggca

SEQ ID NO: 14010 - RNA, 20 nt, Artificial Sequence
  HTT spacer sequence CTCN PAM
cgaguggcugugaccacagg

SEQ ID NO: 14011 - RNA, 20 nt, Artificial Sequence
  HTT spacer sequence CTCN PAM
gccucucgaguggcugugac

SEQ ID NO: 14012 - RNA, 20 nt, Artificial Sequence
  HTT spacer sequence CTCN PAM
caccucagccucucgagugg

SEQ ID NO: 14013 - RNA, 20 nt, Artificial Sequence
  HTT spacer sequence CTCN PAM
agugauccucccaccucagc

SEQ ID NO: 14014 - RNA, 20 nt, Artificial Sequence
  HTT spacer sequence CTCN PAM
caggcucaagugauccuccc

SEQ ID NO: 14015 - RNA, 20 nt, Artificial Sequence
  HTT spacer sequence CTCN PAM
accucccaggcucaagugau

SEQ ID NO: 14016 - RNA, 20 nt, Artificial Sequence
  HTT spacer sequence CTCN PAM
acacgaccuccaccucccag

SEQ ID NO: 14017 - RNA, 20 nt, Artificial Sequence
  HTT spacer sequence CTCN PAM
agccugggcaacagagugag

SEQ ID NO: 14018 - RNA, 20 nt, Artificial Sequence
  HTT spacer sequence CTCN PAM
guugcccaggcuggagugca

SEQ ID NO: 14019 - RNA, 20 nt, Artificial Sequence
  HTT spacer sequence CTCN PAM
cucuguugcccaggcuggag

SEQ ID NO: 14020 - RNA, 20 nt, Artificial Sequence
  HTT spacer sequence CTCN PAM
aaaaaaccaaaauccagaaa

SEQ ID NO: 14021 - RNA, 20 nt, Artificial Sequence
  HTT spacer sequence CTCN PAM
gcagccauauaaguucuuuu

SEQ ID NO: 14022 - RNA, 20 nt, Artificial Sequence
  HTT spacer sequence CTCN PAM
uguacccauuucccagugcc

SEQ ID NO: 14023 - RNA, 20 nt, Artificial Sequence
  HTT spacer sequence CTCN PAM
aucuaaacggcacugggaaa

SEQ ID NO: 14024 - RNA, 20 nt, Artificial Sequence
  HTT spacer sequence CTCN PAM
ucaauggcucugucaccuca

SEQ ID NO: 14025 - RNA, 20 nt, Artificial Sequence
  HTT spacer sequence CTCN PAM
gucaccucagacacccugca

SEQ ID NO: 14026 - RNA, 20 nt, Artificial Sequence
  HTT spacer sequence CTCN PAM
gacacccugcauugacucau

SEQ ID NO: 14027 - RNA, 20 nt, Artificial Sequence
  HTT spacer sequence CTCN PAM
uuagucugauuagagucagg

SEQ ID NO: 14028 - RNA, 20 nt, Artificial Sequence
  HTT spacer sequence CTCN PAM
aaucagacuaaugagucaau

SEQ ID NO: 14029 - RNA, 20 nt, Artificial Sequence
  HTT spacer sequence CTCN PAM
ugaugguuuuuuuuuccccc

SEQ ID NO: 14030 - RNA, 20 nt, Artificial Sequence
  HTT spacer sequence CTCN PAM
gcggaacagucacuuccuua

SEQ ID NO: 14031 - RNA, 20 nt, Artificial Sequence
  HTT spacer sequence CTCN PAM
cuaaggaagugacuguuccg

SEQ ID NO: 14032 - RNA, 20 nt, Artificial Sequence
  HTT spacer sequence CTCN PAM
gaggccgugcuuguugccag

SEQ ID NO: 14033 - RNA, 20 nt, Artificial Sequence
  HTT spacer sequence CTCN PAM
gaggguggcuggggaaaccu

SEQ ID NO: 14034 - RNA, 20 nt, Artificial Sequence
  HTT spacer sequence CTCN PAM
gccacuagagggcagggcug

SEQ ID NO: 14035 - RNA, 20 nt, Artificial Sequence
  HTT spacer sequence CTCN PAM
aguggcagagucuggcaaca

SEQ ID NO: 14036 - RNA, 20 nt, Artificial Sequence
  HTT spacer sequence CTCN PAM
uggcaccucgcacccggccu

SEQ ID NO: 14037 - RNA, 20 nt, Artificial Sequence
  HTT spacer sequence CTCN PAM
cacccggccugcccugucac

SEQ ID NO: 14038 - RNA, 20 nt, Artificial Sequence
  HTT spacer sequence CTCN PAM
guguguugggugaauuccug

SEQ ID NO: 14039 - RNA, 20 nt, Artificial Sequence
  HTT spacer sequence CTCN PAM
cugcucuguguccuacacau

SEQ ID NO: 14040 - RNA, 20 nt, Artificial Sequence
  HTT spacer sequence CTCN PAM
guguccuacacauucggcuu

SEQ ID NO: 14041 - RNA, 20 nt, Artificial Sequence
  HTT spacer sequence CTCN PAM
ccccacaaccccauuuuaua

SEQ ID NO: 14042 - RNA, 20 nt, Artificial Sequence
  HTT spacer sequence CTCN PAM
ccacaaccccauuuuauaau

SEQ ID NO: 14043 - RNA, 20 nt, Artificial Sequence
  HTT spacer sequence CTCN PAM
uuuuucaggaaagcuuuauu

SEQ ID NO: 14044 - RNA, 20 nt, Artificial Sequence
  HTT spacer sequence CTCN PAM
uuuuuaauuagaaaauaagu

SEQ ID NO: 14045 - RNA, 20 nt, Artificial Sequence
  HTT spacer sequence CTCN PAM
gugaucauaagagaaaugaa

SEQ ID NO: 14046 - RNA, 20 nt, Artificial Sequence
  HTT spacer sequence CTCN PAM
uaugaucacagaggaucuaa

SEQ ID NO: 14047 - RNA, 20 nt, Artificial Sequence
  HTT spacer sequence CTCN PAM
caacacuugagcuucaucca

SEQ ID NO: 14048 - RNA, 20 nt, Artificial Sequence
  HTT spacer sequence CTCN PAM
aguguugggagacauccuuc

SEQ ID NO: 14049 - RNA, 20 nt, Artificial Sequence
  HTT spacer sequence CTCN PAM
uguucuuucagcugaguuuu

SEQ ID NO: 14050 - RNA, 20 nt, Artificial Sequence
  HTT spacer sequence CTCN PAM
gcugaaagaacaggaggaug

SEQ ID NO: 14051 - RNA, 20 nt, Artificial Sequence
  HTT spacer sequence CTCN PAM
ugaaggagagcuggaagaau

SEQ ID NO: 14052 - RNA, 20 nt, Artificial Sequence
  HTT spacer sequence CTCN PAM
uucaggagaaacagaagcaa

SEQ ID NO: 14053 - RNA, 20 nt, Artificial Sequence
  HTT spacer sequence CTCN PAM
ccuucaggagaaacagaagc

SEQ ID NO: 14054 - RNA, 20 nt, Artificial Sequence
  HTT spacer sequence CTCN PAM
aacaagcaagagacccgaag

SEQ ID NO: 14055 - RNA, 20 nt, Artificial Sequence
  HTT spacer sequence CTCN PAM
ugcuuguucgagucaggcac

SEQ ID NO: 14056 - RNA, 20 nt, Artificial Sequence
  HTT spacer sequence CTCN PAM
uggacugauucuucgggucu

SEQ ID NO: 14057 - RNA, 20 nt, Artificial Sequence
  HTT spacer sequence CTCN PAM
ggucacaaacaugcgaguga

SEQ ID NO: 14058 - RNA, 20 nt, Artificial Sequence
  HTT spacer sequence CTCN PAM
cauguuugugaccugaggca

SEQ ID NO: 14059 - RNA, 20 nt, Artificial Sequence
  HTT spacer sequence CTCN PAM
cagcaucacucgcauguuug

SEQ ID NO: 14060 - RNA, 20 nt, Artificial Sequence
  HTT spacer sequence CTCN PAM
cucacagcaucacucgcaug

SEQ ID NO: 14061 - RNA, 20 nt, Artificial Sequence
  HTT spacer sequence CTCN PAM
acagacucacucacagcauc

SEQ ID NO: 14062 - RNA, 20 nt, Artificial Sequence
  HTT spacer sequence CTCN PAM
cccuccacagacucacucac

SEQ ID NO: 14063 - RNA, 20 nt, Artificial Sequence
  HTT spacer sequence CTCN PAM
cuguucagaagcccucaccc

SEQ ID NO: 14064 - RNA, 20 nt, Artificial Sequence
  HTT spacer sequence CTCN PAM
cacaggacucccuguucaga

SEQ ID NO: 14065 - RNA, 20 nt, Artificial Sequence
  HTT spacer sequence CTCN PAM
aaaauaacacaaaugauggu

SEQ ID NO: 14066 - RNA, 20 nt, Artificial Sequence
  HTT spacer sequence CTCN PAM
uuucuuacuguggggugaag

SEQ ID NO: 14067 - RNA, 20 nt, Artificial Sequence
  HTT spacer sequence CTCN PAM
ucaccccacaguaagaaaug

SEQ ID NO: 14068 - RNA, 20 nt, Artificial Sequence
  HTT spacer sequence CTCN PAM
caauucaacucuucacccca

SEQ ID NO: 14069 - RNA, 20 nt, Artificial Sequence
  HTT spacer sequence CTCN PAM
ggaaaaaugccuuuucaauu

SEQ ID NO: 14070 - RNA, 20 nt, Artificial Sequence
  HTT spacer sequence CTCN PAM
aguacgccgaaaacaaaucu

SEQ ID NO: 14071 - RNA, 20 nt, Artificial Sequence
  HTT spacer sequence CTCN PAM
uuaaccuagcugcgggaaga

SEQ ID NO: 14072 - RNA, 20 nt, Artificial Sequence
  HTT spacer sequence CTCN PAM
uaccugcagucuuggcacag

SEQ ID NO: 14073 - RNA, 20 nt, Artificial Sequence
  HTT spacer sequence CTCN PAM
cugacgaggccuuguggguc

SEQ ID NO: 14074 - RNA, 20 nt, Artificial Sequence
  HTT spacer sequence CTCN PAM
ucagugagcuuucuccuacc

SEQ ID NO: 14075 - RNA, 20 nt, Artificial Sequence
  HTT spacer sequence CTCN PAM
gauagcugcaggacguucag

SEQ ID NO: 14076 - RNA, 20 nt, Artificial Sequence
  HTT spacer sequence CTCN PAM
acagauuacaggauucuuag

SEQ ID NO: 14077 - RNA, 20 nt, Artificial Sequence
  HTT spacer sequence CTCN PAM
uccuuuuugguaggucaguc

SEQ ID NO: 14078 - RNA, 20 nt, Artificial Sequence
  HTT spacer sequence CTCN PAM
aacccaggacugaccuacca

SEQ ID NO: 14079 - RNA, 20 nt, Artificial Sequence
  HTT spacer sequence CTCN PAM
ugggaggugaugauacacac

SEQ ID NO: 14080 - RNA, 20 nt, Artificial Sequence
  HTT spacer sequence CTCN PAM
caggagggucacuugggcuc

SEQ ID NO: 14081 - RNA, 20 nt, Artificial Sequence
  HTT spacer sequence CTCN PAM
acccaguguguaucaucacc

SEQ ID NO: 14082 - RNA, 20 nt, Artificial Sequence
  HTT spacer sequence CTCN PAM
uuacuaguuauuuuccucua

SEQ ID NO: 14083 - RNA, 20 nt, Artificial Sequence
  HTT spacer sequence CTCN PAM
aggcaaacugcccaacagcu

SEQ ID NO: 14084 - RNA, 20 nt, Artificial Sequence
  HTT spacer sequence CTCN PAM
aagcuauuuccuucguauuc

SEQ ID NO: 14085 - RNA, 20 nt, Artificial Sequence
  HTT spacer sequence CTCN PAM
gagaguaaaauaaaggaaua

SEQ ID NO: 14086 - RNA, 20 nt, Artificial Sequence
  HTT spacer sequence CTCN PAM
gaguugcccuauaugggucc

SEQ ID NO: 14087 - RNA, 20 nt, Artificial Sequence
  HTT spacer sequence CTCN PAM
cagaguugcccuauaugggu

SEQ ID NO: 14088 - RNA, 20 nt, Artificial Sequence
  HTT spacer sequence CTCN PAM
aacacauauuccuuuauuuu

SEQ ID NO: 14089 - RNA, 20 nt, Artificial Sequence
  HTT spacer sequence CTCN PAM
uauuagcugaaugauuugga

SEQ ID NO: 14090 - RNA, 20 nt, Artificial Sequence
  HTT spacer sequence CTCN PAM
cucauguuuuuucucuugag

SEQ ID NO: 14091 - RNA, 20 nt, Artificial Sequence
  HTT spacer sequence CTCN PAM
cauguuuuuucucuugagcu

SEQ ID NO: 14092 - RNA, 20 nt, Artificial Sequence
  HTT spacer sequence CTCN PAM
uguuuuuucucuugagcuuc

SEQ ID NO: 14093 - RNA, 20 nt, Artificial Sequence
  HTT spacer sequence CTCN PAM
ugagcuucgaaguuuucuug

SEQ ID NO: 14094 - RNA, 20 nt, Artificial Sequence
  HTT spacer sequence CTCN PAM
agagaaaaaacaugagagag

SEQ ID NO: 14095 - RNA, 20 nt, Artificial Sequence
  HTT spacer sequence CTCN PAM
uuaguauuaacaagaaaacu

SEQ ID NO: 14096 - RNA, 20 nt, Artificial Sequence
  HTT spacer sequence CTCN PAM
cuucgucauuccaaaacccc

SEQ ID NO: 14097 - RNA, 20 nt, Artificial Sequence
  HTT spacer sequence CTCN PAM
guaaaugguaguuucugcug

SEQ ID NO: 14098 - RNA, 20 nt, Artificial Sequence
  HTT spacer sequence CTCN PAM
uuggaaugggaguaggugcu

SEQ ID NO: 14099 - RNA, 20 nt, Artificial Sequence
  HTT spacer sequence CTCN PAM
cauuccaaagagaugguaau

SEQ ID NO: 14100 - RNA, 20 nt, Artificial Sequence
  HTT spacer sequence CTCN PAM
uuuguggucagaggcuguga

SEQ ID NO: 14101 - RNA, 20 nt, Artificial Sequence
  HTT spacer sequence CTCN PAM
gaccacaaaggagcaccuac

SEQ ID NO: 14102 - RNA, 20 nt, Artificial Sequence
  HTT spacer sequence CTCN PAM
cagccucugaccacaaagga

SEQ ID NO: 14103 - RNA, 20 nt, Artificial Sequence
  HTT spacer sequence CTCN PAM
cacagccucugaccacaaag

SEQ ID NO: 14104 - RNA, 20 nt, Artificial Sequence
  HTT spacer sequence CTCN PAM
acagcgccaguuugcccauc

SEQ ID NO: 14105 - RNA, 20 nt, Artificial Sequence
  HTT spacer sequence CTCN PAM
gugauaucucuggcugucag

SEQ ID NO: 14106 - RNA, 20 nt, Artificial Sequence
  HTT spacer sequence CTCN PAM
ggcugucagagcucagauga

SEQ ID NO: 14107 - RNA, 20 nt, Artificial Sequence
  HTT spacer sequence CTCN PAM
gacagccagagauaucacag

SEQ ID NO: 14108 - RNA, 20 nt, Artificial Sequence
  HTT spacer sequence CTCN PAM
gaugauagaugguauuuuug

SEQ ID NO: 14109 - RNA, 20 nt, Artificial Sequence
  HTT spacer sequence CTCN PAM
uaguucucaucauuuucaug

SEQ ID NO: 14110 - RNA, 20 nt, Artificial Sequence
  HTT spacer sequence CTCN PAM
ucauuuucaugauuucgauc

SEQ ID NO: 14111 - RNA, 20 nt, Artificial Sequence
  HTT spacer sequence CTCN PAM
aauggugaucgaaaucauga

SEQ ID NO: 14112 - RNA, 20 nt, Artificial Sequence
  HTT spacer sequence CTCN PAM
cugcucauuuaugguuauuc

SEQ ID NO: 14113 - RNA, 20 nt, Artificial Sequence
  HTT spacer sequence CTCN PAM
gcucauuuaugguuauucaa

SEQ ID NO: 14114 - RNA, 20 nt, Artificial Sequence
  HTT spacer sequence CTCN PAM
uuuaugguuauucaaauuua

SEQ ID NO: 14115 - RNA, 20 nt, Artificial Sequence
  HTT spacer sequence CTCN PAM
ugauaauaaauuugaauaac

SEQ ID NO: 14116 - RNA, 20 nt, Artificial Sequence
  HTT spacer sequence CTCN PAM
caaguagcuacaauuauagg

SEQ ID NO: 14117 - RNA, 20 nt, Artificial Sequence
  HTT spacer sequence CTCN PAM
gccucccaaguagcuacaau

SEQ ID NO: 14118 - RNA, 20 nt, Artificial Sequence
  HTT spacer sequence CTCN PAM
uaccucagccucccaaguag

SEQ ID NO: 14119 - RNA, 20 nt, Artificial Sequence
  HTT spacer sequence CTCN PAM
agcaauccuccuaccucagc

SEQ ID NO: 14120 - RNA, 20 nt, Artificial Sequence
  HTT spacer sequence CTCN PAM
uggccucaagcaauccuccu

SEQ ID NO: 14121 - RNA, 20 nt, Artificial Sequence
  HTT spacer sequence CTCN PAM
aacuccuggccucaagcaau

SEQ ID NO: 14122 - RNA, 20 nt, Artificial Sequence
  HTT spacer sequence CTCN PAM
cuaucuugcccaggcugguc

SEQ ID NO: 14123 - RNA, 20 nt, Artificial Sequence
  HTT spacer sequence CTCN PAM
aaaaaaacugaaaaaaaauu

SEQ ID NO: 14124 - RNA, 20 nt, Artificial Sequence
  HTT spacer sequence CTCN PAM
ggaggcugagacaggaggcu

SEQ ID NO: 14125 - RNA, 20 nt, Artificial Sequence
  HTT spacer sequence CTCN PAM
ugaguagcuaggaccacagg

SEQ ID NO: 14126 - RNA, 20 nt, Artificial Sequence
  HTT spacer sequence CTCN PAM
gccuccugaguagcuaggac

SEQ ID NO: 14127 - RNA, 20 nt, Artificial Sequence
  HTT spacer sequence CTCN PAM
ugucucagccuccugaguag

SEQ ID NO: 14128 - RNA, 20 nt, Artificial Sequence
  HTT spacer sequence CTCN PAM
guugagcccaggaguuggag

SEQ ID NO: 14129 - RNA, 20 nt, Artificial Sequence
  HTT spacer sequence CTCN PAM
accgagccuccugucucagc

SEQ ID NO: 14130 - RNA, 20 nt, Artificial Sequence
  HTT spacer sequence CTCN PAM
ugggcucaaccgagccuccu

SEQ ID NO: 14131 - RNA, 20 nt, Artificial Sequence
  HTT spacer sequence CTCN PAM
aacuccugggcucaaccgag

SEQ ID NO: 14132 - RNA, 20 nt, Artificial Sequence
  HTT spacer sequence CTCN PAM
aacuccaacuccugggcuca

SEQ ID NO: 14133 - RNA, 20 nt, Artificial Sequence
  HTT spacer sequence CTCN PAM
guguagccucgaacuccaac

SEQ ID NO: 14134 - RNA, 20 nt, Artificial Sequence
  HTT spacer sequence CTCN PAM
agcaugggugguaaaacaag

SEQ ID NO: 14135 - RNA, 20 nt, Artificial Sequence
  HTT spacer sequence CTCN PAM
uaauccuugugucucacagg

SEQ ID NO: 14136 - RNA, 20 nt, Artificial Sequence
  HTT spacer sequence CTCN PAM
caggcaaacauaacucuuag

SEQ ID NO: 14137 - RNA, 20 nt, Artificial Sequence
  HTT spacer sequence CTCN PAM
uaguauuucuuccaauauuu

SEQ ID NO: 14138 - RNA, 20 nt, Artificial Sequence
  HTT spacer sequence CTCN PAM
aagaaaaaaaaagaaagaaa

SEQ ID NO: 14139 - RNA, 20 nt, Artificial Sequence
  HTT spacer sequence CTCN PAM
aucucaaagaaaaaaaaaga

SEQ ID NO: 14140 - RNA, 20 nt, Artificial Sequence
  HTT spacer sequence CTCN PAM
uguugccaaggcuggagugc

SEQ ID NO: 14141 - RNA, 20 nt, Artificial Sequence
  HTT spacer sequence CTCN PAM
agccuuggcaacaagagcaa

SEQ ID NO: 14142 - RNA, 20 nt, Artificial Sequence
  HTT spacer sequence CTCN PAM
ccacaaccucugucucccgg

SEQ ID NO: 14143 - RNA, 20 nt, Artificial Sequence
  HTT spacer sequence CTCN PAM
gucucccggguucaagcgau

SEQ ID NO: 14144 - RNA, 20 nt, Artificial Sequence
  HTT spacer sequence CTCN PAM
cggguucaagcgauucuccu

SEQ ID NO: 14145 - RNA, 20 nt, Artificial Sequence
  HTT spacer sequence CTCN PAM
ugccucagccuccuaguagc

SEQ ID NO: 14146 - RNA, 20 nt, Artificial Sequence
  HTT spacer sequence CTCN PAM
gccuccuaguagcugggauu

SEQ ID NO: 14147 - RNA, 20 nt, Artificial Sequence
  HTT spacer sequence CTCN PAM
uaguagcugggauuacaggc

SEQ ID NO: 14148 - RNA, 20 nt, Artificial Sequence
  HTT spacer sequence CTCN PAM
gcuaauuuuguacuuuuagu

SEQ ID NO: 14149 - RNA, 20 nt, Artificial Sequence
  HTT spacer sequence CTCN PAM
acuaaaaguacaaaauuagc

SEQ ID NO: 14150 - RNA, 20 nt, Artificial Sequence
  HTT spacer sequence CTCN PAM
ggguuggucaggcuggucuc

SEQ ID NO: 14151 - RNA, 20 nt, Artificial Sequence
  HTT spacer sequence CTCN PAM
aacuccugaccucaggugau

SEQ ID NO: 14152 - RNA, 20 nt, Artificial Sequence
  HTT spacer sequence CTCN PAM
ugaccucaggugauccuccc

SEQ ID NO: 14153 - RNA, 20 nt, Artificial Sequence
  HTT spacer sequence CTCN PAM
ggugauccucccaccucagc

SEQ ID NO: 14154 - RNA, 20 nt, Artificial Sequence
  HTT spacer sequence CTCN PAM
caccucagccucccaaagug

SEQ ID NO: 14155 - RNA, 20 nt, Artificial Sequence
  HTT spacer sequence CTCN PAM
gccucccaaagugcugggau

SEQ ID NO: 14156 - RNA, 20 nt, Artificial Sequence
  HTT spacer sequence CTCN PAM
caaagugcugggauuacagg

SEQ ID NO: 14157 - RNA, 20 nt, Artificial Sequence
  HTT spacer sequence CTCN PAM
cgccuguaaucccagcacuu

SEQ ID NO: 14158 - RNA, 20 nt, Artificial Sequence
  HTT spacer sequence CTCN PAM
ucaaauaagaaacacaauca

SEQ ID NO: 14159 - RNA, 20 nt, Artificial Sequence
  HTT spacer sequence CTCN PAM
ggguugaaacuggagagagg

SEQ ID NO: 14160 - RNA, 20 nt, Artificial Sequence
  HTT spacer sequence CTCN PAM
aguuucaacccagagcaaaa

SEQ ID NO: 14161 - RNA, 20 nt, Artificial Sequence
  HTT spacer sequence CTCN PAM
ccaguuucaacccagagcaa

SEQ ID NO: 14162 - RNA, 20 nt, Artificial Sequence
  HTT spacer sequence CTCN PAM
cuccaguuucaacccagagc

SEQ ID NO: 14163 - RNA, 20 nt, Artificial Sequence
  HTT spacer sequence CTCN PAM
ccagguccucucuccaguuu

SEQ ID NO: 14164 - RNA, 20 nt, Artificial Sequence
  HTT spacer sequence CTCN PAM
uccccagguccucucuccag

SEQ ID NO: 14165 - RNA, 20 nt, Artificial Sequence
  HTT spacer sequence CTCN PAM
uccuccccagguccucucuc

SEQ ID NO: 14166 - RNA, 20 nt, Artificial Sequence
  HTT spacer sequence CTCN PAM
uccuccuccccagguccucu

SEQ ID NO: 14167 - RNA, 20 nt, Artificial Sequence
  HTT spacer sequence CTCN PAM
gcacccggggaucugcugau

SEQ ID NO: 14168 - RNA, 20 nt, Artificial Sequence
  HTT spacer sequence CTCN PAM
uaggccaggccccuaucgaa

SEQ ID NO: 14169 - RNA, 20 nt, Artificial Sequence
  HTT spacer sequence CTCN PAM
augauuagaccuugcaggug

SEQ ID NO: 14170 - RNA, 20 nt, Artificial Sequence
  HTT spacer sequence CTCN PAM
aagaugccuuccuaaggaug

SEQ ID NO: 14171 - RNA, 20 nt, Artificial Sequence
  HTT spacer sequence CTCN PAM
accuccaagaugccuuccua

SEQ ID NO: 14172 - RNA, 20 nt, Artificial Sequence
  HTT spacer sequence CTCN PAM
uccaccuccaagaugccuuc

SEQ ID NO: 14173 - RNA, 20 nt, Artificial Sequence
  HTT spacer sequence CTCN PAM
gacccugguuccuuucagag

SEQ ID NO: 14174 - RNA, 20 nt, Artificial Sequence
  HTT spacer sequence CTCN PAM
gaaaggaaccagggucugag

SEQ ID NO: 14175 - RNA, 20 nt, Artificial Sequence
  HTT spacer sequence CTCN PAM
uugcuggcuugugccuugau

SEQ ID NO: 14176 - RNA, 20 nt, Artificial Sequence
  HTT spacer sequence CTCN PAM
aggaaaacaaaaaguuguac

SEQ ID NO: 14177 - RNA, 20 nt, Artificial Sequence
  HTT spacer sequence CTCN PAM
aagaaaacagaugugaagau

SEQ ID NO: 14178 - RNA, 20 nt, Artificial Sequence
  HTT spacer sequence CTCN PAM
auaucgcuugcuuauuauuc

SEQ ID NO: 14179 - RNA, 20 nt, Artificial Sequence
  HTT spacer sequence CTCN PAM
caccuuccaacuucuuugua

SEQ ID NO: 14180 - RNA, 20 nt, Artificial Sequence
  HTT spacer sequence CTCN PAM
aguuggaugaccacacuggg

SEQ ID NO: 14181 - RNA, 20 nt, Artificial Sequence
  HTT spacer sequence CTCN PAM
cugccccagucugggcaggu

SEQ ID NO: 14182 - RNA, 20 nt, Artificial Sequence
  HTT spacer sequence CTCN PAM
gccccagucugggcagguug

SEQ ID NO: 14183 - RNA, 20 nt, Artificial Sequence
  HTT spacer sequence CTCN PAM
uugccauuagccuggaauuu

SEQ ID NO: 14184 - RNA, 20 nt, Artificial Sequence
  HTT spacer sequence CTCN PAM
cguuggaugcccaguuccua

SEQ ID NO: 14185 - RNA, 20 nt, Artificial Sequence
  HTT spacer sequence CTCN PAM
ggaagcuacuagacgauaga

SEQ ID NO: 14186 - RNA, 20 nt, Artificial Sequence
  HTT spacer sequence CTCN PAM
caggaagcuacuagacgaua

SEQ ID NO: 14187 - RNA, 20 nt, Artificial Sequence
  HTT spacer sequence CTCN PAM
cauucaucuucucucaggaa

SEQ ID NO: 14188 - RNA, 20 nt, Artificial Sequence
  HTT spacer sequence CTCN PAM
uacaauuucccucccauuca

SEQ ID NO: 14189 - RNA, 20 nt, Artificial Sequence
  HTT spacer sequence CTCN PAM
gaaaugcaaagucuuugccc

SEQ ID NO: 14190 - RNA, 20 nt, Artificial Sequence
  HTT spacer sequence CTCN PAM
aacgugacccgauuccuuaa

SEQ ID NO: 14191 - RNA, 20 nt, Artificial Sequence
  HTT spacer sequence CTCN PAM
ccaaaaauggaaagcuucca

SEQ ID NO: 14192 - RNA, 20 nt, Artificial Sequence
  HTT spacer sequence CTCN PAM
gagaaguucuugccuuuuau

SEQ ID NO: 14193 - RNA, 20 nt, Artificial Sequence
  HTT spacer sequence CTCN PAM
gagaaauguuaagaaaauuu

SEQ ID NO: 14194 - RNA, 20 nt, Artificial Sequence
  HTT spacer sequence CTCN PAM
ccugaaauugguuaguugga

SEQ ID NO: 14195 - RNA, 20 nt, Artificial Sequence
  HTT spacer sequence CTCN PAM
ugaaauugguuaguuggaug

SEQ ID NO: 14196 - RNA, 20 nt, Artificial Sequence
  HTT spacer sequence CTCN PAM
uagauugacucacaucuuac

SEQ ID NO: 14197 - RNA, 20 nt, Artificial Sequence
  HTT spacer sequence CTCN PAM
caucuuaccuuuuucuuuuc

SEQ ID NO: 14198 - RNA, 20 nt, Artificial Sequence
  HTT spacer sequence CTCN PAM
aacucuucuauucauuguua

SEQ ID NO: 14199 - RNA, 20 nt, Artificial Sequence
  HTT spacer sequence CTCN PAM
ucuauucauuguuauguuuu

SEQ ID NO: 14200 - RNA, 20 nt, Artificial Sequence
  HTT spacer sequence CTCN PAM
ugauggggucuugcccuguu

SEQ ID NO: 14201 - RNA, 20 nt, Artificial Sequence
  HTT spacer sequence CTCN PAM
cugcagccucaaauuccugg

SEQ ID NO: 14202 - RNA, 20 nt, Artificial Sequence
  HTT spacer sequence CTCN PAM
aauuccugggcucaagcagc

SEQ ID NO: 14203 - RNA, 20 nt, Artificial Sequence
  HTT spacer sequence CTCN PAM
agcagcuguucugccucacc

SEQ ID NO: 14204 - RNA, 20 nt, Artificial Sequence
  HTT spacer sequence CTCN PAM
cccucccaaguaguugggac

SEQ ID NO: 14205 - RNA, 20 nt, Artificial Sequence
  HTT spacer sequence CTCN PAM
caaguaguugggacuacagg

SEQ ID NO: 14206 - RNA, 20 nt, Artificial Sequence
  HTT spacer sequence CTCN PAM
aaaaaaaaaaaaaaaaagua

SEQ ID NO: 14207 - RNA, 20 nt, Artificial Sequence
  HTT spacer sequence CTCN PAM
aucucaaaaaaaaaaaaaaa

SEQ ID NO: 14208 - RNA, 20 nt, Artificial Sequence
  HTT spacer sequence CTCN PAM
gucgcccaggcuagagugcg

SEQ ID NO: 14209 - RNA, 20 nt, Artificial Sequence
  HTT spacer sequence CTCN PAM
agccugggcgacagaguagg

SEQ ID NO: 14210 - RNA, 20 nt, Artificial Sequence
  HTT spacer sequence CTCN PAM
cuuaagccucugccucccag

SEQ ID NO: 14211 - RNA, 20 nt, Artificial Sequence
  HTT spacer sequence CTCN PAM
gccucccagguucaagcagu

SEQ ID NO: 14212 - RNA, 20 nt, Artificial Sequence
  HTT spacer sequence CTCN PAM
cagguucaagcaguucuccu

SEQ ID NO: 14213 - RNA, 20 nt, Artificial Sequence
  HTT spacer sequence CTCN PAM
ugccucagccucucaaguag

SEQ ID NO: 14214 - RNA, 20 nt, Artificial Sequence
  HTT spacer sequence CTCN PAM
gccucucaaguagcugggau

SEQ ID NO: 14215 - RNA, 20 nt, Artificial Sequence
  HTT spacer sequence CTCN PAM
caaguagcugggauuacagg

SEQ ID NO: 14216 - RNA, 20 nt, Artificial Sequence
  HTT spacer sequence CTCN PAM
aguagcugggauuacaggug

SEQ ID NO: 14217 - RNA, 20 nt, Artificial Sequence
  HTT spacer sequence CTCN PAM
acuaaaaauacaaaaauuag

SEQ ID NO: 14218 - RNA, 20 nt, Artificial Sequence
  HTT spacer sequence CTCN PAM
ggcucuacuaaaaauacaaa

SEQ ID NO: 14219 - RNA, 20 nt, Artificial Sequence
  HTT spacer sequence CTCN PAM
aacgccugaccucaggugau

SEQ ID NO: 14220 - RNA, 20 nt, Artificial Sequence
  HTT spacer sequence CTCN PAM
ggugauccgccugccuuggc

SEQ ID NO: 14221 - RNA, 20 nt, Artificial Sequence
  HTT spacer sequence CTCN PAM
gaaagugccgggauuacagg

SEQ ID NO: 14222 - RNA, 20 nt, Artificial Sequence
  HTT spacer sequence CTCN PAM
cgccuguaaucccggcacuu

SEQ ID NO: 14223 - RNA, 20 nt, Artificial Sequence
  HTT spacer sequence CTCN PAM
ugagucagcuaguaucccug

SEQ ID NO: 14224 - RNA, 20 nt, Artificial Sequence
  HTT spacer sequence CTCN PAM
agaggaaaagacuuauagau

SEQ ID NO: 14225 - RNA, 20 nt, Artificial Sequence
  HTT spacer sequence CTCN PAM
uuuuccugcuuggaggcuau

SEQ ID NO: 14226 - RNA, 20 nt, Artificial Sequence
  HTT spacer sequence CTCN PAM
aagcaggaaaaugaguaauu

SEQ ID NO: 14227 - RNA, 20 nt, Artificial Sequence
  HTT spacer sequence CTCN PAM
cuuccaguccccgguugcag

SEQ ID NO: 14228 - RNA, 20 nt, Artificial Sequence
  HTT spacer sequence CTCN PAM
uacuuuuuguuuucugugug

SEQ ID NO: 14229 - RNA, 20 nt, Artificial Sequence
  HTT spacer sequence CTCN PAM
cgucuguccucagccuaugu

SEQ ID NO: 14230 - RNA, 20 nt, Artificial Sequence
  HTT spacer sequence CTCN PAM
gccuauguaaacaccucuug

SEQ ID NO: 14231 - RNA, 20 nt, Artificial Sequence
  HTT spacer sequence CTCN PAM
ugagauuaucccucucaauc

SEQ ID NO: 14232 - RNA, 20 nt, Artificial Sequence
  HTT spacer sequence CTCN PAM
agagguguuuacauaggcug

SEQ ID NO: 14233 - RNA, 20 nt, Artificial Sequence
  HTT spacer sequence CTCN PAM
caaucuuugccggagguggg

SEQ ID NO: 14234 - RNA, 20 nt, Artificial Sequence
  HTT spacer sequence CTCN PAM
aucuuugccggagguggggg

SEQ ID NO: 14235 - RNA, 20 nt, Artificial Sequence
  HTT spacer sequence CTCN PAM
ggcaaagauugagagggaua

SEQ ID NO: 14236 - RNA, 20 nt, Artificial Sequence
  HTT spacer sequence CTCN PAM
cccaccuccggcaaagauug

SEQ ID NO: 14237 - RNA, 20 nt, Artificial Sequence
  HTT spacer sequence CTCN PAM
aauccaaggcagcccaggaa

SEQ ID NO: 14238 - RNA, 20 nt, Artificial Sequence
  HTT spacer sequence CTCN PAM
ggugagugggugggaauuug

SEQ ID NO: 14239 - RNA, 20 nt, Artificial Sequence
  HTT spacer sequence CTCN PAM
ccugaggucuucccuccaau

SEQ ID NO: 14240 - RNA, 20 nt, Artificial Sequence
  HTT spacer sequence CTCN PAM
uugggcaaauucccacccac

SEQ ID NO: 14241 - RNA, 20 nt, Artificial Sequence
  HTT spacer sequence CTCN PAM
uggcuccuugggcaaauucc

SEQ ID NO: 14242 - RNA, 20 nt, Artificial Sequence
  HTT spacer sequence CTCN PAM
ccaucccuccacuuucagau

SEQ ID NO: 14243 - RNA, 20 nt, Artificial Sequence
  HTT spacer sequence CTCN PAM
aucccuccacuuucagaugu

SEQ ID NO: 14244 - RNA, 20 nt, Artificial Sequence
  HTT spacer sequence CTCN PAM
acuuucagauguauguggcg

SEQ ID NO: 14245 - RNA, 20 nt, Artificial Sequence
  HTT spacer sequence CTCN PAM
aaagcccgagcucuucuugg

SEQ ID NO: 14246 - RNA, 20 nt, Artificial Sequence
  HTT spacer sequence CTCN PAM
ggcuuuggaggcgccacaua

SEQ ID NO: 14247 - RNA, 20 nt, Artificial Sequence
  HTT spacer sequence CTCN PAM
ucuuggcgucuguggcuuca

SEQ ID NO: 14248 - RNA, 20 nt, Artificial Sequence
  HTT spacer sequence CTCN PAM
uacccuccccuguccccagc

SEQ ID NO: 14249 - RNA, 20 nt, Artificial Sequence
  HTT spacer sequence CTCN PAM
ccuguccccagcaaagcuug

SEQ ID NO: 14250 - RNA, 20 nt, Artificial Sequence
  HTT spacer sequence CTCN PAM
uguuacuuuuuagcuuccga

SEQ ID NO: 14251 - RNA, 20 nt, Artificial Sequence
  HTT spacer sequence CTCN PAM
gcuacccagaaaccccacaa

SEQ ID NO: 14252 - RNA, 20 nt, Artificial Sequence
  HTT spacer sequence CTCN PAM
cacccucugguuuauucuua

SEQ ID NO: 14253 - RNA, 20 nt, Artificial Sequence
  HTT spacer sequence CTCN PAM
gguuuauucuuauucucaaa

SEQ ID NO: 14254 - RNA, 20 nt, Artificial Sequence
  HTT spacer sequence CTCN PAM
aaauuaccugccaaacacug

SEQ ID NO: 14255 - RNA, 20 nt, Artificial Sequence
  HTT spacer sequence CTCN PAM
cuuguuuuuccuuuuccuga

SEQ ID NO: 14256 - RNA, 20 nt, Artificial Sequence
  HTT spacer sequence CTCN PAM
gaagccucuccccuauuccc

SEQ ID NO: 14257 - RNA, 20 nt, Artificial Sequence
  HTT spacer sequence CTCN PAM
ccccuauucccccgucacug

SEQ ID NO: 14258 - RNA, 20 nt, Artificial Sequence
  HTT spacer sequence CTCN PAM
ccuauucccccgucacugcu

SEQ ID NO: 14259 - RNA, 20 nt, Artificial Sequence
  HTT spacer sequence CTCN PAM
ugccuuccuccccaagguca

SEQ ID NO: 14260 - RNA, 20 nt, Artificial Sequence
  HTT spacer sequence CTCN PAM
ccaaggucaugacugcuggc

SEQ ID NO: 14261 - RNA, 20 nt, Artificial Sequence
  HTT spacer sequence CTCN PAM
ggaauuagaagccagcaguc

SEQ ID NO: 14262 - RNA, 20 nt, Artificial Sequence
  HTT spacer sequence CTCN PAM
ugaacuuaaugucgaccaaa

SEQ ID NO: 14263 - RNA, 20 nt, Artificial Sequence
  HTT spacer sequence CTCN PAM
caugaacuuaaugucgacca

SEQ ID NO: 14264 - RNA, 20 nt, Artificial Sequence
  HTT spacer sequence CTCN PAM
uaaaacuacaggaauacuaa

SEQ ID NO: 14265 - RNA, 20 nt, Artificial Sequence
  HTT spacer sequence CTCN PAM
caauagccaagaacuagaaa

SEQ ID NO: 14266 - RNA, 20 nt, Artificial Sequence
  HTT spacer sequence CTCN PAM
uaggugugucuuuuggagua

SEQ ID NO: 14267 - RNA, 20 nt, Artificial Sequence
  HTT spacer sequence CTCN PAM
aaaagacacaccuaagagug

SEQ ID NO: 14268 - RNA, 20 nt, Artificial Sequence
  HTT spacer sequence CTCN PAM
agcugugcaagauggaaacc

SEQ ID NO: 14269 - RNA, 20 nt, Artificial Sequence
  HTT spacer sequence CTCN PAM
accucuagcugugcaagaug

SEQ ID NO: 14270 - RNA, 20 nt, Artificial Sequence
  HTT spacer sequence CTCN PAM
gcugcaguagaaacugccaa

SEQ ID NO: 14271 - RNA, 20 nt, Artificial Sequence
  HTT spacer sequence CTCN PAM
aggaaagcuauuuggcaguu

SEQ ID NO: 14272 - RNA, 20 nt, Artificial Sequence
  HTT spacer sequence CTCN PAM
cccuuuugccacuguguaug

SEQ ID NO: 14273 - RNA, 20 nt, Artificial Sequence
  HTT spacer sequence CTCN PAM
uggaauccccauacacagug

SEQ ID NO: 14274 - RNA, 20 nt, Artificial Sequence
  HTT spacer sequence CTCN PAM
gguccucgcuagcacuugga

SEQ ID NO: 14275 - RNA, 20 nt, Artificial Sequence
  HTT spacer sequence CTCN PAM
cuagcacuuggaauugcuga

SEQ ID NO: 14276 - RNA, 20 nt, Artificial Sequence
  HTT spacer sequence CTCN PAM
uagccuuccugauggguguu

SEQ ID NO: 14277 - RNA, 20 nt, Artificial Sequence
  HTT spacer sequence CTCN PAM
gaaguuuaaugauucaugca

SEQ ID NO: 14278 - RNA, 20 nt, Artificial Sequence
  HTT spacer sequence CTCN PAM
ucccuuuugaaguacucuua

SEQ ID NO: 14279 - RNA, 20 nt, Artificial Sequence
  HTT spacer sequence CTCN PAM
uacagguauguugugcaugu

SEQ ID NO: 14280 - RNA, 20 nt, Artificial Sequence
  HTT spacer sequence CTCN PAM
ucuguguuugaacaguugua

SEQ ID NO: 14281 - RNA, 20 nt, Artificial Sequence
  HTT spacer sequence CTCN PAM
guguuugaacaguuguagcg

SEQ ID NO: 14282 - RNA, 20 nt, Artificial Sequence
  HTT spacer sequence CTCN PAM
uguuagcuggcuuggagaag

SEQ ID NO: 14283 - RNA, 20 nt, Artificial Sequence
  HTT spacer sequence CTCN PAM
aagccagcuaacaggaggcc

SEQ ID NO: 14284 - RNA, 20 nt, Artificial Sequence
  HTT spacer sequence CTCN PAM
acaaucccaagaaucccuuc

SEQ ID NO: 14285 - RNA, 20 nt, Artificial Sequence
  HTT spacer sequence CTCN PAM
ggucuaaucucuacaauccc

SEQ ID NO: 14286 - RNA, 20 nt, Artificial Sequence
  HTT spacer sequence CTCN PAM
ucaggucuaaucucuacaau

SEQ ID NO: 14287 - RNA, 20 nt, Artificial Sequence
  HTT spacer sequence CTCN PAM
aaggggccuccucaggucua

SEQ ID NO: 14288 - RNA, 20 nt, Artificial Sequence
  HTT spacer sequence CTCN PAM
cugacuaaauuuuauucuuu

SEQ ID NO: 14289 - RNA, 20 nt, Artificial Sequence
  HTT spacer sequence CTCN PAM
gacuaaauuuuauucuuuau

SEQ ID NO: 14290 - RNA, 20 nt, Artificial Sequence
  HTT spacer sequence CTCN PAM
ccgugugcugacucaucaua

SEQ ID NO: 14291 - RNA, 20 nt, Artificial Sequence
  HTT spacer sequence CTCN PAM
ucauaauaaugaguagcucu

SEQ ID NO: 14292 - RNA, 20 nt, Artificial Sequence
  HTT spacer sequence CTCN PAM
uuauuaugaugagucagcac

SEQ ID NO: 14293 - RNA, 20 nt, Artificial Sequence
  HTT spacer sequence CTCN PAM
cauugugcuugucuauuugg

SEQ ID NO: 14294 - RNA, 20 nt, Artificial Sequence
  HTT spacer sequence CTCN PAM
uugugcuugucuauuuggac

SEQ ID NO: 14295 - RNA, 20 nt, Artificial Sequence
  HTT spacer sequence CTCN PAM
uacaaugauuuuuuuuuuuu

SEQ ID NO: 14296 - RNA, 20 nt, Artificial Sequence
  HTT spacer sequence CTCN PAM
aagaaaaaaaaaaaaucauu

SEQ ID NO: 14297 - RNA, 20 nt, Artificial Sequence
  HTT spacer sequence CTCN PAM
gucucaaagaaaaaaaaaaa

SEQ ID NO: 14298 - RNA, 20 nt, Artificial Sequence
  HTT spacer sequence CTCN PAM
guugccuaggcuggagugca

SEQ ID NO: 14299 - RNA, 20 nt, Artificial Sequence
  HTT spacer sequence CTCN PAM
agccuaggcaacagagcaag

SEQ ID NO: 14300 - RNA, 20 nt, Artificial Sequence
  HTT spacer sequence CTCN PAM
gcucacugcagccuccaccu

SEQ ID NO: 14301 - RNA, 20 nt, Artificial Sequence
  HTT spacer sequence CTCN PAM
cugcagccuccaccucccag

SEQ ID NO: 14302 - RNA, 20 nt, Artificial Sequence
  HTT spacer sequence CTCN PAM
accucccagguucaagugau

SEQ ID NO: 14303 - RNA, 20 nt, Artificial Sequence
  HTT spacer sequence CTCN PAM
cagguucaagugauucuugu

SEQ ID NO: 14304 - RNA, 20 nt, Artificial Sequence
  HTT spacer sequence CTCN PAM
gcuucucaaguagcugagac

SEQ ID NO: 14305 - RNA, 20 nt, Artificial Sequence
  HTT spacer sequence CTCN PAM
aguagcugagacugcaggug

SEQ ID NO: 14306 - RNA, 20 nt, Artificial Sequence
  HTT spacer sequence CTCN PAM
gcuacuugagaagcugaggc

SEQ ID NO: 14307 - RNA, 20 nt, Artificial Sequence
  HTT spacer sequence CTCN PAM
acuaaaaauacaaacauuag

SEQ ID NO: 14308 - RNA, 20 nt, Artificial Sequence
  HTT spacer sequence CTCN PAM
aacuccugaccucaagugau

SEQ ID NO: 14309 - RNA, 20 nt, Artificial Sequence
  HTT spacer sequence CTCN PAM
ugaccucaagugaucugccu

SEQ ID NO: 14310 - RNA, 20 nt, Artificial Sequence
  HTT spacer sequence CTCN PAM
agugaucugccuucuucagc

SEQ ID NO: 14311 - RNA, 20 nt, Artificial Sequence
  HTT spacer sequence CTCN PAM
caaagugcugggauuacagg

SEQ ID NO: 14312 - RNA, 20 nt, Artificial Sequence
  HTT spacer sequence CTCN PAM
caccuguaaucccagcacuu

SEQ ID NO: 14313 - RNA, 20 nt, Artificial Sequence
  HTT spacer sequence CTCN PAM
guggcucacaccuguaaucc

SEQ ID NO: 14314 - RNA, 20 nt, Artificial Sequence
  HTT spacer sequence CTCN PAM
gacaaacuuuuuuagcugca

SEQ ID NO: 14315 - RNA, 20 nt, Artificial Sequence
  HTT spacer sequence CTCN PAM
agguguuuucucagggagaa

SEQ ID NO: 14316 - RNA, 20 nt, Artificial Sequence
  HTT spacer sequence CTCN PAM
gggagaaauuggaggcagua

SEQ ID NO: 14317 - RNA, 20 nt, Artificial Sequence
  HTT spacer sequence CTCN PAM
cugagaaaacaccuggagaa

SEQ ID NO: 14318 - RNA, 20 nt, Artificial Sequence
  HTT spacer sequence CTCN PAM
aauuucucccugagaaaaca

SEQ ID NO: 14319 - RNA, 20 nt, Artificial Sequence
  HTT spacer sequence CTCN PAM
cccaguggcuuacugccucc

SEQ ID NO: 14320 - RNA, 20 nt, Artificial Sequence
  HTT spacer sequence CTCN PAM
uugucagggaguccuguggc

SEQ ID NO: 14321 - RNA, 20 nt, Artificial Sequence
  HTT spacer sequence CTCN PAM
cugacaaggagccacaggac

SEQ ID NO: 14322 - RNA, 20 nt, Artificial Sequence
  HTT spacer sequence CTCN PAM
uugccagccacaggacuccc

SEQ ID NO: 14323 - RNA, 20 nt, Artificial Sequence
  HTT spacer sequence CTCN PAM
ccuugccagccacaggacuc

SEQ ID NO: 14324 - RNA, 20 nt, Artificial Sequence
  HTT spacer sequence CTCN PAM
caacccagccacaggacuuc

SEQ ID NO: 14325 - RNA, 20 nt, Artificial Sequence
  HTT spacer sequence CTCN PAM
cucccaacccagccacagga

SEQ ID NO: 14326 - RNA, 20 nt, Artificial Sequence
  HTT spacer sequence CTCN PAM
uccugugccuaacagugucc

SEQ ID NO: 14327 - RNA, 20 nt, Artificial Sequence
  HTT spacer sequence CTCN PAM
ggacacuguuaggcacagga

SEQ ID NO: 14328 - RNA, 20 nt, Artificial Sequence
  HTT spacer sequence CTCN PAM
gcaccucuggacacuguuag

SEQ ID NO: 14329 - RNA, 20 nt, Artificial Sequence
  HTT spacer sequence CTCN PAM
gucggggagacccuaaccca

SEQ ID NO: 14330 - RNA, 20 nt, Artificial Sequence
  HTT spacer sequence CTCN PAM
ccgacugagcuggucucggc

SEQ ID NO: 14331 - RNA, 20 nt, Artificial Sequence
  HTT spacer sequence CTCN PAM
agcgcugcuggguuaggguc

SEQ ID NO: 14332 - RNA, 20 nt, Artificial Sequence
  HTT spacer sequence CTCN PAM
auauuucugugugugugucu

SEQ ID NO: 14333 - RNA, 20 nt, Artificial Sequence
  HTT spacer sequence CTCN PAM
cagccuuuagagcugagagc

SEQ ID NO: 14334 - RNA, 20 nt, Artificial Sequence
  HTT spacer sequence CTCN PAM
aaaggcugugagaccccuga

SEQ ID NO: 14335 - RNA, 20 nt, Artificial Sequence
  HTT spacer sequence CTCN PAM
gcucuaaaggcugugagacc

SEQ ID NO: 14336 - RNA, 20 nt, Artificial Sequence
  HTT spacer sequence CTCN PAM
cagcucuaaaggcugugaga

SEQ ID NO: 14337 - RNA, 20 nt, Artificial Sequence
  HTT spacer sequence CTCN PAM
guucagggcucucagcucua

SEQ ID NO: 14338 - RNA, 20 nt, Artificial Sequence
  HTT spacer sequence CTCN PAM
uuucccauaagggauacuuu

SEQ ID NO: 14339 - RNA, 20 nt, Artificial Sequence
  HTT spacer sequence CTCN PAM
ucuuuuaauucggcccaucc

SEQ ID NO: 14340 - RNA, 20 nt, Artificial Sequence
  HTT spacer sequence CTCN PAM
ugcugcgguuaacuagccca

SEQ ID NO: 14341 - RNA, 20 nt, Artificial Sequence
  HTT spacer sequence CTCN PAM
ugcuauuguuuguggcuuaa

SEQ ID NO: 14342 - RNA, 20 nt, Artificial Sequence
  HTT spacer sequence CTCN PAM
uuccugucaacccacaaccu

SEQ ID NO: 14343 - RNA, 20 nt, Artificial Sequence
  HTT spacer sequence CTCN PAM
gaagcacuguaacauguuca

SEQ ID NO: 14344 - RNA, 20 nt, Artificial Sequence
  HTT spacer sequence CTCN PAM
caauacagaggucucgugua

SEQ ID NO: 14345 - RNA, 20 nt, Artificial Sequence
  HTT spacer sequence CTCN PAM
guauugggagcaggcccccc

SEQ ID NO: 14346 - RNA, 20 nt, Artificial Sequence
  HTT spacer sequence CTCN PAM
uguaaauucccugggaggcg

SEQ ID NO: 14347 - RNA, 20 nt, Artificial Sequence
  HTT spacer sequence CTCN PAM
cagggaauuuacacgagacc

SEQ ID NO: 14348 - RNA, 20 nt, Artificial Sequence
  HTT spacer sequence CTCN PAM
gagaaacagacuaugcuaac

SEQ ID NO: 14349 - RNA, 20 nt, Artificial Sequence
  HTT spacer sequence CTCN PAM
gaggcuuaucgccucccagg

SEQ ID NO: 14350 - RNA, 20 nt, Artificial Sequence
  HTT spacer sequence CTCN PAM
uucauggcgugguuagcaua

SEQ ID NO: 14351 - RNA, 20 nt, Artificial Sequence
  HTT spacer sequence CTCN PAM
gacagaguccccgacucaua

SEQ ID NO: 14352 - RNA, 20 nt, Artificial Sequence
  HTT spacer sequence CTCN PAM
gucagagcuacgccugggca

SEQ ID NO: 14353 - RNA, 20 nt, Artificial Sequence
  HTT spacer sequence CTCN PAM
uagugcuugcucagugcaug

SEQ ID NO: 14354 - RNA, 20 nt, Artificial Sequence
  HTT spacer sequence CTCN PAM
gugcaugcugaacaaugauu

SEQ ID NO: 14355 - RNA, 20 nt, Artificial Sequence
  HTT spacer sequence CTCN PAM
gagcauaguuuugaauaaug

SEQ ID NO: 14356 - RNA, 20 nt, Artificial Sequence
  HTT spacer sequence CTCN PAM
gagccaugacuugauuccaa

SEQ ID NO: 14357 - RNA, 20 nt, Artificial Sequence
  HTT spacer sequence CTCN PAM
aaugauggccauuuaaaucu

SEQ ID NO: 14358 - RNA, 20 nt, Artificial Sequence
  HTT spacer sequence CTCN PAM
uuuggauuguccuagaggcc

SEQ ID NO: 14359 - RNA, 20 nt, Artificial Sequence
  HTT spacer sequence CTCN PAM
aggacaauccaaaggagaaa

SEQ ID NO: 14360 - RNA, 20 nt, Artificial Sequence
  HTT spacer sequence CTCN PAM
ugggccucuaggacaaucca

SEQ ID NO: 14361 - RNA, 20 nt, Artificial Sequence
  HTT spacer sequence CTCN PAM
uaagaaauuagggaauacuu

SEQ ID NO: 14362 - RNA, 20 nt, Artificial Sequence
  HTT spacer sequence CTCN PAM
ggacuggaacaucuucgauc

SEQ ID NO: 14363 - RNA, 20 nt, Artificial Sequence
  HTT spacer sequence CTCN PAM
uaggguggggcauuuacugc

SEQ ID NO: 14364 - RNA, 20 nt, Artificial Sequence
  HTT spacer sequence CTCN PAM
uuucuccuuaacuuugucau

SEQ ID NO: 14365 - RNA, 20 nt, Artificial Sequence
  HTT spacer sequence CTCN PAM
uuaacuuugucauuuguuga

SEQ ID NO: 14366 - RNA, 20 nt, Artificial Sequence
  HTT spacer sequence CTCN PAM
gcccacaguauuuggggaca

SEQ ID NO: 14367 - RNA, 20 nt, Artificial Sequence
  HTT spacer sequence CTCN PAM
auucuagauacacucugccc

SEQ ID NO: 14368 - RNA, 20 nt, Artificial Sequence
  HTT spacer sequence CTCN PAM
accauugcggagaggacaug

SEQ ID NO: 14369 - RNA, 20 nt, Artificial Sequence
  HTT spacer sequence CTCN PAM
gcaaugguggaggccucaau

SEQ ID NO: 14370 - RNA, 20 nt, Artificial Sequence
  HTT spacer sequence CTCN PAM
ccgcaaugguggaggccuca

SEQ ID NO: 14371 - RNA, 20 nt, Artificial Sequence
  HTT spacer sequence CTCN PAM
gcauccauguccucuccgca

SEQ ID NO: 14372 - RNA, 20 nt, Artificial Sequence
  HTT spacer sequence CTCN PAM
ggggacugcucagcauccau

SEQ ID NO: 14373 - RNA, 20 nt, Artificial Sequence
  HTT spacer sequence CTCN PAM
ugagugucccaaauuugggg

SEQ ID NO: 14374 - RNA, 20 nt, Artificial Sequence
  HTT spacer sequence CTCN PAM
agagcaguuuacagacaugu

SEQ ID NO: 14375 - RNA, 20 nt, Artificial Sequence
  HTT spacer sequence CTCN PAM
aacuguuuauacuuugcaag

SEQ ID NO: 14376 - RNA, 20 nt, Artificial Sequence
  HTT spacer sequence CTCN PAM
uaugaagcuuaucauguauu

SEQ ID NO: 14377 - RNA, 20 nt, Artificial Sequence
  HTT spacer sequence CTCN PAM
cccaccauucggcggacagc

SEQ ID NO: 14378 - RNA, 20 nt, Artificial Sequence
  HTT spacer sequence CTCN PAM
cugcugauccagccgcuguc

SEQ ID NO: 14379 - RNA, 20 nt, Artificial Sequence
  HTT spacer sequence CTCN PAM
agaaggacacaauauuucua

SEQ ID NO: 14380 - RNA, 20 nt, Artificial Sequence
  HTT spacer sequence CTCN PAM
uagguaagguggaggcauau

SEQ ID NO: 14381 - RNA, 20 nt, Artificial Sequence
  HTT spacer sequence CTCN PAM
accuuaccuaagagcacauu

SEQ ID NO: 14382 - RNA, 20 nt, Artificial Sequence
  HTT spacer sequence CTCN PAM
uaugccuccaccuuaccuaa

SEQ ID NO: 14383 - RNA, 20 nt, Artificial Sequence
  HTT spacer sequence CTCN PAM
uccacucauaugccuccacc

SEQ ID NO: 14384 - RNA, 20 nt, Artificial Sequence
  HTT spacer sequence CTCN PAM
agcauguacucaagauagac

SEQ ID NO: 14385 - RNA, 20 nt, Artificial Sequence
  HTT spacer sequence CTCN PAM
agauagaccuuugaaauaaa

SEQ ID NO: 14386 - RNA, 20 nt, Artificial Sequence
  HTT spacer sequence CTCN PAM
gcuucuagaccaggcuauuu

SEQ ID NO: 14387 - RNA, 20 nt, Artificial Sequence
  HTT spacer sequence CTCN PAM
cagcagccccagugcaguuc

SEQ ID NO: 14388 - RNA, 20 nt, Artificial Sequence
  HTT spacer sequence CTCN PAM
gugacccugcagaugcagcc

SEQ ID NO: 14389 - RNA, 20 nt, Artificial Sequence
  HTT spacer sequence CTCN PAM
caccagcccacacccacugc

SEQ ID NO: 14390 - RNA, 20 nt, Artificial Sequence
  HTT spacer sequence CTCN PAM
gucugugucggccaugacua

SEQ ID NO: 14391 - RNA, 20 nt, Artificial Sequence
  HTT spacer sequence CTCN PAM
ccauagucauggccgacaca

SEQ ID NO: 14392 - RNA, 20 nt, Artificial Sequence
  HTT spacer sequence CTCN PAM
agccuacaagacucaccaua

SEQ ID NO: 14393 - RNA, 20 nt, Artificial Sequence
  HTT spacer sequence CTCN PAM
gguuccugcggguucucugu

SEQ ID NO: 14394 - RNA, 20 nt, Artificial Sequence
  HTT spacer sequence CTCN PAM
guaggucaguugacaguuuc

SEQ ID NO: 14395 - RNA, 20 nt, Artificial Sequence
  HTT spacer sequence CTCN PAM
uguuguuuggguaacugugg

SEQ ID NO: 14396 - RNA, 20 nt, Artificial Sequence
  HTT spacer sequence CTCN PAM
cuucagcacuugccaguguu

SEQ ID NO: 14397 - RNA, 20 nt, Artificial Sequence
  HTT spacer sequence CTCN PAM
cugccuuugaaagccagguc

SEQ ID NO: 14398 - RNA, 20 nt, Artificial Sequence
  HTT spacer sequence CTCN PAM
cuggaaaggaccuugcugag

SEQ ID NO: 14399 - RNA, 20 nt, Artificial Sequence
  HTT spacer sequence CTCN PAM
ggaaaggaccuugcugagcu

SEQ ID NO: 14400 - RNA, 20 nt, Artificial Sequence
  HTT spacer sequence CTCN PAM
gcaagguccuuuccagagag

SEQ ID NO: 14401 - RNA, 20 nt, Artificial Sequence
  HTT spacer sequence CTCN PAM
uggcguacucguucaugauc

SEQ ID NO: 14402 - RNA, 20 nt, Artificial Sequence
  HTT spacer sequence CTCN PAM
uucaugaucauguuugugcc

SEQ ID NO: 14403 - RNA, 20 nt, Artificial Sequence
  HTT spacer sequence CTCN PAM
caggaucucuucuuuuuuaa

SEQ ID NO: 14404 - RNA, 20 nt, Artificial Sequence
  HTT spacer sequence CTCN PAM
ggaucucuucuuuuuuaaca

SEQ ID NO: 14405 - RNA, 20 nt, Artificial Sequence
  HTT spacer sequence CTCN PAM
ucuuuuuuaacagauuaagc

SEQ ID NO: 14406 - RNA, 20 nt, Artificial Sequence
  HTT spacer sequence CTCN PAM
aaacagugagucagauguua

SEQ ID NO: 14407 - RNA, 20 nt, Artificial Sequence
  HTT spacer sequence CTCN PAM
cuguuuggagauucccggcu

SEQ ID NO: 14408 - RNA, 20 nt, Artificial Sequence
  HTT spacer sequence CTCN PAM
uuccugucgaggaugaacac

SEQ ID NO: 14409 - RNA, 20 nt, Artificial Sequence
  HTT spacer sequence CTCN PAM
acaggaacgaguaagccugu

SEQ ID NO: 14410 - RNA, 20 nt, Artificial Sequence
  HTT spacer sequence CTCN PAM
acucugcugauucuuggcgu

SEQ ID NO: 14411 - RNA, 20 nt, Artificial Sequence
  HTT spacer sequence CTCN PAM
gcugauucuuggcgugcugc

SEQ ID NO: 14412 - RNA, 20 nt, Artificial Sequence
  HTT spacer sequence CTCN PAM
cccugagguauuuggugccc

SEQ ID NO: 14413 - RNA, 20 nt, Artificial Sequence
  HTT spacer sequence CTCN PAM
gggugagcagcacgccaaga

SEQ ID NO: 14414 - RNA, 20 nt, Artificial Sequence
  HTT spacer sequence CTCN PAM
gaagcugccuuucaggcuug

SEQ ID NO: 14415 - RNA, 20 nt, Artificial Sequence
  HTT spacer sequence CTCN PAM
ccuucugcagagcagcuugu

SEQ ID NO: 14416 - RNA, 20 nt, Artificial Sequence
  HTT spacer sequence CTCN PAM
uucugcagagcagcuugucc

SEQ ID NO: 14417 - RNA, 20 nt, Artificial Sequence
  HTT spacer sequence CTCN PAM
gcagaaggagagacuuccau

SEQ ID NO: 14418 - RNA, 20 nt, Artificial Sequence
  HTT spacer sequence CTCN PAM
uaccuggacaagcugcucug

SEQ ID NO: 14419 - RNA, 20 nt, Artificial Sequence
  HTT spacer sequence CTCN PAM
aggcccugcaugugaaugac

SEQ ID NO: 14420 - RNA, 20 nt, Artificial Sequence
  HTT spacer sequence CTCN PAM
uccaaauuaaucgguucuuu

SEQ ID NO: 14421 - RNA, 20 nt, Artificial Sequence
  HTT spacer sequence CTCN PAM
guucugccgcuucucuucca

SEQ ID NO: 14422 - RNA, 20 nt, Artificial Sequence
  HTT spacer sequence CTCN PAM
cgguucugccgcuucucuuc

SEQ ID NO: 14423 - RNA, 20 nt, Artificial Sequence
  HTT spacer sequence CTCN PAM
aacucucgguucugccgcuu

SEQ ID NO: 14424 - RNA, 20 nt, Artificial Sequence
  HTT spacer sequence CTCN PAM
ggagcugcgcugcucguuuc

SEQ ID NO: 14425 - RNA, 20 nt, Artificial Sequence
  HTT spacer sequence CTCN PAM
agaguccacaccucuaacuc

SEQ ID NO: 14426 - RNA, 20 nt, Artificial Sequence
  HTT spacer sequence CTCN PAM
uuuccaacccuaggugcuga

SEQ ID NO: 14427 - RNA, 20 nt, Artificial Sequence
  HTT spacer sequence CTCN PAM
agcugucuucccucuguaug

SEQ ID NO: 14428 - RNA, 20 nt, Artificial Sequence
  HTT spacer sequence CTCN PAM
guaugucccugucaccguga

SEQ ID NO: 14429 - RNA, 20 nt, Artificial Sequence
  HTT spacer sequence CTCN PAM
cggugacagggacauacaga

SEQ ID NO: 14430 - RNA, 20 nt, Artificial Sequence
  HTT spacer sequence CTCN PAM
ucaggugccguguuaccuaa

SEQ ID NO: 14431 - RNA, 20 nt, Artificial Sequence
  HTT spacer sequence CTCN PAM
ggugccguguuaccuaagcc

SEQ ID NO: 14432 - RNA, 20 nt, Artificial Sequence
  HTT spacer sequence CTCN PAM
cagagaccacugcuacccug

SEQ ID NO: 14433 - RNA, 20 nt, Artificial Sequence
  HTT spacer sequence CTCN PAM
gagaccacugcuacccuguu

SEQ ID NO: 14434 - RNA, 20 nt, Artificial Sequence
  HTT spacer sequence CTCN PAM
gagaggcuuagguaacacgg

SEQ ID NO: 14435 - RNA, 20 nt, Artificial Sequence
  HTT spacer sequence CTCN PAM
gguuuuagaaacaggguagc

SEQ ID NO: 14436 - RNA, 20 nt, Artificial Sequence
  HTT spacer sequence CTCN PAM
aucaguauuuacugggugga

SEQ ID NO: 14437 - RNA, 20 nt, Artificial Sequence
  HTT spacer sequence CTCN PAM
gggauaggggcuggguauac

SEQ ID NO: 14438 - RNA, 20 nt, Artificial Sequence
  HTT spacer sequence CTCN PAM
ccauuguauacccagccccu

SEQ ID NO: 14439 - RNA, 20 nt, Artificial Sequence
  HTT spacer sequence CTCN PAM
acggggcagaagcugcagcu

SEQ ID NO: 14440 - RNA, 20 nt, Artificial Sequence
  HTT spacer sequence CTCN PAM
cucaaggagauagggacgug

SEQ ID NO: 14441 - RNA, 20 nt, Artificial Sequence
  HTT spacer sequence CTCN PAM
aggagauagggacguggucg

SEQ ID NO: 14442 - RNA, 20 nt, Artificial Sequence
  HTT spacer sequence CTCN PAM
uugagugagcauauaccacc

SEQ ID NO: 14443 - RNA, 20 nt, Artificial Sequence
  HTT spacer sequence CTCN PAM
uuccaaugcagagaaaccuu

SEQ ID NO: 14444 - RNA, 20 nt, Artificial Sequence
  HTT spacer sequence CTCN PAM
gcauuggaaagagaaguucc

SEQ ID NO: 14445 - RNA, 20 nt, Artificial Sequence
  HTT spacer sequence CTCN PAM
gguuauuucacuaacuaugu

SEQ ID NO: 14446 - RNA, 20 nt, Artificial Sequence
  HTT spacer sequence CTCN PAM
uuuuaagcaauuggauuuuu

SEQ ID NO: 14447 - RNA, 20 nt, Artificial Sequence
  HTT spacer sequence CTCN PAM
gugcuuaaauuauuagcauu

SEQ ID NO: 14448 - RNA, 20 nt, Artificial Sequence
  HTT spacer sequence CTCN PAM
gcuguuuaucaacacgcagc

SEQ ID NO: 14449 - RNA, 20 nt, Artificial Sequence
  HTT spacer sequence CTCN PAM
uaagaaaguauuggggcuga

SEQ ID NO: 14450 - RNA, 20 nt, Artificial Sequence
  HTT spacer sequence CTCN PAM
gccccaauacuuucuuaaga

SEQ ID NO: 14451 - RNA, 20 nt, Artificial Sequence
  HTT spacer sequence CTCN PAM
cagccccaauacuuucuuaa

SEQ ID NO: 14452 - RNA, 20 nt, Artificial Sequence
  HTT spacer sequence CTCN PAM
gcuuuuauucugaaaaauaa

SEQ ID NO: 14453 - RNA, 20 nt, Artificial Sequence
  HTT spacer sequence CTCN PAM
ugggauaugacauuuauauu

SEQ ID NO: 14454 - RNA, 20 nt, Artificial Sequence
  HTT spacer sequence CTCN PAM
gcaguguuuuuugugaagga

SEQ ID NO: 14455 - RNA, 20 nt, Artificial Sequence
  HTT spacer sequence CTCN PAM
acaaaacacucagcaguguu

SEQ ID NO: 14456 - RNA, 20 nt, Artificial Sequence
  HTT spacer sequence CTCN PAM
auaaaaagcuagcuuaaaaa

SEQ ID NO: 14457 - RNA, 20 nt, Artificial Sequence
  HTT spacer sequence CTCN PAM
ugaccaguuauauuucauuu

SEQ ID NO: 14458 - RNA, 20 nt, Artificial Sequence
  HTT spacer sequence CTCN PAM
cuuuuuuuauuauuugaaag

SEQ ID NO: 14459 - RNA, 20 nt, Artificial Sequence
  HTT spacer sequence CTCN PAM
uauuucaucuauaaguauuu

SEQ ID NO: 14460 - RNA, 20 nt, Artificial Sequence
  HTT spacer sequence CTCN PAM
auagaugaggacucuucuuu

SEQ ID NO: 14461 - RNA, 20 nt, Artificial Sequence
  HTT spacer sequence CTCN PAM
ucuauagagauacugaaaua

SEQ ID NO: 14462 - RNA, 20 nt, Artificial Sequence
  HTT spacer sequence CTCN PAM
ucuuuauuuuuaaaacuuua

SEQ ID NO: 14463 - RNA, 20 nt, Artificial Sequence
  HTT spacer sequence CTCN PAM
caaaguucugggauuacagg

SEQ ID NO: 14464 - RNA, 20 nt, Artificial Sequence
  HTT spacer sequence CTCN PAM
cagguucaagugauccgccc

SEQ ID NO: 14465 - RNA, 20 nt, Artificial Sequence
  HTT spacer sequence CTCN PAM
aacucccagguucaagugau

SEQ ID NO: 14466 - RNA, 20 nt, Artificial Sequence
  HTT spacer sequence CTCN PAM
caaguagcugggacuacagg

SEQ ID NO: 14467 - RNA, 20 nt, Artificial Sequence
  HTT spacer sequence CTCN PAM
gccucccaaguagcugggac

SEQ ID NO: 14468 - RNA, 20 nt, Artificial Sequence
  HTT spacer sequence CTCN PAM
caucucagccucccaaguag

SEQ ID NO: 14469 - RNA, 20 nt, Artificial Sequence
  HTT spacer sequence CTCN PAM
ugugacccucccaucucagc

SEQ ID NO: 14470 - RNA, 20 nt, Artificial Sequence
  HTT spacer sequence CTCN PAM
auccugggugauggagcaag

SEQ ID NO: 14471 - RNA, 20 nt, Artificial Sequence
  HTT spacer sequence CTCN PAM
aucacccaggauggagugca

SEQ ID NO: 14472 - RNA, 20 nt, Artificial Sequence
  HTT spacer sequence CTCN PAM
aaaaaacaaaacugcaaaac

SEQ ID NO: 14473 - RNA, 20 nt, Artificial Sequence
  HTT spacer sequence CTCN PAM
uuaucaauuuuucucucuac

SEQ ID NO: 14474 - RNA, 20 nt, Artificial Sequence
  HTT spacer sequence CTCN PAM
cuacucuuuuggaaucagca

SEQ ID NO: 14475 - RNA, 20 nt, Artificial Sequence
  HTT spacer sequence CTCN PAM
acucuuuuggaaucagcauc

SEQ ID NO: 14476 - RNA, 20 nt, Artificial Sequence
  HTT spacer sequence CTCN PAM
uuuggaaucagcaucuaaau

SEQ ID NO: 14477 - RNA, 20 nt, Artificial Sequence
  HTT spacer sequence CTCN PAM
uugaugaacugguuccccuc

SEQ ID NO: 14478 - RNA, 20 nt, Artificial Sequence
  HTT spacer sequence CTCN PAM
aucccaguuuuuuucccuua

SEQ ID NO: 14479 - RNA, 20 nt, Artificial Sequence
  HTT spacer sequence CTCN PAM
aagggaaaaaaacugggaug

SEQ ID NO: 14480 - RNA, 20 nt, Artificial Sequence
  HTT spacer sequence CTCN PAM
auaaaugaacucuaagggaa

SEQ ID NO: 14481 - RNA, 20 nt, Artificial Sequence
  HTT spacer sequence CTCN PAM
acuguguaaauuaacaccuu

SEQ ID NO: 14482 - RNA, 20 nt, Artificial Sequence
  HTT spacer sequence CTCN PAM
ucucuguauuuccuguaaau

SEQ ID NO: 14483 - RNA, 20 nt, Artificial Sequence
  HTT spacer sequence CTCN PAM
guauuuccuguaaaucaaua

SEQ ID NO: 14484 - RNA, 20 nt, Artificial Sequence
  HTT spacer sequence CTCN PAM
aauuauugauuuacaggaaa

SEQ ID NO: 14485 - RNA, 20 nt, Artificial Sequence
  HTT spacer sequence CTCN PAM
gauauaaaauauacacuaaa

SEQ ID NO: 14486 - RNA, 20 nt, Artificial Sequence
  HTT spacer sequence CTCN PAM
uuuaaaaaguauugaaacua

SEQ ID NO: 14487 - RNA, 20 nt, Artificial Sequence
  HTT spacer sequence CTCN PAM
auuuuuuuuaacugaugcuu

SEQ ID NO: 14488 - RNA, 20 nt, Artificial Sequence
  HTT spacer sequence CTCN PAM
aaacuuuuaugaucaagcag

SEQ ID NO: 14489 - RNA, 20 nt, Artificial Sequence
  HTT spacer sequence CTCN PAM
accuugcuaaacgguuuagu

SEQ ID NO: 14490 - RNA, 20 nt, Artificial Sequence
  HTT spacer sequence CTCN PAM
aggccccaccaugugcaccu

SEQ ID NO: 14491 - RNA, 20 nt, Artificial Sequence
  HTT spacer sequence CTCN PAM
ugacugaacuucuccaggcc

SEQ ID NO: 14492 - RNA, 20 nt, Artificial Sequence
  HTT spacer sequence CTCN PAM
gugccgggucagauuccacg

SEQ ID NO: 14493 - RNA, 20 nt, Artificial Sequence
  HTT spacer sequence CTCN PAM
caacucugugccgggucaga

SEQ ID NO: 14494 - RNA, 20 nt, Artificial Sequence
  HTT spacer sequence CTCN PAM
ugucuucucccaacucugug

SEQ ID NO: 14495 - RNA, 20 nt, Artificial Sequence
  HTT spacer sequence CTCN PAM
ugggacuuagcaaagaccac

SEQ ID NO: 14496 - RNA, 20 nt, Artificial Sequence
  HTT spacer sequence CTCN PAM
cccuuucacuccugggacuu

SEQ ID NO: 14497 - RNA, 20 nt, Artificial Sequence
  HTT spacer sequence CTCN PAM
cagcacacgagugugggugc

SEQ ID NO: 14498 - RNA, 20 nt, Artificial Sequence
  HTT spacer sequence CTCN PAM
ugugcugugagcacugucuc

SEQ ID NO: 14499 - RNA, 20 nt, Artificial Sequence
  HTT spacer sequence CTCN PAM
gucuacgcacccacacucgu

SEQ ID NO: 14500 - RNA, 20 nt, Artificial Sequence
  HTT spacer sequence CTCN PAM
uagauuagcaagagugcugg

SEQ ID NO: 14501 - RNA, 20 nt, Artificial Sequence
  HTT spacer sequence CTCN PAM
ugcuaaucuaugagaaagcc

SEQ ID NO: 14502 - RNA, 20 nt, Artificial Sequence
  HTT spacer sequence CTCN PAM
guaaccagcacucuugcuaa

SEQ ID NO: 14503 - RNA, 20 nt, Artificial Sequence
  HTT spacer sequence CTCN PAM
aucccuguccuuccaggauu

SEQ ID NO: 14504 - RNA, 20 nt, Artificial Sequence
  HTT spacer sequence CTCN PAM
cauccauacccuuuuuuccc

SEQ ID NO: 14505 - RNA, 20 nt, Artificial Sequence
  HTT spacer sequence CTCN PAM
aaaguaaauaaaugaugugg

SEQ ID NO: 14506 - RNA, 20 nt, Artificial Sequence
  HTT spacer sequence CTCN PAM
agauaugauuaucucuauaa

SEQ ID NO: 14507 - RNA, 20 nt, Artificial Sequence
  HTT spacer sequence CTCN PAM
auaacauaucuuacuccauc

SEQ ID NO: 14508 - RNA, 20 nt, Artificial Sequence
  HTT spacer sequence CTCN PAM
aucuucuuuugacuaaaaac

SEQ ID NO: 14509 - RNA, 20 nt, Artificial Sequence
  HTT spacer sequence CTCN PAM
ugguaauuuaauuaagaaca

SEQ ID NO: 14510 - RNA, 20 nt, Artificial Sequence
  HTT spacer sequence CTCN PAM
auuuuucaauuuauuccuuu

SEQ ID NO: 14511 - RNA, 20 nt, Artificial Sequence
  HTT spacer sequence CTCN PAM
cucaccuaggcaugcaguaa

SEQ ID NO: 14512 - RNA, 20 nt, Artificial Sequence
  HTT spacer sequence CTCN PAM
caccuaggcaugcaguaaaa

SEQ ID NO: 14513 - RNA, 20 nt, Artificial Sequence
  HTT spacer sequence CTCN PAM
ccuaggcaugcaguaaaagc

SEQ ID NO: 14514 - RNA, 20 nt, Artificial Sequence
  HTT spacer sequence CTCN PAM
gcccagcuucuuaaacauac

SEQ ID NO: 14515 - RNA, 20 nt, Artificial Sequence
  HTT spacer sequence CTCN PAM
uuguugauaauauaugcaua

SEQ ID NO: 14516 - RNA, 20 nt, Artificial Sequence
  HTT spacer sequence CTCN PAM
cuccuuguugauaauauaug

SEQ ID NO: 14517 - RNA, 20 nt, Artificial Sequence
  HTT spacer sequence CTCN PAM
uauggaugguuacuaauugc

SEQ ID NO: 14518 - RNA, 20 nt, Artificial Sequence
  HTT spacer sequence CTCN PAM
aaucuauuacuugcuuaaaa

SEQ ID NO: 14519 - RNA, 20 nt, Artificial Sequence
  HTT spacer sequence CTCN PAM
uacucuaaucuauuacuugc

SEQ ID NO: 14520 - RNA, 20 nt, Artificial Sequence
  HTT spacer sequence CTCN PAM
uucaaaugacauggaguagu

SEQ ID NO: 14521 - RNA, 20 nt, Artificial Sequence
  HTT spacer sequence CTCN PAM
augucauuugaaagagaaug

SEQ ID NO: 14522 - RNA, 20 nt, Artificial Sequence
  HTT spacer sequence CTCN PAM
gaaagaaagaaagauuucag

SEQ ID NO: 14523 - RNA, 20 nt, Artificial Sequence
  HTT spacer sequence CTCN PAM
gaaagaaauauuucauuauu

SEQ ID NO: 14524 - RNA, 20 nt, Artificial Sequence
  HTT spacer sequence CTCN PAM
acuucuaggcagagaacauu

SEQ ID NO: 14525 - RNA, 20 nt, Artificial Sequence
  HTT spacer sequence CTCN PAM
gccuagaaguugagccaaaa

SEQ ID NO: 14526 - RNA, 20 nt, Artificial Sequence
  HTT spacer sequence CTCN PAM
uagguaacacuauuuacauu

SEQ ID NO: 14527 - RNA, 20 nt, Artificial Sequence
  HTT spacer sequence CTCN PAM
auaguaugaaagcagugcug

SEQ ID NO: 14528 - RNA, 20 nt, Artificial Sequence
  HTT spacer sequence CTCN PAM
uaaauucuguuagcaacagc

SEQ ID NO: 14529 - RNA, 20 nt, Artificial Sequence
  HTT spacer sequence CTCN PAM
ucugcccccuccuaaauucu

SEQ ID NO: 14530 - RNA, 20 nt, Artificial Sequence
  HTT spacer sequence CTCN PAM
auguaauaaggaaaucagca

SEQ ID NO: 14531 - RNA, 20 nt, Artificial Sequence
  HTT spacer sequence CTCN PAM
caauguaauaaggaaaucag

SEQ ID NO: 14532 - RNA, 20 nt, Artificial Sequence
  HTT spacer sequence CTCN PAM
ucucaauguaauaaggaaau

SEQ ID NO: 14533 - RNA, 20 nt, Artificial Sequence
  HTT spacer sequence CTCN PAM
uggcuccucucaauguaaua

SEQ ID NO: 14534 - RNA, 20 nt, Artificial Sequence
  HTT spacer sequence CTCN PAM
acguaaucagcuuauacuuu

SEQ ID NO: 14535 - RNA, 20 nt, Artificial Sequence
  HTT spacer sequence CTCN PAM
acacuaccuuuguagcauga

SEQ ID NO: 14536 - RNA, 20 nt, Artificial Sequence
  HTT spacer sequence CTCN PAM
guuccggugaaacuuuaggu

SEQ ID NO: 14537 - RNA, 20 nt, Artificial Sequence
  HTT spacer sequence CTCN PAM
ucugaugguaacuucuauac

SEQ ID NO: 14538 - RNA, 20 nt, Artificial Sequence
  HTT spacer sequence CTCN PAM
cuuuuagcucuucugauggu

SEQ ID NO: 14539 - RNA, 20 nt, Artificial Sequence
  HTT spacer sequence CTCN PAM
ucuacacugucugauuuuga

SEQ ID NO: 14540 - RNA, 20 nt, Artificial Sequence
  HTT spacer sequence CTCN PAM
uaauguaucugaaguucaaa

SEQ ID NO: 14541 - RNA, 20 nt, Artificial Sequence
  HTT spacer sequence CTCN PAM
aauuuaaacuguaaacaaac

SEQ ID NO: 14542 - RNA, 20 nt, Artificial Sequence
  HTT spacer sequence CTCN PAM
gcagccuggggguuggggac

SEQ ID NO: 14543 - RNA, 20 nt, Artificial Sequence
  HTT spacer sequence CTCN PAM
gcagccuggggguuggggac

SEQ ID NO: 14544 - RNA, 20 nt, Artificial Sequence
  HTT spacer sequence CTCN PAM
cuuccugcugggcagccugg

SEQ ID NO: 14545 - RNA, 20 nt, Artificial Sequence
  HTT spacer sequence CTCN PAM
ccugcugcucacuuccugcu

SEQ ID NO: 14546 - RNA, 20 nt, Artificial Sequence
  HTT spacer sequence CTCN PAM
ggugggaaugccagcucacc

SEQ ID NO: 14547 - RNA, 20 nt, Artificial Sequence
  HTT spacer sequence CTCN PAM
ugucagaucaguggcagcau

SEQ ID NO: 14548 - RNA, 20 nt, Artificial Sequence
  HTT spacer sequence CTCN PAM
uaugggaaucuaaugcugcc

SEQ ID NO: 14549 - RNA, 20 nt, Artificial Sequence
  HTT spacer sequence CTCN PAM
caugugcaguucacaauagg

SEQ ID NO: 14550 - RNA, 20 nt, Artificial Sequence
  HTT spacer sequence CTCN PAM
uuaugagaaucuaaugccug

SEQ ID NO: 14551 - RNA, 20 nt, Artificial Sequence
  HTT spacer sequence CTCN PAM
uaaggagcgcacaaccuaga

SEQ ID NO: 14552 - RNA, 20 nt, Artificial Sequence
  HTT spacer sequence CTCN PAM
gaucaucaggcauuagauuc

SEQ ID NO: 14553 - RNA, 20 nt, Artificial Sequence
  HTT spacer sequence CTCN PAM
ucuugaaaccauccccuggc

SEQ ID NO: 14554 - RNA, 20 nt, Artificial Sequence
  HTT spacer sequence CTCN PAM
caugaaaccagucucuggug

SEQ ID NO: 14555 - RNA, 20 nt, Artificial Sequence
  HTT spacer sequence CTCN PAM
ggugccagaaagguugggua

SEQ ID NO: 14556 - RNA, 20 nt, Artificial Sequence
  HTT spacer sequence CTCN PAM
uucucaguggcacucauaau

SEQ ID NO: 14557 - RNA, 20 nt, Artificial Sequence
  HTT spacer sequence CTCN PAM
guggcacucauaauaguguu

SEQ ID NO: 14558 - RNA, 20 nt, Artificial Sequence
  HTT spacer sequence CTCN PAM
uaauaguguuuuuugauuuu

SEQ ID NO: 14559 - RNA, 20 nt, Artificial Sequence
  HTT spacer sequence CTCN PAM
ccccuccguguaugcugggc

SEQ ID NO: 14560 - RNA, 20 nt, Artificial Sequence
  HTT spacer sequence CTCN PAM
ccuccguguaugcugggcuu

SEQ ID NO: 14561 - RNA, 20 nt, Artificial Sequence
  HTT spacer sequence CTCN PAM
guguaugcugggcuuuauuu

SEQ ID NO: 14562 - RNA, 20 nt, Artificial Sequence
  HTT spacer sequence CTCN PAM
auuucccaaaacuggugacu

SEQ ID NO: 14563 - RNA, 20 nt, Artificial Sequence
  HTT spacer sequence CTCN PAM
ugcugcuccucuagugcaag

SEQ ID NO: 14564 - RNA, 20 nt, Artificial Sequence
  HTT spacer sequence CTCN PAM
ucuagugcaagugcuccauu

SEQ ID NO: 14565 - RNA, 20 nt, Artificial Sequence
  HTT spacer sequence CTCN PAM
agugcaagugcuccauuuau

SEQ ID NO: 14566 - RNA, 20 nt, Artificial Sequence
  HTT spacer sequence CTCN PAM
auuuauuuuuaaggaauuaa

SEQ ID NO: 14567 - RNA, 20 nt, Artificial Sequence
  HTT spacer sequence CTCN PAM
cccuaaauauuucccuauca

SEQ ID NO: 14568 - RNA, 20 nt, Artificial Sequence
  HTT spacer sequence CTCN PAM
gaccagaacaccuguguuuc

SEQ ID NO: 14569 - RNA, 20 nt, Artificial Sequence
  HTT spacer sequence CTCN PAM
guuucuagguuuaugaacug

SEQ ID NO: 14570 - RNA, 20 nt, Artificial Sequence
  HTT spacer sequence CTCN PAM
ggucacaacauuguggucuu

SEQ ID NO: 14571 - RNA, 20 nt, Artificial Sequence
  HTT spacer sequence CTCN PAM
agggcuccggucacaacauu

SEQ ID NO: 14572 - RNA, 20 nt, Artificial Sequence
  HTT spacer sequence CTCN PAM
ucagaacgccuccacccgag

SEQ ID NO: 14573 - RNA, 20 nt, Artificial Sequence
  HTT spacer sequence CTCN PAM
acccgagcuucugcaaaccc

SEQ ID NO: 14574 - RNA, 20 nt, Artificial Sequence
  HTT spacer sequence CTCN PAM
gguggaggcguucugaagag

SEQ ID NO: 14575 - RNA, 20 nt, Artificial Sequence
  HTT spacer sequence CTCN PAM
ccgcugcuaaggaggagucu

SEQ ID NO: 14576 - RNA, 20 nt, Artificial Sequence
  HTT spacer sequence CTCN PAM
uuagcagcggugagcugccc

SEQ ID NO: 14577 - RNA, 20 nt, Artificial Sequence
  HTT spacer sequence CTCN PAM
uccuuagcagcggugagcug

SEQ ID NO: 14578 - RNA, 20 nt, Artificial Sequence
  HTT spacer sequence CTCN PAM
cacuacggcuucggccacca

SEQ ID NO: 14579 - RNA, 20 nt, Artificial Sequence
  HTT spacer sequence CTCN PAM
uacaauuaacuuugcaguaa

SEQ ID NO: 14580 - RNA, 20 nt, Artificial Sequence
  HTT spacer sequence CTCN PAM
auugauuaugggccugcccu

SEQ ID NO: 14581 - RNA, 20 nt, Artificial Sequence
  HTT spacer sequence CTCN PAM
ccuauuuauaaaauaaagau

SEQ ID NO: 14582 - RNA, 20 nt, Artificial Sequence
  HTT spacer sequence CTCN PAM
cgccuguaauuucagcacuu

SEQ ID NO: 14583 - RNA, 20 nt, Artificial Sequence
  HTT spacer sequence CTCN PAM
ugggcugaagcgauccuucc

SEQ ID NO: 14584 - RNA, 20 nt, Artificial Sequence
  HTT spacer sequence CTCN PAM
aacuccugggcugaagcgau

SEQ ID NO: 14585 - RNA, 20 nt, Artificial Sequence
  HTT spacer sequence CTCN PAM
cuuggccagguugucucaaa

SEQ ID NO: 14586 - RNA, 20 nt, Artificial Sequence
  HTT spacer sequence CTCN PAM
acaaaaaaaaaaaaaaaaaa

SEQ ID NO: 14587 - RNA, 20 nt, Artificial Sequence
  HTT spacer sequence CTCN PAM
aaagcagcugggacuacagg

SEQ ID NO: 14588 - RNA, 20 nt, Artificial Sequence
  HTT spacer sequence CTCN PAM
gccuccaaagcagcugggac

SEQ ID NO: 14589 - RNA, 20 nt, Artificial Sequence
  HTT spacer sequence CTCN PAM
ugggcuuaagcaauccuacc

SEQ ID NO: 14590 - RNA, 20 nt, Artificial Sequence
  HTT spacer sequence CTCN PAM
accucuugggcuuaagcaau

SEQ ID NO: 14591 - RNA, 20 nt, Artificial Sequence
  HTT spacer sequence CTCN PAM
gugcagcugccaucaagauu

SEQ ID NO: 14592 - RNA, 20 nt, Artificial Sequence
  HTT spacer sequence CTCN PAM
gucaccaggcucagugcagc

SEQ ID NO: 14593 - RNA, 20 nt, Artificial Sequence
  HTT spacer sequence CTCN PAM
aaauaaauuuaaaaauaaaa

SEQ ID NO: 14594 - RNA, 20 nt, Artificial Sequence
  HTT spacer sequence CTCN PAM
uauuuuauuuuuaaauuuau

SEQ ID NO: 14595 - RNA, 20 nt, Artificial Sequence
  HTT spacer sequence CTCN PAM
uuuugccacccaaccugcua

SEQ ID NO: 14596 - RNA, 20 nt, Artificial Sequence
  HTT spacer sequence CTCN PAM
uccugauucuuuucucugcc

SEQ ID NO: 14597 - RNA, 20 nt, Artificial Sequence
  HTT spacer sequence CTCN PAM
ugauucuuuucucugccuug

SEQ ID NO: 14598 - RNA, 20 nt, Artificial Sequence
  HTT spacer sequence CTCN PAM
gccuuggcugccuccugugg

SEQ ID NO: 14599 - RNA, 20 nt, Artificial Sequence
  HTT spacer sequence CTCN PAM
uguggcauuuuaggugcuga

SEQ ID NO: 14600 - RNA, 20 nt, Artificial Sequence
  HTT spacer sequence CTCN PAM
gcaccuaaaaugccacagga

SEQ ID NO: 14601 - RNA, 20 nt, Artificial Sequence
  HTT spacer sequence CTCN PAM
uguuaauuugccagaaaugg

SEQ ID NO: 14602 - RNA, 20 nt, Artificial Sequence
  HTT spacer sequence CTCN PAM
gacgacuugaagaugccauu

SEQ ID NO: 14603 - RNA, 20 nt, Artificial Sequence
  HTT spacer sequence CTCN PAM
gaucccucugacgacuugaa

SEQ ID NO: 14604 - RNA, 20 nt, Artificial Sequence
  HTT spacer sequence CTCN PAM
cagaucccucugacgacuug

SEQ ID NO: 14605 - RNA, 20 nt, Artificial Sequence
  HTT spacer sequence CTCN PAM
agucaggccaggaaggaacu

SEQ ID NO: 14606 - RNA, 20 nt, Artificial Sequence
  HTT spacer sequence CTCN PAM
gcgucugccuccacugccca

SEQ ID NO: 14607 - RNA, 20 nt, Artificial Sequence
  HTT spacer sequence CTCN PAM
acugcccagucaccuccucu

SEQ ID NO: 14608 - RNA, 20 nt, Artificial Sequence
  HTT spacer sequence CTCN PAM
ucuccaugcucuuggggcug

SEQ ID NO: 14609 - RNA, 20 nt, Artificial Sequence
  HTT spacer sequence CTCN PAM
ccaugcucuuggggcugggc

SEQ ID NO: 14610 - RNA, 20 nt, Artificial Sequence
  HTT spacer sequence CTCN PAM
augcucuuggggcugggccc

SEQ ID NO: 14611 - RNA, 20 nt, Artificial Sequence
  HTT spacer sequence CTCN PAM
uggggcugggcccuacccca

SEQ ID NO: 14612 - RNA, 20 nt, Artificial Sequence
  HTT spacer sequence CTCN PAM
agggcagcacugcauggugg

SEQ ID NO: 14613 - RNA, 20 nt, Artificial Sequence
  HTT spacer sequence CTCN PAM
cugcuccagggcagcacugc

SEQ ID NO: 14614 - RNA, 20 nt, Artificial Sequence
  HTT spacer sequence CTCN PAM
ugccagacaggacccaccaa

SEQ ID NO: 14615 - RNA, 20 nt, Artificial Sequence
  HTT spacer sequence CTCN PAM
caugccagacaggacccacc

SEQ ID NO: 14616 - RNA, 20 nt, Artificial Sequence
  HTT spacer sequence CTCN PAM
caaaggcagcucucaugcca

SEQ ID NO: 14617 - RNA, 20 nt, Artificial Sequence
  HTT spacer sequence CTCN PAM
accacugggucuggugccua

SEQ ID NO: 14618 - RNA, 20 nt, Artificial Sequence
  HTT spacer sequence CTCN PAM
ggccucuccuaagccacugc

SEQ ID NO: 14619 - RNA, 20 nt, Artificial Sequence
  HTT spacer sequence CTCN PAM
ccuaagccacugcaacgugg

SEQ ID NO: 14620 - RNA, 20 nt, Artificial Sequence
  HTT spacer sequence CTCN PAM
uaagccacugcaacgugguc

SEQ ID NO: 14621 - RNA, 20 nt, Artificial Sequence
  HTT spacer sequence CTCN PAM
cagccuccacauuagagaga

SEQ ID NO: 14622 - RNA, 20 nt, Artificial Sequence
  HTT spacer sequence CTCN PAM
acauuagagagaaucugacu

SEQ ID NO: 14623 - RNA, 20 nt, Artificial Sequence
  HTT spacer sequence CTCN PAM
aauguggaggcugugaguaa

SEQ ID NO: 14624 - RNA, 20 nt, Artificial Sequence
  HTT spacer sequence CTCN PAM
cuaauguggaggcugugagu

SEQ ID NO: 14625 - RNA, 20 nt, Artificial Sequence
  HTT spacer sequence CTCN PAM
ugugaacauaaauguuugcc

SEQ ID NO: 14626 - RNA, 20 nt, Artificial Sequence
  HTT spacer sequence CTCN PAM
ugguucuggcaaacauuuau

SEQ ID NO: 14627 - RNA, 20 nt, Artificial Sequence
  HTT spacer sequence CTCN PAM
uuauuuguaaggcacgcauu

SEQ ID NO: 14628 - RNA, 20 nt, Artificial Sequence
  HTT spacer sequence CTCN PAM
gauuauuuagcugacuaaca

SEQ ID NO: 14629 - RNA, 20 nt, Artificial Sequence
  HTT spacer sequence CTCN PAM
aguuuuaaaguugaaucaag

SEQ ID NO: 14630 - RNA, 20 nt, Artificial Sequence
  HTT spacer sequence CTCN PAM
agcugcaaaucacagaaagu

SEQ ID NO: 14631 - RNA, 20 nt, Artificial Sequence
  HTT spacer sequence CTCN PAM
ugcagcccuguccuuucaag

SEQ ID NO: 14632 - RNA, 20 nt, Artificial Sequence
  HTT spacer sequence CTCN PAM
gauuucugaaauaaucaccu

SEQ ID NO: 14633 - RNA, 20 nt, Artificial Sequence
  HTT spacer sequence CTCN PAM
guguauaucucuucucagau

SEQ ID NO: 14634 - RNA, 20 nt, Artificial Sequence
  HTT spacer sequence CTCN PAM
ucucagaugagugauuauau

SEQ ID NO: 14635 - RNA, 20 nt, Artificial Sequence
  HTT spacer sequence CTCN PAM
gaugagugauuauaugugug

SEQ ID NO: 14636 - RNA, 20 nt, Artificial Sequence
  HTT spacer sequence CTCN PAM
ucugagaagagauauacaca

SEQ ID NO: 14637 - RNA, 20 nt, Artificial Sequence
  HTT spacer sequence CTCN PAM
gucccuuuacaaaaaaaguc

SEQ ID NO: 14638 - RNA, 20 nt, Artificial Sequence
  HTT spacer sequence CTCN PAM
uuugcaacauucagcucugc

SEQ ID NO: 14639 - RNA, 20 nt, Artificial Sequence
  HTT spacer sequence CTCN PAM
gcccugugacaggaaugcag

SEQ ID NO: 14640 - RNA, 20 nt, Artificial Sequence
  HTT spacer sequence CTCN PAM
ugucuuuacaacugcauucc

SEQ ID NO: 14641 - RNA, 20 nt, Artificial Sequence
  HTT spacer sequence CTCN PAM
caaaauauaacaacacauuc

SEQ ID NO: 14642 - RNA, 20 nt, Artificial Sequence
  HTT spacer sequence CTCN PAM
guaaauuuuauuuaguauua

SEQ ID NO: 14643 - RNA, 20 nt, Artificial Sequence
  HTT spacer sequence CTCN PAM
cuauguugaccaggcuggaa

SEQ ID NO: 14644 - RNA, 20 nt, Artificial Sequence
  HTT spacer sequence CTCN PAM
accaaaacaaaacaaaacaa

SEQ ID NO: 14645 - RNA, 20 nt, Artificial Sequence
  HTT spacer sequence CTCN PAM
gcugcugcucagggggcuga

SEQ ID NO: 14646 - RNA, 20 nt, Artificial Sequence
  HTT spacer sequence CTCN PAM
gggggcugaggcaagaggau

SEQ ID NO: 14647 - RNA, 20 nt, Artificial Sequence
  HTT spacer sequence CTCN PAM
gcccccugagcagcagcuga

SEQ ID NO: 14648 - RNA, 20 nt, Artificial Sequence
  HTT spacer sequence CTCN PAM
ugccucagcccccugagcag

SEQ ID NO: 14649 - RNA, 20 nt, Artificial Sequence
  HTT spacer sequence CTCN PAM
aacaauccucuugccucagc

SEQ ID NO: 14650 - RNA, 20 nt, Artificial Sequence
  HTT spacer sequence CTCN PAM
ugggcucaaacaauccucuu

SEQ ID NO: 14651 - RNA, 20 nt, Artificial Sequence
  HTT spacer sequence CTCN PAM
aacuccugggcucaaacaau

SEQ ID NO: 14652 - RNA, 20 nt, Artificial Sequence
  HTT spacer sequence CTCN PAM
cugugaccucaaacuccugg

SEQ ID NO: 14653 - RNA, 20 nt, Artificial Sequence
  HTT spacer sequence CTCN PAM
agccuaggcaacagaaugag

SEQ ID NO: 14654 - RNA, 20 nt, Artificial Sequence
  HTT spacer sequence CTCN PAM
uucuguugccuaggcuggag

SEQ ID NO: 14655 - RNA, 20 nt, Artificial Sequence
  HTT spacer sequence CTCN PAM
aaucaugacacaaaaaagga

SEQ ID NO: 14656 - RNA, 20 nt, Artificial Sequence
  HTT spacer sequence CTCN PAM
auuaaauacucaaaucauga

SEQ ID NO: 14657 - RNA, 20 nt, Artificial Sequence
  HTT spacer sequence CTCN PAM
caauuaaauacucaaaucau

SEQ ID NO: 14658 - RNA, 20 nt, Artificial Sequence
  HTT spacer sequence CTCN PAM
uaagaaauguuuacuuaauu

SEQ ID NO: 14659 - RNA, 20 nt, Artificial Sequence
  HTT spacer sequence CTCN PAM
uacuaugaugacgcaaauau

SEQ ID NO: 14660 - RNA, 20 nt, Artificial Sequence
  HTT spacer sequence CTCN PAM
aacuugauuaaguaucucau

SEQ ID NO: 14661 - RNA, 20 nt, Artificial Sequence
  HTT spacer sequence CTCN PAM
uaauucaagaauauagacau

SEQ ID NO: 14662 - RNA, 20 nt, Artificial Sequence
  HTT spacer sequence CTCN PAM
ccuaauucaagaauauagac

SEQ ID NO: 14663 - RNA, 20 nt, Artificial Sequence
  HTT spacer sequence CTCN PAM
ccgccacuggaaaaagcgac

SEQ ID NO: 14664 - RNA, 20 nt, Artificial Sequence
  HTT spacer sequence CTCN PAM
gaugaguuuauccucuucug

SEQ ID NO: 14665 - RNA, 20 nt, Artificial Sequence
  HTT spacer sequence CTCN PAM
ucugagcaaugugaaucagu

SEQ ID NO: 14666 - RNA, 20 nt, Artificial Sequence
  HTT spacer sequence CTCN PAM
ucuggcugggacaugggaua

SEQ ID NO: 14667 - RNA, 20 nt, Artificial Sequence
  HTT spacer sequence CTCN PAM
uuuaagccuuuuugguauuu

SEQ ID NO: 14668 - RNA, 20 nt, Artificial Sequence
  HTT spacer sequence CTCN PAM
augggggaaaaauaccaaaa

SEQ ID NO: 14669 - RNA, 20 nt, Artificial Sequence
  HTT spacer sequence CTCN PAM
caaugggggaaaaauaccaa

SEQ ID NO: 14670 - RNA, 20 nt, Artificial Sequence
  HTT spacer sequence CTCN PAM
ucuguuauagcuggaaaauc

SEQ ID NO: 14671 - RNA, 20 nt, Artificial Sequence
  HTT spacer sequence CTCN PAM
accuucaucugucuuauaau

SEQ ID NO: 14672 - RNA, 20 nt, Artificial Sequence
  HTT spacer sequence CTCN PAM
aggacacccccacuacuuuc

SEQ ID NO: 14673 - RNA, 20 nt, Artificial Sequence
  HTT spacer sequence CTCN PAM
cuucugguggcagccuagcu

SEQ ID NO: 14674 - RNA, 20 nt, Artificial Sequence
  HTT spacer sequence CTCN PAM
ucugguggcagccuagcucu

SEQ ID NO: 14675 - RNA, 20 nt, Artificial Sequence
  HTT spacer sequence CTCN PAM
ugugccuuugaggaaauuac

SEQ ID NO: 14676 - RNA, 20 nt, Artificial Sequence
  HTT spacer sequence CTCN PAM
aaggcacaagagcuaggcug

SEQ ID NO: 14677 - RNA, 20 nt, Artificial Sequence
  HTT spacer sequence CTCN PAM
guggaacauauuugcaaacc

SEQ ID NO: 14678 - RNA, 20 nt, Artificial Sequence
  HTT spacer sequence CTCN PAM
aucuuccaaaucagugguuu

SEQ ID NO: 14679 - RNA, 20 nt, Artificial Sequence
  HTT spacer sequence CTCN PAM
agguaaagaacuuauuuugu

SEQ ID NO: 14680 - RNA, 20 nt, Artificial Sequence
  HTT spacer sequence CTCN PAM
uuuuuucacucuuaaucuca

SEQ ID NO: 14681 - RNA, 20 nt, Artificial Sequence
  HTT spacer sequence CTCN PAM
uaaucucacaucauuguaag

SEQ ID NO: 14682 - RNA, 20 nt, Artificial Sequence
  HTT spacer sequence CTCN PAM
caucauuguaaguuuaugga

SEQ ID NO: 14683 - RNA, 20 nt, Artificial Sequence
  HTT spacer sequence CTCN PAM
ucaaagaaaaagucagaagu

SEQ ID NO: 14684 - RNA, 20 nt, Artificial Sequence
  HTT spacer sequence CTCN PAM
caugugauguagccacaaag

SEQ ID NO: 14685 - RNA, 20 nt, Artificial Sequence
  HTT spacer sequence CTCN PAM
uuaaaucuuuguggcuacau

SEQ ID NO: 14686 - RNA, 20 nt, Artificial Sequence
  HTT spacer sequence CTCN PAM
uuaauguaauucugaagaug

SEQ ID NO: 14687 - RNA, 20 nt, Artificial Sequence
  HTT spacer sequence CTCN PAM
aauaccuaaaagucacuuuc

SEQ ID NO: 14688 - RNA, 20 nt, Artificial Sequence
  HTT spacer sequence CTCN PAM
aaugacacaccagaauuuau

SEQ ID NO: 14689 - RNA, 20 nt, Artificial Sequence
  HTT spacer sequence CTCN PAM
aacuauaccacaaaacauuu

SEQ ID NO: 14690 - RNA, 20 nt, Artificial Sequence
  HTT spacer sequence CTCN PAM
acauucuuuguguuuaauac

SEQ ID NO: 14691 - RNA, 20 nt, Artificial Sequence
  HTT spacer sequence CTCN PAM
acaguauuaaacacaaagaa

SEQ ID NO: 14692 - RNA, 20 nt, Artificial Sequence
  HTT spacer sequence CTCN PAM
aauauaguuuaucaucauau

SEQ ID NO: 14693 - RNA, 20 nt, Artificial Sequence
  HTT spacer sequence CTCN PAM
uaagaauauuuaauuuacuc

SEQ ID NO: 14694 - RNA, 20 nt, Artificial Sequence
  HTT spacer sequence CTCN PAM
aaaaugaaacucauaagaau

SEQ ID NO: 14695 - RNA, 20 nt, Artificial Sequence
  HTT spacer sequence CTCN PAM
uaggagaagaagaagccuug

SEQ ID NO: 14696 - RNA, 20 nt, Artificial Sequence
  HTT spacer sequence CTCN PAM
uaagagcacuuugccuagua

SEQ ID NO: 14697 - RNA, 20 nt, Artificial Sequence
  HTT spacer sequence CTCN PAM
aaggcuucuucuucuccuaa

SEQ ID NO: 14698 - RNA, 20 nt, Artificial Sequence
  HTT spacer sequence CTCN PAM
gaaucgagaucggaugucag

SEQ ID NO: 14699 - RNA, 20 nt, Artificial Sequence
  HTT spacer sequence CTCN PAM
auucagagucauccuccaag

SEQ ID NO: 14700 - RNA, 20 nt, Artificial Sequence
  HTT spacer sequence CTCN PAM
gccuuaacagguaguucuca

SEQ ID NO: 14701 - RNA, 20 nt, Artificial Sequence
  HTT spacer sequence CTCN PAM
cuaguuagccgcuggugugg

SEQ ID NO: 14702 - RNA, 20 nt, Artificial Sequence
  HTT spacer sequence CTCN PAM
ucccccugcaccugguggac

SEQ ID NO: 14703 - RNA, 20 nt, Artificial Sequence
  HTT spacer sequence CTCN PAM
acugcugcccccagucgugc

SEQ ID NO: 14704 - RNA, 20 nt, Artificial Sequence
  HTT spacer sequence CTCN PAM
gaagcuugugugucuguggu

SEQ ID NO: 14705 - RNA, 20 nt, Artificial Sequence
  HTT spacer sequence CTCN PAM
agccauaaaccuaauuuuaa

SEQ ID NO: 14706 - RNA, 20 nt, Artificial Sequence
  HTT spacer sequence CTCN PAM
caaagcccuaugcucaagcc

SEQ ID NO: 14707 - RNA, 20 nt, Artificial Sequence
  HTT spacer sequence CTCN PAM
ugaguuggauggguuaugcu

SEQ ID NO: 14708 - RNA, 20 nt, Artificial Sequence
  HTT spacer sequence CTCN PAM
ugagauguuucgaccugcca

SEQ ID NO: 14709 - RNA, 20 nt, Artificial Sequence
  HTT spacer sequence CTCN PAM
aaaaagaaaaaagauaacua

SEQ ID NO: 14710 - RNA, 20 nt, Artificial Sequence
  HTT spacer sequence CTCN PAM
aucucaaaaaagaaaaaaga

SEQ ID NO: 14711 - RNA, 20 nt, Artificial Sequence
  HTT spacer sequence CTCN PAM
cacugucacccagugcagau

SEQ ID NO: 14712 - RNA, 20 nt, Artificial Sequence
  HTT spacer sequence CTCN PAM
agugacacuggguaucugca

SEQ ID NO: 14713 - RNA, 20 nt, Artificial Sequence
  HTT spacer sequence CTCN PAM
uggugcacugcagccuccgc

SEQ ID NO: 14714 - RNA, 20 nt, Artificial Sequence
  HTT spacer sequence CTCN PAM
gccuucuggguuccagcgau

SEQ ID NO: 14715 - RNA, 20 nt, Artificial Sequence
  HTT spacer sequence CTCN PAM
ugccucagccucccaaguag

SEQ ID NO: 14716 - RNA, 20 nt, Artificial Sequence
  HTT spacer sequence CTCN PAM
gccucccaaguagcugggac

SEQ ID NO: 14717 - RNA, 20 nt, Artificial Sequence
  HTT spacer sequence CTCN PAM
caaguagcugggacuacagg

SEQ ID NO: 14718 - RNA, 20 nt, Artificial Sequence
  HTT spacer sequence CTCN PAM
acaaaaaaauacaaaaauua

SEQ ID NO: 14719 - RNA, 20 nt, Artificial Sequence
  HTT spacer sequence CTCN PAM
ugaccucaagugaucugccu

SEQ ID NO: 14720 - RNA, 20 nt, Artificial Sequence
  HTT spacer sequence CTCN PAM
agugaucugccugccucagc

SEQ ID NO: 14721 - RNA, 20 nt, Artificial Sequence
  HTT spacer sequence CTCN PAM
gccucccacagugccgggau

SEQ ID NO: 14722 - RNA, 20 nt, Artificial Sequence
  HTT spacer sequence CTCN PAM
cacagugccgggauuacagg

SEQ ID NO: 14723 - RNA, 20 nt, Artificial Sequence
  HTT spacer sequence CTCN PAM
uguaaucccggcacuguggg

SEQ ID NO: 14724 - RNA, 20 nt, Artificial Sequence
  HTT spacer sequence CTCN PAM
cuccuguaaucccggcacug

SEQ ID NO: 14725 - RNA, 20 nt, Artificial Sequence
  HTT spacer sequence CTCN PAM
guguacuuuauaaaagauga

SEQ ID NO: 14726 - RNA, 20 nt, Artificial Sequence
  HTT spacer sequence CTCN PAM
ucuuuuauaaaguacacaga

SEQ ID NO: 14727 - RNA, 20 nt, Artificial Sequence
  HTT spacer sequence CTCN PAM
uauaauccaguuauuaguac

SEQ ID NO: 14728 - RNA, 20 nt, Artificial Sequence
  HTT spacer sequence CTCN PAM
aaauauuuaagucuuacuuu

SEQ ID NO: 14729 - RNA, 20 nt, Artificial Sequence
  HTT spacer sequence CTCN PAM
cuaaauauuuaagucuuacu

SEQ ID NO: 14730 - RNA, 20 nt, Artificial Sequence
  HTT spacer sequence CTCN PAM
caugcuuaccgacccaacug

SEQ ID NO: 14731 - RNA, 20 nt, Artificial Sequence
  HTT spacer sequence CTCN PAM
uggggcaguugggucgguaa

SEQ ID NO: 14732 - RNA, 20 nt, Artificial Sequence
  HTT spacer sequence CTCN PAM
uggaagauaaaccuguaaca

SEQ ID NO: 14733 - RNA, 20 nt, Artificial Sequence
  HTT spacer sequence CTCN PAM
aguccuauucuccuggaaga

SEQ ID NO: 14734 - RNA, 20 nt, Artificial Sequence
  HTT spacer sequence CTCN PAM
acuccaguccuauucuccug

SEQ ID NO: 14735 - RNA, 20 nt, Artificial Sequence
  HTT spacer sequence CTCN PAM
ggggugggcuugccuucuuc

SEQ ID NO: 14736 - RNA, 20 nt, Artificial Sequence
  HTT spacer sequence CTCN PAM
cuggggugggcuugccuucu

SEQ ID NO: 14737 - RNA, 20 nt, Artificial Sequence
  HTT spacer sequence CTCN PAM
ucucucuggggugggcuugc

SEQ ID NO: 14738 - RNA, 20 nt, Artificial Sequence
  HTT spacer sequence CTCN PAM
aagcaagcaguggucagaaa

SEQ ID NO: 14739 - RNA, 20 nt, Artificial Sequence
  HTT spacer sequence CTCN PAM
agcuaaggcuuggaguaguc

SEQ ID NO: 14740 - RNA, 20 nt, Artificial Sequence
  HTT spacer sequence CTCN PAM
aagccuuagcuggagcaaua

SEQ ID NO: 14741 - RNA, 20 nt, Artificial Sequence
  HTT spacer sequence CTCN PAM
aaugcuguuucacugcaaaa

SEQ ID NO: 14742 - RNA, 20 nt, Artificial Sequence
  HTT spacer sequence CTCN PAM
cacuacaguacccaccuuau

SEQ ID NO: 14743 - RNA, 20 nt, Artificial Sequence
  HTT spacer sequence CTCN PAM
cacugccucccacuacagua

SEQ ID NO: 14744 - RNA, 20 nt, Artificial Sequence
  HTT spacer sequence CTCN PAM
cacacugccucccacuacag

SEQ ID NO: 14745 - RNA, 20 nt, Artificial Sequence
  HTT spacer sequence CTCN PAM
cgccauuugacaaaugagug

SEQ ID NO: 14746 - RNA, 20 nt, Artificial Sequence
  HTT spacer sequence CTCN PAM
ccauuugacaaaugaguguu

SEQ ID NO: 14747 - RNA, 20 nt, Artificial Sequence
  HTT spacer sequence CTCN PAM
uuugucaaauggcgagagaa

SEQ ID NO: 14748 - RNA, 20 nt, Artificial Sequence
  HTT spacer sequence CTCN PAM
gucuucagccucagugaagg

SEQ ID NO: 14749 - RNA, 20 nt, Artificial Sequence
  HTT spacer sequence CTCN PAM
gugaaggaugagaucagugg

SEQ ID NO: 14750 - RNA, 20 nt, Artificial Sequence
  HTT spacer sequence CTCN PAM
uccuucacugaggcugaaga

SEQ ID NO: 14751 - RNA, 20 nt, Artificial Sequence
  HTT spacer sequence CTCN PAM
acugaucucauccuucacug

SEQ ID NO: 14752 - RNA, 20 nt, Artificial Sequence
  HTT spacer sequence CTCN PAM
ccacugaucucauccuucac

SEQ ID NO: 14753 - RNA, 20 nt, Artificial Sequence
  HTT spacer sequence CTCN PAM
agggucagcaggucaugaca

SEQ ID NO: 14754 - RNA, 20 nt, Artificial Sequence
  HTT spacer sequence CTCN PAM
guggaucuggccagcuguga

SEQ ID NO: 14755 - RNA, 20 nt, Artificial Sequence
  HTT spacer sequence CTCN PAM
gccacugauggggaugagga

SEQ ID NO: 14756 - RNA, 20 nt, Artificial Sequence
  HTT spacer sequence CTCN PAM
uccccaucaguggcagagcu

SEQ ID NO: 14757 - RNA, 20 nt, Artificial Sequence
  HTT spacer sequence CTCN PAM
ucauccccaucaguggcaga

SEQ ID NO: 14758 - RNA, 20 nt, Artificial Sequence
  HTT spacer sequence CTCN PAM
agauauccuccucaucccca

SEQ ID NO: 14759 - RNA, 20 nt, Artificial Sequence
  HTT spacer sequence CTCN PAM
agccaggucagcgccguccc

SEQ ID NO: 14760 - RNA, 20 nt, Artificial Sequence
  HTT spacer sequence CTCN PAM
ucgcccaucagcgacagcuc

SEQ ID NO: 14761 - RNA, 20 nt, Artificial Sequence
  HTT spacer sequence CTCN PAM
cagaccaccaccgaagggcc

SEQ ID NO: 14762 - RNA, 20 nt, Artificial Sequence
  HTT spacer sequence CTCN PAM
gcccacuuacaauuucagaa

SEQ ID NO: 14763 - RNA, 20 nt, Artificial Sequence
  HTT spacer sequence CTCN PAM
aauaaaaaauaaaaaaaaag

SEQ ID NO: 14764 - RNA, 20 nt, Artificial Sequence
  HTT spacer sequence CTCN PAM
gucucaaauaaaaaauaaaa

SEQ ID NO: 14765 - RNA, 20 nt, Artificial Sequence
  HTT spacer sequence CTCN PAM
cuccauagugcaguggaggc

SEQ ID NO: 14766 - RNA, 20 nt, Artificial Sequence
  HTT spacer sequence CTCN PAM
auagugcaguggaggccggg

SEQ ID NO: 14767 - RNA, 20 nt, Artificial Sequence
  HTT spacer sequence CTCN PAM
acugcacuauggagugagac

SEQ ID NO: 14768 - RNA, 20 nt, Artificial Sequence
  HTT spacer sequence CTCN PAM
ugccuguaaucccagcacuu

SEQ ID NO: 14769 - RNA, 20 nt, Artificial Sequence
  HTT spacer sequence CTCN PAM
caaagugcugggauuacagg

SEQ ID NO: 14770 - RNA, 20 nt, Artificial Sequence
  HTT spacer sequence CTCN PAM
gucucccaaagugcugggau

SEQ ID NO: 14771 - RNA, 20 nt, Artificial Sequence
  HTT spacer sequence CTCN PAM
agugauccgccugccucagu

SEQ ID NO: 14772 - RNA, 20 nt, Artificial Sequence
  HTT spacer sequence CTCN PAM
ugaccucaagugauccgccu

SEQ ID NO: 14773 - RNA, 20 nt, Artificial Sequence
  HTT spacer sequence CTCN PAM
aacuccugaccucaagugau

SEQ ID NO: 14774 - RNA, 20 nt, Artificial Sequence
  HTT spacer sequence CTCN PAM
acuaaaaauacaaaaauuag

SEQ ID NO: 14775 - RNA, 20 nt, Artificial Sequence
  HTT spacer sequence CTCN PAM
cuaacagcugggacuacaga

SEQ ID NO: 14776 - RNA, 20 nt, Artificial Sequence
  HTT spacer sequence CTCN PAM
gccucccuaacagcugggac

SEQ ID NO: 14777 - RNA, 20 nt, Artificial Sequence
  HTT spacer sequence CTCN PAM
ugccucagccucccuaacag

SEQ ID NO: 14778 - RNA, 20 nt, Artificial Sequence
  HTT spacer sequence CTCN PAM
agcaauucuccugccucagc

SEQ ID NO: 14779 - RNA, 20 nt, Artificial Sequence
  HTT spacer sequence CTCN PAM
caggcucaagcaauucuccu

SEQ ID NO: 14780 - RNA, 20 nt, Artificial Sequence
  HTT spacer sequence CTCN PAM
gccucccaggcucaagcaau

SEQ ID NO: 14781 - RNA, 20 nt, Artificial Sequence
  HTT spacer sequence CTCN PAM
uugcaaccucugccucccag

SEQ ID NO: 14782 - RNA, 20 nt, Artificial Sequence
  HTT spacer sequence CTCN PAM
gcucauugcaaccucugccu

SEQ ID NO: 14783 - RNA, 20 nt, Artificial Sequence
  HTT spacer sequence CTCN PAM
agcccgggcaacagagcaag

SEQ ID NO: 14784 - RNA, 20 nt, Artificial Sequence
  HTT spacer sequence CTCN PAM
guugcccgggcuggagugca

SEQ ID NO: 14785 - RNA, 20 nt, Artificial Sequence
  HTT spacer sequence CTCN PAM
auuucaaaaaaaauaaaaaa

SEQ ID NO: 14786 - RNA, 20 nt, Artificial Sequence
  HTT spacer sequence CTCN PAM
uucucagcccacugcaacuu

SEQ ID NO: 14787 - RNA, 20 nt, Artificial Sequence
  HTT spacer sequence CTCN PAM
gcccacugcaacuucugccu

SEQ ID NO: 14788 - RNA, 20 nt, Artificial Sequence
  HTT spacer sequence CTCN PAM
caggcucgagcgauucuccc

SEQ ID NO: 14789 - RNA, 20 nt, Artificial Sequence
  HTT spacer sequence CTCN PAM
agcgauucucccgccucagc

SEQ ID NO: 14790 - RNA, 20 nt, Artificial Sequence
  HTT spacer sequence CTCN PAM
agccugggaggcagaaguug

SEQ ID NO: 14791 - RNA, 20 nt, Artificial Sequence
  HTT spacer sequence CTCN PAM
cgccucagccuccugaguag

SEQ ID NO: 14792 - RNA, 20 nt, Artificial Sequence
  HTT spacer sequence CTCN PAM
gccuccugaguaggugggau

SEQ ID NO: 14793 - RNA, 20 nt, Artificial Sequence
  HTT spacer sequence CTCN PAM
ugaguaggugggauuacagg

SEQ ID NO: 14794 - RNA, 20 nt, Artificial Sequence
  HTT spacer sequence CTCN PAM
ggaggcugaggcgggagaau

SEQ ID NO: 14795 - RNA, 20 nt, Artificial Sequence
  HTT spacer sequence CTCN PAM
gcuaauguuuguauuuucag

SEQ ID NO: 14796 - RNA, 20 nt, Artificial Sequence
  HTT spacer sequence CTCN PAM
acugaaaauacaaacauuag

SEQ ID NO: 14797 - RNA, 20 nt, Artificial Sequence
  HTT spacer sequence CTCN PAM
aacuccugaccuuagaugau

SEQ ID NO: 14798 - RNA, 20 nt, Artificial Sequence
  HTT spacer sequence CTCN PAM
ugaccuuagaugauccaccc

SEQ ID NO: 14799 - RNA, 20 nt, Artificial Sequence
  HTT spacer sequence CTCN PAM
uaaaguauugggauuauagu

SEQ ID NO: 14800 - RNA, 20 nt, Artificial Sequence
  HTT spacer sequence CTCN PAM
caacuauaaucccaauacuu

SEQ ID NO: 14801 - RNA, 20 nt, Artificial Sequence
  HTT spacer sequence CTCN PAM
aaagauggcagguggcaggg

SEQ ID NO: 14802 - RNA, 20 nt, Artificial Sequence
  HTT spacer sequence CTCN PAM
agggaagaacucaaaagaug

SEQ ID NO: 14803 - RNA, 20 nt, Artificial Sequence
  HTT spacer sequence CTCN PAM
ugcuuguucucuuguuaucu

SEQ ID NO: 14804 - RNA, 20 nt, Artificial Sequence
  HTT spacer sequence CTCN PAM
uguuaucuaauaccccuauu

SEQ ID NO: 14805 - RNA, 20 nt, Artificial Sequence
  HTT spacer sequence CTCN PAM
auuaaugaucuaagcugcgc

SEQ ID NO: 14806 - RNA, 20 nt, Artificial Sequence
  HTT spacer sequence CTCN PAM
ccauuaaugaucuaagcugc

SEQ ID NO: 14807 - RNA, 20 nt, Artificial Sequence
  HTT spacer sequence CTCN PAM
ucugauaccuucacugaagg

SEQ ID NO: 14808 - RNA, 20 nt, Artificial Sequence
  HTT spacer sequence CTCN PAM
guguucaacacaaaagacac

SEQ ID NO: 14809 - RNA, 20 nt, Artificial Sequence
  HTT spacer sequence CTCN PAM
gcuaaaauugagugcauuuu

SEQ ID NO: 14810 - RNA, 20 nt, Artificial Sequence
  HTT spacer sequence CTCN PAM
auuuuagcagaguucauaua

SEQ ID NO: 14811 - RNA, 20 nt, Artificial Sequence
  HTT spacer sequence CTCN PAM
uuaaggauuuuuaaaaauaa

SEQ ID NO: 14812 - RNA, 20 nt, Artificial Sequence
  HTT spacer sequence CTCN PAM
ucucuaaguuaguggacaaa

SEQ ID NO: 14813 - RNA, 20 nt, Artificial Sequence
  HTT spacer sequence CTCN PAM
aaguuaguggacaaaaaacc

SEQ ID NO: 14814 - RNA, 20 nt, Artificial Sequence
  HTT spacer sequence CTCN PAM
uggauagucuaauaauguuu

SEQ ID NO: 14815 - RNA, 20 nt, Artificial Sequence
  HTT spacer sequence CTCN PAM
acauggacuuguagcaaaca

SEQ ID NO: 14816 - RNA, 20 nt, Artificial Sequence
  HTT spacer sequence CTCN PAM
auuuuauuuucaguuuuaaa

SEQ ID NO: 14817 - RNA, 20 nt, Artificial Sequence
  HTT spacer sequence CTCN PAM
guaaccuuuugaucauguaa

SEQ ID NO: 14818 - RNA, 20 nt, Artificial Sequence
  HTT spacer sequence CTCN PAM
guucccauugaacucuauuc

SEQ ID NO: 14819 - RNA, 20 nt, Artificial Sequence
  HTT spacer sequence CTCN PAM
auuccuccuuucccgccaag

SEQ ID NO: 14820 - RNA, 20 nt, Artificial Sequence
  HTT spacer sequence CTCN PAM
uuucccgccaagucccuggc

SEQ ID NO: 14821 - RNA, 20 nt, Artificial Sequence
  HTT spacer sequence CTCN PAM
uauacuuuaggagucacaca

SEQ ID NO: 14822 - RNA, 20 nt, Artificial Sequence
  HTT spacer sequence CTCN PAM
uaaaguauaugagaacccaa

SEQ ID NO: 14823 - RNA, 20 nt, Artificial Sequence
  HTT spacer sequence CTCN PAM
ugcauguuguagccuauguu

SEQ ID NO: 14824 - RNA, 20 nt, Artificial Sequence
  HTT spacer sequence CTCN PAM
guccauggacacuuguauug

SEQ ID NO: 14825 - RNA, 20 nt, Artificial Sequence
  HTT spacer sequence CTCN PAM
uggagacucugcuuuccauu

SEQ ID NO: 14826 - RNA, 20 nt, Artificial Sequence
  HTT spacer sequence CTCN PAM
aggagcuaucuguacaccca

SEQ ID NO: 14827 - RNA, 20 nt, Artificial Sequence
  HTT spacer sequence CTCN PAM
gcuuuccauuuuuuuggcua

SEQ ID NO: 14828 - RNA, 20 nt, Artificial Sequence
  HTT spacer sequence CTCN PAM
auuucuggguauuuagccaa

SEQ ID NO: 14829 - RNA, 20 nt, Artificial Sequence
  HTT spacer sequence CTCN PAM
augauaugaauguuuuaaau

SEQ ID NO: 14830 - RNA, 20 nt, Artificial Sequence
  HTT spacer sequence CTCN PAM
uaaauugcaaagacuaaauc

SEQ ID NO: 14831 - RNA, 20 nt, Artificial Sequence
  HTT spacer sequence CTCN PAM
uauuuccaacuugcuguaaa

SEQ ID NO: 14832 - RNA, 20 nt, Artificial Sequence
  HTT spacer sequence CTCN PAM
aaaaaaauuccaauguggac

SEQ ID NO: 14833 - RNA, 20 nt, Artificial Sequence
  HTT spacer sequence CTCN PAM
aaaaacuccaaaaaaauucc

SEQ ID NO: 14834 - RNA, 20 nt, Artificial Sequence
  HTT spacer sequence CTCN PAM
auuagcucuaaaaacuccaa

SEQ ID NO: 14835 - RNA, 20 nt, Artificial Sequence
  HTT spacer sequence CTCN PAM
uucccacuacauuaugaaaa

SEQ ID NO: 14836 - RNA, 20 nt, Artificial Sequence
  HTT spacer sequence CTCN PAM
uagcaguuuccaugcgugca

SEQ ID NO: 14837 - RNA, 20 nt, Artificial Sequence
  HTT spacer sequence CTCN PAM
ucugucauuuauuucaaggc

SEQ ID NO: 14838 - RNA, 20 nt, Artificial Sequence
  HTT spacer sequence CTCN PAM
uuccucauugcacuuccaug

SEQ ID NO: 14839 - RNA, 20 nt, Artificial Sequence
  HTT spacer sequence CTCN PAM
uugcacuuccauguuggagg

SEQ ID NO: 14840 - RNA, 20 nt, Artificial Sequence
  HTT spacer sequence CTCN PAM
aacauggaagugcaaugagg

SEQ ID NO: 14841 - RNA, 20 nt, Artificial Sequence
  HTT spacer sequence CTCN PAM
uggugaucacacuucaaaau

SEQ ID NO: 14842 - RNA, 20 nt, Artificial Sequence
  HTT spacer sequence CTCN PAM
cagccccccuugaaccguuu

SEQ ID NO: 14843 - RNA, 20 nt, Artificial Sequence
  HTT spacer sequence CTCN PAM
ucuucauccuggggcugucc

SEQ ID NO: 14844 - RNA, 20 nt, Artificial Sequence
  HTT spacer sequence CTCN PAM
gaggccuucaggaacucuuc

SEQ ID NO: 14845 - RNA, 20 nt, Artificial Sequence
  HTT spacer sequence CTCN PAM
gaggcuucaucaggaagaau

SEQ ID NO: 14846 - RNA, 20 nt, Artificial Sequence
  HTT spacer sequence CTCN PAM
uccauggguauguggacuac

SEQ ID NO: 14847 - RNA, 20 nt, Artificial Sequence
  HTT spacer sequence CTCN PAM
gaaaacaguaucaaaggacu

SEQ ID NO: 14848 - RNA, 20 nt, Artificial Sequence
  HTT spacer sequence CTCN PAM
auuggucauuuucaucagcu

SEQ ID NO: 14849 - RNA, 20 nt, Artificial Sequence
  HTT spacer sequence CTCN PAM
aaaguauaagauuuagauca

SEQ ID NO: 14850 - RNA, 20 nt, Artificial Sequence
  HTT spacer sequence CTCN PAM
guuuuuaaagcccuucaaca

SEQ ID NO: 14851 - RNA, 20 nt, Artificial Sequence
  HTT spacer sequence CTCN PAM
uguuuuucaauaaaugugcc

SEQ ID NO: 14852 - RNA, 20 nt, Artificial Sequence
  HTT spacer sequence CTCN PAM
acacaaauuuaucaacacug

SEQ ID NO: 14853 - RNA, 20 nt, Artificial Sequence
  HTT spacer sequence CTCN PAM
caacacaaauuuaucaacac

SEQ ID NO: 14854 - RNA, 20 nt, Artificial Sequence
  HTT spacer sequence CTCN PAM
ccuuguuuucuugaucaccc

SEQ ID NO: 14855 - RNA, 20 nt, Artificial Sequence
  HTT spacer sequence CTCN PAM
agccuaugucccucaccuug

SEQ ID NO: 14856 - RNA, 20 nt, Artificial Sequence
  HTT spacer sequence CTCN PAM
gaaacaccaagucgucucaa

SEQ ID NO: 14857 - RNA, 20 nt, Artificial Sequence
  HTT spacer sequence CTCN PAM
cacaagcucagaaacaccaa

SEQ ID NO: 14858 - RNA, 20 nt, Artificial Sequence
  HTT spacer sequence CTCN PAM
ucccaggccuguuguuuucu

SEQ ID NO: 14859 - RNA, 20 nt, Artificial Sequence
  HTT spacer sequence CTCN PAM
aggcuguggguaguaccugg

SEQ ID NO: 14860 - RNA, 20 nt, Artificial Sequence
  HTT spacer sequence CTCN PAM
ggcaauucucaaggcugugg

SEQ ID NO: 14861 - RNA, 20 nt, Artificial Sequence
  HTT spacer sequence CTCN PAM
uuugagagugugccccagac

SEQ ID NO: 14862 - RNA, 20 nt, Artificial Sequence
  HTT spacer sequence CTCN PAM
aaggaggcagaacucaggca

SEQ ID NO: 14863 - RNA, 20 nt, Artificial Sequence
  HTT spacer sequence CTCN PAM
caaaggaggcagaacucagg

SEQ ID NO: 14864 - RNA, 20 nt, Artificial Sequence
  HTT spacer sequence CTCN PAM
cuucauauuaucuuuuuaca

SEQ ID NO: 14865 - RNA, 20 nt, Artificial Sequence
  HTT spacer sequence CTCN PAM
ucauauuaucuuuuuacaug

SEQ ID NO: 14866 - RNA, 20 nt, Artificial Sequence
  HTT spacer sequence CTCN PAM
aggacaaggaauagcguuuc

SEQ ID NO: 14867 - RNA, 20 nt, Artificial Sequence
  HTT spacer sequence CTCN PAM
cuaucuaccaggcccacuuc

SEQ ID NO: 14868 - RNA, 20 nt, Artificial Sequence
  HTT spacer sequence CTCN PAM
uagauuugggcuuccccagg

SEQ ID NO: 14869 - RNA, 20 nt, Artificial Sequence
  HTT spacer sequence CTCN PAM
cugcaugcugcauuuauccc

SEQ ID NO: 14870 - RNA, 20 nt, Artificial Sequence
  HTT spacer sequence CTCN PAM
gacuugucuguuucugcuug

SEQ ID NO: 14871 - RNA, 20 nt, Artificial Sequence
  HTT spacer sequence CTCN PAM
gugaggucaggugugcauau

SEQ ID NO: 14872 - RNA, 20 nt, Artificial Sequence
  HTT spacer sequence CTCN PAM
cagagaccauggccaagcag

SEQ ID NO: 14873 - RNA, 20 nt, Artificial Sequence
  HTT spacer sequence CTCN PAM
uuauccccagcaccuggcuu

SEQ ID NO: 14874 - RNA, 20 nt, Artificial Sequence
  HTT spacer sequence CTCN PAM
ggaacuaucuguugaaugaa

SEQ ID NO: 14875 - RNA, 20 nt, Artificial Sequence
  HTT spacer sequence CTCN PAM
acaauacauucaugcauuag

SEQ ID NO: 14876 - RNA, 20 nt, Artificial Sequence
  HTT spacer sequence CTCN PAM
uacucaacaauacauucaug

SEQ ID NO: 14877 - RNA, 20 nt, Artificial Sequence
  HTT spacer sequence CTCN PAM
uuucuagccuugccgcauca

SEQ ID NO: 14878 - RNA, 20 nt, Artificial Sequence
  HTT spacer sequence CTCN PAM
gcaccucuuguccauugugu

SEQ ID NO: 14879 - RNA, 20 nt, Artificial Sequence
  HTT spacer sequence CTCN PAM
uguccauuguguccgccuuu

SEQ ID NO: 14880 - RNA, 20 nt, Artificial Sequence
  HTT spacer sequence CTCN PAM
ccauuuuuucccccuguuag

SEQ ID NO: 14881 - RNA, 20 nt, Artificial Sequence
  HTT spacer sequence CTCN PAM
gaaaccuaguuauuuccuuc

SEQ ID NO: 14882 - RNA, 20 nt, Artificial Sequence
  HTT spacer sequence CTCN PAM
gcugcacgcaaggcaaaaac

SEQ ID NO: 14883 - RNA, 20 nt, Artificial Sequence
  HTT spacer sequence CTCN PAM
gauucuacuuccucugcugc

SEQ ID NO: 14884 - RNA, 20 nt, Artificial Sequence
  HTT spacer sequence CTCN PAM
uccucagauucuacuuccuc

SEQ ID NO: 14885 - RNA, 20 nt, Artificial Sequence
  HTT spacer sequence CTCN PAM
gcuagugaaaaccaaacuca

SEQ ID NO: 14886 - RNA, 20 nt, Artificial Sequence
  HTT spacer sequence CTCN PAM
ccucggcuagugaaaaccaa

SEQ ID NO: 14887 - RNA, 20 nt, Artificial Sequence
  HTT spacer sequence CTCN PAM
cuccccucggcuagugaaaa

SEQ ID NO: 14888 - RNA, 20 nt, Artificial Sequence
  HTT spacer sequence CTCN PAM
caucauuuccucccuccccu

SEQ ID NO: 14889 - RNA, 20 nt, Artificial Sequence
  HTT spacer sequence CTCN PAM
aacaacagauuguuuucaaa

SEQ ID NO: 14890 - RNA, 20 nt, Artificial Sequence
  HTT spacer sequence CTCN PAM
caucccuguccggaaccagc

SEQ ID NO: 14891 - RNA, 20 nt, Artificial Sequence
  HTT spacer sequence CTCN PAM
gcugugugggagcagcugug

SEQ ID NO: 14892 - RNA, 20 nt, Artificial Sequence
  HTT spacer sequence CTCN PAM
cacacagcugagggccaggg

SEQ ID NO: 14893 - RNA, 20 nt, Artificial Sequence
  HTT spacer sequence CTCN PAM
acccggaaucuuucuucagc

SEQ ID NO: 14894 - RNA, 20 nt, Artificial Sequence
  HTT spacer sequence CTCN PAM
auaaaguuccucuugacacc

SEQ ID NO: 14895 - RNA, 20 nt, Artificial Sequence
  HTT spacer sequence CTCN PAM
ugacaccacggaauacccug

SEQ ID NO: 14896 - RNA, 20 nt, Artificial Sequence
  HTT spacer sequence CTCN PAM
gauuuaaucauuauuguaaa

SEQ ID NO: 14897 - RNA, 20 nt, Artificial Sequence
  HTT spacer sequence CTCN PAM
aaaacuaaaauagucaauac

SEQ ID NO: 14898 - RNA, 20 nt, Artificial Sequence
  HTT spacer sequence CTCN PAM
aaacacuuacugcucuaaaa

SEQ ID NO: 14899 - RNA, 20 nt, Artificial Sequence
  HTT spacer sequence CTCN PAM
ucagaaaacacaugaauagu

SEQ ID NO: 14900 - RNA, 20 nt, Artificial Sequence
  HTT spacer sequence CTCN PAM
auggguuucaucuaaaggga

SEQ ID NO: 14901 - RNA, 20 nt, Artificial Sequence
  HTT spacer sequence CTCN PAM
ucuauggguuucaucuaaag

SEQ ID NO: 14902 - RNA, 20 nt, Artificial Sequence
  HTT spacer sequence CTCN PAM
gcacguaagagccaacauau

SEQ ID NO: 14903 - RNA, 20 nt, Artificial Sequence
  HTT spacer sequence CTCN PAM
uacgugcugagguuucuacu

SEQ ID NO: 14904 - RNA, 20 nt, Artificial Sequence
  HTT spacer sequence CTCN PAM
gcgccacugcgaccaggcac

SEQ ID NO: 14905 - RNA, 20 nt, Artificial Sequence
  HTT spacer sequence CTCN PAM
gccaggccaggcauucacac

SEQ ID NO: 14906 - RNA, 20 nt, Artificial Sequence
  HTT spacer sequence CTCN PAM
gggugagugggaaccaggac

SEQ ID NO: 14907 - RNA, 20 nt, Artificial Sequence
  HTT spacer sequence CTCN PAM
cccugagugugaaugccugg

SEQ ID NO: 14908 - RNA, 20 nt, Artificial Sequence
  HTT spacer sequence CTCN PAM
gccaguccugguucccacuc

SEQ ID NO: 14909 - RNA, 20 nt, Artificial Sequence
  HTT spacer sequence CTCN PAM
aucgcgcccaugcuuacuau

SEQ ID NO: 14910 - RNA, 20 nt, Artificial Sequence
  HTT spacer sequence CTCN PAM
auaguaagcaugggcgcgau

SEQ ID NO: 14911 - RNA, 20 nt, Artificial Sequence
  HTT spacer sequence CTCN PAM
uucucucuuuuucuuugggu

SEQ ID NO: 14912 - RNA, 20 nt, Artificial Sequence
  HTT spacer sequence CTCN PAM
cuuuuucuuugggugagagg

SEQ ID NO: 14913 - RNA, 20 nt, Artificial Sequence
  HTT spacer sequence CTCN PAM
uuuucuuugggugagagggu

SEQ ID NO: 14914 - RNA, 20 nt, Artificial Sequence
  HTT spacer sequence CTCN PAM
cccaaagaaaaagagagaac

SEQ ID NO: 14915 - RNA, 20 nt, Artificial Sequence
  HTT spacer sequence CTCN PAM
cacccaaagaaaaagagaga

SEQ ID NO: 14916 - RNA, 20 nt, Artificial Sequence
  HTT spacer sequence CTCN PAM
uauaaauucaaaaacacaag

SEQ ID NO: 14917 - RNA, 20 nt, Artificial Sequence
  HTT spacer sequence CTCN PAM
auaccacagacuuucuggau

SEQ ID NO: 14918 - RNA, 20 nt, Artificial Sequence
  HTT spacer sequence CTCN PAM
aauucuuaaauccugaaacu

SEQ ID NO: 14919 - RNA, 20 nt, Artificial Sequence
  HTT spacer sequence CTCN PAM
ucacaccucuuuuucucuuu

SEQ ID NO: 14920 - RNA, 20 nt, Artificial Sequence
  HTT spacer sequence CTCN PAM
uuuucucuuuccugagaauu

SEQ ID NO: 14921 - RNA, 20 nt, Artificial Sequence
  HTT spacer sequence CTCN PAM
uuccugagaauuaagcuuuu

SEQ ID NO: 14922 - RNA, 20 nt, Artificial Sequence
  HTT spacer sequence CTCN PAM
ggaaagagaaaaagaggugu

SEQ ID NO: 14923 - RNA, 20 nt, Artificial Sequence
  HTT spacer sequence CTCN PAM
aaacaaaagcuuaauucuca

SEQ ID NO: 14924 - RNA, 20 nt, Artificial Sequence
  HTT spacer sequence CTCN PAM
gccauggaacaauucccuac

SEQ ID NO: 14925 - RNA, 20 nt, Artificial Sequence
  HTT spacer sequence CTCN PAM
acagaggaacaguaugucuc

SEQ ID NO: 14926 - RNA, 20 nt, Artificial Sequence
  HTT spacer sequence CTCN PAM
guggagauaaauugcucagc

SEQ ID NO: 14927 - RNA, 20 nt, Artificial Sequence
  HTT spacer sequence CTCN PAM
gacaucuugaacuacaucga

SEQ ID NO: 14928 - RNA, 20 nt, Artificial Sequence
  HTT spacer sequence CTCN PAM
augaucgauguaguucaaga

SEQ ID NO: 14929 - RNA, 20 nt, Artificial Sequence
  HTT spacer sequence CTCN PAM
aaccugugggucuccaugau

SEQ ID NO: 14930 - RNA, 20 nt, Artificial Sequence
  HTT spacer sequence CTCN PAM
ucgaaccugugggucuccau

SEQ ID NO: 14931 - RNA, 20 nt, Artificial Sequence
  HTT spacer sequence CTCN PAM
gugggacccucaucugcucc

SEQ ID NO: 14932 - RNA, 20 nt, Artificial Sequence
  HTT spacer sequence CTCN PAM
ucugcuccauccucagcagg

SEQ ID NO: 14933 - RNA, 20 nt, Artificial Sequence
  HTT spacer sequence CTCN PAM
auccucagcaggucccgcuu

SEQ ID NO: 14934 - RNA, 20 nt, Artificial Sequence
  HTT spacer sequence CTCN PAM
gcaggucccgcuuccacgug

SEQ ID NO: 14935 - RNA, 20 nt, Artificial Sequence
  HTT spacer sequence CTCN PAM
cacguggaagcgggaccugc

SEQ ID NO: 14936 - RNA, 20 nt, Artificial Sequence
  HTT spacer sequence CTCN PAM
cagguaacggccaguuuuuc

SEQ ID NO: 14937 - RNA, 20 nt, Artificial Sequence
  HTT spacer sequence CTCN PAM
uccuucaguguuuuccgcag

SEQ ID NO: 14938 - RNA, 20 nt, Artificial Sequence
  HTT spacer sequence CTCN PAM
cagcuguacaagcuaacuug

SEQ ID NO: 14939 - RNA, 20 nt, Artificial Sequence
  HTT spacer sequence CTCN PAM
cccucacagcuguacaagcu

SEQ ID NO: 14940 - RNA, 20 nt, Artificial Sequence
  HTT spacer sequence CTCN PAM
aauuuuaauuguagcaauga

SEQ ID NO: 14941 - RNA, 20 nt, Artificial Sequence
  HTT spacer sequence CTCN PAM
aaagcuguaaccaguaauac

SEQ ID NO: 14942 - RNA, 20 nt, Artificial Sequence
  HTT spacer sequence CTCN PAM
cagcuuuagaaagaaaacgu

SEQ ID NO: 14943 - RNA, 20 nt, Artificial Sequence
  HTT spacer sequence CTCN PAM
gcuuuagaaagaaaacguug

SEQ ID NO: 14944 - RNA, 20 nt, Artificial Sequence
  HTT spacer sequence CTCN PAM
gaauauuuguuugaaauaga

SEQ ID NO: 14945 - RNA, 20 nt, Artificial Sequence
  HTT spacer sequence CTCN PAM
uccuaaaggauauauuuaga

SEQ ID NO: 14946 - RNA, 20 nt, Artificial Sequence
  HTT spacer sequence CTCN PAM
caccuguaaucugaccacuu

SEQ ID NO: 14947 - RNA, 20 nt, Artificial Sequence
  HTT spacer sequence CTCN PAM
caaaguggucagauuacagg

SEQ ID NO: 14948 - RNA, 20 nt, Artificial Sequence
  HTT spacer sequence CTCN PAM
agcaauccuuccaccuuggc

SEQ ID NO: 14949 - RNA, 20 nt, Artificial Sequence
  HTT spacer sequence CTCN PAM
ugggcucaagcaauccuucc

SEQ ID NO: 14950 - RNA, 20 nt, Artificial Sequence
  HTT spacer sequence CTCN PAM
gcuacucgggaagcugaggu

SEQ ID NO: 14951 - RNA, 20 nt, Artificial Sequence
  HTT spacer sequence CTCN PAM
ggaagcugagguggaggggg

SEQ ID NO: 14952 - RNA, 20 nt, Artificial Sequence
  HTT spacer sequence CTCN PAM
gcuucccgaguagcugagac

SEQ ID NO: 14953 - RNA, 20 nt, Artificial Sequence
  HTT spacer sequence CTCN PAM
accucagcuucccgaguagc

SEQ ID NO: 14954 - RNA, 20 nt, Artificial Sequence
  HTT spacer sequence CTCN PAM
agcaauccccccuccaccuc

SEQ ID NO: 14955 - RNA, 20 nt, Artificial Sequence
  HTT spacer sequence CTCN PAM
ggggcucaagcaaucccccc

SEQ ID NO: 14956 - RNA, 20 nt, Artificial Sequence
  HTT spacer sequence CTCN PAM
agccugggcaacagagugag

SEQ ID NO: 14957 - RNA, 20 nt, Artificial Sequence
  HTT spacer sequence CTCN PAM
guugcccaggcuagagggca

SEQ ID NO: 14958 - RNA, 20 nt, Artificial Sequence
  HTT spacer sequence CTCN PAM
cucuguugcccaggcuagag

SEQ ID NO: 14959 - RNA, 20 nt, Artificial Sequence
  HTT spacer sequence CTCN PAM
aaaauaauaguaauaauaau

SEQ ID NO: 14960 - RNA, 20 nt, Artificial Sequence
  HTT spacer sequence CTCN PAM
uaccauacuaugggccuagc

SEQ ID NO: 14961 - RNA, 20 nt, Artificial Sequence
  HTT spacer sequence CTCN PAM
cuuuaacucuuaccauacua

SEQ ID NO: 14962 - RNA, 20 nt, Artificial Sequence
  HTT spacer sequence CTCN PAM
accucuguuucuguauaaag

SEQ ID NO: 14963 - RNA, 20 nt, Artificial Sequence
  HTT spacer sequence CTCN PAM
guuucuguauaaaguggaau

SEQ ID NO: 14964 - RNA, 20 nt, Artificial Sequence
  HTT spacer sequence CTCN PAM
auucuuuaagugauagcaug

SEQ ID NO: 14965 - RNA, 20 nt, Artificial Sequence
  HTT spacer sequence CTCN PAM
uaagucacaacuggccaguc

SEQ ID NO: 14966 - RNA, 20 nt, Artificial Sequence
  HTT spacer sequence CTCN PAM
uguugacuggccaguuguga

SEQ ID NO: 14967 - RNA, 20 nt, Artificial Sequence
  HTT spacer sequence CTCN PAM
cccuuuuaaaaugucaugcc

SEQ ID NO: 14968 - RNA, 20 nt, Artificial Sequence
  HTT spacer sequence CTCN PAM
cuaguuuccagguuuucagu

SEQ ID NO: 14969 - RNA, 20 nt, Artificial Sequence
  HTT spacer sequence CTCN PAM
aguuuccagguuuucaguca

SEQ ID NO: 14970 - RNA, 20 nt, Artificial Sequence
  HTT spacer sequence CTCN PAM
aaaaagacacaacugacuga

SEQ ID NO: 14971 - RNA, 20 nt, Artificial Sequence
  HTT spacer sequence CTCN PAM
uagcaugcuuccuucugcuc

SEQ ID NO: 14972 - RNA, 20 nt, Artificial Sequence
  HTT spacer sequence CTCN PAM
aucuuguggcuagcuggggg

SEQ ID NO: 14973 - RNA, 20 nt, Artificial Sequence
  HTT spacer sequence CTCN PAM
ccugcagccccaagcaccca

SEQ ID NO: 14974 - RNA, 20 nt, Artificial Sequence
  HTT spacer sequence CTCN PAM
cgugcuguggaguacauagu

SEQ ID NO: 14975 - RNA, 20 nt, Artificial Sequence
  HTT spacer sequence CTCN PAM
ugcuguggaguacauaguga

SEQ ID NO: 14976 - RNA, 20 nt, Artificial Sequence
  HTT spacer sequence CTCN PAM
acagcacgagagaacagaac

SEQ ID NO: 14977 - RNA, 20 nt, Artificial Sequence
  HTT spacer sequence CTCN PAM
gacccagggguaggaacaag

SEQ ID NO: 14978 - RNA, 20 nt, Artificial Sequence
  HTT spacer sequence CTCN PAM
guaacugaucaauguuugug

SEQ ID NO: 14979 - RNA, 20 nt, Artificial Sequence
  HTT spacer sequence CTCN PAM
aacagcaacuucacaaacau

SEQ ID NO: 14980 - RNA, 20 nt, Artificial Sequence
  HTT spacer sequence CTCN PAM
caaacagcaacuucacaaac

SEQ ID NO: 14981 - RNA, 20 nt, Artificial Sequence
  HTT spacer sequence CTCN PAM
guaaauacaagcuuaaaagu

SEQ ID NO: 14982 - RNA, 20 nt, Artificial Sequence
  HTT spacer sequence CTCN PAM
agaacauugauuaagaauac

SEQ ID NO: 14983 - RNA, 20 nt, Artificial Sequence
  HTT spacer sequence CTCN PAM
caagaacauugauuaagaau

SEQ ID NO: 14984 - RNA, 20 nt, Artificial Sequence
  HTT spacer sequence CTCN PAM
ucaacacacaauguucuggg

SEQ ID NO: 14985 - RNA, 20 nt, Artificial Sequence
  HTT spacer sequence CTCN PAM
aaccgucaagacgcggguac

SEQ ID NO: 14986 - RNA, 20 nt, Artificial Sequence
  HTT spacer sequence CTCN PAM
guacccgcgucuugacgguu

SEQ ID NO: 14987 - RNA, 20 nt, Artificial Sequence
  HTT spacer sequence CTCN PAM
ugccuuggaccuuguguucc

SEQ ID NO: 14988 - RNA, 20 nt, Artificial Sequence
  HTT spacer sequence CTCN PAM
ugacacaguucuggaacaca

SEQ ID NO: 14989 - RNA, 20 nt, Artificial Sequence
  HTT spacer sequence CTCN PAM
gcagcagcagcuacagugag

SEQ ID NO: 14990 - RNA, 20 nt, Artificial Sequence
  HTT spacer sequence CTCN PAM
cuguagcugcugcugcagag

SEQ ID NO: 14991 - RNA, 20 nt, Artificial Sequence
  HTT spacer sequence CTCN PAM
gaggaacaguuccuauuggc

SEQ ID NO: 14992 - RNA, 20 nt, Artificial Sequence
  HTT spacer sequence CTCN PAM
gagucagcacaucgaugauc

SEQ ID NO: 14993 - RNA, 20 nt, Artificial Sequence
  HTT spacer sequence CTCN PAM
ccagccaauaggaacuguuc

SEQ ID NO: 14994 - RNA, 20 nt, Artificial Sequence
  HTT spacer sequence CTCN PAM
guccucaccagccaauagga

SEQ ID NO: 14995 - RNA, 20 nt, Artificial Sequence
  HTT spacer sequence CTCN PAM
gcaaggguuuccagaagcuc

SEQ ID NO: 14996 - RNA, 20 nt, Artificial Sequence
  HTT spacer sequence CTCN PAM
cuuaccugaagucaaucucu

SEQ ID NO: 14997 - RNA, 20 nt, Artificial Sequence
  HTT spacer sequence CTCN PAM
auugaaaguucugggaucac

SEQ ID NO: 14998 - RNA, 20 nt, Artificial Sequence
  HTT spacer sequence CTCN PAM
gauuucugauggacagggua

SEQ ID NO: 14999 - RNA, 20 nt, Artificial Sequence
  HTT spacer sequence CTCN PAM
ucccaguggcuuuuugcuga

SEQ ID NO: 15000 - RNA, 20 nt, Artificial Sequence
  HTT spacer sequence CTCN PAM
caguggcuuuuugcugaacu

SEQ ID NO: 15001 - RNA, 20 nt, Artificial Sequence
  HTT spacer sequence CTCN PAM
aaauaaauaauaaaauaaaa

SEQ ID NO: 15002 - RNA, 20 nt, Artificial Sequence
  HTT spacer sequence CTCN PAM
gucgcccaggcuugaaugca

SEQ ID NO: 15003 - RNA, 20 nt, Artificial Sequence
  HTT spacer sequence CTCN PAM
cugaagcuuugaacucuagg

SEQ ID NO: 15004 - RNA, 20 nt, Artificial Sequence
  HTT spacer sequence CTCN PAM
aggacucaagugguccuccu

SEQ ID NO: 15005 - RNA, 20 nt, Artificial Sequence
  HTT spacer sequence CTCN PAM
agugguccuccugccucagc

SEQ ID NO: 15006 - RNA, 20 nt, Artificial Sequence
  HTT spacer sequence CTCN PAM
ugccucagccucccgauuag

SEQ ID NO: 15007 - RNA, 20 nt, Artificial Sequence
  HTT spacer sequence CTCN PAM
gccucccgauuagcuaggag

SEQ ID NO: 15008 - RNA, 20 nt, Artificial Sequence
  HTT spacer sequence CTCN PAM
cgauuagcuaggagaauagg

SEQ ID NO: 15009 - RNA, 20 nt, Artificial Sequence
  HTT spacer sequence CTCN PAM
uagcuaaucgggaggcugag

SEQ ID NO: 15010 - RNA, 20 nt, Artificial Sequence
  HTT spacer sequence CTCN PAM
aacuccugggcuugauugau

SEQ ID NO: 15011 - RNA, 20 nt, Artificial Sequence
  HTT spacer sequence CTCN PAM
ugggcuugauugauccucca

SEQ ID NO: 15012 - RNA, 20 nt, Artificial Sequence
  HTT spacer sequence CTCN PAM
aucuuggccucccaaagugc

SEQ ID NO: 15013 - RNA, 20 nt, Artificial Sequence
  HTT spacer sequence CTCN PAM
caaagugcugggauuacagg

SEQ ID NO: 15014 - RNA, 20 nt, Artificial Sequence
  HTT spacer sequence CTCN PAM
ugccuguaaucccagcacuu

SEQ ID NO: 15015 - RNA, 20 nt, Artificial Sequence
  HTT spacer sequence CTCN PAM
ucuacuuauauuuuaaaauu

SEQ ID NO: 15016 - RNA, 20 nt, Artificial Sequence
  HTT spacer sequence CTCN PAM
ucauuuaaguauucuggaua

SEQ ID NO: 15017 - RNA, 20 nt, Artificial Sequence
  HTT spacer sequence CTCN PAM
uuuauucccacuauccagaa

SEQ ID NO: 15018 - RNA, 20 nt, Artificial Sequence
  HTT spacer sequence CTCN PAM
ucauuauacugaaccuaggu

SEQ ID NO: 15019 - RNA, 20 nt, Artificial Sequence
  HTT spacer sequence CTCN PAM
cguuuuuuaauugcaacaaa

SEQ ID NO: 15020 - RNA, 20 nt, Artificial Sequence
  HTT spacer sequence CTCN PAM
cugcaaccacagcucacguu

SEQ ID NO: 15021 - RNA, 20 nt, Artificial Sequence
  HTT spacer sequence CTCN PAM
guugccaggcugaagugcaa

SEQ ID NO: 15022 - RNA, 20 nt, Artificial Sequence
  HTT spacer sequence CTCN PAM
cucuguugccaggcugaagu

SEQ ID NO: 15023 - RNA, 20 nt, Artificial Sequence
  HTT spacer sequence CTCN PAM
aaaaaaaaaaaauaacauga

SEQ ID NO: 15024 - RNA, 20 nt, Artificial Sequence
  HTT spacer sequence CTCN PAM
uguuauuuuuuuuuuuuuga

SEQ ID NO: 15025 - RNA, 20 nt, Artificial Sequence
  HTT spacer sequence CTCN PAM
uagaaaaugaaagugccaac

SEQ ID NO: 15026 - RNA, 20 nt, Artificial Sequence
  HTT spacer sequence CTCN PAM
agccaaaacuacucuuagaa

SEQ ID NO: 15027 - RNA, 20 nt, Artificial Sequence
  HTT spacer sequence CTCN PAM
auaaaagguggcuuggaaaa

SEQ ID NO: 15028 - RNA, 20 nt, Artificial Sequence
  HTT spacer sequence CTCN PAM
gcuccacccacagauaggga

SEQ ID NO: 15029 - RNA, 20 nt, Artificial Sequence
  HTT spacer sequence CTCN PAM
acccacagauagggacgcug

SEQ ID NO: 15030 - RNA, 20 nt, Artificial Sequence
  HTT spacer sequence CTCN PAM
gcgucccuaucugugggugg

SEQ ID NO: 15031 - RNA, 20 nt, Artificial Sequence
  HTT spacer sequence CTCN PAM
ugcacgcucagcgucccuau

SEQ ID NO: 15032 - RNA, 20 nt, Artificial Sequence
  HTT spacer sequence CTCN PAM
auaaccugcuaucuugcugc

SEQ ID NO: 15033 - RNA, 20 nt, Artificial Sequence
  HTT spacer sequence CTCN PAM
ccccuucuguggcuugagcc

SEQ ID NO: 15034 - RNA, 20 nt, Artificial Sequence
  HTT spacer sequence CTCN PAM
agccacagaaggggugagcu

SEQ ID NO: 15035 - RNA, 20 nt, Artificial Sequence
  HTT spacer sequence CTCN PAM
guaagugcccuauaaaauug

SEQ ID NO: 15036 - RNA, 20 nt, Artificial Sequence
  HTT spacer sequence CTCN PAM
guaaacuguuuuucuuuuuc

SEQ ID NO: 15037 - RNA, 20 nt, Artificial Sequence
  HTT spacer sequence CTCN PAM
auaagacaguacucaguaaa

SEQ ID NO: 15038 - RNA, 20 nt, Artificial Sequence
  HTT spacer sequence CTCN PAM
caauuccagacucaauaaga

SEQ ID NO: 15039 - RNA, 20 nt, Artificial Sequence
  HTT spacer sequence CTCN PAM
cacaauuccagacucaauaa

SEQ ID NO: 15040 - RNA, 20 nt, Artificial Sequence
  HTT spacer sequence CTCN PAM
auuuauuuaaagccauuggc

SEQ ID NO: 15041 - RNA, 20 nt, Artificial Sequence
  HTT spacer sequence CTCN PAM
aaacaacaaaaaaggccaau

SEQ ID NO: 15042 - RNA, 20 nt, Artificial Sequence
  HTT spacer sequence CTCN PAM
uccaggugcccuggaaggac

SEQ ID NO: 15043 - RNA, 20 nt, Artificial Sequence
  HTT spacer sequence CTCN PAM
ggagcaagcuggcgguaagu

SEQ ID NO: 15044 - RNA, 20 nt, Artificial Sequence
  HTT spacer sequence CTCN PAM
agagcaggcucauccaggug

SEQ ID NO: 15045 - RNA, 20 nt, Artificial Sequence
  HTT spacer sequence CTCN PAM
guaaacacuuaccgccagcu

SEQ ID NO: 15046 - RNA, 20 nt, Artificial Sequence
  HTT spacer sequence CTCN PAM
uuuguuaggcuggugagcuu

SEQ ID NO: 15047 - RNA, 20 nt, Artificial Sequence
  HTT spacer sequence CTCN PAM
ccagccuaacaaaagagcac

SEQ ID NO: 15048 - RNA, 20 nt, Artificial Sequence
  HTT spacer sequence CTCN PAM
aaaaagcucaccagccuaac

SEQ ID NO: 15049 - RNA, 20 nt, Artificial Sequence
  HTT spacer sequence CTCN PAM
guguaaguuuucugcuuuug

SEQ ID NO: 15050 - RNA, 20 nt, Artificial Sequence
  HTT spacer sequence CTCN PAM
ucauuauacagggguaagcg

SEQ ID NO: 15051 - RNA, 20 nt, Artificial Sequence
  HTT spacer sequence CTCN PAM
caaaaauaaaccgcuuaccc

SEQ ID NO: 15052 - RNA, 20 nt, Artificial Sequence
  HTT spacer sequence CTCN PAM
cuuucaccuucuugaaggua

SEQ ID NO: 15053 - RNA, 20 nt, Artificial Sequence
  HTT spacer sequence CTCN PAM
aaaugcauucgucauguuuu

SEQ ID NO: 15054 - RNA, 20 nt, Artificial Sequence
  HTT spacer sequence CTCN PAM
acauuacuagacuuaaaucc

SEQ ID NO: 15055 - RNA, 20 nt, Artificial Sequence
  HTT spacer sequence CTCN PAM
cuagcuuuccaaaauaucuu

SEQ ID NO: 15056 - RNA, 20 nt, Artificial Sequence
  HTT spacer sequence CTCN PAM
cuaaagcuuuuaaaacugca

SEQ ID NO: 15057 - RNA, 20 nt, Artificial Sequence
  HTT spacer sequence CTCN PAM
aaagcuuuuaaaacugcaag

SEQ ID NO: 15058 - RNA, 20 nt, Artificial Sequence
  HTT spacer sequence CTCN PAM
uucuugcaguuuuaaaagcu

SEQ ID NO: 15059 - RNA, 20 nt, Artificial Sequence
  HTT spacer sequence CTCN PAM
auaauguugucauccauuug

SEQ ID NO: 15060 - RNA, 20 nt, Artificial Sequence
  HTT spacer sequence CTCN PAM
aagcaaauggaugacaacau

SEQ ID NO: 15061 - RNA, 20 nt, Artificial Sequence
  HTT spacer sequence CTCN PAM
uuuccuuuuuugguugaagu

SEQ ID NO: 15062 - RNA, 20 nt, Artificial Sequence
  HTT spacer sequence CTCN PAM
uaucuuuuaguacuucaacc

SEQ ID NO: 15063 - RNA, 20 nt, Artificial Sequence
  HTT spacer sequence CTCN PAM
uuccauucucguaucuuuua

SEQ ID NO: 15064 - RNA, 20 nt, Artificial Sequence
  HTT spacer sequence CTCN PAM
cuuuccauucucguaucuuu

SEQ ID NO: 15065 - RNA, 20 nt, Artificial Sequence
  HTT spacer sequence CTCN PAM
acauccuuugaauucuuccc

SEQ ID NO: 15066 - RNA, 20 nt, Artificial Sequence
  HTT spacer sequence CTCN PAM
gauucaggaauacugcucua

SEQ ID NO: 15067 - RNA, 20 nt, Artificial Sequence
  HTT spacer sequence CTCN PAM
uuucagccauucuauucuua

SEQ ID NO: 15068 - RNA, 20 nt, Artificial Sequence
  HTT spacer sequence CTCN PAM
auaguccaaaauuuuuacaa

SEQ ID NO: 15069 - RNA, 20 nt, Artificial Sequence
  HTT spacer sequence CTCN PAM
agguggcagcagaauugaag

SEQ ID NO: 15070 - RNA, 20 nt, Artificial Sequence
  HTT spacer sequence CTCN PAM
augaguuucuuguucaaaau

SEQ ID NO: 15071 - RNA, 20 nt, Artificial Sequence
  HTT spacer sequence CTCN PAM
uagaguauauagcaaaauau

SEQ ID NO: 15072 - RNA, 20 nt, Artificial Sequence
  HTT spacer sequence CTCN PAM
gaaaaagaaaacuauacaca

SEQ ID NO: 15073 - RNA, 20 nt, Artificial Sequence
  HTT spacer sequence CTCN PAM
acuuccaggaauucucagaa

SEQ ID NO: 15074 - RNA, 20 nt, Artificial Sequence
  HTT spacer sequence CTCN PAM
aaaaaaaaauaaaaaaaaaa

SEQ ID NO: 15075 - RNA, 20 nt, Artificial Sequence
  HTT spacer sequence CTCN PAM
gucucaaaaaaaaaauaaaa

SEQ ID NO: 15076 - RNA, 20 nt, Artificial Sequence
  HTT spacer sequence CTCN PAM
auuguccaggugcuaucucg

SEQ ID NO: 15077 - RNA, 20 nt, Artificial Sequence
  HTT spacer sequence CTCN PAM
gcucacugcaaccucugucu

SEQ ID NO: 15078 - RNA, 20 nt, Artificial Sequence
  HTT spacer sequence CTCN PAM
cugcaaccucugucucccug

SEQ ID NO: 15079 - RNA, 20 nt, Artificial Sequence
  HTT spacer sequence CTCN PAM
gucucccugguucaagcgau

SEQ ID NO: 15080 - RNA, 20 nt, Artificial Sequence
  HTT spacer sequence CTCN PAM
cugguucaagcgauucuccu

SEQ ID NO: 15081 - RNA, 20 nt, Artificial Sequence
  HTT spacer sequence CTCN PAM
ugccucagccucccgaguag

SEQ ID NO: 15082 - RNA, 20 nt, Artificial Sequence
  HTT spacer sequence CTCN PAM
gccucccgaguagcugggau

SEQ ID NO: 15083 - RNA, 20 nt, Artificial Sequence
  HTT spacer sequence CTCN PAM
cgaguagcugggauuacagg

SEQ ID NO: 15084 - RNA, 20 nt, Artificial Sequence
  HTT spacer sequence CTCN PAM
ggaggcugaggcaggagaau

SEQ ID NO: 15085 - RNA, 20 nt, Artificial Sequence
  HTT spacer sequence CTCN PAM
acuaaaaauacaaaaauuaa

SEQ ID NO: 15086 - RNA, 20 nt, Artificial Sequence
  HTT spacer sequence CTCN PAM
aacuucugaccccgugaucc

SEQ ID NO: 15087 - RNA, 20 nt, Artificial Sequence
  HTT spacer sequence CTCN PAM
caaagugcugggauuacagg

SEQ ID NO: 15088 - RNA, 20 nt, Artificial Sequence
  HTT spacer sequence CTCN PAM
cgccuguaaucccagcacuu

SEQ ID NO: 15089 - RNA, 20 nt, Artificial Sequence
  HTT spacer sequence CTCN PAM
auaaagcuauuagaagauuu

SEQ ID NO: 15090 - RNA, 20 nt, Artificial Sequence
  HTT spacer sequence CTCN PAM
cuuugaguguauaguaaacu

SEQ ID NO: 15091 - RNA, 20 nt, Artificial Sequence
  HTT spacer sequence CTCN PAM
aagugaguacauuucaagaa

SEQ ID NO: 15092 - RNA, 20 nt, Artificial Sequence
  HTT spacer sequence CTCN PAM
aauuuuaucacauuucuguc

SEQ ID NO: 15093 - RNA, 20 nt, Artificial Sequence
  HTT spacer sequence CTCN PAM
gguuccugccccaacuccua

SEQ ID NO: 15094 - RNA, 20 nt, Artificial Sequence
  HTT spacer sequence CTCN PAM
uaggcagccacucaucuauu

SEQ ID NO: 15095 - RNA, 20 nt, Artificial Sequence
  HTT spacer sequence CTCN PAM
ucuauuuucugucccuuaag

SEQ ID NO: 15096 - RNA, 20 nt, Artificial Sequence
  HTT spacer sequence CTCN PAM
ugccuguaaucccagcacuu

SEQ ID NO: 15097 - RNA, 20 nt, Artificial Sequence
  HTT spacer sequence CTCN PAM
caaagugcugggauuacagg

SEQ ID NO: 15098 - RNA, 20 nt, Artificial Sequence
  HTT spacer sequence CTCN PAM
gccucccaaagugcugggau

SEQ ID NO: 15099 - RNA, 20 nt, Artificial Sequence
  HTT spacer sequence CTCN PAM
agugauccaccaaccucggc

SEQ ID NO: 15100 - RNA, 20 nt, Artificial Sequence
  HTT spacer sequence CTCN PAM
ugaccucaagugauccacca

SEQ ID NO: 15101 - RNA, 20 nt, Artificial Sequence
  HTT spacer sequence CTCN PAM
aacuccugaccucaagugau

SEQ ID NO: 15102 - RNA, 20 nt, Artificial Sequence
  HTT spacer sequence CTCN PAM
acuaaaaauacaaaaauuag

SEQ ID NO: 15103 - RNA, 20 nt, Artificial Sequence
  HTT spacer sequence CTCN PAM
ggaggcugaggcaggagaau

SEQ ID NO: 15104 - RNA, 20 nt, Artificial Sequence
  HTT spacer sequence CTCN PAM
cgaguagcugggauuacagg

SEQ ID NO: 15105 - RNA, 20 nt, Artificial Sequence
  HTT spacer sequence CTCN PAM
gccucccgaguagcugggau

SEQ ID NO: 15106 - RNA, 20 nt, Artificial Sequence
  HTT spacer sequence CTCN PAM
ugccucagccucccgaguag

SEQ ID NO: 15107 - RNA, 20 nt, Artificial Sequence
  HTT spacer sequence CTCN PAM
cagguucaagugauucuccu

SEQ ID NO: 15108 - RNA, 20 nt, Artificial Sequence
  HTT spacer sequence CTCN PAM
gccucccagguucaagugau

SEQ ID NO: 15109 - RNA, 20 nt, Artificial Sequence
  HTT spacer sequence CTCN PAM
cugcaaccuccgccucccag

SEQ ID NO: 15110 - RNA, 20 nt, Artificial Sequence
  HTT spacer sequence CTCN PAM
gcucacugcaaccuccgccu

SEQ ID NO: 15111 - RNA, 20 nt, Artificial Sequence
  HTT spacer sequence CTCN PAM
guugcccagguuggaaggca

SEQ ID NO: 15112 - RNA, 20 nt, Artificial Sequence
  HTT spacer sequence CTCN PAM
cuguugcccagguuggaagg

SEQ ID NO: 15113 - RNA, 20 nt, Artificial Sequence
  HTT spacer sequence CTCN PAM
cucuguugcccagguuggaa

SEQ ID NO: 15114 - RNA, 20 nt, Artificial Sequence
  HTT spacer sequence CTCN PAM
aaacaaacaaagauuuguau

SEQ ID NO: 15115 - RNA, 20 nt, Artificial Sequence
  HTT spacer sequence CTCN PAM
caauuaaguaaaagaagcca

SEQ ID NO: 15116 - RNA, 20 nt, Artificial Sequence
  HTT spacer sequence CTCN PAM
auaauauccaucugauggau

SEQ ID NO: 15117 - RNA, 20 nt, Artificial Sequence
  HTT spacer sequence CTCN PAM
ugaguagaucaccuagaagu

SEQ ID NO: 15118 - RNA, 20 nt, Artificial Sequence
  HTT spacer sequence CTCN PAM
agagaaaugaagacaugucu

SEQ ID NO: 15119 - RNA, 20 nt, Artificial Sequence
  HTT spacer sequence CTCN PAM
ucaaaaacauaccauuguuc

SEQ ID NO: 15120 - RNA, 20 nt, Artificial Sequence
  HTT spacer sequence CTCN PAM
cuuccucccucccuucccua

SEQ ID NO: 15121 - RNA, 20 nt, Artificial Sequence
  HTT spacer sequence CTCN PAM
cucccuucccuacuucccuc

SEQ ID NO: 15122 - RNA, 20 nt, Artificial Sequence
  HTT spacer sequence CTCN PAM
cuucccuacuucccucuccc

SEQ ID NO: 15123 - RNA, 20 nt, Artificial Sequence
  HTT spacer sequence CTCN PAM
cccuuucccuuucccuuccc

SEQ ID NO: 15124 - RNA, 20 nt, Artificial Sequence
  HTT spacer sequence CTCN PAM
cuuucccuuucccuuccccu

SEQ ID NO: 15125 - RNA, 20 nt, Artificial Sequence
  HTT spacer sequence CTCN PAM
gacuucaccauguaaccaaa

SEQ ID NO: 15126 - RNA, 20 nt, Artificial Sequence
  HTT spacer sequence CTCN PAM
ggugacagguguacuaaaau

SEQ ID NO: 15127 - RNA, 20 nt, Artificial Sequence
  HTT spacer sequence CTCN PAM
ccuuccagccuuccgccuug

SEQ ID NO: 15128 - RNA, 20 nt, Artificial Sequence
  HTT spacer sequence CTCN PAM
caaggcggaaggcuggaagg

SEQ ID NO: 15129 - RNA, 20 nt, Artificial Sequence
  HTT spacer sequence CTCN PAM
aauguccauuauaccacacu

SEQ ID NO: 15130 - RNA, 20 nt, Artificial Sequence
  HTT spacer sequence CTCN PAM
gcucccacuucugagaacau

SEQ ID NO: 15131 - RNA, 20 nt, Artificial Sequence
  HTT spacer sequence CTCN PAM
cacuucugagaacauauagc

SEQ ID NO: 15132 - RNA, 20 nt, Artificial Sequence
  HTT spacer sequence CTCN PAM
gaagugggagcugagcugug

SEQ ID NO: 15133 - RNA, 20 nt, Artificial Sequence
  HTT spacer sequence CTCN PAM
cacuaccagaaugugauugu

SEQ ID NO: 15134 - RNA, 20 nt, Artificial Sequence
  HTT spacer sequence CTCN PAM
ccaguacaaauauuucaaaa

SEQ ID NO: 15135 - RNA, 20 nt, Artificial Sequence
  HTT spacer sequence CTCN PAM
uuauuuauuuauuuuuuuug

SEQ ID NO: 15136 - RNA, 20 nt, Artificial Sequence
  HTT spacer sequence CTCN PAM
aaaaaaauaaauaaauaaag

SEQ ID NO: 15137 - RNA, 20 nt, Artificial Sequence
  HTT spacer sequence CTCN PAM
uucuaugaugcccaggcugg

SEQ ID NO: 15138 - RNA, 20 nt, Artificial Sequence
  HTT spacer sequence CTCN PAM
agccugggcaucauagaaug

SEQ ID NO: 15139 - RNA, 20 nt, Artificial Sequence
  HTT spacer sequence CTCN PAM
gcucacugcagucucugccu

SEQ ID NO: 15140 - RNA, 20 nt, Artificial Sequence
  HTT spacer sequence CTCN PAM
cugcagucucugccucccag

SEQ ID NO: 15141 - RNA, 20 nt, Artificial Sequence
  HTT spacer sequence CTCN PAM
gccucccagguucaagugau

SEQ ID NO: 15142 - RNA, 20 nt, Artificial Sequence
  HTT spacer sequence CTCN PAM
cagguucaagugauucccac

SEQ ID NO: 15143 - RNA, 20 nt, Artificial Sequence
  HTT spacer sequence CTCN PAM
caggaagcuggaauuacagg

SEQ ID NO: 15144 - RNA, 20 nt, Artificial Sequence
  HTT spacer sequence CTCN PAM
ccuguaauuccagcuuccug

SEQ ID NO: 15145 - RNA, 20 nt, Artificial Sequence
  HTT spacer sequence CTCN PAM
accaaaaaauacaaaaauua

SEQ ID NO: 15146 - RNA, 20 nt, Artificial Sequence
  HTT spacer sequence CTCN PAM
agcuccugaccucaagugau

SEQ ID NO: 15147 - RNA, 20 nt, Artificial Sequence
  HTT spacer sequence CTCN PAM
ugaccucaagugauccaccu

SEQ ID NO: 15148 - RNA, 20 nt, Artificial Sequence
  HTT spacer sequence CTCN PAM
agugauccaccugccuuggc

SEQ ID NO: 15149 - RNA, 20 nt, Artificial Sequence
  HTT spacer sequence CTCN PAM
cgccuguaaucccagcacuu

SEQ ID NO: 15150 - RNA, 20 nt, Artificial Sequence
  HTT spacer sequence CTCN PAM
caaguaaucaaagaaaugca

SEQ ID NO: 15151 - RNA, 20 nt, Artificial Sequence
  HTT spacer sequence CTCN PAM
uuucauuuacuuaauagguu

SEQ ID NO: 15152 - RNA, 20 nt, Artificial Sequence
  HTT spacer sequence CTCN PAM
gaauaggcaagucauauaaa

SEQ ID NO: 15153 - RNA, 20 nt, Artificial Sequence
  HTT spacer sequence CTCN PAM
acaaacaaacaaacaaaaag

SEQ ID NO: 15154 - RNA, 20 nt, Artificial Sequence
  HTT spacer sequence CTCN PAM
gucuccacaaacaaacaaac

SEQ ID NO: 15155 - RNA, 20 nt, Artificial Sequence
  HTT spacer sequence CTCN PAM
cucugucacucaggcaggaa

SEQ ID NO: 15156 - RNA, 20 nt, Artificial Sequence
  HTT spacer sequence CTCN PAM
gucacucaggcaggaaugca

SEQ ID NO: 15157 - RNA, 20 nt, Artificial Sequence
  HTT spacer sequence CTCN PAM
ggcaggaaugcaguggugga

SEQ ID NO: 15158 - RNA, 20 nt, Artificial Sequence
  HTT spacer sequence CTCN PAM
uugcaacuauugccuccugg

SEQ ID NO: 15159 - RNA, 20 nt, Artificial Sequence
  HTT spacer sequence CTCN PAM
uggguucaagcgauuuuccu

SEQ ID NO: 15160 - RNA, 20 nt, Artificial Sequence
  HTT spacer sequence CTCN PAM
gccucccaaguagcugggau

SEQ ID NO: 15161 - RNA, 20 nt, Artificial Sequence
  HTT spacer sequence CTCN PAM
caaguagcugggauuacagg

SEQ ID NO: 15162 - RNA, 20 nt, Artificial Sequence
  HTT spacer sequence CTCN PAM
uguaaucccagcuacuuggg

SEQ ID NO: 15163 - RNA, 20 nt, Artificial Sequence
  HTT spacer sequence CTCN PAM
acuaaagauacaaaaauuag

SEQ ID NO: 15164 - RNA, 20 nt, Artificial Sequence
  HTT spacer sequence CTCN PAM
uggccucaagcggucccccu

SEQ ID NO: 15165 - RNA, 20 nt, Artificial Sequence
  HTT spacer sequence CTCN PAM
agcggucccccugucucggc

SEQ ID NO: 15166 - RNA, 20 nt, Artificial Sequence
  HTT spacer sequence CTCN PAM
gccucccaaagugcugggau

SEQ ID NO: 15167 - RNA, 20 nt, Artificial Sequence
  HTT spacer sequence CTCN PAM
caaagugcugggauuacagg

SEQ ID NO: 15168 - RNA, 20 nt, Artificial Sequence
  HTT spacer sequence CTCN PAM
cgccuguaaucccagcacuu

SEQ ID NO: 15169 - RNA, 20 nt, Artificial Sequence
  HTT spacer sequence CTCN PAM
ugaucaagucuccaugagga

SEQ ID NO: 15170 - RNA, 20 nt, Artificial Sequence
  HTT spacer sequence CTCN PAM
augaggaaagagacuuuaau

SEQ ID NO: 15171 - RNA, 20 nt, Artificial Sequence
  HTT spacer sequence CTCN PAM
uggagacuugaucaugagua

SEQ ID NO: 15172 - RNA, 20 nt, Artificial Sequence
  HTT spacer sequence CTCN PAM
uuccucauggagacuugauc

SEQ ID NO: 15173 - RNA, 20 nt, Artificial Sequence
  HTT spacer sequence CTCN PAM
guaauacuuuuagaaacaau

SEQ ID NO: 15174 - RNA, 20 nt, Artificial Sequence
  HTT spacer sequence CTCN PAM
auuugaauucaguuuagauu

SEQ ID NO: 15175 - RNA, 20 nt, Artificial Sequence
  HTT spacer sequence CTCN PAM
cagauggcaaagcuuaagcu

SEQ ID NO: 15176 - RNA, 20 nt, Artificial Sequence
  HTT spacer sequence CTCN PAM
gugcucaguacucuguggac

SEQ ID NO: 15177 - RNA, 20 nt, Artificial Sequence
  HTT spacer sequence CTCN PAM
guacucuguggacagacacu

SEQ ID NO: 15178 - RNA, 20 nt, Artificial Sequence
  HTT spacer sequence CTCN PAM
guggacagacacuguucagc

SEQ ID NO: 15179 - RNA, 20 nt, Artificial Sequence
  HTT spacer sequence CTCN PAM
uucuaaaccuucugaucaac

SEQ ID NO: 15180 - RNA, 20 nt, Artificial Sequence
  HTT spacer sequence CTCN PAM
cgccuguaauccagcacuau

SEQ ID NO: 15181 - RNA, 20 nt, Artificial Sequence
  HTT spacer sequence CTCN PAM
gccccccauagugcuggauu

SEQ ID NO: 15182 - RNA, 20 nt, Artificial Sequence
  HTT spacer sequence CTCN PAM
ugauccacccaccucagccc

SEQ ID NO: 15183 - RNA, 20 nt, Artificial Sequence
  HTT spacer sequence CTCN PAM
ugaccucgugauccacccac

SEQ ID NO: 15184 - RNA, 20 nt, Artificial Sequence
  HTT spacer sequence CTCN PAM
ugaacuccugaccucgugau

SEQ ID NO: 15185 - RNA, 20 nt, Artificial Sequence
  HTT spacer sequence CTCN PAM
acuaaaacuacaaaaauuag

SEQ ID NO: 15186 - RNA, 20 nt, Artificial Sequence
  HTT spacer sequence CTCN PAM
ggaggcugaggcaggagaau

SEQ ID NO: 15187 - RNA, 20 nt, Artificial Sequence
  HTT spacer sequence CTCN PAM
ugaguagcugggauuacagg

SEQ ID NO: 15188 - RNA, 20 nt, Artificial Sequence
  HTT spacer sequence CTCN PAM
gccuccugaguagcugggau

SEQ ID NO: 15189 - RNA, 20 nt, Artificial Sequence
  HTT spacer sequence CTCN PAM
ugccucagccuccugaguag

SEQ ID NO: 15190 - RNA, 20 nt, Artificial Sequence
  HTT spacer sequence CTCN PAM
gccguccagguucaagugau

SEQ ID NO: 15191 - RNA, 20 nt, Artificial Sequence
  HTT spacer sequence CTCN PAM
cugcaaccucugccguccag

SEQ ID NO: 15192 - RNA, 20 nt, Artificial Sequence
  HTT spacer sequence CTCN PAM
ggccugggccacagagugac

SEQ ID NO: 15193 - RNA, 20 nt, Artificial Sequence
  HTT spacer sequence CTCN PAM
guggcccaggccggaguaca

SEQ ID NO: 15194 - RNA, 20 nt, Artificial Sequence
  HTT spacer sequence CTCN PAM
aaaaaaaaaaaaaaagaaaa

SEQ ID NO: 15195 - RNA, 20 nt, Artificial Sequence
  HTT spacer sequence CTCN PAM
gacauaacugggugcuguac

SEQ ID NO: 15196 - RNA, 20 nt, Artificial Sequence
  HTT spacer sequence CTCN PAM
ugcacccacucggacauaac

SEQ ID NO: 15197 - RNA, 20 nt, Artificial Sequence
  HTT spacer sequence CTCN PAM
caugcacccacucggacaua

SEQ ID NO: 15198 - RNA, 20 nt, Artificial Sequence
  HTT spacer sequence CTCN PAM
gggucacucucaugcaccca

SEQ ID NO: 15199 - RNA, 20 nt, Artificial Sequence
  HTT spacer sequence CTCN PAM
aaucucagggucacucucau

SEQ ID NO: 15200 - RNA, 20 nt, Artificial Sequence
  HTT spacer sequence CTCN PAM
gguggcguucuucaagcacg

SEQ ID NO: 15201 - RNA, 20 nt, Artificial Sequence
  HTT spacer sequence CTCN PAM
cccccuuucucagguggcgu

SEQ ID NO: 15202 - RNA, 20 nt, Artificial Sequence
  HTT spacer sequence CTCN PAM
gguuaccagcggacaccacu

SEQ ID NO: 15203 - RNA, 20 nt, Artificial Sequence
  HTT spacer sequence CTCN PAM
cugcagauggcuaagccaac

SEQ ID NO: 15204 - RNA, 20 nt, Artificial Sequence
  HTT spacer sequence CTCN PAM
ucccugcagauggcuaagcc

SEQ ID NO: 15205 - RNA, 20 nt, Artificial Sequence
  HTT spacer sequence CTCN PAM
ccugugauagaccacccucc

SEQ ID NO: 15206 - RNA, 20 nt, Artificial Sequence
  HTT spacer sequence CTCN PAM
ugccacggccacuacuggau

SEQ ID NO: 15207 - RNA, 20 nt, Artificial Sequence
  HTT spacer sequence CTCN PAM
ugcaugagacgcagccucca

SEQ ID NO: 15208 - RNA, 20 nt, Artificial Sequence
  HTT spacer sequence CTCN PAM
ugcaugagaaguuucaggua

SEQ ID NO: 15209 - RNA, 20 nt, Artificial Sequence
  HTT spacer sequence CTCN PAM
aucucauuucuccgucagca

SEQ ID NO: 15210 - RNA, 20 nt, Artificial Sequence
  HTT spacer sequence CTCN PAM
uuucuccgucagcacaauaa

SEQ ID NO: 15211 - RNA, 20 nt, Artificial Sequence
  HTT spacer sequence CTCN PAM
gucagcacaauaaccaggua

SEQ ID NO: 15212 - RNA, 20 nt, Artificial Sequence
  HTT spacer sequence CTCN PAM
ggauguuugaguguagguca

SEQ ID NO: 15213 - RNA, 20 nt, Artificial Sequence
  HTT spacer sequence CTCN PAM
aacauccugagcugaagcuu

SEQ ID NO: 15214 - RNA, 20 nt, Artificial Sequence
  HTT spacer sequence CTCN PAM
aaaugauaauauccuaucaa

SEQ ID NO: 15215 - RNA, 20 nt, Artificial Sequence
  HTT spacer sequence CTCN PAM
guauuuaagcucugccacaa

SEQ ID NO: 15216 - RNA, 20 nt, Artificial Sequence
  HTT spacer sequence CTCN PAM
gccacaaucacucagcugug

SEQ ID NO: 15217 - RNA, 20 nt, Artificial Sequence
  HTT spacer sequence CTCN PAM
gcugugacacuguaaaucuc

SEQ ID NO: 15218 - RNA, 20 nt, Artificial Sequence
  HTT spacer sequence CTCN PAM
uaauaguuuauuacauucca

SEQ ID NO: 15219 - RNA, 20 nt, Artificial Sequence
  HTT spacer sequence CTCN PAM
uuaaagguaacacaacuaaa

SEQ ID NO: 15220 - RNA, 20 nt, Artificial Sequence
  HTT spacer sequence CTCN PAM
ccaaaaaaucaacaggcaug

SEQ ID NO: 15221 - RNA, 20 nt, Artificial Sequence
  HTT spacer sequence CTCN PAM
caaaucacugaacuagugga

SEQ ID NO: 15222 - RNA, 20 nt, Artificial Sequence
  HTT spacer sequence CTCN PAM
acaauaaaugugaaugauaa

SEQ ID NO: 15223 - RNA, 20 nt, Artificial Sequence
  HTT spacer sequence CTCN PAM
ccuaagaagcagauaagaau

SEQ ID NO: 15224 - RNA, 20 nt, Artificial Sequence
  HTT spacer sequence CTCN PAM
gcaagcuagaauucugaaga

SEQ ID NO: 15225 - RNA, 20 nt, Artificial Sequence
  HTT spacer sequence CTCN PAM
uuuuuucugcugaguaacag

SEQ ID NO: 15226 - RNA, 20 nt, Artificial Sequence
  HTT spacer sequence CTCN PAM
gcagaaaaaaagaguaucau

SEQ ID NO: 15227 - RNA, 20 nt, Artificial Sequence
  HTT spacer sequence CTCN PAM
gcuuaucaaauaucaaaguc

SEQ ID NO: 15228 - RNA, 20 nt, Artificial Sequence
  HTT spacer sequence CTCN PAM
cgccuguaauccuaacacuu

SEQ ID NO: 15229 - RNA, 20 nt, Artificial Sequence
  HTT spacer sequence CTCN PAM
caaaguguuaggauuacagg

SEQ ID NO: 15230 - RNA, 20 nt, Artificial Sequence
  HTT spacer sequence CTCN PAM
agcgaccugcccaccugggc

SEQ ID NO: 15231 - RNA, 20 nt, Artificial Sequence
  HTT spacer sequence CTCN PAM
gggguucaagaccacccagg

SEQ ID NO: 15232 - RNA, 20 nt, Artificial Sequence
  HTT spacer sequence CTCN PAM
acucaaauacaaaaaauuag

SEQ ID NO: 15233 - RNA, 20 nt, Artificial Sequence
  HTT spacer sequence CTCN PAM
aauacaaaaaauuagccagg

SEQ ID NO: 15234 - RNA, 20 nt, Artificial Sequence
  HTT spacer sequence CTCN PAM
ggaggcugagggaugagaau

SEQ ID NO: 15235 - RNA, 20 nt, Artificial Sequence
  HTT spacer sequence CTCN PAM
cgaguagcugggauuacagg

SEQ ID NO: 15236 - RNA, 20 nt, Artificial Sequence
  HTT spacer sequence CTCN PAM
gccucccgaguagcugggau

SEQ ID NO: 15237 - RNA, 20 nt, Artificial Sequence
  HTT spacer sequence CTCN PAM
ucccucagccucccgaguag

SEQ ID NO: 15238 - RNA, 20 nt, Artificial Sequence
  HTT spacer sequence CTCN PAM
agugauucucaucccucagc

SEQ ID NO: 15239 - RNA, 20 nt, Artificial Sequence
  HTT spacer sequence CTCN PAM
ggggcucaagugauucucau

SEQ ID NO: 15240 - RNA, 20 nt, Artificial Sequence
  HTT spacer sequence CTCN PAM
gccuccggggcucaagugau

SEQ ID NO: 15241 - RNA, 20 nt, Artificial Sequence
  HTT spacer sequence CTCN PAM
cugcaaccucugccuccggg

SEQ ID NO: 15242 - RNA, 20 nt, Artificial Sequence
  HTT spacer sequence CTCN PAM
cagcuugggcuacagaguga

SEQ ID NO: 15243 - RNA, 20 nt, Artificial Sequence
  HTT spacer sequence CTCN PAM
guagcccaagcugggagugc

SEQ ID NO: 15244 - RNA, 20 nt, Artificial Sequence
  HTT spacer sequence CTCN PAM
cucuguagcccaagcuggga

SEQ ID NO: 15245 - RNA, 20 nt, Artificial Sequence
  HTT spacer sequence CTCN PAM
gucucaaaaaaagacacaca

SEQ ID NO: 15246 - RNA, 20 nt, Artificial Sequence
  HTT spacer sequence CTCN PAM
aaaaaagacacacacacaaa

SEQ ID NO: 15247 - RNA, 20 nt, Artificial Sequence
  HTT spacer sequence CTCN PAM
auguuuuuuuuguuugugug

SEQ ID NO: 15248 - RNA, 20 nt, Artificial Sequence
  HTT spacer sequence CTCN PAM
gauaauuuccuuuguuuaaa

SEQ ID NO: 15249 - RNA, 20 nt, Artificial Sequence
  HTT spacer sequence CTCN PAM
gaacuggcauuuucucucuu

SEQ ID NO: 15250 - RNA, 20 nt, Artificial Sequence
  HTT spacer sequence CTCN PAM
cuuggagaagauucaggaca

SEQ ID NO: 15251 - RNA, 20 nt, Artificial Sequence
  HTT spacer sequence CTCN PAM
uggagaagauucaggacaaa

SEQ ID NO: 15252 - RNA, 20 nt, Artificial Sequence
  HTT spacer sequence CTCN PAM
aagagagaaaaugccaguuc

SEQ ID NO: 15253 - RNA, 20 nt, Artificial Sequence
  HTT spacer sequence CTCN PAM
uuuaagauaaguagaagcag

SEQ ID NO: 15254 - RNA, 20 nt, Artificial Sequence
  HTT spacer sequence CTCN PAM
uucacugcuucuacuuaucu

SEQ ID NO: 15255 - RNA, 20 nt, Artificial Sequence
  HTT spacer sequence CTCN PAM
guuggcaucuauuaauaaau

SEQ ID NO: 15256 - RNA, 20 nt, Artificial Sequence
  HTT spacer sequence CTCN PAM
caguuccaaacuucagcagg

SEQ ID NO: 15257 - RNA, 20 nt, Artificial Sequence
  HTT spacer sequence CTCN PAM
ugacaauucagcugugguca

SEQ ID NO: 15258 - RNA, 20 nt, Artificial Sequence
  HTT spacer sequence CTCN PAM
gcugcacaauuggucauugu

SEQ ID NO: 15259 - RNA, 20 nt, Artificial Sequence
  HTT spacer sequence CTCN PAM
uuaguuuuguugagugucuc

SEQ ID NO: 15260 - RNA, 20 nt, Artificial Sequence
  HTT spacer sequence CTCN PAM
acaaaacuaaggagauuaug

SEQ ID NO: 15261 - RNA, 20 nt, Artificial Sequence
  HTT spacer sequence CTCN PAM
guggacaagacacugugagg

SEQ ID NO: 15262 - RNA, 20 nt, Artificial Sequence
  HTT spacer sequence CTCN PAM
cagugucuuguccacggaga

SEQ ID NO: 15263 - RNA, 20 nt, Artificial Sequence
  HTT spacer sequence CTCN PAM
aauuccuuuagaacacaugg

SEQ ID NO: 15264 - RNA, 20 nt, Artificial Sequence
  HTT spacer sequence CTCN PAM
cacggcacuuuuuugcauuc

SEQ ID NO: 15265 - RNA, 20 nt, Artificial Sequence
  HTT spacer sequence CTCN PAM
ucucccacggcacuuuuuug

SEQ ID NO: 15266 - RNA, 20 nt, Artificial Sequence
  HTT spacer sequence CTCN PAM
acuucucaucucccacggca

SEQ ID NO: 15267 - RNA, 20 nt, Artificial Sequence
  HTT spacer sequence CTCN PAM
ccuuacagcguugccuacua

SEQ ID NO: 15268 - RNA, 20 nt, Artificial Sequence
  HTT spacer sequence CTCN PAM
cagucugccccgaacacuuu

SEQ ID NO: 15269 - RNA, 20 nt, Artificial Sequence
  HTT spacer sequence CTCN PAM
cuuccucccagucugccccg

SEQ ID NO: 15270 - RNA, 20 nt, Artificial Sequence
  HTT spacer sequence CTCN PAM
acuuuuaagugaaacgggcu

SEQ ID NO: 15271 - RNA, 20 nt, Artificial Sequence
  HTT spacer sequence CTCN PAM
auauuuuuguuauuagaaua

SEQ ID NO: 15272 - RNA, 20 nt, Artificial Sequence
  HTT spacer sequence CTCN PAM
auauauucuaauaacaaaaa

SEQ ID NO: 15273 - RNA, 20 nt, Artificial Sequence
  HTT spacer sequence CTCN PAM
ugaaagguuauuuuccauag

SEQ ID NO: 15274 - RNA, 20 nt, Artificial Sequence
  HTT spacer sequence CTCN PAM
ugaacuaaucacaucaacca

SEQ ID NO: 15275 - RNA, 20 nt, Artificial Sequence
  HTT spacer sequence CTCN PAM
ggugguugaugugauuaguu

SEQ ID NO: 15276 - RNA, 20 nt, Artificial Sequence
  HTT spacer sequence CTCN PAM
caguaagucucuuucuugau

SEQ ID NO: 15277 - RNA, 20 nt, Artificial Sequence
  HTT spacer sequence CTCN PAM
uucuugaucggucuuacuga

SEQ ID NO: 15278 - RNA, 20 nt, Artificial Sequence
  HTT spacer sequence CTCN PAM
ccguaagaugaccauacaac

SEQ ID NO: 15279 - RNA, 20 nt, Artificial Sequence
  HTT spacer sequence CTCN PAM
uacuuauccaugaggcuugc

SEQ ID NO: 15280 - RNA, 20 nt, Artificial Sequence
  HTT spacer sequence CTCN PAM
uggauaaguaagagcuguaa

SEQ ID NO: 15281 - RNA, 20 nt, Artificial Sequence
  HTT spacer sequence CTCN PAM
gcuuacuccaggaauguaaa

SEQ ID NO: 15282 - RNA, 20 nt, Artificial Sequence
  HTT spacer sequence CTCN PAM
aggaauguaaaugacuaugu

SEQ ID NO: 15283 - RNA, 20 nt, Artificial Sequence
  HTT spacer sequence CTCN PAM
ugccuguaaucccagcacuu

SEQ ID NO: 15284 - RNA, 20 nt, Artificial Sequence
  HTT spacer sequence CTCN PAM
caaagugcugggauuacagg

SEQ ID NO: 15285 - RNA, 20 nt, Artificial Sequence
  HTT spacer sequence CTCN PAM
cuugaggucaggagucggau

SEQ ID NO: 15286 - RNA, 20 nt, Artificial Sequence
  HTT spacer sequence CTCN PAM
agugagcccccaaccuuggc

SEQ ID NO: 15287 - RNA, 20 nt, Artificial Sequence
  HTT spacer sequence CTCN PAM
ugaccucaagugagccccca

SEQ ID NO: 15288 - RNA, 20 nt, Artificial Sequence
  HTT spacer sequence CTCN PAM
acuaaaaauacaaaaauuag

SEQ ID NO: 15289 - RNA, 20 nt, Artificial Sequence
  HTT spacer sequence CTCN PAM
ggaggcugaggcaggagaau

SEQ ID NO: 15290 - RNA, 20 nt, Artificial Sequence
  HTT spacer sequence CTCN PAM
ugaguagcugggauuacagg

SEQ ID NO: 15291 - RNA, 20 nt, Artificial Sequence
  HTT spacer sequence CTCN PAM
gccuccugaguagcugggau

SEQ ID NO: 15292 - RNA, 20 nt, Artificial Sequence
  HTT spacer sequence CTCN PAM
ugccucagccuccugaguag

SEQ ID NO: 15293 - RNA, 20 nt, Artificial Sequence
  HTT spacer sequence CTCN PAM
cagguucaagcgauucuccu

SEQ ID NO: 15294 - RNA, 20 nt, Artificial Sequence
  HTT spacer sequence CTCN PAM
accucccagguucaagcgau

SEQ ID NO: 15295 - RNA, 20 nt, Artificial Sequence
  HTT spacer sequence CTCN PAM
cugcaaccucuaccucccag

SEQ ID NO: 15296 - RNA, 20 nt, Artificial Sequence
  HTT spacer sequence CTCN PAM
gcucacugcaaccucuaccu

SEQ ID NO: 15297 - RNA, 20 nt, Artificial Sequence
  HTT spacer sequence CTCN PAM
agccugugcaauagagcgag

SEQ ID NO: 15298 - RNA, 20 nt, Artificial Sequence
  HTT spacer sequence CTCN PAM
auugcacaggcuggagugca

SEQ ID NO: 15299 - RNA, 20 nt, Artificial Sequence
  HTT spacer sequence CTCN PAM
cucuauugcacaggcuggag

SEQ ID NO: 15300 - RNA, 20 nt, Artificial Sequence
  HTT spacer sequence CTCN PAM
gucucaaaaaaaaaaaaaaa

SEQ ID NO: 15301 - RNA, 20 nt, Artificial Sequence
  HTT spacer sequence CTCN PAM
aaaaaaaaaaaaaaaaaaga

SEQ ID NO: 15302 - RNA, 20 nt, Artificial Sequence
  HTT spacer sequence CTCN PAM
gugaccugguaauauauacu

SEQ ID NO: 15303 - RNA, 20 nt, Artificial Sequence
  HTT spacer sequence CTCN PAM
aaaaaaaaauaauaaaauua

SEQ ID NO: 15304 - RNA, 20 nt, Artificial Sequence
  HTT spacer sequence CTCN PAM
gucucaaaaaaaaaauaaua

SEQ ID NO: 15305 - RNA, 20 nt, Artificial Sequence
  HTT spacer sequence CTCN PAM
uguugcccaggcuggagugc

SEQ ID NO: 15306 - RNA, 20 nt, Artificial Sequence
  HTT spacer sequence CTCN PAM
agccugggcaacaagagcaa

SEQ ID NO: 15307 - RNA, 20 nt, Artificial Sequence
  HTT spacer sequence CTCN PAM
gcucaccacaaccuccaccu

SEQ ID NO: 15308 - RNA, 20 nt, Artificial Sequence
  HTT spacer sequence CTCN PAM
ccacaaccuccaccucccgg

SEQ ID NO: 15309 - RNA, 20 nt, Artificial Sequence
  HTT spacer sequence CTCN PAM
accucccggguucaagcaau

SEQ ID NO: 15310 - RNA, 20 nt, Artificial Sequence
  HTT spacer sequence CTCN PAM
cggguucaagcaauucuccu

SEQ ID NO: 15311 - RNA, 20 nt, Artificial Sequence
  HTT spacer sequence CTCN PAM
ugccucagccuccugaguag

SEQ ID NO: 15312 - RNA, 20 nt, Artificial Sequence
  HTT spacer sequence CTCN PAM
gccuccugaguagcugggau

SEQ ID NO: 15313 - RNA, 20 nt, Artificial Sequence
  HTT spacer sequence CTCN PAM
ugaguagcugggauuacagg

SEQ ID NO: 15314 - RNA, 20 nt, Artificial Sequence
  HTT spacer sequence CTCN PAM
ggaggcugaggcaggagaau

SEQ ID NO: 15315 - RNA, 20 nt, Artificial Sequence
  HTT spacer sequence CTCN PAM
acuaaaaauacaaaauuagc

SEQ ID NO: 15316 - RNA, 20 nt, Artificial Sequence
  HTT spacer sequence CTCN PAM
auguuggucaggcuggucuc

SEQ ID NO: 15317 - RNA, 20 nt, Artificial Sequence
  HTT spacer sequence CTCN PAM
aacucccaaccucaggugau

SEQ ID NO: 15318 - RNA, 20 nt, Artificial Sequence
  HTT spacer sequence CTCN PAM
caaccucaggugauccgccc

SEQ ID NO: 15319 - RNA, 20 nt, Artificial Sequence
  HTT spacer sequence CTCN PAM
ggugauccgcccuccucgac

SEQ ID NO: 15320 - RNA, 20 nt, Artificial Sequence
  HTT spacer sequence CTCN PAM
ucgaccccccaaagugcugg

SEQ ID NO: 15321 - RNA, 20 nt, Artificial Sequence
  HTT spacer sequence CTCN PAM
accccccaaagugcugggau

SEQ ID NO: 15322 - RNA, 20 nt, Artificial Sequence
  HTT spacer sequence CTCN PAM
caccuguaaucccagcacuu

SEQ ID NO: 15323 - RNA, 20 nt, Artificial Sequence
  HTT spacer sequence CTCN PAM
aaagcaucacacuauauacu

SEQ ID NO: 15324 - RNA, 20 nt, Artificial Sequence
  HTT spacer sequence CTCN PAM
auauuguuaaaaauucucca

SEQ ID NO: 15325 - RNA, 20 nt, Artificial Sequence
  HTT spacer sequence CTCN PAM
auauuacaauccagauuaua

SEQ ID NO: 15326 - RNA, 20 nt, Artificial Sequence
  HTT spacer sequence CTCN PAM
cacuggcagauaaucaccaa

SEQ ID NO: 15327 - RNA, 20 nt, Artificial Sequence
  HTT spacer sequence CTCN PAM
aauuuucuaaaaugagcaag

SEQ ID NO: 15328 - RNA, 20 nt, Artificial Sequence
  HTT spacer sequence CTCN PAM
uuuuagaaaauuugagaaua

SEQ ID NO: 15329 - RNA, 20 nt, Artificial Sequence
  HTT spacer sequence CTCN PAM
aaaaauaaaaauaaaaaggu

SEQ ID NO: 15330 - RNA, 20 nt, Artificial Sequence
  HTT spacer sequence CTCN PAM
cucuguugcccaggcuagag

SEQ ID NO: 15331 - RNA, 20 nt, Artificial Sequence
  HTT spacer sequence CTCN PAM
guugcccaggcuagagcaca

SEQ ID NO: 15332 - RNA, 20 nt, Artificial Sequence
  HTT spacer sequence CTCN PAM
agccugggcaacagagugag

SEQ ID NO: 15333 - RNA, 20 nt, Artificial Sequence
  HTT spacer sequence CTCN PAM
cugcagccuccgcuuccugg

SEQ ID NO: 15334 - RNA, 20 nt, Artificial Sequence
  HTT spacer sequence CTCN PAM
gcuuccuggguucaaaugau

SEQ ID NO: 15335 - RNA, 20 nt, Artificial Sequence
  HTT spacer sequence CTCN PAM
ggccccagccuccugagugg

SEQ ID NO: 15336 - RNA, 20 nt, Artificial Sequence
  HTT spacer sequence CTCN PAM
ugaguggcuggaauuacagg

SEQ ID NO: 15337 - RNA, 20 nt, Artificial Sequence
  HTT spacer sequence CTCN PAM
ggaggcuggggccagagaau

SEQ ID NO: 15338 - RNA, 20 nt, Artificial Sequence
  HTT spacer sequence CTCN PAM
acuaaaaauacaaaaauuag

SEQ ID NO: 15339 - RNA, 20 nt, Artificial Sequence
  HTT spacer sequence CTCN PAM
aacuccugaccucgugaucc

SEQ ID NO: 15340 - RNA, 20 nt, Artificial Sequence
  HTT spacer sequence CTCN PAM
ugaccucgugauccacccac

SEQ ID NO: 15341 - RNA, 20 nt, Artificial Sequence
  HTT spacer sequence CTCN PAM
ugauccacccaccucggccu

SEQ ID NO: 15342 - RNA, 20 nt, Artificial Sequence
  HTT spacer sequence CTCN PAM
gccucccaaagugcugggau

SEQ ID NO: 15343 - RNA, 20 nt, Artificial Sequence
  HTT spacer sequence CTCN PAM
caaagugcugggauuacagg

SEQ ID NO: 15344 - RNA, 20 nt, Artificial Sequence
  HTT spacer sequence CTCN PAM
cgccuguaaucccagcacuu

SEQ ID NO: 15345 - RNA, 20 nt, Artificial Sequence
  HTT spacer sequence CTCN PAM
cugaccagccugcagaaacc

SEQ ID NO: 15346 - RNA, 20 nt, Artificial Sequence
  HTT spacer sequence CTCN PAM
agcuuaccacaucgucuccc

SEQ ID NO: 15347 - RNA, 20 nt, Artificial Sequence
  HTT spacer sequence CTCN PAM
gcuccuaaggaugugcaggg

SEQ ID NO: 15348 - RNA, 20 nt, Artificial Sequence
  HTT spacer sequence CTCN PAM
uaaggaugugcaggggcagu

SEQ ID NO: 15349 - RNA, 20 nt, Artificial Sequence
  HTT spacer sequence CTCN PAM
acugccccugcacauccuua

SEQ ID NO: 15350 - RNA, 20 nt, Artificial Sequence
  HTT spacer sequence CTCN PAM
caacugccccugcacauccu

SEQ ID NO: 15351 - RNA, 20 nt, Artificial Sequence
  HTT spacer sequence CTCN PAM
cacccuuccgccucucaacu

SEQ ID NO: 15352 - RNA, 20 nt, Artificial Sequence
  HTT spacer sequence CTCN PAM
cuucauugggauauaauugc

SEQ ID NO: 15353 - RNA, 20 nt, Artificial Sequence
  HTT spacer sequence CTCN PAM
ucauugggauauaauugcca

SEQ ID NO: 15354 - RNA, 20 nt, Artificial Sequence
  HTT spacer sequence CTCN PAM
aacacguguuaucagaaugg

SEQ ID NO: 15355 - RNA, 20 nt, Artificial Sequence
  HTT spacer sequence CTCN PAM
guuuucuucucauuguuugu

SEQ ID NO: 15356 - RNA, 20 nt, Artificial Sequence
  HTT spacer sequence CTCN PAM
uuguuuguacuuuuuauaaa

SEQ ID NO: 15357 - RNA, 20 nt, Artificial Sequence
  HTT spacer sequence CTCN PAM
uguuacccuuuauaaaaagu

SEQ ID NO: 15358 - RNA, 20 nt, Artificial Sequence
  HTT spacer sequence CTCN PAM
guuuggaugcugugaagcuu

SEQ ID NO: 15359 - RNA, 20 nt, Artificial Sequence
  HTT spacer sequence CTCN PAM
aaaugcaaacugggaaggca

SEQ ID NO: 15360 - RNA, 20 nt, Artificial Sequence
  HTT spacer sequence CTCN PAM
guauauauuaauaguugucu

SEQ ID NO: 15361 - RNA, 20 nt, Artificial Sequence
  HTT spacer sequence CTCN PAM
cacagcuaauauagcagaaa

SEQ ID NO: 15362 - RNA, 20 nt, Artificial Sequence
  HTT spacer sequence CTCN PAM
ugucacuagucucacacagc

SEQ ID NO: 15363 - RNA, 20 nt, Artificial Sequence
  HTT spacer sequence CTCN PAM
uuagcuugacucuuuccaaa

SEQ ID NO: 15364 - RNA, 20 nt, Artificial Sequence
  HTT spacer sequence CTCN PAM
uuccaaaauuauuugcugug

SEQ ID NO: 15365 - RNA, 20 nt, Artificial Sequence
  HTT spacer sequence CTCN PAM
aguagauggcccuacuagca

SEQ ID NO: 15366 - RNA, 20 nt, Artificial Sequence
  HTT spacer sequence CTCN PAM
agcauucaggaauaggcuuu

SEQ ID NO: 15367 - RNA, 20 nt, Artificial Sequence
  HTT spacer sequence CTCN PAM
guaauugauacacaaaauga

SEQ ID NO: 15368 - RNA, 20 nt, Artificial Sequence
  HTT spacer sequence CTCN PAM
caucacauuugagaaguaaa

SEQ ID NO: 15369 - RNA, 20 nt, Artificial Sequence
  HTT spacer sequence CTCN PAM
aaugugaugugagucaccaa

SEQ ID NO: 15370 - RNA, 20 nt, Artificial Sequence
  HTT spacer sequence CTCN PAM
agaaugauugcuuucccacc

SEQ ID NO: 15371 - RNA, 20 nt, Artificial Sequence
  HTT spacer sequence CTCN PAM
cauacagacugagcagcuac

SEQ ID NO: 15372 - RNA, 20 nt, Artificial Sequence
  HTT spacer sequence CTCN PAM
gucuguaugugaggaaggug

SEQ ID NO: 15373 - RNA, 20 nt, Artificial Sequence
  HTT spacer sequence CTCN PAM
aaugccaaaguugcccagaa

SEQ ID NO: 15374 - RNA, 20 nt, Artificial Sequence
  HTT spacer sequence CTCN PAM
uuucugcaucuguucacaag

SEQ ID NO: 15375 - RNA, 20 nt, Artificial Sequence
  HTT spacer sequence CTCN PAM
uaaauaucaaccccuuguga

SEQ ID NO: 15376 - RNA, 20 nt, Artificial Sequence
  HTT spacer sequence CTCN PAM
auauccauucuauguucucu

SEQ ID NO: 15377 - RNA, 20 nt, Artificial Sequence
  HTT spacer sequence CTCN PAM
uaaugcucagucagcaccuc

SEQ ID NO: 15378 - RNA, 20 nt, Artificial Sequence
  HTT spacer sequence CTCN PAM
gucagcaccucaggugguug

SEQ ID NO: 15379 - RNA, 20 nt, Artificial Sequence
  HTT spacer sequence CTCN PAM
ggugguuggaguucaaugcu

SEQ ID NO: 15380 - RNA, 20 nt, Artificial Sequence
  HTT spacer sequence CTCN PAM
aaccaccugaggugcugacu

SEQ ID NO: 15381 - RNA, 20 nt, Artificial Sequence
  HTT spacer sequence CTCN PAM
auccccuagaaaagacagug

SEQ ID NO: 15382 - RNA, 20 nt, Artificial Sequence
  HTT spacer sequence CTCN PAM
aauaagcaggacuacccagg

SEQ ID NO: 15383 - RNA, 20 nt, Artificial Sequence
  HTT spacer sequence CTCN PAM
uuauuacuauggaaaaauag

SEQ ID NO: 15384 - RNA, 20 nt, Artificial Sequence
  HTT spacer sequence CTCN PAM
uuuauuuugugccuguuuac

SEQ ID NO: 15385 - RNA, 20 nt, Artificial Sequence
  HTT spacer sequence CTCN PAM
auggcauuaacaugcccaaa

SEQ ID NO: 15386 - RNA, 20 nt, Artificial Sequence
  HTT spacer sequence CTCN PAM
ucuccaguucagcagaacca

SEQ ID NO: 15387 - RNA, 20 nt, Artificial Sequence
  HTT spacer sequence CTCN PAM
aguucagcagaaccauuguc

SEQ ID NO: 15388 - RNA, 20 nt, Artificial Sequence
  HTT spacer sequence CTCN PAM
aaugauuuuuauggagcucu

SEQ ID NO: 15389 - RNA, 20 nt, Artificial Sequence
  HTT spacer sequence CTCN PAM
auaaaaaucauuugagaaau

SEQ ID NO: 15390 - RNA, 20 nt, Artificial Sequence
  HTT spacer sequence CTCN PAM
gauuuauaggaaagauguua

SEQ ID NO: 15391 - RNA, 20 nt, Artificial Sequence
  HTT spacer sequence CTCN PAM
gaaauuguuuuauuuuuaau

SEQ ID NO: 15392 - RNA, 20 nt, Artificial Sequence
  HTT spacer sequence CTCN PAM
uggaauugcaagagaaagga

SEQ ID NO: 15393 - RNA, 20 nt, Artificial Sequence
  HTT spacer sequence CTCN PAM
ugcaauuccaagaggaaggc

SEQ ID NO: 15394 - RNA, 20 nt, Artificial Sequence
  HTT spacer sequence CTCN PAM
ggaagcagacauuugcaaag

SEQ ID NO: 15395 - RNA, 20 nt, Artificial Sequence
  HTT spacer sequence CTCN PAM
acugagugccucagaugagu

SEQ ID NO: 15396 - RNA, 20 nt, Artificial Sequence
  HTT spacer sequence CTCN PAM
guggaggcacucuggaagca

SEQ ID NO: 15397 - RNA, 20 nt, Artificial Sequence
  HTT spacer sequence CTCN PAM
gaugagucuaggaagagcug

SEQ ID NO: 15398 - RNA, 20 nt, Artificial Sequence
  HTT spacer sequence CTCN PAM
ucugaggcacucaguggagg

SEQ ID NO: 15399 - RNA, 20 nt, Artificial Sequence
  HTT spacer sequence CTCN PAM
uccuagacucaucugaggca

SEQ ID NO: 15400 - RNA, 20 nt, Artificial Sequence
  HTT spacer sequence CTCN PAM
cgucagcuugguucccauug

SEQ ID NO: 15401 - RNA, 20 nt, Artificial Sequence
  HTT spacer sequence CTCN PAM
ucagcuugguucccauugga

SEQ ID NO: 15402 - RNA, 20 nt, Artificial Sequence
  HTT spacer sequence CTCN PAM
cagcccaucaagaugcuuug

SEQ ID NO: 15403 - RNA, 20 nt, Artificial Sequence
  HTT spacer sequence CTCN PAM
gcccaucaagaugcuuugau

SEQ ID NO: 15404 - RNA, 20 nt, Artificial Sequence
  HTT spacer sequence CTCN PAM
guaccaguaccugcaagcaa

SEQ ID NO: 15405 - RNA, 20 nt, Artificial Sequence
  HTT spacer sequence CTCN PAM
aggacuuggauuuugauuuc

SEQ ID NO: 15406 - RNA, 20 nt, Artificial Sequence
  HTT spacer sequence CTCN PAM
ccacccccauucccccuaag

SEQ ID NO: 15407 - RNA, 20 nt, Artificial Sequence
  HTT spacer sequence CTCN PAM
uaugcucaccacccccauuc

SEQ ID NO: 15408 - RNA, 20 nt, Artificial Sequence
  HTT spacer sequence CTCN PAM
gcacagaacagcugccaacu

SEQ ID NO: 15409 - RNA, 20 nt, Artificial Sequence
  HTT spacer sequence CTCN PAM
ucccaauauagccccucagu

SEQ ID NO: 15410 - RNA, 20 nt, Artificial Sequence
  HTT spacer sequence CTCN PAM
guuaacuacaaguaaacuca

SEQ ID NO: 15411 - RNA, 20 nt, Artificial Sequence
  HTT spacer sequence CTCN PAM
uuuugaauuucauuuuaaug

SEQ ID NO: 15412 - RNA, 20 nt, Artificial Sequence
  HTT spacer sequence CTCN PAM
cucgggcacugggauguuaa

SEQ ID NO: 15413 - RNA, 20 nt, Artificial Sequence
  HTT spacer sequence CTCN PAM
ggcacugggauguuaagaaa

SEQ ID NO: 15414 - RNA, 20 nt, Artificial Sequence
  HTT spacer sequence CTCN PAM
aguuaguuuuagauuagagg

SEQ ID NO: 15415 - RNA, 20 nt, Artificial Sequence
  HTT spacer sequence CTCN PAM
aaucuaaaacuaacuugaga

SEQ ID NO: 15416 - RNA, 20 nt, Artificial Sequence
  HTT spacer sequence CTCN PAM
gugugaccacugcacuuuug

SEQ ID NO: 15417 - RNA, 20 nt, Artificial Sequence
  HTT spacer sequence CTCN PAM
ccuugggcagauuuaugggc

SEQ ID NO: 15418 - RNA, 20 nt, Artificial Sequence
  HTT spacer sequence CTCN PAM
uugggcagauuuaugggcug

SEQ ID NO: 15419 - RNA, 20 nt, Artificial Sequence
  HTT spacer sequence CTCN PAM
uuccuaccagcccauaaauc

SEQ ID NO: 15420 - RNA, 20 nt, Artificial Sequence
  HTT spacer sequence CTCN PAM
guguugugcucuuuccuacc

SEQ ID NO: 15421 - RNA, 20 nt, Artificial Sequence
  HTT spacer sequence CTCN PAM
ccguguugugcucuuuccua

SEQ ID NO: 15422 - RNA, 20 nt, Artificial Sequence
  HTT spacer sequence CTCN PAM
auuaucaucgccaaggugcu

SEQ ID NO: 15423 - RNA, 20 nt, Artificial Sequence
  HTT spacer sequence CTCN PAM
gucuuccuugcuggccacau

SEQ ID NO: 15424 - RNA, 20 nt, Artificial Sequence
  HTT spacer sequence CTCN PAM
caaaaucaauuucaauggac

SEQ ID NO: 15425 - RNA, 20 nt, Artificial Sequence
  HTT spacer sequence CTCN PAM
augaaagaauuggggccugu

SEQ ID NO: 15426 - RNA, 20 nt, Artificial Sequence
  HTT spacer sequence CTCN PAM
uauagcccccugaagcaaau

SEQ ID NO: 15427 - RNA, 20 nt, Artificial Sequence
  HTT spacer sequence CTCN PAM
ccuauagcccccugaagcaa

SEQ ID NO: 15428 - RNA, 20 nt, Artificial Sequence
  HTT spacer sequence CTCN PAM
ucuuuuagucccuuucacga

SEQ ID NO: 15429 - RNA, 20 nt, Artificial Sequence
  HTT spacer sequence CTCN PAM
agcccauguucaaguuggau

SEQ ID NO: 15430 - RNA, 20 nt, Artificial Sequence
  HTT spacer sequence CTCN PAM
uccagcccauguucaaguug

SEQ ID NO: 15431 - RNA, 20 nt, Artificial Sequence
  HTT spacer sequence CTCN PAM
cuaccuucuccuccagccca

SEQ ID NO: 15432 - RNA, 20 nt, Artificial Sequence
  HTT spacer sequence CTCN PAM
ggagauuaauguugaugcua

SEQ ID NO: 15433 - RNA, 20 nt, Artificial Sequence
  HTT spacer sequence CTCN PAM
ugagucucccuaccuucucc

SEQ ID NO: 15434 - RNA, 20 nt, Artificial Sequence
  HTT spacer sequence CTCN PAM
uacaaucagugucuucccua

SEQ ID NO: 15435 - RNA, 20 nt, Artificial Sequence
  HTT spacer sequence CTCN PAM
uucauucucuuacaaucagu

SEQ ID NO: 15436 - RNA, 20 nt, Artificial Sequence
  HTT spacer sequence CTCN PAM
aacugaaacugauguuuccc

SEQ ID NO: 15437 - RNA, 20 nt, Artificial Sequence
  HTT spacer sequence CTCN PAM
caacauagggucuuaaauga

SEQ ID NO: 15438 - RNA, 20 nt, Artificial Sequence
  HTT spacer sequence CTCN PAM
acauagggucuuaaaugacu

SEQ ID NO: 15439 - RNA, 20 nt, Artificial Sequence
  HTT spacer sequence CTCN PAM
accccaauagcaugggaagg

SEQ ID NO: 15440 - RNA, 20 nt, Artificial Sequence
  HTT spacer sequence CTCN PAM
ccaccccaauagcaugggaa

SEQ ID NO: 15441 - RNA, 20 nt, Artificial Sequence
  HTT spacer sequence CTCN PAM
caaaucucugagaaguucau

SEQ ID NO: 15442 - RNA, 20 nt, Artificial Sequence
  HTT spacer sequence CTCN PAM
gagaaguucaugggccucug

SEQ ID NO: 15443 - RNA, 20 nt, Artificial Sequence
  HTT spacer sequence CTCN PAM
gagauuugggagcacuggcu

SEQ ID NO: 15444 - RNA, 20 nt, Artificial Sequence
  HTT spacer sequence CTCN PAM
gaagaagaagccaacccagc

SEQ ID NO: 15445 - RNA, 20 nt, Artificial Sequence
  HTT spacer sequence CTCN PAM
ugcuugguggcugcuggguu

SEQ ID NO: 15446 - RNA, 20 nt, Artificial Sequence
  HTT spacer sequence CTCN PAM
ucuugcuugguggcugcugg

SEQ ID NO: 15447 - RNA, 20 nt, Artificial Sequence
  HTT spacer sequence CTCN PAM
accaugggcaccagggcccg

SEQ ID NO: 15448 - RNA, 20 nt, Artificial Sequence
  HTT spacer sequence CTCN PAM
ucucucaccugcugaaggug

SEQ ID NO: 15449 - RNA, 20 nt, Artificial Sequence
  HTT spacer sequence CTCN PAM
caccugcugaaggugauuaa

SEQ ID NO: 15450 - RNA, 20 nt, Artificial Sequence
  HTT spacer sequence CTCN PAM
ccugcugaaggugauuaaca

SEQ ID NO: 15451 - RNA, 20 nt, Artificial Sequence
  HTT spacer sequence CTCN PAM
uggacccgcaauaaagguaa

SEQ ID NO: 15452 - RNA, 20 nt, Artificial Sequence
  HTT spacer sequence CTCN PAM
uuuugcuuuaaaugaacaaa

SEQ ID NO: 15453 - RNA, 20 nt, Artificial Sequence
  HTT spacer sequence CTCN PAM
gauugugacacuaaauuuaa

SEQ ID NO: 15454 - RNA, 20 nt, Artificial Sequence
  HTT spacer sequence CTCN PAM
ugccuguuauuccagcacuu

SEQ ID NO: 15455 - RNA, 20 nt, Artificial Sequence
  HTT spacer sequence CTCN PAM
caaagugcuggaauaacagg

SEQ ID NO: 15456 - RNA, 20 nt, Artificial Sequence
  HTT spacer sequence CTCN PAM
gucucccaaagugcuggaau

SEQ ID NO: 15457 - RNA, 20 nt, Artificial Sequence
  HTT spacer sequence CTCN PAM
agugauccacuugccucagu

SEQ ID NO: 15458 - RNA, 20 nt, Artificial Sequence
  HTT spacer sequence CTCN PAM
uggccucaagugauccacuu

SEQ ID NO: 15459 - RNA, 20 nt, Artificial Sequence
  HTT spacer sequence CTCN PAM
aacucuuggccucaagugau

SEQ ID NO: 15460 - RNA, 20 nt, Artificial Sequence
  HTT spacer sequence CTCN PAM
cuacuaaaaauacaaaaaau

SEQ ID NO: 15461 - RNA, 20 nt, Artificial Sequence
  HTT spacer sequence CTCN PAM
acuaaaaauacaaaaaauua

SEQ ID NO: 15462 - RNA, 20 nt, Artificial Sequence
  HTT spacer sequence CTCN PAM
agccuguaaucccagcacuu

SEQ ID NO: 15463 - RNA, 20 nt, Artificial Sequence
  HTT spacer sequence CTCN PAM
caaagugcugggauuacagg

SEQ ID NO: 15464 - RNA, 20 nt, Artificial Sequence
  HTT spacer sequence CTCN PAM
gccucccaaagugcugggau

SEQ ID NO: 15465 - RNA, 20 nt, Artificial Sequence
  HTT spacer sequence CTCN PAM
ugauccgcccaccucggccu

SEQ ID NO: 15466 - RNA, 20 nt, Artificial Sequence
  HTT spacer sequence CTCN PAM
ugaccucgugauccgcccac

SEQ ID NO: 15467 - RNA, 20 nt, Artificial Sequence
  HTT spacer sequence CTCN PAM
acuaaaaauacaaaaaaauu

SEQ ID NO: 15468 - RNA, 20 nt, Artificial Sequence
  HTT spacer sequence CTCN PAM
gauaauuuuuuuguauuuuu

SEQ ID NO: 15469 - RNA, 20 nt, Artificial Sequence
  HTT spacer sequence CTCN PAM
ggaggcugaggcaggagaau

SEQ ID NO: 15470 - RNA, 20 nt, Artificial Sequence
  HTT spacer sequence CTCN PAM
cgagcagcugggacuacagg

SEQ ID NO: 15471 - RNA, 20 nt, Artificial Sequence
  HTT spacer sequence CTCN PAM
gccucccgagcagcugggac

SEQ ID NO: 15472 - RNA, 20 nt, Artificial Sequence
  HTT spacer sequence CTCN PAM
ugccucagccucccgagcag

SEQ ID NO: 15473 - RNA, 20 nt, Artificial Sequence
  HTT spacer sequence CTCN PAM
cggauucacgccauucuccu

SEQ ID NO: 15474 - RNA, 20 nt, Artificial Sequence
  HTT spacer sequence CTCN PAM
gccucccggauucacgccau

SEQ ID NO: 15475 - RNA, 20 nt, Artificial Sequence
  HTT spacer sequence CTCN PAM
cugcaagcuccgccucccgg

SEQ ID NO: 15476 - RNA, 20 nt, Artificial Sequence
  HTT spacer sequence CTCN PAM
gcucacugcaagcuccgccu

SEQ ID NO: 15477 - RNA, 20 nt, Artificial Sequence
  HTT spacer sequence CTCN PAM
agccugggugacagagcgag

SEQ ID NO: 15478 - RNA, 20 nt, Artificial Sequence
  HTT spacer sequence CTCN PAM
gucacccaggcuggagugca

SEQ ID NO: 15479 - RNA, 20 nt, Artificial Sequence
  HTT spacer sequence CTCN PAM
cucugucacccaggcuggag

SEQ ID NO: 15480 - RNA, 20 nt, Artificial Sequence
  HTT spacer sequence CTCN PAM
gucucaaaaaaaaaauuaga

SEQ ID NO: 15481 - RNA, 20 nt, Artificial Sequence
  HTT spacer sequence CTCN PAM
aaaaaaaaauuagaugggca

SEQ ID NO: 15482 - RNA, 20 nt, Artificial Sequence
  HTT spacer sequence CTCN PAM
caaguagcugggauuacagg

SEQ ID NO: 15483 - RNA, 20 nt, Artificial Sequence
  HTT spacer sequence CTCN PAM
gccucccaaguagcugggau

SEQ ID NO: 15484 - RNA, 20 nt, Artificial Sequence
  HTT spacer sequence CTCN PAM
ugccucagccucccaaguag

SEQ ID NO: 15485 - RNA, 20 nt, Artificial Sequence
  HTT spacer sequence CTCN PAM
cuugccucagccucccaagu

SEQ ID NO: 15486 - RNA, 20 nt, Artificial Sequence
  HTT spacer sequence CTCN PAM
cagguucaagcaacucucuu

SEQ ID NO: 15487 - RNA, 20 nt, Artificial Sequence
  HTT spacer sequence CTCN PAM
gccucccagguucaagcaac

SEQ ID NO: 15488 - RNA, 20 nt, Artificial Sequence
  HTT spacer sequence CTCN PAM
agccugggugacagagucag

SEQ ID NO: 15489 - RNA, 20 nt, Artificial Sequence
  HTT spacer sequence CTCN PAM
gucacccaggcuggagugca

SEQ ID NO: 15490 - RNA, 20 nt, Artificial Sequence
  HTT spacer sequence CTCN PAM
uuccaaaagaagaaaaaaau

SEQ ID NO: 15491 - RNA, 20 nt, Artificial Sequence
  HTT spacer sequence CTCN PAM
uuuaguaucaucagucacug

SEQ ID NO: 15492 - RNA, 20 nt, Artificial Sequence
  HTT spacer sequence CTCN PAM
uagggauaacagugacugau

SEQ ID NO: 15493 - RNA, 20 nt, Artificial Sequence
  HTT spacer sequence CTCN PAM
gaauugauguuccuggccaa

SEQ ID NO: 15494 - RNA, 20 nt, Artificial Sequence
  HTT spacer sequence CTCN PAM
uugcugucuccuuaaaucuu

SEQ ID NO: 15495 - RNA, 20 nt, Artificial Sequence
  HTT spacer sequence CTCN PAM
uuaaaucuugguuaauggcu

SEQ ID NO: 15496 - RNA, 20 nt, Artificial Sequence
  HTT spacer sequence CTCN PAM
auaacuaugcuagccaggac

SEQ ID NO: 15497 - RNA, 20 nt, Artificial Sequence
  HTT spacer sequence CTCN PAM
gggacaguuuugcuuuucug

SEQ ID NO: 15498 - RNA, 20 nt, Artificial Sequence
  HTT spacer sequence CTCN PAM
aaaaaaaaaaaaaaaaaaag

SEQ ID NO: 15499 - RNA, 20 nt, Artificial Sequence
  HTT spacer sequence CTCN PAM
aucucaaaaaaaaaaaaaaa

SEQ ID NO: 15500 - RNA, 20 nt, Artificial Sequence
  HTT spacer sequence CTCN PAM
agcccaggcaacaagaauga

SEQ ID NO: 15501 - RNA, 20 nt, Artificial Sequence
  HTT spacer sequence CTCN PAM
gcucacugcaacuucugccu

SEQ ID NO: 15502 - RNA, 20 nt, Artificial Sequence
  HTT spacer sequence CTCN PAM
cugcaacuucugccuccugg

SEQ ID NO: 15503 - RNA, 20 nt, Artificial Sequence
  HTT spacer sequence CTCN PAM
uggguucaaacgauucuucu

SEQ ID NO: 15504 - RNA, 20 nt, Artificial Sequence
  HTT spacer sequence CTCN PAM
gccucucgaggcagauuaca

SEQ ID NO: 15505 - RNA, 20 nt, Artificial Sequence
  HTT spacer sequence CTCN PAM
cgaggcagauuacagcuggg

SEQ ID NO: 15506 - RNA, 20 nt, Artificial Sequence
  HTT spacer sequence CTCN PAM
aggcagauuacagcugggau

SEQ ID NO: 15507 - RNA, 20 nt, Artificial Sequence
  HTT spacer sequence CTCN PAM
agaggcugaggcagaagaau

SEQ ID NO: 15508 - RNA, 20 nt, Artificial Sequence
  HTT spacer sequence CTCN PAM
acuaaaacuacaaaaaaauu

SEQ ID NO: 15509 - RNA, 20 nt, Artificial Sequence
  HTT spacer sequence CTCN PAM
aacuccugaccugaagugau

SEQ ID NO: 15510 - RNA, 20 nt, Artificial Sequence
  HTT spacer sequence CTCN PAM
ugaccugaagugaucuaucc

SEQ ID NO: 15511 - RNA, 20 nt, Artificial Sequence
  HTT spacer sequence CTCN PAM
caaaguguugggauuacggg

SEQ ID NO: 15512 - RNA, 20 nt, Artificial Sequence
  HTT spacer sequence CTCN PAM
ugcccguaaucccaacacuu

SEQ ID NO: 15513 - RNA, 20 nt, Artificial Sequence
  HTT spacer sequence CTCN PAM
cucuuugccuugucuucuac

SEQ ID NO: 15514 - RNA, 20 nt, Artificial Sequence
  HTT spacer sequence CTCN PAM
cuuugccuugucuucuaccu

SEQ ID NO: 15515 - RNA, 20 nt, Artificial Sequence
  HTT spacer sequence CTCN PAM
uugccuugucuucuaccuuu

SEQ ID NO: 15516 - RNA, 20 nt, Artificial Sequence
  HTT spacer sequence CTCN PAM
cuacuaacuucccauucucc

SEQ ID NO: 15517 - RNA, 20 nt, Artificial Sequence
  HTT spacer sequence CTCN PAM
uuuagcugccaucagucuuc

SEQ ID NO: 15518 - RNA, 20 nt, Artificial Sequence
  HTT spacer sequence CTCN PAM
cuucucugcaaacaucucug

SEQ ID NO: 15519 - RNA, 20 nt, Artificial Sequence
  HTT spacer sequence CTCN PAM
gcaaacaucucuggagaguc

SEQ ID NO: 15520 - RNA, 20 nt, Artificial Sequence
  HTT spacer sequence CTCN PAM
ggagagucccagccucagcc

SEQ ID NO: 15521 - RNA, 20 nt, Artificial Sequence
  HTT spacer sequence CTCN PAM
agagauguuugcagagaagg

SEQ ID NO: 15522 - RNA, 20 nt, Artificial Sequence
  HTT spacer sequence CTCN PAM
ccagagauguuugcagagaa

SEQ ID NO: 15523 - RNA, 20 nt, Artificial Sequence
  HTT spacer sequence CTCN PAM
gcccacagagcuucccacug

SEQ ID NO: 15524 - RNA, 20 nt, Artificial Sequence
  HTT spacer sequence CTCN PAM
gugggcugaggcugggacuc

SEQ ID NO: 15525 - RNA, 20 nt, Artificial Sequence
  HTT spacer sequence CTCN PAM
gagguggaccuuguuugcaa

SEQ ID NO: 15526 - RNA, 20 nt, Artificial Sequence
  HTT spacer sequence CTCN PAM
gagcagugggaagcucugug

SEQ ID NO: 15527 - RNA, 20 nt, Artificial Sequence
  HTT spacer sequence CTCN PAM
cuuggccuggacccugucua

SEQ ID NO: 15528 - RNA, 20 nt, Artificial Sequence
  HTT spacer sequence CTCN PAM
uggccuggacccugucuacu

SEQ ID NO: 15529 - RNA, 20 nt, Artificial Sequence
  HTT spacer sequence CTCN PAM
auagcagcguuucccgccca

SEQ ID NO: 15530 - RNA, 20 nt, Artificial Sequence
  HTT spacer sequence CTCN PAM
gggcacugcucugguccugc

SEQ ID NO: 15531 - RNA, 20 nt, Artificial Sequence
  HTT spacer sequence CTCN PAM
gguccugccugccuuucccu

SEQ ID NO: 15532 - RNA, 20 nt, Artificial Sequence
  HTT spacer sequence CTCN PAM
uuguauccugcaggcugcua

SEQ ID NO: 15533 - RNA, 20 nt, Artificial Sequence
  HTT spacer sequence CTCN PAM
agauggggguagcagccugc

SEQ ID NO: 15534 - RNA, 20 nt, Artificial Sequence
  HTT spacer sequence CTCN PAM
ucaguuggcuuucagagggc

SEQ ID NO: 15535 - RNA, 20 nt, Artificial Sequence
  HTT spacer sequence CTCN PAM
gaaagccaacugaagaggac

SEQ ID NO: 15536 - RNA, 20 nt, Artificial Sequence
  HTT spacer sequence CTCN PAM
uggguguucccuuacccacu

SEQ ID NO: 15537 - RNA, 20 nt, Artificial Sequence
  HTT spacer sequence CTCN PAM
ccagucacuggguucagucc

SEQ ID NO: 15538 - RNA, 20 nt, Artificial Sequence
  HTT spacer sequence CTCN PAM
guccuaggccgucuucucuc

SEQ ID NO: 15539 - RNA, 20 nt, Artificial Sequence
  HTT spacer sequence CTCN PAM
cuuuguagucucugggccag

SEQ ID NO: 15540 - RNA, 20 nt, Artificial Sequence
  HTT spacer sequence CTCN PAM
uuguagucucugggccagug

SEQ ID NO: 15541 - RNA, 20 nt, Artificial Sequence
  HTT spacer sequence CTCN PAM
gggccagugcuguucuagag

SEQ ID NO: 15542 - RNA, 20 nt, Artificial Sequence
  HTT spacer sequence CTCN PAM
agaacagcacuggcccagag

SEQ ID NO: 15543 - RNA, 20 nt, Artificial Sequence
  HTT spacer sequence CTCN PAM
cuagaacagcacuggcccag

SEQ ID NO: 15544 - RNA, 20 nt, Artificial Sequence
  HTT spacer sequence CTCN PAM
auagcuaugccaggcaagac

SEQ ID NO: 15545 - RNA, 20 nt, Artificial Sequence
  HTT spacer sequence CTCN PAM
acagcuauauguguuuagug

SEQ ID NO: 15546 - RNA, 20 nt, Artificial Sequence
  HTT spacer sequence CTCN PAM
aguauugggcagggcagccu

SEQ ID NO: 15547 - RNA, 20 nt, Artificial Sequence
  HTT spacer sequence CTCN PAM
ggcugcccugcccaauacug

SEQ ID NO: 15548 - RNA, 20 nt, Artificial Sequence
  HTT spacer sequence CTCN PAM
caggcugcccugcccaauac

SEQ ID NO: 15549 - RNA, 20 nt, Artificial Sequence
  HTT spacer sequence CTCN PAM
ugucuucagugucuagauga

SEQ ID NO: 15550 - RNA, 20 nt, Artificial Sequence
  HTT spacer sequence CTCN PAM
ucuagacacugaagacagga

SEQ ID NO: 15551 - RNA, 20 nt, Artificial Sequence
  HTT spacer sequence CTCN PAM
gaggaccugucucuggagcu

SEQ ID NO: 15552 - RNA, 20 nt, Artificial Sequence
  HTT spacer sequence CTCN PAM
gaggucccucaucuagacac

SEQ ID NO: 15553 - RNA, 20 nt, Artificial Sequence
  HTT spacer sequence CTCN PAM
ggagcugcaguucaauguag

SEQ ID NO: 15554 - RNA, 20 nt, Artificial Sequence
  HTT spacer sequence CTCN PAM
agagacagguccucugaggu

SEQ ID NO: 15555 - RNA, 20 nt, Artificial Sequence
  HTT spacer sequence CTCN PAM
ucacaccgugucugacauau

SEQ ID NO: 15556 - RNA, 20 nt, Artificial Sequence
  HTT spacer sequence CTCN PAM
gcuuucuguccuccucccca

SEQ ID NO: 15557 - RNA, 20 nt, Artificial Sequence
  HTT spacer sequence CTCN PAM
uccccacaucugccccugcc

SEQ ID NO: 15558 - RNA, 20 nt, Artificial Sequence
  HTT spacer sequence CTCN PAM
ccacaucugccccugcccca

SEQ ID NO: 15559 - RNA, 20 nt, Artificial Sequence
  HTT spacer sequence CTCN PAM
ccaagucuuuuguuuccccu

SEQ ID NO: 15560 - RNA, 20 nt, Artificial Sequence
  HTT spacer sequence CTCN PAM
caaaauauuuaguaggggaa

SEQ ID NO: 15561 - RNA, 20 nt, Artificial Sequence
  HTT spacer sequence CTCN PAM
guuaaaaaccggacugcagg

SEQ ID NO: 15562 - RNA, 20 nt, Artificial Sequence
  HTT spacer sequence CTCN PAM
cgccuguaauuccagaacuu

SEQ ID NO: 15563 - RNA, 20 nt, Artificial Sequence
  HTT spacer sequence CTCN PAM
caaaguucuggaauuacagg

SEQ ID NO: 15564 - RNA, 20 nt, Artificial Sequence
  HTT spacer sequence CTCN PAM
gccucccaaaguucuggaau

SEQ ID NO: 15565 - RNA, 20 nt, Artificial Sequence
  HTT spacer sequence CTCN PAM
ugaccuugugaugcacuggu

SEQ ID NO: 15566 - RNA, 20 nt, Artificial Sequence
  HTT spacer sequence CTCN PAM
aucuccugaccuugugaugc

SEQ ID NO: 15567 - RNA, 20 nt, Artificial Sequence
  HTT spacer sequence CTCN PAM
cacggugaaaccccgucucu

SEQ ID NO: 15568 - RNA, 20 nt, Artificial Sequence
  HTT spacer sequence CTCN PAM
acuaaaaauacaaaaaaaaa

SEQ ID NO: 15569 - RNA, 20 nt, Artificial Sequence
  HTT spacer sequence CTCN PAM
cagguagcugggacuauggg

SEQ ID NO: 15570 - RNA, 20 nt, Artificial Sequence
  HTT spacer sequence CTCN PAM
ugcaucagccucccagguag

SEQ ID NO: 15571 - RNA, 20 nt, Artificial Sequence
  HTT spacer sequence CTCN PAM
cagguucacgccguucuccu

SEQ ID NO: 15572 - RNA, 20 nt, Artificial Sequence
  HTT spacer sequence CTCN PAM
gccucccagguucacgccgu

SEQ ID NO: 15573 - RNA, 20 nt, Artificial Sequence
  HTT spacer sequence CTCN PAM
cugcaagcuccgccucccag

SEQ ID NO: 15574 - RNA, 20 nt, Artificial Sequence
  HTT spacer sequence CTCN PAM
gcucacugcaagcuccgccu

SEQ ID NO: 15575 - RNA, 20 nt, Artificial Sequence
  HTT spacer sequence CTCN PAM
agccugggcgacagagcgag

SEQ ID NO: 15576 - RNA, 20 nt, Artificial Sequence
  HTT spacer sequence CTCN PAM
gucgcccaggcuggagugca

SEQ ID NO: 15577 - RNA, 20 nt, Artificial Sequence
  HTT spacer sequence CTCN PAM
cucugucgcccaggcuggag

SEQ ID NO: 15578 - RNA, 20 nt, Artificial Sequence
  HTT spacer sequence CTCN PAM
gucucaaaaacaaaacaaaa

SEQ ID NO: 15579 - RNA, 20 nt, Artificial Sequence
  HTT spacer sequence CTCN PAM
aaaacaaaacaaaacaaaaa

SEQ ID NO: 15580 - RNA, 20 nt, Artificial Sequence
  HTT spacer sequence CTCN PAM
cuucuuccugugcagccugg

SEQ ID NO: 15581 - RNA, 20 nt, Artificial Sequence
  HTT spacer sequence CTCN PAM
gaugguaaugcuugcucacu

SEQ ID NO: 15582 - RNA, 20 nt, Artificial Sequence
  HTT spacer sequence CTCN PAM
aucuccucucaggccagugg

SEQ ID NO: 15583 - RNA, 20 nt, Artificial Sequence
  HTT spacer sequence CTCN PAM
ucucaggccagugguggcau

SEQ ID NO: 15584 - RNA, 20 nt, Artificial Sequence
  HTT spacer sequence CTCN PAM
caggccagugguggcauuag

SEQ ID NO: 15585 - RNA, 20 nt, Artificial Sequence
  HTT spacer sequence CTCN PAM
ggccagugguggcauuagau

SEQ ID NO: 15586 - RNA, 20 nt, Artificial Sequence
  HTT spacer sequence CTCN PAM
uaggagcguguaugaguucg

SEQ ID NO: 15587 - RNA, 20 nt, Artificial Sequence
  HTT spacer sequence CTCN PAM
uaugagaaucuaaugccacc

SEQ ID NO: 15588 - RNA, 20 nt, Artificial Sequence
  HTT spacer sequence CTCN PAM
uacacgcuccuaugagaauc

SEQ ID NO: 15589 - RNA, 20 nt, Artificial Sequence
  HTT spacer sequence CTCN PAM
cacuucuguaaagacauacc

SEQ ID NO: 15590 - RNA, 20 nt, Artificial Sequence
  HTT spacer sequence CTCN PAM
gguaugucuuuacagaagug

SEQ ID NO: 15591 - RNA, 20 nt, Artificial Sequence
  HTT spacer sequence CTCN PAM
uuucuuuauaugucucaggu

SEQ ID NO: 15592 - RNA, 20 nt, Artificial Sequence
  HTT spacer sequence CTCN PAM
caguucugcaggcuguacag

SEQ ID NO: 15593 - RNA, 20 nt, Artificial Sequence
  HTT spacer sequence CTCN PAM
ggaaacuugcagucauggca

SEQ ID NO: 15594 - RNA, 20 nt, Artificial Sequence
  HTT spacer sequence CTCN PAM
uuuuccugugggccauguga

SEQ ID NO: 15595 - RNA, 20 nt, Artificial Sequence
  HTT spacer sequence CTCN PAM
cuuuuuccugugggccaugu

SEQ ID NO: 15596 - RNA, 20 nt, Artificial Sequence
  HTT spacer sequence CTCN PAM
uucucucuuuuuccuguggg

SEQ ID NO: 15597 - RNA, 20 nt, Artificial Sequence
  HTT spacer sequence CTCN PAM
ccuucucucuuuuuccugug

SEQ ID NO: 15598 - RNA, 20 nt, Artificial Sequence
  HTT spacer sequence CTCN PAM
cuccuucucucuuuuuccug

SEQ ID NO: 15599 - RNA, 20 nt, Artificial Sequence
  HTT spacer sequence CTCN PAM
cucuccuucucucuuuuucc

SEQ ID NO: 15600 - RNA, 20 nt, Artificial Sequence
  HTT spacer sequence CTCN PAM
cucucuccuucucucuuuuu

SEQ ID NO: 15601 - RNA, 20 nt, Artificial Sequence
  HTT spacer sequence CTCN PAM
cucucucuccuucucucuuu

SEQ ID NO: 15602 - RNA, 20 nt, Artificial Sequence
  HTT spacer sequence CTCN PAM
cucucucucuccuucucucu

SEQ ID NO: 15603 - RNA, 20 nt, Artificial Sequence
  HTT spacer sequence CTCN PAM
gucucucucucucucuccuu

SEQ ID NO: 15604 - RNA, 20 nt, Artificial Sequence
  HTT spacer sequence CTCN PAM
cugucucucucucucucucc

SEQ ID NO: 15605 - RNA, 20 nt, Artificial Sequence
  HTT spacer sequence CTCN PAM
cucugucucucucucucucu

SEQ ID NO: 15606 - RNA, 20 nt, Artificial Sequence
  HTT spacer sequence CTCN PAM
cucucugucucucucucucu

SEQ ID NO: 15607 - RNA, 20 nt, Artificial Sequence
  HTT spacer sequence CTCN PAM
cucucucugucucucucucu

SEQ ID NO: 15608 - RNA, 20 nt, Artificial Sequence
  HTT spacer sequence CTCN PAM
cucucucucugucucucucu

SEQ ID NO: 15609 - RNA, 20 nt, Artificial Sequence
  HTT spacer sequence CTCN PAM
aucuuucuuuuucucucucu

SEQ ID NO: 15610 - RNA, 20 nt, Artificial Sequence
  HTT spacer sequence CTCN PAM
caaucuuucuuuuucucucu

SEQ ID NO: 15611 - RNA, 20 nt, Artificial Sequence
  HTT spacer sequence CTCN PAM
cucucaaucuuucuuuuucu

SEQ ID NO: 15612 - RNA, 20 nt, Artificial Sequence
  HTT spacer sequence CTCN PAM
cccucucaaucuuucuuuuu

SEQ ID NO: 15613 - RNA, 20 nt, Artificial Sequence
  HTT spacer sequence CTCN PAM
cucccucucaaucuuucuuu

SEQ ID NO: 15614 - RNA, 20 nt, Artificial Sequence
  HTT spacer sequence CTCN PAM
ucucucccucucaaucuuuc

SEQ ID NO: 15615 - RNA, 20 nt, Artificial Sequence
  HTT spacer sequence CTCN PAM
cuccucucucccucucaauc

SEQ ID NO: 15616 - RNA, 20 nt, Artificial Sequence
  HTT spacer sequence CTCN PAM
uuucucccuccucucucccu

SEQ ID NO: 15617 - RNA, 20 nt, Artificial Sequence
  HTT spacer sequence CTCN PAM
ccuuucucccuccucucucc

SEQ ID NO: 15618 - RNA, 20 nt, Artificial Sequence
  HTT spacer sequence CTCN PAM
cccuacaggcacucuccuuu

SEQ ID NO: 15619 - RNA, 20 nt, Artificial Sequence
  HTT spacer sequence CTCN PAM
uuuguguagcaacucccccu

SEQ ID NO: 15620 - RNA, 20 nt, Artificial Sequence
  HTT spacer sequence CTCN PAM
accauuagaaacuaccccca

SEQ ID NO: 15621 - RNA, 20 nt, Artificial Sequence
  HTT spacer sequence CTCN PAM
caccaggccccaccuccgac

SEQ ID NO: 15622 - RNA, 20 nt, Artificial Sequence
  HTT spacer sequence CTCN PAM
gacacuggagauuacaauuc

SEQ ID NO: 15623 - RNA, 20 nt, Artificial Sequence
  HTT spacer sequence CTCN PAM
agugucggagguggggccug

SEQ ID NO: 15624 - RNA, 20 nt, Artificial Sequence
  HTT spacer sequence CTCN PAM
ugcugaauuguaaucuccag

SEQ ID NO: 15625 - RNA, 20 nt, Artificial Sequence
  HTT spacer sequence CTCN PAM
guguccccacccaaaucuca

SEQ ID NO: 15626 - RNA, 20 nt, Artificial Sequence
  HTT spacer sequence CTCN PAM
gauaugguuuggcucugugu

SEQ ID NO: 15627 - RNA, 20 nt, Artificial Sequence
  HTT spacer sequence CTCN PAM
aaugugcaguucacaauagg

SEQ ID NO: 15628 - RNA, 20 nt, Artificial Sequence
  HTT spacer sequence CTCN PAM
uuaugagaaucuaaugccug

SEQ ID NO: 15629 - RNA, 20 nt, Artificial Sequence
  HTT spacer sequence CTCN PAM
uaaggagcaugcaaccuaga

SEQ ID NO: 15630 - RNA, 20 nt, Artificial Sequence
  HTT spacer sequence CTCN PAM
aaucaucaucaggcauuaga

SEQ ID NO: 15631 - RNA, 20 nt, Artificial Sequence
  HTT spacer sequence CTCN PAM
gcacauaugcaugcaccugu

SEQ ID NO: 15632 - RNA, 20 nt, Artificial Sequence
  HTT spacer sequence CTCN PAM
gccacuucugguccagacug

SEQ ID NO: 15633 - RNA, 20 nt, Artificial Sequence
  HTT spacer sequence CTCN PAM
uuuggauuacugcacuagcc

SEQ ID NO: 15634 - RNA, 20 nt, Artificial Sequence
  HTT spacer sequence CTCN PAM
aaaaaauuaaauuaaauuuu

SEQ ID NO: 15635 - RNA, 20 nt, Artificial Sequence
  HTT spacer sequence CTCN PAM
aagcugggcaacagaaugac

SEQ ID NO: 15636 - RNA, 20 nt, Artificial Sequence
  HTT spacer sequence CTCN PAM
cugcggccucgaucucccag

SEQ ID NO: 15637 - RNA, 20 nt, Artificial Sequence
  HTT spacer sequence CTCN PAM
aucucccaggcucaagugau

SEQ ID NO: 15638 - RNA, 20 nt, Artificial Sequence
  HTT spacer sequence CTCN PAM
caggcucaagugauccuucu

SEQ ID NO: 15639 - RNA, 20 nt, Artificial Sequence
  HTT spacer sequence CTCN PAM
agugauccuucugccucagc

SEQ ID NO: 15640 - RNA, 20 nt, Artificial Sequence
  HTT spacer sequence CTCN PAM
gccuucucaguaguugggac

SEQ ID NO: 15641 - RNA, 20 nt, Artificial Sequence
  HTT spacer sequence CTCN PAM
guaguugggacuacaggcau

SEQ ID NO: 15642 - RNA, 20 nt, Artificial Sequence
  HTT spacer sequence CTCN PAM
aaaaaaaaaaaaaaucaaaa

SEQ ID NO: 15643 - RNA, 20 nt, Artificial Sequence
  HTT spacer sequence CTCN PAM
gucucaaaaaaaaaaaaaaa

SEQ ID NO: 15644 - RNA, 20 nt, Artificial Sequence
  HTT spacer sequence CTCN PAM
gccugucgcccaggcuggag

SEQ ID NO: 15645 - RNA, 20 nt, Artificial Sequence
  HTT spacer sequence CTCN PAM
agccugggcgacaggcugag

SEQ ID NO: 15646 - RNA, 20 nt, Artificial Sequence
  HTT spacer sequence CTCN PAM
gcucacugcaacuucugccu

SEQ ID NO: 15647 - RNA, 20 nt, Artificial Sequence
  HTT spacer sequence CTCN PAM
cugcaacuucugccucccag

SEQ ID NO: 15648 - RNA, 20 nt, Artificial Sequence
  HTT spacer sequence CTCN PAM
cagguucaagugauucuccu

SEQ ID NO: 15649 - RNA, 20 nt, Artificial Sequence
  HTT spacer sequence CTCN PAM
ugccucagccucccgaguag

SEQ ID NO: 15650 - RNA, 20 nt, Artificial Sequence
  HTT spacer sequence CTCN PAM
gccucccgaguaguugggau

SEQ ID NO: 15651 - RNA, 20 nt, Artificial Sequence
  HTT spacer sequence CTCN PAM
cgaguaguugggauuacagg

SEQ ID NO: 15652 - RNA, 20 nt, Artificial Sequence
  HTT spacer sequence CTCN PAM
ggaggcugaggcaggagaau

SEQ ID NO: 15653 - RNA, 20 nt, Artificial Sequence
  HTT spacer sequence CTCN PAM
acuaaaaauacaaaaaguua

SEQ ID NO: 15654 - RNA, 20 nt, Artificial Sequence
  HTT spacer sequence CTCN PAM
aacuugugaccucgugauua

SEQ ID NO: 15655 - RNA, 20 nt, Artificial Sequence
  HTT spacer sequence CTCN PAM
ugauuagcccgccucggccu

SEQ ID NO: 15656 - RNA, 20 nt, Artificial Sequence
  HTT spacer sequence CTCN PAM
gccucccaaagugcugggau

SEQ ID NO: 15657 - RNA, 20 nt, Artificial Sequence
  HTT spacer sequence CTCN PAM
caaagugcugggauuacagg

SEQ ID NO: 15658 - RNA, 20 nt, Artificial Sequence
  HTT spacer sequence CTCN PAM
cgccuguaaucccagcacuu

SEQ ID NO: 15659 - RNA, 20 nt, Artificial Sequence
  HTT spacer sequence CTCN PAM
cagccaggaaacagcauucu

SEQ ID NO: 15660 - RNA, 20 nt, Artificial Sequence
  HTT spacer sequence CTCN PAM
agaaugcuguuuccuggcug

SEQ ID NO: 15661 - RNA, 20 nt, Artificial Sequence
  HTT spacer sequence CTCN PAM
uuaguaugcccacagaguug

SEQ ID NO: 15662 - RNA, 20 nt, Artificial Sequence
  HTT spacer sequence CTCN PAM
gugggcauacuaaagagaau

SEQ ID NO: 15663 - RNA, 20 nt, Artificial Sequence
  HTT spacer sequence CTCN PAM
guacucuuuacccaaaaccu

SEQ ID NO: 15664 - RNA, 20 nt, Artificial Sequence
  HTT spacer sequence CTCN PAM
uuacccaaaaccuccaugcc

SEQ ID NO: 15665 - RNA, 20 nt, Artificial Sequence
  HTT spacer sequence CTCN PAM
augccuccagcugcaggcag

SEQ ID NO: 15666 - RNA, 20 nt, Artificial Sequence
  HTT spacer sequence CTCN PAM
agcugcaggcagccacuaac

SEQ ID NO: 15667 - RNA, 20 nt, Artificial Sequence
  HTT spacer sequence CTCN PAM
gugacucuacgucuucugga

SEQ ID NO: 15668 - RNA, 20 nt, Artificial Sequence
  HTT spacer sequence CTCN PAM
acgucuucuggacauuacug

SEQ ID NO: 15669 - RNA, 20 nt, Artificial Sequence
  HTT spacer sequence CTCN PAM
uacagucagugagcuuguga

SEQ ID NO: 15670 - RNA, 20 nt, Artificial Sequence
  HTT spacer sequence CTCN PAM
cugacuguaugagcccaucc

SEQ ID NO: 15671 - RNA, 20 nt, Artificial Sequence
  HTT spacer sequence CTCN PAM
cuguuuuucuuuuuuuuuua

SEQ ID NO: 15672 - RNA, 20 nt, Artificial Sequence
  HTT spacer sequence CTCN PAM
guuuuucuuuuuuuuuuaaa

SEQ ID NO: 15673 - RNA, 20 nt, Artificial Sequence
  HTT spacer sequence CTCN PAM
cggguucaagcgauucuccu

SEQ ID NO: 15674 - RNA, 20 nt, Artificial Sequence
  HTT spacer sequence CTCN PAM
ugccucagccucccgagugg

SEQ ID NO: 15675 - RNA, 20 nt, Artificial Sequence
  HTT spacer sequence CTCN PAM
gccucccgaguggcugggac

SEQ ID NO: 15676 - RNA, 20 nt, Artificial Sequence
  HTT spacer sequence CTCN PAM
cgaguggcugggacuacagg

SEQ ID NO: 15677 - RNA, 20 nt, Artificial Sequence
  HTT spacer sequence CTCN PAM
ggaggcugaggcaggagaau

SEQ ID NO: 15678 - RNA, 20 nt, Artificial Sequence
  HTT spacer sequence CTCN PAM
acuaaaaaaaaaaaaaaaaa

SEQ ID NO: 15679 - RNA, 20 nt, Artificial Sequence
  HTT spacer sequence CTCN PAM
aucuccugacuucaugaucc

SEQ ID NO: 15680 - RNA, 20 nt, Artificial Sequence
  HTT spacer sequence CTCN PAM
ugacuucaugauccgccugc

SEQ ID NO: 15681 - RNA, 20 nt, Artificial Sequence
  HTT spacer sequence CTCN PAM
gccucccaaagugcugggau

SEQ ID NO: 15682 - RNA, 20 nt, Artificial Sequence
  HTT spacer sequence CTCN PAM
caaagugcugggauuacagg

SEQ ID NO: 15683 - RNA, 20 nt, Artificial Sequence
  HTT spacer sequence CTCN PAM
cgccuguaaucccagcacuu

SEQ ID NO: 15684 - RNA, 20 nt, Artificial Sequence
  HTT spacer sequence CTCN PAM
cacuucuggagguugggaag

SEQ ID NO: 15685 - RNA, 20 nt, Artificial Sequence
  HTT spacer sequence CTCN PAM
agaagugugagaaguaaauu

SEQ ID NO: 15686 - RNA, 20 nt, Artificial Sequence
  HTT spacer sequence CTCN PAM
uguggugagggggugaggaa

SEQ ID NO: 15687 - RNA, 20 nt, Artificial Sequence
  HTT spacer sequence CTCN PAM
ccacaugagggcaaggcgaa

SEQ ID NO: 15688 - RNA, 20 nt, Artificial Sequence
  HTT spacer sequence CTCN PAM
cccccucaccacaugagggc

SEQ ID NO: 15689 - RNA, 20 nt, Artificial Sequence
  HTT spacer sequence CTCN PAM
guggggccucuuauauaugg

SEQ ID NO: 15690 - RNA, 20 nt, Artificial Sequence
  HTT spacer sequence CTCN PAM
uauauauggaugcuaaucuc

SEQ ID NO: 15691 - RNA, 20 nt, Artificial Sequence
  HTT spacer sequence CTCN PAM
uucaugaggggucugcccuc

SEQ ID NO: 15692 - RNA, 20 nt, Artificial Sequence
  HTT spacer sequence CTCN PAM
ugaaugagauuagcauccau

SEQ ID NO: 15693 - RNA, 20 nt, Artificial Sequence
  HTT spacer sequence CTCN PAM
ugacccagucaccucccaaa

SEQ ID NO: 15694 - RNA, 20 nt, Artificial Sequence
  HTT spacer sequence CTCN PAM
caaaggccccaccuccuaau

SEQ ID NO: 15695 - RNA, 20 nt, Artificial Sequence
  HTT spacer sequence CTCN PAM
uaauaccaucacccugguaa

SEQ ID NO: 15696 - RNA, 20 nt, Artificial Sequence
  HTT spacer sequence CTCN PAM
cugaucuuagaaaagugcuu

SEQ ID NO: 15697 - RNA, 20 nt, Artificial Sequence
  HTT spacer sequence CTCN PAM
cucccugaucuuagaaaagu

SEQ ID NO: 15698 - RNA, 20 nt, Artificial Sequence
  HTT spacer sequence CTCN PAM
gcuacuuacucacucccuga

SEQ ID NO: 15699 - RNA, 20 nt, Artificial Sequence
  HTT spacer sequence CTCN PAM
auuccacaugucagucaucu

SEQ ID NO: 15700 - RNA, 20 nt, Artificial Sequence
  HTT spacer sequence CTCN PAM
gcuccaugauggcugccucc

SEQ ID NO: 15701 - RNA, 20 nt, Artificial Sequence
  HTT spacer sequence CTCN PAM
augauggcugccuccuagag

SEQ ID NO: 15702 - RNA, 20 nt, Artificial Sequence
  HTT spacer sequence CTCN PAM
uagagcauugggagucucga

SEQ ID NO: 15703 - RNA, 20 nt, Artificial Sequence
  HTT spacer sequence CTCN PAM
aggaggcagccaucauggag

SEQ ID NO: 15704 - RNA, 20 nt, Artificial Sequence
  HTT spacer sequence CTCN PAM
caaugcucuaggaggcagcc

SEQ ID NO: 15705 - RNA, 20 nt, Artificial Sequence
  HTT spacer sequence CTCN PAM
auguucuauaugcucucaug

SEQ ID NO: 15706 - RNA, 20 nt, Artificial Sequence
  HTT spacer sequence CTCN PAM
cauguguuguguauuggaga

SEQ ID NO: 15707 - RNA, 20 nt, Artificial Sequence
  HTT spacer sequence CTCN PAM
uguguuguguauuggagaua

SEQ ID NO: 15708 - RNA, 20 nt, Artificial Sequence
  HTT spacer sequence CTCN PAM
aauacacaacacaugagagc

SEQ ID NO: 15709 - RNA, 20 nt, Artificial Sequence
  HTT spacer sequence CTCN PAM
acuaucuccaauacacaaca

SEQ ID NO: 15710 - RNA, 20 nt, Artificial Sequence
  HTT spacer sequence CTCN PAM
gagccuguuuccucuuuuag

SEQ ID NO: 15711 - RNA, 20 nt, Artificial Sequence
  HTT spacer sequence CTCN PAM
gagaugaaguaacuuauuca

SEQ ID NO: 15712 - RNA, 20 nt, Artificial Sequence
  HTT spacer sequence CTCN PAM
uuuagaaacaggaguuuaaa

SEQ ID NO: 15713 - RNA, 20 nt, Artificial Sequence
  HTT spacer sequence CTCN PAM
uguuucuaaaagaggaaaca

SEQ ID NO: 15714 - RNA, 20 nt, Artificial Sequence
  HTT spacer sequence CTCN PAM
ugccuguaauuccagcacuu

SEQ ID NO: 15715 - RNA, 20 nt, Artificial Sequence
  HTT spacer sequence CTCN PAM
caaagugcuggaauuacagg

SEQ ID NO: 15716 - RNA, 20 nt, Artificial Sequence
  HTT spacer sequence CTCN PAM
gccucccaaagugcuggaau

SEQ ID NO: 15717 - RNA, 20 nt, Artificial Sequence
  HTT spacer sequence CTCN PAM
caucucagccucccaaagug

SEQ ID NO: 15718 - RNA, 20 nt, Artificial Sequence
  HTT spacer sequence CTCN PAM
agugauccucccaucucagc

SEQ ID NO: 15719 - RNA, 20 nt, Artificial Sequence
  HTT spacer sequence CTCN PAM
aagcuccagugauccuccca

SEQ ID NO: 15720 - RNA, 20 nt, Artificial Sequence
  HTT spacer sequence CTCN PAM
aacuccaagcuccagugauc

SEQ ID NO: 15721 - RNA, 20 nt, Artificial Sequence
  HTT spacer sequence CTCN PAM
cacuaugaugcccaggcugg

SEQ ID NO: 15722 - RNA, 20 nt, Artificial Sequence
  HTT spacer sequence CTCN PAM
ucaagaaauuaaaaaauuag

SEQ ID NO: 15723 - RNA, 20 nt, Artificial Sequence
  HTT spacer sequence CTCN PAM
agaaauuaaaaaauuagcug

SEQ ID NO: 15724 - RNA, 20 nt, Artificial Sequence
  HTT spacer sequence CTCN PAM
ggaggcugaggugggaggau

SEQ ID NO: 15725 - RNA, 20 nt, Artificial Sequence
  HTT spacer sequence CTCN PAM
agaguagaugggaccacagg

SEQ ID NO: 15726 - RNA, 20 nt, Artificial Sequence
  HTT spacer sequence CTCN PAM
gccuccagaguagaugggac

SEQ ID NO: 15727 - RNA, 20 nt, Artificial Sequence
  HTT spacer sequence CTCN PAM
caccucagccuccagaguag

SEQ ID NO: 15728 - RNA, 20 nt, Artificial Sequence
  HTT spacer sequence CTCN PAM
agcaauccucccaccucagc

SEQ ID NO: 15729 - RNA, 20 nt, Artificial Sequence
  HTT spacer sequence CTCN PAM
ugggcucaagcaauccuccc

SEQ ID NO: 15730 - RNA, 20 nt, Artificial Sequence
  HTT spacer sequence CTCN PAM
accuccugggcucaagcaau

SEQ ID NO: 15731 - RNA, 20 nt, Artificial Sequence
  HTT spacer sequence CTCN PAM
ucacccaggauggggugcaa

SEQ ID NO: 15732 - RNA, 20 nt, Artificial Sequence
  HTT spacer sequence CTCN PAM
cucgucacccaggauggggu

SEQ ID NO: 15733 - RNA, 20 nt, Artificial Sequence
  HTT spacer sequence CTCN PAM
aaaaagaaaaaaaaaaugcu

SEQ ID NO: 15734 - RNA, 20 nt, Artificial Sequence
  HTT spacer sequence CTCN PAM
aacagcaaacaaccagggca

SEQ ID NO: 15735 - RNA, 20 nt, Artificial Sequence
  HTT spacer sequence CTCN PAM
cugagggcuccuuccaucuu

SEQ ID NO: 15736 - RNA, 20 nt, Artificial Sequence
  HTT spacer sequence CTCN PAM
gggagcccccaggcccaugc

SEQ ID NO: 15737 - RNA, 20 nt, Artificial Sequence
  HTT spacer sequence CTCN PAM
uuccaucuucaacucauucu

SEQ ID NO: 15738 - RNA, 20 nt, Artificial Sequence
  HTT spacer sequence CTCN PAM
uucucugugcaccuguuagg

SEQ ID NO: 15739 - RNA, 20 nt, Artificial Sequence
  HTT spacer sequence CTCN PAM
gugcaccuguuaggaaguug

SEQ ID NO: 15740 - RNA, 20 nt, Artificial Sequence
  HTT spacer sequence CTCN PAM
uuuuguucuuggacccugau

SEQ ID NO: 15741 - RNA, 20 nt, Artificial Sequence
  HTT spacer sequence CTCN PAM
uuuuaauaaaugguaaaacc

SEQ ID NO: 15742 - RNA, 20 nt, Artificial Sequence
  HTT spacer sequence CTCN PAM
aacaaaccccccuucucuaa

SEQ ID NO: 15743 - RNA, 20 nt, Artificial Sequence
  HTT spacer sequence CTCN PAM
aagucccauccgacgaaagg

SEQ ID NO: 15744 - RNA, 20 nt, Artificial Sequence
  HTT spacer sequence CTCN PAM
uuccccuuucgucggauggg

SEQ ID NO: 15745 - RNA, 20 nt, Artificial Sequence
  HTT spacer sequence CTCN PAM
ugguucuuucuccuuccccu

SEQ ID NO: 15746 - RNA, 20 nt, Artificial Sequence
  HTT spacer sequence CTCN PAM
acgguacagaugcuuguucu

SEQ ID NO: 15747 - RNA, 20 nt, Artificial Sequence
  HTT spacer sequence CTCN PAM
cugccuuucuugggacucaa

SEQ ID NO: 15748 - RNA, 20 nt, Artificial Sequence
  HTT spacer sequence CTCN PAM
cuuccccacgcuguuuccua

SEQ ID NO: 15749 - RNA, 20 nt, Artificial Sequence
  HTT spacer sequence CTCN PAM
ugucccucccuuccccacgc

SEQ ID NO: 15750 - RNA, 20 nt, Artificial Sequence
  HTT spacer sequence CTCN PAM
aaaacaccaaguuacuuaaa

SEQ ID NO: 15751 - RNA, 20 nt, Artificial Sequence
  HTT spacer sequence CTCN PAM
cuuuacugauguguauuaua

SEQ ID NO: 15752 - RNA, 20 nt, Artificial Sequence
  HTT spacer sequence CTCN PAM
cacuuuacugauguguauua

SEQ ID NO: 15753 - RNA, 20 nt, Artificial Sequence
  HTT spacer sequence CTCN PAM
aggugcgguucaagauauua

SEQ ID NO: 15754 - RNA, 20 nt, Artificial Sequence
  HTT spacer sequence CTCN PAM
aggcuuccagcccuagcaug

SEQ ID NO: 15755 - RNA, 20 nt, Artificial Sequence
  HTT spacer sequence CTCN PAM
augcuagggcuggaagccug

SEQ ID NO: 15756 - RNA, 20 nt, Artificial Sequence
  HTT spacer sequence CTCN PAM
ccuaugcuucccugguugca

SEQ ID NO: 15757 - RNA, 20 nt, Artificial Sequence
  HTT spacer sequence CTCN PAM
uaugcuucccugguugcagg

SEQ ID NO: 15758 - RNA, 20 nt, Artificial Sequence
  HTT spacer sequence CTCN PAM
agccaucaccugcaaccagg

SEQ ID NO: 15759 - RNA, 20 nt, Artificial Sequence
  HTT spacer sequence CTCN PAM
ccagccaucaccugcaacca

SEQ ID NO: 15760 - RNA, 20 nt, Artificial Sequence
  HTT spacer sequence CTCN PAM
ugauuuucaguaagggaagu

SEQ ID NO: 15761 - RNA, 20 nt, Artificial Sequence
  HTT spacer sequence CTCN PAM
cuacaucuauuccuaagcau

SEQ ID NO: 15762 - RNA, 20 nt, Artificial Sequence
  HTT spacer sequence CTCN PAM
uccaaauguaaauauuccau

SEQ ID NO: 15763 - RNA, 20 nt, Artificial Sequence
  HTT spacer sequence CTCN PAM
ccuuuagcucuuccaaaugu

SEQ ID NO: 15764 - RNA, 20 nt, Artificial Sequence
  HTT spacer sequence CTCN PAM
cgccuuuagcucuuccaaau

SEQ ID NO: 15765 - RNA, 20 nt, Artificial Sequence
  HTT spacer sequence CTCN PAM
gaugacuuuauccccacuuu

SEQ ID NO: 15766 - RNA, 20 nt, Artificial Sequence
  HTT spacer sequence CTCN PAM
aacucagaugacuuuauccc

SEQ ID NO: 15767 - RNA, 20 nt, Artificial Sequence
  HTT spacer sequence CTCN PAM
uccaacucagaugacuuuau

SEQ ID NO: 15768 - RNA, 20 nt, Artificial Sequence
  HTT spacer sequence CTCN PAM
aaacuugugaaugguuuaag

SEQ ID NO: 15769 - RNA, 20 nt, Artificial Sequence
  HTT spacer sequence CTCN PAM
cggugggcaguggcaggggc

SEQ ID NO: 15770 - RNA, 20 nt, Artificial Sequence
  HTT spacer sequence CTCN PAM
gugggcaguggcaggggcag

SEQ ID NO: 15771 - RNA, 20 nt, Artificial Sequence
  HTT spacer sequence CTCN PAM
ugccccugccacugcccacc

SEQ ID NO: 15772 - RNA, 20 nt, Artificial Sequence
  HTT spacer sequence CTCN PAM
ccugccccugccacugccca

SEQ ID NO: 15773 - RNA, 20 nt, Artificial Sequence
  HTT spacer sequence CTCN PAM
ucuccugccccugccacugc

SEQ ID NO: 15774 - RNA, 20 nt, Artificial Sequence
  HTT spacer sequence CTCN PAM
gcuaucugggacgccuggcc

SEQ ID NO: 15775 - RNA, 20 nt, Artificial Sequence
  HTT spacer sequence CTCN PAM
cuccagacccauucucacgc

SEQ ID NO: 15776 - RNA, 20 nt, Artificial Sequence
  HTT spacer sequence CTCN PAM
agacccauucucacgcuguc

SEQ ID NO: 15777 - RNA, 20 nt, Artificial Sequence
  HTT spacer sequence CTCN PAM
cgcugucucuuggcacccag

SEQ ID NO: 15778 - RNA, 20 nt, Artificial Sequence
  HTT spacer sequence CTCN PAM
uggcacccaggggccaguga

SEQ ID NO: 15779 - RNA, 20 nt, Artificial Sequence
  HTT spacer sequence CTCN PAM
cauuuguuuuguguauauag

SEQ ID NO: 15780 - RNA, 20 nt, Artificial Sequence
  HTT spacer sequence CTCN PAM
aaaaaauaaauaaauaaaau

SEQ ID NO: 15781 - RNA, 20 nt, Artificial Sequence
  HTT spacer sequence CTCN PAM
gucucaaaaaaauaaauaaa

SEQ ID NO: 15782 - RNA, 20 nt, Artificial Sequence
  HTT spacer sequence CTCN PAM
cucugucacccaggcuggag

SEQ ID NO: 15783 - RNA, 20 nt, Artificial Sequence
  HTT spacer sequence CTCN PAM
gucacccaggcuggagugca

SEQ ID NO: 15784 - RNA, 20 nt, Artificial Sequence
  HTT spacer sequence CTCN PAM
agccugggugacagagugag

SEQ ID NO: 15785 - RNA, 20 nt, Artificial Sequence
  HTT spacer sequence CTCN PAM
gcucagugcaagcucugccu

SEQ ID NO: 15786 - RNA, 20 nt, Artificial Sequence
  HTT spacer sequence CTCN PAM
gugcaagcucugccuccugg

SEQ ID NO: 15787 - RNA, 20 nt, Artificial Sequence
  HTT spacer sequence CTCN PAM
gccuccuggguucaagcaau

SEQ ID NO: 15788 - RNA, 20 nt, Artificial Sequence
  HTT spacer sequence CTCN PAM
uggguucaagcaauucuccu

SEQ ID NO: 15789 - RNA, 20 nt, Artificial Sequence
  HTT spacer sequence CTCN PAM
ugccucagccuccugaguag

SEQ ID NO: 15790 - RNA, 20 nt, Artificial Sequence
  HTT spacer sequence CTCN PAM
gccuccugaguagcugggac

SEQ ID NO: 15791 - RNA, 20 nt, Artificial Sequence
  HTT spacer sequence CTCN PAM
ugaguagcugggacuacagg

SEQ ID NO: 15792 - RNA, 20 nt, Artificial Sequence
  HTT spacer sequence CTCN PAM
ggaggcugaggcaggagaau

SEQ ID NO: 15793 - RNA, 20 nt, Artificial Sequence
  HTT spacer sequence CTCN PAM
acuaauaaaaaauacaaaaa

SEQ ID NO: 15794 - RNA, 20 nt, Artificial Sequence
  HTT spacer sequence CTCN PAM
ugaccucgugauccguccac

SEQ ID NO: 15795 - RNA, 20 nt, Artificial Sequence
  HTT spacer sequence CTCN PAM
ugauccguccaccucagccu

SEQ ID NO: 15796 - RNA, 20 nt, Artificial Sequence
  HTT spacer sequence CTCN PAM
gccucucaaagugcugggau

SEQ ID NO: 15797 - RNA, 20 nt, Artificial Sequence
  HTT spacer sequence CTCN PAM
caaagugcugggauuacagg

SEQ ID NO: 15798 - RNA, 20 nt, Artificial Sequence
  HTT spacer sequence CTCN PAM
aagugcugggauuacaggca

SEQ ID NO: 15799 - RNA, 20 nt, Artificial Sequence
  HTT spacer sequence CTCN PAM
ugccuguaaucccagcacuu

SEQ ID NO: 15800 - RNA, 20 nt, Artificial Sequence
  HTT spacer sequence CTCN PAM
caccuguaaucccagcacuu

SEQ ID NO: 15801 - RNA, 20 nt, Artificial Sequence
  HTT spacer sequence CTCN PAM
caaagugcugggauuacagg

SEQ ID NO: 15802 - RNA, 20 nt, Artificial Sequence
  HTT spacer sequence CTCN PAM
gccucccaaagugcugggau

SEQ ID NO: 15803 - RNA, 20 nt, Artificial Sequence
  HTT spacer sequence CTCN PAM
ugauccgcccaccucagccu

SEQ ID NO: 15804 - RNA, 20 nt, Artificial Sequence
  HTT spacer sequence CTCN PAM
cgaccucgugauccgcccac

SEQ ID NO: 15805 - RNA, 20 nt, Artificial Sequence
  HTT spacer sequence CTCN PAM
acuaaaaauaccacaaaaaa

SEQ ID NO: 15806 - RNA, 20 nt, Artificial Sequence
  HTT spacer sequence CTCN PAM
cgccagucgucccagcuacu

SEQ ID NO: 15807 - RNA, 20 nt, Artificial Sequence
  HTT spacer sequence CTCN PAM
caaguagcugggacgacugg

SEQ ID NO: 15808 - RNA, 20 nt, Artificial Sequence
  HTT spacer sequence CTCN PAM
gccucccaaguagcugggac

SEQ ID NO: 15809 - RNA, 20 nt, Artificial Sequence
  HTT spacer sequence CTCN PAM
ugccucagccucccaaguag

SEQ ID NO: 15810 - RNA, 20 nt, Artificial Sequence
  HTT spacer sequence CTCN PAM
accugccagauucaagcaau

SEQ ID NO: 15811 - RNA, 20 nt, Artificial Sequence
  HTT spacer sequence CTCN PAM
cugcaaccuccaccugccag

SEQ ID NO: 15812 - RNA, 20 nt, Artificial Sequence
  HTT spacer sequence CTCN PAM
gcucacugcaaccuccaccu

SEQ ID NO: 15813 - RNA, 20 nt, Artificial Sequence
  HTT spacer sequence CTCN PAM
agccugggcgauagagcgag

SEQ ID NO: 15814 - RNA, 20 nt, Artificial Sequence
  HTT spacer sequence CTCN PAM
aucgcccaggcuagagugca

SEQ ID NO: 15815 - RNA, 20 nt, Artificial Sequence
  HTT spacer sequence CTCN PAM
cucuaucgcccaggcuagag

SEQ ID NO: 15816 - RNA, 20 nt, Artificial Sequence
  HTT spacer sequence CTCN PAM
gucucaaaaaaaaaaaaaaa

SEQ ID NO: 15817 - RNA, 20 nt, Artificial Sequence
  HTT spacer sequence CTCN PAM
aaaaaaaaaaaaaaagaaga

SEQ ID NO: 15818 - RNA, 20 nt, Artificial Sequence
  HTT spacer sequence CTCN PAM
cguaucauuguuuuguggug

SEQ ID NO: 15819 - RNA, 20 nt, Artificial Sequence
  HTT spacer sequence CTCN PAM
ccacaaaacaaugauacgug

SEQ ID NO: 15820 - RNA, 20 nt, Artificial Sequence
  HTT spacer sequence CTCN PAM
uucagugauuuucuugcaua

SEQ ID NO: 15821 - RNA, 20 nt, Artificial Sequence
  HTT spacer sequence CTCN PAM
ugaacucauuccuccugucu

SEQ ID NO: 15822 - RNA, 20 nt, Artificial Sequence
  HTT spacer sequence CTCN PAM
uuccuccugucuauaaauga

SEQ ID NO: 15823 - RNA, 20 nt, Artificial Sequence
  HTT spacer sequence CTCN PAM
ugucuauaaaugaaauuuug

SEQ ID NO: 15824 - RNA, 20 nt, Artificial Sequence
  HTT spacer sequence CTCN PAM
aaaaaaaccuugaauguguu

SEQ ID NO: 15825 - RNA, 20 nt, Artificial Sequence
  HTT spacer sequence CTCN PAM
aucucaaaaaaaaccuugaa

SEQ ID NO: 15826 - RNA, 20 nt, Artificial Sequence
  HTT spacer sequence CTCN PAM
agccugggugaagaagacuc

SEQ ID NO: 15827 - RNA, 20 nt, Artificial Sequence
  HTT spacer sequence CTCN PAM
ucucacugcaaccuccgccu

SEQ ID NO: 15828 - RNA, 20 nt, Artificial Sequence
  HTT spacer sequence CTCN PAM
cugcaaccuccgccucccag

SEQ ID NO: 15829 - RNA, 20 nt, Artificial Sequence
  HTT spacer sequence CTCN PAM
gccucccagguucaagcaau

SEQ ID NO: 15830 - RNA, 20 nt, Artificial Sequence
  HTT spacer sequence CTCN PAM
cagguucaagcaauucuccu

SEQ ID NO: 15831 - RNA, 20 nt, Artificial Sequence
  HTT spacer sequence CTCN PAM
ugccucagccuccugaguag

SEQ ID NO: 15832 - RNA, 20 nt, Artificial Sequence
  HTT spacer sequence CTCN PAM
gccuccugaguagcugggau

SEQ ID NO: 15833 - RNA, 20 nt, Artificial Sequence
  HTT spacer sequence CTCN PAM
ugaguagcugggauuacagg

SEQ ID NO: 15834 - RNA, 20 nt, Artificial Sequence
  HTT spacer sequence CTCN PAM
ggaggcugaggcaggagaau

SEQ ID NO: 15835 - RNA, 20 nt, Artificial Sequence
  HTT spacer sequence CTCN PAM
acuucuacuaaaaauacaaa

SEQ ID NO: 15836 - RNA, 20 nt, Artificial Sequence
  HTT spacer sequence CTCN PAM
aacuccugaccucaagugau

SEQ ID NO: 15837 - RNA, 20 nt, Artificial Sequence
  HTT spacer sequence CTCN PAM
ugaccucaagugauccgccu

SEQ ID NO: 15838 - RNA, 20 nt, Artificial Sequence
  HTT spacer sequence CTCN PAM
agugauccgccugccuuggc

SEQ ID NO: 15839 - RNA, 20 nt, Artificial Sequence
  HTT spacer sequence CTCN PAM
caccuguaaucccagcacuu

SEQ ID NO: 15840 - RNA, 20 nt, Artificial Sequence
  HTT spacer sequence CTCN PAM
agcguuuuaaaagaugcucu

SEQ ID NO: 15841 - RNA, 20 nt, Artificial Sequence
  HTT spacer sequence CTCN PAM
uuucuaaggauugacuguag

SEQ ID NO: 15842 - RNA, 20 nt, Artificial Sequence
  HTT spacer sequence CTCN PAM
uguacuacagucaauccuua

SEQ ID NO: 15843 - RNA, 20 nt, Artificial Sequence
  HTT spacer sequence CTCN PAM
gccuuuacaaguguaaaauu

SEQ ID NO: 15844 - RNA, 20 nt, Artificial Sequence
  HTT spacer sequence CTCN PAM
aagucaaaagucuucaaacu

SEQ ID NO: 15845 - RNA, 20 nt, Artificial Sequence
  HTT spacer sequence CTCN PAM
ugaaguuguuggccacuaag

SEQ ID NO: 15846 - RNA, 20 nt, Artificial Sequence
  HTT spacer sequence CTCN PAM
gagagguucuggaauuggcc

SEQ ID NO: 15847 - RNA, 20 nt, Artificial Sequence
  HTT spacer sequence CTCN PAM
gagccuaagauuccuuagug

SEQ ID NO: 15848 - RNA, 20 nt, Artificial Sequence
  HTT spacer sequence CTCN PAM
cugagccuaagauuccuuag

SEQ ID NO: 15849 - RNA, 20 nt, Artificial Sequence
  HTT spacer sequence CTCN PAM
uaugauucucuaacugauuu

SEQ ID NO: 15850 - RNA, 20 nt, Artificial Sequence
  HTT spacer sequence CTCN PAM
aacugauuucucacaaagca

SEQ ID NO: 15851 - RNA, 20 nt, Artificial Sequence
  HTT spacer sequence CTCN PAM
caaagcaaacaagcaaucau

SEQ ID NO: 15852 - RNA, 20 nt, Artificial Sequence
  HTT spacer sequence CTCN PAM
ucuuauuuuguuauuuaaaa

SEQ ID NO: 15853 - RNA, 20 nt, Artificial Sequence
  HTT spacer sequence CTCN PAM
acuuauguuuguuagucaau

SEQ ID NO: 15854 - RNA, 20 nt, Artificial Sequence
  HTT spacer sequence CTCN PAM
uuacuucuaguuaaucaaaa

SEQ ID NO: 15855 - RNA, 20 nt, Artificial Sequence
  HTT spacer sequence CTCN PAM
gaccuuuugauuaacuagaa

SEQ ID NO: 15856 - RNA, 20 nt, Artificial Sequence
  HTT spacer sequence CTCN PAM
uuaaaacuuggcaaguuauu

SEQ ID NO: 15857 - RNA, 20 nt, Artificial Sequence
  HTT spacer sequence CTCN PAM
gguccuguuacaacaaguaa

SEQ ID NO: 15858 - RNA, 20 nt, Artificial Sequence
  HTT spacer sequence CTCN PAM
ucacuggggaguuucuauca

SEQ ID NO: 15859 - RNA, 20 nt, Artificial Sequence
  HTT spacer sequence CTCN PAM
ccagugaugaggauuuacuu

SEQ ID NO: 15860 - RNA, 20 nt, Artificial Sequence
  HTT spacer sequence CTCN PAM
aacugcaugauguccugaaa

SEQ ID NO: 15861 - RNA, 20 nt, Artificial Sequence
  HTT spacer sequence CTCN PAM
gcaucuuuuaaaaauauaua

SEQ ID NO: 15862 - RNA, 20 nt, Artificial Sequence
  HTT spacer sequence CTCN PAM
aagggcuuauacauccuaca

SEQ ID NO: 15863 - RNA, 20 nt, Artificial Sequence
  HTT spacer sequence CTCN PAM
uaucucaaagggcuuauaca

SEQ ID NO: 15864 - RNA, 20 nt, Artificial Sequence
  HTT spacer sequence CTCN PAM
cagcuaagauugauuacagu

SEQ ID NO: 15865 - RNA, 20 nt, Artificial Sequence
  HTT spacer sequence CTCN PAM
gucacuguaaucaaucuuag

SEQ ID NO: 15866 - RNA, 20 nt, Artificial Sequence
  HTT spacer sequence CTCN PAM
accagggccacuucccccua

SEQ ID NO: 15867 - RNA, 20 nt, Artificial Sequence
  HTT spacer sequence CTCN PAM
agacuccaccagggccacuu

SEQ ID NO: 15868 - RNA, 20 nt, Artificial Sequence
  HTT spacer sequence CTCN PAM
cgugaggcucacacaaaaau

SEQ ID NO: 15869 - RNA, 20 nt, Artificial Sequence
  HTT spacer sequence CTCN PAM
cgggagggaaggaagccugu

SEQ ID NO: 15870 - RNA, 20 nt, Artificial Sequence
  HTT spacer sequence CTCN PAM
cacaaaaauacagcaacaug

SEQ ID NO: 15871 - RNA, 20 nt, Artificial Sequence
  HTT spacer sequence CTCN PAM
gccuaacaugagccacaauu

SEQ ID NO: 15872 - RNA, 20 nt, Artificial Sequence
  HTT spacer sequence CTCN PAM
uguuaggcagaggguaccug

SEQ ID NO: 15873 - RNA, 20 nt, Artificial Sequence
  HTT spacer sequence CTCN PAM
cagaagaaaagcagguguuc

SEQ ID NO: 15874 - RNA, 20 nt, Artificial Sequence
  HTT spacer sequence CTCN PAM
ccaugcccagacuauuugaa

SEQ ID NO: 15875 - RNA, 20 nt, Artificial Sequence
  HTT spacer sequence CTCN PAM
uggggguaucuggugaacag

SEQ ID NO: 15876 - RNA, 20 nt, Artificial Sequence
  HTT spacer sequence CTCN PAM
agccaauuagugcagaaaaa

SEQ ID NO: 15877 - RNA, 20 nt, Artificial Sequence
  HTT spacer sequence CTCN PAM
uaguucucuaguuucaguag

SEQ ID NO: 15878 - RNA, 20 nt, Artificial Sequence
  HTT spacer sequence CTCN PAM
aguuucaguaguuucauuua

SEQ ID NO: 15879 - RNA, 20 nt, Artificial Sequence
  HTT spacer sequence CTCN PAM
ucuauuagaagcauccuugu

SEQ ID NO: 15880 - RNA, 20 nt, Artificial Sequence
  HTT spacer sequence CTCN PAM
gucuaaaaaagaaaaaaaaa

SEQ ID NO: 15881 - RNA, 20 nt, Artificial Sequence
  HTT spacer sequence CTCN PAM
guccccagguuggagugcag

SEQ ID NO: 15882 - RNA, 20 nt, Artificial Sequence
  HTT spacer sequence CTCN PAM
aaccuggggacagagcaaga

SEQ ID NO: 15883 - RNA, 20 nt, Artificial Sequence
  HTT spacer sequence CTCN PAM
cugcagucucagggcucaag

SEQ ID NO: 15884 - RNA, 20 nt, Artificial Sequence
  HTT spacer sequence CTCN PAM
gggcucaagugauccuccca

SEQ ID NO: 15885 - RNA, 20 nt, Artificial Sequence
  HTT spacer sequence CTCN PAM
agugauccucccaccucagc

SEQ ID NO: 15886 - RNA, 20 nt, Artificial Sequence
  HTT spacer sequence CTCN PAM
caccucagcuccugaguacc

SEQ ID NO: 15887 - RNA, 20 nt, Artificial Sequence
  HTT spacer sequence CTCN PAM
gcuccugaguaccugggacu

SEQ ID NO: 15888 - RNA, 20 nt, Artificial Sequence
  HTT spacer sequence CTCN PAM
ugaguaccugggacuaccgg

SEQ ID NO: 15889 - RNA, 20 nt, Artificial Sequence
  HTT spacer sequence CTCN PAM
ggagcugaggugggaggauc

SEQ ID NO: 15890 - RNA, 20 nt, Artificial Sequence
  HTT spacer sequence CTCN PAM
acaaaaaauguaaaaauuag

SEQ ID NO: 15891 - RNA, 20 nt, Artificial Sequence
  HTT spacer sequence CTCN PAM
cuaaguugccugggcugguc

SEQ ID NO: 15892 - RNA, 20 nt, Artificial Sequence
  HTT spacer sequence CTCN PAM
agcuccuggcuuaaguaauc

SEQ ID NO: 15893 - RNA, 20 nt, Artificial Sequence
  HTT spacer sequence CTCN PAM
uggcuuaaguaauccucccu

SEQ ID NO: 15894 - RNA, 20 nt, Artificial Sequence
  HTT spacer sequence CTCN PAM
cuccuuggccucccaaagug

SEQ ID NO: 15895 - RNA, 20 nt, Artificial Sequence
  HTT spacer sequence CTCN PAM
uuggccucccaaagugcugg

SEQ ID NO: 15896 - RNA, 20 nt, Artificial Sequence
  HTT spacer sequence CTCN PAM
caaagugcugggauuacagg

SEQ ID NO: 15897 - RNA, 20 nt, Artificial Sequence
  HTT spacer sequence CTCN PAM
caccuguaaucccagcacuu

SEQ ID NO: 15898 - RNA, 20 nt, Artificial Sequence
  HTT spacer sequence CTCN PAM
uaaauaccauuaagcuacaa

SEQ ID NO: 15899 - RNA, 20 nt, Artificial Sequence
  HTT spacer sequence CTCN PAM
cuaaaucaaucuacaaguag

SEQ ID NO: 15900 - RNA, 20 nt, Artificial Sequence
  HTT spacer sequence CTCN PAM
gauguuaagucacccugucc

SEQ ID NO: 15901 - RNA, 20 nt, Artificial Sequence
  HTT spacer sequence CTCN PAM
gaagcacaugaaauuuaaag

SEQ ID NO: 15902 - RNA, 20 nt, Artificial Sequence
  HTT spacer sequence CTCN PAM
ugcacauuucuugauaaaug

SEQ ID NO: 15903 - RNA, 20 nt, Artificial Sequence
  HTT spacer sequence CTCN PAM
gguauuccucuguuuuuguu

SEQ ID NO: 15904 - RNA, 20 nt, Artificial Sequence
  HTT spacer sequence CTCN PAM
guuuuuguuacuaauaguua

SEQ ID NO: 15905 - RNA, 20 nt, Artificial Sequence
  HTT spacer sequence CTCN PAM
aaccuuguaaaauaugaaga

SEQ ID NO: 15906 - RNA, 20 nt, Artificial Sequence
  HTT spacer sequence CTCN PAM
uuaagcugcaugguucucau

SEQ ID NO: 15907 - RNA, 20 nt, Artificial Sequence
  HTT spacer sequence CTCN PAM
ugucagcucccaaagcagaa

SEQ ID NO: 15908 - RNA, 20 nt, Artificial Sequence
  HTT spacer sequence CTCN PAM
caaagcagaagacggcaugu

SEQ ID NO: 15909 - RNA, 20 nt, Artificial Sequence
  HTT spacer sequence CTCN PAM
acggcauuuuucaacaugcc

SEQ ID NO: 15910 - RNA, 20 nt, Artificial Sequence
  HTT spacer sequence CTCN PAM
uaucaucuugaauuucaggg

SEQ ID NO: 15911 - RNA, 20 nt, Artificial Sequence
  HTT spacer sequence CTCN PAM
uagugcuugcuaucuguuua

SEQ ID NO: 15912 - RNA, 20 nt, Artificial Sequence
  HTT spacer sequence CTCN PAM
agcauguucugcuguaauuc

SEQ ID NO: 15913 - RNA, 20 nt, Artificial Sequence
  HTT spacer sequence CTCN PAM
cuggcaucuuggacuccugu

SEQ ID NO: 15914 - RNA, 20 nt, Artificial Sequence
  HTT spacer sequence CTCN PAM
uguuuccuuugcucugucau

SEQ ID NO: 15915 - RNA, 20 nt, Artificial Sequence
  HTT spacer sequence CTCN PAM
gucauccccgcggucagcuc

SEQ ID NO: 15916 - RNA, 20 nt, Artificial Sequence
  HTT spacer sequence CTCN PAM
ugcugcgcagcuucucagcu

SEQ ID NO: 15917 - RNA, 20 nt, Artificial Sequence
  HTT spacer sequence CTCN PAM
gcugaagugcguuuggagug

SEQ ID NO: 15918 - RNA, 20 nt, Artificial Sequence
  HTT spacer sequence CTCN PAM
aaacgcacuucagcugagaa

SEQ ID NO: 15919 - RNA, 20 nt, Artificial Sequence
  HTT spacer sequence CTCN PAM
aagauccagcaagacacgcc

SEQ ID NO: 15920 - RNA, 20 nt, Artificial Sequence
  HTT spacer sequence CTCN PAM
gguuuccuugguuccuucug

SEQ ID NO: 15921 - RNA, 20 nt, Artificial Sequence
  HTT spacer sequence CTCN PAM
gcagaaggaaccaaggaaac

SEQ ID NO: 15922 - RNA, 20 nt, Artificial Sequence
  HTT spacer sequence CTCN PAM
gcgucuccacuccccauuuc

SEQ ID NO: 15923 - RNA, 20 nt, Artificial Sequence
  HTT spacer sequence CTCN PAM
acuccccauuucuugugugg

SEQ ID NO: 15924 - RNA, 20 nt, Artificial Sequence
  HTT spacer sequence CTCN PAM
ccauuucuuguguggcccuu

SEQ ID NO: 15925 - RNA, 20 nt, Artificial Sequence
  HTT spacer sequence CTCN PAM
ucugauuccuuuugucuucc

SEQ ID NO: 15926 - RNA, 20 nt, Artificial Sequence
  HTT spacer sequence CTCN PAM
gauuccuuuugucuucccug

SEQ ID NO: 15927 - RNA, 20 nt, Artificial Sequence
  HTT spacer sequence CTCN PAM
aaaccaaagcaagaaaccag

SEQ ID NO: 15928 - RNA, 20 nt, Artificial Sequence
  HTT spacer sequence CTCN PAM
acagaacuuuugcagcucuu

SEQ ID NO: 15929 - RNA, 20 nt, Artificial Sequence
  HTT spacer sequence CTCN PAM
ucugaagaccuggaagcuuu

SEQ ID NO: 15930 - RNA, 20 nt, Artificial Sequence
  HTT spacer sequence CTCN PAM
ucucaugaccucuuuucccu

SEQ ID NO: 15931 - RNA, 20 nt, Artificial Sequence
  HTT spacer sequence CTCN PAM
ugaccucuuuucccuucuuu

SEQ ID NO: 15932 - RNA, 20 nt, Artificial Sequence
  HTT spacer sequence CTCN PAM
uuucccuucuuugagagcua

SEQ ID NO: 15933 - RNA, 20 nt, Artificial Sequence
  HTT spacer sequence CTCN PAM
aagaagggaaaagaggucau

SEQ ID NO: 15934 - RNA, 20 nt, Artificial Sequence
  HTT spacer sequence CTCN PAM
caaagaagggaaaagagguc

SEQ ID NO: 15935 - RNA, 20 nt, Artificial Sequence
  HTT spacer sequence CTCN PAM
uuccagaauuccaugccuuc

SEQ ID NO: 15936 - RNA, 20 nt, Artificial Sequence
  HTT spacer sequence CTCN PAM
cacuuaccuguuguccagga

SEQ ID NO: 15937 - RNA, 20 nt, Artificial Sequence
  HTT spacer sequence CTCN PAM
uggacaacagguaaguggga

SEQ ID NO: 15938 - RNA, 20 nt, Artificial Sequence
  HTT spacer sequence CTCN PAM
ccuggacaacagguaagugg

SEQ ID NO: 15939 - RNA, 20 nt, Artificial Sequence
  HTT spacer sequence CTCN PAM
aauaugcacagcaaucugac

SEQ ID NO: 15940 - RNA, 20 nt, Artificial Sequence
  HTT spacer sequence CTCN PAM
uccaauaugcacagcaaucu

SEQ ID NO: 15941 - RNA, 20 nt, Artificial Sequence
  HTT spacer sequence CTCN PAM
ucaucucacaugacaucacc

SEQ ID NO: 15942 - RNA, 20 nt, Artificial Sequence
  HTT spacer sequence CTCN PAM
caugacaucaccacaucacc

SEQ ID NO: 15943 - RNA, 20 nt, Artificial Sequence
  HTT spacer sequence CTCN PAM
uuccuuggacccucaguggu

SEQ ID NO: 15944 - RNA, 20 nt, Artificial Sequence
  HTT spacer sequence CTCN PAM
guggugucacugcuggauuu

SEQ ID NO: 15945 - RNA, 20 nt, Artificial Sequence
  HTT spacer sequence CTCN PAM
cauuuucaguuucugugucu

SEQ ID NO: 15946 - RNA, 20 nt, Artificial Sequence
  HTT spacer sequence CTCN PAM
ugccugcuucugacuucgcc

SEQ ID NO: 15947 - RNA, 20 nt, Artificial Sequence
  HTT spacer sequence CTCN PAM
gggcgaagucagaagcaggc

SEQ ID NO: 15948 - RNA, 20 nt, Artificial Sequence
  HTT spacer sequence CTCN PAM
uucacaaggguucuuagauu

SEQ ID NO: 15949 - RNA, 20 nt, Artificial Sequence
  HTT spacer sequence CTCN PAM
gugaacauaaaucuaagaac

SEQ ID NO: 15950 - RNA, 20 nt, Artificial Sequence
  HTT spacer sequence CTCN PAM
gaaaagaaggugcucaguga

SEQ ID NO: 15951 - RNA, 20 nt, Artificial Sequence
  HTT spacer sequence CTCN PAM
ccuuaccuuucuuguuaugc

SEQ ID NO: 15952 - RNA, 20 nt, Artificial Sequence
  HTT spacer sequence CTCN PAM
gagucuguaaaauagaauug

SEQ ID NO: 15953 - RNA, 20 nt, Artificial Sequence
  HTT spacer sequence CTCN PAM
gagaaugggucaggaccaaa

SEQ ID NO: 15954 - RNA, 20 nt, Artificial Sequence
  HTT spacer sequence CTCN PAM
cagggauccuaguguauaag

SEQ ID NO: 15955 - RNA, 20 nt, Artificial Sequence
  HTT spacer sequence CTCN PAM
uuaugaaagaaaguuaggaa

SEQ ID NO: 15956 - RNA, 20 nt, Artificial Sequence
  HTT spacer sequence CTCN PAM
uucaaaggcuuucagguuac

SEQ ID NO: 15957 - RNA, 20 nt, Artificial Sequence
  HTT spacer sequence CTCN PAM
ccuugcagggugugucugcg

SEQ ID NO: 15958 - RNA, 20 nt, Artificial Sequence
  HTT spacer sequence CTCN PAM
acugugcggcgccguacacu

SEQ ID NO: 15959 - RNA, 20 nt, Artificial Sequence
  HTT spacer sequence CTCN PAM
uaauguacaaccaaagacac

SEQ ID NO: 15960 - RNA, 20 nt, Artificial Sequence
  HTT spacer sequence CTCN PAM
ccuucaccuucccaagguca

SEQ ID NO: 15961 - RNA, 20 nt, Artificial Sequence
  HTT spacer sequence CTCN PAM
uucaccuucccaaggucacg

SEQ ID NO: 15962 - RNA, 20 nt, Artificial Sequence
  HTT spacer sequence CTCN PAM
aaacuuuuccgugcuguucu

SEQ ID NO: 15963 - RNA, 20 nt, Artificial Sequence
  HTT spacer sequence CTCN PAM
gcucagccuuggauguucuu

SEQ ID NO: 15964 - RNA, 20 nt, Artificial Sequence
  HTT spacer sequence CTCN PAM
gccuuggauguucuuucuca

SEQ ID NO: 15965 - RNA, 20 nt, Artificial Sequence
  HTT spacer sequence CTCN PAM
gauacuagagcuggccacac

SEQ ID NO: 15966 - RNA, 20 nt, Artificial Sequence
  HTT spacer sequence CTCN PAM
aguaucugagaaagaacauc

SEQ ID NO: 15967 - RNA, 20 nt, Artificial Sequence
  HTT spacer sequence CTCN PAM
uuggguuguggcuggcacac

SEQ ID NO: 15968 - RNA, 20 nt, Artificial Sequence
  HTT spacer sequence CTCN PAM
gcccagaagacgcacaucaa

SEQ ID NO: 15969 - RNA, 20 nt, Artificial Sequence
  HTT spacer sequence CTCN PAM
auccuagaugaacucagccc

SEQ ID NO: 15970 - RNA, 20 nt, Artificial Sequence
  HTT spacer sequence CTCN PAM
agggugccuccgggagacuc

SEQ ID NO: 15971 - RNA, 20 nt, Artificial Sequence
  HTT spacer sequence CTCN PAM
gggagacuccucccugcccc

SEQ ID NO: 15972 - RNA, 20 nt, Artificial Sequence
  HTT spacer sequence CTCN PAM
cggaggcacccuggagaacc

SEQ ID NO: 15973 - RNA, 20 nt, Artificial Sequence
  HTT spacer sequence CTCN PAM
ucccugccccacgugcuugc

SEQ ID NO: 15974 - RNA, 20 nt, Artificial Sequence
  HTT spacer sequence CTCN PAM
cugccccacgugcuugcguc

SEQ ID NO: 15975 - RNA, 20 nt, Artificial Sequence
  HTT spacer sequence CTCN PAM
gccuuagccaugaaguuuag

SEQ ID NO: 15976 - RNA, 20 nt, Artificial Sequence
  HTT spacer sequence CTCN PAM
acaaacacauuuugaaaccc

SEQ ID NO: 15977 - RNA, 20 nt, Artificial Sequence
  HTT spacer sequence CTCN PAM
cgccccgcccccuuacccgu

SEQ ID NO: 15978 - RNA, 20 nt, Artificial Sequence
  HTT spacer sequence CTCN PAM
uuugugccugaggaaguaac

SEQ ID NO: 15979 - RNA, 20 nt, Artificial Sequence
  HTT spacer sequence CTCN PAM
ggcacaaaagagcaagucac

SEQ ID NO: 15980 - RNA, 20 nt, Artificial Sequence
  HTT spacer sequence CTCN PAM
guuacuuccucaggcacaaa

SEQ ID NO: 15981 - RNA, 20 nt, Artificial Sequence
  HTT spacer sequence CTCN PAM
gacacagauagucucugacu

SEQ ID NO: 15982 - RNA, 20 nt, Artificial Sequence
  HTT spacer sequence CTCN PAM
gacuuaucucacagaaaguc

SEQ ID NO: 15983 - RNA, 20 nt, Artificial Sequence
  HTT spacer sequence CTCN PAM
cagaaagucagcggcagagc

SEQ ID NO: 15984 - RNA, 20 nt, Artificial Sequence
  HTT spacer sequence CTCN PAM
gccgcugacuuucugugaga

SEQ ID NO: 15985 - RNA, 20 nt, Artificial Sequence
  HTT spacer sequence CTCN PAM
ggcucugccgcugacuuucu

SEQ ID NO: 15986 - RNA, 20 nt, Artificial Sequence
  HTT spacer sequence CTCN PAM
uagauuuucuuuuucuuuuu

SEQ ID NO: 15987 - RNA, 20 nt, Artificial Sequence
  HTT spacer sequence CTCN PAM
uaauguuaucccucccccag

SEQ ID NO: 15988 - RNA, 20 nt, Artificial Sequence
  HTT spacer sequence CTCN PAM
cccaguccccucacucccca

SEQ ID NO: 15989 - RNA, 20 nt, Artificial Sequence
  HTT spacer sequence CTCN PAM
cuccccaugggccccggugu

SEQ ID NO: 15990 - RNA, 20 nt, Artificial Sequence
  HTT spacer sequence CTCN PAM
ccaugggccccgguguguga

SEQ ID NO: 15991 - RNA, 20 nt, Artificial Sequence
  HTT spacer sequence CTCN PAM
ucccugugcccauguguucu

SEQ ID NO: 15992 - RNA, 20 nt, Artificial Sequence
  HTT spacer sequence CTCN PAM
cugugcccauguguucucau

SEQ ID NO: 15993 - RNA, 20 nt, Artificial Sequence
  HTT spacer sequence CTCN PAM
uuguucaauuuccacuugug

SEQ ID NO: 15994 - RNA, 20 nt, Artificial Sequence
  HTT spacer sequence CTCN PAM
caaguggaaauugaacaaug

SEQ ID NO: 15995 - RNA, 20 nt, Artificial Sequence
  HTT spacer sequence CTCN PAM
cucacaaguggaaauugaac

SEQ ID NO: 15996 - RNA, 20 nt, Artificial Sequence
  HTT spacer sequence CTCN PAM
gcaaacuaucacaagaucag

SEQ ID NO: 15997 - RNA, 20 nt, Artificial Sequence
  HTT spacer sequence CTCN PAM
uccuuuuuuauggcuguaua

SEQ ID NO: 15998 - RNA, 20 nt, Artificial Sequence
  HTT spacer sequence CTCN PAM
aaggucuagaacuagaaaua

SEQ ID NO: 15999 - RNA, 20 nt, Artificial Sequence
  HTT spacer sequence CTCN PAM
caccaacaguguaaaagugu

SEQ ID NO: 16000 - RNA, 20 nt, Artificial Sequence
  HTT spacer sequence CTCN PAM
ccagcaucuguuguuucgug

SEQ ID NO: 16001 - RNA, 20 nt, Artificial Sequence
  HTT spacer sequence CTCN PAM
agcaucuguuguuucgugac

SEQ ID NO: 16002 - RNA, 20 nt, Artificial Sequence
  HTT spacer sequence CTCN PAM
cgccaguuaggauggcgauc

SEQ ID NO: 16003 - RNA, 20 nt, Artificial Sequence
  HTT spacer sequence CTCN PAM
uugugauuuugaucugcauu

SEQ ID NO: 16004 - RNA, 20 nt, Artificial Sequence
  HTT spacer sequence CTCN PAM
aaugaccaguggugaugagc

SEQ ID NO: 16005 - RNA, 20 nt, Artificial Sequence
  HTT spacer sequence CTCN PAM
ucaccacuggucauuagaga

SEQ ID NO: 16006 - RNA, 20 nt, Artificial Sequence
  HTT spacer sequence CTCN PAM
gaugauaguuucuuuugcua

SEQ ID NO: 16007 - RNA, 20 nt, Artificial Sequence
  HTT spacer sequence CTCN PAM
uuaguuuaauuagaucccgu

SEQ ID NO: 16008 - RNA, 20 nt, Artificial Sequence
  HTT spacer sequence CTCN PAM
agauggaucaaagacuuaaa

SEQ ID NO: 16009 - RNA, 20 nt, Artificial Sequence
  HTT spacer sequence CTCN PAM
gaaauaccaccacacaucua

SEQ ID NO: 16010 - RNA, 20 nt, Artificial Sequence
  HTT spacer sequence CTCN PAM
guucuguuccauuggucuau

SEQ ID NO: 16011 - RNA, 20 nt, Artificial Sequence
  HTT spacer sequence CTCN PAM
agcuuuguucuucuagccca

SEQ ID NO: 16012 - RNA, 20 nt, Artificial Sequence
  HTT spacer sequence CTCN PAM
uuuuugguuccauaugaagu

SEQ ID NO: 16013 - RNA, 20 nt, Artificial Sequence
  HTT spacer sequence CTCN PAM
cuuauuuccuugagcagugg

SEQ ID NO: 16014 - RNA, 20 nt, Artificial Sequence
  HTT spacer sequence CTCN PAM
uauuuccuugagcagugguu

SEQ ID NO: 16015 - RNA, 20 nt, Artificial Sequence
  HTT spacer sequence CTCN PAM
aggaaauaagagaggacaca

SEQ ID NO: 16016 - RNA, 20 nt, Artificial Sequence
  HTT spacer sequence CTCN PAM
uugaagagguccuucacauc

SEQ ID NO: 16017 - RNA, 20 nt, Artificial Sequence
  HTT spacer sequence CTCN PAM
ucaaggagaacuacaaacca

SEQ ID NO: 16018 - RNA, 20 nt, Artificial Sequence
  HTT spacer sequence CTCN PAM
cauucacaaaugcuacuaag

SEQ ID NO: 16019 - RNA, 20 nt, Artificial Sequence
  HTT spacer sequence CTCN PAM
ugauuuggcucucuguuugu

SEQ ID NO: 16020 - RNA, 20 nt, Artificial Sequence
  HTT spacer sequence CTCN PAM
cuguuugucuguuauuggug

SEQ ID NO: 16021 - RNA, 20 nt, Artificial Sequence
  HTT spacer sequence CTCN PAM
guuugucuguuauuggugua

SEQ ID NO: 16022 - RNA, 20 nt, Artificial Sequence
  HTT spacer sequence CTCN PAM
ggauacaaaaucaaugugca

SEQ ID NO: 16023 - RNA, 20 nt, Artificial Sequence
  HTT spacer sequence CTCN PAM
uuaagcugauuagcaacuuc

SEQ ID NO: 16024 - RNA, 20 nt, Artificial Sequence
  HTT spacer sequence CTCN PAM
aaaucuccuuaagcugauua

SEQ ID NO: 16025 - RNA, 20 nt, Artificial Sequence
  HTT spacer sequence CTCN PAM
cuuccuauuugaauacccuu

SEQ ID NO: 16026 - RNA, 20 nt, Artificial Sequence
  HTT spacer sequence CTCN PAM
uccuauuugaauacccuuua

SEQ ID NO: 16027 - RNA, 20 nt, Artificial Sequence
  HTT spacer sequence CTCN PAM
ugccugauugcgcuggccag

SEQ ID NO: 16028 - RNA, 20 nt, Artificial Sequence
  HTT spacer sequence CTCN PAM
uauucaacauaguauuggaa

SEQ ID NO: 16029 - RNA, 20 nt, Artificial Sequence
  HTT spacer sequence CTCN PAM
ccacuccuauucaacauagu

SEQ ID NO: 16030 - RNA, 20 nt, Artificial Sequence
  HTT spacer sequence CTCN PAM
caccacuccuauucaacaua

SEQ ID NO: 16031 - RNA, 20 nt, Artificial Sequence
  HTT spacer sequence CTCN PAM
cucaccacuccuauucaaca

SEQ ID NO: 16032 - RNA, 20 nt, Artificial Sequence
  HTT spacer sequence CTCN PAM
uacuauguugagauacguuc

SEQ ID NO: 16033 - RNA, 20 nt, Artificial Sequence
  HTT spacer sequence CTCN PAM
acauaguaagagcuauuuau

SEQ ID NO: 16034 - RNA, 20 nt, Artificial Sequence
  HTT spacer sequence CTCN PAM
auaaacuagguaucgaugga

SEQ ID NO: 16035 - RNA, 20 nt, Artificial Sequence
  HTT spacer sequence CTCN PAM
caauaaacuagguaucgaug

SEQ ID NO: 16036 - RNA, 20 nt, Artificial Sequence
  HTT spacer sequence CTCN PAM
acagaugcagaaaaggccuu

SEQ ID NO: 16037 - RNA, 20 nt, Artificial Sequence
  HTT spacer sequence CTCN PAM
auaaaauacuggcaaacuga

SEQ ID NO: 16038 - RNA, 20 nt, Artificial Sequence
  HTT spacer sequence CTCN PAM
uuuuuuguugugucucugcc

SEQ ID NO: 16039 - RNA, 20 nt, Artificial Sequence
  HTT spacer sequence CTCN PAM
gccaggcuuugguaucagga

SEQ ID NO: 16040 - RNA, 20 nt, Artificial Sequence
  HTT spacer sequence CTCN PAM
uaaaaugaguuagggaggau

SEQ ID NO: 16041 - RNA, 20 nt, Artificial Sequence
  HTT spacer sequence CTCN PAM
uuuuaugaggccagcaucau

SEQ ID NO: 16042 - RNA, 20 nt, Artificial Sequence
  HTT spacer sequence CTCN PAM
cuaacucauuuuaugaggcc

SEQ ID NO: 16043 - RNA, 20 nt, Artificial Sequence
  HTT spacer sequence CTCN PAM
cuuuuucuauugauuggaau

SEQ ID NO: 16044 - RNA, 20 nt, Artificial Sequence
  HTT spacer sequence CTCN PAM
uuuucuauugauuggaauag

SEQ ID NO: 16045 - RNA, 20 nt, Artificial Sequence
  HTT spacer sequence CTCN PAM
ucuuuguaccucugguagaa

SEQ ID NO: 16046 - RNA, 20 nt, Artificial Sequence
  HTT spacer sequence CTCN PAM
uuguaccucugguagaauuc

SEQ ID NO: 16047 - RNA, 20 nt, Artificial Sequence
  HTT spacer sequence CTCN PAM
gguagaauucggcugugaau

SEQ ID NO: 16048 - RNA, 20 nt, Artificial Sequence
  HTT spacer sequence CTCN PAM
aguuuagaaccuguuaucag

SEQ ID NO: 16049 - RNA, 20 nt, Artificial Sequence
  HTT spacer sequence CTCN PAM
gaauagacugauaacagguu

SEQ ID NO: 16050 - RNA, 20 nt, Artificial Sequence
  HTT spacer sequence CTCN PAM
caagacuaaaccagaaaaaa

SEQ ID NO: 16051 - RNA, 20 nt, Artificial Sequence
  HTT spacer sequence CTCN PAM
acccaaauaaacuagaaaau

SEQ ID NO: 16052 - RNA, 20 nt, Artificial Sequence
  HTT spacer sequence CTCN PAM
gaugguaguuuguauuucug

SEQ ID NO: 16053 - RNA, 20 nt, Artificial Sequence
  HTT spacer sequence CTCN PAM
auaaaaacgauaaaggggau

SEQ ID NO: 16054 - RNA, 20 nt, Artificial Sequence
  HTT spacer sequence CTCN PAM
cuuuucuucuuuauuagucu

SEQ ID NO: 16055 - RNA, 20 nt, Artificial Sequence
  HTT spacer sequence CTCN PAM
uuucuucuuuauuagucuug

SEQ ID NO: 16056 - RNA, 20 nt, Artificial Sequence
  HTT spacer sequence CTCN PAM
aaaaaaaaucaaugaaucca

SEQ ID NO: 16057 - RNA, 20 nt, Artificial Sequence
  HTT spacer sequence CTCN PAM
aucuccuucaguucugcucu

SEQ ID NO: 16058 - RNA, 20 nt, Artificial Sequence
  HTT spacer sequence CTCN PAM
uucaguucugcucugaucuu

SEQ ID NO: 16059 - RNA, 20 nt, Artificial Sequence
  HTT spacer sequence CTCN PAM
gaucuuaguuauuuuuuguc

SEQ ID NO: 16060 - RNA, 20 nt, Artificial Sequence
  HTT spacer sequence CTCN PAM
ugcuuuucuaguucuuuuaa

SEQ ID NO: 16061 - RNA, 20 nt, Artificial Sequence
  HTT spacer sequence CTCN PAM
ugugggcauuuagugcuaua

SEQ ID NO: 16062 - RNA, 20 nt, Artificial Sequence
  HTT spacer sequence CTCN PAM
acacacugcuuuaaaugugu

SEQ ID NO: 16063 - RNA, 20 nt, Artificial Sequence
  HTT spacer sequence CTCN PAM
gggacacauuuaaagcagug

SEQ ID NO: 16064 - RNA, 20 nt, Artificial Sequence
  HTT spacer sequence CTCN PAM
uugguuuccaagaaaauuuu

SEQ ID NO: 16065 - RNA, 20 nt, Artificial Sequence
  HTT spacer sequence CTCN PAM
ugaaugacuacuggguaaau

SEQ ID NO: 16066 - RNA, 20 nt, Artificial Sequence
  HTT spacer sequence CTCN PAM
aaaccacacaacuacaugga

SEQ ID NO: 16067 - RNA, 20 nt, Artificial Sequence
  HTT spacer sequence CTCN PAM
cucaaaaccacacaacuaca

SEQ ID NO: 16068 - RNA, 20 nt, Artificial Sequence
  HTT spacer sequence CTCN PAM
auccugaguucuaauuugau

SEQ ID NO: 16069 - RNA, 20 nt, Artificial Sequence
  HTT spacer sequence CTCN PAM
ggauugagaaucucacucaa

SEQ ID NO: 16070 - RNA, 20 nt, Artificial Sequence
  HTT spacer sequence CTCN PAM
gcaaauguaaaagaacagaa

SEQ ID NO: 16071 - RNA, 20 nt, Artificial Sequence
  HTT spacer sequence CTCN PAM
ucagcaaauguaaaagaaca

SEQ ID NO: 16072 - RNA, 20 nt, Artificial Sequence
  HTT spacer sequence CTCN PAM
gcaccacauugcacuuauuc

SEQ ID NO: 16073 - RNA, 20 nt, Artificial Sequence
  HTT spacer sequence CTCN PAM
gcaccccaaaucaacagaac

SEQ ID NO: 16074 - RNA, 20 nt, Artificial Sequence
  HTT spacer sequence CTCN PAM
gcacuggaccaagcggaccu

SEQ ID NO: 16075 - RNA, 20 nt, Artificial Sequence
  HTT spacer sequence CTCN PAM
uugaucugccuaauauugac

SEQ ID NO: 16076 - RNA, 20 nt, Artificial Sequence
  HTT spacer sequence CTCN PAM
cacuauuaccgggugggagu

SEQ ID NO: 16077 - RNA, 20 nt, Artificial Sequence
  HTT spacer sequence CTCN PAM
cacccgguaauagugggaga

SEQ ID NO: 16078 - RNA, 20 nt, Artificial Sequence
  HTT spacer sequence CTCN PAM
uuguaggucucuaagaacuu

SEQ ID NO: 16079 - RNA, 20 nt, Artificial Sequence
  HTT spacer sequence CTCN PAM
aagaacuugcuucaugaauc

SEQ ID NO: 16080 - RNA, 20 nt, Artificial Sequence
  HTT spacer sequence CTCN PAM
uguauugggggcguguauau

SEQ ID NO: 16081 - RNA, 20 nt, Artificial Sequence
  HTT spacer sequence CTCN PAM
ucuuguugaauugaucccuu

SEQ ID NO: 16082 - RNA, 20 nt, Artificial Sequence
  HTT spacer sequence CTCN PAM
uuugaacuuuguugauuuaa

SEQ ID NO: 16083 - RNA, 20 nt, Artificial Sequence
  HTT spacer sequence CTCN PAM
gauaaaacagacuuuaaauc

SEQ ID NO: 16084 - RNA, 20 nt, Artificial Sequence
  HTT spacer sequence CTCN PAM
aucccuuuauuuugagccaa

SEQ ID NO: 16085 - RNA, 20 nt, Artificial Sequence
  HTT spacer sequence CTCN PAM
aaauaaagggauggaggaag

SEQ ID NO: 16086 - RNA, 20 nt, Artificial Sequence
  HTT spacer sequence CTCN PAM
uuggcucaaaauaaagggau

SEQ ID NO: 16087 - RNA, 20 nt, Artificial Sequence
  HTT spacer sequence CTCN PAM
caugcaaagacacucauugg

SEQ ID NO: 16088 - RNA, 20 nt, Artificial Sequence
  HTT spacer sequence CTCN PAM
ugaauacagcacaccaaugg

SEQ ID NO: 16089 - RNA, 20 nt, Artificial Sequence
  HTT spacer sequence CTCN PAM
uuauccaauuugccagucug

SEQ ID NO: 16090 - RNA, 20 nt, Artificial Sequence
  HTT spacer sequence CTCN PAM
ugaaggaagcacuaaacaug

SEQ ID NO: 16091 - RNA, 20 nt, Artificial Sequence
  HTT spacer sequence CTCN PAM
uguaaggcaggccugguggu

SEQ ID NO: 16092 - RNA, 20 nt, Artificial Sequence
  HTT spacer sequence CTCN PAM
gcauuugcuugucuguaaag

SEQ ID NO: 16093 - RNA, 20 nt, Artificial Sequence
  HTT spacer sequence CTCN PAM
uucacuuaugaagcuuaguu

SEQ ID NO: 16094 - RNA, 20 nt, Artificial Sequence
  HTT spacer sequence CTCN PAM
cacucuuuucuggcuuguag

SEQ ID NO: 16095 - RNA, 20 nt, Artificial Sequence
  HTT spacer sequence CTCN PAM
uuucuggcuuguaggauuuc

SEQ ID NO: 16096 - RNA, 20 nt, Artificial Sequence
  HTT spacer sequence CTCN PAM
gcagaaauccuacaagccag

SEQ ID NO: 16097 - RNA, 20 nt, Artificial Sequence
  HTT spacer sequence CTCN PAM
cugcagaaauccuacaagcc

SEQ ID NO: 16098 - RNA, 20 nt, Artificial Sequence
  HTT spacer sequence CTCN PAM
cuggcugcccuuuccuucau

SEQ ID NO: 16099 - RNA, 20 nt, Artificial Sequence
  HTT spacer sequence CTCN PAM
ggcugcccuuuccuucauuu

SEQ ID NO: 16100 - RNA, 20 nt, Artificial Sequence
  HTT spacer sequence CTCN PAM
ucucgaggaguaucuuugug

SEQ ID NO: 16101 - RNA, 20 nt, Artificial Sequence
  HTT spacer sequence CTCN PAM
aggaguaucuuugugguguu

SEQ ID NO: 16102 - RNA, 20 nt, Artificial Sequence
  HTT spacer sequence CTCN PAM
agaagagcaaccccaagaca

SEQ ID NO: 16103 - RNA, 20 nt, Artificial Sequence
  HTT spacer sequence CTCN PAM
ucgagaagagcaaccccaag

SEQ ID NO: 16104 - RNA, 20 nt, Artificial Sequence
  HTT spacer sequence CTCN PAM
guauuuccugaauuugaaug

SEQ ID NO: 16105 - RNA, 20 nt, Artificial Sequence
  HTT spacer sequence CTCN PAM
uggauaauauccugaagagu

SEQ ID NO: 16106 - RNA, 20 nt, Artificial Sequence
  HTT spacer sequence CTCN PAM
ucaggauauuauccaggaga

SEQ ID NO: 16107 - RNA, 20 nt, Artificial Sequence
  HTT spacer sequence CTCN PAM
ccaucacuuucagguacacc

SEQ ID NO: 16108 - RNA, 20 nt, Artificial Sequence
  HTT spacer sequence CTCN PAM
aagaaauaugggacuaugug

SEQ ID NO: 16109 - RNA, 20 nt, Artificial Sequence
  HTT spacer sequence CTCN PAM
uuuuucucuaaucuugucuu

SEQ ID NO: 16110 - RNA, 20 nt, Artificial Sequence
  HTT spacer sequence CTCN PAM
aaucuugucuucucgcuuua

SEQ ID NO: 16111 - RNA, 20 nt, Artificial Sequence
  HTT spacer sequence CTCN PAM
cuuuauuucauuaauuugau

SEQ ID NO: 16112 - RNA, 20 nt, Artificial Sequence
  HTT spacer sequence CTCN PAM
uucugugguuuuuagcucca

SEQ ID NO: 16113 - RNA, 20 nt, Artificial Sequence
  HTT spacer sequence CTCN PAM
aucaggucauuuaagcucuu

SEQ ID NO: 16114 - RNA, 20 nt, Artificial Sequence
  HTT spacer sequence CTCN PAM
ucucuacacugguuauucua

SEQ ID NO: 16115 - RNA, 20 nt, Artificial Sequence
  HTT spacer sequence CTCN PAM
acacugguuauucuagccau

SEQ ID NO: 16116 - RNA, 20 nt, Artificial Sequence
  HTT spacer sequence CTCN PAM
uuuagcucggagaaguuugu

SEQ ID NO: 16117 - RNA, 20 nt, Artificial Sequence
  HTT spacer sequence CTCN PAM
gagaaguuuguuauuaccga

SEQ ID NO: 16118 - RNA, 20 nt, Artificial Sequence
  HTT spacer sequence CTCN PAM
gagcuaaaggagcauguucu

SEQ ID NO: 16119 - RNA, 20 nt, Artificial Sequence
  HTT spacer sequence CTCN PAM
uucuccauccaguuuuguuc

SEQ ID NO: 16120 - RNA, 20 nt, Artificial Sequence
  HTT spacer sequence CTCN PAM
auccaguuuuguucccuugc

SEQ ID NO: 16121 - RNA, 20 nt, Artificial Sequence
  HTT spacer sequence CTCN PAM
ccagcaagggaacaaaacug

SEQ ID NO: 16122 - RNA, 20 nt, Artificial Sequence
  HTT spacer sequence CTCN PAM
ucaccagcaagggaacaaaa

SEQ ID NO: 16123 - RNA, 20 nt, Artificial Sequence
  HTT spacer sequence CTCN PAM
aaaggaucacaacuccucac

SEQ ID NO: 16124 - RNA, 20 nt, Artificial Sequence
  HTT spacer sequence CTCN PAM
uccaaaggaucacaacuccu

SEQ ID NO: 16125 - RNA, 20 nt, Artificial Sequence
  HTT spacer sequence CTCN PAM
ucuccuccaaaggaucacaa

SEQ ID NO: 16126 - RNA, 20 nt, Artificial Sequence
  HTT spacer sequence CTCN PAM
ccaucauugugguuuuaucu

SEQ ID NO: 16127 - RNA, 20 nt, Artificial Sequence
  HTT spacer sequence CTCN PAM
gcugcaggucuguuggaguu

SEQ ID NO: 16128 - RNA, 20 nt, Artificial Sequence
  HTT spacer sequence CTCN PAM
aacagaccugcagcugaggg

SEQ ID NO: 16129 - RNA, 20 nt, Artificial Sequence
  HTT spacer sequence CTCN PAM
agcaaacuccaacagaccug

SEQ ID NO: 16130 - RNA, 20 nt, Artificial Sequence
  HTT spacer sequence CTCN PAM
aggcccuguuugccugggca

SEQ ID NO: 16131 - RNA, 20 nt, Artificial Sequence
  HTT spacer sequence CTCN PAM
gcuggugaugcccaggcaaa

SEQ ID NO: 16132 - RNA, 20 nt, Artificial Sequence
  HTT spacer sequence CTCN PAM
ggaaacaucgucccagagca

SEQ ID NO: 16133 - RNA, 20 nt, Artificial Sequence
  HTT spacer sequence CTCN PAM
gggacgauguuuccagagga

SEQ ID NO: 16134 - RNA, 20 nt, Artificial Sequence
  HTT spacer sequence CTCN PAM
uacaggcagacaccuucgug

SEQ ID NO: 16135 - RNA, 20 nt, Artificial Sequence
  HTT spacer sequence CTCN PAM
caguaggggccaacaaacac

SEQ ID NO: 16136 - RNA, 20 nt, Artificial Sequence
  HTT spacer sequence CTCN PAM
cagucaggcuacaugggggu

SEQ ID NO: 16137 - RNA, 20 nt, Artificial Sequence
  HTT spacer sequence CTCN PAM
agugggucccugacccccau

SEQ ID NO: 16138 - RNA, 20 nt, Artificial Sequence
  HTT spacer sequence CTCN PAM
gauaaugaacagacugccuc

SEQ ID NO: 16139 - RNA, 20 nt, Artificial Sequence
  HTT spacer sequence CTCN PAM
cgguacggcauucaagcucc

SEQ ID NO: 16140 - RNA, 20 nt, Artificial Sequence
  HTT spacer sequence CTCN PAM
cuucagagcugucaggcacg

SEQ ID NO: 16141 - RNA, 20 nt, Artificial Sequence
  HTT spacer sequence CTCN PAM
ucagagcugucaggcacgua

SEQ ID NO: 16142 - RNA, 20 nt, Artificial Sequence
  HTT spacer sequence CTCN PAM
gaagagagcagugguucucc

SEQ ID NO: 16143 - RNA, 20 nt, Artificial Sequence
  HTT spacer sequence CTCN PAM
agauuuaaacauacgugccu

SEQ ID NO: 16144 - RNA, 20 nt, Artificial Sequence
  HTT spacer sequence CTCN PAM
gggggaagggcacaucugaa

SEQ ID NO: 16145 - RNA, 20 nt, Artificial Sequence
  HTT spacer sequence CTCN PAM
agauuccaccucugggggaa

SEQ ID NO: 16146 - RNA, 20 nt, Artificial Sequence
  HTT spacer sequence CTCN PAM
cuagauuccaccucuggggg

SEQ ID NO: 16147 - RNA, 20 nt, Artificial Sequence
  HTT spacer sequence CTCN PAM
gcaaggccuacugccucucu

SEQ ID NO: 16148 - RNA, 20 nt, Artificial Sequence
  HTT spacer sequence CTCN PAM
gcccaguucgagcuucccug

SEQ ID NO: 16149 - RNA, 20 nt, Artificial Sequence
  HTT spacer sequence CTCN PAM
aacugggcagagcccacugc

SEQ ID NO: 16150 - RNA, 20 nt, Artificial Sequence
  HTT spacer sequence CTCN PAM
caguguaaacaaagcagcag

SEQ ID NO: 16151 - RNA, 20 nt, Artificial Sequence
  HTT spacer sequence CTCN PAM
agccucagcagugguggaca

SEQ ID NO: 16152 - RNA, 20 nt, Artificial Sequence
  HTT spacer sequence CTCN PAM
gcagugguggacaccccucc

SEQ ID NO: 16153 - RNA, 20 nt, Artificial Sequence
  HTT spacer sequence CTCN PAM
cccagccaagcuccugcauc

SEQ ID NO: 16154 - RNA, 20 nt, Artificial Sequence
  HTT spacer sequence CTCN PAM
ugcaucccaggucgauuuca

SEQ ID NO: 16155 - RNA, 20 nt, Artificial Sequence
  HTT spacer sequence CTCN PAM
gaaaucgaccugggaugcag

SEQ ID NO: 16156 - RNA, 20 nt, Artificial Sequence
  HTT spacer sequence CTCN PAM
cugcuagcgcagcacucuga

SEQ ID NO: 16157 - RNA, 20 nt, Artificial Sequence
  HTT spacer sequence CTCN PAM
gcgggucccacgcccauggg

SEQ ID NO: 16158 - RNA, 20 nt, Artificial Sequence
  HTT spacer sequence CTCN PAM
ugugccuggcucagcggguc

SEQ ID NO: 16159 - RNA, 20 nt, Artificial Sequence
  HTT spacer sequence CTCN PAM
ccugugccuggcucagcggg

SEQ ID NO: 16160 - RNA, 20 nt, Artificial Sequence
  HTT spacer sequence CTCN PAM
uggucugcugguugugaaga

SEQ ID NO: 16161 - RNA, 20 nt, Artificial Sequence
  HTT spacer sequence CTCN PAM
ugcccaaauacugcacuuuu

SEQ ID NO: 16162 - RNA, 20 nt, Artificial Sequence
  HTT spacer sequence CTCN PAM
uucagguacagucacucaug

SEQ ID NO: 16163 - RNA, 20 nt, Artificial Sequence
  HTT spacer sequence CTCN PAM
uggcuuccuuuggcuuggaa

SEQ ID NO: 16164 - RNA, 20 nt, Artificial Sequence
  HTT spacer sequence CTCN PAM
ccugggaagcacaagggguc

SEQ ID NO: 16165 - RNA, 20 nt, Artificial Sequence
  HTT spacer sequence CTCN PAM
gugggcugcacccacugucc

SEQ ID NO: 16166 - RNA, 20 nt, Artificial Sequence
  HTT spacer sequence CTCN PAM
cugggacuugcuggacagug

SEQ ID NO: 16167 - RNA, 20 nt, Artificial Sequence
  HTT spacer sequence CTCN PAM
guuggaaaugcagaaaucac

SEQ ID NO: 16168 - RNA, 20 nt, Artificial Sequence
  HTT spacer sequence CTCN PAM
cugggagcuguagacuggag

SEQ ID NO: 16169 - RNA, 20 nt, Artificial Sequence
  HTT spacer sequence CTCN PAM
cagugagaucgacacagaag

SEQ ID NO: 16170 - RNA, 20 nt, Artificial Sequence
  HTT spacer sequence CTCN PAM
agucuacagcucccagugag

SEQ ID NO: 16171 - RNA, 20 nt, Artificial Sequence
  HTT spacer sequence CTCN PAM
aaaaacaagggaugcuucca

SEQ ID NO: 16172 - RNA, 20 nt, Artificial Sequence
  HTT spacer sequence CTCN PAM
accucaaaaaacaagggaug

SEQ ID NO: 16173 - RNA, 20 nt, Artificial Sequence
  HTT spacer sequence CTCN PAM
gucgcccaggcugacgugca

SEQ ID NO: 16174 - RNA, 20 nt, Artificial Sequence
  HTT spacer sequence CTCN PAM
gcccacugcaaccuuugccu

SEQ ID NO: 16175 - RNA, 20 nt, Artificial Sequence
  HTT spacer sequence CTCN PAM
ugguuucaagcgauucuccu

SEQ ID NO: 16176 - RNA, 20 nt, Artificial Sequence
  HTT spacer sequence CTCN PAM
uaccucagccuccggaguag

SEQ ID NO: 16177 - RNA, 20 nt, Artificial Sequence
  HTT spacer sequence CTCN PAM
gccuccggaguagcugggau

SEQ ID NO: 16178 - RNA, 20 nt, Artificial Sequence
  HTT spacer sequence CTCN PAM
ggaguagcugggauuacagg

SEQ ID NO: 16179 - RNA, 20 nt, Artificial Sequence
  HTT spacer sequence CTCN PAM
ggaggcugagguaggagaau

SEQ ID NO: 16180 - RNA, 20 nt, Artificial Sequence
  HTT spacer sequence CTCN PAM
acuaaaaauacaaaaaauua

SEQ ID NO: 16181 - RNA, 20 nt, Artificial Sequence
  HTT spacer sequence CTCN PAM
aacuccugaccuugugaucc

SEQ ID NO: 16182 - RNA, 20 nt, Artificial Sequence
  HTT spacer sequence CTCN PAM
ugaccuugugauccacccac

SEQ ID NO: 16183 - RNA, 20 nt, Artificial Sequence
  HTT spacer sequence CTCN PAM
gccuccuagagugcugggau

SEQ ID NO: 16184 - RNA, 20 nt, Artificial Sequence
  HTT spacer sequence CTCN PAM
uagagugcugggaucacagg

SEQ ID NO: 16185 - RNA, 20 nt, Artificial Sequence
  HTT spacer sequence CTCN PAM
aggaggcugaggugggugga

SEQ ID NO: 16186 - RNA, 20 nt, Artificial Sequence
  HTT spacer sequence CTCN PAM
cucucuuugcccuaaaccac

SEQ ID NO: 16187 - RNA, 20 nt, Artificial Sequence
  HTT spacer sequence CTCN PAM
cuuugcccuaaaccacugug

SEQ ID NO: 16188 - RNA, 20 nt, Artificial Sequence
  HTT spacer sequence CTCN PAM
uugcccuaaaccacugugcu

SEQ ID NO: 16189 - RNA, 20 nt, Artificial Sequence
  HTT spacer sequence CTCN PAM
auguauaacacauuuuagca

SEQ ID NO: 16190 - RNA, 20 nt, Artificial Sequence
  HTT spacer sequence CTCN PAM
cguucaaauuuaaaacauau

SEQ ID NO: 16191 - RNA, 20 nt, Artificial Sequence
  HTT spacer sequence CTCN PAM
ucucugaaaauuuuuacauu

SEQ ID NO: 16192 - RNA, 20 nt, Artificial Sequence
  HTT spacer sequence CTCN PAM
gaaaauuuuuacauuuggca

SEQ ID NO: 16193 - RNA, 20 nt, Artificial Sequence
  HTT spacer sequence CTCN PAM
ggccugugucuuuacaguua

SEQ ID NO: 16194 - RNA, 20 nt, Artificial Sequence
  HTT spacer sequence CTCN PAM
ccucuccuuuuuuguuuuuc

SEQ ID NO: 16195 - RNA, 20 nt, Artificial Sequence
  HTT spacer sequence CTCN PAM
ccuuuuuuguuuuucuaagu

SEQ ID NO: 16196 - RNA, 20 nt, Artificial Sequence
  HTT spacer sequence CTCN PAM
uuuuuuguuuuucuaaguuc

SEQ ID NO: 16197 - RNA, 20 nt, Artificial Sequence
  HTT spacer sequence CTCN PAM
gucuugaaacagcaaaaaag

SEQ ID NO: 16198 - RNA, 20 nt, Artificial Sequence
  HTT spacer sequence CTCN PAM
cauauccuuuuguuuguacu

SEQ ID NO: 16199 - RNA, 20 nt, Artificial Sequence
  HTT spacer sequence CTCN PAM
ccugcuuaauuguugaguuu

SEQ ID NO: 16200 - RNA, 20 nt, Artificial Sequence
  HTT spacer sequence CTCN PAM
acaauuaagcaggugaggcu

SEQ ID NO: 16201 - RNA, 20 nt, Artificial Sequence
  HTT spacer sequence CTCN PAM
aaaagaccacggauaaaaac

SEQ ID NO: 16202 - RNA, 20 nt, Artificial Sequence
  HTT spacer sequence CTCN PAM
aaacagucaggggccaagug

SEQ ID NO: 16203 - RNA, 20 nt, Artificial Sequence
  HTT spacer sequence CTCN PAM
cucacugacucacagcaugg

SEQ ID NO: 16204 - RNA, 20 nt, Artificial Sequence
  HTT spacer sequence CTCN PAM
cugacucacagcauggcaag

SEQ ID NO: 16205 - RNA, 20 nt, Artificial Sequence
  HTT spacer sequence CTCN PAM
cagcauggcaagguuucaga

SEQ ID NO: 16206 - RNA, 20 nt, Artificial Sequence
  HTT spacer sequence CTCN PAM
uucugccacacagcaguucu

SEQ ID NO: 16207 - RNA, 20 nt, Artificial Sequence
  HTT spacer sequence CTCN PAM
gaacugcuguguggcagaaa

SEQ ID NO: 16208 - RNA, 20 nt, Artificial Sequence
  HTT spacer sequence CTCN PAM
agccuggccugacaaucuaa

SEQ ID NO: 16209 - RNA, 20 nt, Artificial Sequence
  HTT spacer sequence CTCN PAM
auaguuuguauaucucaagc

SEQ ID NO: 16210 - RNA, 20 nt, Artificial Sequence
  HTT spacer sequence CTCN PAM
gaugccuucaccuaagcaag

SEQ ID NO: 16211 - RNA, 20 nt, Artificial Sequence
  HTT spacer sequence CTCN PAM
gcaugugugcggggcugggu

SEQ ID NO: 16212 - RNA, 20 nt, Artificial Sequence
  HTT spacer sequence CTCN PAM
acacccagccccgcacacau

SEQ ID NO: 16213 - RNA, 20 nt, Artificial Sequence
  HTT spacer sequence CTCN PAM
gaccucaacacccagccccg

SEQ ID NO: 16214 - RNA, 20 nt, Artificial Sequence
  HTT spacer sequence CTCN PAM
agcuacacuugugcucagac

SEQ ID NO: 16215 - RNA, 20 nt, Artificial Sequence
  HTT spacer sequence CTCN PAM
ccagcuacacuugugcucag

SEQ ID NO: 16216 - RNA, 20 nt, Artificial Sequence
  HTT spacer sequence CTCN PAM
ccucuccagcuacacuugug

SEQ ID NO: 16217 - RNA, 20 nt, Artificial Sequence
  HTT spacer sequence CTCN PAM
uacccgucgccacaucaagc

SEQ ID NO: 16218 - RNA, 20 nt, Artificial Sequence
  HTT spacer sequence CTCN PAM
cagaagucugaagaaaaccu

SEQ ID NO: 16219 - RNA, 20 nt, Artificial Sequence
  HTT spacer sequence CTCN PAM
gugccuuuaaauccuggaac

SEQ ID NO: 16220 - RNA, 20 nt, Artificial Sequence
  HTT spacer sequence CTCN PAM
uuuuuauacauaauugaaau

SEQ ID NO: 16221 - RNA, 20 nt, Artificial Sequence
  HTT spacer sequence CTCN PAM
uuacuguuccauuuuauaug

SEQ ID NO: 16222 - RNA, 20 nt, Artificial Sequence
  HTT spacer sequence CTCN PAM
acaaaaagaaaaacaaaaau

SEQ ID NO: 16223 - RNA, 20 nt, Artificial Sequence
  HTT spacer sequence CTCN PAM
gggcugaggugggaggauug

SEQ ID NO: 16224 - RNA, 20 nt, Artificial Sequence
  HTT spacer sequence CTCN PAM
gccccgaguagcugggacca

SEQ ID NO: 16225 - RNA, 20 nt, Artificial Sequence
  HTT spacer sequence CTCN PAM
caccucagccccgaguagcu

SEQ ID NO: 16226 - RNA, 20 nt, Artificial Sequence
  HTT spacer sequence CTCN PAM
agcaauccucccaccucagc

SEQ ID NO: 16227 - RNA, 20 nt, Artificial Sequence
  HTT spacer sequence CTCN PAM
caaggcucaagcaauccucc

SEQ ID NO: 16228 - RNA, 20 nt, Artificial Sequence
  HTT spacer sequence CTCN PAM
accucccaaggcucaagcaa

SEQ ID NO: 16229 - RNA, 20 nt, Artificial Sequence
  HTT spacer sequence CTCN PAM
uugcagccucaaccucccaa

SEQ ID NO: 16230 - RNA, 20 nt, Artificial Sequence
  HTT spacer sequence CTCN PAM
agcaugggugacagacuuua

SEQ ID NO: 16231 - RNA, 20 nt, Artificial Sequence
  HTT spacer sequence CTCN PAM
auaaacccaggcacaagaaa

SEQ ID NO: 16232 - RNA, 20 nt, Artificial Sequence
  HTT spacer sequence CTCN PAM
aaaaaaaaaaaaagaaagaa

SEQ ID NO: 16233 - RNA, 20 nt, Artificial Sequence
  HTT spacer sequence CTCN PAM
cucugucgccugcguuggag

SEQ ID NO: 16234 - RNA, 20 nt, Artificial Sequence
  HTT spacer sequence CTCN PAM
gucgccugcguuggagugca

SEQ ID NO: 16235 - RNA, 20 nt, Artificial Sequence
  HTT spacer sequence CTCN PAM
aacgcaggcgacagagcgag

SEQ ID NO: 16236 - RNA, 20 nt, Artificial Sequence
  HTT spacer sequence CTCN PAM
cugcaagcucugccuccugg

SEQ ID NO: 16237 - RNA, 20 nt, Artificial Sequence
  HTT spacer sequence CTCN PAM
gccuccuggguucacgccau

SEQ ID NO: 16238 - RNA, 20 nt, Artificial Sequence
  HTT spacer sequence CTCN PAM
uggguucacgccauucuccu

SEQ ID NO: 16239 - RNA, 20 nt, Artificial Sequence
  HTT spacer sequence CTCN PAM
ugccucagccuccugaguag

SEQ ID NO: 16240 - RNA, 20 nt, Artificial Sequence
  HTT spacer sequence CTCN PAM
gccuccugaguagcugggac

SEQ ID NO: 16241 - RNA, 20 nt, Artificial Sequence
  HTT spacer sequence CTCN PAM
ugaguagcugggacuacagg

SEQ ID NO: 16242 - RNA, 20 nt, Artificial Sequence
  HTT spacer sequence CTCN PAM
ggaggcugaggcaggagaau

SEQ ID NO: 16243 - RNA, 20 nt, Artificial Sequence
  HTT spacer sequence CTCN PAM
acuaaaaauacaaaaaauua

SEQ ID NO: 16244 - RNA, 20 nt, Artificial Sequence
  HTT spacer sequence CTCN PAM
ucucuacuaaaaauacaaaa

SEQ ID NO: 16245 - RNA, 20 nt, Artificial Sequence
  HTT spacer sequence CTCN PAM
aucuccugaccucgugaucu

SEQ ID NO: 16246 - RNA, 20 nt, Artificial Sequence
  HTT spacer sequence CTCN PAM
ugaccucgugaucugcccgc

SEQ ID NO: 16247 - RNA, 20 nt, Artificial Sequence
  HTT spacer sequence CTCN PAM
ugaucugcccgccugggccu

SEQ ID NO: 16248 - RNA, 20 nt, Artificial Sequence
  HTT spacer sequence CTCN PAM
caaagugcugggauuacagg

SEQ ID NO: 16249 - RNA, 20 nt, Artificial Sequence
  HTT spacer sequence CTCN PAM
cgccuguaaucccagcacuu

SEQ ID NO: 16250 - RNA, 20 nt, Artificial Sequence
  HTT spacer sequence CTCN PAM
cuccuuuuuucccucucuua

SEQ ID NO: 16251 - RNA, 20 nt, Artificial Sequence
  HTT spacer sequence CTCN PAM
uuuuuucccucucuuaaagg

SEQ ID NO: 16252 - RNA, 20 nt, Artificial Sequence
  HTT spacer sequence CTCN PAM
cuuaaaggggcugugauuuc

SEQ ID NO: 16253 - RNA, 20 nt, Artificial Sequence
  HTT spacer sequence CTCN PAM
uaaaggggcugugauuuccu

SEQ ID NO: 16254 - RNA, 20 nt, Artificial Sequence
  HTT spacer sequence CTCN PAM
uuucaguguuugauuguuuu

SEQ ID NO: 16255 - RNA, 20 nt, Artificial Sequence
  HTT spacer sequence CTCN PAM
gaucuuuucuucuacagugu

SEQ ID NO: 16256 - RNA, 20 nt, Artificial Sequence
  HTT spacer sequence CTCN PAM
guuguuaaucuguuaaucug

SEQ ID NO: 16257 - RNA, 20 nt, Artificial Sequence
  HTT spacer sequence CTCN PAM
cucuguugcccaggcuggag

SEQ ID NO: 16258 - RNA, 20 nt, Artificial Sequence
  HTT spacer sequence CTCN PAM
guugcccaggcuggaguuua

SEQ ID NO: 16259 - RNA, 20 nt, Artificial Sequence
  HTT spacer sequence CTCN PAM
agccugggcaacagagugag

SEQ ID NO: 16260 - RNA, 20 nt, Artificial Sequence
  HTT spacer sequence CTCN PAM
cugcaaccuccaccucccag

SEQ ID NO: 16261 - RNA, 20 nt, Artificial Sequence
  HTT spacer sequence CTCN PAM
accucccaggcucaagcaau

SEQ ID NO: 16262 - RNA, 20 nt, Artificial Sequence
  HTT spacer sequence CTCN PAM
caggcucaagcaauucuucu

SEQ ID NO: 16263 - RNA, 20 nt, Artificial Sequence
  HTT spacer sequence CTCN PAM
agcaauucuucugccucagc

SEQ ID NO: 16264 - RNA, 20 nt, Artificial Sequence
  HTT spacer sequence CTCN PAM
gccucccgaguagcugggac

SEQ ID NO: 16265 - RNA, 20 nt, Artificial Sequence
  HTT spacer sequence CTCN PAM
cgaguagcugggacuauagg

SEQ ID NO: 16266 - RNA, 20 nt, Artificial Sequence
  HTT spacer sequence CTCN PAM
ggaggcugaggcagaagaau

SEQ ID NO: 16267 - RNA, 20 nt, Artificial Sequence
  HTT spacer sequence CTCN PAM
aauaaaaauacacaaauuag

SEQ ID NO: 16268 - RNA, 20 nt, Artificial Sequence
  HTT spacer sequence CTCN PAM
ugaccucaggugauucaucc

SEQ ID NO: 16269 - RNA, 20 nt, Artificial Sequence
  HTT spacer sequence CTCN PAM
ggugauucauccgccucggu

SEQ ID NO: 16270 - RNA, 20 nt, Artificial Sequence
  HTT spacer sequence CTCN PAM
gucucccaaaguguugggau

SEQ ID NO: 16271 - RNA, 20 nt, Artificial Sequence
  HTT spacer sequence CTCN PAM
caaaguguugggauuauagg

SEQ ID NO: 16272 - RNA, 20 nt, Artificial Sequence
  HTT spacer sequence CTCN PAM
ugccuauaaucccaacacuu

SEQ ID NO: 16273 - RNA, 20 nt, Artificial Sequence
  HTT spacer sequence CTCN PAM
agaaguuugauuuaggucuu

SEQ ID NO: 16274 - RNA, 20 nt, Artificial Sequence
  HTT spacer sequence CTCN PAM
cuguguuucuguuuagcuuu

SEQ ID NO: 16275 - RNA, 20 nt, Artificial Sequence
  HTT spacer sequence CTCN PAM
gcuaguucuaagaucuucua

SEQ ID NO: 16276 - RNA, 20 nt, Artificial Sequence
  HTT spacer sequence CTCN PAM
uugguugauugauacuccuc

SEQ ID NO: 16277 - RNA, 20 nt, Artificial Sequence
  HTT spacer sequence CTCN PAM
ucguuuuggguuguauuuuc

SEQ ID NO: 16278 - RNA, 20 nt, Artificial Sequence
  HTT spacer sequence CTCN PAM
uuuuggguuguauuuuccug

SEQ ID NO: 16279 - RNA, 20 nt, Artificial Sequence
  HTT spacer sequence CTCN PAM
uuguauggcugccaauuuuu

SEQ ID NO: 16280 - RNA, 20 nt, Artificial Sequence
  HTT spacer sequence CTCN PAM
agaagaucuaugggaacaca

SEQ ID NO: 16281 - RNA, 20 nt, Artificial Sequence
  HTT spacer sequence CTCN PAM
gaacaaagcucaagaagauc

SEQ ID NO: 16282 - RNA, 20 nt, Artificial Sequence
  HTT spacer sequence CTCN PAM
acuaaccucagaacaaagcu

SEQ ID NO: 16283 - RNA, 20 nt, Artificial Sequence
  HTT spacer sequence CTCN PAM
uuugggucuugcuuuauaau

SEQ ID NO: 16284 - RNA, 20 nt, Artificial Sequence
  HTT spacer sequence CTCN PAM
aacccaucugacaaauuaua

SEQ ID NO: 16285 - RNA, 20 nt, Artificial Sequence
  HTT spacer sequence CTCN PAM
uuaggaauaauuagguacca

SEQ ID NO: 16286 - RNA, 20 nt, Artificial Sequence
  HTT spacer sequence CTCN PAM
uaagcaugguaccuaauuau

SEQ ID NO: 16287 - RNA, 20 nt, Artificial Sequence
  HTT spacer sequence CTCN PAM
ggauggucuugccuccuaag

SEQ ID NO: 16288 - RNA, 20 nt, Artificial Sequence
  HTT spacer sequence CTCN PAM
accuaaugaaccagaaaguu

SEQ ID NO: 16289 - RNA, 20 nt, Artificial Sequence
  HTT spacer sequence CTCN PAM
gcaggcggacuggaaaaccc

SEQ ID NO: 16290 - RNA, 20 nt, Artificial Sequence
  HTT spacer sequence CTCN PAM
cacagggcuagaaagucacu

SEQ ID NO: 16291 - RNA, 20 nt, Artificial Sequence
  HTT spacer sequence CTCN PAM
gcgcucacacagggcuagaa

SEQ ID NO: 16292 - RNA, 20 nt, Artificial Sequence
  HTT spacer sequence CTCN PAM
gcuccuucuaauccuuucca

SEQ ID NO: 16293 - RNA, 20 nt, Artificial Sequence
  HTT spacer sequence CTCN PAM
uucuaauccuuuccaaugcu

SEQ ID NO: 16294 - RNA, 20 nt, Artificial Sequence
  HTT spacer sequence CTCN PAM
gggaguuuucucacacacau

SEQ ID NO: 16295 - RNA, 20 nt, Artificial Sequence
  HTT spacer sequence CTCN PAM
cugaggccagggaaagaagc

SEQ ID NO: 16296 - RNA, 20 nt, Artificial Sequence
  HTT spacer sequence CTCN PAM
cacacauaucucugcugagu

SEQ ID NO: 16297 - RNA, 20 nt, Artificial Sequence
  HTT spacer sequence CTCN PAM
gcugaguacucgagagggac

SEQ ID NO: 16298 - RNA, 20 nt, Artificial Sequence
  HTT spacer sequence CTCN PAM
gcagagauaugugugugaga

SEQ ID NO: 16299 - RNA, 20 nt, Artificial Sequence
  HTT spacer sequence CTCN PAM
agagggaccuuccccagauc

SEQ ID NO: 16300 - RNA, 20 nt, Artificial Sequence
  HTT spacer sequence CTCN PAM
aguacucagcagagauaugu

SEQ ID NO: 16301 - RNA, 20 nt, Artificial Sequence
  HTT spacer sequence CTCN PAM
cgaguacucagcagagauau

SEQ ID NO: 16302 - RNA, 20 nt, Artificial Sequence
  HTT spacer sequence CTCN PAM
agagcucucucugucuuguu

SEQ ID NO: 16303 - RNA, 20 nt, Artificial Sequence
  HTT spacer sequence CTCN PAM
ggagaucuggggaagguccc

SEQ ID NO: 16304 - RNA, 20 nt, Artificial Sequence
  HTT spacer sequence CTCN PAM
cucugucuuguuuucucuuc

SEQ ID NO: 16305 - RNA, 20 nt, Artificial Sequence
  HTT spacer sequence CTCN PAM
cugucuuguuuucucuucuc

SEQ ID NO: 16306 - RNA, 20 nt, Artificial Sequence
  HTT spacer sequence CTCN PAM
gucuuguuuucucuucucug

SEQ ID NO: 16307 - RNA, 20 nt, Artificial Sequence
  HTT spacer sequence CTCN PAM
ucucuggugcucugucuuau

SEQ ID NO: 16308 - RNA, 20 nt, Artificial Sequence
  HTT spacer sequence CTCN PAM
ggugcucugucuuaugaacu

SEQ ID NO: 16309 - RNA, 20 nt, Artificial Sequence
  HTT spacer sequence CTCN PAM
gucuuaugaacuguggcugu

SEQ ID NO: 16310 - RNA, 20 nt, Artificial Sequence
  HTT spacer sequence CTCN PAM
uuagauucucagcaccucuu

SEQ ID NO: 16311 - RNA, 20 nt, Artificial Sequence
  HTT spacer sequence CTCN PAM
gcaccucuucaauucagagg

SEQ ID NO: 16312 - RNA, 20 nt, Artificial Sequence
  HTT spacer sequence CTCN PAM
ucaauucagaggguugccug

SEQ ID NO: 16313 - RNA, 20 nt, Artificial Sequence
  HTT spacer sequence CTCN PAM
gaauugaagaggugcugaga

SEQ ID NO: 16314 - RNA, 20 nt, Artificial Sequence
  HTT spacer sequence CTCN PAM
uccuugugccacagccuagg

SEQ ID NO: 16315 - RNA, 20 nt, Artificial Sequence
  HTT spacer sequence CTCN PAM
uugugccacagccuaggaac

SEQ ID NO: 16316 - RNA, 20 nt, Artificial Sequence
  HTT spacer sequence CTCN PAM
cucaaagcagcgaguugggg

SEQ ID NO: 16317 - RNA, 20 nt, Artificial Sequence
  HTT spacer sequence CTCN PAM
caaagcagcgaguuggggca

SEQ ID NO: 16318 - RNA, 20 nt, Artificial Sequence
  HTT spacer sequence CTCN PAM
aagcagcgaguuggggcagc

SEQ ID NO: 16319 - RNA, 20 nt, Artificial Sequence
  HTT spacer sequence CTCN PAM
cugcuuugagagaguuccua

SEQ ID NO: 16320 - RNA, 20 nt, Artificial Sequence
  HTT spacer sequence CTCN PAM
cgucucccagggaucacugu

SEQ ID NO: 16321 - RNA, 20 nt, Artificial Sequence
  HTT spacer sequence CTCN PAM
ucucccagggaucacugucc

SEQ ID NO: 16322 - RNA, 20 nt, Artificial Sequence
  HTT spacer sequence CTCN PAM
cagggaucacuguccuucau

SEQ ID NO: 16323 - RNA, 20 nt, Artificial Sequence
  HTT spacer sequence CTCN PAM
uguccagugucuugaggacu

SEQ ID NO: 16324 - RNA, 20 nt, Artificial Sequence
  HTT spacer sequence CTCN PAM
agacacuggacaugagcaau

SEQ ID NO: 16325 - RNA, 20 nt, Artificial Sequence
  HTT spacer sequence CTCN PAM
ggguuuugucuguuuuguuu

SEQ ID NO: 16326 - RNA, 20 nt, Artificial Sequence
  HTT spacer sequence CTCN PAM
ggcaggaggguaaacccagu

SEQ ID NO: 16327 - RNA, 20 nt, Artificial Sequence
  HTT spacer sequence CTCN PAM
ugccugagacaaccaaagca

SEQ ID NO: 16328 - RNA, 20 nt, Artificial Sequence
  HTT spacer sequence CTCN PAM
cccucauugugcucaguagu

SEQ ID NO: 16329 - RNA, 20 nt, Artificial Sequence
  HTT spacer sequence CTCN PAM
uugugcucaguaguggaagu

SEQ ID NO: 16330 - RNA, 20 nt, Artificial Sequence
  HTT spacer sequence CTCN PAM
guaguggaagucucacucua

SEQ ID NO: 16331 - RNA, 20 nt, Artificial Sequence
  HTT spacer sequence CTCN PAM
cucuauuacauuagauauua

SEQ ID NO: 16332 - RNA, 20 nt, Artificial Sequence
  HTT spacer sequence CTCN PAM
auuacauuagauauuaguau

SEQ ID NO: 16333 - RNA, 20 nt, Artificial Sequence
  HTT spacer sequence CTCN PAM
gcuacaaauacuaauaucua

SEQ ID NO: 16334 - RNA, 20 nt, Artificial Sequence
  HTT spacer sequence CTCN PAM
ccaaguaccagggaaccagg

SEQ ID NO: 16335 - RNA, 20 nt, Artificial Sequence
  HTT spacer sequence CTCN PAM
ugaaaggccagaaacagcau

SEQ ID NO: 16336 - RNA, 20 nt, Artificial Sequence
  HTT spacer sequence CTCN PAM
ccuuuuccagggcuucaguu

SEQ ID NO: 16337 - RNA, 20 nt, Artificial Sequence
  HTT spacer sequence CTCN PAM
cagcagauacccaauacaug

SEQ ID NO: 16338 - RNA, 20 nt, Artificial Sequence
  HTT spacer sequence CTCN PAM
aaguauauucuaaguguuua

SEQ ID NO: 16339 - RNA, 20 nt, Artificial Sequence
  HTT spacer sequence CTCN PAM
agggccacacauuuuuaaaa

SEQ ID NO: 16340 - RNA, 20 nt, Artificial Sequence
  HTT spacer sequence CTCN PAM
acuaauaagcaauagauucu

SEQ ID NO: 16341 - RNA, 20 nt, Artificial Sequence
  HTT spacer sequence CTCN PAM
acuuguuuaacaaaauaucc

SEQ ID NO: 16342 - RNA, 20 nt, Artificial Sequence
  HTT spacer sequence CTCN PAM
ccacuuguuuaacaaaauau

SEQ ID NO: 16343 - RNA, 20 nt, Artificial Sequence
  HTT spacer sequence CTCN PAM
cuccacuuguuuaacaaaau

SEQ ID NO: 16344 - RNA, 20 nt, Artificial Sequence
  HTT spacer sequence CTCN PAM
cucuccacuuguuuaacaaa

SEQ ID NO: 16345 - RNA, 20 nt, Artificial Sequence
  HTT spacer sequence CTCN PAM
uugaguuagcaucuucuucu

SEQ ID NO: 16346 - RNA, 20 nt, Artificial Sequence
  HTT spacer sequence CTCN PAM
aagagcgccaccauucugaa

SEQ ID NO: 16347 - RNA, 20 nt, Artificial Sequence
  HTT spacer sequence CTCN PAM
aaaaaaaaaaaaaaagaauc

SEQ ID NO: 16348 - RNA, 20 nt, Artificial Sequence
  HTT spacer sequence CTCN PAM
uguugcccagguaacaacuc

SEQ ID NO: 16349 - RNA, 20 nt, Artificial Sequence
  HTT spacer sequence CTCN PAM
agugcaauggcgccaucucg

SEQ ID NO: 16350 - RNA, 20 nt, Artificial Sequence
  HTT spacer sequence CTCN PAM
gcucacuguaaccucugccu

SEQ ID NO: 16351 - RNA, 20 nt, Artificial Sequence
  HTT spacer sequence CTCN PAM
cuguaaccucugccucccug

SEQ ID NO: 16352 - RNA, 20 nt, Artificial Sequence
  HTT spacer sequence CTCN PAM
gccucccugguucaagcgau

SEQ ID NO: 16353 - RNA, 20 nt, Artificial Sequence
  HTT spacer sequence CTCN PAM
cugguucaagcgauucuccu

SEQ ID NO: 16354 - RNA, 20 nt, Artificial Sequence
  HTT spacer sequence CTCN PAM
ugccucagccucucaaguag

SEQ ID NO: 16355 - RNA, 20 nt, Artificial Sequence
  HTT spacer sequence CTCN PAM
gccucucaaguagcugggau

SEQ ID NO: 16356 - RNA, 20 nt, Artificial Sequence
  HTT spacer sequence CTCN PAM
caaguagcugggauuacagg

SEQ ID NO: 16357 - RNA, 20 nt, Artificial Sequence
  HTT spacer sequence CTCN PAM
aguagcugggauuacaggug

SEQ ID NO: 16358 - RNA, 20 nt, Artificial Sequence
  HTT spacer sequence CTCN PAM
accaaaaauacaaaauuagc

SEQ ID NO: 16359 - RNA, 20 nt, Artificial Sequence
  HTT spacer sequence CTCN PAM
ugaccucaagugaugcaccu

SEQ ID NO: 16360 - RNA, 20 nt, Artificial Sequence
  HTT spacer sequence CTCN PAM
agugaugcaccugccucgau

SEQ ID NO: 16361 - RNA, 20 nt, Artificial Sequence
  HTT spacer sequence CTCN PAM
aucucccaaaaugcugggau

SEQ ID NO: 16362 - RNA, 20 nt, Artificial Sequence
  HTT spacer sequence CTCN PAM
caaaaugcugggauuacagg

SEQ ID NO: 16363 - RNA, 20 nt, Artificial Sequence
  HTT spacer sequence CTCN PAM
cgccuguaaucccagcauuu

SEQ ID NO: 16364 - RNA, 20 nt, Artificial Sequence
  HTT spacer sequence CTCN PAM
cagccccuucuugauucuug

SEQ ID NO: 16365 - RNA, 20 nt, Artificial Sequence
  HTT spacer sequence CTCN PAM
uuauagauguugauaaaaau

SEQ ID NO: 16366 - RNA, 20 nt, Artificial Sequence
  HTT spacer sequence CTCN PAM
caagcauuuuuaucaacauc

SEQ ID NO: 16367 - RNA, 20 nt, Artificial Sequence
  HTT spacer sequence CTCN PAM
ucucacaagcauuuuuauca

SEQ ID NO: 16368 - RNA, 20 nt, Artificial Sequence
  HTT spacer sequence CTCN PAM
acagaugcagggcucuuagc

SEQ ID NO: 16369 - RNA, 20 nt, Artificial Sequence
  HTT spacer sequence CTCN PAM
uagcugcuuugcacacuucu

SEQ ID NO: 16370 - RNA, 20 nt, Artificial Sequence
  HTT spacer sequence CTCN PAM
uuaauucaauaaacuguuau

SEQ ID NO: 16371 - RNA, 20 nt, Artificial Sequence
  HTT spacer sequence CTCN PAM
gauuuuccucuacuauuuac

SEQ ID NO: 16372 - RNA, 20 nt, Artificial Sequence
  HTT spacer sequence CTCN PAM
acuauuuacacaauuuaaau

SEQ ID NO: 16373 - RNA, 20 nt, Artificial Sequence
  HTT spacer sequence CTCN PAM
gagucgcuuaaugucucacu

SEQ ID NO: 16374 - RNA, 20 nt, Artificial Sequence
  HTT spacer sequence CTCN PAM
gagaugacccguuauuguac

SEQ ID NO: 16375 - RNA, 20 nt, Artificial Sequence
  HTT spacer sequence CTCN PAM
cuugucuuucuacagugugu

SEQ ID NO: 16376 - RNA, 20 nt, Artificial Sequence
  HTT spacer sequence CTCN PAM
ucaacacacuguagaaagac

SEQ ID NO: 16377 - RNA, 20 nt, Artificial Sequence
  HTT spacer sequence CTCN PAM
acuaaagcaggauuucaggu

SEQ ID NO: 16378 - RNA, 20 nt, Artificial Sequence
  HTT spacer sequence CTCN PAM
uacuuguugaacacaaacag

SEQ ID NO: 16379 - RNA, 20 nt, Artificial Sequence
  HTT spacer sequence CTCN PAM
ucuguuaagacguucgggua

SEQ ID NO: 16380 - RNA, 20 nt, Artificial Sequence
  HTT spacer sequence CTCN PAM
uuaagaggcaggcgcuguug

SEQ ID NO: 16381 - RNA, 20 nt, Artificial Sequence
  HTT spacer sequence CTCN PAM
uaaggaguagcagcguuuug

SEQ ID NO: 16382 - RNA, 20 nt, Artificial Sequence
  HTT spacer sequence CTCN PAM
cagcugauuaugccaacagc

SEQ ID NO: 16383 - RNA, 20 nt, Artificial Sequence
  HTT spacer sequence CTCN PAM
guccaugauugagccaagag

SEQ ID NO: 16384 - RNA, 20 nt, Artificial Sequence
  HTT spacer sequence CTCN PAM
aucauggacugagccaaaaa

SEQ ID NO: 16385 - RNA, 20 nt, Artificial Sequence
  HTT spacer sequence CTCN PAM
uggcucaaucauggacugag

SEQ ID NO: 16386 - RNA, 20 nt, Artificial Sequence
  HTT spacer sequence CTCN PAM
ccaggaggacgaggucuguc

SEQ ID NO: 16387 - RNA, 20 nt, Artificial Sequence
  HTT spacer sequence CTCN PAM
uggggagugaagggaaggau

SEQ ID NO: 16388 - RNA, 20 nt, Artificial Sequence
  HTT spacer sequence CTCN PAM
uccuccuggggagugaaggg

SEQ ID NO: 16389 - RNA, 20 nt, Artificial Sequence
  HTT spacer sequence CTCN PAM
acagugacagaccucguccu

SEQ ID NO: 16390 - RNA, 20 nt, Artificial Sequence
  HTT spacer sequence CTCN PAM
gcccuccacagugacagacc

SEQ ID NO: 16391 - RNA, 20 nt, Artificial Sequence
  HTT spacer sequence CTCN PAM
ucugcaaccucgcuaguuaa

SEQ ID NO: 16392 - RNA, 20 nt, Artificial Sequence
  HTT spacer sequence CTCN PAM
gcaaccucgcuaguuaacuu

SEQ ID NO: 16393 - RNA, 20 nt, Artificial Sequence
  HTT spacer sequence CTCN PAM
cuaguuaacuuccagucccu

SEQ ID NO: 16394 - RNA, 20 nt, Artificial Sequence
  HTT spacer sequence CTCN PAM
gaguuucuguuuagaaugcu

SEQ ID NO: 16395 - RNA, 20 nt, Artificial Sequence
  HTT spacer sequence CTCN PAM
gagggacuggaaguuaacua

SEQ ID NO: 16396 - RNA, 20 nt, Artificial Sequence
  HTT spacer sequence CTCN PAM
aucucauuuagaauugcaag

SEQ ID NO: 16397 - RNA, 20 nt, Artificial Sequence
  HTT spacer sequence CTCN PAM
uuuagaauugcaaggaaacc

SEQ ID NO: 16398 - RNA, 20 nt, Artificial Sequence
  HTT spacer sequence CTCN PAM
ugagguauuaauagugauuc

SEQ ID NO: 16399 - RNA, 20 nt, Artificial Sequence
  HTT spacer sequence CTCN PAM
ugagauauuguaugaagugc

SEQ ID NO: 16400 - RNA, 20 nt, Artificial Sequence
  HTT spacer sequence CTCN PAM
cagcgugaaauucuuccugu

SEQ ID NO: 16401 - RNA, 20 nt, Artificial Sequence
  HTT spacer sequence CTCN PAM
cacacaaauaucaaauccau

SEQ ID NO: 16402 - RNA, 20 nt, Artificial Sequence
  HTT spacer sequence CTCN PAM
uuuuuuucacuguaguuguu

SEQ ID NO: 16403 - RNA, 20 nt, Artificial Sequence
  HTT spacer sequence CTCN PAM
cuuuggcacaaacuuggccu

SEQ ID NO: 16404 - RNA, 20 nt, Artificial Sequence
  HTT spacer sequence CTCN PAM
uuggcacaaacuuggccucc

SEQ ID NO: 16405 - RNA, 20 nt, Artificial Sequence
  HTT spacer sequence CTCN PAM
caguuugauggcuuaucuuc

SEQ ID NO: 16406 - RNA, 20 nt, Artificial Sequence
  HTT spacer sequence CTCN PAM
gccuugugacuugcuggggu

SEQ ID NO: 16407 - RNA, 20 nt, Artificial Sequence
  HTT spacer sequence CTCN PAM
uccagugugaggccaggcuu

SEQ ID NO: 16408 - RNA, 20 nt, Artificial Sequence
  HTT spacer sequence CTCN PAM
agugugaggccaggcuugua

SEQ ID NO: 16409 - RNA, 20 nt, Artificial Sequence
  HTT spacer sequence CTCN PAM
cacuggaggagccaaggcgc

SEQ ID NO: 16410 - RNA, 20 nt, Artificial Sequence
  HTT spacer sequence CTCN PAM
cugacgccagccugaggaac

SEQ ID NO: 16411 - RNA, 20 nt, Artificial Sequence
  HTT spacer sequence CTCN PAM
ggcuggcgucagcgagggcc

SEQ ID NO: 16412 - RNA, 20 nt, Artificial Sequence
  HTT spacer sequence CTCN PAM
gccugcaccauguuccucag

SEQ ID NO: 16413 - RNA, 20 nt, Artificial Sequence
  HTT spacer sequence CTCN PAM
ugcuccgccugcaccauguu

SEQ ID NO: 16414 - RNA, 20 nt, Artificial Sequence
  HTT spacer sequence CTCN PAM
ggguaacaguuguggcaaga

SEQ ID NO: 16415 - RNA, 20 nt, Artificial Sequence
  HTT spacer sequence CTCN PAM
uucgugcuuccaccaacgac

SEQ ID NO: 16416 - RNA, 20 nt, Artificial Sequence
  HTT spacer sequence CTCN PAM
gaauacagcagacuauuaga

SEQ ID NO: 16417 - RNA, 20 nt, Artificial Sequence
  HTT spacer sequence CTCN PAM
aggagauauauaugguugau

SEQ ID NO: 16418 - RNA, 20 nt, Artificial Sequence
  HTT spacer sequence CTCN PAM
uagaguucucugaauacagc

SEQ ID NO: 16419 - RNA, 20 nt, Artificial Sequence
  HTT spacer sequence CTCN PAM
cuggccacacacuucuugga

SEQ ID NO: 16420 - RNA, 20 nt, Artificial Sequence
  HTT spacer sequence CTCN PAM
cucacuggccacacacuucu

SEQ ID NO: 16421 - RNA, 20 nt, Artificial Sequence
  HTT spacer sequence CTCN PAM
gagguggggguagaggagga

SEQ ID NO: 16422 - RNA, 20 nt, Artificial Sequence
  HTT spacer sequence CTCN PAM
gagauguguaagucccaagc

SEQ ID NO: 16423 - RNA, 20 nt, Artificial Sequence
  HTT spacer sequence CTCN PAM
acccccaccucugagaugug

SEQ ID NO: 16424 - RNA, 20 nt, Artificial Sequence
  HTT spacer sequence CTCN PAM
ucuacccccaccucugagau

SEQ ID NO: 16425 - RNA, 20 nt, Artificial Sequence
  HTT spacer sequence CTCN PAM
uccucuacccccaccucuga

SEQ ID NO: 16426 - RNA, 20 nt, Artificial Sequence
  HTT spacer sequence CTCN PAM
guguuccuccuccucuaccc

SEQ ID NO: 16427 - RNA, 20 nt, Artificial Sequence
  HTT spacer sequence CTCN PAM
gcccacucaguguuccuccu

SEQ ID NO: 16428 - RNA, 20 nt, Artificial Sequence
  HTT spacer sequence CTCN PAM
cauugccaaagugugucagc

SEQ ID NO: 16429 - RNA, 20 nt, Artificial Sequence
  HTT spacer sequence CTCN PAM
uugccaaagugugucagcaa

SEQ ID NO: 16430 - RNA, 20 nt, Artificial Sequence
  HTT spacer sequence CTCN PAM
acagguccugugcuuugaau

SEQ ID NO: 16431 - RNA, 20 nt, Artificial Sequence
  HTT spacer sequence CTCN PAM
gaacaccagcacuacugugc

SEQ ID NO: 16432 - RNA, 20 nt, Artificial Sequence
  HTT spacer sequence CTCN PAM
uuucacuuaaauuuguuuuu

SEQ ID NO: 16433 - RNA, 20 nt, Artificial Sequence
  HTT spacer sequence CTCN PAM
aaaaaaaaaaaaacaaauuu

SEQ ID NO: 16434 - RNA, 20 nt, Artificial Sequence
  HTT spacer sequence CTCN PAM
gucucaaaaaaaaaaaaaac

SEQ ID NO: 16435 - RNA, 20 nt, Artificial Sequence
  HTT spacer sequence CTCN PAM
gucgcccaggcuggagugca

SEQ ID NO: 16436 - RNA, 20 nt, Artificial Sequence
  HTT spacer sequence CTCN PAM
agccugggcgacagagcaag

SEQ ID NO: 16437 - RNA, 20 nt, Artificial Sequence
  HTT spacer sequence CTCN PAM
gcucacugcaagcucugcau

SEQ ID NO: 16438 - RNA, 20 nt, Artificial Sequence
  HTT spacer sequence CTCN PAM
cugcaagcucugcauccugg

SEQ ID NO: 16439 - RNA, 20 nt, Artificial Sequence
  HTT spacer sequence CTCN PAM
gcauccuggguucaugccau

SEQ ID NO: 16440 - RNA, 20 nt, Artificial Sequence
  HTT spacer sequence CTCN PAM
ugccucagccucccgaguag

SEQ ID NO: 16441 - RNA, 20 nt, Artificial Sequence
  HTT spacer sequence CTCN PAM
gccucccgaguagcugggac

SEQ ID NO: 16442 - RNA, 20 nt, Artificial Sequence
  HTT spacer sequence CTCN PAM
cgaguagcugggacuacagg

SEQ ID NO: 16443 - RNA, 20 nt, Artificial Sequence
  HTT spacer sequence CTCN PAM
ggaggcugaggcaggagaau

SEQ ID NO: 16444 - RNA, 20 nt, Artificial Sequence
  HTT spacer sequence CTCN PAM
acuaaaaauacaaaaaaaag

SEQ ID NO: 16445 - RNA, 20 nt, Artificial Sequence
  HTT spacer sequence CTCN PAM
aucuccugaccucgugaucu

SEQ ID NO: 16446 - RNA, 20 nt, Artificial Sequence
  HTT spacer sequence CTCN PAM
ugaccucgugaucugcccgu

SEQ ID NO: 16447 - RNA, 20 nt, Artificial Sequence
  HTT spacer sequence CTCN PAM
ugaucugcccgucccggccu

SEQ ID NO: 16448 - RNA, 20 nt, Artificial Sequence
  HTT spacer sequence CTCN PAM
caaagugcugggauuacagg

SEQ ID NO: 16449 - RNA, 20 nt, Artificial Sequence
  HTT spacer sequence CTCN PAM
cgccuguaaucccagcacuu

SEQ ID NO: 16450 - RNA, 20 nt, Artificial Sequence
  HTT spacer sequence CTCN PAM
uuucacuuaaauuuauguuu

SEQ ID NO: 16451 - RNA, 20 nt, Artificial Sequence
  HTT spacer sequence CTCN PAM
aauaccuguucauacuuaag

SEQ ID NO: 16452 - RNA, 20 nt, Artificial Sequence
  HTT spacer sequence CTCN PAM
aguguuuuaauuguagcuau

SEQ ID NO: 16453 - RNA, 20 nt, Artificial Sequence
  HTT spacer sequence CTCN PAM
ugacucuaguguuuuaauug

SEQ ID NO: 16454 - RNA, 20 nt, Artificial Sequence
  HTT spacer sequence CTCN PAM
aauauauaguaaguacauca

SEQ ID NO: 16455 - RNA, 20 nt, Artificial Sequence
  HTT spacer sequence CTCN PAM
ugaaacuccaauauauagua

SEQ ID NO: 16456 - RNA, 20 nt, Artificial Sequence
  HTT spacer sequence CTCN PAM
caugcuuauuaauaccccaa

SEQ ID NO: 16457 - RNA, 20 nt, Artificial Sequence
  HTT spacer sequence CTCN PAM
aaaaaaaucauguaauuucu

SEQ ID NO: 16458 - RNA, 20 nt, Artificial Sequence
  HTT spacer sequence CTCN PAM
caaaucucacuuaagacugg

SEQ ID NO: 16459 - RNA, 20 nt, Artificial Sequence
  HTT spacer sequence CTCN PAM
aaucucacuuaagacugggc

SEQ ID NO: 16460 - RNA, 20 nt, Artificial Sequence
  HTT spacer sequence CTCN PAM
cuuaagacugggcugaguag

SEQ ID NO: 16461 - RNA, 20 nt, Artificial Sequence
  HTT spacer sequence CTCN PAM
gcccagucuuaagugagauu

SEQ ID NO: 16462 - RNA, 20 nt, Artificial Sequence
  HTT spacer sequence CTCN PAM
gacuugaguagccuucugcg

SEQ ID NO: 16463 - RNA, 20 nt, Artificial Sequence
  HTT spacer sequence CTCN PAM
agucugagcuuuuuucugcu

SEQ ID NO: 16464 - RNA, 20 nt, Artificial Sequence
  HTT spacer sequence CTCN PAM
cagaaggcuacucaagucug

SEQ ID NO: 16465 - RNA, 20 nt, Artificial Sequence
  HTT spacer sequence CTCN PAM
cucgcagaaggcuacucaag

SEQ ID NO: 16466 - RNA, 20 nt, Artificial Sequence
  HTT spacer sequence CTCN PAM
ucacucgcagaaggcuacuc

SEQ ID NO: 16467 - RNA, 20 nt, Artificial Sequence
  HTT spacer sequence CTCN PAM
aaauagagugucauuaucug

SEQ ID NO: 16468 - RNA, 20 nt, Artificial Sequence
  HTT spacer sequence CTCN PAM
auuuagaguuuacagcugcc

SEQ ID NO: 16469 - RNA, 20 nt, Artificial Sequence
  HTT spacer sequence CTCN PAM
ucagauaaugacacucuauu

SEQ ID NO: 16470 - RNA, 20 nt, Artificial Sequence
  HTT spacer sequence CTCN PAM
guguggcagcaucgcccucu

SEQ ID NO: 16471 - RNA, 20 nt, Artificial Sequence
  HTT spacer sequence CTCN PAM
aucugacacguucugaucgu

SEQ ID NO: 16472 - RNA, 20 nt, Artificial Sequence
  HTT spacer sequence CTCN PAM
aaccaauuucacauucacac

SEQ ID NO: 16473 - RNA, 20 nt, Artificial Sequence
  HTT spacer sequence CTCN PAM
ugcucaaaccaauuucacau

SEQ ID NO: 16474 - RNA, 20 nt, Artificial Sequence
  HTT spacer sequence CTCN PAM
gauauacuccugcucaaacc

SEQ ID NO: 16475 - RNA, 20 nt, Artificial Sequence
  HTT spacer sequence CTCN PAM
gcacucagauauacuccugc

SEQ ID NO: 16476 - RNA, 20 nt, Artificial Sequence
  HTT spacer sequence CTCN PAM
ucugcacucagauauacucc

SEQ ID NO: 16477 - RNA, 20 nt, Artificial Sequence
  HTT spacer sequence CTCN PAM
uucucugcuucccuuuuauu

SEQ ID NO: 16478 - RNA, 20 nt, Artificial Sequence
  HTT spacer sequence CTCN PAM
gcuucccuuuuauucccauu

SEQ ID NO: 16479 - RNA, 20 nt, Artificial Sequence
  HTT spacer sequence CTCN PAM
agaaagugucuacccaguug

SEQ ID NO: 16480 - RNA, 20 nt, Artificial Sequence
  HTT spacer sequence CTCN PAM
cgagugucacaaagaaccgu

SEQ ID NO: 16481 - RNA, 20 nt, Artificial Sequence
  HTT spacer sequence CTCN PAM
ugagguuugucuucaacugg

SEQ ID NO: 16482 - RNA, 20 nt, Artificial Sequence
  HTT spacer sequence CTCN PAM
ggcgugucagugcuagagag

SEQ ID NO: 16483 - RNA, 20 nt, Artificial Sequence
  HTT spacer sequence CTCN PAM
agcacugacacgccugaguu

SEQ ID NO: 16484 - RNA, 20 nt, Artificial Sequence
  HTT spacer sequence CTCN PAM
cuagcacugacacgccugag

SEQ ID NO: 16485 - RNA, 20 nt, Artificial Sequence
  HTT spacer sequence CTCN PAM
aguuuccucucuagcacuga

SEQ ID NO: 16486 - RNA, 20 nt, Artificial Sequence
  HTT spacer sequence CTCN PAM
gcuccaguuuccucucuagc

SEQ ID NO: 16487 - RNA, 20 nt, Artificial Sequence
  HTT spacer sequence CTCN PAM
uguuauaaaagcuuuaaaac

SEQ ID NO: 16488 - RNA, 20 nt, Artificial Sequence
  HTT spacer sequence CTCN PAM
ucaguugcugcugcuuaucu

SEQ ID NO: 16489 - RNA, 20 nt, Artificial Sequence
  HTT spacer sequence CTCN PAM
gcaagucagcauccuugccc

SEQ ID NO: 16490 - RNA, 20 nt, Artificial Sequence
  HTT spacer sequence CTCN PAM
cuggacucaaggcuaaccug

SEQ ID NO: 16491 - RNA, 20 nt, Artificial Sequence
  HTT spacer sequence CTCN PAM
aggcuaaccugggguuggcu

SEQ ID NO: 16492 - RNA, 20 nt, Artificial Sequence
  HTT spacer sequence CTCN PAM
ccuccaaaauaaguuugaau

SEQ ID NO: 16493 - RNA, 20 nt, Artificial Sequence
  HTT spacer sequence CTCN PAM
aaaauaaguuugaauuuaaa

SEQ ID NO: 16494 - RNA, 20 nt, Artificial Sequence
  HTT spacer sequence CTCN PAM
caauuuaaauucaaacuuau

SEQ ID NO: 16495 - RNA, 20 nt, Artificial Sequence
  HTT spacer sequence CTCN PAM
agauuuugcaaaaauguucc

SEQ ID NO: 16496 - RNA, 20 nt, Artificial Sequence
  HTT spacer sequence CTCN PAM
uuaaaaaggaauggaauuua

SEQ ID NO: 16497 - RNA, 20 nt, Artificial Sequence
  HTT spacer sequence CTCN PAM
guuacuguccugcuaaauuc

SEQ ID NO: 16498 - RNA, 20 nt, Artificial Sequence
  HTT spacer sequence CTCN PAM
uggaguccaugugggagcug

SEQ ID NO: 16499 - RNA, 20 nt, Artificial Sequence
  HTT spacer sequence CTCN PAM
aggagcacgggucucaguua

SEQ ID NO: 16500 - RNA, 20 nt, Artificial Sequence
  HTT spacer sequence CTCN PAM
cacauggacuccaggagcac

SEQ ID NO: 16501 - RNA, 20 nt, Artificial Sequence
  HTT spacer sequence CTCN PAM
gcacaagcauuugcacgcuu

SEQ ID NO: 16502 - RNA, 20 nt, Artificial Sequence
  HTT spacer sequence CTCN PAM
ugacugcauuaccuuccucc

SEQ ID NO: 16503 - RNA, 20 nt, Artificial Sequence
  HTT spacer sequence CTCN PAM
uauaguugcugugggcacca

SEQ ID NO: 16504 - RNA, 20 nt, Artificial Sequence
  HTT spacer sequence CTCN PAM
agauucgucccaguuaaauc

SEQ ID NO: 16505 - RNA, 20 nt, Artificial Sequence
  HTT spacer sequence CTCN PAM
aaaaugacaguuaaauuuug

SEQ ID NO: 16506 - RNA, 20 nt, Artificial Sequence
  HTT spacer sequence CTCN PAM
caaauauuccuaccccacau

SEQ ID NO: 16507 - RNA, 20 nt, Artificial Sequence
  HTT spacer sequence CTCN PAM
auuuccuucuagacguaaau

SEQ ID NO: 16508 - RNA, 20 nt, Artificial Sequence
  HTT spacer sequence CTCN PAM
ccugaaagggucuguuuccc

SEQ ID NO: 16509 - RNA, 20 nt, Artificial Sequence
  HTT spacer sequence CTCN PAM
uagggaaacagacccuuuca

SEQ ID NO: 16510 - RNA, 20 nt, Artificial Sequence
  HTT spacer sequence CTCN PAM
guucuccuagggaaacagac

SEQ ID NO: 16511 - RNA, 20 nt, Artificial Sequence
  HTT spacer sequence CTCN PAM
gucaacacugauuuuccaca

SEQ ID NO: 16512 - RNA, 20 nt, Artificial Sequence
  HTT spacer sequence CTCN PAM
aaaaaaaaacaaaaaaaaac

SEQ ID NO: 16513 - RNA, 20 nt, Artificial Sequence
  HTT spacer sequence CTCN PAM
aucucaaaaaaaaaacaaaa

SEQ ID NO: 16514 - RNA, 20 nt, Artificial Sequence
  HTT spacer sequence CTCN PAM
cucugucacccaggcuggag

SEQ ID NO: 16515 - RNA, 20 nt, Artificial Sequence
  HTT spacer sequence CTCN PAM
gucacccaggcuggagugca

SEQ ID NO: 16516 - RNA, 20 nt, Artificial Sequence
  HTT spacer sequence CTCN PAM
agccugggugacagagcgag

SEQ ID NO: 16517 - RNA, 20 nt, Artificial Sequence
  HTT spacer sequence CTCN PAM
gcucacugccagcuccgccu

SEQ ID NO: 16518 - RNA, 20 nt, Artificial Sequence
  HTT spacer sequence CTCN PAM
cugccagcuccgccucagag

SEQ ID NO: 16519 - RNA, 20 nt, Artificial Sequence
  HTT spacer sequence CTCN PAM
gccucagagguucacgccau

SEQ ID NO: 16520 - RNA, 20 nt, Artificial Sequence
  HTT spacer sequence CTCN PAM
gagguucacgccauucuccu

SEQ ID NO: 16521 - RNA, 20 nt, Artificial Sequence
  HTT spacer sequence CTCN PAM
gaggcggagcuggcagugag

SEQ ID NO: 16522 - RNA, 20 nt, Artificial Sequence
  HTT spacer sequence CTCN PAM
ugccucagccucccgaguag

SEQ ID NO: 16523 - RNA, 20 nt, Artificial Sequence
  HTT spacer sequence CTCN PAM
gccucccgaguagcugggac

SEQ ID NO: 16524 - RNA, 20 nt, Artificial Sequence
  HTT spacer sequence CTCN PAM
cgaguagcugggacuacagg

SEQ ID NO: 16525 - RNA, 20 nt, Artificial Sequence
  HTT spacer sequence CTCN PAM
ggaggcugaggcaggagaau

SEQ ID NO: 16526 - RNA, 20 nt, Artificial Sequence
  HTT spacer sequence CTCN PAM
acuaaaaauacaaaaaauua

SEQ ID NO: 16527 - RNA, 20 nt, Artificial Sequence
  HTT spacer sequence CTCN PAM
ucucuacuaaaaauacaaaa

SEQ ID NO: 16528 - RNA, 20 nt, Artificial Sequence
  HTT spacer sequence CTCN PAM
aucuccugaccucgugaucu

SEQ ID NO: 16529 - RNA, 20 nt, Artificial Sequence
  HTT spacer sequence CTCN PAM
ugaccucgugaucugcccgc

SEQ ID NO: 16530 - RNA, 20 nt, Artificial Sequence
  HTT spacer sequence CTCN PAM
ugaucugcccgccucggccu

SEQ ID NO: 16531 - RNA, 20 nt, Artificial Sequence
  HTT spacer sequence CTCN PAM
gccucccaaagugcugggau

SEQ ID NO: 16532 - RNA, 20 nt, Artificial Sequence
  HTT spacer sequence CTCN PAM
caaagugcugggaugacagg

SEQ ID NO: 16533 - RNA, 20 nt, Artificial Sequence
  HTT spacer sequence CTCN PAM
cgccugucaucccagcacuu

SEQ ID NO: 16534 - RNA, 20 nt, Artificial Sequence
  HTT spacer sequence CTCN PAM
uucauuaaaagcagacccca

SEQ ID NO: 16535 - RNA, 20 nt, Artificial Sequence
  HTT spacer sequence CTCN PAM
ccucaggaaauagucauugg

SEQ ID NO: 16536 - RNA, 20 nt, Artificial Sequence
  HTT spacer sequence CTCN PAM
ucaggaaauagucauuggga

SEQ ID NO: 16537 - RNA, 20 nt, Artificial Sequence
  HTT spacer sequence CTCN PAM
ggaaauagucauugggaacu

SEQ ID NO: 16538 - RNA, 20 nt, Artificial Sequence
  HTT spacer sequence CTCN PAM
uagugucaaaggaaaggaaa

SEQ ID NO: 16539 - RNA, 20 nt, Artificial Sequence
  HTT spacer sequence CTCN PAM
ccagucagccuccuaguguc

SEQ ID NO: 16540 - RNA, 20 nt, Artificial Sequence
  HTT spacer sequence CTCN PAM
gccccugcugcccacagcca

SEQ ID NO: 16541 - RNA, 20 nt, Artificial Sequence
  HTT spacer sequence CTCN PAM
cagccccugcugcccacagc

SEQ ID NO: 16542 - RNA, 20 nt, Artificial Sequence
  HTT spacer sequence CTCN PAM
ucucagccccugcugcccac

SEQ ID NO: 16543 - RNA, 20 nt, Artificial Sequence
  HTT spacer sequence CTCN PAM
caggggggcacggguacccc

SEQ ID NO: 16544 - RNA, 20 nt, Artificial Sequence
  HTT spacer sequence CTCN PAM
ggggggcacggguaccccaa

SEQ ID NO: 16545 - RNA, 20 nt, Artificial Sequence
  HTT spacer sequence CTCN PAM
ggcuucccuugggguacccg

SEQ ID NO: 16546 - RNA, 20 nt, Artificial Sequence
  HTT spacer sequence CTCN PAM
gguuucauguuuguucugau

SEQ ID NO: 16547 - RNA, 20 nt, Artificial Sequence
  HTT spacer sequence CTCN PAM
caguucuuaagauucaguac

SEQ ID NO: 16548 - RNA, 20 nt, Artificial Sequence
  HTT spacer sequence CTCN PAM
augcugauaaagauuuauug

SEQ ID NO: 16549 - RNA, 20 nt, Artificial Sequence
  HTT spacer sequence CTCN PAM
auaaaucuuuaucagcauag

SEQ ID NO: 16550 - RNA, 20 nt, Artificial Sequence
  HTT spacer sequence CTCN PAM
ugcuguauguuugcauucug

SEQ ID NO: 16551 - RNA, 20 nt, Artificial Sequence
  HTT spacer sequence CTCN PAM
gggcagaaugcaaacauaca

SEQ ID NO: 16552 - RNA, 20 nt, Artificial Sequence
  HTT spacer sequence CTCN PAM
gagaaaaccaggccauaugc

SEQ ID NO: 16553 - RNA, 20 nt, Artificial Sequence
  HTT spacer sequence CTCN PAM
gagccucugggcagaaugca

SEQ ID NO: 16554 - RNA, 20 nt, Artificial Sequence
  HTT spacer sequence CTCN PAM
augcuuuauccauggaagcu

SEQ ID NO: 16555 - RNA, 20 nt, Artificial Sequence
  HTT spacer sequence CTCN PAM
ccgucagguugggaaagcug

SEQ ID NO: 16556 - RNA, 20 nt, Artificial Sequence
  HTT spacer sequence CTCN PAM
caugcagcccuuacgugucg

SEQ ID NO: 16557 - RNA, 20 nt, Artificial Sequence
  HTT spacer sequence CTCN PAM
cagaugguugggggacgaag

SEQ ID NO: 16558 - RNA, 20 nt, Artificial Sequence
  HTT spacer sequence CTCN PAM
gaugguugggggacgaaggu

SEQ ID NO: 16559 - RNA, 20 nt, Artificial Sequence
  HTT spacer sequence CTCN PAM
uuuggguaucuuauuacuaa

SEQ ID NO: 16560 - RNA, 20 nt, Artificial Sequence
  HTT spacer sequence CTCN PAM
ucuguucacguuaauggcag

SEQ ID NO: 16561 - RNA, 20 nt, Artificial Sequence
  HTT spacer sequence CTCN PAM
uggaauuuauuauuuguuuu

SEQ ID NO: 16562 - RNA, 20 nt, Artificial Sequence
  HTT spacer sequence CTCN PAM
uuggaaaaacaaauaauaaa

SEQ ID NO: 16563 - RNA, 20 nt, Artificial Sequence
  HTT spacer sequence CTCN PAM
ggguauaguaaaguuguuga

SEQ ID NO: 16564 - RNA, 20 nt, Artificial Sequence
  HTT spacer sequence CTCN PAM
acaacuuuacuauacccuga

SEQ ID NO: 16565 - RNA, 20 nt, Artificial Sequence
  HTT spacer sequence CTCN PAM
auucugaaaucagccuagau

SEQ ID NO: 16566 - RNA, 20 nt, Artificial Sequence
  HTT spacer sequence CTCN PAM
ugcuuaucugcauaaauuuu

SEQ ID NO: 16567 - RNA, 20 nt, Artificial Sequence
  HTT spacer sequence CTCN PAM
uaaaaauuaauguauaucuc

SEQ ID NO: 16568 - RNA, 20 nt, Artificial Sequence
  HTT spacer sequence CTCN PAM
agacuuguuuggaaguaguu

SEQ ID NO: 16569 - RNA, 20 nt, Artificial Sequence
  HTT spacer sequence CTCN PAM
accacaagauuucauuccac

SEQ ID NO: 16570 - RNA, 20 nt, Artificial Sequence
  HTT spacer sequence CTCN PAM
aagaagauuuaaaaacuagu

SEQ ID NO: 16571 - RNA, 20 nt, Artificial Sequence
  HTT spacer sequence CTCN PAM
gcagcuuuuucuugcuagau

SEQ ID NO: 16572 - RNA, 20 nt, Artificial Sequence
  HTT spacer sequence CTCN PAM
acaucuagcaagaaaaagcu

SEQ ID NO: 16573 - RNA, 20 nt, Artificial Sequence
  HTT spacer sequence CTCN PAM
acuguguuuuggggcaaguu

SEQ ID NO: 16574 - RNA, 20 nt, Artificial Sequence
  HTT spacer sequence CTCN PAM
uuugaguuucaauuucuuca

SEQ ID NO: 16575 - RNA, 20 nt, Artificial Sequence
  HTT spacer sequence CTCN PAM
aaagagaaacaguaacuugc

SEQ ID NO: 16576 - RNA, 20 nt, Artificial Sequence
  HTT spacer sequence CTCN PAM
ugaagaaauugaaacucaaa

SEQ ID NO: 16577 - RNA, 20 nt, Artificial Sequence
  HTT spacer sequence CTCN PAM
uugcucuugaagaaauugaa

SEQ ID NO: 16578 - RNA, 20 nt, Artificial Sequence
  HTT spacer sequence CTCN PAM
gccucuuugcucuugaagaa

SEQ ID NO: 16579 - RNA, 20 nt, Artificial Sequence
  HTT spacer sequence CTCN PAM
ucugccucuuugcucuugaa

SEQ ID NO: 16580 - RNA, 20 nt, Artificial Sequence
  HTT spacer sequence CTCN PAM
ccucugccucuuugcucuug

SEQ ID NO: 16581 - RNA, 20 nt, Artificial Sequence
  HTT spacer sequence CTCN PAM
gaaccuuuacacaugucccu

SEQ ID NO: 16582 - RNA, 20 nt, Artificial Sequence
  HTT spacer sequence CTCN PAM
gcgcgagggcacagauggga

SEQ ID NO: 16583 - RNA, 20 nt, Artificial Sequence
  HTT spacer sequence CTCN PAM
cgcagagcagggacaugugu

SEQ ID NO: 16584 - RNA, 20 nt, Artificial Sequence
  HTT spacer sequence CTCN PAM
aaccccaccccugccacagu

SEQ ID NO: 16585 - RNA, 20 nt, Artificial Sequence
  HTT spacer sequence CTCN PAM
gauucccuaaaaacaaaaac

SEQ ID NO: 16586 - RNA, 20 nt, Artificial Sequence
  HTT spacer sequence CTCN PAM
gugauggcaucauggccagu

SEQ ID NO: 16587 - RNA, 20 nt, Artificial Sequence
  HTT spacer sequence CTCN PAM
ggcucugcaugugugucugu

SEQ ID NO: 16588 - RNA, 20 nt, Artificial Sequence
  HTT spacer sequence CTCN PAM
gcaugugugucuguguaugu

SEQ ID NO: 16589 - RNA, 20 nt, Artificial Sequence
  HTT spacer sequence CTCN PAM
aaccaguaccuucacauaca

SEQ ID NO: 16590 - RNA, 20 nt, Artificial Sequence
  HTT spacer sequence CTCN PAM
uuugaaacgucucuaaccag

SEQ ID NO: 16591 - RNA, 20 nt, Artificial Sequence
  HTT spacer sequence CTCN PAM
ucucuuuugaaacgucucua

SEQ ID NO: 16592 - RNA, 20 nt, Artificial Sequence
  HTT spacer sequence CTCN PAM
cuucucuuuugaaacgucuc

SEQ ID NO: 16593 - RNA, 20 nt, Artificial Sequence
  HTT spacer sequence CTCN PAM
cagcaauuuguaaucuucuc

SEQ ID NO: 16594 - RNA, 20 nt, Artificial Sequence
  HTT spacer sequence CTCN PAM
gcaauuuguaaucuucucag

SEQ ID NO: 16595 - RNA, 20 nt, Artificial Sequence
  HTT spacer sequence CTCN PAM
gggaaaaaaauucaagaaac

SEQ ID NO: 16596 - RNA, 20 nt, Artificial Sequence
  HTT spacer sequence CTCN PAM
cauccagugguauuggagau

SEQ ID NO: 16597 - RNA, 20 nt, Artificial Sequence
  HTT spacer sequence CTCN PAM
uccagugguauuggagauau

SEQ ID NO: 16598 - RNA, 20 nt, Artificial Sequence
  HTT spacer sequence CTCN PAM
aauaccacuggaugagagau

SEQ ID NO: 16599 - RNA, 20 nt, Artificial Sequence
  HTT spacer sequence CTCN PAM
agcaaaaucaucaggcaaaa

SEQ ID NO: 16600 - RNA, 20 nt, Artificial Sequence
  HTT spacer sequence CTCN PAM
uggguuccuuauuuaagcuc

SEQ ID NO: 16601 - RNA, 20 nt, Artificial Sequence
  HTT spacer sequence CTCN PAM
uuccacaggcugggggcuug

SEQ ID NO: 16602 - RNA, 20 nt, Artificial Sequence
  HTT spacer sequence CTCN PAM
uucauaaaaccacacuagcu

SEQ ID NO: 16603 - RNA, 20 nt, Artificial Sequence
  HTT spacer sequence CTCN PAM
aagaaagauuugcaacucau

SEQ ID NO: 16604 - RNA, 20 nt, Artificial Sequence
  HTT spacer sequence CTCN PAM
cugacuccuuugcuggaauc

SEQ ID NO: 16605 - RNA, 20 nt, Artificial Sequence
  HTT spacer sequence CTCN PAM
uuugcuggaaucuguaggcu

SEQ ID NO: 16606 - RNA, 20 nt, Artificial Sequence
  HTT spacer sequence CTCN PAM
cagaugugagaauggcacua

SEQ ID NO: 16607 - RNA, 20 nt, Artificial Sequence
  HTT spacer sequence CTCN PAM
caucugggaguuugcaaggg

SEQ ID NO: 16608 - RNA, 20 nt, Artificial Sequence
  HTT spacer sequence CTCN PAM
aaguaguagugccauucuca

SEQ ID NO: 16609 - RNA, 20 nt, Artificial Sequence
  HTT spacer sequence CTCN PAM
gcgugugugcagaagagcau

SEQ ID NO: 16610 - RNA, 20 nt, Artificial Sequence
  HTT spacer sequence CTCN PAM
ucugcacacacgcugagucg

SEQ ID NO: 16611 - RNA, 20 nt, Artificial Sequence
  HTT spacer sequence CTCN PAM
caacacagcccgguugaugc

SEQ ID NO: 16612 - RNA, 20 nt, Artificial Sequence
  HTT spacer sequence CTCN PAM
caguguuuacauagcuaagc

SEQ ID NO: 16613 - RNA, 20 nt, Artificial Sequence
  HTT spacer sequence CTCN PAM
guguuuacauagcuaagcca

SEQ ID NO: 16614 - RNA, 20 nt, Artificial Sequence
  HTT spacer sequence CTCN PAM
caagggcuucagauucacac

SEQ ID NO: 16615 - RNA, 20 nt, Artificial Sequence
  HTT spacer sequence CTCN PAM
aaguccaggaaaccaaacac

SEQ ID NO: 16616 - RNA, 20 nt, Artificial Sequence
  HTT spacer sequence CTCN PAM
cagaugaccaagcuucccag

SEQ ID NO: 16617 - RNA, 20 nt, Artificial Sequence
  HTT spacer sequence CTCN PAM
cacagaugaccaagcuuccc

SEQ ID NO: 16618 - RNA, 20 nt, Artificial Sequence
  HTT spacer sequence CTCN PAM
gacccucucacagaugacca

SEQ ID NO: 16619 - RNA, 20 nt, Artificial Sequence
  HTT spacer sequence CTCN PAM
cugacccucucacagaugac

SEQ ID NO: 16620 - RNA, 20 nt, Artificial Sequence
  HTT spacer sequence CTCN PAM
cugacccuucgguggcaugc

SEQ ID NO: 16621 - RNA, 20 nt, Artificial Sequence
  HTT spacer sequence CTCN PAM
gggccggagagaguaugugu

SEQ ID NO: 16622 - RNA, 20 nt, Artificial Sequence
  HTT spacer sequence CTCN PAM
ggcccugagacaugcacaca

SEQ ID NO: 16623 - RNA, 20 nt, Artificial Sequence
  HTT spacer sequence CTCN PAM
ccggcccugagacaugcaca

SEQ ID NO: 16624 - RNA, 20 nt, Artificial Sequence
  HTT spacer sequence CTCN PAM
cuccggcccugagacaugca

SEQ ID NO: 16625 - RNA, 20 nt, Artificial Sequence
  HTT spacer sequence CTCN PAM
gugacacauacucucuccgg

SEQ ID NO: 16626 - RNA, 20 nt, Artificial Sequence
  HTT spacer sequence CTCN PAM
cagugacacauacucucucc

SEQ ID NO: 16627 - RNA, 20 nt, Artificial Sequence
  HTT spacer sequence CTCN PAM
gaccucucagugacacauac

SEQ ID NO: 16628 - RNA, 20 nt, Artificial Sequence
  HTT spacer sequence CTCN PAM
uugacacacacacaaacacu

SEQ ID NO: 16629 - RNA, 20 nt, Artificial Sequence
  HTT spacer sequence CTCN PAM
gugaagggcacaaugcaacc

SEQ ID NO: 16630 - RNA, 20 nt, Artificial Sequence
  HTT spacer sequence CTCN PAM
gaccccucagugaagggcac

SEQ ID NO: 16631 - RNA, 20 nt, Artificial Sequence
  HTT spacer sequence CTCN PAM
cguguguguguguguacgug

SEQ ID NO: 16632 - RNA, 20 nt, Artificial Sequence
  HTT spacer sequence CTCN PAM
gugacacacacacacguaca

SEQ ID NO: 16633 - RNA, 20 nt, Artificial Sequence
  HTT spacer sequence CTCN PAM
gaccccucagugacacacac

SEQ ID NO: 16634 - RNA, 20 nt, Artificial Sequence
  HTT spacer sequence CTCN PAM
gugacauguacgcacacaca

SEQ ID NO: 16635 - RNA, 20 nt, Artificial Sequence
  HTT spacer sequence CTCN PAM
gaccccucagugacauguac

SEQ ID NO: 16636 - RNA, 20 nt, Artificial Sequence
  HTT spacer sequence CTCN PAM
gugugugugcucaugugugu

SEQ ID NO: 16637 - RNA, 20 nt, Artificial Sequence
  HTT spacer sequence CTCN PAM
ugugugugcauacgugucac

SEQ ID NO: 16638 - RNA, 20 nt, Artificial Sequence
  HTT spacer sequence CTCN PAM
gugacacguaugcacacaca

SEQ ID NO: 16639 - RNA, 20 nt, Artificial Sequence
  HTT spacer sequence CTCN PAM
gaccccucagugacacguau

SEQ ID NO: 16640 - RNA, 20 nt, Artificial Sequence
  HTT spacer sequence CTCN PAM
gugugugcucauuugugagc

SEQ ID NO: 16641 - RNA, 20 nt, Artificial Sequence
  HTT spacer sequence CTCN PAM
uuugugagcguaugugucac

SEQ ID NO: 16642 - RNA, 20 nt, Artificial Sequence
  HTT spacer sequence CTCN PAM
caaaugagcacacacagagg

SEQ ID NO: 16643 - RNA, 20 nt, Artificial Sequence
  HTT spacer sequence CTCN PAM
gugacacauacgcucacaaa

SEQ ID NO: 16644 - RNA, 20 nt, Artificial Sequence
  HTT spacer sequence CTCN PAM
gacccccucagugacacaua

SEQ ID NO: 16645 - RNA, 20 nt, Artificial Sequence
  HTT spacer sequence CTCN PAM
gugugugugcucauguguga

SEQ ID NO: 16646 - RNA, 20 nt, Artificial Sequence
  HTT spacer sequence CTCN PAM
ugugugagcguaugugucac

SEQ ID NO: 16647 - RNA, 20 nt, Artificial Sequence
  HTT spacer sequence CTCN PAM
cacaugagcacacacacaga

SEQ ID NO: 16648 - RNA, 20 nt, Artificial Sequence
  HTT spacer sequence CTCN PAM
gugacacauacgcucacaca

SEQ ID NO: 16649 - RNA, 20 nt, Artificial Sequence
  HTT spacer sequence CTCN PAM
gacccccucagugacacaua

SEQ ID NO: 16650 - RNA, 20 nt, Artificial Sequence
  HTT spacer sequence CTCN PAM
gugugugugcucauguguga

SEQ ID NO: 16651 - RNA, 20 nt, Artificial Sequence
  HTT spacer sequence CTCN PAM
ugugugagcguaugugucac

SEQ ID NO: 16652 - RNA, 20 nt, Artificial Sequence
  HTT spacer sequence CTCN PAM
cacaugagcacacacacaga

SEQ ID NO: 16653 - RNA, 20 nt, Artificial Sequence
  HTT spacer sequence CTCN PAM
gugacacauacgcucacaca

SEQ ID NO: 16654 - RNA, 20 nt, Artificial Sequence
  HTT spacer sequence CTCN PAM
ugacauugagggucagagug

SEQ ID NO: 16655 - RNA, 20 nt, Artificial Sequence
  HTT spacer sequence CTCN PAM
augucaugagcacauaggaa

SEQ ID NO: 16656 - RNA, 20 nt, Artificial Sequence
  HTT spacer sequence CTCN PAM
gacccucaaugucaugagca

SEQ ID NO: 16657 - RNA, 20 nt, Artificial Sequence
  HTT spacer sequence CTCN PAM
uguguuagaccaaaauaaga

SEQ ID NO: 16658 - RNA, 20 nt, Artificial Sequence
  HTT spacer sequence CTCN PAM
gucauuagauagauaaggga

SEQ ID NO: 16659 - RNA, 20 nt, Artificial Sequence
  HTT spacer sequence CTCN PAM
cucugucauuagauagauaa

SEQ ID NO: 16660 - RNA, 20 nt, Artificial Sequence
  HTT spacer sequence CTCN PAM
agaauaaucuacuugauuca

SEQ ID NO: 16661 - RNA, 20 nt, Artificial Sequence
  HTT spacer sequence CTCN PAM
aauucaaaagucaauuugaa

SEQ ID NO: 16662 - RNA, 20 nt, Artificial Sequence
  HTT spacer sequence CTCN PAM
uauaauuuaacaccacuucu

SEQ ID NO: 16663 - RNA, 20 nt, Artificial Sequence
  HTT spacer sequence CTCN PAM
gaacacugaucauuuuguga

SEQ ID NO: 16664 - RNA, 20 nt, Artificial Sequence
  HTT spacer sequence CTCN PAM
uccucugaacacugaucauu

SEQ ID NO: 16665 - RNA, 20 nt, Artificial Sequence
  HTT spacer sequence CTCN PAM
uaccauaaaccaaguaugug

SEQ ID NO: 16666 - RNA, 20 nt, Artificial Sequence
  HTT spacer sequence CTCN PAM
acaucuacaaaaugcuuuca

SEQ ID NO: 16667 - RNA, 20 nt, Artificial Sequence
  HTT spacer sequence CTCN PAM
caacaucuacaaaaugcuuu

SEQ ID NO: 16668 - RNA, 20 nt, Artificial Sequence
  HTT spacer sequence CTCN PAM
gcagcccauaguccacgacc

SEQ ID NO: 16669 - RNA, 20 nt, Artificial Sequence
  HTT spacer sequence CTCN PAM
uuguauuaagaggaacaaau

SEQ ID NO: 16670 - RNA, 20 nt, Artificial Sequence
  HTT spacer sequence CTCN PAM
uaauacaaagaggucgugga

SEQ ID NO: 16671 - RNA, 20 nt, Artificial Sequence
  HTT spacer sequence CTCN PAM
uuuccugcaucagcuuuauu

SEQ ID NO: 16672 - RNA, 20 nt, Artificial Sequence
  HTT spacer sequence CTCN PAM
uuuuggguuucaagcucuuu

SEQ ID NO: 16673 - RNA, 20 nt, Artificial Sequence
  HTT spacer sequence CTCN PAM
guaacauugacaccaccacc

SEQ ID NO: 16674 - RNA, 20 nt, Artificial Sequence
  HTT spacer sequence CTCN PAM
uccaguaccaucagguaaga

SEQ ID NO: 16675 - RNA, 20 nt, Artificial Sequence
  HTT spacer sequence CTCN PAM
uaccugaugguacuggauga

SEQ ID NO: 16676 - RNA, 20 nt, Artificial Sequence
  HTT spacer sequence CTCN PAM
cuguuaacuguguuacuuug

SEQ ID NO: 16677 - RNA, 20 nt, Artificial Sequence
  HTT spacer sequence CTCN PAM
ccaucccccugcaccggcau

SEQ ID NO: 16678 - RNA, 20 nt, Artificial Sequence
  HTT spacer sequence CTCN PAM
cuccccaucccccugcaccg

SEQ ID NO: 16679 - RNA, 20 nt, Artificial Sequence
  HTT spacer sequence CTCN PAM
accacacccccccacccccc

SEQ ID NO: 16680 - RNA, 20 nt, Artificial Sequence
  HTT spacer sequence CTCN PAM
ccaacuccaccacacccccc

SEQ ID NO: 16681 - RNA, 20 nt, Artificial Sequence
  HTT spacer sequence CTCN PAM
ugccacugcaccuccccaac

SEQ ID NO: 16682 - RNA, 20 nt, Artificial Sequence
  HTT spacer sequence CTCN PAM
aaaaaaaaaaaaggauacac

SEQ ID NO: 16683 - RNA, 20 nt, Artificial Sequence
  HTT spacer sequence CTCN PAM
aucucaaaaaaaaaaaaagg

SEQ ID NO: 16684 - RNA, 20 nt, Artificial Sequence
  HTT spacer sequence CTCN PAM
cuccgucgcccaggcuggag

SEQ ID NO: 16685 - RNA, 20 nt, Artificial Sequence
  HTT spacer sequence CTCN PAM
ccgucgcccaggcuggagug

SEQ ID NO: 16686 - RNA, 20 nt, Artificial Sequence
  HTT spacer sequence CTCN PAM
gucgcccaggcuggagugug

SEQ ID NO: 16687 - RNA, 20 nt, Artificial Sequence
  HTT spacer sequence CTCN PAM
agccugggcgacggagagag

SEQ ID NO: 16688 - RNA, 20 nt, Artificial Sequence
  HTT spacer sequence CTCN PAM
uugcaagcuccaccucccgg

SEQ ID NO: 16689 - RNA, 20 nt, Artificial Sequence
  HTT spacer sequence CTCN PAM
accucccggguuuaagcaau

SEQ ID NO: 16690 - RNA, 20 nt, Artificial Sequence
  HTT spacer sequence CTCN PAM
cggguuuaagcaauucuccu

SEQ ID NO: 16691 - RNA, 20 nt, Artificial Sequence
  HTT spacer sequence CTCN PAM
ugccuccaccucccgaguag

SEQ ID NO: 16692 - RNA, 20 nt, Artificial Sequence
  HTT spacer sequence CTCN PAM
accucccgaguagcugggau

SEQ ID NO: 16693 - RNA, 20 nt, Artificial Sequence
  HTT spacer sequence CTCN PAM
cgaguagcugggauuacagg

SEQ ID NO: 16694 - RNA, 20 nt, Artificial Sequence
  HTT spacer sequence CTCN PAM
ggagguggaggcaggagaau

SEQ ID NO: 16695 - RNA, 20 nt, Artificial Sequence
  HTT spacer sequence CTCN PAM
acuaaaaauacaaaaaaaaa

SEQ ID NO: 16696 - RNA, 20 nt, Artificial Sequence
  HTT spacer sequence CTCN PAM
ugaccucaagugauccuccu

SEQ ID NO: 16697 - RNA, 20 nt, Artificial Sequence
  HTT spacer sequence CTCN PAM
agugauccuccugccuuggc

SEQ ID NO: 16698 - RNA, 20 nt, Artificial Sequence
  HTT spacer sequence CTCN PAM
ugccuuggccucccaaagug

SEQ ID NO: 16699 - RNA, 20 nt, Artificial Sequence
  HTT spacer sequence CTCN PAM
caaagugcuaggauuacagg

SEQ ID NO: 16700 - RNA, 20 nt, Artificial Sequence
  HTT spacer sequence CTCN PAM
cgccuguaauccuagcacuu

SEQ ID NO: 16701 - RNA, 20 nt, Artificial Sequence
  HTT spacer sequence CTCN PAM
uguggcugugcccacuuuaa

SEQ ID NO: 16702 - RNA, 20 nt, Artificial Sequence
  HTT spacer sequence CTCN PAM
uggucugagagucacgagau

SEQ ID NO: 16703 - RNA, 20 nt, Artificial Sequence
  HTT spacer sequence CTCN PAM
gaccaggagucaggugaacu

SEQ ID NO: 16704 - RNA, 20 nt, Artificial Sequence
  HTT spacer sequence CTCN PAM
cagaccaggagucaggugaa

SEQ ID NO: 16705 - RNA, 20 nt, Artificial Sequence
  HTT spacer sequence CTCN PAM
ugacucucagaccaggaguc

SEQ ID NO: 16706 - RNA, 20 nt, Artificial Sequence
  HTT spacer sequence CTCN PAM
cuaucuugaacgaucucgug

SEQ ID NO: 16707 - RNA, 20 nt, Artificial Sequence
  HTT spacer sequence CTCN PAM
uuuccaaaacgaggaccaaa

SEQ ID NO: 16708 - RNA, 20 nt, Artificial Sequence
  HTT spacer sequence CTCN PAM
uuuuggaaaagagggccuca

SEQ ID NO: 16709 - RNA, 20 nt, Artificial Sequence
  HTT spacer sequence CTCN PAM
acucugaaauaaaaacuuua

SEQ ID NO: 16710 - RNA, 20 nt, Artificial Sequence
  HTT spacer sequence CTCN PAM
gaaauaaaaacuuuauuugu

SEQ ID NO: 16711 - RNA, 20 nt, Artificial Sequence
  HTT spacer sequence CTCN PAM
aagaaaaagaccuuagcccu

SEQ ID NO: 16712 - RNA, 20 nt, Artificial Sequence
  HTT spacer sequence CTCN PAM
aaaugucuuugaauucuuau

SEQ ID NO: 16713 - RNA, 20 nt, Artificial Sequence
  HTT spacer sequence CTCN PAM
gccuuccucaaaaugucuuu

SEQ ID NO: 16714 - RNA, 20 nt, Artificial Sequence
  HTT spacer sequence CTCN PAM
cuuuuuaaaugacuucuccu

SEQ ID NO: 16715 - RNA, 20 nt, Artificial Sequence
  HTT spacer sequence CTCN PAM
uuuuaaaugacuucuccuuu

SEQ ID NO: 16716 - RNA, 20 nt, Artificial Sequence
  HTT spacer sequence CTCN PAM
uuucuuuuaacuugcacugu

SEQ ID NO: 16717 - RNA, 20 nt, Artificial Sequence
  HTT spacer sequence CTCN PAM
cuuauuuugucaauucuuuu

SEQ ID NO: 16718 - RNA, 20 nt, Artificial Sequence
  HTT spacer sequence CTCN PAM
uaagaagcagcacuuucuuu

SEQ ID NO: 16719 - RNA, 20 nt, Artificial Sequence
  HTT spacer sequence CTCN PAM
uuaugauacauguacuuuug

SEQ ID NO: 16720 - RNA, 20 nt, Artificial Sequence
  HTT spacer sequence CTCN PAM
uuuucagaccucuuuaugau

SEQ ID NO: 16721 - RNA, 20 nt, Artificial Sequence
  HTT spacer sequence CTCN PAM
gccugccaccaccugcuugc

SEQ ID NO: 16722 - RNA, 20 nt, Artificial Sequence
  HTT spacer sequence CTCN PAM
augacacccacccacccaag

SEQ ID NO: 16723 - RNA, 20 nt, Artificial Sequence
  HTT spacer sequence CTCN PAM
ccaugacacccacccaccca

SEQ ID NO: 16724 - RNA, 20 nt, Artificial Sequence
  HTT spacer sequence CTCN PAM
ucuccaugacacccacccac

SEQ ID NO: 16725 - RNA, 20 nt, Artificial Sequence
  HTT spacer sequence CTCN PAM
cugaacauguggcugaugaa

SEQ ID NO: 16726 - RNA, 20 nt, Artificial Sequence
  HTT spacer sequence CTCN PAM
ggauaugucuguuuagaaau

SEQ ID NO: 16727 - RNA, 20 nt, Artificial Sequence
  HTT spacer sequence CTCN PAM
accauguauaccucugggaa

SEQ ID NO: 16728 - RNA, 20 nt, Artificial Sequence
  HTT spacer sequence CTCN PAM
gggaagcaggugcucuucag

SEQ ID NO: 16729 - RNA, 20 nt, Artificial Sequence
  HTT spacer sequence CTCN PAM
ucaguagauugccucugcag

SEQ ID NO: 16730 - RNA, 20 nt, Artificial Sequence
  HTT spacer sequence CTCN PAM
gcagagaacacagaauugaa

SEQ ID NO: 16731 - RNA, 20 nt, Artificial Sequence
  HTT spacer sequence CTCN PAM
gcagaggcaaucuacugaag

SEQ ID NO: 16732 - RNA, 20 nt, Artificial Sequence
  HTT spacer sequence CTCN PAM
uugccuuuguggacauucac

SEQ ID NO: 16733 - RNA, 20 nt, Artificial Sequence
  HTT spacer sequence CTCN PAM
gauugugaaauauuacaaau

SEQ ID NO: 16734 - RNA, 20 nt, Artificial Sequence
  HTT spacer sequence CTCN PAM
ugagcaaagugugcaccuug

SEQ ID NO: 16735 - RNA, 20 nt, Artificial Sequence
  HTT spacer sequence CTCN PAM
ggaggauuugccaucauugu

SEQ ID NO: 16736 - RNA, 20 nt, Artificial Sequence
  HTT spacer sequence CTCN PAM
agggcacauacaaggugcac

SEQ ID NO: 16737 - RNA, 20 nt, Artificial Sequence
  HTT spacer sequence CTCN PAM
ugucauagaguggggguugc

SEQ ID NO: 16738 - RNA, 20 nt, Artificial Sequence
  HTT spacer sequence CTCN PAM
augacaugagaaauguaggg

SEQ ID NO: 16739 - RNA, 20 nt, Artificial Sequence
  HTT spacer sequence CTCN PAM
cugggaucacaucuguuugg

SEQ ID NO: 16740 - RNA, 20 nt, Artificial Sequence
  HTT spacer sequence CTCN PAM
aggauccaaacagaugugau

SEQ ID NO: 16741 - RNA, 20 nt, Artificial Sequence
  HTT spacer sequence CTCN PAM
uggcagcagacuuucuaauu

SEQ ID NO: 16742 - RNA, 20 nt, Artificial Sequence
  HTT spacer sequence CTCN PAM
uauagguguuggagauguuc

SEQ ID NO: 16743 - RNA, 20 nt, Artificial Sequence
  HTT spacer sequence CTCN PAM
aacaccuauaagagcgugca

SEQ ID NO: 16744 - RNA, 20 nt, Artificial Sequence
  HTT spacer sequence CTCN PAM
uuguggcacugcugcaggac

SEQ ID NO: 16745 - RNA, 20 nt, Artificial Sequence
  HTT spacer sequence CTCN PAM
acagauagcugacaucaucc

SEQ ID NO: 16746 - RNA, 20 nt, Artificial Sequence
  HTT spacer sequence CTCN PAM
caauguuagccaaacagcag

SEQ ID NO: 16747 - RNA, 20 nt, Artificial Sequence
  HTT spacer sequence CTCN PAM
uccuucaguccuaaucugug

SEQ ID NO: 16748 - RNA, 20 nt, Artificial Sequence
  HTT spacer sequence CTCN PAM
gugcuagucaugggacagcu

SEQ ID NO: 16749 - RNA, 20 nt, Artificial Sequence
  HTT spacer sequence CTCN PAM
caaugccaucucagguuggu

SEQ ID NO: 16750 - RNA, 20 nt, Artificial Sequence
  HTT spacer sequence CTCN PAM
gguugguauugcccaccuac

SEQ ID NO: 16751 - RNA, 20 nt, Artificial Sequence
  HTT spacer sequence CTCN PAM
gagagguuauggaggugauc

SEQ ID NO: 16752 - RNA, 20 nt, Artificial Sequence
  HTT spacer sequence CTCN PAM
gagcugugggauccccccug

SEQ ID NO: 16753 - RNA, 20 nt, Artificial Sequence
  HTT spacer sequence CTCN PAM
cggagcugugggaucccccc

SEQ ID NO: 16754 - RNA, 20 nt, Artificial Sequence
  HTT spacer sequence CTCN PAM
auaaccucucggagcugugg

SEQ ID NO: 16755 - RNA, 20 nt, Artificial Sequence
  HTT spacer sequence CTCN PAM
aaagcugugugcugccugau

SEQ ID NO: 16756 - RNA, 20 nt, Artificial Sequence
  HTT spacer sequence CTCN PAM
ccccagcacucuaaagcugu

SEQ ID NO: 16757 - RNA, 20 nt, Artificial Sequence
  HTT spacer sequence CTCN PAM
aaagcccgaacccuuaccuc

SEQ ID NO: 16758 - RNA, 20 nt, Artificial Sequence
  HTT spacer sequence CTCN PAM
uacacugccuccugcauucu

SEQ ID NO: 16759 - RNA, 20 nt, Artificial Sequence
  HTT spacer sequence CTCN PAM
ugcauucuggucaacccagu

SEQ ID NO: 16760 - RNA, 20 nt, Artificial Sequence
  HTT spacer sequence CTCN PAM
cucugucacccaggcuagag

SEQ ID NO: 16761 - RNA, 20 nt, Artificial Sequence
  HTT spacer sequence CTCN PAM
gucacccaggcuagagugca

SEQ ID NO: 16762 - RNA, 20 nt, Artificial Sequence
  HTT spacer sequence CTCN PAM
agccugggugacagagugag

SEQ ID NO: 16763 - RNA, 20 nt, Artificial Sequence
  HTT spacer sequence CTCN PAM
cugcaacaaccucugccucc

SEQ ID NO: 16764 - RNA, 20 nt, Artificial Sequence
  HTT spacer sequence CTCN PAM
gccucccagguucaaccaau

SEQ ID NO: 16765 - RNA, 20 nt, Artificial Sequence
  HTT spacer sequence CTCN PAM
cagguucaaccaauucuccc

SEQ ID NO: 16766 - RNA, 20 nt, Artificial Sequence
  HTT spacer sequence CTCN PAM
caccucagccuccugaguag

SEQ ID NO: 16767 - RNA, 20 nt, Artificial Sequence
  HTT spacer sequence CTCN PAM
gccuccugaguagcaaggac

SEQ ID NO: 16768 - RNA, 20 nt, Artificial Sequence
  HTT spacer sequence CTCN PAM
ugaguagcaaggaccacagg

SEQ ID NO: 16769 - RNA, 20 nt, Artificial Sequence
  HTT spacer sequence CTCN PAM
ggaggcugaggugggagaau

SEQ ID NO: 16770 - RNA, 20 nt, Artificial Sequence
  HTT spacer sequence CTCN PAM
acuaaaaauacaaaaaacua

SEQ ID NO: 16771 - RNA, 20 nt, Artificial Sequence
  HTT spacer sequence CTCN PAM
ucucuacuaaaaauacaaaa

SEQ ID NO: 16772 - RNA, 20 nt, Artificial Sequence
  HTT spacer sequence CTCN PAM
cuguguugcccaggcugguu

SEQ ID NO: 16773 - RNA, 20 nt, Artificial Sequence
  HTT spacer sequence CTCN PAM
ugggcgcaagugauccacca

SEQ ID NO: 16774 - RNA, 20 nt, Artificial Sequence
  HTT spacer sequence CTCN PAM
caccuguaaugccagcacuu

SEQ ID NO: 16775 - RNA, 20 nt, Artificial Sequence
  HTT spacer sequence CTCN PAM
ccuggccuauucaucacuaa

SEQ ID NO: 16776 - RNA, 20 nt, Artificial Sequence
  HTT spacer sequence CTCN PAM
guagcucacagagaagggug

SEQ ID NO: 16777 - RNA, 20 nt, Artificial Sequence
  HTT spacer sequence CTCN PAM
cagagaagggugguggggac

SEQ ID NO: 16778 - RNA, 20 nt, Artificial Sequence
  HTT spacer sequence CTCN PAM
gugagcuacagaggugcugc

SEQ ID NO: 16779 - RNA, 20 nt, Artificial Sequence
  HTT spacer sequence CTCN PAM
uugaggcagcucugccagaa

SEQ ID NO: 16780 - RNA, 20 nt, Artificial Sequence
  HTT spacer sequence CTCN PAM
aggagguccccaccacccuu

SEQ ID NO: 16781 - RNA, 20 nt, Artificial Sequence
  HTT spacer sequence CTCN PAM
gccagaaaaucucaugagcu

SEQ ID NO: 16782 - RNA, 20 nt, Artificial Sequence
  HTT spacer sequence CTCN PAM
ugagcugccuggcacagcuu

SEQ ID NO: 16783 - RNA, 20 nt, Artificial Sequence
  HTT spacer sequence CTCN PAM
ugagauuuucuggcagagcu

SEQ ID NO: 16784 - RNA, 20 nt, Artificial Sequence
  HTT spacer sequence CTCN PAM
agcugugccaggcagcucau

SEQ ID NO: 16785 - RNA, 20 nt, Artificial Sequence
  HTT spacer sequence CTCN PAM
gcaaauacauguuuguucau

SEQ ID NO: 16786 - RNA, 20 nt, Artificial Sequence
  HTT spacer sequence CTCN PAM
guauaguacgaguaguccgu

SEQ ID NO: 16787 - RNA, 20 nt, Artificial Sequence
  HTT spacer sequence CTCN PAM
uacuauacagaguaguuguu

SEQ ID NO: 16788 - RNA, 20 nt, Artificial Sequence
  HTT spacer sequence CTCN PAM
aaguuuaaaucaaaugccaa

SEQ ID NO: 16789 - RNA, 20 nt, Artificial Sequence
  HTT spacer sequence CTCN PAM
agauaacauuccauuaugaa

SEQ ID NO: 16790 - RNA, 20 nt, Artificial Sequence
  HTT spacer sequence CTCN PAM
ccagaagccaagaucccugu

SEQ ID NO: 16791 - RNA, 20 nt, Artificial Sequence
  HTT spacer sequence CTCN PAM
cugccuacagaugguuuuag

SEQ ID NO: 16792 - RNA, 20 nt, Artificial Sequence
  HTT spacer sequence CTCN PAM
gauuacgcacagaaaagaau

SEQ ID NO: 16793 - RNA, 20 nt, Artificial Sequence
  HTT spacer sequence CTCN PAM
acucagauuacgcacagaaa

SEQ ID NO: 16794 - RNA, 20 nt, Artificial Sequence
  HTT spacer sequence CTCN PAM
acucuacucagauuacgcac

SEQ ID NO: 16795 - RNA, 20 nt, Artificial Sequence
  HTT spacer sequence CTCN PAM
ccacaggugcauguugcauu

SEQ ID NO: 16796 - RNA, 20 nt, Artificial Sequence
  HTT spacer sequence CTCN PAM
aagaaggcagggggucuuuc

SEQ ID NO: 16797 - RNA, 20 nt, Artificial Sequence
  HTT spacer sequence CTCN PAM
cuugcuuuucuauugucugu

SEQ ID NO: 16798 - RNA, 20 nt, Artificial Sequence
  HTT spacer sequence CTCN PAM
uggauucuucuguacggugu

SEQ ID NO: 16799 - RNA, 20 nt, Artificial Sequence
  HTT spacer sequence CTCN PAM
ucccuccuggauucuucugu

SEQ ID NO: 16800 - RNA, 20 nt, Artificial Sequence
  HTT spacer sequence CTCN PAM
cuucccuccuggauucuucu

SEQ ID NO: 16801 - RNA, 20 nt, Artificial Sequence
  HTT spacer sequence CTCN PAM
caccgcagacaccaccuaac

SEQ ID NO: 16802 - RNA, 20 nt, Artificial Sequence
  HTT spacer sequence CTCN PAM
ucaccagcugaacaaugcca

SEQ ID NO: 16803 - RNA, 20 nt, Artificial Sequence
  HTT spacer sequence CTCN PAM
aaugucaccagaucaccaaa

SEQ ID NO: 16804 - RNA, 20 nt, Artificial Sequence
  HTT spacer sequence CTCN PAM
uaggcuuguaucuuuccuuu

SEQ ID NO: 16805 - RNA, 20 nt, Artificial Sequence
  HTT spacer sequence CTCN PAM
gccuggaauguuccuucccc

SEQ ID NO: 16806 - RNA, 20 nt, Artificial Sequence
  HTT spacer sequence CTCN PAM
uugcuuguacccuaacagca

SEQ ID NO: 16807 - RNA, 20 nt, Artificial Sequence
  HTT spacer sequence CTCN PAM
acccucauugcuuguacccu

SEQ ID NO: 16808 - RNA, 20 nt, Artificial Sequence
  HTT spacer sequence CTCN PAM
uccacccucauugcuuguac

SEQ ID NO: 16809 - RNA, 20 nt, Artificial Sequence
  HTT spacer sequence CTCN PAM
ccauggcugccccacuccuc

SEQ ID NO: 16810 - RNA, 20 nt, Artificial Sequence
  HTT spacer sequence CTCN PAM
cuucccuccccauggcugcc

SEQ ID NO: 16811 - RNA, 20 nt, Artificial Sequence
  HTT spacer sequence CTCN PAM
cucccuucccuccccauggc

SEQ ID NO: 16812 - RNA, 20 nt, Artificial Sequence
  HTT spacer sequence CTCN PAM
ccccaccaggccucacuccc

SEQ ID NO: 16813 - RNA, 20 nt, Artificial Sequence
  HTT spacer sequence CTCN PAM
acacuggccucaccccacca

SEQ ID NO: 16814 - RNA, 20 nt, Artificial Sequence
  HTT spacer sequence CTCN PAM
uccacacuggccucacccca

SEQ ID NO: 16815 - RNA, 20 nt, Artificial Sequence
  HTT spacer sequence CTCN PAM
aggcuccuccacacuggccu

SEQ ID NO: 16816 - RNA, 20 nt, Artificial Sequence
  HTT spacer sequence CTCN PAM
caaggcuccuccacacuggc

SEQ ID NO: 16817 - RNA, 20 nt, Artificial Sequence
  HTT spacer sequence CTCN PAM
ggaauaagaaugauccugcu

SEQ ID NO: 16818 - RNA, 20 nt, Artificial Sequence
  HTT spacer sequence CTCN PAM
acucaggaauaagaaugauc

SEQ ID NO: 16819 - RNA, 20 nt, Artificial Sequence
  HTT spacer sequence CTCN PAM
aggcuauucucaacucagga

SEQ ID NO: 16820 - RNA, 20 nt, Artificial Sequence
  HTT spacer sequence CTCN PAM
cccucaaggcuauucucaac

SEQ ID NO: 16821 - RNA, 20 nt, Artificial Sequence
  HTT spacer sequence CTCN PAM
ccucccccucaaggcuauuc

SEQ ID NO: 16822 - RNA, 20 nt, Artificial Sequence
  HTT spacer sequence CTCN PAM
gcccucaccucccccucaag

SEQ ID NO: 16823 - RNA, 20 nt, Artificial Sequence
  HTT spacer sequence CTCN PAM
cauggguggcccugcucugc

SEQ ID NO: 16824 - RNA, 20 nt, Artificial Sequence
  HTT spacer sequence CTCN PAM
agugccgggucucacauggg

SEQ ID NO: 16825 - RNA, 20 nt, Artificial Sequence
  HTT spacer sequence CTCN PAM
caugccacaucuaagccacc

SEQ ID NO: 16826 - RNA, 20 nt, Artificial Sequence
  HTT spacer sequence CTCN PAM
cacaugccacaucuaagcca

SEQ ID NO: 16827 - RNA, 20 nt, Artificial Sequence
  HTT spacer sequence CTCN PAM
cucacaugccacaucuaagc

SEQ ID NO: 16828 - RNA, 20 nt, Artificial Sequence
  HTT spacer sequence CTCN PAM
cucucacaugccacaucuaa

SEQ ID NO: 16829 - RNA, 20 nt, Artificial Sequence
  HTT spacer sequence CTCN PAM
cccugaaaucacccccaaag

SEQ ID NO: 16830 - RNA, 20 nt, Artificial Sequence
  HTT spacer sequence CTCN PAM
ugcugcccccaaugucugcc

SEQ ID NO: 16831 - RNA, 20 nt, Artificial Sequence
  HTT spacer sequence CTCN PAM
gaccuccugcugcccccaau

SEQ ID NO: 16832 - RNA, 20 nt, Artificial Sequence
  HTT spacer sequence CTCN PAM
acugcuacauccagacaggc

SEQ ID NO: 16833 - RNA, 20 nt, Artificial Sequence
  HTT spacer sequence CTCN PAM
uuaggcaccuauggggucuc

SEQ ID NO: 16834 - RNA, 20 nt, Artificial Sequence
  HTT spacer sequence CTCN PAM
ccucauuaggcaccuauggg

SEQ ID NO: 16835 - RNA, 20 nt, Artificial Sequence
  HTT spacer sequence CTCN PAM
uacaccugaugcuggccuca

SEQ ID NO: 16836 - RNA, 20 nt, Artificial Sequence
  HTT spacer sequence CTCN PAM
aggcucauacaccugaugcu

SEQ ID NO: 16837 - RNA, 20 nt, Artificial Sequence
  HTT spacer sequence CTCN PAM
acaacuccaggcucauacac

SEQ ID NO: 16838 - RNA, 20 nt, Artificial Sequence
  HTT spacer sequence CTCN PAM
cgacaacuccaggcucauac

SEQ ID NO: 16839 - RNA, 20 nt, Artificial Sequence
  HTT spacer sequence CTCN PAM
gaugcugacccccugcccca

SEQ ID NO: 16840 - RNA, 20 nt, Artificial Sequence
  HTT spacer sequence CTCN PAM
caguggacccagacuggcug

SEQ ID NO: 16841 - RNA, 20 nt, Artificial Sequence
  HTT spacer sequence CTCN PAM
agccagucuggguccacugu

SEQ ID NO: 16842 - RNA, 20 nt, Artificial Sequence
  HTT spacer sequence CTCN PAM
ccagccagucuggguccacu

SEQ ID NO: 16843 - RNA, 20 nt, Artificial Sequence
  HTT spacer sequence CTCN PAM
ucuccagccagucugggucc

SEQ ID NO: 16844 - RNA, 20 nt, Artificial Sequence
  HTT spacer sequence CTCN PAM
uccucuccagccagucuggg

SEQ ID NO: 16845 - RNA, 20 nt, Artificial Sequence
  HTT spacer sequence CTCN PAM
uccuccucuccagccagucu

SEQ ID NO: 16846 - RNA, 20 nt, Artificial Sequence
  HTT spacer sequence CTCN PAM
guauucaagcuccuccuccu

SEQ ID NO: 16847 - RNA, 20 nt, Artificial Sequence
  HTT spacer sequence CTCN PAM
gcaggcucgguauucaagcu

SEQ ID NO: 16848 - RNA, 20 nt, Artificial Sequence
  HTT spacer sequence CTCN PAM
aaggucagguaggugagggg

SEQ ID NO: 16849 - RNA, 20 nt, Artificial Sequence
  HTT spacer sequence CTCN PAM
ccuaccugaccuuggagcug

SEQ ID NO: 16850 - RNA, 20 nt, Artificial Sequence
  HTT spacer sequence CTCN PAM
ccucaccuaccugaccuugg

SEQ ID NO: 16851 - RNA, 20 nt, Artificial Sequence
  HTT spacer sequence CTCN PAM
cccugccccagcacuggcuc

SEQ ID NO: 16852 - RNA, 20 nt, Artificial Sequence
  HTT spacer sequence CTCN PAM
ugcacaaaaugccuuaaaaa

SEQ ID NO: 16853 - RNA, 20 nt, Artificial Sequence
  HTT spacer sequence CTCN PAM
gugcugccaaaccugggcca

SEQ ID NO: 16854 - RNA, 20 nt, Artificial Sequence
  HTT spacer sequence CTCN PAM
ucagugcccucggugcugcc

SEQ ID NO: 16855 - RNA, 20 nt, Artificial Sequence
  HTT spacer sequence CTCN PAM
aaaagcacucaucagugccc

SEQ ID NO: 16856 - RNA, 20 nt, Artificial Sequence
  HTT spacer sequence CTCN PAM
uccaaaagcacucaucagug

SEQ ID NO: 16857 - RNA, 20 nt, Artificial Sequence
  HTT spacer sequence CTCN PAM
cuuugcuccuccaaaagcac

SEQ ID NO: 16858 - RNA, 20 nt, Artificial Sequence
  HTT spacer sequence CTCN PAM
uguccuuucaggaacacauu

SEQ ID NO: 16859 - RNA, 20 nt, Artificial Sequence
  HTT spacer sequence CTCN PAM
ccuguccuuucaggaacaca

SEQ ID NO: 16860 - RNA, 20 nt, Artificial Sequence
  HTT spacer sequence CTCN PAM
cuccuguccuuucaggaaca

SEQ ID NO: 16861 - RNA, 20 nt, Artificial Sequence
  HTT spacer sequence CTCN PAM
ucaaguaaaaccuuuuccca

SEQ ID NO: 16862 - RNA, 20 nt, Artificial Sequence
  HTT spacer sequence CTCN PAM
guucccucuucaaguaaaac

SEQ ID NO: 16863 - RNA, 20 nt, Artificial Sequence
  HTT spacer sequence CTCN PAM
ggcuacugcccuauuucucc

SEQ ID NO: 16864 - RNA, 20 nt, Artificial Sequence
  HTT spacer sequence CTCN PAM
ucuggcuacugcccuauuuc

SEQ ID NO: 16865 - RNA, 20 nt, Artificial Sequence
  HTT spacer sequence CTCN PAM
uccucuggcuacugcccuau

SEQ ID NO: 16866 - RNA, 20 nt, Artificial Sequence
  HTT spacer sequence CTCN PAM
ccuccucuggcuacugcccu

SEQ ID NO: 16867 - RNA, 20 nt, Artificial Sequence
  HTT spacer sequence CTCN PAM
ucuccuccucuggcuacugc

SEQ ID NO: 16868 - RNA, 20 nt, Artificial Sequence
  HTT spacer sequence CTCN PAM
gugcguaaacaggccuucau

SEQ ID NO: 16869 - RNA, 20 nt, Artificial Sequence
  HTT spacer sequence CTCN PAM
cuguugcuucugcccucagu

SEQ ID NO: 16870 - RNA, 20 nt, Artificial Sequence
  HTT spacer sequence CTCN PAM
ugugucaugaacugauccuc

SEQ ID NO: 16871 - RNA, 20 nt, Artificial Sequence
  HTT spacer sequence CTCN PAM
gucauccaugcagccaaucc

SEQ ID NO: 16872 - RNA, 20 nt, Artificial Sequence
  HTT spacer sequence CTCN PAM
cagaguugcuggggaggagg

SEQ ID NO: 16873 - RNA, 20 nt, Artificial Sequence
  HTT spacer sequence CTCN PAM
gggagaacccacagugcucu

SEQ ID NO: 16874 - RNA, 20 nt, Artificial Sequence
  HTT spacer sequence CTCN PAM
ccagcaacucugggagaacc

SEQ ID NO: 16875 - RNA, 20 nt, Artificial Sequence
  HTT spacer sequence CTCN PAM
uccccagcaacucugggaga

SEQ ID NO: 16876 - RNA, 20 nt, Artificial Sequence
  HTT spacer sequence CTCN PAM
gccuccuccccagcaacucu

SEQ ID NO: 16877 - RNA, 20 nt, Artificial Sequence
  HTT spacer sequence CTCN PAM
ccaacucugccuccucccca

SEQ ID NO: 16878 - RNA, 20 nt, Artificial Sequence
  HTT spacer sequence CTCN PAM
ccugugcucaccaacucugc

SEQ ID NO: 16879 - RNA, 20 nt, Artificial Sequence
  HTT spacer sequence CTCN PAM
aggauuccugcauccuggac

SEQ ID NO: 16880 - RNA, 20 nt, Artificial Sequence
  HTT spacer sequence CTCN PAM
agucaguuguucccuuguug

SEQ ID NO: 16881 - RNA, 20 nt, Artificial Sequence
  HTT spacer sequence CTCN PAM
caacacuggccacaucuuac

SEQ ID NO: 16882 - RNA, 20 nt, Artificial Sequence
  HTT spacer sequence CTCN PAM
gcaaacagaugugguguuuu

SEQ ID NO: 16883 - RNA, 20 nt, Artificial Sequence
  HTT spacer sequence CTCN PAM
guagaaacaaaaauuggaaa

SEQ ID NO: 16884 - RNA, 20 nt, Artificial Sequence
  HTT spacer sequence CTCN PAM
ugccuguaaucccagcacuu

SEQ ID NO: 16885 - RNA, 20 nt, Artificial Sequence
  HTT spacer sequence CTCN PAM
caaagugcugggauuacagg

SEQ ID NO: 16886 - RNA, 20 nt, Artificial Sequence
  HTT spacer sequence CTCN PAM
agcaaucugccugccuuggc

SEQ ID NO: 16887 - RNA, 20 nt, Artificial Sequence
  HTT spacer sequence CTCN PAM
ggaguuugagaccagccugg

SEQ ID NO: 16888 - RNA, 20 nt, Artificial Sequence
  HTT spacer sequence CTCN PAM
ugagcucaagcaaucugccu

SEQ ID NO: 16889 - RNA, 20 nt, Artificial Sequence
  HTT spacer sequence CTCN PAM
aacuccugagcucaagcaau

SEQ ID NO: 16890 - RNA, 20 nt, Artificial Sequence
  HTT spacer sequence CTCN PAM
acuagaaauacaaaaaguag

SEQ ID NO: 16891 - RNA, 20 nt, Artificial Sequence
  HTT spacer sequence CTCN PAM
ggaggcugaggugggaggau

SEQ ID NO: 16892 - RNA, 20 nt, Artificial Sequence
  HTT spacer sequence CTCN PAM
ugaguuagccaggacuacag

SEQ ID NO: 16893 - RNA, 20 nt, Artificial Sequence
  HTT spacer sequence CTCN PAM
gccuccugaguuagccagga

SEQ ID NO: 16894 - RNA, 20 nt, Artificial Sequence
  HTT spacer sequence CTCN PAM
caccucagccuccugaguua

SEQ ID NO: 16895 - RNA, 20 nt, Artificial Sequence
  HTT spacer sequence CTCN PAM
agugauccucccaccucagc

SEQ ID NO: 16896 - RNA, 20 nt, Artificial Sequence
  HTT spacer sequence CTCN PAM
uggggcacagagugagacuc

SEQ ID NO: 16897 - RNA, 20 nt, Artificial Sequence
  HTT spacer sequence CTCN PAM
gugccccaggagugcagugg

SEQ ID NO: 16898 - RNA, 20 nt, Artificial Sequence
  HTT spacer sequence CTCN PAM
cucugugccccaggagugca

SEQ ID NO: 16899 - RNA, 20 nt, Artificial Sequence
  HTT spacer sequence CTCN PAM
guuagaaagagagagagaga

SEQ ID NO: 16900 - RNA, 20 nt, Artificial Sequence
  HTT spacer sequence CTCN PAM
uucuaacagagucucacucu

SEQ ID NO: 16901 - RNA, 20 nt, Artificial Sequence
  HTT spacer sequence CTCN PAM
cuuucuaacagagucucacu

SEQ ID NO: 16902 - RNA, 20 nt, Artificial Sequence
  HTT spacer sequence CTCN PAM
cucuuucuaacagagucuca

SEQ ID NO: 16903 - RNA, 20 nt, Artificial Sequence
  HTT spacer sequence CTCN PAM
cucucuuucuaacagagucu

SEQ ID NO: 16904 - RNA, 20 nt, Artificial Sequence
  HTT spacer sequence CTCN PAM
cucucucuuucuaacagagu

SEQ ID NO: 16905 - RNA, 20 nt, Artificial Sequence
  HTT spacer sequence CTCN PAM
ucuuucucucucucucuuuc

SEQ ID NO: 16906 - RNA, 20 nt, Artificial Sequence
  HTT spacer sequence CTCN PAM
cuucuuucucucucucucuu

SEQ ID NO: 16907 - RNA, 20 nt, Artificial Sequence
  HTT spacer sequence CTCN PAM
cucuucuuucucucucucuc

SEQ ID NO: 16908 - RNA, 20 nt, Artificial Sequence
  HTT spacer sequence CTCN PAM
cucucucuucuuucucucuc

SEQ ID NO: 16909 - RNA, 20 nt, Artificial Sequence
  HTT spacer sequence CTCN PAM
cucccucucucuucuuucuc

SEQ ID NO: 16910 - RNA, 20 nt, Artificial Sequence
  HTT spacer sequence CTCN PAM
cuuccauuucuuccauuuau

SEQ ID NO: 16911 - RNA, 20 nt, Artificial Sequence
  HTT spacer sequence CTCN PAM
ccuuccucccuuccauuucu

SEQ ID NO: 16912 - RNA, 20 nt, Artificial Sequence
  HTT spacer sequence CTCN PAM
cuccccuuccucccuuccau

SEQ ID NO: 16913 - RNA, 20 nt, Artificial Sequence
  HTT spacer sequence CTCN PAM
caaggcaacuggcugaacuu

SEQ ID NO: 16914 - RNA, 20 nt, Artificial Sequence
  HTT spacer sequence CTCN PAM
auugcacuggguuaagugag

SEQ ID NO: 16915 - RNA, 20 nt, Artificial Sequence
  HTT spacer sequence CTCN PAM
cuuaacccagugcaauggag

SEQ ID NO: 16916 - RNA, 20 nt, Artificial Sequence
  HTT spacer sequence CTCN PAM
ucucacuuaacccagugcaa

SEQ ID NO: 16917 - RNA, 20 nt, Artificial Sequence
  HTT spacer sequence CTCN PAM
gcucuucucacuuaacccag

SEQ ID NO: 16918 - RNA, 20 nt, Artificial Sequence
  HTT spacer sequence CTCN PAM
gugggugagggggcaaggau

SEQ ID NO: 16919 - RNA, 20 nt, Artificial Sequence
  HTT spacer sequence CTCN PAM
cccacagagguuuuguuuua

SEQ ID NO: 16920 - RNA, 20 nt, Artificial Sequence
  HTT spacer sequence CTCN PAM
cacaacaguuguaacaaaug

SEQ ID NO: 16921 - RNA, 20 nt, Artificial Sequence
  HTT spacer sequence CTCN PAM
aucccucccacaacaguugu

SEQ ID NO: 16922 - RNA, 20 nt, Artificial Sequence
  HTT spacer sequence CTCN PAM
aauauacaaaagugugaaaa

SEQ ID NO: 16923 - RNA, 20 nt, Artificial Sequence
  HTT spacer sequence CTCN PAM
uuuaaaagcauuuuaaguuc

SEQ ID NO: 16924 - RNA, 20 nt, Artificial Sequence
  HTT spacer sequence CTCN PAM
ucgucaccuucccucauuua

SEQ ID NO: 16925 - RNA, 20 nt, Artificial Sequence
  HTT spacer sequence CTCN PAM
agggcaaaucaucauaauca

SEQ ID NO: 16926 - RNA, 20 nt, Artificial Sequence
  HTT spacer sequence CTCN PAM
caugaagcccuuggaguguu

SEQ ID NO: 16927 - RNA, 20 nt, Artificial Sequence
  HTT spacer sequence CTCN PAM
ugaagcccuuggaguguuaa

SEQ ID NO: 16928 - RNA, 20 nt, Artificial Sequence
  HTT spacer sequence CTCN PAM
aagggcuucaugagagucaa

SEQ ID NO: 16929 - RNA, 20 nt, Artificial Sequence
  HTT spacer sequence CTCN PAM
aauaauguauuuaacacucc

SEQ ID NO: 16930 - RNA, 20 nt, Artificial Sequence
  HTT spacer sequence CTCN PAM
cuccguccgguagacaugcu

SEQ ID NO: 16931 - RNA, 20 nt, Artificial Sequence
  HTT spacer sequence CTCN PAM
guccgguagacaugcuuuua

SEQ ID NO: 16932 - RNA, 20 nt, Artificial Sequence
  HTT spacer sequence CTCN PAM
guaaaagcaugucuaccgga

SEQ ID NO: 16933 - RNA, 20 nt, Artificial Sequence
  HTT spacer sequence CTCN PAM
aaacacaauggugagucucu

SEQ ID NO: 16934 - RNA, 20 nt, Artificial Sequence
  HTT spacer sequence CTCN PAM
ccauuguguuuggagugacg

SEQ ID NO: 16935 - RNA, 20 nt, Artificial Sequence
  HTT spacer sequence CTCN PAM
cgccuggcucagcagaugaa

SEQ ID NO: 16936 - RNA, 20 nt, Artificial Sequence
  HTT spacer sequence CTCN PAM
ccuggcucagcagaugaauc

SEQ ID NO: 16937 - RNA, 20 nt, Artificial Sequence
  HTT spacer sequence CTCN PAM
gcagaugaaucuggacggcu

SEQ ID NO: 16938 - RNA, 20 nt, Artificial Sequence
  HTT spacer sequence CTCN PAM
gauuacugggaccaccccca

SEQ ID NO: 16939 - RNA, 20 nt, Artificial Sequence
  HTT spacer sequence CTCN PAM
gacauucugggggugguccc

SEQ ID NO: 16940 - RNA, 20 nt, Artificial Sequence
  HTT spacer sequence CTCN PAM
agaagcccuacccaaacuga

SEQ ID NO: 16941 - RNA, 20 nt, Artificial Sequence
  HTT spacer sequence CTCN PAM
caagaagcccuacccaaacu

SEQ ID NO: 16942 - RNA, 20 nt, Artificial Sequence
  HTT spacer sequence CTCN PAM
guuccgcaccacccccacac

SEQ ID NO: 16943 - RNA, 20 nt, Artificial Sequence
  HTT spacer sequence CTCN PAM
cucugucgcccaggcuggag

SEQ ID NO: 16944 - RNA, 20 nt, Artificial Sequence
  HTT spacer sequence CTCN PAM
gucgcccaggcuggaguaca

SEQ ID NO: 16945 - RNA, 20 nt, Artificial Sequence
  HTT spacer sequence CTCN PAM
agccugggcgacagagugag

SEQ ID NO: 16946 - RNA, 20 nt, Artificial Sequence
  HTT spacer sequence CTCN PAM
gcucacugcaagcucugccu

SEQ ID NO: 16947 - RNA, 20 nt, Artificial Sequence
  HTT spacer sequence CTCN PAM
cugcaagcucugccuuccag

SEQ ID NO: 16948 - RNA, 20 nt, Artificial Sequence
  HTT spacer sequence CTCN PAM
gccuuccagcuucacaccau

SEQ ID NO: 16949 - RNA, 20 nt, Artificial Sequence
  HTT spacer sequence CTCN PAM
ugccucagccucccgaguug

SEQ ID NO: 16950 - RNA, 20 nt, Artificial Sequence
  HTT spacer sequence CTCN PAM
gccucccgaguugcugggac

SEQ ID NO: 16951 - RNA, 20 nt, Artificial Sequence
  HTT spacer sequence CTCN PAM
cgaguugcugggacuacaag

SEQ ID NO: 16952 - RNA, 20 nt, Artificial Sequence
  HTT spacer sequence CTCN PAM
ggaggcugaggcaggagaau

SEQ ID NO: 16953 - RNA, 20 nt, Artificial Sequence
  HTT spacer sequence CTCN PAM
acuaaaaauacaaaaaaauu

SEQ ID NO: 16954 - RNA, 20 nt, Artificial Sequence
  HTT spacer sequence CTCN PAM
ugaccucgugacccgcccau

SEQ ID NO: 16955 - RNA, 20 nt, Artificial Sequence
  HTT spacer sequence CTCN PAM
ugacccgcccaucucagccu

SEQ ID NO: 16956 - RNA, 20 nt, Artificial Sequence
  HTT spacer sequence CTCN PAM
gccucccaaagugcugggau

SEQ ID NO: 16957 - RNA, 20 nt, Artificial Sequence
  HTT spacer sequence CTCN PAM
caaagugcugggauuacagg

SEQ ID NO: 16958 - RNA, 20 nt, Artificial Sequence
  HTT spacer sequence CTCN PAM
cgccuguaaucccagcacuu

SEQ ID NO: 16959 - RNA, 20 nt, Artificial Sequence
  HTT spacer sequence CTCN PAM
aaaaaaaauaaaaaggccgg

SEQ ID NO: 16960 - RNA, 20 nt, Artificial Sequence
  HTT spacer sequence CTCN PAM
aucuccaaaaaaaauaaaaa

SEQ ID NO: 16961 - RNA, 20 nt, Artificial Sequence
  HTT spacer sequence CTCN PAM
gucacccaggcuggaguaca

SEQ ID NO: 16962 - RNA, 20 nt, Artificial Sequence
  HTT spacer sequence CTCN PAM
agccugggugacagagcaag

SEQ ID NO: 16963 - RNA, 20 nt, Artificial Sequence
  HTT spacer sequence CTCN PAM
acucacugcaaccuccgccu

SEQ ID NO: 16964 - RNA, 20 nt, Artificial Sequence
  HTT spacer sequence CTCN PAM
cugcaaccuccgccucccgg

SEQ ID NO: 16965 - RNA, 20 nt, Artificial Sequence
  HTT spacer sequence CTCN PAM
gccucccggguucaagcaau

SEQ ID NO: 16966 - RNA, 20 nt, Artificial Sequence
  HTT spacer sequence CTCN PAM
cggguucaagcaauuuuccu

SEQ ID NO: 16967 - RNA, 20 nt, Artificial Sequence
  HTT spacer sequence CTCN PAM
gccucccgaguagcugggac

SEQ ID NO: 16968 - RNA, 20 nt, Artificial Sequence
  HTT spacer sequence CTCN PAM
cgaguagcugggacuacagg

SEQ ID NO: 16969 - RNA, 20 nt, Artificial Sequence
  HTT spacer sequence CTCN PAM
ggaggcugaggcaggaaaau

SEQ ID NO: 16970 - RNA, 20 nt, Artificial Sequence
  HTT spacer sequence CTCN PAM
acuaaaaauacaaaaaauua

SEQ ID NO: 16971 - RNA, 20 nt, Artificial Sequence
  HTT spacer sequence CTCN PAM
ugaccuugugauccgcccgc

SEQ ID NO: 16972 - RNA, 20 nt, Artificial Sequence
  HTT spacer sequence CTCN PAM
gccucccaaaguguugggau

SEQ ID NO: 16973 - RNA, 20 nt, Artificial Sequence
  HTT spacer sequence CTCN PAM
caaaguguugggauuacagg

SEQ ID NO: 16974 - RNA, 20 nt, Artificial Sequence
  HTT spacer sequence CTCN PAM
cgcaccaagccaagaguuug

SEQ ID NO: 16975 - RNA, 20 nt, Artificial Sequence
  HTT spacer sequence CTCN PAM
caccaagccaagaguuugca

SEQ ID NO: 16976 - RNA, 20 nt, Artificial Sequence
  HTT spacer sequence CTCN PAM
uggcuuggugcgagagccac

SEQ ID NO: 16977 - RNA, 20 nt, Artificial Sequence
  HTT spacer sequence CTCN PAM
cagaaaagcaggcauuaguu

SEQ ID NO: 16978 - RNA, 20 nt, Artificial Sequence
  HTT spacer sequence CTCN PAM
gugauagagagguuuauugg

SEQ ID NO: 16979 - RNA, 20 nt, Artificial Sequence
  HTT spacer sequence CTCN PAM
aucacugagucccaaagugu

SEQ ID NO: 16980 - RNA, 20 nt, Artificial Sequence
  HTT spacer sequence CTCN PAM
cuaucacugagucccaaagu

SEQ ID NO: 16981 - RNA, 20 nt, Artificial Sequence
  HTT spacer sequence CTCN PAM
uauuuuacuauccuaccaau

SEQ ID NO: 16982 - RNA, 20 nt, Artificial Sequence
  HTT spacer sequence CTCN PAM
cggacgccuaaaauaaacau

SEQ ID NO: 16983 - RNA, 20 nt, Artificial Sequence
  HTT spacer sequence CTCN PAM
aaauggccagaauucccgau

SEQ ID NO: 16984 - RNA, 20 nt, Artificial Sequence
  HTT spacer sequence CTCN PAM
uauucaggagcucuccuucu

SEQ ID NO: 16985 - RNA, 20 nt, Artificial Sequence
  HTT spacer sequence CTCN PAM
ugaauacgagaaagaacaau

SEQ ID NO: 16986 - RNA, 20 nt, Artificial Sequence
  HTT spacer sequence CTCN PAM
ccuucucuccguauuuaauc

SEQ ID NO: 16987 - RNA, 20 nt, Artificial Sequence
  HTT spacer sequence CTCN PAM
uucucuccguauuuaaucuc

SEQ ID NO: 16988 - RNA, 20 nt, Artificial Sequence
  HTT spacer sequence CTCN PAM
ccguauuuaaucuccuguac

SEQ ID NO: 16989 - RNA, 20 nt, Artificial Sequence
  HTT spacer sequence CTCN PAM
guauuuaaucuccuguacag

SEQ ID NO: 16990 - RNA, 20 nt, Artificial Sequence
  HTT spacer sequence CTCN PAM
uguacaguaauuaauagguu

SEQ ID NO: 16991 - RNA, 20 nt, Artificial Sequence
  HTT spacer sequence CTCN PAM
uaaccuauuaauuacuguac

SEQ ID NO: 16992 - RNA, 20 nt, Artificial Sequence
  HTT spacer sequence CTCN PAM
gauagaaagcauaccuugaa

SEQ ID NO: 16993 - RNA, 20 nt, Artificial Sequence
  HTT spacer sequence CTCN PAM
gaagugaagcaagaccaggu

SEQ ID NO: 16994 - RNA, 20 nt, Artificial Sequence
  HTT spacer sequence CTCN PAM
ugguucauaccugucuugaa

SEQ ID NO: 16995 - RNA, 20 nt, Artificial Sequence
  HTT spacer sequence CTCN PAM
uguccucaguagagaugcua

SEQ ID NO: 16996 - RNA, 20 nt, Artificial Sequence
  HTT spacer sequence CTCN PAM
guagagaugcuacagcagug

SEQ ID NO: 16997 - RNA, 20 nt, Artificial Sequence
  HTT spacer sequence CTCN PAM
acugaggacaagagacagaa

SEQ ID NO: 16998 - RNA, 20 nt, Artificial Sequence
  HTT spacer sequence CTCN PAM
ccucaggcagggcagggcag

SEQ ID NO: 16999 - RNA, 20 nt, Artificial Sequence
  HTT spacer sequence CTCN PAM
ggcagggcagggcagugggg

SEQ ID NO: 17000 - RNA, 20 nt, Artificial Sequence
  HTT spacer sequence CTCN PAM
uggguuucaacuucccugac

SEQ ID NO: 17001 - RNA, 20 nt, Artificial Sequence
  HTT spacer sequence CTCN PAM
cuuuuacuggcuucucuugg

SEQ ID NO: 17002 - RNA, 20 nt, Artificial Sequence
  HTT spacer sequence CTCN PAM
gauugucaccaugugcuggc

SEQ ID NO: 17003 - RNA, 20 nt, Artificial Sequence
  HTT spacer sequence CTCN PAM
cugcagggcagccugccucc

SEQ ID NO: 17004 - RNA, 20 nt, Artificial Sequence
  HTT spacer sequence CTCN PAM
aauaaauacguguaguauca

SEQ ID NO: 17005 - RNA, 20 nt, Artificial Sequence
  HTT spacer sequence CTCN PAM
uaaauuguuuggaagcuccc

SEQ ID NO: 17006 - RNA, 20 nt, Artificial Sequence
  HTT spacer sequence CTCN PAM
ccaaggacagugaugaggca

SEQ ID NO: 17007 - RNA, 20 nt, Artificial Sequence
  HTT spacer sequence CTCN PAM
ucacuguccuuggggagcuu

SEQ ID NO: 17008 - RNA, 20 nt, Artificial Sequence
  HTT spacer sequence CTCN PAM
uaagugcuugcugccuagau

SEQ ID NO: 17009 - RNA, 20 nt, Artificial Sequence
  HTT spacer sequence CTCN PAM
ccaccuuugcuagauucuga

SEQ ID NO: 17010 - RNA, 20 nt, Artificial Sequence
  HTT spacer sequence CTCN PAM
accuuugcuagauucugagc

SEQ ID NO: 17011 - RNA, 20 nt, Artificial Sequence
  HTT spacer sequence CTCN PAM
gaaucuagcaaagguggaga

SEQ ID NO: 17012 - RNA, 20 nt, Artificial Sequence
  HTT spacer sequence CTCN PAM
gugaaugcucagaaucuagc

SEQ ID NO: 17013 - RNA, 20 nt, Artificial Sequence
  HTT spacer sequence CTCN PAM
aacucagugaaugcucagaa

SEQ ID NO: 17014 - RNA, 20 nt, Artificial Sequence
  HTT spacer sequence CTCN PAM
acugaugacaaaccaaguga

SEQ ID NO: 17015 - RNA, 20 nt, Artificial Sequence
  HTT spacer sequence CTCN PAM
uucgacaacacagggcaucu

SEQ ID NO: 17016 - RNA, 20 nt, Artificial Sequence
  HTT spacer sequence CTCN PAM
gugaggaaggugauacacag

SEQ ID NO: 17017 - RNA, 20 nt, Artificial Sequence
  HTT spacer sequence CTCN PAM
cugaggaugaaauggcaggu

SEQ ID NO: 17018 - RNA, 20 nt, Artificial Sequence
  HTT spacer sequence CTCN PAM
guguaucaccuuccucacug

SEQ ID NO: 17019 - RNA, 20 nt, Artificial Sequence
  HTT spacer sequence CTCN PAM
cuguguaucaccuuccucac

SEQ ID NO: 17020 - RNA, 20 nt, Artificial Sequence
  HTT spacer sequence CTCN PAM
gcauuucacuuuagcgguua

SEQ ID NO: 17021 - RNA, 20 nt, Artificial Sequence
  HTT spacer sequence CTCN PAM
accuauauuuuuacuuuaua

SEQ ID NO: 17022 - RNA, 20 nt, Artificial Sequence
  HTT spacer sequence CTCN PAM
uuuccaccuucagcuguuuu

SEQ ID NO: 17023 - RNA, 20 nt, Artificial Sequence
  HTT spacer sequence CTCN PAM
cucauuuccaccuucagcug

SEQ ID NO: 17024 - RNA, 20 nt, Artificial Sequence
  HTT spacer sequence CTCN PAM
aggaagacuaaugugauuca

SEQ ID NO: 17025 - RNA, 20 nt, Artificial Sequence
  HTT spacer sequence CTCN PAM
uuccccauucugcacuauac

SEQ ID NO: 17026 - RNA, 20 nt, Artificial Sequence
  HTT spacer sequence CTCN PAM
cagaguguaggagcugugcu

SEQ ID NO: 17027 - RNA, 20 nt, Artificial Sequence
  HTT spacer sequence CTCN PAM
gaguguaggagcugugcugc

SEQ ID NO: 17028 - RNA, 20 nt, Artificial Sequence
  HTT spacer sequence CTCN PAM
gagaguguauagugcagaau

SEQ ID NO: 17029 - RNA, 20 nt, Artificial Sequence
  HTT spacer sequence CTCN PAM
uacacucugagaguguauag

SEQ ID NO: 17030 - RNA, 20 nt, Artificial Sequence
  HTT spacer sequence CTCN PAM
gccuugcccagugugccagu

SEQ ID NO: 17031 - RNA, 20 nt, Artificial Sequence
  HTT spacer sequence CTCN PAM
uacagcaacaaauauuuuca

SEQ ID NO: 17032 - RNA, 20 nt, Artificial Sequence
  HTT spacer sequence CTCN PAM
uggguauauacccaaaagaa

SEQ ID NO: 17033 - RNA, 20 nt, Artificial Sequence
  HTT spacer sequence CTCN PAM
auggaugaauggauaagcaa

SEQ ID NO: 17034 - RNA, 20 nt, Artificial Sequence
  HTT spacer sequence CTCN PAM
uguaaguggaaucacauagu

SEQ ID NO: 17035 - RNA, 20 nt, Artificial Sequence
  HTT spacer sequence CTCN PAM
aggucccucauguaagugga

SEQ ID NO: 17036 - RNA, 20 nt, Artificial Sequence
  HTT spacer sequence CTCN PAM
ccugcagccccuggcaacca

SEQ ID NO: 17037 - RNA, 20 nt, Artificial Sequence
  HTT spacer sequence CTCN PAM
ccuccccugcagccccuggc

SEQ ID NO: 17038 - RNA, 20 nt, Artificial Sequence
  HTT spacer sequence CTCN PAM
ucaucuuguaaaaauaacuc

SEQ ID NO: 17039 - RNA, 20 nt, Artificial Sequence
  HTT spacer sequence CTCN PAM
cuucaucuuguaaaaauaac

SEQ ID NO: 17040 - RNA, 20 nt, Artificial Sequence
  HTT spacer sequence CTCN PAM
uaacuauuuuuaacuguaca

SEQ ID NO: 17041 - RNA, 20 nt, Artificial Sequence
  HTT spacer sequence CTCN PAM
ugccugaaauccaagcacuu

SEQ ID NO: 17042 - RNA, 20 nt, Artificial Sequence
  HTT spacer sequence CTCN PAM
aagugcuuggauuucaggca

SEQ ID NO: 17043 - RNA, 20 nt, Artificial Sequence
  HTT spacer sequence CTCN PAM
caaagugcuuggauuucagg

SEQ ID NO: 17044 - RNA, 20 nt, Artificial Sequence
  HTT spacer sequence CTCN PAM
ugccuuggccucucaaagug

SEQ ID NO: 17045 - RNA, 20 nt, Artificial Sequence
  HTT spacer sequence CTCN PAM
agcaauccuccugccuuggc

SEQ ID NO: 17046 - RNA, 20 nt, Artificial Sequence
  HTT spacer sequence CTCN PAM
uuggcucaagcaauccuccu

SEQ ID NO: 17047 - RNA, 20 nt, Artificial Sequence
  HTT spacer sequence CTCN PAM
aacuccuuggcucaagcaau

SEQ ID NO: 17048 - RNA, 20 nt, Artificial Sequence
  HTT spacer sequence CTCN PAM
gcaacaugguaggaccccau

SEQ ID NO: 17049 - RNA, 20 nt, Artificial Sequence
  HTT spacer sequence CTCN PAM
ggagacugaggcuggaggau

SEQ ID NO: 17050 - RNA, 20 nt, Artificial Sequence
  HTT spacer sequence CTCN PAM
ugaguagcugggaccacaug

SEQ ID NO: 17051 - RNA, 20 nt, Artificial Sequence
  HTT spacer sequence CTCN PAM
gucuccugaguagcugggac

SEQ ID NO: 17052 - RNA, 20 nt, Artificial Sequence
  HTT spacer sequence CTCN PAM
agccucagucuccugaguag

SEQ ID NO: 17053 - RNA, 20 nt, Artificial Sequence
  HTT spacer sequence CTCN PAM
agcgauccuccagccucagu

SEQ ID NO: 17054 - RNA, 20 nt, Artificial Sequence
  HTT spacer sequence CTCN PAM
ugggcucaagcgauccucca

SEQ ID NO: 17055 - RNA, 20 nt, Artificial Sequence
  HTT spacer sequence CTCN PAM
agugagauguguucaugcca

SEQ ID NO: 17056 - RNA, 20 nt, Artificial Sequence
  HTT spacer sequence CTCN PAM
cuagagacuuaaccuccugg

SEQ ID NO: 17057 - RNA, 20 nt, Artificial Sequence
  HTT spacer sequence CTCN PAM
agccucggcuauagaguaag

SEQ ID NO: 17058 - RNA, 20 nt, Artificial Sequence
  HTT spacer sequence CTCN PAM
gcuauagaguaagacccugc

SEQ ID NO: 17059 - RNA, 20 nt, Artificial Sequence
  HTT spacer sequence CTCN PAM
auagccgaggcuggagugca

SEQ ID NO: 17060 - RNA, 20 nt, Artificial Sequence
  HTT spacer sequence CTCN PAM
aaaaaacaaaacaaaacaag

SEQ ID NO: 17061 - RNA, 20 nt, Artificial Sequence
  HTT spacer sequence CTCN PAM
ugucuuguuuuguuuuguuu

SEQ ID NO: 17062 - RNA, 20 nt, Artificial Sequence
  HTT spacer sequence CTCN PAM
caaaguguugggauuacagg

SEQ ID NO: 17063 - RNA, 20 nt, Artificial Sequence
  HTT spacer sequence CTCN PAM
uggcuucaagugauccuuuu

SEQ ID NO: 17064 - RNA, 20 nt, Artificial Sequence
  HTT spacer sequence CTCN PAM
ggcuggucccaagcuccugg

SEQ ID NO: 17065 - RNA, 20 nt, Artificial Sequence
  HTT spacer sequence CTCN PAM
auauguugcucaggcugguc

SEQ ID NO: 17066 - RNA, 20 nt, Artificial Sequence
  HTT spacer sequence CTCN PAM
acaaagaaaaucaaaaacua

SEQ ID NO: 17067 - RNA, 20 nt, Artificial Sequence
  HTT spacer sequence CTCN PAM
caaguagcugggacuacagg

SEQ ID NO: 17068 - RNA, 20 nt, Artificial Sequence
  HTT spacer sequence CTCN PAM
gccucccaaguagcugggac

SEQ ID NO: 17069 - RNA, 20 nt, Artificial Sequence
  HTT spacer sequence CTCN PAM
caccucagccucccaaguag

SEQ ID NO: 17070 - RNA, 20 nt, Artificial Sequence
  HTT spacer sequence CTCN PAM
ugagcucaggaguucgaggc

SEQ ID NO: 17071 - RNA, 20 nt, Artificial Sequence
  HTT spacer sequence CTCN PAM
agagauccucccaccucagc

SEQ ID NO: 17072 - RNA, 20 nt, Artificial Sequence
  HTT spacer sequence CTCN PAM
ggaguucgaggcugcaggga

SEQ ID NO: 17073 - RNA, 20 nt, Artificial Sequence
  HTT spacer sequence CTCN PAM
ugagcucaagagauccuccc

SEQ ID NO: 17074 - RNA, 20 nt, Artificial Sequence
  HTT spacer sequence CTCN PAM
aacuccugagcucaagagau

SEQ ID NO: 17075 - RNA, 20 nt, Artificial Sequence
  HTT spacer sequence CTCN PAM
cugcagccucgaacuccuga

SEQ ID NO: 17076 - RNA, 20 nt, Artificial Sequence
  HTT spacer sequence CTCN PAM
agccugggcuacagaaugau

SEQ ID NO: 17077 - RNA, 20 nt, Artificial Sequence
  HTT spacer sequence CTCN PAM
uauuaaaaaaaaauccaaaa

SEQ ID NO: 17078 - RNA, 20 nt, Artificial Sequence
  HTT spacer sequence CTCN PAM
gguuuacuuuuuuuuuuuuu

SEQ ID NO: 17079 - RNA, 20 nt, Artificial Sequence
  HTT spacer sequence CTCN PAM
cagguuuacuuuuuuuuuuu

SEQ ID NO: 17080 - RNA, 20 nt, Artificial Sequence
  HTT spacer sequence CTCN PAM
uccuguguuaaauuuggagg

SEQ ID NO: 17081 - RNA, 20 nt, Artificial Sequence
  HTT spacer sequence CTCN PAM
uguguuaaauuuggaggcca

SEQ ID NO: 17082 - RNA, 20 nt, Artificial Sequence
  HTT spacer sequence CTCN PAM
aaauuuaacacaggaggagg

SEQ ID NO: 17083 - RNA, 20 nt, Artificial Sequence
  HTT spacer sequence CTCN PAM
caccugaaaucccagcacuu

SEQ ID NO: 17084 - RNA, 20 nt, Artificial Sequence
  HTT spacer sequence CTCN PAM
caaagugcugggauuucagg

SEQ ID NO: 17085 - RNA, 20 nt, Artificial Sequence
  HTT spacer sequence CTCN PAM
gccucccaaagugcugggau

SEQ ID NO: 17086 - RNA, 20 nt, Artificial Sequence
  HTT spacer sequence CTCN PAM
agcgaucaccccgccucagc

SEQ ID NO: 17087 - RNA, 20 nt, Artificial Sequence
  HTT spacer sequence CTCN PAM
agcucaagcgaucaccccgc

SEQ ID NO: 17088 - RNA, 20 nt, Artificial Sequence
  HTT spacer sequence CTCN PAM
ugcuauguuguccaggcugg

SEQ ID NO: 17089 - RNA, 20 nt, Artificial Sequence
  HTT spacer sequence CTCN PAM
acaaaaauaaaaaaauaaaa

SEQ ID NO: 17090 - RNA, 20 nt, Artificial Sequence
  HTT spacer sequence CTCN PAM
uggcuauuuuuuuuuauuuu

SEQ ID NO: 17091 - RNA, 20 nt, Artificial Sequence
  HTT spacer sequence CTCN PAM
ugccacuacuccuggcuauu

SEQ ID NO: 17092 - RNA, 20 nt, Artificial Sequence
  HTT spacer sequence CTCN PAM
ggcucaugccacuacuccug

SEQ ID NO: 17093 - RNA, 20 nt, Artificial Sequence
  HTT spacer sequence CTCN PAM
ugggcucaggcucaugccac

SEQ ID NO: 17094 - RNA, 20 nt, Artificial Sequence
  HTT spacer sequence CTCN PAM
cuacagcuugaccuccuggg

SEQ ID NO: 17095 - RNA, 20 nt, Artificial Sequence
  HTT spacer sequence CTCN PAM
agccugggcgagaucgagac

SEQ ID NO: 17096 - RNA, 20 nt, Artificial Sequence
  HTT spacer sequence CTCN PAM
cccaggcuggagugcagugg

SEQ ID NO: 17097 - RNA, 20 nt, Artificial Sequence
  HTT spacer sequence CTCN PAM
aucucgcccaggcuggagug

SEQ ID NO: 17098 - RNA, 20 nt, Artificial Sequence
  HTT spacer sequence CTCN PAM
agagaaagaaaaugacaagg

SEQ ID NO: 17099 - RNA, 20 nt, Artificial Sequence
  HTT spacer sequence CTCN PAM
agagacauggucucgaucuc

SEQ ID NO: 17100 - RNA, 20 nt, Artificial Sequence
  HTT spacer sequence CTCN PAM
uuacaaacgaucguucuucu

SEQ ID NO: 17101 - RNA, 20 nt, Artificial Sequence
  HTT spacer sequence CTCN PAM
caagaaaauagaaaggcaau

SEQ ID NO: 17102 - RNA, 20 nt, Artificial Sequence
  HTT spacer sequence CTCN PAM
agaaaauagaaaggcaauuc

SEQ ID NO: 17103 - RNA, 20 nt, Artificial Sequence
  HTT spacer sequence CTCN PAM
uauuuggaccaugacuuaau

SEQ ID NO: 17104 - RNA, 20 nt, Artificial Sequence
  HTT spacer sequence CTCN PAM
uuuaagcggcuuaggaguca

SEQ ID NO: 17105 - RNA, 20 nt, Artificial Sequence
  HTT spacer sequence CTCN PAM
uaagccgcuuaaaggagaac

SEQ ID NO: 17106 - RNA, 20 nt, Artificial Sequence
  HTT spacer sequence CTCN PAM
uucuauaggucuuugaucgu

SEQ ID NO: 17107 - RNA, 20 nt, Artificial Sequence
  HTT spacer sequence CTCN PAM
cuugggaacuagauucagau

SEQ ID NO: 17108 - RNA, 20 nt, Artificial Sequence
  HTT spacer sequence CTCN PAM
ugggaacuagauucagauag

SEQ ID NO: 17109 - RNA, 20 nt, Artificial Sequence
  HTT spacer sequence CTCN PAM
agcaguauuuacauuaugac

SEQ ID NO: 17110 - RNA, 20 nt, Artificial Sequence
  HTT spacer sequence CTCN PAM
aaaaaaaaaagaaagaaaga

SEQ ID NO: 17111 - RNA, 20 nt, Artificial Sequence
  HTT spacer sequence CTCN PAM
gucucaaaaaaaaaaagaaa

SEQ ID NO: 17112 - RNA, 20 nt, Artificial Sequence
  HTT spacer sequence CTCN PAM
uguugcccauccuggagugc

SEQ ID NO: 17113 - RNA, 20 nt, Artificial Sequence
  HTT spacer sequence CTCN PAM
aggaugggcaacaagaguga

SEQ ID NO: 17114 - RNA, 20 nt, Artificial Sequence
  HTT spacer sequence CTCN PAM
gcucaccgcaaccucugccu

SEQ ID NO: 17115 - RNA, 20 nt, Artificial Sequence
  HTT spacer sequence CTCN PAM
ccgcaaccucugccucccag

SEQ ID NO: 17116 - RNA, 20 nt, Artificial Sequence
  HTT spacer sequence CTCN PAM
gccucccagguucaagcaau

SEQ ID NO: 17117 - RNA, 20 nt, Artificial Sequence
  HTT spacer sequence CTCN PAM
cagguucaagcaauucuccu

SEQ ID NO: 17118 - RNA, 20 nt, Artificial Sequence
  HTT spacer sequence CTCN PAM
ugccucagccucccgaguag

SEQ ID NO: 17119 - RNA, 20 nt, Artificial Sequence
  HTT spacer sequence CTCN PAM
gccucccgaguagcugggau

SEQ ID NO: 17120 - RNA, 20 nt, Artificial Sequence
  HTT spacer sequence CTCN PAM
cgaguagcugggauuacggg

SEQ ID NO: 17121 - RNA, 20 nt, Artificial Sequence
  HTT spacer sequence CTCN PAM
ggaggcugaggcaggagaau

SEQ ID NO: 17122 - RNA, 20 nt, Artificial Sequence
  HTT spacer sequence CTCN PAM
acuaaaaauacaaaaaauua

SEQ ID NO: 17123 - RNA, 20 nt, Artificial Sequence
  HTT spacer sequence CTCN PAM
auguugaggcuggucucgaa

SEQ ID NO: 17124 - RNA, 20 nt, Artificial Sequence
  HTT spacer sequence CTCN PAM
acauggagaaacccugucuc

SEQ ID NO: 17125 - RNA, 20 nt, Artificial Sequence
  HTT spacer sequence CTCN PAM
aacuccugaccucaggugau

SEQ ID NO: 17126 - RNA, 20 nt, Artificial Sequence
  HTT spacer sequence CTCN PAM
ugaccucaggugauccaccc

SEQ ID NO: 17127 - RNA, 20 nt, Artificial Sequence
  HTT spacer sequence CTCN PAM
ggugauccacccgccucggc

SEQ ID NO: 17128 - RNA, 20 nt, Artificial Sequence
  HTT spacer sequence CTCN PAM
gccucccaaagugcugggau

SEQ ID NO: 17129 - RNA, 20 nt, Artificial Sequence
  HTT spacer sequence CTCN PAM
caaagugcugggauuacagg

SEQ ID NO: 17130 - RNA, 20 nt, Artificial Sequence
  HTT spacer sequence CTCN PAM
caccuguaaucccagcacuu

SEQ ID NO: 17131 - RNA, 20 nt, Artificial Sequence
  HTT spacer sequence CTCN PAM
ggccgggugcgguggcucac

SEQ ID NO: 17132 - RNA, 20 nt, Artificial Sequence
  HTT spacer sequence CTCN PAM
accaucuacuugccaaauua

SEQ ID NO: 17133 - RNA, 20 nt, Artificial Sequence
  HTT spacer sequence CTCN PAM
aucucuaccaucuacuugcc

SEQ ID NO: 17134 - RNA, 20 nt, Artificial Sequence
  HTT spacer sequence CTCN PAM
ccaccucuaucucuaccauc

SEQ ID NO: 17135 - RNA, 20 nt, Artificial Sequence
  HTT spacer sequence CTCN PAM
auauuuuggucugucaacuu

SEQ ID NO: 17136 - RNA, 20 nt, Artificial Sequence
  HTT spacer sequence CTCN PAM
gaagccucuauauuuugguc

SEQ ID NO: 17137 - RNA, 20 nt, Artificial Sequence
  HTT spacer sequence CTCN PAM
aaauagaacuaaacauguaa

SEQ ID NO: 17138 - RNA, 20 nt, Artificial Sequence
  HTT spacer sequence CTCN PAM
uaacaaucugaauuacaugu

SEQ ID NO: 17139 - RNA, 20 nt, Artificial Sequence
  HTT spacer sequence CTCN PAM
uuuauacuaccuccuaacaa

SEQ ID NO: 17140 - RNA, 20 nt, Artificial Sequence
  HTT spacer sequence CTCN PAM
ucuuuauuacgguagaguua

SEQ ID NO: 17141 - RNA, 20 nt, Artificial Sequence
  HTT spacer sequence CTCN PAM
accguaauaaagaugagauu

SEQ ID NO: 17142 - RNA, 20 nt, Artificial Sequence
  HTT spacer sequence CTCN PAM
aguuuaaacugggguuuuau

SEQ ID NO: 17143 - RNA, 20 nt, Artificial Sequence
  HTT spacer sequence CTCN PAM
uacucuaguuuaaacugggg

SEQ ID NO: 17144 - RNA, 20 nt, Artificial Sequence
  HTT spacer sequence CTCN PAM
uggaaagugcaggcaagggu

SEQ ID NO: 17145 - RNA, 20 nt, Artificial Sequence
  HTT spacer sequence CTCN PAM
gcucugcuuucuucuuuuca

SEQ ID NO: 17146 - RNA, 20 nt, Artificial Sequence
  HTT spacer sequence CTCN PAM
gcuuucuucuuuucauuuau

SEQ ID NO: 17147 - RNA, 20 nt, Artificial Sequence
  HTT spacer sequence CTCN PAM
cuuugucgccuaggcugaag

SEQ ID NO: 17148 - RNA, 20 nt, Artificial Sequence
  HTT spacer sequence CTCN PAM
cacugcacuucaugccacug

SEQ ID NO: 17149 - RNA, 20 nt, Artificial Sequence
  HTT spacer sequence CTCN PAM
cucuagccucgaacuccugg

SEQ ID NO: 17150 - RNA, 20 nt, Artificial Sequence
  HTT spacer sequence CTCN PAM
agccucgaacuccugggcuc

SEQ ID NO: 17151 - RNA, 20 nt, Artificial Sequence
  HTT spacer sequence CTCN PAM
aacuccugggcucuagaguu

SEQ ID NO: 17152 - RNA, 20 nt, Artificial Sequence
  HTT spacer sequence CTCN PAM
ugggcucuagaguucuuccu

SEQ ID NO: 17153 - RNA, 20 nt, Artificial Sequence
  HTT spacer sequence CTCN PAM
agaguucuuccugccucagc

SEQ ID NO: 17154 - RNA, 20 nt, Artificial Sequence
  HTT spacer sequence CTCN PAM
agagcccaggaguucgaggc

SEQ ID NO: 17155 - RNA, 20 nt, Artificial Sequence
  HTT spacer sequence CTCN PAM
gccuucuaaguagcugagac

SEQ ID NO: 17156 - RNA, 20 nt, Artificial Sequence
  HTT spacer sequence CTCN PAM
gcuacuuagaaggcugaggc

SEQ ID NO: 17157 - RNA, 20 nt, Artificial Sequence
  HTT spacer sequence CTCN PAM
uagcuucaggcgauccuccu

SEQ ID NO: 17158 - RNA, 20 nt, Artificial Sequence
  HTT spacer sequence CTCN PAM
ugccucugccucccaaaaug

SEQ ID NO: 17159 - RNA, 20 nt, Artificial Sequence
  HTT spacer sequence CTCN PAM
gccucccaaaaugcugaggu

SEQ ID NO: 17160 - RNA, 20 nt, Artificial Sequence
  HTT spacer sequence CTCN PAM
caaaaugcugagguuauagg

SEQ ID NO: 17161 - RNA, 20 nt, Artificial Sequence
  HTT spacer sequence CTCN PAM
gcauuuugggaggcagaggc

SEQ ID NO: 17162 - RNA, 20 nt, Artificial Sequence
  HTT spacer sequence CTCN PAM
ucucugcuuccuguguuagu

SEQ ID NO: 17163 - RNA, 20 nt, Artificial Sequence
  HTT spacer sequence CTCN PAM
gcuuccuguguuaguuuugu

SEQ ID NO: 17164 - RNA, 20 nt, Artificial Sequence
  HTT spacer sequence CTCN PAM
ggugggcuguuuucacauga

SEQ ID NO: 17165 - RNA, 20 nt, Artificial Sequence
  HTT spacer sequence CTCN PAM
agcaggcuguguucucagcc

SEQ ID NO: 17166 - RNA, 20 nt, Artificial Sequence
  HTT spacer sequence CTCN PAM
gccccucaaguaggccuaug

SEQ ID NO: 17167 - RNA, 20 nt, Artificial Sequence
  HTT spacer sequence CTCN PAM
aguaggccuaugugauuggc

SEQ ID NO: 17168 - RNA, 20 nt, Artificial Sequence
  HTT spacer sequence CTCN PAM
ugcaaggccaaucacauagg

SEQ ID NO: 17169 - RNA, 20 nt, Artificial Sequence
  HTT spacer sequence CTCN PAM
gguccacaugggccaaaugg

SEQ ID NO: 17170 - RNA, 20 nt, Artificial Sequence
  HTT spacer sequence CTCN PAM
cauuuggcccauguggacca

SEQ ID NO: 17171 - RNA, 20 nt, Artificial Sequence
  HTT spacer sequence CTCN PAM
ucaauggaaugcuguccagu

SEQ ID NO: 17172 - RNA, 20 nt, Artificial Sequence
  HTT spacer sequence CTCN PAM
ucaucaauggaaugcugucc

SEQ ID NO: 17173 - RNA, 20 nt, Artificial Sequence
  HTT spacer sequence CTCN PAM
gggaguaagggagaggagca

SEQ ID NO: 17174 - RNA, 20 nt, Artificial Sequence
  HTT spacer sequence CTCN PAM
cggagaccagccccaccucc

SEQ ID NO: 17175 - RNA, 20 nt, Artificial Sequence
  HTT spacer sequence CTCN PAM
cuuacucccggagaccagcc

SEQ ID NO: 17176 - RNA, 20 nt, Artificial Sequence
  HTT spacer sequence CTCN PAM
cccuuacucccggagaccag

SEQ ID NO: 17177 - RNA, 20 nt, Artificial Sequence
  HTT spacer sequence CTCN PAM
ucucccuuacucccggagac

SEQ ID NO: 17178 - RNA, 20 nt, Artificial Sequence
  HTT spacer sequence CTCN PAM
aaaauucuaacugcugugcu

SEQ ID NO: 17179 - RNA, 20 nt, Artificial Sequence
  HTT spacer sequence CTCN PAM
caucccuuuuuaaggcaacu

SEQ ID NO: 17180 - RNA, 20 nt, Artificial Sequence
  HTT spacer sequence CTCN PAM
uuucucuuacuggauuuuug

SEQ ID NO: 17181 - RNA, 20 nt, Artificial Sequence
  HTT spacer sequence CTCN PAM
uacuggauuuuuguacacau

SEQ ID NO: 17182 - RNA, 20 nt, Artificial Sequence
  HTT spacer sequence CTCN PAM
aagauauguaugcaaaaugu

SEQ ID NO: 17183 - RNA, 20 nt, Artificial Sequence
  HTT spacer sequence CTCN PAM
aauggaccaaggcugaaaau

SEQ ID NO: 17184 - RNA, 20 nt, Artificial Sequence
  HTT spacer sequence CTCN PAM
uggcguggcccgccuccaug

SEQ ID NO: 17185 - RNA, 20 nt, Artificial Sequence
  HTT spacer sequence CTCN PAM
augcuagcaggcucugguug

SEQ ID NO: 17186 - RNA, 20 nt, Artificial Sequence
  HTT spacer sequence CTCN PAM
gguugugccaaguucaguug

SEQ ID NO: 17187 - RNA, 20 nt, Artificial Sequence
  HTT spacer sequence CTCN PAM
acugaacuuggcacaaccag

SEQ ID NO: 17188 - RNA, 20 nt, Artificial Sequence
  HTT spacer sequence CTCN PAM
ugccugcacggaacuuccag

SEQ ID NO: 17189 - RNA, 20 nt, Artificial Sequence
  HTT spacer sequence CTCN PAM
gccugcccacccauuucguc

SEQ ID NO: 17190 - RNA, 20 nt, Artificial Sequence
  HTT spacer sequence CTCN PAM
gaaauccugccucugccugc

SEQ ID NO: 17191 - RNA, 20 nt, Artificial Sequence
  HTT spacer sequence CTCN PAM
cucagaaauccugccucugc

SEQ ID NO: 17192 - RNA, 20 nt, Artificial Sequence
  HTT spacer sequence CTCN PAM
cccucagaaauccugccucu

SEQ ID NO: 17193 - RNA, 20 nt, Artificial Sequence
  HTT spacer sequence CTCN PAM
gcaaaaagcuagcuacuucu

SEQ ID NO: 17194 - RNA, 20 nt, Artificial Sequence
  HTT spacer sequence CTCN PAM
ucucugcaaaaagcuagcua

SEQ ID NO: 17195 - RNA, 20 nt, Artificial Sequence
  HTT spacer sequence CTCN PAM
ugggugccggaacucuucuc

SEQ ID NO: 17196 - RNA, 20 nt, Artificial Sequence
  HTT spacer sequence CTCN PAM
cuugggugccggaacucuuc

SEQ ID NO: 17197 - RNA, 20 nt, Artificial Sequence
  HTT spacer sequence CTCN PAM
gcugcucucuugggugccgg

SEQ ID NO: 17198 - RNA, 20 nt, Artificial Sequence
  HTT spacer sequence CTCN PAM
cagcugcucucuugggugcc

SEQ ID NO: 17199 - RNA, 20 nt, Artificial Sequence
  HTT spacer sequence CTCN PAM
aggauucuguggcgccgugc

SEQ ID NO: 17200 - RNA, 20 nt, Artificial Sequence
  HTT spacer sequence CTCN PAM
ucauggccucugcauucagc

SEQ ID NO: 17201 - RNA, 20 nt, Artificial Sequence
  HTT spacer sequence CTCN PAM
gcauucagcugcugucaccc

SEQ ID NO: 17202 - RNA, 20 nt, Artificial Sequence
  HTT spacer sequence CTCN PAM
gcacaggccauggccaaaau

SEQ ID NO: 17203 - RNA, 20 nt, Artificial Sequence
  HTT spacer sequence CTCN PAM
aguuuuugagccuuacuugc

SEQ ID NO: 17204 - RNA, 20 nt, Artificial Sequence
  HTT spacer sequence CTCN PAM
aaaacuagaguccacuauga

SEQ ID NO: 17205 - RNA, 20 nt, Artificial Sequence
  HTT spacer sequence CTCN PAM
acuuuaaacuuauuacagug

SEQ ID NO: 17206 - RNA, 20 nt, Artificial Sequence
  HTT spacer sequence CTCN PAM
uggcaucaaauccaaaccaa

SEQ ID NO: 17207 - RNA, 20 nt, Artificial Sequence
  HTT spacer sequence CTCN PAM
uccuggcaucaaauccaaac

SEQ ID NO: 17208 - RNA, 20 nt, Artificial Sequence
  HTT spacer sequence CTCN PAM
uuucuaaggacuagucuugc

SEQ ID NO: 17209 - RNA, 20 nt, Artificial Sequence
  HTT spacer sequence CTCN PAM
gacauguagaaggacacaga

SEQ ID NO: 17210 - RNA, 20 nt, Artificial Sequence
  HTT spacer sequence CTCN PAM
gugcagcucaaaugugguca

SEQ ID NO: 17211 - RNA, 20 nt, Artificial Sequence
  HTT spacer sequence CTCN PAM
aauguggucacugucuuauu

SEQ ID NO: 17212 - RNA, 20 nt, Artificial Sequence
  HTT spacer sequence CTCN PAM
ccuuccaucucacaauugag

SEQ ID NO: 17213 - RNA, 20 nt, Artificial Sequence
  HTT spacer sequence CTCN PAM
uuccaucucacaauugaggc

SEQ ID NO: 17214 - RNA, 20 nt, Artificial Sequence
  HTT spacer sequence CTCN PAM
caauugaggcaaaauauugu

SEQ ID NO: 17215 - RNA, 20 nt, Artificial Sequence
  HTT spacer sequence CTCN PAM
auugugagauggaaggagag

SEQ ID NO: 17216 - RNA, 20 nt, Artificial Sequence
  HTT spacer sequence CTCN PAM
gcuggaaguccuauuggaca

SEQ ID NO: 17217 - RNA, 20 nt, Artificial Sequence
  HTT spacer sequence CTCN PAM
guguggauaguggcuccugu

SEQ ID NO: 17218 - RNA, 20 nt, Artificial Sequence
  HTT spacer sequence CTCN PAM
uguaugagacagugcagguc

SEQ ID NO: 17219 - RNA, 20 nt, Artificial Sequence
  HTT spacer sequence CTCN PAM
uacaggagccacuauccaca

SEQ ID NO: 17220 - RNA, 20 nt, Artificial Sequence
  HTT spacer sequence CTCN PAM
acagaccugcacugucucau

SEQ ID NO: 17221 - RNA, 20 nt, Artificial Sequence
  HTT spacer sequence CTCN PAM
caccaguaaagcugcuucuc

SEQ ID NO: 17222 - RNA, 20 nt, Artificial Sequence
  HTT spacer sequence CTCN PAM
acucccaccaguaaagcugc

SEQ ID NO: 17223 - RNA, 20 nt, Artificial Sequence
  HTT spacer sequence CTCN PAM
aagcccuccacucccaccag

SEQ ID NO: 17224 - RNA, 20 nt, Artificial Sequence
  HTT spacer sequence CTCN PAM
ccaagcccuccacucccacc

SEQ ID NO: 17225 - RNA, 20 nt, Artificial Sequence
  HTT spacer sequence CTCN PAM
uaucuugaaaccaaucaaau

SEQ ID NO: 17226 - RNA, 20 nt, Artificial Sequence
  HTT spacer sequence CTCN PAM
uguuuuuauauaaguaaggu

SEQ ID NO: 17227 - RNA, 20 nt, Artificial Sequence
  HTT spacer sequence CTCN PAM
uguugggagaggaggguauu

SEQ ID NO: 17228 - RNA, 20 nt, Artificial Sequence
  HTT spacer sequence CTCN PAM
caacaagaggaaaagcagga

SEQ ID NO: 17229 - RNA, 20 nt, Artificial Sequence
  HTT spacer sequence CTCN PAM
cccaacaagaggaaaagcag

SEQ ID NO: 17230 - RNA, 20 nt, Artificial Sequence
  HTT spacer sequence CTCN PAM
ucucccaacaagaggaaaag

SEQ ID NO: 17231 - RNA, 20 nt, Artificial Sequence
  HTT spacer sequence CTCN PAM
uguuuacaacauuuggggua

SEQ ID NO: 17232 - RNA, 20 nt, Artificial Sequence
  HTT spacer sequence CTCN PAM
cuuuugguccaagauagacu

SEQ ID NO: 17233 - RNA, 20 nt, Artificial Sequence
  HTT spacer sequence CTCN PAM
uuugguccaagauagacugg

SEQ ID NO: 17234 - RNA, 20 nt, Artificial Sequence
  HTT spacer sequence CTCN PAM
ggugccaucaucuguuucua

SEQ ID NO: 17235 - RNA, 20 nt, Artificial Sequence
  HTT spacer sequence CTCN PAM
ugggccucuggugccaucau

SEQ ID NO: 17236 - RNA, 20 nt, Artificial Sequence
  HTT spacer sequence CTCN PAM
aauucagccacauggacaac

SEQ ID NO: 17237 - RNA, 20 nt, Artificial Sequence
  HTT spacer sequence CTCN PAM
acacggccuuccagcuuugc

SEQ ID NO: 17238 - RNA, 20 nt, Artificial Sequence
  HTT spacer sequence CTCN PAM
ccgugauuuucaaggacaca

SEQ ID NO: 17239 - RNA, 20 nt, Artificial Sequence
  HTT spacer sequence CTCN PAM
ucccugccugccauccagac

SEQ ID NO: 17240 - RNA, 20 nt, Artificial Sequence
  HTT spacer sequence CTCN PAM
ugccacccugacuggguaua

SEQ ID NO: 17241 - RNA, 20 nt, Artificial Sequence
  HTT spacer sequence CTCN PAM
cugaguccuggucgugggug

SEQ ID NO: 17242 - RNA, 20 nt, Artificial Sequence
  HTT spacer sequence CTCN PAM
gggaggaaggggcagcagcu

SEQ ID NO: 17243 - RNA, 20 nt, Artificial Sequence
  HTT spacer sequence CTCN PAM
accacccacgaccaggacuc

SEQ ID NO: 17244 - RNA, 20 nt, Artificial Sequence
  HTT spacer sequence CTCN PAM
cggaggcaugcucaccccuu

SEQ ID NO: 17245 - RNA, 20 nt, Artificial Sequence
  HTT spacer sequence CTCN PAM
gugagcgucauggcacaucu

SEQ ID NO: 17246 - RNA, 20 nt, Artificial Sequence
  HTT spacer sequence CTCN PAM
ccccuuccucuguggcagag

SEQ ID NO: 17247 - RNA, 20 nt, Artificial Sequence
  HTT spacer sequence CTCN PAM
guggcagaggggauggcugc

SEQ ID NO: 17248 - RNA, 20 nt, Artificial Sequence
  HTT spacer sequence CTCN PAM
gccacagaggaaggggugag

SEQ ID NO: 17249 - RNA, 20 nt, Artificial Sequence
  HTT spacer sequence CTCN PAM
ucccuguccuuuccaaagcg

SEQ ID NO: 17250 - RNA, 20 nt, Artificial Sequence
  HTT spacer sequence CTCN PAM
uccaguauuccugcuuugcc

SEQ ID NO: 17251 - RNA, 20 nt, Artificial Sequence
  HTT spacer sequence CTCN PAM
cuuccaguauuccugcuuug

SEQ ID NO: 17252 - RNA, 20 nt, Artificial Sequence
  HTT spacer sequence CTCN PAM
cucuuccaguauuccugcuu

SEQ ID NO: 17253 - RNA, 20 nt, Artificial Sequence
  HTT spacer sequence CTCN PAM
cagcauuauaauuguuagua

SEQ ID NO: 17254 - RNA, 20 nt, Artificial Sequence
  HTT spacer sequence CTCN PAM
uggguaugugguagguuuaa

SEQ ID NO: 17255 - RNA, 20 nt, Artificial Sequence
  HTT spacer sequence CTCN PAM
gugaaguauuucccgcuuug

SEQ ID NO: 17256 - RNA, 20 nt, Artificial Sequence
  HTT spacer sequence CTCN PAM
caucaggccacuucuugggu

SEQ ID NO: 17257 - RNA, 20 nt, Artificial Sequence
  HTT spacer sequence CTCN PAM
ucaggccacuucuuggguug

SEQ ID NO: 17258 - RNA, 20 nt, Artificial Sequence
  HTT spacer sequence CTCN PAM
ccacuaucaacccaagaagu

SEQ ID NO: 17259 - RNA, 20 nt, Artificial Sequence
  HTT spacer sequence CTCN PAM
acgccacacagugacugggg

SEQ ID NO: 17260 - RNA, 20 nt, Artificial Sequence
  HTT spacer sequence CTCN PAM
ucuccacgccacacagugac

SEQ ID NO: 17261 - RNA, 20 nt, Artificial Sequence
  HTT spacer sequence CTCN PAM
cugugucauagcugaacaag

SEQ ID NO: 17262 - RNA, 20 nt, Artificial Sequence
  HTT spacer sequence CTCN PAM
gugucauagcugaacaagcc

SEQ ID NO: 17263 - RNA, 20 nt, Artificial Sequence
  HTT spacer sequence CTCN PAM
gggcugggcuuguucagcua

SEQ ID NO: 17264 - RNA, 20 nt, Artificial Sequence
  HTT spacer sequence CTCN PAM
cugggcugggcuuguucagc

SEQ ID NO: 17265 - RNA, 20 nt, Artificial Sequence
  HTT spacer sequence CTCN PAM
uagggcagaaaccucucugg

SEQ ID NO: 17266 - RNA, 20 nt, Artificial Sequence
  HTT spacer sequence CTCN PAM
cgaugguggaauugggaugc

SEQ ID NO: 17267 - RNA, 20 nt, Artificial Sequence
  HTT spacer sequence CTCN PAM
augguggaauugggaugcga

SEQ ID NO: 17268 - RNA, 20 nt, Artificial Sequence
  HTT spacer sequence CTCN PAM
caaaaacacggcuugcggag

SEQ ID NO: 17269 - RNA, 20 nt, Artificial Sequence
  HTT spacer sequence CTCN PAM
gcaagccguguuuuugugag

SEQ ID NO: 17270 - RNA, 20 nt, Artificial Sequence
  HTT spacer sequence CTCN PAM
gggugcagccugcauccgcc

SEQ ID NO: 17271 - RNA, 20 nt, Artificial Sequence
  HTT spacer sequence CTCN PAM
uuuccugcacugccaucgug

SEQ ID NO: 17272 - RNA, 20 nt, Artificial Sequence
  HTT spacer sequence CTCN PAM
gggcacuuggucccuuucuc

SEQ ID NO: 17273 - RNA, 20 nt, Artificial Sequence
  HTT spacer sequence CTCN PAM
uccccugagucccuuuggcu

SEQ ID NO: 17274 - RNA, 20 nt, Artificial Sequence
  HTT spacer sequence CTCN PAM
ggggaagagaaagggaccaa

SEQ ID NO: 17275 - RNA, 20 nt, Artificial Sequence
  HTT spacer sequence CTCN PAM
ccugugccacccuugugauc

SEQ ID NO: 17276 - RNA, 20 nt, Artificial Sequence
  HTT spacer sequence CTCN PAM
gccuucuuucugucucagac

SEQ ID NO: 17277 - RNA, 20 nt, Artificial Sequence
  HTT spacer sequence CTCN PAM
gacugcugcucaucacuacu

SEQ ID NO: 17278 - RNA, 20 nt, Artificial Sequence
  HTT spacer sequence CTCN PAM
ucacuacucgggacccuagg

SEQ ID NO: 17279 - RNA, 20 nt, Artificial Sequence
  HTT spacer sequence CTCN PAM
ggacccuaggaagggagguu

SEQ ID NO: 17280 - RNA, 20 nt, Artificial Sequence
  HTT spacer sequence CTCN PAM
cuuccuagggucccgaguag

SEQ ID NO: 17281 - RNA, 20 nt, Artificial Sequence
  HTT spacer sequence CTCN PAM
guggaaccucccuuccuagg

SEQ ID NO: 17282 - RNA, 20 nt, Artificial Sequence
  HTT spacer sequence CTCN PAM
ucucagccacguucucagug

SEQ ID NO: 17283 - RNA, 20 nt, Artificial Sequence
  HTT spacer sequence CTCN PAM
gccacguucucagugccacu

SEQ ID NO: 17284 - RNA, 20 nt, Artificial Sequence
  HTT spacer sequence CTCN PAM
gugccacuguugucuuuguu

SEQ ID NO: 17285 - RNA, 20 nt, Artificial Sequence
  HTT spacer sequence CTCN PAM
ggugugaagccauggaaaug

SEQ ID NO: 17286 - RNA, 20 nt, Artificial Sequence
  HTT spacer sequence CTCN PAM
auacauugucauaaaaccaa

SEQ ID NO: 17287 - RNA, 20 nt, Artificial Sequence
  HTT spacer sequence CTCN PAM
augugggaauucggggaccc

SEQ ID NO: 17288 - RNA, 20 nt, Artificial Sequence
  HTT spacer sequence CTCN PAM
uuuccuucuuuugguucugu

SEQ ID NO: 17289 - RNA, 20 nt, Artificial Sequence
  HTT spacer sequence CTCN PAM
aggccuucacauccucugug

SEQ ID NO: 17290 - RNA, 20 nt, Artificial Sequence
  HTT spacer sequence CTCN PAM
gugucugguuggggacaagg

SEQ ID NO: 17291 - RNA, 20 nt, Artificial Sequence
  HTT spacer sequence CTCN PAM
uuguccccaaccagacacag

SEQ ID NO: 17292 - RNA, 20 nt, Artificial Sequence
  HTT spacer sequence CTCN PAM
ccuuguccccaaccagacac

SEQ ID NO: 17293 - RNA, 20 nt, Artificial Sequence
  HTT spacer sequence CTCN PAM
cguggugacaggucacagcc

SEQ ID NO: 17294 - RNA, 20 nt, Artificial Sequence
  HTT spacer sequence CTCN PAM
uggugacaggucacagcccc

SEQ ID NO: 17295 - RNA, 20 nt, Artificial Sequence
  HTT spacer sequence CTCN PAM
guccccuuuuacaggguggg

SEQ ID NO: 17296 - RNA, 20 nt, Artificial Sequence
  HTT spacer sequence CTCN PAM
caguccccuuuuacagggug

SEQ ID NO: 17297 - RNA, 20 nt, Artificial Sequence
  HTT spacer sequence CTCN PAM
gauguguuuucugugaggau

SEQ ID NO: 17298 - RNA, 20 nt, Artificial Sequence
  HTT spacer sequence CTCN PAM
cagaaaacacaucagagacc

SEQ ID NO: 17299 - RNA, 20 nt, Artificial Sequence
  HTT spacer sequence CTCN PAM
uccuggaaucaccuguuuuu

SEQ ID NO: 17300 - RNA, 20 nt, Artificial Sequence
  HTT spacer sequence CTCN PAM
uuccaaggguuucccugacu

SEQ ID NO: 17301 - RNA, 20 nt, Artificial Sequence
  HTT spacer sequence CTCN PAM
uucugaagccaccacuaauc

SEQ ID NO: 17302 - RNA, 20 nt, Artificial Sequence
  HTT spacer sequence CTCN PAM
cugcagcucauucugaagcc

SEQ ID NO: 17303 - RNA, 20 nt, Artificial Sequence
  HTT spacer sequence CTCN PAM
ccgcagagagagugaugaau

SEQ ID NO: 17304 - RNA, 20 nt, Artificial Sequence
  HTT spacer sequence CTCN PAM
gcagagagagugaugaaucc

SEQ ID NO: 17305 - RNA, 20 nt, Artificial Sequence
  HTT spacer sequence CTCN PAM
gcggagagcaaggcagacac

SEQ ID NO: 17306 - RNA, 20 nt, Artificial Sequence
  HTT spacer sequence CTCN PAM
cugcggagagcaaggcagac

SEQ ID NO: 17307 - RNA, 20 nt, Artificial Sequence
  HTT spacer sequence CTCN PAM
cucugcggagagcaaggcag

SEQ ID NO: 17308 - RNA, 20 nt, Artificial Sequence
  HTT spacer sequence CTCN PAM
ugagccucuguccaguuguu

SEQ ID NO: 17309 - RNA, 20 nt, Artificial Sequence
  HTT spacer sequence CTCN PAM
ugagaaggauucaucacucu

SEQ ID NO: 17310 - RNA, 20 nt, Artificial Sequence
  HTT spacer sequence CTCN PAM
guccaguuguuccucccucc

SEQ ID NO: 17311 - RNA, 20 nt, Artificial Sequence
  HTT spacer sequence CTCN PAM
cuccaccuggaagggacccu

SEQ ID NO: 17312 - RNA, 20 nt, Artificial Sequence
  HTT spacer sequence CTCN PAM
accuggaagggacccugggu

SEQ ID NO: 17313 - RNA, 20 nt, Artificial Sequence
  HTT spacer sequence CTCN PAM
uaacaucccagcggaacagg

SEQ ID NO: 17314 - RNA, 20 nt, Artificial Sequence
  HTT spacer sequence CTCN PAM
uccuccugccggcuuccugg

SEQ ID NO: 17315 - RNA, 20 nt, Artificial Sequence
  HTT spacer sequence CTCN PAM
ugccggcuuccuggccccuc

SEQ ID NO: 17316 - RNA, 20 nt, Artificial Sequence
  HTT spacer sequence CTCN PAM
uaugucugcuuccugacgcc

SEQ ID NO: 17317 - RNA, 20 nt, Artificial Sequence
  HTT spacer sequence CTCN PAM
ggaauugaauuuugccuuug

SEQ ID NO: 17318 - RNA, 20 nt, Artificial Sequence
  HTT spacer sequence CTCN PAM
caccuguaauccugugcacu

SEQ ID NO: 17319 - RNA, 20 nt, Artificial Sequence
  HTT spacer sequence CTCN PAM
agcaaucugcccaccuuggc

SEQ ID NO: 17320 - RNA, 20 nt, Artificial Sequence
  HTT spacer sequence CTCN PAM
ugggcucaagcaaucugccc

SEQ ID NO: 17321 - RNA, 20 nt, Artificial Sequence
  HTT spacer sequence CTCN PAM
aacuccugggcucaagcaau

SEQ ID NO: 17322 - RNA, 20 nt, Artificial Sequence
  HTT spacer sequence CTCN PAM
ggcuaaucucaaacuccugg

SEQ ID NO: 17323 - RNA, 20 nt, Artificial Sequence
  HTT spacer sequence CTCN PAM
cagcuacucaggaaccugag

SEQ ID NO: 17324 - RNA, 20 nt, Artificial Sequence
  HTT spacer sequence CTCN PAM
ggaaccugagacaggaggau

SEQ ID NO: 17325 - RNA, 20 nt, Artificial Sequence
  HTT spacer sequence CTCN PAM
gguuccugaguagcugggag

SEQ ID NO: 17326 - RNA, 20 nt, Artificial Sequence
  HTT spacer sequence CTCN PAM
ugucucagguuccugaguag

SEQ ID NO: 17327 - RNA, 20 nt, Artificial Sequence
  HTT spacer sequence CTCN PAM
auugauccuccugucucagg

SEQ ID NO: 17328 - RNA, 20 nt, Artificial Sequence
  HTT spacer sequence CTCN PAM
ggggcucaauugauccuccu

SEQ ID NO: 17329 - RNA, 20 nt, Artificial Sequence
  HTT spacer sequence CTCN PAM
agucuggucaaacagaguga

SEQ ID NO: 17330 - RNA, 20 nt, Artificial Sequence
  HTT spacer sequence CTCN PAM
guuugaccagacuggaguac

SEQ ID NO: 17331 - RNA, 20 nt, Artificial Sequence
  HTT spacer sequence CTCN PAM
cucuguuugaccagacugga

SEQ ID NO: 17332 - RNA, 20 nt, Artificial Sequence
  HTT spacer sequence CTCN PAM
uuuacacuuaacagccacac

SEQ ID NO: 17333 - RNA, 20 nt, Artificial Sequence
  HTT spacer sequence CTCN PAM
ugcuuccuucaugagggguc

SEQ ID NO: 17334 - RNA, 20 nt, Artificial Sequence
  HTT spacer sequence CTCN PAM
ugaaggaagcaggagggcac

SEQ ID NO: 17335 - RNA, 20 nt, Artificial Sequence
  HTT spacer sequence CTCN PAM
cucuguguacacuccauucu

SEQ ID NO: 17336 - RNA, 20 nt, Artificial Sequence
  HTT spacer sequence CTCN PAM
guguacacuccauucucauu

SEQ ID NO: 17337 - RNA, 20 nt, Artificial Sequence
  HTT spacer sequence CTCN PAM
auucucauugcccauggugg

SEQ ID NO: 17338 - RNA, 20 nt, Artificial Sequence
  HTT spacer sequence CTCN PAM
uugcccauggugguuuguuu

SEQ ID NO: 17339 - RNA, 20 nt, Artificial Sequence
  HTT spacer sequence CTCN PAM
uguuucucaagccauggcag

SEQ ID NO: 17340 - RNA, 20 nt, Artificial Sequence
  HTT spacer sequence CTCN PAM
agccauggcagccugccucu

SEQ ID NO: 17341 - RNA, 20 nt, Artificial Sequence
  HTT spacer sequence CTCN PAM
ugcccucuuuacuaaaaagg

SEQ ID NO: 17342 - RNA, 20 nt, Artificial Sequence
  HTT spacer sequence CTCN PAM
uuacuaaaaaggccuuugca

SEQ ID NO: 17343 - RNA, 20 nt, Artificial Sequence
  HTT spacer sequence CTCN PAM
gcaaaggccuuuuuaguaaa

SEQ ID NO: 17344 - RNA, 20 nt, Artificial Sequence
  HTT spacer sequence CTCN PAM
cucauccuaggcccuccagc

SEQ ID NO: 17345 - RNA, 20 nt, Artificial Sequence
  HTT spacer sequence CTCN PAM
cauccuaggcccuccagcuu

SEQ ID NO: 17346 - RNA, 20 nt, Artificial Sequence
  HTT spacer sequence CTCN PAM
uccuaggcccuccagcuuga

SEQ ID NO: 17347 - RNA, 20 nt, Artificial Sequence
  HTT spacer sequence CTCN PAM
agcuugauucuguggagcug

SEQ ID NO: 17348 - RNA, 20 nt, Artificial Sequence
  HTT spacer sequence CTCN PAM
acagaaucaagcuggagggc

SEQ ID NO: 17349 - RNA, 20 nt, Artificial Sequence
  HTT spacer sequence CTCN PAM
ugucacucaguagcuugugg

SEQ ID NO: 17350 - RNA, 20 nt, Artificial Sequence
  HTT spacer sequence CTCN PAM
guagcuuguggggucuucuc

SEQ ID NO: 17351 - RNA, 20 nt, Artificial Sequence
  HTT spacer sequence CTCN PAM
gucuagccacuuaauugauu

SEQ ID NO: 17352 - RNA, 20 nt, Artificial Sequence
  HTT spacer sequence CTCN PAM
aguugcuguccauggucucu

SEQ ID NO: 17353 - RNA, 20 nt, Artificial Sequence
  HTT spacer sequence CTCN PAM
aggaacacaaucaauuaagu

SEQ ID NO: 17354 - RNA, 20 nt, Artificial Sequence
  HTT spacer sequence CTCN PAM
cguuacuguuuucucugugu

SEQ ID NO: 17355 - RNA, 20 nt, Artificial Sequence
  HTT spacer sequence CTCN PAM
uuacuguuuucucuguguuu

SEQ ID NO: 17356 - RNA, 20 nt, Artificial Sequence
  HTT spacer sequence CTCN PAM
guguuucugccucucuccuu

SEQ ID NO: 17357 - RNA, 20 nt, Artificial Sequence
  HTT spacer sequence CTCN PAM
cuccuuggccuugguagguc

SEQ ID NO: 17358 - RNA, 20 nt, Artificial Sequence
  HTT spacer sequence CTCN PAM
ccuuggccuugguaggucca

SEQ ID NO: 17359 - RNA, 20 nt, Artificial Sequence
  HTT spacer sequence CTCN PAM
uuggccuugguagguccauc

SEQ ID NO: 17360 - RNA, 20 nt, Artificial Sequence
  HTT spacer sequence CTCN PAM
cauggacaacuuucucuugc

SEQ ID NO: 17361 - RNA, 20 nt, Artificial Sequence
  HTT spacer sequence CTCN PAM
uggacaacuuucucuugcug

SEQ ID NO: 17362 - RNA, 20 nt, Artificial Sequence
  HTT spacer sequence CTCN PAM
ugcugguccuuguaguccug

SEQ ID NO: 17363 - RNA, 20 nt, Artificial Sequence
  HTT spacer sequence CTCN PAM
acacgggacuuguccugcca

SEQ ID NO: 17364 - RNA, 20 nt, Artificial Sequence
  HTT spacer sequence CTCN PAM
gacuugcacuuaaaauugaa

SEQ ID NO: 17365 - RNA, 20 nt, Artificial Sequence
  HTT spacer sequence CTCN PAM
ccagggccucuucuuguuaa

SEQ ID NO: 17366 - RNA, 20 nt, Artificial Sequence
  HTT spacer sequence CTCN PAM
agggccucuucuuguuaauu

SEQ ID NO: 17367 - RNA, 20 nt, Artificial Sequence
  HTT spacer sequence CTCN PAM
ucuuguuaauuagaucauua

SEQ ID NO: 17368 - RNA, 20 nt, Artificial Sequence
  HTT spacer sequence CTCN PAM
ucccgcuaccccaggaaccc

SEQ ID NO: 17369 - RNA, 20 nt, Artificial Sequence
  HTT spacer sequence CTCN PAM
cgcuaccccaggaacccuaa

SEQ ID NO: 17370 - RNA, 20 nt, Artificial Sequence
  HTT spacer sequence CTCN PAM
uccucucuaucuacuaggag

SEQ ID NO: 17371 - RNA, 20 nt, Artificial Sequence
  HTT spacer sequence CTCN PAM
ucucuaucuacuaggaggug

SEQ ID NO: 17372 - RNA, 20 nt, Artificial Sequence
  HTT spacer sequence CTCN PAM
cuaucuacuaggagguggcc

SEQ ID NO: 17373 - RNA, 20 nt, Artificial Sequence
  HTT spacer sequence CTCN PAM
aucuacuaggagguggcccu

SEQ ID NO: 17374 - RNA, 20 nt, Artificial Sequence
  HTT spacer sequence CTCN PAM
uaguagauagagaggaggag

SEQ ID NO: 17375 - RNA, 20 nt, Artificial Sequence
  HTT spacer sequence CTCN PAM
gaguccgucucaucuuccac

SEQ ID NO: 17376 - RNA, 20 nt, Artificial Sequence
  HTT spacer sequence CTCN PAM
gagggccaccuccuaguaga

SEQ ID NO: 17377 - RNA, 20 nt, Artificial Sequence
  HTT spacer sequence CTCN PAM
ucuuccaccugaacuucccu

SEQ ID NO: 17378 - RNA, 20 nt, Artificial Sequence
  HTT spacer sequence CTCN PAM
agcagcugccaccccggggg

SEQ ID NO: 17379 - RNA, 20 nt, Artificial Sequence
  HTT spacer sequence CTCN PAM
gcccccgggguggcagcugc

SEQ ID NO: 17380 - RNA, 20 nt, Artificial Sequence
  HTT spacer sequence CTCN PAM
augccuugugcagugcugag

SEQ ID NO: 17381 - RNA, 20 nt, Artificial Sequence
  HTT spacer sequence CTCN PAM
gcacugcacaaggcauggag

SEQ ID NO: 17382 - RNA, 20 nt, Artificial Sequence
  HTT spacer sequence CTCN PAM
uguuugcuccuuauuacagc

SEQ ID NO: 17383 - RNA, 20 nt, Artificial Sequence
  HTT spacer sequence CTCN PAM
uuauuacagcccugcgaaca

SEQ ID NO: 17384 - RNA, 20 nt, Artificial Sequence
  HTT spacer sequence CTCN PAM
uaauuccaucuuacaccuaa

SEQ ID NO: 17385 - RNA, 20 nt, Artificial Sequence
  HTT spacer sequence CTCN PAM
gcuuccuuagguguaagaug

SEQ ID NO: 17386 - RNA, 20 nt, Artificial Sequence
  HTT spacer sequence CTCN PAM
acugucuacuaccuggguga

SEQ ID NO: 17387 - RNA, 20 nt, Artificial Sequence
  HTT spacer sequence CTCN PAM
gaaucagacugccugguuca

SEQ ID NO: 17388 - RNA, 20 nt, Artificial Sequence
  HTT spacer sequence CTCN PAM
gccaccuagaacacagcuug

SEQ ID NO: 17389 - RNA, 20 nt, Artificial Sequence
  HTT spacer sequence CTCN PAM
guggccuggcugcaucuucc

SEQ ID NO: 17390 - RNA, 20 nt, Artificial Sequence
  HTT spacer sequence CTCN PAM
ucacucagggggcccaugca

SEQ ID NO: 17391 - RNA, 20 nt, Artificial Sequence
  HTT spacer sequence CTCN PAM
gggggcccaugcaggaacag

SEQ ID NO: 17392 - RNA, 20 nt, Artificial Sequence
  HTT spacer sequence CTCN PAM
guuccugcaugggcccccug

SEQ ID NO: 17393 - RNA, 20 nt, Artificial Sequence
  HTT spacer sequence CTCN PAM
uccuucuguggggcccucug

SEQ ID NO: 17394 - RNA, 20 nt, Artificial Sequence
  HTT spacer sequence CTCN PAM
agcccauucugcacuggccu

SEQ ID NO: 17395 - RNA, 20 nt, Artificial Sequence
  HTT spacer sequence CTCN PAM
acacuugcuuccuggucagc

SEQ ID NO: 17396 - RNA, 20 nt, Artificial Sequence
  HTT spacer sequence CTCN PAM
agguuuccugggauuucucu

SEQ ID NO: 17397 - RNA, 20 nt, Artificial Sequence
  HTT spacer sequence CTCN PAM
uccagguuuccugggauuuc

SEQ ID NO: 17398 - RNA, 20 nt, Artificial Sequence
  HTT spacer sequence CTCN PAM
ggcuccuccagguuuccugg

SEQ ID NO: 17399 - RNA, 20 nt, Artificial Sequence
  HTT spacer sequence CTCN PAM
ucgucgugaccuggucugca

SEQ ID NO: 17400 - RNA, 20 nt, Artificial Sequence
  HTT spacer sequence CTCN PAM
ucgugaccuggucugcauuc

SEQ ID NO: 17401 - RNA, 20 nt, Artificial Sequence
  HTT spacer sequence CTCN PAM
gagugugcugcuucuguuag

SEQ ID NO: 17402 - RNA, 20 nt, Artificial Sequence
  HTT spacer sequence CTCN PAM
gagaaugcagaccaggucac

SEQ ID NO: 17403 - RNA, 20 nt, Artificial Sequence
  HTT spacer sequence CTCN PAM
cuuccuuggucucagguuau

SEQ ID NO: 17404 - RNA, 20 nt, Artificial Sequence
  HTT spacer sequence CTCN PAM
gguuauaguuuaaggcauug

SEQ ID NO: 17405 - RNA, 20 nt, Artificial Sequence
  HTT spacer sequence CTCN PAM
acaaugccuuaaacuauaac

SEQ ID NO: 17406 - RNA, 20 nt, Artificial Sequence
  HTT spacer sequence CTCN PAM
guuuuuaccuguuuuaggac

SEQ ID NO: 17407 - RNA, 20 nt, Artificial Sequence
  HTT spacer sequence CTCN PAM
aaaaaaaaaaaaaaaaaaaa

SEQ ID NO: 17408 - RNA, 20 nt, Artificial Sequence
  HTT spacer sequence CTCN PAM
aucucaaaaaaaaaaaaaaa

SEQ ID NO: 17409 - RNA, 20 nt, Artificial Sequence
  HTT spacer sequence CTCN PAM
cuccauugcccaggcuagag

SEQ ID NO: 17410 - RNA, 20 nt, Artificial Sequence
  HTT spacer sequence CTCN PAM
auugcccaggcuagagugca

SEQ ID NO: 17411 - RNA, 20 nt, Artificial Sequence
  HTT spacer sequence CTCN PAM
agccugggcaauggagcgag

SEQ ID NO: 17412 - RNA, 20 nt, Artificial Sequence
  HTT spacer sequence CTCN PAM
uggguucaagcaauucuugu

SEQ ID NO: 17413 - RNA, 20 nt, Artificial Sequence
  HTT spacer sequence CTCN PAM
cgccucccaaauaccuggga

SEQ ID NO: 17414 - RNA, 20 nt, Artificial Sequence
  HTT spacer sequence CTCN PAM
caaauaccugggauuacagg

SEQ ID NO: 17415 - RNA, 20 nt, Artificial Sequence
  HTT spacer sequence CTCN PAM
gccaauuuuuguauuuuuag

SEQ ID NO: 17416 - RNA, 20 nt, Artificial Sequence
  HTT spacer sequence CTCN PAM
acuaaaaauacaaaaauugg

SEQ ID NO: 17417 - RNA, 20 nt, Artificial Sequence
  HTT spacer sequence CTCN PAM
aacuccugaccucaagugau

SEQ ID NO: 17418 - RNA, 20 nt, Artificial Sequence
  HTT spacer sequence CTCN PAM
ugaccucaagugaucugccc

SEQ ID NO: 17419 - RNA, 20 nt, Artificial Sequence
  HTT spacer sequence CTCN PAM
agugaucugcccaccuuggc

SEQ ID NO: 17420 - RNA, 20 nt, Artificial Sequence
  HTT spacer sequence CTCN PAM
caaagugcugugauuauagg

SEQ ID NO: 17421 - RNA, 20 nt, Artificial Sequence
  HTT spacer sequence CTCN PAM
cgccuauaaucacagcacuu

SEQ ID NO: 17422 - RNA, 20 nt, Artificial Sequence
  HTT spacer sequence CTCN PAM
cccagaucugggcugccugg

SEQ ID NO: 17423 - RNA, 20 nt, Artificial Sequence
  HTT spacer sequence CTCN PAM
cccccagaucugggcugccu

SEQ ID NO: 17424 - RNA, 20 nt, Artificial Sequence
  HTT spacer sequence CTCN PAM
guuucccaagucuugcugcc

SEQ ID NO: 17425 - RNA, 20 nt, Artificial Sequence
  HTT spacer sequence CTCN PAM
cccugcugggcuuugcagcc

SEQ ID NO: 17426 - RNA, 20 nt, Artificial Sequence
  HTT spacer sequence CTCN PAM
cugcugggcuuugcagccug

SEQ ID NO: 17427 - RNA, 20 nt, Artificial Sequence
  HTT spacer sequence CTCN PAM
gugccuuugaccuuguuuau

SEQ ID NO: 17428 - RNA, 20 nt, Artificial Sequence
  HTT spacer sequence CTCN PAM
uuuggauaaacaaggucaaa

SEQ ID NO: 17429 - RNA, 20 nt, Artificial Sequence
  HTT spacer sequence CTCN PAM
ccuuuggauaaacaagguca

SEQ ID NO: 17430 - RNA, 20 nt, Artificial Sequence
  HTT spacer sequence CTCN PAM
aggaaucaugacuucauucu

SEQ ID NO: 17431 - RNA, 20 nt, Artificial Sequence
  HTT spacer sequence CTCN PAM
gggcuccaggaaucaugacu

SEQ ID NO: 17432 - RNA, 20 nt, Artificial Sequence
  HTT spacer sequence CTCN PAM
acagcauccuucucagggcu

SEQ ID NO: 17433 - RNA, 20 nt, Artificial Sequence
  HTT spacer sequence CTCN PAM
gcuagauucuaccggcaaau

SEQ ID NO: 17434 - RNA, 20 nt, Artificial Sequence
  HTT spacer sequence CTCN PAM
gcaacacacucagcuagauu

SEQ ID NO: 17435 - RNA, 20 nt, Artificial Sequence
  HTT spacer sequence CTCN PAM
ccacacacaaugcuggcacc

SEQ ID NO: 17436 - RNA, 20 nt, Artificial Sequence
  HTT spacer sequence CTCN PAM
auggccgggcacagaggcca

SEQ ID NO: 17437 - RNA, 20 nt, Artificial Sequence
  HTT spacer sequence CTCN PAM
gugcccggccauggagcauc

SEQ ID NO: 17438 - RNA, 20 nt, Artificial Sequence
  HTT spacer sequence CTCN PAM
ugacaccugacagccaagug

SEQ ID NO: 17439 - RNA, 20 nt, Artificial Sequence
  HTT spacer sequence CTCN PAM
gcaggcuccugacaccugac

SEQ ID NO: 17440 - RNA, 20 nt, Artificial Sequence
  HTT spacer sequence CTCN PAM
gugugcccucugcaggcucc

SEQ ID NO: 17441 - RNA, 20 nt, Artificial Sequence
  HTT spacer sequence CTCN PAM
ccuggccuccuucagcauuu

SEQ ID NO: 17442 - RNA, 20 nt, Artificial Sequence
  HTT spacer sequence CTCN PAM
uucagcauuucugucccuca

SEQ ID NO: 17443 - RNA, 20 nt, Artificial Sequence
  HTT spacer sequence CTCN PAM
guccuuagcaagcccaggag

SEQ ID NO: 17444 - RNA, 20 nt, Artificial Sequence
  HTT spacer sequence CTCN PAM
ugggcuugcuaaggacugag

SEQ ID NO: 17445 - RNA, 20 nt, Artificial Sequence
  HTT spacer sequence CTCN PAM
acagcuccugggcuugcuaa

SEQ ID NO: 17446 - RNA, 20 nt, Artificial Sequence
  HTT spacer sequence CTCN PAM
gcaccugccaaacucaacag

SEQ ID NO: 17447 - RNA, 20 nt, Artificial Sequence
  HTT spacer sequence CTCN PAM
guccugugggggccccgcug

SEQ ID NO: 17448 - RNA, 20 nt, Artificial Sequence
  HTT spacer sequence CTCN PAM
ggccacagcggggcccccac

SEQ ID NO: 17449 - RNA, 20 nt, Artificial Sequence
  HTT spacer sequence CTCN PAM
aaucacugcacucgggccac

SEQ ID NO: 17450 - RNA, 20 nt, Artificial Sequence
  HTT spacer sequence CTCN PAM
gcgccucgaaucacugcacu

SEQ ID NO: 17451 - RNA, 20 nt, Artificial Sequence
  HTT spacer sequence CTCN PAM
uucuccaggagcuguguuca

SEQ ID NO: 17452 - RNA, 20 nt, Artificial Sequence
  HTT spacer sequence CTCN PAM
aggagcuguguucagacuuu

SEQ ID NO: 17453 - RNA, 20 nt, Artificial Sequence
  HTT spacer sequence CTCN PAM
uggagaaggagucagggaac

SEQ ID NO: 17454 - RNA, 20 nt, Artificial Sequence
  HTT spacer sequence CTCN PAM
uggcuuggagcuccuggagg

SEQ ID NO: 17455 - RNA, 20 nt, Artificial Sequence
  HTT spacer sequence CTCN PAM
aagccaagagcugcgaaagu

SEQ ID NO: 17456 - RNA, 20 nt, Artificial Sequence
  HTT spacer sequence CTCN PAM
uggagggcuuggcauugccg

SEQ ID NO: 17457 - RNA, 20 nt, Artificial Sequence
  HTT spacer sequence CTCN PAM
aggagcuccaagccaagagc

SEQ ID NO: 17458 - RNA, 20 nt, Artificial Sequence
  HTT spacer sequence CTCN PAM
acauuggucggcaaugccaa

SEQ ID NO: 17459 - RNA, 20 nt, Artificial Sequence
  HTT spacer sequence CTCN PAM
cugucgaccuccacauuggu

SEQ ID NO: 17460 - RNA, 20 nt, Artificial Sequence
  HTT spacer sequence CTCN PAM
cacugucgaccuccacauug

SEQ ID NO: 17461 - RNA, 20 nt, Artificial Sequence
  HTT spacer sequence CTCN PAM
cucacugucgaccuccacau

SEQ ID NO: 17462 - RNA, 20 nt, Artificial Sequence
  HTT spacer sequence CTCN PAM
ucucucacugucgaccucca

SEQ ID NO: 17463 - RNA, 20 nt, Artificial Sequence
  HTT spacer sequence CTCN PAM
cgccuuaaucccagcacuuu

SEQ ID NO: 17464 - RNA, 20 nt, Artificial Sequence
  HTT spacer sequence CTCN PAM
caaagugcugggauuaaggc

SEQ ID NO: 17465 - RNA, 20 nt, Artificial Sequence
  HTT spacer sequence CTCN PAM
gccucccaaagugcugggau

SEQ ID NO: 17466 - RNA, 20 nt, Artificial Sequence
  HTT spacer sequence CTCN PAM
ugauccacccgccucagccu

SEQ ID NO: 17467 - RNA, 20 nt, Artificial Sequence
  HTT spacer sequence CTCN PAM
ggaguucaagaccagccugg

SEQ ID NO: 17468 - RNA, 20 nt, Artificial Sequence
  HTT spacer sequence CTCN PAM
ugagcucgugauccacccgc

SEQ ID NO: 17469 - RNA, 20 nt, Artificial Sequence
  HTT spacer sequence CTCN PAM
auacuaaaaauacaaauauu

SEQ ID NO: 17470 - RNA, 20 nt, Artificial Sequence
  HTT spacer sequence CTCN PAM
caaguagcuaggauuacagg

SEQ ID NO: 17471 - RNA, 20 nt, Artificial Sequence
  HTT spacer sequence CTCN PAM
gccucccaaguagcuaggau

SEQ ID NO: 17472 - RNA, 20 nt, Artificial Sequence
  HTT spacer sequence CTCN PAM
ugccucagccucccaaguag

SEQ ID NO: 17473 - RNA, 20 nt, Artificial Sequence
  HTT spacer sequence CTCN PAM
accuuccgguuucaagcugu

SEQ ID NO: 17474 - RNA, 20 nt, Artificial Sequence
  HTT spacer sequence CTCN PAM
cugcaaacuccaccuuccgg

SEQ ID NO: 17475 - RNA, 20 nt, Artificial Sequence
  HTT spacer sequence CTCN PAM
aaccugggcaacaagagcaa

SEQ ID NO: 17476 - RNA, 20 nt, Artificial Sequence
  HTT spacer sequence CTCN PAM
uguugcccagguuggagugc

SEQ ID NO: 17477 - RNA, 20 nt, Artificial Sequence
  HTT spacer sequence CTCN PAM
aucucaaaaaaaaaaaaaaa

SEQ ID NO: 17478 - RNA, 20 nt, Artificial Sequence
  HTT spacer sequence CTCN PAM
aaaaaaaaaaaaaaaguagg

SEQ ID NO: 17479 - RNA, 20 nt, Artificial Sequence
  HTT spacer sequence CTCN PAM
cauacuuacguauucagaac

SEQ ID NO: 17480 - RNA, 20 nt, Artificial Sequence
  HTT spacer sequence CTCN PAM
gccuguuucauuuuuaugua

SEQ ID NO: 17481 - RNA, 20 nt, Artificial Sequence
  HTT spacer sequence CTCN PAM
guccagugccacauggcuac

SEQ ID NO: 17482 - RNA, 20 nt, Artificial Sequence
  HTT spacer sequence CTCN PAM
uuaacuuuguuucuaggaau

SEQ ID NO: 17483 - RNA, 20 nt, Artificial Sequence
  HTT spacer sequence CTCN PAM
ggaacauuccuagaaacaaa

SEQ ID NO: 17484 - RNA, 20 nt, Artificial Sequence
  HTT spacer sequence CTCN PAM
uuccaugaucaccacccacc

SEQ ID NO: 17485 - RNA, 20 nt, Artificial Sequence
  HTT spacer sequence CTCN PAM
ggugucagauacugcugcuu

SEQ ID NO: 17486 - RNA, 20 nt, Artificial Sequence
  HTT spacer sequence CTCN PAM
ggacagggugcugggcuggc

SEQ ID NO: 17487 - RNA, 20 nt, Artificial Sequence
  HTT spacer sequence CTCN PAM
caguaaccugagcuuuggcc

SEQ ID NO: 17488 - RNA, 20 nt, Artificial Sequence
  HTT spacer sequence CTCN PAM
gguuacugggagucucagga

SEQ ID NO: 17489 - RNA, 20 nt, Artificial Sequence
  HTT spacer sequence CTCN PAM
caaaaaauggaaaaugaaaa

SEQ ID NO: 17490 - RNA, 20 nt, Artificial Sequence
  HTT spacer sequence CTCN PAM
guggcuccuacuaaguucua

SEQ ID NO: 17491 - RNA, 20 nt, Artificial Sequence
  HTT spacer sequence CTCN PAM
uacuaaguucuaguccuuaa

SEQ ID NO: 17492 - RNA, 20 nt, Artificial Sequence
  HTT spacer sequence CTCN PAM
uuauaaaguaaaugugguuc

SEQ ID NO: 17493 - RNA, 20 nt, Artificial Sequence
  HTT spacer sequence CTCN PAM
uggaaauguuauuuuaccau

SEQ ID NO: 17494 - RNA, 20 nt, Artificial Sequence
  HTT spacer sequence CTCN PAM
uuauggguggcccucuuuuu

SEQ ID NO: 17495 - RNA, 20 nt, Artificial Sequence
  HTT spacer sequence CTCN PAM
uuuugcaaaagguuuucagg

SEQ ID NO: 17496 - RNA, 20 nt, Artificial Sequence
  HTT spacer sequence CTCN PAM
auuucuaggugcuccaacac

SEQ ID NO: 17497 - RNA, 20 nt, Artificial Sequence
  HTT spacer sequence CTCN PAM
aacacuccauuauuuguaua

SEQ ID NO: 17498 - RNA, 20 nt, Artificial Sequence
  HTT spacer sequence CTCN PAM
auuauuuguauauguaugga

SEQ ID NO: 17499 - RNA, 20 nt, Artificial Sequence
  HTT spacer sequence CTCN PAM
gcacaguauuucuggaaggc

SEQ ID NO: 17500 - RNA, 20 nt, Artificial Sequence
  HTT spacer sequence CTCN PAM
agaucccacgcuggggaaaa

SEQ ID NO: 17501 - RNA, 20 nt, Artificial Sequence
  HTT spacer sequence CTCN PAM
agaacuucuuuuccccagcg

SEQ ID NO: 17502 - RNA, 20 nt, Artificial Sequence
  HTT spacer sequence CTCN PAM
uuugucuccagaacuucuuu

SEQ ID NO: 17503 - RNA, 20 nt, Artificial Sequence
  HTT spacer sequence CTCN PAM
cugcucaguauggauacugg

SEQ ID NO: 17504 - RNA, 20 nt, Artificial Sequence
  HTT spacer sequence CTCN PAM
gcucaguauggauacuggac

SEQ ID NO: 17505 - RNA, 20 nt, Artificial Sequence
  HTT spacer sequence CTCN PAM
guauggauacuggaccuugu

SEQ ID NO: 17506 - RNA, 20 nt, Artificial Sequence
  HTT spacer sequence CTCN PAM
caguagggccaguucauggc

SEQ ID NO: 17507 - RNA, 20 nt, Artificial Sequence
  HTT spacer sequence CTCN PAM
gcuggaaaguccacuguugg

SEQ ID NO: 17508 - RNA, 20 nt, Artificial Sequence
  HTT spacer sequence CTCN PAM
caacaguggacuuuccagcu

SEQ ID NO: 17509 - RNA, 20 nt, Artificial Sequence
  HTT spacer sequence CTCN PAM
gugccguauguagugggguc

SEQ ID NO: 17510 - RNA, 20 nt, Artificial Sequence
  HTT spacer sequence CTCN PAM
aacagaaugaccagacccca

SEQ ID NO: 17511 - RNA, 20 nt, Artificial Sequence
  HTT spacer sequence CTCN PAM
uccaacagaaugaccagacc

SEQ ID NO: 17512 - RNA, 20 nt, Artificial Sequence
  HTT spacer sequence CTCN PAM
gucaucguaacaggccuaag

SEQ ID NO: 17513 - RNA, 20 nt, Artificial Sequence
  HTT spacer sequence CTCN PAM
ugcccccacagugcucaguc

SEQ ID NO: 17514 - RNA, 20 nt, Artificial Sequence
  HTT spacer sequence CTCN PAM
uaguucugugcugcuuuaac

SEQ ID NO: 17515 - RNA, 20 nt, Artificial Sequence
  HTT spacer sequence CTCN PAM
uuuucugacagaugggccug

SEQ ID NO: 17516 - RNA, 20 nt, Artificial Sequence
  HTT spacer sequence CTCN PAM
gauguuauaucagaaagcuc

SEQ ID NO: 17517 - RNA, 20 nt, Artificial Sequence
  HTT spacer sequence CTCN PAM
gaaucugggaauuguguccc

SEQ ID NO: 17518 - RNA, 20 nt, Artificial Sequence
  HTT spacer sequence CTCN PAM
aauucaggggacacaauucc

SEQ ID NO: 17519 - RNA, 20 nt, Artificial Sequence
  HTT spacer sequence CTCN PAM
ucaucuaagcauuucuguua

SEQ ID NO: 17520 - RNA, 20 nt, Artificial Sequence
  HTT spacer sequence CTCN PAM
gagggcaaacuacagcuuuu

SEQ ID NO: 17521 - RNA, 20 nt, Artificial Sequence
  HTT spacer sequence CTCN PAM
gagggcugaaugaagacgcu

SEQ ID NO: 17522 - RNA, 20 nt, Artificial Sequence
  HTT spacer sequence CTCN PAM
gauccaguuuuccuuuauaa

SEQ ID NO: 17523 - RNA, 20 nt, Artificial Sequence
  HTT spacer sequence CTCN PAM
ugccuauaaucccagcaccu

SEQ ID NO: 17524 - RNA, 20 nt, Artificial Sequence
  HTT spacer sequence CTCN PAM
ggugaucugcccgccuuggc

SEQ ID NO: 17525 - RNA, 20 nt, Artificial Sequence
  HTT spacer sequence CTCN PAM
aaguccuggccucaggugau

SEQ ID NO: 17526 - RNA, 20 nt, Artificial Sequence
  HTT spacer sequence CTCN PAM
acugaaaauaacaaaaauua

SEQ ID NO: 17527 - RNA, 20 nt, Artificial Sequence
  HTT spacer sequence CTCN PAM
gcuaauuuuuguuauuuuca

SEQ ID NO: 17528 - RNA, 20 nt, Artificial Sequence
  HTT spacer sequence CTCN PAM
gaaggcugaggcgggagaau

SEQ ID NO: 17529 - RNA, 20 nt, Artificial Sequence
  HTT spacer sequence CTCN PAM
gccuucugaguagcagggac

SEQ ID NO: 17530 - RNA, 20 nt, Artificial Sequence
  HTT spacer sequence CTCN PAM
cgccucagccuucugaguag

SEQ ID NO: 17531 - RNA, 20 nt, Artificial Sequence
  HTT spacer sequence CTCN PAM
uagguucaagcgauucuccc

SEQ ID NO: 17532 - RNA, 20 nt, Artificial Sequence
  HTT spacer sequence CTCN PAM
cugcaaccuuuuccuccuag

SEQ ID NO: 17533 - RNA, 20 nt, Artificial Sequence
  HTT spacer sequence CTCN PAM
gcucacugcaaccuuuuccu

SEQ ID NO: 17534 - RNA, 20 nt, Artificial Sequence
  HTT spacer sequence CTCN PAM
agccugggugacagagugag

SEQ ID NO: 17535 - RNA, 20 nt, Artificial Sequence
  HTT spacer sequence CTCN PAM
gucacccaggcuagagugca

SEQ ID NO: 17536 - RNA, 20 nt, Artificial Sequence
  HTT spacer sequence CTCN PAM
cucugucacccaggcuagag

SEQ ID NO: 17537 - RNA, 20 nt, Artificial Sequence
  HTT spacer sequence CTCN PAM
aucucaaaaaaaaaaaaaaa

SEQ ID NO: 17538 - RNA, 20 nt, Artificial Sequence
  HTT spacer sequence CTCN PAM
aaaaaaaaaaaaaaaaaaaa

SEQ ID NO: 17539 - RNA, 20 nt, Artificial Sequence
  HTT spacer sequence CTCN PAM
caugcuuguuacauauuauc

SEQ ID NO: 17540 - RNA, 20 nt, Artificial Sequence
  HTT spacer sequence CTCN PAM
augggcaucuuggacacuua

SEQ ID NO: 17541 - RNA, 20 nt, Artificial Sequence
  HTT spacer sequence CTCN PAM
cuaugggcaucuuggacacu

SEQ ID NO: 17542 - RNA, 20 nt, Artificial Sequence
  HTT spacer sequence CTCN PAM
gcucucuaugggcaucuugg

SEQ ID NO: 17543 - RNA, 20 nt, Artificial Sequence
  HTT spacer sequence CTCN PAM
uagcacuguguuuuuccagc

SEQ ID NO: 17544 - RNA, 20 nt, Artificial Sequence
  HTT spacer sequence CTCN PAM
ucccccaccacccacagcug

SEQ ID NO: 17545 - RNA, 20 nt, Artificial Sequence
  HTT spacer sequence CTCN PAM
uggaaauaaaaagauacuca

SEQ ID NO: 17546 - RNA, 20 nt, Artificial Sequence
  HTT spacer sequence CTCN PAM
ucucauggaaauaaaaagau

SEQ ID NO: 17547 - RNA, 20 nt, Artificial Sequence
  HTT spacer sequence CTCN PAM
uuuuuuagccauagacucag

SEQ ID NO: 17548 - RNA, 20 nt, Artificial Sequence
  HTT spacer sequence CTCN PAM
gcagccauaaaauugcugua

SEQ ID NO: 17549 - RNA, 20 nt, Artificial Sequence
  HTT spacer sequence CTCN PAM
ugacccucucucgguuugug

SEQ ID NO: 17550 - RNA, 20 nt, Artificial Sequence
  HTT spacer sequence CTCN PAM
cucgguuugugugcaucucc

SEQ ID NO: 17551 - RNA, 20 nt, Artificial Sequence
  HTT spacer sequence CTCN PAM
cgguuugugugcaucuccuc

SEQ ID NO: 17552 - RNA, 20 nt, Artificial Sequence
  HTT spacer sequence CTCN PAM
guuugugugcaucuccucuc

SEQ ID NO: 17553 - RNA, 20 nt, Artificial Sequence
  HTT spacer sequence CTCN PAM
ucucaggcuggcucccagau

SEQ ID NO: 17554 - RNA, 20 nt, Artificial Sequence
  HTT spacer sequence CTCN PAM
caggcuggcucccagauggg

SEQ ID NO: 17555 - RNA, 20 nt, Artificial Sequence
  HTT spacer sequence CTCN PAM
ggcuggcucccagaugggag

SEQ ID NO: 17556 - RNA, 20 nt, Artificial Sequence
  HTT spacer sequence CTCN PAM
cagaugggagcuggcuccag

SEQ ID NO: 17557 - RNA, 20 nt, Artificial Sequence
  HTT spacer sequence CTCN PAM
caucugggagccagccugag

SEQ ID NO: 17558 - RNA, 20 nt, Artificial Sequence
  HTT spacer sequence CTCN PAM
aggcgacacugggugcucug

SEQ ID NO: 17559 - RNA, 20 nt, Artificial Sequence
  HTT spacer sequence CTCN PAM
gcuccaggagguccuuaugu

SEQ ID NO: 17560 - RNA, 20 nt, Artificial Sequence
  HTT spacer sequence CTCN PAM
aggagguccuuauguggguc

SEQ ID NO: 17561 - RNA, 20 nt, Artificial Sequence
  HTT spacer sequence CTCN PAM
uggagcagagcacccagugu

SEQ ID NO: 17562 - RNA, 20 nt, Artificial Sequence
  HTT spacer sequence CTCN PAM
cuuauggacucugucacugu

SEQ ID NO: 17563 - RNA, 20 nt, Artificial Sequence
  HTT spacer sequence CTCN PAM
uauggacucugucacugugg

SEQ ID NO: 17564 - RNA, 20 nt, Artificial Sequence
  HTT spacer sequence CTCN PAM
gucacuguggguuuaugauu

SEQ ID NO: 17565 - RNA, 20 nt, Artificial Sequence
  HTT spacer sequence CTCN PAM
caaucugucuuaccucuugg

SEQ ID NO: 17566 - RNA, 20 nt, Artificial Sequence
  HTT spacer sequence CTCN PAM
aucugucuuaccucuuggug

SEQ ID NO: 17567 - RNA, 20 nt, Artificial Sequence
  HTT spacer sequence CTCN PAM
uggugaacuguuagaguccu

SEQ ID NO: 17568 - RNA, 20 nt, Artificial Sequence
  HTT spacer sequence CTCN PAM
aacaguucaccaagagguaa

SEQ ID NO: 17569 - RNA, 20 nt, Artificial Sequence
  HTT spacer sequence CTCN PAM
ucuuguucugagucacccua

SEQ ID NO: 17570 - RNA, 20 nt, Artificial Sequence
  HTT spacer sequence CTCN PAM
gaacaagaugagcugggaag

SEQ ID NO: 17571 - RNA, 20 nt, Artificial Sequence
  HTT spacer sequence CTCN PAM
ggccauacaccgcccgguac

SEQ ID NO: 17572 - RNA, 20 nt, Artificial Sequence
  HTT spacer sequence CTCN PAM
aauucagccccaauuuguag

SEQ ID NO: 17573 - RNA, 20 nt, Artificial Sequence
  HTT spacer sequence CTCN PAM
uauuugaauugcaaauacug

SEQ ID NO: 17574 - RNA, 20 nt, Artificial Sequence
  HTT spacer sequence CTCN PAM
ucucuuucagaggcucauua

SEQ ID NO: 17575 - RNA, 20 nt, Artificial Sequence
  HTT spacer sequence CTCN PAM
uucagaggcucauuacccua

SEQ ID NO: 17576 - RNA, 20 nt, Artificial Sequence
  HTT spacer sequence CTCN PAM
gaaagagaagaggcaguauu

SEQ ID NO: 17577 - RNA, 20 nt, Artificial Sequence
  HTT spacer sequence CTCN PAM
uuacccuauagcuguauuau

SEQ ID NO: 17578 - RNA, 20 nt, Artificial Sequence
  HTT spacer sequence CTCN PAM
agcuguaauugugcacuuug

SEQ ID NO: 17579 - RNA, 20 nt, Artificial Sequence
  HTT spacer sequence CTCN PAM
gugggccguccugccagcgc

SEQ ID NO: 17580 - RNA, 20 nt, Artificial Sequence
  HTT spacer sequence CTCN PAM
cccaaccacaucaagauaua

SEQ ID NO: 17581 - RNA, 20 nt, Artificial Sequence
  HTT spacer sequence CTCN PAM
auaucuugaugugguugggg

SEQ ID NO: 17582 - RNA, 20 nt, Artificial Sequence
  HTT spacer sequence CTCN PAM
ucuauaucuugaugugguug

SEQ ID NO: 17583 - RNA, 20 nt, Artificial Sequence
  HTT spacer sequence CTCN PAM
uccucugccacauccugccc

SEQ ID NO: 17584 - RNA, 20 nt, Artificial Sequence
  HTT spacer sequence CTCN PAM
gccacauccugccccucccc

SEQ ID NO: 17585 - RNA, 20 nt, Artificial Sequence
  HTT spacer sequence CTCN PAM
ccaggucuaaccaccaaucc

SEQ ID NO: 17586 - RNA, 20 nt, Artificial Sequence
  HTT spacer sequence CTCN PAM
gucccucuguucagcccauu

SEQ ID NO: 17587 - RNA, 20 nt, Artificial Sequence
  HTT spacer sequence CTCN PAM
guucagcccauugcagaagg

SEQ ID NO: 17588 - RNA, 20 nt, Artificial Sequence
  HTT spacer sequence CTCN PAM
ugccuguaaucccaguauuu

SEQ ID NO: 17589 - RNA, 20 nt, Artificial Sequence
  HTT spacer sequence CTCN PAM
aaauacugggauuacaggca

SEQ ID NO: 17590 - RNA, 20 nt, Artificial Sequence
  HTT spacer sequence CTCN PAM
caaaauacugggauuacagg

SEQ ID NO: 17591 - RNA, 20 nt, Artificial Sequence
  HTT spacer sequence CTCN PAM
cacuucagccucucaaaaua

SEQ ID NO: 17592 - RNA, 20 nt, Artificial Sequence
  HTT spacer sequence CTCN PAM
agucauccucccacuucagc

SEQ ID NO: 17593 - RNA, 20 nt, Artificial Sequence
  HTT spacer sequence CTCN PAM
cagccucaagucauccuccc

SEQ ID NO: 17594 - RNA, 20 nt, Artificial Sequence
  HTT spacer sequence CTCN PAM
agaaaaaaaaaauuuaaaaa

SEQ ID NO: 17595 - RNA, 20 nt, Artificial Sequence
  HTT spacer sequence CTCN PAM
caagcagcugaacuacaggg

SEQ ID NO: 17596 - RNA, 20 nt, Artificial Sequence
  HTT spacer sequence CTCN PAM
gccucccaagcagcugaacu

SEQ ID NO: 17597 - RNA, 20 nt, Artificial Sequence
  HTT spacer sequence CTCN PAM
ugccucagccucccaagcag

SEQ ID NO: 17598 - RNA, 20 nt, Artificial Sequence
  HTT spacer sequence CTCN PAM
agugauccuccugccucagc

SEQ ID NO: 17599 - RNA, 20 nt, Artificial Sequence
  HTT spacer sequence CTCN PAM
ggaguuagagguuacaguga

SEQ ID NO: 17600 - RNA, 20 nt, Artificial Sequence
  HTT spacer sequence CTCN PAM
ugagcucaagugauccuccu

SEQ ID NO: 17601 - RNA, 20 nt, Artificial Sequence
  HTT spacer sequence CTCN PAM
aacuccugagcucaagugau

SEQ ID NO: 17602 - RNA, 20 nt, Artificial Sequence
  HTT spacer sequence CTCN PAM
cuguaaccucuaacuccuga

SEQ ID NO: 17603 - RNA, 20 nt, Artificial Sequence
  HTT spacer sequence CTCN PAM
agccuaggugacacagcaag

SEQ ID NO: 17604 - RNA, 20 nt, Artificial Sequence
  HTT spacer sequence CTCN PAM
ggggaaaaaagaaagaaacg

SEQ ID NO: 17605 - RNA, 20 nt, Artificial Sequence
  HTT spacer sequence CTCN PAM
gaaggcugcacaccgcgugg

SEQ ID NO: 17606 - RNA, 20 nt, Artificial Sequence
  HTT spacer sequence CTCN PAM
ccgaaaggggccagacucag

SEQ ID NO: 17607 - RNA, 20 nt, Artificial Sequence
  HTT spacer sequence CTCN PAM
cuccuugcaacugcugagca

SEQ ID NO: 17608 - RNA, 20 nt, Artificial Sequence
  HTT spacer sequence CTCN PAM
uugcaacugcugagcauugu

SEQ ID NO: 17609 - RNA, 20 nt, Artificial Sequence
  HTT spacer sequence CTCN PAM
gcaguugcaaggagcgagcc

SEQ ID NO: 17610 - RNA, 20 nt, Artificial Sequence
  HTT spacer sequence CTCN PAM
guuucccaacuggugaagug

SEQ ID NO: 17611 - RNA, 20 nt, Artificial Sequence
  HTT spacer sequence CTCN PAM
ucuaaauccugagggauuac

SEQ ID NO: 17612 - RNA, 20 nt, Artificial Sequence
  HTT spacer sequence CTCN PAM
ggauuuagaagagaacuggu

SEQ ID NO: 17613 - RNA, 20 nt, Artificial Sequence
  HTT spacer sequence CTCN PAM
guccccguuaaggcccuuug

SEQ ID NO: 17614 - RNA, 20 nt, Artificial Sequence
  HTT spacer sequence CTCN PAM
gucagacccugaaggucaga

SEQ ID NO: 17615 - RNA, 20 nt, Artificial Sequence
  HTT spacer sequence CTCN PAM
gaccuucagggucugaccga

SEQ ID NO: 17616 - RNA, 20 nt, Artificial Sequence
  HTT spacer sequence CTCN PAM
caaacugccccucugaccuu

SEQ ID NO: 17617 - RNA, 20 nt, Artificial Sequence
  HTT spacer sequence CTCN PAM
aguccauacaguuaaaaugu

SEQ ID NO: 17618 - RNA, 20 nt, Artificial Sequence
  HTT spacer sequence CTCN PAM
uggcucuaguccauacaguu

SEQ ID NO: 17619 - RNA, 20 nt, Artificial Sequence
  HTT spacer sequence CTCN PAM
agguuuauaauucccacgua

SEQ ID NO: 17620 - RNA, 20 nt, Artificial Sequence
  HTT spacer sequence CTCN PAM
cuuuauuguuuuuuucuuuu

SEQ ID NO: 17621 - RNA, 20 nt, Artificial Sequence
  HTT spacer sequence CTCN PAM
acacugacuucucacuuuau

SEQ ID NO: 17622 - RNA, 20 nt, Artificial Sequence
  HTT spacer sequence CTCN PAM
aaacauguugauguuauacg

SEQ ID NO: 17623 - RNA, 20 nt, Artificial Sequence
  HTT spacer sequence CTCN PAM
cugcuuucauguuuuacugu

SEQ ID NO: 17624 - RNA, 20 nt, Artificial Sequence
  HTT spacer sequence CTCN PAM
aucugccgugaaaguugcca

SEQ ID NO: 17625 - RNA, 20 nt, Artificial Sequence
  HTT spacer sequence CTCN PAM
auuaucaaacauagccagug

SEQ ID NO: 17626 - RNA, 20 nt, Artificial Sequence
  HTT spacer sequence CTCN PAM
cacuggcuauguuugauaau

SEQ ID NO: 17627 - RNA, 20 nt, Artificial Sequence
  HTT spacer sequence CTCN PAM
guuaucuauuccuaagcuac

SEQ ID NO: 17628 - RNA, 20 nt, Artificial Sequence
  HTT spacer sequence CTCN PAM
caguuaucuauuccuaagcu

SEQ ID NO: 17629 - RNA, 20 nt, Artificial Sequence
  HTT spacer sequence CTCN PAM
cugccauccagaaacauugu

SEQ ID NO: 17630 - RNA, 20 nt, Artificial Sequence
  HTT spacer sequence CTCN PAM
uucuagaagacacagucugu

SEQ ID NO: 17631 - RNA, 20 nt, Artificial Sequence
  HTT spacer sequence CTCN PAM
agacaucuggggacuaagua

SEQ ID NO: 17632 - RNA, 20 nt, Artificial Sequence
  HTT spacer sequence CTCN PAM
ucuccagacaucuggggacu

SEQ ID NO: 17633 - RNA, 20 nt, Artificial Sequence
  HTT spacer sequence CTCN PAM
ucuucuccagacaucugggg

SEQ ID NO: 17634 - RNA, 20 nt, Artificial Sequence
  HTT spacer sequence CTCN PAM
auugcacauuccaaguuugg

SEQ ID NO: 17635 - RNA, 20 nt, Artificial Sequence
  HTT spacer sequence CTCN PAM
ucguacuauuucucuauugc

SEQ ID NO: 17636 - RNA, 20 nt, Artificial Sequence
  HTT spacer sequence CTCN PAM
cauucucuucugugauuaug

SEQ ID NO: 17637 - RNA, 20 nt, Artificial Sequence
  HTT spacer sequence CTCN PAM
uucucuucugugauuauguc

SEQ ID NO: 17638 - RNA, 20 nt, Artificial Sequence
  HTT spacer sequence CTCN PAM
ucugugauuaugucguaagu

SEQ ID NO: 17639 - RNA, 20 nt, Artificial Sequence
  HTT spacer sequence CTCN PAM
accccguuuacaggcauuuc

SEQ ID NO: 17640 - RNA, 20 nt, Artificial Sequence
  HTT spacer sequence CTCN PAM
cucaaccccguuuacaggca

SEQ ID NO: 17641 - RNA, 20 nt, Artificial Sequence
  HTT spacer sequence CTCN PAM
ugguccccaccucccucaac

SEQ ID NO: 17642 - RNA, 20 nt, Artificial Sequence
  HTT spacer sequence CTCN PAM
ggaacccagaccgcccggug

SEQ ID NO: 17643 - RNA, 20 nt, Artificial Sequence
  HTT spacer sequence CTCN PAM
aucgaaacuaaaucuagaau

SEQ ID NO: 17644 - RNA, 20 nt, Artificial Sequence
  HTT spacer sequence CTCN PAM
aauuauaugucacagcagaa

SEQ ID NO: 17645 - RNA, 20 nt, Artificial Sequence
  HTT spacer sequence CTCN PAM
caguccaacuuagaauccag

SEQ ID NO: 17646 - RNA, 20 nt, Artificial Sequence
  HTT spacer sequence CTCN PAM
cacaguccaacuuagaaucc

SEQ ID NO: 17647 - RNA, 20 nt, Artificial Sequence
  HTT spacer sequence CTCN PAM
uuuaucaaaugcccggcuau

SEQ ID NO: 17648 - RNA, 20 nt, Artificial Sequence
  HTT spacer sequence CTCN PAM
cgccuacaugaugcugggua

SEQ ID NO: 17649 - RNA, 20 nt, Artificial Sequence
  HTT spacer sequence CTCN PAM
aauuaacaaacauacccagc

SEQ ID NO: 17650 - RNA, 20 nt, Artificial Sequence
  HTT spacer sequence CTCN PAM
ugguauuaauuuuuaaaaaa

SEQ ID NO: 17651 - RNA, 20 nt, Artificial Sequence
  HTT spacer sequence CTCN PAM
agaggcugagguaggaagau

SEQ ID NO: 17652 - RNA, 20 nt, Artificial Sequence
  HTT spacer sequence CTCN PAM
aguugcuggaauuuaggcau

SEQ ID NO: 17653 - RNA, 20 nt, Artificial Sequence
  HTT spacer sequence CTCN PAM
cgaguugcuggaauuuaggc

SEQ ID NO: 17654 - RNA, 20 nt, Artificial Sequence
  HTT spacer sequence CTCN PAM
gccucucgaguugcuggaau

SEQ ID NO: 17655 - RNA, 20 nt, Artificial Sequence
  HTT spacer sequence CTCN PAM
agugaucuuccuaccucagc

SEQ ID NO: 17656 - RNA, 20 nt, Artificial Sequence
  HTT spacer sequence CTCN PAM
ugggcucaagugaucuuccu

SEQ ID NO: 17657 - RNA, 20 nt, Artificial Sequence
  HTT spacer sequence CTCN PAM
aacuccugggcucaagugau

SEQ ID NO: 17658 - RNA, 20 nt, Artificial Sequence
  HTT spacer sequence CTCN PAM
caccauagcccaggcuuguc

SEQ ID NO: 17659 - RNA, 20 nt, Artificial Sequence
  HTT spacer sequence CTCN PAM
aaaaaaauaaaaaauaaaaa

SEQ ID NO: 17660 - RNA, 20 nt, Artificial Sequence
  HTT spacer sequence CTCN PAM
ugccuguaaucacagcucuu

SEQ ID NO: 17661 - RNA, 20 nt, Artificial Sequence
  HTT spacer sequence CTCN PAM
uugagaagcugagggcggag

SEQ ID NO: 17662 - RNA, 20 nt, Artificial Sequence
  HTT spacer sequence CTCN PAM
aagagcugugauuacaggca

SEQ ID NO: 17663 - RNA, 20 nt, Artificial Sequence
  HTT spacer sequence CTCN PAM
gcuucucaaagagcugugau

SEQ ID NO: 17664 - RNA, 20 nt, Artificial Sequence
  HTT spacer sequence CTCN PAM
gcccucagcuucucaaagag

SEQ ID NO: 17665 - RNA, 20 nt, Artificial Sequence
  HTT spacer sequence CTCN PAM
agccauccuccgcccucagc

SEQ ID NO: 17666 - RNA, 20 nt, Artificial Sequence
  HTT spacer sequence CTCN PAM
caggcucaagccauccuccg

SEQ ID NO: 17667 - RNA, 20 nt, Artificial Sequence
  HTT spacer sequence CTCN PAM
aacucccaggcucaagccau

SEQ ID NO: 17668 - RNA, 20 nt, Artificial Sequence
  HTT spacer sequence CTCN PAM
guguugccaggcuggucucg

SEQ ID NO: 17669 - RNA, 20 nt, Artificial Sequence
  HTT spacer sequence CTCN PAM
accaaaaaaagaaagagagg

SEQ ID NO: 17670 - RNA, 20 nt, Artificial Sequence
  HTT spacer sequence CTCN PAM
uucuuuuuuugguagaggca

SEQ ID NO: 17671 - RNA, 20 nt, Artificial Sequence
  HTT spacer sequence CTCN PAM
cuuucuuuuuuugguagagg

SEQ ID NO: 17672 - RNA, 20 nt, Artificial Sequence
  HTT spacer sequence CTCN PAM
gguggcugggaccacaggca

SEQ ID NO: 17673 - RNA, 20 nt, Artificial Sequence
  HTT spacer sequence CTCN PAM
cagguggcugggaccacagg

SEQ ID NO: 17674 - RNA, 20 nt, Artificial Sequence
  HTT spacer sequence CTCN PAM
gucucucagguggcugggac

SEQ ID NO: 17675 - RNA, 20 nt, Artificial Sequence
  HTT spacer sequence CTCN PAM
cuucucagucucucaggugg

SEQ ID NO: 17676 - RNA, 20 nt, Artificial Sequence
  HTT spacer sequence CTCN PAM
agcaauccucccuucucagu

SEQ ID NO: 17677 - RNA, 20 nt, Artificial Sequence
  HTT spacer sequence CTCN PAM
aacuucugggcucaagcaau

SEQ ID NO: 17678 - RNA, 20 nt, Artificial Sequence
  HTT spacer sequence CTCN PAM
cugcagccucaaacuucugg

SEQ ID NO: 17679 - RNA, 20 nt, Artificial Sequence
  HTT spacer sequence CTCN PAM
ggccugggugacaaggcgag

SEQ ID NO: 17680 - RNA, 20 nt, Artificial Sequence
  HTT spacer sequence CTCN PAM
ccuugucacccaggccggag

SEQ ID NO: 17681 - RNA, 20 nt, Artificial Sequence
  HTT spacer sequence CTCN PAM
aaaauaauuuuuuuaaguua

SEQ ID NO: 17682 - RNA, 20 nt, Artificial Sequence
  HTT spacer sequence CTCN PAM
uuaaagaaaaaaaaauaacu

SEQ ID NO: 17683 - RNA, 20 nt, Artificial Sequence
  HTT spacer sequence CTCN PAM
cacaaguuauuuuuuuuucu

SEQ ID NO: 17684 - RNA, 20 nt, Artificial Sequence
  HTT spacer sequence CTCN PAM
augguaaauaugugaugcua

SEQ ID NO: 17685 - RNA, 20 nt, Artificial Sequence
  HTT spacer sequence CTCN PAM
guuuauuuguuuuuuuguaa

SEQ ID NO: 17686 - RNA, 20 nt, Artificial Sequence
  HTT spacer sequence CTCN PAM
uguaaucauacuacucagag

SEQ ID NO: 17687 - RNA, 20 nt, Artificial Sequence
  HTT spacer sequence CTCN PAM
gagauaacuugcuguuagau

SEQ ID NO: 17688 - RNA, 20 nt, Artificial Sequence
  HTT spacer sequence CTCN PAM
gaguaguaugauuacaggag

SEQ ID NO: 17689 - RNA, 20 nt, Artificial Sequence
  HTT spacer sequence CTCN PAM
ccaacugaaagagguguuau

SEQ ID NO: 17690 - RNA, 20 nt, Artificial Sequence
  HTT spacer sequence CTCN PAM
aacugaaagagguguuaucc

SEQ ID NO: 17691 - RNA, 20 nt, Artificial Sequence
  HTT spacer sequence CTCN PAM
uucaguuggagagucggcuu

SEQ ID NO: 17692 - RNA, 20 nt, Artificial Sequence
  HTT spacer sequence CTCN PAM
aggauaacaccucuuucagu

SEQ ID NO: 17693 - RNA, 20 nt, Artificial Sequence
  HTT spacer sequence CTCN PAM
auugaaguaguuuuucuauu

SEQ ID NO: 17694 - RNA, 20 nt, Artificial Sequence
  HTT spacer sequence CTCN PAM
aaauucugaagcuuuuugag

SEQ ID NO: 17695 - RNA, 20 nt, Artificial Sequence
  HTT spacer sequence CTCN PAM
aaaagcuucagaauuuggag

SEQ ID NO: 17696 - RNA, 20 nt, Artificial Sequence
  HTT spacer sequence CTCN PAM
cuaaauccgaaaaucugaaa

SEQ ID NO: 17697 - RNA, 20 nt, Artificial Sequence
  HTT spacer sequence CTCN PAM
acaaauaaguauaaugcaca

SEQ ID NO: 17698 - RNA, 20 nt, Artificial Sequence
  HTT spacer sequence CTCN PAM
gcauguuuaaaaauauauau

SEQ ID NO: 17699 - RNA, 20 nt, Artificial Sequence
  HTT spacer sequence CTCN PAM
uuuuccaauuuugugauagu

SEQ ID NO: 17700 - RNA, 20 nt, Artificial Sequence
  HTT spacer sequence CTCN PAM
aauuacucuuuuuccaauuu

SEQ ID NO: 17701 - RNA, 20 nt, Artificial Sequence
  HTT spacer sequence CTCN PAM
cgggcuucgggccggcuaag

SEQ ID NO: 17702 - RNA, 20 nt, Artificial Sequence
  HTT spacer sequence CTCN PAM
cccgggcuucgggccggcua

SEQ ID NO: 17703 - RNA, 20 nt, Artificial Sequence
  HTT spacer sequence CTCN PAM
cugaggccugccuuuguccu

SEQ ID NO: 17704 - RNA, 20 nt, Artificial Sequence
  HTT spacer sequence CTCN PAM
gcgagauccgcagguagcag

SEQ ID NO: 17705 - RNA, 20 nt, Artificial Sequence
  HTT spacer sequence CTCN PAM
gagagcuggacugcuguacc

SEQ ID NO: 17706 - RNA, 20 nt, Artificial Sequence
  HTT spacer sequence CTCN PAM
gagacacuaacaaauggcca

SEQ ID NO: 17707 - RNA, 20 nt, Artificial Sequence
  HTT spacer sequence CTCN PAM
cagagacacuaacaaauggc

SEQ ID NO: 17708 - RNA, 20 nt, Artificial Sequence
  HTT spacer sequence CTCN PAM
gccgcagugcgugguuggag

SEQ ID NO: 17709 - RNA, 20 nt, Artificial Sequence
  HTT spacer sequence CTCN PAM
aaccacgcacugcggcagag

SEQ ID NO: 17710 - RNA, 20 nt, Artificial Sequence
  HTT spacer sequence CTCN PAM
auuuaccaaggccgucaccu

SEQ ID NO: 17711 - RNA, 20 nt, Artificial Sequence
  HTT spacer sequence CTCN PAM
ucaauuauuugugcucauac

SEQ ID NO: 17712 - RNA, 20 nt, Artificial Sequence
  HTT spacer sequence CTCN PAM
auuauuugugcucauacacu

SEQ ID NO: 17713 - RNA, 20 nt, Artificial Sequence
  HTT spacer sequence CTCN PAM
uacacuguauauuuuuagug

SEQ ID NO: 17714 - RNA, 20 nt, Artificial Sequence
  HTT spacer sequence CTCN PAM
cuaaaaauauacaguguaug

SEQ ID NO: 17715 - RNA, 20 nt, Artificial Sequence
  HTT spacer sequence CTCN PAM
uucuuacccuuucuggccuu

SEQ ID NO: 17716 - RNA, 20 nt, Artificial Sequence
  HTT spacer sequence CTCN PAM
ucuuguguacuugaaaauga

SEQ ID NO: 17717 - RNA, 20 nt, Artificial Sequence
  HTT spacer sequence CTCN PAM
caucauauuuuuccuuagug

SEQ ID NO: 17718 - RNA, 20 nt, Artificial Sequence
  HTT spacer sequence CTCN PAM
ucauauuuuuccuuaguguc

SEQ ID NO: 17719 - RNA, 20 nt, Artificial Sequence
  HTT spacer sequence CTCN PAM
augacuccgagcacuuaacg

SEQ ID NO: 17720 - RNA, 20 nt, Artificial Sequence
  HTT spacer sequence CTCN PAM
gagcacuuaacguggcucau

SEQ ID NO: 17721 - RNA, 20 nt, Artificial Sequence
  HTT spacer sequence CTCN PAM
gagucauggagguucugaca

SEQ ID NO: 17722 - RNA, 20 nt, Artificial Sequence
  HTT spacer sequence CTCN PAM
uuguaaaucacauucaagau

SEQ ID NO: 17723 - RNA, 20 nt, Artificial Sequence
  HTT spacer sequence CTCN PAM
ugggaaaggcugaucagauc

SEQ ID NO: 17724 - RNA, 20 nt, Artificial Sequence
  HTT spacer sequence CTCN PAM
aguacaggacuucaucagug

SEQ ID NO: 17725 - RNA, 20 nt, Artificial Sequence
  HTT spacer sequence CTCN PAM
gcugccagcggccuguucau

SEQ ID NO: 17726 - RNA, 20 nt, Artificial Sequence
  HTT spacer sequence CTCN PAM
uugugaaaaccuuucaacug

SEQ ID NO: 17727 - RNA, 20 nt, Artificial Sequence
  HTT spacer sequence CTCN PAM
auuuuuaaggcagggaaaac

SEQ ID NO: 17728 - RNA, 20 nt, Artificial Sequence
  HTT spacer sequence CTCN PAM
ucagugcuuggaggggaucc

SEQ ID NO: 17729 - RNA, 20 nt, Artificial Sequence
  HTT spacer sequence CTCN PAM
aagcacugaagaguuuucuu

SEQ ID NO: 17730 - RNA, 20 nt, Artificial Sequence
  HTT spacer sequence CTCN PAM
gccagucgggagcugugcuc

SEQ ID NO: 17731 - RNA, 20 nt, Artificial Sequence
  HTT spacer sequence CTCN PAM
cgacuggcugagauggaucc

SEQ ID NO: 17732 - RNA, 20 nt, Artificial Sequence
  HTT spacer sequence CTCN PAM
cgcuguauguggacaggcuu

SEQ ID NO: 17733 - RNA, 20 nt, Artificial Sequence
  HTT spacer sequence CTCN PAM
cauggucgacauccuugcuu

SEQ ID NO: 17734 - RNA, 20 nt, Artificial Sequence
  HTT spacer sequence CTCN PAM
ucccaauaccuguaaauuug

SEQ ID NO: 17735 - RNA, 20 nt, Artificial Sequence
  HTT spacer sequence CTCN PAM
guaaguauggucuugacaug

SEQ ID NO: 17736 - RNA, 20 nt, Artificial Sequence
  HTT spacer sequence CTCN PAM
uguguccgaucugacuguuu

SEQ ID NO: 17737 - RNA, 20 nt, Artificial Sequence
  HTT spacer sequence CTCN PAM
uuuaaaaaggaugaacugau

SEQ ID NO: 17738 - RNA, 20 nt, Artificial Sequence
  HTT spacer sequence CTCN PAM
ugcucauuuaaaaaggauga

SEQ ID NO: 17739 - RNA, 20 nt, Artificial Sequence
  HTT spacer sequence CTCN PAM
aauagacaaaaacacauuag

SEQ ID NO: 17740 - RNA, 20 nt, Artificial Sequence
  HTT spacer sequence CTCN PAM
acagaauccaggaauaccuu

SEQ ID NO: 17741 - RNA, 20 nt, Artificial Sequence
  HTT spacer sequence CTCN PAM
gaagguauuccuggauucug

SEQ ID NO: 17742 - RNA, 20 nt, Artificial Sequence
  HTT spacer sequence CTCN PAM
cucagagguaaugcuggaaa

SEQ ID NO: 17743 - RNA, 20 nt, Artificial Sequence
  HTT spacer sequence CTCN PAM
gagguaaugcuggaaacaca

SEQ ID NO: 17744 - RNA, 20 nt, Artificial Sequence
  HTT spacer sequence CTCN PAM
gagcgagcccgcugcucuga

SEQ ID NO: 17745 - RNA, 20 nt, Artificial Sequence
  HTT spacer sequence CTCN PAM
cuuucuaaagaguaaaggau

SEQ ID NO: 17746 - RNA, 20 nt, Artificial Sequence
  HTT spacer sequence CTCN PAM
uuagaaagugagaucugguu

SEQ ID NO: 17747 - RNA, 20 nt, Artificial Sequence
  HTT spacer sequence CTCN PAM
cgucacagacgugauccugc

SEQ ID NO: 17748 - RNA, 20 nt, Artificial Sequence
  HTT spacer sequence CTCN PAM
acucacgucacagacgugau

SEQ ID NO: 17749 - RNA, 20 nt, Artificial Sequence
  HTT spacer sequence CTCN PAM
ugguggcuguuugagaggua

SEQ ID NO: 17750 - RNA, 20 nt, Artificial Sequence
  HTT spacer sequence CTCN PAM
aacagccaccaggagugcaa

SEQ ID NO: 17751 - RNA, 20 nt, Artificial Sequence
  HTT spacer sequence CTCN PAM
caaacagccaccaggagugc

SEQ ID NO: 17752 - RNA, 20 nt, Artificial Sequence
  HTT spacer sequence CTCN PAM
ucacaggacagugaauacag

SEQ ID NO: 17753 - RNA, 20 nt, Artificial Sequence
  HTT spacer sequence CTCN PAM
uguuuagcaauuagaugaca

SEQ ID NO: 17754 - RNA, 20 nt, Artificial Sequence
  HTT spacer sequence CTCN PAM
gauuugccaacucuuguuua

SEQ ID NO: 17755 - RNA, 20 nt, Artificial Sequence
  HTT spacer sequence CTCN PAM
cagauuugccaacucuuguu

SEQ ID NO: 17756 - RNA, 20 nt, Artificial Sequence
  HTT spacer sequence CTCN PAM
auccuuggcaugcaggacuu

SEQ ID NO: 17757 - RNA, 20 nt, Artificial Sequence
  HTT spacer sequence CTCN PAM
aagacuuugcaaacacaacu

SEQ ID NO: 17758 - RNA, 20 nt, Artificial Sequence
  HTT spacer sequence CTCN PAM
uaugugaguguauuuccaug

SEQ ID NO: 17759 - RNA, 20 nt, Artificial Sequence
  HTT spacer sequence CTCN PAM
cauaggagauguagggauuu

SEQ ID NO: 17760 - RNA, 20 nt, Artificial Sequence
  HTT spacer sequence CTCN PAM
cacacacaaucccugccccc

SEQ ID NO: 17761 - RNA, 20 nt, Artificial Sequence
  HTT spacer sequence CTCN PAM
cacacacacaaucccugccc

SEQ ID NO: 17762 - RNA, 20 nt, Artificial Sequence
  HTT spacer sequence CTCN PAM
cucucacacacacaaucccu

SEQ ID NO: 17763 - RNA, 20 nt, Artificial Sequence
  HTT spacer sequence CTCN PAM
cccucucacacacacaaucc

SEQ ID NO: 17764 - RNA, 20 nt, Artificial Sequence
  HTT spacer sequence CTCN PAM
cucccucucacacacacaau

SEQ ID NO: 17765 - RNA, 20 nt, Artificial Sequence
  HTT spacer sequence CTCN PAM
cucucccucucacacacaca

SEQ ID NO: 17766 - RNA, 20 nt, Artificial Sequence
  HTT spacer sequence CTCN PAM
gcugucucucucucccucuc

SEQ ID NO: 17767 - RNA, 20 nt, Artificial Sequence
  HTT spacer sequence CTCN PAM
uucucugcugucucucucuc

SEQ ID NO: 17768 - RNA, 20 nt, Artificial Sequence
  HTT spacer sequence CTCN PAM
aaguacacagcaugauaauu

SEQ ID NO: 17769 - RNA, 20 nt, Artificial Sequence
  HTT spacer sequence CTCN PAM
aaagacugaaaagcauaaua

SEQ ID NO: 17770 - RNA, 20 nt, Artificial Sequence
  HTT spacer sequence CTCN PAM
aaagacugaaaagcauaaua

SEQ ID NO: 17771 - RNA, 20 nt, Artificial Sequence
  HTT spacer sequence CTCN PAM
uuuguaauuugcauuaugaa

SEQ ID NO: 17772 - RNA, 20 nt, Artificial Sequence
  HTT spacer sequence CTCN PAM
cauagcagauggcgggagau

SEQ ID NO: 17773 - RNA, 20 nt, Artificial Sequence
  HTT spacer sequence CTCN PAM
uagcagauggcgggagauaa

SEQ ID NO: 17774 - RNA, 20 nt, Artificial Sequence
  HTT spacer sequence CTCN PAM
cgccaucugcuaugagagug

SEQ ID NO: 17775 - RNA, 20 nt, Artificial Sequence
  HTT spacer sequence CTCN PAM
ucuggacugaagacuaaguc

SEQ ID NO: 17776 - RNA, 20 nt, Artificial Sequence
  HTT spacer sequence CTCN PAM
cucaucuggacugaagacua

SEQ ID NO: 17777 - RNA, 20 nt, Artificial Sequence
  HTT spacer sequence CTCN PAM
ucuggcacaagauauuuaua

SEQ ID NO: 17778 - RNA, 20 nt, Artificial Sequence
  HTT spacer sequence CTCN PAM
aaugcacaaauuccacuauc

SEQ ID NO: 17779 - RNA, 20 nt, Artificial Sequence
  HTT spacer sequence CTCN PAM
aacacugcaacaggcaauac

SEQ ID NO: 17780 - RNA, 20 nt, Artificial Sequence
  HTT spacer sequence CTCN PAM
auuaauauuuuccagaaauu

SEQ ID NO: 17781 - RNA, 20 nt, Artificial Sequence
  HTT spacer sequence CTCN PAM
aacaggucaugauacaaaug

SEQ ID NO: 17782 - RNA, 20 nt, Artificial Sequence
  HTT spacer sequence CTCN PAM
ucaauacucaaacaggucau

SEQ ID NO: 17783 - RNA, 20 nt, Artificial Sequence
  HTT spacer sequence CTCN PAM
uuagaguguauauuucuaga

SEQ ID NO: 17784 - RNA, 20 nt, Artificial Sequence
  HTT spacer sequence CTCN PAM
aaggagaugcacuauuagug

SEQ ID NO: 17785 - RNA, 20 nt, Artificial Sequence
  HTT spacer sequence CTCN PAM
gcacacuaggauucuagaaa

SEQ ID NO: 17786 - RNA, 20 nt, Artificial Sequence
  HTT spacer sequence CTCN PAM
auucccugcuggacagguuu

SEQ ID NO: 17787 - RNA, 20 nt, Artificial Sequence
  HTT spacer sequence CTCN PAM
ccaccaugcaagacucacuu

SEQ ID NO: 17788 - RNA, 20 nt, Artificial Sequence
  HTT spacer sequence CTCN PAM
accaugcaagacucacuuag

SEQ ID NO: 17789 - RNA, 20 nt, Artificial Sequence
  HTT spacer sequence CTCN PAM
cuuagucccucuccuccagu

SEQ ID NO: 17790 - RNA, 20 nt, Artificial Sequence
  HTT spacer sequence CTCN PAM
ccuccagucucuucccaccc

SEQ ID NO: 17791 - RNA, 20 nt, Artificial Sequence
  HTT spacer sequence CTCN PAM
uccagucucuucccacccgc

SEQ ID NO: 17792 - RNA, 20 nt, Artificial Sequence
  HTT spacer sequence CTCN PAM
agucucuucccacccgcugg

SEQ ID NO: 17793 - RNA, 20 nt, Artificial Sequence
  HTT spacer sequence CTCN PAM
ucccacccgcuggacgggga

SEQ ID NO: 17794 - RNA, 20 nt, Artificial Sequence
  HTT spacer sequence CTCN PAM
cuguuuccagugacacgugc

SEQ ID NO: 17795 - RNA, 20 nt, Artificial Sequence
  HTT spacer sequence CTCN PAM
caugcagacacgcuggacac

SEQ ID NO: 17796 - RNA, 20 nt, Artificial Sequence
  HTT spacer sequence CTCN PAM
gcgcccugugccucccaugc

SEQ ID NO: 17797 - RNA, 20 nt, Artificial Sequence
  HTT spacer sequence CTCN PAM
gucaccuguggcagauacag

SEQ ID NO: 17798 - RNA, 20 nt, Artificial Sequence
  HTT spacer sequence CTCN PAM
guaucugccacaggugacag

SEQ ID NO: 17799 - RNA, 20 nt, Artificial Sequence
  HTT spacer sequence CTCN PAM
cuguaucugccacaggugac

SEQ ID NO: 17800 - RNA, 20 nt, Artificial Sequence
  HTT spacer sequence CTCN PAM
gcacucucuguaucugccac

SEQ ID NO: 17801 - RNA, 20 nt, Artificial Sequence
  HTT spacer sequence CTCN PAM
ucugcacucucuguaucugc

SEQ ID NO: 17802 - RNA, 20 nt, Artificial Sequence
  HTT spacer sequence CTCN PAM
uuggguccacggcaccuccu

SEQ ID NO: 17803 - RNA, 20 nt, Artificial Sequence
  HTT spacer sequence CTCN PAM
gcucggcucagugaagcugu

SEQ ID NO: 17804 - RNA, 20 nt, Artificial Sequence
  HTT spacer sequence CTCN PAM
gcucagugaagcugugguua

SEQ ID NO: 17805 - RNA, 20 nt, Artificial Sequence
  HTT spacer sequence CTCN PAM
gugaagcugugguuagagac

SEQ ID NO: 17806 - RNA, 20 nt, Artificial Sequence
  HTT spacer sequence CTCN PAM
aaccacagcuucacugagcc

SEQ ID NO: 17807 - RNA, 20 nt, Artificial Sequence
  HTT spacer sequence CTCN PAM
gaccuugauggccccccacg

SEQ ID NO: 17808 - RNA, 20 nt, Artificial Sequence
  HTT spacer sequence CTCN PAM
cucagaccuugauggccccc

SEQ ID NO: 17809 - RNA, 20 nt, Artificial Sequence
  HTT spacer sequence CTCN PAM
uaccaaaagggucccacauc

SEQ ID NO: 17810 - RNA, 20 nt, Artificial Sequence
  HTT spacer sequence CTCN PAM
ccccacacuccuaccaaaag

SEQ ID NO: 17811 - RNA, 20 nt, Artificial Sequence
  HTT spacer sequence CTCN PAM
cuccaucuccucauaccuuc

SEQ ID NO: 17812 - RNA, 20 nt, Artificial Sequence
  HTT spacer sequence CTCN PAM
aucuccucauaccuucuggc

SEQ ID NO: 17813 - RNA, 20 nt, Artificial Sequence
  HTT spacer sequence CTCN PAM
ucauaccuucuggccaccug

SEQ ID NO: 17814 - RNA, 20 nt, Artificial Sequence
  HTT spacer sequence CTCN PAM
uaccuucuggccaccuguga

SEQ ID NO: 17815 - RNA, 20 nt, Artificial Sequence
  HTT spacer sequence CTCN PAM
cagguggccagaagguauga

SEQ ID NO: 17816 - RNA, 20 nt, Artificial Sequence
  HTT spacer sequence CTCN PAM
acugcucauaccucaugguu

SEQ ID NO: 17817 - RNA, 20 nt, Artificial Sequence
  HTT spacer sequence CTCN PAM
uaccucaugguuagggacca

SEQ ID NO: 17818 - RNA, 20 nt, Artificial Sequence
  HTT spacer sequence CTCN PAM
ugguuagggaccaccuggag

SEQ ID NO: 17819 - RNA, 20 nt, Artificial Sequence
  HTT spacer sequence CTCN PAM
agguggucccuaaccaugag

SEQ ID NO: 17820 - RNA, 20 nt, Artificial Sequence
  HTT spacer sequence CTCN PAM
accaaggcuccagguggucc

SEQ ID NO: 17821 - RNA, 20 nt, Artificial Sequence
  HTT spacer sequence CTCN PAM
accaaggcucuaccaaggcu

SEQ ID NO: 17822 - RNA, 20 nt, Artificial Sequence
  HTT spacer sequence CTCN PAM
acuuuccuggacaaaguuca

SEQ ID NO: 17823 - RNA, 20 nt, Artificial Sequence
  HTT spacer sequence CTCN PAM
auucgcuaagcaccugcccu

SEQ ID NO: 17824 - RNA, 20 nt, Artificial Sequence
  HTT spacer sequence CTCN PAM
ccagcaaccagggcagggca

SEQ ID NO: 17825 - RNA, 20 nt, Artificial Sequence
  HTT spacer sequence CTCN PAM
ccccagcaaccagggcaggg

SEQ ID NO: 17826 - RNA, 20 nt, Artificial Sequence
  HTT spacer sequence CTCN PAM
ucucuccccagcaaccaggg

SEQ ID NO: 17827 - RNA, 20 nt, Artificial Sequence
  HTT spacer sequence CTCN PAM
uggguugucugcuuuacuca

SEQ ID NO: 17828 - RNA, 20 nt, Artificial Sequence
  HTT spacer sequence CTCN PAM
ccuggguugucugcuuuacu

SEQ ID NO: 17829 - RNA, 20 nt, Artificial Sequence
  HTT spacer sequence CTCN PAM
cccuucaccuggugaacuuc

SEQ ID NO: 17830 - RNA, 20 nt, Artificial Sequence
  HTT spacer sequence CTCN PAM
cagccucccccuucaccugg

SEQ ID NO: 17831 - RNA, 20 nt, Artificial Sequence
  HTT spacer sequence CTCN PAM
ccacaccacagguuuucccc

SEQ ID NO: 17832 - RNA, 20 nt, Artificial Sequence
  HTT spacer sequence CTCN PAM
cagccuagugcgguguuccc

SEQ ID NO: 17833 - RNA, 20 nt, Artificial Sequence
  HTT spacer sequence CTCN PAM
gccuagugcgguguucccaa

SEQ ID NO: 17834 - RNA, 20 nt, Artificial Sequence
  HTT spacer sequence CTCN PAM
agggaugugaaguccccuug

SEQ ID NO: 17835 - RNA, 20 nt, Artificial Sequence
  HTT spacer sequence CTCN PAM
gcaccuuccagcagugcaga

SEQ ID NO: 17836 - RNA, 20 nt, Artificial Sequence
  HTT spacer sequence CTCN PAM
guacggggggagcaguggag

SEQ ID NO: 17837 - RNA, 20 nt, Artificial Sequence
  HTT spacer sequence CTCN PAM
ccccguaccgaguucaucau

SEQ ID NO: 17838 - RNA, 20 nt, Artificial Sequence
  HTT spacer sequence CTCN PAM
acugcuccccccguaccgag

SEQ ID NO: 17839 - RNA, 20 nt, Artificial Sequence
  HTT spacer sequence CTCN PAM
gcuuuucuugugacuuccaa

SEQ ID NO: 17840 - RNA, 20 nt, Artificial Sequence
  HTT spacer sequence CTCN PAM
ucaucaugugacccacuugu

SEQ ID NO: 17841 - RNA, 20 nt, Artificial Sequence
  HTT spacer sequence CTCN PAM
agucugggcagggacgggau

SEQ ID NO: 17842 - RNA, 20 nt, Artificial Sequence
  HTT spacer sequence CTCN PAM
gacaucccgucccugcccag

SEQ ID NO: 17843 - RNA, 20 nt, Artificial Sequence
  HTT spacer sequence CTCN PAM
ccgacaucccgucccugccc

SEQ ID NO: 17844 - RNA, 20 nt, Artificial Sequence
  HTT spacer sequence CTCN PAM
acucugaauggggccgggaa

SEQ ID NO: 17845 - RNA, 20 nt, Artificial Sequence
  HTT spacer sequence CTCN PAM
gaauggggccgggaaguggg

SEQ ID NO: 17846 - RNA, 20 nt, Artificial Sequence
  HTT spacer sequence CTCN PAM
ccacuucccggccccauuca

SEQ ID NO: 17847 - RNA, 20 nt, Artificial Sequence
  HTT spacer sequence CTCN PAM
auuucagauggggucgggac

SEQ ID NO: 17848 - RNA, 20 nt, Artificial Sequence
  HTT spacer sequence CTCN PAM
aucagcauaacccccauguc

SEQ ID NO: 17849 - RNA, 20 nt, Artificial Sequence
  HTT spacer sequence CTCN PAM
guggauucuaauguggcuga

SEQ ID NO: 17850 - RNA, 20 nt, Artificial Sequence
  HTT spacer sequence CTCN PAM
ucccaaaccauacacccagc

SEQ ID NO: 17851 - RNA, 20 nt, Artificial Sequence
  HTT spacer sequence CTCN PAM
acuggaggaacaaacacagg

SEQ ID NO: 17852 - RNA, 20 nt, Artificial Sequence
  HTT spacer sequence CTCN PAM
aguggaggccagauaguucu

SEQ ID NO: 17853 - RNA, 20 nt, Artificial Sequence
  HTT spacer sequence CTCN PAM
auggccaagacagaauggaa

SEQ ID NO: 17854 - RNA, 20 nt, Artificial Sequence
  HTT spacer sequence CTCN PAM
uuuacgacuaaagaucaacu

SEQ ID NO: 17855 - RNA, 20 nt, Artificial Sequence
  HTT spacer sequence CTCN PAM
cugcauccaagggucucuuu

SEQ ID NO: 17856 - RNA, 20 nt, Artificial Sequence
  HTT spacer sequence CTCN PAM
acucacaccucuguuagaug

SEQ ID NO: 17857 - RNA, 20 nt, Artificial Sequence
  HTT spacer sequence CTCN PAM
caccucuguuagauguagug

SEQ ID NO: 17858 - RNA, 20 nt, Artificial Sequence
  HTT spacer sequence CTCN PAM
guuagauguagugagguucu

SEQ ID NO: 17859 - RNA, 20 nt, Artificial Sequence
  HTT spacer sequence CTCN PAM
cuacaucuaacagaggugug

SEQ ID NO: 17860 - RNA, 20 nt, Artificial Sequence
  HTT spacer sequence CTCN PAM
gacaucugggguuggggggu

SEQ ID NO: 17861 - RNA, 20 nt, Artificial Sequence
  HTT spacer sequence CTCN PAM
gcgcagggugcccucugaca

SEQ ID NO: 17862 - RNA, 20 nt, Artificial Sequence
  HTT spacer sequence CTCN PAM
uagcucugcgcagggugccc

SEQ ID NO: 17863 - RNA, 20 nt, Artificial Sequence
  HTT spacer sequence CTCN PAM
cccgugggcagguccuguga

SEQ ID NO: 17864 - RNA, 20 nt, Artificial Sequence
  HTT spacer sequence CTCN PAM
caggaccugcccacggguga

SEQ ID NO: 17865 - RNA, 20 nt, Artificial Sequence
  HTT spacer sequence CTCN PAM
uggguauggugcagccaugg

SEQ ID NO: 17866 - RNA, 20 nt, Artificial Sequence
  HTT spacer sequence CTCN PAM
gaccuacuaggacgggagaa

SEQ ID NO: 17867 - RNA, 20 nt, Artificial Sequence
  HTT spacer sequence CTCN PAM
cguccuaguaggucugagaa

SEQ ID NO: 17868 - RNA, 20 nt, Artificial Sequence
  HTT spacer sequence CTCN PAM
uggugcuuuagcccugcguu

SEQ ID NO: 17869 - RNA, 20 nt, Artificial Sequence
  HTT spacer sequence CTCN PAM
cauuugcugcauaucaacgc

SEQ ID NO: 17870 - RNA, 20 nt, Artificial Sequence
  HTT spacer sequence CTCN PAM
caggugcccacuucccuccc

SEQ ID NO: 17871 - RNA, 20 nt, Artificial Sequence
  HTT spacer sequence CTCN PAM
acaggcauuuguccucccag

SEQ ID NO: 17872 - RNA, 20 nt, Artificial Sequence
  HTT spacer sequence CTCN PAM
cggccucuacaggcauuugu

SEQ ID NO: 17873 - RNA, 20 nt, Artificial Sequence
  HTT spacer sequence CTCN PAM
uuucaugaacaccugccguc

SEQ ID NO: 17874 - RNA, 20 nt, Artificial Sequence
  HTT spacer sequence CTCN PAM
ccacaaggucucuuuucaug

SEQ ID NO: 17875 - RNA, 20 nt, Artificial Sequence
  HTT spacer sequence CTCN PAM
ucaguacaucagaacacacu

SEQ ID NO: 17876 - RNA, 20 nt, Artificial Sequence
  HTT spacer sequence CTCN PAM
acugaaaacaacaggagaau

SEQ ID NO: 17877 - RNA, 20 nt, Artificial Sequence
  HTT spacer sequence CTCN PAM
uguuguuuucaguugagcuc

SEQ ID NO: 17878 - RNA, 20 nt, Artificial Sequence
  HTT spacer sequence CTCN PAM
aaaaaaaaaaaaaagauaaa

SEQ ID NO: 17879 - RNA, 20 nt, Artificial Sequence
  HTT spacer sequence CTCN PAM
cuguugucccccaggcugga

SEQ ID NO: 17880 - RNA, 20 nt, Artificial Sequence
  HTT spacer sequence CTCN PAM
agccugggggacaacagcga

SEQ ID NO: 17881 - RNA, 20 nt, Artificial Sequence
  HTT spacer sequence CTCN PAM
cugcaaccuccgccuccugg

SEQ ID NO: 17882 - RNA, 20 nt, Artificial Sequence
  HTT spacer sequence CTCN PAM
gccuccuggguucauacgau

SEQ ID NO: 17883 - RNA, 20 nt, Artificial Sequence
  HTT spacer sequence CTCN PAM
uggguucauacgauucuccu

SEQ ID NO: 17884 - RNA, 20 nt, Artificial Sequence
  HTT spacer sequence CTCN PAM
ugccucagccucccaaauag

SEQ ID NO: 17885 - RNA, 20 nt, Artificial Sequence
  HTT spacer sequence CTCN PAM
gccucccaaauagcugguau

SEQ ID NO: 17886 - RNA, 20 nt, Artificial Sequence
  HTT spacer sequence CTCN PAM
caaauagcugguauuaacag

SEQ ID NO: 17887 - RNA, 20 nt, Artificial Sequence
  HTT spacer sequence CTCN PAM
acuaaaaauacaaaaauuag

SEQ ID NO: 17888 - RNA, 20 nt, Artificial Sequence
  HTT spacer sequence CTCN PAM
aacuccugaccucaggugau

SEQ ID NO: 17889 - RNA, 20 nt, Artificial Sequence
  HTT spacer sequence CTCN PAM
ugaccucaggugauccgccc

SEQ ID NO: 17890 - RNA, 20 nt, Artificial Sequence
  HTT spacer sequence CTCN PAM
ggugauccgcccaccucggc

SEQ ID NO: 17891 - RNA, 20 nt, Artificial Sequence
  HTT spacer sequence CTCN PAM
gccucccaaagugcugggau

SEQ ID NO: 17892 - RNA, 20 nt, Artificial Sequence
  HTT spacer sequence CTCN PAM
caaagugcugggauuauagg

SEQ ID NO: 17893 - RNA, 20 nt, Artificial Sequence
  HTT spacer sequence CTCN PAM
ggccuauaaucccagcacuu

SEQ ID NO: 17894 - RNA, 20 nt, Artificial Sequence
  HTT spacer sequence CTCN PAM
guaaguuagcuuucacugca

SEQ ID NO: 17895 - RNA, 20 nt, Artificial Sequence
  HTT spacer sequence CTCN PAM
gaaaagcaucaugaaugcca

SEQ ID NO: 17896 - RNA, 20 nt, Artificial Sequence
  HTT spacer sequence CTCN PAM
gugauacaccaaccacccua

SEQ ID NO: 17897 - RNA, 20 nt, Artificial Sequence
  HTT spacer sequence CTCN PAM
uggauuugcuugaaauaaaa

SEQ ID NO: 17898 - RNA, 20 nt, Artificial Sequence
  HTT spacer sequence CTCN PAM
uaguauuuuaaguaauauuu

SEQ ID NO: 17899 - RNA, 20 nt, Artificial Sequence
  HTT spacer sequence CTCN PAM
cuuaguauuuuaaguaauau

SEQ ID NO: 17900 - RNA, 20 nt, Artificial Sequence
  HTT spacer sequence CTCN PAM
augccuguuauaaauauuug

SEQ ID NO: 17901 - RNA, 20 nt, Artificial Sequence
  HTT spacer sequence CTCN PAM
gaaacauuugccuuauucuu

SEQ ID NO: 17902 - RNA, 20 nt, Artificial Sequence
  HTT spacer sequence CTCN PAM
uaaucuguuguuauuguuug

SEQ ID NO: 17903 - RNA, 20 nt, Artificial Sequence
  HTT spacer sequence CTCN PAM
gauuucaggaguucaaccua

SEQ ID NO: 17904 - RNA, 20 nt, Artificial Sequence
  HTT spacer sequence CTCN PAM
ugaaaucagagcauuaaagg

SEQ ID NO: 17905 - RNA, 20 nt, Artificial Sequence
  HTT spacer sequence CTCN PAM
augcuuaagccuagggauga

SEQ ID NO: 17906 - RNA, 20 nt, Artificial Sequence
  HTT spacer sequence CTCN PAM
ucccuaggcuuaagcaugga

SEQ ID NO: 17907 - RNA, 20 nt, Artificial Sequence
  HTT spacer sequence CTCN PAM
ucuggccaccagaaauuuca

SEQ ID NO: 17908 - RNA, 20 nt, Artificial Sequence
  HTT spacer sequence CTCN PAM
cgggcugcuucaaaaagggc

SEQ ID NO: 17909 - RNA, 20 nt, Artificial Sequence
  HTT spacer sequence CTCN PAM
ggcccgugugagcggcaccg

SEQ ID NO: 17910 - RNA, 20 nt, Artificial Sequence
  HTT spacer sequence CTCN PAM
cacgggccagagucaccuca

SEQ ID NO: 17911 - RNA, 20 nt, Artificial Sequence
  HTT spacer sequence CTCN PAM
cugcuguccaucaugucuuc

SEQ ID NO: 17912 - RNA, 20 nt, Artificial Sequence
  HTT spacer sequence CTCN PAM
ggcuggaagacaugauggac

SEQ ID NO: 17913 - RNA, 20 nt, Artificial Sequence
  HTT spacer sequence CTCN PAM
gcaggcagcucgggcuggaa

SEQ ID NO: 17914 - RNA, 20 nt, Artificial Sequence
  HTT spacer sequence CTCN PAM
aguaggccgccggcucugca

SEQ ID NO: 17915 - RNA, 20 nt, Artificial Sequence
  HTT spacer sequence CTCN PAM
guaaacgcuuucaauguauu

SEQ ID NO: 17916 - RNA, 20 nt, Artificial Sequence
  HTT spacer sequence CTCN PAM
uuagcuaccucuguaaacgc

SEQ ID NO: 17917 - RNA, 20 nt, Artificial Sequence
  HTT spacer sequence CTCN PAM
gcucagaauuucuuccugug

SEQ ID NO: 17918 - RNA, 20 nt, Artificial Sequence
  HTT spacer sequence CTCN PAM
gaauuucuuccuguguguuu

SEQ ID NO: 17919 - RNA, 20 nt, Artificial Sequence
  HTT spacer sequence CTCN PAM
aagcccuugaggaaggcugg

SEQ ID NO: 17920 - RNA, 20 nt, Artificial Sequence
  HTT spacer sequence CTCN PAM
agggcuuagagcccuauguc

SEQ ID NO: 17921 - RNA, 20 nt, Artificial Sequence
  HTT spacer sequence CTCN PAM
ggggagaugcagccccaaac

SEQ ID NO: 17922 - RNA, 20 nt, Artificial Sequence
  HTT spacer sequence CTCN PAM
ccugaggucuggcccagccu

SEQ ID NO: 17923 - RNA, 20 nt, Artificial Sequence
  HTT spacer sequence CTCN PAM
guggcacaucuacacauccg

SEQ ID NO: 17924 - RNA, 20 nt, Artificial Sequence
  HTT spacer sequence CTCN PAM
agacauuguuccucaguggc

SEQ ID NO: 17925 - RNA, 20 nt, Artificial Sequence
  HTT spacer sequence CTCN PAM
gagaauugcuugacugccuu

SEQ ID NO: 17926 - RNA, 20 nt, Artificial Sequence
  HTT spacer sequence CTCN PAM
gagaaucugaugaaagcuca

SEQ ID NO: 17927 - RNA, 20 nt, Artificial Sequence
  HTT spacer sequence CTCN PAM
cguuugcacccacccacgag

SEQ ID NO: 17928 - RNA, 20 nt, Artificial Sequence
  HTT spacer sequence CTCN PAM
ugggugggugcaaacgugag

SEQ ID NO: 17929 - RNA, 20 nt, Artificial Sequence
  HTT spacer sequence CTCN PAM
ggcccgggcccuggcacagu

SEQ ID NO: 17930 - RNA, 20 nt, Artificial Sequence
  HTT spacer sequence CTCN PAM
aaacugcccagucauuugca

SEQ ID NO: 17931 - RNA, 20 nt, Artificial Sequence
  HTT spacer sequence CTCN PAM
ugagaaagagaaggacauug

SEQ ID NO: 17932 - RNA, 20 nt, Artificial Sequence
  HTT spacer sequence CTCN PAM
ggaggaaggugcaaaugacu

SEQ ID NO: 17933 - RNA, 20 nt, Artificial Sequence
  HTT spacer sequence CTCN PAM
uucucaggaggaaggugcaa

SEQ ID NO: 17934 - RNA, 20 nt, Artificial Sequence
  HTT spacer sequence CTCN PAM
aggguugccaccacgaauuu

SEQ ID NO: 17935 - RNA, 20 nt, Artificial Sequence
  HTT spacer sequence CTCN PAM
uaccucaaggguugccacca

SEQ ID NO: 17936 - RNA, 20 nt, Artificial Sequence
  HTT spacer sequence CTCN PAM
ggagcucaguguugcugugg

SEQ ID NO: 17937 - RNA, 20 nt, Artificial Sequence
  HTT spacer sequence CTCN PAM
cgagcugccucuuaccucaa

SEQ ID NO: 17938 - RNA, 20 nt, Artificial Sequence
  HTT spacer sequence CTCN PAM
guguugcuguggggaggggg

SEQ ID NO: 17939 - RNA, 20 nt, Artificial Sequence
  HTT spacer sequence CTCN PAM
ccacagcaacacugagcucc

SEQ ID NO: 17940 - RNA, 20 nt, Artificial Sequence
  HTT spacer sequence CTCN PAM
ucagugucagccccaugccc

SEQ ID NO: 17941 - RNA, 20 nt, Artificial Sequence
  HTT spacer sequence CTCN PAM
gaccaguccagucacuuuuc

SEQ ID NO: 17942 - RNA, 20 nt, Artificial Sequence
  HTT spacer sequence CTCN PAM
gccuggcaguaagucuuguc

SEQ ID NO: 17943 - RNA, 20 nt, Artificial Sequence
  HTT spacer sequence CTCN PAM
ccucgccacuccucauggug

SEQ ID NO: 17944 - RNA, 20 nt, Artificial Sequence
  HTT spacer sequence CTCN PAM
ccacuccucaugguggccug

SEQ ID NO: 17945 - RNA, 20 nt, Artificial Sequence
  HTT spacer sequence CTCN PAM
ucaugguggccugugagguc

SEQ ID NO: 17946 - RNA, 20 nt, Artificial Sequence
  HTT spacer sequence CTCN PAM
ugguggccugugaggucagc

SEQ ID NO: 17947 - RNA, 20 nt, Artificial Sequence
  HTT spacer sequence CTCN PAM
caggccaccaugaggagugg

SEQ ID NO: 17948 - RNA, 20 nt, Artificial Sequence
  HTT spacer sequence CTCN PAM
ucugcaccuaccauguuagg

SEQ ID NO: 17949 - RNA, 20 nt, Artificial Sequence
  HTT spacer sequence CTCN PAM
aaaauuaggauccaccuaac

SEQ ID NO: 17950 - RNA, 20 nt, Artificial Sequence
  HTT spacer sequence CTCN PAM
gcaaggacacacuuugcaga

SEQ ID NO: 17951 - RNA, 20 nt, Artificial Sequence
  HTT spacer sequence CTCN PAM
gugggucugcaaaguguguc

SEQ ID NO: 17952 - RNA, 20 nt, Artificial Sequence
  HTT spacer sequence CTCN PAM
gccuccaccucacaccaaag

SEQ ID NO: 17953 - RNA, 20 nt, Artificial Sequence
  HTT spacer sequence CTCN PAM
accucacaccaaagaaaggg

SEQ ID NO: 17954 - RNA, 20 nt, Artificial Sequence
  HTT spacer sequence CTCN PAM
caccaaagaaagggaggagu

SEQ ID NO: 17955 - RNA, 20 nt, Artificial Sequence
  HTT spacer sequence CTCN PAM
cuuucuuuggugugaggugg

SEQ ID NO: 17956 - RNA, 20 nt, Artificial Sequence
  HTT spacer sequence CTCN PAM
ucccuuucuuuggugugagg

SEQ ID NO: 17957 - RNA, 20 nt, Artificial Sequence
  HTT spacer sequence CTCN PAM
caaaaugauaaauacacccu

SEQ ID NO: 17958 - RNA, 20 nt, Artificial Sequence
  HTT spacer sequence CTCN PAM
acgugguucagaauaagggu

SEQ ID NO: 17959 - RNA, 20 nt, Artificial Sequence
  HTT spacer sequence CTCN PAM
cacaacccccugugagauag

SEQ ID NO: 17960 - RNA, 20 nt, Artificial Sequence
  HTT spacer sequence CTCN PAM
caacccccugugagauaggc

SEQ ID NO: 17961 - RNA, 20 nt, Artificial Sequence
  HTT spacer sequence CTCN PAM
caggggguugugagagucaa

SEQ ID NO: 17962 - RNA, 20 nt, Artificial Sequence
  HTT spacer sequence CTCN PAM
guuacucccauuugacaggu

SEQ ID NO: 17963 - RNA, 20 nt, Artificial Sequence
  HTT spacer sequence CTCN PAM
cauuugacaggugaggaaag

SEQ ID NO: 17964 - RNA, 20 nt, Artificial Sequence
  HTT spacer sequence CTCN PAM
ccugucaaaugggaguaaca

SEQ ID NO: 17965 - RNA, 20 nt, Artificial Sequence
  HTT spacer sequence CTCN PAM
aagccuugcuuuccucaccu

SEQ ID NO: 17966 - RNA, 20 nt, Artificial Sequence
  HTT spacer sequence CTCN PAM
gagcuaggaaguagccauuc

SEQ ID NO: 17967 - RNA, 20 nt, Artificial Sequence
  HTT spacer sequence CTCN PAM
gaggaccugggcaagucacu

SEQ ID NO: 17968 - RNA, 20 nt, Artificial Sequence
  HTT spacer sequence CTCN PAM
caaauucaaccuaugacaga

SEQ ID NO: 17969 - RNA, 20 nt, Artificial Sequence
  HTT spacer sequence CTCN PAM
aauucaaccuaugacagagg

SEQ ID NO: 17970 - RNA, 20 nt, Artificial Sequence
  HTT spacer sequence CTCN PAM
gucauagguugaauuugaga

SEQ ID NO: 17971 - RNA, 20 nt, Artificial Sequence
  HTT spacer sequence CTCN PAM
cacagcaccagggcuugccu

SEQ ID NO: 17972 - RNA, 20 nt, Artificial Sequence
  HTT spacer sequence CTCN PAM
uccuuggggcucccacagca

SEQ ID NO: 17973 - RNA, 20 nt, Artificial Sequence
  HTT spacer sequence CTCN PAM
ggccugguggccacguagcc

SEQ ID NO: 17974 - RNA, 20 nt, Artificial Sequence
  HTT spacer sequence CTCN PAM
ugggcuacguggccaccagg

SEQ ID NO: 17975 - RNA, 20 nt, Artificial Sequence
  HTT spacer sequence CTCN PAM
ccugggcuacguggccacca

SEQ ID NO: 17976 - RNA, 20 nt, Artificial Sequence
  HTT spacer sequence CTCN PAM
uguagaaaucucuccugggc

SEQ ID NO: 17977 - RNA, 20 nt, Artificial Sequence
  HTT spacer sequence CTCN PAM
uucagcgcugugggcuccug

SEQ ID NO: 17978 - RNA, 20 nt, Artificial Sequence
  HTT spacer sequence CTCN PAM
ccuucagcgcugugggcucc

SEQ ID NO: 17979 - RNA, 20 nt, Artificial Sequence
  HTT spacer sequence CTCN PAM
cuccuucagcgcugugggcu

SEQ ID NO: 17980 - RNA, 20 nt, Artificial Sequence
  HTT spacer sequence CTCN PAM
cucuccuucagcgcuguggg

SEQ ID NO: 17981 - RNA, 20 nt, Artificial Sequence
  HTT spacer sequence CTCN PAM
gcugccucucucuccuucag

SEQ ID NO: 17982 - RNA, 20 nt, Artificial Sequence
  HTT spacer sequence CTCN PAM
gccacaaagcccccuuacuc

SEQ ID NO: 17983 - RNA, 20 nt, Artificial Sequence
  HTT spacer sequence CTCN PAM
cugccacaaagcccccuuac

SEQ ID NO: 17984 - RNA, 20 nt, Artificial Sequence
  HTT spacer sequence CTCN PAM
auuacauucaguccugaccc

SEQ ID NO: 17985 - RNA, 20 nt, Artificial Sequence
  HTT spacer sequence CTCN PAM
gacauggcuccauuacauuc

SEQ ID NO: 17986 - RNA, 20 nt, Artificial Sequence
  HTT spacer sequence CTCN PAM
gugcuuuggacgguuccaca

SEQ ID NO: 17987 - RNA, 20 nt, Artificial Sequence
  HTT spacer sequence CTCN PAM
uguaccuucguuuggggaag

SEQ ID NO: 17988 - RNA, 20 nt, Artificial Sequence
  HTT spacer sequence CTCN PAM
guacuucccuuuaggcccug

SEQ ID NO: 17989 - RNA, 20 nt, Artificial Sequence
  HTT spacer sequence CTCN PAM
uggaucaaaugccaggacag

SEQ ID NO: 17990 - RNA, 20 nt, Artificial Sequence
  HTT spacer sequence CTCN PAM
gcgggaucugcucauggauc

SEQ ID NO: 17991 - RNA, 20 nt, Artificial Sequence
  HTT spacer sequence CTCN PAM
aggcagggcuggacugcugc

SEQ ID NO: 17992 - RNA, 20 nt, Artificial Sequence
  HTT spacer sequence CTCN PAM
ggagcguggucuccuccaca

SEQ ID NO: 17993 - RNA, 20 nt, Artificial Sequence
  HTT spacer sequence CTCN PAM
agaggccaggcagcugcagg

SEQ ID NO: 17994 - RNA, 20 nt, Artificial Sequence
  HTT spacer sequence CTCN PAM
uccacagaguuugugaccca

SEQ ID NO: 17995 - RNA, 20 nt, Artificial Sequence
  HTT spacer sequence CTCN PAM
acagaguuugugacccacgc

SEQ ID NO: 17996 - RNA, 20 nt, Artificial Sequence
  HTT spacer sequence CTCN PAM
guggaggagaccacgcucca

SEQ ID NO: 17997 - RNA, 20 nt, Artificial Sequence
  HTT spacer sequence CTCN PAM
cucaucuacugugugcacuu

SEQ ID NO: 17998 - RNA, 20 nt, Artificial Sequence
  HTT spacer sequence CTCN PAM
ucuacugugugcacuucauc

SEQ ID NO: 17999 - RNA, 20 nt, Artificial Sequence
  HTT spacer sequence CTCN PAM
aggaugaagugcacacagua

SEQ ID NO: 18000 - RNA, 20 nt, Artificial Sequence
  HTT spacer sequence CTCN PAM
ccggccuccaggaugaagug

SEQ ID NO: 18001 - RNA, 20 nt, Artificial Sequence
  HTT spacer sequence CTCN PAM
auccccaauuccuagcuuag

SEQ ID NO: 18002 - RNA, 20 nt, Artificial Sequence
  HTT spacer sequence CTCN PAM
ccauccccaauuccuagcuu

SEQ ID NO: 18003 - RNA, 20 nt, Artificial Sequence
  HTT spacer sequence CTCN PAM
uacucuccaauauauuggag

SEQ ID NO: 18004 - RNA, 20 nt, Artificial Sequence
  HTT spacer sequence CTCN PAM
ccaauauauuggagucuaca

SEQ ID NO: 18005 - RNA, 20 nt, Artificial Sequence
  HTT spacer sequence CTCN PAM
aauauauuggagucuacacu

SEQ ID NO: 18006 - RNA, 20 nt, Artificial Sequence
  HTT spacer sequence CTCN PAM
aauauauuggagaguaagag

SEQ ID NO: 18007 - RNA, 20 nt, Artificial Sequence
  HTT spacer sequence CTCN PAM
aaacuuuaugucucugugau

SEQ ID NO: 18008 - RNA, 20 nt, Artificial Sequence
  HTT spacer sequence CTCN PAM
gugaucuuuggucuuagcug

SEQ ID NO: 18009 - RNA, 20 nt, Artificial Sequence
  HTT spacer sequence CTCN PAM
gacagaaaacaaauaaucuu

SEQ ID NO: 18010 - RNA, 20 nt, Artificial Sequence
  HTT spacer sequence CTCN PAM
acaagggucauuagccacaa

SEQ ID NO: 18011 - RNA, 20 nt, Artificial Sequence
  HTT spacer sequence CTCN PAM
aacauguaaacuaugacguc

SEQ ID NO: 18012 - RNA, 20 nt, Artificial Sequence
  HTT spacer sequence CTCN PAM
auaacauuuaauuuaaaaau

SEQ ID NO: 18013 - RNA, 20 nt, Artificial Sequence
  HTT spacer sequence CTCN PAM
aagaagucuggcuuuuaagu

SEQ ID NO: 18014 - RNA, 20 nt, Artificial Sequence
  HTT spacer sequence CTCN PAM
agauacuaucaaaaucauca

SEQ ID NO: 18015 - RNA, 20 nt, Artificial Sequence
  HTT spacer sequence CTCN PAM
uaauaaccucagggugagag

SEQ ID NO: 18016 - RNA, 20 nt, Artificial Sequence
  HTT spacer sequence CTCN PAM
gggugagagauggccaacag

SEQ ID NO: 18017 - RNA, 20 nt, Artificial Sequence
  HTT spacer sequence CTCN PAM
cccugagguuauuaugagac

SEQ ID NO: 18018 - RNA, 20 nt, Artificial Sequence
  HTT spacer sequence CTCN PAM
cacccugagguuauuaugag

SEQ ID NO: 18019 - RNA, 20 nt, Artificial Sequence
  HTT spacer sequence CTCN PAM
uguuggccaucucucacccu

SEQ ID NO: 18020 - RNA, 20 nt, Artificial Sequence
  HTT spacer sequence CTCN PAM
acugucuccuguuggccauc

SEQ ID NO: 18021 - RNA, 20 nt, Artificial Sequence
  HTT spacer sequence CTCN PAM
ugguuagugguauaugucug

SEQ ID NO: 18022 - RNA, 20 nt, Artificial Sequence
  HTT spacer sequence CTCN PAM
gucuaguauugucuguuugu

SEQ ID NO: 18023 - RNA, 20 nt, Artificial Sequence
  HTT spacer sequence CTCN PAM
caaaaguugaaagggauaga

SEQ ID NO: 18024 - RNA, 20 nt, Artificial Sequence
  HTT spacer sequence CTCN PAM
uuguucuguuguaauuuuag

SEQ ID NO: 18025 - RNA, 20 nt, Artificial Sequence
  HTT spacer sequence CTCN PAM
aggcugcacugcaacuaaaa

SEQ ID NO: 18026 - RNA, 20 nt, Artificial Sequence
  HTT spacer sequence CTCN PAM
ccaggcugcacugcaacuaa

SEQ ID NO: 18027 - RNA, 20 nt, Artificial Sequence
  HTT spacer sequence CTCN PAM
cugauggcuuuugggguauu

SEQ ID NO: 18028 - RNA, 20 nt, Artificial Sequence
  HTT spacer sequence CTCN PAM
ucgcugauggcuuuuggggu

SEQ ID NO: 18029 - RNA, 20 nt, Artificial Sequence
  HTT spacer sequence CTCN PAM
uccucgcugauggcuuuugg

SEQ ID NO: 18030 - RNA, 20 nt, Artificial Sequence
  HTT spacer sequence CTCN PAM
uccuccucgcugauggcuuu

SEQ ID NO: 18031 - RNA, 20 nt, Artificial Sequence
  HTT spacer sequence CTCN PAM
guguguuuggaucuacuucc

SEQ ID NO: 18032 - RNA, 20 nt, Artificial Sequence
  HTT spacer sequence CTCN PAM
ggacccauuuuuuucuuaca

SEQ ID NO: 18033 - RNA, 20 nt, Artificial Sequence
  HTT spacer sequence CTCN PAM
aggacuuaaaaaucauucac

SEQ ID NO: 18034 - RNA, 20 nt, Artificial Sequence
  HTT spacer sequence CTCN PAM
gugaaugauuuuuaaguccu

SEQ ID NO: 18035 - RNA, 20 nt, Artificial Sequence
  HTT spacer sequence CTCN PAM
ccgcggugcacgucucugug

SEQ ID NO: 18036 - RNA, 20 nt, Artificial Sequence
  HTT spacer sequence CTCN PAM
uggaagcgcaccguagcucc

SEQ ID NO: 18037 - RNA, 20 nt, Artificial Sequence
  HTT spacer sequence CTCN PAM
gcuguguccugcugcuccuc

SEQ ID NO: 18038 - RNA, 20 nt, Artificial Sequence
  HTT spacer sequence CTCN PAM
ucccuagcugucagggaggc

SEQ ID NO: 18039 - RNA, 20 nt, Artificial Sequence
  HTT spacer sequence CTCN PAM
cuagcugucagggaggcugu

SEQ ID NO: 18040 - RNA, 20 nt, Artificial Sequence
  HTT spacer sequence CTCN PAM
cugacagcuagggaggagca

SEQ ID NO: 18041 - RNA, 20 nt, Artificial Sequence
  HTT spacer sequence CTCN PAM
uuuguuuccgagugaacacc

SEQ ID NO: 18042 - RNA, 20 nt, Artificial Sequence
  HTT spacer sequence CTCN PAM
gaaacaaaagagcuggcaaa

SEQ ID NO: 18043 - RNA, 20 nt, Artificial Sequence
  HTT spacer sequence CTCN PAM
gacccuacagaccagcuggg

SEQ ID NO: 18044 - RNA, 20 nt, Artificial Sequence
  HTT spacer sequence CTCN PAM
cccaguggcaucccagcugg

SEQ ID NO: 18045 - RNA, 20 nt, Artificial Sequence
  HTT spacer sequence CTCN PAM
cuuccccccgcacuucccac

SEQ ID NO: 18046 - RNA, 20 nt, Artificial Sequence
  HTT spacer sequence CTCN PAM
gcaguuauucugagauccuu

SEQ ID NO: 18047 - RNA, 20 nt, Artificial Sequence
  HTT spacer sequence CTCN PAM
gaauaacugcagaguguggg

SEQ ID NO: 18048 - RNA, 20 nt, Artificial Sequence
  HTT spacer sequence CTCN PAM
aggaucucagaauaacugca

SEQ ID NO: 18049 - RNA, 20 nt, Artificial Sequence
  HTT spacer sequence CTCN PAM
gaaauuaaugcucggccucu

SEQ ID NO: 18050 - RNA, 20 nt, Artificial Sequence
  HTT spacer sequence CTCN PAM
gccucuggucagcaagcaac

SEQ ID NO: 18051 - RNA, 20 nt, Artificial Sequence
  HTT spacer sequence CTCN PAM
ggucagcaagcaacaaccuu

SEQ ID NO: 18052 - RNA, 20 nt, Artificial Sequence
  HTT spacer sequence CTCN PAM
acaaaagguuguugcuugcu

SEQ ID NO: 18053 - RNA, 20 nt, Artificial Sequence
  HTT spacer sequence CTCN PAM
ugugggaaacauuuauuuau

SEQ ID NO: 18054 - RNA, 20 nt, Artificial Sequence
  HTT spacer sequence CTCN PAM
gugucagguucagccaucug

SEQ ID NO: 18055 - RNA, 20 nt, Artificial Sequence
  HTT spacer sequence CTCN PAM
caauucuagaguagguauuu

SEQ ID NO: 18056 - RNA, 20 nt, Artificial Sequence
  HTT spacer sequence CTCN PAM
agaauugggaggaaagugca

SEQ ID NO: 18057 - RNA, 20 nt, Artificial Sequence
  HTT spacer sequence CTCN PAM
caacaggcacugccaccauu

SEQ ID NO: 18058 - RNA, 20 nt, Artificial Sequence
  HTT spacer sequence CTCN PAM
gugggacaggcaacaggggc

SEQ ID NO: 18059 - RNA, 20 nt, Artificial Sequence
  HTT spacer sequence CTCN PAM
ccuggagccuguccacacau

SEQ ID NO: 18060 - RNA, 20 nt, Artificial Sequence
  HTT spacer sequence CTCN PAM
aggugaggcacccccaccuc

SEQ ID NO: 18061 - RNA, 20 nt, Artificial Sequence
  HTT spacer sequence CTCN PAM
agguaagcgugcuguguaaa

SEQ ID NO: 18062 - RNA, 20 nt, Artificial Sequence
  HTT spacer sequence CTCN PAM
guggcucaggaaacacgccu

SEQ ID NO: 18063 - RNA, 20 nt, Artificial Sequence
  HTT spacer sequence CTCN PAM
ggaaacacgccuuuucaauc

SEQ ID NO: 18064 - RNA, 20 nt, Artificial Sequence
  HTT spacer sequence CTCN PAM
ugauugaaaaggcguguuuc

SEQ ID NO: 18065 - RNA, 20 nt, Artificial Sequence
  HTT spacer sequence CTCN PAM
ccgcuuuugugcaauccugg

SEQ ID NO: 18066 - RNA, 20 nt, Artificial Sequence
  HTT spacer sequence CTCN PAM
auccacaaccaggauugcac

SEQ ID NO: 18067 - RNA, 20 nt, Artificial Sequence
  HTT spacer sequence CTCN PAM
ucugguucccgguucaaggu

SEQ ID NO: 18068 - RNA, 20 nt, Artificial Sequence
  HTT spacer sequence CTCN PAM
aauuacaaaaccuugaaccg

SEQ ID NO: 18069 - RNA, 20 nt, Artificial Sequence
  HTT spacer sequence CTCN PAM
gaauuuguaucucaaaccuc

SEQ ID NO: 18070 - RNA, 20 nt, Artificial Sequence
  HTT spacer sequence CTCN PAM
aaccucuguggguccuucag

SEQ ID NO: 18071 - RNA, 20 nt, Artificial Sequence
  HTT spacer sequence CTCN PAM
guggguccuucaggcuucag

SEQ ID NO: 18072 - RNA, 20 nt, Artificial Sequence
  HTT spacer sequence CTCN PAM
cuacucugcaucuuccagcc

SEQ ID NO: 18073 - RNA, 20 nt, Artificial Sequence
  HTT spacer sequence CTCN PAM
gcaucuuccagccgaguggc

SEQ ID NO: 18074 - RNA, 20 nt, Artificial Sequence
  HTT spacer sequence CTCN PAM
gcuggaagaugcagaguagg

SEQ ID NO: 18075 - RNA, 20 nt, Artificial Sequence
  HTT spacer sequence CTCN PAM
ggcuguggauccugugcuuc

SEQ ID NO: 18076 - RNA, 20 nt, Artificial Sequence
  HTT spacer sequence CTCN PAM
ccacagaagcacaggaucca

SEQ ID NO: 18077 - RNA, 20 nt, Artificial Sequence
  HTT spacer sequence CTCN PAM
auguaaagcaccuggaacgg

SEQ ID NO: 18078 - RNA, 20 nt, Artificial Sequence
  HTT spacer sequence CTCN PAM
acaaaugcuaucaugauuuu

SEQ ID NO: 18079 - RNA, 20 nt, Artificial Sequence
  HTT spacer sequence CTCN PAM
acuguuuuaaagcaauggaa

SEQ ID NO: 18080 - RNA, 20 nt, Artificial Sequence
  HTT spacer sequence CTCN PAM
aaccgccaagaugucucaac

SEQ ID NO: 18081 - RNA, 20 nt, Artificial Sequence
  HTT spacer sequence CTCN PAM
aacucaaaccgccaagaugu

SEQ ID NO: 18082 - RNA, 20 nt, Artificial Sequence
  HTT spacer sequence CTCN PAM
uuaggcaagagugggaagcu

SEQ ID NO: 18083 - RNA, 20 nt, Artificial Sequence
  HTT spacer sequence CTCN PAM
ugccuaaagagggccauggg

SEQ ID NO: 18084 - RNA, 20 nt, Artificial Sequence
  HTT spacer sequence CTCN PAM
auaggacguuacuucuuaaa

SEQ ID NO: 18085 - RNA, 20 nt, Artificial Sequence
  HTT spacer sequence CTCN PAM
cgccuguaaucccagcacuu

SEQ ID NO: 18086 - RNA, 20 nt, Artificial Sequence
  HTT spacer sequence CTCN PAM
caaagugcugggauuacagg

SEQ ID NO: 18087 - RNA, 20 nt, Artificial Sequence
  HTT spacer sequence CTCN PAM
gccucccaaagugcugggau

SEQ ID NO: 18088 - RNA, 20 nt, Artificial Sequence
  HTT spacer sequence CTCN PAM
ugauccgcccgccucggccu

SEQ ID NO: 18089 - RNA, 20 nt, Artificial Sequence
  HTT spacer sequence CTCN PAM
ugaccucgugauccgcccgc

SEQ ID NO: 18090 - RNA, 20 nt, Artificial Sequence
  HTT spacer sequence CTCN PAM
aucuccugaccucgugaucc

SEQ ID NO: 18091 - RNA, 20 nt, Artificial Sequence
  HTT spacer sequence CTCN PAM
acuaaaaauacaaaaaauua

SEQ ID NO: 18092 - RNA, 20 nt, Artificial Sequence
  HTT spacer sequence CTCN PAM
caaguagcugggacuacagg

SEQ ID NO: 18093 - RNA, 20 nt, Artificial Sequence
  HTT spacer sequence CTCN PAM
gccucccaaguagcugggac

SEQ ID NO: 18094 - RNA, 20 nt, Artificial Sequence
  HTT spacer sequence CTCN PAM
ugccucagccucccaaguag

SEQ ID NO: 18095 - RNA, 20 nt, Artificial Sequence
  HTT spacer sequence CTCN PAM
cggguucacgccauucuccu

SEQ ID NO: 18096 - RNA, 20 nt, Artificial Sequence
  HTT spacer sequence CTCN PAM
gccucccggguucacgccau

SEQ ID NO: 18097 - RNA, 20 nt, Artificial Sequence
  HTT spacer sequence CTCN PAM
cugcaagcuccgccucccgg

SEQ ID NO: 18098 - RNA, 20 nt, Artificial Sequence
  HTT spacer sequence CTCN PAM
gcucacugcaagcuccgccu

SEQ ID NO: 18099 - RNA, 20 nt, Artificial Sequence
  HTT spacer sequence CTCN PAM
agccugggcgacagagcaag

SEQ ID NO: 18100 - RNA, 20 nt, Artificial Sequence
  HTT spacer sequence CTCN PAM
gucgcccaggcuggagugca

SEQ ID NO: 18101 - RNA, 20 nt, Artificial Sequence
  HTT spacer sequence CTCN PAM
gucucaaaaaaaaaaaaaaa

SEQ ID NO: 18102 - RNA, 20 nt, Artificial Sequence
  HTT spacer sequence CTCN PAM
aaaaaaaaaaaaaauauuaa

SEQ ID NO: 18103 - RNA, 20 nt, Artificial Sequence
  HTT spacer sequence CTCN PAM
uuagcguggggcuuaauugc

SEQ ID NO: 18104 - RNA, 20 nt, Artificial Sequence
  HTT spacer sequence CTCN PAM
uuggacuuaagcaauuaagc

SEQ ID NO: 18105 - RNA, 20 nt, Artificial Sequence
  HTT spacer sequence CTCN PAM
auccuaggaaguugcccaaa

SEQ ID NO: 18106 - RNA, 20 nt, Artificial Sequence
  HTT spacer sequence CTCN PAM
uggccuguggguaauagcca

SEQ ID NO: 18107 - RNA, 20 nt, Artificial Sequence
  HTT spacer sequence CTCN PAM
cugccucaacaaaucauauu

SEQ ID NO: 18108 - RNA, 20 nt, Artificial Sequence
  HTT spacer sequence CTCN PAM
acaaaucauauuuuaguagg

SEQ ID NO: 18109 - RNA, 20 nt, Artificial Sequence
  HTT spacer sequence CTCN PAM
agacaccauucuguggaucu

SEQ ID NO: 18110 - RNA, 20 nt, Artificial Sequence
  HTT spacer sequence CTCN PAM
caaggcagacgcuguggaca

SEQ ID NO: 18111 - RNA, 20 nt, Artificial Sequence
  HTT spacer sequence CTCN PAM
agcacucugaccuaggaaag

SEQ ID NO: 18112 - RNA, 20 nt, Artificial Sequence
  HTT spacer sequence CTCN PAM
gaccuaggaaagccagugaa

SEQ ID NO: 18113 - RNA, 20 nt, Artificial Sequence
  HTT spacer sequence CTCN PAM
gcuaguaucaaagggccaug

SEQ ID NO: 18114 - RNA, 20 nt, Artificial Sequence
  HTT spacer sequence CTCN PAM
caggaccugugucugucccu

SEQ ID NO: 18115 - RNA, 20 nt, Artificial Sequence
  HTT spacer sequence CTCN PAM
ggucucccaggaccuguguc

SEQ ID NO: 18116 - RNA, 20 nt, Artificial Sequence
  HTT spacer sequence CTCN PAM
ucuuucucuggucucccagg

SEQ ID NO: 18117 - RNA, 20 nt, Artificial Sequence
  HTT spacer sequence CTCN PAM
gccccucgucuuucucuggu

SEQ ID NO: 18118 - RNA, 20 nt, Artificial Sequence
  HTT spacer sequence CTCN PAM
ucugccccucgucuuucucu

SEQ ID NO: 18119 - RNA, 20 nt, Artificial Sequence
  HTT spacer sequence CTCN PAM
gacuuccuuuaggacaccuc

SEQ ID NO: 18120 - RNA, 20 nt, Artificial Sequence
  HTT spacer sequence CTCN PAM
gccucagacuuccuuuagga

SEQ ID NO: 18121 - RNA, 20 nt, Artificial Sequence
  HTT spacer sequence CTCN PAM
ucagccucagacuuccuuua

SEQ ID NO: 18122 - RNA, 20 nt, Artificial Sequence
  HTT spacer sequence CTCN PAM
gugauaaggccagcagcagc

SEQ ID NO: 18123 - RNA, 20 nt, Artificial Sequence
  HTT spacer sequence CTCN PAM
cugugauaaggccagcagca

SEQ ID NO: 18124 - RNA, 20 nt, Artificial Sequence
  HTT spacer sequence CTCN PAM
ggcccacucucugugauaag

SEQ ID NO: 18125 - RNA, 20 nt, Artificial Sequence
  HTT spacer sequence CTCN PAM
ggccuugguucccagcccuc

SEQ ID NO: 18126 - RNA, 20 nt, Artificial Sequence
  HTT spacer sequence CTCN PAM
gguucaggaccauuccagca

SEQ ID NO: 18127 - RNA, 20 nt, Artificial Sequence
  HTT spacer sequence CTCN PAM
ccauuuucugcugggauugc

SEQ ID NO: 18128 - RNA, 20 nt, Artificial Sequence
  HTT spacer sequence CTCN PAM
gagucuaaguggauuccaca

SEQ ID NO: 18129 - RNA, 20 nt, Artificial Sequence
  HTT spacer sequence CTCN PAM
gaguuggccacugaaggccu

SEQ ID NO: 18130 - RNA, 20 nt, Artificial Sequence
  HTT spacer sequence CTCN PAM
agcuguaacuguggaaucca

SEQ ID NO: 18131 - RNA, 20 nt, Artificial Sequence
  HTT spacer sequence CTCN PAM
cuuaaccguugcuuguuuag

SEQ ID NO: 18132 - RNA, 20 nt, Artificial Sequence
  HTT spacer sequence CTCN PAM
uaaccguugcuuguuuagau

SEQ ID NO: 18133 - RNA, 20 nt, Artificial Sequence
  HTT spacer sequence CTCN PAM
caggcugcagugauauacuu

SEQ ID NO: 18134 - RNA, 20 nt, Artificial Sequence
  HTT spacer sequence CTCN PAM
accauuucugccaccaucuc

SEQ ID NO: 18135 - RNA, 20 nt, Artificial Sequence
  HTT spacer sequence CTCN PAM
gcagucgguguuggccuugg

SEQ ID NO: 18136 - RNA, 20 nt, Artificial Sequence
  HTT spacer sequence CTCN PAM
cgccauugcuaaggaacauc

SEQ ID NO: 18137 - RNA, 20 nt, Artificial Sequence
  HTT spacer sequence CTCN PAM
ccagugggggcacacgugug

SEQ ID NO: 18138 - RNA, 20 nt, Artificial Sequence
  HTT spacer sequence CTCN PAM
uuccuugcagaagaccaagu

SEQ ID NO: 18139 - RNA, 20 nt, Artificial Sequence
  HTT spacer sequence CTCN PAM
cgugugcccagcccagggcc

SEQ ID NO: 18140 - RNA, 20 nt, Artificial Sequence
  HTT spacer sequence CTCN PAM
cacgugugcccagcccaggg

SEQ ID NO: 18141 - RNA, 20 nt, Artificial Sequence
  HTT spacer sequence CTCN PAM
gggcugcggggauucugucc

SEQ ID NO: 18142 - RNA, 20 nt, Artificial Sequence
  HTT spacer sequence CTCN PAM
ggcaccacguguggaggucg

SEQ ID NO: 18143 - RNA, 20 nt, Artificial Sequence
  HTT spacer sequence CTCN PAM
acacguggugccugaggaaa

SEQ ID NO: 18144 - RNA, 20 nt, Artificial Sequence
  HTT spacer sequence CTCN PAM
guucauuuuagaaaacccag

SEQ ID NO: 18145 - RNA, 20 nt, Artificial Sequence
  HTT spacer sequence CTCN PAM
uagggauguagggccucagu

SEQ ID NO: 18146 - RNA, 20 nt, Artificial Sequence
  HTT spacer sequence CTCN PAM
agaaucaggucuaacacuaa

SEQ ID NO: 18147 - RNA, 20 nt, Artificial Sequence
  HTT spacer sequence CTCN PAM
agugagugagauuuuccuuu

SEQ ID NO: 18148 - RNA, 20 nt, Artificial Sequence
  HTT spacer sequence CTCN PAM
agggggugugguuucugguc

SEQ ID NO: 18149 - RNA, 20 nt, Artificial Sequence
  HTT spacer sequence CTCN PAM
cucgagggggugugguuucu

SEQ ID NO: 18150 - RNA, 20 nt, Artificial Sequence
  HTT spacer sequence CTCN PAM
cucacucgaggggguguggu

SEQ ID NO: 18151 - RNA, 20 nt, Artificial Sequence
  HTT spacer sequence CTCN PAM
aaaggaaaaucucacucacu

SEQ ID NO: 18152 - RNA, 20 nt, Artificial Sequence
  HTT spacer sequence CTCN PAM
ugccuguaaucccagcacuu

SEQ ID NO: 18153 - RNA, 20 nt, Artificial Sequence
  HTT spacer sequence CTCN PAM
agugauccgcccaccuuggc

SEQ ID NO: 18154 - RNA, 20 nt, Artificial Sequence
  HTT spacer sequence CTCN PAM
aaauccugaccucaagugau

SEQ ID NO: 18155 - RNA, 20 nt, Artificial Sequence
  HTT spacer sequence CTCN PAM
acuaaaaauauaaaaauuag

SEQ ID NO: 18156 - RNA, 20 nt, Artificial Sequence
  HTT spacer sequence CTCN PAM
ggagacugagacaggagaau

SEQ ID NO: 18157 - RNA, 20 nt, Artificial Sequence
  HTT spacer sequence CTCN PAM
ugaguagcugggauuacagg

SEQ ID NO: 18158 - RNA, 20 nt, Artificial Sequence
  HTT spacer sequence CTCN PAM
gucuccugaguagcugggau

SEQ ID NO: 18159 - RNA, 20 nt, Artificial Sequence
  HTT spacer sequence CTCN PAM
ugucucagucuccugaguag

SEQ ID NO: 18160 - RNA, 20 nt, Artificial Sequence
  HTT spacer sequence CTCN PAM
uggguucaagcgauucuccu

SEQ ID NO: 18161 - RNA, 20 nt, Artificial Sequence
  HTT spacer sequence CTCN PAM
gcuuacugcaaccuucgccu

SEQ ID NO: 18162 - RNA, 20 nt, Artificial Sequence
  HTT spacer sequence CTCN PAM
agccugggcaacagagcaag

SEQ ID NO: 18163 - RNA, 20 nt, Artificial Sequence
  HTT spacer sequence CTCN PAM
guugcccaggcuagagugca

SEQ ID NO: 18164 - RNA, 20 nt, Artificial Sequence
  HTT spacer sequence CTCN PAM
gucucaaaaaaaaaaaaggu

SEQ ID NO: 18165 - RNA, 20 nt, Artificial Sequence
  HTT spacer sequence CTCN PAM
aaaaaaaaaaagguaggugu

SEQ ID NO: 18166 - RNA, 20 nt, Artificial Sequence
  HTT spacer sequence CTCN PAM
uguuaucugaaacaaggguu

SEQ ID NO: 18167 - RNA, 20 nt, Artificial Sequence
  HTT spacer sequence CTCN PAM
ucauguuaucugaaacaagg

SEQ ID NO: 18168 - RNA, 20 nt, Artificial Sequence
  HTT spacer sequence CTCN PAM
agcuaagcuccucauguuau

SEQ ID NO: 18169 - RNA, 20 nt, Artificial Sequence
  HTT spacer sequence CTCN PAM
ucaagcuaagcuccucaugu

SEQ ID NO: 18170 - RNA, 20 nt, Artificial Sequence
  HTT spacer sequence CTCN PAM
ccucaagcuaagcuccucau

SEQ ID NO: 18171 - RNA, 20 nt, Artificial Sequence
  HTT spacer sequence CTCN PAM
cucuccucaagcuaagcucc

SEQ ID NO: 18172 - RNA, 20 nt, Artificial Sequence
  HTT spacer sequence CTCN PAM
aucaacccucacucuccuca

SEQ ID NO: 18173 - RNA, 20 nt, Artificial Sequence
  HTT spacer sequence CTCN PAM
caccagcccgcugaaauaag

SEQ ID NO: 18174 - RNA, 20 nt, Artificial Sequence
  HTT spacer sequence CTCN PAM
ggcaggaaagaaaggccgac

SEQ ID NO: 18175 - RNA, 20 nt, Artificial Sequence
  HTT spacer sequence CTCN PAM
cacccugccaggucggccuu

SEQ ID NO: 18176 - RNA, 20 nt, Artificial Sequence
  HTT spacer sequence CTCN PAM
cugaccuacaccugcuggcu

SEQ ID NO: 18177 - RNA, 20 nt, Artificial Sequence
  HTT spacer sequence CTCN PAM
auucucccugaccuacaccu

SEQ ID NO: 18178 - RNA, 20 nt, Artificial Sequence
  HTT spacer sequence CTCN PAM
ucccugggaccuggcuccau

SEQ ID NO: 18179 - RNA, 20 nt, Artificial Sequence
  HTT spacer sequence CTCN PAM
ggcagccacaagccucuucc

SEQ ID NO: 18180 - RNA, 20 nt, Artificial Sequence
  HTT spacer sequence CTCN PAM
agcauacauacacacacgug

SEQ ID NO: 18181 - RNA, 20 nt, Artificial Sequence
  HTT spacer sequence CTCN PAM
ccagcauacauacacacacg

SEQ ID NO: 18182 - RNA, 20 nt, Artificial Sequence
  HTT spacer sequence CTCN PAM
cuagacucuccagcauacau

SEQ ID NO: 18183 - RNA, 20 nt, Artificial Sequence
  HTT spacer sequence CTCN PAM
aaggacgcaguauuguuuga

SEQ ID NO: 18184 - RNA, 20 nt, Artificial Sequence
  HTT spacer sequence CTCN PAM
ggaucaaacaauacugcguc

SEQ ID NO: 18185 - RNA, 20 nt, Artificial Sequence
  HTT spacer sequence CTCN PAM
caggaucaaacaauacugcg

SEQ ID NO: 18186 - RNA, 20 nt, Artificial Sequence
  HTT spacer sequence CTCN PAM
ucuucggaauaagcccgcca

SEQ ID NO: 18187 - RNA, 20 nt, Artificial Sequence
  HTT spacer sequence CTCN PAM
cuguucugcaacugcuucca

SEQ ID NO: 18188 - RNA, 20 nt, Artificial Sequence
  HTT spacer sequence CTCN PAM
ucccaggaaagccuacaacu

SEQ ID NO: 18189 - RNA, 20 nt, Artificial Sequence
  HTT spacer sequence CTCN PAM
cuucccaggaaagccuacaa

SEQ ID NO: 18190 - RNA, 20 nt, Artificial Sequence
  HTT spacer sequence CTCN PAM
agcaccccugcugcucucuu

SEQ ID NO: 18191 - RNA, 20 nt, Artificial Sequence
  HTT spacer sequence CTCN PAM
cggccccacucuuggugcac

SEQ ID NO: 18192 - RNA, 20 nt, Artificial Sequence
  HTT spacer sequence CTCN PAM
gccccacucuuggugcacag

SEQ ID NO: 18193 - RNA, 20 nt, Artificial Sequence
  HTT spacer sequence CTCN PAM
uggugcacagcgagucacug

SEQ ID NO: 18194 - RNA, 20 nt, Artificial Sequence
  HTT spacer sequence CTCN PAM
cugugcaccaagaguggggc

SEQ ID NO: 18195 - RNA, 20 nt, Artificial Sequence
  HTT spacer sequence CTCN PAM
uaaccagaugcuaaugaacc

SEQ ID NO: 18196 - RNA, 20 nt, Artificial Sequence
  HTT spacer sequence CTCN PAM
uuuggaggggcucguggaga

SEQ ID NO: 18197 - RNA, 20 nt, Artificial Sequence
  HTT spacer sequence CTCN PAM
aaaggagcaguuacugucuc

SEQ ID NO: 18198 - RNA, 20 nt, Artificial Sequence
  HTT spacer sequence CTCN PAM
uggagaccaugcaggagggc

SEQ ID NO: 18199 - RNA, 20 nt, Artificial Sequence
  HTT spacer sequence CTCN PAM
acgagccccuccaaaggagc

SEQ ID NO: 18200 - RNA, 20 nt, Artificial Sequence
  HTT spacer sequence CTCN PAM
ugcauggucuccacgagccc

SEQ ID NO: 18201 - RNA, 20 nt, Artificial Sequence
  HTT spacer sequence CTCN PAM
agaccgugcccuccugcaug

SEQ ID NO: 18202 - RNA, 20 nt, Artificial Sequence
  HTT spacer sequence CTCN PAM
ggacggcaugaccucaagac

SEQ ID NO: 18203 - RNA, 20 nt, Artificial Sequence
  HTT spacer sequence CTCN PAM
ggugugcucuggacggcaug

SEQ ID NO: 18204 - RNA, 20 nt, Artificial Sequence
  HTT spacer sequence CTCN PAM
agcaagcucuucacuggcau

SEQ ID NO: 18205 - RNA, 20 nt, Artificial Sequence
  HTT spacer sequence CTCN PAM
ucacuggcauugaggaguuc

SEQ ID NO: 18206 - RNA, 20 nt, Artificial Sequence
  HTT spacer sequence CTCN PAM
augccagugaagagcuugcu

SEQ ID NO: 18207 - RNA, 20 nt, Artificial Sequence
  HTT spacer sequence CTCN PAM
ucaaugccagugaagagcuu

SEQ ID NO: 18208 - RNA, 20 nt, Artificial Sequence
  HTT spacer sequence CTCN PAM
gggaacuccucaaugccagu

SEQ ID NO: 18209 - RNA, 20 nt, Artificial Sequence
  HTT spacer sequence CTCN PAM
cccuggguggguaccagaga

SEQ ID NO: 18210 - RNA, 20 nt, Artificial Sequence
  HTT spacer sequence CTCN PAM
cuggguggguaccagagagg

SEQ ID NO: 18211 - RNA, 20 nt, Artificial Sequence
  HTT spacer sequence CTCN PAM
gguacccacccagggagaga

SEQ ID NO: 18212 - RNA, 20 nt, Artificial Sequence
  HTT spacer sequence CTCN PAM
cugguacccacccagggaga

SEQ ID NO: 18213 - RNA, 20 nt, Artificial Sequence
  HTT spacer sequence CTCN PAM
ucucugguacccacccaggg

SEQ ID NO: 18214 - RNA, 20 nt, Artificial Sequence
  HTT spacer sequence CTCN PAM
ccuaugcuccucucugguac

SEQ ID NO: 18215 - RNA, 20 nt, Artificial Sequence
  HTT spacer sequence CTCN PAM
uuaaaucgguuaugcucccc

SEQ ID NO: 18216 - RNA, 20 nt, Artificial Sequence
  HTT spacer sequence CTCN PAM
cuuuaaaucgguuaugcucc

SEQ ID NO: 18217 - RNA, 20 nt, Artificial Sequence
  HTT spacer sequence CTCN PAM
ccacaggaaagcccucucuu

SEQ ID NO: 18218 - RNA, 20 nt, Artificial Sequence
  HTT spacer sequence CTCN PAM
uaccucaccacaggaaagcc

SEQ ID NO: 18219 - RNA, 20 nt, Artificial Sequence
  HTT spacer sequence CTCN PAM
augauaaugaccagcuaauc

SEQ ID NO: 18220 - RNA, 20 nt, Artificial Sequence
  HTT spacer sequence CTCN PAM
gccuuugugcagaugggcug

SEQ ID NO: 18221 - RNA, 20 nt, Artificial Sequence
  HTT spacer sequence CTCN PAM
cugaaggcauguaagcugag

SEQ ID NO: 18222 - RNA, 20 nt, Artificial Sequence
  HTT spacer sequence CTCN PAM
gcuuacaugccuucagugag

SEQ ID NO: 18223 - RNA, 20 nt, Artificial Sequence
  HTT spacer sequence CTCN PAM
cggucuggccagcucagcuu

SEQ ID NO: 18224 - RNA, 20 nt, Artificial Sequence
  HTT spacer sequence CTCN PAM
ggauucuucugugcauggca

SEQ ID NO: 18225 - RNA, 20 nt, Artificial Sequence
  HTT spacer sequence CTCN PAM
gacaagugccaugcacagaa

SEQ ID NO: 18226 - RNA, 20 nt, Artificial Sequence
  HTT spacer sequence CTCN PAM
cgcacagagaacuggacuuc

SEQ ID NO: 18227 - RNA, 20 nt, Artificial Sequence
  HTT spacer sequence CTCN PAM
gugcgugaggugcucagaca

SEQ ID NO: 18228 - RNA, 20 nt, Artificial Sequence
  HTT spacer sequence CTCN PAM
gaaguccaguucucugugcg

SEQ ID NO: 18229 - RNA, 20 nt, Artificial Sequence
  HTT spacer sequence CTCN PAM
gauauguuuauuggcaagca

SEQ ID NO: 18230 - RNA, 20 nt, Artificial Sequence
  HTT spacer sequence CTCN PAM
uugaacgccugccuuuauuc

SEQ ID NO: 18231 - RNA, 20 nt, Artificial Sequence
  HTT spacer sequence CTCN PAM
cccacaaacagcaggugcug

SEQ ID NO: 18232 - RNA, 20 nt, Artificial Sequence
  HTT spacer sequence CTCN PAM
aacuccugccugcuucuccc

SEQ ID NO: 18233 - RNA, 20 nt, Artificial Sequence
  HTT spacer sequence CTCN PAM
ugccugcuucucccagcacu

SEQ ID NO: 18234 - RNA, 20 nt, Artificial Sequence
  HTT spacer sequence CTCN PAM
cagcacucccugaguggggu

SEQ ID NO: 18235 - RNA, 20 nt, Artificial Sequence
  HTT spacer sequence CTCN PAM
cugaguggggugugccagca

SEQ ID NO: 18236 - RNA, 20 nt, Artificial Sequence
  HTT spacer sequence CTCN PAM
gggagugcugggagaagcag

SEQ ID NO: 18237 - RNA, 20 nt, Artificial Sequence
  HTT spacer sequence CTCN PAM
ggaugaggacaggaaguggg

SEQ ID NO: 18238 - RNA, 20 nt, Artificial Sequence
  HTT spacer sequence CTCN PAM
uccugaggcugcuggcacac

SEQ ID NO: 18239 - RNA, 20 nt, Artificial Sequence
  HTT spacer sequence CTCN PAM
cacuuccuguccucauccug

SEQ ID NO: 18240 - RNA, 20 nt, Artificial Sequence
  HTT spacer sequence CTCN PAM
gcccucccacuuccuguccu

SEQ ID NO: 18241 - RNA, 20 nt, Artificial Sequence
  HTT spacer sequence CTCN PAM
caaaucugcucugcccuccc

SEQ ID NO: 18242 - RNA, 20 nt, Artificial Sequence
  HTT spacer sequence CTCN PAM
aacugcuuccugggacuucc

SEQ ID NO: 18243 - RNA, 20 nt, Artificial Sequence
  HTT spacer sequence CTCN PAM
cccagaaaacagcuccaacu

SEQ ID NO: 18244 - RNA, 20 nt, Artificial Sequence
  HTT spacer sequence CTCN PAM
gggacaguguugggguagug

SEQ ID NO: 18245 - RNA, 20 nt, Artificial Sequence
  HTT spacer sequence CTCN PAM
cuaccccaacacugucccag

SEQ ID NO: 18246 - RNA, 20 nt, Artificial Sequence
  HTT spacer sequence CTCN PAM
ucacuaccccaacacugucc

SEQ ID NO: 18247 - RNA, 20 nt, Artificial Sequence
  HTT spacer sequence CTCN PAM
cuccucacuaccccaacacu

SEQ ID NO: 18248 - RNA, 20 nt, Artificial Sequence
  HTT spacer sequence CTCN PAM
acugggcucccuccucacua

SEQ ID NO: 18249 - RNA, 20 nt, Artificial Sequence
  HTT spacer sequence CTCN PAM
ccacugggcucccuccucac

SEQ ID NO: 18250 - RNA, 20 nt, Artificial Sequence
  HTT spacer sequence CTCN PAM
caguaugucuguccugacuc

SEQ ID NO: 18251 - RNA, 20 nt, Artificial Sequence
  HTT spacer sequence CTCN PAM
acucggaugaugucacuucc

SEQ ID NO: 18252 - RNA, 20 nt, Artificial Sequence
  HTT spacer sequence CTCN PAM
gaugaugucacuuccuuuuc

SEQ ID NO: 18253 - RNA, 20 nt, Artificial Sequence
  HTT spacer sequence CTCN PAM
gguguggaagcuuggauggu

SEQ ID NO: 18254 - RNA, 20 nt, Artificial Sequence
  HTT spacer sequence CTCN PAM
cgguuugggugaccauccaa

SEQ ID NO: 18255 - RNA, 20 nt, Artificial Sequence
  HTT spacer sequence CTCN PAM
gggaaugcugugccaaaauc

SEQ ID NO: 18256 - RNA, 20 nt, Artificial Sequence
  HTT spacer sequence CTCN PAM
acggggaucucagggaaugc

SEQ ID NO: 18257 - RNA, 20 nt, Artificial Sequence
  HTT spacer sequence CTCN PAM
aggaaaaggaagucuuuaag

SEQ ID NO: 18258 - RNA, 20 nt, Artificial Sequence
  HTT spacer sequence CTCN PAM
uuaaagacuuccuuuuccug

SEQ ID NO: 18259 - RNA, 20 nt, Artificial Sequence
  HTT spacer sequence CTCN PAM
uggggccucuccuucagguc

SEQ ID NO: 18260 - RNA, 20 nt, Artificial Sequence
  HTT spacer sequence CTCN PAM
ccuucaggucaccauugucg

SEQ ID NO: 18261 - RNA, 20 nt, Artificial Sequence
  HTT spacer sequence CTCN PAM
uucaggucaccauugucgga

SEQ ID NO: 18262 - RNA, 20 nt, Artificial Sequence
  HTT spacer sequence CTCN PAM
cgguagauguccgacaaugg

SEQ ID NO: 18263 - RNA, 20 nt, Artificial Sequence
  HTT spacer sequence CTCN PAM
ggauuuccucccgguagaug

SEQ ID NO: 18264 - RNA, 20 nt, Artificial Sequence
  HTT spacer sequence CTCN PAM
uuugacuccagaaaagauuu

SEQ ID NO: 18265 - RNA, 20 nt, Artificial Sequence
  HTT spacer sequence CTCN PAM
agaaaagauuuaagcaugau

SEQ ID NO: 18266 - RNA, 20 nt, Artificial Sequence
  HTT spacer sequence CTCN PAM
uuuuauacugagaaaauaga

SEQ ID NO: 18267 - RNA, 20 nt, Artificial Sequence
  HTT spacer sequence CTCN PAM
guauaaaaggaguuuugcca

SEQ ID NO: 18268 - RNA, 20 nt, Artificial Sequence
  HTT spacer sequence CTCN PAM
cguuguccacuacacaugaa

SEQ ID NO: 18269 - RNA, 20 nt, Artificial Sequence
  HTT spacer sequence CTCN PAM
gaauguuuucuuguguucac

SEQ ID NO: 18270 - RNA, 20 nt, Artificial Sequence
  HTT spacer sequence CTCN PAM
gugguccauuuucucauaug

SEQ ID NO: 18271 - RNA, 20 nt, Artificial Sequence
  HTT spacer sequence CTCN PAM
uaugggaacaagcagacggg

SEQ ID NO: 18272 - RNA, 20 nt, Artificial Sequence
  HTT spacer sequence CTCN PAM
cgucugcuuguucccauaug

SEQ ID NO: 18273 - RNA, 20 nt, Artificial Sequence
  HTT spacer sequence CTCN PAM
aucugcucccgucugcuugu

SEQ ID NO: 18274 - RNA, 20 nt, Artificial Sequence
  HTT spacer sequence CTCN PAM
ccuuccccagagccuagagg

SEQ ID NO: 18275 - RNA, 20 nt, Artificial Sequence
  HTT spacer sequence CTCN PAM
ggggaaggcgagugccaaga

SEQ ID NO: 18276 - RNA, 20 nt, Artificial Sequence
  HTT spacer sequence CTCN PAM
aggcucuggggaaggcgagu

SEQ ID NO: 18277 - RNA, 20 nt, Artificial Sequence
  HTT spacer sequence CTCN PAM
ccaugcugccucuaggcucu

SEQ ID NO: 18278 - RNA, 20 nt, Artificial Sequence
  HTT spacer sequence CTCN PAM
gacaguccuggucugcuucc

SEQ ID NO: 18279 - RNA, 20 nt, Artificial Sequence
  HTT spacer sequence CTCN PAM
uaccugagcagcgcagggca

SEQ ID NO: 18280 - RNA, 20 nt, Artificial Sequence
  HTT spacer sequence CTCN PAM
gguaggagggcuggaagcag

SEQ ID NO: 18281 - RNA, 20 nt, Artificial Sequence
  HTT spacer sequence CTCN PAM
agagacccucaguuuuguca

SEQ ID NO: 18282 - RNA, 20 nt, Artificial Sequence
  HTT spacer sequence CTCN PAM
agagguuagacggacuugcc

SEQ ID NO: 18283 - RNA, 20 nt, Artificial Sequence
  HTT spacer sequence CTCN PAM
guuuugucauauguaaaaug

SEQ ID NO: 18284 - RNA, 20 nt, Artificial Sequence
  HTT spacer sequence CTCN PAM
ugccaucaaauaggggcaaa

SEQ ID NO: 18285 - RNA, 20 nt, Artificial Sequence
  HTT spacer sequence CTCN PAM
gugacugugcccugcugugg

SEQ ID NO: 18286 - RNA, 20 nt, Artificial Sequence
  HTT spacer sequence CTCN PAM
acuguccaguccucucccca

SEQ ID NO: 18287 - RNA, 20 nt, Artificial Sequence
  HTT spacer sequence CTCN PAM
ccccagucccucgggcuucu

SEQ ID NO: 18288 - RNA, 20 nt, Artificial Sequence
  HTT spacer sequence CTCN PAM
ccagucccucgggcuucugc

SEQ ID NO: 18289 - RNA, 20 nt, Artificial Sequence
  HTT spacer sequence CTCN PAM
ggcuucugcagauuugaggc

SEQ ID NO: 18290 - RNA, 20 nt, Artificial Sequence
  HTT spacer sequence CTCN PAM
aaucugcagaagcccgaggg

SEQ ID NO: 18291 - RNA, 20 nt, Artificial Sequence
  HTT spacer sequence CTCN PAM
ugccacaaccuucugggauc

SEQ ID NO: 18292 - RNA, 20 nt, Artificial Sequence
  HTT spacer sequence CTCN PAM
acuuuccccuuuauaauuca

SEQ ID NO: 18293 - RNA, 20 nt, Artificial Sequence
  HTT spacer sequence CTCN PAM
uuggacauugaauuauaaag

SEQ ID NO: 18294 - RNA, 20 nt, Artificial Sequence
  HTT spacer sequence CTCN PAM
cuuuggacauugaauuauaa

SEQ ID NO: 18295 - RNA, 20 nt, Artificial Sequence
  HTT spacer sequence CTCN PAM
gggcucucuuuggacauuga

SEQ ID NO: 18296 - RNA, 20 nt, Artificial Sequence
  HTT spacer sequence CTCN PAM
cgccagcugccucacggagc

SEQ ID NO: 18297 - RNA, 20 nt, Artificial Sequence
  HTT spacer sequence CTCN PAM
cggagcuccuccucuuccug

SEQ ID NO: 18298 - RNA, 20 nt, Artificial Sequence
  HTT spacer sequence CTCN PAM
gugaggcagcuggcgugagg

SEQ ID NO: 18299 - RNA, 20 nt, Artificial Sequence
  HTT spacer sequence CTCN PAM
uccucuuccuggcugugagg

SEQ ID NO: 18300 - RNA, 20 nt, Artificial Sequence
  HTT spacer sequence CTCN PAM
ucuuccuggcugugaggauc

SEQ ID NO: 18301 - RNA, 20 nt, Artificial Sequence
  HTT spacer sequence CTCN PAM
uccuggcugugaggaucggu

SEQ ID NO: 18302 - RNA, 20 nt, Artificial Sequence
  HTT spacer sequence CTCN PAM
cagccaggaagaggaggagc

SEQ ID NO: 18303 - RNA, 20 nt, Artificial Sequence
  HTT spacer sequence CTCN PAM
ugcucucucccccuugccua

SEQ ID NO: 18304 - RNA, 20 nt, Artificial Sequence
  HTT spacer sequence CTCN PAM
cucccccuugccuaacacga

SEQ ID NO: 18305 - RNA, 20 nt, Artificial Sequence
  HTT spacer sequence CTCN PAM
cccccuugccuaacacgagc

SEQ ID NO: 18306 - RNA, 20 nt, Artificial Sequence
  HTT spacer sequence CTCN PAM
cccuugccuaacacgagcac

SEQ ID NO: 18307 - RNA, 20 nt, Artificial Sequence
  HTT spacer sequence CTCN PAM
uguuaggcaagggggagaga

SEQ ID NO: 18308 - RNA, 20 nt, Artificial Sequence
  HTT spacer sequence CTCN PAM
ugaacugcccaucggacgug

SEQ ID NO: 18309 - RNA, 20 nt, Artificial Sequence
  HTT spacer sequence CTCN PAM
uuuucuuuguucauuuuuuu

SEQ ID NO: 18310 - RNA, 20 nt, Artificial Sequence
  HTT spacer sequence CTCN PAM
ccuucucucugucucuuguu

SEQ ID NO: 18311 - RNA, 20 nt, Artificial Sequence
  HTT spacer sequence CTCN PAM
uucucucugucucuuguucu

SEQ ID NO: 18312 - RNA, 20 nt, Artificial Sequence
  HTT spacer sequence CTCN PAM
cugucucuuguucuuucuuu

SEQ ID NO: 18313 - RNA, 20 nt, Artificial Sequence
  HTT spacer sequence CTCN PAM
gucucuuguucuuucuuuac

SEQ ID NO: 18314 - RNA, 20 nt, Artificial Sequence
  HTT spacer sequence CTCN PAM
uguucuuucuuuaccccguu

SEQ ID NO: 18315 - RNA, 20 nt, Artificial Sequence
  HTT spacer sequence CTCN PAM
aguucuccuguccuaagcac

SEQ ID NO: 18316 - RNA, 20 nt, Artificial Sequence
  HTT spacer sequence CTCN PAM
uguccuaagcaccccauccc

SEQ ID NO: 18317 - RNA, 20 nt, Artificial Sequence
  HTT spacer sequence CTCN PAM
cuggccuuaccacaaguggc

SEQ ID NO: 18318 - RNA, 20 nt, Artificial Sequence
  HTT spacer sequence CTCN PAM
ggccuuaccacaaguggcgu

SEQ ID NO: 18319 - RNA, 20 nt, Artificial Sequence
  HTT spacer sequence CTCN PAM
gacaucaugauggggacaug

SEQ ID NO: 18320 - RNA, 20 nt, Artificial Sequence
  HTT spacer sequence CTCN PAM
aaugcagcucaucaauaggg

SEQ ID NO: 18321 - RNA, 20 nt, Artificial Sequence
  HTT spacer sequence CTCN PAM
ucaauagggauggagggucu

SEQ ID NO: 18322 - RNA, 20 nt, Artificial Sequence
  HTT spacer sequence CTCN PAM
aucccuauugaugagcugca

SEQ ID NO: 18323 - RNA, 20 nt, Artificial Sequence
  HTT spacer sequence CTCN PAM
uuuuaaucuauucuucuaga

SEQ ID NO: 18324 - RNA, 20 nt, Artificial Sequence
  HTT spacer sequence CTCN PAM
gaccugucuagaagaauaga

SEQ ID NO: 18325 - RNA, 20 nt, Artificial Sequence
  HTT spacer sequence CTCN PAM
auaaagcugcuaaaaauuua

SEQ ID NO: 18326 - RNA, 20 nt, Artificial Sequence
  HTT spacer sequence CTCN PAM
aagcggacagcuugguggcc

SEQ ID NO: 18327 - RNA, 20 nt, Artificial Sequence
  HTT spacer sequence CTCN PAM
guggauaaaacuaauggcca

SEQ ID NO: 18328 - RNA, 20 nt, Artificial Sequence
  HTT spacer sequence CTCN PAM
gggcuggacuccagggaaga

SEQ ID NO: 18329 - RNA, 20 nt, Artificial Sequence
  HTT spacer sequence CTCN PAM
agggaagauuuuagcccauu

SEQ ID NO: 18330 - RNA, 20 nt, Artificial Sequence
  HTT spacer sequence CTCN PAM
cuaaaugggcuaaaaucuuc

SEQ ID NO: 18331 - RNA, 20 nt, Artificial Sequence
  HTT spacer sequence CTCN PAM
ugcagggccagggccacuuc

SEQ ID NO: 18332 - RNA, 20 nt, Artificial Sequence
  HTT spacer sequence CTCN PAM
acuggggguugaccaggcug

SEQ ID NO: 18333 - RNA, 20 nt, Artificial Sequence
  HTT spacer sequence CTCN PAM
caugugucucggacagugca

SEQ ID NO: 18334 - RNA, 20 nt, Artificial Sequence
  HTT spacer sequence CTCN PAM
ugugucucggacagugcagc

SEQ ID NO: 18335 - RNA, 20 nt, Artificial Sequence
  HTT spacer sequence CTCN PAM
gacagugcagccgaugucua

SEQ ID NO: 18336 - RNA, 20 nt, Artificial Sequence
  HTT spacer sequence CTCN PAM
augaugaaauggaggggaua

SEQ ID NO: 18337 - RNA, 20 nt, Artificial Sequence
  HTT spacer sequence CTCN PAM
auuucaucauugaggaaacc

SEQ ID NO: 18338 - RNA, 20 nt, Artificial Sequence
  HTT spacer sequence CTCN PAM
cacaguucuaugaugcgggg

SEQ ID NO: 18339 - RNA, 20 nt, Artificial Sequence
  HTT spacer sequence CTCN PAM
cugcccuuggcguggagccu

SEQ ID NO: 18340 - RNA, 20 nt, Artificial Sequence
  HTT spacer sequence CTCN PAM
acgccaagggcagugagucc

SEQ ID NO: 18341 - RNA, 20 nt, Artificial Sequence
  HTT spacer sequence CTCN PAM
aggggccgugcugugucggc

SEQ ID NO: 18342 - RNA, 20 nt, Artificial Sequence
  HTT spacer sequence CTCN PAM
ccguuacaggcuugagaagg

SEQ ID NO: 18343 - RNA, 20 nt, Artificial Sequence
  HTT spacer sequence CTCN PAM
guuacaggcuugagaagggu

SEQ ID NO: 18344 - RNA, 20 nt, Artificial Sequence
  HTT spacer sequence CTCN PAM
agccuguaacggagagcuga

SEQ ID NO: 18345 - RNA, 20 nt, Artificial Sequence
  HTT spacer sequence CTCN PAM
cucauguaacauuuauauuu

SEQ ID NO: 18346 - RNA, 20 nt, Artificial Sequence
  HTT spacer sequence CTCN PAM
cauguaacauuuauauuucu

SEQ ID NO: 18347 - RNA, 20 nt, Artificial Sequence
  HTT spacer sequence CTCN PAM
uguaacauuuauauuucuag

SEQ ID NO: 18348 - RNA, 20 nt, Artificial Sequence
  HTT spacer sequence CTCN PAM
guuugaagaaacuugggcca

SEQ ID NO: 18349 - RNA, 20 nt, Artificial Sequence
  HTT spacer sequence CTCN PAM
uugguguccuggugacgcag

SEQ ID NO: 18350 - RNA, 20 nt, Artificial Sequence
  HTT spacer sequence CTCN PAM
ugauggagcaggaggagagc

SEQ ID NO: 18351 - RNA, 20 nt, Artificial Sequence
  HTT spacer sequence CTCN PAM
aucacgaggggcugcgucac

SEQ ID NO: 18352 - RNA, 20 nt, Artificial Sequence
  HTT spacer sequence CTCN PAM
ugcuccaucacgaggggcug

SEQ ID NO: 18353 - RNA, 20 nt, Artificial Sequence
  HTT spacer sequence CTCN PAM
uccugcuccaucacgagggg

SEQ ID NO: 18354 - RNA, 20 nt, Artificial Sequence
  HTT spacer sequence CTCN PAM
ccuccugcuccaucacgagg

SEQ ID NO: 18355 - RNA, 20 nt, Artificial Sequence
  HTT spacer sequence CTCN PAM
uaccuuauuuuugaaagagu

SEQ ID NO: 18356 - RNA, 20 nt, Artificial Sequence
  HTT spacer sequence CTCN PAM
uucaaaaauaagguaagaga

SEQ ID NO: 18357 - RNA, 20 nt, Artificial Sequence
  HTT spacer sequence CTCN PAM
ggaauaucagucaagacacc

SEQ ID NO: 18358 - RNA, 20 nt, Artificial Sequence
  HTT spacer sequence CTCN PAM
gcaggcuuugucccugcucu

SEQ ID NO: 18359 - RNA, 20 nt, Artificial Sequence
  HTT spacer sequence CTCN PAM
gaauauugauaaacuaaaag

SEQ ID NO: 18360 - RNA, 20 nt, Artificial Sequence
  HTT spacer sequence CTCN PAM
ucugaauauugauaaacuaa

SEQ ID NO: 18361 - RNA, 20 nt, Artificial Sequence
  HTT spacer sequence CTCN PAM
uggccuuuauaaagugccuu

SEQ ID NO: 18362 - RNA, 20 nt, Artificial Sequence
  HTT spacer sequence CTCN PAM
gcaagacauuagaaaaauga

SEQ ID NO: 18363 - RNA, 20 nt, Artificial Sequence
  HTT spacer sequence CTCN PAM
gguacagcggagccagcaga

SEQ ID NO: 18364 - RNA, 20 nt, Artificial Sequence
  HTT spacer sequence CTCN PAM
gcuguaccagagcacaguua

SEQ ID NO: 18365 - RNA, 20 nt, Artificial Sequence
  HTT spacer sequence CTCN PAM
cagaaaugacaguuuggagg

SEQ ID NO: 18366 - RNA, 20 nt, Artificial Sequence
  HTT spacer sequence CTCN PAM
aaacugucauuucugugagu

SEQ ID NO: 18367 - RNA, 20 nt, Artificial Sequence
  HTT spacer sequence CTCN PAM
uacauuuuacaggccuugcu

SEQ ID NO: 18368 - RNA, 20 nt, Artificial Sequence
  HTT spacer sequence CTCN PAM
aaacaugaauuacuuuuuaa

SEQ ID NO: 18369 - RNA, 20 nt, Artificial Sequence
  HTT spacer sequence CTCN PAM
uuugggcacaaaacuccaaa

SEQ ID NO: 18370 - RNA, 20 nt, Artificial Sequence
  HTT spacer sequence CTCN PAM
gcacacacgggcccugaaac

SEQ ID NO: 18371 - RNA, 20 nt, Artificial Sequence
  HTT spacer sequence CTCN PAM
cggggcacaaggcagggccu

SEQ ID NO: 18372 - RNA, 20 nt, Artificial Sequence
  HTT spacer sequence CTCN PAM
gccugacagaaauccuuugg

SEQ ID NO: 18373 - RNA, 20 nt, Artificial Sequence
  HTT spacer sequence CTCN PAM
ucuuccucccauugaggcag

SEQ ID NO: 18374 - RNA, 20 nt, Artificial Sequence
  HTT spacer sequence CTCN PAM
uccucccauugaggcaggga

SEQ ID NO: 18375 - RNA, 20 nt, Artificial Sequence
  HTT spacer sequence CTCN PAM
cauugaggcagggaagacuc

SEQ ID NO: 18376 - RNA, 20 nt, Artificial Sequence
  HTT spacer sequence CTCN PAM
augggaggaagaggagccuu

SEQ ID NO: 18377 - RNA, 20 nt, Artificial Sequence
  HTT spacer sequence CTCN PAM
ggguucugcaggcagaggug

SEQ ID NO: 18378 - RNA, 20 nt, Artificial Sequence
  HTT spacer sequence CTCN PAM
gccugcagaacccagagucu

SEQ ID NO: 18379 - RNA, 20 nt, Artificial Sequence
  HTT spacer sequence CTCN PAM
uguugacaugugggcucucc

SEQ ID NO: 18380 - RNA, 20 nt, Artificial Sequence
  HTT spacer sequence CTCN PAM
ccuuccaggaagacacagag

SEQ ID NO: 18381 - RNA, 20 nt, Artificial Sequence
  HTT spacer sequence CTCN PAM
uuccaggaagacacagagag

SEQ ID NO: 18382 - RNA, 20 nt, Artificial Sequence
  HTT spacer sequence CTCN PAM
gugucuuccuggaaggagag

SEQ ID NO: 18383 - RNA, 20 nt, Artificial Sequence
  HTT spacer sequence CTCN PAM
cugugucuuccuggaaggag

SEQ ID NO: 18384 - RNA, 20 nt, Artificial Sequence
  HTT spacer sequence CTCN PAM
cuggugcucagugcaaugac

SEQ ID NO: 18385 - RNA, 20 nt, Artificial Sequence
  HTT spacer sequence CTCN PAM
gugcaaugacugugccugug

SEQ ID NO: 18386 - RNA, 20 nt, Artificial Sequence
  HTT spacer sequence CTCN PAM
aagcagcuuacagcuggguu

SEQ ID NO: 18387 - RNA, 20 nt, Artificial Sequence
  HTT spacer sequence CTCN PAM
gaaagcucucgacaccaggu

SEQ ID NO: 18388 - RNA, 20 nt, Artificial Sequence
  HTT spacer sequence CTCN PAM
cgacaccagguuugcuugag

SEQ ID NO: 18389 - RNA, 20 nt, Artificial Sequence
  HTT spacer sequence CTCN PAM
acaccagguuugcuugaguu

SEQ ID NO: 18390 - RNA, 20 nt, Artificial Sequence
  HTT spacer sequence CTCN PAM
agcaaaccuggugucgagag

SEQ ID NO: 18391 - RNA, 20 nt, Artificial Sequence
  HTT spacer sequence CTCN PAM
gggacauagcaggugcuggg

SEQ ID NO: 18392 - RNA, 20 nt, Artificial Sequence
  HTT spacer sequence CTCN PAM
ugcacaggccacacggacgg

SEQ ID NO: 18393 - RNA, 20 nt, Artificial Sequence
  HTT spacer sequence CTCN PAM
uggucagugagaagcuggaa

SEQ ID NO: 18394 - RNA, 20 nt, Artificial Sequence
  HTT spacer sequence CTCN PAM
cugaccaggaggccaccuuu

SEQ ID NO: 18395 - RNA, 20 nt, Artificial Sequence
  HTT spacer sequence CTCN PAM
auaaccccacgucaguuccu

SEQ ID NO: 18396 - RNA, 20 nt, Artificial Sequence
  HTT spacer sequence CTCN PAM
gcuaacgucuuccccuaaau

SEQ ID NO: 18397 - RNA, 20 nt, Artificial Sequence
  HTT spacer sequence CTCN PAM
uuccugcucugcuaacgucu

SEQ ID NO: 18398 - RNA, 20 nt, Artificial Sequence
  HTT spacer sequence CTCN PAM
cggacaggugcucacuuagg

SEQ ID NO: 18399 - RNA, 20 nt, Artificial Sequence
  HTT spacer sequence CTCN PAM
cuuaggaagugaguuucauu

SEQ ID NO: 18400 - RNA, 20 nt, Artificial Sequence
  HTT spacer sequence CTCN PAM
cuuccuaagugagcaccugu

SEQ ID NO: 18401 - RNA, 20 nt, Artificial Sequence
  HTT spacer sequence CTCN PAM
gcuuugccuaaaggaaccug

SEQ ID NO: 18402 - RNA, 20 nt, Artificial Sequence
  HTT spacer sequence CTCN PAM
uuaccuuuuuucuaaaaugu

SEQ ID NO: 18403 - RNA, 20 nt, Artificial Sequence
  HTT spacer sequence CTCN PAM
caaaccuacauuuuagaaaa

SEQ ID NO: 18404 - RNA, 20 nt, Artificial Sequence
  HTT spacer sequence CTCN PAM
gcuuccucccaaaccuacau

SEQ ID NO: 18405 - RNA, 20 nt, Artificial Sequence
  HTT spacer sequence CTCN PAM
gauaaugcucagcuuccucc

SEQ ID NO: 18406 - RNA, 20 nt, Artificial Sequence
  HTT spacer sequence CTCN PAM
acaaucccucugauaaugcu

SEQ ID NO: 18407 - RNA, 20 nt, Artificial Sequence
  HTT spacer sequence CTCN PAM
ugcuccacaaucccucugau

SEQ ID NO: 18408 - RNA, 20 nt, Artificial Sequence
  HTT spacer sequence CTCN PAM
uugaaaccauugcuugaauc

SEQ ID NO: 18409 - RNA, 20 nt, Artificial Sequence
  HTT spacer sequence CTCN PAM
cuuugaaaccauugcuugaa

SEQ ID NO: 18410 - RNA, 20 nt, Artificial Sequence
  HTT spacer sequence CTCN PAM
cucuuugaaaccauugcuug

SEQ ID NO: 18411 - RNA, 20 nt, Artificial Sequence
  HTT spacer sequence CTCN PAM
gucuccggcuacuacaggua

SEQ ID NO: 18412 - RNA, 20 nt, Artificial Sequence
  HTT spacer sequence CTCN PAM
ggcuacuacagguaccugag

SEQ ID NO: 18413 - RNA, 20 nt, Artificial Sequence
  HTT spacer sequence CTCN PAM
gguaccuguaguagccggag

SEQ ID NO: 18414 - RNA, 20 nt, Artificial Sequence
  HTT spacer sequence CTCN PAM
cccgcacccuuucccucagg

SEQ ID NO: 18415 - RNA, 20 nt, Artificial Sequence
  HTT spacer sequence CTCN PAM
uucuagcccaaguacaaccg

SEQ ID NO: 18416 - RNA, 20 nt, Artificial Sequence
  HTT spacer sequence CTCN PAM
cauucuagcccaaguacaac

SEQ ID NO: 18417 - RNA, 20 nt, Artificial Sequence
  HTT spacer sequence CTCN PAM
ccacaccagugaugcgggaa

SEQ ID NO: 18418 - RNA, 20 nt, Artificial Sequence
  HTT spacer sequence CTCN PAM
ggucuucccgcaucacuggu

SEQ ID NO: 18419 - RNA, 20 nt, Artificial Sequence
  HTT spacer sequence CTCN PAM
gaccacacucaggucuuccc

SEQ ID NO: 18420 - RNA, 20 nt, Artificial Sequence
  HTT spacer sequence CTCN PAM
aacucagaccacacucaggu

SEQ ID NO: 18421 - RNA, 20 nt, Artificial Sequence
  HTT spacer sequence CTCN PAM
ugcuuaugaaaggggcagcg

SEQ ID NO: 18422 - RNA, 20 nt, Artificial Sequence
  HTT spacer sequence CTCN PAM
cugggccugacuaagacucc

SEQ ID NO: 18423 - RNA, 20 nt, Artificial Sequence
  HTT spacer sequence CTCN PAM
uucauuuccagauuuuacuu

SEQ ID NO: 18424 - RNA, 20 nt, Artificial Sequence
  HTT spacer sequence CTCN PAM
ccugccagucaagaaaugag

SEQ ID NO: 18425 - RNA, 20 nt, Artificial Sequence
  HTT spacer sequence CTCN PAM
ugccagucaagaaaugagaa

SEQ ID NO: 18426 - RNA, 20 nt, Artificial Sequence
  HTT spacer sequence CTCN PAM
uuucuugacuggcaggagag

SEQ ID NO: 18427 - RNA, 20 nt, Artificial Sequence
  HTT spacer sequence CTCN PAM
cgggcuguaagaccagcagg

SEQ ID NO: 18428 - RNA, 20 nt, Artificial Sequence
  HTT spacer sequence CTCN PAM
accaaguucaucuacacaag

SEQ ID NO: 18429 - RNA, 20 nt, Artificial Sequence
  HTT spacer sequence CTCN PAM
agcuuuuccuaagaaaccau

SEQ ID NO: 18430 - RNA, 20 nt, Artificial Sequence
  HTT spacer sequence CTCN PAM
ggcccagcugugcccugccc

SEQ ID NO: 18431 - RNA, 20 nt, Artificial Sequence
  HTT spacer sequence CTCN PAM
cugcaccucuccccucccug

SEQ ID NO: 18432 - RNA, 20 nt, Artificial Sequence
  HTT spacer sequence CTCN PAM
ccccucccugggcccugccu

SEQ ID NO: 18433 - RNA, 20 nt, Artificial Sequence
  HTT spacer sequence CTCN PAM
ccucccugggcccugccugu

SEQ ID NO: 18434 - RNA, 20 nt, Artificial Sequence
  HTT spacer sequence CTCN PAM
cugggcccugccugucacug

SEQ ID NO: 18435 - RNA, 20 nt, Artificial Sequence
  HTT spacer sequence CTCN PAM
cccaccaagccuuccgguug

SEQ ID NO: 18436 - RNA, 20 nt, Artificial Sequence
  HTT spacer sequence CTCN PAM
caccaagccuuccgguugug

SEQ ID NO: 18437 - RNA, 20 nt, Artificial Sequence
  HTT spacer sequence CTCN PAM
gaugccugugauagggcagg

SEQ ID NO: 18438 - RNA, 20 nt, Artificial Sequence
  HTT spacer sequence CTCN PAM
ucuuuuaaaccaggugacaa

SEQ ID NO: 18439 - RNA, 20 nt, Artificial Sequence
  HTT spacer sequence CTCN PAM
cuucuuuuaaaccaggugac

SEQ ID NO: 18440 - RNA, 20 nt, Artificial Sequence
  HTT spacer sequence CTCN PAM
aaaguauuuuagcguagagc

SEQ ID NO: 18441 - RNA, 20 nt, Artificial Sequence
  HTT spacer sequence CTCN PAM
acgcuaaaauacuuuugagu

SEQ ID NO: 18442 - RNA, 20 nt, Artificial Sequence
  HTT spacer sequence CTCN PAM
gugauuccguagcuauuuag

SEQ ID NO: 18443 - RNA, 20 nt, Artificial Sequence
  HTT spacer sequence CTCN PAM
uaaauagcuacggaaucaca

SEQ ID NO: 18444 - RNA, 20 nt, Artificial Sequence
  HTT spacer sequence CTCN PAM
uagacacugcguauaacaca

SEQ ID NO: 18445 - RNA, 20 nt, Artificial Sequence
  HTT spacer sequence CTCN PAM
aauguuuauuagggcguuga

SEQ ID NO: 18446 - RNA, 20 nt, Artificial Sequence
  HTT spacer sequence CTCN PAM
guuuacuucaacgcccuaau

SEQ ID NO: 18447 - RNA, 20 nt, Artificial Sequence
  HTT spacer sequence CTCN PAM
aagugcucaguuuacuucaa

SEQ ID NO: 18448 - RNA, 20 nt, Artificial Sequence
  HTT spacer sequence CTCN PAM
uugaaggcuggauccauggc

SEQ ID NO: 18449 - RNA, 20 nt, Artificial Sequence
  HTT spacer sequence CTCN PAM
uaagucaggaggacccagga

SEQ ID NO: 18450 - RNA, 20 nt, Artificial Sequence
  HTT spacer sequence CTCN PAM
ugacuuaugagcuccuugaa

SEQ ID NO: 18451 - RNA, 20 nt, Artificial Sequence
  HTT spacer sequence CTCN PAM
uggguccuccugacuuauga

SEQ ID NO: 18452 - RNA, 20 nt, Artificial Sequence
  HTT spacer sequence CTCN PAM
uuucugccuucuaugacagg

SEQ ID NO: 18453 - RNA, 20 nt, Artificial Sequence
  HTT spacer sequence CTCN PAM
gugccccucuuuucugccuu

SEQ ID NO: 18454 - RNA, 20 nt, Artificial Sequence
  HTT spacer sequence CTCN PAM
cacccaccucugugccccuc

SEQ ID NO: 18455 - RNA, 20 nt, Artificial Sequence
  HTT spacer sequence CTCN PAM
uggagcuccaaggggagcaa

SEQ ID NO: 18456 - RNA, 20 nt, Artificial Sequence
  HTT spacer sequence CTCN PAM
aggagcugccuguguaugcc

SEQ ID NO: 18457 - RNA, 20 nt, Artificial Sequence
  HTT spacer sequence CTCN PAM
aaggggagcaagugcuucca

SEQ ID NO: 18458 - RNA, 20 nt, Artificial Sequence
  HTT spacer sequence CTCN PAM
ccuuggagcuccaggagcug

SEQ ID NO: 18459 - RNA, 20 nt, Artificial Sequence
  HTT spacer sequence CTCN PAM
acgcccccuucccuggaagc

SEQ ID NO: 18460 - RNA, 20 nt, Artificial Sequence
  HTT spacer sequence CTCN PAM
aaaggggccuccacgccccc

SEQ ID NO: 18461 - RNA, 20 nt, Artificial Sequence
  HTT spacer sequence CTCN PAM
uccaaaggggccuccacgcc

SEQ ID NO: 18462 - RNA, 20 nt, Artificial Sequence
  HTT spacer sequence CTCN PAM
gccagaccccagaucaacuu

SEQ ID NO: 18463 - RNA, 20 nt, Artificial Sequence
  HTT spacer sequence CTCN PAM
cgcuaaauguccccagcuaa

SEQ ID NO: 18464 - RNA, 20 nt, Artificial Sequence
  HTT spacer sequence CTCN PAM
ugucuuucugcugggcaucc

SEQ ID NO: 18465 - RNA, 20 nt, Artificial Sequence
  HTT spacer sequence CTCN PAM
ucaugucuuucugcugggca

SEQ ID NO: 18466 - RNA, 20 nt, Artificial Sequence
  HTT spacer sequence CTCN PAM
cgcuccugccggcuguaucu

SEQ ID NO: 18467 - RNA, 20 nt, Artificial Sequence
  HTT spacer sequence CTCN PAM
ugccggcuguaucuggucag

SEQ ID NO: 18468 - RNA, 20 nt, Artificial Sequence
  HTT spacer sequence CTCN PAM
gugcccaggcugaccagaua

SEQ ID NO: 18469 - RNA, 20 nt, Artificial Sequence
  HTT spacer sequence CTCN PAM
gggggacccagauaagcauu

SEQ ID NO: 18470 - RNA, 20 nt, Artificial Sequence
  HTT spacer sequence CTCN PAM
cugggggacccagauaagca

SEQ ID NO: 18471 - RNA, 20 nt, Artificial Sequence
  HTT spacer sequence CTCN PAM
ccugcaacugcugacuccua

SEQ ID NO: 18472 - RNA, 20 nt, Artificial Sequence
  HTT spacer sequence CTCN PAM
uaagcuuuugcagcucagcc

SEQ ID NO: 18473 - RNA, 20 nt, Artificial Sequence
  HTT spacer sequence CTCN PAM
gcccacaaccaguuccuauu

SEQ ID NO: 18474 - RNA, 20 nt, Artificial Sequence
  HTT spacer sequence CTCN PAM
gugaauaggaacugguugug

SEQ ID NO: 18475 - RNA, 20 nt, Artificial Sequence
  HTT spacer sequence CTCN PAM
caccucugugaauaggaacu

SEQ ID NO: 18476 - RNA, 20 nt, Artificial Sequence
  HTT spacer sequence CTCN PAM
gcucccaccucugugaauag

SEQ ID NO: 18477 - RNA, 20 nt, Artificial Sequence
  HTT spacer sequence CTCN PAM
augacaaauaagacugcagc

SEQ ID NO: 18478 - RNA, 20 nt, Artificial Sequence
  HTT spacer sequence CTCN PAM
gucacuuuuucucuaugaca

SEQ ID NO: 18479 - RNA, 20 nt, Artificial Sequence
  HTT spacer sequence CTCN PAM
gcacaaccugggcccuccug

SEQ ID NO: 18480 - RNA, 20 nt, Artificial Sequence
  HTT spacer sequence CTCN PAM
ugccaguggcggcgagggca

SEQ ID NO: 18481 - RNA, 20 nt, Artificial Sequence
  HTT spacer sequence CTCN PAM
ccgccacuggcaggagggcc

SEQ ID NO: 18482 - RNA, 20 nt, Artificial Sequence
  HTT spacer sequence CTCN PAM
cggcugggugccugucuggg

SEQ ID NO: 18483 - RNA, 20 nt, Artificial Sequence
  HTT spacer sequence CTCN PAM
ugcccagacaggcacccagc

SEQ ID NO: 18484 - RNA, 20 nt, Artificial Sequence
  HTT spacer sequence CTCN PAM
gggugcugguguucacaggu

SEQ ID NO: 18485 - RNA, 20 nt, Artificial Sequence
  HTT spacer sequence CTCN PAM
ucagccacgagaagcugcug

SEQ ID NO: 18486 - RNA, 20 nt, Artificial Sequence
  HTT spacer sequence CTCN PAM
uggcugaugagggcaccugu

SEQ ID NO: 18487 - RNA, 20 nt, Artificial Sequence
  HTT spacer sequence CTCN PAM
ggguugaucuguagcagcag

SEQ ID NO: 18488 - RNA, 20 nt, Artificial Sequence
  HTT spacer sequence CTCN PAM
cgcucgggguugaucuguag

SEQ ID NO: 18489 - RNA, 20 nt, Artificial Sequence
  HTT spacer sequence CTCN PAM
ccagcucccgcucgggguug

SEQ ID NO: 18490 - RNA, 20 nt, Artificial Sequence
  HTT spacer sequence CTCN PAM
ugcuccccagcucccgcucg

SEQ ID NO: 18491 - RNA, 20 nt, Artificial Sequence
  HTT spacer sequence CTCN PAM
gccaggucagucucgcgccc

SEQ ID NO: 18492 - RNA, 20 nt, Artificial Sequence
  HTT spacer sequence CTCN PAM
cgcccccgccgccuggccuc

SEQ ID NO: 18493 - RNA, 20 nt, Artificial Sequence
  HTT spacer sequence CTCN PAM
guccguuucuguccucagac

SEQ ID NO: 18494 - RNA, 20 nt, Artificial Sequence
  HTT spacer sequence CTCN PAM
gacuuuggcgcuugacacac

SEQ ID NO: 18495 - RNA, 20 nt, Artificial Sequence
  HTT spacer sequence CTCN PAM
ugggugugucaagcgccaaa

SEQ ID NO: 18496 - RNA, 20 nt, Artificial Sequence
  HTT spacer sequence CTCN PAM
gugcacuuuuuaaaugaaag

SEQ ID NO: 18497 - RNA, 20 nt, Artificial Sequence
  HTT spacer sequence CTCN PAM
gcuugcgggaccuaggaaua

SEQ ID NO: 18498 - RNA, 20 nt, Artificial Sequence
  HTT spacer sequence CTCN PAM
uaacuacuuucuggaauaca

SEQ ID NO: 18499 - RNA, 20 nt, Artificial Sequence
  HTT spacer sequence CTCN PAM
cauguagcgauagagaugug

SEQ ID NO: 18500 - RNA, 20 nt, Artificial Sequence
  HTT spacer sequence CTCN PAM
aucgcuacaugugaggucuc

SEQ ID NO: 18501 - RNA, 20 nt, Artificial Sequence
  HTT spacer sequence CTCN PAM
uacacacaucucuaucgcua

SEQ ID NO: 18502 - RNA, 20 nt, Artificial Sequence
  HTT spacer sequence CTCN PAM
cugucucuuacacacaucuc

SEQ ID NO: 18503 - RNA, 20 nt, Artificial Sequence
  HTT spacer sequence CTCN PAM
cacugucucuuacacacauc

SEQ ID NO: 18504 - RNA, 20 nt, Artificial Sequence
  HTT spacer sequence CTCN PAM
cgguccuugcuuaaguccaa

SEQ ID NO: 18505 - RNA, 20 nt, Artificial Sequence
  HTT spacer sequence CTCN PAM
ccccccuuuuugugucucac

SEQ ID NO: 18506 - RNA, 20 nt, Artificial Sequence
  HTT spacer sequence CTCN PAM
guccucaccccccuuuuugu

SEQ ID NO: 18507 - RNA, 20 nt, Artificial Sequence
  HTT spacer sequence CTCN PAM
acucuguccucaccccccuu

SEQ ID NO: 18508 - RNA, 20 nt, Artificial Sequence
  HTT spacer sequence CTCN PAM
ggaggaaguagacgccauga

SEQ ID NO: 18509 - RNA, 20 nt, Artificial Sequence
  HTT spacer sequence CTCN PAM
ugagcauuucagcugacucc

SEQ ID NO: 18510 - RNA, 20 nt, Artificial Sequence
  HTT spacer sequence CTCN PAM
cggccacgccugcggccccc

SEQ ID NO: 18511 - RNA, 20 nt, Artificial Sequence
  HTT spacer sequence CTCN PAM
uggggggcucccugaguguc

SEQ ID NO: 18512 - RNA, 20 nt, Artificial Sequence
  HTT spacer sequence CTCN PAM
cugagugucccugucccugu

SEQ ID NO: 18513 - RNA, 20 nt, Artificial Sequence
  HTT spacer sequence CTCN PAM
gggagccccccaagagcugg

SEQ ID NO: 18514 - RNA, 20 nt, Artificial Sequence
  HTT spacer sequence CTCN PAM
cacccagaacuggccacagg

SEQ ID NO: 18515 - RNA, 20 nt, Artificial Sequence
  HTT spacer sequence CTCN PAM
gccacuuccuagcaggucac

SEQ ID NO: 18516 - RNA, 20 nt, Artificial Sequence
  HTT spacer sequence CTCN PAM
ucagauaagugaagggauuc

SEQ ID NO: 18517 - RNA, 20 nt, Artificial Sequence
  HTT spacer sequence CTCN PAM
gauaagugaagggauucaag

SEQ ID NO: 18518 - RNA, 20 nt, Artificial Sequence
  HTT spacer sequence CTCN PAM
uaaaauguuauagauuacag

SEQ ID NO: 18519 - RNA, 20 nt, Artificial Sequence
  HTT spacer sequence CTCN PAM
gccuccuaaaauguuauaga

SEQ ID NO: 18520 - RNA, 20 nt, Artificial Sequence
  HTT spacer sequence CTCN PAM
ugccucagccuccuaaaaug

SEQ ID NO: 18521 - RNA, 20 nt, Artificial Sequence
  HTT spacer sequence CTCN PAM
gguaagccuccugccucagc

SEQ ID NO: 18522 - RNA, 20 nt, Artificial Sequence
  HTT spacer sequence CTCN PAM
ggagguugaggcugcaguga

SEQ ID NO: 18523 - RNA, 20 nt, Artificial Sequence
  HTT spacer sequence CTCN PAM
ugagcucagguaagccuccu

SEQ ID NO: 18524 - RNA, 20 nt, Artificial Sequence
  HTT spacer sequence CTCN PAM
accuccugagcucagguaag

SEQ ID NO: 18525 - RNA, 20 nt, Artificial Sequence
  HTT spacer sequence CTCN PAM
cugcagccucaaccuccuga

SEQ ID NO: 18526 - RNA, 20 nt, Artificial Sequence
  HTT spacer sequence CTCN PAM
agccugggcaacagaccagu

SEQ ID NO: 18527 - RNA, 20 nt, Artificial Sequence
  HTT spacer sequence CTCN PAM
gucccuuaaaaaaaaaugua

SEQ ID NO: 18528 - RNA, 20 nt, Artificial Sequence
  HTT spacer sequence CTCN PAM
acgccaugugccaucauaug

SEQ ID NO: 18529 - RNA, 20 nt, Artificial Sequence
  HTT spacer sequence CTCN PAM
accccggugcugugucuuuc

SEQ ID NO: 18530 - RNA, 20 nt, Artificial Sequence
  HTT spacer sequence CTCN PAM
ccggguuccugauuuaguga

SEQ ID NO: 18531 - RNA, 20 nt, Artificial Sequence
  HTT spacer sequence CTCN PAM
uuguagcuuuuguuucugug

SEQ ID NO: 18532 - RNA, 20 nt, Artificial Sequence
  HTT spacer sequence CTCN PAM
uaaguguuucuaaacaccau

SEQ ID NO: 18533 - RNA, 20 nt, Artificial Sequence
  HTT spacer sequence CTCN PAM
gagaguuuccucuucugagu

SEQ ID NO: 18534 - RNA, 20 nt, Artificial Sequence
  HTT spacer sequence CTCN PAM
gagcucauaaguguuucuaa

SEQ ID NO: 18535 - RNA, 20 nt, Artificial Sequence
  HTT spacer sequence CTCN PAM
cagagcucauaaguguuucu

SEQ ID NO: 18536 - RNA, 20 nt, Artificial Sequence
  HTT spacer sequence CTCN PAM
ucugaguuccuggccugcag

SEQ ID NO: 18537 - RNA, 20 nt, Artificial Sequence
  HTT spacer sequence CTCN PAM
gaagaggaaacucucagagc

SEQ ID NO: 18538 - RNA, 20 nt, Artificial Sequence
  HTT spacer sequence CTCN PAM
cugccuguacuguccuguuu

SEQ ID NO: 18539 - RNA, 20 nt, Artificial Sequence
  HTT spacer sequence CTCN PAM
gccuguacuguccuguuuug

SEQ ID NO: 18540 - RNA, 20 nt, Artificial Sequence
  HTT spacer sequence CTCN PAM
cugcuuccugucacugaaac

SEQ ID NO: 18541 - RNA, 20 nt, Artificial Sequence
  HTT spacer sequence CTCN PAM
ucuguccuuucaccuuugac

SEQ ID NO: 18542 - RNA, 20 nt, Artificial Sequence
  HTT spacer sequence CTCN PAM
gccugcccuucagaaacacu

SEQ ID NO: 18543 - RNA, 20 nt, Artificial Sequence
  HTT spacer sequence CTCN PAM
cagccugcccuucagaaaca

SEQ ID NO: 18544 - RNA, 20 nt, Artificial Sequence
  HTT spacer sequence CTCN PAM
cucucagccugcccuucaga

SEQ ID NO: 18545 - RNA, 20 nt, Artificial Sequence
  HTT spacer sequence CTCN PAM
cacucucagccugcccuuca

SEQ ID NO: 18546 - RNA, 20 nt, Artificial Sequence
  HTT spacer sequence CTCN PAM
cugggugccucuggccuugu

SEQ ID NO: 18547 - RNA, 20 nt, Artificial Sequence
  HTT spacer sequence CTCN PAM
ggccuuguccugggcccagg

SEQ ID NO: 18548 - RNA, 20 nt, Artificial Sequence
  HTT spacer sequence CTCN PAM
ggcacagaccagugucccug

SEQ ID NO: 18549 - RNA, 20 nt, Artificial Sequence
  HTT spacer sequence CTCN PAM
guccaguggcaucuaggggc

SEQ ID NO: 18550 - RNA, 20 nt, Artificial Sequence
  HTT spacer sequence CTCN PAM
uucccaaaagcaaguagcgg

SEQ ID NO: 18551 - RNA, 20 nt, Artificial Sequence
  HTT spacer sequence CTCN PAM
cccagaccccuaacccccac

SEQ ID NO: 18552 - RNA, 20 nt, Artificial Sequence
  HTT spacer sequence CTCN PAM
ccucgcccagaccccuaacc

SEQ ID NO: 18553 - RNA, 20 nt, Artificial Sequence
  HTT spacer sequence CTCN PAM
uccuuggccugagagcuguu

SEQ ID NO: 18554 - RNA, 20 nt, Artificial Sequence
  HTT spacer sequence CTCN PAM
uuggccugagagcuguucau

SEQ ID NO: 18555 - RNA, 20 nt, Artificial Sequence
  HTT spacer sequence CTCN PAM
ggccaaggaggagccccugc

SEQ ID NO: 18556 - RNA, 20 nt, Artificial Sequence
  HTT spacer sequence CTCN PAM
caggccaaggaggagccccu

SEQ ID NO: 18557 - RNA, 20 nt, Artificial Sequence
  HTT spacer sequence CTCN PAM
ucgcccacucccugcagggu

SEQ ID NO: 18558 - RNA, 20 nt, Artificial Sequence
  HTT spacer sequence CTCN PAM
cccacucccugcagggugcu

SEQ ID NO: 18559 - RNA, 20 nt, Artificial Sequence
  HTT spacer sequence CTCN PAM
cugcagggugcuggguccca

SEQ ID NO: 18560 - RNA, 20 nt, Artificial Sequence
  HTT spacer sequence CTCN PAM
cguucuuggcaccaagggcc

SEQ ID NO: 18561 - RNA, 20 nt, Artificial Sequence
  HTT spacer sequence CTCN PAM
aucaucacuggcacuagccc

SEQ ID NO: 18562 - RNA, 20 nt, Artificial Sequence
  HTT spacer sequence CTCN PAM
aggcuucccgagaaccaggc

SEQ ID NO: 18563 - RNA, 20 nt, Artificial Sequence
  HTT spacer sequence CTCN PAM
agcacuuggcacagugcugu

SEQ ID NO: 18564 - RNA, 20 nt, Artificial Sequence
  HTT spacer sequence CTCN PAM
ggaagccucgagcacuuggc

SEQ ID NO: 18565 - RNA, 20 nt, Artificial Sequence
  HTT spacer sequence CTCN PAM
uuucugccugguucucggga

SEQ ID NO: 18566 - RNA, 20 nt, Artificial Sequence
  HTT spacer sequence CTCN PAM
acuguccuccuuucugccug

SEQ ID NO: 18567 - RNA, 20 nt, Artificial Sequence
  HTT spacer sequence CTCN PAM
agaucacgcagccaccacgc

SEQ ID NO: 18568 - RNA, 20 nt, Artificial Sequence
  HTT spacer sequence CTCN PAM
cgccuuugugacccgcgcuc

SEQ ID NO: 18569 - RNA, 20 nt, Artificial Sequence
  HTT spacer sequence CTCN PAM
cucgcgccuuugugacccgc

SEQ ID NO: 18570 - RNA, 20 nt, Artificial Sequence
  HTT spacer sequence CTCN PAM
ggccuuggguuuaccgcaau

SEQ ID NO: 18571 - RNA, 20 nt, Artificial Sequence
  HTT spacer sequence CTCN PAM
cgcacuggcagucauugcgg

SEQ ID NO: 18572 - RNA, 20 nt, Artificial Sequence
  HTT spacer sequence CTCN PAM
cguauugguuccguguuuug

SEQ ID NO: 18573 - RNA, 20 nt, Artificial Sequence
  HTT spacer sequence CTCN PAM
auucagaugucacuuaggag

SEQ ID NO: 18574 - RNA, 20 nt, Artificial Sequence
  HTT spacer sequence CTCN PAM
uaagugacaucugaauggag

SEQ ID NO: 18575 - RNA, 20 nt, Artificial Sequence
  HTT spacer sequence CTCN PAM
acgaagggaugcuuucacuc

SEQ ID NO: 18576 - RNA, 20 nt, Artificial Sequence
  HTT spacer sequence CTCN PAM
uucugugucacccuccucag

SEQ ID NO: 18577 - RNA, 20 nt, Artificial Sequence
  HTT spacer sequence CTCN PAM
ucagcugcuccugggguuga

SEQ ID NO: 18578 - RNA, 20 nt, Artificial Sequence
  HTT spacer sequence CTCN PAM
gcugcuccugggguugacug

SEQ ID NO: 18579 - RNA, 20 nt, Artificial Sequence
  HTT spacer sequence CTCN PAM
ugggguugacuggccccuga

SEQ ID NO: 18580 - RNA, 20 nt, Artificial Sequence
  HTT spacer sequence CTCN PAM
agcacaugcuaaaggcauga

SEQ ID NO: 18581 - RNA, 20 nt, Artificial Sequence
  HTT spacer sequence CTCN PAM
cugugggcucccuugcccgu

SEQ ID NO: 18582 - RNA, 20 nt, Artificial Sequence
  HTT spacer sequence CTCN PAM
gugggcucccuugcccguaa

SEQ ID NO: 18583 - RNA, 20 nt, Artificial Sequence
  HTT spacer sequence CTCN PAM
cuugcccguaaccuggggug

SEQ ID NO: 18584 - RNA, 20 nt, Artificial Sequence
  HTT spacer sequence CTCN PAM
gcacaugccuaccgucuaac

SEQ ID NO: 18585 - RNA, 20 nt, Artificial Sequence
  HTT spacer sequence CTCN PAM
ugguggguggguguggccac

SEQ ID NO: 18586 - RNA, 20 nt, Artificial Sequence
  HTT spacer sequence CTCN PAM
gugcugcggccacagugcca

SEQ ID NO: 18587 - RNA, 20 nt, Artificial Sequence
  HTT spacer sequence CTCN PAM
guguggcuggggaacagcau

SEQ ID NO: 18588 - RNA, 20 nt, Artificial Sequence
  HTT spacer sequence CTCN PAM
ggggugugaugcuguucccc

SEQ ID NO: 18589 - RNA, 20 nt, Artificial Sequence
  HTT spacer sequence CTCN PAM
cucaggggugugaugcuguu

SEQ ID NO: 18590 - RNA, 20 nt, Artificial Sequence
  HTT spacer sequence CTCN PAM
ucccucaggggugugaugcu

SEQ ID NO: 18591 - RNA, 20 nt, Artificial Sequence
  HTT spacer sequence CTCN PAM
ucccauuccuccucccucag

SEQ ID NO: 18592 - RNA, 20 nt, Artificial Sequence
  HTT spacer sequence CTCN PAM
uccucgucccauuccuccuc

SEQ ID NO: 18593 - RNA, 20 nt, Artificial Sequence
  HTT spacer sequence CTCN PAM
ucuuccucgucccauuccuc

SEQ ID NO: 18594 - RNA, 20 nt, Artificial Sequence
  HTT spacer sequence CTCN PAM
uccucuuccucgucccauuc

SEQ ID NO: 18595 - RNA, 20 nt, Artificial Sequence
  HTT spacer sequence CTCN PAM
uccuccucuuccucguccca

SEQ ID NO: 18596 - RNA, 20 nt, Artificial Sequence
  HTT spacer sequence CTCN PAM
agucaacuccagguuuucca

SEQ ID NO: 18597 - RNA, 20 nt, Artificial Sequence
  HTT spacer sequence CTCN PAM
agguuuuccaauggccuuuu

SEQ ID NO: 18598 - RNA, 20 nt, Artificial Sequence
  HTT spacer sequence CTCN PAM
aacaaaucaaaugacugaua

SEQ ID NO: 18599 - RNA, 20 nt, Artificial Sequence
  HTT spacer sequence CTCN PAM
uuucaagaagcaccucaaac

SEQ ID NO: 18600 - RNA, 20 nt, Artificial Sequence
  HTT spacer sequence CTCN PAM
caucucauguacuuggaaaa

SEQ ID NO: 18601 - RNA, 20 nt, Artificial Sequence
  HTT spacer sequence CTCN PAM
ucucauguacuuggaaaaua

SEQ ID NO: 18602 - RNA, 20 nt, Artificial Sequence
  HTT spacer sequence CTCN PAM
uguacuuggaaaauacccau

SEQ ID NO: 18603 - RNA, 20 nt, Artificial Sequence
  HTT spacer sequence CTCN PAM
cauauuccacaggaaacacc

SEQ ID NO: 18604 - RNA, 20 nt, Artificial Sequence
  HTT spacer sequence CTCN PAM
agcccgguguuuccugugga

SEQ ID NO: 18605 - RNA, 20 nt, Artificial Sequence
  HTT spacer sequence CTCN PAM
uguucgcaguuuuugcuuga

SEQ ID NO: 18606 - RNA, 20 nt, Artificial Sequence
  HTT spacer sequence CTCN PAM
agcaaaaacugcgaacagga

SEQ ID NO: 18607 - RNA, 20 nt, Artificial Sequence
  HTT spacer sequence CTCN PAM
gccaggaggaccccggccau

SEQ ID NO: 18608 - RNA, 20 nt, Artificial Sequence
  HTT spacer sequence CTCN PAM
uggcugagcuggacggcagg

SEQ ID NO: 18609 - RNA, 20 nt, Artificial Sequence
  HTT spacer sequence CTCN PAM
cugaucaggauggccggggu

SEQ ID NO: 18610 - RNA, 20 nt, Artificial Sequence
  HTT spacer sequence CTCN PAM
cuuacggaucugaccaccuc

SEQ ID NO: 18611 - RNA, 20 nt, Artificial Sequence
  HTT spacer sequence CTCN PAM
caccugcacgugccacacgc

SEQ ID NO: 18612 - RNA, 20 nt, Artificial Sequence
  HTT spacer sequence CTCN PAM
ugcaugcaacacacacacag

SEQ ID NO: 18613 - RNA, 20 nt, Artificial Sequence
  HTT spacer sequence CTCN PAM
acaugcaugcaccacacaca

SEQ ID NO: 18614 - RNA, 20 nt, Artificial Sequence
  HTT spacer sequence CTCN PAM
uggguguaagaacacgacuu

SEQ ID NO: 18615 - RNA, 20 nt, Artificial Sequence
  HTT spacer sequence CTCN PAM
ccuugcccuccugguuuucc

SEQ ID NO: 18616 - RNA, 20 nt, Artificial Sequence
  HTT spacer sequence CTCN PAM
ugguuuuccacaucuccagc

SEQ ID NO: 18617 - RNA, 20 nt, Artificial Sequence
  HTT spacer sequence CTCN PAM
agcuucuaguggucucagac

SEQ ID NO: 18618 - RNA, 20 nt, Artificial Sequence
  HTT spacer sequence CTCN PAM
gacuuguucaccgagcgcaa

SEQ ID NO: 18619 - RNA, 20 nt, Artificial Sequence
  HTT spacer sequence CTCN PAM
gugaacaagucugagaccac

SEQ ID NO: 18620 - RNA, 20 nt, Artificial Sequence
  HTT spacer sequence CTCN PAM
aacugguugcgcucggugaa

SEQ ID NO: 18621 - RNA, 20 nt, Artificial Sequence
  HTT spacer sequence CTCN PAM
ucuucugaagggugcacccu

SEQ ID NO: 18622 - RNA, 20 nt, Artificial Sequence
  HTT spacer sequence CTCN PAM
cucaguaccuggugccugcc

SEQ ID NO: 18623 - RNA, 20 nt, Artificial Sequence
  HTT spacer sequence CTCN PAM
guaccuggugccugccaccu

SEQ ID NO: 18624 - RNA, 20 nt, Artificial Sequence
  HTT spacer sequence CTCN PAM
gugccaccugucacuuacca

SEQ ID NO: 18625 - RNA, 20 nt, Artificial Sequence
  HTT spacer sequence CTCN PAM
ggccaacaccaggucccaag

SEQ ID NO: 18626 - RNA, 20 nt, Artificial Sequence
  HTT spacer sequence CTCN PAM
uuccaagaguugacccgaac

SEQ ID NO: 18627 - RNA, 20 nt, Artificial Sequence
  HTT spacer sequence CTCN PAM
uggaaggaggcagccgcacc

SEQ ID NO: 18628 - RNA, 20 nt, Artificial Sequence
  HTT spacer sequence CTCN PAM
acggcccacgugagcugcag

SEQ ID NO: 18629 - RNA, 20 nt, Artificial Sequence
  HTT spacer sequence CTCN PAM
cgugggccguggaguccggu

SEQ ID NO: 18630 - RNA, 20 nt, Artificial Sequence
  HTT spacer sequence CTCN PAM
gauggaggggguucagcgac

SEQ ID NO: 18631 - RNA, 20 nt, Artificial Sequence
  HTT spacer sequence CTCN PAM
aucugagaagcacugcagcu

SEQ ID NO: 18632 - RNA, 20 nt, Artificial Sequence
  HTT spacer sequence CTCN PAM
gcgccaccacacaccguggu

SEQ ID NO: 18633 - RNA, 20 nt, Artificial Sequence
  HTT spacer sequence CTCN PAM
gcccugaggccugacugccu

SEQ ID NO: 18634 - RNA, 20 nt, Artificial Sequence
  HTT spacer sequence CTCN PAM
gggcagagcauggggaagcc

SEQ ID NO: 18635 - RNA, 20 nt, Artificial Sequence
  HTT spacer sequence CTCN PAM
cuccccuucucaguuauguu

SEQ ID NO: 18636 - RNA, 20 nt, Artificial Sequence
  HTT spacer sequence CTCN PAM
ccuucucaguuauguuccag

SEQ ID NO: 18637 - RNA, 20 nt, Artificial Sequence
  HTT spacer sequence CTCN PAM
guuauguuccaggccccccg

SEQ ID NO: 18638 - RNA, 20 nt, Artificial Sequence
  HTT spacer sequence CTCN PAM
gggggccuggaacauaacug

SEQ ID NO: 18639 - RNA, 20 nt, Artificial Sequence
  HTT spacer sequence CTCN PAM
ccugggggccguuuugucac

SEQ ID NO: 18640 - RNA, 20 nt, Artificial Sequence
  HTT spacer sequence CTCN PAM
ugggggccguuuugucacag

SEQ ID NO: 18641 - RNA, 20 nt, Artificial Sequence
  HTT spacer sequence CTCN PAM
uuuuagcguggugguugucu

SEQ ID NO: 18642 - RNA, 20 nt, Artificial Sequence
  HTT spacer sequence CTCN PAM
ccguucugggggcuggaagu

SEQ ID NO: 18643 - RNA, 20 nt, Artificial Sequence
  HTT spacer sequence CTCN PAM
ucacacaccaaaucugcugg

SEQ ID NO: 18644 - RNA, 20 nt, Artificial Sequence
  HTT spacer sequence CTCN PAM
cugcuucauagauggcaucu

SEQ ID NO: 18645 - RNA, 20 nt, Artificial Sequence
  HTT spacer sequence CTCN PAM
gcuucauagauggcaucuuc

SEQ ID NO: 18646 - RNA, 20 nt, Artificial Sequence
  HTT spacer sequence CTCN PAM
cgguggaaggagugaacaag

SEQ ID NO: 18647 - RNA, 20 nt, Artificial Sequence
  HTT spacer sequence CTCN PAM
uuccaccgugaggacccagc

SEQ ID NO: 18648 - RNA, 20 nt, Artificial Sequence
  HTT spacer sequence CTCN PAM
cucaggccuuuuagaagggc

SEQ ID NO: 18649 - RNA, 20 nt, Artificial Sequence
  HTT spacer sequence CTCN PAM
ggccuuuuagaagggcccca

SEQ ID NO: 18650 - RNA, 20 nt, Artificial Sequence
  HTT spacer sequence CTCN PAM
cccaucaugaccucaucacc

SEQ ID NO: 18651 - RNA, 20 nt, Artificial Sequence
  HTT spacer sequence CTCN PAM
caucaugaccucaucaccuc

SEQ ID NO: 18652 - RNA, 20 nt, Artificial Sequence
  HTT spacer sequence CTCN PAM
ucaccucccaaggccccacc

SEQ ID NO: 18653 - RNA, 20 nt, Artificial Sequence
  HTT spacer sequence CTCN PAM
caaggccccaccuucuugua

SEQ ID NO: 18654 - RNA, 20 nt, Artificial Sequence
  HTT spacer sequence CTCN PAM
uacacugacaccuaauuugc

SEQ ID NO: 18655 - RNA, 20 nt, Artificial Sequence
  HTT spacer sequence CTCN PAM
ugaaacuccuacacugacac

SEQ ID NO: 18656 - RNA, 20 nt, Artificial Sequence
  HTT spacer sequence CTCN PAM
ugaguuccuccuuauucugc

SEQ ID NO: 18657 - RNA, 20 nt, Artificial Sequence
  HTT spacer sequence CTCN PAM
agaggaugaacacuugaccg

SEQ ID NO: 18658 - RNA, 20 nt, Artificial Sequence
  HTT spacer sequence CTCN PAM
uuauucugcuucugguuuau

SEQ ID NO: 18659 - RNA, 20 nt, Artificial Sequence
  HTT spacer sequence CTCN PAM
gacaguucugccauccuuga

SEQ ID NO: 18660 - RNA, 20 nt, Artificial Sequence
  HTT spacer sequence CTCN PAM
gguuccuugucauguggcau

SEQ ID NO: 18661 - RNA, 20 nt, Artificial Sequence
  HTT spacer sequence CTCN PAM
uuucuucaacaaacaccuga

SEQ ID NO: 18662 - RNA, 20 nt, Artificial Sequence
  HTT spacer sequence CTCN PAM
gguguuuguugaagaaauga

SEQ ID NO: 18663 - RNA, 20 nt, Artificial Sequence
  HTT spacer sequence CTCN PAM
ccaagggccccagacggcug

SEQ ID NO: 18664 - RNA, 20 nt, Artificial Sequence
  HTT spacer sequence CTCN PAM
ggacgggcuccuguguguca

SEQ ID NO: 18665 - RNA, 20 nt, Artificial Sequence
  HTT spacer sequence CTCN PAM
ugugugucaggaacgacaau

SEQ ID NO: 18666 - RNA, 20 nt, Artificial Sequence
  HTT spacer sequence CTCN PAM
agccgcuaacauuugcggag

SEQ ID NO: 18667 - RNA, 20 nt, Artificial Sequence
  HTT spacer sequence CTCN PAM
gcaaauguuagcggcuggag

SEQ ID NO: 18668 - RNA, 20 nt, Artificial Sequence
  HTT spacer sequence CTCN PAM
uccucccgcacccccaccug

SEQ ID NO: 18669 - RNA, 20 nt, Artificial Sequence
  HTT spacer sequence CTCN PAM
cgcacccccaccugacaagg

SEQ ID NO: 18670 - RNA, 20 nt, Artificial Sequence
  HTT spacer sequence CTCN PAM
gaccuuggccgccuagggug

SEQ ID NO: 18671 - RNA, 20 nt, Artificial Sequence
  HTT spacer sequence CTCN PAM
gcugcauuuugugugaccca

SEQ ID NO: 18672 - RNA, 20 nt, Artificial Sequence
  HTT spacer sequence CTCN PAM
accucugcugcauuuugugu

SEQ ID NO: 18673 - RNA, 20 nt, Artificial Sequence
  HTT spacer sequence CTCN PAM
ccucaaccucugcugcauuu

SEQ ID NO: 18674 - RNA, 20 nt, Artificial Sequence
  HTT spacer sequence CTCN PAM
aggucacggacaugugcuca

SEQ ID NO: 18675 - RNA, 20 nt, Artificial Sequence
  HTT spacer sequence CTCN PAM
cucucugcgagucuugacug

SEQ ID NO: 18676 - RNA, 20 nt, Artificial Sequence
  HTT spacer sequence CTCN PAM
cugcgagucuugacugcucu

SEQ ID NO: 18677 - RNA, 20 nt, Artificial Sequence
  HTT spacer sequence CTCN PAM
gcgagucuugacugcucuug

SEQ ID NO: 18678 - RNA, 20 nt, Artificial Sequence
  HTT spacer sequence CTCN PAM
cagagagggagucaggcucc

SEQ ID NO: 18679 - RNA, 20 nt, Artificial Sequence
  HTT spacer sequence CTCN PAM
ugccuagacucuguccuccc

SEQ ID NO: 18680 - RNA, 20 nt, Artificial Sequence
  HTT spacer sequence CTCN PAM
guccuccccgagcccaaacg

SEQ ID NO: 18681 - RNA, 20 nt, Artificial Sequence
  HTT spacer sequence CTCN PAM
ccgagcccaaacgccaguca

SEQ ID NO: 18682 - RNA, 20 nt, Artificial Sequence
  HTT spacer sequence CTCN PAM
gggaggacagagucuaggca

SEQ ID NO: 18683 - RNA, 20 nt, Artificial Sequence
  HTT spacer sequence CTCN PAM
gcagccguccagggagugga

SEQ ID NO: 18684 - RNA, 20 nt, Artificial Sequence
  HTT spacer sequence CTCN PAM
cuggacggcugcugagucac

SEQ ID NO: 18685 - RNA, 20 nt, Artificial Sequence
  HTT spacer sequence CTCN PAM
auuguuuccacucccuggac

SEQ ID NO: 18686 - RNA, 20 nt, Artificial Sequence
  HTT spacer sequence CTCN PAM
cuucacggcgaacacccucu

SEQ ID NO: 18687 - RNA, 20 nt, Artificial Sequence
  HTT spacer sequence CTCN PAM
ucacggcgaacacccucugg

SEQ ID NO: 18688 - RNA, 20 nt, Artificial Sequence
  HTT spacer sequence CTCN PAM
ggguguugcccacacgaugu

SEQ ID NO: 18689 - RNA, 20 nt, Artificial Sequence
  HTT spacer sequence CTCN PAM
uggaagggguccuucuccuu

SEQ ID NO: 18690 - RNA, 20 nt, Artificial Sequence
  HTT spacer sequence CTCN PAM
uuugugggaaguuucagcug

SEQ ID NO: 18691 - RNA, 20 nt, Artificial Sequence
  HTT spacer sequence CTCN PAM
ggcccagaucccccuaggca

SEQ ID NO: 18692 - RNA, 20 nt, Artificial Sequence
  HTT spacer sequence CTCN PAM
uuugauuacugauggcacaa

SEQ ID NO: 18693 - RNA, 20 nt, Artificial Sequence
  HTT spacer sequence CTCN PAM
cucccagcucuuugugcacu

SEQ ID NO: 18694 - RNA, 20 nt, Artificial Sequence
  HTT spacer sequence CTCN PAM
cagcucuuugugcacucaug

SEQ ID NO: 18695 - RNA, 20 nt, Artificial Sequence
  HTT spacer sequence CTCN PAM
uugugcacucaugcuuucug

SEQ ID NO: 18696 - RNA, 20 nt, Artificial Sequence
  HTT spacer sequence CTCN PAM
ugcuuucuggaagauggcca

SEQ ID NO: 18697 - RNA, 20 nt, Artificial Sequence
  HTT spacer sequence CTCN PAM
gugaagguuuucagcgcguc

SEQ ID NO: 18698 - RNA, 20 nt, Artificial Sequence
  HTT spacer sequence CTCN PAM
ggauacguggguaccaagca

SEQ ID NO: 18699 - RNA, 20 nt, Artificial Sequence
  HTT spacer sequence CTCN PAM
aaacgacaugcucuggauac

SEQ ID NO: 18700 - RNA, 20 nt, Artificial Sequence
  HTT spacer sequence CTCN PAM
gguggcacggauuucacaac

SEQ ID NO: 18701 - RNA, 20 nt, Artificial Sequence
  HTT spacer sequence CTCN PAM
cggguggcacggauuucaca

SEQ ID NO: 18702 - RNA, 20 nt, Artificial Sequence
  HTT spacer sequence CTCN PAM
cuaaggacugcguacggccc

SEQ ID NO: 18703 - RNA, 20 nt, Artificial Sequence
  HTT spacer sequence CTCN PAM
cacgcacaacgccacacggc

SEQ ID NO: 18704 - RNA, 20 nt, Artificial Sequence
  HTT spacer sequence CTCN PAM
cccugugcuauccccucaca

SEQ ID NO: 18705 - RNA, 20 nt, Artificial Sequence
  HTT spacer sequence CTCN PAM
ucuuuugguccuuguuccug

SEQ ID NO: 18706 - RNA, 20 nt, Artificial Sequence
  HTT spacer sequence CTCN PAM
uuugguccuuguuccuggga

SEQ ID NO: 18707 - RNA, 20 nt, Artificial Sequence
  HTT spacer sequence CTCN PAM
cagccaucccaggaacaagg

SEQ ID NO: 18708 - RNA, 20 nt, Artificial Sequence
  HTT spacer sequence CTCN PAM
gcaggggaaauggccggacg

SEQ ID NO: 18709 - RNA, 20 nt, Artificial Sequence
  HTT spacer sequence CTCN PAM
ccgcaggggaaauggccgga

SEQ ID NO: 18710 - RNA, 20 nt, Artificial Sequence
  HTT spacer sequence CTCN PAM
uaccacugccgagaaccuca

SEQ ID NO: 18711 - RNA, 20 nt, Artificial Sequence
  HTT spacer sequence CTCN PAM
gcagugguaggagccucucc

SEQ ID NO: 18712 - RNA, 20 nt, Artificial Sequence
  HTT spacer sequence CTCN PAM
ucauuccacaaaaacaagag

SEQ ID NO: 18713 - RNA, 20 nt, Artificial Sequence
  HTT spacer sequence CTCN PAM
uguuuuuguggaaugaugag

SEQ ID NO: 18714 - RNA, 20 nt, Artificial Sequence
  HTT spacer sequence CTCN PAM
augggaauucugugucccca

SEQ ID NO: 18715 - RNA, 20 nt, Artificial Sequence
  HTT spacer sequence CTCN PAM
uucagcccaagacuaugggg

SEQ ID NO: 18716 - RNA, 20 nt, Artificial Sequence
  HTT spacer sequence CTCN PAM
ucacuguuaaagagcagauu

SEQ ID NO: 18717 - RNA, 20 nt, Artificial Sequence
  HTT spacer sequence CTCN PAM
cuguuaaagagcagauugaa

SEQ ID NO: 18718 - RNA, 20 nt, Artificial Sequence
  HTT spacer sequence CTCN PAM
uuaacagugaggagaccccu

SEQ ID NO: 18719 - RNA, 20 nt, Artificial Sequence
  HTT spacer sequence CTCN PAM
auuucacuuaguauccaaaa

SEQ ID NO: 18720 - RNA, 20 nt, Artificial Sequence
  HTT spacer sequence CTCN PAM
cagcuaagauguguuauggu

SEQ ID NO: 18721 - RNA, 20 nt, Artificial Sequence
  HTT spacer sequence CTCN PAM
gcuaagauguguuaugguaa

SEQ ID NO: 18722 - RNA, 20 nt, Artificial Sequence
  HTT spacer sequence CTCN PAM
gcccuugcuaauuuucuuug

SEQ ID NO: 18723 - RNA, 20 nt, Artificial Sequence
  HTT spacer sequence CTCN PAM
ggacaucgccccaugggccu

SEQ ID NO: 18724 - RNA, 20 nt, Artificial Sequence
  HTT spacer sequence CTCN PAM
agccugguguccucgggaca

SEQ ID NO: 18725 - RNA, 20 nt, Artificial Sequence
  HTT spacer sequence CTCN PAM
cccagcggggucgugcagga

SEQ ID NO: 18726 - RNA, 20 nt, Artificial Sequence
  HTT spacer sequence CTCN PAM
cagcggggucgugcaggacg

SEQ ID NO: 18727 - RNA, 20 nt, Artificial Sequence
  HTT spacer sequence CTCN PAM
ccgcacagugagccgugaca

SEQ ID NO: 18728 - RNA, 20 nt, Artificial Sequence
  HTT spacer sequence CTCN PAM
cugugcggggaguuaagugc

SEQ ID NO: 18729 - RNA, 20 nt, Artificial Sequence
  HTT spacer sequence CTCN PAM
agugugcuuuccuggcgacg

SEQ ID NO: 18730 - RNA, 20 nt, Artificial Sequence
  HTT spacer sequence CTCN PAM
gugccaggguuuuuacuggg

SEQ ID NO: 18731 - RNA, 20 nt, Artificial Sequence
  HTT spacer sequence CTCN PAM
gccugccucgugcccagacu

SEQ ID NO: 18732 - RNA, 20 nt, Artificial Sequence
  HTT spacer sequence CTCN PAM
ugcccagacucuggacuccc

SEQ ID NO: 18733 - RNA, 20 nt, Artificial Sequence
  HTT spacer sequence CTCN PAM
ggacucccggagggaaggca

SEQ ID NO: 18734 - RNA, 20 nt, Artificial Sequence
  HTT spacer sequence CTCN PAM
cggagggaaggcaaguucuc

SEQ ID NO: 18735 - RNA, 20 nt, Artificial Sequence
  HTT spacer sequence CTCN PAM
gggaguccagagucugggca

SEQ ID NO: 18736 - RNA, 20 nt, Artificial Sequence
  HTT spacer sequence CTCN PAM
gcaccaacccuggugcccac

SEQ ID NO: 18737 - RNA, 20 nt, Artificial Sequence
  HTT spacer sequence CTCN PAM
gcugcuugugugggcaccag

SEQ ID NO: 18738 - RNA, 20 nt, Artificial Sequence
  HTT spacer sequence CTCN PAM
cugugcucagcugcuugugu

SEQ ID NO: 18739 - RNA, 20 nt, Artificial Sequence
  HTT spacer sequence CTCN PAM
ucagugaggauggugggcac

SEQ ID NO: 18740 - RNA, 20 nt, Artificial Sequence
  HTT spacer sequence CTCN PAM
gugaggauggugggcaccgu

SEQ ID NO: 18741 - RNA, 20 nt, Artificial Sequence
  HTT spacer sequence CTCN PAM
cugaggaggggcucccugug

SEQ ID NO: 18742 - RNA, 20 nt, Artificial Sequence
  HTT spacer sequence CTCN PAM
caggauggucuccggccugc

SEQ ID NO: 18743 - RNA, 20 nt, Artificial Sequence
  HTT spacer sequence CTCN PAM
ggauggucuccggccugcug

SEQ ID NO: 18744 - RNA, 20 nt, Artificial Sequence
  HTT spacer sequence CTCN PAM
ggccugcuguguagucucuu

SEQ ID NO: 18745 - RNA, 20 nt, Artificial Sequence
  HTT spacer sequence CTCN PAM
ucugcacacaagcgugaggg

SEQ ID NO: 18746 - RNA, 20 nt, Artificial Sequence
  HTT spacer sequence CTCN PAM
cgcuugugugcagaagagac

SEQ ID NO: 18747 - RNA, 20 nt, Artificial Sequence
  HTT spacer sequence CTCN PAM
gcuguggggaggagccacug

SEQ ID NO: 18748 - RNA, 20 nt, Artificial Sequence
  HTT spacer sequence CTCN PAM
ccacagccgaggcgggggcg

SEQ ID NO: 18749 - RNA, 20 nt, Artificial Sequence
  HTT spacer sequence CTCN PAM
uccccacagccgaggcgggg

SEQ ID NO: 18750 - RNA, 20 nt, Artificial Sequence
  HTT spacer sequence CTCN PAM
cgucccaguggcuccucccc

SEQ ID NO: 18751 - RNA, 20 nt, Artificial Sequence
  HTT spacer sequence CTCN PAM
gguggcaugcagcagcuuuu

SEQ ID NO: 18752 - RNA, 20 nt, Artificial Sequence
  HTT spacer sequence CTCN PAM
gccacggccuuguccuaggc

SEQ ID NO: 18753 - RNA, 20 nt, Artificial Sequence
  HTT spacer sequence CTCN PAM
agcaggcggcugacaggcuc

SEQ ID NO: 18754 - RNA, 20 nt, Artificial Sequence
  HTT spacer sequence CTCN PAM
ccagcaggcggcugacaggc

SEQ ID NO: 18755 - RNA, 20 nt, Artificial Sequence
  HTT spacer sequence CTCN PAM
ggagcagccaccugcccagc

SEQ ID NO: 18756 - RNA, 20 nt, Artificial Sequence
  HTT spacer sequence CTCN PAM
ugagcgugcucuccagcagg

SEQ ID NO: 18757 - RNA, 20 nt, Artificial Sequence
  HTT spacer sequence CTCN PAM
aacccugcugggcagguggc

SEQ ID NO: 18758 - RNA, 20 nt, Artificial Sequence
  HTT spacer sequence CTCN PAM
augugcuggagugcgaccug

SEQ ID NO: 18759 - RNA, 20 nt, Artificial Sequence
  HTT spacer sequence CTCN PAM
agcacauagaggacgccgug

SEQ ID NO: 18760 - RNA, 20 nt, Artificial Sequence
  HTT spacer sequence CTCN PAM
ucccggucaucagcgacuau

SEQ ID NO: 18761 - RNA, 20 nt, Artificial Sequence
  HTT spacer sequence CTCN PAM
ucuccaaccugaaagggauc

SEQ ID NO: 18762 - RNA, 20 nt, Artificial Sequence
  HTT spacer sequence CTCN PAM
ccaaccugaaagggaucgcc

SEQ ID NO: 18763 - RNA, 20 nt, Artificial Sequence
  HTT spacer sequence CTCN PAM
aaccugaaagggaucgccca

SEQ ID NO: 18764 - RNA, 20 nt, Artificial Sequence
  HTT spacer sequence CTCN PAM
cugggcgaucccuuucaggu

SEQ ID NO: 18765 - RNA, 20 nt, Artificial Sequence
  HTT spacer sequence CTCN PAM
cacucacugggcgaucccuu

SEQ ID NO: 18766 - RNA, 20 nt, Artificial Sequence
  HTT spacer sequence CTCN PAM
gaaugagcugugaaggaagc

SEQ ID NO: 18767 - RNA, 20 nt, Artificial Sequence
  HTT spacer sequence CTCN PAM
uucugagacccccgccccag

SEQ ID NO: 18768 - RNA, 20 nt, Artificial Sequence
  HTT spacer sequence CTCN PAM
ccaagugcccaggcuccugg

SEQ ID NO: 18769 - RNA, 20 nt, Artificial Sequence
  HTT spacer sequence CTCN PAM
aagugcccaggcuccuggcc

SEQ ID NO: 18770 - RNA, 20 nt, Artificial Sequence
  HTT spacer sequence CTCN PAM
uggccagauggcaggccagg

SEQ ID NO: 18771 - RNA, 20 nt, Artificial Sequence
  HTT spacer sequence CTCN PAM
gccauggcacccaccugggu

SEQ ID NO: 18772 - RNA, 20 nt, Artificial Sequence
  HTT spacer sequence CTCN PAM
cugaccucagccauggcacc

SEQ ID NO: 18773 - RNA, 20 nt, Artificial Sequence
  HTT spacer sequence CTCN PAM
ugcgucucacugaccucagc

SEQ ID NO: 18774 - RNA, 20 nt, Artificial Sequence
  HTT spacer sequence CTCN PAM
aggacgcaccugugcucuug

SEQ ID NO: 18775 - RNA, 20 nt, Artificial Sequence
  HTT spacer sequence CTCN PAM
ggcaccuccagcgagcugga

SEQ ID NO: 18776 - RNA, 20 nt, Artificial Sequence
  HTT spacer sequence CTCN PAM
agcgagcuggagcucucgcc

SEQ ID NO: 18777 - RNA, 20 nt, Artificial Sequence
  HTT spacer sequence CTCN PAM
cuggaggugcccgaggaagc

SEQ ID NO: 18778 - RNA, 20 nt, Artificial Sequence
  HTT spacer sequence CTCN PAM
agcucgcuggaggugcccga

SEQ ID NO: 18779 - RNA, 20 nt, Artificial Sequence
  HTT spacer sequence CTCN PAM
cgccucugcugcugucucau

SEQ ID NO: 18780 - RNA, 20 nt, Artificial Sequence
  HTT spacer sequence CTCN PAM
ccucugcugcugucucaugu

SEQ ID NO: 18781 - RNA, 20 nt, Artificial Sequence
  HTT spacer sequence CTCN PAM
gcugcugucucauguggcgc

SEQ ID NO: 18782 - RNA, 20 nt, Artificial Sequence
  HTT spacer sequence CTCN PAM
uguggcgcuuagcacacucu

SEQ ID NO: 18783 - RNA, 20 nt, Artificial Sequence
  HTT spacer sequence CTCN PAM
cccacgugcccauuccugac

SEQ ID NO: 18784 - RNA, 20 nt, Artificial Sequence
  HTT spacer sequence CTCN PAM
cacgugcccauuccugacuc

SEQ ID NO: 18785 - RNA, 20 nt, Artificial Sequence
  HTT spacer sequence CTCN PAM
gcucucgaggccaucggcuc

SEQ ID NO: 18786 - RNA, 20 nt, Artificial Sequence
  HTT spacer sequence CTCN PAM
cgaggccaucggcucucauu

SEQ ID NO: 18787 - RNA, 20 nt, Artificial Sequence
  HTT spacer sequence CTCN PAM
aggccaucggcucucauucu

SEQ ID NO: 18788 - RNA, 20 nt, Artificial Sequence
  HTT spacer sequence CTCN PAM
agagcagagucaggaauggg

SEQ ID NO: 18789 - RNA, 20 nt, Artificial Sequence
  HTT spacer sequence CTCN PAM
cauucucugcucccagaacc

SEQ ID NO: 18790 - RNA, 20 nt, Artificial Sequence
  HTT spacer sequence CTCN PAM
uucucugcucccagaacccu

SEQ ID NO: 18791 - RNA, 20 nt, Artificial Sequence
  HTT spacer sequence CTCN PAM
gcucccagaacccuguuauu

SEQ ID NO: 18792 - RNA, 20 nt, Artificial Sequence
  HTT spacer sequence CTCN PAM
cagaacccuguuauuaccca

SEQ ID NO: 18793 - RNA, 20 nt, Artificial Sequence
  HTT spacer sequence CTCN PAM
ucucugcaccuuccccgccc

SEQ ID NO: 18794 - RNA, 20 nt, Artificial Sequence
  HTT spacer sequence CTCN PAM
cugcaccuuccccgcccugg

SEQ ID NO: 18795 - RNA, 20 nt, Artificial Sequence
  HTT spacer sequence CTCN PAM
gcaccuuccccgcccuggcc

SEQ ID NO: 18796 - RNA, 20 nt, Artificial Sequence
  HTT spacer sequence CTCN PAM
cucuuguuuccacugugauu

SEQ ID NO: 18797 - RNA, 20 nt, Artificial Sequence
  HTT spacer sequence CTCN PAM
uguuuccacugugauuccga

SEQ ID NO: 18798 - RNA, 20 nt, Artificial Sequence
  HTT spacer sequence CTCN PAM
ccuuaucuuaaagcugcugg

SEQ ID NO: 18799 - RNA, 20 nt, Artificial Sequence
  HTT spacer sequence CTCN PAM
gcgagcaagucaagcucuuc

SEQ ID NO: 18800 - RNA, 20 nt, Artificial Sequence
  HTT spacer sequence CTCN PAM
cugagggguugcggcaccag

SEQ ID NO: 18801 - RNA, 20 nt, Artificial Sequence
  HTT spacer sequence CTCN PAM
ucacagcgaugucuuacaag

SEQ ID NO: 18802 - RNA, 20 nt, Artificial Sequence
  HTT spacer sequence CTCN PAM
gcgcuuguaagacaucgcug

SEQ ID NO: 18803 - RNA, 20 nt, Artificial Sequence
  HTT spacer sequence CTCN PAM
gugacacccuggucucaccg

SEQ ID NO: 18804 - RNA, 20 nt, Artificial Sequence
  HTT spacer sequence CTCN PAM
ccgccacucuuccaaagucg

SEQ ID NO: 18805 - RNA, 20 nt, Artificial Sequence
  HTT spacer sequence CTCN PAM
uccaaagucgcagaggcuuu

SEQ ID NO: 18806 - RNA, 20 nt, Artificial Sequence
  HTT spacer sequence CTCN PAM
gcgacuuuggaagaguggcg

SEQ ID NO: 18807 - RNA, 20 nt, Artificial Sequence
  HTT spacer sequence CTCN PAM
gcuaaagccucugcgacuuu

SEQ ID NO: 18808 - RNA, 20 nt, Artificial Sequence
  HTT spacer sequence CTCN PAM
cugagucauaggcuucugca

SEQ ID NO: 18809 - RNA, 20 nt, Artificial Sequence
  HTT spacer sequence CTCN PAM
gagucauaggcuucugcaca

SEQ ID NO: 18810 - RNA, 20 nt, Artificial Sequence
  HTT spacer sequence CTCN PAM
gagaggcugggcccaucucu

SEQ ID NO: 18811 - RNA, 20 nt, Artificial Sequence
  HTT spacer sequence CTCN PAM
cgugugcagaagccuaugac

SEQ ID NO: 18812 - RNA, 20 nt, Artificial Sequence
  HTT spacer sequence CTCN PAM
aaagacagcucccgugugca

SEQ ID NO: 18813 - RNA, 20 nt, Artificial Sequence
  HTT spacer sequence CTCN PAM
cucuaaagacagcucccgug

SEQ ID NO: 18814 - RNA, 20 nt, Artificial Sequence
  HTT spacer sequence CTCN PAM
cccauguggguggcugauga

SEQ ID NO: 18815 - RNA, 20 nt, Artificial Sequence
  HTT spacer sequence CTCN PAM
acucccccauguggguggcu

SEQ ID NO: 18816 - RNA, 20 nt, Artificial Sequence
  HTT spacer sequence CTCN PAM
uaauucuugcccucaacucc

SEQ ID NO: 18817 - RNA, 20 nt, Artificial Sequence
  HTT spacer sequence CTCN PAM
cagaccccuucccaucuuug

SEQ ID NO: 18818 - RNA, 20 nt, Artificial Sequence
  HTT spacer sequence CTCN PAM
acuuugaccuagcccccguu

SEQ ID NO: 18819 - RNA, 20 nt, Artificial Sequence
  HTT spacer sequence CTCN PAM
aggucuuccacucaacuuug

SEQ ID NO: 18820 - RNA, 20 nt, Artificial Sequence
  HTT spacer sequence CTCN PAM
cuccaggucuuccacucaac

SEQ ID NO: 18821 - RNA, 20 nt, Artificial Sequence
  HTT spacer sequence CTCN PAM
guaggcacaguucagacagg

SEQ ID NO: 18822 - RNA, 20 nt, Artificial Sequence
  HTT spacer sequence CTCN PAM
ugucugaacugugccuacag

SEQ ID NO: 18823 - RNA, 20 nt, Artificial Sequence
  HTT spacer sequence CTCN PAM
cuccugucugaacugugccu

SEQ ID NO: 18824 - RNA, 20 nt, Artificial Sequence
  HTT spacer sequence CTCN PAM
caccucccuccugucugaac

SEQ ID NO: 18825 - RNA, 20 nt, Artificial Sequence
  HTT spacer sequence CTCN PAM
agcaugucccaaauccugcc

SEQ ID NO: 18826 - RNA, 20 nt, Artificial Sequence
  HTT spacer sequence CTCN PAM
ucaggggccauugcccucau

SEQ ID NO: 18827 - RNA, 20 nt, Artificial Sequence
  HTT spacer sequence CTCN PAM
uccaggccagagugucacaa

SEQ ID NO: 18828 - RNA, 20 nt, Artificial Sequence
  HTT spacer sequence CTCN PAM
ggccuggaugagggcaaugg

SEQ ID NO: 18829 - RNA, 20 nt, Artificial Sequence
  HTT spacer sequence CTCN PAM
ccacgggcuugugacacucu

SEQ ID NO: 18830 - RNA, 20 nt, Artificial Sequence
  HTT spacer sequence CTCN PAM
ccugucauccuugcugggca

SEQ ID NO: 18831 - RNA, 20 nt, Artificial Sequence
  HTT spacer sequence CTCN PAM
gcaucccuggagccuggcau

SEQ ID NO: 18832 - RNA, 20 nt, Artificial Sequence
  HTT spacer sequence CTCN PAM
agggaugcagagacaguugc

SEQ ID NO: 18833 - RNA, 20 nt, Artificial Sequence
  HTT spacer sequence CTCN PAM
ugcugugggcauggaggacu

SEQ ID NO: 18834 - RNA, 20 nt, Artificial Sequence
  HTT spacer sequence CTCN PAM
augcccacagcaagagccau

SEQ ID NO: 18835 - RNA, 20 nt, Artificial Sequence
  HTT spacer sequence CTCN PAM
gggaaggagaguugaggugg

SEQ ID NO: 18836 - RNA, 20 nt, Artificial Sequence
  HTT spacer sequence CTCN PAM
uucccugaguccuccaugcc

SEQ ID NO: 18837 - RNA, 20 nt, Artificial Sequence
  HTT spacer sequence CTCN PAM
ccuucccugaguccuccaug

SEQ ID NO: 18838 - RNA, 20 nt, Artificial Sequence
  HTT spacer sequence CTCN PAM
acucuccuucccugaguccu

SEQ ID NO: 18839 - RNA, 20 nt, Artificial Sequence
  HTT spacer sequence CTCN PAM
uggaccaccucaacucuccu

SEQ ID NO: 18840 - RNA, 20 nt, Artificial Sequence
  HTT spacer sequence CTCN PAM
gcaucccaaacgcaacuccu

SEQ ID NO: 18841 - RNA, 20 nt, Artificial Sequence
  HTT spacer sequence CTCN PAM
cugcaucccaaacgcaacuc

SEQ ID NO: 18842 - RNA, 20 nt, Artificial Sequence
  HTT spacer sequence CTCN PAM
gcaccaugggcagaggggcc

SEQ ID NO: 18843 - RNA, 20 nt, Artificial Sequence
  HTT spacer sequence CTCN PAM
gcccauggugcugaggucag

SEQ ID NO: 18844 - RNA, 20 nt, Artificial Sequence
  HTT spacer sequence CTCN PAM
gagguggaggugggaccacg

SEQ ID NO: 18845 - RNA, 20 nt, Artificial Sequence
  HTT spacer sequence CTCN PAM
gaggcacgugacacggcccc

SEQ ID NO: 18846 - RNA, 20 nt, Artificial Sequence
  HTT spacer sequence CTCN PAM
accucggaggcacgugacac

SEQ ID NO: 18847 - RNA, 20 nt, Artificial Sequence
  HTT spacer sequence CTCN PAM
ucuguucacaguggccacuc

SEQ ID NO: 18848 - RNA, 20 nt, Artificial Sequence
  HTT spacer sequence CTCN PAM
guucacaguggccacucauu

SEQ ID NO: 18849 - RNA, 20 nt, Artificial Sequence
  HTT spacer sequence CTCN PAM
uucagucccuggcuaccagg

SEQ ID NO: 18850 - RNA, 20 nt, Artificial Sequence
  HTT spacer sequence CTCN PAM
cugugccauggggaaggccg

SEQ ID NO: 18851 - RNA, 20 nt, Artificial Sequence
  HTT spacer sequence CTCN PAM
ggaaguagaggggacuggcc

SEQ ID NO: 18852 - RNA, 20 nt, Artificial Sequence
  HTT spacer sequence CTCN PAM
acuuccugagugcccugugc

SEQ ID NO: 18853 - RNA, 20 nt, Artificial Sequence
  HTT spacer sequence CTCN PAM
uugagggacagagagaggaa

SEQ ID NO: 18854 - RNA, 20 nt, Artificial Sequence
  HTT spacer sequence CTCN PAM
acgaggcccuagauucccac

SEQ ID NO: 18855 - RNA, 20 nt, Artificial Sequence
  HTT spacer sequence CTCN PAM
gucccucaacgaggcccuag

SEQ ID NO: 18856 - RNA, 20 nt, Artificial Sequence
  HTT spacer sequence CTCN PAM
cugucccucaacgaggcccu

SEQ ID NO: 18857 - RNA, 20 nt, Artificial Sequence
  HTT spacer sequence CTCN PAM
cucugucccucaacgaggcc

SEQ ID NO: 18858 - RNA, 20 nt, Artificial Sequence
  HTT spacer sequence CTCN PAM
augcuggccaccacacacuu

SEQ ID NO: 18859 - RNA, 20 nt, Artificial Sequence
  HTT spacer sequence CTCN PAM
ccuguggccaccuccaugcu

SEQ ID NO: 18860 - RNA, 20 nt, Artificial Sequence
  HTT spacer sequence CTCN PAM
gccuccccuguggccaccuc

SEQ ID NO: 18861 - RNA, 20 nt, Artificial Sequence
  HTT spacer sequence CTCN PAM
gccuaacucagccuccccug

SEQ ID NO: 18862 - RNA, 20 nt, Artificial Sequence
  HTT spacer sequence CTCN PAM
cggccuaacucagccucccc

SEQ ID NO: 18863 - RNA, 20 nt, Artificial Sequence
  HTT spacer sequence CTCN PAM
ccaacgcccugcccucucgg

SEQ ID NO: 18864 - RNA, 20 nt, Artificial Sequence
  HTT spacer sequence CTCN PAM
gccacucagggaguggucaa

SEQ ID NO: 18865 - RNA, 20 nt, Artificial Sequence
  HTT spacer sequence CTCN PAM
gggaguggucaagcagaggc

SEQ ID NO: 18866 - RNA, 20 nt, Artificial Sequence
  HTT spacer sequence CTCN PAM
cugaguggcugagcccgucu

SEQ ID NO: 18867 - RNA, 20 nt, Artificial Sequence
  HTT spacer sequence CTCN PAM
gcuugaccacucccugagug

SEQ ID NO: 18868 - RNA, 20 nt, Artificial Sequence
  HTT spacer sequence CTCN PAM
cccaggccccugcaaccugg

SEQ ID NO: 18869 - RNA, 20 nt, Artificial Sequence
  HTT spacer sequence CTCN PAM
ggguaggcgcucccgggagc

SEQ ID NO: 18870 - RNA, 20 nt, Artificial Sequence
  HTT spacer sequence CTCN PAM
cgggagcccgccuggcccau

SEQ ID NO: 18871 - RNA, 20 nt, Artificial Sequence
  HTT spacer sequence CTCN PAM
cgggagcgccuacccugagu

SEQ ID NO: 18872 - RNA, 20 nt, Artificial Sequence
  HTT spacer sequence CTCN PAM
acacucccgcguggggccgg

SEQ ID NO: 18873 - RNA, 20 nt, Artificial Sequence
  HTT spacer sequence CTCN PAM
cgcguggggccggacaugcu

SEQ ID NO: 18874 - RNA, 20 nt, Artificial Sequence
  HTT spacer sequence CTCN PAM
ccacguuggauggggguggc

SEQ ID NO: 18875 - RNA, 20 nt, Artificial Sequence
  HTT spacer sequence CTCN PAM
acguuggauggggguggcug

SEQ ID NO: 18876 - RNA, 20 nt, Artificial Sequence
  HTT spacer sequence CTCN PAM
gccacccccauccaacgugg

SEQ ID NO: 18877 - RNA, 20 nt, Artificial Sequence
  HTT spacer sequence CTCN PAM
cguuuucagcugcgugaaca

SEQ ID NO: 18878 - RNA, 20 nt, Artificial Sequence
  HTT spacer sequence CTCN PAM
uugagaacuauccucuggac

SEQ ID NO: 18879 - RNA, 20 nt, Artificial Sequence
  HTT spacer sequence CTCN PAM
augagguaaaacgcaguggc

SEQ ID NO: 18880 - RNA, 20 nt, Artificial Sequence
  HTT spacer sequence CTCN PAM
ggacguagggccggaauuuu

SEQ ID NO: 18881 - RNA, 20 nt, Artificial Sequence
  HTT spacer sequence CTCN PAM
ccuguauuauugaugcugaa

SEQ ID NO: 18882 - RNA, 20 nt, Artificial Sequence
  HTT spacer sequence CTCN PAM
gcacacggggagugggcuuc

SEQ ID NO: 18883 - RNA, 20 nt, Artificial Sequence
  HTT spacer sequence CTCN PAM
ccgugugcagaggaagacag

SEQ ID NO: 18884 - RNA, 20 nt, Artificial Sequence
  HTT spacer sequence CTCN PAM
uuuccuugcaggaucauacc

SEQ ID NO: 18885 - RNA, 20 nt, Artificial Sequence
  HTT spacer sequence CTCN PAM
cgaccaagucaaaacuggcc

SEQ ID NO: 18886 - RNA, 20 nt, Artificial Sequence
  HTT spacer sequence CTCN PAM
ucccgaccaagucaaaacug

SEQ ID NO: 18887 - RNA, 20 nt, Artificial Sequence
  HTT spacer sequence CTCN PAM
gguguucaugccuccucccg

SEQ ID NO: 18888 - RNA, 20 nt, Artificial Sequence
  HTT spacer sequence CTCN PAM
gugucaaagaaucgcugcac

SEQ ID NO: 18889 - RNA, 20 nt, Artificial Sequence
  HTT spacer sequence CTCN PAM
cugugcagauguguggggug

SEQ ID NO: 18890 - RNA, 20 nt, Artificial Sequence
  HTT spacer sequence CTCN PAM
cuuccagacagcaucacccc

SEQ ID NO: 18891 - RNA, 20 nt, Artificial Sequence
  HTT spacer sequence CTCN PAM
ucacuuccagacagcaucac

SEQ ID NO: 18892 - RNA, 20 nt, Artificial Sequence
  HTT spacer sequence CTCN PAM
aucauuuaccacugugcccu

SEQ ID NO: 18893 - RNA, 20 nt, Artificial Sequence
  HTT spacer sequence CTCN PAM
gaggccuggagcgccuccug

SEQ ID NO: 18894 - RNA, 20 nt, Artificial Sequence
  HTT spacer sequence CTCN PAM
gagggcacagugguaaauga

SEQ ID NO: 18895 - RNA, 20 nt, Artificial Sequence
  HTT spacer sequence CTCN PAM
aggccucugagggcacagug

SEQ ID NO: 18896 - RNA, 20 nt, Artificial Sequence
  HTT spacer sequence CTCN PAM
ugcucucugagcagcucucc

SEQ ID NO: 18897 - RNA, 20 nt, Artificial Sequence
  HTT spacer sequence CTCN PAM
cugagcagcucucccgccug

SEQ ID NO: 18898 - RNA, 20 nt, Artificial Sequence
  HTT spacer sequence CTCN PAM
gagcagcucucccgccugga

SEQ ID NO: 18899 - RNA, 20 nt, Artificial Sequence
  HTT spacer sequence CTCN PAM
gagagcaggaggcgcuccag

SEQ ID NO: 18900 - RNA, 20 nt, Artificial Sequence
  HTT spacer sequence CTCN PAM
cccgccuggaugcagaaucg

SEQ ID NO: 18901 - RNA, 20 nt, Artificial Sequence
  HTT spacer sequence CTCN PAM
cgccuggaugcagaaucgcu

SEQ ID NO: 18902 - RNA, 20 nt, Artificial Sequence
  HTT spacer sequence CTCN PAM
gcuugaccagcgauucugca

SEQ ID NO: 18903 - RNA, 20 nt, Artificial Sequence
  HTT spacer sequence CTCN PAM
guccacacucagcuugacca

SEQ ID NO: 18904 - RNA, 20 nt, Artificial Sequence
  HTT spacer sequence CTCN PAM
gggccugaugcucaccugca

SEQ ID NO: 18905 - RNA, 20 nt, Artificial Sequence
  HTT spacer sequence CTCN PAM
ccugcauguacacaggugag

SEQ ID NO: 18906 - RNA, 20 nt, Artificial Sequence
  HTT spacer sequence CTCN PAM
ccuguguacaugcaggugag

SEQ ID NO: 18907 - RNA, 20 nt, Artificial Sequence
  HTT spacer sequence CTCN PAM
cuugaacaggacuugggcug

SEQ ID NO: 18908 - RNA, 20 nt, Artificial Sequence
  HTT spacer sequence CTCN PAM
ugccucccuugaacaggacu

SEQ ID NO: 18909 - RNA, 20 nt, Artificial Sequence
  HTT spacer sequence CTCN PAM
cucaagggaccucgacuagg

SEQ ID NO: 18910 - RNA, 20 nt, Artificial Sequence
  HTT spacer sequence CTCN PAM
agggaccucgacuaggugcc

SEQ ID NO: 18911 - RNA, 20 nt, Artificial Sequence
  HTT spacer sequence CTCN PAM
acuaggugcccucugauuuc

SEQ ID NO: 18912 - RNA, 20 nt, Artificial Sequence
  HTT spacer sequence CTCN PAM
gauuucacacuucugguguu

SEQ ID NO: 18913 - RNA, 20 nt, Artificial Sequence
  HTT spacer sequence CTCN PAM
ggagcccccagggcuggagu

SEQ ID NO: 18914 - RNA, 20 nt, Artificial Sequence
  HTT spacer sequence CTCN PAM
agagccuuucuugcaaggug

SEQ ID NO: 18915 - RNA, 20 nt, Artificial Sequence
  HTT spacer sequence CTCN PAM
agcccugggggcuccagagc

SEQ ID NO: 18916 - RNA, 20 nt, Artificial Sequence
  HTT spacer sequence CTCN PAM
ucccauguggcugagcuggg

SEQ ID NO: 18917 - RNA, 20 nt, Artificial Sequence
  HTT spacer sequence CTCN PAM
gccacaugggaugagugacc

SEQ ID NO: 18918 - RNA, 20 nt, Artificial Sequence
  HTT spacer sequence CTCN PAM
agggacucacuggaccccug

SEQ ID NO: 18919 - RNA, 20 nt, Artificial Sequence
  HTT spacer sequence CTCN PAM
cuggaccccuguguacaaag

SEQ ID NO: 18920 - RNA, 20 nt, Artificial Sequence
  HTT spacer sequence CTCN PAM
guagacagugcuuuguacac

SEQ ID NO: 18921 - RNA, 20 nt, Artificial Sequence
  HTT spacer sequence CTCN PAM
auacaacccaauaggcucug

SEQ ID NO: 18922 - RNA, 20 nt, Artificial Sequence
  HTT spacer sequence CTCN PAM
uuuccuguaacaaaaguguu

SEQ ID NO: 18923 - RNA, 20 nt, Artificial Sequence
  HTT spacer sequence CTCN PAM
cugucgggggcugcaggauu

SEQ ID NO: 18924 - RNA, 20 nt, Artificial Sequence
  HTT spacer sequence CTCN PAM
auagcaacaaucacugacuc

SEQ ID NO: 18925 - RNA, 20 nt, Artificial Sequence
  HTT spacer sequence CTCN PAM
gccguuagcuucccuagaac

SEQ ID NO: 18926 - RNA, 20 nt, Artificial Sequence
  HTT spacer sequence CTCN PAM
agcaacagcgccaggggauc

SEQ ID NO: 18927 - RNA, 20 nt, Artificial Sequence
  HTT spacer sequence CTCN PAM
ggguuccacuggcgagcugg

SEQ ID NO: 18928 - RNA, 20 nt, Artificial Sequence
  HTT spacer sequence CTCN PAM
ccaguggaacccugagccaa

SEQ ID NO: 18929 - RNA, 20 nt, Artificial Sequence
  HTT spacer sequence CTCN PAM
gguguagcguugaccaguuc

SEQ ID NO: 18930 - RNA, 20 nt, Artificial Sequence
  HTT spacer sequence CTCN PAM
ccugagggcucagggacagu

SEQ ID NO: 18931 - RNA, 20 nt, Artificial Sequence
  HTT spacer sequence CTCN PAM
ugagggcucagggacaguac

SEQ ID NO: 18932 - RNA, 20 nt, Artificial Sequence
  HTT spacer sequence CTCN PAM
ggagagaugggcaggcacug

SEQ ID NO: 18933 - RNA, 20 nt, Artificial Sequence
  HTT spacer sequence CTCN PAM
gggacaguaccuggcaguug

SEQ ID NO: 18934 - RNA, 20 nt, Artificial Sequence
  HTT spacer sequence CTCN PAM
gggaggguggggcagaagcc

SEQ ID NO: 18935 - RNA, 20 nt, Artificial Sequence
  HTT spacer sequence CTCN PAM
cagaggcuggucauuccugc

SEQ ID NO: 18936 - RNA, 20 nt, Artificial Sequence
  HTT spacer sequence CTCN PAM
cuguacaggcuucugcccca

SEQ ID NO: 18937 - RNA, 20 nt, Artificial Sequence
  HTT spacer sequence CTCN PAM
ucacuguacaggcuucugcc

SEQ ID NO: 18938 - RNA, 20 nt, Artificial Sequence
  HTT spacer sequence CTCN PAM
uccucacuguacaggcuucu

SEQ ID NO: 18939 - RNA, 20 nt, Artificial Sequence
  HTT spacer sequence CTCN PAM
gccuggcugccuaucgugag

SEQ ID NO: 18940 - RNA, 20 nt, Artificial Sequence
  HTT spacer sequence CTCN PAM
cgauaggcagccaggcugag

SEQ ID NO: 18941 - RNA, 20 nt, Artificial Sequence
  HTT spacer sequence CTCN PAM
cacgauaggcagccaggcug

SEQ ID NO: 18942 - RNA, 20 nt, Artificial Sequence
  HTT spacer sequence CTCN PAM
ccucucacgauaggcagcca

SEQ ID NO: 18943 - RNA, 20 nt, Artificial Sequence
  HTT spacer sequence CTCN PAM
cacagccccgugggcucccc

SEQ ID NO: 18944 - RNA, 20 nt, Artificial Sequence
  HTT spacer sequence CTCN PAM
caggcaccacggccccccuc

SEQ ID NO: 18945 - RNA, 20 nt, Artificial Sequence
  HTT spacer sequence CTCN PAM
cccugcucacaggcaccacg

SEQ ID NO: 18946 - RNA, 20 nt, Artificial Sequence
  HTT spacer sequence CTCN PAM
ucacccugcucacaggcacc

SEQ ID NO: 18947 - RNA, 20 nt, Artificial Sequence
  HTT spacer sequence CTCN PAM
ugccgcugcuccucacccug

SEQ ID NO: 18948 - RNA, 20 nt, Artificial Sequence
  HTT spacer sequence CTCN PAM
aagaugcauguguggguucc

SEQ ID NO: 18949 - RNA, 20 nt, Artificial Sequence
  HTT spacer sequence CTCN PAM
ccugcucuggaaguggguua

SEQ ID NO: 18950 - RNA, 20 nt, Artificial Sequence
  HTT spacer sequence CTCN PAM
ggaaguggguuaggagcuug

SEQ ID NO: 18951 - RNA, 20 nt, Artificial Sequence
  HTT spacer sequence CTCN PAM
uaacccacuuccagagcagg

SEQ ID NO: 18952 - RNA, 20 nt, Artificial Sequence
  HTT spacer sequence CTCN PAM
aggacaagggccccugauuu

SEQ ID NO: 18953 - RNA, 20 nt, Artificial Sequence
  HTT spacer sequence CTCN PAM
caggccucaguccuggcgac

SEQ ID NO: 18954 - RNA, 20 nt, Artificial Sequence
  HTT spacer sequence CTCN PAM
ggccucaguccuggcgacau

SEQ ID NO: 18955 - RNA, 20 nt, Artificial Sequence
  HTT spacer sequence CTCN PAM
guccuggcgacaugguggau

SEQ ID NO: 18956 - RNA, 20 nt, Artificial Sequence
  HTT spacer sequence CTCN PAM
agauccaccaugucgccagg

SEQ ID NO: 18957 - RNA, 20 nt, Artificial Sequence
  HTT spacer sequence CTCN PAM
ccaaucaggguggccagugg

SEQ ID NO: 18958 - RNA, 20 nt, Artificial Sequence
  HTT spacer sequence CTCN PAM
aaucaggguggccagugggg

SEQ ID NO: 18959 - RNA, 20 nt, Artificial Sequence
  HTT spacer sequence CTCN PAM
ccacuggccacccugauugg

SEQ ID NO: 18960 - RNA, 20 nt, Artificial Sequence
  HTT spacer sequence CTCN PAM
agagcauacucagguggacc

SEQ ID NO: 18961 - RNA, 20 nt, Artificial Sequence
  HTT spacer sequence CTCN PAM
ugagaaaagccaaauggcuc

SEQ ID NO: 18962 - RNA, 20 nt, Artificial Sequence
  HTT spacer sequence CTCN PAM
gguggaccuugcuccacugu

SEQ ID NO: 18963 - RNA, 20 nt, Artificial Sequence
  HTT spacer sequence CTCN PAM
acuguuugaccagaugaggc

SEQ ID NO: 18964 - RNA, 20 nt, Artificial Sequence
  HTT spacer sequence CTCN PAM
ucuggucaaacaguggagca

SEQ ID NO: 18965 - RNA, 20 nt, Artificial Sequence
  HTT spacer sequence CTCN PAM
aaaagaaaagaaaaaaaaaa

SEQ ID NO: 18966 - RNA, 20 nt, Artificial Sequence
  HTT spacer sequence CTCN PAM
aucucaaaaagaaaagaaaa

SEQ ID NO: 18967 - RNA, 20 nt, Artificial Sequence
  HTT spacer sequence CTCN PAM
agccugggugacaagggaaa

SEQ ID NO: 18968 - RNA, 20 nt, Artificial Sequence
  HTT spacer sequence CTCN PAM
gcucacugcaaccuccgccu

SEQ ID NO: 18969 - RNA, 20 nt, Artificial Sequence
  HTT spacer sequence CTCN PAM
cugcaaccuccgccucccgg

SEQ ID NO: 18970 - RNA, 20 nt, Artificial Sequence
  HTT spacer sequence CTCN PAM
gccucccggguucaagugau

SEQ ID NO: 18971 - RNA, 20 nt, Artificial Sequence
  HTT spacer sequence CTCN PAM
cggguucaagugauucuccu

SEQ ID NO: 18972 - RNA, 20 nt, Artificial Sequence
  HTT spacer sequence CTCN PAM
ugccucagccucccuaguag

SEQ ID NO: 18973 - RNA, 20 nt, Artificial Sequence
  HTT spacer sequence CTCN PAM
gccucccuaguagcugggau

SEQ ID NO: 18974 - RNA, 20 nt, Artificial Sequence
  HTT spacer sequence CTCN PAM
cuaguagcugggauuacagg

SEQ ID NO: 18975 - RNA, 20 nt, Artificial Sequence
  HTT spacer sequence CTCN PAM
acuaaaaacacaaaaauuag

SEQ ID NO: 18976 - RNA, 20 nt, Artificial Sequence
  HTT spacer sequence CTCN PAM
aacuccugaacucaagugau

SEQ ID NO: 18977 - RNA, 20 nt, Artificial Sequence
  HTT spacer sequence CTCN PAM
ugaacucaagugauccaccc

SEQ ID NO: 18978 - RNA, 20 nt, Artificial Sequence
  HTT spacer sequence CTCN PAM
agugauccacccuccuuggc

SEQ ID NO: 18979 - RNA, 20 nt, Artificial Sequence
  HTT spacer sequence CTCN PAM
uuggccucccaaagugcugg

SEQ ID NO: 18980 - RNA, 20 nt, Artificial Sequence
  HTT spacer sequence CTCN PAM
caaagugcugggauugcagg

SEQ ID NO: 18981 - RNA, 20 nt, Artificial Sequence
  HTT spacer sequence CTCN PAM
cgccugcaaucccagcacuu

SEQ ID NO: 18982 - RNA, 20 nt, Artificial Sequence
  HTT spacer sequence CTCN PAM
gcaucguucuucagucccca

SEQ ID NO: 18983 - RNA, 20 nt, Artificial Sequence
  HTT spacer sequence CTCN PAM
cugagcaccacugcgacugg

SEQ ID NO: 18984 - RNA, 20 nt, Artificial Sequence
  HTT spacer sequence CTCN PAM
gugagcauauggggacugaa

SEQ ID NO: 18985 - RNA, 20 nt, Artificial Sequence
  HTT spacer sequence CTCN PAM
cugugcccgucugccagucg

SEQ ID NO: 18986 - RNA, 20 nt, Artificial Sequence
  HTT spacer sequence CTCN PAM
ccaccuagcauugggcccac

SEQ ID NO: 18987 - RNA, 20 nt, Artificial Sequence
  HTT spacer sequence CTCN PAM
aaagaguguggugcacgccu

SEQ ID NO: 18988 - RNA, 20 nt, Artificial Sequence
  HTT spacer sequence CTCN PAM
uuggagcacucgccaccuag

SEQ ID NO: 18989 - RNA, 20 nt, Artificial Sequence
  HTT spacer sequence CTCN PAM
ccagacgccacagggaggca

SEQ ID NO: 18990 - RNA, 20 nt, Artificial Sequence
  HTT spacer sequence CTCN PAM
agacgccacagggaggcacc

SEQ ID NO: 18991 - RNA, 20 nt, Artificial Sequence
  HTT spacer sequence CTCN PAM
cuguggcgucuggagagcgg

SEQ ID NO: 18992 - RNA, 20 nt, Artificial Sequence
  HTT spacer sequence CTCN PAM
cagcugaccacagauuucuc

SEQ ID NO: 18993 - RNA, 20 nt, Artificial Sequence
  HTT spacer sequence CTCN PAM
cuguggagcagugucuucag

SEQ ID NO: 18994 - RNA, 20 nt, Artificial Sequence
  HTT spacer sequence CTCN PAM
guggagcagugucuucagag

SEQ ID NO: 18995 - RNA, 20 nt, Artificial Sequence
  HTT spacer sequence CTCN PAM
acagagagaaaucugugguc

SEQ ID NO: 18996 - RNA, 20 nt, Artificial Sequence
  HTT spacer sequence CTCN PAM
gaagacacugcuccacagag

SEQ ID NO: 18997 - RNA, 20 nt, Artificial Sequence
  HTT spacer sequence CTCN PAM
cccagcaguggcauggcagc

SEQ ID NO: 18998 - RNA, 20 nt, Artificial Sequence
  HTT spacer sequence CTCN PAM
acccgcccgcagacccucgc

SEQ ID NO: 18999 - RNA, 20 nt, Artificial Sequence
  HTT spacer sequence CTCN PAM
uggcucuacccgcccgcaga

SEQ ID NO: 19000 - RNA, 20 nt, Artificial Sequence
  HTT spacer sequence CTCN PAM
caggugcuccuggcucuacc

SEQ ID NO: 19001 - RNA, 20 nt, Artificial Sequence
  HTT spacer sequence CTCN PAM
guuacacacggcuggcaugu

SEQ ID NO: 19002 - RNA, 20 nt, Artificial Sequence
  HTT spacer sequence CTCN PAM
ucagugcacacaugccagcc

SEQ ID NO: 19003 - RNA, 20 nt, Artificial Sequence
  HTT spacer sequence CTCN PAM
gggggcguguuucaggaucu

SEQ ID NO: 19004 - RNA, 20 nt, Artificial Sequence
  HTT spacer sequence CTCN PAM
cugcuucuucccuaaccaga

SEQ ID NO: 19005 - RNA, 20 nt, Artificial Sequence
  HTT spacer sequence CTCN PAM
cgcugcuucuucccuaacca

SEQ ID NO: 19006 - RNA, 20 nt, Artificial Sequence
  HTT spacer sequence CTCN PAM
acaaacaucccuauguguuc

SEQ ID NO: 19007 - RNA, 20 nt, Artificial Sequence
  HTT spacer sequence CTCN PAM
uuuguaacauccuucccgcu

SEQ ID NO: 19008 - RNA, 20 nt, Artificial Sequence
  HTT spacer sequence CTCN PAM
ucuuaggaguucuggucccu

SEQ ID NO: 19009 - RNA, 20 nt, Artificial Sequence
  HTT spacer sequence CTCN PAM
uaggaguucuggucccuaca

SEQ ID NO: 19010 - RNA, 20 nt, Artificial Sequence
  HTT spacer sequence CTCN PAM
uaagaggaguuugaaagcua

SEQ ID NO: 19011 - RNA, 20 nt, Artificial Sequence
  HTT spacer sequence CTCN PAM
cacgcccuguagggaccaga

SEQ ID NO: 19012 - RNA, 20 nt, Artificial Sequence
  HTT spacer sequence CTCN PAM
ucuuaggaguucuggucccu

SEQ ID NO: 19013 - RNA, 20 nt, Artificial Sequence
  HTT spacer sequence CTCN PAM
uaggaguucuggucccuaca

SEQ ID NO: 19014 - RNA, 20 nt, Artificial Sequence
  HTT spacer sequence CTCN PAM
uaagaggaguuugaaagcua

SEQ ID NO: 19015 - RNA, 20 nt, Artificial Sequence
  HTT spacer sequence CTCN PAM
cacacccuguagggaccaga

SEQ ID NO: 19016 - RNA, 20 nt, Artificial Sequence
  HTT spacer sequence CTCN PAM
gcacaggcccugggcuccca

SEQ ID NO: 19017 - RNA, 20 nt, Artificial Sequence
  HTT spacer sequence CTCN PAM
acgagcuagacagaggaagg

SEQ ID NO: 19018 - RNA, 20 nt, Artificial Sequence
  HTT spacer sequence CTCN PAM
uggaggcaggcugcucggca

SEQ ID NO: 19019 - RNA, 20 nt, Artificial Sequence
  HTT spacer sequence CTCN PAM
gucuagcucguggaggcagg

SEQ ID NO: 19020 - RNA, 20 nt, Artificial Sequence
  HTT spacer sequence CTCN PAM
aaauucguacuccaguugcu

SEQ ID NO: 19021 - RNA, 20 nt, Artificial Sequence
  HTT spacer sequence CTCN PAM
aguugcuuaggcucugacuu

SEQ ID NO: 19022 - RNA, 20 nt, Artificial Sequence
  HTT spacer sequence CTCN PAM
gacuuuccccacuuggaaag

SEQ ID NO: 19023 - RNA, 20 nt, Artificial Sequence
  HTT spacer sequence CTCN PAM
cggccgagggucccucccag

SEQ ID NO: 19024 - RNA, 20 nt, Artificial Sequence
  HTT spacer sequence CTCN PAM
gccgugagggacuuuccaag

SEQ ID NO: 19025 - RNA, 20 nt, Artificial Sequence
  HTT spacer sequence CTCN PAM
cagcccugauuucacaucgg

SEQ ID NO: 19026 - RNA, 20 nt, Artificial Sequence
  HTT spacer sequence CTCN PAM
aauacuggggaaaaugccga

SEQ ID NO: 19027 - RNA, 20 nt, Artificial Sequence
  HTT spacer sequence CTCN PAM
gcgggcagguggggcagcug

SEQ ID NO: 19028 - RNA, 20 nt, Artificial Sequence
  HTT spacer sequence CTCN PAM
cacagcugccccaccugccc

SEQ ID NO: 19029 - RNA, 20 nt, Artificial Sequence
  HTT spacer sequence CTCN PAM
gaccugcgucccuccuccca

SEQ ID NO: 19030 - RNA, 20 nt, Artificial Sequence
  HTT spacer sequence CTCN PAM
ucccaggaucaggaaaggcu

SEQ ID NO: 19031 - RNA, 20 nt, Artificial Sequence
  HTT spacer sequence CTCN PAM
caggaucaggaaaggcuuuc

SEQ ID NO: 19032 - RNA, 20 nt, Artificial Sequence
  HTT spacer sequence CTCN PAM
ggcuucacaaggaaagccuu

SEQ ID NO: 19033 - RNA, 20 nt, Artificial Sequence
  HTT spacer sequence CTCN PAM
gaugacuuuguucaugaugu

SEQ ID NO: 19034 - RNA, 20 nt, Artificial Sequence
  HTT spacer sequence CTCN PAM
ccgaugacuuuguucaugau

SEQ ID NO: 19035 - RNA, 20 nt, Artificial Sequence
  HTT spacer sequence CTCN PAM
ccuuauacaccacgguggcc

SEQ ID NO: 19036 - RNA, 20 nt, Artificial Sequence
  HTT spacer sequence CTCN PAM
auccccaucccacaugcaac

SEQ ID NO: 19037 - RNA, 20 nt, Artificial Sequence
  HTT spacer sequence CTCN PAM
aggcuuucccacuccauccc

SEQ ID NO: 19038 - RNA, 20 nt, Artificial Sequence
  HTT spacer sequence CTCN PAM
accuccaggcuuucccacuc

SEQ ID NO: 19039 - RNA, 20 nt, Artificial Sequence
  HTT spacer sequence CTCN PAM
gacuucccagcagauucgcc

SEQ ID NO: 19040 - RNA, 20 nt, Artificial Sequence
  HTT spacer sequence CTCN PAM
gcuggcgaaucugcugggaa

SEQ ID NO: 19041 - RNA, 20 nt, Artificial Sequence
  HTT spacer sequence CTCN PAM
uccgcuuuaaagcagcaaug

SEQ ID NO: 19042 - RNA, 20 nt, Artificial Sequence
  HTT spacer sequence CTCN PAM
gcuuuaaagcagcaaugccu

SEQ ID NO: 19043 - RNA, 20 nt, Artificial Sequence
  HTT spacer sequence CTCN PAM
ggcccccaccccacccccgc

SEQ ID NO: 19044 - RNA, 20 nt, Artificial Sequence
  HTT spacer sequence CTCN PAM
ggcaccugcuugcuccuugc

SEQ ID NO: 19045 - RNA, 20 nt, Artificial Sequence
  HTT spacer sequence CTCN PAM
uugcagguguuucagacucu

SEQ ID NO: 19046 - RNA, 20 nt, Artificial Sequence
  HTT spacer sequence CTCN PAM
gcacagcaccgggcagucgu

SEQ ID NO: 19047 - RNA, 20 nt, Artificial Sequence
  HTT spacer sequence CTCN PAM
ccaacuucacgcagagggcc

SEQ ID NO: 19048 - RNA, 20 nt, Artificial Sequence
  HTT spacer sequence CTCN PAM
aacuucacgcagagggcccc

SEQ ID NO: 19049 - RNA, 20 nt, Artificial Sequence
  HTT spacer sequence CTCN PAM
gcgugaaguuggagagggac

SEQ ID NO: 19050 - RNA, 20 nt, Artificial Sequence
  HTT spacer sequence CTCN PAM
acguggccauggcgaccggg

SEQ ID NO: 19051 - RNA, 20 nt, Artificial Sequence
  HTT spacer sequence CTCN PAM
ccugcuucuuugucagcgcg

SEQ ID NO: 19052 - RNA, 20 nt, Artificial Sequence
  HTT spacer sequence CTCN PAM
ugcuucuuugucagcgcguc

SEQ ID NO: 19053 - RNA, 20 nt, Artificial Sequence
  HTT spacer sequence CTCN PAM
cugggucccuggugcuggcc

SEQ ID NO: 19054 - RNA, 20 nt, Artificial Sequence
  HTT spacer sequence CTCN PAM
gggucccuggugcuggcccc

SEQ ID NO: 19055 - RNA, 20 nt, Artificial Sequence
  HTT spacer sequence CTCN PAM
guguugacaagggaaacggg

SEQ ID NO: 19056 - RNA, 20 nt, Artificial Sequence
  HTT spacer sequence CTCN PAM
uguuucaugauaagguuuug

SEQ ID NO: 19057 - RNA, 20 nt, Artificial Sequence
  HTT spacer sequence CTCN PAM
gccccagggaaguaaaaugc

SEQ ID NO: 19058 - RNA, 20 nt, Artificial Sequence
  HTT spacer sequence CTCN PAM
uuucuguaccccugucagca

SEQ ID NO: 19059 - RNA, 20 nt, Artificial Sequence
  HTT spacer sequence CTCN PAM
cagaggggccgguguauggc

SEQ ID NO: 19060 - RNA, 20 nt, Artificial Sequence
  HTT spacer sequence CTCN PAM
gaggggccgguguauggcag

SEQ ID NO: 19061 - RNA, 20 nt, Artificial Sequence
  HTT spacer sequence CTCN PAM
gagaggcccuggucagcaaa

SEQ ID NO: 19062 - RNA, 20 nt, Artificial Sequence
  HTT spacer sequence CTCN PAM
ugccauacaccggccccucu

SEQ ID NO: 19063 - RNA, 20 nt, Artificial Sequence
  HTT spacer sequence CTCN PAM
gcugcgacccuccugccaua

SEQ ID NO: 19064 - RNA, 20 nt, Artificial Sequence
  HTT spacer sequence CTCN PAM
acagaaaggccccucagcug

SEQ ID NO: 19065 - RNA, 20 nt, Artificial Sequence
  HTT spacer sequence CTCN PAM
cccaggcccuccacagaaag

SEQ ID NO: 19066 - RNA, 20 nt, Artificial Sequence
  HTT spacer sequence CTCN PAM
ccucacccaggcccuccaca

SEQ ID NO: 19067 - RNA, 20 nt, Artificial Sequence
  HTT spacer sequence CTCN PAM
cuccccucacccaggcccuc

SEQ ID NO: 19068 - RNA, 20 nt, Artificial Sequence
  HTT spacer sequence CTCN PAM
gcagacgucccgcccacucg

SEQ ID NO: 19069 - RNA, 20 nt, Artificial Sequence
  HTT spacer sequence CTCN PAM
cgggcucuguguggcugggc

SEQ ID NO: 19070 - RNA, 20 nt, Artificial Sequence
  HTT spacer sequence CTCN PAM
guguggcugggcuucuccug

SEQ ID NO: 19071 - RNA, 20 nt, Artificial Sequence
  HTT spacer sequence CTCN PAM
ugacacugcuucucauuagc

SEQ ID NO: 19072 - RNA, 20 nt, Artificial Sequence
  HTT spacer sequence CTCN PAM
uuagcuuuggucauugugcc

SEQ ID NO: 19073 - RNA, 20 nt, Artificial Sequence
  HTT spacer sequence CTCN PAM
aucgcccucucggggaaagg

SEQ ID NO: 19074 - RNA, 20 nt, Artificial Sequence
  HTT spacer sequence CTCN PAM
cggggaaaggcuuaaguaaa

SEQ ID NO: 19075 - RNA, 20 nt, Artificial Sequence
  HTT spacer sequence CTCN PAM
gggaaaggcuuaaguaaaga

SEQ ID NO: 19076 - RNA, 20 nt, Artificial Sequence
  HTT spacer sequence CTCN PAM
uggcagccagcaucuggggg

SEQ ID NO: 19077 - RNA, 20 nt, Artificial Sequence
  HTT spacer sequence CTCN PAM
uguggucugucuuggggaag

SEQ ID NO: 19078 - RNA, 20 nt, Artificial Sequence
  HTT spacer sequence CTCN PAM
aagcagcacaguuguccugg

SEQ ID NO: 19079 - RNA, 20 nt, Artificial Sequence
  HTT spacer sequence CTCN PAM
gcccucacugcauuggagca

SEQ ID NO: 19080 - RNA, 20 nt, Artificial Sequence
  HTT spacer sequence CTCN PAM
cugcauuggagcagggcuag

SEQ ID NO: 19081 - RNA, 20 nt, Artificial Sequence
  HTT spacer sequence CTCN PAM
aaugcagugagggcagagcc

SEQ ID NO: 19082 - RNA, 20 nt, Artificial Sequence
  HTT spacer sequence CTCN PAM
acuagcccugcuccaaugca

SEQ ID NO: 19083 - RNA, 20 nt, Artificial Sequence
  HTT spacer sequence CTCN PAM
ugugcagcgcugguggccgg

SEQ ID NO: 19084 - RNA, 20 nt, Artificial Sequence
  HTT spacer sequence CTCN PAM
ccuggccuggcuccugugca

SEQ ID NO: 19085 - RNA, 20 nt, Artificial Sequence
  HTT spacer sequence CTCN PAM
gcagcacucaccuggccugg

SEQ ID NO: 19086 - RNA, 20 nt, Artificial Sequence
  HTT spacer sequence CTCN PAM
auuccugcaacccuuggcug

SEQ ID NO: 19087 - RNA, 20 nt, Artificial Sequence
  HTT spacer sequence CTCN PAM
accuccauuccugcaacccu

SEQ ID NO: 19088 - RNA, 20 nt, Artificial Sequence
  HTT spacer sequence CTCN PAM
agcugcaucagcgccuccac

SEQ ID NO: 19089 - RNA, 20 nt, Artificial Sequence
  HTT spacer sequence CTCN PAM
gcucgcucuccaggcucccu

SEQ ID NO: 19090 - RNA, 20 nt, Artificial Sequence
  HTT spacer sequence CTCN PAM
cucuccaggcucccuggacc

SEQ ID NO: 19091 - RNA, 20 nt, Artificial Sequence
  HTT spacer sequence CTCN PAM
ccaggcucccuggaccccuu

SEQ ID NO: 19092 - RNA, 20 nt, Artificial Sequence
  HTT spacer sequence CTCN PAM
aggcucccuggaccccuuug

SEQ ID NO: 19093 - RNA, 20 nt, Artificial Sequence
  HTT spacer sequence CTCN PAM
cuggaccccuuuguagacug

SEQ ID NO: 19094 - RNA, 20 nt, Artificial Sequence
  HTT spacer sequence CTCN PAM
ugaaacagucuacaaagggg

SEQ ID NO: 19095 - RNA, 20 nt, Artificial Sequence
  HTT spacer sequence CTCN PAM
ccugaaacagucuacaaagg

SEQ ID NO: 19096 - RNA, 20 nt, Artificial Sequence
  HTT spacer sequence CTCN PAM
caggugaggacagggaggca

SEQ ID NO: 19097 - RNA, 20 nt, Artificial Sequence
  HTT spacer sequence CTCN PAM
ccugggaguuccucuccuga

SEQ ID NO: 19098 - RNA, 20 nt, Artificial Sequence
  HTT spacer sequence CTCN PAM
cuguccucaccugggaguuc

SEQ ID NO: 19099 - RNA, 20 nt, Artificial Sequence
  HTT spacer sequence CTCN PAM
uuugccggccuuuuuccuua

SEQ ID NO: 19100 - RNA, 20 nt, Artificial Sequence
  HTT spacer sequence CTCN PAM
ugcaccagccucccacaugu

SEQ ID NO: 19101 - RNA, 20 nt, Artificial Sequence
  HTT spacer sequence CTCN PAM
cacaugucaucagcaggaug

SEQ ID NO: 19102 - RNA, 20 nt, Artificial Sequence
  HTT spacer sequence CTCN PAM
agcuugcccauccugcugau

SEQ ID NO: 19103 - RNA, 20 nt, Artificial Sequence
  HTT spacer sequence CTCN PAM
aucuggugucuguagaaguc

SEQ ID NO: 19104 - RNA, 20 nt, Artificial Sequence
  HTT spacer sequence CTCN PAM
ucuaucuggugucuguagaa

SEQ ID NO: 19105 - RNA, 20 nt, Artificial Sequence
  HTT spacer sequence CTCN PAM
uccucuaucuggugucugua

SEQ ID NO: 19106 - RNA, 20 nt, Artificial Sequence
  HTT spacer sequence CTCN PAM
accgcagggccuuccagucu

SEQ ID NO: 19107 - RNA, 20 nt, Artificial Sequence
  HTT spacer sequence CTCN PAM
agcacagacuggaaggcccu

SEQ ID NO: 19108 - RNA, 20 nt, Artificial Sequence
  HTT spacer sequence CTCN PAM
gcagguggugaccuugugga

SEQ ID NO: 19109 - RNA, 20 nt, Artificial Sequence
  HTT spacer sequence CTCN PAM
caccauggcgcucagcaggu

SEQ ID NO: 19110 - RNA, 20 nt, Artificial Sequence
  HTT spacer sequence CTCN PAM
cccaccauggcgcucagcag

SEQ ID NO: 19111 - RNA, 20 nt, Artificial Sequence
  HTT spacer sequence CTCN PAM
cagucucucccaccauggcg

SEQ ID NO: 19112 - RNA, 20 nt, Artificial Sequence
  HTT spacer sequence CTCN PAM
ggccccagcugccgccucac

SEQ ID NO: 19113 - RNA, 20 nt, Artificial Sequence
  HTT spacer sequence CTCN PAM
accgagccagcuuggucccu

SEQ ID NO: 19114 - RNA, 20 nt, Artificial Sequence
  HTT spacer sequence CTCN PAM
guggaggcagggcacaaggg

SEQ ID NO: 19115 - RNA, 20 nt, Artificial Sequence
  HTT spacer sequence CTCN PAM
gccauguggcagaagugcuc

SEQ ID NO: 19116 - RNA, 20 nt, Artificial Sequence
  HTT spacer sequence CTCN PAM
uuguggcaguggccaggcag

SEQ ID NO: 19117 - RNA, 20 nt, Artificial Sequence
  HTT spacer sequence CTCN PAM
cugccuggccacugccacaa

SEQ ID NO: 19118 - RNA, 20 nt, Artificial Sequence
  HTT spacer sequence CTCN PAM
gccccaccaggacugcagac

SEQ ID NO: 19119 - RNA, 20 nt, Artificial Sequence
  HTT spacer sequence CTCN PAM
ggcucagccccaccaggacu

SEQ ID NO: 19120 - RNA, 20 nt, Artificial Sequence
  HTT spacer sequence CTCN PAM
ugcuuucuggaaggccucag

SEQ ID NO: 19121 - RNA, 20 nt, Artificial Sequence
  HTT spacer sequence CTCN PAM
ugauagucaccugcugguug

SEQ ID NO: 19122 - RNA, 20 nt, Artificial Sequence
  HTT spacer sequence CTCN PAM
ugcaucugggccagaagucc

SEQ ID NO: 19123 - RNA, 20 nt, Artificial Sequence
  HTT spacer sequence CTCN PAM
cuccugcaggcuggcuguug

SEQ ID NO: 19124 - RNA, 20 nt, Artificial Sequence
  HTT spacer sequence CTCN PAM
ugcaggcuggcuguuggccc

SEQ ID NO: 19125 - RNA, 20 nt, Artificial Sequence
  HTT spacer sequence CTCN PAM
gcuguccugcaguagaaggu

SEQ ID NO: 19126 - RNA, 20 nt, Artificial Sequence
  HTT spacer sequence CTCN PAM
cggcaccuucuacugcagga

SEQ ID NO: 19127 - RNA, 20 nt, Artificial Sequence
  HTT spacer sequence CTCN PAM
cugguggggugugcaugcca

SEQ ID NO: 19128 - RNA, 20 nt, Artificial Sequence
  HTT spacer sequence CTCN PAM
cuucucucuuuucuucucag

SEQ ID NO: 19129 - RNA, 20 nt, Artificial Sequence
  HTT spacer sequence CTCN PAM
cuuuucuucucaggauuuaa

SEQ ID NO: 19130 - RNA, 20 nt, Artificial Sequence
  HTT spacer sequence CTCN PAM
uuucuucucaggauuuaaaa

SEQ ID NO: 19131 - RNA, 20 nt, Artificial Sequence
  HTT spacer sequence CTCN PAM
ggauuuaaaauuuaauuaua

SEQ ID NO: 19132 - RNA, 20 nt, Artificial Sequence
  HTT spacer sequence CTCN PAM
uuacugauauaauuaaauuu

SEQ ID NO: 19133 - RNA, 20 nt, Artificial Sequence
  HTT spacer sequence CTCN PAM
uucuaugcccguguaaagua

SEQ ID NO: 19134 - RNA, 20 nt, Artificial Sequence
  HTT spacer sequence CTCN PAM
cucuccuguagccacuggca

SEQ ID NO: 19135 - RNA, 20 nt, Artificial Sequence
  HTT spacer sequence CTCN PAM
ccuguagccacuggcauagc

SEQ ID NO: 19136 - RNA, 20 nt, Artificial Sequence
  HTT spacer sequence CTCN PAM
uguagccacuggcauagccc

SEQ ID NO: 19137 - RNA, 20 nt, Artificial Sequence
  HTT spacer sequence CTCN PAM
ugagcacccgcugacauuuc

SEQ ID NO: 19138 - RNA, 20 nt, Artificial Sequence
  HTT spacer sequence CTCN PAM
ggagggcuaugccaguggcu

SEQ ID NO: 19139 - RNA, 20 nt, Artificial Sequence
  HTT spacer sequence CTCN PAM
acaucccagucaccuuguga

SEQ ID NO: 19140 - RNA, 20 nt, Artificial Sequence
  HTT spacer sequence CTCN PAM
cuacaucccagucaccuugu

SEQ ID NO: 19141 - RNA, 20 nt, Artificial Sequence
  HTT spacer sequence CTCN PAM
guccugcuguggccaccugc

SEQ ID NO: 19142 - RNA, 20 nt, Artificial Sequence
  HTT spacer sequence CTCN PAM
ccugcagccccuccuccucg

SEQ ID NO: 19143 - RNA, 20 nt, Artificial Sequence
  HTT spacer sequence CTCN PAM
uccucgggcacagacgacug

SEQ ID NO: 19144 - RNA, 20 nt, Artificial Sequence
  HTT spacer sequence CTCN PAM
ucgggcacagacgacugucg

SEQ ID NO: 19145 - RNA, 20 nt, Artificial Sequence
  HTT spacer sequence CTCN PAM
ggcacagacgacugucguuc

SEQ ID NO: 19146 - RNA, 20 nt, Artificial Sequence
  HTT spacer sequence CTCN PAM
acccaccagucagggacagc

SEQ ID NO: 19147 - RNA, 20 nt, Artificial Sequence
  HTT spacer sequence CTCN PAM
cugucacucagcugagaagg

SEQ ID NO: 19148 - RNA, 20 nt, Artificial Sequence
  HTT spacer sequence CTCN PAM
gcugagaaggccagcccucc

SEQ ID NO: 19149 - RNA, 20 nt, Artificial Sequence
  HTT spacer sequence CTCN PAM
gcugagugacagggaggcug

SEQ ID NO: 19150 - RNA, 20 nt, Artificial Sequence
  HTT spacer sequence CTCN PAM
cuggcugugagcagccucca

SEQ ID NO: 19151 - RNA, 20 nt, Artificial Sequence
  HTT spacer sequence CTCN PAM
cagccagggagggcuggccu

SEQ ID NO: 19152 - RNA, 20 nt, Artificial Sequence
  HTT spacer sequence CTCN PAM
acuguguccagagacauggg

SEQ ID NO: 19153 - RNA, 20 nt, Artificial Sequence
  HTT spacer sequence CTCN PAM
ggacacaguggaggcugcuc

SEQ ID NO: 19154 - RNA, 20 nt, Artificial Sequence
  HTT spacer sequence CTCN PAM
cacuccuguuccuugcuagc

SEQ ID NO: 19155 - RNA, 20 nt, Artificial Sequence
  HTT spacer sequence CTCN PAM
uguuccuugcuagcccuggg

SEQ ID NO: 19156 - RNA, 20 nt, Artificial Sequence
  HTT spacer sequence CTCN PAM
uaggcagacgccaccccagg

SEQ ID NO: 19157 - RNA, 20 nt, Artificial Sequence
  HTT spacer sequence CTCN PAM
auggaugcaugcccuaagag

SEQ ID NO: 19158 - RNA, 20 nt, Artificial Sequence
  HTT spacer sequence CTCN PAM
uagggcaugcauccauggag

SEQ ID NO: 19159 - RNA, 20 nt, Artificial Sequence
  HTT spacer sequence CTCN PAM
gugacacucuuagggcaugc

SEQ ID NO: 19160 - RNA, 20 nt, Artificial Sequence
  HTT spacer sequence CTCN PAM
gacaaaacacagcucaguga

SEQ ID NO: 19161 - RNA, 20 nt, Artificial Sequence
  HTT spacer sequence CTCN PAM
cucggucaacagcaaagcuu

SEQ ID NO: 19162 - RNA, 20 nt, Artificial Sequence
  HTT spacer sequence CTCN PAM
cggucaacagcaaagcuugg

SEQ ID NO: 19163 - RNA, 20 nt, Artificial Sequence
  HTT spacer sequence CTCN PAM
gucaacagcaaagcuuggug

SEQ ID NO: 19164 - RNA, 20 nt, Artificial Sequence
  HTT spacer sequence CTCN PAM
gucacuaacagugccaagac

SEQ ID NO: 19165 - RNA, 20 nt, Artificial Sequence
  HTT spacer sequence CTCN PAM
ugacuaaaaggggucaccgu

SEQ ID NO: 19166 - RNA, 20 nt, Artificial Sequence
  HTT spacer sequence CTCN PAM
ccugacuaaaaggggucacc

SEQ ID NO: 19167 - RNA, 20 nt, Artificial Sequence
  HTT spacer sequence CTCN PAM
ucggagacugccccacggcc

SEQ ID NO: 19168 - RNA, 20 nt, Artificial Sequence
  HTT spacer sequence CTCN PAM
gaugagcacagaucugcacu

SEQ ID NO: 19169 - RNA, 20 nt, Artificial Sequence
  HTT spacer sequence CTCN PAM
gacagggccguggggcaguc

SEQ ID NO: 19170 - RNA, 20 nt, Artificial Sequence
  HTT spacer sequence CTCN PAM
uauccccaggccaggucccu

SEQ ID NO: 19171 - RNA, 20 nt, Artificial Sequence
  HTT spacer sequence CTCN PAM
uguuugcaggcccagaggag

SEQ ID NO: 19172 - RNA, 20 nt, Artificial Sequence
  HTT spacer sequence CTCN PAM
gggccugcaaacaggaggcu

SEQ ID NO: 19173 - RNA, 20 nt, Artificial Sequence
  HTT spacer sequence CTCN PAM
ucugggccugcaaacaggag

SEQ ID NO: 19174 - RNA, 20 nt, Artificial Sequence
  HTT spacer sequence CTCN PAM
uacaucagcagcagcccggc

SEQ ID NO: 19175 - RNA, 20 nt, Artificial Sequence
  HTT spacer sequence CTCN PAM
caaauccagcuccuacauca

SEQ ID NO: 19176 - RNA, 20 nt, Artificial Sequence
  HTT spacer sequence CTCN PAM
gcuugccgacuggcugugag

SEQ ID NO: 19177 - RNA, 20 nt, Artificial Sequence
  HTT spacer sequence CTCN PAM
cagccagucggcaagcagag

SEQ ID NO: 19178 - RNA, 20 nt, Artificial Sequence
  HTT spacer sequence CTCN PAM
ucucacagccagucggcaag

SEQ ID NO: 19179 - RNA, 20 nt, Artificial Sequence
  HTT spacer sequence CTCN PAM
gcuuccucagcccuagaggc

SEQ ID NO: 19180 - RNA, 20 nt, Artificial Sequence
  HTT spacer sequence CTCN PAM
gcccuagaggcgagccaggc

SEQ ID NO: 19181 - RNA, 20 nt, Artificial Sequence
  HTT spacer sequence CTCN PAM
agggcugaggaagcagagcc

SEQ ID NO: 19182 - RNA, 20 nt, Artificial Sequence
  HTT spacer sequence CTCN PAM
ccucuagggcugaggaagca

SEQ ID NO: 19183 - RNA, 20 nt, Artificial Sequence
  HTT spacer sequence CTCN PAM
acuuaccacauucaauaccc

SEQ ID NO: 19184 - RNA, 20 nt, Artificial Sequence
  HTT spacer sequence CTCN PAM
gugcaggugcugccuugaga

SEQ ID NO: 19185 - RNA, 20 nt, Artificial Sequence
  HTT spacer sequence CTCN PAM
aggcagcaccugcacagagu

SEQ ID NO: 19186 - RNA, 20 nt, Artificial Sequence
  HTT spacer sequence CTCN PAM
ccuauguggcagcuggggag

SEQ ID NO: 19187 - RNA, 20 nt, Artificial Sequence
  HTT spacer sequence CTCN PAM
uauguggcagcuggggagca

SEQ ID NO: 19188 - RNA, 20 nt, Artificial Sequence
  HTT spacer sequence CTCN PAM
ccagcugccacauaggagag

SEQ ID NO: 19189 - RNA, 20 nt, Artificial Sequence
  HTT spacer sequence CTCN PAM
gcugcuccccagcugccaca

SEQ ID NO: 19190 - RNA, 20 nt, Artificial Sequence
  HTT spacer sequence CTCN PAM
cguaugugggcagcauacaa

SEQ ID NO: 19191 - RNA, 20 nt, Artificial Sequence
  HTT spacer sequence CTCN PAM
cccucacguaugugggcagc

SEQ ID NO: 19192 - RNA, 20 nt, Artificial Sequence
  HTT spacer sequence CTCN PAM
cuuucagcucccccucacgu

SEQ ID NO: 19193 - RNA, 20 nt, Artificial Sequence
  HTT spacer sequence CTCN PAM
ucugagcagccucugccagg

SEQ ID NO: 19194 - RNA, 20 nt, Artificial Sequence
  HTT spacer sequence CTCN PAM
gagcagccucugccaggccu

SEQ ID NO: 19195 - RNA, 20 nt, Artificial Sequence
  HTT spacer sequence CTCN PAM
gaggaggggcucccuuucag

SEQ ID NO: 19196 - RNA, 20 nt, Artificial Sequence
  HTT spacer sequence CTCN PAM
gccaggccuguaugaggcuu

SEQ ID NO: 19197 - RNA, 20 nt, Artificial Sequence
  HTT spacer sequence CTCN PAM
uacaggccuggcagaggcug

SEQ ID NO: 19198 - RNA, 20 nt, Artificial Sequence
  HTT spacer sequence CTCN PAM
caacagaggccucccccagc

SEQ ID NO: 19199 - RNA, 20 nt, Artificial Sequence
  HTT spacer sequence CTCN PAM
guugggagcuggugggaaaa

SEQ ID NO: 19200 - RNA, 20 nt, Artificial Sequence
  HTT spacer sequence CTCN PAM
cccagccaggaccaccucgu

SEQ ID NO: 19201 - RNA, 20 nt, Artificial Sequence
  HTT spacer sequence CTCN PAM
uccucguggcggggcagcag

SEQ ID NO: 19202 - RNA, 20 nt, Artificial Sequence
  HTT spacer sequence CTCN PAM
uggcggggcagcaggagcgg

SEQ ID NO: 19203 - RNA, 20 nt, Artificial Sequence
  HTT spacer sequence CTCN PAM
ugcugccccgccacgaggac

SEQ ID NO: 19204 - RNA, 20 nt, Artificial Sequence
  HTT spacer sequence CTCN PAM
aacaucggaccccuuucuac

SEQ ID NO: 19205 - RNA, 20 nt, Artificial Sequence
  HTT spacer sequence CTCN PAM
ucaaacaucggaccccuuuc

SEQ ID NO: 19206 - RNA, 20 nt, Artificial Sequence
  HTT spacer sequence CTCN PAM
uguuucucauccuagcuuuu

SEQ ID NO: 19207 - RNA, 20 nt, Artificial Sequence
  HTT spacer sequence CTCN PAM
uccuagcuuuuuccuggaaa

SEQ ID NO: 19208 - RNA, 20 nt, Artificial Sequence
  HTT spacer sequence CTCN PAM
uucccaaaccuucuagcggg

SEQ ID NO: 19209 - RNA, 20 nt, Artificial Sequence
  HTT spacer sequence CTCN PAM
gaacuguuggcugcucccca

SEQ ID NO: 19210 - RNA, 20 nt, Artificial Sequence
  HTT spacer sequence CTCN PAM
ccacccgccucccgccuccc

SEQ ID NO: 19211 - RNA, 20 nt, Artificial Sequence
  HTT spacer sequence CTCN PAM
cgccucccccgcagguuaug

SEQ ID NO: 19212 - RNA, 20 nt, Artificial Sequence
  HTT spacer sequence CTCN PAM
cccgcagguuaugucagcag

SEQ ID NO: 19213 - RNA, 20 nt, Artificial Sequence
  HTT spacer sequence CTCN PAM
gagacagcaguaucacaggc

SEQ ID NO: 19214 - RNA, 20 nt, Artificial Sequence
  HTT spacer sequence CTCN PAM
gagcugcugacauaaccugc

SEQ ID NO: 19215 - RNA, 20 nt, Artificial Sequence
  HTT spacer sequence CTCN PAM
guuuuacauucacaguguua

SEQ ID NO: 19216 - RNA, 20 nt, Artificial Sequence
  HTT spacer sequence CTCN PAM
acauagaguuugucuuccuc

SEQ ID NO: 19217 - RNA, 20 nt, Artificial Sequence
  HTT spacer sequence CTCN PAM
auguugagcccagcgauaug

SEQ ID NO: 19218 - RNA, 20 nt, Artificial Sequence
  HTT spacer sequence CTCN PAM
uguuuacgacgugaucuaaa

SEQ ID NO: 19219 - RNA, 20 nt, Artificial Sequence
  HTT spacer sequence CTCN PAM
gaacaccccgcucuggcagu

SEQ ID NO: 19220 - RNA, 20 nt, Artificial Sequence
  HTT spacer sequence CTCN PAM
ggcaguaggugucccccacc

SEQ ID NO: 19221 - RNA, 20 nt, Artificial Sequence
  HTT spacer sequence CTCN PAM
ggagaugaauaugagcucau

SEQ ID NO: 19222 - RNA, 20 nt, Artificial Sequence
  HTT spacer sequence CTCN PAM
ggagcacacaggcaggucuu

SEQ ID NO: 19223 - RNA, 20 nt, Artificial Sequence
  HTT spacer sequence CTCN PAM
uauucaucuccggagcacac

SEQ ID NO: 19224 - RNA, 20 nt, Artificial Sequence
  HTT spacer sequence CTCN PAM
uuaguaaaaaugacuucacc

SEQ ID NO: 19225 - RNA, 20 nt, Artificial Sequence
  HTT spacer sequence CTCN PAM
caagacggagaugcauggcc

SEQ ID NO: 19226 - RNA, 20 nt, Artificial Sequence
  HTT spacer sequence CTCN PAM
agacggagaugcauggccuc

SEQ ID NO: 19227 - RNA, 20 nt, Artificial Sequence
  HTT spacer sequence CTCN PAM
gucuugagaggugugugugu

SEQ ID NO: 19228 - RNA, 20 nt, Artificial Sequence
  HTT spacer sequence CTCN PAM
aagagugcccgugucgguuc

SEQ ID NO: 19229 - RNA, 20 nt, Artificial Sequence
  HTT spacer sequence CTCN PAM
uagaggccaugcaucuccgu

SEQ ID NO: 19230 - RNA, 20 nt, Artificial Sequence
  HTT spacer sequence CTCN PAM
uucauugcccacuaggaucc

SEQ ID NO: 19231 - RNA, 20 nt, Artificial Sequence
  HTT spacer sequence CTCN PAM
auaucagcucucugcagaag

SEQ ID NO: 19232 - RNA, 20 nt, Artificial Sequence
  HTT spacer sequence CTCN PAM
cugcagaagggaggaagacu

SEQ ID NO: 19233 - RNA, 20 nt, Artificial Sequence
  HTT spacer sequence CTCN PAM
gcagaagggaggaagacuuu

SEQ ID NO: 19234 - RNA, 20 nt, Artificial Sequence
  HTT spacer sequence CTCN PAM
cuucugcagagagcugauau

SEQ ID NO: 19235 - RNA, 20 nt, Artificial Sequence
  HTT spacer sequence CTCN PAM
ccacagcccacccccaaaac

SEQ ID NO: 19236 - RNA, 20 nt, Artificial Sequence
  HTT spacer sequence CTCN PAM
cuuccgcugcgggcccagcu

SEQ ID NO: 19237 - RNA, 20 nt, Artificial Sequence
  HTT spacer sequence CTCN PAM
gcugggcccgcagcggaagg

SEQ ID NO: 19238 - RNA, 20 nt, Artificial Sequence
  HTT spacer sequence CTCN PAM
uuguuacuguccacccucau

SEQ ID NO: 19239 - RNA, 20 nt, Artificial Sequence
  HTT spacer sequence CTCN PAM
uuucugccagcgcauguguc

SEQ ID NO: 19240 - RNA, 20 nt, Artificial Sequence
  HTT spacer sequence CTCN PAM
agacacccagaauguagcau

SEQ ID NO: 19241 - RNA, 20 nt, Artificial Sequence
  HTT spacer sequence CTCN PAM
gaugcuacauucuggguguc

SEQ ID NO: 19242 - RNA, 20 nt, Artificial Sequence
  HTT spacer sequence CTCN PAM
cccccaucuucauggagggg

SEQ ID NO: 19243 - RNA, 20 nt, Artificial Sequence
  HTT spacer sequence CTCN PAM
augaagaugggggcgagggg

SEQ ID NO: 19244 - RNA, 20 nt, Artificial Sequence
  HTT spacer sequence CTCN PAM
gaaaugacccccuccaugaa

SEQ ID NO: 19245 - RNA, 20 nt, Artificial Sequence
  HTT spacer sequence CTCN PAM
gagccaaugaacagcuccuc

SEQ ID NO: 19246 - RNA, 20 nt, Artificial Sequence
  HTT spacer sequence CTCN PAM
gagggcucugaaaugacccc

SEQ ID NO: 19247 - RNA, 20 nt, Artificial Sequence
  HTT spacer sequence CTCN PAM
uccucuuggagcugagauga

SEQ ID NO: 19248 - RNA, 20 nt, Artificial Sequence
  HTT spacer sequence CTCN PAM
ucuuggagcugagaugagcc

SEQ ID NO: 19249 - RNA, 20 nt, Artificial Sequence
  HTT spacer sequence CTCN PAM
uggagcugagaugagcccca

SEQ ID NO: 19250 - RNA, 20 nt, Artificial Sequence
  HTT spacer sequence CTCN PAM
aagaggaggagcuguucauu

SEQ ID NO: 19251 - RNA, 20 nt, Artificial Sequence
  HTT spacer sequence CTCN PAM
gcuccaagaggaggagcugu

SEQ ID NO: 19252 - RNA, 20 nt, Artificial Sequence
  HTT spacer sequence CTCN PAM
ucucagcuccaagaggagga

SEQ ID NO: 19253 - RNA, 20 nt, Artificial Sequence
  HTT spacer sequence CTCN PAM
acguggggcucaucucagcu

SEQ ID NO: 19254 - RNA, 20 nt, Artificial Sequence
  HTT spacer sequence CTCN PAM
ggacggauaguagacagcaa

SEQ ID NO: 19255 - RNA, 20 nt, Artificial Sequence
  HTT spacer sequence CTCN PAM
guguguggccgccuggcagg

SEQ ID NO: 19256 - RNA, 20 nt, Artificial Sequence
  HTT spacer sequence CTCN PAM
cguugcgggguggagugagg

SEQ ID NO: 19257 - RNA, 20 nt, Artificial Sequence
  HTT spacer sequence CTCN PAM
accccgcaacgggaggaagu

SEQ ID NO: 19258 - RNA, 20 nt, Artificial Sequence
  HTT spacer sequence CTCN PAM
cuccaccccgcaacgggagg

SEQ ID NO: 19259 - RNA, 20 nt, Artificial Sequence
  HTT spacer sequence CTCN PAM
acccaccagacacacagaac

SEQ ID NO: 19260 - RNA, 20 nt, Artificial Sequence
  HTT spacer sequence CTCN PAM
ugcuaccugugagcauccuu

SEQ ID NO: 19261 - RNA, 20 nt, Artificial Sequence
  HTT spacer sequence CTCN PAM
cagguagcaagagaagccug

SEQ ID NO: 19262 - RNA, 20 nt, Artificial Sequence
  HTT spacer sequence CTCN PAM
ucgggcuuugucccuccccc

SEQ ID NO: 19263 - RNA, 20 nt, Artificial Sequence
  HTT spacer sequence CTCN PAM
cccgcuuccucccucugcgg

SEQ ID NO: 19264 - RNA, 20 nt, Artificial Sequence
  HTT spacer sequence CTCN PAM
cucugcggggaggacccggg

SEQ ID NO: 19265 - RNA, 20 nt, Artificial Sequence
  HTT spacer sequence CTCN PAM
gcggggaggacccgggacca

SEQ ID NO: 19266 - RNA, 20 nt, Artificial Sequence
  HTT spacer sequence CTCN PAM
ccgcagagggaggaagcggg

SEQ ID NO: 19267 - RNA, 20 nt, Artificial Sequence
  HTT spacer sequence CTCN PAM
aagucuacccuggccagcag

SEQ ID NO: 19268 - RNA, 20 nt, Artificial Sequence
  HTT spacer sequence CTCN PAM
agaggggucacguguaggag

SEQ ID NO: 19269 - RNA, 20 nt, Artificial Sequence
  HTT spacer sequence CTCN PAM
ggaggacagcuccaagucua

SEQ ID NO: 19270 - RNA, 20 nt, Artificial Sequence
  HTT spacer sequence CTCN PAM
uacacgugaccccucuggag

SEQ ID NO: 19271 - RNA, 20 nt, Artificial Sequence
  HTT spacer sequence CTCN PAM
cuccuacacgugaccccucu

SEQ ID NO: 19272 - RNA, 20 nt, Artificial Sequence
  HTT spacer sequence CTCN PAM
agaucuuccuucuucucacu

SEQ ID NO: 19273 - RNA, 20 nt, Artificial Sequence
  HTT spacer sequence CTCN PAM
caagaucuuccuucuucuca

SEQ ID NO: 19274 - RNA, 20 nt, Artificial Sequence
  HTT spacer sequence CTCN PAM
gcagcucucaagaucuuccu

SEQ ID NO: 19275 - RNA, 20 nt, Artificial Sequence
  HTT spacer sequence CTCN PAM
aaggucccucagcagcucuc

SEQ ID NO: 19276 - RNA, 20 nt, Artificial Sequence
  HTT spacer sequence CTCN PAM
ccaaggucccucagcagcuc

SEQ ID NO: 19277 - RNA, 20 nt, Artificial Sequence
  HTT spacer sequence CTCN PAM
ggauggcucagacgaggaca

SEQ ID NO: 19278 - RNA, 20 nt, Artificial Sequence
  HTT spacer sequence CTCN PAM
gacgaggacacucgcuugcc

SEQ ID NO: 19279 - RNA, 20 nt, Artificial Sequence
  HTT spacer sequence CTCN PAM
ucugagccauccugagcucu

SEQ ID NO: 19280 - RNA, 20 nt, Artificial Sequence
  HTT spacer sequence CTCN PAM
cuugccgggccugggccucc

SEQ ID NO: 19281 - RNA, 20 nt, Artificial Sequence
  HTT spacer sequence CTCN PAM
ugggaaggagggagcugcuc

SEQ ID NO: 19282 - RNA, 20 nt, Artificial Sequence
  HTT spacer sequence CTCN PAM
uucccaggaggcccaggccc

SEQ ID NO: 19283 - RNA, 20 nt, Artificial Sequence
  HTT spacer sequence CTCN PAM
cuccuucccaggaggcccag

SEQ ID NO: 19284 - RNA, 20 nt, Artificial Sequence
  HTT spacer sequence CTCN PAM
gaaugccgcaugacaacuga

SEQ ID NO: 19285 - RNA, 20 nt, Artificial Sequence
  HTT spacer sequence CTCN PAM
ucccccaugugccugucacg

SEQ ID NO: 19286 - RNA, 20 nt, Artificial Sequence
  HTT spacer sequence CTCN PAM
ggugcagucaaaggaacgcc

SEQ ID NO: 19287 - RNA, 20 nt, Artificial Sequence
  HTT spacer sequence CTCN PAM
guuguuucuaagagcagagu

SEQ ID NO: 19288 - RNA, 20 nt, Artificial Sequence
  HTT spacer sequence CTCN PAM
uagaaacaacugaggggaag

SEQ ID NO: 19289 - RNA, 20 nt, Artificial Sequence
  HTT spacer sequence CTCN PAM
gcucuuagaaacaacugagg

SEQ ID NO: 19290 - RNA, 20 nt, Artificial Sequence
  HTT spacer sequence CTCN PAM
cgcugcaaucugggugguaa

SEQ ID NO: 19291 - RNA, 20 nt, Artificial Sequence
  HTT spacer sequence CTCN PAM
aaggcuggcaguuaccaccc

SEQ ID NO: 19292 - RNA, 20 nt, Artificial Sequence
  HTT spacer sequence CTCN PAM
guaggcagguccacguuggc

SEQ ID NO: 19293 - RNA, 20 nt, Artificial Sequence
  HTT spacer sequence CTCN PAM
gacccaaguggggccuccuu

SEQ ID NO: 19294 - RNA, 20 nt, Artificial Sequence
  HTT spacer sequence CTCN PAM
uuguccaggucucacugcuu

SEQ ID NO: 19295 - RNA, 20 nt, Artificial Sequence
  HTT spacer sequence CTCN PAM
cugcuuugcaccguggucag

SEQ ID NO: 19296 - RNA, 20 nt, Artificial Sequence
  HTT spacer sequence CTCN PAM
gaccacggugcaaagcagug

SEQ ID NO: 19297 - RNA, 20 nt, Artificial Sequence
  HTT spacer sequence CTCN PAM
gcugacagucccucugacca

SEQ ID NO: 19298 - RNA, 20 nt, Artificial Sequence
  HTT spacer sequence CTCN PAM
agcucagcugacagucccuc

SEQ ID NO: 19299 - RNA, 20 nt, Artificial Sequence
  HTT spacer sequence CTCN PAM
ccuggagccagcagggcugu

SEQ ID NO: 19300 - RNA, 20 nt, Artificial Sequence
  HTT spacer sequence CTCN PAM
aggggagcucaagcucagcu

SEQ ID NO: 19301 - RNA, 20 nt, Artificial Sequence
  HTT spacer sequence CTCN PAM
cccaucacagcccugcuggc

SEQ ID NO: 19302 - RNA, 20 nt, Artificial Sequence
  HTT spacer sequence CTCN PAM
gggacucgcccaucacagcc

SEQ ID NO: 19303 - RNA, 20 nt, Artificial Sequence
  HTT spacer sequence CTCN PAM
gaagcauucaggucugggug

SEQ ID NO: 19304 - RNA, 20 nt, Artificial Sequence
  HTT spacer sequence CTCN PAM
cagaagcauucaggucuggg

SEQ ID NO: 19305 - RNA, 20 nt, Artificial Sequence
  HTT spacer sequence CTCN PAM
ucaguccuucccuuugcucu

SEQ ID NO: 19306 - RNA, 20 nt, Artificial Sequence
  HTT spacer sequence CTCN PAM
cgucaguccuucccuuugcu

SEQ ID NO: 19307 - RNA, 20 nt, Artificial Sequence
  HTT spacer sequence CTCN PAM
cacagcaacaacugaugguu

SEQ ID NO: 19308 - RNA, 20 nt, Artificial Sequence
  HTT spacer sequence CTCN PAM
ugaagcaaagcaagccucac

SEQ ID NO: 19309 - RNA, 20 nt, Artificial Sequence
  HTT spacer sequence CTCN PAM
gcaaggucuagguucucaug

SEQ ID NO: 19310 - RNA, 20 nt, Artificial Sequence
  HTT spacer sequence CTCN PAM
agcucagcaaggucuagguu

SEQ ID NO: 19311 - RNA, 20 nt, Artificial Sequence
  HTT spacer sequence CTCN PAM
uaagugcuucuccagcaggg

SEQ ID NO: 19312 - RNA, 20 nt, Artificial Sequence
  HTT spacer sequence CTCN PAM
agcaggggcagaaacugucc

SEQ ID NO: 19313 - RNA, 20 nt, Artificial Sequence
  HTT spacer sequence CTCN PAM
auaaugccagauguuagcug

SEQ ID NO: 19314 - RNA, 20 nt, Artificial Sequence
  HTT spacer sequence CTCN PAM
ucccuggcuacagaaaacac

SEQ ID NO: 19315 - RNA, 20 nt, Artificial Sequence
  HTT spacer sequence CTCN PAM
caucugcagggcaggaagac

SEQ ID NO: 19316 - RNA, 20 nt, Artificial Sequence
  HTT spacer sequence CTCN PAM
cacagcucccaucugcaggg

SEQ ID NO: 19317 - RNA, 20 nt, Artificial Sequence
  HTT spacer sequence CTCN PAM
agcagcucccacagcuccca

SEQ ID NO: 19318 - RNA, 20 nt, Artificial Sequence
  HTT spacer sequence CTCN PAM
agcagcuccagcagcuccca

SEQ ID NO: 19319 - RNA, 20 nt, Artificial Sequence
  HTT spacer sequence CTCN PAM
ggacuuggcccauggcacug

SEQ ID NO: 19320 - RNA, 20 nt, Artificial Sequence
  HTT spacer sequence CTCN PAM
gugcugggccugaugaccug

SEQ ID NO: 19321 - RNA, 20 nt, Artificial Sequence
  HTT spacer sequence CTCN PAM
agucucugugcugggccuga

SEQ ID NO: 19322 - RNA, 20 nt, Artificial Sequence
  HTT spacer sequence CTCN PAM
cagggcccaccacccuucca

SEQ ID NO: 19323 - RNA, 20 nt, Artificial Sequence
  HTT spacer sequence CTCN PAM
uuggccauugacaccugcgu

SEQ ID NO: 19324 - RNA, 20 nt, Artificial Sequence
  HTT spacer sequence CTCN PAM
cagguaacccccaaagcagc

SEQ ID NO: 19325 - RNA, 20 nt, Artificial Sequence
  HTT spacer sequence CTCN PAM
gguguggccggggcugcugu

SEQ ID NO: 19326 - RNA, 20 nt, Artificial Sequence
  HTT spacer sequence CTCN PAM
aagaagccucugcucagccc

SEQ ID NO: 19327 - RNA, 20 nt, Artificial Sequence
  HTT spacer sequence CTCN PAM
gcucagcccagcggggaugc

SEQ ID NO: 19328 - RNA, 20 nt, Artificial Sequence
  HTT spacer sequence CTCN PAM
gcccagcggggaugcuucua

SEQ ID NO: 19329 - RNA, 20 nt, Artificial Sequence
  HTT spacer sequence CTCN PAM
ggacgagccucucggaagcc

SEQ ID NO: 19330 - RNA, 20 nt, Artificial Sequence
  HTT spacer sequence CTCN PAM
uccggagcuuagaagcaucc

SEQ ID NO: 19331 - RNA, 20 nt, Artificial Sequence
  HTT spacer sequence CTCN PAM
cggaagccuuggugauuggu

SEQ ID NO: 19332 - RNA, 20 nt, Artificial Sequence
  HTT spacer sequence CTCN PAM
gaagccuuggugauuggugg

SEQ ID NO: 19333 - RNA, 20 nt, Artificial Sequence
  HTT spacer sequence CTCN PAM
ggugcaggguauuuagucaa

SEQ ID NO: 19334 - RNA, 20 nt, Artificial Sequence
  HTT spacer sequence CTCN PAM
gcaaacauugacuaaauacc

SEQ ID NO: 19335 - RNA, 20 nt, Artificial Sequence
  HTT spacer sequence CTCN PAM
gcugucugugccaggagaga

SEQ ID NO: 19336 - RNA, 20 nt, Artificial Sequence
  HTT spacer sequence CTCN PAM
uggcacagacagcagagcag

SEQ ID NO: 19337 - RNA, 20 nt, Artificial Sequence
  HTT spacer sequence CTCN PAM
ccuggcacagacagcagagc

SEQ ID NO: 19338 - RNA, 20 nt, Artificial Sequence
  HTT spacer sequence CTCN PAM
ugcugccugcuccucuuggg

SEQ ID NO: 19339 - RNA, 20 nt, Artificial Sequence
  HTT spacer sequence CTCN PAM
ucuugggcacgugcgggggc

SEQ ID NO: 19340 - RNA, 20 nt, Artificial Sequence
  HTT spacer sequence CTCN PAM
ugggcacgugcgggggcccc

SEQ ID NO: 19341 - RNA, 20 nt, Artificial Sequence
  HTT spacer sequence CTCN PAM
gagcagggauagggaucagu

SEQ ID NO: 19342 - RNA, 20 nt, Artificial Sequence
  HTT spacer sequence CTCN PAM
gagaaagggggcccccgcac

SEQ ID NO: 19343 - RNA, 20 nt, Artificial Sequence
  HTT spacer sequence CTCN PAM
ggcagacugaucccuauccc

SEQ ID NO: 19344 - RNA, 20 nt, Artificial Sequence
  HTT spacer sequence CTCN PAM
aguggcaugccccgccccaa

SEQ ID NO: 19345 - RNA, 20 nt, Artificial Sequence
  HTT spacer sequence CTCN PAM
cuaaaucugucuccucauag

SEQ ID NO: 19346 - RNA, 20 nt, Artificial Sequence
  HTT spacer sequence CTCN PAM
ucauaggugacaccgcucca

SEQ ID NO: 19347 - RNA, 20 nt, Artificial Sequence
  HTT spacer sequence CTCN PAM
uaggugacaccgcuccaggg

SEQ ID NO: 19348 - RNA, 20 nt, Artificial Sequence
  HTT spacer sequence CTCN PAM
agggccccccaguggccucu

SEQ ID NO: 19349 - RNA, 20 nt, Artificial Sequence
  HTT spacer sequence CTCN PAM
ccuuucagagcuaccuaaau

SEQ ID NO: 19350 - RNA, 20 nt, Artificial Sequence
  HTT spacer sequence CTCN PAM
uuucagagcuaccuaaauuc

SEQ ID NO: 19351 - RNA, 20 nt, Artificial Sequence
  HTT spacer sequence CTCN PAM
gaaaggagaggccacugggg

SEQ ID NO: 19352 - RNA, 20 nt, Artificial Sequence
  HTT spacer sequence CTCN PAM
gaagugaccagaauuuaggu

SEQ ID NO: 19353 - RNA, 20 nt, Artificial Sequence
  HTT spacer sequence CTCN PAM
auuucucugaagugaccaga

SEQ ID NO: 19354 - RNA, 20 nt, Artificial Sequence
  HTT spacer sequence CTCN PAM
cugguccagguguggacagc

SEQ ID NO: 19355 - RNA, 20 nt, Artificial Sequence
  HTT spacer sequence CTCN PAM
gugugccaggcuguccacac

SEQ ID NO: 19356 - RNA, 20 nt, Artificial Sequence
  HTT spacer sequence CTCN PAM
ucuuucugaaauuaccagcc

SEQ ID NO: 19357 - RNA, 20 nt, Artificial Sequence
  HTT spacer sequence CTCN PAM
ugagugggcuuugcaguccc

SEQ ID NO: 19358 - RNA, 20 nt, Artificial Sequence
  HTT spacer sequence CTCN PAM
cgagggguucaccgcugcuu

SEQ ID NO: 19359 - RNA, 20 nt, Artificial Sequence
  HTT spacer sequence CTCN PAM
ccaugccacggcagagcugc

SEQ ID NO: 19360 - RNA, 20 nt, Artificial Sequence
  HTT spacer sequence CTCN PAM
gccguggcauggggagggac

SEQ ID NO: 19361 - RNA, 20 nt, Artificial Sequence
  HTT spacer sequence CTCN PAM
acacagccuuccucuuccuc

SEQ ID NO: 19362 - RNA, 20 nt, Artificial Sequence
  HTT spacer sequence CTCN PAM
uccucaucggagagcacacc

SEQ ID NO: 19363 - RNA, 20 nt, Artificial Sequence
  HTT spacer sequence CTCN PAM
ucggagagcacacccugucc

SEQ ID NO: 19364 - RNA, 20 nt, Artificial Sequence
  HTT spacer sequence CTCN PAM
gaugaggaagaggaaggcug

SEQ ID NO: 19365 - RNA, 20 nt, Artificial Sequence
  HTT spacer sequence CTCN PAM
ccgaugaggaagaggaaggc

SEQ ID NO: 19366 - RNA, 20 nt, Artificial Sequence
  HTT spacer sequence CTCN PAM
gcaaggggacagggugugcu

SEQ ID NO: 19367 - RNA, 20 nt, Artificial Sequence
  HTT spacer sequence CTCN PAM
acgcaccacgcaggggaagc

SEQ ID NO: 19368 - RNA, 20 nt, Artificial Sequence
  HTT spacer sequence CTCN PAM
ucugacuuacagugcuccac

SEQ ID NO: 19369 - RNA, 20 nt, Artificial Sequence
  HTT spacer sequence CTCN PAM
cccuggcuacuucccucauc

SEQ ID NO: 19370 - RNA, 20 nt, Artificial Sequence
  HTT spacer sequence CTCN PAM
ccucacccuggcuacuuccc

SEQ ID NO: 19371 - RNA, 20 nt, Artificial Sequence
  HTT spacer sequence CTCN PAM
acccgguacucaccucaccc

SEQ ID NO: 19372 - RNA, 20 nt, Artificial Sequence
  HTT spacer sequence CTCN PAM
acaugaugugacacagccaa

SEQ ID NO: 19373 - RNA, 20 nt, Artificial Sequence
  HTT spacer sequence CTCN PAM
guuggcugugucacaucaug

SEQ ID NO: 19374 - RNA, 20 nt, Artificial Sequence
  HTT spacer sequence CTCN PAM
guccucgguuggcuguguca

SEQ ID NO: 19375 - RNA, 20 nt, Artificial Sequence
  HTT spacer sequence CTCN PAM
gggaagccugcaguggggcc

SEQ ID NO: 19376 - RNA, 20 nt, Artificial Sequence
  HTT spacer sequence CTCN PAM
ggccccacugcaggcuuccc

SEQ ID NO: 19377 - RNA, 20 nt, Artificial Sequence
  HTT spacer sequence CTCN PAM
gcgagcccacgagucugguc

SEQ ID NO: 19378 - RNA, 20 nt, Artificial Sequence
  HTT spacer sequence CTCN PAM
cggaggaugccuuuccucag

SEQ ID NO: 19379 - RNA, 20 nt, Artificial Sequence
  HTT spacer sequence CTCN PAM
ugggcucgcggaggaugccu

SEQ ID NO: 19380 - RNA, 20 nt, Artificial Sequence
  HTT spacer sequence CTCN PAM
uggaccagacucgugggcuc

SEQ ID NO: 19381 - RNA, 20 nt, Artificial Sequence
  HTT spacer sequence CTCN PAM
acccacagacacugucacgg

SEQ ID NO: 19382 - RNA, 20 nt, Artificial Sequence
  HTT spacer sequence CTCN PAM
uuugggaaaccauguggaca

SEQ ID NO: 19383 - RNA, 20 nt, Artificial Sequence
  HTT spacer sequence CTCN PAM
gcagccccagcagccuggcu

SEQ ID NO: 19384 - RNA, 20 nt, Artificial Sequence
  HTT spacer sequence CTCN PAM
agccacuugcccaaaaggca

SEQ ID NO: 19385 - RNA, 20 nt, Artificial Sequence
  HTT spacer sequence CTCN PAM
guggcucaagccacuugccc

SEQ ID NO: 19386 - RNA, 20 nt, Artificial Sequence
  HTT spacer sequence CTCN PAM
gggggggcccgccagugugg

SEQ ID NO: 19387 - RNA, 20 nt, Artificial Sequence
  HTT spacer sequence CTCN PAM
acccuacaccaggccuccag

SEQ ID NO: 19388 - RNA, 20 nt, Artificial Sequence
  HTT spacer sequence CTCN PAM
agguguccuggucgggggug

SEQ ID NO: 19389 - RNA, 20 nt, Artificial Sequence
  HTT spacer sequence CTCN PAM
cagguccacagggcccaccc

SEQ ID NO: 19390 - RNA, 20 nt, Artificial Sequence
  HTT spacer sequence CTCN PAM
agugaugcccugacccugac

SEQ ID NO: 19391 - RNA, 20 nt, Artificial Sequence
  HTT spacer sequence CTCN PAM
gccuccagugaugcccugac

SEQ ID NO: 19392 - RNA, 20 nt, Artificial Sequence
  HTT spacer sequence CTCN PAM
augcuuggucaggcagcuac

SEQ ID NO: 19393 - RNA, 20 nt, Artificial Sequence
  HTT spacer sequence CTCN PAM
ggaccagccuguccuagcag

SEQ ID NO: 19394 - RNA, 20 nt, Artificial Sequence
  HTT spacer sequence CTCN PAM
ggacagcccacccgcccaac

SEQ ID NO: 19395 - RNA, 20 nt, Artificial Sequence
  HTT spacer sequence CTCN PAM
uggccccaauugcucugggg

SEQ ID NO: 19396 - RNA, 20 nt, Artificial Sequence
  HTT spacer sequence CTCN PAM
ggggaaguccaggcuccgga

SEQ ID NO: 19397 - RNA, 20 nt, Artificial Sequence
  HTT spacer sequence CTCN PAM
ggagccugcccaggggcccc

SEQ ID NO: 19398 - RNA, 20 nt, Artificial Sequence
  HTT spacer sequence CTCN PAM
ggagccuggacuuccccaga

SEQ ID NO: 19399 - RNA, 20 nt, Artificial Sequence
  HTT spacer sequence CTCN PAM
acgugguucucugccuucac

SEQ ID NO: 19400 - RNA, 20 nt, Artificial Sequence
  HTT spacer sequence CTCN PAM
gccuucacccaagcccugaa

SEQ ID NO: 19401 - RNA, 20 nt, Artificial Sequence
  HTT spacer sequence CTCN PAM
ucagcugccaaauccccacc

SEQ ID NO: 19402 - RNA, 20 nt, Artificial Sequence
  HTT spacer sequence CTCN PAM
gcugccaaauccccacccau

SEQ ID NO: 19403 - RNA, 20 nt, Artificial Sequence
  HTT spacer sequence CTCN PAM
ccacugcugcuccuggaagg

SEQ ID NO: 19404 - RNA, 20 nt, Artificial Sequence
  HTT spacer sequence CTCN PAM
uggaaggugccccucagugg

SEQ ID NO: 19405 - RNA, 20 nt, Artificial Sequence
  HTT spacer sequence CTCN PAM
gugggacgcccaccuccucu

SEQ ID NO: 19406 - RNA, 20 nt, Artificial Sequence
  HTT spacer sequence CTCN PAM
ucucugggcuucuguguuug

SEQ ID NO: 19407 - RNA, 20 nt, Artificial Sequence
  HTT spacer sequence CTCN PAM
cugggcuucuguguuuggga

SEQ ID NO: 19408 - RNA, 20 nt, Artificial Sequence
  HTT spacer sequence CTCN PAM
gggcuucuguguuugggagc

SEQ ID NO: 19409 - RNA, 20 nt, Artificial Sequence
  HTT spacer sequence CTCN PAM
caaacacagaagcccagaga

SEQ ID NO: 19410 - RNA, 20 nt, Artificial Sequence
  HTT spacer sequence CTCN PAM
gcauuucuggguggauuuuc

SEQ ID NO: 19411 - RNA, 20 nt, Artificial Sequence
  HTT spacer sequence CTCN PAM
uccugcucagcauuucuggg

SEQ ID NO: 19412 - RNA, 20 nt, Artificial Sequence
  HTT spacer sequence CTCN PAM
cauccugcucagcauuucug

SEQ ID NO: 19413 - RNA, 20 nt, Artificial Sequence
  HTT spacer sequence CTCN PAM
uuauuuagaagggauggagg

SEQ ID NO: 19414 - RNA, 20 nt, Artificial Sequence
  HTT spacer sequence CTCN PAM
aucccuucuaaauaaugagg

SEQ ID NO: 19415 - RNA, 20 nt, Artificial Sequence
  HTT spacer sequence CTCN PAM
cuaggccuccaucccuucua

SEQ ID NO: 19416 - RNA, 20 nt, Artificial Sequence
  HTT spacer sequence CTCN PAM
ggcuagaagcaugcucccua

SEQ ID NO: 19417 - RNA, 20 nt, Artificial Sequence
  HTT spacer sequence CTCN PAM
ugccgaggccugaccugccc

SEQ ID NO: 19418 - RNA, 20 nt, Artificial Sequence
  HTT spacer sequence CTCN PAM
gcaggagcugucccuggugc

SEQ ID NO: 19419 - RNA, 20 nt, Artificial Sequence
  HTT spacer sequence CTCN PAM
cucaggugcugcugguugac

SEQ ID NO: 19420 - RNA, 20 nt, Artificial Sequence
  HTT spacer sequence CTCN PAM
ggugcugcugguugaccagc

SEQ ID NO: 19421 - RNA, 20 nt, Artificial Sequence
  HTT spacer sequence CTCN PAM
ggcccuaggagaccccguag

SEQ ID NO: 19422 - RNA, 20 nt, Artificial Sequence
  HTT spacer sequence CTCN PAM
uagggccagaggcuggucaa

SEQ ID NO: 19423 - RNA, 20 nt, Artificial Sequence
  HTT spacer sequence CTCN PAM
gucgcuacggggucuccuag

SEQ ID NO: 19424 - RNA, 20 nt, Artificial Sequence
  HTT spacer sequence CTCN PAM
uaccuuggcaaagcugcaug

SEQ ID NO: 19425 - RNA, 20 nt, Artificial Sequence
  HTT spacer sequence CTCN PAM
ccagcaggggacagaugugg

SEQ ID NO: 19426 - RNA, 20 nt, Artificial Sequence
  HTT spacer sequence CTCN PAM
caggcaggagcagcugggug

SEQ ID NO: 19427 - RNA, 20 nt, Artificial Sequence
  HTT spacer sequence CTCN PAM
ugccugggaggguccccaca

SEQ ID NO: 19428 - RNA, 20 nt, Artificial Sequence
  HTT spacer sequence CTCN PAM
cauuggaggucagugugagg

SEQ ID NO: 19429 - RNA, 20 nt, Artificial Sequence
  HTT spacer sequence CTCN PAM
aaugugaggacaagaaccag

SEQ ID NO: 19430 - RNA, 20 nt, Artificial Sequence
  HTT spacer sequence CTCN PAM
cacugaccuccaaugugagg

SEQ ID NO: 19431 - RNA, 20 nt, Artificial Sequence
  HTT spacer sequence CTCN PAM
gccucgggaaaggccaugga

SEQ ID NO: 19432 - RNA, 20 nt, Artificial Sequence
  HTT spacer sequence CTCN PAM
ggaaaggccauggagcuugc

SEQ ID NO: 19433 - RNA, 20 nt, Artificial Sequence
  HTT spacer sequence CTCN PAM
auggccuuucccgaggcaga

SEQ ID NO: 19434 - RNA, 20 nt, Artificial Sequence
  HTT spacer sequence CTCN PAM
caugugcacugagccuggga

SEQ ID NO: 19435 - RNA, 20 nt, Artificial Sequence
  HTT spacer sequence CTCN PAM
gugcacaugggaggcccugg

SEQ ID NO: 19436 - RNA, 20 nt, Artificial Sequence
  HTT spacer sequence CTCN PAM
ucccaggcucagugcacaug

SEQ ID NO: 19437 - RNA, 20 nt, Artificial Sequence
  HTT spacer sequence CTCN PAM
cuucccaggcucagugcaca

SEQ ID NO: 19438 - RNA, 20 nt, Artificial Sequence
  HTT spacer sequence CTCN PAM
aacccucucuucccaggcuc

SEQ ID NO: 19439 - RNA, 20 nt, Artificial Sequence
  HTT spacer sequence CTCN PAM
acuccaacccucucuuccca

SEQ ID NO: 19440 - RNA, 20 nt, Artificial Sequence
  HTT spacer sequence CTCN PAM
aggcagcauucccaggguaa

SEQ ID NO: 19441 - RNA, 20 nt, Artificial Sequence
  HTT spacer sequence CTCN PAM
cugcgcccacuggaacucgg

SEQ ID NO: 19442 - RNA, 20 nt, Artificial Sequence
  HTT spacer sequence CTCN PAM
ggcaggcagggguguaggug

SEQ ID NO: 19443 - RNA, 20 nt, Artificial Sequence
  HTT spacer sequence CTCN PAM
ucuagagccguccggugggg

SEQ ID NO: 19444 - RNA, 20 nt, Artificial Sequence
  HTT spacer sequence CTCN PAM
agagccguccggugggggcc

SEQ ID NO: 19445 - RNA, 20 nt, Artificial Sequence
  HTT spacer sequence CTCN PAM
agaggaggcaccuacacccc

SEQ ID NO: 19446 - RNA, 20 nt, Artificial Sequence
  HTT spacer sequence CTCN PAM
aagguggauuuguggaaggg

SEQ ID NO: 19447 - RNA, 20 nt, Artificial Sequence
  HTT spacer sequence CTCN PAM
acccccuuccacaaauccac

SEQ ID NO: 19448 - RNA, 20 nt, Artificial Sequence
  HTT spacer sequence CTCN PAM
acgugcccucuacccccuuc

SEQ ID NO: 19449 - RNA, 20 nt, Artificial Sequence
  HTT spacer sequence CTCN PAM
ccaggguucugggagggcug

SEQ ID NO: 19450 - RNA, 20 nt, Artificial Sequence
  HTT spacer sequence CTCN PAM
cagaacccuggggaggucau

SEQ ID NO: 19451 - RNA, 20 nt, Artificial Sequence
  HTT spacer sequence CTCN PAM
acaacagggguaacaggauc

SEQ ID NO: 19452 - RNA, 20 nt, Artificial Sequence
  HTT spacer sequence CTCN PAM
ccuccacaacagggguaaca

SEQ ID NO: 19453 - RNA, 20 nt, Artificial Sequence
  HTT spacer sequence CTCN PAM
ccacuaaccuguuuccucac

SEQ ID NO: 19454 - RNA, 20 nt, Artificial Sequence
  HTT spacer sequence CTCN PAM
gcauggaccuuagucauguc

SEQ ID NO: 19455 - RNA, 20 nt, Artificial Sequence
  HTT spacer sequence CTCN PAM
agcgacucagcauggaccuu

SEQ ID NO: 19456 - RNA, 20 nt, Artificial Sequence
  HTT spacer sequence CTCN PAM
cggcacaagggguaagcaga

SEQ ID NO: 19457 - RNA, 20 nt, Artificial Sequence
  HTT spacer sequence CTCN PAM
uggcaucucccggcacaagg

SEQ ID NO: 19458 - RNA, 20 nt, Artificial Sequence
  HTT spacer sequence CTCN PAM
cagcaucucuuggcaucucc

SEQ ID NO: 19459 - RNA, 20 nt, Artificial Sequence
  HTT spacer sequence CTCN PAM
gcccuuggagucauggcuac

SEQ ID NO: 19460 - RNA, 20 nt, Artificial Sequence
  HTT spacer sequence CTCN PAM
aagggcagagguggggcugg

SEQ ID NO: 19461 - RNA, 20 nt, Artificial Sequence
  HTT spacer sequence CTCN PAM
ccggggagggccgaacccug

SEQ ID NO: 19462 - RNA, 20 nt, Artificial Sequence
  HTT spacer sequence CTCN PAM
ccggugaggucagggaccgg

SEQ ID NO: 19463 - RNA, 20 nt, Artificial Sequence
  HTT spacer sequence CTCN PAM
ggaacaggguucggcccucc

SEQ ID NO: 19464 - RNA, 20 nt, Artificial Sequence
  HTT spacer sequence CTCN PAM
ucaggaacaggguucggccc

SEQ ID NO: 19465 - RNA, 20 nt, Artificial Sequence
  HTT spacer sequence CTCN PAM
aggaagcccuggcuccucag

SEQ ID NO: 19466 - RNA, 20 nt, Artificial Sequence
  HTT spacer sequence CTCN PAM
ucuaggaagcccuggcuccu

SEQ ID NO: 19467 - RNA, 20 nt, Artificial Sequence
  HTT spacer sequence CTCN PAM
uucaucugcaggcacuccac

SEQ ID NO: 19468 - RNA, 20 nt, Artificial Sequence
  HTT spacer sequence CTCN PAM
acagagcucucugugccagc

SEQ ID NO: 19469 - RNA, 20 nt, Artificial Sequence
  HTT spacer sequence CTCN PAM
guggagugccugcagaugaa

SEQ ID NO: 19470 - RNA, 20 nt, Artificial Sequence
  HTT spacer sequence CTCN PAM
cugugccagcccccagcacg

SEQ ID NO: 19471 - RNA, 20 nt, Artificial Sequence
  HTT spacer sequence CTCN PAM
gugccagcccccagcacgga

SEQ ID NO: 19472 - RNA, 20 nt, Artificial Sequence
  HTT spacer sequence CTCN PAM
gugcugggggcuggcacaga

SEQ ID NO: 19473 - RNA, 20 nt, Artificial Sequence
  HTT spacer sequence CTCN PAM
acuaaggucagcccuccgug

SEQ ID NO: 19474 - RNA, 20 nt, Artificial Sequence
  HTT spacer sequence CTCN PAM
acucgacuaaggucagcccu

SEQ ID NO: 19475 - RNA, 20 nt, Artificial Sequence
  HTT spacer sequence CTCN PAM
ugaggcccagauggaaggga

SEQ ID NO: 19476 - RNA, 20 nt, Artificial Sequence
  HTT spacer sequence CTCN PAM
ggagacaucaucccuacugc

SEQ ID NO: 19477 - RNA, 20 nt, Artificial Sequence
  HTT spacer sequence CTCN PAM
uggggcugaugguggggcca

SEQ ID NO: 19478 - RNA, 20 nt, Artificial Sequence
  HTT spacer sequence CTCN PAM
gcacccccuacacugggucc

SEQ ID NO: 19479 - RNA, 20 nt, Artificial Sequence
  HTT spacer sequence CTCN PAM
gaguuccucacacaucccug

SEQ ID NO: 19480 - RNA, 20 nt, Artificial Sequence
  HTT spacer sequence CTCN PAM
gaggggucucugcacccccu

SEQ ID NO: 19481 - RNA, 20 nt, Artificial Sequence
  HTT spacer sequence CTCN PAM
cacaucccuggggcccuccc

SEQ ID NO: 19482 - RNA, 20 nt, Artificial Sequence
  HTT spacer sequence CTCN PAM
ccauacacuuccuauccuga

SEQ ID NO: 19483 - RNA, 20 nt, Artificial Sequence
  HTT spacer sequence CTCN PAM
ugcccgcagucaggauagga

SEQ ID NO: 19484 - RNA, 20 nt, Artificial Sequence
  HTT spacer sequence CTCN PAM
cucuugcccgcagucaggau

SEQ ID NO: 19485 - RNA, 20 nt, Artificial Sequence
  HTT spacer sequence CTCN PAM
ggggaaggacagggcagggg

SEQ ID NO: 19486 - RNA, 20 nt, Artificial Sequence
  HTT spacer sequence CTCN PAM
caggggaaggacagggcagg

SEQ ID NO: 19487 - RNA, 20 nt, Artificial Sequence
  HTT spacer sequence CTCN PAM
gucccaccuccaaggugccu

SEQ ID NO: 19488 - RNA, 20 nt, Artificial Sequence
  HTT spacer sequence CTCN PAM
aaggugccucagaggacagc

SEQ ID NO: 19489 - RNA, 20 nt, Artificial Sequence
  HTT spacer sequence CTCN PAM
gaggacagcaggggcagcgg

SEQ ID NO: 19490 - RNA, 20 nt, Artificial Sequence
  HTT spacer sequence CTCN PAM
gaggcaccuuggagguggga

SEQ ID NO: 19491 - RNA, 20 nt, Artificial Sequence
  HTT spacer sequence CTCN PAM
gcccgcugccccugcugucc

SEQ ID NO: 19492 - RNA, 20 nt, Artificial Sequence
  HTT spacer sequence CTCN PAM
gccucugcccgcugccccug

SEQ ID NO: 19493 - RNA, 20 nt, Artificial Sequence
  HTT spacer sequence CTCN PAM
ucauuccaggcucagcugcc

SEQ ID NO: 19494 - RNA, 20 nt, Artificial Sequence
  HTT spacer sequence CTCN PAM
uuccaggcucagcugcccuu

SEQ ID NO: 19495 - RNA, 20 nt, Artificial Sequence
  HTT spacer sequence CTCN PAM
gcugcccuucuuggggcagc

SEQ ID NO: 19496 - RNA, 20 nt, Artificial Sequence
  HTT spacer sequence CTCN PAM
ggugugggcugccccaagaa

SEQ ID NO: 19497 - RNA, 20 nt, Artificial Sequence
  HTT spacer sequence CTCN PAM
caggugugggcugccccaag

SEQ ID NO: 19498 - RNA, 20 nt, Artificial Sequence
  HTT spacer sequence CTCN PAM
ugcaguuggucaggccugag

SEQ ID NO: 19499 - RNA, 20 nt, Artificial Sequence
  HTT spacer sequence CTCN PAM
ggccugaccaacugcaggag

SEQ ID NO: 19500 - RNA, 20 nt, Artificial Sequence
  HTT spacer sequence CTCN PAM
ucaggccugaccaacugcag

SEQ ID NO: 19501 - RNA, 20 nt, Artificial Sequence
  HTT spacer sequence CTCN PAM
gcugaccacaguggcauuua

SEQ ID NO: 19502 - RNA, 20 nt, Artificial Sequence
  HTT spacer sequence CTCN PAM
acagagcccugccugacaug

SEQ ID NO: 19503 - RNA, 20 nt, Artificial Sequence
  HTT spacer sequence CTCN PAM
guggagcccacggcaccugu

SEQ ID NO: 19504 - RNA, 20 nt, Artificial Sequence
  HTT spacer sequence CTCN PAM
gggcagaacccccaggccac

SEQ ID NO: 19505 - RNA, 20 nt, Artificial Sequence
  HTT spacer sequence CTCN PAM
gguuccgguuccgcugcauc

SEQ ID NO: 19506 - RNA, 20 nt, Artificial Sequence
  HTT spacer sequence CTCN PAM
cggcaggcugugguccuccg

SEQ ID NO: 19507 - RNA, 20 nt, Artificial Sequence
  HTT spacer sequence CTCN PAM
gcaggcugugguccuccggc

SEQ ID NO: 19508 - RNA, 20 nt, Artificial Sequence
  HTT spacer sequence CTCN PAM
ggccagccugggggcaucuc

SEQ ID NO: 19509 - RNA, 20 nt, Artificial Sequence
  HTT spacer sequence CTCN PAM
gucccucagccccacagggg

SEQ ID NO: 19510 - RNA, 20 nt, Artificial Sequence
  HTT spacer sequence CTCN PAM
gccccacaggggccugcccc

SEQ ID NO: 19511 - RNA, 20 nt, Artificial Sequence
  HTT spacer sequence CTCN PAM
agccccgucuccgcacgcug

SEQ ID NO: 19512 - RNA, 20 nt, Artificial Sequence
  HTT spacer sequence CTCN PAM
aggcccaggcugcggggcag

SEQ ID NO: 19513 - RNA, 20 nt, Artificial Sequence
  HTT spacer sequence CTCN PAM
gcacgcugugccgaaucugg

SEQ ID NO: 19514 - RNA, 20 nt, Artificial Sequence
  HTT spacer sequence CTCN PAM
cugcguacccagacugugcc

SEQ ID NO: 19515 - RNA, 20 nt, Artificial Sequence
  HTT spacer sequence CTCN PAM
ucccaggagugcccuguggc

SEQ ID NO: 19516 - RNA, 20 nt, Artificial Sequence
  HTT spacer sequence CTCN PAM
ugggaagagccacgggcaug

SEQ ID NO: 19517 - RNA, 20 nt, Artificial Sequence
  HTT spacer sequence CTCN PAM
cccuggcuugcugggcugau

SEQ ID NO: 19518 - RNA, 20 nt, Artificial Sequence
  HTT spacer sequence CTCN PAM
ugugucucaaacagagcuca

SEQ ID NO: 19519 - RNA, 20 nt, Artificial Sequence
  HTT spacer sequence CTCN PAM
aacagagcucaccuuugcca

SEQ ID NO: 19520 - RNA, 20 nt, Artificial Sequence
  HTT spacer sequence CTCN PAM
guuugagacacaggagggaa

SEQ ID NO: 19521 - RNA, 20 nt, Artificial Sequence
  HTT spacer sequence CTCN PAM
ccuuugccaucacugcuguc

SEQ ID NO: 19522 - RNA, 20 nt, Artificial Sequence
  HTT spacer sequence CTCN PAM
ccggccggugccagaggccc

SEQ ID NO: 19523 - RNA, 20 nt, Artificial Sequence
  HTT spacer sequence CTCN PAM
ggcaccggccggugaggaca

SEQ ID NO: 19524 - RNA, 20 nt, Artificial Sequence
  HTT spacer sequence CTCN PAM
gggcagggccuggcucugac

SEQ ID NO: 19525 - RNA, 20 nt, Artificial Sequence
  HTT spacer sequence CTCN PAM
gaccaacccgggcuuccagu

SEQ ID NO: 19526 - RNA, 20 nt, Artificial Sequence
  HTT spacer sequence CTCN PAM
agcccccaggcgcccugggc

SEQ ID NO: 19527 - RNA, 20 nt, Artificial Sequence
  HTT spacer sequence CTCN PAM
ugcuccagcccccaggcgcc

SEQ ID NO: 19528 - RNA, 20 nt, Artificial Sequence
  HTT spacer sequence CTCN PAM
uuuugcuucucuugcuccag

SEQ ID NO: 19529 - RNA, 20 nt, Artificial Sequence
  HTT spacer sequence CTCN PAM
caagaaccccaaacccccac

SEQ ID NO: 19530 - RNA, 20 nt, Artificial Sequence
  HTT spacer sequence CTCN PAM
uggguguccugguccugggg

SEQ ID NO: 19531 - RNA, 20 nt, Artificial Sequence
  HTT spacer sequence CTCN PAM
gaaggccccugccuucugaa

SEQ ID NO: 19532 - RNA, 20 nt, Artificial Sequence
  HTT spacer sequence CTCN PAM
cucagaaggccccugccuuc

SEQ ID NO: 19533 - RNA, 20 nt, Artificial Sequence
  HTT spacer sequence CTCN PAM
gccuccucgucgcucguccu

SEQ ID NO: 19534 - RNA, 20 nt, Artificial Sequence
  HTT spacer sequence CTCN PAM
ucgucgcucguccucucugu

SEQ ID NO: 19535 - RNA, 20 nt, Artificial Sequence
  HTT spacer sequence CTCN PAM
ucgcucguccucucuguuuc

SEQ ID NO: 19536 - RNA, 20 nt, Artificial Sequence
  HTT spacer sequence CTCN PAM
uccucucuguuucucccacc

SEQ ID NO: 19537 - RNA, 20 nt, Artificial Sequence
  HTT spacer sequence CTCN PAM
cuguuucucccaccuuuugc

SEQ ID NO: 19538 - RNA, 20 nt, Artificial Sequence
  HTT spacer sequence CTCN PAM
guuucucccaccuuuugccc

SEQ ID NO: 19539 - RNA, 20 nt, Artificial Sequence
  HTT spacer sequence CTCN PAM
caccuuuugcccccuuucuc

SEQ ID NO: 19540 - RNA, 20 nt, Artificial Sequence
  HTT spacer sequence CTCN PAM
uugccuguucccacccgagg

SEQ ID NO: 19541 - RNA, 20 nt, Artificial Sequence
  HTT spacer sequence CTCN PAM
ggugggaacaggcaaggaga

SEQ ID NO: 19542 - RNA, 20 nt, Artificial Sequence
  HTT spacer sequence CTCN PAM
uggccugcgugagccggggc

SEQ ID NO: 19543 - RNA, 20 nt, Artificial Sequence
  HTT spacer sequence CTCN PAM
cgcaggccaagagggggccu

SEQ ID NO: 19544 - RNA, 20 nt, Artificial Sequence
  HTT spacer sequence CTCN PAM
ccgccgcccaggcggaucgg

SEQ ID NO: 19545 - RNA, 20 nt, Artificial Sequence
  HTT spacer sequence CTCN PAM
caccgccgcccaggcggauc

SEQ ID NO: 19546 - RNA, 20 nt, Artificial Sequence
  HTT spacer sequence CTCN PAM
cggcccugccucucaccgcc

SEQ ID NO: 19547 - RNA, 20 nt, Artificial Sequence
  HTT spacer sequence CTCN PAM
ccgcaauauugauggcccgu

SEQ ID NO: 19548 - RNA, 20 nt, Artificial Sequence
  HTT spacer sequence CTCN PAM
guugcuauggaaacgugaca

SEQ ID NO: 19549 - RNA, 20 nt, Artificial Sequence
  HTT spacer sequence CTCN PAM
aaauggggccuacaucugac

SEQ ID NO: 19550 - RNA, 20 nt, Artificial Sequence
  HTT spacer sequence CTCN PAM
acgcucaaaauggggccuac

SEQ ID NO: 19551 - RNA, 20 nt, Artificial Sequence
  HTT spacer sequence CTCN PAM
aaggcagcuccacgcucaaa

SEQ ID NO: 19552 - RNA, 20 nt, Artificial Sequence
  HTT spacer sequence CTCN PAM
cucgaaggcagcuccacgcu

SEQ ID NO: 19553 - RNA, 20 nt, Artificial Sequence
  HTT spacer sequence CTCN PAM
cgcucgcucgaaggcagcuc

SEQ ID NO: 19554 - RNA, 20 nt, Artificial Sequence
  HTT spacer sequence CTCN PAM
cgcccauggugcguggggcc

SEQ ID NO: 19555 - RNA, 20 nt, Artificial Sequence
  HTT spacer sequence CTCN PAM
cugagcgcgcucucucaccc

SEQ ID NO: 19556 - RNA, 20 nt, Artificial Sequence
  HTT spacer sequence CTCN PAM
gcgagggccccggcccggcc

SEQ ID NO: 19557 - RNA, 20 nt, Artificial Sequence
  HTT spacer sequence CTCN PAM
cucaccccacaggcgccucc

SEQ ID NO: 19558 - RNA, 20 nt, Artificial Sequence
  HTT spacer sequence CTCN PAM
caccccacaggcgccuccgg

SEQ ID NO: 19559 - RNA, 20 nt, Artificial Sequence
  HTT spacer sequence CTCN PAM
ccccacaggcgccuccggca

SEQ ID NO: 19560 - RNA, 20 nt, Artificial Sequence
  HTT spacer sequence CTCN PAM
ggcauggcggcggccgaggg

SEQ ID NO: 19561 - RNA, 20 nt, Artificial Sequence
  HTT spacer sequence CTCN PAM
gccgccgccaugccggaggc

SEQ ID NO: 19562 - RNA, 20 nt, Artificial Sequence
  HTT spacer sequence CTCN PAM
ugucuccccaggcggagaag

SEQ ID NO: 19563 - RNA, 20 nt, Artificial Sequence
  HTT spacer sequence CTCN PAM
ccaggcggagaagcaccggc

SEQ ID NO: 19564 - RNA, 20 nt, Artificial Sequence
  HTT spacer sequence CTCN PAM
gccuggggagacacgaggua

SEQ ID NO: 19565 - RNA, 20 nt, Artificial Sequence
  HTT spacer sequence CTCN PAM
gcguccguccaguugcgggc

SEQ ID NO: 19566 - RNA, 20 nt, Artificial Sequence
  HTT spacer sequence CTCN PAM
ugcuggucugggaggaguuc

SEQ ID NO: 19567 - RNA, 20 nt, Artificial Sequence
  HTT spacer sequence CTCN PAM
cagaccagcaugaggccgcg

SEQ ID NO: 19568 - RNA, 20 nt, Artificial Sequence
  HTT spacer sequence CTCN PAM
ucccagaccagcaugaggcc

SEQ ID NO: 19569 - RNA, 20 nt, Artificial Sequence
  HTT spacer sequence CTCN PAM
ucgaagaacuccucccagac

SEQ ID NO: 19570 - RNA, 20 nt, Artificial Sequence
  HTT spacer sequence CTCN PAM
agcagaccaagcgcaacgcc

SEQ ID NO: 19571 - RNA, 20 nt, Artificial Sequence
  HTT spacer sequence CTCN PAM
uacaccuuggcguugcgcuu

SEQ ID NO: 19572 - RNA, 20 nt, Artificial Sequence
  HTT spacer sequence CTCN PAM
ucgagaugaccggcgagcgc

SEQ ID NO: 19573 - RNA, 20 nt, Artificial Sequence
  HTT spacer sequence CTCN PAM
aagagcuugcuggccaucuu

SEQ ID NO: 19574 - RNA, 20 nt, Artificial Sequence
  HTT spacer sequence CTCN PAM
ccggucaucucgaagagcuu

SEQ ID NO: 19575 - RNA, 20 nt, Artificial Sequence
  HTT spacer sequence CTCN PAM
cccagccugcgcucgccggu

SEQ ID NO: 19576 - RNA, 20 nt, Artificial Sequence
  HTT spacer sequence CTCN PAM
ucgcccagccugcgcucgcc

SEQ ID NO: 19577 - RNA, 20 nt, Artificial Sequence
  HTT spacer sequence CTCN PAM
cccaccuguacuggaagguc

SEQ ID NO: 19578 - RNA, 20 nt, Artificial Sequence
  HTT spacer sequence CTCN PAM
ugacuuucuuggagcucuga

SEQ ID NO: 19579 - RNA, 20 nt, Artificial Sequence
  HTT spacer sequence CTCN PAM
aagaaagucaggagcggccc

SEQ ID NO: 19580 - RNA, 20 nt, Artificial Sequence
  HTT spacer sequence CTCN PAM
gagucgggacgauguguggg

SEQ ID NO: 19581 - RNA, 20 nt, Artificial Sequence
  HTT spacer sequence CTCN PAM
gagcuccaagaaagucagga

SEQ ID NO: 19582 - RNA, 20 nt, Artificial Sequence
  HTT spacer sequence CTCN PAM
ucuggccggguaugggcaga

SEQ ID NO: 19583 - RNA, 20 nt, Artificial Sequence
  HTT spacer sequence CTCN PAM
ggccggguaugggcagaacc

SEQ ID NO: 19584 - RNA, 20 nt, Artificial Sequence
  HTT spacer sequence CTCN PAM
ccccgugggguucugcccau

SEQ ID NO: 19585 - RNA, 20 nt, Artificial Sequence
  HTT spacer sequence CTCN PAM
guuuccccacuuccccaaug

SEQ ID NO: 19586 - RNA, 20 nt, Artificial Sequence
  HTT spacer sequence CTCN PAM
uagacugguuuccugcccuu

SEQ ID NO: 19587 - RNA, 20 nt, Artificial Sequence
  HTT spacer sequence CTCN PAM
gcucuuagacugguuuccug

SEQ ID NO: 19588 - RNA, 20 nt, Artificial Sequence
  HTT spacer sequence CTCN PAM
gcccagcaccagccccaccc

SEQ ID NO: 19589 - RNA, 20 nt, Artificial Sequence
  HTT spacer sequence CTCN PAM
caggacguaugggcggucug

SEQ ID NO: 19590 - RNA, 20 nt, Artificial Sequence
  HTT spacer sequence CTCN PAM
gaggcagcaacacucauggu

SEQ ID NO: 19591 - RNA, 20 nt, Artificial Sequence
  HTT spacer sequence CTCN PAM
gagggacagugcccagaccg

SEQ ID NO: 19592 - RNA, 20 nt, Artificial Sequence
  HTT spacer sequence CTCN PAM
ugguggugcccacugaccuc

SEQ ID NO: 19593 - RNA, 20 nt, Artificial Sequence
  HTT spacer sequence CTCN PAM
cacccugcucccccauaggg

SEQ ID NO: 19594 - RNA, 20 nt, Artificial Sequence
  HTT spacer sequence CTCN PAM
cccauagggaggcggcggcu

SEQ ID NO: 19595 - RNA, 20 nt, Artificial Sequence
  HTT spacer sequence CTCN PAM
cuaugggggagcagggugug

SEQ ID NO: 19596 - RNA, 20 nt, Artificial Sequence
  HTT spacer sequence CTCN PAM
ccaccaccaagcucccaagc

SEQ ID NO: 19597 - RNA, 20 nt, Artificial Sequence
  HTT spacer sequence CTCN PAM
caagcucagcagggguuuca

SEQ ID NO: 19598 - RNA, 20 nt, Artificial Sequence
  HTT spacer sequence CTCN PAM
gcagggguuucaggggccua

SEQ ID NO: 19599 - RNA, 20 nt, Artificial Sequence
  HTT spacer sequence CTCN PAM
auuuccccaaugacgcagua

SEQ ID NO: 19600 - RNA, 20 nt, Artificial Sequence
  HTT spacer sequence CTCN PAM
cuugcagucucaauuucccc

SEQ ID NO: 19601 - RNA, 20 nt, Artificial Sequence
  HTT spacer sequence CTCN PAM
uucucacuugcagucucaau

SEQ ID NO: 19602 - RNA, 20 nt, Artificial Sequence
  HTT spacer sequence CTCN PAM
gugcucugcgacuuggagca

SEQ ID NO: 19603 - RNA, 20 nt, Artificial Sequence
  HTT spacer sequence CTCN PAM
gcgacuuggagcauccacug

SEQ ID NO: 19604 - RNA, 20 nt, Artificial Sequence
  HTT spacer sequence CTCN PAM
aagucgcagagcacugagcc

SEQ ID NO: 19605 - RNA, 20 nt, Artificial Sequence
  HTT spacer sequence CTCN PAM
guggaugcuccaagucgcag

SEQ ID NO: 19606 - RNA, 20 nt, Artificial Sequence
  HTT spacer sequence CTCN PAM
gccaugagccggugagcccc

SEQ ID NO: 19607 - RNA, 20 nt, Artificial Sequence
  HTT spacer sequence CTCN PAM
uggcagaggcucaguggaug

SEQ ID NO: 19608 - RNA, 20 nt, Artificial Sequence
  HTT spacer sequence CTCN PAM
ccggcucauggcagaggcuc

SEQ ID NO: 19609 - RNA, 20 nt, Artificial Sequence
  HTT spacer sequence CTCN PAM
ccuggugauuucuggaaaua

SEQ ID NO: 19610 - RNA, 20 nt, Artificial Sequence
  HTT spacer sequence CTCN PAM
uucuucuucgcaccguaagc

SEQ ID NO: 19611 - RNA, 20 nt, Artificial Sequence
  HTT spacer sequence CTCN PAM
accucuuucuucuucgcacc

SEQ ID NO: 19612 - RNA, 20 nt, Artificial Sequence
  HTT spacer sequence CTCN PAM
cagcgugggggcucccggcc

SEQ ID NO: 19613 - RNA, 20 nt, Artificial Sequence
  HTT spacer sequence CTCN PAM
cggccuggccccaccucugc

SEQ ID NO: 19614 - RNA, 20 nt, Artificial Sequence
  HTT spacer sequence CTCN PAM
gcuccugcuacauggcaggu

SEQ ID NO: 19615 - RNA, 20 nt, Artificial Sequence
  HTT spacer sequence CTCN PAM
ugcuacauggcaggugggcc

SEQ ID NO: 19616 - RNA, 20 nt, Artificial Sequence
  HTT spacer sequence CTCN PAM
ggccuucccugcagguugcc

SEQ ID NO: 19617 - RNA, 20 nt, Artificial Sequence
  HTT spacer sequence CTCN PAM
cuggcugggugguccccucc

SEQ ID NO: 19618 - RNA, 20 nt, Artificial Sequence
  HTT spacer sequence CTCN PAM
uagacgccaacaucucccug

SEQ ID NO: 19619 - RNA, 20 nt, Artificial Sequence
  HTT spacer sequence CTCN PAM
ggcacaggcaaggucacagg

SEQ ID NO: 19620 - RNA, 20 nt, Artificial Sequence
  HTT spacer sequence CTCN PAM
ccgcaccugugaccuugccu

SEQ ID NO: 19621 - RNA, 20 nt, Artificial Sequence
  HTT spacer sequence CTCN PAM
ccacacccaaaaccaucacc

SEQ ID NO: 19622 - RNA, 20 nt, Artificial Sequence
  HTT spacer sequence CTCN PAM
gugcaagacccuccccacac

SEQ ID NO: 19623 - RNA, 20 nt, Artificial Sequence
  HTT spacer sequence CTCN PAM
cuccgugcaagacccucccc

SEQ ID NO: 19624 - RNA, 20 nt, Artificial Sequence
  HTT spacer sequence CTCN PAM
ugcugccacccucgcuccgu

SEQ ID NO: 19625 - RNA, 20 nt, Artificial Sequence
  HTT spacer sequence CTCN PAM
cccugcagcuuccagcucuu

SEQ ID NO: 19626 - RNA, 20 nt, Artificial Sequence
  HTT spacer sequence CTCN PAM
gcugccauucucccccugca

SEQ ID NO: 19627 - RNA, 20 nt, Artificial Sequence
  HTT spacer sequence CTCN PAM
cugcugccauucucccccug

SEQ ID NO: 19628 - RNA, 20 nt, Artificial Sequence
  HTT spacer sequence CTCN PAM
ggcagccccaggcccagccc

SEQ ID NO: 19629 - RNA, 20 nt, Artificial Sequence
  HTT spacer sequence CTCN PAM
ccggcagccccaggcccagc

SEQ ID NO: 19630 - RNA, 20 nt, Artificial Sequence
  HTT spacer sequence CTCN PAM
cauccuggaagcugacaggc

SEQ ID NO: 19631 - RNA, 20 nt, Artificial Sequence
  HTT spacer sequence CTCN PAM
cucagcugcuccaccuccgg

SEQ ID NO: 19632 - RNA, 20 nt, Artificial Sequence
  HTT spacer sequence CTCN PAM
gcugcuccaccuccggguca

SEQ ID NO: 19633 - RNA, 20 nt, Artificial Sequence
  HTT spacer sequence CTCN PAM
accuccgggucaggcaggug

SEQ ID NO: 19634 - RNA, 20 nt, Artificial Sequence
  HTT spacer sequence CTCN PAM
gggucaggcaggugagccug

SEQ ID NO: 19635 - RNA, 20 nt, Artificial Sequence
  HTT spacer sequence CTCN PAM
ccugccugacccggaggugg

SEQ ID NO: 19636 - RNA, 20 nt, Artificial Sequence
  HTT spacer sequence CTCN PAM
gccccaggcucaccugccug

SEQ ID NO: 19637 - RNA, 20 nt, Artificial Sequence
  HTT spacer sequence CTCN PAM
cugccccaggcucaccugcc

SEQ ID NO: 19638 - RNA, 20 nt, Artificial Sequence
  HTT spacer sequence CTCN PAM
gccucucugccccaggcuca

SEQ ID NO: 19639 - RNA, 20 nt, Artificial Sequence
  HTT spacer sequence CTCN PAM
cagccucucugccccaggcu

SEQ ID NO: 19640 - RNA, 20 nt, Artificial Sequence
  HTT spacer sequence CTCN PAM
ggugcucucagccucucugc

SEQ ID NO: 19641 - RNA, 20 nt, Artificial Sequence
  HTT spacer sequence CTCN PAM
cacaaguggcucaggugcuc

SEQ ID NO: 19642 - RNA, 20 nt, Artificial Sequence
  HTT spacer sequence CTCN PAM
cccacaaguggcucaggugc

SEQ ID NO: 19643 - RNA, 20 nt, Artificial Sequence
  HTT spacer sequence CTCN PAM
ggcgaggagccggccuccag

SEQ ID NO: 19644 - RNA, 20 nt, Artificial Sequence
  HTT spacer sequence CTCN PAM
ccugaggggggcaguggggg

SEQ ID NO: 19645 - RNA, 20 nt, Artificial Sequence
  HTT spacer sequence CTCN PAM
ucgccugaggggggcagugg

SEQ ID NO: 19646 - RNA, 20 nt, Artificial Sequence
  HTT spacer sequence CTCN PAM
agcacagcagaagggaaccc

SEQ ID NO: 19647 - RNA, 20 nt, Artificial Sequence
  HTT spacer sequence CTCN PAM
cacuagggcuggggacuggg

SEQ ID NO: 19648 - RNA, 20 nt, Artificial Sequence
  HTT spacer sequence CTCN PAM
uccccacucccacuagggcu

SEQ ID NO: 19649 - RNA, 20 nt, Artificial Sequence
  HTT spacer sequence CTCN PAM
caggcuggcggucuguccgg

SEQ ID NO: 19650 - RNA, 20 nt, Artificial Sequence
  HTT spacer sequence CTCN PAM
gcuuucaguugcguugauuu

SEQ ID NO: 19651 - RNA, 20 nt, Artificial Sequence
  HTT spacer sequence CTCN PAM
gaaaaaaucaaaucaacgca

SEQ ID NO: 19652 - RNA, 20 nt, Artificial Sequence
  HTT spacer sequence CTCN PAM
uucaaggcucagaaaaaauc

SEQ ID NO: 19653 - RNA, 20 nt, Artificial Sequence
  HTT spacer sequence CTCN PAM
gcacccuaggucccggcuuu

SEQ ID NO: 19654 - RNA, 20 nt, Artificial Sequence
  HTT spacer sequence CTCN PAM
aacccaacauccgucaugcu

SEQ ID NO: 19655 - RNA, 20 nt, Artificial Sequence
  HTT spacer sequence CTCN PAM
cgucgcaagccagccgcuca

SEQ ID NO: 19656 - RNA, 20 nt, Artificial Sequence
  HTT spacer sequence CTCN PAM
gcccucacgucgcaagccag

SEQ ID NO: 19657 - RNA, 20 nt, Artificial Sequence
  HTT spacer sequence CTCN PAM
caccucagcccucacgucgc

SEQ ID NO: 19658 - RNA, 20 nt, Artificial Sequence
  HTT spacer sequence CTCN PAM
gaagauacccaggcucacac

SEQ ID NO: 19659 - RNA, 20 nt, Artificial Sequence
  HTT spacer sequence CTCN PAM
uaguccugcucaggcaccug

SEQ ID NO: 19660 - RNA, 20 nt, Artificial Sequence
  HTT spacer sequence CTCN PAM
ggcaccuggugaggaaggga

SEQ ID NO: 19661 - RNA, 20 nt, Artificial Sequence
  HTT spacer sequence CTCN PAM
ccaggugccugagcaggacu

SEQ ID NO: 19662 - RNA, 20 nt, Artificial Sequence
  HTT spacer sequence CTCN PAM
gcgucccuuccucaccaggu

SEQ ID NO: 19663 - RNA, 20 nt, Artificial Sequence
  HTT spacer sequence CTCN PAM
cacugcccucugcgucccuu

SEQ ID NO: 19664 - RNA, 20 nt, Artificial Sequence
  HTT spacer sequence CTCN PAM
ccucugacucaggaauucac

SEQ ID NO: 19665 - RNA, 20 nt, Artificial Sequence
  HTT spacer sequence CTCN PAM
gacucaggaauucacgggca

SEQ ID NO: 19666 - RNA, 20 nt, Artificial Sequence
  HTT spacer sequence CTCN PAM
ggaauucacgggcaccaccu

SEQ ID NO: 19667 - RNA, 20 nt, Artificial Sequence
  HTT spacer sequence CTCN PAM
cuggcuggcucugguuggug

SEQ ID NO: 19668 - RNA, 20 nt, Artificial Sequence
  HTT spacer sequence CTCN PAM
gguuggugucuggccagguu

SEQ ID NO: 19669 - RNA, 20 nt, Artificial Sequence
  HTT spacer sequence CTCN PAM
ucagagucccaggggagggu

SEQ ID NO: 19670 - RNA, 20 nt, Artificial Sequence
  HTT spacer sequence CTCN PAM
gaagaggcuuucagcauaaa

SEQ ID NO: 19671 - RNA, 20 nt, Artificial Sequence
  HTT spacer sequence CTCN PAM
ccugggacucugaagaggcu

SEQ ID NO: 19672 - RNA, 20 nt, Artificial Sequence
  HTT spacer sequence CTCN PAM
auuccuggaggcugagagau

SEQ ID NO: 19673 - RNA, 20 nt, Artificial Sequence
  HTT spacer sequence CTCN PAM
aggaauggagacagaaaccc

SEQ ID NO: 19674 - RNA, 20 nt, Artificial Sequence
  HTT spacer sequence CTCN PAM
gccuccaggaauggagacag

SEQ ID NO: 19675 - RNA, 20 nt, Artificial Sequence
  HTT spacer sequence CTCN PAM
cagccuccaggaauggagac

SEQ ID NO: 19676 - RNA, 20 nt, Artificial Sequence
  HTT spacer sequence CTCN PAM
ucucucagccuccaggaaug

SEQ ID NO: 19677 - RNA, 20 nt, Artificial Sequence
  HTT spacer sequence CTCN PAM
gcugcacccucaucucucag

SEQ ID NO: 19678 - RNA, 20 nt, Artificial Sequence
  HTT spacer sequence CTCN PAM
acuccagacccugcagucug

SEQ ID NO: 19679 - RNA, 20 nt, Artificial Sequence
  HTT spacer sequence CTCN PAM
agacccugcagucugggcug

SEQ ID NO: 19680 - RNA, 20 nt, Artificial Sequence
  HTT spacer sequence CTCN PAM
gagcugccacagucagccuu

SEQ ID NO: 19681 - RNA, 20 nt, Artificial Sequence
  HTT spacer sequence CTCN PAM
gaggggcugcgguguggaag

SEQ ID NO: 19682 - RNA, 20 nt, Artificial Sequence
  HTT spacer sequence CTCN PAM
gugaacuaaggcugacugug

SEQ ID NO: 19683 - RNA, 20 nt, Artificial Sequence
  HTT spacer sequence CTCN PAM
gcuucccccucggugaacua

SEQ ID NO: 19684 - RNA, 20 nt, Artificial Sequence
  HTT spacer sequence CTCN PAM
gggccucagcuucccccucg

SEQ ID NO: 19685 - RNA, 20 nt, Artificial Sequence
  HTT spacer sequence CTCN PAM
ugcucugggccucagcuucc

SEQ ID NO: 19686 - RNA, 20 nt, Artificial Sequence
  HTT spacer sequence CTCN PAM
caugcucugggccucagcuu

SEQ ID NO: 19687 - RNA, 20 nt, Artificial Sequence
  HTT spacer sequence CTCN PAM
gcuaaggacuauguggcccu

SEQ ID NO: 19688 - RNA, 20 nt, Artificial Sequence
  HTT spacer sequence CTCN PAM
aucuuuguccuuuuucuuua

SEQ ID NO: 19689 - RNA, 20 nt, Artificial Sequence
  HTT spacer sequence CTCN PAM
ccauagcagaggcuuuucuu

SEQ ID NO: 19690 - RNA, 20 nt, Artificial Sequence
  HTT spacer sequence CTCN PAM
gcuauggggagacugcgggu

SEQ ID NO: 19691 - RNA, 20 nt, Artificial Sequence
  HTT spacer sequence CTCN PAM
uuauauauuaaggcuguugg

SEQ ID NO: 19692 - RNA, 20 nt, Artificial Sequence
  HTT spacer sequence CTCN PAM
ggcuucuucagcccaacagc

SEQ ID NO: 19693 - RNA, 20 nt, Artificial Sequence
  HTT spacer sequence CTCN PAM
caggcuucuucagcccaaca

SEQ ID NO: 19694 - RNA, 20 nt, Artificial Sequence
  HTT spacer sequence CTCN PAM
acagaaccagccacccucuc

SEQ ID NO: 19695 - RNA, 20 nt, Artificial Sequence
  HTT spacer sequence CTCN PAM
uacacugagaauaggccuuu

SEQ ID NO: 19696 - RNA, 20 nt, Artificial Sequence
  HTT spacer sequence CTCN PAM
guguaggaggcccccaaacu

SEQ ID NO: 19697 - RNA, 20 nt, Artificial Sequence
  HTT spacer sequence CTCN PAM
uuucuccaaagagugggcug

SEQ ID NO: 19698 - RNA, 20 nt, Artificial Sequence
  HTT spacer sequence CTCN PAM
aaagagugggcuggcucaag

SEQ ID NO: 19699 - RNA, 20 nt, Artificial Sequence
  HTT spacer sequence CTCN PAM
uuggagaaacgagaaaaggc

SEQ ID NO: 19700 - RNA, 20 nt, Artificial Sequence
  HTT spacer sequence CTCN PAM
aguagggcagagagagaagc

SEQ ID NO: 19701 - RNA, 20 nt, Artificial Sequence
  HTT spacer sequence CTCN PAM
gcccuacuugagccagccca

SEQ ID NO: 19702 - RNA, 20 nt, Artificial Sequence
  HTT spacer sequence CTCN PAM
cugcccuacuugagccagcc

SEQ ID NO: 19703 - RNA, 20 nt, Artificial Sequence
  HTT spacer sequence CTCN PAM
cucugcccuacuugagccag

SEQ ID NO: 19704 - RNA, 20 nt, Artificial Sequence
  HTT spacer sequence CTCN PAM
gccccaggcuucucucucug

SEQ ID NO: 19705 - RNA, 20 nt, Artificial Sequence
  HTT spacer sequence CTCN PAM
cacgcucugugcuggugucu

SEQ ID NO: 19706 - RNA, 20 nt, Artificial Sequence
  HTT spacer sequence CTCN PAM
gugcuggugucuucacagcc

SEQ ID NO: 19707 - RNA, 20 nt, Artificial Sequence
  HTT spacer sequence CTCN PAM
ccaucuggcugugccuguuu

SEQ ID NO: 19708 - RNA, 20 nt, Artificial Sequence
  HTT spacer sequence CTCN PAM
uucagaauccagcuuauugu

SEQ ID NO: 19709 - RNA, 20 nt, Artificial Sequence
  HTT spacer sequence CTCN PAM
ugcuaccugccagggugugg

SEQ ID NO: 19710 - RNA, 20 nt, Artificial Sequence
  HTT spacer sequence CTCN PAM
uacucuugcuaccugccagg

SEQ ID NO: 19711 - RNA, 20 nt, Artificial Sequence
  HTT spacer sequence CTCN PAM
ccuacucuugcuaccugcca

SEQ ID NO: 19712 - RNA, 20 nt, Artificial Sequence
  HTT spacer sequence CTCN PAM
cuccuacucuugcuaccugc

SEQ ID NO: 19713 - RNA, 20 nt, Artificial Sequence
  HTT spacer sequence CTCN PAM
ucucuccuacucuugcuacc

SEQ ID NO: 19714 - RNA, 20 nt, Artificial Sequence
  HTT spacer sequence CTCN PAM
gagcacagguuggguuugga

SEQ ID NO: 19715 - RNA, 20 nt, Artificial Sequence
  HTT spacer sequence CTCN PAM
gagugggugucuccucucuc

SEQ ID NO: 19716 - RNA, 20 nt, Artificial Sequence
  HTT spacer sequence CTCN PAM
aaacccaaccugugcucgga

SEQ ID NO: 19717 - RNA, 20 nt, Artificial Sequence
  HTT spacer sequence CTCN PAM
gucacucaaaggcagagugg

SEQ ID NO: 19718 - RNA, 20 nt, Artificial Sequence
  HTT spacer sequence CTCN PAM
aaggcagaguggggaguggg

SEQ ID NO: 19719 - RNA, 20 nt, Artificial Sequence
  HTT spacer sequence CTCN PAM
gccuuugagugacagagugc

SEQ ID NO: 19720 - RNA, 20 nt, Artificial Sequence
  HTT spacer sequence CTCN PAM
ccacucugccuuugagugac

SEQ ID NO: 19721 - RNA, 20 nt, Artificial Sequence
  HTT spacer sequence CTCN PAM
uaaggcccagugcccacucc

SEQ ID NO: 19722 - RNA, 20 nt, Artificial Sequence
  HTT spacer sequence CTCN PAM
cuggacccaguaccuccuaa

SEQ ID NO: 19723 - RNA, 20 nt, Artificial Sequence
  HTT spacer sequence CTCN PAM
gccucacuggacccaguacc

SEQ ID NO: 19724 - RNA, 20 nt, Artificial Sequence
  HTT spacer sequence CTCN PAM
ggccaggccagggaagaagc

SEQ ID NO: 19725 - RNA, 20 nt, Artificial Sequence
  HTT spacer sequence CTCN PAM
ugccuugaccucccagaggg

SEQ ID NO: 19726 - RNA, 20 nt, Artificial Sequence
  HTT spacer sequence CTCN PAM
cagagggcagccgaggccca

SEQ ID NO: 19727 - RNA, 20 nt, Artificial Sequence
  HTT spacer sequence CTCN PAM
gggaggucaaggcaggagac

SEQ ID NO: 19728 - RNA, 20 nt, Artificial Sequence
  HTT spacer sequence CTCN PAM
gcugcccucugggaggucaa

SEQ ID NO: 19729 - RNA, 20 nt, Artificial Sequence
  HTT spacer sequence CTCN PAM
ccugggccucggcugcccuc

SEQ ID NO: 19730 - RNA, 20 nt, Artificial Sequence
  HTT spacer sequence CTCN PAM
cagggcaggaccugucugca

SEQ ID NO: 19731 - RNA, 20 nt, Artificial Sequence
  HTT spacer sequence CTCN PAM
gggcaggaccugucugcagg

SEQ ID NO: 19732 - RNA, 20 nt, Artificial Sequence
  HTT spacer sequence CTCN PAM
ugcagacagguccugcccug

SEQ ID NO: 19733 - RNA, 20 nt, Artificial Sequence
  HTT spacer sequence CTCN PAM
uuaccacugggacccccagc

SEQ ID NO: 19734 - RNA, 20 nt, Artificial Sequence
  HTT spacer sequence CTCN PAM
gggcagguugcagguuguag

SEQ ID NO: 19735 - RNA, 20 nt, Artificial Sequence
  HTT spacer sequence CTCN PAM
ugcccagacuguagguucaa

SEQ ID NO: 19736 - RNA, 20 nt, Artificial Sequence
  HTT spacer sequence CTCN PAM
caugccauucuugguugaac

SEQ ID NO: 19737 - RNA, 20 nt, Artificial Sequence
  HTT spacer sequence CTCN PAM
cccagcuacagggcagauuu

SEQ ID NO: 19738 - RNA, 20 nt, Artificial Sequence
  HTT spacer sequence CTCN PAM
auuuuuauaucaaugacaua

SEQ ID NO: 19739 - RNA, 20 nt, Artificial Sequence
  HTT spacer sequence CTCN PAM
gagaggugaaugaaccugcc

SEQ ID NO: 19740 - RNA, 20 nt, Artificial Sequence
  HTT spacer sequence CTCN PAM
gagccucuauuuuuauauca

SEQ ID NO: 19741 - RNA, 20 nt, Artificial Sequence
  HTT spacer sequence CTCN PAM
cugagccucuauuuuuauau

SEQ ID NO: 19742 - RNA, 20 nt, Artificial Sequence
  HTT spacer sequence CTCN PAM
acacuuugcugugugacuuu

SEQ ID NO: 19743 - RNA, 20 nt, Artificial Sequence
  HTT spacer sequence CTCN PAM
ucuccacacuuugcugugug

SEQ ID NO: 19744 - RNA, 20 nt, Artificial Sequence
  HTT spacer sequence CTCN PAM
gggcuguggacacugaagcc

SEQ ID NO: 19745 - RNA, 20 nt, Artificial Sequence
  HTT spacer sequence CTCN PAM
aacgccaguggcugucgcuc

SEQ ID NO: 19746 - RNA, 20 nt, Artificial Sequence
  HTT spacer sequence CTCN PAM
cugaggcauucucucccgaa

SEQ ID NO: 19747 - RNA, 20 nt, Artificial Sequence
  HTT spacer sequence CTCN PAM
gggagcgacagccacuggcg

SEQ ID NO: 19748 - RNA, 20 nt, Artificial Sequence
  HTT spacer sequence CTCN PAM
cccgaacaacacaguuauua

SEQ ID NO: 19749 - RNA, 20 nt, Artificial Sequence
  HTT spacer sequence CTCN PAM
cgaacaacacaguuauuaua

SEQ ID NO: 19750 - RNA, 20 nt, Artificial Sequence
  HTT spacer sequence CTCN PAM
accuuucaaaaugaauuauu

SEQ ID NO: 19751 - RNA, 20 nt, Artificial Sequence
  HTT spacer sequence CTCN PAM
uugcagagagucuagaaacu

SEQ ID NO: 19752 - RNA, 20 nt, Artificial Sequence
  HTT spacer sequence CTCN PAM
gcaaugagcaaauacugcuu

SEQ ID NO: 19753 - RNA, 20 nt, Artificial Sequence
  HTT spacer sequence CTCN PAM
cugcaaugagcaaauacugc

SEQ ID NO: 19754 - RNA, 20 nt, Artificial Sequence
  HTT spacer sequence CTCN PAM
gauguuaaaaaggaagcaca

SEQ ID NO: 19755 - RNA, 20 nt, Artificial Sequence
  HTT spacer sequence CTCN PAM
agggucaagaugacaaugga

SEQ ID NO: 19756 - RNA, 20 nt, Artificial Sequence
  HTT spacer sequence CTCN PAM
ccagcaaaaucggccaggcu

SEQ ID NO: 19757 - RNA, 20 nt, Artificial Sequence
  HTT spacer sequence CTCN PAM
gcuggcaagggccuccccag

SEQ ID NO: 19758 - RNA, 20 nt, Artificial Sequence
  HTT spacer sequence CTCN PAM
cggcuggcaagggccucccc

SEQ ID NO: 19759 - RNA, 20 nt, Artificial Sequence
  HTT spacer sequence CTCN PAM
ugccugugccggcguggcgc

SEQ ID NO: 19760 - RNA, 20 nt, Artificial Sequence
  HTT spacer sequence CTCN PAM
gcugaggcugggcaggacag

SEQ ID NO: 19761 - RNA, 20 nt, Artificial Sequence
  HTT spacer sequence CTCN PAM
gcagaggggcgcgccacgcc

SEQ ID NO: 19762 - RNA, 20 nt, Artificial Sequence
  HTT spacer sequence CTCN PAM
guuucucacccuuggcucuu

SEQ ID NO: 19763 - RNA, 20 nt, Artificial Sequence
  HTT spacer sequence CTCN PAM
cccuuggcucuugugucucu

SEQ ID NO: 19764 - RNA, 20 nt, Artificial Sequence
  HTT spacer sequence CTCN PAM
ugugucucucguuucaggaa

SEQ ID NO: 19765 - RNA, 20 nt, Artificial Sequence
  HTT spacer sequence CTCN PAM
cguuucaggaaauuaaaaug

SEQ ID NO: 19766 - RNA, 20 nt, Artificial Sequence
  HTT spacer sequence CTCN PAM
uuucaggaaauuaaaaugca

SEQ ID NO: 19767 - RNA, 20 nt, Artificial Sequence
  HTT spacer sequence CTCN PAM
cuaucugucaugcauuuuaa

SEQ ID NO: 19768 - RNA, 20 nt, Artificial Sequence
  HTT spacer sequence CTCN PAM
gggaccuuggccagaauccc

SEQ ID NO: 19769 - RNA, 20 nt, Artificial Sequence
  HTT spacer sequence CTCN PAM
acgucccagaccgaggcguc

SEQ ID NO: 19770 - RNA, 20 nt, Artificial Sequence
  HTT spacer sequence CTCN PAM
gucugggacguggagggccc

SEQ ID NO: 19771 - RNA, 20 nt, Artificial Sequence
  HTT spacer sequence CTCN PAM
guacuucccguauaaccagu

SEQ ID NO: 19772 - RNA, 20 nt, Artificial Sequence
  HTT spacer sequence CTCN PAM
uacgaaggccgcuucgagga

SEQ ID NO: 19773 - RNA, 20 nt, Artificial Sequence
  HTT spacer sequence CTCN PAM
aagcggccuucguaggagca

SEQ ID NO: 19774 - RNA, 20 nt, Artificial Sequence
  HTT spacer sequence CTCN PAM
gacagcuccuccagcuuacu

SEQ ID NO: 19775 - RNA, 20 nt, Artificial Sequence
  HTT spacer sequence CTCN PAM
uccagcuuacugucccuuaa

SEQ ID NO: 19776 - RNA, 20 nt, Artificial Sequence
  HTT spacer sequence CTCN PAM
agcuuacugucccuuaaguu

SEQ ID NO: 19777 - RNA, 20 nt, Artificial Sequence
  HTT spacer sequence CTCN PAM
gcccccaccauuuagagaaa

SEQ ID NO: 19778 - RNA, 20 nt, Artificial Sequence
  HTT spacer sequence CTCN PAM
aaauggugggggcugagaua

SEQ ID NO: 19779 - RNA, 20 nt, Artificial Sequence
  HTT spacer sequence CTCN PAM
cagucccuuucucuaaaugg

SEQ ID NO: 19780 - RNA, 20 nt, Artificial Sequence
  HTT spacer sequence CTCN PAM
gcaaccacuguggccgccgc

SEQ ID NO: 19781 - RNA, 20 nt, Artificial Sequence
  HTT spacer sequence CTCN PAM
agggacaggcggccucagac

SEQ ID NO: 19782 - RNA, 20 nt, Artificial Sequence
  HTT spacer sequence CTCN PAM
gaccagggagggcuuuagug

SEQ ID NO: 19783 - RNA, 20 nt, Artificial Sequence
  HTT spacer sequence CTCN PAM
cuggucugaggccgccuguc

SEQ ID NO: 19784 - RNA, 20 nt, Artificial Sequence
  HTT spacer sequence CTCN PAM
gucugccuguggacacuaaa

SEQ ID NO: 19785 - RNA, 20 nt, Artificial Sequence
  HTT spacer sequence CTCN PAM
cagcuccaucacuuuugagc

SEQ ID NO: 19786 - RNA, 20 nt, Artificial Sequence
  HTT spacer sequence CTCN PAM
aucacuuuugagcugcacgg

SEQ ID NO: 19787 - RNA, 20 nt, Artificial Sequence
  HTT spacer sequence CTCN PAM
aaagugauggagcugggaga

SEQ ID NO: 19788 - RNA, 20 nt, Artificial Sequence
  HTT spacer sequence CTCN PAM
ggccucagucucccuccuau

SEQ ID NO: 19789 - RNA, 20 nt, Artificial Sequence
  HTT spacer sequence CTCN PAM
gucucccuccuauaaaaugg

SEQ ID NO: 19790 - RNA, 20 nt, Artificial Sequence
  HTT spacer sequence CTCN PAM
cuccuauaaaauggggguaa

SEQ ID NO: 19791 - RNA, 20 nt, Artificial Sequence
  HTT spacer sequence CTCN PAM
uauaaaauggggguaaauca

SEQ ID NO: 19792 - RNA, 20 nt, Artificial Sequence
  HTT spacer sequence CTCN PAM
gaggguggcugggagcauca

SEQ ID NO: 19793 - RNA, 20 nt, Artificial Sequence
  HTT spacer sequence CTCN PAM
gagaaagguacugauuuacc

SEQ ID NO: 19794 - RNA, 20 nt, Artificial Sequence
  HTT spacer sequence CTCN PAM
cagccacccucugagaaagg

SEQ ID NO: 19795 - RNA, 20 nt, Artificial Sequence
  HTT spacer sequence CTCN PAM
ugugaugcucccagccaccc

SEQ ID NO: 19796 - RNA, 20 nt, Artificial Sequence
  HTT spacer sequence CTCN PAM
ccugugaugcucccagccac

SEQ ID NO: 19797 - RNA, 20 nt, Artificial Sequence
  HTT spacer sequence CTCN PAM
gugugccgggccccaugcug

SEQ ID NO: 19798 - RNA, 20 nt, Artificial Sequence
  HTT spacer sequence CTCN PAM
cuccgugugccgggccccau

SEQ ID NO: 19799 - RNA, 20 nt, Artificial Sequence
  HTT spacer sequence CTCN PAM
cuuagcccacacagacccca

SEQ ID NO: 19800 - RNA, 20 nt, Artificial Sequence
  HTT spacer sequence CTCN PAM
caggcuagcugcccucucag

SEQ ID NO: 19801 - RNA, 20 nt, Artificial Sequence
  HTT spacer sequence CTCN PAM
cagcacuggggagggugucg

SEQ ID NO: 19802 - RNA, 20 nt, Artificial Sequence
  HTT spacer sequence CTCN PAM
gcacuggggagggugucggg

SEQ ID NO: 19803 - RNA, 20 nt, Artificial Sequence
  HTT spacer sequence CTCN PAM
ccagugcugagagggcagcu

SEQ ID NO: 19804 - RNA, 20 nt, Artificial Sequence
  HTT spacer sequence CTCN PAM
ucacguguugccgugggcau

SEQ ID NO: 19805 - RNA, 20 nt, Artificial Sequence
  HTT spacer sequence CTCN PAM
gccauccaucccacaccuca

SEQ ID NO: 19806 - RNA, 20 nt, Artificial Sequence
  HTT spacer sequence CTCN PAM
gacccgucccgugcuggcca

SEQ ID NO: 19807 - RNA, 20 nt, Artificial Sequence
  HTT spacer sequence CTCN PAM
cagggcagccgggagccagg

SEQ ID NO: 19808 - RNA, 20 nt, Artificial Sequence
  HTT spacer sequence CTCN PAM
cggcugcccugugagcaucu

SEQ ID NO: 19809 - RNA, 20 nt, Artificial Sequence
  HTT spacer sequence CTCN PAM
ccaggcccaccccgcaggug

SEQ ID NO: 19810 - RNA, 20 nt, Artificial Sequence
  HTT spacer sequence CTCN PAM
gggcuccccaggcccacccc

SEQ ID NO: 19811 - RNA, 20 nt, Artificial Sequence
  HTT spacer sequence CTCN PAM
aaagcaccuucucugggcuc

SEQ ID NO: 19812 - RNA, 20 nt, Artificial Sequence
  HTT spacer sequence CTCN PAM
ucaaaagcaccuucucuggg

SEQ ID NO: 19813 - RNA, 20 nt, Artificial Sequence
  HTT spacer sequence CTCN PAM
aaauggccaacuucuauuuu

SEQ ID NO: 19814 - RNA, 20 nt, Artificial Sequence
  HTT spacer sequence CTCN PAM
aauccacaaucuuccuguuc

SEQ ID NO: 19815 - RNA, 20 nt, Artificial Sequence
  HTT spacer sequence CTCN PAM
ccugcccuggucuucaaguc

SEQ ID NO: 19816 - RNA, 20 nt, Artificial Sequence
  HTT spacer sequence CTCN PAM
ugucagaaagacuugaagac

SEQ ID NO: 19817 - RNA, 20 nt, Artificial Sequence
  HTT spacer sequence CTCN PAM
acuaaagauacuuuucugac

SEQ ID NO: 19818 - RNA, 20 nt, Artificial Sequence
  HTT spacer sequence CTCN PAM
gaggagggucccucucaugc

SEQ ID NO: 19819 - RNA, 20 nt, Artificial Sequence
  HTT spacer sequence CTCN PAM
gagacgccuucucuacuaaa

SEQ ID NO: 19820 - RNA, 20 nt, Artificial Sequence
  HTT spacer sequence CTCN PAM
ucggagacgccuucucuacu

SEQ ID NO: 19821 - RNA, 20 nt, Artificial Sequence
  HTT spacer sequence CTCN PAM
caugccgggggccgcugcuu

SEQ ID NO: 19822 - RNA, 20 nt, Artificial Sequence
  HTT spacer sequence CTCN PAM
ugccgggggccgcugcuuga

SEQ ID NO: 19823 - RNA, 20 nt, Artificial Sequence
  HTT spacer sequence CTCN PAM
ggauuucucauugaagaccu

SEQ ID NO: 19824 - RNA, 20 nt, Artificial Sequence
  HTT spacer sequence CTCN PAM
uugaagaccugagacaaaaa

SEQ ID NO: 19825 - RNA, 20 nt, Artificial Sequence
  HTT spacer sequence CTCN PAM
ggucuucaaugagaaauccu

SEQ ID NO: 19826 - RNA, 20 nt, Artificial Sequence
  HTT spacer sequence CTCN PAM
ugcugguuccuucuagcugc

SEQ ID NO: 19827 - RNA, 20 nt, Artificial Sequence
  HTT spacer sequence CTCN PAM
ggccuccugcugguuccuuc

SEQ ID NO: 19828 - RNA, 20 nt, Artificial Sequence
  HTT spacer sequence CTCN PAM
guccacgggaacaacagcca

SEQ ID NO: 19829 - RNA, 20 nt, Artificial Sequence
  HTT spacer sequence CTCN PAM
gacucagcugccuggggccu

SEQ ID NO: 19830 - RNA, 20 nt, Artificial Sequence
  HTT spacer sequence CTCN PAM
gcugccuggggccuugcaca

SEQ ID NO: 19831 - RNA, 20 nt, Artificial Sequence
  HTT spacer sequence CTCN PAM
cugaucaggcccaaagcgcg

SEQ ID NO: 19832 - RNA, 20 nt, Artificial Sequence
  HTT spacer sequence CTCN PAM
cgccccugagguuggcugua

SEQ ID NO: 19833 - RNA, 20 nt, Artificial Sequence
  HTT spacer sequence CTCN PAM
ggggcgugagauccgcgcuu

SEQ ID NO: 19834 - RNA, 20 nt, Artificial Sequence
  HTT spacer sequence CTCN PAM
cagcucagagcagagugugg

SEQ ID NO: 19835 - RNA, 20 nt, Artificial Sequence
  HTT spacer sequence CTCN PAM
gcucagagcagagugugggc

SEQ ID NO: 19836 - RNA, 20 nt, Artificial Sequence
  HTT spacer sequence CTCN PAM
gagcagagugugggccaggg

SEQ ID NO: 19837 - RNA, 20 nt, Artificial Sequence
  HTT spacer sequence CTCN PAM
gagcugagaggguacagcca

SEQ ID NO: 19838 - RNA, 20 nt, Artificial Sequence
  HTT spacer sequence CTCN PAM
gcucugagcugagaggguac

SEQ ID NO: 19839 - RNA, 20 nt, Artificial Sequence
  HTT spacer sequence CTCN PAM
ucccuggcccacacucugcu

SEQ ID NO: 19840 - RNA, 20 nt, Artificial Sequence
  HTT spacer sequence CTCN PAM
agugccugcucaucccuggc

SEQ ID NO: 19841 - RNA, 20 nt, Artificial Sequence
  HTT spacer sequence CTCN PAM
cugcccuucagggaggucug

SEQ ID NO: 19842 - RNA, 20 nt, Artificial Sequence
  HTT spacer sequence CTCN PAM
cugaagggcagggagcugcc

SEQ ID NO: 19843 - RNA, 20 nt, Artificial Sequence
  HTT spacer sequence CTCN PAM
gcagaccucccugaagggca

SEQ ID NO: 19844 - RNA, 20 nt, Artificial Sequence
  HTT spacer sequence CTCN PAM
gcugcugggguaggggccac

SEQ ID NO: 19845 - RNA, 20 nt, Artificial Sequence
  HTT spacer sequence CTCN PAM
caggaggcgcccacagggcu

SEQ ID NO: 19846 - RNA, 20 nt, Artificial Sequence
  HTT spacer sequence CTCN PAM
ggaggcgcccacagggcugg

SEQ ID NO: 19847 - RNA, 20 nt, Artificial Sequence
  HTT spacer sequence CTCN PAM
ugagagcucugcugcugggg

SEQ ID NO: 19848 - RNA, 20 nt, Artificial Sequence
  HTT spacer sequence CTCN PAM
ccaccucuaccagagcucug

SEQ ID NO: 19849 - RNA, 20 nt, Artificial Sequence
  HTT spacer sequence CTCN PAM
accagagcucugagguccug

SEQ ID NO: 19850 - RNA, 20 nt, Artificial Sequence
  HTT spacer sequence CTCN PAM
gguagagguggugaguaaag

SEQ ID NO: 19851 - RNA, 20 nt, Artificial Sequence
  HTT spacer sequence CTCN PAM
gagguccuggggagagagcc

SEQ ID NO: 19852 - RNA, 20 nt, Artificial Sequence
  HTT spacer sequence CTCN PAM
gagcucugguagagguggug

SEQ ID NO: 19853 - RNA, 20 nt, Artificial Sequence
  HTT spacer sequence CTCN PAM
ccaggaccucagagcucugg

SEQ ID NO: 19854 - RNA, 20 nt, Artificial Sequence
  HTT spacer sequence CTCN PAM
ccccaggaccucagagcucu

SEQ ID NO: 19855 - RNA, 20 nt, Artificial Sequence
  HTT spacer sequence CTCN PAM
cuccccaggaccucagagcu

SEQ ID NO: 19856 - RNA, 20 nt, Artificial Sequence
  HTT spacer sequence CTCN PAM
ugugggccccacacccucua

SEQ ID NO: 19857 - RNA, 20 nt, Artificial Sequence
  HTT spacer sequence CTCN PAM
aggugccuguccuucugccu

SEQ ID NO: 19858 - RNA, 20 nt, Artificial Sequence
  HTT spacer sequence CTCN PAM
cuaccaaggugugccggccc

SEQ ID NO: 19859 - RNA, 20 nt, Artificial Sequence
  HTT spacer sequence CTCN PAM
accaaggugugccggcccca

SEQ ID NO: 19860 - RNA, 20 nt, Artificial Sequence
  HTT spacer sequence CTCN PAM
cggcggccuagaaauggggc

SEQ ID NO: 19861 - RNA, 20 nt, Artificial Sequence
  HTT spacer sequence CTCN PAM
caucucaggcccuuccuucu

SEQ ID NO: 19862 - RNA, 20 nt, Artificial Sequence
  HTT spacer sequence CTCN PAM
ggcccuuccuucugggaccu

SEQ ID NO: 19863 - RNA, 20 nt, Artificial Sequence
  HTT spacer sequence CTCN PAM
guuuccccaucugccuaagg

SEQ ID NO: 19864 - RNA, 20 nt, Artificial Sequence
  HTT spacer sequence CTCN PAM
ggaccccuguagggaagcca

SEQ ID NO: 19865 - RNA, 20 nt, Artificial Sequence
  HTT spacer sequence CTCN PAM
gcacuacccagcacccccca

SEQ ID NO: 19866 - RNA, 20 nt, Artificial Sequence
  HTT spacer sequence CTCN PAM
cccuggggguggucucucca

SEQ ID NO: 19867 - RNA, 20 nt, Artificial Sequence
  HTT spacer sequence CTCN PAM
cuggggguggucucuccacc

SEQ ID NO: 19868 - RNA, 20 nt, Artificial Sequence
  HTT spacer sequence CTCN PAM
ccaccccuggcccccaacug

SEQ ID NO: 19869 - RNA, 20 nt, Artificial Sequence
  HTT spacer sequence CTCN PAM
accccuggcccccaacuggg

SEQ ID NO: 19870 - RNA, 20 nt, Artificial Sequence
  HTT spacer sequence CTCN PAM
gccccaguugggggccaggg

SEQ ID NO: 19871 - RNA, 20 nt, Artificial Sequence
  HTT spacer sequence CTCN PAM
cuggcaggauaugccccucu

SEQ ID NO: 19872 - RNA, 20 nt, Artificial Sequence
  HTT spacer sequence CTCN PAM
gcagcccagaacaucccacc

SEQ ID NO: 19873 - RNA, 20 nt, Artificial Sequence
  HTT spacer sequence CTCN PAM
cuuucuuucuuuuucuuuuu

SEQ ID NO: 19874 - RNA, 20 nt, Artificial Sequence
  HTT spacer sequence CTCN PAM
uucuuucuuuuucuuuuuuu

SEQ ID NO: 19875 - RNA, 20 nt, Artificial Sequence
  HTT spacer sequence CTCN PAM
aaaaaaaaaaaaaagaaaaa

SEQ ID NO: 19876 - RNA, 20 nt, Artificial Sequence
  HTT spacer sequence CTCN PAM
gucucaaaaaaaaaaaaaaa

SEQ ID NO: 19877 - RNA, 20 nt, Artificial Sequence
  HTT spacer sequence CTCN PAM
cucuugugcagagagcagug

SEQ ID NO: 19878 - RNA, 20 nt, Artificial Sequence
  HTT spacer sequence CTCN PAM
ugugcagagagcaguggcgc

SEQ ID NO: 19879 - RNA, 20 nt, Artificial Sequence
  HTT spacer sequence CTCN PAM
gcacaagagcgagacuccgu

SEQ ID NO: 19880 - RNA, 20 nt, Artificial Sequence
  HTT spacer sequence CTCN PAM
cugcacaagagcgagacucc

SEQ ID NO: 19881 - RNA, 20 nt, Artificial Sequence
  HTT spacer sequence CTCN PAM
cugcaaccuccgccucgugg

SEQ ID NO: 19882 - RNA, 20 nt, Artificial Sequence
  HTT spacer sequence CTCN PAM
gccucguggguucaagcgau

SEQ ID NO: 19883 - RNA, 20 nt, Artificial Sequence
  HTT spacer sequence CTCN PAM
uggguucaagcgauucuccu

SEQ ID NO: 19884 - RNA, 20 nt, Artificial Sequence
  HTT spacer sequence CTCN PAM
ugccucagccucccgaguag

SEQ ID NO: 19885 - RNA, 20 nt, Artificial Sequence
  HTT spacer sequence CTCN PAM
gccucccgaguagcugggau

SEQ ID NO: 19886 - RNA, 20 nt, Artificial Sequence
  HTT spacer sequence CTCN PAM
cgaguagcugggauuacagg

SEQ ID NO: 19887 - RNA, 20 nt, Artificial Sequence
  HTT spacer sequence CTCN PAM
ggaggcugaggcaggagaau

SEQ ID NO: 19888 - RNA, 20 nt, Artificial Sequence
  HTT spacer sequence CTCN PAM
acuaaaaauacaaaaauuag

SEQ ID NO: 19889 - RNA, 20 nt, Artificial Sequence
  HTT spacer sequence CTCN PAM
ugaccucaggugauccaccu

SEQ ID NO: 19890 - RNA, 20 nt, Artificial Sequence
  HTT spacer sequence CTCN PAM
ggugauccaccugccucugc

SEQ ID NO: 19891 - RNA, 20 nt, Artificial Sequence
  HTT spacer sequence CTCN PAM
gccucccaaagugcugggau

SEQ ID NO: 19892 - RNA, 20 nt, Artificial Sequence
  HTT spacer sequence CTCN PAM
caaagugcugggauuacagg

SEQ ID NO: 19893 - RNA, 20 nt, Artificial Sequence
  HTT spacer sequence CTCN PAM
acacccggccaccccuguua

SEQ ID NO: 19894 - RNA, 20 nt, Artificial Sequence
  HTT spacer sequence CTCN PAM
uuugcacauggaauaugaga

SEQ ID NO: 19895 - RNA, 20 nt, Artificial Sequence
  HTT spacer sequence CTCN PAM
uauuccaugugcaaaggagg

SEQ ID NO: 19896 - RNA, 20 nt, Artificial Sequence
  HTT spacer sequence CTCN PAM
gggucucauauuccaugugc

SEQ ID NO: 19897 - RNA, 20 nt, Artificial Sequence
  HTT spacer sequence CTCN PAM
cuggggccucaguuucccca

SEQ ID NO: 19898 - RNA, 20 nt, Artificial Sequence
  HTT spacer sequence CTCN PAM
guuuccccauuugcccagua

SEQ ID NO: 19899 - RNA, 20 nt, Artificial Sequence
  HTT spacer sequence CTCN PAM
cgacaauccuacugggcaaa

SEQ ID NO: 19900 - RNA, 20 nt, Artificial Sequence
  HTT spacer sequence CTCN PAM
ccggacccucccgacaaucc

SEQ ID NO: 19901 - RNA, 20 nt, Artificial Sequence
  HTT spacer sequence CTCN PAM
guggccagcacguccacagc

SEQ ID NO: 19902 - RNA, 20 nt, Artificial Sequence
  HTT spacer sequence CTCN PAM
gaccuggaaggacagugccg

SEQ ID NO: 19903 - RNA, 20 nt, Artificial Sequence
  HTT spacer sequence CTCN PAM
uccgaccuggaaggacagug

SEQ ID NO: 19904 - RNA, 20 nt, Artificial Sequence
  HTT spacer sequence CTCN PAM
gcaccuugcgcuucuucacc

SEQ ID NO: 19905 - RNA, 20 nt, Artificial Sequence
  HTT spacer sequence CTCN PAM
agcagccgcagcugcuucuu

SEQ ID NO: 19906 - RNA, 20 nt, Artificial Sequence
  HTT spacer sequence CTCN PAM
accauggccuccagcagccg

SEQ ID NO: 19907 - RNA, 20 nt, Artificial Sequence
  HTT spacer sequence CTCN PAM
uccaccauggccuccagcag

SEQ ID NO: 19908 - RNA, 20 nt, Artificial Sequence
  HTT spacer sequence CTCN PAM
gccggcgcugcuccuccacc

SEQ ID NO: 19909 - RNA, 20 nt, Artificial Sequence
  HTT spacer sequence CTCN PAM
acggcgcggcucagccggcg

SEQ ID NO: 19910 - RNA, 20 nt, Artificial Sequence
  HTT spacer sequence CTCN PAM
uccacggcgcggcucagccg

SEQ ID NO: 19911 - RNA, 20 nt, Artificial Sequence
  HTT spacer sequence CTCN PAM
cggcaggucuccuccacggc

SEQ ID NO: 19912 - RNA, 20 nt, Artificial Sequence
  HTT spacer sequence CTCN PAM
gcaccugcaggaugugcugc

SEQ ID NO: 19913 - RNA, 20 nt, Artificial Sequence
  HTT spacer sequence CTCN PAM
ugcagcugcaggcucugcac

SEQ ID NO: 19914 - RNA, 20 nt, Artificial Sequence
  HTT spacer sequence CTCN PAM
ucaugcgcuccugcagcugc

SEQ ID NO: 19915 - RNA, 20 nt, Artificial Sequence
  HTT spacer sequence CTCN PAM
agcagacucaucaugcgcuc

SEQ ID NO: 19916 - RNA, 20 nt, Artificial Sequence
  HTT spacer sequence CTCN PAM
ccagcagacucaucaugcgc

SEQ ID NO: 19917 - RNA, 20 nt, Artificial Sequence
  HTT spacer sequence CTCN PAM
ggccacccagggcaggccac

SEQ ID NO: 19918 - RNA, 20 nt, Artificial Sequence
  HTT spacer sequence CTCN PAM
ggccaggcgggcaagggggc

SEQ ID NO: 19919 - RNA, 20 nt, Artificial Sequence
  HTT spacer sequence CTCN PAM
cggggcggcccccuugcccg

SEQ ID NO: 19920 - RNA, 20 nt, Artificial Sequence
  HTT spacer sequence CTCN PAM
gcucgcggggcggcccccuu

SEQ ID NO: 19921 - RNA, 20 nt, Artificial Sequence
  HTT spacer sequence CTCN PAM
ggcaggaugucccuucugag

SEQ ID NO: 19922 - RNA, 20 nt, Artificial Sequence
  HTT spacer sequence CTCN PAM
gaagggacauccugccagag

SEQ ID NO: 19923 - RNA, 20 nt, Artificial Sequence
  HTT spacer sequence CTCN PAM
aaauaccccucagaagggac

SEQ ID NO: 19924 - RNA, 20 nt, Artificial Sequence
  HTT spacer sequence CTCN PAM
cgguccccagggccuggggg

SEQ ID NO: 19925 - RNA, 20 nt, Artificial Sequence
  HTT spacer sequence CTCN PAM
agucuccagcaugaaugccc

SEQ ID NO: 19926 - RNA, 20 nt, Artificial Sequence
  HTT spacer sequence CTCN PAM
agcaugaaugcccuuccucg

SEQ ID NO: 19927 - RNA, 20 nt, Artificial Sequence
  HTT spacer sequence CTCN PAM
gacacaggccagggccucug

SEQ ID NO: 19928 - RNA, 20 nt, Artificial Sequence
  HTT spacer sequence CTCN PAM
gggguucacuccgaguaaga

SEQ ID NO: 19929 - RNA, 20 nt, Artificial Sequence
  HTT spacer sequence CTCN PAM
gaguaagaacguccuagagc

SEQ ID NO: 19930 - RNA, 20 nt, Artificial Sequence
  HTT spacer sequence CTCN PAM
gagugaaccccagaggcccu

SEQ ID NO: 19931 - RNA, 20 nt, Artificial Sequence
  HTT spacer sequence CTCN PAM
aggacguucuuacucggagu

SEQ ID NO: 19932 - RNA, 20 nt, Artificial Sequence
  HTT spacer sequence CTCN PAM
ccagugucguuacuaucaau

SEQ ID NO: 19933 - RNA, 20 nt, Artificial Sequence
  HTT spacer sequence CTCN PAM
agugucguuacuaucaauga

SEQ ID NO: 19934 - RNA, 20 nt, Artificial Sequence
  HTT spacer sequence CTCN PAM
ccaagccagcaacagcaaac

SEQ ID NO: 19935 - RNA, 20 nt, Artificial Sequence
  HTT spacer sequence CTCN PAM
agccugccccaacccguuuc

SEQ ID NO: 19936 - RNA, 20 nt, Artificial Sequence
  HTT spacer sequence CTCN PAM
cccagcuccagccugcccca

SEQ ID NO: 19937 - RNA, 20 nt, Artificial Sequence
  HTT spacer sequence CTCN PAM
cuccugaagggaacccugug

SEQ ID NO: 19938 - RNA, 20 nt, Artificial Sequence
  HTT spacer sequence CTCN PAM
ccugaagggaacccuguguc

SEQ ID NO: 19939 - RNA, 20 nt, Artificial Sequence
  HTT spacer sequence CTCN PAM
ugaagggaacccuguguccu

SEQ ID NO: 19940 - RNA, 20 nt, Artificial Sequence
  HTT spacer sequence CTCN PAM
cucaccaggaccucugcguc

SEQ ID NO: 19941 - RNA, 20 nt, Artificial Sequence
  HTT spacer sequence CTCN PAM
ccaggaccucugcgucucuc

SEQ ID NO: 19942 - RNA, 20 nt, Artificial Sequence
  HTT spacer sequence CTCN PAM
gcgucucuccuuaaauggcc

SEQ ID NO: 19943 - RNA, 20 nt, Artificial Sequence
  HTT spacer sequence CTCN PAM
ccuuaaauggccucugacgc

SEQ ID NO: 19944 - RNA, 20 nt, Artificial Sequence
  HTT spacer sequence CTCN PAM
uuaaauggccucugacgccu

SEQ ID NO: 19945 - RNA, 20 nt, Artificial Sequence
  HTT spacer sequence CTCN PAM
gacgccugaugaaaacccca

SEQ ID NO: 19946 - RNA, 20 nt, Artificial Sequence
  HTT spacer sequence CTCN PAM
uggaaggucgcugggguuuu

SEQ ID NO: 19947 - RNA, 20 nt, Artificial Sequence
  HTT spacer sequence CTCN PAM
guuuggagcaucagguguuu

SEQ ID NO: 19948 - RNA, 20 nt, Artificial Sequence
  HTT spacer sequence CTCN PAM
aaacagagcugaauaaaagc

SEQ ID NO: 19949 - RNA, 20 nt, Artificial Sequence
  HTT spacer sequence CTCN PAM
uuagcaaugacacuaauaaa

SEQ ID NO: 19950 - RNA, 20 nt, Artificial Sequence
  HTT spacer sequence CTCN PAM
acagggcugugcaugugaac

SEQ ID NO: 19951 - RNA, 20 nt, Artificial Sequence
  HTT spacer sequence CTCN PAM
agcacccagaacacucaaca

SEQ ID NO: 19952 - RNA, 20 nt, Artificial Sequence
  HTT spacer sequence CTCN PAM
uggagcuuaugcucccaugc

SEQ ID NO: 19953 - RNA, 20 nt, Artificial Sequence
  HTT spacer sequence CTCN PAM
aagaggccagggccuuugug

SEQ ID NO: 19954 - RNA, 20 nt, Artificial Sequence
  HTT spacer sequence CTCN PAM
caugcggggaagacacaugg

SEQ ID NO: 19955 - RNA, 20 nt, Artificial Sequence
  HTT spacer sequence CTCN PAM
acugacccaugugucuuccc

SEQ ID NO: 19956 - RNA, 20 nt, Artificial Sequence
  HTT spacer sequence CTCN PAM
cuuccagcacuuaucacaac

SEQ ID NO: 19957 - RNA, 20 nt, Artificial Sequence
  HTT spacer sequence CTCN PAM
ggccaaccccucccuuccag

SEQ ID NO: 19958 - RNA, 20 nt, Artificial Sequence
  HTT spacer sequence CTCN PAM
guguccucaggccaaccccu

SEQ ID NO: 19959 - RNA, 20 nt, Artificial Sequence
  HTT spacer sequence CTCN PAM
acguaugucugccuccgugu

SEQ ID NO: 19960 - RNA, 20 nt, Artificial Sequence
  HTT spacer sequence CTCN PAM
gggccuucgcacuggccguu

SEQ ID NO: 19961 - RNA, 20 nt, Artificial Sequence
  HTT spacer sequence CTCN PAM
gccucugggccuucgcacug

SEQ ID NO: 19962 - RNA, 20 nt, Artificial Sequence
  HTT spacer sequence CTCN PAM
aguguccucugccucugggc

SEQ ID NO: 19963 - RNA, 20 nt, Artificial Sequence
  HTT spacer sequence CTCN PAM
ugggcuugcuccaguguccu

SEQ ID NO: 19964 - RNA, 20 nt, Artificial Sequence
  HTT spacer sequence CTCN PAM
uagcugcuccugggcuugcu

SEQ ID NO: 19965 - RNA, 20 nt, Artificial Sequence
  HTT spacer sequence CTCN PAM
ccacgggcugcacgggcuuc

SEQ ID NO: 19966 - RNA, 20 nt, Artificial Sequence
  HTT spacer sequence CTCN PAM
uccccacgggcugcacgggc

SEQ ID NO: 19967 - RNA, 20 nt, Artificial Sequence
  HTT spacer sequence CTCN PAM
cacuaagcuugaaaagcaug

SEQ ID NO: 19968 - RNA, 20 nt, Artificial Sequence
  HTT spacer sequence CTCN PAM
gggucugacaucgguggggg

SEQ ID NO: 19969 - RNA, 20 nt, Artificial Sequence
  HTT spacer sequence CTCN PAM
gucccccaccgaugucagac

SEQ ID NO: 19970 - RNA, 20 nt, Artificial Sequence
  HTT spacer sequence CTCN PAM
accaccccucugucccccac

SEQ ID NO: 19971 - RNA, 20 nt, Artificial Sequence
  HTT spacer sequence CTCN PAM
ccucacugccggcccuucca

SEQ ID NO: 19972 - RNA, 20 nt, Artificial Sequence
  HTT spacer sequence CTCN PAM
cugccggcccuuccaccagu

SEQ ID NO: 19973 - RNA, 20 nt, Artificial Sequence
  HTT spacer sequence CTCN PAM
uucuagaagcuccagcuuuc

SEQ ID NO: 19974 - RNA, 20 nt, Artificial Sequence
  HTT spacer sequence CTCN PAM
agcuuucccaaagcugaauu

SEQ ID NO: 19975 - RNA, 20 nt, Artificial Sequence
  HTT spacer sequence CTCN PAM
augagccuccuuggccggga

SEQ ID NO: 19976 - RNA, 20 nt, Artificial Sequence
  HTT spacer sequence CTCN PAM
uagagaauucagcuuuggga

SEQ ID NO: 19977 - RNA, 20 nt, Artificial Sequence
  HTT spacer sequence CTCN PAM
uuggccgggacucgggcguc

SEQ ID NO: 19978 - RNA, 20 nt, Artificial Sequence
  HTT spacer sequence CTCN PAM
ggcgucugguugcccuggcu

SEQ ID NO: 19979 - RNA, 20 nt, Artificial Sequence
  HTT spacer sequence CTCN PAM
uuugcagccagggcaaccag

SEQ ID NO: 19980 - RNA, 20 nt, Artificial Sequence
  HTT spacer sequence CTCN PAM
aacacaccuggccccagccu

SEQ ID NO: 19981 - RNA, 20 nt, Artificial Sequence
  HTT spacer sequence CTCN PAM
uggaauuaggcaaguugcug

SEQ ID NO: 19982 - RNA, 20 nt, Artificial Sequence
  HTT spacer sequence CTCN PAM
ggguucagaaaaaucucccu

SEQ ID NO: 19983 - RNA, 20 nt, Artificial Sequence
  HTT spacer sequence CTCN PAM
cucuggcugccaagcgagca

SEQ ID NO: 19984 - RNA, 20 nt, Artificial Sequence
  HTT spacer sequence CTCN PAM
ggcugccaagcgagcaggcc

SEQ ID NO: 19985 - RNA, 20 nt, Artificial Sequence
  HTT spacer sequence CTCN PAM
cuuggcagccagagggagau

SEQ ID NO: 19986 - RNA, 20 nt, Artificial Sequence
  HTT spacer sequence CTCN PAM
acggccugcucgcuuggcag

SEQ ID NO: 19987 - RNA, 20 nt, Artificial Sequence
  HTT spacer sequence CTCN PAM
gcaccugucuccacggccug

SEQ ID NO: 19988 - RNA, 20 nt, Artificial Sequence
  HTT spacer sequence CTCN PAM
uccuacccucuagggggucu

SEQ ID NO: 19989 - RNA, 20 nt, Artificial Sequence
  HTT spacer sequence CTCN PAM
agggggucuugaggucagcc

SEQ ID NO: 19990 - RNA, 20 nt, Artificial Sequence
  HTT spacer sequence CTCN PAM
agacccccuagaggguagga

SEQ ID NO: 19991 - RNA, 20 nt, Artificial Sequence
  HTT spacer sequence CTCN PAM
ugccuggcugaccucaagac

SEQ ID NO: 19992 - RNA, 20 nt, Artificial Sequence
  HTT spacer sequence CTCN PAM
cuugccuggcugaccucaag

SEQ ID NO: 19993 - RNA, 20 nt, Artificial Sequence
  HTT spacer sequence CTCN PAM
acugggugugggaccagccu

SEQ ID NO: 19994 - RNA, 20 nt, Artificial Sequence
  HTT spacer sequence CTCN PAM
acaccaccaugguccacagg

SEQ ID NO: 19995 - RNA, 20 nt, Artificial Sequence
  HTT spacer sequence CTCN PAM
gccugccugugugaaggaga

SEQ ID NO: 19996 - RNA, 20 nt, Artificial Sequence
  HTT spacer sequence CTCN PAM
uucacacaggcaggccgagg

SEQ ID NO: 19997 - RNA, 20 nt, Artificial Sequence
  HTT spacer sequence CTCN PAM
ccuucacacaggcaggccga

SEQ ID NO: 19998 - RNA, 20 nt, Artificial Sequence
  HTT spacer sequence CTCN PAM
acagaacacgccggccucuc

SEQ ID NO: 19999 - RNA, 20 nt, Artificial Sequence
  HTT spacer sequence CTCN PAM
ccuuugggcuccacagaaca

SEQ ID NO: 20000 - RNA, 20 nt, Artificial Sequence
  HTT spacer sequence CTCN PAM
gaggguccuggagcucccac

SEQ ID NO: 20001 - RNA, 20 nt, Artificial Sequence
  HTT spacer sequence CTCN PAM
gagugaagugaauccugcuu

SEQ ID NO: 20002 - RNA, 20 nt, Artificial Sequence
  HTT spacer sequence CTCN PAM
aggacccucagagugaagug

SEQ ID NO: 20003 - RNA, 20 nt, Artificial Sequence
  HTT spacer sequence CTCN PAM
cacccuccucagccaucucc

SEQ ID NO: 20004 - RNA, 20 nt, Artificial Sequence
  HTT spacer sequence CTCN PAM
ucagccaucuccccagagcc

SEQ ID NO: 20005 - RNA, 20 nt, Artificial Sequence
  HTT spacer sequence CTCN PAM
gccaucuccccagagccugu

SEQ ID NO: 20006 - RNA, 20 nt, Artificial Sequence
  HTT spacer sequence CTCN PAM
ccagagccugugugccgagg

SEQ ID NO: 20007 - RNA, 20 nt, Artificial Sequence
  HTT spacer sequence CTCN PAM
ggggagauggcugaggaggg

SEQ ID NO: 20008 - RNA, 20 nt, Artificial Sequence
  HTT spacer sequence CTCN PAM
gcacacaggcucuggggaga

SEQ ID NO: 20009 - RNA, 20 nt, Artificial Sequence
  HTT spacer sequence CTCN PAM
gcccauguugcugugggaug

SEQ ID NO: 20010 - RNA, 20 nt, Artificial Sequence
  HTT spacer sequence CTCN PAM
ucccacagcaacaugggccg

SEQ ID NO: 20011 - RNA, 20 nt, Artificial Sequence
  HTT spacer sequence CTCN PAM
caucccacagcaacaugggc

SEQ ID NO: 20012 - RNA, 20 nt, Artificial Sequence
  HTT spacer sequence CTCN PAM
gccucucaucccacagcaac

SEQ ID NO: 20013 - RNA, 20 nt, Artificial Sequence
  HTT spacer sequence CTCN PAM
cgacacucugccucucaucc

SEQ ID NO: 20014 - RNA, 20 nt, Artificial Sequence
  HTT spacer sequence CTCN PAM
uuacacccucacgacacucu

SEQ ID NO: 20015 - RNA, 20 nt, Artificial Sequence
  HTT spacer sequence CTCN PAM
caccacugccgccgcuccuu

SEQ ID NO: 20016 - RNA, 20 nt, Artificial Sequence
  HTT spacer sequence CTCN PAM
ucccaccacugccgccgcuc

SEQ ID NO: 20017 - RNA, 20 nt, Artificial Sequence
  HTT spacer sequence CTCN PAM
cuccucccaccacugccgcc

SEQ ID NO: 20018 - RNA, 20 nt, Artificial Sequence
  HTT spacer sequence CTCN PAM
accacagggucagcggcguc

SEQ ID NO: 20019 - RNA, 20 nt, Artificial Sequence
  HTT spacer sequence CTCN PAM
ucucaaccacagggucagcg

SEQ ID NO: 20020 - RNA, 20 nt, Artificial Sequence
  HTT spacer sequence CTCN PAM
gugcaucucuucucaaccac

SEQ ID NO: 20021 - RNA, 20 nt, Artificial Sequence
  HTT spacer sequence CTCN PAM
ugcaagccaguguggcugcc

SEQ ID NO: 20022 - RNA, 20 nt, Artificial Sequence
  HTT spacer sequence CTCN PAM
gcaggugcuauggcagccac

SEQ ID NO: 20023 - RNA, 20 nt, Artificial Sequence
  HTT spacer sequence CTCN PAM
uggggccacccuuccuucug

SEQ ID NO: 20024 - RNA, 20 nt, Artificial Sequence
  HTT spacer sequence CTCN PAM
guccuccuggggccacccuu

SEQ ID NO: 20025 - RNA, 20 nt, Artificial Sequence
  HTT spacer sequence CTCN PAM
ggcccgcaucagaugugccc

SEQ ID NO: 20026 - RNA, 20 nt, Artificial Sequence
  HTT spacer sequence CTCN PAM
caaaacucaggcccgcauca

SEQ ID NO: 20027 - RNA, 20 nt, Artificial Sequence
  HTT spacer sequence CTCN PAM
agccaguuuccagcuccggg

SEQ ID NO: 20028 - RNA, 20 nt, Artificial Sequence
  HTT spacer sequence CTCN PAM
gggacccacccgccucguag

SEQ ID NO: 20029 - RNA, 20 nt, Artificial Sequence
  HTT spacer sequence CTCN PAM
uaggcaagacaccacccaag

SEQ ID NO: 20030 - RNA, 20 nt, Artificial Sequence
  HTT spacer sequence CTCN PAM
aacuggacaccugugccacc

SEQ ID NO: 20031 - RNA, 20 nt, Artificial Sequence
  HTT spacer sequence CTCN PAM
guggucagcagcugggggca

SEQ ID NO: 20032 - RNA, 20 nt, Artificial Sequence
  HTT spacer sequence CTCN PAM
cauggggccagugugggguu

SEQ ID NO: 20033 - RNA, 20 nt, Artificial Sequence
  HTT spacer sequence CTCN PAM
uaacagggagccagucacaa

SEQ ID NO: 20034 - RNA, 20 nt, Artificial Sequence
  HTT spacer sequence CTCN PAM
cuguuaggaggcuggggaac

SEQ ID NO: 20035 - RNA, 20 nt, Artificial Sequence
  HTT spacer sequence CTCN PAM
agagggaagggugcccgcgg

SEQ ID NO: 20036 - RNA, 20 nt, Artificial Sequence
  HTT spacer sequence CTCN PAM
agggcuugugacuggcuccc

SEQ ID NO: 20037 - RNA, 20 nt, Artificial Sequence
  HTT spacer sequence CTCN PAM
cgagggcuugugacuggcuc

SEQ ID NO: 20038 - RNA, 20 nt, Artificial Sequence
  HTT spacer sequence CTCN PAM
cacaagacauaacagaugga

SEQ ID NO: 20039 - RNA, 20 nt, Artificial Sequence
  HTT spacer sequence CTCN PAM
aucuguuaugucuuguggga

SEQ ID NO: 20040 - RNA, 20 nt, Artificial Sequence
  HTT spacer sequence CTCN PAM
acagcaguuucagggugaag

SEQ ID NO: 20041 - RNA, 20 nt, Artificial Sequence
  HTT spacer sequence CTCN PAM
cggugugcugucccggaugc

SEQ ID NO: 20042 - RNA, 20 nt, Artificial Sequence
  HTT spacer sequence CTCN PAM
cccucucuaaucagagucag

SEQ ID NO: 20043 - RNA, 20 nt, Artificial Sequence
  HTT spacer sequence CTCN PAM
cuaaucagagucagugauuc

SEQ ID NO: 20044 - RNA, 20 nt, Artificial Sequence
  HTT spacer sequence CTCN PAM
aaucagagucagugauucau

SEQ ID NO: 20045 - RNA, 20 nt, Artificial Sequence
  HTT spacer sequence CTCN PAM
gauuagagagggcgagaaga

SEQ ID NO: 20046 - RNA, 20 nt, Artificial Sequence
  HTT spacer sequence CTCN PAM
aaggugauggaagggcauga

SEQ ID NO: 20047 - RNA, 20 nt, Artificial Sequence
  HTT spacer sequence CTCN PAM
aggcuggagcagcaucgccu

SEQ ID NO: 20048 - RNA, 20 nt, Artificial Sequence
  HTT spacer sequence CTCN PAM
agccuggagaaggucgggca

SEQ ID NO: 20049 - RNA, 20 nt, Artificial Sequence
  HTT spacer sequence CTCN PAM
ugucagcagaacucagcugu

SEQ ID NO: 20050 - RNA, 20 nt, Artificial Sequence
  HTT spacer sequence CTCN PAM
gcuguagaauaucguggggu

SEQ ID NO: 20051 - RNA, 20 nt, Artificial Sequence
  HTT spacer sequence CTCN PAM
uuaauggaccaacaacuaag

SEQ ID NO: 20052 - RNA, 20 nt, Artificial Sequence
  HTT spacer sequence CTCN PAM
gccauugcuaaaauauuuga

SEQ ID NO: 20053 - RNA, 20 nt, Artificial Sequence
  HTT spacer sequence CTCN PAM
ugauucuaguuuucaauguu

SEQ ID NO: 20054 - RNA, 20 nt, Artificial Sequence
  HTT spacer sequence CTCN PAM
caaagugcugggauuacagg

SEQ ID NO: 20055 - RNA, 20 nt, Artificial Sequence
  HTT spacer sequence CTCN PAM
gccucccaaagugcugggau

SEQ ID NO: 20056 - RNA, 20 nt, Artificial Sequence
  HTT spacer sequence CTCN PAM
cgccucagccucccaaagug

SEQ ID NO: 20057 - RNA, 20 nt, Artificial Sequence
  HTT spacer sequence CTCN PAM
gaggucaggaguucaagacc

SEQ ID NO: 20058 - RNA, 20 nt, Artificial Sequence
  HTT spacer sequence CTCN PAM
gaggauccucccgccucagc

SEQ ID NO: 20059 - RNA, 20 nt, Artificial Sequence
  HTT spacer sequence CTCN PAM
ugaccucagaggauccuccc

SEQ ID NO: 20060 - RNA, 20 nt, Artificial Sequence
  HTT spacer sequence CTCN PAM
auguuggucaggcuggucuu

SEQ ID NO: 20061 - RNA, 20 nt, Artificial Sequence
  HTT spacer sequence CTCN PAM
ucauuacuaaaaauacaaaa

SEQ ID NO: 20062 - RNA, 20 nt, Artificial Sequence
  HTT spacer sequence CTCN PAM
caaguagcugggauuacagg

SEQ ID NO: 20063 - RNA, 20 nt, Artificial Sequence
  HTT spacer sequence CTCN PAM
gccucccaaguagcugggau

SEQ ID NO: 20064 - RNA, 20 nt, Artificial Sequence
  HTT spacer sequence CTCN PAM
ugccucagccucccaaguag

SEQ ID NO: 20065 - RNA, 20 nt, Artificial Sequence
  HTT spacer sequence CTCN PAM
cggguucaagcgauucuccu

SEQ ID NO: 20066 - RNA, 20 nt, Artificial Sequence
  HTT spacer sequence CTCN PAM
gccucccggguucaagcgau

SEQ ID NO: 20067 - RNA, 20 nt, Artificial Sequence
  HTT spacer sequence CTCN PAM
cugcaaccuccgccucccgg

SEQ ID NO: 20068 - RNA, 20 nt, Artificial Sequence
  HTT spacer sequence CTCN PAM
gcucacugcaaccuccgccu

SEQ ID NO: 20069 - RNA, 20 nt, Artificial Sequence
  HTT spacer sequence CTCN PAM
agccugggugacagugaaac

SEQ ID NO: 20070 - RNA, 20 nt, Artificial Sequence
  HTT spacer sequence CTCN PAM
gucucaaaaaaaaaaaaaaa

SEQ ID NO: 20071 - RNA, 20 nt, Artificial Sequence
  HTT spacer sequence CTCN PAM
aaaaaaaaaaaaaauuaaaa

SEQ ID NO: 20072 - RNA, 20 nt, Artificial Sequence
  HTT spacer sequence CTCN PAM
acuuucuucauuucuuaucc

SEQ ID NO: 20073 - RNA, 20 nt, Artificial Sequence
  HTT spacer sequence CTCN PAM
cagucuuuuguacauuuggc

SEQ ID NO: 20074 - RNA, 20 nt, Artificial Sequence
  HTT spacer sequence CTCN PAM
uuaaaccagcuuaaacuugu

SEQ ID NO: 20075 - RNA, 20 nt, Artificial Sequence
  HTT spacer sequence CTCN PAM
uuuucaacaaguuuaagcug

SEQ ID NO: 20076 - RNA, 20 nt, Artificial Sequence
  HTT spacer sequence CTCN PAM
gaaugggauauuucuucauc

SEQ ID NO: 20077 - RNA, 20 nt, Artificial Sequence
  HTT spacer sequence CTCN PAM
acugaagagaacuaugcagu

SEQ ID NO: 20078 - RNA, 20 nt, Artificial Sequence
  HTT spacer sequence CTCN PAM
ucaguagagguccuguuccu

SEQ ID NO: 20079 - RNA, 20 nt, Artificial Sequence
  HTT spacer sequence CTCN PAM
gguauuauuuagauuuuuca

SEQ ID NO: 20080 - RNA, 20 nt, Artificial Sequence
  HTT spacer sequence CTCN PAM
agcgcucagguauuauuuag

SEQ ID NO: 20081 - RNA, 20 nt, Artificial Sequence
  HTT spacer sequence CTCN PAM
ugaaagcuccaaagucaaug

SEQ ID NO: 20082 - RNA, 20 nt, Artificial Sequence
  HTT spacer sequence CTCN PAM
aaagucaaugucaucauuuu

SEQ ID NO: 20083 - RNA, 20 nt, Artificial Sequence
  HTT spacer sequence CTCN PAM
auaauaucacuucuugguuu

SEQ ID NO: 20084 - RNA, 20 nt, Artificial Sequence
  HTT spacer sequence CTCN PAM
cgcugacuggccuuggacuu

SEQ ID NO: 20085 - RNA, 20 nt, Artificial Sequence
  HTT spacer sequence CTCN PAM
gccucccucggagucgggga

SEQ ID NO: 20086 - RNA, 20 nt, Artificial Sequence
  HTT spacer sequence CTCN PAM
cucggagucggggaguugga

SEQ ID NO: 20087 - RNA, 20 nt, Artificial Sequence
  HTT spacer sequence CTCN PAM
gagucggggaguuggaaccg

SEQ ID NO: 20088 - RNA, 20 nt, Artificial Sequence
  HTT spacer sequence CTCN PAM
gagggaggccgagcggucuu

SEQ ID NO: 20089 - RNA, 20 nt, Artificial Sequence
  HTT spacer sequence CTCN PAM
ccgacuccgagggaggccga

SEQ ID NO: 20090 - RNA, 20 nt, Artificial Sequence
  HTT spacer sequence CTCN PAM
gucugcgguuccaacucccc

SEQ ID NO: 20091 - RNA, 20 nt, Artificial Sequence
  HTT spacer sequence CTCN PAM
agcagccacaugaucucagu

SEQ ID NO: 20092 - RNA, 20 nt, Artificial Sequence
  HTT spacer sequence CTCN PAM
auuucccgacguucguccug

SEQ ID NO: 20093 - RNA, 20 nt, Artificial Sequence
  HTT spacer sequence CTCN PAM
ugcguugcuggugggaugug

SEQ ID NO: 20094 - RNA, 20 nt, Artificial Sequence
  HTT spacer sequence CTCN PAM
uggaagcggcugcaccacau

SEQ ID NO: 20095 - RNA, 20 nt, Artificial Sequence
  HTT spacer sequence CTCN PAM
ggucagugccacuccuagac

SEQ ID NO: 20096 - RNA, 20 nt, Artificial Sequence
  HTT spacer sequence CTCN PAM
uagacaggccacccugcggc

SEQ ID NO: 20097 - RNA, 20 nt, Artificial Sequence
  HTT spacer sequence CTCN PAM
aacuggucugaggaccccuc

SEQ ID NO: 20098 - RNA, 20 nt, Artificial Sequence
  HTT spacer sequence CTCN PAM
gaccaguuugaggacggcug

SEQ ID NO: 20099 - RNA, 20 nt, Artificial Sequence
  HTT spacer sequence CTCN PAM
acgcucuuaaaaaucauuaa

SEQ ID NO: 20100 - RNA, 20 nt, Artificial Sequence
  HTT spacer sequence CTCN PAM
uaaaaaucauuaaaaguggg

SEQ ID NO: 20101 - RNA, 20 nt, Artificial Sequence
  HTT spacer sequence CTCN PAM
caccuguaaucccagcacuu

SEQ ID NO: 20102 - RNA, 20 nt, Artificial Sequence
  HTT spacer sequence CTCN PAM
caaagugcugggauuacagg

SEQ ID NO: 20103 - RNA, 20 nt, Artificial Sequence
  HTT spacer sequence CTCN PAM
ugauccgccugucuuggccu

SEQ ID NO: 20104 - RNA, 20 nt, Artificial Sequence
  HTT spacer sequence CTCN PAM
auguccugaccucgugaucc

SEQ ID NO: 20105 - RNA, 20 nt, Artificial Sequence
  HTT spacer sequence CTCN PAM
acuaaaaauacaaaaaauua

SEQ ID NO: 20106 - RNA, 20 nt, Artificial Sequence
  HTT spacer sequence CTCN PAM
caaguagcugggacuacagg

SEQ ID NO: 20107 - RNA, 20 nt, Artificial Sequence
  HTT spacer sequence CTCN PAM
gccucccaaguagcugggac

SEQ ID NO: 20108 - RNA, 20 nt, Artificial Sequence
  HTT spacer sequence CTCN PAM
uggcucagccucccaaguag

SEQ ID NO: 20109 - RNA, 20 nt, Artificial Sequence
  HTT spacer sequence CTCN PAM
uggguucacgccauucuccu

SEQ ID NO: 20110 - RNA, 20 nt, Artificial Sequence
  HTT spacer sequence CTCN PAM
accuccuggguucacgccau

SEQ ID NO: 20111 - RNA, 20 nt, Artificial Sequence
  HTT spacer sequence CTCN PAM
cugcaagcuccaccuccugg

SEQ ID NO: 20112 - RNA, 20 nt, Artificial Sequence
  HTT spacer sequence CTCN PAM
gcucacugcaagcuccaccu

SEQ ID NO: 20113 - RNA, 20 nt, Artificial Sequence
  HTT spacer sequence CTCN PAM
acugcacuccagccugggca

SEQ ID NO: 20114 - RNA, 20 nt, Artificial Sequence
  HTT spacer sequence CTCN PAM
agccugggcagcagagcgag

SEQ ID NO: 20115 - RNA, 20 nt, Artificial Sequence
  HTT spacer sequence CTCN PAM
gcugcccaggcuggagugca

SEQ ID NO: 20116 - RNA, 20 nt, Artificial Sequence
  HTT spacer sequence CTCN PAM
cucugcugcccaggcuggag

SEQ ID NO: 20117 - RNA, 20 nt, Artificial Sequence
  HTT spacer sequence CTCN PAM
gucucaaaaaaaaauaauaa

SEQ ID NO: 20118 - RNA, 20 nt, Artificial Sequence
  HTT spacer sequence CTCN PAM
aaaaaaaauaauaaauaaau

SEQ ID NO: 20119 - RNA, 20 nt, Artificial Sequence
  HTT spacer sequence CTCN PAM
cauaagcaaaaguucuuugg

SEQ ID NO: 20120 - RNA, 20 nt, Artificial Sequence
  HTT spacer sequence CTCN PAM
gguuuaauuucuaauaagau

SEQ ID NO: 20121 - RNA, 20 nt, Artificial Sequence
  HTT spacer sequence CTCN PAM
cgaaaacuuuuuguuuugga

SEQ ID NO: 20122 - RNA, 20 nt, Artificial Sequence
  HTT spacer sequence CTCN PAM
ggcuuaagagaagcccacug

SEQ ID NO: 20123 - RNA, 20 nt, Artificial Sequence
  HTT spacer sequence CTCN PAM
uaagccagagauuuacgacc

SEQ ID NO: 20124 - RNA, 20 nt, Artificial Sequence
  HTT spacer sequence CTCN PAM
cagcaggcucuggguccguc

SEQ ID NO: 20125 - RNA, 20 nt, Artificial Sequence
  HTT spacer sequence CTCN PAM
gcaggcucuggguccgucca

SEQ ID NO: 20126 - RNA, 20 nt, Artificial Sequence
  HTT spacer sequence CTCN PAM
ggguccguccacuuuggggg

SEQ ID NO: 20127 - RNA, 20 nt, Artificial Sequence
  HTT spacer sequence CTCN PAM
uauacuucacaaccaaaaca

SEQ ID NO: 20128 - RNA, 20 nt, Artificial Sequence
  HTT spacer sequence CTCN PAM
auucacuccuauacuucaca

SEQ ID NO: 20129 - RNA, 20 nt, Artificial Sequence
  HTT spacer sequence CTCN PAM
uucuuacccagauguguauu

SEQ ID NO: 20130 - RNA, 20 nt, Artificial Sequence
  HTT spacer sequence CTCN PAM
aaaaaaaaaaaacaaaccac

SEQ ID NO: 20131 - RNA, 20 nt, Artificial Sequence
  HTT spacer sequence CTCN PAM
gucuccaaaaaaaaaaaaca

SEQ ID NO: 20132 - RNA, 20 nt, Artificial Sequence
  HTT spacer sequence CTCN PAM
gucacucaggcuggagugca

SEQ ID NO: 20133 - RNA, 20 nt, Artificial Sequence
  HTT spacer sequence CTCN PAM
ggcuggagugcaguggcgcg

SEQ ID NO: 20134 - RNA, 20 nt, Artificial Sequence
  HTT spacer sequence CTCN PAM
agccugagugacagagcggg

SEQ ID NO: 20135 - RNA, 20 nt, Artificial Sequence
  HTT spacer sequence CTCN PAM
cugcaagcuccgccuccugg

SEQ ID NO: 20136 - RNA, 20 nt, Artificial Sequence
  HTT spacer sequence CTCN PAM
gccuccuggguucacugcaa

SEQ ID NO: 20137 - RNA, 20 nt, Artificial Sequence
  HTT spacer sequence CTCN PAM
uggguucacugcaagcucug

SEQ ID NO: 20138 - RNA, 20 nt, Artificial Sequence
  HTT spacer sequence CTCN PAM
gccucccggguucacgccau

SEQ ID NO: 20139 - RNA, 20 nt, Artificial Sequence
  HTT spacer sequence CTCN PAM
cggguucacgccauucuccu

SEQ ID NO: 20140 - RNA, 20 nt, Artificial Sequence
  HTT spacer sequence CTCN PAM
ugccucagccuccugaguag

SEQ ID NO: 20141 - RNA, 20 nt, Artificial Sequence
  HTT spacer sequence CTCN PAM
gccuccugaguagcugggac

SEQ ID NO: 20142 - RNA, 20 nt, Artificial Sequence
  HTT spacer sequence CTCN PAM
ugaguagcugggacuacagg

SEQ ID NO: 20143 - RNA, 20 nt, Artificial Sequence
  HTT spacer sequence CTCN PAM
ggaggcugaggcaggagaau

SEQ ID NO: 20144 - RNA, 20 nt, Artificial Sequence
  HTT spacer sequence CTCN PAM
acuaaaaauacaaaaaauua

SEQ ID NO: 20145 - RNA, 20 nt, Artificial Sequence
  HTT spacer sequence CTCN PAM
aucuccugacaucgugaucc

SEQ ID NO: 20146 - RNA, 20 nt, Artificial Sequence
  HTT spacer sequence CTCN PAM
ugacaucgugauccacccgc

SEQ ID NO: 20147 - RNA, 20 nt, Artificial Sequence
  HTT spacer sequence CTCN PAM
gccucccaaagugcuggaau

SEQ ID NO: 20148 - RNA, 20 nt, Artificial Sequence
  HTT spacer sequence CTCN PAM
caaagugcuggaauuacagg

SEQ ID NO: 20149 - RNA, 20 nt, Artificial Sequence
  HTT spacer sequence CTCN PAM
ugaaaugaaguagaaguuca

SEQ ID NO: 20150 - RNA, 20 nt, Artificial Sequence
  HTT spacer sequence CTCN PAM
guccaucaugccuuugugac

SEQ ID NO: 20151 - RNA, 20 nt, Artificial Sequence
  HTT spacer sequence CTCN PAM
cacgcugggccuuugguuca

SEQ ID NO: 20152 - RNA, 20 nt, Artificial Sequence
  HTT spacer sequence CTCN PAM
ugguggugucuuucagaauu

SEQ ID NO: 20153 - RNA, 20 nt, Artificial Sequence
  HTT spacer sequence CTCN PAM
uucaaagaaaauagcugaca

SEQ ID NO: 20154 - RNA, 20 nt, Artificial Sequence
  HTT spacer sequence CTCN PAM
cuuuguucguuuuccaaaaa

SEQ ID NO: 20155 - RNA, 20 nt, Artificial Sequence
  HTT spacer sequence CTCN PAM
gguuguucagccuugggugu

SEQ ID NO: 20156 - RNA, 20 nt, Artificial Sequence
  HTT spacer sequence CTCN PAM
aaaaaaggaugugcaaaaac

SEQ ID NO: 20157 - RNA, 20 nt, Artificial Sequence
  HTT spacer sequence CTCN PAM
auacguguguuccagaucca

SEQ ID NO: 20158 - RNA, 20 nt, Artificial Sequence
  HTT spacer sequence CTCN PAM
gcccauugcacaccugcauu

SEQ ID NO: 20159 - RNA, 20 nt, Artificial Sequence
  HTT spacer sequence CTCN PAM
gcguggacguggggcaggcg

SEQ ID NO: 20160 - RNA, 20 nt, Artificial Sequence
  HTT spacer sequence CTCN PAM
ggcaggacguugaaaagaug

SEQ ID NO: 20161 - RNA, 20 nt, Artificial Sequence
  HTT spacer sequence CTCN PAM
cacacucgaccauuuucacu

SEQ ID NO: 20162 - RNA, 20 nt, Artificial Sequence
  HTT spacer sequence CTCN PAM
accauuuucacuccaucacg

SEQ ID NO: 20163 - RNA, 20 nt, Artificial Sequence
  HTT spacer sequence CTCN PAM
aucacggacauuuggaagug

SEQ ID NO: 20164 - RNA, 20 nt, Artificial Sequence
  HTT spacer sequence CTCN PAM
gggcugcgccggggcucggg

SEQ ID NO: 20165 - RNA, 20 nt, Artificial Sequence
  HTT spacer sequence CTCN PAM
gggccugccugcguuccugc

SEQ ID NO: 20166 - RNA, 20 nt, Artificial Sequence
  HTT spacer sequence CTCN PAM
ggucuugccacaucagugcg

SEQ ID NO: 20167 - RNA, 20 nt, Artificial Sequence
  HTT spacer sequence CTCN PAM
gugaagaccccgugaagacc

SEQ ID NO: 20168 - RNA, 20 nt, Artificial Sequence
  HTT spacer sequence CTCN PAM
gggacccuuggugacccaca

SEQ ID NO: 20169 - RNA, 20 nt, Artificial Sequence
  HTT spacer sequence CTCN PAM
gccugugggucaccaagggu

SEQ ID NO: 20170 - RNA, 20 nt, Artificial Sequence
  HTT spacer sequence CTCN PAM
ggucucggccugugggucac

SEQ ID NO: 20171 - RNA, 20 nt, Artificial Sequence
  HTT spacer sequence CTCN PAM
agcauucaggcagugguucu

SEQ ID NO: 20172 - RNA, 20 nt, Artificial Sequence
  HTT spacer sequence CTCN PAM
ggucaccugugugcccgcuc

SEQ ID NO: 20173 - RNA, 20 nt, Artificial Sequence
  HTT spacer sequence CTCN PAM
cucaggucaccugugugccc

SEQ ID NO: 20174 - RNA, 20 nt, Artificial Sequence
  HTT spacer sequence CTCN PAM
ucuguccuugcccgguaccc

SEQ ID NO: 20175 - RNA, 20 nt, Artificial Sequence
  HTT spacer sequence CTCN PAM
ggguaccgggcaaggacaga

SEQ ID NO: 20176 - RNA, 20 nt, Artificial Sequence
  HTT spacer sequence CTCN PAM
cuggcgauugguggacgcac

SEQ ID NO: 20177 - RNA, 20 nt, Artificial Sequence
  HTT spacer sequence CTCN PAM
gugugacuggguggcgucau

SEQ ID NO: 20178 - RNA, 20 nt, Artificial Sequence
  HTT spacer sequence CTCN PAM
gggcccgcuugggggcacgg

SEQ ID NO: 20179 - RNA, 20 nt, Artificial Sequence
  HTT spacer sequence CTCN PAM
cugcugucuuguaggcacug

SEQ ID NO: 20180 - RNA, 20 nt, Artificial Sequence
  HTT spacer sequence CTCN PAM
aaacccuguaaagacaaaga

SEQ ID NO: 20181 - RNA, 20 nt, Artificial Sequence
  HTT spacer sequence CTCN PAM
acucgaaacccuguaaagac

SEQ ID NO: 20182 - RNA, 20 nt, Artificial Sequence
  HTT spacer sequence CTCN PAM
ucuaacauacuagacacuua

SEQ ID NO: 20183 - RNA, 20 nt, Artificial Sequence
  HTT spacer sequence CTCN PAM
cuucuaacauacuagacacu

SEQ ID NO: 20184 - RNA, 20 nt, Artificial Sequence
  HTT spacer sequence CTCN PAM
aaucccccuacagccuuauu

SEQ ID NO: 20185 - RNA, 20 nt, Artificial Sequence
  HTT spacer sequence CTCN PAM
ccccacggcuccaauccccc

SEQ ID NO: 20186 - RNA, 20 nt, Artificial Sequence
  HTT spacer sequence CTCN PAM
caccccacggcuccaauccc

SEQ ID NO: 20187 - RNA, 20 nt, Artificial Sequence
  HTT spacer sequence CTCN PAM
caugacauuuuuugaaggcc

SEQ ID NO: 20188 - RNA, 20 nt, Artificial Sequence
  HTT spacer sequence CTCN PAM
auccgcucacaugacauuuu

SEQ ID NO: 20189 - RNA, 20 nt, Artificial Sequence
  HTT spacer sequence CTCN PAM
cacuccauccgcucacauga

SEQ ID NO: 20190 - RNA, 20 nt, Artificial Sequence
  HTT spacer sequence CTCN PAM
ccugagcacugggagcugca

SEQ ID NO: 20191 - RNA, 20 nt, Artificial Sequence
  HTT spacer sequence CTCN PAM
ggugagggcgccccucccac

SEQ ID NO: 20192 - RNA, 20 nt, Artificial Sequence
  HTT spacer sequence CTCN PAM
cagugcucaggugagggcgc

SEQ ID NO: 20193 - RNA, 20 nt, Artificial Sequence
  HTT spacer sequence CTCN PAM
caccuagacagugcagcucc

SEQ ID NO: 20194 - RNA, 20 nt, Artificial Sequence
  HTT spacer sequence CTCN PAM
gagggcgaggugggccugga

SEQ ID NO: 20195 - RNA, 20 nt, Artificial Sequence
  HTT spacer sequence CTCN PAM
gagccagcucccaccuagac

SEQ ID NO: 20196 - RNA, 20 nt, Artificial Sequence
  HTT spacer sequence CTCN PAM
cccucagagccagcucccac

SEQ ID NO: 20197 - RNA, 20 nt, Artificial Sequence
  HTT spacer sequence CTCN PAM
ugucccagcagaaagcaggg

SEQ ID NO: 20198 - RNA, 20 nt, Artificial Sequence
  HTT spacer sequence CTCN PAM
cuugucccagcagaaagcag

SEQ ID NO: 20199 - RNA, 20 nt, Artificial Sequence
  HTT spacer sequence CTCN PAM
gggacucucuugucccagca

SEQ ID NO: 20200 - RNA, 20 nt, Artificial Sequence
  HTT spacer sequence CTCN PAM
cugcuccgggacucucuugu

SEQ ID NO: 20201 - RNA, 20 nt, Artificial Sequence
  HTT spacer sequence CTCN PAM
acgccacaccugacccuccc

SEQ ID NO: 20202 - RNA, 20 nt, Artificial Sequence
  HTT spacer sequence CTCN PAM
caggcuccacgccacaccug

SEQ ID NO: 20203 - RNA, 20 nt, Artificial Sequence
  HTT spacer sequence CTCN PAM
cccaccucccaggcuccacg

SEQ ID NO: 20204 - RNA, 20 nt, Artificial Sequence
  HTT spacer sequence CTCN PAM
ggaggcauccuggccuaggg

SEQ ID NO: 20205 - RNA, 20 nt, Artificial Sequence
  HTT spacer sequence CTCN PAM
ugagcaccccucacccaccu

SEQ ID NO: 20206 - RNA, 20 nt, Artificial Sequence
  HTT spacer sequence CTCN PAM
ccuaggccaggaugccuccu

SEQ ID NO: 20207 - RNA, 20 nt, Artificial Sequence
  HTT spacer sequence CTCN PAM
gugugcuggcuuugcgcucg

SEQ ID NO: 20208 - RNA, 20 nt, Artificial Sequence
  HTT spacer sequence CTCN PAM
uggccaucuccaggacucag

SEQ ID NO: 20209 - RNA, 20 nt, Artificial Sequence
  HTT spacer sequence CTCN PAM
aggacucagaacaugcgaga

SEQ ID NO: 20210 - RNA, 20 nt, Artificial Sequence
  HTT spacer sequence CTCN PAM
gaacaugcgagaggcacgca

SEQ ID NO: 20211 - RNA, 20 nt, Artificial Sequence
  HTT spacer sequence CTCN PAM
cauguucugaguccuggaga

SEQ ID NO: 20212 - RNA, 20 nt, Artificial Sequence
  HTT spacer sequence CTCN PAM
cgcauguucugaguccugga

SEQ ID NO: 20213 - RNA, 20 nt, Artificial Sequence
  HTT spacer sequence CTCN PAM
accuugcgugccucucgcau

SEQ ID NO: 20214 - RNA, 20 nt, Artificial Sequence
  HTT spacer sequence CTCN PAM
cacacgcuccaccuugcgug

SEQ ID NO: 20215 - RNA, 20 nt, Artificial Sequence
  HTT spacer sequence CTCN PAM
gcuggguccggagggagagg

SEQ ID NO: 20216 - RNA, 20 nt, Artificial Sequence
  HTT spacer sequence CTCN PAM
ggacccagcugagaugaacu

SEQ ID NO: 20217 - RNA, 20 nt, Artificial Sequence
  HTT spacer sequence CTCN PAM
cuccggacccagcugagaug

SEQ ID NO: 20218 - RNA, 20 nt, Artificial Sequence
  HTT spacer sequence CTCN PAM
cccuccggacccagcugaga

SEQ ID NO: 20219 - RNA, 20 nt, Artificial Sequence
  HTT spacer sequence CTCN PAM
uguucuagggguagggugcc

SEQ ID NO: 20220 - RNA, 20 nt, Artificial Sequence
  HTT spacer sequence CTCN PAM
cagaugugucaguucuuggc

SEQ ID NO: 20221 - RNA, 20 nt, Artificial Sequence
  HTT spacer sequence CTCN PAM
ccucagcucagggaaguggg

SEQ ID NO: 20222 - RNA, 20 nt, Artificial Sequence
  HTT spacer sequence CTCN PAM
gcucagggaagugggacccc

SEQ ID NO: 20223 - RNA, 20 nt, Artificial Sequence
  HTT spacer sequence CTCN PAM
gggaagugggaccccugcac

SEQ ID NO: 20224 - RNA, 20 nt, Artificial Sequence
  HTT spacer sequence CTCN PAM
guuuaucuccgccuugcugg

SEQ ID NO: 20225 - RNA, 20 nt, Artificial Sequence
  HTT spacer sequence CTCN PAM
gccuugcugggcacuagcuc

SEQ ID NO: 20226 - RNA, 20 nt, Artificial Sequence
  HTT spacer sequence CTCN PAM
gcuucacugcuuuccgucaa

SEQ ID NO: 20227 - RNA, 20 nt, Artificial Sequence
  HTT spacer sequence CTCN PAM
ccugcucugcaccaccaugu

SEQ ID NO: 20228 - RNA, 20 nt, Artificial Sequence
  HTT spacer sequence CTCN PAM
ugcucugcaccaccaugucc

SEQ ID NO: 20229 - RNA, 20 nt, Artificial Sequence
  HTT spacer sequence CTCN PAM
gcaccaccauguccagaccu

SEQ ID NO: 20230 - RNA, 20 nt, Artificial Sequence
  HTT spacer sequence CTCN PAM
aggucuggacaugguggugc

SEQ ID NO: 20231 - RNA, 20 nt, Artificial Sequence
  HTT spacer sequence CTCN PAM
ucccccacaaaugucauauu

SEQ ID NO: 20232 - RNA, 20 nt, Artificial Sequence
  HTT spacer sequence CTCN PAM
aggggguaaauaugacauuu

SEQ ID NO: 20233 - RNA, 20 nt, Artificial Sequence
  HTT spacer sequence CTCN PAM
agguccucuaggggguaaau

SEQ ID NO: 20234 - RNA, 20 nt, Artificial Sequence
  HTT spacer sequence CTCN PAM
uguccucuagguccucuagg

SEQ ID NO: 20235 - RNA, 20 nt, Artificial Sequence
  HTT spacer sequence CTCN PAM
cuccuguccucuagguccuc

SEQ ID NO: 20236 - RNA, 20 nt, Artificial Sequence
  HTT spacer sequence CTCN PAM
ggucugcccuccccguuggg

SEQ ID NO: 20237 - RNA, 20 nt, Artificial Sequence
  HTT spacer sequence CTCN PAM
ccguuggggccaagugcccg

SEQ ID NO: 20238 - RNA, 20 nt, Artificial Sequence
  HTT spacer sequence CTCN PAM
cuaagaaaggcugugacguu

SEQ ID NO: 20239 - RNA, 20 nt, Artificial Sequence
  HTT spacer sequence CTCN PAM
agccccaaaggcguucccca

SEQ ID NO: 20240 - RNA, 20 nt, Artificial Sequence
  HTT spacer sequence CTCN PAM
uuuggauguuuucccugauc

SEQ ID NO: 20241 - RNA, 20 nt, Artificial Sequence
  HTT spacer sequence CTCN PAM
gcuguagccugugggcuacc

SEQ ID NO: 20242 - RNA, 20 nt, Artificial Sequence
  HTT spacer sequence CTCN PAM
cccugggcacacccucagcu

SEQ ID NO: 20243 - RNA, 20 nt, Artificial Sequence
  HTT spacer sequence CTCN PAM
cgcccugggcacacccucag

SEQ ID NO: 20244 - RNA, 20 nt, Artificial Sequence
  HTT spacer sequence CTCN PAM
gcggggcucugggcugcccu

SEQ ID NO: 20245 - RNA, 20 nt, Artificial Sequence
  HTT spacer sequence CTCN PAM
gggcugcccuugcggcguga

SEQ ID NO: 20246 - RNA, 20 nt, Artificial Sequence
  HTT spacer sequence CTCN PAM
cgccgcaagggcagcccaga

SEQ ID NO: 20247 - RNA, 20 nt, Artificial Sequence
  HTT spacer sequence CTCN PAM
ugcugccgggcgugcugggc

SEQ ID NO: 20248 - RNA, 20 nt, Artificial Sequence
  HTT spacer sequence CTCN PAM
gcccagcacgcccggcagca

SEQ ID NO: 20249 - RNA, 20 nt, Artificial Sequence
  HTT spacer sequence CTCN PAM
uccuaggaggucacggagga

SEQ ID NO: 20250 - RNA, 20 nt, Artificial Sequence
  HTT spacer sequence CTCN PAM
uaggaagagcuguccaagac

SEQ ID NO: 20251 - RNA, 20 nt, Artificial Sequence
  HTT spacer sequence CTCN PAM
gugaccuccuaggaagagcu

SEQ ID NO: 20252 - RNA, 20 nt, Artificial Sequence
  HTT spacer sequence CTCN PAM
uuuggaaacgguuuuuaggg

SEQ ID NO: 20253 - RNA, 20 nt, Artificial Sequence
  HTT spacer sequence CTCN PAM
cagccugaguccgaucucac

SEQ ID NO: 20254 - RNA, 20 nt, Artificial Sequence
  HTT spacer sequence CTCN PAM
gccugaguccgaucucacag

SEQ ID NO: 20255 - RNA, 20 nt, Artificial Sequence
  HTT spacer sequence CTCN PAM
ggcugagaggugcacacccu

SEQ ID NO: 20256 - RNA, 20 nt, Artificial Sequence
  HTT spacer sequence CTCN PAM
cagagacugugugagcugcu

SEQ ID NO: 20257 - RNA, 20 nt, Artificial Sequence
  HTT spacer sequence CTCN PAM
gugagaucggacucaggcug

SEQ ID NO: 20258 - RNA, 20 nt, Artificial Sequence
  HTT spacer sequence CTCN PAM
cacagucucugugagaucgg

SEQ ID NO: 20259 - RNA, 20 nt, Artificial Sequence
  HTT spacer sequence CTCN PAM
cccucgugacccccuucagc

SEQ ID NO: 20260 - RNA, 20 nt, Artificial Sequence
  HTT spacer sequence CTCN PAM
ugacccccuucagcucaugc

SEQ ID NO: 20261 - RNA, 20 nt, Artificial Sequence
  HTT spacer sequence CTCN PAM
ugccagccugccugaucugc

SEQ ID NO: 20262 - RNA, 20 nt, Artificial Sequence
  HTT spacer sequence CTCN PAM
cacaaguaccugcugcucug

SEQ ID NO: 20263 - RNA, 20 nt, Artificial Sequence
  HTT spacer sequence CTCN PAM
gaaccuugccauuuucggca

SEQ ID NO: 20264 - RNA, 20 nt, Artificial Sequence
  HTT spacer sequence CTCN PAM
uccucuugaacgggagaauc

SEQ ID NO: 20265 - RNA, 20 nt, Artificial Sequence
  HTT spacer sequence CTCN PAM
ucuugaacgggagaaucgga

SEQ ID NO: 20266 - RNA, 20 nt, Artificial Sequence
  HTT spacer sequence CTCN PAM
ugaacgggagaaucggauuc

SEQ ID NO: 20267 - RNA, 20 nt, Artificial Sequence
  HTT spacer sequence CTCN PAM
cguucaagaggaggagggca

SEQ ID NO: 20268 - RNA, 20 nt, Artificial Sequence
  HTT spacer sequence CTCN PAM
acacacuggaauccgauucu

SEQ ID NO: 20269 - RNA, 20 nt, Artificial Sequence
  HTT spacer sequence CTCN PAM
ugggucccuuacugauggag

SEQ ID NO: 20270 - RNA, 20 nt, Artificial Sequence
  HTT spacer sequence CTCN PAM
aucaguaagggacccacgag

SEQ ID NO: 20271 - RNA, 20 nt, Artificial Sequence
  HTT spacer sequence CTCN PAM
ccaucaguaagggacccacg

SEQ ID NO: 20272 - RNA, 20 nt, Artificial Sequence
  HTT spacer sequence CTCN PAM
gcaauaaaccguggugcagc

SEQ ID NO: 20273 - RNA, 20 nt, Artificial Sequence
  HTT spacer sequence CTCN PAM
cuguguacuuguguacacua

SEQ ID NO: 20274 - RNA, 20 nt, Artificial Sequence
  HTT spacer sequence CTCN PAM
guguacuuguguacacuagu

SEQ ID NO: 20275 - RNA, 20 nt, Artificial Sequence
  HTT spacer sequence CTCN PAM
cuaguguacacaaguacaca

SEQ ID NO: 20276 - RNA, 20 nt, Artificial Sequence
  HTT spacer sequence CTCN PAM
uccuucaaaacucacuagug

SEQ ID NO: 20277 - RNA, 20 nt, Artificial Sequence
  HTT spacer sequence CTCN PAM
aggggaaacgaaaaguugua

SEQ ID NO: 20278 - RNA, 20 nt, Artificial Sequence
  HTT spacer sequence CTCN PAM
cguguaagccauuuguagcc

SEQ ID NO: 20279 - RNA, 20 nt, Artificial Sequence
  HTT spacer sequence CTCN PAM
acccgaccucacguguaagc

SEQ ID NO: 20280 - RNA, 20 nt, Artificial Sequence
  HTT spacer sequence CTCN PAM
ucuacaaacggugcuguaac

SEQ ID NO: 20281 - RNA, 20 nt, Artificial Sequence
  HTT spacer sequence CTCN PAM
auagcgacaggacacccucu

SEQ ID NO: 20282 - RNA, 20 nt, Artificial Sequence
  HTT spacer sequence CTCN PAM
uucuugaagauggauggccu

SEQ ID NO: 20283 - RNA, 20 nt, Artificial Sequence
  HTT spacer sequence CTCN PAM
uuuuuaggaucugaaauuau

SEQ ID NO: 20284 - RNA, 20 nt, Artificial Sequence
  HTT spacer sequence CTCN PAM
agaauguagcgucagaaauu

SEQ ID NO: 20285 - RNA, 20 nt, Artificial Sequence
  HTT spacer sequence CTCN PAM
agaagcacacagguggggau

SEQ ID NO: 20286 - RNA, 20 nt, Artificial Sequence
  HTT spacer sequence CTCN PAM
gaccccaucugucugcucua

SEQ ID NO: 20287 - RNA, 20 nt, Artificial Sequence
  HTT spacer sequence CTCN PAM
ccucugaccccaucugucug

SEQ ID NO: 20288 - RNA, 20 nt, Artificial Sequence
  HTT spacer sequence CTCN PAM
caaauccccgcugccucacc

SEQ ID NO: 20289 - RNA, 20 nt, Artificial Sequence
  HTT spacer sequence CTCN PAM
ugccucccaaauccccgcug

SEQ ID NO: 20290 - RNA, 20 nt, Artificial Sequence
  HTT spacer sequence CTCN PAM
gccaaccauggcccugaccu

SEQ ID NO: 20291 - RNA, 20 nt, Artificial Sequence
  HTT spacer sequence CTCN PAM
ugaccaucaguggccucugc

SEQ ID NO: 20292 - RNA, 20 nt, Artificial Sequence
  HTT spacer sequence CTCN PAM
uccugcugugugcagccucc

SEQ ID NO: 20293 - RNA, 20 nt, Artificial Sequence
  HTT spacer sequence CTCN PAM
ugcugugugcagccuccuuc

SEQ ID NO: 20294 - RNA, 20 nt, Artificial Sequence
  HTT spacer sequence CTCN PAM
uuccugccgggcccugcuga

SEQ ID NO: 20295 - RNA, 20 nt, Artificial Sequence
  HTT spacer sequence CTCN PAM
ggccgcccugaggugcacag

SEQ ID NO: 20296 - RNA, 20 nt, Artificial Sequence
  HTT spacer sequence CTCN PAM
gggcggccugaggucagggc

SEQ ID NO: 20297 - RNA, 20 nt, Artificial Sequence
  HTT spacer sequence CTCN PAM
gugcaccucagggcggccug

SEQ ID NO: 20298 - RNA, 20 nt, Artificial Sequence
  HTT spacer sequence CTCN PAM
uagauaagauugcuggaucc

SEQ ID NO: 20299 - RNA, 20 nt, Artificial Sequence
  HTT spacer sequence CTCN PAM
ugggacccugcaggcuccua

SEQ ID NO: 20300 - RNA, 20 nt, Artificial Sequence
  HTT spacer sequence CTCN PAM
cuugucucaugggacccugc

SEQ ID NO: 20301 - RNA, 20 nt, Artificial Sequence
  HTT spacer sequence CTCN PAM
ucuguuugcgcaagaagcaa

SEQ ID NO: 20302 - RNA, 20 nt, Artificial Sequence
  HTT spacer sequence CTCN PAM
accucgucuguuugcgcaag

SEQ ID NO: 20303 - RNA, 20 nt, Artificial Sequence
  HTT spacer sequence CTCN PAM
uccaccucgucuguuugcgc

SEQ ID NO: 20304 - RNA, 20 nt, Artificial Sequence
  HTT spacer sequence CTCN PAM
ccaucggccuucuagggccc

SEQ ID NO: 20305 - RNA, 20 nt, Artificial Sequence
  HTT spacer sequence CTCN PAM
aucggccuucuagggcccug

SEQ ID NO: 20306 - RNA, 20 nt, Artificial Sequence
  HTT spacer sequence CTCN PAM
gggcccuagaaggccgaugg

SEQ ID NO: 20307 - RNA, 20 nt, Artificial Sequence
  HTT spacer sequence CTCN PAM
ggacugccucagggcccuag

SEQ ID NO: 20308 - RNA, 20 nt, Artificial Sequence
  HTT spacer sequence CTCN PAM
cccucaggacugccucaggg

SEQ ID NO: 20309 - RNA, 20 nt, Artificial Sequence
  HTT spacer sequence CTCN PAM
ggugggcguggcccucaccc

SEQ ID NO: 20310 - RNA, 20 nt, Artificial Sequence
  HTT spacer sequence CTCN PAM
gcucuggugggcguggcccu

SEQ ID NO: 20311 - RNA, 20 nt, Artificial Sequence
  HTT spacer sequence CTCN PAM
ggccccuccgcucugguggg

SEQ ID NO: 20312 - RNA, 20 nt, Artificial Sequence
  HTT spacer sequence CTCN PAM
cacagaagcagccaggccca

SEQ ID NO: 20313 - RNA, 20 nt, Artificial Sequence
  HTT spacer sequence CTCN PAM
aaaauugcauuuggcuucaa

SEQ ID NO: 20314 - RNA, 20 nt, Artificial Sequence
  HTT spacer sequence CTCN PAM
caaaaauugcauuuggcuuc

SEQ ID NO: 20315 - RNA, 20 nt, Artificial Sequence
  HTT spacer sequence CTCN PAM
ccuuuugggcacuaaauucc

SEQ ID NO: 20316 - RNA, 20 nt, Artificial Sequence
  HTT spacer sequence CTCN PAM
cuccccuuuugggcacuaaa

SEQ ID NO: 20317 - RNA, 20 nt, Artificial Sequence
  HTT spacer sequence CTCN PAM
uacagcauggcauuggcucg

SEQ ID NO: 20318 - RNA, 20 nt, Artificial Sequence
  HTT spacer sequence CTCN PAM
ugaggcugcugaauggggcg

SEQ ID NO: 20319 - RNA, 20 nt, Artificial Sequence
  HTT spacer sequence CTCN PAM
cgagccaaugccaugcugua

SEQ ID NO: 20320 - RNA, 20 nt, Artificial Sequence
  HTT spacer sequence CTCN PAM
ccacgccccauucagcagcc

SEQ ID NO: 20321 - RNA, 20 nt, Artificial Sequence
  HTT spacer sequence CTCN PAM
uccccacgccccauucagca

SEQ ID NO: 20322 - RNA, 20 nt, Artificial Sequence
  HTT spacer sequence CTCN PAM
ugggccagcagaccacccac

SEQ ID NO: 20323 - RNA, 20 nt, Artificial Sequence
  HTT spacer sequence CTCN PAM
cggccuguggguggucugcu

SEQ ID NO: 20324 - RNA, 20 nt, Artificial Sequence
  HTT spacer sequence CTCN PAM
ggcugcccucccggccugug

SEQ ID NO: 20325 - RNA, 20 nt, Artificial Sequence
  HTT spacer sequence CTCN PAM
ucaggcugcccucccggccu

SEQ ID NO: 20326 - RNA, 20 nt, Artificial Sequence
  HTT spacer sequence CTCN PAM
uucuuggggaacuuugcuga

SEQ ID NO: 20327 - RNA, 20 nt, Artificial Sequence
  HTT spacer sequence CTCN PAM
ugccaccccgcccgcuggcu

SEQ ID NO: 20328 - RNA, 20 nt, Artificial Sequence
  HTT spacer sequence CTCN PAM
cuagcccagcugcagcuccu

SEQ ID NO: 20329 - RNA, 20 nt, Artificial Sequence
  HTT spacer sequence CTCN PAM
cugcccguggggugcuauga

SEQ ID NO: 20330 - RNA, 20 nt, Artificial Sequence
  HTT spacer sequence CTCN PAM
gcccguggggugcuaugaaa

SEQ ID NO: 20331 - RNA, 20 nt, Artificial Sequence
  HTT spacer sequence CTCN PAM
aaaucacaccggcuuucaua

SEQ ID NO: 20332 - RNA, 20 nt, Artificial Sequence
  HTT spacer sequence CTCN PAM
gcagggcuguccccaggcug

SEQ ID NO: 20333 - RNA, 20 nt, Artificial Sequence
  HTT spacer sequence CTCN PAM
ugcaaugucggcagccuggg

SEQ ID NO: 20334 - RNA, 20 nt, Artificial Sequence
  HTT spacer sequence CTCN PAM
acggggccccagaucugggg

SEQ ID NO: 20335 - RNA, 20 nt, Artificial Sequence
  HTT spacer sequence CTCN PAM
gcggacacagagucaaaucu

SEQ ID NO: 20336 - RNA, 20 nt, Artificial Sequence
  HTT spacer sequence CTCN PAM
guguccgcagaguccgguga

SEQ ID NO: 20337 - RNA, 20 nt, Artificial Sequence
  HTT spacer sequence CTCN PAM
cccacaggcccaguguaccc

SEQ ID NO: 20338 - RNA, 20 nt, Artificial Sequence
  HTT spacer sequence CTCN PAM
aggaggggaagaugggggcg

SEQ ID NO: 20339 - RNA, 20 nt, Artificial Sequence
  HTT spacer sequence CTCN PAM
uugagggccaacccacagcc

SEQ ID NO: 20340 - RNA, 20 nt, Artificial Sequence
  HTT spacer sequence CTCN PAM
acaacgccaccccugccugc

SEQ ID NO: 20341 - RNA, 20 nt, Artificial Sequence
  HTT spacer sequence CTCN PAM
uggaccuccacaacgccacc

SEQ ID NO: 20342 - RNA, 20 nt, Artificial Sequence
  HTT spacer sequence CTCN PAM
ucauggaccuccacaacgcc

SEQ ID NO: 20343 - RNA, 20 nt, Artificial Sequence
  HTT spacer sequence CTCN PAM
caggcugcccugcccuccuc

SEQ ID NO: 20344 - RNA, 20 nt, Artificial Sequence
  HTT spacer sequence CTCN PAM
cccgugcugccaggaucuac

SEQ ID NO: 20345 - RNA, 20 nt, Artificial Sequence
  HTT spacer sequence CTCN PAM
gggcccuucccuuacucacc

SEQ ID NO: 20346 - RNA, 20 nt, Artificial Sequence
  HTT spacer sequence CTCN PAM
ucagggcccuucccuuacuc

SEQ ID NO: 20347 - RNA, 20 nt, Artificial Sequence
  HTT spacer sequence CTCN PAM
ccuccucagggcccuucccu

SEQ ID NO: 20348 - RNA, 20 nt, Artificial Sequence
  HTT spacer sequence CTCN PAM
ggucuugcucagcccuagac

SEQ ID NO: 20349 - RNA, 20 nt, Artificial Sequence
  HTT spacer sequence CTCN PAM
gcccuagacuggcucugacc

SEQ ID NO: 20350 - RNA, 20 nt, Artificial Sequence
  HTT spacer sequence CTCN PAM
gaccccacacccaggguugc

SEQ ID NO: 20351 - RNA, 20 nt, Artificial Sequence
  HTT spacer sequence CTCN PAM
ccccaccacguugcaacccu

SEQ ID NO: 20352 - RNA, 20 nt, Artificial Sequence
  HTT spacer sequence CTCN PAM
uggguggcccugcugcugug

SEQ ID NO: 20353 - RNA, 20 nt, Artificial Sequence
  HTT spacer sequence CTCN PAM
aagucaggaggaaggaggcc

SEQ ID NO: 20354 - RNA, 20 nt, Artificial Sequence
  HTT spacer sequence CTCN PAM
ugacuuggagacccugugca

SEQ ID NO: 20355 - RNA, 20 nt, Artificial Sequence
  HTT spacer sequence CTCN PAM
uuccuccugacuuggagacc

SEQ ID NO: 20356 - RNA, 20 nt, Artificial Sequence
  HTT spacer sequence CTCN PAM
uggccuccuuccuccugacu

SEQ ID NO: 20357 - RNA, 20 nt, Artificial Sequence
  HTT spacer sequence CTCN PAM
acuccuggccuccuuccucc

SEQ ID NO: 20358 - RNA, 20 nt, Artificial Sequence
  HTT spacer sequence CTCN PAM
gcccugccacgcaggguugu

SEQ ID NO: 20359 - RNA, 20 nt, Artificial Sequence
  HTT spacer sequence CTCN PAM
guccuacugcucggggucca

SEQ ID NO: 20360 - RNA, 20 nt, Artificial Sequence
  HTT spacer sequence CTCN PAM
ggguccagguucuggggcuc

SEQ ID NO: 20361 - RNA, 20 nt, Artificial Sequence
  HTT spacer sequence CTCN PAM
guccucugcgagcaccucuc

SEQ ID NO: 20362 - RNA, 20 nt, Artificial Sequence
  HTT spacer sequence CTCN PAM
gcgagcaccucucagccucg

SEQ ID NO: 20363 - RNA, 20 nt, Artificial Sequence
  HTT spacer sequence CTCN PAM
cagaggacagagccccagaa

SEQ ID NO: 20364 - RNA, 20 nt, Artificial Sequence
  HTT spacer sequence CTCN PAM
cagccucgcaccccugggga

SEQ ID NO: 20365 - RNA, 20 nt, Artificial Sequence
  HTT spacer sequence CTCN PAM
gccucgcaccccuggggagc

SEQ ID NO: 20366 - RNA, 20 nt, Artificial Sequence
  HTT spacer sequence CTCN PAM
caccccuggggagcggcuuu

SEQ ID NO: 20367 - RNA, 20 nt, Artificial Sequence
  HTT spacer sequence CTCN PAM
ccaggggugcgaggcugaga

SEQ ID NO: 20368 - RNA, 20 nt, Artificial Sequence
  HTT spacer sequence CTCN PAM
caggugcgccugggaacccu

SEQ ID NO: 20369 - RNA, 20 nt, Artificial Sequence
  HTT spacer sequence CTCN PAM
ccugcgaaaggggagcgggg

SEQ ID NO: 20370 - RNA, 20 nt, Artificial Sequence
  HTT spacer sequence CTCN PAM
ccuuucgcaggugagaacag

SEQ ID NO: 20371 - RNA, 20 nt, Artificial Sequence
  HTT spacer sequence CTCN PAM
ccgcuccccuuucgcaggug

SEQ ID NO: 20372 - RNA, 20 nt, Artificial Sequence
  HTT spacer sequence CTCN PAM
ugcuccuccuccugcaggca

SEQ ID NO: 20373 - RNA, 20 nt, Artificial Sequence
  HTT spacer sequence CTCN PAM
uccuccugcaggcaccgccc

SEQ ID NO: 20374 - RNA, 20 nt, Artificial Sequence
  HTT spacer sequence CTCN PAM
uccugcaggcaccgccccuc

SEQ ID NO: 20375 - RNA, 20 nt, Artificial Sequence
  HTT spacer sequence CTCN PAM
ugcaggcaccgccccuccac

SEQ ID NO: 20376 - RNA, 20 nt, Artificial Sequence
  HTT spacer sequence CTCN PAM
accccacagagggcuucugc

SEQ ID NO: 20377 - RNA, 20 nt, Artificial Sequence
  HTT spacer sequence CTCN PAM
gugggguggaggggcggugc

SEQ ID NO: 20378 - RNA, 20 nt, Artificial Sequence
  HTT spacer sequence CTCN PAM
ugacuuauucccuuguuuaa

SEQ ID NO: 20379 - RNA, 20 nt, Artificial Sequence
  HTT spacer sequence CTCN PAM
gcucagggcggguggggucu

SEQ ID NO: 20380 - RNA, 20 nt, Artificial Sequence
  HTT spacer sequence CTCN PAM
gggcggguggggucuggagu

SEQ ID NO: 20381 - RNA, 20 nt, Artificial Sequence
  HTT spacer sequence CTCN PAM
agaccccacccgcccugagc

SEQ ID NO: 20382 - RNA, 20 nt, Artificial Sequence
  HTT spacer sequence CTCN PAM
cccaacagcccaccugcucc

SEQ ID NO: 20383 - RNA, 20 nt, Artificial Sequence
  HTT spacer sequence CTCN PAM
ccgcccggccgccuggcgca

SEQ ID NO: 20384 - RNA, 20 nt, Artificial Sequence
  HTT spacer sequence CTCN PAM
gcgccaggcggccgggcggg

SEQ ID NO: 20385 - RNA, 20 nt, Artificial Sequence
  HTT spacer sequence CTCN PAM
aaacuagggccucugcgcca

SEQ ID NO: 20386 - RNA, 20 nt, Artificial Sequence
  HTT spacer sequence CTCN PAM
ccaaacuagggccucugcgc

SEQ ID NO: 20387 - RNA, 20 nt, Artificial Sequence
  HTT spacer sequence CTCN PAM
gaauuuggauucaaccacgg

SEQ ID NO: 20388 - RNA, 20 nt, Artificial Sequence
  HTT spacer sequence CTCN PAM
cucauuuuccaaaacgccuu

SEQ ID NO: 20389 - RNA, 20 nt, Artificial Sequence
  HTT spacer sequence CTCN PAM
uuuuccaaaacgccuuuguc

SEQ ID NO: 20390 - RNA, 20 nt, Artificial Sequence
  HTT spacer sequence CTCN PAM
ugaaaguucuuugaacagga

SEQ ID NO: 20391 - RNA, 20 nt, Artificial Sequence
  HTT spacer sequence CTCN PAM
ccagggugccagcuggcauc

SEQ ID NO: 20392 - RNA, 20 nt, Artificial Sequence
  HTT spacer sequence CTCN PAM
gccuucgaaacuaauggaau

SEQ ID NO: 20393 - RNA, 20 nt, Artificial Sequence
  HTT spacer sequence CTCN PAM
accgagcggcugcagcaggg

SEQ ID NO: 20394 - RNA, 20 nt, Artificial Sequence
  HTT spacer sequence CTCN PAM
guggagcgcugcuauucuua

SEQ ID NO: 20395 - RNA, 20 nt, Artificial Sequence
  HTT spacer sequence CTCN PAM
gggcccugcugcagccgcuc

SEQ ID NO: 20396 - RNA, 20 nt, Artificial Sequence
  HTT spacer sequence CTCN PAM
augugggagccgugcccagg

SEQ ID NO: 20397 - RNA, 20 nt, Artificial Sequence
  HTT spacer sequence CTCN PAM
cacauggaggcuggcgccca

SEQ ID NO: 20398 - RNA, 20 nt, Artificial Sequence
  HTT spacer sequence CTCN PAM
cugggcacggcucccacaug

SEQ ID NO: 20399 - RNA, 20 nt, Artificial Sequence
  HTT spacer sequence CTCN PAM
cgcagcccacaccaggugcc

SEQ ID NO: 20400 - RNA, 20 nt, Artificial Sequence
  HTT spacer sequence CTCN PAM
cuuacaggcagcugcugaag

SEQ ID NO: 20401 - RNA, 20 nt, Artificial Sequence
  HTT spacer sequence CTCN PAM
accugaccaggacgguccca

SEQ ID NO: 20402 - RNA, 20 nt, Artificial Sequence
  HTT spacer sequence CTCN PAM
uccaccugaccaggacgguc

SEQ ID NO: 20403 - RNA, 20 nt, Artificial Sequence
  HTT spacer sequence CTCN PAM
ggguccaaaguccaggacac

SEQ ID NO: 20404 - RNA, 20 nt, Artificial Sequence
  HTT spacer sequence CTCN PAM
auacaaauuucagcaggcuu

SEQ ID NO: 20405 - RNA, 20 nt, Artificial Sequence
  HTT spacer sequence CTCN PAM
augucuuuuauuucucuuuc

SEQ ID NO: 20406 - RNA, 20 nt, Artificial Sequence
  HTT spacer sequence CTCN PAM
uucuugccuuauuuucuggc

SEQ ID NO: 20407 - RNA, 20 nt, Artificial Sequence
  HTT spacer sequence CTCN PAM
uagccagaaaauaaggcaag

SEQ ID NO: 20408 - RNA, 20 nt, Artificial Sequence
  HTT spacer sequence CTCN PAM
aguacaauguugaaaagaag

SEQ ID NO: 20409 - RNA, 20 nt, Artificial Sequence
  HTT spacer sequence CTCN PAM
ugaacacagacacaaaaucc

SEQ ID NO: 20410 - RNA, 20 nt, Artificial Sequence
  HTT spacer sequence CTCN PAM
ugauguccuugucagguuuu

SEQ ID NO: 20411 - RNA, 20 nt, Artificial Sequence
  HTT spacer sequence CTCN PAM
gauaucaaaaccugacaagg

SEQ ID NO: 20412 - RNA, 20 nt, Artificial Sequence
  HTT spacer sequence CTCN PAM
ugcacuuacuguaugaaacc

SEQ ID NO: 20413 - RNA, 20 nt, Artificial Sequence
  HTT spacer sequence CTCN PAM
uuuuucugaaaaaaauugug

SEQ ID NO: 20414 - RNA, 20 nt, Artificial Sequence
  HTT spacer sequence CTCN PAM
uauuuuugucauucccuucc

SEQ ID NO: 20415 - RNA, 20 nt, Artificial Sequence
  HTT spacer sequence CTCN PAM
uuauuuucuagcuucuuaau

SEQ ID NO: 20416 - RNA, 20 nt, Artificial Sequence
  HTT spacer sequence CTCN PAM
gaucauuuauuucaaacuag

SEQ ID NO: 20417 - RNA, 20 nt, Artificial Sequence
  HTT spacer sequence CTCN PAM
ggucaaacaagauaucacaa

SEQ ID NO: 20418 - RNA, 20 nt, Artificial Sequence
  HTT spacer sequence CTCN PAM
uuaaaugcuaaaggacugaa

SEQ ID NO: 20419 - RNA, 20 nt, Artificial Sequence
  HTT spacer sequence CTCN PAM
ugaaaagaguauuuauucua

SEQ ID NO: 20420 - RNA, 20 nt, Artificial Sequence
  HTT spacer sequence CTCN PAM
uuucaagagcacaugguaca

SEQ ID NO: 20421 - RNA, 20 nt, Artificial Sequence
  HTT spacer sequence CTCN PAM
cgccuguaaucccagcacuu

SEQ ID NO: 20422 - RNA, 20 nt, Artificial Sequence
  HTT spacer sequence CTCN PAM
aauguuugaaaauauagcca

SEQ ID NO: 20423 - RNA, 20 nt, Artificial Sequence
  HTT spacer sequence CTCN PAM
aucuacuuugaaaucauauu

SEQ ID NO: 20424 - RNA, 20 nt, Artificial Sequence
  HTT spacer sequence CTCN PAM
uagauccccaaagcucaaua

SEQ ID NO: 20425 - RNA, 20 nt, Artificial Sequence
  HTT spacer sequence CTCN PAM
aacugaauuuaaaaaaauca

SEQ ID NO: 20426 - RNA, 20 nt, Artificial Sequence
  HTT spacer sequence CTCN PAM
ccauuuuaccuguacucuuu

SEQ ID NO: 20427 - RNA, 20 nt, Artificial Sequence
  HTT spacer sequence CTCN PAM
ccaauacauguuuuauuuca

SEQ ID NO: 20428 - RNA, 20 nt, Artificial Sequence
  HTT spacer sequence CTCN PAM
ggaaacaaucacaaauagaa

SEQ ID NO: 20429 - RNA, 20 nt, Artificial Sequence
  HTT spacer sequence CTCN PAM
cacaugagcagagcagucac

SEQ ID NO: 20430 - RNA, 20 nt, Artificial Sequence
  HTT spacer sequence CTCN PAM
ugugugagaagcucuggaaa

SEQ ID NO: 20431 - RNA, 20 nt, Artificial Sequence
  HTT spacer sequence CTCN PAM
gcucaugugugagaagcucu

SEQ ID NO: 20432 - RNA, 20 nt, Artificial Sequence
  HTT spacer sequence CTCN PAM
ccuugacaaucuuuuaaaaa

SEQ ID NO: 20433 - RNA, 20 nt, Artificial Sequence
  HTT spacer sequence CTCN PAM
acagccuccccuugacaauc

SEQ ID NO: 20434 - RNA, 20 nt, Artificial Sequence
  HTT spacer sequence CTCN PAM
ucccuuacccauugugauag

SEQ ID NO: 20435 - RNA, 20 nt, Artificial Sequence
  HTT spacer sequence CTCN PAM
ggguauuccaaagcacaucc

SEQ ID NO: 20436 - RNA, 20 nt, Artificial Sequence
  HTT spacer sequence CTCN PAM
auguguaucauauuugaccu

SEQ ID NO: 20437 - RNA, 20 nt, Artificial Sequence
  HTT spacer sequence CTCN PAM
gaaccacaaaagaaugucaa

SEQ ID NO: 20438 - RNA, 20 nt, Artificial Sequence
  HTT spacer sequence CTCN PAM
ucuaauacaucuugaauacu

SEQ ID NO: 20439 - RNA, 20 nt, Artificial Sequence
  HTT spacer sequence CTCN PAM
uguaaaauaagcaauaaaaa

SEQ ID NO: 20440 - RNA, 20 nt, Artificial Sequence
  HTT spacer sequence CTCN PAM
auugaagagagaugugaaua

SEQ ID NO: 20441 - RNA, 20 nt, Artificial Sequence
  HTT spacer sequence CTCN PAM
ucaauugagauuauuccuua

SEQ ID NO: 20442 - RNA, 20 nt, Artificial Sequence
  HTT spacer sequence CTCN PAM
cuucaauugagauuauuccu

SEQ ID NO: 20443 - RNA, 20 nt, Artificial Sequence
  HTT spacer sequence CTCN PAM
guuuauucacaucucucuuc

SEQ ID NO: 20444 - RNA, 20 nt, Artificial Sequence
  HTT spacer sequence CTCN PAM
gcacuggcaaauuugaaaga

SEQ ID NO: 20445 - RNA, 20 nt, Artificial Sequence
  HTT spacer sequence CTCN PAM
uaaagcaacaccuagauuca

SEQ ID NO: 20446 - RNA, 20 nt, Artificial Sequence
  HTT spacer sequence CTCN PAM
caaagagcugggauuacagg

SEQ ID NO: 20447 - RNA, 20 nt, Artificial Sequence
  HTT spacer sequence CTCN PAM
agugauccacccaccugggc

SEQ ID NO: 20448 - RNA, 20 nt, Artificial Sequence
  HTT spacer sequence CTCN PAM
uacccucaagugauccaccc

SEQ ID NO: 20449 - RNA, 20 nt, Artificial Sequence
  HTT spacer sequence CTCN PAM
guuucuacuaaaaauacaaa

SEQ ID NO: 20450 - RNA, 20 nt, Artificial Sequence
  HTT spacer sequence CTCN PAM
guucaguucacucuguuguu

SEQ ID NO: 20451 - RNA, 20 nt, Artificial Sequence
  HTT spacer sequence CTCN PAM
cccacgaugggcagcagcua

SEQ ID NO: 20452 - RNA, 20 nt, Artificial Sequence
  HTT spacer sequence CTCN PAM
gucucccccacgaugggcag

SEQ ID NO: 20453 - RNA, 20 nt, Artificial Sequence
  HTT spacer sequence CTCN PAM
aaucccaaacucugucuccc

SEQ ID NO: 20454 - RNA, 20 nt, Artificial Sequence
  HTT spacer sequence CTCN PAM
uagaagaaaaucaacacuuc

SEQ ID NO: 20455 - RNA, 20 nt, Artificial Sequence
  HTT spacer sequence CTCN PAM
gauaaagauaauagaaucca

SEQ ID NO: 20456 - RNA, 20 nt, Artificial Sequence
  HTT spacer sequence CTCN PAM
guucaugcugcugcaaucau

SEQ ID NO: 20457 - RNA, 20 nt, Artificial Sequence
  HTT spacer sequence CTCN PAM
gaccacuauuauuucugaug

SEQ ID NO: 20458 - RNA, 20 nt, Artificial Sequence
  HTT spacer sequence CTCN PAM
aaaaaauaauaauaaaacaa

SEQ ID NO: 20459 - RNA, 20 nt, Artificial Sequence
  HTT spacer sequence CTCN PAM
gcugguguaucccacuggcc

SEQ ID NO: 20460 - RNA, 20 nt, Artificial Sequence
  HTT spacer sequence CTCN PAM
caucucugcugguguauccc

SEQ ID NO: 20461 - RNA, 20 nt, Artificial Sequence
  HTT spacer sequence CTCN PAM
ugcucccaucucugcuggug

SEQ ID NO: 20462 - RNA, 20 nt, Artificial Sequence
  HTT spacer sequence CTCN PAM
cucuggagucugauagcccu

SEQ ID NO: 20463 - RNA, 20 nt, Artificial Sequence
  HTT spacer sequence CTCN PAM
cuggagucugauagcccuuc

SEQ ID NO: 20464 - RNA, 20 nt, Artificial Sequence
  HTT spacer sequence CTCN PAM
ggagucugauagcccuucgu

SEQ ID NO: 20465 - RNA, 20 nt, Artificial Sequence
  HTT spacer sequence CTCN PAM
agagagagcacagcccuccu

SEQ ID NO: 20466 - RNA, 20 nt, Artificial Sequence
  HTT spacer sequence CTCN PAM
agccaacaacccaauuccca

SEQ ID NO: 20467 - RNA, 20 nt, Artificial Sequence
  HTT spacer sequence CTCN PAM
ugccgccccuggggcucaag

SEQ ID NO: 20468 - RNA, 20 nt, Artificial Sequence
  HTT spacer sequence CTCN PAM
cccuggccaaugggaagcgc

SEQ ID NO: 20469 - RNA, 20 nt, Artificial Sequence
  HTT spacer sequence CTCN PAM
agggcauccugcuggcgcuu

SEQ ID NO: 20470 - RNA, 20 nt, Artificial Sequence
  HTT spacer sequence CTCN PAM
ccuccagggcauccugcugg

SEQ ID NO: 20471 - RNA, 20 nt, Artificial Sequence
  HTT spacer sequence CTCN PAM
gcugcucccuaaacuacccc

SEQ ID NO: 20472 - RNA, 20 nt, Artificial Sequence
  HTT spacer sequence CTCN PAM
cuaaacuaccccaccgcccc

SEQ ID NO: 20473 - RNA, 20 nt, Artificial Sequence
  HTT spacer sequence CTCN PAM
cugaaugcuuuuuuuuuuuu

SEQ ID NO: 20474 - RNA, 20 nt, Artificial Sequence
  HTT spacer sequence CTCN PAM
acacucaggaggcugaggua

SEQ ID NO: 20475 - RNA, 20 nt, Artificial Sequence
  HTT spacer sequence CTCN PAM
ggaggcugagguaggaggau

SEQ ID NO: 20476 - RNA, 20 nt, Artificial Sequence
  HTT spacer sequence CTCN PAM
ugaguguugagauuacaggc

SEQ ID NO: 20477 - RNA, 20 nt, Artificial Sequence
  HTT spacer sequence CTCN PAM
gccuccugaguguugagauu

SEQ ID NO: 20478 - RNA, 20 nt, Artificial Sequence
  HTT spacer sequence CTCN PAM
uaccucagccuccugagugu

SEQ ID NO: 20479 - RNA, 20 nt, Artificial Sequence
  HTT spacer sequence CTCN PAM
agccauccuccuaccucagc

SEQ ID NO: 20480 - RNA, 20 nt, Artificial Sequence
  HTT spacer sequence CTCN PAM
acuucccagacucaagccau

SEQ ID NO: 20481 - RNA, 20 nt, Artificial Sequence
  HTT spacer sequence CTCN PAM
cugcagccucaacuucccag

SEQ ID NO: 20482 - RNA, 20 nt, Artificial Sequence
  HTT spacer sequence CTCN PAM
agccugggcaacagggcaag

SEQ ID NO: 20483 - RNA, 20 nt, Artificial Sequence
  HTT spacer sequence CTCN PAM
aaaaaaaaaaaaaaaaaaaa

SEQ ID NO: 20484 - RNA, 20 nt, Artificial Sequence
  HTT spacer sequence CTCN PAM
ggccgccagggccaggggcu

SEQ ID NO: 20485 - RNA, 20 nt, Artificial Sequence
  HTT spacer sequence CTCN PAM
uggcaauuagggacguuguc

SEQ ID NO: 20486 - RNA, 20 nt, Artificial Sequence
  HTT spacer sequence CTCN PAM
acuuaguaacaauaugcucu

SEQ ID NO: 20487 - RNA, 20 nt, Artificial Sequence
  HTT spacer sequence CTCN PAM
auuuaauuaacuuuguguau

SEQ ID NO: 20488 - RNA, 20 nt, Artificial Sequence
  HTT spacer sequence CTCN PAM
cugauggugaauuccacaac

SEQ ID NO: 20489 - RNA, 20 nt, Artificial Sequence
  HTT spacer sequence CTCN PAM
accaaaaacacaaaaaauua

SEQ ID NO: 20490 - RNA, 20 nt, Artificial Sequence
  HTT spacer sequence CTCN PAM
aacuccugagcuuaagugag

SEQ ID NO: 20491 - RNA, 20 nt, Artificial Sequence
  HTT spacer sequence CTCN PAM
ugagcuuaagugagccaccu

SEQ ID NO: 20492 - RNA, 20 nt, Artificial Sequence
  HTT spacer sequence CTCN PAM
ggaguuggagaccagccugg

SEQ ID NO: 20493 - RNA, 20 nt, Artificial Sequence
  HTT spacer sequence CTCN PAM
cuuaagcucaggaguuggag

SEQ ID NO: 20494 - RNA, 20 nt, Artificial Sequence
  HTT spacer sequence CTCN PAM
gccuuccaaagagcugggau

SEQ ID NO: 20495 - RNA, 20 nt, Artificial Sequence
  HTT spacer sequence CTCN PAM
uuggaaggcugagguaggug

SEQ ID NO: 20496 - RNA, 20 nt, Artificial Sequence
  HTT spacer sequence CTCN PAM
agggcagggacaaguggccc

SEQ ID NO: 20497 - RNA, 20 nt, Artificial Sequence
  HTT spacer sequence CTCN PAM
ggaggcugagcucugcggcc

SEQ ID NO: 20498 - RNA, 20 nt, Artificial Sequence
  HTT spacer sequence CTCN PAM
ugaggcuccagggcagggac

SEQ ID NO: 20499 - RNA, 20 nt, Artificial Sequence
  HTT spacer sequence CTCN PAM
gccuccugaggcuccagggc

SEQ ID NO: 20500 - RNA, 20 nt, Artificial Sequence
  HTT spacer sequence CTCN PAM
gcggccugcuuccuucuggc

SEQ ID NO: 20501 - RNA, 20 nt, Artificial Sequence
  HTT spacer sequence CTCN PAM
ggaagauuccaccaucugcg

SEQ ID NO: 20502 - RNA, 20 nt, Artificial Sequence
  HTT spacer sequence CTCN PAM
aaaaaaaaaaaaaaagagcc

SEQ ID NO: 20503 - RNA, 20 nt, Artificial Sequence
  HTT spacer sequence CTCN PAM
aucucaaaaaaaaaaaaaaa

SEQ ID NO: 20504 - RNA, 20 nt, Artificial Sequence
  HTT spacer sequence CTCN PAM
gucaccuaggcuggagugca

SEQ ID NO: 20505 - RNA, 20 nt, Artificial Sequence
  HTT spacer sequence CTCN PAM
agccuaggugacagagugaa

SEQ ID NO: 20506 - RNA, 20 nt, Artificial Sequence
  HTT spacer sequence CTCN PAM
gcucacagcaaccuccgccu

SEQ ID NO: 20507 - RNA, 20 nt, Artificial Sequence
  HTT spacer sequence CTCN PAM
cagcaaccuccgccuccggg

SEQ ID NO: 20508 - RNA, 20 nt, Artificial Sequence
  HTT spacer sequence CTCN PAM
gccuccggggcucaagugau

SEQ ID NO: 20509 - RNA, 20 nt, Artificial Sequence
  HTT spacer sequence CTCN PAM
ggggcucaagugauucuccu

SEQ ID NO: 20510 - RNA, 20 nt, Artificial Sequence
  HTT spacer sequence CTCN PAM
cgccgcguuuuucccucgag

SEQ ID NO: 20511 - RNA, 20 nt, Artificial Sequence
  HTT spacer sequence CTCN PAM
cccgccgcguuuuucccucg

SEQ ID NO: 20512 - RNA, 20 nt, Artificial Sequence
  HTT spacer sequence CTCN PAM
uucucucccgccgcguuuuu

SEQ ID NO: 20513 - RNA, 20 nt, Artificial Sequence
  HTT spacer sequence CTCN PAM
cugccccuuccuuccugccu

SEQ ID NO: 20514 - RNA, 20 nt, Artificial Sequence
  HTT spacer sequence CTCN PAM
ccguccccgccccuccuccg

SEQ ID NO: 20515 - RNA, 20 nt, Artificial Sequence
  HTT spacer sequence CTCN PAM
guccccgccccuccuccggc

SEQ ID NO: 20516 - RNA, 20 nt, Artificial Sequence
  HTT spacer sequence CTCN PAM
uccggccucggccccgcccu

SEQ ID NO: 20517 - RNA, 20 nt, Artificial Sequence
  HTT spacer sequence CTCN PAM
ggccucggccccgcccucgc

SEQ ID NO: 20518 - RNA, 20 nt, Artificial Sequence
  HTT spacer sequence CTCN PAM
gccccgcccucgccucgacc

SEQ ID NO: 20519 - RNA, 20 nt, Artificial Sequence
  HTT spacer sequence CTCN PAM
ccucgaccccggggggcggu

SEQ ID NO: 20520 - RNA, 20 nt, Artificial Sequence
  HTT spacer sequence CTCN PAM
accccggggggcgguggcug

SEQ ID NO: 20521 - RNA, 20 nt, Artificial Sequence
  HTT spacer sequence CTCN PAM
gcagccaccgccccccgggg

SEQ ID NO: 20522 - RNA, 20 nt, Artificial Sequence
  HTT spacer sequence CTCN PAM
gggcgcuucggcccgcgcca

SEQ ID NO: 20523 - RNA, 20 nt, Artificial Sequence
  HTT spacer sequence CTCN PAM
cgcuccgggcgcuucggccc

SEQ ID NO: 20524 - RNA, 20 nt, Artificial Sequence
  HTT spacer sequence CTCN PAM
cucccgcuccgggcgcuucg

SEQ ID NO: 20525 - RNA, 20 nt, Artificial Sequence
  HTT spacer sequence CTCN PAM
cagcgcucccgggcgcaucu

SEQ ID NO: 20526 - RNA, 20 nt, Artificial Sequence
  HTT spacer sequence CTCN PAM
ucggacuccacgagcggccg

SEQ ID NO: 20527 - RNA, 20 nt, Artificial Sequence
  HTT spacer sequence CTCN PAM
acgagcggccgcuuuguuag

SEQ ID NO: 20528 - RNA, 20 nt, Artificial Sequence
  HTT spacer sequence CTCN PAM
uggaguccgacgagggaacc

SEQ ID NO: 20529 - RNA, 20 nt, Artificial Sequence
  HTT spacer sequence CTCN PAM
gaaggcagcuucugcccuaa

SEQ ID NO: 20530 - RNA, 20 nt, Artificial Sequence
  HTT spacer sequence CTCN PAM
agacgcacugcagcgaccug

SEQ ID NO: 20531 - RNA, 20 nt, Artificial Sequence
  HTT spacer sequence CTCN PAM
acggcucugggcccccucuc

SEQ ID NO: 20532 - RNA, 20 nt, Artificial Sequence
  HTT spacer sequence CTCN PAM
gucuacacuccacggcucug

SEQ ID NO: 20533 - RNA, 20 nt, Artificial Sequence
  HTT spacer sequence CTCN PAM
cugucuacacuccacggcuc

SEQ ID NO: 20534 - RNA, 20 nt, Artificial Sequence
  HTT spacer sequence CTCN PAM
cucugucuacacuccacggc

SEQ ID NO: 20535 - RNA, 20 nt, Artificial Sequence
  HTT spacer sequence CTCN PAM
gggcccucucucugucuaca

SEQ ID NO: 20536 - RNA, 20 nt, Artificial Sequence
  HTT spacer sequence CTCN PAM
gucuacacuagauggcucug

SEQ ID NO: 20537 - RNA, 20 nt, Artificial Sequence
  HTT spacer sequence CTCN PAM
cugucuacacuagauggcuc

SEQ ID NO: 20538 - RNA, 20 nt, Artificial Sequence
  HTT spacer sequence CTCN PAM
acagcuauggguccccucuc

SEQ ID NO: 20539 - RNA, 20 nt, Artificial Sequence
  HTT spacer sequence CTCN PAM
gugccugaguuuccucauug

SEQ ID NO: 20540 - RNA, 20 nt, Artificial Sequence
  HTT spacer sequence CTCN PAM
ggcacagagaagguggucac

SEQ ID NO: 20541 - RNA, 20 nt, Artificial Sequence
  HTT spacer sequence CTCN PAM
uuggaccugucuuuggagcu

SEQ ID NO: 20542 - RNA, 20 nt, Artificial Sequence
  HTT spacer sequence CTCN PAM
aguccccaaaagcacuggcc

SEQ ID NO: 20543 - RNA, 20 nt, Artificial Sequence
  HTT spacer sequence CTCN PAM
ggcaagggcagugggguggc

SEQ ID NO: 20544 - RNA, 20 nt, Artificial Sequence
  HTT spacer sequence CTCN PAM
gccaccccacugcccuugcc

SEQ ID NO: 20545 - RNA, 20 nt, Artificial Sequence
  HTT spacer sequence CTCN PAM
gugacuggcagagcagaggg

SEQ ID NO: 20546 - RNA, 20 nt, Artificial Sequence
  HTT spacer sequence CTCN PAM
gccagucacagaggcauccg

SEQ ID NO: 20547 - RNA, 20 nt, Artificial Sequence
  HTT spacer sequence CTCN PAM
gcucugccagucacagaggc

SEQ ID NO: 20548 - RNA, 20 nt, Artificial Sequence
  HTT spacer sequence CTCN PAM
cucugcucugccagucacag

SEQ ID NO: 20549 - RNA, 20 nt, Artificial Sequence
  HTT spacer sequence CTCN PAM
ucccucugcucugccaguca

SEQ ID NO: 20550 - RNA, 20 nt, Artificial Sequence
  HTT spacer sequence CTCN PAM
ggucaccacugcccugucgc

SEQ ID NO: 20551 - RNA, 20 nt, Artificial Sequence
  HTT spacer sequence CTCN PAM
gggagguugacaaagacaag

SEQ ID NO: 20552 - RNA, 20 nt, Artificial Sequence
  HTT spacer sequence CTCN PAM
cugagaccuccggucaccac

SEQ ID NO: 20553 - RNA, 20 nt, Artificial Sequence
  HTT spacer sequence CTCN PAM
gcccuugucuuugucaaccu

SEQ ID NO: 20554 - RNA, 20 nt, Artificial Sequence
  HTT spacer sequence CTCN PAM
cguggacuggagguacagua

SEQ ID NO: 20555 - RNA, 20 nt, Artificial Sequence
  HTT spacer sequence CTCN PAM
uugcagugccugucgagugc

SEQ ID NO: 20556 - RNA, 20 nt, Artificial Sequence
  HTT spacer sequence CTCN PAM
ucuuugcagugccugucgag

SEQ ID NO: 20557 - RNA, 20 nt, Artificial Sequence
  HTT spacer sequence CTCN PAM
cuuucugcccuguuuaggau

SEQ ID NO: 20558 - RNA, 20 nt, Artificial Sequence
  HTT spacer sequence CTCN PAM
uccuaaacagggcagaaagg

SEQ ID NO: 20559 - RNA, 20 nt, Artificial Sequence
  HTT spacer sequence CTCN PAM
gggaagaagggguggccagg

SEQ ID NO: 20560 - RNA, 20 nt, Artificial Sequence
  HTT spacer sequence CTCN PAM
uacaacugggaagggaaaug

SEQ ID NO: 20561 - RNA, 20 nt, Artificial Sequence
  HTT spacer sequence CTCN PAM
cuuaguggcugaaaauggca

SEQ ID NO: 20562 - RNA, 20 nt, Artificial Sequence
  HTT spacer sequence CTCN PAM
ccaauuaccuuuuaacuuag

SEQ ID NO: 20563 - RNA, 20 nt, Artificial Sequence
  HTT spacer sequence CTCN PAM
aauuaccuuuuaacuuagcu

SEQ ID NO: 20564 - RNA, 20 nt, Artificial Sequence
  HTT spacer sequence CTCN PAM
uaaaaaaaaaauugaacaaa

SEQ ID NO: 20565 - RNA, 20 nt, Artificial Sequence
  HTT spacer sequence CTCN PAM
gucucuuaaaaaaaaaauug

SEQ ID NO: 20566 - RNA, 20 nt, Artificial Sequence
  HTT spacer sequence CTCN PAM
cucuuuugcccaggcuggag

SEQ ID NO: 20567 - RNA, 20 nt, Artificial Sequence
  HTT spacer sequence CTCN PAM
uuugcccaggcuggagugca

SEQ ID NO: 20568 - RNA, 20 nt, Artificial Sequence
  HTT spacer sequence CTCN PAM
agccugggcaaaagagugag

SEQ ID NO: 20569 - RNA, 20 nt, Artificial Sequence
  HTT spacer sequence CTCN PAM
cugcagccccaaacuccugg

SEQ ID NO: 20570 - RNA, 20 nt, Artificial Sequence
  HTT spacer sequence CTCN PAM
ugggcucaagcgaucccccu

SEQ ID NO: 20571 - RNA, 20 nt, Artificial Sequence
  HTT spacer sequence CTCN PAM
cacgcugcuaaaucaaguuc

SEQ ID NO: 20572 - RNA, 20 nt, Artificial Sequence
  HTT spacer sequence CTCN PAM
guccguaaauugacaguucc

SEQ ID NO: 20573 - RNA, 20 nt, Artificial Sequence
  HTT spacer sequence CTCN PAM
ccacccccaggucuaggcag

SEQ ID NO: 20574 - RNA, 20 nt, Artificial Sequence
  HTT spacer sequence CTCN PAM
ucaccacccccaggucuagg

SEQ ID NO: 20575 - RNA, 20 nt, Artificial Sequence
  HTT spacer sequence CTCN PAM
cguggcuccucaccaccccc

SEQ ID NO: 20576 - RNA, 20 nt, Artificial Sequence
  HTT spacer sequence CTCN PAM
ucacguggcuccucaccacc

SEQ ID NO: 20577 - RNA, 20 nt, Artificial Sequence
  HTT spacer sequence CTCN PAM
uggggccugaagcgcugugc

SEQ ID NO: 20578 - RNA, 20 nt, Artificial Sequence
  HTT spacer sequence CTCN PAM
ucuguaacacggggucuguc

SEQ ID NO: 20579 - RNA, 20 nt, Artificial Sequence
  HTT spacer sequence CTCN PAM
guaacacggggucugucccg

SEQ ID NO: 20580 - RNA, 20 nt, Artificial Sequence
  HTT spacer sequence CTCN PAM
ucuguaacacggggucuguc

SEQ ID NO: 20581 - RNA, 20 nt, Artificial Sequence
  HTT spacer sequence CTCN PAM
guaacacggggucugucccc

SEQ ID NO: 20582 - RNA, 20 nt, Artificial Sequence
  HTT spacer sequence CTCN PAM
ucuguaacacggggucuguc

SEQ ID NO: 20583 - RNA, 20 nt, Artificial Sequence
  HTT spacer sequence CTCN PAM
guaacacggggucugucccg

SEQ ID NO: 20584 - RNA, 20 nt, Artificial Sequence
  HTT spacer sequence CTCN PAM
cucugcacagauuuaaaaac

SEQ ID NO: 20585 - RNA, 20 nt, Artificial Sequence
  HTT spacer sequence CTCN PAM
gcacagauuuaaaaaccaca

SEQ ID NO: 20586 - RNA, 20 nt, Artificial Sequence
  HTT spacer sequence CTCN PAM
acuugauauuuacuucuguu

SEQ ID NO: 20587 - RNA, 20 nt, Artificial Sequence
  HTT spacer sequence CTCN PAM
ccaaaccucaacaucccccu

SEQ ID NO: 20588 - RNA, 20 nt, Artificial Sequence
  HTT spacer sequence CTCN PAM
cugggucccuccccaaaccu

SEQ ID NO: 20589 - RNA, 20 nt, Artificial Sequence
  HTT spacer sequence CTCN PAM
cacugggucccuccccaaac

SEQ ID NO: 20590 - RNA, 20 nt, Artificial Sequence
  HTT spacer sequence CTCN PAM
cucacugggucccuccccaa

SEQ ID NO: 20591 - RNA, 20 nt, Artificial Sequence
  HTT spacer sequence CTCN PAM
agaggcuggacccaguggga

SEQ ID NO: 20592 - RNA, 20 nt, Artificial Sequence
  HTT spacer sequence CTCN PAM
ugaggcucucucacuggguc

SEQ ID NO: 20593 - RNA, 20 nt, Artificial Sequence
  HTT spacer sequence CTCN PAM
ccgcuguaccccacuugccg

SEQ ID NO: 20594 - RNA, 20 nt, Artificial Sequence
  HTT spacer sequence CTCN PAM
ugcuggacuccccgcuguac

SEQ ID NO: 20595 - RNA, 20 nt, Artificial Sequence
  HTT spacer sequence CTCN PAM
ccuugcaugguggccacacc

SEQ ID NO: 20596 - RNA, 20 nt, Artificial Sequence
  HTT spacer sequence CTCN PAM
guacggcgaccuaggcaggg

SEQ ID NO: 20597 - RNA, 20 nt, Artificial Sequence
  HTT spacer sequence CTCN PAM
caucccugcuggcuguuggc

SEQ ID NO: 20598 - RNA, 20 nt, Artificial Sequence
  HTT spacer sequence CTCN PAM
ggccaacagccagcagggau

SEQ ID NO: 20599 - RNA, 20 nt, Artificial Sequence
  HTT spacer sequence CTCN PAM
cugaccccaaaccccaucac

SEQ ID NO: 20600 - RNA, 20 nt, Artificial Sequence
  HTT spacer sequence CTCN PAM
aaaaaagcaccuggaaucca

SEQ ID NO: 20601 - RNA, 20 nt, Artificial Sequence
  HTT spacer sequence CTCN PAM
ucauuuuaggcaacuaagca

SEQ ID NO: 20602 - RNA, 20 nt, Artificial Sequence
  HTT spacer sequence CTCN PAM
uuuuaggcaacuaagcaaug

SEQ ID NO: 20603 - RNA, 20 nt, Artificial Sequence
  HTT spacer sequence CTCN PAM
caaaauaaucacauaaguuc

SEQ ID NO: 20604 - RNA, 20 nt, Artificial Sequence
  HTT spacer sequence CTCN PAM
gauuucggcagaauauuccc

SEQ ID NO: 20605 - RNA, 20 nt, Artificial Sequence
  HTT spacer sequence CTCN PAM
uucuggcaauuuaaauugcu

SEQ ID NO: 20606 - RNA, 20 nt, Artificial Sequence
  HTT spacer sequence CTCN PAM
uuaaagaucacuuuaaaaag

SEQ ID NO: 20607 - RNA, 20 nt, Artificial Sequence
  HTT spacer sequence CTCN PAM
ucugcaagacucuuuaaaga

SEQ ID NO: 20608 - RNA, 20 nt, Artificial Sequence
  HTT spacer sequence CTCN PAM
ggccugcuguguagucucuu

SEQ ID NO: 20609 - RNA, 20 nt, Artificial Sequence
  HTT spacer sequence CTCN PAM
uuaauaaugagcuguucguu

SEQ ID NO: 20610 - RNA, 20 nt, Artificial Sequence
  HTT spacer sequence CTCN PAM
uuauuaaagagcccaucuuu

SEQ ID NO: 20611 - RNA, 20 nt, Artificial Sequence
  HTT spacer sequence CTCN PAM
uuguucccuuggagccauau

SEQ ID NO: 20612 - RNA, 20 nt, Artificial Sequence
  HTT spacer sequence CTCN PAM
uggucuuggaagcucaucag

SEQ ID NO: 20613 - RNA, 20 nt, Artificial Sequence
  HTT spacer sequence CTCN PAM
ucagaauguuuagagcuggg

SEQ ID NO: 20614 - RNA, 20 nt, Artificial Sequence
  HTT spacer sequence CTCN PAM
aaacauucugaugagcuucc

SEQ ID NO: 20615 - RNA, 20 nt, Artificial Sequence
  HTT spacer sequence CTCN PAM
ccagcucuaaacauucugau

SEQ ID NO: 20616 - RNA, 20 nt, Artificial Sequence
  HTT spacer sequence CTCN PAM
aaacgcccauugccugggcc

SEQ ID NO: 20617 - RNA, 20 nt, Artificial Sequence
  HTT spacer sequence CTCN PAM
gcacccuugggggcgacggc

SEQ ID NO: 20618 - RNA, 20 nt, Artificial Sequence
  HTT spacer sequence CTCN PAM
acacuccgcacccuuggggg

SEQ ID NO: 20619 - RNA, 20 nt, Artificial Sequence
  HTT spacer sequence CTCN PAM
cccgggcaaccuccacacuc

SEQ ID NO: 20620 - RNA, 20 nt, Artificial Sequence
  HTT spacer sequence CTCN PAM
gcugcgucaugagagggagc

SEQ ID NO: 20621 - RNA, 20 nt, Artificial Sequence
  HTT spacer sequence CTCN PAM
ugacgcagcugagcacacag

SEQ ID NO: 20622 - RNA, 20 nt, Artificial Sequence
  HTT spacer sequence CTCN PAM
caugacgcagcugagcacac

SEQ ID NO: 20623 - RNA, 20 nt, Artificial Sequence
  HTT spacer sequence CTCN PAM
cucucaugacgcagcugagc

SEQ ID NO: 20624 - RNA, 20 nt, Artificial Sequence
  HTT spacer sequence CTCN PAM
gagcuggagaccagauacuu

SEQ ID NO: 20625 - RNA, 20 nt, Artificial Sequence
  HTT spacer sequence CTCN PAM
gaggcccacgaaauccgcag

SEQ ID NO: 20626 - RNA, 20 nt, Artificial Sequence
  HTT spacer sequence CTCN PAM
agcucggaggcccacgaaau

SEQ ID NO: 20627 - RNA, 20 nt, Artificial Sequence
  HTT spacer sequence CTCN PAM
ugaagauguagugaaauuaa

SEQ ID NO: 20628 - RNA, 20 nt, Artificial Sequence
  HTT spacer sequence CTCN PAM
gguguccuucacauggugau

SEQ ID NO: 20629 - RNA, 20 nt, Artificial Sequence
  HTT spacer sequence CTCN PAM
augaaggaaaaggcuggcug

SEQ ID NO: 20630 - RNA, 20 nt, Artificial Sequence
  HTT spacer sequence CTCN PAM
guuuauaccuagugcuuuag

SEQ ID NO: 20631 - RNA, 20 nt, Artificial Sequence
  HTT spacer sequence CTCN PAM
gcucuguuuauaccuagugc

SEQ ID NO: 20632 - RNA, 20 nt, Artificial Sequence
  HTT spacer sequence CTCN PAM
cucugcucuguuuauaccua

SEQ ID NO: 20633 - RNA, 20 nt, Artificial Sequence
  HTT spacer sequence CTCN PAM
acgacucgcucugcucuguu

SEQ ID NO: 20634 - RNA, 20 nt, Artificial Sequence
  HTT spacer sequence CTCN PAM
gguuuucaaaaaucauauug

SEQ ID NO: 20635 - RNA, 20 nt, Artificial Sequence
  HTT spacer sequence CTCN PAM
cacaaaggcucggguuuuca

SEQ ID NO: 20636 - RNA, 20 nt, Artificial Sequence
  HTT spacer sequence CTCN PAM
gaauugcucgcacaaaggcu

SEQ ID NO: 20637 - RNA, 20 nt, Artificial Sequence
  HTT spacer sequence CTCN PAM
gaaagggaucuuuguuucaa

SEQ ID NO: 20638 - RNA, 20 nt, Artificial Sequence
  HTT spacer sequence CTCN PAM
auuugauguuggacaugaaa

SEQ ID NO: 20639 - RNA, 20 nt, Artificial Sequence
  HTT spacer sequence CTCN PAM
uuagaaagcauguugggauu

SEQ ID NO: 20640 - RNA, 20 nt, Artificial Sequence
  HTT spacer sequence CTCN PAM
auugagcuuccuuccacgag

SEQ ID NO: 20641 - RNA, 20 nt, Artificial Sequence
  HTT spacer sequence CTCN PAM
auggagccuaaguagcccac

SEQ ID NO: 20642 - RNA, 20 nt, Artificial Sequence
  HTT spacer sequence CTCN PAM
uggaaggaagcucaauggag

SEQ ID NO: 20643 - RNA, 20 nt, Artificial Sequence
  HTT spacer sequence CTCN PAM
aaccuggaguccgacagcuu

SEQ ID NO: 20644 - RNA, 20 nt, Artificial Sequence
  HTT spacer sequence CTCN PAM
agguuggagcucguggaagg

SEQ ID NO: 20645 - RNA, 20 nt, Artificial Sequence
  HTT spacer sequence CTCN PAM
gcccgcaggcgccgcaugca

SEQ ID NO: 20646 - RNA, 20 nt, Artificial Sequence
  HTT spacer sequence CTCN PAM
cuggugaccaugaagaucau

SEQ ID NO: 20647 - RNA, 20 nt, Artificial Sequence
  HTT spacer sequence CTCN PAM
gcugcacacagucgugcaug

SEQ ID NO: 20648 - RNA, 20 nt, Artificial Sequence
  HTT spacer sequence CTCN PAM
agccuugucagugcucagcu

SEQ ID NO: 20649 - RNA, 20 nt, Artificial Sequence
  HTT spacer sequence CTCN PAM
gccacgacuccagccuuguc

SEQ ID NO: 20650 - RNA, 20 nt, Artificial Sequence
  HTT spacer sequence CTCN PAM
gccggguacucggccacgac

SEQ ID NO: 20651 - RNA, 20 nt, Artificial Sequence
  HTT spacer sequence CTCN PAM
cgucgucauucgucugcaug

SEQ ID NO: 20652 - RNA, 20 nt, Artificial Sequence
  HTT spacer sequence CTCN PAM
ugggccaggcucccgucguc

SEQ ID NO: 20653 - RNA, 20 nt, Artificial Sequence
  HTT spacer sequence CTCN PAM
uccugggccaggcucccguc

SEQ ID NO: 20654 - RNA, 20 nt, Artificial Sequence
  HTT spacer sequence CTCN PAM
uccuccugggccaggcuccc

SEQ ID NO: 20655 - RNA, 20 nt, Artificial Sequence
  HTT spacer sequence CTCN PAM
gcgguuuggguuugagugca

SEQ ID NO: 20656 - RNA, 20 nt, Artificial Sequence
  HTT spacer sequence CTCN PAM
aacccaaaccgccgagcaau

SEQ ID NO: 20657 - RNA, 20 nt, Artificial Sequence
  HTT spacer sequence CTCN PAM
cuccccguccugcaguucau

SEQ ID NO: 20658 - RNA, 20 nt, Artificial Sequence
  HTT spacer sequence CTCN PAM
ccguccugcaguucaucucu

SEQ ID NO: 20659 - RNA, 20 nt, Artificial Sequence
  HTT spacer sequence CTCN PAM
guccuguaccgagacauggg

SEQ ID NO: 20660 - RNA, 20 nt, Artificial Sequence
  HTT spacer sequence CTCN PAM
guacaggacagagaugaacu

SEQ ID NO: 20661 - RNA, 20 nt, Artificial Sequence
  HTT spacer sequence CTCN PAM
cccaugucucgguacaggac

SEQ ID NO: 20662 - RNA, 20 nt, Artificial Sequence
  HTT spacer sequence CTCN PAM
aucagcucacccaugucucg

SEQ ID NO: 20663 - RNA, 20 nt, Artificial Sequence
  HTT spacer sequence CTCN PAM
ugguggaaguucccaaugcc

SEQ ID NO: 20664 - RNA, 20 nt, Artificial Sequence
  HTT spacer sequence CTCN PAM
uccugguggaaguucccaau

SEQ ID NO: 20665 - RNA, 20 nt, Artificial Sequence
  HTT spacer sequence CTCN PAM
ucuccuccugguggaaguuc

SEQ ID NO: 20666 - RNA, 20 nt, Artificial Sequence
  HTT spacer sequence CTCN PAM
cacccagguccaccacaagg

SEQ ID NO: 20667 - RNA, 20 nt, Artificial Sequence
  HTT spacer sequence CTCN PAM
agcagacacggccccggagg

SEQ ID NO: 20668 - RNA, 20 nt, Artificial Sequence
  HTT spacer sequence CTCN PAM
agcucccacccagguccacc

SEQ ID NO: 20669 - RNA, 20 nt, Artificial Sequence
  HTT spacer sequence CTCN PAM
ggggccgugucugcucgagc

SEQ ID NO: 20670 - RNA, 20 nt, Artificial Sequence
  HTT spacer sequence CTCN PAM
cacccacaccgucccacgcg

SEQ ID NO: 20671 - RNA, 20 nt, Artificial Sequence
  HTT spacer sequence CTCN PAM
cuggacugggcccuucuguc

SEQ ID NO: 20672 - RNA, 20 nt, Artificial Sequence
  HTT spacer sequence CTCN PAM
cuucgggguccggacagaag

SEQ ID NO: 20673 - RNA, 20 nt, Artificial Sequence
  HTT spacer sequence CTCN PAM
aauggggggcucccuucggg

SEQ ID NO: 20674 - RNA, 20 nt, Artificial Sequence
  HTT spacer sequence CTCN PAM
ucagacugacagguucuggg

SEQ ID NO: 20675 - RNA, 20 nt, Artificial Sequence
  HTT spacer sequence CTCN PAM
ccuguggaggugcccccagc

SEQ ID NO: 20676 - RNA, 20 nt, Artificial Sequence
  HTT spacer sequence CTCN PAM
uguggaggugcccccagcuu

SEQ ID NO: 20677 - RNA, 20 nt, Artificial Sequence
  HTT spacer sequence CTCN PAM
acaggagaggcuggcccuag

SEQ ID NO: 20678 - RNA, 20 nt, Artificial Sequence
  HTT spacer sequence CTCN PAM
aggaagcugggggcaccucc

SEQ ID NO: 20679 - RNA, 20 nt, Artificial Sequence
  HTT spacer sequence CTCN PAM
ucaaggaagcugggggcacc

SEQ ID NO: 20680 - RNA, 20 nt, Artificial Sequence
  HTT spacer sequence CTCN PAM
guccccccuuccaagagggg

SEQ ID NO: 20681 - RNA, 20 nt, Artificial Sequence
  HTT spacer sequence CTCN PAM
uggaaggggggacugagcuc

SEQ ID NO: 20682 - RNA, 20 nt, Artificial Sequence
  HTT spacer sequence CTCN PAM
cgguccacgugcuccgggag

SEQ ID NO: 20683 - RNA, 20 nt, Artificial Sequence
  HTT spacer sequence CTCN PAM
gggaguggcagugcggacac

SEQ ID NO: 20684 - RNA, 20 nt, Artificial Sequence
  HTT spacer sequence CTCN PAM
cggagcacguggaccgggag

SEQ ID NO: 20685 - RNA, 20 nt, Artificial Sequence
  HTT spacer sequence CTCN PAM
uacacagauuccaccgaugg

SEQ ID NO: 20686 - RNA, 20 nt, Artificial Sequence
  HTT spacer sequence CTCN PAM
uaugagcaagauccccgcag

SEQ ID NO: 20687 - RNA, 20 nt, Artificial Sequence
  HTT spacer sequence CTCN PAM
uaggagggggcagugugccg

SEQ ID NO: 20688 - RNA, 20 nt, Artificial Sequence
  HTT spacer sequence CTCN PAM
acccuguagcggucugcggg

SEQ ID NO: 20689 - RNA, 20 nt, Artificial Sequence
  HTT spacer sequence CTCN PAM
ucggggcauucagcgggggc

SEQ ID NO: 20690 - RNA, 20 nt, Artificial Sequence
  HTT spacer sequence CTCN PAM
cucuucggggcauucagcgg

SEQ ID NO: 20691 - RNA, 20 nt, Artificial Sequence
  HTT spacer sequence CTCN PAM
uggcaggcuuaccuuuuuau

SEQ ID NO: 20692 - RNA, 20 nt, Artificial Sequence
  HTT spacer sequence CTCN PAM
gcgcggaggcccggccuccu

SEQ ID NO: 20693 - RNA, 20 nt, Artificial Sequence
  HTT spacer sequence CTCN PAM
gcgcugaguggcuccuggca

SEQ ID NO: 20694 - RNA, 20 nt, Artificial Sequence
  HTT spacer sequence CTCN PAM
ucacuuagcagucacgggga

SEQ ID NO: 20695 - RNA, 20 nt, Artificial Sequence
  HTT spacer sequence CTCN PAM
ugcuggacaaagucccuucc

SEQ ID NO: 20696 - RNA, 20 nt, Artificial Sequence
  HTT spacer sequence CTCN PAM
cacacuggcagcaccgccuc

SEQ ID NO: 20697 - RNA, 20 nt, Artificial Sequence
  HTT spacer sequence CTCN PAM
ggaaggacuuccuccagcca

SEQ ID NO: 20698 - RNA, 20 nt, Artificial Sequence
  HTT spacer sequence CTCN PAM
ggcuguuuacgauguaaaga

SEQ ID NO: 20699 - RNA, 20 nt, Artificial Sequence
  HTT spacer sequence CTCN PAM
ggaugugaacaaacacuaaa

SEQ ID NO: 20700 - RNA, 20 nt, Artificial Sequence
  HTT spacer sequence CTCN PAM
aaggcugcuggcuggguagg

SEQ ID NO: 20701 - RNA, 20 nt, Artificial Sequence
  HTT spacer sequence CTCN PAM
ccuaacuacacagggaggcc

SEQ ID NO: 20702 - RNA, 20 nt, Artificial Sequence
  HTT spacer sequence CTCN PAM
ccaguuagagcagcagaagc

SEQ ID NO: 20703 - RNA, 20 nt, Artificial Sequence
  HTT spacer sequence CTCN PAM
aacuggggaggcuaugggau

SEQ ID NO: 20704 - RNA, 20 nt, Artificial Sequence
  HTT spacer sequence CTCN PAM
ugaccccuggaagcuucugc

SEQ ID NO: 20705 - RNA, 20 nt, Artificial Sequence
  HTT spacer sequence CTCN PAM
uccuugucagcuucucccuc

SEQ ID NO: 20706 - RNA, 20 nt, Artificial Sequence
  HTT spacer sequence CTCN PAM
cuccucuggggaggagcaag

SEQ ID NO: 20707 - RNA, 20 nt, Artificial Sequence
  HTT spacer sequence CTCN PAM
ucuggggaggagcaaggaag

SEQ ID NO: 20708 - RNA, 20 nt, Artificial Sequence
  HTT spacer sequence CTCN PAM
ggggaggagcaaggaagggg

SEQ ID NO: 20709 - RNA, 20 nt, Artificial Sequence
  HTT spacer sequence CTCN PAM
ccagaggagggagaagcuga

SEQ ID NO: 20710 - RNA, 20 nt, Artificial Sequence
  HTT spacer sequence CTCN PAM
uccccagaggagggagaagc

SEQ ID NO: 20711 - RNA, 20 nt, Artificial Sequence
  HTT spacer sequence CTCN PAM
ccuuccuugcuccuccccag

SEQ ID NO: 20712 - RNA, 20 nt, Artificial Sequence
  HTT spacer sequence CTCN PAM
gcuccccuuccuugcuccuc

SEQ ID NO: 20713 - RNA, 20 nt, Artificial Sequence
  HTT spacer sequence CTCN PAM
ccaaagagguuuucuaguuu

SEQ ID NO: 20714 - RNA, 20 nt, Artificial Sequence
  HTT spacer sequence CTCN PAM
uuggugagcaauuuggcaaa

SEQ ID NO: 20715 - RNA, 20 nt, Artificial Sequence
  HTT spacer sequence CTCN PAM
cucucucucucucucucucu

SEQ ID NO: 20716 - RNA, 20 nt, Artificial Sequence
  HTT spacer sequence CTCN PAM
cucucucucucucucucucu

SEQ ID NO: 20717 - RNA, 20 nt, Artificial Sequence
  HTT spacer sequence CTCN PAM
uucaauaaaaaagggggcau

SEQ ID NO: 20718 - RNA, 20 nt, Artificial Sequence
  HTT spacer sequence CTCN PAM
acaguguucauuucacccag

SEQ ID NO: 20719 - RNA, 20 nt, Artificial Sequence
  HTT spacer sequence CTCN PAM
cguugccaagcuggaaaagg

SEQ ID NO: 20720 - RNA, 20 nt, Artificial Sequence
  HTT spacer sequence CTCN PAM
gggaccaaaaucuguggcuc

SEQ ID NO: 20721 - RNA, 20 nt, Artificial Sequence
  HTT spacer sequence CTCN PAM
aagcugguggaagcuaucaa

SEQ ID NO: 20722 - RNA, 20 nt, Artificial Sequence
  HTT spacer sequence CTCN PAM
cuugucuuccaaguuaaccu

SEQ ID NO: 20723 - RNA, 20 nt, Artificial Sequence
  HTT spacer sequence CTCN PAM
acugucgccuucacacaggu

SEQ ID NO: 20724 - RNA, 20 nt, Artificial Sequence
  HTT spacer sequence CTCN PAM
uugguccugcgggcuugacg

SEQ ID NO: 20725 - RNA, 20 nt, Artificial Sequence
  HTT spacer sequence CTCN PAM
ucaggccuucccuugacagu

SEQ ID NO: 20726 - RNA, 20 nt, Artificial Sequence
  HTT spacer sequence CTCN PAM
ggacgcaggcaggcaggaag

SEQ ID NO: 20727 - RNA, 20 nt, Artificial Sequence
  HTT spacer sequence CTCN PAM
gugggagccacgucacgugc

SEQ ID NO: 20728 - RNA, 20 nt, Artificial Sequence
  HTT spacer sequence CTCN PAM
cacugagcugguugucuucc

SEQ ID NO: 20729 - RNA, 20 nt, Artificial Sequence
  HTT spacer sequence CTCN PAM
gcggguggugaucgcacgug

SEQ ID NO: 20730 - RNA, 20 nt, Artificial Sequence
  HTT spacer sequence CTCN PAM
uucuccaccaagguugugac

SEQ ID NO: 20731 - RNA, 20 nt, Artificial Sequence
  HTT spacer sequence CTCN PAM
accaagguugugacaguauc

SEQ ID NO: 20732 - RNA, 20 nt, Artificial Sequence
  HTT spacer sequence CTCN PAM
uaguggggauguccccugug

SEQ ID NO: 20733 - RNA, 20 nt, Artificial Sequence
  HTT spacer sequence CTCN PAM
gcuucuucucuugcuugucu

SEQ ID NO: 20734 - RNA, 20 nt, Artificial Sequence
  HTT spacer sequence CTCN PAM
ugcuugucucugguugguac

SEQ ID NO: 20735 - RNA, 20 nt, Artificial Sequence
  HTT spacer sequence CTCN PAM
gguugguacugugggccagc

SEQ ID NO: 20736 - RNA, 20 nt, Artificial Sequence
  HTT spacer sequence CTCN PAM
ggccacaggcagcuacccaa

SEQ ID NO: 20737 - RNA, 20 nt, Artificial Sequence
  HTT spacer sequence CTCN PAM
ugugauugacugguucaccc

SEQ ID NO: 20738 - RNA, 20 nt, Artificial Sequence
  HTT spacer sequence CTCN PAM
augaauggcugaaagcaccu

SEQ ID NO: 20739 - RNA, 20 nt, Artificial Sequence
  HTT spacer sequence CTCN PAM
gacguccaucuucuuggcca

SEQ ID NO: 20740 - RNA, 20 nt, Artificial Sequence
  HTT spacer sequence CTCN PAM
uccuucccuuuggccuucuu

SEQ ID NO: 20741 - RNA, 20 nt, Artificial Sequence
  HTT spacer sequence CTCN PAM
uucccuuuggccuucuuccc

SEQ ID NO: 20742 - RNA, 20 nt, Artificial Sequence
  HTT spacer sequence CTCN PAM
agcuaccuaagaugcugaaa

SEQ ID NO: 20743 - RNA, 20 nt, Artificial Sequence
  HTT spacer sequence CTCN PAM
ucuccagcuaccuaagaugc

SEQ ID NO: 20744 - RNA, 20 nt, Artificial Sequence
  HTT spacer sequence CTCN PAM
ggaguuuuaucaguguuuua

SEQ ID NO: 20745 - RNA, 20 nt, Artificial Sequence
  HTT spacer sequence CTCN PAM
agagcuacauggguaggaag

SEQ ID NO: 20746 - RNA, 20 nt, Artificial Sequence
  HTT spacer sequence CTCN PAM
agcuaccaaaaauucauuca

SEQ ID NO: 20747 - RNA, 20 nt, Artificial Sequence
  HTT spacer sequence CTCN PAM
auuugaccuccagcuaccaa

SEQ ID NO: 20748 - RNA, 20 nt, Artificial Sequence
  HTT spacer sequence CTCN PAM
cuauuugaccuccagcuacc

SEQ ID NO: 20749 - RNA, 20 nt, Artificial Sequence
  HTT spacer sequence CTCN PAM
caagaaaauucccacucucu

SEQ ID NO: 20750 - RNA, 20 nt, Artificial Sequence
  HTT spacer sequence CTCN PAM
ucccaagaaaauucccacuc

SEQ ID NO: 20751 - RNA, 20 nt, Artificial Sequence
  HTT spacer sequence CTCN PAM
aagcaugcauaaaucaccuu

SEQ ID NO: 20752 - RNA, 20 nt, Artificial Sequence
  HTT spacer sequence CTCN PAM
agcagcacaucaaaaagaua

SEQ ID NO: 20753 - RNA, 20 nt, Artificial Sequence
  HTT spacer sequence CTCN PAM
uauucaacauaguacuggaa

SEQ ID NO: 20754 - RNA, 20 nt, Artificial Sequence
  HTT spacer sequence CTCN PAM
ggcuaggacuuccaguacua

SEQ ID NO: 20755 - RNA, 20 nt, Artificial Sequence
  HTT spacer sequence CTCN PAM
ugccugacugcucuggcuag

SEQ ID NO: 20756 - RNA, 20 nt, Artificial Sequence
  HTT spacer sequence CTCN PAM
aauugguaugccuuuuauuu

SEQ ID NO: 20757 - RNA, 20 nt, Artificial Sequence
  HTT spacer sequence CTCN PAM
ucucuaauugguaugccuuu

SEQ ID NO: 20758 - RNA, 20 nt, Artificial Sequence
  HTT spacer sequence CTCN PAM
ucuucucuaauugguaugcc

SEQ ID NO: 20759 - RNA, 20 nt, Artificial Sequence
  HTT spacer sequence CTCN PAM
cucugucacccaggcuggag

SEQ ID NO: 20760 - RNA, 20 nt, Artificial Sequence
  HTT spacer sequence CTCN PAM
gucacccaggcuggagcaca

SEQ ID NO: 20761 - RNA, 20 nt, Artificial Sequence
  HTT spacer sequence CTCN PAM
agccugggugacagagcgag

SEQ ID NO: 20762 - RNA, 20 nt, Artificial Sequence
  HTT spacer sequence CTCN PAM
aacucuuggacucaagggau

SEQ ID NO: 20763 - RNA, 20 nt, Artificial Sequence
  HTT spacer sequence CTCN PAM
uggacucaagggauccuccc

SEQ ID NO: 20764 - RNA, 20 nt, Artificial Sequence
  HTT spacer sequence CTCN PAM
agggauccucccgccucagc

SEQ ID NO: 20765 - RNA, 20 nt, Artificial Sequence
  HTT spacer sequence CTCN PAM
cgccucagccucccaaguag

SEQ ID NO: 20766 - RNA, 20 nt, Artificial Sequence
  HTT spacer sequence CTCN PAM
gccucccaaguagcuagaac

SEQ ID NO: 20767 - RNA, 20 nt, Artificial Sequence
  HTT spacer sequence CTCN PAM
caaguagcuagaacuacagg

SEQ ID NO: 20768 - RNA, 20 nt, Artificial Sequence
  HTT spacer sequence CTCN PAM
gcuagaucauuauugguaua

SEQ ID NO: 20769 - RNA, 20 nt, Artificial Sequence
  HTT spacer sequence CTCN PAM
uuuuugguuccauauaaauu

SEQ ID NO: 20770 - RNA, 20 nt, Artificial Sequence
  HTT spacer sequence CTCN PAM
agcuuuguucuuuuugcuua

SEQ ID NO: 20771 - RNA, 20 nt, Artificial Sequence
  HTT spacer sequence CTCN PAM
auuuuguugucuaguuuuau

SEQ ID NO: 20772 - RNA, 20 nt, Artificial Sequence
  HTT spacer sequence CTCN PAM
cccuugucuacuaaccaugu

SEQ ID NO: 20773 - RNA, 20 nt, Artificial Sequence
  HTT spacer sequence CTCN PAM
cauccagacuggacaugguu

SEQ ID NO: 20774 - RNA, 20 nt, Artificial Sequence
  HTT spacer sequence CTCN PAM
aaggggaaguugucaggcca

SEQ ID NO: 20775 - RNA, 20 nt, Artificial Sequence
  HTT spacer sequence CTCN PAM
uuguacuggaaaagcagcgu

SEQ ID NO: 20776 - RNA, 20 nt, Artificial Sequence
  HTT spacer sequence CTCN PAM
cauuguacuggaaaagcagc

SEQ ID NO: 20777 - RNA, 20 nt, Artificial Sequence
  HTT spacer sequence CTCN PAM
cgccuguaaucccggcacuu

SEQ ID NO: 20778 - RNA, 20 nt, Artificial Sequence
  HTT spacer sequence CTCN PAM
aguaguaauaaauguauuaa

SEQ ID NO: 20779 - RNA, 20 nt, Artificial Sequence
  HTT spacer sequence CTCN PAM
cuuuuuccccuuaaaguuuc

SEQ ID NO: 20780 - RNA, 20 nt, Artificial Sequence
  HTT spacer sequence CTCN PAM
gguugaagcauuuacaauuu

SEQ ID NO: 20781 - RNA, 20 nt, Artificial Sequence
  HTT spacer sequence CTCN PAM
augaaugcaaaauaacaaag

SEQ ID NO: 20782 - RNA, 20 nt, Artificial Sequence
  HTT spacer sequence CTCN PAM
ggaaugcaaguauggucuau

SEQ ID NO: 20783 - RNA, 20 nt, Artificial Sequence
  HTT spacer sequence CTCN PAM
aacacagacuuuaaaauuau

SEQ ID NO: 20784 - RNA, 20 nt, Artificial Sequence
  HTT spacer sequence CTCN PAM
cucaaacacagacuuuaaaa

SEQ ID NO: 20785 - RNA, 20 nt, Artificial Sequence
  HTT spacer sequence CTCN PAM
uacuuucccuucucauuauc

SEQ ID NO: 20786 - RNA, 20 nt, Artificial Sequence
  HTT spacer sequence CTCN PAM
caaaacaaaaaauuaauggu

SEQ ID NO: 20787 - RNA, 20 nt, Artificial Sequence
  HTT spacer sequence CTCN PAM
uccuucucuuuucccucccu

SEQ ID NO: 20788 - RNA, 20 nt, Artificial Sequence
  HTT spacer sequence CTCN PAM
uuucccucccuuucuucucc

SEQ ID NO: 20789 - RNA, 20 nt, Artificial Sequence
  HTT spacer sequence CTCN PAM
cuuucuucuccuuuuccucg

SEQ ID NO: 20790 - RNA, 20 nt, Artificial Sequence
  HTT spacer sequence CTCN PAM
uuuuccucguauauugaauc

SEQ ID NO: 20791 - RNA, 20 nt, Artificial Sequence
  HTT spacer sequence CTCN PAM
uauauugaaucuuauauuuu

SEQ ID NO: 20792 - RNA, 20 nt, Artificial Sequence
  HTT spacer sequence CTCN PAM
cuccagaggauuucaauaac

SEQ ID NO: 20793 - RNA, 20 nt, Artificial Sequence
  HTT spacer sequence CTCN PAM
agaggauuucaauaacuuuu

SEQ ID NO: 20794 - RNA, 20 nt, Artificial Sequence
  HTT spacer sequence CTCN PAM
ggagggaggauaaaaauaaa

SEQ ID NO: 20795 - RNA, 20 nt, Artificial Sequence
  HTT spacer sequence CTCN PAM
agaagaagaucaggcagaug

SEQ ID NO: 20796 - RNA, 20 nt, Artificial Sequence
  HTT spacer sequence CTCN PAM
augugccagucacccaacac

SEQ ID NO: 20797 - RNA, 20 nt, Artificial Sequence
  HTT spacer sequence CTCN PAM
gggauauuacugcauucuuc

SEQ ID NO: 20798 - RNA, 20 nt, Artificial Sequence
  HTT spacer sequence CTCN PAM
cucccugcuuucuugccuua

SEQ ID NO: 20799 - RNA, 20 nt, Artificial Sequence
  HTT spacer sequence CTCN PAM
cugcuuucuugccuuauguu

SEQ ID NO: 20800 - RNA, 20 nt, Artificial Sequence
  HTT spacer sequence CTCN PAM
acuuaaaugucuuuucaugu

SEQ ID NO: 20801 - RNA, 20 nt, Artificial Sequence
  HTT spacer sequence CTCN PAM
gugcggcaggaagaauucca

SEQ ID NO: 20802 - RNA, 20 nt, Artificial Sequence
  HTT spacer sequence CTCN PAM
caccuguaaucccagcacuu

SEQ ID NO: 20803 - RNA, 20 nt, Artificial Sequence
  HTT spacer sequence CTCN PAM
ggggcagccacgucacagau

SEQ ID NO: 20804 - RNA, 20 nt, Artificial Sequence
  HTT spacer sequence CTCN PAM
gauaaaaaccaguuccugcg

SEQ ID NO: 20805 - RNA, 20 nt, Artificial Sequence
  HTT spacer sequence CTCN PAM
gccgcaggaacugguuuuua

SEQ ID NO: 20806 - RNA, 20 nt, Artificial Sequence
  HTT spacer sequence CTCN PAM
uuccccuuccuggccaauga

SEQ ID NO: 20807 - RNA, 20 nt, Artificial Sequence
  HTT spacer sequence CTCN PAM
uuggccaggaaggggaaaga

SEQ ID NO: 20808 - RNA, 20 nt, Artificial Sequence
  HTT spacer sequence CTCN PAM
cauuggccaggaaggggaaa

SEQ ID NO: 20809 - RNA, 20 nt, Artificial Sequence
  HTT spacer sequence CTCN PAM
ucacuguccucucauuggcc

SEQ ID NO: 20810 - RNA, 20 nt, Artificial Sequence
  HTT spacer sequence CTCN PAM
gaagcuggccccaggugguc

SEQ ID NO: 20811 - RNA, 20 nt, Artificial Sequence
  HTT spacer sequence CTCN PAM
cacagugccugucagggggc

SEQ ID NO: 20812 - RNA, 20 nt, Artificial Sequence
  HTT spacer sequence CTCN PAM
ggcacccaaaguaagccccc

SEQ ID NO: 20813 - RNA, 20 nt, Artificial Sequence
  HTT spacer sequence CTCN PAM
gcgggggaggaggaugcgca

SEQ ID NO: 20814 - RNA, 20 nt, Artificial Sequence
  HTT spacer sequence CTCN PAM
cccgcagagucuguccucug

SEQ ID NO: 20815 - RNA, 20 nt, Artificial Sequence
  HTT spacer sequence CTCN PAM
ucccccgcagagucuguccu

SEQ ID NO: 20816 - RNA, 20 nt, Artificial Sequence
  HTT spacer sequence CTCN PAM
cagccugccggcaagggcaa

SEQ ID NO: 20817 - RNA, 20 nt, Artificial Sequence
  HTT spacer sequence CTCN PAM
gcacagggccccagcccugc

SEQ ID NO: 20818 - RNA, 20 nt, Artificial Sequence
  HTT spacer sequence CTCN PAM
uguuaaaacccauacagugu

SEQ ID NO: 20819 - RNA, 20 nt, Artificial Sequence
  HTT spacer sequence CTCN PAM
gggacacacacuguaugggu

SEQ ID NO: 20820 - RNA, 20 nt, Artificial Sequence
  HTT spacer sequence CTCN PAM
uuuuccuugguccccucccc

SEQ ID NO: 20821 - RNA, 20 nt, Artificial Sequence
  HTT spacer sequence CTCN PAM
cccuugggagguuccucugg

SEQ ID NO: 20822 - RNA, 20 nt, Artificial Sequence
  HTT spacer sequence CTCN PAM
caagggggaggggaccaagg

SEQ ID NO: 20823 - RNA, 20 nt, Artificial Sequence
  HTT spacer sequence CTCN PAM
gggccucacuuguuuggacu

SEQ ID NO: 20824 - RNA, 20 nt, Artificial Sequence
  HTT spacer sequence CTCN PAM
cuuguuuggacuuuggcgug

SEQ ID NO: 20825 - RNA, 20 nt, Artificial Sequence
  HTT spacer sequence CTCN PAM
acuucucgggaguggccagg

SEQ ID NO: 20826 - RNA, 20 nt, Artificial Sequence
  HTT spacer sequence CTCN PAM
ggaguggccaggagguacca

SEQ ID NO: 20827 - RNA, 20 nt, Artificial Sequence
  HTT spacer sequence CTCN PAM
cgagaaguggaggucacugg

SEQ ID NO: 20828 - RNA, 20 nt, Artificial Sequence
  HTT spacer sequence CTCN PAM
uggccacucccgagaagugg

SEQ ID NO: 20829 - RNA, 20 nt, Artificial Sequence
  HTT spacer sequence CTCN PAM
uucgcuccccuggcccuggc

SEQ ID NO: 20830 - RNA, 20 nt, Artificial Sequence
  HTT spacer sequence CTCN PAM
ccuggcccuggcagcccucg

SEQ ID NO: 20831 - RNA, 20 nt, Artificial Sequence
  HTT spacer sequence CTCN PAM
ccuuggcagagaggaggaca

SEQ ID NO: 20832 - RNA, 20 nt, Artificial Sequence
  HTT spacer sequence CTCN PAM
gccaaggcgagggcugccag

SEQ ID NO: 20833 - RNA, 20 nt, Artificial Sequence
  HTT spacer sequence CTCN PAM
cugccaaggcgagggcugcc

SEQ ID NO: 20834 - RNA, 20 nt, Artificial Sequence
  HTT spacer sequence CTCN PAM
ucucugccaaggcgagggcu

SEQ ID NO: 20835 - RNA, 20 nt, Artificial Sequence
  HTT spacer sequence CTCN PAM
cagacggccuggcaaggacc

SEQ ID NO: 20836 - RNA, 20 nt, Artificial Sequence
  HTT spacer sequence CTCN PAM
gcugcuaucuaggcaggaac

SEQ ID NO: 20837 - RNA, 20 nt, Artificial Sequence
  HTT spacer sequence CTCN PAM
ggagcuccauucugcucacc

SEQ ID NO: 20838 - RNA, 20 nt, Artificial Sequence
  HTT spacer sequence CTCN PAM
agaggcuggacaaacccgug

SEQ ID NO: 20839 - RNA, 20 nt, Artificial Sequence
  HTT spacer sequence CTCN PAM
auucugcucacccccucuca

SEQ ID NO: 20840 - RNA, 20 nt, Artificial Sequence
  HTT spacer sequence CTCN PAM
cccccucucacuuccuggca

SEQ ID NO: 20841 - RNA, 20 nt, Artificial Sequence
  HTT spacer sequence CTCN PAM
cacuuccuggcauccguguc

SEQ ID NO: 20842 - RNA, 20 nt, Artificial Sequence
  HTT spacer sequence CTCN PAM
cuuccuggcauccguguccc

SEQ ID NO: 20843 - RNA, 20 nt, Artificial Sequence
  HTT spacer sequence CTCN PAM
ccaggggacacggaugccag

SEQ ID NO: 20844 - RNA, 20 nt, Artificial Sequence
  HTT spacer sequence CTCN PAM
ucugauuccucuccuuccug

SEQ ID NO: 20845 - RNA, 20 nt, Artificial Sequence
  HTT spacer sequence CTCN PAM
ccuuccugggcugaguccug

SEQ ID NO: 20846 - RNA, 20 nt, Artificial Sequence
  HTT spacer sequence CTCN PAM
uuccugggcugaguccuggg

SEQ ID NO: 20847 - RNA, 20 nt, Artificial Sequence
  HTT spacer sequence CTCN PAM
gcccaggaaggagaggaauc

SEQ ID NO: 20848 - RNA, 20 nt, Artificial Sequence
  HTT spacer sequence CTCN PAM
gcgcccugggcccuuccugc

SEQ ID NO: 20849 - RNA, 20 nt, Artificial Sequence
  HTT spacer sequence CTCN PAM
cguuggggccgccguggcuu

SEQ ID NO: 20850 - RNA, 20 nt, Artificial Sequence
  HTT spacer sequence CTCN PAM
uggcucagcugacugucucg

SEQ ID NO: 20851 - RNA, 20 nt, Artificial Sequence
  HTT spacer sequence CTCN PAM
gcugacugucucgaguucuc

SEQ ID NO: 20852 - RNA, 20 nt, Artificial Sequence
  HTT spacer sequence CTCN PAM
aguucucggccuccuccugg

SEQ ID NO: 20853 - RNA, 20 nt, Artificial Sequence
  HTT spacer sequence CTCN PAM
agacagucagcugagccagg

SEQ ID NO: 20854 - RNA, 20 nt, Artificial Sequence
  HTT spacer sequence CTCN PAM
gccuccuccuggucacgcug

SEQ ID NO: 20855 - RNA, 20 nt, Artificial Sequence
  HTT spacer sequence CTCN PAM
uccuggucacgcuggccuuc

SEQ ID NO: 20856 - RNA, 20 nt, Artificial Sequence
  HTT spacer sequence CTCN PAM
uggucacgcuggccuuccgg

SEQ ID NO: 20857 - RNA, 20 nt, Artificial Sequence
  HTT spacer sequence CTCN PAM
uucauaacuugacuugucug

SEQ ID NO: 20858 - RNA, 20 nt, Artificial Sequence
  HTT spacer sequence CTCN PAM
ccuccagccccuuccacugu

SEQ ID NO: 20859 - RNA, 20 nt, Artificial Sequence
  HTT spacer sequence CTCN PAM
uccagccccuuccacuguuc

SEQ ID NO: 20860 - RNA, 20 nt, Artificial Sequence
  HTT spacer sequence CTCN PAM
agccccuuccacuguuccaa

SEQ ID NO: 20861 - RNA, 20 nt, Artificial Sequence
  HTT spacer sequence CTCN PAM
gaggcgucuccccaacccuc

SEQ ID NO: 20862 - RNA, 20 nt, Artificial Sequence
  HTT spacer sequence CTCN PAM
gaggaaggggcuuggaacag

SEQ ID NO: 20863 - RNA, 20 nt, Artificial Sequence
  HTT spacer sequence CTCN PAM
ccaacccuccugcugguggc

SEQ ID NO: 20864 - RNA, 20 nt, Artificial Sequence
  HTT spacer sequence CTCN PAM
ugcugguggccgcucuugca

SEQ ID NO: 20865 - RNA, 20 nt, Artificial Sequence
  HTT spacer sequence CTCN PAM
ugcacugcuugggugggcgg

SEQ ID NO: 20866 - RNA, 20 nt, Artificial Sequence
  HTT spacer sequence CTCN PAM
gggcuugacuccucugcugc

SEQ ID NO: 20867 - RNA, 20 nt, Artificial Sequence
  HTT spacer sequence CTCN PAM
ucugcugccacccugagugg

SEQ ID NO: 20868 - RNA, 20 nt, Artificial Sequence
  HTT spacer sequence CTCN PAM
gcugccacccugagugguca

SEQ ID NO: 20869 - RNA, 20 nt, Artificial Sequence
  HTT spacer sequence CTCN PAM
ggguggcagcagaggaguca

SEQ ID NO: 20870 - RNA, 20 nt, Artificial Sequence
  HTT spacer sequence CTCN PAM
cuaggccccguuccacuccu

SEQ ID NO: 20871 - RNA, 20 nt, Artificial Sequence
  HTT spacer sequence CTCN PAM
aggccccguuccacuccugu

SEQ ID NO: 20872 - RNA, 20 nt, Artificial Sequence
  HTT spacer sequence CTCN PAM
ugugggagggcagugaugcu

SEQ ID NO: 20873 - RNA, 20 nt, Artificial Sequence
  HTT spacer sequence CTCN PAM
cacaggaguggaacggggcc

SEQ ID NO: 20874 - RNA, 20 nt, Artificial Sequence
  HTT spacer sequence CTCN PAM
agcaucacugcccucccaca

SEQ ID NO: 20875 - RNA, 20 nt, Artificial Sequence
  HTT spacer sequence CTCN PAM
ccagcaucacugcccuccca

SEQ ID NO: 20876 - RNA, 20 nt, Artificial Sequence
  HTT spacer sequence CTCN PAM
cgcucuccagcaucacugcc

SEQ ID NO: 20877 - RNA, 20 nt, Artificial Sequence
  HTT spacer sequence CTCN PAM
ccgccccucacgcucuccag

SEQ ID NO: 20878 - RNA, 20 nt, Artificial Sequence
  HTT spacer sequence CTCN PAM
gugccugugugccaugacgc

SEQ ID NO: 20879 - RNA, 20 nt, Artificial Sequence
  HTT spacer sequence CTCN PAM
ggggcagccaccaacagucc

SEQ ID NO: 20880 - RNA, 20 nt, Artificial Sequence
  HTT spacer sequence CTCN PAM
gugcccacgugccgugacgc

SEQ ID NO: 20881 - RNA, 20 nt, Artificial Sequence
  HTT spacer sequence CTCN PAM
uguugggugucaccuaguuu

SEQ ID NO: 20882 - RNA, 20 nt, Artificial Sequence
  HTT spacer sequence CTCN PAM
gcccaaacuaggugacaccc

SEQ ID NO: 20883 - RNA, 20 nt, Artificial Sequence
  HTT spacer sequence CTCN PAM
cacuccgcccaaacuaggug

SEQ ID NO: 20884 - RNA, 20 nt, Artificial Sequence
  HTT spacer sequence CTCN PAM
ugacucauugggccgucugg

SEQ ID NO: 20885 - RNA, 20 nt, Artificial Sequence
  HTT spacer sequence CTCN PAM
uugggccgucuggcuuuccc

SEQ ID NO: 20886 - RNA, 20 nt, Artificial Sequence
  HTT spacer sequence CTCN PAM
accuggagagugccucugag

SEQ ID NO: 20887 - RNA, 20 nt, Artificial Sequence
  HTT spacer sequence CTCN PAM
agguggaggugucccgggaa

SEQ ID NO: 20888 - RNA, 20 nt, Artificial Sequence
  HTT spacer sequence CTCN PAM
ccagguggaggugucccggg

SEQ ID NO: 20889 - RNA, 20 nt, Artificial Sequence
  HTT spacer sequence CTCN PAM
gagaaccucccagagucugc

SEQ ID NO: 20890 - RNA, 20 nt, Artificial Sequence
  HTT spacer sequence CTCN PAM
gaggcacucuccagguggag

SEQ ID NO: 20891 - RNA, 20 nt, Artificial Sequence
  HTT spacer sequence CTCN PAM
cagagucugccccuuguguu

SEQ ID NO: 20892 - RNA, 20 nt, Artificial Sequence
  HTT spacer sequence CTCN PAM
gggagguucucagaggcacu

SEQ ID NO: 20893 - RNA, 20 nt, Artificial Sequence
  HTT spacer sequence CTCN PAM
gauggacuuuucguuuccug

SEQ ID NO: 20894 - RNA, 20 nt, Artificial Sequence
  HTT spacer sequence CTCN PAM
aggaaacgaaaaguccaucu

SEQ ID NO: 20895 - RNA, 20 nt, Artificial Sequence
  HTT spacer sequence CTCN PAM
ugacaaaacuccaggaaacg

SEQ ID NO: 20896 - RNA, 20 nt, Artificial Sequence
  HTT spacer sequence CTCN PAM
ugucucucucucuuuucuuu

SEQ ID NO: 20897 - RNA, 20 nt, Artificial Sequence
  HTT spacer sequence CTCN PAM
cucucuuuucuuucagucug

SEQ ID NO: 20898 - RNA, 20 nt, Artificial Sequence
  HTT spacer sequence CTCN PAM
cucuuuucuuucagucugca

SEQ ID NO: 20899 - RNA, 20 nt, Artificial Sequence
  HTT spacer sequence CTCN PAM
cuuuucuuucagucugcaac

SEQ ID NO: 20900 - RNA, 20 nt, Artificial Sequence
  HTT spacer sequence CTCN PAM
uuucuuucagucugcaacug

SEQ ID NO: 20901 - RNA, 20 nt, Artificial Sequence
  HTT spacer sequence CTCN PAM
ggaaggacggguuguuugcc

SEQ ID NO: 20902 - RNA, 20 nt, Artificial Sequence
  HTT spacer sequence CTCN PAM
uugugggcggguucuaggug

SEQ ID NO: 20903 - RNA, 20 nt, Artificial Sequence
  HTT spacer sequence CTCN PAM
ccuagaacccgcccacaagg

SEQ ID NO: 20904 - RNA, 20 nt, Artificial Sequence
  HTT spacer sequence CTCN PAM
gcguguguuuuggaagcugu

SEQ ID NO: 20905 - RNA, 20 nt, Artificial Sequence
  HTT spacer sequence CTCN PAM
uaacaaacagcuuccaaaac

SEQ ID NO: 20906 - RNA, 20 nt, Artificial Sequence
  HTT spacer sequence CTCN PAM
aucacacugguguucagggc

(The sequence listing continues in the following parts.)
